United States Patent Application Publication US 2020/0163878 A1 - sequence listing, part 40

SEQ ID NO: 150241 - RNA, 1410 nt, Artificial Sequence
  derived and/or modified CDS sequence (opt3) from neuraminidase__InfluenzaA__AFH74964
augaaccccaaucagaagaucauuaccauaggcagcgugucccugacaaucucuacuauuugcuucuuuaugcaaaucgccauucucaucacgaccgucacacuucacuucaaacaguacgaguuuaacucaccuccaaauaaccagguuaugcugugugaaccgacuauaaucgagagaaauauuaccgaaaucguguauuugacaaacaccacuauugagaaggaaaucugccccaaauuagcugaguacaggaauuggaguaagccucagugugacauaacaggguucgcaccauuuagcaaagauaacuccauucggcugucugccggaggugacaucuggguaacccgcgagcccuaugugucgugcgauccugacaaguguuaccaauucgcgcuaggccaggggacgacucucaauaacguccauucaaauaacaccgugcgagaucguacaccauauagaacucugcuuaugaaugaacugggaguucccuuucacuugggcaccaaacaggugugcauugcuuggagcaguuccucuugucaugacgguaaggccuggcuccacgucugcaucacaggggaugacaagaacgcaaccgccagcuucaucuacaauggaaggcugguggauuccguaguuucauggaguaaagagauucugcggacgcaggaaagcgagugugugugcauaaacggcacuuguacagucgugaugaccgacggcucugcuuccgggaaggcagauacuaaaauccucuuuauugaggaaggaaagaucgugcauacaucaauauuaagcgguagugcccaacacgucgaggaaugcucuugcuauccucgcuacccaggcguuagaugugugugcagggacaacuggaagggguccaaucggccgauuguagauaucaacaucaaagaccacagcauugugucgucuuacgucuguuccggacuggugggcgacacccccaggaagaaugauucaaguagcuccucucauugccuugacccuaacaaugaggaaggugggcacggaguuaaaggcugggcuuucgaugacggcaacgauguguggauggggcgaacgaucagcgagaagucaagauugggauaugagaccuuuaaagucauugaagguuggaguaauccaaaguccaaacugcagauaaaccgccaggugaucguagaccggggcaaucguagcggguacucuggaauuuucucaguugagggcaagaguuguaucaaccgcugcuuuuauguggaacuaaucagagguaggaaggaggaaacagagguccucuggacuagcaauuccauuguggucuucugugggaccucuggcacauacggaacuggcucguggcccgauggggccgacauaaaccugaugccuguguga

SEQ ID NO: 150242 - RNA, 1410 nt, Artificial Sequence; identical to SEQ ID NO: 149683
  derived and/or modified CDS sequence (opt3) from neuraminidase__InfluenzaA__AFH75391

SEQ ID NO: 150243 - RNA, 1410 nt, Artificial Sequence; identical to SEQ ID NO: 144786
  derived and/or modified CDS sequence (opt3) from neuraminidase__InfluenzaA__AFH97143

SEQ ID NO: 150244 - RNA, 1410 nt, Artificial Sequence
  derived and/or modified CDS sequence (opt3) from neuraminidase__InfluenzaA__AFI56407
augaaccccaaucagaagaucauuaccauaggcagcgugugcaugacaaucgggauggccaaccugauucuccaaaucggaaauauuaucuccauauggaucucucacucaauucagcuugguaaccagaaucagaucgagacuuguaaccaaagugucauuacguacgaaaauaacaccuggguuaaucagacauaugugaacaucagcaauacuaacuucgcugcaggccaguccguagugucugucaaacuggccggaaauucgucauugugcccugugagcgggugggcgauauacaguaaggacaacuccauuagaaucggcucuaaagguaauguuuuugugauuagggagccauucaucagcuguuccccguuagaaugccggaccuuuuuccugacacagggggcucuacucaacgauaagcauucaaacggaaccaucaaagaccgcagucccuaucgaacucugaugagcuguccuauuggcgaggucccaucucccuacaauucccguuuugaaucaguggccuggagcgcaagugccugccacgauggcauaaacuggcuuacaaucgggauuucuggaccugacaauggugcuguagcaguucugaaguauaacggcaucauaaccgauacgauuaaguccuggagaaauaacaucuugaggacucaagagagcgagugugccugcgugaaugggucguguuucaccaucaugacagacggaccaucugauggccaggcuuccuacaaaauuuuucggaucgaaaaggguaaaauugucaagucaguggagaugaacgcccccaauuaucauuacgaagagugcaguuguuacccugacagcuccgagauaacuugcgugugccgcgauaacuggcacgggucuaauagaccaugggucagcuucaaccagaaucucgaauaucagaucggauacauuuguucaggcaucuuuggcgacaacccgaggcccaaugauaaaaccgggaguugcggaccuguuuccagcaacggugcgaacggcgugaagggguucucuuuuaaguauggaaauggcguauggaucggucggacaaaaucaauuaguagccgcaagggguucgagaugauaugggacccaaacggcuggaccggaacggauaauuccuuuucuaucaaacaagacauugugggcaucaacgaauggucgggguacagcggauccuucguccagcaucccgagcugacuggucuggacuguauucgaccuugcuucuggguggaacucaucagaggcaggccaaaggagaauacaauauggaccucagggaguucuaucagcuuuuguggaguuaacuccggcacuguggguuggucauggcccgauggggcagaguuaccguucacaauugacaaauga

SEQ ID NO: 150245 - RNA, 1410 nt, Artificial Sequence
  derived and/or modified CDS sequence (opt3) from neuraminidase__InfluenzaA__AFJ05141
augaaccccaaucagaagaucauuaccauaggcagcgugucccugacaaucucuacuauuugcuucuuuaugcagaucgccauucucaucacgaccgucacacuucacuucaaacaguacgaguuuaacucaccuccaaauaaccagguuaugcugugugaaccgacuauaaucgagagaaauauuaccgaaaucguguauuugacaaacaccacuauugagaaggaaaucugccccaaaccugcugaguacaggaauuggaguaagccacagugugacauaacaggguucgcacccuuuagcaaagauaacuccauucgguuaucugccggaggugacaucuggguaacccgcgagccuuaugugucgugcgauccagacaaguguuaccaauucgcgcugggccaggggacgacucuaaauaacguccauucaaauaacaccgugcgagaucguacacccuauagaagccuccugaugaaugaacuuggaguuccuuuucaccugggcacuaaacaggugugcauugcuuggaguuccucuagcugucaugacgguaaggccugguugcacgucugcaucaccggggaugacaagaacgcaacagccuccuucaucuacaauggaaggcucguggauucaguaguuaguuggagcaaagagauucugcggacccaggaaucugagugugugugcauaaacggcacguguacugucgugaugacagacggcuccgcuucagggaaggcagauaccaaaauccuguuuauugaggaaggaaagaucgugcauacuagcacacucagugguucugcccaacacgucgaggaaugcuccugcuauccacgcuacccgggcguuagaugugugugcagggacaacuggaaggggagcaaucggcccauaguagauauuaacaucaaagaccacucgaucgugucuuccuacgucuguucaggauuagugggcgacaccccucgcaagaaugauaguagcuccucuagccauugccuggacccaaacaaugaggaaggugggcacggaguuaaaggcugggcuuucgaugacggcaacgauguguggauggggcgaacgauuaaugagaccucaagacuuggauaugagacauuuaaggucaucgaagguuggaguaaccccaaauccaaguugcagauuaauaggcaagugauaguagaccggggcgaucguagcggguacucuggaaucuucucaguugagggcaaaaguuguauuaaccgcugcuuuuauguggaacugaucagagguaggaaggaggaaacugagguccuauggaccagcaauuccaucguggucuucugugggacaucuggcacuuacggaaccggcucguggccugacggggccgaucucaaccugaugccaauuuga

SEQ ID NO: 150246 - RNA, 1410 nt, Artificial Sequence
  derived and/or modified CDS sequence (opt3) from neuraminidase__InfluenzaA__AFJ05145
augaaccccaaucagaagaucauuaccauaggcagcgugucccugacaaugucuacuaucugcuucuuuaugcagauugccauccucauuacgaccgucacacuucacuucaaacaguacgaguuuaacucaccuccaaauaaccagguuaugcugugugaaccgacuaucauagagagaaauaucaccgaaauuguguauuugacaaacaccacuaucgagaaggaaauuugccccaaaccugcugaguacaggaauuggaguaagccacagugugacaucacaggguucgcacccuuuagcaaagauaacuccauacgguuaucugccggaggugacauuuggguaacccgcgagccuuaugugucgugcgauccagacaaguguuaccaauucgcgcugggccaggggacgacucuaaauaacguccauucaaauaacaccgugcgagaucguacacccuauagaacucuccugaugaaugaacuuggaguuccuuuucaccugggcaccaaacaggugugcaucgcuuggagcaguuccucuugucaugacgguaaggccugguugcacgucugcauuacaggggaugacaagaacgcaaccgccagcuucaucuacaauggaaggcucguggauuccguaguuucauggaguaaagagauccugcggacgcaggaaagcgagugugugugcauuaacggcacuuguacagucgugaugaccgacggcucugcuuccgggaaggcagauacuaaaauacuguuuaucgaggaaggaaagauugugcauacaucaacccucagcgguagugcccaacacgucgaggaaugcucuugcuauccacgcuacccgggcguuagaugugugugcagggacaacuggaagggguccaaucggcccaucguagauauaaacauuaaagaccacagcaucgugucgucuuacgucuguuccggauuagugggcgacacgccucgcaagaaugauucaaguagcuccucucauugccuggacccaaacaaugaggaaggugggcacggaguuaaaggcugggcuuucgaugacggcaacgauguguggauggggcgaaccaucaaugagacaagcagacuuggauaugagacuuuuaaggucauugaagguuggucaaaccccaaaaguaaguugcagaucaauaggcaagugauuguagaccggggcgaucguuccggguacagcggaauauucucuguugagggcaaaucauguaucaaccgcugcuuuuauguggaacugauuagagguaggaaggaggaaaccgagguccuauggacaaguaauagcaucguggucuucugugggacuuccggcaccuacggaacaggcucuuggccugacggggccgaucucaaccugaugccaaucuga

SEQ ID NO: 150247 - RNA, 1410 nt, Artificial Sequence
  derived and/or modified CDS sequence (opt3) from neuraminidase__InfluenzaA__AFJ05635
augaaccccaaucagaagaucauuaccauaggcagcgugugcaugacaaucgggauggccaaccugauucuccaaaucggaaauauuaucuccauauggaucucucacucaauucagcuuagaaaccagagucagaucgagacuuguaaucaaagcgucauuacguacgaaaacaauaccuggguuaaccagacauaugugaauaucuccaacacuaauuucgcugcaggucagucuguagugucgaugaaacuggccggcaacucauccuugugcccugucagugggugggcgauauacuccaaggacaauucuauuaggaucggaagcaaaggcgauguguuuguuauucgggagccauucaucuccuguucaccguuagaaugccgcaccuuuuuccugacacagggugcucuacucaacgacaagcauaguaaugggaccaucaaagaucgaagccccuaucguacucugaugucuuguccuauuggagaggugccaucccccuacaacucaagauuugaaagcgucgccuggagugcaucugccugccacgacggcauaaacuggcuuacaaucggcauuuccgggccugauaauggagcuguggcaguacugaaguauaacgguaucauaaccgacacgauuaagagcuggaggaauaacaucuugcggacucaagagucggagugugccugcguuaauggcucuuguuucaccaucaugacagaugggccauccgacggacaggcuucauacaaaauuuuucgcaucgaaaagggcaaaauugugaagagugucgagaugaacgcccccaauuaucauuacgaagagugcagcuguuacccugauuccucugagauaacuugcgugugcagagacaacuggcacgguagcaauaggccaugggugucauucaaccagaaucucgaauaucagaucggguacauuuguaguggaaucuuuggcgauaacccgcggcccaaugacaaaaccggcuccugcgggccugucagcucuaacggagcgaaugguguuaagggcuucucauuuaaguaugggaacggaguguggaucggccgcacaaaaaguauuagcucccgaaaggguuucgagaugauaugggauccaaacggguggaccggcacggacaauaacuuuucuaucaaacaagacauuguaggaaucaaugaauggucgggcuacagcggguccuucgugcagcaucccgagcugacuggacuggauuguauuagaccuugcuucugggucgaacucaucaggggucggccaaaggagaacacaauauggaccucaggcaguucuaucagcuuuuguggggugaauagcgacacuguuggauggucauggcccgauggcgcagaguuaccguucacaauugacaaauga

SEQ ID NO: 150248 - RNA, 1410 nt, Artificial Sequence
  derived and/or modified CDS sequence (opt3) from neuraminidase__InfluenzaA__AFJ11709
augaaccccaaucagaagaucauuaccauaggcagcgugucccugacaaucucuacuauuugcuucuuuaugcagaucgccauucucaucacgaccgucacacuucacuucaaacaguacgaguuuaacucaccuccaaauaaccagguuaugcugugugaaccgacuauaaucgagagaaauauuaccgaaaucguguauuugacaaacaccacuauugagaaggaaaucugccccaaauuagcugaguacaggaauuggaguaagccucagugugacauaacaggguucgcaccauuuagcaaagauaacuccauucggcugucugccggaggugacaucuggguaacccgcgagcccuaugugucgugcgauccugacaaguguuaccaauucgcgcuaggccaggggacgacucucaauaacguccauucaaauaacaccgugcgagaucguacaccauauagaacucugcuuaugaaugaacugggaguucccuuucacuugggcaccaaacaggugugcauugcuuggagcaguuccucuugucaugacgguaaggccuggcuccacgucugcaucacaggggaugacaagaacgcaaccgccagcuucaucuacaauggaaggcugguggauuccguaguuucauggaguaaagagauucugcggacgcaggaaagcgagugugugugcauaaacggcacuuguacagucgugaugaccgacggcucugcuuccgggaaggcagauacuaaaauccucuuuauugaggaaggaaagaucgugcauacaucaaccuuaagcgguagugcccaacacgucgaggaaugcucuugcuauccucgcuacccaggcguuagaugugugugcagggacaacuggaagggguccaaucggccgauaguagauauuaacaucaaagaccacagcaucgugucgucuuacgucuguuccggacuggugggcgacacgccccgcaagaaugauucaaguagcuccucucauugccuugacccuaacaaugaggaaggugggcacggaguuaaaggcugggcuuucgaugacggcaacgauguguggauggggcgaaccauuaaugagacaagcagauugggauaugagacuuuuaaggucaucgaagguuggucaaacccaaaaaguaagcugcagauuaauaggcaagugauaguagaccggggcaaccguuccggguacagcggaaucuucucuguugagggcaaaucauguauuaaucgcugcuuuuauguggaacuaaucagagguaggaaggaggaaaccgagguccucuggacaaguaacagcaucguggucuucugugggacuuccggcaccuacggaacaggcucuuggcccgauggggccgaccugaaucuuaugcugauuuga

SEQ ID NO: 150249 - RNA, 1410 nt, Artificial Sequence
  derived and/or modified CDS sequence (opt3) from neuraminidase__InfluenzaA__AFJ11720
augaaccccaaucagaagaucauuaccauaggcagcgugucccugacaaucucuacuauuugcuucuuuaugcaaaucgccauucucaucacgaccgucacacuucacuucaaacaguacgaguuuaacucaccuccaaauaaccagguuaugcugugugaaccgacuauaaucgagagaaauauuaccgaaaucguguauuugacaaacaccacuauugagaaggaaaucugccccaaauuagcugaguacaggaauuggaguaagccucagugugacauaacaggguucgcaccauuuagcaaagauaacuccauucggcugucugccggaggugacaucuggguaacccgcgagcccuaugugucgugcgauccugacaaguguuaccaauucgcgcuaggccaggggacgacucucaauaacguccauucaaauaacaccgugcgagaucguacaccauauagaacucugcuuaugaaugaacugggaguucccuuucacuugggcaccaaacaggugugcauugcuuggagcaguuccucuugucaugacgguaaggccuggcuccacgucugcaucacaggggaugacaagaacgcaaccgccagcuucaucuacaauggaaggcugauugauuccgugguaucauggaguaaagagauacugcggacgcaggaaagcgaguguguuugcaucaacggcacuuguacaguggucaugaccgacggcucugcuuccgggaaggcagauacuaaaauucucuuuaucgaggaaggaaagauagugcauacaucaaccuuaagcgguagugcccaacacguggaggaaugcucuugcuauccucgcuacccaggcgucagauguguuugcagggacaacuggaagggguccaaucggccgauuguggauaucaacaucaaagaccacagcauuguaucgucuuacguguguuccggacuggucggcgacacgccccgcaagaaugauucaaguagcuccucucauugccuugacccuaacaaugaggaaggugggcacggagugaaaggcugggcuuucgaugacggcaacgauguuuggauggggcgaaccaucaaugagacaagcagauugggauaugagacuuuuaaggugauugaagguuggucaaacccaaaaaguaagcugcagauaaauaggcaggucaucguggacaaaggcaaccgguccggguacagcggaauuuucucuguagagggcaagucauguaucaaucguugcuuuuauguugaacuaauccgcgguagaaaggaggaaaccgaggugcucuggacaaguaacagcauugucguguucugugggacuuccggcaccuacggaacaggcucuuggcccgauggggccgaccugaaucuuaugccuauauga

SEQ ID NO: 150250 - RNA, 1410 nt, Artificial Sequence; identical to SEQ ID NO: 149191
  derived and/or modified CDS sequence (opt3) from neuraminidase__InfluenzaA__AFJ11731

SEQ ID NO: 150251 - RNA, 1410 nt, Artificial Sequence
  derived and/or modified CDS sequence (opt3) from neuraminidase__InfluenzaA__AFJ19845
augaaccccaaucagaagaucauuaccauaggcagcgugucccugacaaucucuacuauuugcuucuuuaugcagaucgccauucucaucacgaccgucacacuucacuucaaacaguacgaguuuaacucaccuccaaauaaccagguuaugcugugugaaccgacuauaaucgagagaaauauuaccgaaaucguguauuugacaaacaccacuauugagaaggaaaucugccccaaauuagcugaguacaggaauuggaguaagccucagugugacauaacaggguucgcaccauuuagcaaagauaacuccauucggcugucugccggaggugacaucuggguaacccgcgagcccuaugugucgugcgauccugacaaguguuaccaauucgcgcuaggccaggggacgacucucaauaacguccauucaaauaacaccgugcgagaucguacaccauauagaacucugcuuaugaaugaacugggaguucccuuucacuugggcaccaaacaggugugcauugcuuggagcaguuccucuugucaugacgguaaggccuggcuccacgucugcaucacaggggaugacaagaacgcaaccgccagcuucaucuacaauggaaggcugguggauuccguaguuucauggaguaaagagauucugcggacgcaggaaagcgagugugugugcauaaacggcacuuguacagucgugaugaccgacggcucugcuuccgggaaggcagauacuaaaauccucuuuauugaggaaggaaagaucgugcauacaucaaccuuaagcgguagugcccaacacgucgaggaaugcucuugcuauccucgcuacccagacguuagaugugugugcagggauaacuggaagggcuccaaucggccgauaguagacauuaacaucaaagaccacagcaucgugucgucuuacgucuguuccgggcuggugggagauacgccccgcaagaaugacucaaguagcuccucucauugccuugauccuaacaaugaggaaggcggucacgggguuaaaggaugggcuuucgacgauggcaacgacguguggaugggccgaaccauuaaugagacaagcagauugggguaugagacuuuuaaggucaucgaaggauggucaaacccaaaaaguaagcugcagauuaauaggcaagugauaguagauaaagguaaccgguccggcuacagcgggaucuucucuguugagggaaagucauguauuaaucguugcuuuuauguggaacuaauccgcggcagaaaggaggaaaccgagguccucuggacaaguaacagcaucguggucuucugugguacuuccgggaccuacggcacaggaucuuggcccgacggcgccgaucugaaucuuaugccuauuuga

SEQ ID NO: 150252 - RNA, 1410 nt, Artificial Sequence; identical to SEQ ID NO: 144786
  derived and/or modified CDS sequence (opt3) from neuraminidase__InfluenzaA__AFJ44697

SEQ ID NO: 150253 - RNA, 1410 nt, Artificial Sequence; identical to SEQ ID NO: 148305
  derived and/or modified CDS sequence (opt3) from neuraminidase__InfluenzaA__AFJ69989

SEQ ID NO: 150254 - RNA, 1410 nt, Artificial Sequence
  derived and/or modified CDS sequence (opt3) from neuraminidase__InfluenzaA__AFJ69990
augaaccccaaucagaagaucauuaccauaggcagcgugugcaugacaaucgggauggccaaccugauucuccaaaucggaaauauuacuuccaucuggauaucucacucaauccagcuugguaaccagaaucagauugagacguguaaccaaagugucaucaccuacgaaaauaacacauggguuaaucagacuuaugugaacauuagcaauaccaacuucgcugcaggccaguccguagugucugucaaacuggccggaaauucgucauugugcccugugagcggaugggcgaucuacaguaaggacaacuccauaagaauuggcucuaaaggugauguuuuugugaucagggagccauucauuagcuguuccccguuagaaugccggacauuuuuccugacccagggggcucuacucaaugacaagcauucaaacggaacuaucaaagaucgcagucccuaucgaacacugaugagcuguccuaucggcgaggucccaucucccuacaacucccguuuugaaucaguggccuggagcgcaagugccugccacgacggcauuaauuggcuuaccauagggaucucuggaccugauaacggugcuguagcaguucugaaguauaauggcauuaucacggacacuauaaaguccuggagaaacaauauuuugaggacccaagagagcgagugugccugcgugaacgggucguguuucacagucaugacugauggaccaucugacggccaggcuuccuacaaaaucuuucggaucgaaaaggguaaaauugugaagucaguggagaugaaugcccccaacuaucauuacgaagagugcaguuguuacccugauagcuccgagauuaccugcgucugccgcgacaauuggcacgggucuaacagaccauggguuagcuucaaucagaaccucgaauauaggaucggauacauauguucaggcaucuuuggcgauaauccgcggcccaacgacaaaacagggaguugcggaccuguguccagcaauggugcgaacggcguaaagggguucucuuuuaaguauggaaacggcguguggauuggucgcaccaaaucaaucaguagccgaaauggguucgagaugaucugggauccaaacggcuggacgggaacugacaauaacuuuuccauuaagcaggacauaaucggcauuaaugaauggucuggguacucggggagcuucguccaacaucccgagcugacaggucuggauuguaucagaccuugcuucuggguggaacucauuaggggccggccaaaagagaacaccaucuggacuuccgggucaaguauaucuuuuuguggaguuaauagcgacacagugggcugguccuggcccgauggugcagaguuaccguucaccaucgacaaguga

SEQ ID NO: 150255 - RNA, 1410 nt, Artificial Sequence
  derived and/or modified CDS sequence (opt3) from neuraminidase__InfluenzaA__AFJ69991
augaaccccaaucagaagaucauuaccauaggcagcgugugcaugacaaucgggauggccaaccugauucuccaaaucggaaauauuaucuccauauggaucucucacucaauucagcuugguaaccagagucagaucgagacuuguaaucaaagcgucauuacguacgaaaacaauaccuggguuaaccagacauaugugaauaucuccaacacuaauuucgcugcaggccagucuguagugucggucaaacuggccgggaacucauccuugugcccugugaguggaugggcgauauacuccaaggacaauucuauuagaaucggcagcaaaggugauguuuuugugauuagggagccauucaucuccuguucaccguuagaaugccggaccuuuuuccugacacagggggcucuacucaacgacaagcauaguaauggaaccaucaaagaucgcagccccuaucgaacucugaugucuuguccuauuggcgaggucccaucccccuacaaccaagaccuuucacacagcgccuggagugcaucugccugccaugauggcauaaacuggcugacaaucgggauuuccggaccugacaauggugcuguggcaguauugaaguauaacggcaucauaaccgauacgauuaagagcuggcguaauaacauccucagaacucaggaaucggagugugccugcguuaaugggucuuguuuuaccaucaugacagacggaccauccgauggccaggcuucauacaaaauuuucaggaucgagaaggguaaaauugugaagagugucgaaaugaacgcccccaauuaucacuacgaggaaugcagcuguuacccugacuccucugagauaacuugcgugugccgggauaacuggcaugggagcaaucgcccaugggugucauuuaaccagaaucuggaguaucaaaucggauacauuuguaguggcaucuucggcgacaacccgagacccaaugauaaaaccggguccugcggaccugucagcucuaacggugcgaauggcguuaagggguuuucauucaaguauggaaacggcguguggaucgguaggacaaaaaguauuagcucccggaagggguuugaaaugauaugggacccaaacggcuggaccggaacggacaauaacuucucuaucaaacaggauauuguaggcaucaaugaguggucgggguacagcggauccuuugugcagcaccccgaacugacuggucucgacuguauucgcccuugcuucugggucgaguuaauccgaggcagaccaaaggaaaacacaauauggaccucagggaguucuaucagcuucuguggagugaauagcgauacuguuggcuggucauggcccgacggugcagagcugccguuuacaauugauaaauga

SEQ ID NO: 150256 - RNA, 1410 nt, Artificial Sequence; identical to SEQ ID NO: 145612
  derived and/or modified CDS sequence (opt3) from neuraminidase__InfluenzaA__AFJ69992

SEQ ID NO: 150257 - RNA, 1410 nt, Artificial Sequence
  derived and/or modified CDS sequence (opt3) from neuraminidase__InfluenzaA__AFJ69993
augaaccccaaucagaagaucauuaccauaggcagcgugucccugacaaucucuacuauuugcuucuuuaugcagaucgccauucucaucacgaccgucacacuucacuucaaacaguacgaguuuaacucaccuccaaauaaccagguuaugcugugugaaccgacuauaaucgagagaaauauuaccgaaaucguguauuugacaaacaccacuauugagaaggaaaucugccccaaauuagcugaguacaggaauuggaguaagccucagugugacauaacaggguucgcaccauuuagcaaagauaacuccauucggcugucugccggaggugacaucuggguaacccgcgagcccuaugugucgugcgauccugacaaguguuaccaauucgcgcuaggccaggggacgacucucaauaacguccauucaaauaacaccgugcgagaucguacaccauauagaacucugcuuaugaaugaacugggaguucccuuucacuugggcaccaaacaggugugcauugcuuggagcaguuccucuugucaugacgguaaggccuggcuccacgucugcaucacaggggaugacaagaacgcaaccgccagcuucaucuacaauggaaggcugguggauuccguaguuucauggaguaaagagauucugcggacgcaggaaagcgagugugugugcauaaacggcacuuguacagucgugaugaccgacggcucugcuuccgggaaggcagauacuaaaauccucuuuauugaggaaggaaagaucgugcauacaucaaccuuaagcgguagugcccaacacgucgaggaaugcucuugcuauccucgcuacccaggcguuagaugugugugcagggacaacuggaagggguccaaucggccgauaguagauauuaacaucaaagaccacagcaucgugucgucuuacgucuguuccggacuggugggcgacacgccccgcaagaaugauucaaguagcuccucucauugccuugacccuaacaaugaggaaggugggcacggaguuaaaggcugggcuuucgaugacggcaacgauguguggauggggcgaaccauuaaugagacaagcagauugggauaugagacuuuuaaggucaucgaagguuggucaaacccaaaaaguaagcugcagauuaauaggcaagugauaguaggccgggggaaccguuccggauacagcggcaucuucucuguugaggguaaaucauguauuaaucgcugcuuuuauguggaacuaaucagagggaggaaggaggaaaccgagguccucuggacaaguaacagcaucguggucuucuguggcacuuccggaaccuacggcacagggucuuggcccgacggagccaaucugaaccuuaugccuauuuga

SEQ ID NO: 150258 - RNA, 1410 nt, Artificial Sequence; identical to SEQ ID NO: 147566
  derived and/or modified CDS sequence (opt3) from neuraminidase__InfluenzaA__AFJ69994

SEQ ID NO: 150259 - RNA, 1413 nt, Artificial Sequence
  derived and/or modified CDS sequence (opt3) from neuraminidase__InfluenzaA__AFJ74389
augaaccccaaucagaagaucauuaccauaggcagcaucuccauugccaucgggauuaucucucugauacuccaaaucggaaacauuaucucaauuugggcuagucacagcauccagacagguucccagaaucauacuggcgugugcaaccagagaauaauuacguacgaaaauucuaccugggucaaccaaacauauguuaauaucaacaauacuaacgugguagcagggaaagacaagaccucgaugacacuugccggaaauucaagccuguguccuauuaggggcugggcgaucuacaccaaagauaacaguauccggauugguuccaagggggacguguucgucauacgcgagccauuuaucucuugcagccacuuggagugucgaacuuucuuuuuaacacagggagcucugcuaaaugauaaacauuccaacggcaccgugaaggaccguucaccguauagagcccucaugaguugcccccugggcgaagcaccuagcccauacaauucuagguucgaguccguugccuggucagcuagcgcaugucacgaugggcuuggauggcugacgauugguaucaguggccccgacaacggggccguggcugucuugaaguauaacggaauaauuacugaaaccaucaaaucuuggaagaaacggauccuccgcacacaggaguccgagugcguguguaugaauggcagcugcuuuacuauuaugaccgaugguccuucgaacggggccgcgucuuacagaaucuucaagauugaaaaaggaaggguaacaaaguccauagagcuggacgcaccaaauuaucauuacgaagaguguucaugcuaccccgauaccggcacgguuaugugugugugccgggacaacuggcacggcaguaaucgcccuugggucagcuuuaaccagaaucuggauuaucaaaucggguacauuugcuccggaguguucggugacaacccacgaccgaaggauggcgaggggucuuguaaucccgugacugucgacggagccgacggcguuaaagguuuuagcuauagauacgggaacggcguguggaucggaaggacaaagucaaaucggcuccguaaaggcuucgaaaugaucugggauccuaacggguggaccgacacugauagugacuuuuccaugaagcaggauauuguagcuaugacagacuggagcggauauucugguucauucgugcagcacccagaguuaaccggccuggauugcaugcgccccuguuuuugggucgaacuugugagaggguugccuagggagaauacgaccauauggacaaguggaagcuccaucucuuucugcggcguuaacucggacacugccaauuggagcuggccagauggugcagaacugcccuucaccauugacaaauga

SEQ ID NO: 150260 - RNA, 1410 nt, Artificial Sequence
  derived and/or modified CDS sequence (opt3) from neuraminidase__InfluenzaA__AFJ74399
augaaccccaaucagaagaucauuaccauaggcagcgugucccugacaaucgccacuauuugcuuccucaugcaaaucgcuauucuugucaucacgcugaccuugcacuuuaaacaguacgaguguaacucuccuccaaauaaccagguuauguuaugcgaaccgacaauaaucgagagaaauauuacugaaaucguguaucugaccaacacaaccauugagaaggaaaucugucccaaacuagcagaguacaggaauuggucaaagccucagugcaaaauaacuggguucgccccauuuaguaaggacaacagcauucggcucuccgcgggaggugauaucuggguaacacgcgagcccuaugugucuugugacccuggcaagugcuaccaauucgcucuggggcagggaaccacgcuuaauaaccgacauucgaaugauacuguccacgaccguaccccauauagaacacuguugaugaacgaacucggcgugcccuuucaucuggguacuaaacagguuuguauugccuggucaagcaguuccugccacgaugggaaggcauggcugcaugugugugucaccggacacaaugagaacgccacagcuucuuucaucuacgacggcaggcucguggauagcaucggcuccuggaguaaaaauauuuuacggacccaggaaucagagugcguauguauaaacgggacgugcacuguugugaugacagacggaagcgcaucuggucgcgccgauaccaagauccuguuuauugaggaaggcaaaaucguccacauauccccucuuucagggagcgcucaacauguggaggaaugcaguuguuauccaagauacccgggagugaggugcgucugucgggacaacuggaagggcucuaaucgccccauuguugauaucaacgugaaggacuucuccaucguaagcucguacgugugcucugguuuggucggggauacuccucgaaagaaugacuccucaaguagcucccacugucugaacccaaauaacgaggaaggaggccauggcgugaaagggugggccuuugacgauggaaaugacguuuggauggguagaacaauuucugagaaacuaaggagcggcuaugagaccuucaaggugaucgggggauggucaaaacccaacaguaagcuccagauuaaucggcaggucauaguggaucguggcaaccgcuccgguuacagcgggaucuuuucuguagaaggcaaaucaugcauuaauagauguuucuauguugagcugaucaggggacggaagcaggaaacggaggugugguggaccaguaacagcaucgucguguuuugcggcacauccgggacuuacggaaccgguucuuggccugacggcgcggauauuaaucuuaugccaauauga

SEQ ID NO: 150261 - RNA, 1410 nt, Artificial Sequence
  derived and/or modified CDS sequence (opt3) from neuraminidase__InfluenzaA__AFJ74410
augaaccccaaucagaagaucauuaccauaggcagcgugucccugacaaucgccacuauuugcuuccucaugcaaaucgcuauucuugucaugacgguuacccugcacuuuaaacaguacgaguguaacucuccuccaaauaaccaggugauguugugcgaaccgacaaucauagagagaaauaucacugaaauuguauauuuaaccaacacaaccaucgagaaggaaauuugucccaaacuggcagaguacaggaauuggucaaagccucagugcaaaaucacuggguucgccccauuuaguaaggacaacagcauacggcuauccgcgggaggugauauuugggugacacgcgagcccuaugucucuugugacccuggcaagugcuaccaauucgcucucgggcagggaaccacgcugaauaaccgacauucgaaugauacugugcacgaccguaccccauauagaacacuucugaugaacgaauugggcguucccuuucaucucgguacuaaacagguguguaucgccuggucaagcaguuccugccacgaugggaaggcauggcugcaugucugugugaccggacacaaugagaacgccacagcuucuuucauuuacgacggcaggcugguagauagcaucggcuccuggaguaaaaauauccuccggacccaggaaucagagugcguuuguauuaacgggacgugcacuguggucaugacagacggaagcgcaucuggucgcgccgauaccaagauauuauuuaucgaggaaggcaaaauugugcacaucuccccucugucagggagcgcucaacauguggaggaaugcaguuguuauccaagauacccgggagucaggugcguuugucgggacaacuggaagggcucuaaucgccccauaguggauauuaacguaaaggacuacuccaucaucagcucguaugugugcucuggucuugucggggauacuccucgaaagaaugacuccucaaguagcucccacuguuugaacccaaauaacgaggaaggaggccauggcgugaaagggugggccuucgacgauggaaaugacguuuggauggguagaacaauuucugagaaacugaggagcggcuacgagaccuuuaaggugaucgggggauggucaaaacccaacaguaagcuacagauuaaucggcaggucauaguggaucguggcaaccgcuccgguuauagcgggaucuucucuguagaaggcaaaucaugcauuaauagauguuuuuacguugagcucaucaggggacggaagcaggaaacggaggugugguggaccaguaacagcaucgucguguucugcggcacauccgggacuuauggaaccgguucuuggccugacggcgcggauauuaaucugaugccaauauga

SEQ ID NO: 150262 - RNA, 1410 nt, Artificial Sequence; identical to SEQ ID NO: 142363
  derived and/or modified CDS sequence (opt3) from neuraminidase__InfluenzaA__AFJ74451

SEQ ID NO: 150263 - RNA, 1413 nt, Artificial Sequence
  derived and/or modified CDS sequence (opt3) from neuraminidase__InfluenzaA__AFJ74462
augaaccccaaucagaagaucauuaccauaggcagcaucuccguggccauugggaucauuucucugauccuccaaauaggaaacaucauuucaaucugggcuagucacagcauucagacagguucccagaauuacacuggcaucugcaaccagagaauaauuacguaugaaaauucuaccugggucaaccaaacauacguuaauaucaacaauacuaacgugguagcagggaaagacaagaccucgaugacacuugccggaaauucaagccuguguccuauuaggggcugggcgaucuauaccaaagauaacaguauccggauugguuccaagggggacguguucgucauacgcgagccauuuaucucuugcagccauuuggagugucgaacuuucuuuuuaacacagggagcucugcuaaaugauaaacacuccaacggcaccgugaaggaccguucaccguacagagcccucaugaguugcccccugggcgaagcaccuagcccauauaauucuagguucgaguccguugccuggucagcuagcgcaugucaugaugggcuuggauggcugacgauugguaucaguggccccgacaacggggccguggcugucuugaaguacaacggaauaauuacugaaaccaucaaaucuuggaagaaacagauccuccggacacaggaguccgagugcguguguguaaauggcagcugcuuuacuauuaugaccgaugguccuucgaaccgcgccgcgucuuauagaaucuucaagauugaaaaagggaggguuacaaaguccauagagcuggacgcaccaaauuaccacuacgaagaguguucaugcuaucccgauaccggaacggugaugugugucugccgggacaacuggcauggcaguaaucgcccuugggugagcuuuaaccaaaaucuggauuaccagaucggcuauauuugcuccgggguguucggagacaacccacgaccgaaggauggugagggcucuuguaaucccgucacuguugacggggccgacggagugaaaggcuuuagcuacagauaugguaacgggguauggaucggcaggacaaagucaaaucggcuccguaaaggauucgaaaugaucugggauccuaacggcuggaccgacacugauagugacuuuuccaugaagcaggauguggucgcuaugacagacuggagcggguacucuggaucauucgugcagcacccagaguuaaccggucuggauugcaugcgccccuguuuuuggguugaacuugugagaggcuugccuagggagaauacgaccauuuggacaagugggagcuccauaucuuucugcggagucaacucggaaacugccaauuggagcuggccagacggcgcagagcugcccuucaccaucgauaaauga

SEQ ID NO: 150264 - RNA, 1410 nt, Artificial Sequence
  derived and/or modified CDS sequence (opt3) from neuraminidase__InfluenzaA__AFJ74517
augaaccccaaucagaagaucauuaccauaggcagcgugucccugacaaucgccacuauuugcuuccucaugcaaaucgcuauucuugucacgaccguuacacugcacuuuaaacaguacgaguguaacucuccuccaaauaaccaggugauguugugcgaaccgacuaucauagagagaaauaucaccgaaauuguauauaugacaaacaccacuaucgagaaggaaauuugucccaaauuagcagaguacaggaauuggucaaagccucagugcaaaaucacaggguucgccccauuuaguaaggacaacagcauacggcuguccgcgggaggugauauuugggugacccgcgagcccuaugucucuugugacccugauaagugcuaccaauucgcucuaggccaggggacgacucucaauaaccgacauucgaaugacaccgugcacgaucguacaccauauagaacucugcuuaugaacgaacugggaguucccuuucauuugggcaccaaacagguguguaucgccuggucaagcaguuccugccacgacgguaaggcauggcuccaugucugugugacagggcacgaugagaaugccaccgcuucuuucauuuacgacggaaggcugguagauagcaucggcuccuggaguaaaaagauccugcggacgcaggaaucagagugcguuuguauuaacggcacuugcacaguggucaugaccgacgggagcgcaucuggacgcgccgauacuaaaauacucuuuaucgaggaagguaagauugugcacaucucccaauuaucaggcagcgcucagcauguggaggaaugcaguuguuauccuagauacccaggggucaggugcguuugucgggacaauuggaagggaucuaaccgcccgauaguggauauuaacguaaaagacuacuccaucgugagcucguaugucugcucuggccuggugggugacacaccccgaaagaaugauuccucaaguagcucccacugucuuaacccuaauaacgaggaagggggacauggcguuaaaggcugggccuucgacgaugggaaugacguguggaugggaagaaccaucucugagaaguugaggagcgguuacgagacguuuaaagucauugaaggcuggucaaagccaaacaguaaacugcagaucaaucgucaggugauuguagaucgggggaaccgcuccggauauagcggcauauucucuguugaggguaagucaugcaucaauagauguuuuuacguggaacuaauuagggggcggaagcaagagaacgaagucugguggaccaguaauagcaucguggucuucugcggcacauccggaacuuauggcaccgggucuuggcccgacggagcggauaucaaccucaugccuauuuga

SEQ ID NO: 150265 - RNA, 1410 nt, Artificial Sequence
  derived and/or modified CDS sequence (opt3) from neuraminidase__InfluenzaA__AFJ74564
augaaccccaaucagaagaucauuaccauaggcagcgugucccugacaaucgccacuauuugcuuccucaugcagaucgcuauucuugucacgaccguuacacugcacuuuaaacaguacgaguguaacucuccuccaaauaaccaggugauguugugcgaaccgacuaucauagagagaaauaucaccgaaauuguauauuuaacaaacaccacuacagagaaggaaaucugucccaaacuggcagaguacaggaauuggucaaagccucagugcaacauuaccggguucgccccauuuaguaaagacaauagcauccggcuauccgcgggaggugauauaugggugacgcgcgagcccuaugucucuugugacccugauaagugcuaccaauucgcucucggccaggggacuacccugaacaauggacauucgaacgacacagugcacgaucgaacuccauaucguacccuucugaugaaugaauugggcguucccuuucaucucgguacaagacagguguguauugccuggucaagcaguuccugccacgacgggaaggcauggcugcaugucugugugaccggagaugacgagaacgccacggcuucuuucaucuacaauggcaggcugguagauagcauuggcuccuggaguaaaaagauccuccggacucaggaaucagagugcguuuguaucaacgggacaugcaccguggucaugacugacggaagcgcaucugguaaagccgauacaaagauuuuauuuauagaggaaggcaaaaucgugcacauuuccacccugucagggagcgcucaacacguggaggaaugcaguuguuauccucgcuacccaggagucagaugcguuuguagggacaacuggaagggcucuaaucggccgaucguggauauaaacguaaaggacuacuccauugugagcucguaugucugcucuggucuugugggggacacgccccgcaaaaaugauuccuucucaaguagccauuguuuggacccuaacaaugaggaaggaggccacggcguuaaggggugggccuuugaugacggaaacgauguguggaugggucgaaccaucuccgagacacugagaucuggcuacgagacuuucaaagucaucgaaggguggagcaagccaaauucaaaacuacagauuaacaggcaagugaucguagagcggggaaaucguaguggcuauuccgguauuuuuagcguugaagggaagucuugcauaaaccgcuguuucuacguggagcucaucagaggcaggaaagaagagaccgaggucugguggacaucaaauaguauuguggucuuuugcggaacuagcggcaccuaugggacaggauccuggcccgacggugcggauaucaaccugaugccuaucuga

SEQ ID NO: 150266 - RNA, 1413 nt, Artificial Sequence
  derived and/or modified CDS sequence (opt3) from neuraminidase__InfluenzaA__AFJ74639
augaaccccaaucagaagaucauuaccauaggcagcaucuccauugccaucgggauuaucucucugaugcuccaaauaggaaacaucauuucaaucugggcuagucacagcauucagacagguucccagaaucauacuggcaucugcaaccagagaauaauuacguacgagaauaacaccugggugaaucacacauaugucaacaucaauaacacuaauguuguggcagggaaagacaagaccucuguaacacuugccggaaacucgucacuguguagcauuaguggcugggcgaucuacaccaaagauaauuccaucaggauugguucuaagggggacguguucgucauacgggaaccuuuuaucagcugcucccauuuggagugucgcacuuucuuuuuaacacaaggagcucugcuaaacgauaaacacucaaauggcaccgugaaggaccgaaguccauaucgugcccucaugagcugcccgcugggcgaagcacccucuccuuacaacuccaaguucgagucaguugccuggagcgcuagugcaugucaugaugggaugggauggcuuacgauugguaucucuggcccagacaacggggccguggcuguccugaaauauaauggaauaauuacugaaaccaucaaguccuggaaaaagagaaucuugaggacacaggagagcgagugcguguguaugaacggcucgugcuuuacuauuaugaccgauggucccucuaauggggccgcguccuacaaaaucuucaagauugaaaagggaaaaguaacaaagucaauagagcucaacgcaccuaguuuucacuaugaagaguguagcugcuacccagacaccggcacgguuaugugugugugccgggauaauuggcacggcuccaaccgccccugggucucuuucaaucagaaccuggacuaccagaucggguauauuugcagcggaguguuuggugauaauccuagaccaaaagacggcgaggggucauguaacccggugacugucgauggagccgacggcguuaaggguuucaguuacaaauaugggaauggcguguggaucggaaggacaaaguccaaccggcugcgcaaaggcuuugaaaugaucugggaccccaauggguggaccaacacugauagcgacuucucuguaaagcaagauguggucgcuauuacagacuggucaggauacagugguagcuuugugcagcauccugagcucaccggcuuagauugcauacgaccauguuucuggguugaacuggugagagggcuucccagggagaauacgaccaucuggacauccggaucuucgauuagcuucugcggcgucaacuccgacacugccaacuggucauggccugauggugcagaauugccauuuaccaucgacaaguga

SEQ ID NO: 150267 - RNA, 1410 nt, Artificial Sequence
  derived and/or modified CDS sequence (opt3) from neuraminidase__InfluenzaA__AFJ74640
augaaccccaaucagaagaucauuaccauaggcagcgugucccugacaaucucuacuauuugcuucuuuaugcaaaucgccauucucaucacgaccgucacacuucacuucaaacaguacgaguuuaacucaccuccaaauaaccagguuaugcugugugaaccgacuauaaucgagagaaauauuaccgaaaucguguauuugacaaacaccacuauugagaaggaaaucugccccaaauuagcuggguacaggaauuggaguaagccucaguguaacauaacaggauucgcaccauuuagcaaagacaauuccauucggcugucugccgguggcgauaucuggguaacccgcgagcccuaugugucgugcgacccugauaaguguuaccaauucgcgcuagggcagggaacgacucucaacaauguccauucaaacgacaccgugcacgaucgaacaccauaucguacucugcuuaugaaugagcugggcguucccuuucauuuggguaccaaacaggugugcauugcuuggagcaguuccucuugucacgacgggaaggccuggcuccaugucugcgugacaggagaugacgaaaacgcaaccgccagcuucaucuacaauggcagacugguagauuccaucguuucauggaguaagaaaauucugaggacgcaggagagcgaaugugugugcauaaacggcacuuguacagucgugaugaccgacgggucugcuuccggaaaggcagauacuaaaauccucuuuauugaggaggguaagaucgugcacacaucaaccuuaagcggcagugcccaacacgucgaagagugcucuugcuauccucgguacccagggguucgcugugugugcagagacaacuggaagggauccaauaggccgauaguagauauuaacaucaaagacuacagcaucgugucgucuuaugucuguuccggccuggugggugacacgccccggaagaaugauucaaguagcuccucucauugccuugacccuaacaaugaagaagggggacacggcguuaaaggcugggcuuucgaugacgggaacgauguguggaugggacgcaccauuagcgagaaguugcgaucagguuacgagacauuuaaagucaucgagggcuggaguaauccaaacuccaagcugcagauuaauagacaggugauaguagacaaagggaacaggagcggauauucuggcaucuucucaguugaagguaagaguuguauuaaucggugcuuuuacguggagcuaauccgugggcgcaagcaggaaacugagguccucuggaccagcaacuccaucguggucuucuguggcacaucuggaacuuauggcaccgggucguggcccgauggagccgacauuaaucugaugccuauauga

SEQ ID NO: 150268 - RNA, 1413 nt, Artificial Sequence; identical to SEQ ID NO: 150266
  derived and/or modified CDS sequence (opt3) from neuraminidase__InfluenzaA__AFJ74659

SEQ ID NO: 150269 - RNA, 1413 nt, Artificial Sequence
  derived and/or modified CDS sequence (opt3) from neuraminidase__InfluenzaA__AFJ74679
augaaccccaaucagaagaucauuaccauaggcagcaucuccauugccaucgggauuaucucucugaugcuccaaauaggaaacaucauuucaaucugggcuagucacagcauucagacagguucccagaaucauacuggcaucugcaaccagagaauaauuacguacgagaauaacaccugggugaaucacacauaugucaacaucaauaacacuaauguuguggcagggaaagacaagaccucuguaacacuugccggaaacucgucacuguguagcauuaguggcugggcgaucuacaccaaagauaauuccaucaggauugguucuaagggggacguguucgucauacgggaaccuuuuaucagcugcucccauuuggagugucgcacuuucuuuuuaacacaaggagcucugcuaaacgauaaacacucaaauggcaccgugaaggaccgaaguccauaucgugcccucaugagcugcccgcugggcgaagcacccucuccuuacaacuccaaguucgagucaguugccuggagcgcuagugcaugucaugaugggaugggauggcuuacgauugguaucucuggcccagacaacggggccguggcuguccugaaauauaauggaauaauuacugaaaccaucaaguccuggaaaaagagaaucuugaggacacaggagagcgagugcguguguaugaacggcucgugcuuuacuauuaugaccgauggucccucuaauggggccgcguccuacaaaaucuucaagauugaaaagggaaaaguaacaaagucaauagagcucaacgcaccuaguuuucacuaugaagaguguagcugcuacccagacaccggcacgguuaugugugugugccgggauaauuggcacggcuccaaccgccccugggucucuuucaaucagaaccuggacuaccagaucggguauauuugcagcggaguguuuggugauaauccuagaccaaaagacggcgaggggucauguaacccggugacugucgauggagccgacggcguuaaggguuucaguuacaaauaugacaaugggguguggaucggcaggacaaaguccaaccggcugcgcaaaggauuugaaaugaucugggaucccaauggcuggaccaacacugacagcgauuucucuguaaagcaagacguggucgcuauuacagauuggucaggguacagugguagcuuugugcagcauccugagcucaccggauuagacugcauacgaccauguuucuggguugaacuggugagaggccuucccagggagaauacgaccaucuggacauccgggucuucgauuagcuucugcggagucaacuccgauacugccaacuggucauggccugacggcgcagaauugccauuuaccaucgauaaguga

SEQ ID NO: 150270 - RNA, 1410 nt, Artificial Sequence
  derived and/or modified CDS sequence (opt3) from neuraminidase__InfluenzaA__AFJ74680
augaaccccaaucagaagaucauuaccauaggcagcgugucccugacaaucucuacuauuugcuucuuuaugcaaaucgccauucucaucacgaccgucacacuucacuucaaacaguacgaguuuaacucaccuccaaauaaccagguuauacugugugaaccgacuaucauugagagaaauaucaccgaaauuguguauuugacaaacaccacuaucgagaaggaaauaugccccaaauuagcugaguacaggaauuggaguaagccucaguguaacauuacaggguucgcaccauuuagcaaagacaauuccauccggcugucugccggaggugauauuuggguaacccgcgagcccuaugugucgugcgacccugauaaguguuaccaauucgcgcuaggccaggggacgacucucaacaauguccauucaaacgacaccgugcacgaucgaacaccauaucguacucugcuuaugaaugaacugggaguucccuuucauuugggcaccaaacaggugugcaucgcuuggagcaguuccucuugucacgacgguaaggccuggcuccaugucugcgugacaggggaugacgagaacgcaaccgccagcuucaucuacaauggaagacugguagauuccauuguuucauggaguaagaaaauacugaggacgcaggaaagcgagugugugugcaucaacggcacuuguacagucgugaugaccgacggcucugcuuccgggaaggcagauacuaaaauucucuuuaucaaggagggaaagauagugcacacaucaaccuuaagcgguagugcccaacacgucgaagagugcucuugcuauccucgguacccaggcguucgcugugugugcagagacaacuggaaaggguccaauaggccgauuguagauaucaacaucaaggacuacagcauugugucgucuuaugucuguuccggacuggugggcgacacgccccggaaaaaugauucaaguagcuccucucauugccuugacccuaacaaugaagagggugggcacggaguuaagggcugggcuuucgaugacggcaacgauguguggauggggcgcaccaucagcgaaaaauugcgaucaggauacgagacauuuaaggucauugaggguuggaguaauccaaacuccaaacugcagauaaauagacaggugaucguagacaggggcaaccggagcggguauucuggaauuuucucaguugaaggcaagaguuguaucaaucguugcuuuuacguggagcuaauccgcgguagaaagcaggaaacugagguccucuggaccagcaacuccauuguggucuucugugggacaucuggcacuuauggaaccggcucguggcccgauggggccgacauaaaucugaugccuaucuga

SEQ ID NO: 150271 - RNA, 1410 nt, Artificial Sequence
  derived and/or modified CDS sequence (opt3) from neuraminidase__InfluenzaA__AFJ74701
augaaccccaaucagaagaucauuaccauaggcagcgugucccugacaaucgccacuauuugcuuccucaugcaaaucgcuauucuugucacgaccguuacacugcacuuuaaccaguacgaguguaauucuccuccaaacaaucaggugauguugugcgaaccgacuaucauagagagaaacaucaccgaaauuguauauuuaacaaauaccacuaucgagaaagaaauuugucccaagcuggcagaguacaggaucuggucaaaaccucagugcaacauaacaggguucgccccauuuaguaaggacaauagcauucggcuauccgcgggaggugauaucugggugacccgcgagcccuaugucucuugugacccugauaaaugcuaccaauucgcucucggccaggggacgacucugaacaauggacauucgaacgacaccgugcacgaucgaacaccauaucguacucuucugaugaaugaauugggcguucccuuucaucucgguaccagacagguguguauggccuggucaagcaguuccugccacgacgggaaggcauggcugcaugucugugugacaggagaugacgagaacgccaccgcuucuuucauuuacaauggcaggcugguagauagcaucggcuccuggucaaagaaaauccuccggacgcaggaaagugagugcguuuguauuaacgggacuugcacaguggucaugaccgacggaagcgcaucugguaaggccgauacuaaaauauuauuuaucgaggaaggcaagauugugcacaucuccacacugucagggagcgcucaacacguggaggaaugcaguuguuauccucgcuacccaggagucagaugcguuuguagggacaacuggaaaggcucuaaucggccgauaguggauauuaacguaaaggacuacuccaucgugagcucguaugucugcucuggucuugugggggacacgccccgcaagaaugauuccuucucaaguagccauuguuuggacccuaacaaugaggaaggaggccacggcguuaaagggugggccuuugaugacggaaacgauguguggaugggucgaaccaucuccgagaagcugagaucuggcuacgagaccuucaaagucauugaaggguggagcaagccaaauucaaaacuacaggugaacaggcagguaaucguugagcggggaaaucguaguggcuauuccgguauuuuuagcguggaagggaagucuugcauaaaccgcuguuucuacgucgagcucaucagaggcaggaaagaagagacagaggugugguggacuucaaauaguauugucguguuuugcggaaccagcggcacauaugggacuggauccuggcccgacggugcggauaucaaccugaugccuaucuga

SEQ ID NO: 150272 - RNA, 1410 nt, Artificial Sequence
  derived and/or modified CDS sequence (opt3) from neuraminidase__InfluenzaA__AFJ74731
augaaccccaaucagaagaucauuaccauaggcagcgugucccugacaaucucuacuauuugcuucuuuaugcaaaucgccauucucaucacgaccgucacacuucacuucaaacaguacgaguuuaacucaccuccaaauaaccagguuaugcugugugaaccgacuauaaucgagagaaauauuaccgaaaucguguauuugacaaacaccacuauugagaaggaaaucugccccaaauuagcugaguacaggaauuggaguaagccucaguguaacauaacaggguucgcaccauuuagcaaagacaauuccauucggcugucugccggaggugauaucuggguaacccgcgagcccuaugugucgugcgacccugauaaguguuaccaauucgcgcuaggccaggggacgacucucaacaauguccauucaaacgacaccgugcacgaucgaacaccauaucguacucugcuuaugaaugaacugggaguucccuuucauuugggcaccaaacaggugugcauugcuuggagcaguuccucuugucacgacgguaaggccuggcuccaugucugcgugacaggggaugacgagaacgcaaccgccagcuucaucuacaauggaagacugguagauuccaucguuucauggaguaagaaaauucugaggacgcaggaaagcgagugugugugcauaaacggcacuuguacagucgugaugaccgacggcucugcuuccgggaaggcagauacuaaaauccucuuuauugaggaaggaaagaucgugcacacaucaaccuuaagcgguagugcccaacacgucgaggaaugcucuugcuauccucgguacccaggcguucgcugugugugcagagacaacuggaagggguccaauaggccgauaguagauauuaacaucaaagacuacagcaucgugucgucuuaugucuguuccggacuggugggcgacacgccccggaagaccgauucaaguagcuccucucauugccuugacccuaauaacgaggaaggugggcacggaguuaaaggcugggcuuucgaugacggcaaugauguguggauggggcgcacaauuagcgagaaguugcgaucaggauacgagacuuuuaaagucaucgaagguuggaguaacccaaauuccaagcugcagauuaacagacaggugauaguagacaggggcaaucggagcggguauucuggaaucuucucaguugagggcaaaaguuguauuaaccguugcuuuuacguggaacuaauccgcgguagaaaucaggagaccgaaguccucuggacaagcaacuccaucguggucuucugugggacuucuggcaccuauggaacaggcucguggcccgauggggccgagauuaaucugaugccuauauga

SEQ ID NO: 150273 - RNA, 1413 nt, Artificial Sequence; identical to SEQ ID NO: 150266
  derived and/or modified CDS sequence (opt3) from neuraminidase__InfluenzaA__AFJ74766

SEQ ID NO: 150274 - RNA, 1410 nt, Artificial Sequence
  derived and/or modified CDS sequence (opt3) from neuraminidase__InfluenzaA__AFJ74767
augaaccccaaucagaagaucauuaccauaggcagcgugucccugacaaucucuacuauuugcuucuuuaugcaaaucgccauucucaucacgaccgucacacuucacuucaaacaguacgaguuuaacucaccuccaaauaaccagguuaugcugugugaaccgacuauaaucgagagaaauauuaccgaaaucguguauuugacaaacaccacuauugagaaggaaaucugccccaaauuagcugaguacaggaauuggaguaagccucaguguaacauaacaggguucgcaccauuuagcaaagacaauuccauucggcugucugccggaggugauaucuggguaacccgcgagcccuaugugucgugcgacccugauaaguguuaccaauucgcgcuaggccaggggacgacucucaacaauguccauucaaacgacaccgugcacgaucgaacaccauaucguacucugcuuaugaaugaacugggaguucccuuucauuugggcaccaaacaggugugcauugcuuggagcaguuccucuugucacgacgguaaggccuggcuccaugucugcgugacaggggaugacgagaacgcaaccgccagcuucaucuacaauggaagacugguagauuccaucguuucauggaguaagaaaauucugaggacgcaggaaagcgagugugugugcauaaacggcacuuguacagucgugaugaccgacggcucugcuuccgggaaggcagauacuaaaauccucuuuauugaggaaggaaagaucgugcacacaucaaccuuaagcgguagugcccaacacgucgaggaaugcucuugcuauccucgguacccaggcguucgcugugugugcagagacaacuggaagggguccaauaggccgauaguagauauuaacaucaaagacuacagcaucgugucgucuuaugucuguuccggacuggugggcgacacgccccggaagaaugauucaaguagcuccucucauugccuugacccuaacaaugaggaaggugggcacggaguuaaaggcugggcuuucgaugacggcaacgauguguggauggggcgcaccauuagcgagaaguugcgaucaggauacgagacauuuaaagucaucgaagguuggaguaauccaaacuccaagcugcagauuaauagacaggugauaguagacaggggcaaccggagcggguauucuggaaucuucucaguugagggcaaaaguuguauuaaucguugcuuuuacguggaacuaauccgcgguagaaaccaggagacugaaguccucuggaccagcaauuccaucguggucuucugugggacaucuggcacuuauggaaccggcucguggcccgauggggccgacauuaaccugaugccuauauga

SEQ ID NO: 150275 - RNA, 1410 nt, Artificial Sequence; identical to SEQ ID NO: 150274
  derived and/or modified CDS sequence (opt3) from neuraminidase__InfluenzaA__AFJ74783

SEQ ID NO: 150276 - RNA, 1410 nt, Artificial Sequence; identical to SEQ ID NO: 142193
  derived and/or modified CDS sequence (opt3) from neuraminidase__InfluenzaA__AFJ74807

SEQ ID NO: 150277 - RNA, 1410 nt, Artificial Sequence; identical to SEQ ID NO: 142193
  derived and/or modified CDS sequence (opt3) from neuraminidase__InfluenzaA__AFJ74822

SEQ ID NO: 150278 - RNA, 1410 nt, Artificial Sequence; identical to SEQ ID NO: 142762
  derived and/or modified CDS sequence (opt3) from neuraminidase__InfluenzaA__AFJ74834

SEQ ID NO: 150279 - RNA, 1410 nt, Artificial Sequence; identical to SEQ ID NO: 142193
  derived and/or modified CDS sequence (opt3) from neuraminidase__InfluenzaA__AFJ74845

SEQ ID NO: 150280 - RNA, 1413 nt, Artificial Sequence
  derived and/or modified CDS sequence (opt3) from neuraminidase__InfluenzaA__AFJ75039
augaaccccaaucagaagaucauuaccauaggcagcaucuccauugccaucgggauuaucucucugaugcuccaaauaggaaacaucauuucaaucugggcuagucacagcauucagacagguucccagaaucauacuggcaucugcaaccagagaauaauuacguacgaaaauucuaccugggugaacaauacauaugucaacaucaauaacacuucgguuguggcagagaaagacaagaccucaguaacacuugccgggaauagcagucuguguuccauuucuggaugggcgaucuacaccaaagauaacagcaucaggauuggcuccaagggugacguguucgucauacgggagccuuuuaucucaugcagucacuuggaaugucgcacuuucuuuuuaacacaaggggcucugcuaaaugauaaacauagcaacggaaccgugaaggaccgaucuccauaucgugcccucauguccugcccgcugggcgaggcacccucaccuuacaauagcaaguucgaaaguguugccuggucugcuuccgcaugucacgauggcaugggguggcuuacgauuggaaucagcgguccagacaacggcgccguggcuguccugaaauauaacgggauaauuacugagaccaucaagucguggaaaaagagaaucuugaggacacaggagucugaaugcguguguaugaauggauccugcuuuacuauuaugaccgauggccccucaaacgguggggccaguuacaaaaucuucaagauugagaagggaaaaguaacaaagagcauagaacucaaugcgccuaacuuucauuaugaggaguguuccugcuacccagacaccggcacgguuaugugugugugccgggauaauuggcacggcucuaaccgccccugggucagcuucaaucagaaccuggacuaccagaucggguauauuugcucaggaguguuuggugauaauccuagaccaaaagacggcgaagggaguuguaacccggugacuaucgauggagcagacggcgucaaggguuucuccuacaaauaugggaauggcguuuggaucggaaggacaaagagcaaccggcugcgcaaaggcuuugagaugauuugggaccccaauggguggaccaacacugauucugacuucucagugaagcaagauguaguggccauaacagacuggaguggauacagcgguuccuuuguccagcacccugaacucaccggcuuagauugcauccgaccauguuucuggguggagcugguuagagggcuucccagggaaaauacgaccauuuggacaucuggaucgagcaucuccuucugcggcgugaacucagacacugcuaacuggaguuggccugauggugccgaguugccauuuaccauugacaaguga

SEQ ID NO: 150281 - RNA, 1410 nt, Artificial Sequence
  derived and/or modified CDS sequence (opt3) from neuraminidase__InfluenzaA__AFJ75050
augaaccccaaucagaagaucauuaccauaggcagcgugucccugacaaucucuacuauuugcuucuuuaugcaaaucgccauucucaucacgaccgucacacuucacuucaaacaguacgaguuuaacucaccuccaaauaaccagguuaugcugugugaaccgacuauaaucgagagaaauauuaccgaaaucguguauuugacaaacaccacuauugagaaggaaaucugccccaaauuagcugaguacaggaauuggaguaagccucaguguaacauaacaggguucgcaccauuuagcaaagacaauuccguacggcugucugccggaggugauauuugggugacccgcgagcccuaugucucgugcgacccugauaaguguuaccaauucgcgcuaggccaggggacgacucucaacaaugugcauucaaacgacaccguucacgaucgaacaccauaucguacucugcuuaugaaugaacugggagugcccuuucauuugggcaccaagcaggucugcaucgcuuggagcaguuccucuugucacgacgguaaagccuggcuccaugugugcguaacaggggaugacaagaacgcaaccgccagcuucauuuacaauggaagacugguugauuccaucgugucauggaguaaagagauccugaggacgcaggaaagcgagugugucugcauuaacggcacuuguacaguggugaugaccgacggcucugcuuccgggaaggcagauacuaaaauacucuuuaucgucgagggaaagauuguucacacaucagccuuaagcgguagugcucaacacguggaagagugcucuugcuauccucgguacccaggcguacgcugugugugcagagacaacuggaagggguccaauaggccgaucgucgauauaaacauuaaagacuacagcaucgugucgucuuauguuuguuccggacuggugggcgacacgccccggaagaaugauucaaguagcuccucucauugccuugacccuaacaaugaagagggugggcacggagucaaaggcugggccuucgaugacggcaacgauguguggauggggcgcaccaucagcgaaaaguugcgaucaggauacgagaccuuuaaaguaauugaggguuggaguaauccaaacuccaagcugcagaucaauagacagguuauuguggacaggggcaaccggagcggguauucuggaauauucucagucgaaggcaaaaguuguaucaaucguugcuuuuacguggagcuaauucgcgguagaaaggaagagacagaaguccucuggacuagcaacuccaucgugguuuucugugggaccucuggcacauauggaacuggcucguggcccgauggggcggacaucaaucugaugccuauuuga

SEQ ID NO: 150282 - RNA, 1410 nt, Artificial Sequence
  derived and/or modified CDS sequence (opt3) from neuraminidase__InfluenzaA__AFJ75094
augaaccccaaucagaagaucauuaccauaggcagcgugucccugacaaucucuacuauuugcuucuuuaugcaaaucgccauucucaucacgaccgucacacuucacuucaaacaguacgaguuuaacucaccuccaaauaaccagguuaugcugugugaaccgacuauaaucgagaagaauauuaccgaaaucguguauuugacaaacaccacuauugagaaagaaaucugccccaaguuagcugaguacagaaauuggaguaaaccucagugugacauaacaggguucgcaccauuuagcaaggauaacuccauuaggcugucugccggaggugacaucuggguaacccgggagcccuaugugucgugcgauccugacaaguguuaccaauucgcgcuaggccaggggacgacucucaauaacguccauucaaaugauaccgugcgcgaccgaacaccauaucguacucugcuuaugaacgaacugggaguucccuuucacuugggcaccaaacaggugugcauugcuuggagcaguuccucuugucaugaugguaaggccuggcuccacgucugcaucacaggggacgauaaaaaugcaaccgccagcuucaucuacaacggaagacugguggacuccauuguaucauggaguaaggagauacugaggacgcaggaaagcgaguguguuugcaucaauggcacuuguacaguggucaugaccgauggcucugcuuccgggaaagcagacacuaagauucucuuuaucgaggaaggaaagauagugcauacaucaaccuuaagcgguagugcccaacacguggaggaaugcucuugcuauccucgguacccaggcguccgcuguguuugcagagauaacuggaaaggguccaacaggccgauuguggacaucaauaucaaggaccacagcauuguaucgucuuacguguguuccggacuggucggcgauacgccccggaaaaacgacucaaguagcuccucuaauugccuugauccuaacaaugaggaaggugggcauggagugaagggcugggcuuucgacgauggcaacgacguuuggauggggcgcaccaucagcgagaaaucacgauugggauaugagacauuuaaggugauugaagguuggaguaauccaaacuccaaacugcagauaaauagacaggucaucguggauaggggcaaccggagcggguacucuggaauuuucucaguagagggcaagaguuguaucaaucguugcuuuuauguugaacuaauccgcgguagaaaggaggaaauugaggugcucuggacuagcaacuccauagucguguucugugggaccucuggcacauacggaacuggcucguggcccgacggggccgauaucaauauuaugccuaucuga

SEQ ID NO: 150283 - RNA, 1413 nt, Artificial Sequence
  derived and/or modified CDS sequence (opt3) from neuraminidase__InfluenzaA__AFJ75104
augaaccccaaucagaagaucauuaccauaggcagcaucuccauugccaucgggauuaucucucugaugcuccaaauaggaaacaucauuucaaucugggcuagucacagcauucagacagguucccagaaucauacuggcaucugcaaccagagaauaauuacguacgaaaauucuaccugggugaaccacacauaugucaauaucaacaauacuaacguuguggcagggaaagacaagaccccuguaacacuugccggaaauucgucacuguguagcauuaguggcugggcgauccauaccaaagauaacuccaucaggauugguucuaagggggacguguucgucauacgggagccauuuaucagcugcucccacuuggaguguaaaacuuucuuuuuaacacaaggagcucugcuaaaugauaagcauucaaacggcaccgugaaggaccgcaguccguaccgagcccucaugagcugcccccugggcgaagcaccuucuccauauaauuccaaauucgagucaguugccuggagcgcuagugcaugucacgaugggauuggauggcuuacgaucgguauaucuggccccgacaacggggccguggcuguccugaaguacaacggaauuaucacuggcaccaucaaauccuggaagaaacagauuuugcguacacaggaaagcgagugcguguguaugaaugguucgugcuuuacuaucaugaccgaugggccuucuaacggagccgcguccuauaagauuuucaagauagagaaaggcaagguaacaaaaucaauggaacucaaugcaccaaacuuucacuacgaggaauguaguugcuaucccgacaccggcacgguuaugugugugugcagagauaauuggcaugggagcaacaggccuugggucuccuucaaucagaaccuggacuaccaaaucggauacauuugcucugguguguuuggcgauaauccacggccggaggacggggagggaagcuguaaccccgugacugucgauggcgccaaugguguuaagggguucucauauaaauacggcaacggaguguggaucggccgcacaaagaguaauagaaucaggaaaggguuugaaaugauuugggacccuaacggauggaccaauacugacuccgauuucagcguaaagcaggacauaguggcuaucacagauuggucugguuauucaggcaguuuuguccagcacccagagcugaccgggcucgacugcauucggcccuguuucuggguggaauuaguucgcggacugccucgagagaacacgaccaucuggacaagcggcuccucuauuucguucugcggugugaacagcgauaucgccaauugguccuggccagacggggcagaacuucccuuuacuauagauaaguga

SEQ ID NO: 150284 - RNA, 1410 nt, Artificial Sequence; identical to SEQ ID NO: 143932
  derived and/or modified CDS sequence (opt3) from neuraminidase__InfluenzaA__AFJ75114

SEQ ID NO: 150285 - RNA, 1410 nt, Artificial Sequence; identical to SEQ ID NO: 143932
  derived and/or modified CDS sequence (opt3) from neuraminidase__InfluenzaA__AFJ75452

SEQ ID NO: 150286 - RNA, 1410 nt, Artificial Sequence; identical to SEQ ID NO: 143932
  derived and/or modified CDS sequence (opt3) from neuraminidase__InfluenzaA__AFJ75463

SEQ ID NO: 150287 - RNA, 1413 nt, Artificial Sequence; identical to SEQ ID NO: 150283
  derived and/or modified CDS sequence (opt3) from neuraminidase__InfluenzaA__AFJ75552

SEQ ID NO: 150288 - RNA, 1413 nt, Artificial Sequence
  derived and/or modified CDS sequence (opt3) from neuraminidase__InfluenzaA__AFJ75574
augaaccccaaucagaagaucauuaccauaggcagcaucuccauugccaucgggauuaucucucugaugcuccaaauaggaaacaucauuucaaucugggcuagucacagcauucagacagguucccagaaucauacuggcaucugcaaccagagaauaauuacguacgaaaauucuaccugggugaaccacacauaugucaauaucaacaauacuaacguuguggcagggaaagacaagaccccuguaacacuugccggaaauucgucacuguguagcauuaguggcugggcgauccauaccaaagauaacuccaucaggauugguucuaagggggacguguucgucauacgggagccauuuaucagcugcucccacuuggaguguaaaacuuucuuuuuaacacaaggagcucugcuaaaugauaagcauucaaacggcaccgugaaggaccgcaguccguaccgagcccucaugagcugcccccugggcgaagcaccuucuccauauaauuccaaauucgagucaguugccuggagcgcuagugcaugucacgaugggauuggauggcuuacgaucgguauaucuggccccgacaacggggccguggcuguccugaaguacaacggaauuaucacuggcaccaucaaauccuggaagggucagauuuugcguacacaggaaagcgagugcguguguaugaaugggucgugcuuuacuaucaugaccgauggaccuucuaacggcgccgcguccuauaaaauuuucaagauagagaagggcaaaguaacaaagucaauggaacucaaugcaccaaacuuucacuacgaggaauguaguugcuaucccgacaccgggacgguuaugugugugugcagagauaauuggcauggaagcaacaggccuugggucuccuucaaucagaaccuggacuaccaaaucgguuacauuugcucuggcguguuuggggauaauccacggccggaggacggagagggcagcuguaaccccgugacugucgauggugccaaugggguuaaaggcuucucauauaaguacggaaacggcguguggaucgggcgcacaaaaaguaauagaaucaggaagggauuugaaaugauuugggacccuaacgguuggaccaauacugacuccgauuucagcguaaaacaggacauaguggcuaucacagauuggucuggcuauucagggaguuuuguccagcacccagagcugaccggacucgacugcauucggcccuguuucuggguggaauuaguucgcggccugccucgagagaacacgaccaucuggacaagcgguuccucuauuucguucugcggggugaacagcgauaucgccaauugguccuggccagacggcgcagaacuucccuuuacuauagauaaguga

SEQ ID NO: 150289 - RNA, 1410 nt, Artificial Sequence; identical to SEQ ID NO: 143932
  derived and/or modified CDS sequence (opt3) from neuraminidase__InfluenzaA__AFJ75585

SEQ ID NO: 150290 - RNA, 1410 nt, Artificial Sequence
  derived and/or modified CDS sequence (opt3) from neuraminidase__InfluenzaA__AFJ75596
augaaccccaaucagaagaucauuaccauaggcagcgugucccugacaaucucuacuauuugcuucuuuaugcaaacggccauccucauuaccacagucacucuucacuucaaacaguacgaguuuaacucaccuccaaauaaccagguuaugcugugugaaccgaccaucauagagagaaauaucacagaaauuguguauuugaccaacacuacaaucgagaaggaaauuugccccaaauuagcugaguacaggaauuggaguaagccucagugugggaucaccggauucgcaccauuuagcaaagacaacuccauacggcugucugccgguggcgauauuuggguaacgcgcgagcccuaugugucgugcgacccugauaaguguuaccaauucgcgcuagggcagggaacuacccucaauaacguccauucaaauaacacagugcgagaccguacuccauauagaacccugcuuaugaaugaacugggcguucccuuucacuuggguacaaaacaggugugcaucgcuuggagcaguuccucuugucaugaugggaaggccuggcuccacgucugcauuaccggagacgauaagaacgcaacggccagcuucaucuacaauggcaggcugguggacuccaucguaucauggaguaaagagauucugcggacucaggaaagcgaguguguuugcauaaacggcacauguaccguggucaugacugaugggucugcuuccggaaaggcagacacaaaaauccucuuuauugaggaagguaagaucgugcauaccucaacguuaagcggcagugcccaacacguggaggaaugcucuugcuauccucgcuacccaggggucagauguguuugcagggauaacuggaagggauccaaucggccgauaguggacauuaacaucaaagaucacagcaucguaucgucuuacguguguuccggccuggucggugacacaccccgcaagaaugacucaaguagcuccucucauugccuugauccuaacaaugaggaagggggacacggcgugaaaggcugggcuuucgacgaugggaacgacguuuggaugggacgaaccauuagcgagaagucaagauuggguuaugagacuuuuaaagugaucgaaggcuggaguaauccaaaguccaaacugcagauuaacaggcaggucauaguggaucgggggaaucguagcggauacucuggcaucuucucaguagaggguaagaguuguauuaaccgcugcuuuuauguugaacuaaucagagggaggaaggaggaaaccgaggugcucuggacaagcaauuccaucgucguguucuguggcacuucuggaaccuacggcacagggucguggcccgacggagccgauauuaaccugaugccuauauga

SEQ ID NO: 150291 - RNA, 1410 nt, Artificial Sequence
  derived and/or modified CDS sequence (opt3) from neuraminidase__InfluenzaA__AFJ75607
augaaccccacccagaagaucauuacaauaggcagcgugucccugacuaucucuacgauuugcuucuuuaugcaaaccgccauccucauuacaacugucacccuucacuucaaacaguacgaguuuaauucaccuccaaacaaucagguuaugcugugugaaccgacaaucauagagagaaacaucaccgaaauuguguauuugacuaauacaaccaucgagaaggaaauuugccccaaauuagcugaguacaggaacuggaguaagccucagugugacaucacgggguucgcaccauuuagcaaagauaauuccauacggcugucugccggaggugacauuuggguaacucgcgagcccuaugugucgugcgauccugaaaaguguuaccaauucgcgcuaggccaggggaccacacucaacaauguccauucaaacaauacugugcgagaccguaccccauauagaacacugcuuaugaacgagcugggaguucccuuucacuugggcaccaaacaggugugcaucgcuuggagcaguuccucuugucaugaugguaaggccuggcuccacgucugcauuacgggggacgauaagaaugcaacugccagcuucaucuacaacggaaggcugguggacuccaucguaucauggaguaaagaaauucugcggacacaggagagcgaguguguuugcauaaauggcaccuguacuguggucaugacagauggcucugcuuccgggaaggcagacaccaaaauccucuuuauugaagagggaaagaucgugcauacgucaaaguuaagcgguagugcccaacacguggaagagugcucuugcuauccucgcuacccaggcgucagauguguuugcagggauaacuggaaaggguccaaccggccgauaguggacauuaauaucaaggaucacagcaucguaucgucuuacguguguuccggacuggucggcgacacaccccgcaaaaacgacucaagugguagcucccauugccuugauccuaauaacgaagaagggggacacggcgugaagggcugggcuuucgacgaugggaaugacguuuggaugggacgaaccauuucugagaaaagcagauuggguuaugagacuuuuaaggugaucgagggcuggucaaacccaaaaaguaagcugcagauuaauaggcaggucauaguggaucgggggaaccguuccggauacagcggcaucuucucuguagaagguaagucauguauuaaucgcugcuuuuauguugagcuaaucagagggaggaaagaagagaccgaggugcucuggacaaguaacagcaucgucguguucuguggcacuuccggaaccuacggcacagggucuuggcccgacggagccgauauuaaucugaugccuauauga

SEQ ID NO: 150292 - RNA, 1410 nt, Artificial Sequence
  derived and/or modified CDS sequence (opt3) from neuraminidase__InfluenzaA__AFJ75633
augaaccccaaucagaagaucauuaccauaggcagcgugucccugacaaucucuacuauuugcuucuuuaugcagaucgccauucucaucacgaccgucacacuucacuucaaacaguacgaguuuaacucaccuccaaauaaccagguuaugcugugugaaccgacuauaaucgagagaaauauuaccgaaaucguguauuugacaaacaccacuauugagaaggaaaucugccccaaauuagcugaguacaggaauuggaguaagccucagugugacauaacaggguucgcaccauuuagcaaagauaacuccauucggcugucugccggaggugacaucuggguaacccgcgagcccuaugugucgugcgauccugacaaguguuaccaauucgcgcuaggccaggggacgacucucaauaacguccauucaaaugauaccgugcgagaccguacaccauauagaacucugcuuaugaacgaacugggaguucccuuucacuugggcaccaaacaggugugcauugcuuggagcaguuccucuugucaugaugguaaggccuggcuccacgucugcaucacaggggacgauaagaaugcaaccgccagcuucaucuacaacggaaggcugguggacuccguaguuucauggaguaaagauauucugcggacgcaggagagcgaaugugugugcauaaauggcacuuguacagucgugaugaccgacggcucugcuuccgggaaggcagauacuaaaauccucuuuauugaggagggaaagaucgugcauacaucaaccuuaagcgguagugcccaacacgucgaagagugcucuugcuauccucgcuacccaggcguuagaugugugugcagggacaacuggaagggguccaaccggccgauaguagacauuaauaucaaaaaccacagcaucgugucgucuuacgucuguuccggacuggugggcgauacgccccgcaagaaugacucaaguagcuccucucauugccuugauccuaacaaugaagagggugggcacggaguuaaaggcugggcuuucgacgauggcaacgacguguggauggggcgaaccauuagcgaaaagucaagauugggauaugagacauuuaaagucaucgaggguuggaguaauccaaaguccaaacugcagauuaacaggcaagugauaguagaucggggcaaucguagcggguacucuggaaucuucucaguugaaggcaagaguuguauuaaccgcugcuuuuauguggagcuaaucagagguaggaaggaagagacugaaguccucuggaccagcaauuccaucguggucuucugugggacaucuggcacuuacggaaccggcucguggcccgacggggccgauauuaaccugaugccuauauga

SEQ ID NO: 150293 - RNA, 1413 nt, Artificial Sequence; identical to SEQ ID NO: 145509
  derived and/or modified CDS sequence (opt3) from neuraminidase__InfluenzaA__AFJ75654

SEQ ID NO: 150294 - RNA, 1410 nt, Artificial Sequence; identical to SEQ ID NO: 143932
  derived and/or modified CDS sequence (opt3) from neuraminidase__InfluenzaA__AFJ75665

SEQ ID NO: 150295 - RNA, 1413 nt, Artificial Sequence
  derived and/or modified CDS sequence (opt3) from neuraminidase__InfluenzaA__AFJ75676
augaaccccaaucagaagaucauuaccauaggcagcaucuccauugccaucgggauuaucucucugaugcuccaaauaggaaacaucauuucaaucugggcuagucacagcauucagacagguucccagaaucauacuggcaucugcaaccagagaauaauuacguacgaaaauucuaccugggugaaccacacauaugucaauaucaacaauacuaacguuguggcagggaaagacaagaccccuguaacacuugccggaaauucgucacuguguagcauuaguggcugggcgauccauaccaaagauaacuccaucaggauugguucuaagggggacguguucgucauacgggagccauuuaucagcugcucccacuuggaguguaaaacuuucuuuuuaacacaaggagcucugcuaaaugauaagcauucaaacggcaccgugaaggaccgcaguccguaccgagcccucaugagcugcccccugggcgaagcaccuucuccauauaauuccaaauucgagucaguugccuggagcgcuagugcaugucacgaugggauuggauggcuuacgaucgguauaucuggccccgacaacggggccguggcuguccugaaguacaacggaauuaucacuggcaccaucaaauccuggaagaaacagauuuugcguacacaggaaagcgagugcguguguaugaaugguucgugcuuuacuaucaugaccgaugggccuucuaacggagccgcguccuauaagauuuucaagauagagaaaggcaagguaacaaaaucaauggaacucaaugcaccaaacuuucacuacgaggaauguaguugcuaucccgacaccggcacgguuaugugugugugcagagauaauuggcaugggagcaacaggccuugggucuccuucaaucagaaccuggacuaccaaaucggauacauuugcucugguguguuuggcgauaauccacggccgaaggacggggagggaagcuguaaccccgugacugucgauggcgccaaugguguuaaaggguucucauauaaguacggcaacggaguguggaucggccgcacaaaaaguaauagaaucaggaagggguuugagaugauuugggacccuaacggauggaccaauacugacuccgauuucagcguaaagcaggacauaguggcuaucacagauuggucugguuauucaggcaguuuuguccagcacccagaacugaccgggcucgacugcauucggcccuguuucuggguggaguuaguucgcggacugccucgagaaaacacgaccaucuggacaagcggcuccucuauuucguucugcggugugaacagcgauaucgccaauugguccuggccagacggggcagagcuucccuuuacuauagauaaauga

SEQ ID NO: 150296 - RNA, 1413 nt, Artificial Sequence; identical to SEQ ID NO: 145509
  derived and/or modified CDS sequence (opt3) from neuraminidase__InfluenzaA__AFJ75687

SEQ ID NO: 150297 - RNA, 1410 nt, Artificial Sequence; identical to SEQ ID NO: 144786
  derived and/or modified CDS sequence (opt3) from neuraminidase__InfluenzaA__AFJ76122

SEQ ID NO: 150298 - RNA, 1410 nt, Artificial Sequence; identical to SEQ ID NO: 149364
  derived and/or modified CDS sequence (opt3) from neuraminidase__InfluenzaA__AFJ76134

SEQ ID NO: 150299 - RNA, 1410 nt, Artificial Sequence; identical to SEQ ID NO: 144786
  derived and/or modified CDS sequence (opt3) from neuraminidase__InfluenzaA__AFJ76146

SEQ ID NO: 150300 - RNA, 1410 nt, Artificial Sequence; identical to SEQ ID NO: 144786
  derived and/or modified CDS sequence (opt3) from neuraminidase__InfluenzaA__AFJ76159

SEQ ID NO: 150301 - RNA, 1410 nt, Artificial Sequence; identical to SEQ ID NO: 144786
  derived and/or modified CDS sequence (opt3) from neuraminidase__InfluenzaA__AFJ76173

SEQ ID NO: 150302 - RNA, 1410 nt, Artificial Sequence; identical to SEQ ID NO: 144786
  derived and/or modified CDS sequence (opt3) from neuraminidase__InfluenzaA__AFJ76191

SEQ ID NO: 150303 - RNA, 1413 nt, Artificial Sequence
  derived and/or modified CDS sequence (opt3) from neuraminidase__InfluenzaA__AFJ76192
augaaccccaaucagaagaucauuaccauaggcagcaucuccauugccaucgggauuaucucucugauggugcaaauaggaaacaucauuucaaucugggcuagucacagcauucagacagguauccagaauaacacuggcauaugcaaucagagaauuaucacguacgagaacuccaccugggucaaucauacauauguuaacauuaauaacacuaaugugguagcaggggaagacaaaaccucugugacacucgccggaaacucgucacuuuguagcaucaguggcugggcgaucuacaccaaggauaauuccauuaggauagguucuaaaggggacgucuucgugauccgggagccuuuuauuagcugcucccaccuggaaugucgcacuuucuuuuugacacaaggagcuuuacugaacgauaagcauucaaauggcaccguuaaagaccgaaguccauaucgugcccuaaugagcugcccgcucggcgaggcacccucuccuuacaacuccaaguucgaaucaguggccuggagcgcuagugcaugucacgaugggaugggauggcugacgaucgguauaucuggcccagacaacggggccgucgcugugcuuaaguauaauggaauuaucacuggcaccaucaaauccuggaagaaacagauucugagaacacaggagagcgagugcguauguaugaacgguucgugcuuuacuaucaugaccgaugggcccucuaauaaggccgcguccuacaaaauuuucaagauagaaaagggaaaaguuacaaagucaaucgaguugaacgcaccuaauuuuuauuacgaagaguguaguugcuacccagacaccggcauugugaugugugucugcagggauaacuggcauggcagcaaucggcccuggguguccuucaaccagaaucucgacuaucaaaucggguacaucugcucuggaguguuuggugauaacccucgcccagaggacggcgaagggagcuguaauccggucacgguugauggagccaacggcgugaaagguuucucauauaaguacgggaauggcguauggauuggaagaacuaaaaguaacaggcugcggaagggcuuugagaugauaugggaccccaauggguggacaaacaccgacuccgauuucagcgugaaacaggacgucguggcuaucacugauuggucuggauauucagguaguuuuguucagcacccugaacugacaggccucgacugcauucgcccauguuucuggguggaguuaguccgagggcugcccagagaaaacaccacgaucuggaccagcggauccucuauuucguucugcggcgugaauagcgauacagccaacugguccuggccugacggugcagagcuuccauuuacuaucgauaaguga

SEQ ID NO: 150304 - RNA, 1410 nt, Artificial Sequence; identical to SEQ ID NO: 144786
  derived and/or modified CDS sequence (opt3) from neuraminidase__InfluenzaA__AFJ76206

SEQ ID NO: 150305 - RNA, 1410 nt, Artificial Sequence
  derived and/or modified CDS sequence (opt3) from neuraminidase__InfluenzaA__AFJ76216
augaaccccaaucagaagaucauuaccauaggcagcgugucccugacaaucgccacuauuugcuuccucaugcaaaucgcuauucuugucacgaccguuacacugcacuuuaaacagcaugaguguaacucuccuccaaauaaccaggugauguugugcgaaccgacuaucauaaagagaaauaucaccgagauuguauacuuaacaaacaccacuaucgaaaaagagauuugucccaagcuggcagaauauaggaauuggucaaaaccucagugcaacaucacaggguucgccccauuuaguaaggacaauagcauacggcuauccgcgggaggugauauuugggugacccgcgagcccuacgucucuugugacccugauaagugcuaucaauucgcucucggccaggggacgacucugaacaauggacacucgaacgacaccgugcaugaucgaacaccauaccguacucuucugaugaaugaguugggcguucccuuucaccucgguaccagacagguguguaucgccuggucaagcaguuccugccaugacgggaaagcauggcugcacgucugugugacaggagaugacaagaacgccaccgcuucuuucauuuauaauggcaggcugguagauagcaucggcuccuggaguaaaaagauccuccggacgcaggaaucagagugcguuuguauuaacgggacuugcacaguggucaugaccgacggaagcgcaucugguaaagccgauacuaagauauuauuuaucgaagagggcaagauugugcacaucuccacacugucagggagcgcucaacauguggaggaaugcaguuguuacccucgcuauccaggagucagaugcguuuguagggacaacuggaaaggcucuaaucggccgauaguggauauuaacguaaaggacuacuccaucgugagcucguacgucugcucuggucuugugggggacacccccaggaaaaaugauuccuucucaaguagccacuguuuggacccuaacaaugaggaaggaggccauggcguuaaggggugggccuuugaugacggaaacgauguguggaugggucgaacgaucuccgagaaacugagaucuggcuaugaaaccuucaaggucauugagggguggagcaaaccaaauucaaagcuacagaucaaccgccaggugauuguagagcggggaaaucguaguggcuacuccgguauauuuagcguugaagggaagucuugcaucaaccgcuguuucuauguggagcucauuagaggcaggaaagaagagacagaagucugguggacuucaaauaguaucguggucuuuugcggaaccagcggcacauacgggacuggauccuggcccgacggugcggauaucaaccugaugccuauuuga

SEQ ID NO: 150306 - RNA, 1410 nt, Artificial Sequence
  derived and/or modified CDS sequence (opt3) from neuraminidase__InfluenzaA__AFJ77411
augaaccccaaucagaagaucauuaccauaggcagcgugucccugacaaucgccacuauuugcuuccucaugcaaaucgucauucuuguuacgaccgugacacugcacuuuaaacaguacgaguguaacucuccuccaaauaaccagguaauguugugcgaaccgacuaucauagagagaaauaucaccgaaauuguguauuuaacaaacaccacuaucgagaaggaaauuugucccaaacuggcugaguacaggaauuggucaaagccucagugcaaaaucacaggguucgcaccauuuaguaaggacaacagcauacggcuauccgccggaggugauauuugggucacccgcgagcccuaugugucuugugacccuggcaagugcuaccaauucgcgcucgggcagggaacgacucugaauaaccgacauucgaaugauaccguucacgaccguacaccauauagaacucuucugaugaacgaauugggcgugcccuuucaucucgguaccaaacaggucuguaucgcuuggucaagcaguuccugccacgaugggaaggccuggcugcauguguguguaacaggacacgacgagaaugcaaccgccucuuucauuuacgauggcaggcugguugacagcaucggcuccuggaguaaaaacauccuccggacgcaggaaucagagugcguguguauuaaugggacuugcacagucgugaugaccgauggaagcgcuucugagcgcgcagacacuaagauauuauuuaucgaagaggguaaaauugugcacaucuccccucugucaggcagcgcccaacaugucgaagagugcaguuguuauccaagauacccggggguuaggugcgugugucgggauaacuggaagggaucuaaccgccccauaguagacauuaaugugaaggauuacuccaucgucagcucguaugugugcucuggccuuguuggugacacaccucgaaagaacgacuccucaaguagcuccuacuguuugaauccaaacaaugaagaagggggacacggcgugaaaggcugggcuuucgaugacgggaacgaugucuggaugggaagaaccaucucugagaaacugaggagcgguuaugagacguuuaaggugauuggcggguggucaaaacccaauaguaagcuacagaucaaccggcagguaauuguugaccguggaaaucgcuccggcuacagcgguauauucucuguggaggggaaaucaugcgucaacagauguuuuuauguggaacucaucaggggccggaagcaggagaccgaagucugguggacaaguaauagcauugugguuuucugcggaacuuccggcaccuacgggacaggaucuuggccugauggugccgacaucaaccugaugccaaucuga

SEQ ID NO: 150307 - RNA, 1410 nt, Artificial Sequence
  derived and/or modified CDS sequence (opt3) from neuraminidase__InfluenzaA__AFJ77422
augaaccccaaucagaagaucauuaccauaggcagcgugucccugacaaucgccacuauuugcuuccucaugcaaaucgcuauucuugucaucacgguuacccugcacuuuaaacaguacgaguguaacucuccuccaaauaaccaggugauguugugcgaaccgacaauaaucgagagaaauauuacugaaaucguauauuuaaccaacacaaccauugagaaggaaaucugucccaaacuggcagaguacaggaauuggucaaagccucagugcaaaauaacuggguucgccccauuuaguaaggacaacagcauucggcuauccgcgggaggugauaucugggugacacgcgagcccuaugucucuugugacccugauaagugcuaccaauucgcucucggccaggggaccacgcugaauaaccgacauucgaaugacacugugcacgaucguaccccauauagaacacuucugaugaacgaauugggaguucccuuucaucucggcacuaaacagguguguauugccuggucaagcaguuccugccacgacgguaaggcauggcugcaugucugugugaccgggcacgaugagaaugccacagcuucuuucaucuacgacggaaggcugguagauagcaucggcuccuggaguaaaaagauucuccggacccaggaaucagagugcguuuguauaaacggcacgugcacuguggucaugacagacgggagcgcaucuggacgcgccgauaccaaaaucuuauuuauugaggaagguaagaucgugcacauauccccucugucaggcagcgcucaacauguggaggaaugcaguuguuauccaagauacucuggggucaggugcguuugucgggacaauuggaagggauccaaccgcccgauuguggauaucaacguaaaagacuacagcaucgugucgucuuucgucugcuccggccuugugggugacacuccccgaaagaaugauucaaguagcuccucucacuguuugaacccuaauaacgaggaagggggacauggcguuaaaggcugggccuuugacgaugggaaugacguguggaugggaagaacaauuagcgagaagcugaggucagguuaugagaccuucaaagucaucggcggguggaguaagccaaacuccaaacuacagauuaaucgucaggugauaguagaucggggaaaccgcagcggcuacucugguaucuuuucaguugaagggaagaguugcauuaauagauguuucuauguggagcucaucaggggccggaagcaggaaacggaggucugguggaccagcaacuccaucguggucuuuugcggaacaucuggcacuuacgggaccggaucguggcccgacggugcggauauuaaucugaugccuauauga

SEQ ID NO: 150308 - RNA, 1410 nt, Artificial Sequence
  derived and/or modified CDS sequence (opt3) from neuraminidase__InfluenzaA__AFJ77433
augaaccccaaucagaagaucauuaccauaggcagcgugucccugacaaucgccacuauuugcuuccucaugcaaaucgucauucuuguuacgaccgugacacugcacuuuaaacaguacgaguguaacucuccuccaaauaaccagguaauguugugcgaaccgacuaucauagagagaaauaucaccgaaauuguguauuuaacaaacaccacuaucgagaaggaaauuugucccaaacuggcugaguacaggaauuggucaaagccucagugcaaaaucacaggguucgcaccauuuaguaaggacaacagcauacggcuauccgccggaggugauauuugggucacccgcgagcccuaugugucuugugacccuggcaagugcuaccaauucgcgcucgggcagggaacgacucugaauaaccgacauucgaaugauaccguucacgaccguacaccauauagaacucuucugaugaacgaauugggcgugcccuuucaucucgguaccaaacaggucuguaucgcuuggucaagcaguuccugccacgaugggaaggccuggcugcauguguguguaacaggacacgacgagaaugcaaccgccucuuucauuuacgauggcaggcugguugacagcaucggcuccuggaguaaaaacauccuccggacgcaggaaagugagugcguguguauuaaugggacuugcacagucgugaugaccgauggaagcgcuucugagcgcgcagacacuaagauauuauuuaucgaagaggguaaaauugugcacaucuccccucugucaggcagcgcccaacaugucgaagagugcaguuguuauccaagauacccggggguuaggugcgugugucgggauaacuggaagggaucuaaccgccccauaguagacauuaaugugaaggauuacuccaucgucagcucguaugugugcucuggccuuguuggugacacaccucgaaaaaccgacuccucaaguagcuccgauuguuugaacccaaauaacgaagaagggggacacggcgugaagggcugggcuuucgacgaugggaaugacgucuggaugggaagaacgaucucugagaaacugaggagcgguuacgagaccuuuaaggugauuggcggguggucaaaacccaacaguaagcuacagaucaaucggcagguaauuguugaucguggaaaccgcuccggcuauagcgguauauucucuguggaggggaaaucaugcgucaauagauguuuuuacguggaacucaucaggggccggaagcaggagacagaagucugguggacuucaaacagcauugugguuuucugcggaaccuccggcacauaugggacuggaucuuggccugacggugccgauaucaaucugaugccaaucuga

SEQ ID NO: 150309 - RNA, 1410 nt, Artificial Sequence
  derived and/or modified CDS sequence (opt3) from neuraminidase__InfluenzaA__AFJ77443
augaaccccaaucagaagaucauuaccauaggcagcgugucccugacaaucgccacuauuugcuuccucaugcaaaucgcuauucuugucaucacgcugaccuugcacuuuaaacaguacgaguguaacucuccuccaaauaaccagguuauguuaugcgaaccgacaauaaucgagagaaauauuacugaaaucguguaucugaccaacacaaccauugagaaggaaaucugucccaaacuagcagaguacaggaauuggucaaagccucagugcaaaauaacuggguucgccccauuuaguaaggacaacagcauucggcucuccgcgggaggugauaucuggguaacacgcgagcccuaugugucuugugacccuggcaagugcuaccaauucgcucuggggcagggaaccacgcuuaauaaccgacauucgaaugauacuguccacgaccguaccccauauagaacacuguugaugaacgaacucggcgugcccuuucaucuggguacuaaacagguuuguauugccuggucaagcaguuccugccacgaugggaaggcauggcugcaugugugugucaccggacacaaugagaacgccacagcuucuuucaucuacgacggcaggcucguggauagcaucggcuccuggaguaaaaauauuuuacggacccaggaaucagagugcguauguauaaacgggacgugcacuguugugaugacagacggaagcgcaucuggucgcgccgauaccaagauccuguuuauugaggaaggcaaaaucguccacauauccccucuuucagggagcgcucaacauguggaggaaugcaguuguuauccaagauacccgggagugaggugcgucugucgggacaacuggaagggcucuaaucgccccauuguugauaucaacgugaaggacuucuccaucguaagcucguacgugugcucugguuuggucggggauacuccucgaaagaaugacuccucaaguagcucccacugucugaacccaaauaacgaggaaggaggcaauggcgugaaagggugggccuuugacgauggaaacgacguuuggauggguagaacaauuucugagaaacuaaggagcggcuaugagaccuucaaggugaucgggggauggucaaaacccaauaguaagcuccagauuaaccggcaggucauaguggaucguggcaaucgcuccgguuacagcgggaucuuuucuguagaaggcaaaucaugcauuaacagauguuucuauguugagcugaucaggggacggaagcaggaaacggaggugugguggaccaguaauagcaucgucguguuuugcggcacauccgggacuuacggaaccgguucuuggccugacggcgcggauauuaaccuuaugccaauauga

SEQ ID NO: 150310 - RNA, 1410 nt, Artificial Sequence
  derived and/or modified CDS sequence (opt3) from neuraminidase__InfluenzaA__AFJ77465
augaaccccaaucagaagaucauuaccauaggcagcgugucccugacaaucgccacuauuugcuuccucaugcaaaucgcuauucuugucacgaccguuacacugcacuuuaaacaguacgaguguaacccuccaccgaauaaccaggugauguugugcgaacccacuaucauagagagaaauaucaccgaaauuguauauuuaacaaacaccacuaucgagaaggaaauuuguccuaaacuggcagaguacaggaauuggucuaagccacagugcaaaaucacaggguucgcccccuuuucaaaggacaacaguauacggcuaagcgcgggaggugauauuugggugacccgcgagccuuaugucuccugugacccagauaagugcuaccaauucgcucucggccaggggacgacucugaauaaccgacauucuaaugacaccgugcacgaucguacacccuauagaacucuucugaugaacgaauugggaguuccuuuucaucucggcaccaaacagguguguaucgccuggucgucaagcaguugccacgacgguaaggcauggcugcaugucugugugacagggcacgaugagaaugccaccgcuuccuucauuuacgacggaaggcugguagauucuaucggcagcugguccaaaaagauccuccggacgcaggaaucagagugcguuuguauuaacggcacuugcacaguggucaugaccgacgggagugcaagcggacgcgccgauacuaaaauauuauuuaucgaggaagguaagauugugcacaucucuccacuguccggcucagcucaacauguggaggaaugcagcuguuauccgagauaccccggggucaggugcguuugucgggacaauuggaagggaaguaaccgcccuauaguggauauuaacgugaaaaauuacucuaucguguccagcuaugucugcucgggccuugugggugacacaccacgaaagaacgacucuuccucaaguagccacuguuugaaucccaacaaugaggaagggggacauggcguuaaaggcugggccuucgaugacgggaacgauguguggaugggaagaaccaucuccgagaagcugaggucugguuacgagacguuuaaagucauugaaggcuggagcaagccuaauucaaaacuacagaucaaccggcagguaauuguagaccgugggaaucgcaguggauauuccggcauauucagcguugaggguaagucuugcaucaacagauguuuuuacguggaacucauuagggggcggaagcaggagaccgaagucugguggacaucaaauaguaucguggucuucugcggcacuagcggaaccuauggcacaggguccuggccagauggagcggacaucaaccugaugcccauuuga

SEQ ID NO: 150311 - RNA, 1410 nt, Artificial Sequence
  derived and/or modified CDS sequence (opt3) from neuraminidase__InfluenzaA__AFJ77476
augaaccccaaucagaagaucauuaccauaggcagcgugucccugacaaucgccacuauuugcuuccucaugcaaaucgcuauucuugucacgaccguuacacugcacuuuaaacaguacgaguguaacucuuugccuaauaaccaggugauguuaugcgaaccaacuaucauagagagaaauaucaccgaaauuguauaucugacaaacaccacuaucgagaaggaaauuuguccgaaacuagcagaguacaggaauuggucaaagccccagugcaaaaucacaggguucgccccuuuuaguaaggacaacagcauacggcucuccgcgggaggugauauuugggugacccgcgagccauaugucucuugugaccccgauaagugcuaccaauucgcucugggccaggggacgacucuuaauaaccgacauucgaaugacaccgugcacgaucguacaccuuauagaacucuguugaugaacgaacucggaguuccauuucaucugggcaccaaacagguguguaucgccuggucaagcaguuccugccacgacgguaaggcauggcugcaugucugugugacagggcacgaugagaaugccaccgcuucuuucauuuacggaggcaggcucguagacagcaucggcuccuggaguaaaaagaucuuacggacgcaggaaucagagugcguuuguauuaacgggacuugcacaguggucaugaccgauggaagcgcaucuggucgcgccgacacuaaaauacuguuuaucgaggaaggcaagauuauccacauaucccaacuuucagggagcgcucagcauguggaggaaugcaguuguuaucccagauacccuggagugaggugcgucugucgggauaauuggaagggcucuaaccgcccaauuguugacaucaacgugaaagauuacuccaucguaagcucguaugugugcucugguuuggucggggacacaccgcgaaagaaugacuccucaaguagcucccacugucuggaucccaacaaugaggaaggaggccauggcgugaaagggugggccuucgacgauggaaacgacguuuggauggguagaaccauuucugagaaguuuaggagcggcuacgagacguucaaagugaucgaaggguggucaaagccuaauaguaaacuacagauuaaccggcagauaaucgucgaucgugacaaucgcuccggauauagcggcaucuuuucuguggaggguaagucaugcauuaacagauguuucuacguagaacucaucagggggcggaagcaagagaccgaaguuugguggacaaguaauagcauuguggucuuuugcggcacuuccggaaccuauggcacagggucuuggccagauggagcggacauaaaccugaugcccaucuga

SEQ ID NO: 150312 - RNA, 1410 nt, Artificial Sequence; identical to SEQ ID NO: 142363
  derived and/or modified CDS sequence (opt3) from neuraminidase__InfluenzaA__AFJ77487

SEQ ID NO: 150313 - RNA, 1410 nt, Artificial Sequence
  derived and/or modified CDS sequence (opt3) from neuraminidase__InfluenzaA__AFJ77498
augaaccccaaucagaagaucauuaccauaggcagcgugucccugacaaucgccacuauuugcuuccucaugcaaaucgcuauucuugucacgaccguuacacugcacuuuaaacaguacgaguguaacucuccuccaaauaaccaggugauguugugcgaaccgacuaucauagagagaaauaucaccgaaauuguauauuuaacaaacaccacuaucgagaaggaaauuugucccaaacuggcagaguacaggaauuggucaaagccucagugcaaaaucacaggguucgccccauuuaguaaggacaacagcauacggcuauccgcgggaggugauauuugggugacccgcgagcccuaugucucuugugacccugauaagugcuaccaauucgcucucggccaggggacgacucugaauaaccgacauucgaaugacaccgugcacgaucguacaccauauagaacucuucugaugaacgaauugggaguucccuuucaucucggcaccaaacagguguguaucgccuggucaagcaguuccugccacgacgguaaggcauggcugcaugucugugugacagggcacgaugagaaugccaccgcuucuuucauuuacgacggaaggcugguagauagcaucggcuccuggaguaaaaagauccuccggacgcaggaaucagagugcguuuguauuaacggcacuugcacaguggucaugaccgacgggagcgcaucuggacgcgccgauacuaaaauauuauuuaucgaggaagguaagauugugcacacauccaagcugucaggcagcgcucaacauguggaggaaugcaguuguuauccuagauacccaggggucaggugcguuugucgggacaauuggaaaggaucuaaccgcccgaucguggauauaaacguaaaggacuacuccauuaucagcucguaugugugcucuggccuugucggugacacccccagaaagaaugauuccucaaguagcucccacuguuuggacccuaacaaugaggaagggggacauggcgugaaaggcugggccuucgaugacgggaacgauguuuggaugggacgaacgaucucugagaaaagcaggucagguuacgagaccuuuaaggugauugaaggcuggaguaaaccaaauuccaagcugcagaucaaccggcaggucauuguggagcgugggaauaugagcggauauucuggcauauucucaguagaagguaagaguugcaucaaccgcuguuuuuacguugagcuaauuagagggaggaaacaggaaacagaggugugguggacuagcaauuccaucgucguguucugcggcaccucuggaacauauggcacugggucguggcccgacggagcggauaucaaccucaugccuauuuga

SEQ ID NO: 150314 - RNA, 1410 nt, Artificial Sequence; identical to SEQ ID NO: 142363
  derived and/or modified CDS sequence (opt3) from neuraminidase__InfluenzaA__AFJ77509

SEQ ID NO: 150315 - RNA, 1410 nt, Artificial Sequence
  derived and/or modified CDS sequence (opt3) from neuraminidase__InfluenzaA__AFJ77520
augaaccccaaucagaagaucauuaccauaggcagcgugucccugacaaucgccacuauuugcuuccucaugcaaaucgcuauucuugucacgaccguuacacugcacuuuaaacaguacgaguguaacucuccuccaaauaaccaggugauguugugcgaaccgacuaucauagagagaaauaucaccgaaauuguauauuuaacaaacaccacuaucgagaaggaaauuugucccaaacuggcagaguacaggaauuggucaaagccucagugcaacaucacaggguucgccccauuuaguaaagacaauagcauacggcuauccgcgggaggugauauuugggugacccgcgagcccuaugucucuugugacccugauaagugcuaccaauucgcucucggccaggggacgacucugaacaauggacauucgaacgacaccgugcacgaucgaacaccauaucguacucuucugaugaaugaauugggcguucccuuucaucucgguaccaaacagguguguaucgccuggucaagcaguuccugccacgacgggaaggcauggcugcaugucugugugacaggagaugacgagaacgccaccgcuucuuucauuuacaauggcagacugguagauagcaucggcuccuggucaaagaaaauccucaggacgcaggaaagugagugcguuuguauuaacgggacuugcacaguggucaugaccgacggaagcgcaucugguaaggccgauacuaaaauauuauuuaucgaggaaggcaagauugugcacacauccucacugagcgggagugcucaacacguggaggaaugcucuuguuauccucgguacccaggaguccgcugcguuuguagagacaacuggaagggcuccaauaggccgaucguggauauaaacguaaaagacuacagcauugugucgucuuaugucugcuccggucuugugggggacacgccccggaagaaugauucaaguagcuccucucauuguuuggacccuaacaaugaggaaggaggccacggcguuaaagggugggccuucgaugacggaaacgauguguggaugggucgcaccaucagcgagaagcugcgaucaggcuacgagaccuuuaaagucaucgaaggguggaguaagccaaauuccaaacuacagauuaacagacaggugaucguagacaggggaaaucggagcggcuauucugguauuuucucaguugaggggaagaguugcauaaaccguuguuuuuacguggaacucauccgcggcagaaagcaggagauugaaguccuguggacaagcaauuccaucguggucuucugcggaacuucuggcaccuaugggacaggaucguggcccgauggugcggacaucaaccuuaugccuauuuga

SEQ ID NO: 150316 - RNA, 1410 nt, Artificial Sequence
  derived and/or modified CDS sequence (opt3) from neuraminidase__InfluenzaA__AFJ77531
augaaccccaaucagaagaucauuaccauaggcagcgugucccugacaaucacuacgauuugcuuccucaugcaaaucgccauucuugucaucaccguuacacugcacuuuaaacagugugagugcaacucuccuccaaauaaccaggugauguugugugaaccgacuauaaucgagagaaauauuaccgaaaucguauacuuaacaaacaccacuauugagaaggaaaucugccccaaacuggcugaguauaggaauuggucaaagccucaguguaaagugacaggguucgcaccauuuaguaaggacaacagcauacggcuauccgccggaggugauauuugggucacccgcgagcccuacgugucuugcgacccuggcaaguguuaucaauucgcgcucgggcagggaacgacucugaauaaccgacauucgaaugauaccguucacgaccguacaccauacagaacucuucugaugaacgaauugggcgugcccuuucaucucgguaccaaacaggucugcaucgcuuggucaagcaguuccugucacgaugggaaggccuggcugcaugugugcguaacaggacacaaugagaacgcaaccgccucuuucauuuaugacggcaggcugguugauagcaucggcuccuggaguaaaaauauccuccggacgcaggaaucagagugugugugcauuaacgggacuugcacagucgugaugaccgacggaagcgcuucuggucgcgcagauacuaagauauuauuuaucgaggaaggcaaaauugugcacaucuccccucugucagggagcgcccaacaugucgaggaauguaguugcuacccaagauauccgggaguuaggugugugugccgggacaacuggaagggcucuaaucgccccauaguagauauuaacgugaaggacuacuccaucgucagcucguacguguguucuggucuuguuggggauacaccucgaaagaaugacuccucaaguagcuccuauugcuuggacccaaacaaugaggaaggaggccacggcgugaaagggugggcuuucgaugacggaaacgaugucuggauggguagaaccaucucugagaaacugaggagcggcuacgagacguuuaaggugauugggggauggucaaaacccaauaguaagcuacagaucaaccggcagguaauuguugaccguggcaaucgcuccgguuauagcgggauauucucuguggaaggcaaaucauguaucaacagaugcuuuuacgucgagcucauuaggggacggaagcaggaaaccgaggugugguggacaaguaauagcaucgucguguucuguggcacuuccgggaccuauggaacagguucuuggccugauggcgccgacaucaaccugaugccaauuuga

SEQ ID NO: 150317 - RNA, 1410 nt, Artificial Sequence
  derived and/or modified CDS sequence (opt3) from neuraminidase__InfluenzaA__AFJ77542
augaaccccaaucagaagaucauuaccauaggcagcgugucccugacaaucucuacuauuugcuuccucaugcaaaucgccauucuugucacgaccguuacacugcacuuuaaacaguacgaguguaacucaccuccaaauaaccaggugauguugugcgaaccgacuaucauagagagaaauaucaccgaaauuguauauuuaacaaacaccacuaucgagaaggaaauuugucccaaacuggcugaguacaggaauuggaguaagccucagugcaacaucacaggguucgcaccauuuagcaaagacaauuccauacggcuaucugccggaggugauauuugggugacccgcgagcccuaugucucgugugacccugauaagugcuaccaauucgcgcucggccaggggacgacucugaacaauggacauucaaacgacaccgugcacgaucgaacaccauaucguacucuucugaugaaugaauugggcguucccuuucaucucgguaccaaacagguguguaucgcuuggagcaguuccucuugccacgacgggaaggccuggcugcaugucugugugacaggagaugacgagaacgcaaccgccagcuucauuuacaauggcagacugguagauuccaucggcucauggaguaagaaaauccucaggacgcaggaaagcgagugcguuuguauuaacgggacuugcacaguggucaugaccgacggaucugcuuccgguaaggcagauacuaaaauauuauuuaucgaggaaggcaagauugugcacacaucaacccugagcgggagugcccaacacguggaggaaugcucuuguuauccucgguacccaggaguccgcugcguuuguagagacaacuggaagggcuccaauaggccgaucguggauauaaacauuaaagacuacagcaucguaucgucuuaugugugcuccggucuugucggggacacgccccggaagaaugauucaaguagcuccucucauuguuuggacccuaacaaugaggaaggaggccacggcgugaaagggugggcuuucgaugacggaaacgauguuuggaugggucgcaccaucagcgagaagcugcgaucaggcuacgagacauuuaaagugauugaaggguggaguaagccaaauuccaaacuacagaucaacagacaggucauuguggacaggggaaaucggagcggcuauucugguauauucucaguagaggggaagaguugcaucaaccguuguuuuuacguugaacucauucgcggcagaaagcaggagacugaagugcuguggaccagcaauuccaucgucguguucugcggaacaucuggcacuuaugggaccggaucguggcccgauggugccgacaucaaccuuaugccuauuuga

SEQ ID NO: 150318 - RNA, 1410 nt, Artificial Sequence; identical to SEQ ID NO: 142301
  derived and/or modified CDS sequence (opt3) from neuraminidase__InfluenzaA__AFJ77553

SEQ ID NO: 150319 - RNA, 1410 nt, Artificial Sequence
  derived and/or modified CDS sequence (opt3) from neuraminidase__InfluenzaA__AFJ77564
augaaccccaaucagaagaucauuaccauaggcagcgugucccugacaaucgccacuauuugcuuccucaugcaaaucgcuauucuugucacgaccguuacacugcacuuuaaacaguacgaguguaacucuccuccaaauaaccaggugauguugugcgaaccgacuaucauagagagaaauaucaccgaaauuguauauuuaacaaacaccacuaucgagaaggaaauuugucccaaacuggcagaguacaggaauuggucaaagccucagugcaaaaucacaggguucgccccauuuaguaaggacaacagcauacggcuauccgcgggaggugauauuugggugacccgcgagcccuaugucucuugugacccugauaagugcuaccaauucgcucucggccaggggacgacucugaauaaccgacauucgaaugacaccgugcacgaucguacaccauauagaacucuucugaugaacgaauugggaguucccuuucaucucggcaccaaacagguguguaucgccuggucaagcaguuccugccacgacgguaaggcauggcugcaugucugugugacagggcacgaugagaaugccaccgcuucuuucauuuacgacggaaggcugguagauagcaucggcuccuggaguaaaaagauccuccggacgcaggaaucagagugcguuuguauuaacggcacuugcacaguggucaugaccgacgggagcgcaucuggacgcgccgauacuaaaauauuauuuaucgaggaagguaagauugugcacaucucccaacugucaggcagcgcucagcauguggaggaaugcaguuguuauccuagauacccaggggucaggugcguuugucgggacaauuggaagggaucuaaccgcccgauaguggauauuaacguaaaagacuacuccaucgugagcucguaugucugcucuggccuugugggugacacaccccgaaagaaugauuccucaaguagcucccacuguuugaacccuaauaacgaggaagggggacauggcguuaaaggcugggccuucgacgaugggaaugacguguggaugggaagaaccaucucugagaagcugaggagcgguuacgagacguuuaaagucauugaaggcuggucaaagccaaacaguaaacuacagaucaaucgucaggugauuguagaucgggggaaccgcuccggauauagcggcauauucucuguugaggguaagucaugcaucaauagauguuuuuacguggaacucauuagggggcggaagcaagagaacgaagucugguggaccaguaauagcaucguggucuucugcggcacauccggaacuuauggcaccgggucuuggcccgacggagcggauaucaaccugaugccuauuuga

SEQ ID NO: 150320 - RNA, 1329 nt, Artificial Sequence
  derived and/or modified CDS sequence (opt3) from neuraminidase__InfluenzaA__AFJ77575
augaaccccaaucagaagaucauuaccauaggcagcgugucccugacaaucgccacuauuugcuuccucaugcaaaucgcuauucuugucaucgagagaaacauaacggaaaucguuuaccugaccaauacaacuauugagaaagaaaucuguccuaaguuggcagaguauaggaacuggucuaaaccacagugcaauauuaccggguuugccccguucucaaaggacaacaguauccgguuaagcgcgggaggugauauaugggugacacgcgaacccuacguauccugugacccugauaaaugcuaucaguuugcucugggccaggggaccacucuaaauaacggacacucuaaugacacagugcaugaucgaaccccauaccguacgcuccugaugaacgagcuuggcguccccuuccaccuggguacuaagcaaguguguauugccuggucgucaagcaguugccaugacgggaaggcaugguugcacguuugugugaccggagaugacgagaaugccacagcuuccuuuaucuauaacggcagacucgucgauucuauuggcagcugguccaaaaagauccugaggacucaggaaucagagugcguguguaucaaugggaccugcacaguaguuaugaccgacggaagugcaagcgguaaagccgauacgaagauucuguucauagaagagggcaaaaucgugcauacuucuucccucucagggagcgcucagcacgucgaggaauguaguugcuacccucgguauccaggagugcgcugcguguguagagacaacuggaagggcucuaauaggcccauugucgauaucaacguuaaggacuacuccauagugagcucguacguaugcucugguuuagugggggacacaccucggaaaaacgauuccucaaguagcucccacugucuggacccaaauaacgaggaaggaggccauggcgucaaggggugggccuuugaugacggaaaugauguguggaugggucgcaccauuucugagaaacuucgaagcggcuaugaaacuuucaagguuaucgagggguggucaaaaccgaacaguaaguugcagaucaauagacaagugauugucgacaggggaaaccgguccggcuacagcgguaucuuuucuguggaggggaaaucaugcauuaaucguuguuucuauguagaacugauacgcggcagaaagcaggagacagaaguucuauggaccaguaacagcaucguggucuuuugcggaacguccggcaccuacgggacaggaucuuggcccgauggugcggacauuaaucucaugccuaucuga

SEQ ID NO: 150321 - RNA, 1410 nt, Artificial Sequence
  derived and/or modified CDS sequence (opt3) from neuraminidase__InfluenzaA__AFJ77597
augaaccccaaucagaagaucauuaccauaggcagcgugucccugacaaucgccacuauuugcuuccucaugcagaucgcuauucuugucacgaccguuacacugcacuuuaaacaguacgaguguaacucuccuccaaauaaccaggugauguugugcgaaccgacuaucauagagagaaauaucaccgaaauuguauauuuaacaaacaccacuaucgagaaggaaauuugucccaaacuggcagaguacaggaauuggucaaagccucagugcaacaucacaggguucgccccauuuaguaaagacaauagcauacggcuauccgcgggaggugauauuugggugacccgcgagcccuaugucucuugugacccugauaagugcuaccaauucgcucucggccaggggacgacucugaacaauggacauucgaacgacaccgugcacgaucgaacaccauaucguacucuucugaugaaugaauugggcguucccuuucaucucgguaccaaacagguguguaucgccuggucaagcaguuccugccacgacgggaaggcauggcugcaugucugugugacaggagaugacgagaacgccaccgcuucuuucauuuacaauggcagacugguagauagcaucggcuccuggucaaagaaaauccucaggacgcaggaaagugagugcguuuguauuaacgggacuugcacaguggucaugaccgacggaagcgcaucugguaaggccgauacuaaaauauuauuuaucgaggaaggcaagauugugcacacacggccucuguccgggucagcucaacacguggaggaaugcagcuguuauccacgcuacccgggagucagaugcguuuguagggacaacuggaagggcaguaaucggcccaucguggauauaaacguaaaagacuacucuauuguguccagcuaugucugcucgggucuugugggggacaccccucgcaagaaugauucuuccucaaguagccauuguuuggacccaaacaaugaggaaggaggccacggcguuaaagggugggccuucgaugacggaaacgauguguggaugggucgaacgaucuccgagaagcugagaucuggcuacgagaccuuuaaagucaucgaaggguggagcaagcccaauucaaaacuacagauuaacaggcaagugaucguagaccggggaaaucguaguggcuauuccgguauuuucagcguugaggggaagucuugcauaaaccgcuguuuuuacguggaacucaucagaggcaggaagcaggagacagaaguccuguggacuucaaauaguauuguggucuucugcggaaccagcggcacauaugggacuggauccuggccugauggugcggacaucaaccuuaugccaaucuga

SEQ ID NO: 150322 - RNA, 1410 nt, Artificial Sequence
  derived and/or modified CDS sequence (opt3) from neuraminidase__InfluenzaA__AFJ77608
augaaccccaaucagaagaucauuaccauaggcagcgugucccugacaaucgccacuauuugcuuccucaugcaaacggcuauccuugucaccacaguuacucugcacuuuaaacaguacgaguguaacucuccuccaaauaaccaggugauguugugcgaaccgaccauuaucgagagaaauaugacagaaauaguauauuuaaccaacacuacaaucgagaaggaaauuugucccaaacuggcagaguacaggaauuggucaaagccucagugcaacaucaccggguucgccccauuuaguaaagacaauagcauucggcuauccgcgggaggugaucucugggugacgcgcgagcccuaugucucuugugacccugauaagugcuaccaauucgcucugggccaggggacuacccuuaacaauggacauucgaacgacacagugcacgaucgaacuccauaucguacccuguugaugaaugaacucggcguucccuuucaucuggguacaaaacagguguguaucgccuggucaagcaguuccugccacgacgggaaggcauggcugcaugucugugugaccggagaugacgagaacgccacggcuucuuucauauacaauggcagacucguagauagcauuggcuccuggucaaagaaaaucuuaaggacucaggaaagugagugcguuuguauuaacgggacaugcaccguggucaugacugacggaagcgcaucugguaaggccgauacaaaaauccuguuuaucgaggaaggcaagauugugcacaccuccucacuuagcgggagugcucaacacguggaggaaugcucuuguuauccucgguacccaggaguccgcugcguuuguagagacaacuggaagggcuccaauaggccgauaguggauaucaacguaaaagacuacagcauugugucgucuuaugucugcuccgguuuggugggggacacgccccggaagaaugauucaaguagcuccucucauugucuggacccuaacaaugaggaaggaggccacggcguuaaagggugggccuucgaugacggaaacgauguguggaugggucgcaccaucagcgagaagcuacgaucaggcuacgagacauuuaaagucauagaaggguggaguaagccaaauuccaaacuccagauuaacagacaggugaucguagacaggggaaaucggagcggcuauucugguaucuucucaguugaggggaagaguugcauuaaccguuguuuuuacguggaacugauccgcggcagaaagcaggagacugaaguccuuuggaccagcaauuccauuguggucuucugcggaacaucuggcacuuaugggaccggaucguggcccgauggugcggacauaaaccugaugccuaucuga

SEQ ID NO: 150323 - RNA, 1410 nt, Artificial Sequence; identical to SEQ ID NO: 150321
  derived and/or modified CDS sequence (opt3) from neuraminidase__InfluenzaA__AFJ77619

SEQ ID NO: 150324 - RNA, 1410 nt, Artificial Sequence; identical to SEQ ID NO: 150321
  derived and/or modified CDS sequence (opt3) from neuraminidase__InfluenzaA__AFJ77630

SEQ ID NO: 150325 - RNA, 1410 nt, Artificial Sequence; identical to SEQ ID NO: 150317
  derived and/or modified CDS sequence (opt3) from neuraminidase__InfluenzaA__AFJ77641

SEQ ID NO: 150326 - RNA, 1410 nt, Artificial Sequence; identical to SEQ ID NO: 150317
  derived and/or modified CDS sequence (opt3) from neuraminidase__InfluenzaA__AFJ77652

SEQ ID NO: 150327 - RNA, 1410 nt, Artificial Sequence; identical to SEQ ID NO: 142088
  derived and/or modified CDS sequence (opt3) from neuraminidase__InfluenzaA__AFJ77663

SEQ ID NO: 150328 - RNA, 1410 nt, Artificial Sequence; identical to SEQ ID NO: 142088
  derived and/or modified CDS sequence (opt3) from neuraminidase__InfluenzaA__AFJ77674

SEQ ID NO: 150329 - RNA, 1410 nt, Artificial Sequence; identical to SEQ ID NO: 142088
  derived and/or modified CDS sequence (opt3) from neuraminidase__InfluenzaA__AFJ77685

SEQ ID NO: 150330 - RNA, 1410 nt, Artificial Sequence
  derived and/or modified CDS sequence (opt3) from neuraminidase__InfluenzaA__AFJ77696
augaaccccaaucagaagaucauuaccauaggcagcgugucccugacaaucgccacuauuugcuuccucaugcaaaucgcuauucuugucacgaccguuacacugcacuuuaaacaguacgaguguaacucuccuccaaauaaccaggugauguugugcgaaccgacuaucauagagagaaauaucaccgaaauuguauauuuaacaaacaccacuaucgagaaggaaauuugucccaaacuggcagaguacaggaauuggucaaagccucagugcaacaucacaggguucgccccauuuaguaaagacaauagcauacggcuauccgcgggaggugauauuugggugacccgcgagcccuaugucucuugugacccugauaagugcuaccaauucgcucucggccaggggacgacucugaacaauggacauucgaacgacaccgugcacgaucgaacaccauaucguacucuucugaugaaugaauugggcguucccuuucaucucgguaccaaacagguguguaucgccuggucaagcaguuccugccacgacgggaaggcauggcugcaugucugugugacaggagaugacgagaacgccaccgcuucuuucauuuacaauggcagacugguagauagcaucggcuccuggucaaagaaaauccucaggacgcaggaaagugagugcguuuguauuaacgggacuugcacaguggucaugaccgacggaagcgcaucugagaaggccgauacuaaaauauuauuuaucgaagaggguaagauugugcacacaucccugcuuucaggcagcgcucaacacguggaagagugcaguuguuauccucgguacccagggguccgcugcguuuguagagacaacuggaagggaucuaauaggccgaucguggauauaaacguaaaagacuacuccauugugagcucguaugucugcucuggcuuggugggugacacuccccggaagaaugauuccucaaguagcucccauugucuggacccuaacaaugaagaagggggacacggcguuaaaggcugggccuucgaugacgggaacgauguguggaugggacgcacgaucucugagaagcuacgaagcgguuacgagaccuuuaaagucaucgagggcuggucaaagccaaauaguaaacuccagauuaacagacaggugaucguagacagggggaaucgguccggauauagcggcauuuucucuguugaagguaagucaugcauaaaccguuguuuuuacguggagcugauccgcgggagaaagcaggaaacagagguccuuuggaccaguaauagcauuguggucuucugcggcaccuccggaacauauggcacugggucuuggcccgauggagcggacaucaaccugaugccuaucuga

SEQ ID NO: 150331 - RNA, 1410 nt, Artificial Sequence; identical to SEQ ID NO: 142088
  derived and/or modified CDS sequence (opt3) from neuraminidase__InfluenzaA__AFJ77707

SEQ ID NO: 150332 - RNA, 1410 nt, Artificial Sequence; identical to SEQ ID NO: 142109
  derived and/or modified CDS sequence (opt3) from neuraminidase__InfluenzaA__AFJ77718

SEQ ID NO: 150333 - RNA, 1410 nt, Artificial Sequence; identical to SEQ ID NO: 142109
  derived and/or modified CDS sequence (opt3) from neuraminidase__InfluenzaA__AFJ77729

SEQ ID NO: 150334 - RNA, 1410 nt, Artificial Sequence
  derived and/or modified CDS sequence (opt3) from neuraminidase__InfluenzaA__AFJ77740
augaaccccaaucagaagaucauuaccauaggcagcgugucccugacaaucucuacuauuugcuucuuuaugcaaaucgccauucucaucacgaccgucacacuucacuucaaacaguacgaguuuaacucaccuccaaauaaccagguuaugcugugugaaccgacuauaaucgagagaaauauuaccgaaaucguguauuugacaaacaccacuauugagaaggaaaucugccccaaauuagcugaguacaggaauuggaguaagccucaguguaacauaacaggguucgcaccauuuagcaaagacaauuccauucggcugucugccggaggugauaucuggguaacccgcgagcccuaugugucgugcgacccugauaaguguuaccaauucgcgcuaggccaggggacgacucucaacaauguccauucaaacgacaccgugcacgaucgaacaccauaucguacucugcuuaugaaugaacugggaguucccuuucauuugggcaccaaacaggugugcauugcuuggagcaguuccucuugucacgacgguaaggccuggcuccaugucugcgugacaggggaugacgagaacgcaaccgccagcuucaucuacaauggaagacugguagauuccaucguuucauggaguaagaaaauucugaggacgcaggaaagcgagugugugugcauaaacggcacuuguaucgucgugaugacagacggcucugcuuccgggaaggcagauaccaaaauucucuuuaucgaggaaggaaagauagugcacacuucaacauuaagcgguagugcccaacacgucgaggaaugcucuugcuauccucgguacccaggcguucgcugugugugcagagacaacuggaagggguccaauaggccgauuguagauaucaacaucaaagacuacagcauugugucgucuuaugucuguuccggacuggugggcgacacgccccggaagaaugauucaaguagcuccucucauugccuugacccuaacaaugaggaaggugggcacggaguuaaaggcugggcuuucgaugacggcaacgauguguggauggggcgcaccaucagcgagaaguugcgaucaggauacgagaccuuuaaagucauugaagguuggaguaauccaaacuccaagcugcagauaaauagacaggugaucguagacaggggcaaccggagcggguauucuggaauuuucucaguugagggcaaaaguuguaucaaucguugcuuuuacguggaacuaauccgcgguagaaagcaggagacagaaguccucuggacuagcaacuccauuguggucuucugugggaccucuggcacauauggaacuggcucguggcccgauggggccgacauaaaucugaugccuaucuga

SEQ ID NO: 150335 - RNA, 1410 nt, Artificial Sequence
  derived and/or modified CDS sequence (opt3) from neuraminidase__InfluenzaA__AFJ77751
augaaccccaaucagaagaucauuaccauaggcagcgugucccugacaaucgccacuauuugcuuccucaugcaaaucgcuauucuugucacgaccguuacacugcacuuuaaacagcaugaguguaacucuccuccaaauaaccaggugauguugugcgaaccgacuaucauagagagaaauaucaccgaaauuguauacuuaacaaacaccacuaucgagaaggaaauuugucccaaacuggcagaguauaggaauuggucaaagccucagugcaacaucacaggguucgccccauuuaguaaagacaauagcauacggcuauccgcgggaggugauauuugggugacccgcgagcccuacgucucuugugacccugauaagugcuaucaauucgcucucggccaggggacgacucugaacaauggacacucgaacgacaccgugcgagaucguacaccauacagaacucuucugaugaaugaauugggcguucccuuucaucucgguacccgacagguguguaucgccuggucaagcaguuccugccacgacgggaaggcauggcugcaugucugugugacaggagaugacaaaaacgccaccgcuucuuucauuuauaauggccggcugguagauagcaucggcuccuggucaaagaaaauccuccgcacgcaggagagugaaugcguuuguauuaacgggacuugcacaguggucaugaccgacggaagcgcaucugguaaggccgauacuaaaauauuauuuaucgaggagggcaagauugugcacaucuccacacugucagggagcgcucaacacguggaagagugcaguuguuacccuagauauccaggagucaggugcguuugucgggacaacuggaagggcucuaaucgcccgauaguggauauuaacguaaaagacuacuccaucuucagcucguacgugugcucuggucuugucggggacacccccaggaagaaugauuccuuuucaaguagccauuguuuggacccuaacaaugaagagggaggccacggcgugaaagggugggccuucgaugacggaaacgauguuuggauggguagaacgaucuccgaaaagcugaggucuggcuaugagaccuuuaaagugauugagggguggagcaagccaaauucaaaacuacagaucaaccggcaggucauuguggaacguggaaaucgcaguggcuacuccgguauauucagcguagaggggaagucuugcaucaacagauguuuuuauguugaacucauuaggggccggaaggaggaaacagaggugugguggacuucaaauaguaucgucguguucugcggaaccagcggcacauacgggacuggauccuggcccgacggugcggauaucaaccugaugccuauuuga

SEQ ID NO: 150336 - RNA, 1410 nt, Artificial Sequence; identical to SEQ ID NO: 142193
  derived and/or modified CDS sequence (opt3) from neuraminidase__InfluenzaA__AFJ77762

SEQ ID NO: 150337 - RNA, 1410 nt, Artificial Sequence; identical to SEQ ID NO: 142193
  derived and/or modified CDS sequence (opt3) from neuraminidase__InfluenzaA__AFJ77773

SEQ ID NO: 150338 - RNA, 1410 nt, Artificial Sequence; identical to SEQ ID NO: 142193
  derived and/or modified CDS sequence (opt3) from neuraminidase__InfluenzaA__AFJ77784

SEQ ID NO: 150339 - RNA, 1410 nt, Artificial Sequence; identical to SEQ ID NO: 142762
  derived and/or modified CDS sequence (opt3) from neuraminidase__InfluenzaA__AFJ77795

SEQ ID NO: 150340 - RNA, 1410 nt, Artificial Sequence; identical to SEQ ID NO: 142762
  derived and/or modified CDS sequence (opt3) from neuraminidase__InfluenzaA__AFJ77806

SEQ ID NO: 150341 - RNA, 1410 nt, Artificial Sequence; identical to SEQ ID NO: 142762
  derived and/or modified CDS sequence (opt3) from neuraminidase__InfluenzaA__AFJ77817

SEQ ID NO: 150342 - RNA, 1410 nt, Artificial Sequence; identical to SEQ ID NO: 142762
  derived and/or modified CDS sequence (opt3) from neuraminidase__InfluenzaA__AFJ77828

SEQ ID NO: 150343 - RNA, 1410 nt, Artificial Sequence
  derived and/or modified CDS sequence (opt3) from neuraminidase__InfluenzaA__AFJ77839
augaaccccaaucagaagaucauuaccauaggcagcgugucccugacaaucucuacuauuugcuucuuuaugcaaaucgccauucucaucacgaccgucacacuucacuucaaacaguacgaguuuaacucaccuccaaauaaccagguuaugcugugugaaccgacuauaaucgagagaaauauuaccgaaaucguguauuugacaaacaccacuauugagaaggaaaucugccccaaauuagcugaguacaggaauuggaguaagccucagugugacauaacaggguucgcaccauuuagcaaagauaacuccauucggcugucugccggaggugacaucuggguaacccgcgagcccuaugugucgugcgauccugacaaguguuaccaauucgcgcuaggccaggggacgacucucaauaacguccauucaaaugauaccgugcacgaccgaacaccauaucguacucugcuuaugaacgaacugggaguucccuuucauuugggcaccaaacaggugugcauugcuuggagcaguuccucuugucacgaugguaaggccuggcuccaugucugcgugacaggggacgauaagaaugcaaccgccagcuucaucuacaacggaagacugguagacuccaucguuucauggaguaaaaagauucugaggacgcaggagagcgaaugugugugcauaaauggcacuuguacagucgugaugaccgauggcucugcuuccgggaaagcagacacuaagauccucuuuauugaggagggaaagaucauacacacaucaaccuuaagcgguagugcccaacacguggaagagugcucuugcuauccucgguacccaggcguccgcuguguuugcagagauaacuggaaaggguccaacaggccgauuguggacaucaauaucaaggacuacagcauuguaucgucuuauguguguuccggacuggucggcgauacgccccggaaaaacgacucaaguagcuccucucauugccuugauccuaauaacgaagagggugggcacggagugaagggcugggcuuucgacgauggcaaugacguuuggauggggcgcaccaucagcgaaaaauugcgaucaggauacgagacauuuaaggugauugaggguuggaguaacccaaauuccaaacugcagauaaacagacaggucaucguggauaggggcaaucggagcggguauucuggaauuuucucaguagaaggcaagaguuguaucaaccguugcuuuuacguugagcuaauccgcgguagaaaggaagagacugaagugcucuggaccagcaauuccauugucguguucugugggacaucuggcacuuauggaaccggcucguggcccgacggggccgauauaaaccugaugccuaucuga

SEQ ID NO: 150344 - RNA, 1410 nt, Artificial Sequence
  derived and/or modified CDS sequence (opt3) from neuraminidase__InfluenzaA__AFJ77850
augaaccccaaucagaagaucauuaccauaggcagcgugucccugacaaucucuacuauuugcuucuuuaugcaaaucgccauucucaucacgaccgucacacuucacuucaaacaguacgaguuuaacucaccuccaaauaaccagguuaugcugugugaaccgacuauaaucgagagaaauauuaccgaaaucguguauuugacaaacaccacuauugagaaggaaaucugccccaaauuagcuaaguacaggaauuggaguaaaccucagugugacauaacaggguucgcaccauuuagcaaggauaacuccauucggcugucugccggaggugacaucuggguaacccgcgagcccuaugugucgugcgauccugacaaguguuaccaauucgcgcuaggccaggggacgacucucaauaacguccauucaaaugauaccgugcacgaccgaacaccauaucguacucugcuuaugaacgagcugggaguucccuuucauuugggcaccaaacaggugugcauugcuuggagcaguuccucuugucacgaugguaaggccuggcuccaugucugcgugacaggggacgauaaaaaugcaaccgccagcuucaucuacaacggaagacugguagacuccaucguuucauggaguaagaaaauucugaggacgcaggaaagcgagugugugugcauaaauggcacuuguacagucgugaugaccgauggcucugcuuccgggaaggcagacacuaagauccucuuuauugaagagggaaaaaucgugcacacaucaaccuuaagcgguagugcccaacacgucgaggaaugcucuugcuauccucgguacccaggcguucgcugugugugcagagauaacuggaagggguccaacaggccgauaguagacauuaauaucaaagacuacagcaucgugucgucuuaugucuguuccggacuggugggcgauacgccccggaagaacgacucaaguagcuccucucauugccuugauccuaauaacgaggaaggugggcacggaguuaaaggcugggcuuucgacgauggcaaugacguguggauggggcgcaccauuagcgagaaguugcgaucaggauacgaaacauuuaaagucaucgaggguuggaguaacccaaauuccaagcugcagauuaacagacaggugauaguagauaggggcaaucggagcggguauucuggaaucuucucaguugagggcaagaguuguauuaaccguugcuuuuacguggaacuaauccgcgguagaaaagaggaaacugagguccucuggaccagcaauuccaucguggucuucugugggacaucuggcacuuauggaaccggcucguggcccgacggggccgauauuaaccugaugccuauauga

SEQ ID NO: 150345 - RNA, 1410 nt, Artificial Sequence; identical to SEQ ID NO: 142762
  derived and/or modified CDS sequence (opt3) from neuraminidase__InfluenzaA__AFJ77861

SEQ ID NO: 150346 - RNA, 1410 nt, Artificial Sequence; identical to SEQ ID NO: 142762
  derived and/or modified CDS sequence (opt3) from neuraminidase__InfluenzaA__AFJ77872

SEQ ID NO: 150347 - RNA, 1410 nt, Artificial Sequence; identical to SEQ ID NO: 143228
  derived and/or modified CDS sequence (opt3) from neuraminidase__InfluenzaA__AFJ77883

SEQ ID NO: 150348 - RNA, 1410 nt, Artificial Sequence; identical to SEQ ID NO: 142762
  derived and/or modified CDS sequence (opt3) from neuraminidase__InfluenzaA__AFJ77894

SEQ ID NO: 150349 - RNA, 1410 nt, Artificial Sequence; identical to SEQ ID NO: 142762
  derived and/or modified CDS sequence (opt3) from neuraminidase__InfluenzaA__AFJ77905

SEQ ID NO: 150350 - RNA, 1410 nt, Artificial Sequence
  derived and/or modified CDS sequence (opt3) from neuraminidase__InfluenzaA__AFJ77916
augaaccccaaucagaagaucauuaccauaggcagcgugucccugacaaucucuacuauuugcuucuuuaugcaaaucgccauucucaucacgaccgucacacuucacuucaaacaguacgaguuuaacucaccuccaaauaaccagguuaugcugugugaaccgacuauaaucgagagaaauauuaccgaaaucguguauuugacaaacaccacuauugagaaggaaaucugccccaaauuagcugaguacaggaauuggaguaagccucagugugacauaacaggguucgcaccauuuagcaaagauaacuccauucggcugucugccggaggugacaucuggguaacccgcgagcccuaugugucgugcgauccugacaaguguuaccaauucgcgcuaggccaggggacgacucucaauaacguccauucaaaugauaccgugcacgaccgaacaccauaucguacucugcuuaugaacgaacugggaguucccuuucauuugggcaccaaacaggugugcauugcuuggagcaguuccucuugucacgaugguaaggccuggcuccaugucugcgugacaggggacgauaagaaugcaaccgccagcuucaucuacaacggaagacugguagacuccaucguuucauggaguaaaaagauucugaggacgcaggagagcgaaugugugugcauaaauggcacuuguacagucgugaugaccgauggcucugcuuccgggaaagcagacacuaagauccucuuuauugaggagggaaagaucgugcacacaucaaccuuaagcgguagugcccaacacgucgaagagugcucuugcuauccucgguacccaggcguucgcugugugugcagagauaacuggaaaggguccaacaggccgauaguagacauuaauaucaaggacuacagcaucgugucgucuuaugucuguuccggacuggugggcgauacgccccggaaaaacgacucaaguagcuccucucauugccuugauccuaauaacgaagagggugggcacggaguuaagggcugggcuuucgacgauggcaaugacguguggauggggcgcaccauuagcgaaaaauugcgaucaggauacgagacauuuaaggucaucgaggguuggaguaacccaaauuccaaacugcagauuaacagacaggugauaguagauaggggcaaucggagcggguauucuggaaucuucucaguugaaggcaagaguuguauuaaccguugcuuuuacguggagcuaauccgcgguagaaaggaagagacugaaguccucuggaccagcaauuccaucauuguguucugugggacaucuggcacuuauggaaccggcucguggcccgacggggccgauauaaaccugaugccuaucuga

SEQ ID NO: 150351 - RNA, 1410 nt, Artificial Sequence; identical to SEQ ID NO: 142784
  derived and/or modified CDS sequence (opt3) from neuraminidase__InfluenzaA__AFJ77927

SEQ ID NO: 150352 - RNA, 1410 nt, Artificial Sequence; identical to SEQ ID NO: 142784
  derived and/or modified CDS sequence (opt3) from neuraminidase__InfluenzaA__AFJ77938

SEQ ID NO: 150353 - RNA, 1410 nt, Artificial Sequence; identical to SEQ ID NO: 142762
  derived and/or modified CDS sequence (opt3) from neuraminidase__InfluenzaA__AFJ77949

SEQ ID NO: 150354 - RNA, 1410 nt, Artificial Sequence; identical to SEQ ID NO: 142762
  derived and/or modified CDS sequence (opt3) from neuraminidase__InfluenzaA__AFJ77960

SEQ ID NO: 150355 - RNA, 1410 nt, Artificial Sequence
  derived and/or modified CDS sequence (opt3) from neuraminidase__InfluenzaA__AFJ77971
augaaccccaaucagaagaucauuaccauaggcagcgugucccugacaaucucuacuauuugcuucuuuaugcaaaucgccauucucaucacgaccgucacacuucacuucaaacaguacgaguuuaacucaccuccaaauaaccagguuaugcugugugaaccgacuauaaucgagagaaauauuaccgaaaucguguauuugacaaacaccacuauugagaaggaaaucugccccaaauuagcugaguacaggaauuggaguaagccucaguguaacauaacaggguucgcaccauuuagcaaagacaauuccauucggcugucugccggaggugauaucuggguaacccgcgagcccuaugugucgugcgacccugauaaguguuaccaauucgcgcuaggccaggggacgacucucaacaauguccauucaaacgacaccgugcacgaucgaacaccauaucguacucugcuuaugaaugaacugggaguucccuuucauuugggcaccaaacaggugugcauugcuuggagcaguuccucuugucacgacgguaaggccuggcuccaugucugcgugacaggggaugacaagaacgcaaccgccagcuucaucuacaauggaagacugguagauuccaucguuucauggaguaaagagauucugaggacgcaggaaagcgagugugugugcauaaacggcacuuguacagucgugaugaccgacggcucugcuuccgggaaggcagauacuaaaauccucuuuauugaggaaggaaagaucgugcacacaucaaccuuaagcgguagugcccaacacgucgaggaaugcucuugcuauccucgguacccaggcguucgcugugugugcagagacaacuggaagggguccaauaggccgauaguagauauuaacaucaaagacuacagcaucgugucgucuuaugucuguuccggacuggugggcgacacgccccggaagaaugauucaaguagcuccucucauugccuugacccuaacaaugaggaaggugggcacggaguuaaaggcugggcuuucgaugacggcaacgauguguggauggggcgcaccauuagcgagaaguugcgaucaggauacgagacauuuaaagucaucgaagguuggaguaauccaaacuccaagcugcagauuaauagacaggugauaguagacaggggcaaccggagcggguauucuggaaucuucucaguugagggcaaaaguuguauuaaucguugcuuuuacguggaacuaauccgcgguagaaaggaugagacugaaguccucuggaccagcaacuccaucguggucuucugugggacaucuggcacuuauggaaccggcucguggcccgacggggccgauauuaaucugaugccuauauga

SEQ ID NO: 150356 - RNA, 1410 nt, Artificial Sequence
  derived and/or modified CDS sequence (opt3) from neuraminidase__InfluenzaA__AFJ77982
augaaccccaaucagaagaucauuaccauaggcuucgugagccugacaaucuccacuauuugcuuuuucaugcaaaucgccauucucaucacgaccgucccucuucacuuuaaacaguacgaguucaacucuccaccgaauaaccagguuaugcugugugaacccacaauaaucgagagaaauauuacugaaaucguguauuugaccaacacaaccauugagaaggaaaucugcccuaaauuagcugaguacaggaauuggucaaagccacaguguaacauaacuggguuugcacccuucaguaaagacaauagcauucggcuguccgccggaggugauaucuggguaacacgcgagccuuaugugucuugcgacccagauaaguguuaccaauuugcgcuaggccaggggaccacgcucaacaauguccauucgaacgacacugugcacgaucgaacccccuaucguacacugcuuaugaaugaacugggaguuccuuuccauuugggcacuaaacaggugugcauugcuuggucaagcaguuccugucacgacgguaaggccuggcuccaugucugcgugaccggggaugacaagaacgcaacagccucuuuuaucuacaauggaagacugguagauagcaucguuuccuggucaaaagagauucugaggacccaggaaagugagugugugugcauaaacggcacguguacugucgugaugacagacggcagcgcuucugggaaggcagauaccaaaauccucuucauugaggaaggaaagaucgugcacacuuccacauuaucagguagcgcccaacacgucgaggaaugcaguugcuauccacgguacccgggcguucgcugugugugcagagacaacuggaaggggucuaauaggcccauaguagauauuaacaucaaagacuacuccaucgugagcucguaugucuguucuggaauugugggcgacaccccucggaagaaugauuccucaaguagcucccauugccuggacccaaacaaugaggaaggugggcacggaguuaaaggcugggcuuuugaugacggcaacgauguguggauggggcgcacgaucucugagaaacuucgaagcggauacgagaccuucaaggucauugaagguuggucaaaucccaacaguaaguugcagauaaauagacaggugaucguagacaggggcaaccgguccggguauagcggaauuuuuaguguugagggcaaaucauguaucaaucguugcuucuacguggaacugauccgcgguagaaaggaggaaacagagguccuauggacuucuaacagcauuguggucuucugugggaccuccggcacauauggaacuggcucuuggccugauggggccgacauaaaucucaugccaaucuga

SEQ ID NO: 150357 - RNA, 1410 nt, Artificial Sequence; identical to SEQ ID NO: 142760
  derived and/or modified CDS sequence (opt3) from neuraminidase__InfluenzaA__AFJ77993

SEQ ID NO: 150358 - RNA, 1410 nt, Artificial Sequence
  derived and/or modified CDS sequence (opt3) from neuraminidase__InfluenzaA__AFJ78004
augaaccccaaucagaagaucauuaccauaggcagcgugucccugacaaucucuacuauuugcuucuuuaugcaaaucgccauucucaucacgaccgucacacuucacuucaaacaguacgaguuuaacucaccuccaaauaaccagguuaugcugugugaaccgacuauaaucgagaagaauauuaccgaaaucguguauuugacaaacaccacuauugagaaagaaaucugccccaaguuagcugaguacagaaauuggaguaaaccucaguguaacauaacaggguucgcaccauuuagcaaggacaauuccauuaggcugucugccggaggugauaucuggguaacccgggagcccuaugugucgugcgacccugauaaguguuaccaauucgcgcuaggccaggggacgacucucaacaauguccauucaaacgacaccgugcacgaucgcacaccauaucgaacucugcuuaugaaugaacugggaguucccuuucauuugggcaccaaacaggugugcauugcuuggagcaguuccucuugucacgacgguaaggccuggcuccaugucugcgugacaggggaugacaaaaacgcaaccgccagcuucaucuacaauggacgucugguagauuccaucguuucauggaguaaggagauucugagaacgcaggaaagcgagugugugugcauaaacggcacuuguacagucgugaugaccgacggcucugcuuccgggaaagcagauacuaagauccucuuuauugaggaaggaaagaucgugcacacaucaaccuuaagcgguagugcccaacacgucgaggaaugcucuugcuauccuagguacccaggcguucggugugugugccgcgacaacuggaaaggguccaauagaccgauaguagauauuaacaucaaggacuacagcaucgugucgucuuaugucuguuccggacuggugggcgacacgcccaggaaaaaugauucaaguagcuccucucauugccuugacccuaacaaugaggaaggugggcacggaguuaagggcugggcuuucgaugacggcaacgauguguggauggggcggaccauuagcgagaaauugcgcucaggauacgagacauuuaaggucaucgaagguuggaguaauccaaacuccaaacugcagauuaaucgacaggugauaguagacagaggcaacaggagcggguauucuggaaucuucucaguugagggcaagaguuguauuaaucggugcuuuuacguggaacuaauccguggucgcaaggaggaaacugagguccucuggaccagcaacuccaucguggucuucugugggacaucuggcacuuauggaaccggcucguggcccgauggggccgacauuaaucugaugccuauauga

SEQ ID NO: 150359 - RNA, 1410 nt, Artificial Sequence; identical to SEQ ID NO: 142760
  derived and/or modified CDS sequence (opt3) from neuraminidase__InfluenzaA__AFJ78015

SEQ ID NO: 150360 - RNA, 1410 nt, Artificial Sequence; identical to SEQ ID NO: 149617
  derived and/or modified CDS sequence (opt3) from neuraminidase__InfluenzaA__AFJ78026

SEQ ID NO: 150361 - RNA, 1410 nt, Artificial Sequence; identical to SEQ ID NO: 149617
  derived and/or modified CDS sequence (opt3) from neuraminidase__InfluenzaA__AFJ78037

SEQ ID NO: 150362 - RNA, 1410 nt, Artificial Sequence
  derived and/or modified CDS sequence (opt3) from neuraminidase__InfluenzaA__AFJ78048
augaaccccaaucagaagaucauuaccauaggcagcgugucccugacaaucucuacuauuugcuucuuuaugcaaaucgccauucucaucacgaccgucacacuucacuucaaacaguacgaguuuaacucaccuccaaauaaccagguuaugcugugugaaccgacuauaaucgagagaaauauuaccgaaaucguguauuugacaaacaccacuauugagaaggaaaucugccccaaauuagcugaguacaggaauuggaguaagccucaguguaacauaacaggguucgcaccauuuagcaaagacaauuccauucggcugucugccggaggugauaucuggguaacccgcgagcccuaugugucgugcgacccugauaaguguuaccaauucgcgcuaggccaggggacgacucucaacaauguccauucaaacgacaccgugcacgaucgaacaccauaucguacucugcuuaugaaugaacugggaguucccuuucauuugggcaccaaacaggugugcauugcuuggagcaguuccucuugucacgacgguaaggccuggcuccaugucugcgugacaggggaugacaagaacgcaaccgccagcuucaucuacaauggaagacugguagauuccaucguuucauggaguaaagagauucugaggacgcaggaaagcgagugugugugcauaaacggcacuuguacagucgugaugaccgacggcaacgcuucugggaaggcagauacuaaaauccucuuuauugaggaaggaaagaucgugcacacauccaccuuaucagguagcgcccaacacgucgaggaaugcaguugcuauccucgguacccaggcguucgcugugugugcagagacaauuggaaggggucuaacaggccgauaguagauauuaauaucaaagacuacuccaucgugagcucguaugucuguucuggacuggugggcgacacgccccggaagaacgauuccucaaguagcucccauugccuugacccuaauaacgaggaaggugggcacggaguuaaaggcugggcuuucgaugacggcaaugauguguggauggggcgcaccauuucugagaaguugcgaagcggauacgagacauuuaaagucaucgaagguuggucaaacccaaauaguaagcugcagauuaacagacaggugauaguagacaggggcaaucgguccggguauagcggaaucuucucuguugagggcaaaucauguauuaaccguugcuuuuacguggaacuaauccgcgguagaaaggaggaaacugagguccucuggaccaguaauagcaucguggucuucugugggacauccggcacuuauggaaccggcucuuggcccgauggggccgacauuaaccugaugccuauauga

SEQ ID NO: 150363 - RNA, 1410 nt, Artificial Sequence
  derived and/or modified CDS sequence (opt3) from neuraminidase__InfluenzaA__AFJ78059
augaaccccaaucagaagaucauuaccauaggcagcgugucccugacaaucucuacuauuugcuucuuuaugcaaaucgccauucucaucacgaccgucacacuucacuucaaacaguacgaguuuaacccuccaccgaauaaccagguuaugcugugugaacccacuauaaucgagagaaauauuaccgaaaucguguauuugacaaacaccacuauugagaaggaaaucugcccuaaauuagcugaguacaggaauuggucaaagccacaguguaacauaacaggguucgcacccuuuaguaaagacaauagcauucggcuguccgccggaggugauaucuggguaacccgcgagccuuaugugucuugcgacccagauaaguguuaccaauucgcgcuaggccaggggacgacucucaacaauguccauucgaacgacaccgugcacgaucgaacacccuaucguacucugcuuaugaaugaacugggaguuccuuuucauuugggcaccaaacaggugugcauugcuuggucaagcaguuccugucacgacgguaaggccuggcuccaugucugcgugacaggggaugacaagaacgcaaccgccucuuucaucuacaauggaagacugguagauagcaucguuuccuggucaaaagagauucugaggacgcaggaaagugagugugugugcauaaacggcacuuguacagucgugaugaccgacggcagcgcuucugggaaggcagauacuaaaauccucuuuauugaggaaggaaagaucgugcacacauccaccuuaucagguagcgcccaacacgucgaggaaugcaguugcuauccacgguacccgggcguucgcugugugugcagagacaacuggaaggggucuaauaggcccauaguagauauuaacaucaaagacuacuccaucgugagcucguaugucuguucuggacuggugggcgacacgccucggaagaaugauuccucaaguagcucccauugccuugacccaaacaaugaggaaggugggcacggaguuaaaggcugggcuuucgaugacggcaacgauguguggauggggcgcaccauuucugagaaguugcgaagcggauacgagacauuuaaagucaucgaagguuggucaaaucccaacaguaagcugcagauuaauagacaggugauaguagacaggggcaaccgguccggguauagcggaaucuucucuguugagggcaaaucauguauuaaucguugcuuuuacguggaacuaauccgcgguagaaaggaugagacugaaguccucuggaccaguaacagcaucguggucuucugugggacauccggcacuuauggaaccggcucuuggccugacggggccgauauuaaucugaugccaauauga

SEQ ID NO: 150364 - RNA, 1410 nt, Artificial Sequence
  derived and/or modified CDS sequence (opt3) from neuraminidase__InfluenzaA__AFJ78070
augaaccccaaucagaagaucauuaccauaggcagcgugucccugacaaucucuacuauuugcuucuuuaugcagaucgccauucucaucacgaccgucacacuucacuucaaacaguacgaguuuaacucaccuccaaauaaccagguuaugcugugugaaccgacuauaaucgagagaaauauuaccgaaaucguguauuugacaaacaccacuauugagaaggaaaucugccccaaauuagcugaguacaggaaguggaguaaaccucaguguaauauaacaggguucgcaccauuuagcaaggacaacuccauucggcugucugccggaggugauaucuggguaacccgcgagcccuaugugucgugcgacccugauaaguguuaccaauucgcgcuaggccaggggacgacucucaauaacguccauucaaaugacaccgugcgagaucguacaccauauagaacucugcuuaugaacgaacugggaguucccuuucacuugggcaccaaacaggugugcauugcuuggagcaguuccucuugucaugacgguaaggccuggcuccacgucugcgugacaggggaugacaaaaaugcaaccgccagcuucaucuacaacggaaggcugguagauuccaucguuucauggaguaaggagauucugcggacgcaggaaagcgagugugugugcauaaauggcacuuguacagucgugaugaccgacggcucugcuuccgggaaagcagauacuaagauccucuuuauugaggaaggaaagaucgugcauacaucaaccuuaagcgguagugcccaacacgucgaggaaugcucuugcuauccucgcuacccaggcguuagaugugugugcagggacaacuggaaaggguccaaccggccgauaguagauauuaauaucaaggacuacagcaucgugucgucuuaugucuguuccggacuggugggcgacacgccccgcaaaaacgauucaaguagcuccggucacugccuugacccuaauaacgaggaagggggacauggcguuaagggcugggcuuucgaugacgggaaugauguguggaugggacgaaccauuucugagaaaagcagaucagguuacgagacauuuaaggucaucgaaggcuggaguaacccaaauuccaaauugcagauuaacaggcaagugauaguagaccgggggaaucguagcggauauucuggcaucuucucaguugaggguaagaguuguauuaaccgcugcuuuuacguggaacugaucagagggaggaaggaggaaacugagguccuauggaccagcaauuccaucguggucuucuguggcacaucuggaacuuauggcaccgggucguggcccgauggagccgacauuaaccucaugccuauauga

SEQ ID NO: 150365 - RNA, 1410 nt, Artificial Sequence
  derived and/or modified CDS sequence (opt3) from neuraminidase__InfluenzaA__AFJ78081
augaaccccaaucagaagaucauuaccauaggcagcgugucccugacaaucucuacuauuugcuucuuuaugcaaaucgccauucucaucacgaccgucacacuucacuucaaacaguacgaguuuaacucaccuccaaauaaccagguuaugcugugugaaccgacuauaaucgagagaaauauuaccgaaaucguguauuugacaaacaccacuauugagaaggaaaucugccccaaauuagcugaguacaggaauuggaguaagccucagugugacauaacaggguucgcaccauuuagcaaagauaacuccauucggcugucugccggaggugacaucuggguaacccgcgagcccuaugugucgugcgauccugacaaguguuaccaauucgcgcuaggccaggggacgacucucaauaacguccauucaaaugauaccgugcgagaccguacaccauauagaacucugcuuaugaacgaacugggaguucccuuucacuugggcaccaaacaggugugcauugcuuggagcaguuccucuugucaugaugguaaggccuggcuccacgucugcaucacaggggacgauaagaaugcaaccgccagcuucaucuacaacggaaggcugguggacuccauuguaucauggaguaaagagauacugcggacgcaggaaagcgaguguguuugcaucaauggcacuuguacaguggucaugaccgauggcucugcuuccgggaaggcagacacuaaaauucucuuuaucgaggaaggaaagauagugcauacaucaaccuuaagcgguagugcccaacacguggaggaaugcucuugcuauccucgcuacccaggcgucagauguguuugcagggauaacuggaagggguccaaccggccgauuguggacaucaauaucaaagaccacagcauuguaucgucuuacguguguuccggacuggucggcgauacgccccgcaagaacgacaauucaaguagcucccauugccuugauccuaacaaugaggaaggugggcacggagugaaaggcugggcuuucgacgauggcaacgacguuuggauggggcgaaccaucucugaaaagagcagauugggauaugagacauuuaaagugauugaggguuggucaaauccaaacaguaagcugcagaugaauaggcaggucauaguggaucggggcaaccguuccggguacagcggaaucuucucuguagagggcaaaucauguauuaaucgcugcuuuuauguugaacuaaucagagguaggaaggaggaaacugaggugcucuggaccaguaacagcaucgucguguucugugggacauccggcacuuacggaaccggcucuuggcccgacggggccgauauuaaucugaugccuauauga

SEQ ID NO: 150366 - RNA, 1410 nt, Artificial Sequence; identical to SEQ ID NO: 150282
  derived and/or modified CDS sequence (opt3) from neuraminidase__InfluenzaA__AFJ78092

SEQ ID NO: 150367 - RNA, 1410 nt, Artificial Sequence
  derived and/or modified CDS sequence (opt3) from neuraminidase__InfluenzaA__AFJ78103
augaaccccaaucagaagaucauuaccauaggcagcgugucccugacaaucucuacuauuugcuucuuuaugcaaaucgccauucucaucacgaccgucacacuucacuucaaacaguacgaguuuaacucaccuccaaauaaccagguuaugcugugugaaccgacuauaaucgagagaaauauuaccgaaaucguguauuugacaaacaccacuauugagaaggaaaucugccccaaauuagcugaguacaggaauuggaguaagccucagugugacauaacaggguucgcaccauuuagcaaagauaacuccauucggcugucugccggaggugacaucuggguaacccgcgagcccuaugugucgugcgauccugacaaguguuaccaauucgcgcuaggccaggggacgacucucaauaacguccauucaaaugauaccgugcgagaccguacaccauauagaacucugcuuaugaacgaacugggaguucccuuucacuugggcaccaaacaggugugcauugcuuggagcaguuccucuugucaugaugguaaggccuggcuccacgucugcaucacaggggacgauaagaaugcaaccgccagcuucaucuacaacggaaggcugguggacuccauuguaucauggaguaaagagauacugcggacgcaggaaagcgaguguguuugcaucaauggcacuuguacaguggucaugaccgauggcucugcuuccgggaaggcagacacuaaaauucucuuuaucgaggaaggaaagauagugcauacaucaaccuuacuggguagcgcccaacacguggaggaaugcaguugcuauccucgcuacccaggcgucagauguguuugcagggauaacuggaaggggucuaaccggccgauuguggacaucaauaucaaagaccacuccauuguaagcucguacguguguucuggacuugucggcgauacgccccgcaagaacgacuccucaaguagcggucauugcuuggauccuaauaacgaggaagggggacacggcgugaaaggcugggcuuucgacgaugggaaugacguuuggaugggacgaaccaucuccgagaagucuagacuggguuaugagacauuuaaagugauugaaggcuggagcaacccaucaaguaagcuacagauaaauaggcaggucaucguggaucgggggaaccguuccggauacagcggcauuuucucuguagaggguaaaucauguaucaaucgcugcuuuuauguugaacucaucagagggaggaaggaggaaacugaggugcuguggaccaguaacagcauugucguguucuguggcacauccggaacuuacggcaccgggucuuggcccgacggagccgauauaaaucuuaugccuaucuga

SEQ ID NO: 150368 - RNA, 1410 nt, Artificial Sequence
  derived and/or modified CDS sequence (opt3) from neuraminidase__InfluenzaA__AFJ78114
augaaccccaaucagaagaucauuaccauaggcagcgugucccugacaaucucuacuauuugcuucuuuaugcaaaucgccauucucaucacgaccgucacacuucacuucaaacaguacgagcugaacucaccuccaaauaaccagguuauguugugugaaccgacuauaaucgagagaaauauuaccgaaaucguguauuuaacaaacaccacuauugagaaggaaaucugccccaaacuggcugaguacaggaauuggaguaagccucagugugacauaacaggguuugcaccauucagcaaagauaacuccauucggcuaucugccggaggugacaucuggguaacccgcgagcccuaugugucgugcgauccugacaaguguuaccaauuugcgcucggccaggggacgacucugaauaacguccauucaaaugauaccgugcgagaccguacaccauauagaacucuucugaugaacgaauugggaguucccuuccaccucggcaccaaacaggugugcauugcuuggagcaguuccucuugucaugaugguaaggccuggcugcacgucugcaucacaggggacgauaagaaugcaaccgccagcuuuaucuacaacggaaggcugguggacuccauuguaucauggaguaaagagauacuccggacgcaggaaagcgaguguguuugcaucaauggcacuuguacaguggucaugaccgauggcucugcuuccgggaaggcagacacuaaaauuuuauucaucgaggaaggaaagauagugcauacaucaacccugagcgguagugcccaacacguggaggaaugcucuugcuauccucgcuacccaggcgucagauguguuugcagggauaacuggaagggguccaaccggccgauuguggacaucaauaucaaagaccacagcauuguaucgucuuacguguguuccggacuugucggcgauacgccccgcaagaacgacucaaguagcuccucucauugcuuggauccuaauaacgaggaaggugggcacggagugaaaggcugggcuuuugacgauggcaaugacguuuggauggggcgaaccaucagcgagaagucaagacugggauaugagacauucaaagugauugaagguuggaguaacccaaauuccaagcuacagauaaacaggcaggucaucguggaucggagcaaucguucuggcuacucagggauuuuuaguguagagggaaaaagcuguaucaaccgcugcuucuauguugaacucaucagaggcaggaaggaggaaacugaggugcuguggaccuccaauucuauugucguguuuugugguacaucggggacuuacggcaccggaagcuggcccgacggcgccgauauaaaccuuaugccuaucuga

SEQ ID NO: 150369 - RNA, 1410 nt, Artificial Sequence
  derived and/or modified CDS sequence (opt3) from neuraminidase__InfluenzaA__AFJ78125
augaaccccaaucagaagaucauuaccauaggcagcgugucccugacaaucucuacuauuugcuucuuuaugcaaaucgccauucucaucacgaccgucacacuucacuucaaacaguacgaguuuaacucaccuccaaauaaccagguuaugcugugugaaccgacuauaaucgagagaaauauuaccgaaaucguguauuugacaaacaccacuauugagaaggaaaugugccccaaauuagcugaguacaggaauuggaguaagccucagugugacaucacaggguucgcaccauuuagcaaagauaacuccauacggcugucugccggaggugacauuuggguaacccgcgagcccuaugugucgugcgauccugacaaguguuaccaauucgcgcuaggccaggggacgacucucaauaacguccauucaaaugauaccgugcgagaccguacaccauauagaacucugcuuaugaacgaacugggaguucccuuucacuugggcaccaaacaggugugcaucgcuuggagcaguuccucuugucaugaugguaaggccuggcuccacgucugcauuacaggggacgauaagaaugcaaccgccagcuucaucuacaacggaaggcugguggacuccaucguaucauggaguaaagagauucugcggacgcaggaaagcgaguguguuugcauaaauggcacuuguacaguggucaugaccgauggcucugcuuccgggaaggcagacacuaaaauccucuuuauugaggaaggaaagaucgugcauacaucaaccuuaagcgguagugcccaacacguggaggaaugcucuugcuauccucgcuacccaggcgucagauguguuugcagggauaacuggaagggguccaaccggccgauaguggacauuaauaucaaagaccacagcaucguaucgucuuacguguguuccggacuggucggcgauacgccccgcaagaacgacucaaguagcuccucucauugccuugauccuaauaacgaggaaggugggcacggagugaaaggcugggcuuucgacgauggcaaugacguuuggauggggcgaaccauuagcgagaagucaagauugggauaugagacauuuaaagugaucgaagguuggaguaacccaaauuccaagcugcagaugaacaggcaggucauuguggaucggggcaaucguagcggguacucuggaauauucucaguagagggcaaaaguuguaucaaccgcugcuuuuauguugaacuaauuagagguaggaaggaggaaacugaggugcucuggaccagcaauuccaucgucguguucugugggacaucuggcacuuacggaaccggcucguggcccgacggggccgauaucaaccugaugccuauuuga

SEQ ID NO: 150370 - RNA, 1410 nt, Artificial Sequence
  derived and/or modified CDS sequence (opt3) from neuraminidase__InfluenzaA__AFJ78136
augaaccccaaucagaagaucauuaccauaggcagcgugucccugacaaucucuacuauuugcuucuuuaugcaaacggccauccucauuaccacagucacucuucacuucaaacaguacgaguuuaacucaccuccaaauaaccagguuaugcugugugaaccgaccaucauagagagaaauaucacagaaauuguguauuugaccaacacuacaaucgagaaggaaauuugccccaaauuagcugaguacaggaauuggaguaagccucagugugacaucaccggguucgcaccauuuagcaaagauaacuccauacggcugucugccggaggugacauuuggguaacgcgcgagcccuaugugucgugcgauccugacaaguguuaccaauucgcgcuaggccaggggacuacccucaauaacguccauucaaauaacacagugcgagaucguacuccauauagaacccugcuuaugaaugaacugggaguucccuuucacuugggcacaaaacaggugugcaucgcuuggagcaguuccucuugucaugacgguaaggccuggcuccacgucugcauuaccggggaugacaagaacgcaacggccagcuucaucuacaauggaaggcugguggauuccaucguaucauggaguaaagagauucugcggacucaggaaagcgaguguguuugcauaaacggcacauguaccguggucaugacugacggcucugcuuccgggaaggcagauacaaaaauccucuuuauugaggaaggaaagaucgugcauaccucaacguuaagcgguagugcccaacacguggaggaaugcucuugcuauccucgcuacccaggcgucagauguguuugcagggacaacuggaagggguccaaucggccgauaguggauauuaacaucaaagaccacagcaucguaucgucuuacguguguuccggacuggucggcgacacaccccgcaagaaugauucaaguagcuccucucauugccuugacccuaacaaugaggaaggugggcacggagugaaaggcugggcuuucgaugacggcaacgauguuuggauggggcgaaccauuagcgagaagucaagauugggauaugagacuuuuaaagugaucgaagguuggaguaauccaaaguccaaacugcagauuaacaggcaggucauaguggaccggggcaaucguagcggguacucuggaaucuucucaguagagggcaagaguuguauuaaccgcugcuuuuauguugaacuaaucagagguaggaaggaggaaaccgaggugcucuggacaagcaauuccaucgucguguucugugggacuucuggcaccuacggaacaggcucguggcccgauggggccgacauuaaccugaugccuauauga

SEQ ID NO: 150371 - RNA, 1410 nt, Artificial Sequence; identical to SEQ ID NO: 150370
  derived and/or modified CDS sequence (opt3) from neuraminidase__InfluenzaA__AFJ78147

SEQ ID NO: 150372 - RNA, 1410 nt, Artificial Sequence; identical to SEQ ID NO: 150370
  derived and/or modified CDS sequence (opt3) from neuraminidase__InfluenzaA__AFJ78158

SEQ ID NO: 150373 - RNA, 1410 nt, Artificial Sequence; identical to SEQ ID NO: 143932
  derived and/or modified CDS sequence (opt3) from neuraminidase__InfluenzaA__AFJ78169

SEQ ID NO: 150374 - RNA, 1410 nt, Artificial Sequence; identical to SEQ ID NO: 144450
  derived and/or modified CDS sequence (opt3) from neuraminidase__InfluenzaA__AFJ78180

SEQ ID NO: 150375 - RNA, 1410 nt, Artificial Sequence; identical to SEQ ID NO: 143932
  derived and/or modified CDS sequence (opt3) from neuraminidase__InfluenzaA__AFJ78191

SEQ ID NO: 150376 - RNA, 1410 nt, Artificial Sequence
  derived and/or modified CDS sequence (opt3) from neuraminidase__InfluenzaA__AFJ78202
augaaccccaaucagaagaucauuaccauaggcagcgugucccugacaaucucuacuauuugcuucuuuaugcaaacggccauccucauuaccacagucacucuucacuucaaacaguacgaguuuaacucaccuccaaauaaccagguuaugcugugugaaccgaccaucauagagagaaauaucacagaaauuguguauuugaucaacaccacuauugagaaggaaaucugccccaaauuagcugaguacaggaauuggaguaagccucagugugacauaacaggguucgcaccauuuagcaaagauaacuccauucggcugucugccggaggugacaucuggguaacccgcgagcccuaugugucgugcgauccugacaaguguuaccaauucgcgcuaggccaggggacgacucucaauaacguccauucaaauaacaccgugcgagaucguacaccauauagaacucugcuuaugaaugaacugggaguucccuuucacuugggcaccaaacaggugugcauugcuuggagcaguuccucuugucaugacgguaaggccuggcuccacgucugcaucacaggggaugacaagaacgcaaccgccagcuucaucuacaauggaaggcugguggauuccauuguaucauggaguaaagagauacugcggacgcaggaaagcgaguguguuugcaucaacggcacuuguacaguggucaugaccgacggcucugcuuccgggaaggcagauacuaaaauucucuuuaucgaggaaggaaagauagugcauacaucaaccuuaagcgguggcgcccaacacguggaggaaugcaguugcuauccucgcuacccaggggucagauguguuugcagggacaacuggaagggaucuaaucggccgauuguggauaucaacaucaaagaccacuccauuguaagcucguacguguguucuggccuggucggugacacgccccgcaagaaugauuccucaaguagcucccauugccuugacccuaacaaugaggaagggggacacggcgugaaaggcugggcuuucgaugacgggaacgauguuuggaugggacgaaccaucucugaaaagagcagauuggguuaugagacauuuaaagugauugagggcuggucaaauccaaagaguaaacugcagauaaacaggcaggucaucguggaccgggggaaucguuccggauacagcggcauuuucucuguagaggguaagucauguaucaaccgcugcuuuuauguugaacuaaucagagggaggaaggaggaaacugaggugcucuggaccaguaauagcauugucguguucuguggcacauccggaacuuacggcaccgggucuuggcccgauggagccgacauaucgcugaugccuaucuga

SEQ ID NO: 150377 - RNA, 1410 nt, Artificial Sequence
  derived and/or modified CDS sequence (opt3) from neuraminidase__InfluenzaA__AFJ78213
augaaccccaaucagaagaucauuaccauaggcagcgugucccugacaaucucuacuauuugcuucuuuaugcaaaucgccauucucaucacgaccgucacacuucacuucaaacaguacgaguuuaacucaccuccaaauaaccagguuaugcugugugaaccgacuauaaucgagagaaauauuaccgaaaucguguauuugacaaacaccacuauugagaaggaaaucugccccaaauuagcugaguacaggaauuggaguaagccucagugugacauaacaggguucgcaccauuuagcaaagauaacuccauucggcugucugccggaggugacaucuggguaacccgcgagcccuaugugucgugcgauccugacaaguguuaccaauucgcgcuaggccaggggacgacucucaauaacguccauucaaaugauaccgugcgagaccguacaccauauagaacucugcuuaugaacgaacugggaguucccuuucacuugggcaccaaacaggugugcauugcuuggagcaguuccucuugucaugaugguaaggccuggcuccacgucugcaucacaggggacgauaagaaugcaaccgccagcuucaucuacaacggaaggcugguggacuccauuguaucauggaguaaagagauacugcggacgcaggaaagcgaguguguuugcaucaauggcacuuguacaguggucaugaccgauggcucugcuuccgggaaggcagacacuaaaauucucuuuaucgaggaaggaaagauagugcauacaucaaccuuaagcgguagugcccaacacguggaggaaugcucuugcuauccucgcuacccaggcgucagauguguuugcagggauaacuggaagggguccaaccggccgauuguggacaucaauaucaaagaccacagcauuguaucgucuuacguguguuccggacuggucggcgauacgccccgcaagaacgacucaaguagcuccucucauugccuugauccuaauaacgaggaaggugggcacggagugaaaggcugggcuuucgacgauggcaaugacguuuggauggggcgaaccaucagcgagaagucaagauugggauaugagacauuuaaagugauugaagguuggaguaacccaaaguccaaacugcagauaaauaggcaggucaucguggaucggggcaaccguagcggguacucuggaauuuucucaguagagggcaagaguuguaucaaucgcugcuuuuauguugaacuaaucagagguaggaaggaggaaacugaggugcucuggaccagcaacuccauugucguguucugugggacaucuggcacuuacggaaccggcucguggcccgacggggccgauauaaaucugaugcuuaucuga

SEQ ID NO: 150378 - RNA, 1410 nt, Artificial Sequence; identical to SEQ ID NO: 143932
  derived and/or modified CDS sequence (opt3) from neuraminidase__InfluenzaA__AFJ78224

SEQ ID NO: 150379 - RNA, 1410 nt, Artificial Sequence; identical to SEQ ID NO: 143932
  derived and/or modified CDS sequence (opt3) from neuraminidase__InfluenzaA__AFJ78235

SEQ ID NO: 150380 - RNA, 1410 nt, Artificial Sequence
  derived and/or modified CDS sequence (opt3) from neuraminidase__InfluenzaA__AFJ78246
augaaccccaaucagaagaucauuaccauaggcagcgugucccugacaaucucuacuauuugcuucuuuaugcagaucgccauucucaucacgaccgucacacuucacuucaaacaguacgaguuuaacucaccuccaaauaaccaggcuaugcugugugaaccgacuauaaucgagagaaauauuaccgaaaucguuuauuugacaaacaccacuauugagaaggaaaucugccccaaauuagcagaguacaggaauuggaguaagccucagugugacauaacaggguucgccccauuuagcaaagauaacuccauucggcugucugcgggaggugacaucugggugacccgcgagcccuauguaucgugcgauccugacaaguguuaccaauucgcucuaggccaggggacgacucucaauaacgugcauucaaaugauaccguccgagaccguacaccauauagaacucugcuuaugaacgaacugggagugcccuuucacuugggcaccaagcagguuugcauugccuggagcaguuccucuugucaugaugguaaagcauggcuccacgugugcaucacaggggacgauaagaaugccaccgcuagcuucaucuacaacggaaggcuggucgacuccauugugucauggaguaaagagauacugcggacgcaggaaagcgaguguguaugcaucaauggcacuuguacaguugugaugaccgauggcucugcauccgggaaggccgacacuaaaauucucuuuaucgaggaaggaaagauaguccauacaucaaccuuaagcgguagugcucaacacguggaggaaugcucuugcuauccucgcuacccaggcgugagaugugucugcagggauaacuggaagggguccaaccggccgauuguugacaucaauaucaaagaccacagcauugugucgucuuacguauguuccggacuggugggcgauacgccccgcaagaacgacucaaguagcuccucucauugccuugauccuaauaacgaggaaggugggcacggagucaaaggcugggccuucgacgauggcaaugacguguggauggggcgaaccaucagcgagaagucaagauugggauaugagacauuuaaaguuauugaagguuggaguaacccaaaguccaaacugcagauaaauaggcaagugaucgucgaucggggcaaccguagcggguacucuggaauuuucucaguggagggcaagaguuguaucaaucgcugcuuuuauguagaacuaaucagagguaggaaggaggaaacugagguucucuggaccagcaacuccauuguggucuucugugggacaucuggcacuuacggaaccggcucguggcccgacggggcggauauaaaucugaugccuaucuga

SEQ ID NO: 150381 - RNA, 1410 nt, Artificial Sequence
  derived and/or modified CDS sequence (opt3) from neuraminidase__InfluenzaA__AFJ78268
augaaccccaaucagaagaucauuaccauaggcagcgugucccugacaaucucuacuauuugcuucuuuaugcaaacggccauccucauuaccacagucacucuucacuucaaacaguacgaguuuaacucaccuccaaauaaccagguuaugcugugugaaccgaccaucauagagagaaauaucacagaaauuguguauuugaccaacacuacaaucgagaaggaaauuugccccaaauuagcugaguacaggaauuggaguaagccucagugugacaucaccggguucgcaccauuuagcaaagauaacuccauacggcugucugccggaggugacauuuggguaacgcgcgagcccuaugugucgugcgauccugacaaguguuaccaauucgcgcuaggccaggggacuacccucaauaacguccauucaaauaacacagugcgagaucguacuccauauagaacccugcuuaugaaugaacugggaguucccuuucacuugggcacaaaacaggugugcaucgcuuggagcaguuccucuugucaugacgguaaggccuggcuccacgucugcauuaccggggaugacaagaacgcaacggccagcuucaucuacaauggaaggcugguggauuccaucguaucauggaguaaagagauucugcggacucaggaaagcgaguguguuugcauaaacggcacauguaccguggucaugacugacggcucugcuuccgggaaggcagauacaaaaauccucuuuauugaggaaggaaagaucgugcauaccucaaaguuaagcgguagugcccaacacguggaggaaugcucuugcuauccucgcuacccaggcgucagauguguuugcagggacaacuggaaaggguccaaucggccgauaguggauauuaacaugaaggaccacagcaucguaucgucuuacguguguuccggacuggucggcgacacgccccgcaaaaaugauucaaguagcuccucucauugccuugacccuaacaaugaggaaggugggcacggagugaagggcugggcuuucgaugacggcaacgauguuuggauggggcgaaccaucagcgagaaaucaagauugggauaugagacauuuaaggugauugaagguuggaguaauccaaaauccaagcugcagaucaacaggcaggucauuguggaccggggcaaucguagcggguacucuggaauauucucaguagagggcaagaguuguaucaaccgcugcuuuuauguugaacuaauuagagguaggaaagaggaaacugaggugcucuggaccagcaauuccaucgucguguucugugggacaucuggcacuuacggaaccggcucguggcccgauggggccgacaucaaccugaugccuauuuga

SEQ ID NO: 150382 - RNA, 1410 nt, Artificial Sequence
  derived and/or modified CDS sequence (opt3) from neuraminidase__InfluenzaA__AFJ78279
augaaccccaaucagaagaucauuaccauaggcagcgugucccugacaaucucuacuauuugcuucuuuaugcaaacggccauccucauuaccacagucacucuucacuucaaacaguacgaguuuaacucaccuccaaauaaccagguuaugcugugugaaccgaccaucauagagagaaauaucacagaaauuguguauuugaucaacaccacuauugagaaggaaaucugccccaaauuagcugaguacaggaauuggaguaagccucagugugacauaacaggguucgcaccauuuagcaaagauaacuccauucggcugucugccggaggugacaucuggguaacccgcgagcccuaugugucgugcgauccugacaaguguuaccaauucgcgcuaggccaggggacgacucucaauaacguccauucaaauaacaccgugcgagaucguacaccauauagaacucugcuuaugaaugaacugggaguucccuuucacuugggcaccaaacaggugugcauugcuuggagcaguuccucuugucaugacgguaaggccuggcuccacgucugcaucacaggggaugacaagaacgcaaccgccagcuucaucuacaauggaaggcugguggauuccauuguaucauggaguaaagagauacugcggacgcaggaaagcgaguguguuugcaucaacggcacuuguacaguggucaugaccgacggcucugcuuccgggaaggcagauacuaaaauucucuuuaucgaggaaggaaagauagugcauacaucaaccuuaagcgguggcgcccaacacguggaggaaugcaguugcuauccucgcuacccaggggucagauguguuugcagggacaacuggaagggaucuaaucggccgauuguggauaucaacaucaaagaccacuccauuguaagcucguacguguguucuggccuggucggugacacgccccgcaagaaugauuccucaaguagcucccauugccuugacccuaacaaugaggaagggggacacggcgugaaaggcugggcuuucgaugacgggaacgauguuuggaugggacgaaccaucucugaaaagagcagauuggguuaugagacauuuaaagugauugagggcuggucaaauccaaagaguaaacugcagauaaacaggcaggucaucguggaccgggggaaucguuccggauacagcggcauuuucucuguagaggguaagucauguaucaaccgcugcuuuuauguugaacuaaucagagggaggaaggaggaaacugaggugcucuggaccaguaauagcauugucguguucuguggcacauccggaacuuacggcaccgggucuuggcccgauggagccgacauaaaccugaugccuaucuga

SEQ ID NO: 150383 - RNA, 1410 nt, Artificial Sequence
  derived and/or modified CDS sequence (opt3) from neuraminidase__InfluenzaA__AFJ78290
augaaccccaaucagaagaucauuaccauaggcagcgugucccugacaaucucuacuauuugcuucuuuaugcaaaucgccauucucaucacgaccgucacacuucacuucaaacaguacgaguuuaacucaccuccaaauaaccagguuaugcugugugaaccgacuauaaucgagagaaauauuaccgaaaucguguauuugacaaacaccacuauugagaaggaaaucugccccaaauuagcugaguacaggaauuggaguaagccucagugugacauaacaggguucgcaccauuuagcaaagauaacuccauucggcugucugccggaggugacaucuggguaacccgcgagcccuaugugucgugcgauccugacaaguguuaccaauucgcgcuaggccaggggacgacucucaauaacguccauucaaauaacaccgugcgagaucguacaccauauagaacucugcuuaugaaugaacugggaguucccuuucacuugggcaccaaacaggugugcauugcuuggagcaguuccucuugucaugacgguaaggccuggcuccacgucugcaucacaggggaugacaagaacgcaaccgccagcuucaucuacaauggaaggcugguggauuccguaguuucauggaguaaagagauucugcggacgcaggaaagcgagugugugugcauaaacggcacuuguacagucgugaugaccgacggcucugcuuccgggaaggcagauacuaaaauccucuuuauugaggaaggaaagaucgugcauacaucagccuuaagcgguagugcucaacacgucgaggaaugcucuugcuauccucgcuacccaggcguuagaugugugugcagggacaacuggaagggguccaaucggccgauaguagauauuaacaucaaagaccacagcaucgugucgucuuacgucuguuccggacuggugggcgacacccccaggaagaaugauucaaguagcuccucucauugccuugacccuaacaaugaggaaggugggcacggaguuaaaggcugggccuucgaugacggcaacgauguguggauggggcgaacgauuagcgagaagucaagauugggauaugagaccuuuaaagucaucgaagguuggaguaauccaaaguccaaacugcagauuaaccgccaggugauaguagaccggggcaaucguagcggguacucuggaaucuucucaguugagggcaagaguuguauuaaccgcugcuuuuauguggaacuaaucagagguaggaaggaggaaacagagguccucuggacuagcaauuccaucguggucuucugugggaccucuggcacauacggaacuggcucguggcccgauggggcggacauuaaccugaugccuauauga

SEQ ID NO: 150384 - RNA, 1413 nt, Artificial Sequence
  derived and/or modified CDS sequence (opt3) from neuraminidase__InfluenzaA__AFJ78312
augaaccccaaucagaagaucauuaccauaggcagcaucuccauugccaucgggauuaucucucugaugcuccaaauaggaaacaucauuucaaucugggcuagucacagcauucagacagguucccagaaucauacuggcaucugcaaccagagaauaauuacguacgaaaauucuaccugggugaaccacacauaugucaauaucaacaauacuaacguuguggcagggaaagacaagaccucgguaacacuugccggaaauucaagccuguguaguauuuccggcugggcgaucuacaccaaagauaacucuaucaggauugguagcaagggggacguguucgucauacgggagccuuuuaucuccugcucacauuuggagugucgcacuuucuuuuuaacacaaggagcucugcuaaaugauaaacacaguaacggcaccgugaaggaccgaagcccauaucgugcccucaugucuugcccgcugggcgaagcacccuccccuuacaauucaaaguucgagagcguugccuggagugcuucugcaugucaugaugggaugggauggcuuacgauugguaucuccggcccagacaacggggccguggcuguccugaaauauaacggaauaauuacugaaaccaucaagagcugggagaaaagaaucuugaggacacaggagucggaaugcguguguguaaauggcucuugcuuuacuauuaugaccgauggucccuccaacggggccgcgucauacaagaucuucaaaauugagaagggaaagguuacaaaaaguauagaacucaaugcaccuaacagccacuaugaggaguguuccugcuacccagacaccggcacggugaugugugucugccgggauaauuggcacggcucuaaccgccccugggugagcuuuaaucagaaccuggacuaccagaucggguauauuugcucaggaguguucggugauaauccuagaccaaaggacggcgaagggaguuguaacccggucacugccgauggagcugacggcguuaaagguuuuuccuacaaguaugggaauggcguguggaucggaaggacaaaaagcaaccggcugcgcaagggcuucgagaugaucugggaccccaauggguggaccgauacugacucugauuuuucaguaaaacaagacguggucgccauuacagauuggaguggauacagcgguuccuucgugcagcauccugaacucaccggcuuagacugcauacgaccauguuuuuggguugagcuggugagagggaggccccgggaaaacacgaccaucuggacaucuggaucgagcauuuccuucugcggcgucaauucagauacugcaaacuggaguuggccugacggugcugagcuuccauucaccaucgauaaguga

SEQ ID NO: 150385 - RNA, 1410 nt, Artificial Sequence; identical to SEQ ID NO: 150317
  derived and/or modified CDS sequence (opt3) from neuraminidase__InfluenzaA__AFJ78323

SEQ ID NO: 150386 - RNA, 1413 nt, Artificial Sequence
  derived and/or modified CDS sequence (opt3) from neuraminidase__InfluenzaA__AFJ78334
augaaccccaaucagaagaucauuaccauaggcagcaucuccauugccaucgggauuaucucucugaugcuccaaauaggaaacaucauuucaaucugggcuagucacagcauucagacagguucccagaaucauacuggcaucugcaaccagagaauaauuacguacgaaaauucuaccugggugaaccacacauaugugaauaucaacaauacuaacguuguggcagggaaagacaagaccucgguaacacuugccggaaauucaagccuguguaguauuuccggcugggcgaucuacaccaaagauaacucuaucaggauugguagcaagggggacguguucgucauacgggagccuuuuaucuccugcucacauuuggagugucgcacuuucuuuuuaacacaaggagcucugcuaaaugauaaacacaguaacggcaccgugaaggaccgaagcccauaucgugcccucaugucuugcccgcugggcgaagcacccuccccuuacaauucaaaguucgagagcguugccuggagugcuucugcaugucaugaugggaugggauggcuuacgauugguaucuccggcccagacaacggggccguggcuguccugaaauauaacggaauaauuacugaaaccaucaagagcuggaaaaagcagaucuugagaacacaggagucggagugcguguguguaaauggcucuugcuuuacuauuaugaccgauggucccuccaacggggccgcgucauacaaaaucuucaagauugaaaagggaaaaguuacaaagaguauagagcucaaugcaccuaacuuucacuaugaagaguguagcugcuacccagacaccggcacggugaugugugucugcagggauaauuggcacggcuccaaccggcccugggugucuuucaaucagaaccuggacuaccaaaucggguauauuugcagcggaguguuuggugauaauccucgcccaaaagacggcgaggggucauguaacccggucacuguugauggagccgacggcgugaaggguuucaguuacaaauaugggaauggcguauggaucggaagaacaaaguccaacaggcugcggaaaggcuuugaaaugaucugggaccccaauggguggaccgauacugacagcgauuucucugugaagcaggacgucguggcuauuacagauuggucaggauacagugguagcuuuguucagcauccugagcucaccggcuuagacugcauacgcccauguuucuggguggaacugguccgagggcuucccagagagaacacgaccaucuggacauccggaucuucgauuagcuucugcggcgucaauuccgauacugccaacuggucauggccugacggugcagaauugccauuuaccaucgauaaguga

SEQ ID NO: 150387 - RNA, 1413 nt, Artificial Sequence; identical to SEQ ID NO: 150386
  derived and/or modified CDS sequence (opt3) from neuraminidase__InfluenzaA__AFJ78345

SEQ ID NO: 150388 - RNA, 1413 nt, Artificial Sequence
  derived and/or modified CDS sequence (opt3) from neuraminidase__InfluenzaA__AFJ78356
augaaccccaaucagaagaucauuaccauaggcagcaucuccauugccaucgggauuaucucucugaugcuccaaauaggaaacaucauuucaaucugggcuagucacagcauucagacagguucccagaaucauacuggcaucugcaaccagagaauaauuacguacgaaaauucuaccugggugaaccacacauaugugaauaucaacaauacuaacguugugguagggaaagacaagaccucggugacacuugcaggaaauucaagccuguguaguauuuccggcugggccaucuacaccaaagauaacucuaucaggauugguagcaagggggacgucuucgugauacgggagccuuuuaucuccugcucacauuuggagugucgcacuuucuuuuuaacacaaggagcgcugcuaaaugauaaacacaguaacggcaccguuaaggaccgaagcccauaucgugcucucaugucuugcccgcugggcgaagcccccuccccuuacaauucaaaguucgagagcguggcauggagugccucugcuugucaugaugggaugggauggcuuacgauugguaucuccggcccagacaacggggcagucgccgugcugaaauauaacggaauaauuacugaaaccaucaagagcuggaaaaagcagaucuugagaacacaggagucggagugcguauguguuaauggcucuugcuuuacuauuaugaccgauggucccuccaacggggcugccucauacaaaaucuucaagauugaaaagggaaaagugacaaagaguauagagcucaaugcgccuaacuuucacuaugaagaguguagcugcuacccagacaccggcacggucauguguaucugcagggauaauuggcacggcuccaaccggcccugggugucuuucaaucagaaccuggacuaccaaauuggguauaucugcagcggaguguuuggugauaauccucgcccaaaagacggcgaggggucauguaacccggucacuguugauggagcagacggcgugaaggguuucaguuacaaauaugggaauggcguauggaucggaagaacaaaguccaacaggcugcggaaaggcuuugaaaugauuugggaccccaauggguggaccgauacugacagcgauuucucugugaagcaggacgucguggccauaacagauuggucaggauacagugguagcuuuguucagcauccugagcucaccggcuuagacugcauccgcccauguuucuggguggaacugguccgagggcuucccagagagaacacgaccauuuggacauccggaucuucgaucagcuucugcggcgucaauuccgauacugcuaacuggucauggccugacggugccgaauugccauuuaccauugauaaguga

SEQ ID NO: 150389 - RNA, 1413 nt, Artificial Sequence
  derived and/or modified CDS sequence (opt3) from neuraminidase__InfluenzaA__AFJ78367
augaaccccaaucagaagaucauuaccauaggcagcaucuccauugccaucgggauuaucucucugaugcuccaaauaggaaacaucauuucaaucugggcuagucacagcauucagacagguucccagaaucauacuggcaucugcaaccagagaauaauuacguacgaaaauucuaccugggugaaccacacauaugucaauaucaacaauacuaacguuguggcagggaaagacaagaccucgguaacacuugccggaaauucaagccuguguaguauuuccggcugggcgaucuacaccaaagauaacucuaucaggauugguagcaagggggacguguucgucauacgggagccuuuuaucuccugcucacauuuggagugucgcacuuucuuuuuaacacaaggagcucugcuaaaugauaaacacaguaacggcaccgugaaggaccgaagcccauaucgugcccucaugucuugcccgcugggcgaagcacccuccccuuacaauucaaaguucgagagcguugccuggagugcuucugcaugucaugaugggaugggauggcuuacgauugguaucuccggcccagacaacggggccguggcuguccugaaauauaacggaauaauuacugaaaccaucaagagcuggaaaaagagaaucuugaggacacaggagucggagugcguguguguaaauggcucuugcuuuacuauuaugaccgauggucccuccaacggggccgcgucauacaaaaucuucaagauugaaaagggaaaaguuacaaagaguauagagcucaaugcaccuaacagccacuaugaagaguguuccugcuacccagacaccggcacggugaugugugucugccgggauaauuggcacggcucuaaccgccccugggugagcuuuaaucagaaccuggacuaccagaucggguauauuugcucaggaguguucggugauaauccuagaccaaaagacggcgaggggaguuguaacccggucacugccgauggagcugacggcguuaaggguuuuuccuacaaauaugggaauggcguguggaucggaaggacaaagagcaaccggcugcgcaaaggcuucgaaaugaucugggaccccaauggguggaccgauacugacucugauuuuucaguaaagcaagacguggucgccauuacagauuggaguggauacagcgguuccuucgugcagcauccugagcucaccggcuuagacugcauacgaccauguuuuuggguugaacuggugagagggaggccccgggagaacacgaccaucuggacaucuggaucgagcauuuccuucugcggcgucaauggugauacugcaaacuggucauggccugacggggcugaacuuccauucaccaucgauaaguga

SEQ ID NO: 150390 - RNA, 1413 nt, Artificial Sequence
  derived and/or modified CDS sequence (opt3) from neuraminidase__InfluenzaA__AFJ78378
augaaccccaaucagaaggugaucaccauuggcagcauauccaucgccauugggaucauuucucugaugcuccaaaucggaaacauaaucucaauuugggcuagucacagcauccagacagguucccagaaucauacuggcauuugcaaccagagaaucauaacguacgaaaauucuaccugggucaaccacacauauguuaauauuaacaauacuaacgugguagcagggaaagacaagaccucggugacacuugccggaaauucaagccuguguaguaucuccggcugggcgauuuacaccaaagauaacucuaucaggaucgguagcaagggggacgucuucgugauucgggagccuuuuauauccugcucacauauggagugucgcacuuucuuuuugacacaaggagcuuuacugaaugauaaacacaguaacggcaccguuaaggaccgaagcccauaucgugcccuaaugucuugcccgcucggcgaagcacccuccccuuacaauucaaaguucgagagcguggccuggagugcuucugcaugucaugaugggaugggauggcugacgaucgguauuuccggcccagacaacggggccgucgcugugcuuaaauauaacggaaucauaacugaaaccauuaagagcuggaaaaagagaauccugaggacacaggagucggagugcguauguguuaauggcucuugcuuuacuaucaugaccgauggucccuccaacggggccgcgucauacaaaauuuucaagaucgaaaagggaaaagugacaaagaguauugaguugaaugcaccuaacagccacuaugaagaguguuccugcuacccagacaccggcacggucaugugugugugccgggauaauuggcacggcucuaaccgccccugggugagcuuuaaucagaaccucgacuaccagauaggguauaucugcucaggagucuucggugauaauccuagaccaagggacggcgaggggaguuguaacccgguuacuguggauggagccgacggcguaaaagguuuuuccuacaaguaugggaauggcguguggauuggacggacaaaaagcaaccgccugcgaaagggcuucgaaaugaucugggaccccaauggguggaccgauacugacucugauuuugcugucaaacaagacgugguugccaucacagauuggucaggauacagugguagcuucgugcagcauccugagcugaccggccucgacugcauuagaccauguuuuugggucgaauuagugagggggcugccccgggagaacacgaccauauggacauccggaucuucgaucagcuucugcggcguaaauuccgauacugcaaacuggucauggccugacggugcugaacuuccauucaccauugauaaguga

SEQ ID NO: 150391 - RNA, 1413 nt, Artificial Sequence; identical to SEQ ID NO: 142434
  derived and/or modified CDS sequence (opt3) from neuraminidase__InfluenzaA__AFJ78389

SEQ ID NO: 150392 - RNA, 1413 nt, Artificial Sequence; identical to SEQ ID NO: 142434
  derived and/or modified CDS sequence (opt3) from neuraminidase__InfluenzaA__AFJ78400

SEQ ID NO: 150393 - RNA, 1413 nt, Artificial Sequence; identical to SEQ ID NO: 142434
  derived and/or modified CDS sequence (opt3) from neuraminidase__InfluenzaA__AFJ78411

SEQ ID NO: 150394 - RNA, 1413 nt, Artificial Sequence
  derived and/or modified CDS sequence (opt3) from neuraminidase__InfluenzaA__AFJ78422
augaaccccaaucagaagaucauuaccauaggcagcaucuccauugccaucgggauuaucucucugaugcuccaaauaggaaacaucauuucaaucugggcuagucacagcauucagacagguucccagaaucauacuggcaucugcaaccagagaauaauuacguacgaaaauucuaccugggugaaccacacauaugucaauaucaacaauacuaacguuguggcagggaaagacaagaccucgguaacacuugccggaaauucaagccuguguaguauuuccggcugggcgaucuacaccaaagauaacucuaucaggauugguagcaagggggacguguucgucauacgggagccuuuuaucuccugcucacauuuggagugucgcacuuucuuuuuaacacaaggagcucugcuaaaugauaaacacaguaacggcaccgugaaggaccgaagcccauaucgugcccucaugucuugcccgcugggcgaagcacccuccccuuacaauucaaaguucgagagcguugccuggagugcuucugcaugucaugaugggacgggauggcuuacuauugguaucuccggcccagacaacggggccguggcuguccugaaauauaacggaauaauuaccgaaacaaucaagagcuggaaaaagagaaucuugaggacucaggagucggagugcguguguaugaauggcucuugcuuuaccauuaugacagauggucccuccaacggggccgcgucauacaaaaucuucaagauugaaaagggaaaaguaaccaagaguauagagcucaaugcaccuagcuuucacuaugaagaguguuccugcuacccagacacgggcacuguuaugugugugugccgggauaacuggcacggcucuaaucgccccugggucagcuucaaccagaaucuggacuaccagaucggguauauuugcucaggaguguuuggugauaacccuagaccacaagacggcgaggggaguuguaauccggugacagucgauggagccgacggcguuaaagguuucuccuacaaguaugggaacggcguguggaucggaaggaccaaaagcaaucggcugcgcaagggcuuugaaaugaucugggaccccaacggguggacuaauacagauucugacuucucaguaaaacaggauguggucgcuauuaccgacuggaguggauacagcgguuccuuugugcagcauccugagcucacgggcuuagauugcauacgaccauguuucuggguugaacuggugagagggcuucccagggagaacaccacaaucuggacuucuggaucgagcauuuccuucugcggcgucaauucagacaccgccaacuggaguuggccugauggugcagaauugccauuuacaaucgacaaguga

SEQ ID NO: 150395 - RNA, 1413 nt, Artificial Sequence; identical to SEQ ID NO: 144541
  derived and/or modified CDS sequence (opt3) from neuraminidase__InfluenzaA__AFJ78433

SEQ ID NO: 150396 - RNA, 1413 nt, Artificial Sequence; identical to SEQ ID NO: 144541
  derived and/or modified CDS sequence (opt3) from neuraminidase__InfluenzaA__AFJ78444

SEQ ID NO: 150397 - RNA, 1413 nt, Artificial Sequence
  derived and/or modified CDS sequence (opt3) from neuraminidase__InfluenzaA__AFJ78466
augaaccccaaucagaagaucauuaccauaggcagcaucuccauugccaucgggauuaucucucugaugcuccaaauaggaaacaucauuucaaucugggcuagucacagcauucagacagguucccagaaucauacuggcaucugcaaccagagaauaauuacguacgaaaauucuaccugggugaaccacacauaugucaauaucaacaauacuaacguuguggcagggaaagacaagaccucgguaacacuugccggaaauucaagccuguguaguauuuccggcugggcgaucuacaccaaagauaacucuaucaggauugguagcaagggggacguguucgucauacgggagccuuuuaucuccugcucacauuuggagugucgcacuuucuuuuuaacacaaggagcucugcuaaaugauaaacacaguaacggcaccgugaaggaccgaagcccauaucgugcccucaugucuugcccgcugggcgaagcacccuccccuuacaauucaaaguucgagagcguugccuggagugcuucugcaugucaugaugggauuggauggcuuacgaucgguauauccggcccagacaacggggccguggcuguccugaaauauaacggaauuaucacuggcaccaucaagagcuggaaaaagcagauuuugagaacacaggaaucggagugcguguguaucaaugguucuugcuuuacuauuaugaccgaugggcccuccaacggagccgcgucauacaaaauauucaagaucgagaagggcaaaguaacaaagaguauugaacucaaugcaccuaacuuucacuaugaggaauguagcugcuacccagacaccggcacgguuaugugugugugcagggauaauuggcacggguccaaccggcccugggucucuuucaaucagaaccuggacuaccaaaucggauauaucugcagcgguguguuuggcgauaauccucgcccaaaagacggggagggaagauguaacccggugacugucgauggcgccgacgguguuaagggguucucauacaaauauggcaauggaguguggauuggcaggacaaagaguaaccggcugcgcaaaggguuugagaugauaugggaccccaauggauggaccaacacugauuccgacuucagcguaaagcaggauguggucgcuaucacagacuggucugguuacucaggcaguuuugugcagcauccugaacucaccggguuagauugcauucgaccauguuucuggguugagcuggugagaggacuucccagggaaaauacgaccaucuggacaagcggcuccucuauuucguucugcggugucaacagcgacacugccaacugguccuggccugauggggcagaguugccauuuaccaucgacaaguga

SEQ ID NO: 150398 - RNA, 1413 nt, Artificial Sequence
  derived and/or modified CDS sequence (opt3) from neuraminidase__InfluenzaA__AFJ78477
augaaccccaaucagaagaucauuaccauaggcagcaucuccauugccaucgggauuaucggacugaugcuccaaauagguaacaucauuucuaucugggcuucacacaguauucagacaggcagccagaaucauacugggaucugcucccagagaauaauuacguacgagaacucuaccugggugaauaacacauaugucaauaucaacaauacuaacguuguggcagaaaaagacaagaccucgguaacacuugccggaaauucaagccuguguaguauuuccggcugggcgaucuacaccaaagauaacucuaucaggauugguagcaagggggacguguucgucauacgggagccuuuuaucuccugcucacacuuggaaugucgcacuuucuuuuuaacacaaggagcucugcuaaaugauaaacauaguaacggcaccgugaaggaccgaagcccauaucgugcccucaugucuugcccgcugggcgaggcacccuccccuuacaauucaagauucgaaagcguugccuggagugcuucugcaugucacgaugggaugggauggcuuacgauugguaucuccggcccagacaacggggccguggcuguccugaaguauaacggaauaauuacugagaccaucaaaagcuggaagaaaaggaucuugcggacacaggagucggaaugcguguguaugaauggcucuugcuuuacuauuaugaccgauggucccuccaacggggccgcgucauacaagaucuucaaaauugagaagggaaagguaacaaaaaguauagaacucaaugcaccuaacuuucauuaugaggaguguagcugcuacccagacaccggcacgguuaugugugugugccgcgauaauuggcacggcuccaacagacccugggucucuuucaaucagaaccuggacuaccagaucggguauauuugcagcggaguguuuggugauaauccuaggccaaaggacggcgaagggucauguaacccggugacugucgauggagccgacggcguuaaagguuucaguuacaaguaugggaauggcguguggaucggacggacaaaauccaaccgccugcgaaagggcuuugagaugaucugggaccccaauggguggaccaacacugauagcgacuucucuguaaaacaagauguggucgcuauuacagacuggucaggauacagugguagcuuugugcagcacccugaacucaccggcuuagauugcauaagaccauguuucuggguugagcuggugagggggcuuccccgggaaaauacgaccaucuggacauccggaucuucgauuagcuucugcggcgucaacuccgguacugccaacuggucauggccugacggggcagaguugccauuuaccaucgauaaguga

SEQ ID NO: 150399 - RNA, 1413 nt, Artificial Sequence
  derived and/or modified CDS sequence (opt3) from neuraminidase__InfluenzaA__AFJ78488
augaaccccaaucagaagaucauuaccauaggcagcaucuccauugccaucgggauuaucucucugauacuccaaaucggaaacauuaucucaauuugggcuagucacagcauccagacagguucccagaaucauacuggcauaugcaaccagagaauuaucacguacgaaaauucuaccugggugaacaauacauaugucaacauuaauaacacuaauguuguggcagagaaagacaagaccucgguaacacuugccgggaacucaagccuguguaguaucuccggaugggcgaucuacaccaaagauaauucuauuaggauaggcagcaagggugacguguucgucauccgggagccuuuuauuuccugcucacacuuggaaugucgcacuuucuuuuuaacacaaggggcucugcuaaacgauaaacauaguaauggaaccgugaaggaccgaagcccauaucgugcccucaugucuugcccgcugggcgaggcacccuccccuuacaacucaagauucgaaagcguugccuggagugcuucugcaugucacgauggcaugggguggcuuacgaucggaauauccgguccagacaacggcgccguggcuguccugaaguauaaugggauuaucacugagaccaucaaaagcuggaagaaaaggauuuugcggacacaggagucggaaugcguguguaugaacggaucuugcuuuacuaucaugaccgauggccccuccaauggugccgcgucauacaagauuuucaaaauagagaaggggaagguaacaaaaaccaucgaacucaacgcaccuaauuuucauuaugaggaguguaguugcuacccagacacgggaacuguuaugugugugugccgcgauaacuggcacggcagcaauagacccugggucuccuucaaccagaaucuggacuaccagauuggcuauaucugcucugggguguuuggagauaacccuaggccaaaggacggugaaggcagcuguaauccggugacagucgauggggccgacggaguuaaaggcuucucauacaaguaugguaacgggguguggaucggccggaccaaaaguaaucgccugcgaaagggauuugagaugauuugggaccccaacggcuggacuaauacagauuccgacuucagcaugaaacaagauguaguggcuauaaccgacuggucuggguacucaggaaguuuuguccagcacccugaacucacggguuuagauugcaucagaccauguuucuggguggagcugguuaggggccuuccccgggaaaacaccacaauuuggacuagcggguccucuaucucguucugcggagugaacagcggcaccgccaauugguccuggccugacggugcagaguugccauuuacaauugauaaguga

SEQ ID NO: 150400 - RNA, 1413 nt, Artificial Sequence
  derived and/or modified CDS sequence (opt3) from neuraminidase__InfluenzaA__AFJ78510
augaaccccaaucagaagaucauuaccauaggcagcaucuccauugccaucgggauuaucucucugaugcuccaaauaggaaacaucauuucaaucugggcuagucacagcauucagacagguucccagaaucauacuggcaucugcaaccagagaauaauuacguacgaaaauucuaccugggugaaccacacauaugucaauaucaacaauacuaacguuguggcagggaaagacaagaccucgguaacacuugccggaaauucaagccuguguaguauuuccggcugggcgaucuacaccaaagauaacucuaucaggauugguagcaagggggacguguucgucauacgggagccuuuuaucuccugcucacauuuggagugucgcacuuucuuuuuaacacaaggagcucugcuaaaugauaaacacaguaacggcaccgugaaggaccgaagcccauaucgugcccucaugucuugcccgcugggcgaagcacccuccccuuacaauucaaaguucgagagcguugccuggagugcuucugcaugucaugaugggaugggauggcuuacgauugguaucuccggcccagacaacggggccguggcuguccugaaauauaacggaauaauuacuggcaccaucaagagcuggaaaaagcagaucuugagaacacaggaaucggagugcguguguaugaaugguucuugcuuuacuauuaugaccgaugggcccuccaacggagccgcgucauacaaaaucuucaagauugagaagggcaaaguaacaaagaguauagaacucaaugcaccuaacuuucacuaugaggaauguagcugcuacccagacaccggcaucguuaugugugugugcagggauaauuggcacggguccaaccggcccugggucucuuucaaucagaaccuggacuaccaaauuggauauaucugcagcgguguguuuggcgauaauccucgcccaaaagacggggagggaucauguaacccggugacggucgauggcgccgacgguguuaagggguucaguuacaaauaugacaauggcguguggaucggaagaacuaaguccaacaggcugcggaaaggcuuugagaugauuugggaucccaauggguggacaaacaccgacagcgauuucucuguaaagcaggacguggucgcuauaacugauuggucaggauacagugguagcuuugugcagcauccugaacucacaggcuuagacugcauccgcccauguuucuggguugagcuggugcgagggcuucccagagaaaauaccacgauuuggaccuccggaucuucgaucagcuucugcggcgucaacuccgauacagccaacuggucauggccugacggugcagaguugccauuuacuauugauaaguga

SEQ ID NO: 150401 - RNA, 1413 nt, Artificial Sequence
  derived and/or modified CDS sequence (opt3) from neuraminidase__InfluenzaA__AFJ78521
augaaccccaaucagaagaucauuaccauaggcagcaucuccauugccaucgggauuaucucucugauacuccaaaucggaaacauuaucucaauuugggcuagucacagcauccagacagguucccagaaucauacuggcauaugcaaccagagaauuaucacguacgaaaauucuaccugggugaacaauacauaugucaacauuaauaacacuaauguuguggcagagaaagacaagaccucgguaacacuugccgggaacucaagccuguguaguaucuccggaugggcgaucuacaccaaagauaauucuauuaggauaggcagcaagggugacguguucgucauccgggagccuuuuauuuccugcucacacuuggaaugucgcacuuucuuuuuaacacaaggggcucugcuaaacgauaaacauaguaauggaaccgugaaggaccgaagcccauaucgugcccucaugucuugcccgcugggcgaggcacccuccccuuacaacucaagauucgaaagcguugccuggagugcuucugcaugucacgauggcaugggguggcuuacgaucggaauauccgguccagacaacggcgccguggcuguccugaaguauaaugggauuaucacugagaccaucaaaagcuggaagaaaaggauuuugcggacacaggagucggaaugcguguguaugaacggaucuugcuuuacuaucaugaccgauggccccuccaauggugccgcgucauacaagauuuucaaaauagagaaggggaagguaacaaaaaccaucgaacucaacgcaccuaauuuucauuaugaggaguguaguugcuacccagacacgggaacuguuaugugugugugccgcgauaacuggcacggcagcaauagacccugggucuccuucaaccagaaucuggacuaccagauuggcuauaucugcucugggguguuuggagauaacccuaggccaaaggacggugaaggcagcuguaauccggugacagucgauggggccgacggaguuaaaggcuucucauacaaguaugguaacgggguguggaucggccggaccaaaaguaaucgccugcgaaagggauuugagaugauuugggaccccaacggcuggacuaauacagauuccgacuucagcguaaaacaagauguggucgcuauaaccgacuggucuggguacucaggaaguuuugugcagcacccugaacucacggguuuagauugcaucagaccauguuucuggguugagcuggugaggggccuuccccgggaaaacaccacaauuuggacuagcggguccucuaucucguucugcggagucaacagcggcaccgccaauugguccuggccugacggugcagaguugccauuuacaauugauaaguga

SEQ ID NO: 150402 - RNA, 1413 nt, Artificial Sequence; identical to SEQ ID NO: 150295
  derived and/or modified CDS sequence (opt3) from neuraminidase__InfluenzaA__AFJ78532

SEQ ID NO: 150403 - RNA, 1413 nt, Artificial Sequence; identical to SEQ ID NO: 150295
  derived and/or modified CDS sequence (opt3) from neuraminidase__InfluenzaA__AFJ78543

SEQ ID NO: 150404 - RNA, 1413 nt, Artificial Sequence; identical to SEQ ID NO: 150295
  derived and/or modified CDS sequence (opt3) from neuraminidase__InfluenzaA__AFJ78554

SEQ ID NO: 150405 - RNA, 1413 nt, Artificial Sequence; identical to SEQ ID NO: 150283
  derived and/or modified CDS sequence (opt3) from neuraminidase__InfluenzaA__AFJ78565

SEQ ID NO: 150406 - RNA, 1413 nt, Artificial Sequence
  derived and/or modified CDS sequence (opt3) from neuraminidase__InfluenzaA__AFJ78576
augaaccccaaucagaagaucauuaccauaggcagcaucuccauugccaucgggauuaucucucugaugcuccaaauaggaaacaucauuucaaucugggcuagucacagcauucagacagguucccagaaucauacuggcaucugcaaccagagaauaauuacguacgagaauaguaccugggugaaccacacauaugucaauaucaacaauacuaacguuguggcagggaaagacaagaccccuguaacacuugccggaaauucgucacuguguagcauuaguggcugggcgauccauaccaaagauaacuccaucaggauugguucuaagggggacguguucgucauacgggaaccauuuaucagcugcucccacuuggaguguaaaacuuucuuuuuaacacaaggagcucugcuaaaugauaagcauucaaacggcaccgugaaggaccgcaguccguaccgagcccucaugagcugcccccugggcgaagcaccuucuccauauaauuccaaauucgagucaguugccuggagcgcuagugcaugucacgaugggauuggauggcuuacgaucgguauaucuggccccgacaacggggccguggcuguccugaaguacaacggaauuaucacuggcaccaucaaauccuggaagaaacagauuuugcguacacaggaaagcgagugcguguguaugaaugguucgugcuuuacuaucaugaccgaugggccuucuaacggagccgcguccuauaagauuuucaagauagagaaaggcaagguaacaaaaucaauggaacucaaugcaccaaacuuucacuacgaggaauguaguugcuaucccgacaccggcacgguuaugugugugugcagagauaauuggcaugggagcaacaggccuugggucuccuucaaucagaaccuggacuaccaaaucggauacauuugcacugguguguuuggcgauaauccacggccggaggacggggagggaucuuguaaccccgugacagucgauggcgccaaugguguuaagggguucagcuauaaauacggcaacggaguguggaucggccgcaccaagucaaauagaaucaggaaaggguuugaaaugauuugggacccuaacggauggacuaauacagacagugauuucuccguaaagcaggacauaguggcuaucaccgauuggagcgguuauucuggcucauuuguccagcacccagagcugacggggcucgacugcauucggcccuguuucuggguggaauuaguucgcggacugccucgagagaacaccacaaucuggacuucuggcagcuccauuucuuucugcggugugaacucggauaucgccaauuggagcuggccagacggggcagaacuucccuuuaccauagauaaguga

SEQ ID NO: 150407 - RNA, 1413 nt, Artificial Sequence
  derived and/or modified CDS sequence (opt3) from neuraminidase__InfluenzaA__AFJ78598
augaaccccaaucagaagaucauuaccauaggcagcaucuccauugccaucgggauuaucucucugaugcuccaaauaggaaacaucauuucaaucugggcuagucacagcauucagacagguauccagaauaacacuggcauaugcaaucagagaauuaucacguacgagaacuccaccugggugaaucauacauaugucaacauuaauaacacuaauguuguggcaggggaagacaaaaccucuguaacacuugccggaaacucgucacuguguagcaucaguggcugggcgaucuacaccaaggauaauuccauuaggauagguucuaaaggggacguguucgucauccgggagccuuuuauuagcugcucccacuuggaaugucgcacuuucuuuuuaacacaaggagcucugcuaaacgauaagcauucaaauggcaccgugaaagaccgaaguccauaucgugcccucaugagcugcccgcugggcgaggcacccucuccuuacaacuccaaguucgaaucaguugccuggagcgcuagugcaugucacgaugggaugggauggcuuacgaucgguauaucuggcccagacaacggggccguggcuguccugaaguauaauggaauuaucacuggcaccaucaaauccuggaagaaacagauuuugagaacacaggagagcgagugcguguguaugaacgguucgugcuuuacuaucaugaccgaugggcccucuaauaaggccgcguccuacaaaauuuucaagauagaaaagggaaaaguaacaaagucaaucgagcucaacgcaccuaauuuucauuaugaagaguguaguugcuacccagacaccggcauuguuaugugugugugcagggauaacuggcacggcagcaaucggcccugggucuccuucaaccagaaucuggacuaccaaaucggguauaucugcucuggaguguuuggugauaacccucgcccagaggacggcgaagggagcuguaauccggugacggucgauggagccaacggcguuaaagguuucucauacaaguaugacaaugggguguggauuggcagaacuaaaaguaacaggcugcggaagggauuugagaugauaugggaccccaauggcuggacaaacaccgauuccgacuucagcguaaaacaggauguggucgcuaucacugacuggucuggguacucaggaaguuuugugcagcacccugaacucacagguuuagauugcauucgcccauguuucuggguugagcuggugcgaggccuucccagagaaaacaccacgaucuggaccagcggguccucuauuucguucugcggagucaauagcgacacagccaacugguccuggccugauggcgcagaguugccauuuacuaucgacaaguga

SEQ ID NO: 150408 - RNA, 1413 nt, Artificial Sequence
  derived and/or modified CDS sequence (opt3) from neuraminidase__InfluenzaA__AFJ78609
augaaccccaaucagaagaucauuaccauaggcagcaucuccauugccaucgggauuaucucucugaugcuccaaauaggaaacaucauuucaaucugggcuagucacagcauucagacagguucccagaauaacacuggcaucugcaaucagagaauaauuacguacgagaacucuaccugggugaaucauacauaugucaacaucaauaacacuaauguuguggcaggggaagacaaaaccucgguaauucuugccggaaacucaagccuguguaguaucuccggcugggcgaucuacacaaaggauaauucuauuaggauagguagcaaaggggacguguucgucauccgggagccuuuuauuuccugcucacacuuggaaugucgcaccuucuuuuuaacucaaggagcucugcuaaacgauaagcauaguaauggcacagugaaagaccgaagcccauaucgugcccucaugucuugcccgcugggcgaggcacccuccccuuacaacucaaaguucgaaagcguugccuggagugcuucugcaugucacgaugggaugggauggcuuaccaucgguauauccggcccagacaacggggccguggcuguccugaaguauaauggaauuaucacgggcacuaucaaaagcuggaagaaacagauuuugagaacccaggagucggagugcguguguaugaacgguucuugcuuuacaaucaugacugaugggcccuccaauaaggccgcgucauacaaaauuuucaagauagaaaagggaaaaguaaccaagaguaucgagcucaacgcaccuaauuuuuauuacgaagaguguagcugcuacccagacacaggcauuguuaugugugugugcagggauaacuggcauggcuccaaucggcccugggucucuuucaaccagaaucuggacuaucaaaucggguacaucugcagcggaguguuuggugauaacccucgcccagaggacggcgaagggucauguaauccggugaccgucgauggagccaacggcguuaaagguuucaguuauaaguacgggaauggcguguggauuggaagaacgaaauccaacaggcugcggaagggcuuugagaugauaugggaccccaauggguggacuaacacagacagcgauuucucuguaaaacaggacguggucgcuaucaccgauuggucaggauauagugguagcuuugugcagcacccugaacucacuggcuuagacugcauucgcccauguuucuggguugagcuggugcgagggcuucccagagaaaacacaaccaucuggacguccggaucuucgauuagcuucugcggcgucaauuccgauaccgccaacuggucauggccugacggugcagaguugccauuuacaaucgauaaguga

SEQ ID NO: 150409 - RNA, 1413 nt, Artificial Sequence; identical to SEQ ID NO: 145509
  derived and/or modified CDS sequence (opt3) from neuraminidase__InfluenzaA__AFJ78620

SEQ ID NO: 150410 - RNA, 1413 nt, Artificial Sequence; identical to SEQ ID NO: 150283
  derived and/or modified CDS sequence (opt3) from neuraminidase__InfluenzaA__AFJ78631

SEQ ID NO: 150411 - RNA, 1413 nt, Artificial Sequence; identical to SEQ ID NO: 145509
  derived and/or modified CDS sequence (opt3) from neuraminidase__InfluenzaA__AFJ78642

SEQ ID NO: 150412 - RNA, 1413 nt, Artificial Sequence; identical to SEQ ID NO: 145509
  derived and/or modified CDS sequence (opt3) from neuraminidase__InfluenzaA__AFJ78653

SEQ ID NO: 150413 - RNA, 1410 nt, Artificial Sequence; identical to SEQ ID NO: 144786
  derived and/or modified CDS sequence (opt3) from neuraminidase__InfluenzaA__AFJ78664

SEQ ID NO: 150414 - RNA, 1410 nt, Artificial Sequence; identical to SEQ ID NO: 144786
  derived and/or modified CDS sequence (opt3) from neuraminidase__InfluenzaA__AFJ78674

SEQ ID NO: 150415 - RNA, 1410 nt, Artificial Sequence; identical to SEQ ID NO: 144786
  derived and/or modified CDS sequence (opt3) from neuraminidase__InfluenzaA__AFJ78684

SEQ ID NO: 150416 - RNA, 1410 nt, Artificial Sequence; identical to SEQ ID NO: 144786
  derived and/or modified CDS sequence (opt3) from neuraminidase__InfluenzaA__AFJ78694

SEQ ID NO: 150417 - RNA, 1410 nt, Artificial Sequence; identical to SEQ ID NO: 144786
  derived and/or modified CDS sequence (opt3) from neuraminidase__InfluenzaA__AFJ78704

SEQ ID NO: 150418 - RNA, 1410 nt, Artificial Sequence; identical to SEQ ID NO: 144786
  derived and/or modified CDS sequence (opt3) from neuraminidase__InfluenzaA__AFJ78714

SEQ ID NO: 150419 - RNA, 1410 nt, Artificial Sequence
  derived and/or modified CDS sequence (opt3) from neuraminidase__InfluenzaA__AFJ78724
augaaccccaaucagaagaucauuaccauaggcagcgugugcaugacaaucgggauggccaaccugauucuccaaaucggaaauauuaucuccauauggaucucucacucaauucagcuugguaaccagaaucagaucgagacuuguaaccaaagugucauuacguacgaaaauaacaccuggguuaaucagacauaugugaacaucagcaauacuaacuucgcugcaggccaguccguagugucugucaaacuggccggaaauucgucauugugcccugugagcggaugggcgauauacaguaaggacaacuccauuagaaucggcucuaaaggugauguuuuugugauuagggagccauucaucagcuguuccccguuagaaugccggaccuuuuuccugacacagggggcucuacucaaugacaagcauucaaacggaaccaucaaagaucgcagucccuaucgaacucugaugagcuguccuauuggcgaggucccaucucccuacaacucccguuuugaaucaguggccuggagcgcaagugccugccacgacggcauaaauuggcuuacaaucgggauuucuggaccugauaacggugcuguagcaguucugaaguauaauggcaucauaaccgacacgauuaaguccuggagaaacaauaucuugaggacucaagagagcgagugugccugcgugaacgggucguguuucacccucaugacagauggaccaucugacggccaggcuuccuacaaaaucuuucggauugaaaaggguaaaaucgucaagucaguggagaugaaugcccccaacuaucauuacgaagagugcaguuguuacccugauagcuccgagauuacuugcgugugccgcgacaauuggcacgggucuaacagaccaugggucagcuucaaucagaaccuggaauaucagauaggauacaucuguucaggcauuuuuggcgauaauccgaggcccaacgacaaaaccgggaguugcggaccuguuuccagcaauggugcgaacggcgugaagggguucucuuuuaaguauggaaacggcguauggaucggucggacaaaaucaaucaguagccgcaauggguucgagaugauuugggauccaaacggcuggaccggaacggacaauaacuuuuccauaaagcaagacaucgugggcauuaaugaauggucuggguacucggggagcuucguccagcaucccgagcugacuggucucgauuguauccgaccuugcuucuggguggaauuaauuagaggcaggccaaaagagaacacaaucuggaccuccgggucaaguauaucuuuuuguggaguuaauagcgacacugugggcugguccuggcccgauggugcagagcugccguucacaaucgacaaguga

SEQ ID NO: 150420 - RNA, 1410 nt, Artificial Sequence; identical to SEQ ID NO: 144786
  derived and/or modified CDS sequence (opt3) from neuraminidase__InfluenzaA__AFJ78734

SEQ ID NO: 150421 - RNA, 1410 nt, Artificial Sequence; identical to SEQ ID NO: 144786
  derived and/or modified CDS sequence (opt3) from neuraminidase__InfluenzaA__AFJ78744

SEQ ID NO: 150422 - RNA, 1410 nt, Artificial Sequence; identical to SEQ ID NO: 144786
  derived and/or modified CDS sequence (opt3) from neuraminidase__InfluenzaA__AFJ78754

SEQ ID NO: 150423 - RNA, 1410 nt, Artificial Sequence; identical to SEQ ID NO: 144786
  derived and/or modified CDS sequence (opt3) from neuraminidase__InfluenzaA__AFJ78764

SEQ ID NO: 150424 - RNA, 1410 nt, Artificial Sequence; identical to SEQ ID NO: 144786
  derived and/or modified CDS sequence (opt3) from neuraminidase__InfluenzaA__AFJ78774

SEQ ID NO: 150425 - RNA, 1410 nt, Artificial Sequence; identical to SEQ ID NO: 144786
  derived and/or modified CDS sequence (opt3) from neuraminidase__InfluenzaA__AFJ78784

SEQ ID NO: 150426 - RNA, 1410 nt, Artificial Sequence
  derived and/or modified CDS sequence (opt3) from neuraminidase__InfluenzaA__AFJ78794
augaaccccaaucagaagaucauuaccauaggcagcgugugcaugacaaucgggauggccaaccugauucuccaaaucggaaauauuaucuccauauggaucucucacucaauucagcuugguaaccagaaucagaucgagacuuguaaccaaagugucauuacguacgaaaauaacaccuggguuaaucagacauaugugaacaucagcaauacuaacuucgcugcaggccaguccguagugucugucaaacuggccggaaauucgucauugugcccugugagcgggugggcgauauacaguaaggacaacuccauuagaaucggcucuaaaggugauguuuuugugauuagggagccauucaucagcuguuccccguuagaaugccggaccuuuuuccugacacagggggcucuacucaaugacaagcauucaaacggaaccaucaaagaucgcagucccuaucgaacucugaugagcuguccuauuggcgaggucccaucucccuacaacucccguuuugaaucaguggccuggagcgcaagugccugccacgacggcauaaauuggcuuacaaucgggauuucuggaccugauaacggugcuguagcaguucugaaguauaauggcaucauaaccgacacgauuaaguccuggagaaacaauaucuugaggacucaagagagcgagugugccugcgugaacgggucguguuucaccgucaugacagauggaccaucugacggccaggcuuccuacaaaaucuuucggauugaaaaggguaaaaucgugaagucaguggagaugaaugcccccaacuaucauuacgaagagugcaguuguuacccugauagcggggagauuacuugcgucugccgcgacaauuggcacggauccaacagaccauggguuucuuucaaucagaaccucgaauaucagauaggcuacaucuguagcggcauuuuuggggauaauccgaggcccaacgacaaaaccggaucaugcgguccugugaguuccaauggcgcgaacgggguaaagggauucagcuuuaaguauggcaacgguguguggaucgggcggacaaaaucuaucucaagucgcaauggcuucgagaugauuugggauccaaacggauggaccggcacggacaauaacuuuagcauaaagcaagacaucgucgggauuaaugaaugguccggauacucugguucguucgugcagcaucccgagcugacuggccuggauuguauccgaccuugcuucuggguugaacucauuagagggaggccaaaagagaacacaaucuggaccagcggauccucaauaaguuuuuguggcgucaauucugacacuguggguuggagcuggcccgauggggcagaguuaccguucacaaucgacaaguga

SEQ ID NO: 150427 - RNA, 1410 nt, Artificial Sequence; identical to SEQ ID NO: 144786
  derived and/or modified CDS sequence (opt3) from neuraminidase__InfluenzaA__AFJ78804

SEQ ID NO: 150428 - RNA, 1410 nt, Artificial Sequence; identical to SEQ ID NO: 144786
  derived and/or modified CDS sequence (opt3) from neuraminidase__InfluenzaA__AFJ78814

SEQ ID NO: 150429 - RNA, 1410 nt, Artificial Sequence; identical to SEQ ID NO: 144786
  derived and/or modified CDS sequence (opt3) from neuraminidase__InfluenzaA__AFJ78824

SEQ ID NO: 150430 - RNA, 1410 nt, Artificial Sequence; identical to SEQ ID NO: 144786
  derived and/or modified CDS sequence (opt3) from neuraminidase__InfluenzaA__AFJ78834

SEQ ID NO: 150431 - RNA, 1410 nt, Artificial Sequence; identical to SEQ ID NO: 144786
  derived and/or modified CDS sequence (opt3) from neuraminidase__InfluenzaA__AFJ78844

SEQ ID NO: 150432 - RNA, 1410 nt, Artificial Sequence; identical to SEQ ID NO: 147035
  derived and/or modified CDS sequence (opt3) from neuraminidase__InfluenzaA__AFJ78854

SEQ ID NO: 150433 - RNA, 1410 nt, Artificial Sequence; identical to SEQ ID NO: 144786
  derived and/or modified CDS sequence (opt3) from neuraminidase__InfluenzaA__AFJ78864

SEQ ID NO: 150434 - RNA, 1410 nt, Artificial Sequence; identical to SEQ ID NO: 144786
  derived and/or modified CDS sequence (opt3) from neuraminidase__InfluenzaA__AFJ78874

SEQ ID NO: 150435 - RNA, 1410 nt, Artificial Sequence; identical to SEQ ID NO: 144786
  derived and/or modified CDS sequence (opt3) from neuraminidase__InfluenzaA__AFJ78884

SEQ ID NO: 150436 - RNA, 1410 nt, Artificial Sequence; identical to SEQ ID NO: 144786
  derived and/or modified CDS sequence (opt3) from neuraminidase__InfluenzaA__AFJ78894

SEQ ID NO: 150437 - RNA, 1410 nt, Artificial Sequence; identical to SEQ ID NO: 144786
  derived and/or modified CDS sequence (opt3) from neuraminidase__InfluenzaA__AFJ78904

SEQ ID NO: 150438 - RNA, 1410 nt, Artificial Sequence; identical to SEQ ID NO: 144786
  derived and/or modified CDS sequence (opt3) from neuraminidase__InfluenzaA__AFJ78914

SEQ ID NO: 150439 - RNA, 1410 nt, Artificial Sequence
  derived and/or modified CDS sequence (opt3) from neuraminidase__InfluenzaA__AFJ78924
augaaccccaaucagaagaucauuaccauaggcagcgugugcaugacaaucgggauggccaaccugauucuccaaaucggaaauauuaucuccauauggaucucucacucaauucagcuugguaaccagaaucagaucgagacuuguaaccaaagugucauuacguacgaaaauaacaccuggguuaaucagacauauguggacaucagcaacacuaauuucgcugcaggccaguccguagugucugucaaacuggccgggaacucgucauugugcccugugagcggaugggcgauauacaguaaggauaauuccauuagaaucggcucuaaaggugacguuuuugugauuagggagccauucaucagcuguuccccguuagaaugccggaccuuuuuccugacacagggggcucuacucaacgauaagcauucaaauggaaccaucaaagaccgcagucccuaucgaacucugaugagcuguccuauuggcgagauaccaucucccuacaacucccguuuugaaucagucgccuggagcgcaagugccugccacgauggcaucaacuggcuuacaauugggaucucuggaccugacaauggugcuguggcaguacugaaguauaacggcauaauuaccgauacgaucaaguccuggagaaauaacaucuugaggacucaagagagcgagugugccugcguuaaugggucguguuucaccgugaugacagacggaccaucugauggccaggcuuccuacaaaauuuuucggaucgaaaaggguaaaauugucaagucaguggagaugaacgcccccaauuaucauuacgaagagugcaguuguuacccugacagcuccgagauaacuugcgugugccgcgauaacuggcacgggucuaauagaccaugggucagcuucaaccagaaucucgaauaucagaucggauacauuuguucaggcaucuuuggcgacaacccgaggcccaaugauaaaaccgggaguugcggaccuguuuccagcaacggugcgaauggcgugaagggguucucuuuuaaguauggaaacggcguauggaucggucggacaaaaucaauuaguagccgcaacggguucgagaugauaugggacccaaauggcuggaccggaacggacaacaauuuuuccaucaagcaagauauugugggcaucaacgaauggucuggguacucggguagcuucguccagcaucccgagcugacuggacuggacuguauucgaccuugcuucuggguggaacucaucagaggcaggccaaaagagaauacaauauggaccuccgggucaaguaucucuuuuuguggaguuaacagcgauacugugggcugguccuggcccgacggugcagaguuaccguucacaauugauaaguga

SEQ ID NO: 150440 - RNA, 1410 nt, Artificial Sequence
  derived and/or modified CDS sequence (opt3) from neuraminidase__InfluenzaA__AFJ97569
augaaccccaaucagaagaucauuaccauaggcagcgugugcaugacaaucgggauggccaaccugauucuccaaaucggaaauauuaucuccauauggaucucucacucaauucagcuugguaaccagaaucagaucgagacuuguaaccaaagugucauuacguacgaaaauaacaccuggguuaaucagacauaugugaacaucagcaauacuaacuucgcugcaggccaguccguagugucugucaaacuggccggaaauucgucauugugcccugugagcgggugggcgauauacaguaaggacaacuccauuagaaucggcucuaaaggugauguuuuugugauuagggagccauucaucagcuguuccccguuagaaugccggaccuuuuuccugacacagggggcucuacucaaugacaagcauucaaacgagaccaucaaagaucgcagucccuaucgaacucugaugagcuguccuauuggagaagucccaucucccuacaacucccguuuugagucaguggccuggagcgcaagugccugccacgacggcauaaauuggcuuacaaucggcauuucugggccugauaacggagcuguagcaguucugaaguauaaugguaucauaaccgacacgauuaaguccuggagaaacaauaucuugaggacucaagagagcgaaugugccugcgugaacggcucguguuucaccgucaugacagaugggccaucugacggacaggcuuccuacaaaaucuuucggauugagaagggcaaaaucgugaagucaguggaaaugaaugcccccaacuaucauuacgaggagugcaguuguuacccugauagcuccgaaauuacuugcgucugccgcgacaauuggcacgguucuaacagaccauggguuagcuucaaucagaaccucgaguaucagauaggguacaucuguucaggaauuuuuggcgauaauccgaggcccaacgacaaaaccggcaguugcgggccuguguccagcaauggagcgaacgguguaaagggcuucucuuuuaaguaugggaacggaguguggaucggccggacaaaaucaaucaguagccgcaaugguuucgaaaugauuugggauccaaacggguggaccggcacggacaauaacuuuuccauaaagcaagacaucgucggaauuaaugaguggucuggcuacucggggagcuucgugcagcaucccgaacugacuggacuggauuguauccgaccuugcuucuggguugagcucauuagagguaggccaaaagagaacacaaucuggaccuccggcucaaguauaucuuuuuguggggugaauagcgacacugucuccuggucauggcccgauggagcagaauuaccguucacaaucgacaaguga

SEQ ID NO: 150441 - RNA, 1410 nt, Artificial Sequence; identical to SEQ ID NO: 144776
  derived and/or modified CDS sequence (opt3) from neuraminidase__InfluenzaA__AFK14107

SEQ ID NO: 150442 - RNA, 1410 nt, Artificial Sequence; identical to SEQ ID NO: 144786
  derived and/or modified CDS sequence (opt3) from neuraminidase__InfluenzaA__AFK14117

SEQ ID NO: 150443 - RNA, 1410 nt, Artificial Sequence; identical to SEQ ID NO: 145553
  derived and/or modified CDS sequence (opt3) from neuraminidase__InfluenzaA__AFK14141

SEQ ID NO: 150444 - RNA, 1410 nt, Artificial Sequence
  derived and/or modified CDS sequence (opt3) from neuraminidase__InfluenzaA__AFK14150
augaaccccaaucagaagaucauuaccauaggcagcgugugcaugacaaucgggauggccaaccugauucuccaaaucggaaauauuaucuccauauggaucucucacucaauuagacuugguaaccagaaucagaucgagacuuguaaccagagugucauuacguacgaaaauaacaccuggguuaaucaaacauaugugaacaucagcaauacuaacuucgcugcaggccaguccguagugucugucaaacuggccggaaauucgucauugugcccugugagcgggugggcgauauacaguaaggacaacuccauuaggaucggcucuaaaggugauguuuuugugauucgggagccauucaucagcuguuccccguuagaaugccgcaccuuuuuccugacacagggggcucuacucaaugacaagcauucaaacggaaccaucaaagaucgaagucccuaucguacucugaugagcuguccuauuggcgaggucccaucucccuacaacuccagauuugaaucaguggccuggagcgcaagugccugccacgacggcauaaauuggcuuacaaucgggauuucuggaccugauaacggugcuguagcaguucugaaguauaauggcaucauaaccgacacgauuaaguccuggaggaacaauaucuugcggacucaggagagcgagugugccugcgugaacgggucguguuucaccgucaugacagauggaccaucugacgaacaggcuuccuacaaaaucuuucgcauugagaagggcaaaaucgugaagucaguggaaaugaaugcccccaacuaucauuacgaggagugcaguuguuacccugauagcuccgaaauuacuugcgucugcagagacaauuggcacgguucuaacaggccauggguuagcuucaaucaaaaccucgaguaucagauaggguacaucuguucaggaauuuuuggcgauaauccgcggcccaacgacaaaaccggcaguugcgggccuguguccagcaauggagcgaacgguguaaagggcuucucuuuuaaguaugggaacggaguguggaucggccgcacaaaaucaaucaguagccgaaaugguuucgaaaugauuugggauccaaacggguggaccggcacggacaauaacuuuuccauaaagcaggacaucgucggaauuaaugaguggucuggcuacucggggagcuucgugcaacaucccgaacugacuggacuggauuguaucagaccuugcuucuggguugagcucauuaggggucggccaaaagagaacacaaucuggaccuccggcucaaguauaucuuuuuguggggugaauagcgacacugucggaugguccuggcccgauggcgcagaauuaccguucacaaucgacaaguga

SEQ ID NO: 150445 - RNA, 1410 nt, Artificial Sequence; identical to SEQ ID NO: 145369
  derived and/or modified CDS sequence (opt3) from neuraminidase__InfluenzaA__AFK14159

SEQ ID NO: 150446 - RNA, 1410 nt, Artificial Sequence; identical to SEQ ID NO: 144786
  derived and/or modified CDS sequence (opt3) from neuraminidase__InfluenzaA__AFK14168

SEQ ID NO: 150447 - RNA, 1410 nt, Artificial Sequence; identical to SEQ ID NO: 144786
  derived and/or modified CDS sequence (opt3) from neuraminidase__InfluenzaA__AFK14177

SEQ ID NO: 150448 - RNA, 1410 nt, Artificial Sequence
  derived and/or modified CDS sequence (opt3) from neuraminidase__InfluenzaA__AFK14186
augaaccccaaucagaagaucauuaccauaggcagcgugugcaugacaaucgggauggccaaccugauucuccaaaucggaaauauuaucuccauauggaucucucacucaauucagcuugguaaccagaaucagaucgagacuuguaaccaaagugucauuacguacgaaaauaacaccuggguuaaucagacauaugugaacaucagcaauacuaacuucgcugcaggccaguccguagugucugucaaacuggccggaaauucgucauugugcccugugagcggaugggcgauauacaguaaggacaacuccauuagaaucggcucuaaaggugauguuuuugugauuagggagccauucaucagcuguuccccguuagaaugccggaccuuuuuccugacacagggggcucuacucaaugacaagcauucaaacggaaccaucaaagaucgcagucccuaucgaacucugaugagcuguccuauuggcgaggucccaucucccuacaacucccguuuugaaucaguggccuggagcgcaagugccugccacgacggcauaaauuggcuuacaaucgggauuucuggaccugauaacggugcuguagcaguucugaaguauaauggcaucauaaccgacacgauuaaguccuggagaaacaauaucuugaggacucaagagagcgagugugccugcgugaacgggucguguuucaccgucaugacagauggaccaucugacggccaggcuuccuacaaaaucuuucggauugaaaaggguaaaaucgugaagucaguggagaugaaugcccccaacuaucauuucgaagagugcaguuguuacccugauagcuccgagauuacuugcgucugccgcgacaauuggcacgggucuaacagaccauggguuagcuuuaaucagaaccucgaauaccagauaggauauaucuguucaggcauuuucggcgauaauccgaggcccaacgacaaaaccgggaguugcggaccuguguccagcaauggugcgaacggcguaaagggguuuucuuucaaguacggaaacggcguguggaucggucggacaaaaucaaucaguagccgcaauggguuugagaugauuugggauccaaacggcuggaccggaacggacaauaacuucuccauaaagcaagacaucgucggcauuaaugaauggucuggguauucggggagcuucgugcagcaucccgagcugacuggucuggauuguauccgaccuugcuuuuggguugaacucauuagaggcaggccaaaagagaacacaaucuggaccuccgggucaaguauaucuuucuguggagugaauagcgacacugucggcugguccuggcccgauggugcagaguuaccguuuacaaucgacaaguga

SEQ ID NO: 150449 - RNA, 1410 nt, Artificial Sequence; identical to SEQ ID NO: 146767
  derived and/or modified CDS sequence (opt3) from neuraminidase__InfluenzaA__AFK14195

SEQ ID NO: 150450 - RNA, 1410 nt, Artificial Sequence; identical to SEQ ID NO: 144786
  derived and/or modified CDS sequence (opt3) from neuraminidase__InfluenzaA__AFK14204

SEQ ID NO: 150451 - RNA, 1410 nt, Artificial Sequence; identical to SEQ ID NO: 146767
  derived and/or modified CDS sequence (opt3) from neuraminidase__InfluenzaA__AFK14213

SEQ ID NO: 150452 - RNA, 1410 nt, Artificial Sequence
  derived and/or modified CDS sequence (opt3) from neuraminidase__InfluenzaA__AFK14222
augaaccccaaucagaagaucauuaccauaggcagcgugugcaugacaaucgggauggccaaccugauucuccaaaucggaaauauuaucuccauauggaucucucacucaauuagacuugguaaccagaaucagaucgagacuuguaaccagagugucauuacguacgaaaauaacaccuggguuaaucaaacauaugugaacaucagcaauacuaacuucgcugcaggccaguccguagugucugucaaacuggccggaaauucgucauugugcccugugagcggaugggcgauauacaguaaggacaacuccauuaggaucggcucuaaaggugauguuuuugugauucgggagccauucaucagcuguuccccguuagaaugccgcaccuuuuuccugacacagggggcucuacucaaugacaagcauucaaacggaaccaucaaagaucgaagucccuaucguacucugaugagcuguccuauuggcgaggucccaucucccuacaacuccagauuugaaucaguggccuggagcgcaagugccugccacgacggcauaaauuggcuuacaaucgggauuucuggaccugauaacggugcuguagcaguucugaaguauaauggcaucauaaccgacacgauuaaguccuggaggaacaauaucuugcggacucaggagagcgagugugccugcgugaacgggucguguuucaccgucaugacagauggaccaucugacggccaggcuuccuacaaaaucuuucgcauugaaaaggguaaaaucgugaagucaguggagaugaaugcccccaacuaucauuacgaagagugcaguuguuacccugauagcuccgagauuacuugcgucugcagagacaauuggcacgggucuaacaggccauggguuagcuucaaucaaaaccucgaauaucagauaggauacaucuguucaggcauuuuuggcgauaauccgcggcccaacgacaaaaccgggaguugcggaccuguguccagcaauggugcgaacggcguaaagggguucucuuuuaaguauggaaacggcguguggaucggucgcacaaaaucaaucaguagccgaaauggguucgagaugauuugggauccaaacggcuggaccggaacggacaauaacuuuuccauaaagcaggacaucgucggcauuaaugaauggucuggguacucggggagcuucgugcaacaucccgagcugacuggucuggauuguaucagaccuugcuucuggguugaacucauuaggggccggccaaaagagaacacaaucuggaccuccgggucaaguauaucuuuuuguggagugaauagcgacacugucggcugguccuggcccgauggugcagaguuaccguucacaaucgacaaguga

SEQ ID NO: 150453 - RNA, 1410 nt, Artificial Sequence; identical to SEQ ID NO: 145369
  derived and/or modified CDS sequence (opt3) from neuraminidase__InfluenzaA__AFK14231

SEQ ID NO: 150454 - RNA, 1410 nt, Artificial Sequence; identical to SEQ ID NO: 144786
  derived and/or modified CDS sequence (opt3) from neuraminidase__InfluenzaA__AFK14240

SEQ ID NO: 150455 - RNA, 1410 nt, Artificial Sequence; identical to SEQ ID NO: 145553
  derived and/or modified CDS sequence (opt3) from neuraminidase__InfluenzaA__AFK14249

SEQ ID NO: 150456 - RNA, 1410 nt, Artificial Sequence; identical to SEQ ID NO: 144786
  derived and/or modified CDS sequence (opt3) from neuraminidase__InfluenzaA__AFK14257

SEQ ID NO: 150457 - RNA, 1410 nt, Artificial Sequence; identical to SEQ ID NO: 144786
  derived and/or modified CDS sequence (opt3) from neuraminidase__InfluenzaA__AFK14266

SEQ ID NO: 150458 - RNA, 1410 nt, Artificial Sequence; identical to SEQ ID NO: 144786
  derived and/or modified CDS sequence (opt3) from neuraminidase__InfluenzaA__AFK14274

SEQ ID NO: 150459 - RNA, 1410 nt, Artificial Sequence
  derived and/or modified CDS sequence (opt3) from neuraminidase__InfluenzaA__AFK14281
augaaccccaaucagaagaucauuaccauaggcagcgugugcaugacaaucgggauggccaaccugauucuccaaaucggaaauauuaucuccauauggaucucucacucaauucagcuugguaaccagaaucagaucgagacuuguaaccaaagugucauuacguacgaaaauaacaccuggguuaaucagacagacgugaacaucagcaauacuaacuucgcugcaggccaguccguagugucugucaaacuggccggaaauucgucauugugcccugugagcggaugggcgauauauaguaaggauaacuccauuagaaucggcucuaaaggugacguuuuugugauuagggagccauucaucagcuguuccccguuagaaugccggaccuuuuuccugacacagggggcucuacucaaugauaagcauucaaacggaaccaucaaagaccgcagucccuaccgaacucugaugagcuguccuauuggcgaggucccaucucccuauaacucccguuuugaaucaguggccuggagcgcaagugccugccacgauggcauaaauuggcuuacaaucgggauuucuggaccugacaacggugcuguagcaguucugaaguacaauggcaucauaaccgauacgauuaaguccuggagaaacaauaucuugaggacucaagagagcgagugugccugcgugaacgggucguguuucaccgucaugacagacggaccaucugauggccaggcuuccuauaaaaucuuucggauugaaaaggguaaaaucgugaagucaguggagaugaaugcccccaacuaccauuaugaagagugcaguuguuacccugacagcuccgagauuacuugcgucugccgcgauaauuggcacgggucuaacagaccauggguuagcuucaaucagaaccucgaauaccagauaggauauaucuguucaggcauuuuuggcgacaauccgaggcccaacgauaaaaccgggaguugcggaccuguguccagcaauggugcgaacggcguaaagggguucucuuuuaaguacggaaacggcguguggaucggucggacaaaaucaaucaguagccgcaauggguucgagaugauuugggacccaaacggcuggaccggaacggacaauaacuuuuccauaaagcaagauaucgucggcauuaaugaauggucuggguauucggggagcuucgugcagcaucccgagcugacuggucuggacuguauccgaccuugcuucuggguugaacucauuagaggcaggccaaaagagaacacaaucuggaccuccgggucaaguauaucuuuuuguggagugaauagcgauacugucggcugguccuggcccgacggugcagaguuaccguucacaaucgauaaguga

SEQ ID NO: 150460 - RNA, 1410 nt, Artificial Sequence; identical to SEQ ID NO: 144786
  derived and/or modified CDS sequence (opt3) from neuraminidase__InfluenzaA__AFK14289

SEQ ID NO: 150461 - RNA, 1410 nt, Artificial Sequence; identical to SEQ ID NO: 145369
  derived and/or modified CDS sequence (opt3) from neuraminidase__InfluenzaA__AFK14298

SEQ ID NO: 150462 - RNA, 1410 nt, Artificial Sequence; identical to SEQ ID NO: 144786
  derived and/or modified CDS sequence (opt3) from neuraminidase__InfluenzaA__AFK14307

SEQ ID NO: 150463 - RNA, 1410 nt, Artificial Sequence; identical to SEQ ID NO: 146767
  derived and/or modified CDS sequence (opt3) from neuraminidase__InfluenzaA__AFK14316

SEQ ID NO: 150464 - RNA, 1410 nt, Artificial Sequence
  derived and/or modified CDS sequence (opt3) from neuraminidase__InfluenzaA__AFK14325
augaaccccaaucagaagaucauuaccauaggcagcgugugcaugacaaucgggauggccaaccugauucuccaaaucggaaauauuaucuccauauggaucucucacucaauucagcuugguaaccagaaucagaucgagacuuguaaccaaagugucauuacguacgaaaauaacaccuggguuaaucagacauaugugaacaucagcaauacuaacuucgcugcaggccaguccguagugucugucaaacuggccggaaauucgucauugugcccugugagcggaugggcgauauacaguaaggacaacuccauuagaaucggcucuaaaggugauguuuuugugauuagggagccauucaucagcuguuccccguuagaaugccggaccuuuuuccugacacagggggcucuacucaaugacaagcauucaaacggaaccaucaaagaucgcagucccuaucgaacucugaugagcuguccuauuggcgaggucccaucucccuacaacucccguuuugaaucaguggccuggagcgcaagugccugccacgacggcauaaauuggcuuacaaucgggauuucuggaccugauaacggugcuguagcaguucugaaguauaauggcaucauaaccgacacgauuaaguccuggagaaacaauaucuugaggacucaagagagcgagugugccugcgugaacgggucguguuucaccgucaugacagauggaccaucugacggccaggcuuccuacaaaaucuuucggauugaacgcgguaagaucgugaaaucaguggagaugaaugcccccaacuaucauuacgaagagugcaguuguuacccugauagcuccgagauuacuugcgucugcagagacaauuggcacgggucuaacaggccauggguuagcuucaaucagaaccucgaauaucagauaggauacaucuguucaggcauuuuuggcgauaauccgcggcccaacgacaagaccgggaguugcggaccuguguccagcaauggugcgaacggcguaaaaggguucucuuuuaaguauggaaacggcguguggaucggucgcacaaagucaaucaguagccgaaauggguucgagaugauuugggauccaaacggcuggaccggaacggacaauaacuuuuccauaaaacaagacaucgucggcauuaaugaauggucuggguacucggggagcuucgugcagcaucccgagcugacuggucuggauuguaucagaccuugcuucuggguugaacucauuaggggccggccaaaggagaacacaaucuggaccuccgggucaaguauaucuuuuuguggagugaauagcgacacugucggcugguccuggcccgauggugcagaguuaccguucacaaucgacaaauga

SEQ ID NO: 150465 - RNA, 1410 nt, Artificial Sequence; identical to SEQ ID NO: 144786
  derived and/or modified CDS sequence (opt3) from neuraminidase__InfluenzaA__AFK14334

SEQ ID NO: 150466 - RNA, 1410 nt, Artificial Sequence; identical to SEQ ID NO: 144786
  derived and/or modified CDS sequence (opt3) from neuraminidase__InfluenzaA__AFK14343

SEQ ID NO: 150467 - RNA, 1410 nt, Artificial Sequence; identical to SEQ ID NO: 144786
  derived and/or modified CDS sequence (opt3) from neuraminidase__InfluenzaA__AFK14352

SEQ ID NO: 150468 - RNA, 1410 nt, Artificial Sequence; identical to SEQ ID NO: 144786
  derived and/or modified CDS sequence (opt3) from neuraminidase__InfluenzaA__AFK14360

SEQ ID NO: 150469 - RNA, 1410 nt, Artificial Sequence; identical to SEQ ID NO: 144786
  derived and/or modified CDS sequence (opt3) from neuraminidase__InfluenzaA__AFK14369

SEQ ID NO: 150470 - RNA, 1410 nt, Artificial Sequence
  derived and/or modified CDS sequence (opt3) from neuraminidase__InfluenzaA__AFK14387
augaaccccaaucagaagaucauuaccauaggcagcgugugcaugacaaucgggauggccaaccugauucuccaaaucggaaauauuacuuccaucuggauaucucacucaauccagcuugguaaccagaaucagauugacacguguaaccaaagugucaucaccuacgagaauaacacauggguuaaucagacuuaugugaacauuagcaauaccaacuucgcugcaggccaguccguagugucugucaaacuggccggaaauucgucauugugcccugugagcggaugggcgaucuacaguaaggauaacuccauaagaauuggcucuaaaggugacguuuuugugaucagggaaccauucauuagcuguuccccguuagagugccggacauuuuuccugacccagggggcucuacucaaugauaagcauucaaacggaacuaucaaagaccgcagucccuaucgaacacugaugagcuguccuaucggcgaagucccaucucccuacaacucccguuuugagucaguggccuggagcgcaagugccugccacgauggcauuaauuggcuuaccauagggaucucuggaccugacaacggugcuguagcaguucugaaguauaauggcauuaucacggauacuauaaaguccuggagaaacaauauuuugaggacccaagaaagcgagugugccugcgugaacgggucguguuucacagucaugacugacggaccaucugauggccaggcuuccuacaaaaucuuucggaucgagaaggguaaaauugugaagucaguggaaaugaaugcccccaacuaucauuacgaggaaugcaguuguuacccugacagcuccgagauuaccugcgucugccgcgauaauuggcacgggucuaacagaccauggguuagcuucaaucagaaccucgaguaucagaucggauacauauguucaggcaucuuuggcgacaauccgaggcccaacgauaaaacagggaguugcggaccuguguccagcaauggugcgaacggcguaaagggguucucuuuuaaguauggaaacggcguguggauuggucggaccaaaucaaucaguagccgcaauggguucgaaaugaucugggacccaaacggcuggacgggaacugacaauaacuuuuccauuaagcaagauauagucggcaucaaugaguggucuggguacucggggagcuucgugcagcaucccgaacugacaggucuggacuguauucgaccuugcuucuggguugagcucaucagaggcaggccaaaagaaaacaccauuuggacuuccgggucaaguaucucuuuuuguggagugaauagcgauacagucggcugguccuggcccgacggugcagaguuaccguucaccauagauaaguga

SEQ ID NO: 150471 - RNA, 1410 nt, Artificial Sequence; identical to SEQ ID NO: 145369
  derived and/or modified CDS sequence (opt3) from neuraminidase__InfluenzaA__AFK14397

SEQ ID NO: 150472 - RNA, 1410 nt, Artificial Sequence; identical to SEQ ID NO: 144786
  derived and/or modified CDS sequence (opt3) from neuraminidase__InfluenzaA__AFK14406

SEQ ID NO: 150473 - RNA, 1410 nt, Artificial Sequence; identical to SEQ ID NO: 144786
  derived and/or modified CDS sequence (opt3) from neuraminidase__InfluenzaA__AFK14415

SEQ ID NO: 150474 - RNA, 1410 nt, Artificial Sequence; identical to SEQ ID NO: 144786
  derived and/or modified CDS sequence (opt3) from neuraminidase__InfluenzaA__AFK14424

SEQ ID NO: 150475 - RNA, 1410 nt, Artificial Sequence
  derived and/or modified CDS sequence (opt3) from neuraminidase__InfluenzaA__AFK14433
augaaccccaaucagaagaucauuaccauaggcagcgugugcaugaucauugggauggccaaccugauccuccaaauuggaaauaucauauccaucuggauuucucacucaauccagcuugguaaccagaaucagauugagacauguaaccaaagugucaucacuuacgaaaauaacacguggguuaaucagaccuaugugaacauaagcaauacaaacuucgcugcaggccaguccguagugucugucaaacuggccggaaauucgucauugugcccugugagcggaugggcgauuuacaguaaggacaacuccaucagaauuggcucuaaaggugauguuuuugugaucagggagccauucaucagcuguuccccguuagaaugccggaccuuuuuccugacucagggggcucuacucaaugacaagcauucaaacggaacaauuaaagaucgcagucccuaucgaacccugaugagcuguccuauaggcgaggucccaucucccuacaacucccguuuugaaucaguggccuggagcgcaagugccugccacgacggcaucaauuggcuuacuauugggaucucuggaccugauaacggugcuguagcaguucugaaguauaauggcauaauuacagacaccaucaaguccuggagaaacaauaucuugaggacgcaagagagcgagugugccugcgugaacgggucguguuucacugucaugaccgauggaccaucugacggccaggcuuccuacaaaauuuuucggaucgaaaaggguaaaauugugaagucaguggagaugaaugcccccaacuaucauuacgaagagugcaguuguuacccugauagcuccgagauaacaugcgucugccgcgacaauuggcacgggucuaacagaccauggguuagcuucaaucagaaccucgaauaucagaucggauacauuuguucaggcaucuuuggcgauaauccgaggcccaacgacaaaacugggaguugcggaccuguguccagcaauggugcgaacggcguaaagggguucucuuuuaaguauggaaacggcguguggaucggucggaccaaaucaauuaguagccgcaauggguucgagaugauaugggauccaaacggcuggacaggaaccgacaauaacuuuuccaucaagcaagacauugucggcaucaaugaauggucuggguacucggggagcuucgugcagcaucccgagcugacgggucuggauuguauucgaccuugcuucuggguugaacucaucagaggcaggccaaaagagaacacuauauggacauccgggucaaguaucucuuuuuguggagugaauagcgacaccgucggcugguccuggcccgauggugcagaguuaccguucacuauugacaaguga

SEQ ID NO: 150476 - RNA, 1410 nt, Artificial Sequence; identical to SEQ ID NO: 144786
  derived and/or modified CDS sequence (opt3) from neuraminidase__InfluenzaA__AFK14442

SEQ ID NO: 150477 - RNA, 1410 nt, Artificial Sequence
  derived and/or modified CDS sequence (opt3) from neuraminidase__InfluenzaA__AFK14451
augaaccccaaucagaagaucauuaccauaggcagcgugugcaugacaaucgggauggccaaccugauucuccaaaucggaaauauuaucuccauauggaucucucacucaauucagcuugguaaccagaaucagaucgagacuuguaaccaaagugucauuacguacgaaaauaacaccuggguuaaucagacauaugugaacaucagcaauacuaacuucgcugcaggccaguccguagccucugcgaaacuggcuggaaauucgucauugugcccugugagcggaugggccauauacaguaaggacaacuccauuagaaucggcucuaaaggugaugucuuugugauuagggagccauucaucagcuguuccccguuagaaugccggaccuuuuuccugacacagggggcacuacucaaugacaagcauucaaacggaaccaucaaagaucgcagucccuaucgaacucugaugagcuguccuauuggcgagguuccaucucccuacaacucccguuuugaaucaguggccuggagcgcuagugcaugccacgacggcauaaauuggcuuacaaucgggauuucuggaccugauaacggugccgucgcugugcugaaguauaauggcaucauaaccgacacgauuaaguccuggagaaacaauaucuugaggacucaagagagcgagugugccugcguaaacgggucguguuucaccguuaugacagauggaccaucugacggccaggcguccuacaaaaucuuucggauugaaaaggguaaaaucgugaagucagucgagaugaaugcacccaacuaucauuacgaagagugcaguuguuacccugauagcuccgagauuacuugcgugugccgcgacaauuggcacgggucuaacagaccaugggugagcuucaaucagaaccucgaauaucagauaggauacaucuguucaggcauuuuuggcgauaauccgaggcccaacgacaaaaccgggaguugcggaccugucuccagcaauggugccaacggcguuaagggguucucuuuuaaguauggaaacggcguguggaucggucggacaaaaucaaucaguagccgcaauggguucgagaugauuugggauccaaacggcuggaccggaacggacaauaacuuuuccauaaagcaagacaucguaggcauuaaugaauggucuggguacucggggagcuucgugcagcaucccgagcugacuggucuggauuguauccgaccuugcuucugggucgaacucauuagaggcaggccaaaagagaacacaaucuggaccuccgggucaauaaucaguuuuuguggaguuaauucugacacugugggcuggagcuggcccgauggugcugaguuaccguucacaauugacaaguga

SEQ ID NO: 150478 - RNA, 1410 nt, Artificial Sequence; identical to SEQ ID NO: 144786
  derived and/or modified CDS sequence (opt3) from neuraminidase__InfluenzaA__AFK14458

SEQ ID NO: 150479 - RNA, 1410 nt, Artificial Sequence; identical to SEQ ID NO: 144786
  derived and/or modified CDS sequence (opt3) from neuraminidase__InfluenzaA__AFK14467

SEQ ID NO: 150480 - RNA, 1410 nt, Artificial Sequence; identical to SEQ ID NO: 144786
  derived and/or modified CDS sequence (opt3) from neuraminidase__InfluenzaA__AFK14476

SEQ ID NO: 150481 - RNA, 1410 nt, Artificial Sequence; identical to SEQ ID NO: 147845
  derived and/or modified CDS sequence (opt3) from neuraminidase__InfluenzaA__AFK14485

SEQ ID NO: 150482 - RNA, 1410 nt, Artificial Sequence; identical to SEQ ID NO: 144786
  derived and/or modified CDS sequence (opt3) from neuraminidase__InfluenzaA__AFK14504

SEQ ID NO: 150483 - RNA, 1410 nt, Artificial Sequence; identical to SEQ ID NO: 144786
  derived and/or modified CDS sequence (opt3) from neuraminidase__InfluenzaA__AFK14514

SEQ ID NO: 150484 - RNA, 1410 nt, Artificial Sequence; identical to SEQ ID NO: 144786
  derived and/or modified CDS sequence (opt3) from neuraminidase__InfluenzaA__AFK14522

SEQ ID NO: 150485 - RNA, 1410 nt, Artificial Sequence; identical to SEQ ID NO: 144786
  derived and/or modified CDS sequence (opt3) from neuraminidase__InfluenzaA__AFK14529

SEQ ID NO: 150486 - RNA, 1410 nt, Artificial Sequence; identical to SEQ ID NO: 144786
  derived and/or modified CDS sequence (opt3) from neuraminidase__InfluenzaA__AFK14538

SEQ ID NO: 150487 - RNA, 1410 nt, Artificial Sequence; identical to SEQ ID NO: 147161
  derived and/or modified CDS sequence (opt3) from neuraminidase__InfluenzaA__AFK14547

SEQ ID NO: 150488 - RNA, 1410 nt, Artificial Sequence
  derived and/or modified CDS sequence (opt3) from neuraminidase__InfluenzaA__AFK14555
augaaccccaaucagaagaucauuaccauaggcagcgugugcaugacaaucgggauggccaaccugauucuccaaaucggaaauauuaucuccauauggaucucucacucaauucagcuugguaaccagaaucagaucgagacuuguaaccaaagugucauuacguacgaaaauaacaccuggguuaaucagacauaugugaacaucagcaauacuaacuucgcugcaggccaguccguaauaucugugaaacuggccggaaauucgucauugugcccugucagcggaugggcgauuuacaguaaggacaacuccaucagaauuggcucuaaaggugauguguuuguuaucagggagccauucaucagcuguuccccguuagaaugccggaccuuuuuccugacacagggggcucuacucaaugacaagcauucaaacggaaccauuaaagaucgcagucccuaucgaacucugaugagcuguccuauaggcgaggugccaucucccuacaacucccguuuugaaucagucgccuggagcgcaagugccugccacgacggcaucaauuggcuuacaauugggaucucuggaccugauaacggugcuguggcaguacugaaguauaauggcauaauuaccgacacgaucaaguccuggagaaacaauaucuugaggacucaagagagcgagugugccugcguuaacgggucguguuucaccgugaugacagauggaccaucugacggccaggcuuccuacaaaauuuuucggaucgaaaaggguaaaauugucaagucaguggagaugaaugcccccaacuaucauuacgaagagugcaguuguuacccugauagcuccgagauaacuugcgugugccgcgacaauuggcacgggucuaacagaccaugggucagcuucaaucagaaccucgaauaucagaucggauacauuuguucaggcaucuuuggcgauaauccgaggcccaacgacaaaaccgggaguugcggaccuguuuccagcaauggugcgaacggcgugaagggguucucuuuuaaguauggaaacggcguauggaucggucggacaaaaucaauuaguagccgcaauggguucgagaugauaugggauccaaacggcuggaccggaacggacaauaacuuuuccaucaagcaagacauugugggcaucaaugaauggucuggguacucggggagcuucguccagcaucccgagcugacuggucuggauuguauucgaccuugcuucuggguggaacucaucagaggcaggccaaaagagaacacaauauggaccuccgggucaaguaucucuuuuuguggaguuaauagcgacacugugggcugguccuggcccgauggugcagaguuaccguucacaauugacaaguga

SEQ ID NO: 150489 - RNA, 1410 nt, Artificial Sequence; identical to SEQ ID NO: 144786
  derived and/or modified CDS sequence (opt3) from neuraminidase__InfluenzaA__AFK14564

SEQ ID NO: 150490 - RNA, 1410 nt, Artificial Sequence; identical to SEQ ID NO: 144786
  derived and/or modified CDS sequence (opt3) from neuraminidase__InfluenzaA__AFK14573

SEQ ID NO: 150491 - RNA, 1410 nt, Artificial Sequence
  derived and/or modified CDS sequence (opt3) from neuraminidase__InfluenzaA__AFK14579
augaaccccaaucagaagaucauuaccauaggcagcgugugcaugacaaucgggauggccaaccugauucuccaaaucggaaauauuaucuccauauggaucucucacucaauucagcuugguaaccagaaucagaucgagacuuguaaccaaagugucauuacguacgaaaauaacaccuggguuaaucagacauaugugaacaucagcaauacuaacuucgcugcaggccaguccguagugucugucaaacuggccggaaauucgucauugugcccugugagcggaugggcgauauacaguaaggacaacuccauuagaaucggcucuaaaggugauguuuuugugauuagggagccauucaucagcuguuccccguuagaaugccggaccuuuuuccugacacagggggcucuacucaaugacaagcauucaaacggaaccaucaaagaucgcagucccuaucgaacucugaugagcuguccuauuggcgaggucccaucucccuacaacucccguuuugaaucaguggccuggagcgcaagugccugccacgacggcauaaauuggcuuacaaucgggauuucuggaccugauaacggugcuguagcaguucugaaguauaauggcaucauaaccgacacgauuaaguccuggagaaacaauaucuugaggacucaagagagcgagugugccugcgugaacgggucguguuucaccgucaugacagauggaccaucugacggccaggcuuccuacaaaaucuuucggauugaaaaggguaaaaucgugaagucaguggagaugaaugcccccaacuaucauuacgaagagugcaguuguuacccugauagcuccgagauuacuugcgucugccgcgacaauuggcacgggucuaacagaccauggguuagcuucaaucagaaccucgaauaucagauaggauacauguguucaggcaucuuuggcgauaauccgaggcccaacgacaaaaccgggaguugcggaccuguguccagcaauggugcgaacggcguaaagggguucucuuuuaaguauggaaacggcguguggauuggucggacaaaaucaaucaguagccgcaauggguucgagaugaucugggauccaaacggcuggaccggaacggacaauaacuuuuccauuaagcaagacauagucggcaucaaugaauggucuggguacucggggagcuucgugcagcaucccgagcugacuggucuggauuguauucgaccuugcuucuggguugaacucaucagaggcaggccaaaagagaacacaauuuggaccuccgggucaaguaucucuuuuuguggagugaauagcgacacugucggcugguccuggcccgauggugcagaguuaccguucacaauagacaaguga

SEQ ID NO: 150492 - RNA, 1410 nt, Artificial Sequence; identical to SEQ ID NO: 144786
  derived and/or modified CDS sequence (opt3) from neuraminidase__InfluenzaA__AFK14588

SEQ ID NO: 150493 - RNA, 1410 nt, Artificial Sequence; identical to SEQ ID NO: 144786
  derived and/or modified CDS sequence (opt3) from neuraminidase__InfluenzaA__AFK14597

SEQ ID NO: 150494 - RNA, 1410 nt, Artificial Sequence; identical to SEQ ID NO: 144786
  derived and/or modified CDS sequence (opt3) from neuraminidase__InfluenzaA__AFK14604

SEQ ID NO: 150495 - RNA, 1410 nt, Artificial Sequence; identical to SEQ ID NO: 144786
  derived and/or modified CDS sequence (opt3) from neuraminidase__InfluenzaA__AFK14632

SEQ ID NO: 150496 - RNA, 1410 nt, Artificial Sequence; identical to SEQ ID NO: 144776
  derived and/or modified CDS sequence (opt3) from neuraminidase__InfluenzaA__AFK14641

SEQ ID NO: 150497 - RNA, 1410 nt, Artificial Sequence; identical to SEQ ID NO: 144786
  derived and/or modified CDS sequence (opt3) from neuraminidase__InfluenzaA__AFK14651

SEQ ID NO: 150498 - RNA, 1410 nt, Artificial Sequence; identical to SEQ ID NO: 144786
  derived and/or modified CDS sequence (opt3) from neuraminidase__InfluenzaA__AFK14656

SEQ ID NO: 150499 - RNA, 1410 nt, Artificial Sequence; identical to SEQ ID NO: 144786
  derived and/or modified CDS sequence (opt3) from neuraminidase__InfluenzaA__AFK14663

SEQ ID NO: 150500 - RNA, 1410 nt, Artificial Sequence; identical to SEQ ID NO: 144786
  derived and/or modified CDS sequence (opt3) from neuraminidase__InfluenzaA__AFK14672

SEQ ID NO: 150501 - RNA, 1410 nt, Artificial Sequence; identical to SEQ ID NO: 144786
  derived and/or modified CDS sequence (opt3) from neuraminidase__InfluenzaA__AFK14680

SEQ ID NO: 150502 - RNA, 1410 nt, Artificial Sequence; identical to SEQ ID NO: 144786
  derived and/or modified CDS sequence (opt3) from neuraminidase__InfluenzaA__AFK14690

SEQ ID NO: 150503 - RNA, 1410 nt, Artificial Sequence; identical to SEQ ID NO: 144786
  derived and/or modified CDS sequence (opt3) from neuraminidase__InfluenzaA__AFK14707

SEQ ID NO: 150504 - RNA, 1410 nt, Artificial Sequence; identical to SEQ ID NO: 144786
  derived and/or modified CDS sequence (opt3) from neuraminidase__InfluenzaA__AFK14715

SEQ ID NO: 150505 - RNA, 1410 nt, Artificial Sequence; identical to SEQ ID NO: 144786
  derived and/or modified CDS sequence (opt3) from neuraminidase__InfluenzaA__AFK14724

SEQ ID NO: 150506 - RNA, 1410 nt, Artificial Sequence; identical to SEQ ID NO: 144786
  derived and/or modified CDS sequence (opt3) from neuraminidase__InfluenzaA__AFK14733

SEQ ID NO: 150507 - RNA, 1410 nt, Artificial Sequence; identical to SEQ ID NO: 144786
  derived and/or modified CDS sequence (opt3) from neuraminidase__InfluenzaA__AFK14751

SEQ ID NO: 150508 - RNA, 1410 nt, Artificial Sequence; identical to SEQ ID NO: 144786
  derived and/or modified CDS sequence (opt3) from neuraminidase__InfluenzaA__AFK14757

SEQ ID NO: 150509 - RNA, 1410 nt, Artificial Sequence; identical to SEQ ID NO: 144786
  derived and/or modified CDS sequence (opt3) from neuraminidase__InfluenzaA__AFK14766

SEQ ID NO: 150510 - RNA, 1410 nt, Artificial Sequence; identical to SEQ ID NO: 145369
  derived and/or modified CDS sequence (opt3) from neuraminidase__InfluenzaA__AFK14774

SEQ ID NO: 150511 - RNA, 1410 nt, Artificial Sequence; identical to SEQ ID NO: 150488
  derived and/or modified CDS sequence (opt3) from neuraminidase__InfluenzaA__AFK14781

SEQ ID NO: 150512 - RNA, 1410 nt, Artificial Sequence; identical to SEQ ID NO: 145369
  derived and/or modified CDS sequence (opt3) from neuraminidase__InfluenzaA__AFK14790

SEQ ID NO: 150513 - RNA, 1410 nt, Artificial Sequence
  derived and/or modified CDS sequence (opt3) from neuraminidase__InfluenzaA__AFK14800
augaaccccaaucagaagaucauuaccauaggcagcgugugcaugacaaucgggauggccaaccugauucuccaaaucggaaauauuaucuccauauggaucucucacucaauucagcuugguaaccagaaucagaucgagacuuguaaccaaagugucauuacguacgaaaauaacaccuggguuaaucagacauaugugaacaucagcaauacuaacuucgcugcaggccaguccguagugucugucaaacuggccggaaauucgucauugugcccugugagcggaugggcgauauacaguaaggacaacuccauuagaaucggcucuaaaggugauguuuuugugauuagggagccauucaucagcuguuccccguuagaaugccggaccuuuuuccugacacagggggcucuacucaaugacaagcauucaaacggaaccaucaaagaucgcagucccuaucgaacucugaugagcuguccuauuggcgaggucccaucucccuacaacucccguuuugaaucaguggccuggagcgcaagugccugccacgacggcauaaauuggcuuacaaucgggauuucuggaccugauaacggugcuguagcaguucugaaguauaauggcaucauaaccgacacgauuaaguccuggagaaacaauaucuugaggacucaagagagcgagugugccugcgugaacgggucguguuucaccgucaugacagauggaccaucugacggccaggcuuccuacaaaaucuuucggauugaaaaggguaaaaucgugaagucaguggagaugaaugcccccaacuaucauuacgaagagugcaguuguuacccugauagcuccgagauuacuugcgucugccgcgacaauuggcacgggucuaacagaccauggguuagcuucaaucagaaccucgaauaucagauaggauacaucuguucaggcauuuuuggcgauaauccgaggcccaacgacaaaaccgggaguugcggaccuguguccagcaauggugcgaacggcguaaagggguucucuuuuaaguauggaaacggcguguggaucggucggacaaaaucaaucaguagccgcaauggguucgagaugauuugggauccaaacggcuggaccggaacggacaauaacuuuuccauaaagcaagacaucgucggcauuaaugaauggucuggguacucggggagcuucgugcagcaucccgagcugacuggucuggauuguauccgaccuugcuucuggguugaacucauuagaggcaggccacgggagaacacaaucuggaccuccgggucaaguauaucuuuuuguggagugaauagcgacacugucggcugguccuggcccgauggugcagaguuaccguucacaaucgacaaauga

SEQ ID NO: 150514 - RNA, 1410 nt, Artificial Sequence; identical to SEQ ID NO: 146767
  derived and/or modified CDS sequence (opt3) from neuraminidase__InfluenzaA__AFK14809

SEQ ID NO: 150515 - RNA, 1410 nt, Artificial Sequence; identical to SEQ ID NO: 146767
  derived and/or modified CDS sequence (opt3) from neuraminidase__InfluenzaA__AFK14816

SEQ ID NO: 150516 - RNA, 1410 nt, Artificial Sequence; identical to SEQ ID NO: 144786
  derived and/or modified CDS sequence (opt3) from neuraminidase__InfluenzaA__AFK14824

SEQ ID NO: 150517 - RNA, 1410 nt, Artificial Sequence; identical to SEQ ID NO: 144786
  derived and/or modified CDS sequence (opt3) from neuraminidase__InfluenzaA__AFK14841

SEQ ID NO: 150518 - RNA, 1410 nt, Artificial Sequence; identical to SEQ ID NO: 145859
  derived and/or modified CDS sequence (opt3) from neuraminidase__InfluenzaA__AFK14849

SEQ ID NO: 150519 - RNA, 1410 nt, Artificial Sequence
  derived and/or modified CDS sequence (opt3) from neuraminidase__InfluenzaA__AFK14856
augaaccccaaucagaagaucauuaccauaggcagcgugugcaugacaaucgggauggccaaccugauucuccaaaucggaaauauuaucuccauauggaucucucacucaauucagcuugguaaccagaaucagaucgagacuuguaaccaaagugucauuacguacgaaaauaacaccuggguuaaucagacauaugugaacaucagcaauacuaacuucgcugcaggccaguccguagugucugucaaacuggccggaaauucgucauugugcccugugagcggaugggcgauauacaguaaggacaacuccguuagaauuggcucuaaaggugauguguuugucaucagggagccauucauuagcuguuccccguuagaaugccggaccuuuuuccugacacagggggcucuacucaaugacaagcauucaaacggaaccaucaaagaucgcagucccuaucgaacucugaugagcuguccuaucggcgaggugccaucucccuacaacucccguuuugaaucaguagccuggagcgcaagugccugccacgacggcauuaauuggcuuacaauagggaucucuggaccugauaacggugcuguugcagugcugaaguauaauggcauuaucaccgacacgauaaaguccuggagaaacaauauuuugaggacucaagagagcgagugugccugcgucaacgggucguguuucaccgugaugacagauggaccaucuaauggccaggcuuccuacaaaaucuuuaagaucgaaaaagguaagauugugaaaucagucgagaugaacgcccccaauuaucauuacgaagagugcaguuguuacccugacagcuccgagaucacuugcguuugccgggauaacuggcacgggucuaaucgcccaugggugagcuucaaccagaaucucgaauaucagauuggauacauauguucaggcaucuuuggcgacaacccgagacccauugauaagaccgggaguugcggaccuguauccagcaauggugcgaacggcgugaagggguucucuuuuaaauauggaaacggcgucuggaucgguaggacaaagucaaucaguagccggaauggguucgagaugauuugggacccaaacggcuggaccggaacggauaauaacuuuuccauaaaacaagacaucgugggcauuaaugaauggucuggguacucggggagcuucguucagcaucccgagcugacuggucuggacuguauccgcccuugcuucuggguggaacucauucgaggcagaccaaaggagaacacaaucuggaccuccgggucaaguauaucuuuuuguggagucaauagcgauacugugggcugguccuggcccgacggugcagaguuaccguucacaaucgauaaauga

SEQ ID NO: 150520 - RNA, 1410 nt, Artificial Sequence; identical to SEQ ID NO: 144786
  derived and/or modified CDS sequence (opt3) from neuraminidase__InfluenzaA__AFK14870

SEQ ID NO: 150521 - RNA, 1410 nt, Artificial Sequence; identical to SEQ ID NO: 144786
  derived and/or modified CDS sequence (opt3) from neuraminidase__InfluenzaA__AFK14879

SEQ ID NO: 150522 - RNA, 1410 nt, Artificial Sequence; identical to SEQ ID NO: 144786
  derived and/or modified CDS sequence (opt3) from neuraminidase__InfluenzaA__AFK14885

SEQ ID NO: 150523 - RNA, 1410 nt, Artificial Sequence; identical to SEQ ID NO: 144786
  derived and/or modified CDS sequence (opt3) from neuraminidase__InfluenzaA__AFK14894

SEQ ID NO: 150524 - RNA, 1410 nt, Artificial Sequence; identical to SEQ ID NO: 144786
  derived and/or modified CDS sequence (opt3) from neuraminidase__InfluenzaA__AFK14903

SEQ ID NO: 150525 - RNA, 1410 nt, Artificial Sequence; identical to SEQ ID NO: 144786
  derived and/or modified CDS sequence (opt3) from neuraminidase__InfluenzaA__AFK14912

SEQ ID NO: 150526 - RNA, 1410 nt, Artificial Sequence; identical to SEQ ID NO: 144786
  derived and/or modified CDS sequence (opt3) from neuraminidase__InfluenzaA__AFK14921

SEQ ID NO: 150527 - RNA, 1410 nt, Artificial Sequence; identical to SEQ ID NO: 144786
  derived and/or modified CDS sequence (opt3) from neuraminidase__InfluenzaA__AFK14931

SEQ ID NO: 150528 - RNA, 1410 nt, Artificial Sequence
  derived and/or modified CDS sequence (opt3) from neuraminidase__InfluenzaA__AFK25604
augaaccccaaucagaagaucauuaccauaggcagcgugugcaugacaaucgggauggccaaccugauucuccaaaucggaaauauuaucuccauauggaucucucacucaauucagcuuagaaaccagagucagaucgagacuuguaaucaaagcgucauuacguacgaaaacaauaccuggguuaaccagacauaugugaauaucuccaacacuaauuucgcugcaggucagucuguagugucggucaaacuggccggcaacagcucauugugcccugugagugggugggcgauauacuccaaggacaauucuauuaggaucggaagcaaaggcgauguuuuugugauucgggagccauucaucuccuguucaccguuagaaugccgcaccuuuuuccugacacagggugcucuacucaacgacaagcauaguaaugggaccaucaaagaucgaagccccuaucguacucugaugucuuguccuauuggagaggucccaucccccuacaacucaagauuugaaagcguggccuggagugcaucugccugccacgacggcauaaacuggcuuacaaucggcauuuccgggccugauaauggagcuguagcaguucugaaguauaacgguaucauaaccgacacgauuaagagcuggaggaauaacaucuugcggacucaagagucggagugugccugcgugaauggcucuuguuucaccaucaugacagaugggccauccgacggacaggcuucauacaaaauuuuucgcaucgaaaagggcaaaauugucaagaguguggagaugaacgcccccaauuauuacuacgaagagugcagcuguuauccugauuccucugagauaacuugcgugugcagagacaacuggcaugguagcaauaggccaugggucucauucaaccagaaucucgaauaccagaucggguauauuuguaguggaaucuuuggcgauaacccgcggcccaaugacaaaaccggcuccugcgggccuguuagcucuaacggagcgaauggugugaagggcuucucauuuaaguacgggaacggaguauggaucggccgcacaaaaaguauuagcucccgaaaggguuucgagaugauaugggauccaaacggguggaccggcacggacaauaacuuuucuaucaaacaagacauugugggaaucaaugaauggucgggcuauagcggguccuucguccagcaccccgagcugacuggacuggauuguauuagaccuugcuucuggguggaacucaucaggggucggccaaaggagaacacaauauggaccucaggcaguucuaucagcuuuugugggguuaauuccgacacugugggauggucauggcccgauggcgcagaguuaccguucacaauugacaaauga

SEQ ID NO: 150529 - RNA, 1410 nt, Artificial Sequence; identical to SEQ ID NO: 150528
  derived and/or modified CDS sequence (opt3) from neuraminidase__InfluenzaA__AFK25606

SEQ ID NO: 150530 - RNA, 1410 nt, Artificial Sequence; identical to SEQ ID NO: 146137
  derived and/or modified CDS sequence (opt3) from neuraminidase__InfluenzaA__AFK74537

SEQ ID NO: 150531 - RNA, 1410 nt, Artificial Sequence; identical to SEQ ID NO: 144786
  derived and/or modified CDS sequence (opt3) from neuraminidase__InfluenzaA__AFK74547

SEQ ID NO: 150532 - RNA, 1410 nt, Artificial Sequence; identical to SEQ ID NO: 147778
  derived and/or modified CDS sequence (opt3) from neuraminidase__InfluenzaA__AFK74557

SEQ ID NO: 150533 - RNA, 1410 nt, Artificial Sequence; identical to SEQ ID NO: 144786
  derived and/or modified CDS sequence (opt3) from neuraminidase__InfluenzaA__AFK74567

SEQ ID NO: 150534 - RNA, 1410 nt, Artificial Sequence; identical to SEQ ID NO: 144786
  derived and/or modified CDS sequence (opt3) from neuraminidase__InfluenzaA__AFK74578

SEQ ID NO: 150535 - RNA, 1410 nt, Artificial Sequence; identical to SEQ ID NO: 149901
  derived and/or modified CDS sequence (opt3) from neuraminidase__InfluenzaA__AFK74588

SEQ ID NO: 150536 - RNA, 1410 nt, Artificial Sequence; identical to SEQ ID NO: 144786
  derived and/or modified CDS sequence (opt3) from neuraminidase__InfluenzaA__AFK74598

SEQ ID NO: 150537 - RNA, 1410 nt, Artificial Sequence; identical to SEQ ID NO: 144786
  derived and/or modified CDS sequence (opt3) from neuraminidase__InfluenzaA__AFK74608

SEQ ID NO: 150538 - RNA, 1410 nt, Artificial Sequence; identical to SEQ ID NO: 144786
  derived and/or modified CDS sequence (opt3) from neuraminidase__InfluenzaA__AFK74618

SEQ ID NO: 150539 - RNA, 1410 nt, Artificial Sequence; identical to SEQ ID NO: 144786
  derived and/or modified CDS sequence (opt3) from neuraminidase__InfluenzaA__AFK74628

SEQ ID NO: 150540 - RNA, 1410 nt, Artificial Sequence; identical to SEQ ID NO: 144786
  derived and/or modified CDS sequence (opt3) from neuraminidase__InfluenzaA__AFK74638

SEQ ID NO: 150541 - RNA, 1410 nt, Artificial Sequence; identical to SEQ ID NO: 144786
  derived and/or modified CDS sequence (opt3) from neuraminidase__InfluenzaA__AFK74648

SEQ ID NO: 150542 - RNA, 1410 nt, Artificial Sequence; identical to SEQ ID NO: 149910
  derived and/or modified CDS sequence (opt3) from neuraminidase__InfluenzaA__AFK74658

SEQ ID NO: 150543 - RNA, 1410 nt, Artificial Sequence; identical to SEQ ID NO: 149910
  derived and/or modified CDS sequence (opt3) from neuraminidase__InfluenzaA__AFK74668

SEQ ID NO: 150544 - RNA, 1410 nt, Artificial Sequence; identical to SEQ ID NO: 144786
  derived and/or modified CDS sequence (opt3) from neuraminidase__InfluenzaA__AFK74678

SEQ ID NO: 150545 - RNA, 1410 nt, Artificial Sequence; identical to SEQ ID NO: 144786
  derived and/or modified CDS sequence (opt3) from neuraminidase__InfluenzaA__AFK74688

SEQ ID NO: 150546 - RNA, 1410 nt, Artificial Sequence; identical to SEQ ID NO: 144786
  derived and/or modified CDS sequence (opt3) from neuraminidase__InfluenzaA__AFK74698

SEQ ID NO: 150547 - RNA, 1410 nt, Artificial Sequence; identical to SEQ ID NO: 149917
  derived and/or modified CDS sequence (opt3) from neuraminidase__InfluenzaA__AFK74708

SEQ ID NO: 150548 - RNA, 1410 nt, Artificial Sequence; identical to SEQ ID NO: 147778
  derived and/or modified CDS sequence (opt3) from neuraminidase__InfluenzaA__AFK74718

SEQ ID NO: 150549 - RNA, 1410 nt, Artificial Sequence; identical to SEQ ID NO: 144786
  derived and/or modified CDS sequence (opt3) from neuraminidase__InfluenzaA__AFK74728

SEQ ID NO: 150550 - RNA, 1410 nt, Artificial Sequence; identical to SEQ ID NO: 144786
  derived and/or modified CDS sequence (opt3) from neuraminidase__InfluenzaA__AFK74738

SEQ ID NO: 150551 - RNA, 1410 nt, Artificial Sequence; identical to SEQ ID NO: 144786
  derived and/or modified CDS sequence (opt3) from neuraminidase__InfluenzaA__AFK74748

SEQ ID NO: 150552 - RNA, 1410 nt, Artificial Sequence; identical to SEQ ID NO: 144786
  derived and/or modified CDS sequence (opt3) from neuraminidase__InfluenzaA__AFK74758

SEQ ID NO: 150553 - RNA, 1410 nt, Artificial Sequence; identical to SEQ ID NO: 144786
  derived and/or modified CDS sequence (opt3) from neuraminidase__InfluenzaA__AFK74768

SEQ ID NO: 150554 - RNA, 1410 nt, Artificial Sequence; identical to SEQ ID NO: 144786
  derived and/or modified CDS sequence (opt3) from neuraminidase__InfluenzaA__AFK74778

SEQ ID NO: 150555 - RNA, 1410 nt, Artificial Sequence; identical to SEQ ID NO: 147778
  derived and/or modified CDS sequence (opt3) from neuraminidase__InfluenzaA__AFK74788

SEQ ID NO: 150556 - RNA, 1410 nt, Artificial Sequence; identical to SEQ ID NO: 147778
  derived and/or modified CDS sequence (opt3) from neuraminidase__InfluenzaA__AFK74798

SEQ ID NO: 150557 - RNA, 1410 nt, Artificial Sequence; identical to SEQ ID NO: 147778
  derived and/or modified CDS sequence (opt3) from neuraminidase__InfluenzaA__AFK74808

SEQ ID NO: 150558 - RNA, 1410 nt, Artificial Sequence; identical to SEQ ID NO: 147778
  derived and/or modified CDS sequence (opt3) from neuraminidase__InfluenzaA__AFK74818

SEQ ID NO: 150559 - RNA, 1410 nt, Artificial Sequence; identical to SEQ ID NO: 144786
  derived and/or modified CDS sequence (opt3) from neuraminidase__InfluenzaA__AFK74828

SEQ ID NO: 150560 - RNA, 1410 nt, Artificial Sequence; identical to SEQ ID NO: 146677
  derived and/or modified CDS sequence (opt3) from neuraminidase__InfluenzaA__AFK74838

SEQ ID NO: 150561 - RNA, 1410 nt, Artificial Sequence; identical to SEQ ID NO: 144786
  derived and/or modified CDS sequence (opt3) from neuraminidase__InfluenzaA__AFK74848

SEQ ID NO: 150562 - RNA, 1410 nt, Artificial Sequence; identical to SEQ ID NO: 144786
  derived and/or modified CDS sequence (opt3) from neuraminidase__InfluenzaA__AFK74898

SEQ ID NO: 150563 - RNA, 1410 nt, Artificial Sequence; identical to SEQ ID NO: 144786
  derived and/or modified CDS sequence (opt3) from neuraminidase__InfluenzaA__AFK74908

SEQ ID NO: 150564 - RNA, 1410 nt, Artificial Sequence; identical to SEQ ID NO: 144786
  derived and/or modified CDS sequence (opt3) from neuraminidase__InfluenzaA__AFK74918

SEQ ID NO: 150565 - RNA, 1410 nt, Artificial Sequence; identical to SEQ ID NO: 144786
  derived and/or modified CDS sequence (opt3) from neuraminidase__InfluenzaA__AFK74928

SEQ ID NO: 150566 - RNA, 1410 nt, Artificial Sequence
  derived and/or modified CDS sequence (opt3) from neuraminidase__InfluenzaA__AFK74938
augaaccccaaucagaagaucauuaccauaggcagcgugugcaugacaaucgggauggccaaccugauucuccaaaucggaaauauuaucuccauauggaucucucacucaauucagcuugguaaccagaaucagaucgagacuuguaaccaaagugucauuacguacgaaaauaacaccuggguuaaucagacauaugugaacaucagcaauacuaacuucgcugcaggccaguccguagugucugucaaacuggccggaaauucgucauugugcccugugagcggaugggcgauauacaguaaggacaacuccauuagaaucggcucuaaaggugauguuuuugugauuagggagccauucaucagcuguuccccguuagaaugccggaccuuuuuccugacacagggggcucuacucaaugacaagcauucaaacggaaccaucaaagaucgcagucccuaucgaacucugaugagcuguccuauuggcgaggucccaucucccuacaacucccguuuugaaucaguggccuggagcgcaagugccugccacgacggcauaaauuggcuuacaaucgggauuucuggaccugauaacggugcuguagcaguucugaaguauaauggcaucauaaccgacacgauuaaguccuggagaaacaauaucuugaggacucaagagagcgagugugccugcgugaacgggucguguuucaccgucaugacagauggaccaucugacggccaggcuuccuacaaaaucuuucggauugaaaaggguaaaaucgugaagucaguggagaugaaugcccccaacuaucauuacgaagagugcaguuguuacccugauagcuccgagauuacuugcgucugccgcgacaauuggcacgggucuaacagaccauggguuagcuucaaucagaaccucgaauaucagauaggauacaucuguucaggcauuuuuggcgauaauccgaggcccaacgacaauaccgggaguugcggaccuguguccagcaacggugcgaacggcguaaaaggguucucuuuuaaguauggaaauggcguguggaucggucggacaaagucaaucaguagccgcaacggguucgagaugauuugggauccaaauggcuggaccggaacggacaacaauuuuuccauaaaacaagacaucgucggcauuaacgaauggucuggguacucggggagcuucgugcagcaucccgagcugacuggucuggauuguauccgaccuugcuucuggguugaacucauuagaggcaggccaaaggagaauacaaucuggaccuccgggucaaguauaucuuuuuguggagugaacagcgacacugucggcugguccuggcccgauggugcagaguuaccguucacaaucgacaaauga

SEQ ID NO: 150567 - RNA, 1410 nt, Artificial Sequence; identical to SEQ ID NO: 144786
  derived and/or modified CDS sequence (opt3) from neuraminidase__InfluenzaA__AFK74948

SEQ ID NO: 150568 - RNA, 1410 nt, Artificial Sequence; identical to SEQ ID NO: 146677
  derived and/or modified CDS sequence (opt3) from neuraminidase__InfluenzaA__AFK74958

SEQ ID NO: 150569 - RNA, 1410 nt, Artificial Sequence; identical to SEQ ID NO: 147778
  derived and/or modified CDS sequence (opt3) from neuraminidase__InfluenzaA__AFK74968

SEQ ID NO: 150570 - RNA, 1410 nt, Artificial Sequence; identical to SEQ ID NO: 144786
  derived and/or modified CDS sequence (opt3) from neuraminidase__InfluenzaA__AFK74978

SEQ ID NO: 150571 - RNA, 1410 nt, Artificial Sequence; identical to SEQ ID NO: 146677
  derived and/or modified CDS sequence (opt3) from neuraminidase__InfluenzaA__AFK74988

SEQ ID NO: 150572 - RNA, 1410 nt, Artificial Sequence; identical to SEQ ID NO: 144786
  derived and/or modified CDS sequence (opt3) from neuraminidase__InfluenzaA__AFK74998

SEQ ID NO: 150573 - RNA, 1410 nt, Artificial Sequence; identical to SEQ ID NO: 147778
  derived and/or modified CDS sequence (opt3) from neuraminidase__InfluenzaA__AFK75008

SEQ ID NO: 150574 - RNA, 1410 nt, Artificial Sequence; identical to SEQ ID NO: 144786
  derived and/or modified CDS sequence (opt3) from neuraminidase__InfluenzaA__AFK75018

SEQ ID NO: 150575 - RNA, 1410 nt, Artificial Sequence; identical to SEQ ID NO: 144786
  derived and/or modified CDS sequence (opt3) from neuraminidase__InfluenzaA__AFK75028

SEQ ID NO: 150576 - RNA, 1410 nt, Artificial Sequence; identical to SEQ ID NO: 144786
  derived and/or modified CDS sequence (opt3) from neuraminidase__InfluenzaA__AFK75038

SEQ ID NO: 150577 - RNA, 1410 nt, Artificial Sequence; identical to SEQ ID NO: 144786
  derived and/or modified CDS sequence (opt3) from neuraminidase__InfluenzaA__AFK75048

SEQ ID NO: 150578 - RNA, 1410 nt, Artificial Sequence; identical to SEQ ID NO: 144786
  derived and/or modified CDS sequence (opt3) from neuraminidase__InfluenzaA__AFK75058

SEQ ID NO: 150579 - RNA, 1410 nt, Artificial Sequence; identical to SEQ ID NO: 147778
  derived and/or modified CDS sequence (opt3) from neuraminidase__InfluenzaA__AFK75068

SEQ ID NO: 150580 - RNA, 1410 nt, Artificial Sequence; identical to SEQ ID NO: 144786
  derived and/or modified CDS sequence (opt3) from neuraminidase__InfluenzaA__AFK75078

SEQ ID NO: 150581 - RNA, 1410 nt, Artificial Sequence; identical to SEQ ID NO: 144786
  derived and/or modified CDS sequence (opt3) from neuraminidase__InfluenzaA__AFK75088

SEQ ID NO: 150582 - RNA, 1410 nt, Artificial Sequence; identical to SEQ ID NO: 144786
  derived and/or modified CDS sequence (opt3) from neuraminidase__InfluenzaA__AFK75098

SEQ ID NO: 150583 - RNA, 1410 nt, Artificial Sequence; identical to SEQ ID NO: 146699
  derived and/or modified CDS sequence (opt3) from neuraminidase__InfluenzaA__AFK75108

SEQ ID NO: 150584 - RNA, 1410 nt, Artificial Sequence; identical to SEQ ID NO: 144786
  derived and/or modified CDS sequence (opt3) from neuraminidase__InfluenzaA__AFK77860

SEQ ID NO: 150585 - RNA, 1410 nt, Artificial Sequence; identical to SEQ ID NO: 144786
  derived and/or modified CDS sequence (opt3) from neuraminidase__InfluenzaA__AFK77870

SEQ ID NO: 150586 - RNA, 1410 nt, Artificial Sequence; identical to SEQ ID NO: 144786
  derived and/or modified CDS sequence (opt3) from neuraminidase__InfluenzaA__AFK77880

SEQ ID NO: 150587 - RNA, 1410 nt, Artificial Sequence
  derived and/or modified CDS sequence (opt3) from neuraminidase__InfluenzaA__AFK77890
augaaccccaaucagaagaucauuaccauaggcagcgugugcaugacaaucgggauggccaaccugauucuccaaaucggaaauauuaucuccauauggaucucucacucaauucagcuugguaaccagaaucagaucgagacuuguaaccaaagugucauuacguacgaaaauaacaccuggguuaaucagacauaugugaacaucagcaauacuaacuucgcugcaggccaguccguagugucugucaaacuggccggaaauucgucauugugcccugugagcgggugggcgauauacaguaaggacaacuccauuagaaucggcucuaaaggugauguuuuugugauuagggagccauucaucagcuguuccccguuagaaugccggaccuuuuuccugacacagggggcucuacucaaugacaagcauucaaacggaaccaucaaagaucgcagucccuaucgaacucugaugagcuguccuauuggcgaggucccaucucccuacaacucccguuuugaaucaguggccuggagcgcaagugccugccacgacggcauaaauuggcuuacaaucgggauuucuggaccugauaacggugcuguagcaguucugaaguauaauggcaucauaaccgacacgauuaaguccuggagaaacaauaucuugaggacucaagagagcgagugugccugcgugaacgggucguguuucaccgucaugacagauggaccaucugacggccaggcuuccuacaaaaucuuucggauugaaaaggguaaaaucgugaagucaguggagaugaaugcccccaacuaucauuacgaagagugcaguuguuacccugauagcuccgagauuacuugcgucugccgcgacaauuggcacgggucuaacagaccauggguuagcuucaaucagaaccucgaauaucagauaggauacaucuguucaggcauuuuuggcgauaauccgaggcccaacgacaaaaccgggaguugcggaccuguguccagcaauggugcgaacggcguaaagggguucucuuuuaaguauggaaacggcguguggaucggucggacaaaagggaucucaagucgcaauggcuucgagaugauuugggauccaaacggauggaccggcacggacaauaacuuuagcauaaagcaagacaucgucgggauuaaugaaugguccggauacucugguucguucgugcagcaucccgagcugacuggccuggauuguauccgaccuugcuucuggguugaacucauuagagggaggccaaaagagaacacaaucuggaccagcggauccucaauaaguuuuuguggcgucaauucugacacuguggguuggagcuggcccgauggggcagaguuaccguucacaaucgacaaguga

SEQ ID NO: 150588 - RNA, 1410 nt, Artificial Sequence
  derived and/or modified CDS sequence (opt3) from neuraminidase__InfluenzaA__AFK77900
augaaccccaaucagaagaucauuaccauaggcagcgugugcaugacaaucgggauggccaaccugauucuccaaaucggaaauauuaucuccauauggaucucucacucaauucagaucgguaaccagaaucagauugagacuuguaaccaaagugucaucacguacgaaaauaacaccuggguuaaucagacauaugugaacauaagcaauacuaacuucgcugcaggccaguccguagccucugugaaacuugcgggaaauucgucacugugcccugucagcggaugggcuauuuacaguaaggacaacuccaucagaauuggcucuaaaggugauguguuuguuaucagggagccauucaucagcuguuccccguuggaaugccggaccuuuuucuuaacacagggggcccugcuaaaugacaagcauucaaacggaaccauuaaagaucgcagucccuaucgagcacucaugagcuguccuauaggcgaggugccaucucccuacaacucccguuuugaaucagucgccuggagcgcuagugcaugccacgacggcaucaauuggcugacuauugggaucucuggaccugauaacggugccguggcuguacuuaaguauaauggcauaauuacagacaccaucaaguccuggagaaacaauauccugaggacgcaagagagcgagugugccugcguuaacgggucguguuucacuauuaugaccgauggaccaucugacggccaggcguccuacaaaaucuuucggauugaaaaggguaaaauagugaagucagucgagaugaaugcacccaacuaucauuacgaagagugcaguuguuacccugauagcuccgagaucacaugcgugugccgcgacaauuggcacgggucuaacagaccaugggugagcuucaaucagaacuuggaauaucagauuggauacaucuguucaggcaucuuuggcgauaauccgaggcccaacgacaaaacugggaguugcggaccugucuccagcaauggugccaacggcguuaagggguucucuuuuaaguauggaaacggcguguggauuggucggaccaaaucaauaaguagccgcaagggguucgagaugaucugggauccaaauggcuggacaggaaccgacaacaauuuuuccauuaaacaagacaucguaggcaugaacgaauggucuggguacucggggagcuucgugcagcaucccgagcucacgggucuggauuguauucgaccuugcuucugggucgaacugaucagaggcaggccaaaggagaauacuauauggacauccgggucaaguaucucuuuuuguggagugaacagcgacaccguuggcugguccuggcccgauggugcugagcucccguucacuauugacaaauga

SEQ ID NO: 150589 - RNA, 1410 nt, Artificial Sequence
  derived and/or modified CDS sequence (opt3) from neuraminidase__InfluenzaA__AFK78031
augaaccccaaucagaagaucauuaccauaggcagcgugugcaugacaaucgggauggccaaccugauucuccaaaucggaaauauuaucuccauauggaucucucacucaauucagcuugguaaccagaaucagaucgagacuuguaaccaaagugucauuacguacgaaaauaacaccuggguuaaucagacauaugugaacaucagcaauacuaacuucgcugcaggccaguccguagccucugugaaacuggcgggaaauucgucauugugcccugucagcggaugggcuauauacaguaaggacaacuccauuagaaucggcucuaaaggugauguguuuguuauuagggagccauucaucagcuguuccccguuagaaugccggaccuuuuuccugacacagggggcccuacucaaugacaagcauucaaacggaaccaucaaagaucgcagucccuaucgagcacugaugagcuguccuauuggcgaggugccaucucccuacaacucccguuuugaaucagucgccuggagcgcuagugcaugccacgacggcauaaauuggcuuacuaucgggauuucuggaccugauaacggugccguggcuguacugaaguauaauggcaucauaacagacaccauuaaguccuggagaaacaauaucuugaggacgcaagagagcgagugugccugcguuaacgggucguguuucacuaucaugaccgauggaccaucugacggccaggcguccuacaaaauuuuucggaucgaaaaggguaaaauugugaagucagucgagaugaaugcacccaacuaucauuacgaagagugcaguuguuacccugauagcuccgagauaacaugcgugugccgcgacaauuggcacgggucuaacagaccaugggugagcuucaaucagaaccucgaauaucagaucggauacauuuguucaggcaucuuuggcgauaauccgaggcccaacgacaaaacugggaguugcggaccugucuccagcaauggugccaacggcguuaagggguucucuuuuaaguauggaaacggcguguggaucggucggaccaaaucaauuaguagccgcaagggguucgagaugauaugggauccaaauggcuggacaggaaccgacaacaauuuuuccaucaaacaagacauuguaggcaugaacgaauggucuggguacucggggagcuucgugcagcaucccgagcugacgggucuggauuguauccgaccuugcuucugggucgaacucauuagaggcaggccaaaggagaauacuaucuggacauccgggucaaguauaucuuuuuguggagugaacagcgacaccguuggcugguccuggcccgauggugcugaguuaccguucacuaucgacaaauga

SEQ ID NO: 150590 - RNA, 1410 nt, Artificial Sequence; identical to SEQ ID NO: 144786
  derived and/or modified CDS sequence (opt3) from neuraminidase__InfluenzaA__AFK78190

SEQ ID NO: 150591 - RNA, 1362 nt, Artificial Sequence
  derived and/or modified CDS sequence (opt3) from neuraminidase__InfluenzaA__AFM68957
augaaccccaaucagaagaucauuaccauaggcagcaucugcaugguggucgggauuaucucccugauucuccaaaucggaaacauaaucucuauuuggaucucacacaguauucagacagguaaucagaaccauacuggcaucuguaaucaggggauaauuacgcacaacguuguggccggacaagacagcaccuccguaauccuuacaggcaauucuucgcugugcccuauuagagguugggcuauccauucaaaagauaacgggaucaggauuggaagcaagggcgacguguucgucauacgggagccauuuaucaguuguucccacuuggaaugccgcacuuucuuuuuaacccagggcgcacugcuaaaugauaaacauucuuacgggacaagcaaggaccgauccccguaucgugcccucaugucaugucccgugggagaggcgccuaguccauacaacagcagauucgaaucuguugcuugguccgccucagcaugccacgaugguaugggcuggcugaccauugggaucagcggacccgacaauggcgccguggcuguccuuaaauauaacgguauaauuacugagacaaucaagaguuggaggaagaaaauccugcggacccaggaaucugaguguacgugcgugaauggguccuguuuuacuauuaugaccgauggaccuagcgacggcuuggcaucguacaagaucuucaaaauugagaagggcaaaguaacaaagucuauagaacucaacgccccaaauucccacuaugaggaaugcucauguuaccccgauacugggaagguuaugugcgugugccgcgacaacuggcauggaaguaacagaccuugggucagcuuugaucagaaucuggacuaucaaaucgguuacauuuguuccggcguguucggggauaacccaaggccgaaagacggaaccggcucuugcggucccgugagcgcugacggggccaauggcgucaagggauuuucauaccgguauggcaacgggguuuggaucggacgcacaaaaagugauuccagccgacacgguuucgagaugaucugggacccuaauggcuggaccgagacggauucuagauuuucagugaggcaggacguaguggcgaugacugaucggaguggguacagcggauccuucguccagcauccagaacugacaggccucgacuguaugcgucccugcuuuuggguggaguuaauucgcggucagccugaagaggaaaccauauggacuucugggucgaucauuagcuucuguggcguuaacuccgauacaguggacuggucauggccagauggagcagagcugcccuucaccaucgacaaguga

SEQ ID NO: 150592 - RNA, 1410 nt, Artificial Sequence
  derived and/or modified CDS sequence (opt3) from neuraminidase__InfluenzaA__AFM68968
augaaccccaaucagaagaucauuaccauaggcagcgugucccugacaaucgccacuauuugcuuccucaugcaaaucgcuauucuugucacgaccguuacacugcacuuuaaacaguacgagugugacucuccugcaaacaaucaggugaugccaugcgaaccgaucauaaucgagagaaacauuacugaaaucguauauuugaccaauacaaccauugagaaggaaaucugucccaaauuaguggaguacaggaacuggucaaagccucagugcaaaauaacuggguucgccccauuuaguaaggauaauagcauucggcuguccgcgggaggugacaucugggucacacgcgagcccuaugugucuugugauccuggcaagugcuaccaauucgcucuagggcagggaaccacgcucgacaacaaacauucgaaugauacuauucacgaccgaaccccacaucguacacugcuuaugaacgaacugggcguucccuuucacuuggguacuagacagguguguaucgccuggucaagcaguuccugccaugaugggaaggcauggcuccacgucugugugaccggauaugacaaaaaugccacagcuucuuucaucuacgauggcaggcugguagacagcauuggcuccuggucaaagaacauacugcggacccaggagagugaaugcguuuguaucaaugggacgugcacuguggucaugacagauggaagcgcaucugagcgcgccgacaccaaaauucucuuuaucgaggaagguaagauagugcacauuuccccuuuaucaggcagcgcucaacauguggaggaaugcaguuguuauccaagauacccgggggucaggugcguuugucgggauaacuggaagggaucuaaucgccccaucguggacaucaacguaaaagacuacuccauugccagcucguaugugugcucuggccuggucggugauacuccucgaaagaacgacagauccucaaguagcuacuguaggaauccaaacaaugagaaagggaaccacggagugaagggcugggcguucgaugacggcaaugauguuuggauggggcggacaaucuccgaagagucucguagcggauaugagaccuuuaaagugauugguggcuggucaacgcccaacaguaaacuucagauaaaucgccaggucaucguggacuccgauaacagaagcggguacucuggaauuuucucaguagaaggcaagaguugcaucaauagguguuuuuauguugaguugauccggggucgagaacaggagacccgcgugugguggacaagcaacuccauugucguguucugcgggacuucuggcaccuacggaacaggcucguggccugacggggcagauauaaaucugaugccaaucuga

SEQ ID NO: 150593 - RNA, 1410 nt, Artificial Sequence
  derived and/or modified CDS sequence (opt3) from neuraminidase__InfluenzaA__AFM68979
augaaccccaaucagaagaucauuaccauaggcagcgugucccugacaaucgccacuauuugcuuccucaugcaaaucgcuauucuugucacgaccguuacacugcacuuuaaacaguacgaguguucuucaccuccaaacaaucaggugaugccgugcgaacccaucauaaucgagagaaacauuacugaaaucguauauuugaccaauacaaccauugagaaggaaaucuguccuaaauuaguggaguacaggaacuggaguaagccacagugcaaaauaacuggguucgcacccuuuagcaaggacaauuccauucggcugucugccggagguggcaucugggucacacgcgagccuuaugugucgugugauccagggaagugcuaccaauucgcgcuaggacagggcaccacgcucgacaacaaacauucaaaugauacuauucacgaccgaacccccuaucguacacugcuuaugaacgaacuggguguuccuuuucauuuggggacuagacagguguguaucgcuuggagcaguuccucuugccacgauggaaaggccuggcuccaugucugugugaccggcuacgacaaaaaugcaacagccagcuucaucuaugauggcaggcugguagacuccauugggucauggaguaagaacauacugcggacccaggagagcgaaugcguuuguaucaauggaacgugcacuguggucaugacagaugguucugcuuccgagcgcgcagacaccaaaauucucuuuaucgaggaaggcaagauagugcacauuucaccauuaagcgggagugcccaacacguggaggaaugcucuuguuacccgagauaccccggagucaggugcguuugucgggauaacuggaagggcuccaaucgcccugugguagacaucaacgugaaagauuauagcaucgucucgucuuacgugugcuccggucugguuggggacacuccacgaaagaacgacagaucaaguagcuccuauuguaggaaucccaacaaugagaaaggaaaccauggcgugaagggcugggcuuucgaugacgggaaugaugucuggaugggacggacaauuucugaagagagccguucagguuacgagaccuuuaaagugaucggcggguggaguacgccuaacuccaaacuucagauuaaucgccagguaauaguugacagcgauaacagaucuggauauucaggcaucuucaguguggaagguaagagcugcauuaauagguguuuuuacgucgaguugauccgggggcgagaacaggagacccgcgugugguggacauccaacucuaucgucguguucugcggcacuucgggaaccuauggcacagggagcuggccagacggagccgauauuaaucugaugcccauauga

SEQ ID NO: 150594 - RNA, 1410 nt, Artificial Sequence; identical to SEQ ID NO: 150593
  derived and/or modified CDS sequence (opt3) from neuraminidase__InfluenzaA__AFM68990

SEQ ID NO: 150595 - RNA, 1410 nt, Artificial Sequence; identical to SEQ ID NO: 142861
  derived and/or modified CDS sequence (opt3) from neuraminidase__InfluenzaA__AFM71723

SEQ ID NO: 150596 - RNA, 1410 nt, Artificial Sequence; identical to SEQ ID NO: 150183
  derived and/or modified CDS sequence (opt3) from neuraminidase__InfluenzaA__AFM71734

SEQ ID NO: 150597 - RNA, 1410 nt, Artificial Sequence; identical to SEQ ID NO: 149997
  derived and/or modified CDS sequence (opt3) from neuraminidase__InfluenzaA__AFM71745

SEQ ID NO: 150598 - RNA, 1410 nt, Artificial Sequence; identical to SEQ ID NO: 146657
  derived and/or modified CDS sequence (opt3) from neuraminidase__InfluenzaA__AFM71771

SEQ ID NO: 150599 - RNA, 1410 nt, Artificial Sequence; identical to SEQ ID NO: 149683
  derived and/or modified CDS sequence (opt3) from neuraminidase__InfluenzaA__AFM71782

SEQ ID NO: 150600 - RNA, 1410 nt, Artificial Sequence; identical to SEQ ID NO: 149683
  derived and/or modified CDS sequence (opt3) from neuraminidase__InfluenzaA__AFM71794

SEQ ID NO: 150601 - RNA, 1410 nt, Artificial Sequence; identical to SEQ ID NO: 144647
  derived and/or modified CDS sequence (opt3) from neuraminidase__InfluenzaA__AFM71805

SEQ ID NO: 150602 - RNA, 1410 nt, Artificial Sequence
  derived and/or modified CDS sequence (opt3) from neuraminidase__InfluenzaA__AFM71827
augaaccccaaucagaagaucauuaccauaggcagcgugucccugacaaucucuacuauuugcuucuuuaugcagaucgccauucucaucacgaccgucacacuucacuucaaacaguacgaguuuaacucaccuccaaauaaccagguuaugcugugugaaccgacuauaaucgagagaaauauuaccgaaaucguguauuugacaaacaccacuauugagaaggaaaucugccccaaauuagcugaguacaggaauuggaguaagccucagugugacauaacaggguucgcaccauuuagcaaagauaacuccauucggcugucugccggaggugacaucuggguaacccgcgagcccuaugugucgugcgauccugacaaguguuaccaauucgcgcuaggccaggggacgacucucaauaacguccauucaaauaacaccgugcgagaucguacaccauauagaacucugcuuaugaaugaacugggaguucccuuucacuugggcaccaaacaggugugcauugcuuggagcaguuccucuugucaugacgguaaggccuggcuccacgucugcaucacaggggaugacaagaacgcaaccgccagcuucaucuacaauggaaggcugguggauuccguaguuucauggaguaaagagauucugcggacgcaggaaagcgagugugugugcauaaacggcacuuguacagucgugaugaccgacggcucugcuuccgggaaggcagauacuaaaauccucuuuauugaggaaggaaagaucgugcauacaucaaccuuaagcgguagugcccaacacgucgaggaaugcucuugcuauccucgcuacccaggcguuagaugugugugcagggacaacuggaagggguccaaucggccgauaguagauauuaacaucaaagaccacagcaucgugucgucuuacgucuguuccggacuggugggcgacacgccccgcaagaaugauucaaguagcuccucucauugccuugacccuaacaaugaggaaggugggcacggaguuaaaggcugggcuuucgaugacggcaaggauguguggauggggcgaaccauuagcgagaaaucaagauugggauaugagacauuuaaggucaucgaagguuggaguaacccaaaauccaagcugcagauuaauaggcaagugauaguagaccggggcaaccguagcggguacucuggaaucuucucaguugagggcaagaguuguauuaaucgcugcuuuuauguggaacuaaucagagguaggaaagaggaaacugagguccucuggaccagcaacuccaucguggucuucugugggacaucuggcacuuacggaaccggcucguggcccgauggggccgacauuaaucugaugccuauauga

SEQ ID NO: 150603 - RNA, 1410 nt, Artificial Sequence; identical to SEQ ID NO: 147566
  derived and/or modified CDS sequence (opt3) from neuraminidase__InfluenzaA__AFM71838

SEQ ID NO: 150604 - RNA, 1365 nt, Artificial Sequence; identical to SEQ ID NO: 143767
  derived and/or modified CDS sequence (opt3) from neuraminidase__InfluenzaA__AFM71849

SEQ ID NO: 150605 - RNA, 1410 nt, Artificial Sequence; identical to SEQ ID NO: 142143
  derived and/or modified CDS sequence (opt3) from neuraminidase__InfluenzaA__AFM71860

SEQ ID NO: 150606 - RNA, 1410 nt, Artificial Sequence; identical to SEQ ID NO: 142375
  derived and/or modified CDS sequence (opt3) from neuraminidase__InfluenzaA__AFM71871

SEQ ID NO: 150607 - RNA, 1410 nt, Artificial Sequence; identical to SEQ ID NO: 142375
  derived and/or modified CDS sequence (opt3) from neuraminidase__InfluenzaA__AFM71882

SEQ ID NO: 150608 - RNA, 1410 nt, Artificial Sequence
  derived and/or modified CDS sequence (opt3) from neuraminidase__InfluenzaA__AFM71893
augaaccccaaucagaagaucauuaccauaggcagcgugucccugacaaucgccacugucugcuuccucaugcaaauugcuauccuugcaacgaccguuacacugcacuuuaaacagcaugagugugacucuccugccucaaaccaggugaugccaugcgaaccgauuaucauagagagaaauaucacugaaauuguauacuugaacaauaccacaaucgagaaggaaauuugucccgagguggucgaguauaggaacuggaguaaaccucagugccaaaucaccggguucgcgccauuuagcaaggauaauuccauacgguuaucugcuggaggugacauuugggugacucgcgaacccuacguuucgugugauccuggcaaaugcuaucaguucgcccuggggcagggaacaacccuagacaacaagcacucaaauggcacgauccaugaucguauuccacaccgaacucuccugaugaacgagcuuggugugcccuuucaucuggggaccaagcaggucuguguggcauggagcaguuccucuugccacgacggaaaagccugguugcacguauguguuacaggcgaugacagaaaugcuacugccagcuucaucuacgauggcaggcucguggacuccaucgggucauggagucaaaacauucugcggacccaggaaagcgagugcgucuguauaaauggaacaugcaccguggugaugacggaugguucugcauccggccgcgcugacacuagaauccuguuuauuaaggaggggaaaaucguccauauaucaccucucagcggaagugcccagcacauugaagagugcucuuguuauccaagguacccggauguucggugcaucugucgcgacaacuggaagggcuccaaucgacccgugaucgacauuaacauggaagauuauagcaucgacucgucuuacguaugcuccgguuuagugggggauacaccuagaaacgacgauucaaguagcaauuccaacuguagggacccaaauaacgagcggggaaaucccggcgucaaaggcugggcguucgauaacggggacgauguguggaugggacguaccauuaauaaggaaucucgcagcgguuacgagacuuuuaagguuauaggcggguggucaacaccuaacaguaaaucccaggugaauagacaagucaucguggacaacaauaacuggagcggauauucuggcauuuucucaguagaggguaagaguugcaucaauagguguuuuuacguugaacugauccgggggcgaccacaggagacccgcgugugguggacgagcaacuccauugucguguucugcggcaccucuggaacauauggcacugggucguggcccgauggagcaaauauaaacuuuaugccgaucuga

SEQ ID NO: 150609 - RNA, 1410 nt, Artificial Sequence
  derived and/or modified CDS sequence (opt3) from neuraminidase__InfluenzaA__AFM71904
augaaccccaaucagaagaucauuaccauaggcagcgugucccugacaaucgccacugucugcuuccucaugcaaauugcuauccuugcaacgaccguuacacugcacuuuaaacagcaugagugugacucuccugccucaaaccaggugaugccaugcgaaccgauuaucauagagagaaauaucacugaaauuguauacuugaacaauaccacaaucgagaaggaaauuugucccgagguggucgaguauaggaacuggaguaaaccucagugccaaaucaccggguucgcgccauuuagcaaggauaauuccauacgguuaucugcuggaggugacauuugggugacucgcgaacccuacguuucgugugauccuggcaaaugcuaucaguucgcccuggggcagggaacaacccuagacaacaagcacucaaaugugacgauccaugaucguauuccacaccgaacucuccugaugaacgagcuuggcguccccuuucaucuggguaccaaacagguguguguagcauggagcaguuccucuugccacgacgggaaggccugguugcacguuugugugacaggagaugacagaaaugcuacugccagcuucaucuacgauggcaggcucgucgacuccaucggcucauggagucaaaacauucugcggacccaggaaagcgagugcguguguauaaaugggacaugcaccguggucaugacggauggaucugcauccggucgcgcugacacuagaauccuguuuauuaaggagggcaaaaucguucauauaucaccucucagcgggagugcccagcacauugaagagugcucuuguuauccaagguacccggaugugcggugcaucugucgcgacaacuggaagggauccaaucgacccguaaucgacauuaacauggaagauuauagcaucgacucgggcuacgugugcucugguuuagucggggauacaccuagaaacgacgauuccucaaguaauagcaacuguagggacccaaauaacgagcggggaaaucccggcgugaaaggcugggcguucgauaacggggacgauguuuggaugggacguaccauuaauaaggaaucccgcucugguuacgagacuuuuaaggugauaggcggguggagcacaccuaacucaaaaagucaggucaauagacaagugaucguagacaacaauaacugguccggauauagcggcauuuucucuguugaggguaagucaugcaucaauagguguuuuuacguggaacugauccgggggcgaccacaggagacccgcgucugguggacgaguaacagcauuguggucuucugcggcaccuccggaacauauggcacugggucuuggcccgauggagcaaauauaaacuuuaugccgaucuga

SEQ ID NO: 150610 - RNA, 1410 nt, Artificial Sequence; identical to SEQ ID NO: 143020
  derived and/or modified CDS sequence (opt3) from neuraminidase__InfluenzaA__AFM71915

SEQ ID NO: 150611 - RNA, 1410 nt, Artificial Sequence; identical to SEQ ID NO: 143020
  derived and/or modified CDS sequence (opt3) from neuraminidase__InfluenzaA__AFM71926

SEQ ID NO: 150612 - RNA, 1410 nt, Artificial Sequence; identical to SEQ ID NO: 143020
  derived and/or modified CDS sequence (opt3) from neuraminidase__InfluenzaA__AFM71937

SEQ ID NO: 150613 - RNA, 1410 nt, Artificial Sequence; identical to SEQ ID NO: 150028
  derived and/or modified CDS sequence (opt3) from neuraminidase__InfluenzaA__AFM71948

SEQ ID NO: 150614 - RNA, 1410 nt, Artificial Sequence; identical to SEQ ID NO: 150028
  derived and/or modified CDS sequence (opt3) from neuraminidase__InfluenzaA__AFM71959

SEQ ID NO: 150615 - RNA, 1410 nt, Artificial Sequence
  derived and/or modified CDS sequence (opt3) from neuraminidase__InfluenzaA__AFM71970
augaaccccaaucagaagaucauuaccauaggcagcgugucccugacaaucgccacuauuugcuuccucaugcaaaucgcuauucuugucacgaccguuacacugcacuuuaaacaguacgagugugacucuccugcaaacaaucaggugaugccauaugaaccgaucauaaucgagagaaacauuacugaaaucguauacuugaccaauacaaccauugagaaggaaaucugccccaaauuaguggaguauaggaacuggucaaagccucaguguaaaauaacuggguucgccccauuuaguaaggauaauagcauucggcuguccgcgggaggugacaucugggucacacgcgagcccuacgugucuugcgauccuggcaaguguuaucaauucgcucuagggcagggaaccacgcucgaaaacaaacauucgaaugacacuauucacgaucgaaccccacaucguacacugcuuaugaacgagcugggcguucccuuucacuuggguacuagacaggugugcaucgccuggucaagcaguuccugucaugacgggaaggcauggcuccacgucugcgugaccggauacgauaaaaaugccacagcuucuuucaucuaugacggcaggcugguagauagcauuggcuccuggucacagaacauacugcggacccaagaaagugaguguguuugcaucaaugggacguguacuguggucaugacagacggaagcgcaucuggucgcgccgauaccaagauucucuuuaucgaggaaggcaaaauagugcacauuuccccuuuaucagggagcgcucagcauguggaggaaugcaguugcuacccaagauacccgggagucagguguaucugccgggacaacuggaagggcucuaaucgccccguuguggauaucaacguaaaggacuauuccauugacagcucguacguguguucuggucuggucggggauacuccucgaaagaacgacagauccucaaguagcuauugcaggaauccaaacaaugagaaaggaaaccacggcgugaaaggcugggccuucgaugacgggaaugauguuuggaugggacggacaaucuccgaagacucucguagcgguuacgagaccuuuaaggugauuggcggguggucaacgcccaacaguaaacuucagauaaaucgccaggucaucguggauuccgcgaacagaagcggauauucuggcauuuucucaguagaggguaagaguuguaucaauaggugcuuuuacguugaauugauccgggggcgagagcaagaaacccgcgugugguggacaagcaacuccauugucguguucuguggcacuucuggaaccuauggcacagggucguggccugacggagcagauauaaaucugaugccaaucuga

SEQ ID NO: 150616 - RNA, 1410 nt, Artificial Sequence; identical to SEQ ID NO: 150036
  derived and/or modified CDS sequence (opt3) from neuraminidase__InfluenzaA__AFM71981

SEQ ID NO: 150617 - RNA, 1410 nt, Artificial Sequence
  derived and/or modified CDS sequence (opt3) from neuraminidase__InfluenzaA__AFM71992
augaaccccaaucagaagaucauuaccauaggcagcgugucccugacaaucucuacuauuugcuucuuuaugcagaucgccauucucaucacgaccgucacacuucacuucaaacaguacgaguuuaacucaccuccaaauaaccagguuaugcugugugaaccgacuauaaucgagagaaauauuaccgaaaucguguauuugacaaacaccacuauugagaaggaaaucugccccaaauuagcugaguacaggaauuggaguaagccucagugugacauaacaggguucgcaccauuuagcaaagauaacuccauucggcugucugccggaggugacaucuggguaacccgcgagcccuaugugucgugcgauccugacaaguguuaccaauucgcgcuaggccaggggacgacucucaauaacguccauucaaauaacaccgugcgagaucguacaccauauagaacucugcuuaugaaugaacugggaguucccuuucacuugggcaccaaacaggugugcauugcuuggagcaguuccucuugucaugacgguaaggccuggcuccacgucugcaucacaggggaugacaagaacgcaaccgccagcuucaucuacaauggaaggcugguggauuccguaguuucauggagucaggagauucugcggacgcaagaaagcgagugugugugcauaaacggcacuuguacagucgugaugaccgacggcucugcuuccgggaaagcagauacuaagauccucuuuauugaggaaggaaaaaucgugcauacaucaaccuuaagcgguagugcccagcacgucgaggaaugcucuugcuauccucgcuacccaggcguuagaugugugugcagggacaacuggaagggguccaaucggccgauaguagauauuaacaucaaggaccacagcaucgugucgucuuacgucuguuccggacuggugggcgacacgccccgcaaaaaugauucaaguagcuccucucauugccuugacccuaacaaugaggaaggugggcacggaguuaagggcugggcuuucgaugacggcaacgauguguggauggggcgaaccauuaaugagacaagcagauugggauaugagacuuuuaaagucaucgaagguuggucaaacccaaagaguaaacugcagaugaauaggcaagugauuguagaccggggcaaccguuccggguacagcggaauauucucuguugagggcaagucauguaucaaucgcugcuuuuauguggaacuaauuagagguaggaaagaggaaaccgagguccucuggacaaguaacagcaucguggucuucugugggacuuccggcaccuacggaacaggcucuuggcccgauggggccgaccugaaucuuaugccuaucuga

SEQ ID NO: 150618 - RNA, 1410 nt, Artificial Sequence; identical to SEQ ID NO: 150592
  derived and/or modified CDS sequence (opt3) from neuraminidase__InfluenzaA__AFM72013

SEQ ID NO: 150619 - RNA, 1365 nt, Artificial Sequence; identical to SEQ ID NO: 143767
  derived and/or modified CDS sequence (opt3) from neuraminidase__InfluenzaA__AFM72024

SEQ ID NO: 150620 - RNA, 1410 nt, Artificial Sequence; identical to SEQ ID NO: 147043
  derived and/or modified CDS sequence (opt3) from neuraminidase__InfluenzaA__AFM72035

SEQ ID NO: 150621 - RNA, 1410 nt, Artificial Sequence; identical to SEQ ID NO: 147043
  derived and/or modified CDS sequence (opt3) from neuraminidase__InfluenzaA__AFM72046

SEQ ID NO: 150622 - RNA, 1413 nt, Artificial Sequence
  derived and/or modified CDS sequence (opt3) from neuraminidase__InfluenzaA__AFM72057
augaaccccaaucagaagaucauuaccauaggcagcaucugcacaacuauugggaucauuucccugauccuccaaauaggaaacaucauuucuaucugggugucacacaguauucagacggguagccagaaucauaccggcaucuguaaccagagaauaauuacauacgaaaauuccacuugggucaaccaaaccuauguuaauaucaacaauacaaacgugguagccgggaaagacaccacuucugugacacuugcuggaaauucgucacugugcccuauuaggggcugggcaaucuacagcaaggauaacaguauccggauugguuccaaaggggacgucuucgugauacgcgaaccauuuaucucuuguagccacuuggagugccgaaccuucuuuuuaacgcagggagcccugcuaaaugauaagcauuccaacggcacuguuaaagaccguucaccguauagagcgcucaugaguugucccauuggcgaagcuccuagcccauacaauucuagguucgaguccguggccuggucagcaagcgccugccacgaugggaugggauggcugaccaucgguauaaguggccccgacgauggggcugucgcagugcuuaaguauaacggaauuaucacagaaacuaucaagucuuggcggaaacgcauucugagaacccaggaguccgaguguguaugcguuaacggcagcuguuuuacaaucaugaccgacgguccuucgaaugggccagccucuuacaggauuuucaagauagaaaaaggaaagaucacgaaauccauugaguuggaugcucccaacucacauuaugaagagugcaguuguuacccugacacuggcacagugaugugcgucugccgggauaauuggcacggcagcaaccgcccauggguguccuuuaaucagaaccucgacuaccaaaucggguauaucuguucuggaguguucggugauaauccgcgacccaaggacggcaaggggagcugcgacccugucaccguugauggagccgacggcgugaaagguuuuucauacagauaugggaacggcguauggauuggaaggacuaagaguaauuccagccggaaaggcuucgagaugauaugggauccaaacggguggacagacaccgauucuaauuuucuggugaagcaggacgucguggcgaugacggauuggucaggauacagugguagcuucguucagcaccccgaacugaccggccucgacuguaugcguccuugcuuuuggguggaguuaauccgcgggagaccaagggagaaaacaacuauuuggaccuccggaucuucgaucagcuucuguggcgucaacuccgauacagcaaauuggucauggcccgacggugccgagcugccguucacuauugauaaguga

SEQ ID NO: 150623 - RNA, 1413 nt, Artificial Sequence; identical to SEQ ID NO: 143107
  derived and/or modified CDS sequence (opt3) from neuraminidase__InfluenzaA__AFM72068

SEQ ID NO: 150624 - RNA, 1410 nt, Artificial Sequence
  derived and/or modified CDS sequence (opt3) from neuraminidase__InfluenzaA__AFM72090
augaaccccaaucagaagaucauuaccauaggcagcgugucccugacaaucgccacuauuugcuuccucaugcaaaucgcuauucuugucacgaccguuacacugcacuuuaaacaguacgaguguucuucaccuccaaacaaucaggugaugccgugcgaacccaucauaaucgagagaaacauuacugaaaucguauauuugaccaauacaaccauugagaaggaaaucuguccuaaauuaguggaguacaggaacuggaguaagccacagugcaaaauaacuggguucgcacccuuuagcaaggacaauuccauucggcugucugccggaggugauaucugggucacacgcgagccuuaugugucgugugacccaggcaagugcuaccaauucgcgcuagggcagggaaccacgcucaacaauaaacauucaaacgauacuguucacgaccgaacccccuaucguacacugcuuaugaaugaacugggcgugccuuuucauuuggguacuaagcaggucuguauugcuuggagcaguuccucuugccacgaugggaaagccuggcuccauguguguguaaccggacacgacaagaacgcaacagccagcuucaucuacgauggcagacugguugacuccaucggcucauggaguaaaaauauucugaggacccaggagagcgaaugcguguguauaaacgggacgugcacugucgugaugacagauggaucugcuuccgagcgggcagacaccaagauccucuuuauugaggaagguaagaucgugcacauaucaccauuaagcggcagugcccaacaugucgaggaaugcucuuguuauccgcgcuaccccgggguuagaugcguguguagggauaauuggaaaggauccaaccggccuauuguagacaucaacgugaaggauuacagcaucgucucgucuuaugugugcuccggccugguuggugacacuccacgcaaaaaugaccgaucaaguagcuccuacuguagaaaccccaauaacgagaaggggaaucacggagugaaaggcugggcuuucgaugacggcaacgaugucuggauggggaggacaauuggagaggaacuucgguuggguuaugagaccuuuaaggugaucggcggguggucuacgccuaauagcaaacugcagauuaaccgucagguaauaguugacucaaagaaucgcaguggauacuccggcaucuucagcguggaagguaagucuugcauuaacagauguuuuuaugucgagcuaaucagggggcgggaacaggagacccgagugugguggacaucaaauaguaucgucguguucugcggcacuagcggaaccuacggcacaggguccuggccagauggagccgacauuaaccucaugcccauauga

SEQ ID NO: 150625 - RNA, 1410 nt, Artificial Sequence
  derived and/or modified CDS sequence (opt3) from neuraminidase__InfluenzaA__AFM72101
augaaccccaaucagaagaucauuaccauaggcagcgugucccugacaaucgccacuauuugcuuccucaugcaaaucgcuauucuugucacgaccguuacacugcacuuuaaacaguacgaguguucuucaccuccaaacaaucaggcaaugccgugcgaacccacuaucauagagagaaacaucaccgaaauuguguauuugacaaauaccacuaucgagaaggaaauuuguccuaaauuaguagaguacaggaacuggaguaagccacagugcaaaaucacaggguucgcccccuuuagcaaggacaauuccauacggcugucugcgggaggugauauuugggugacccgcgagccuuaugucucgugugacccaggcaagugcuaccaauucgcucuagggcagggaacgacucucaacaaucgacauucaaacgauaccgugcacgaccguacacccuauagaacucugcuuaugaaugaacugggcguuccuuuucauuuggguaccaaacagguguguaucgccuggagcaguuccucuugccacgaugggaaggcauggcuccaugucugugugacaggacacgacaaaaacgccaccgcuagcuucauuuacgauggcaggcugguagacuccaucggcucauggaguaagaauauccugcggacgcaggagagcgaaugcguuuguauuaacgggacuugcacaguggucaugaccgauggaucugcauccgagcgcgccgacacuaaaauacucuuuaucgaggaagguaagauugugcacaucucaccauuaagcggcagugcucaacauguggaggaaugcucuuguuauccgagauaccccggggucaggugcguuugucgggauaauuggaagggauccaaccgcccuauaguggacauuaacguaaaagauuacagcaucgugucgucuuaugucugcuccggccuggugggugacacaccacgaaagaaugacagaucaaguagcuccuacuguaggaaccccaauaacgagaaagggucucacggaguuaagggcugggccuucgaugacggcaaugauguguggauggggcggaccaucggagaggaacuucguagcgguuaugagacguuuaaagucauuggcggguggucaaccccuaacaguaaguugcagaucaaucgccaggugauuguagacuccggaaacagaagcggcuacucugguauauucucaguugaagggaaaaguugcaucaauagguguuuuuauguggagcugauucggggccgagaacaggagacacgcgucugguggacuagcaacuccaucguggucuucugcggaaccucuggcacauacgggacuggaucguggccagauggugcggacaucaaucuaaugcccauuuga

SEQ ID NO: 150626 - RNA, 1410 nt, Artificial Sequence; identical to SEQ ID NO: 142861
  derived and/or modified CDS sequence (opt3) from neuraminidase__InfluenzaA__AFM72112

SEQ ID NO: 150627 - RNA, 1410 nt, Artificial Sequence
  derived and/or modified CDS sequence (opt3) from neuraminidase__InfluenzaA__AFM72123
augaaccccaaucagaagaucauuaccauaggcagcgugucccugacaaucgccacuauuugcuuccucaugcaaaucgcuauucuugucacgaccguuacacugcacuuuaaacaguacgaguguucuucaccuccaaacaaucaggugaugccgugcgaacccacuaucauagagagaaacaucaccgaaauuguauauuugacaaauaccacuaucgagaaggaaauuuguccuaaauuaguggaguacaggaacuggaguaagccacagugcaaaaucacaggguucgcacccuuuagcaaggacaauuccauacggcugucugccggaggugauauuugggucacccgcgagccuuaugugucgugugacccaggcaagugcuaccaauucgcgcuagggcagggaacgacucucaacaaucgacauucaaacgauaccguucacgaccguacacccuauagaacucugcuuaugaaugaacugggcgugccuuuucauuuggguaccaaacaggucuguaucgcuuggagcaguuccucuugccacgaugggaaggccuggcuccauguguguguaacaggacacgacaaaaacgcaaccgccagcuucauuuacgauggcaggcugguugacuccaucggcucauggaguaagaauauccugcggacgcaggagagcgaaugcguguguauuaacgggacuugcacagucgugaugaccgauggaucugcuuccgagcgcgcagacacuaaaauacucuuuaucgaggaagguaagauugugcacaucucaccauuaagcggcagugcccaacaugucgaggaaugcucuuguuauccgagauaccccgggguuaggugcgugugucgggauaauuggaagggauccaaccgcccuauaguagacauuaacgugaaagauuacagcaucgucucgucuuaugugugcuccggccugguuggugacacaccacgaaagaaugacagaucaaguagcuccuacuguaggaaccccaauaacgagaaagggucucacggagugaagggcugggcuuucgaugacggcaaugaugucuggauggggcggaccaucggagaggaacuucguagcgguuaugagacguuuaaagugauuggcggguggucaaccccuaacaguaaguugcagacaaaucgccagguaaucguugacuccggaaacagaagcggcuacucugguauuuucucaguggaagggaaaaguugcauaaauagguguuuuuaugucgagcugauccggggccgagaacaggagacucgcgugugguggaccagcaacuccauugucguguucugcggaacaucuggcacuuacgggaccggaucguggccagauggugccgacaucaaucuaaugcccaucuga

SEQ ID NO: 150628 - RNA, 1410 nt, Artificial Sequence; identical to SEQ ID NO: 150183
  derived and/or modified CDS sequence (opt3) from neuraminidase__InfluenzaA__AFM72134

SEQ ID NO: 150629 - RNA, 1410 nt, Artificial Sequence
  derived and/or modified CDS sequence (opt3) from neuraminidase__InfluenzaA__AFM72145
augaaccccaaucagaagaucauuaccauaggcagcgugucccugacaaucgccacuauuugcuuccucaugcaaaucgcuauucuugcaaucacggucacccugcacuuuaaacaguacgaguguaacucuccuccaaauaaccagguuauguugugcgaaccgacaauaaucgagagaaauacuaccgaaauuguguauuuaacaaacaccacuaucgagaaggaaguaugucccaaacuggccgaguacaggaauuggucaaagccucagugcaaaauuacaggguucgcgccauuuaguaaggacaacagcauccggcuauccgcuggaggugauauaugggugacccgcgagcccuaugucucuugugacccuggcaagugcuaccaauucgcccucgggcagggaacgacucugaauaaccgacauucgaaugauaccgugcacgaccguacaccauauagaacucuucugaugaacgaauugggcguucccuuucaucucgguaccaaacagguguguauugcauggucaagcaguuccugccacgaugggaaggccuggcugcaugucugugugacaggacacgacgagaaugcuaccgcaucuuucaucuacgauggcaggcugguagacagcauuggcuccuggaguaaaaacauccuccggacgcaggaaucagagugcguuuguaucaaugggacuugcacaguggucaugaccgauggaagcgccucugagcgcgcugacacuaagauuuuauuuauagaagaggguaaaaucgugcacauuuccccucugucaggcagcgcccaacauguggaagagugcaguuguuauccaagauacccgggggucaggugcguuugucgggauaacuggaagggaucuaaccgccccaucguggacauaaauguaaaggauuacuccauugugagcucguaugucugcucuggccuugugggugacacaccucgaaagaacgacuccucaaguagcuccuacuguagaaauccaaacaaugaaaaagggucucacggaguuaaaggcugggcguucgaugacggcaacgauguguggauggggaggaccaucagcgaggaguugcggucaggauaugaaacguuuaaggucaucgguggcuggaguaaacccaauuccaagcugcagauuaaccgucaggugaucguagaccgcgggaauagaagcggauacucuggcauuuucucaguugaggguaaaaguugcauaaacagguguuuuuauguggaacuaauccgggggcgaaagcaggagaccgaagucugguggacaagcaauuccauuguggucuucugcggcacuucuggaaccuacggcacagggucguggccugauggagcagacaucaaccucaugccaaucuga

SEQ ID NO: 150630 - RNA, 1410 nt, Artificial Sequence; identical to SEQ ID NO: 143233
  derived and/or modified CDS sequence (opt3) from neuraminidase__InfluenzaA__AFM72156

SEQ ID NO: 150631 - RNA, 1410 nt, Artificial Sequence
  derived and/or modified CDS sequence (opt3) from neuraminidase__InfluenzaA__AFM72167
augaaccccaaucagaagaucauuaccauaggcagcaucucccugacaauugccacuaucugcuuccucaugcaaauugcuauccuugugacgaccgucacacugcacuuuaaacaguacgaguguaacucuccuccaaauaaccagguuauguugugcgaaccgacuauaaucgagagaaauauuaccgaaaucguguauuuaacaaacaccacuauugagaaggaaaucugucccgagcuggcagaguacaggaauuggucaaaaccucagugcaagauaacaggguucgccccauuuaguaaagacaacagcauucggcuauccgcgggaggugauaucuggguaacccgcgaacccuaugugucuugugacccuggcaagugcuaccaauucgcucucgggcagggaacgacucugaauaaccgacauucgaaugauaccguccacgaccguacaccauauagaacucuucugaugaacgaguugggcgugcccuuucaucucgguaccaagcagguuuguauugccuggucaagcaguuccugccacgaugggaaagcauggcugcaugugugugucacaggacacgacgaaaaugccaccgcuucuuucaucuacgauggcaggcugguggacagcaucggcuccuggucaaagaacauucuccggacgcaggagagugagugcguauguauaaaugggacuugcacaguugugaugaccgauggaagcgcaucugaacgcgccgacacuaaaaucuuauuuauugaggaagguaagaucguccacauauccccucugucaggcagcgcucaacauguggaggaaugcaguuguuauccaagauacccgggggugaggugcgucugucgggauaacuggaaaggaucuaaccgccccauuguugacaucaaugugaaggauuacuccaucguaagcucguaugugugcucuggccuugucggugacacaccucgaaagaacgacuccucaaguagcuccuacuguuggaauccaaacaaugagaaagggggacacggcgugaagggcugggccuucgaugacgggaacgauguuuggaugggaagaaccauuucugaggaauugaggagcgguuaugagacguuuaaagugaucggcggguggucaaagcccaauaguaaacugcagauuaaccggcaggucauaguggaccguggaaaucgcuccggcuacagcgguaucuucucuguagaagggaagucaugcauuaacagauguuuuuauguugagcuaaucaggggccggaaacaggaaaccgaggugugguggacaaguaauagcaucgucguguucugcggaacuuccggcaccuacgggacaggaucuuggccugauggugcggacauuaaccucaugccaauauga

SEQ ID NO: 150632 - RNA, 1410 nt, Artificial Sequence
  derived and/or modified CDS sequence (opt3) from neuraminidase__InfluenzaA__AFM72178
augaaccccaaucagaagaucauuaccauaggcagcgugucccugacaaucgccacuauuugcuuccucaugcaaaucgcuauucuugucacgaccguuacacugcacuuuaaacaguacgaguguaacucuccuccaaauaaccaggugauguugugcgaaccgacuaucauagagagaaauaucaccgaaauuguauauuuaacaaacaccacuaucgagaaggaaauuugucccgagcuggcagaguacaggaauuggucaaaaccucagugcaagaucacaggguucgccccauuuaguaaagacaacagcauacggcuauccgcgggaggugauauuugggugacccgcgaacccuaugucucuugugacccuggcaagugcuaccaauucgcucucgggcagggaacgacucugaauaaccgacauucgaaugauaccgugcacgaccguacaccauauagaacucuucugaugaacgaguugggcguucccuuucaucucgguaccaaacagguguguaucgccuggucaagcaguuccugccacgaugggaaggcauggcugcaugucugugugacaggacacgacgaaaaugccaccgcuucuuucauuuacgauggcaggcugguagacagcaucggcuccuggucaaagaacauccuccggacgcaggagagugagugcguuuguauuaaugggacuugcacaguggucaugaccgauggaagcgcaucugaacgcgccgacacuaaaauauuauuuaucgaggaagguaagauugugcacaucuccccucugucaggcagcgcucaacauguggaggaaugcaguuguuauccaagauacccgggggucaggugcguuugucgggauaacuggaaaggaucuaaccgccccauaguggacauuaauguaaaggauuacuccaucgugagcucguaugucugcucuggccuugugggugacacaccucgaaagaacgacuccucaaguagcuccuacuguuggaauccaaacaaugagaaagggggacacggcguuaagggcugggccuucgaugacgggaacgauguguggaugggaagaaccaucucugaggaauugaggagcgguuaugagacguuuaaagucauuggcggguggucaaagcccaauaguaaacugcagaucaaccgucaggugauuguagaccggggaaaucgcuccggcuacagcgguauauucucuguugaagggaagucaugcaucaacagauguuuuuauguggagcuaauuaggggccggaaacaggaaaccgaggucugguggacaaguaauagcaucguggucuucugcggaacuuccggcaccuacgggacaggaucuuggccugauggugcggacaucaaccucaugccaauuuga

SEQ ID NO: 150633 - RNA, 1410 nt, Artificial Sequence
  derived and/or modified CDS sequence (opt3) from neuraminidase__InfluenzaA__AFM72189
augaaccccaaucagaagaucauuaccauaggcagcgugucccugacaaucgccacuauuugcuuccucaugcaaaucgcuauucuugucacgaccguuacacugcacuuuaaacaguacgaguguaacucuccuccaaauaaccaggugauguugugcgaaccgacuaucauagagagaaauaucaccgaaauuguauauuuaacaaacaccacuaucgagaaggaaauuugucccaaacuggcagaguacaggaauuggucaaagccucagugcaaaaucacaggguucgccccauuuaguaaggacaacagcauacggcuauccgcgggaggugauauuugggugacccgcgagcccuaugucucuugugacccugauaagugcuaccaauucgcucucggccaggggacgacucugaauaaccgacauucgaaugacaccgugcacgaucguacaccauauagaacucuucugaugaacgaauugggaguucccuuucaucucggcaccaaacagguguguaucgccuggucaagcaguuccugccacgacgguaaggcauggcugcaugucugugugacagggcacgaugagaaugccaccgcuucuuucauuuacgacggaaggcugguagauagcaucggcuccuggaguaaaaagauccuccggacgcaggaaucagagugcguuuguauuaacggcacuugcacaguggucaugaccgacgggagcgcaucuggacgcgccgauacuaaaauauuauuuaucgaggaagguaagauugugcacaucuccccucugcuuggcucagcucaacauguggaggaaugcagcuguuauccaagauacccgggggucaggugcguuugucgggacaauuggaagggaaguaaccgccccauaguggauauuaacguaaaagacuacucuaucguguccagcuaugucugcucgggcuuggugggugacacaccucgaaagaaugauucuuccucaaguagccacugucugaacccaaauaacgaggaagggggacauggcguuaaaggcugggccuucgacgauggggacgauguguggaugggaagaaccaucuccgagaagcuaaggucugguuacgagacguuuaaagucauugaaggcuggagcaagcccaauucaaaacuccagaucaaccgucaggugauuguagaccgggggaaucgcaguggauauuccggcauauucagcguugaggguaagucuugcaucaacagauguuuuuacguggaacugauuagggggcggaagcaggagaccgaagucugguggacaucaaauaguaucguggucuucugcggcacuagcggaaccuauggcacaggguccuggccugauggagcggacaucaaccuuaugccaauuuga

SEQ ID NO: 150634 - RNA, 1410 nt, Artificial Sequence; identical to SEQ ID NO: 150633
  derived and/or modified CDS sequence (opt3) from neuraminidase__InfluenzaA__AFM72200

SEQ ID NO: 150635 - RNA, 1410 nt, Artificial Sequence; identical to SEQ ID NO: 143797
  derived and/or modified CDS sequence (opt3) from neuraminidase__InfluenzaA__AFM72211

SEQ ID NO: 150636 - RNA, 1410 nt, Artificial Sequence; identical to SEQ ID NO: 143797
  derived and/or modified CDS sequence (opt3) from neuraminidase__InfluenzaA__AFM72222

SEQ ID NO: 150637 - RNA, 1413 nt, Artificial Sequence; identical to SEQ ID NO: 144501
  derived and/or modified CDS sequence (opt3) from neuraminidase__InfluenzaA__AFM72233

SEQ ID NO: 150638 - RNA, 1410 nt, Artificial Sequence; identical to SEQ ID NO: 142621
  derived and/or modified CDS sequence (opt3) from neuraminidase__InfluenzaA__AFM72249

SEQ ID NO: 150639 - RNA, 1410 nt, Artificial Sequence; identical to SEQ ID NO: 142109
  derived and/or modified CDS sequence (opt3) from neuraminidase__InfluenzaA__AFM72260

SEQ ID NO: 150640 - RNA, 1410 nt, Artificial Sequence; identical to SEQ ID NO: 142109
  derived and/or modified CDS sequence (opt3) from neuraminidase__InfluenzaA__AFM72271

SEQ ID NO: 150641 - RNA, 1410 nt, Artificial Sequence
  derived and/or modified CDS sequence (opt3) from neuraminidase__InfluenzaA__AFM72293
augaaccccaaucagaagaucauuaccauaggcagcgugucccugacaaucgccacuauuugcuuccucaugcaaaucgcuauucuugucacgaccguuacacugcacuuuaaacaguacgaguguaacucuccuccaaauaaccaggugauguugugcgaaccgacuaucauagagagaaauaucaccgaaauuguauauuuaacaaacaccacuaucgagaaggaaauuugucccaaacuggcagaguacaggaauuggucaaagccucagugcaacaucacaggguucgccccauuuaguaaagacaauagcauacggcuauccgcgggaggugauauuugggugacccgcgagcccuaugucucuugugacccugauaagugcuaccaauucgcucucggccaggggacgacucugaacaauggacauucgaacuauaccgugcacgaccgaacaccauaccguacucuucugaugaaugaauugggcguucccuuucaucucgguaccaaacagguguguaucgccuggucaagcaguuccugccacgaugggaaggcauggcugcaugucugugugacaggagacgaugagaacgccaccgcuucuuucauuuauaauggcagacugguagacagcaucggcuccuggucaaagaaaauccucaggacgcaggaaagugagugcguuuguauuaacgggacuugcacaguggucaugaccgauggaagcgcaucugguaaggccgacacuaaaauauuauuuaucgaggaaggcaagauugugcacacauccucacugagcgggagugcucaacacguggaggaaugcucuuguuacccucgguacccaggaguccgcugcguuuguagagauaacuggaagggcuccaauaggccgaucguggacauaaacguaaaagauuauagcauugugucgucuuacgucugcuccggucuugugggggacacgccccggaagaaugacucaaguagcuccucucauuguuuggauccuaacaaugaggaaggaggccacggcguuaaagggugggccuucgacgauggaaacgacguguggaugggucgcaccaucagcgagaagcugcgaucaggcuaugagaccuuuaaagucaucgaaggguggaguaagccaaauuccaaacuacagauuaacagacaggugaucguagauaggggaaaucggagcggcuacucugguauuuucucaguugaggggaagaguugcauaaaccguuguuuuuauguggaacucauccgcggcagaaagcaggagacagaaguccuguggacuagcaauuccauuguggucuucugcggaaccucuggcacauacgggacuggaucguggcccgacggugcggauaucaaccuuaugccuaucuga

SEQ ID NO: 150642 - RNA, 1410 nt, Artificial Sequence; identical to SEQ ID NO: 143977
  derived and/or modified CDS sequence (opt3) from neuraminidase__InfluenzaA__AFM72304

SEQ ID NO: 150643 - RNA, 1410 nt, Artificial Sequence
  derived and/or modified CDS sequence (opt3) from neuraminidase__InfluenzaA__AFM72315
augaaccccaaucagaagaucauuaccauaggcagcgugucccugacaaucucuacuauuugcuucuuuaugcaaaucgccauucucaucacgaccgucacacuucacuucaaacaguacgaguuuaacucaccuccaaauaaccagguuaugcugugugaaccgacuauaaucgagagaaauauuaccgaaaucguguauuugacaaacaccacuauugagaaggaaaucugccccaaauuagcugaguacaggaauuggaguaagccucaguguaacauaacaggguucgcaccauuuagcaaagacaauuccauucggcugucugccggaggugauaucuggguaacccgcgagcccuaugugucgugcgacccugauaaguguuaccaauucgcgcuaggccaggggacgacucucaacaauguccauucaaacgacaccgugcacgaucgaacaccauaucguacucugcuuaugaaugaacugggaguucccuuucauuugggcaccaaacaggugugcauugcuuggagcaguuccucuugucacgacgguaaggccuggcuccaugucugcgugacaggggaugacgagaacgcaaccgccagcuucaucuacaauggaagacugguagauuccaucguuucauggaguaagaaaauucugaggacgcaggaaagcgagugugugugcauaaacggcacuuguacagucgugaugaccgacggcucugcuuccgggaaggcagauacuaaaauccucuuuauugaggaaggaaagaucgugcacacaucaaccuuaagcgguagugcccaacacgucgaggaaugcucuugcuauccucgguacccaggcguucgcugugugugcagagacaacuggaagggguccaauaggccgauaguagauauuaacaucaaagacuacagcaucgugucgucuuaugucuguuccggacuggugggcgacacgccccggaagaaugauucaaguagcuccucucauugccuugacccuaacaaugagaaaggugggcacggaguuaagggcugggcuuucgaugacggcaacgauguguggauggggcgcaccauuagcgaaaaauugcgaucaggauacgagacauuuaaggucaucgaggguuggaguaauccaaacuccaaacugcagauuaauagacaggugauaguagacagggauaaccggagcggcuauucugggaucuucucaguugaaggaaagaguuguauuaaucguugcuuuuacguggagcuaauccgcggcagaaaccaggaaacugagguccucuggaccagcaauuccaucguggucuucugugguacaucugggacuuauggcaccggaucguggcccgacggcgccgauauuaaccugaugccuauauga

SEQ ID NO: 150644 - RNA, 1410 nt, Artificial Sequence
  derived and/or modified CDS sequence (opt3) from neuraminidase__InfluenzaA__AFM72326
augaaccccaaucagaagaucauuaccauaggcagcgugucccugacaaucucuacuauuugcuucuuuaugcaaaucgccauucucaucacgaccgucacacuucacuucaaacaguacgaguuuaacucaccuccaaauaaccagguuaugcugugugaaccgacuauaaucgagagaaauauuaccgaaaucguguauuugacaaacaccacuauugagaaggaaaucugccccaaauuagcugaguacaggaauuggaguaagccucaguguaacauaacaggguucgcaccauuuagcaaagacaauuccauucggcugucugccggaggugauaucuggguaacccgcgagcccuaugugucgugcgacccugauaaguguuaccaauucgcgcuaggccaggggacgacucucaacaauguccauucaaacgacaccgugcacgaucgaacaccauaucguacucugcuuaugaaugaacugggaguucccuuucauuugggcaccaaacaggugugcauugcuuggagcaguuccucuugucacgacgguaaggccuggcuccaugucugcgugacaggggaugacgagaacgcaaccgccagcuucaucuacaauggaagacugguagauuccaucguuucauggaguaagaaaauucugaggacgcaggaaagcgagugugugugcauaaacggcacuuguacagucgugaugaccgacggcucugcuuccgggaaggcagauacuaaaauccucuuuauugaggaaggaaagaucgugcacacaucaaccuuaagcgguagugcccaacacgucgaggaaugcucuugcuauccucgguacccaggcguucgcugugugugcagagacaacuggaagggguccaauaggccgauaguagauauuaacaucaaagacuacagcaucgugucgucuuaugucuguuccggacuggugggcgacacgccccggaagaaugauucaaguagcuccucucauugccuugacccuaacaaugaggaaggugggcacggaguuaaaggcugggcuuucgaugacggcaacgauguguggauggggcgcaccauuagcgagaaguugcgaucaggauacgagacauuuaaagucaucgaagguuggaguaauccaaacuccaaguuccagauuaauagacaggugauaguagacagggauaaccggagcggcuauucugggaucuuuucaguugagggaaaaaguuguauuaaucguugcuucuacguggaacugauccgcggcagaaaccaggagacugaaguccuauggaccagcaauuccaucguggucuucugugguacaucugggacuuauggcaccggaucguggcccgacggcgccgauauuaaccucaugccuauauga

SEQ ID NO: 150645 - RNA, 1410 nt, Artificial Sequence
  derived and/or modified CDS sequence (opt3) from neuraminidase__InfluenzaA__AFM72337
augaaccccaaucagaagaucauuaccauaggcagcgugucccugacaaucucuacuauuugcuucuuuaugcagaucgccauucucaucacgaccgucacacuucacuucaaacaguacgaguuuaacucaccuccaaauaaccagguuaugcugugugaaccgacuauaaucgagagaaauauuaccgaaaucguguauuugacaaacaccacuauugagaaggaaaucugccccaaauuagcugaguacaggaauuggaguaagccucagugugacauaacaggguucgcaccauuuagcaaagauaacuccauucggcugucugccggaggugacaucuggguaacccgcgagcccuaugugucgugcgauccugacaaguguuaccaauucgcgcuaggccaggggacgacucucaauaacguccauucaaaugauaccgugcgagaccguacaccauauagaacucugcuuaugaacgaacugggaguucccuuucacuugggcaccaaacaggugugcauugcuuggagcaguuccucuugucaugaugguaaggccuggcuccacgucugcaucacaggggacgauaagaaugcaaccgccagcuucaucuacaacggaaggcugguggacuccguaguuucauggaguaaagagauucugcggacgcaggaaagcgagugugugugcauaaauggcacuuguacagucgugaugaccgauggcucugcuuccgggaaggcagacacuaaaauccucuuuauugaggaaggaaagaucgugcauacaucaaccuuaagcgguagugcccaacacgucgaggaaugcucuugcuauccucgcuacccaggcguuagaugugugugcagggauaacuggaagggguccaaccggccgauaguagacauuaauaucaaagaccacagcaucgugucgucuuacgucuguuccggacuggugggcgauacgccccgcaagaacgacucaaguagcuccucucauugccuugauccuaauaacgaggaaggugggcacggaguuaaaggcugggcuuucgacgauggcaaugacguguggauggggcgaaccauuaacgagacaagcagauugggauaugagacuuuuaaggucaucgaagguuggucaaauccaaaaaguaagcugcagauuaacaggcaagugauaguagaucggggcaaucguuccggguacagcggaaucuucucuguugagggcaaaucauguauuaaccgcugcuuuuauguggaacuaaucagagguaggaaggaggaaaccgagguccucuggacaaguaauagcaucguggucuucugugggacuuccggcaccuacggaacaggcucuuggcccgacggggccgaucugaaccuuaugccuauuuga

SEQ ID NO: 150646 - RNA, 1410 nt, Artificial Sequence
  derived and/or modified CDS sequence (opt3) from neuraminidase__InfluenzaA__AFM72348
augaaccccaaucagaagaucauuaccauaggcagcgugucccugacaaucgccacuauuugcuuccucaugcaaaucgcuauucuugucacgaccguuacacugcacuuuaaacagcaugaguguaacucuccuccaaauaaccaggugauguugugcgaaccgacuaucauagagagaaauaucaccgaaauuguauacuuaacaaacaccacuaucgagaaggaaauuugucccaaacuggcagaguauaggaauuggucaaagccucagugcaacaucacaggguucgccccauuuaguaaagacaauagcauacggcuauccgcgggaggugauauuugggugacccgcgagcccuacgucucuugugacccugauaagugcuaucaauucgcucucggccaggggacgacucugaacaauggacacucgaacgacaccgugcaugaucgaacaccauaccguacucuucugaugaaugaauugggcauccccuuucaccucgguaccagacagguuuguauugccuggucaagcaguuccugccaugacgggaaggcauggcugcacgugugugucacaggagaugacaaaaacgccaccgcuucuuucaucuauaauggcaggcugguggauagcaucggcuccuggucaaagaaaauucuccggacgcaggagagugaaugcguauguauaaacgggacuugcacaguugugaugaccgacggaagcgcaucugguaaggccgauacuaaaaucuuauuuauugaggagggcaagaucguccacauauccacacugucagggagcgcucaacauguggaagagugcaguuguuacccucgcuauccaggagugagaugcgucuguagggacaacuggaagggcucuaaucggccgauuguugauaucaacgugaaagacuacuccaucguaagcucguacgugugcucuggucuugucggggacacuccccgcaagaaugauuccucaaguagcucccacuguuuggacccuaacaaugaagagggaggccauggcgugaaagggugggccuucgaugacggaaacgauguuuggaugggucgaacgauuucugaaaagcugagaagcggcuaugagaccuuuaaagugaucgagggguggucaaagccaaauaguaaacuacagauuaacaggcaggucauaguggaacggggaaaucguuccggcuacagcgguaucuucucuguagaggggaagucaugcauuaaccgcuguuuuuauguugaacucaucagaggcaggaaggaggaaacagaggugugguggaccaguaauagcaucgucguguucugcggaaccuccggcacauacgggacuggaucuuggcccgacggugcggauauuaaccugaugccuauauga

SEQ ID NO: 150647 - RNA, 1410 nt, Artificial Sequence
  derived and/or modified CDS sequence (opt3) from neuraminidase__InfluenzaA__AFM72359
augaaccccaaucagaagaucauuaccauaggcagcgugucccugacaaucucuacuauuugcuucuuuaugcaaaucgccauucucaucacgaccgucacacuucacuucaaacaguacgaguuuaacucaccuccaaauaaccagguuaugcugugugaaccgacuauaaucgagagaaauauuaccgaaaucguguauuugacaaacaccacuauugagaaggaaaucugccccaaauuagcugaguacaggaauuggaguaagccucagugugacauaacaggguucgcaccauuuagcaaagauaacuccauucggcugucugccggaggugacaucuggguaacccgcgagcccuaugugucgugcgauccugacaaguguuaccaauucgcgcuaggccaggggacgacucucaauaacguccauucaaaugauaccgugcacgaccgaacaccauaucguacucugcuuaugaacgaacugggaguucccuuucauuugggcaccaaacaggugugcauugcuuggagcaguuccucuugucacgaugguaaggccuggcuccaugucugcgugacaggggacgauaagaaugcaaccgccagcuucaucuacaacggaagacugguagacuccaucguuucauggaguaaaaagauucugaggacgcaggagagcgaaugugugugcauaaauggcacuuguacagucgugaugaccgauggcucugcuuccgggaaagcagacacuaagauccucuuuauugaggagggaaagaucgugcacacaucaaccuuaagcgguagugcccaacacgucgaagagugcucuugcuauccucgguacccaggcguucgcugugugugcagagauaacuggaaaggguccaacaggccgauaguagacauuaauaucaaggacuacagcaucgugucgucuuaugucuguuccggacuggugggcgauacgccccggaaaaacgacucaaguagcuccucucauugccuugauccuaauaacgaagagggugggcacggaguuaagggcugggcuuucgacgauggcaaugacguguggauggggcgcaccauuagcgaaaaauugcgaucaggauacgagacauuuaaggucaucgaggguuggaguaacccaaauuccaaacugcagauuaacagacaggugauaguagauaggggcaaucggagcggguauucuggaaucuucucaguugaaggcaagaguuguauuaaccguugcuuuuacguggagcuaauccgcgguagaaaggaagagacuaaaguccucuggaccagcaauuccaucguggucuucugugggacaucuggcacuuauggaaccggcucguggcccgacggggccgauauuaaccugaugccuauauga

SEQ ID NO: 150648 - RNA, 1410 nt, Artificial Sequence; identical to SEQ ID NO: 150647
  derived and/or modified CDS sequence (opt3) from neuraminidase__InfluenzaA__AFM72370

SEQ ID NO: 150649 - RNA, 1410 nt, Artificial Sequence; identical to SEQ ID NO: 147566
  derived and/or modified CDS sequence (opt3) from neuraminidase__InfluenzaA__AFM72381

SEQ ID NO: 150650 - RNA, 1410 nt, Artificial Sequence; identical to SEQ ID NO: 147566
  derived and/or modified CDS sequence (opt3) from neuraminidase__InfluenzaA__AFM72392

SEQ ID NO: 150651 - RNA, 1410 nt, Artificial Sequence; identical to SEQ ID NO: 144450
  derived and/or modified CDS sequence (opt3) from neuraminidase__InfluenzaA__AFM72403

SEQ ID NO: 150652 - RNA, 1410 nt, Artificial Sequence; identical to SEQ ID NO: 144450
  derived and/or modified CDS sequence (opt3) from neuraminidase__InfluenzaA__AFM72414

SEQ ID NO: 150653 - RNA, 1410 nt, Artificial Sequence; identical to SEQ ID NO: 144114
  derived and/or modified CDS sequence (opt3) from neuraminidase__InfluenzaA__AFM72425

SEQ ID NO: 150654 - RNA, 1410 nt, Artificial Sequence; identical to SEQ ID NO: 144114
  derived and/or modified CDS sequence (opt3) from neuraminidase__InfluenzaA__AFM72436

SEQ ID NO: 150655 - RNA, 1410 nt, Artificial Sequence; identical to SEQ ID NO: 144114
  derived and/or modified CDS sequence (opt3) from neuraminidase__InfluenzaA__AFM72447

SEQ ID NO: 150656 - RNA, 1410 nt, Artificial Sequence; identical to SEQ ID NO: 144114
  derived and/or modified CDS sequence (opt3) from neuraminidase__InfluenzaA__AFM72458

SEQ ID NO: 150657 - RNA, 1410 nt, Artificial Sequence; identical to SEQ ID NO: 144114
  derived and/or modified CDS sequence (opt3) from neuraminidase__InfluenzaA__AFM72469

SEQ ID NO: 150658 - RNA, 1410 nt, Artificial Sequence
  derived and/or modified CDS sequence (opt3) from neuraminidase__InfluenzaA__AFM72491
augaaccccaaucagaagaucauuaccauaggcagcgugucccugacaaucucuacuauuugcuucuuuaugcaaaucgccauucucaucacgaccgucacacuucacuucaaacaguacgaguuuaacucaccuccaaauaaccagguuaugaugugugaaccgacuauaaucgagagaaauauuaccgaaaucguguaucugacaaacaccacuauugagaaggaaaucugccccaaauuggcugaguacaggaauuggaguaagccucagugugacauaacaggguucgcaccauuuagcaaagauaacuccauucgguuaucugccggaggugacaucuggguaacccgcgagcccuaugugucgugcgauccugacaaguguuaccaauucgcgcugggccaggggacgacucuaaauaacguccauucaaaugauaccgugcgagaccguacaccauauagaacucuccugaugaacgaacuuggaguucccuuucaccugggcaccaaacaggugugcauugcuuggagcaguuccucuugucaugaugguaaggccugguugcacgucugcaucacaggggacgauaagaaugcaaccgccagcuucaucuacaacggaaggcucguggacuccauuguaucauggaguaaagagauacugcggacgcaggaaagcgaguguguuugcaucaauggcacuuguacaguggucaugaccgauggcucugcuuccgggaaggcagacacuaaaauucuguuuaucgaggaaggaaagauagugcauacaucaacccucagcgguagugcccaacacguggaggaaugcucuugcuauccucgcuacccaggcgucagauguguuugcagggauaacuggaagggguccaaccggccgauuguggacaucaauaucaaagaccacagcauuguaucgucuuacguguguuccggauuagucggcgauacgccccgcaagaacgacucaaguagcuccucucauugccuggauccuaauaacgaggaaggugggcacggagugaaaggcugggcuuucgacgauggcaaugacguuuggauggggcgaaccaucagcgagaagucaagacuuggauaugagacauuuaaagugauugaagguuggaguaacccaaauuccaaguugcagauaaacaggcaggucaucguggaucggggcaaucguagcggguacucuggaauuuucucaguagagggcaaaaguuguaucaaccgcugcuuuuauguugaacugaucagagguaggaaggaggaaacugaggugcuauggaccagcaauuccauugucguguucugugggacaucuggcacuuacggaaccggcucguggcccgacggggccgauauaaaccucaugccuaucuga

SEQ ID NO: 150659 - RNA, 1410 nt, Artificial Sequence; identical to SEQ ID NO: 150658
  derived and/or modified CDS sequence (opt3) from neuraminidase__InfluenzaA__AFM72502

SEQ ID NO: 150660 - RNA, 1413 nt, Artificial Sequence; identical to SEQ ID NO: 144680
  derived and/or modified CDS sequence (opt3) from neuraminidase__InfluenzaA__AFM72513

SEQ ID NO: 150661 - RNA, 1413 nt, Artificial Sequence; identical to SEQ ID NO: 144680
  derived and/or modified CDS sequence (opt3) from neuraminidase__InfluenzaA__AFM72524

SEQ ID NO: 150662 - RNA, 1413 nt, Artificial Sequence; identical to SEQ ID NO: 144680
  derived and/or modified CDS sequence (opt3) from neuraminidase__InfluenzaA__AFM72535

SEQ ID NO: 150663 - RNA, 1413 nt, Artificial Sequence; identical to SEQ ID NO: 144680
  derived and/or modified CDS sequence (opt3) from neuraminidase__InfluenzaA__AFM72546

SEQ ID NO: 150664 - RNA, 1413 nt, Artificial Sequence; identical to SEQ ID NO: 144680
  derived and/or modified CDS sequence (opt3) from neuraminidase__InfluenzaA__AFM72557

SEQ ID NO: 150665 - RNA, 1410 nt, Artificial Sequence
  derived and/or modified CDS sequence (opt3) from neuraminidase__InfluenzaA__AFM72579
augaaccccaaucagaagaucauuaccauaggcagcgugucccugacaaucucuacuauuugcuucuuuaugcaaacggccauccucauuaccacagucacucuucacuucaaacaguacgaguuuaacucaccuccaaauaaccagguuaugcugugugaaccgaccaucauagagagaaauaucacagaaauuguguauuugaccaacacuacaaucgagaaggaaauuugccccaaauuagcugaguacaggaauuggaguaagccucagugugacaucaccggguucgcaccauuuagcaaagauaacuccauacggcugucugccggaggugacauuuggguaacgcgcgagcccuaugugucgugcgauccugacaaguguuaccaauucgcgcuaggccaggggacuacccucaauaacguccauucaaaugauacagugcacgaccgaacuccauaucguacccugcuuaugaacgaacugggaguucccuuucauuugggcacaaaacaggugugcaucgcuuggagcaguuccucuugucacgaugguaaggccuggcuccaugucugcauuaccggggacgauaagaaugcaacggccagcuucaucuacaacggaagacugguggacuccaucguaucauggaguaaagagauucugaggacucaggaaagcgaguguguuugcauaaauggcacauguaccguggucaugacugauggcucugcuuccgggaaggcagacacaaaaauccucuuuauugaggaaggaaagaucgugcacaccucaauauuaagcgguagugcccaacacguggaggaaugcucuugcuauccucgguacccaggcguccgcuguguuugcagagauaacuggaagggguccaacaggccgauuguggacaucaauaucaaagaccauagcauuguaucgucuuacguguguuccggacuggucggcgauacgccccggaagaacgacucaaguagcuccucucacugccuugauccuaauaacgaggaaggugggcauggagugaaaggcugggcuuucgacgauggcaaugacguuuggauggggcgcaccaucagcgagaagucacgauugggauaugagacauuuaaagugauugaagguuggaguaacccaaaguccaaacugcagauaaauagacaggucaucguggauaggggcaaccggagcggguacucuggaauuuucucaguagagggcaagaguuguaucaaucguugcuuuuauguugaacuaauccgcgguagaaaggaggaaacugaggugcucuggaccagcaacuccauugucguguucugugggacaucuggcacuuacggaaccggcucguggcccgacggggccgauauaaaucugaugccuaucuga

SEQ ID NO: 150666 - RNA, 1413 nt, Artificial Sequence
  derived and/or modified CDS sequence (opt3) from neuraminidase__InfluenzaA__AFM72802
augaaccccaaucagaagaucauuaccauaggcagcaucuccauugccaucgggauuaucucucugaugcuccaaauaggaaacaucauuucaaucugggcuagucacagcauucagacagguucccagaaucauacuggcaugugcaaccagagaaucauaacguacgaaaauucuaccugggugaaccacacauaugucaauauuaacaauacuaacguuguggcagggaaagacaagaccccuguaacacuugccggaaauucgucacuguguagcaucaguggcugggcgauucauaccaaagauaacuccaucaggaucgguucuaagggggacguguucgucauucgggagccauuuauaagcugcucccacuuggaguguaaaacuuucuuuuuaacacaaggagcucugcuaaaugauaagcauucaaacggcaccgugaaggaccgcaguccguaccgagcccucaugagcugcccccugggcgaagcaccuucuccauauaauuccaaauucgagucaguugccuggagcgcuagugcaugucacgaugggaucggauggcuuacgauugguaucucuggccccgacaacggggccguggcuguccugaaguacaacggaauaauuacuggcaccaucaaauccuggaagaaacagaucuugcguacacaggaaagcgagugcguguguaugaaugguucgugcuuuacuauuaugaccgaugggccuucuaacggagccgcguccuauaagaucuucaagauugagaaaggcaagguaauaaaaucaauggaacucaaugcaccaaacuuucacuacgaggaauguaguugcuaucccgacacaggcaccguuaugugugugugcagagauaauuggcaugggagcaacaggccuugggucuccuucaaucagaaccuggacuaccaaaucggauacauuugcucugguguguuuggcgauaauccacggccggaggacggggagggaagcuguaaccccgugacggucgauggcgccaaugguguuaagggguucucauauaaauacggcaacggaguguggaucggccgcacuaagaguaauagaaucaggaaaggguuugaaaugauuugggacccuaacggauggacaaauaccgacuccgauuucagcguaaagcaggacauaguggcuaucacugauuggucugguuauucaggcaguuuuguccagcacccagagcugacagggcucgacugcauucggcccuguuucuggguggaauuaguucgcggacugccucgagagaacaccacgaucuggaccagcggcuccucuauuucguucugcggugugaacagcgauaucgccaauugguccuggccagacggggcagaacuucccuuuacaauagauaaguga

SEQ ID NO: 150667 - RNA, 1413 nt, Artificial Sequence; identical to SEQ ID NO: 150666
  derived and/or modified CDS sequence (opt3) from neuraminidase__InfluenzaA__AFM72813

SEQ ID NO: 150668 - RNA, 1413 nt, Artificial Sequence; identical to SEQ ID NO: 150666
  derived and/or modified CDS sequence (opt3) from neuraminidase__InfluenzaA__AFM72824

SEQ ID NO: 150669 - RNA, 1410 nt, Artificial Sequence; identical to SEQ ID NO: 144776
  derived and/or modified CDS sequence (opt3) from neuraminidase__InfluenzaA__AFM72835

SEQ ID NO: 150670 - RNA, 1410 nt, Artificial Sequence; identical to SEQ ID NO: 144776
  derived and/or modified CDS sequence (opt3) from neuraminidase__InfluenzaA__AFM72845

SEQ ID NO: 150671 - RNA, 1410 nt, Artificial Sequence; identical to SEQ ID NO: 144776
  derived and/or modified CDS sequence (opt3) from neuraminidase__InfluenzaA__AFM72855

SEQ ID NO: 150672 - RNA, 1410 nt, Artificial Sequence; identical to SEQ ID NO: 144776
  derived and/or modified CDS sequence (opt3) from neuraminidase__InfluenzaA__AFM72865

SEQ ID NO: 150673 - RNA, 1410 nt, Artificial Sequence
  derived and/or modified CDS sequence (opt3) from neuraminidase__InfluenzaA__AFM72875
augaaccccaaucagaagaucauuaccauaggcagcgugucccugacaaucucuacuauuugcuucuuuaugcagaucgccauucucaucacgaccgucacacuucacuucaaacaguacgaguuuaacucaccuccaaauaaccagguuaugcugugugaaccgacuauaaucgagagaaauauuaccgaaaucguguauuugacaaacaccacuauugagaaggaaaucugccccaaauuagcugaguacaggaauuggaguaagccucagugugacauaacaggguucgcaccauuuagcaaagauaacuccauucggcugucugccggaggugacaucuggguaacccgcgagcccuaugugucgugcgauccugacaaguguuaccaauucgcgcuaggccaggggacgacucucaauaacguccauucaaauaacaccgugcgagaucguacaccauauagaacucugcuuaugaaugaacugggaguucccuuucacuugggcaccaaacaggugugcauugcuuggagcaguuccucuugucaugacgguaaggccuggcuccacgucugcaucacaggggaugacaagaacgcaaccgccagcuucaucuacaauggaaggcugguggauuccguaguuucauggaguaaagagauucugcggacgcaggaaagcgagugugugugcauaaacggcacuuguacagucgugaugaccgacggcucugcuuccgggaaggcagauacuaaaauccucuuuauugaggaaggaaagaucgugcauacaucaaccuuaagcgguagugcccaacacgucgaggaaugcucuugcuauccucgcuacccaggcguuagaugugugugcagggacaacuggaagggguccaaucggccgauaguagauauuaacaucaaagaccacagcaucgugucgucuuacgucuguuccggacuggugggcgacacgccccgcaagucagauaguagcuccucuagccauugccuugacccuaauaacgaggaaggugggcacggaguuaaaggcugggcuuucgaugacggcaaugauguguggauggggcgaaccauuucagagaagaguagauugggauaugagacauuuaaagucaucgaagguugguccaacccaaagagcaaacugcagauuaauaggcaagugauaguagaccggggcaaccguucuggguacucaggaaucuucaguguugagggcaagagcuguauuaaucgcugcuuuuauguggaacuaaucagagguaggaaggaggaaacugagguccucuggaccuccaacucuaucguggucuucugugggacaucgggcacuuacggaaccggcagcuggcccgauggggccgacauuaaucugaugccuguguga

SEQ ID NO: 150674 - RNA, 1410 nt, Artificial Sequence; identical to SEQ ID NO: 144647
  derived and/or modified CDS sequence (opt3) from neuraminidase__InfluenzaA__AFM72886

SEQ ID NO: 150675 - RNA, 1410 nt, Artificial Sequence; identical to SEQ ID NO: 144647
  derived and/or modified CDS sequence (opt3) from neuraminidase__InfluenzaA__AFM72897

SEQ ID NO: 150676 - RNA, 1410 nt, Artificial Sequence
  derived and/or modified CDS sequence (opt3) from neuraminidase__InfluenzaA__AFM72908
augaaccccaaucagaagaucauuaccauaggcagcgugucccugacaaucucuacuauuugcuucuuuaugcaaaucgccauucucaucacgaccgucacacuucacuucaaacaguacgaguuuaacucaccuccaaauaaccagguuaugcugugugaaccgacuauaaucgagagaaauauuaccgaaaucguguauuugacaaacaccacuauugagaaggaaaucugccccaaauuagcugaguacaggaauuggaguaagccucagugugacauaacaggguucgcaccauuuagcaaagauaacuccauucggcugucugccggaggugacaucuggguaacccgcgagcccuaugugucgugcgauccugacaaguguuaccaauucgcgcuaggccaggggacgacucucaauaacguccauucaaauaacaccgugcgagaucguacaccauauagaacucugcuuaugaaugaacugggaguucccuuucacuugggcaccaaacaggugugcauugcuuggagcaguuccucuugucaugacgguaaggccuggcuccacgucugcaucacaggggaugacaagaacgcaaccgccagcuucaucuacaauggaaggcugguggauuccguaguuucauggaguaaagagauucugcggacgcaggaaagcgagugugugugcauaaacggcacuuguacagucgugaugaccgacggcucugcuuccgggaaggcagauacuaaaauccucuuuauugaggaaggaaagaucgugcauacaucaaccuuaagcgguagugcccaacacgucgaggaaugcucuugcuauccucgcuacccaggcguuagaugugugugcagggacaacuggaagggguccaaucggccgauaguagauauuaacacgaaagaccacagcaucgugucgucuuacgucuguuccggacuggugggcgacacccccaggaagaaugauucaaguagcuccucucauugccuugacccuaacaaugaggaaggugggcacggaguuaaaggcugggcuuucgaugacggcaacgauguguggauggggcgaacaaucagcgagaagucaagauugggauaugagacuuuuaaagucauugaagguuggaguaauccaaaguccaaacugcagaucaaccgccaggugauuguagaccggggcaaucguagcggguacucuggaauauucucaguugagggcaagaguuguaucaaccgcugcuuuuauguggaacuaauuagagguaggaaggaggaaaccgagguccucuggacaagcaauuccaucguggucuucugugggacuucuggcaccuacggaacaggcucguggcccgauggggccgacaucaaccugaugccuguguga

SEQ ID NO: 150677 - RNA, 1410 nt, Artificial Sequence
  derived and/or modified CDS sequence (opt3) from neuraminidase__InfluenzaA__AFM72919
augaaccccaaucagaagaucauuaccauaggcagcgugucccugacaaucucuacuauuugcuucuuuaugcaaaucgccauucucaucacgaccgucacacuucacuucaaacagcaugaguuuaacucaccuccaaauaaccagguuaugcugugugaaccgacuauaaucgagagaaauauuaccgaaaucguguacuugacaaacaccacuauugagaaggaaaucugccccaaauuagcugaguauaggaauuggaguaagccucagugugacauaacaggguucgcaccauuuagcaaagauaacuccauucggcugucugccggaggugacaucuggguaacccgcgagcccuacgugucgugcgauccugacaaguguuaucaauucgcgcuaggccaggggacgacucucaauaacguccacucaaauaacaccgugcgagaucguacaccauacagaacucugcuuaugaaugaacugggaguucccuuucauuugggcaccaaacaggugugcauugcuuggagcaguuccucuugucacgacgguaaggccuggcuccaugucugcaucacaggggaugacaagaacgcaaccgccagcuucaucuauaauggaaggcugguggauuccguaguuucauggaguaaagagauucugcggacgcaggaaagcgagugugugugcauaaacggcacuuguacagucgugaugaccgacggcucugcuuccgggaaggcagauacuaaaauccucuuuauugaggaaggaaagaucgugcacacaucaaccuuaagcgguagugcccaacacgucgaggaaugcucuugcuacccucgcuauccaggcguuagaugugugugcagggacaacuggaagggguccaaucggccgauaguagauauuaacacgaaagaccauagcaucgugucgucuuacgucuguuccggacuggugggcgacacccccaggaagaaugauucaaguagcuccucucacugccuugacccuaacaaugaggaaggugggcauggaguuaaaggcugggcuuucgaugacggcaacgauguguggauggggcgaacaaucagcgagaagucaagauugggauacgagacuuuuaaagucauugaagguuggaguaauccaaaguccaaacugcagaucaaccgccaggugauuguagaccggggcaaucguagcggguauucuggaauauucucaguugagggcaagaguuguaucaaccgcugcuuuuacguggaacuaauuagagguaggaaggaggaaaccgagguccucuggacaagcaauuccaucguggucuucugugggacuucuggcaccuauggaacaggcucguggcccgauggggccgacaucaaccugaugccuguguga

SEQ ID NO: 150678 - RNA, 1410 nt, Artificial Sequence; identical to SEQ ID NO: 145953
  derived and/or modified CDS sequence (opt3) from neuraminidase__InfluenzaA__AFM72930

SEQ ID NO: 150679 - RNA, 1410 nt, Artificial Sequence; identical to SEQ ID NO: 145953
  derived and/or modified CDS sequence (opt3) from neuraminidase__InfluenzaA__AFM72941

SEQ ID NO: 150680 - RNA, 1410 nt, Artificial Sequence; identical to SEQ ID NO: 145953
  derived and/or modified CDS sequence (opt3) from neuraminidase__InfluenzaA__AFM72952

SEQ ID NO: 150681 - RNA, 1410 nt, Artificial Sequence; identical to SEQ ID NO: 145953
  derived and/or modified CDS sequence (opt3) from neuraminidase__InfluenzaA__AFM72963

SEQ ID NO: 150682 - RNA, 1410 nt, Artificial Sequence; identical to SEQ ID NO: 145953
  derived and/or modified CDS sequence (opt3) from neuraminidase__InfluenzaA__AFM72974

SEQ ID NO: 150683 - RNA, 1410 nt, Artificial Sequence; identical to SEQ ID NO: 147566
  derived and/or modified CDS sequence (opt3) from neuraminidase__InfluenzaA__AFM72985

SEQ ID NO: 150684 - RNA, 1410 nt, Artificial Sequence; identical to SEQ ID NO: 147566
  derived and/or modified CDS sequence (opt3) from neuraminidase__InfluenzaA__AFM72996

SEQ ID NO: 150685 - RNA, 1410 nt, Artificial Sequence; identical to SEQ ID NO: 147566
  derived and/or modified CDS sequence (opt3) from neuraminidase__InfluenzaA__AFM73007

SEQ ID NO: 150686 - RNA, 1410 nt, Artificial Sequence
  derived and/or modified CDS sequence (opt3) from neuraminidase__InfluenzaA__AFM73018
augaaccccaaucagaagaucauuaccauaggcagcgugugcaugacaaucgggauggccaaccugauucuccaaaucggaaauauuaucuccauauggaucucucacucaauucagcuugguaaccagagucagaucgagacuuguaaucaaagcgucauuacguacgaaaacaauaccuggguuaaccagacauaugugaauaucuccaacacuaauuucgcugcaggccagucuguagugucggucaaacuggccgggaacucauccuugugcccugugaguggaugggcgauauacuccaaggacaauucuauuagaaucggcagcaaaggugauguuuuugugauuagggagccauucaucuccuguucaccguuagaaugccggaccuuuuuccugacacagggggcucuacucaacgacaagcauaguaauggaaccaucaaagaucgcagccccuaucgaacucugaugucuuguccuauuggcgaggucccaucccccuacaacucacguuuugaaagcguggccuggagugcaucugccugccacgacggcauaaacuggcuuacaaucgggauuuccggaccugauaauggugcuguagcaguucugaaguauaacggcaucauaaccgacacgauuaagagcuggagaaauaacaucuugaggacucaagagucggagugugccugcgugaaugggucuuguuucaccaucaugacagauggaccauccgacggccaggcuucauacaaaauuuuucggaucgaaaaggguaaaauugucaagaguguggagaugaacgcccccaauuaucauuacgaagagugcagcuguuacccugauuccucugagauaacuugcgugugccgcgacaacuggcacgggagcaauagaccaugggucucauucaaccagaaucucgaauaucagaucggauacauuuguaguggcaucuuuggcgauaacccgaggcccaaugacaaaaccggguccugcggaccuguuagcucuaacggugcgaauggcgugaagggguucucauuuaaguauggaaacggcaucuggauuggucggacaaaaaguauaagcucccgcaagggguucgagaugaucugggauccaaacggcuggaccggaacggacaauaacuuuucuauuaaacaagacaucguaggcauuaaugaauggucgggguacagcggauccuucgugcagcaucccgagcugacuggucuggauuguauccgaccuugcuucugggucgaacucauaagaggcaggccaaaggagaacacaaucuggaccucagggaguucuauuagcuuuuguggagugaauagcgacacuguuggcuggucauggcccgauggugcagaguuaccguucacaaucgacaaauga

SEQ ID NO: 150687 - RNA, 1410 nt, Artificial Sequence; identical to SEQ ID NO: 150686
  derived and/or modified CDS sequence (opt3) from neuraminidase__InfluenzaA__AFM73028

SEQ ID NO: 150688 - RNA, 1410 nt, Artificial Sequence; identical to SEQ ID NO: 150686
  derived and/or modified CDS sequence (opt3) from neuraminidase__InfluenzaA__AFM73038

SEQ ID NO: 150689 - RNA, 1410 nt, Artificial Sequence; identical to SEQ ID NO: 146521
  derived and/or modified CDS sequence (opt3) from neuraminidase__InfluenzaA__AFM73048

SEQ ID NO: 150690 - RNA, 1410 nt, Artificial Sequence
  derived and/or modified CDS sequence (opt3) from neuraminidase__InfluenzaA__AFM73058
augaaccccaaucagaagaucauuaccauaggcagcuucugcaugacaaucgggcuggccaaccucauucuucaaaucggaaauauuaucuccauauggaucucucacucaauucagcuggguaaccagaaucagaucgagacuuguaaccaaagugugauuacguacgaaaauaacaccugggucaaucagacauauguuaacaucagcaauacuaacuuugcugcaggccaguccgugguaucugugaaauuggccggaaauucgucauuaugcccugucagcggaugggcgauauacaguaaggacaacuccgugagaauuggcucuaaaggugauguuuucgugaucagggagccauuuauuagcuguuccccgcuggaaugccggaccuucuuucuaacacagggggcucuccugaaugacaagcauucaaacggaaccaucaaagaucgcagucccuaucgaacucuuaugagcuguccuaucggcgaggucccaucucccuacaacucccguuucgaaucaguggccuggagcgcaagugccugccacgacggcauuaauuggcugacaauagggaucucuggaccugauaacggugcuguagcaguuuugaaguauaauggcauuaucaccgacacgauaaaguccuggagaaacaauauucucaggacucaagagagcgagugugccugcgugaacgggucguguuuuaccgucaugacagauggaccaucugacggccaggcuuccuacaaaaucuuccggaucgaaaaggguaaaauugugaagucaguggagaugaaugcccccaacuaucauuacgaagagugcaguuguuacccugauagcuccgagaucacuugcgucugccgcgacaauuggcacgggucuaacagaccauggguuagcuuuaaucagaaccuggaauauaggauuggauacauauguucaggcaucuucggcgauaauccgcggcccaacgacaaaaccgggaguugcggaccuguguccagcaauggugcgaacggcguaaagggguuuucuuucaaguauggaaacggcguguggauuggucgcacaaaaucaaucaguagccgaaauggguuugagaugaucugggauccaaacggcuggaccggaacggacaagaauuucuccauuaaacaggacauagucggcaucaacgaauggucuggguacucggggagcuucgugcaacaucccgagcugacuggucucgauuguauuagaccuugcuuuuggguugaauuaaucaggggccggccaaaggagaauacaauuuggaccuccgggucaaguaucucuuucuguggagugaacagcgacacugucggcugguccuggcccgauggugcagagcugccguuuacaauagacaaauga

SEQ ID NO: 150691 - RNA, 1410 nt, Artificial Sequence; identical to SEQ ID NO: 146521
  derived and/or modified CDS sequence (opt3) from neuraminidase__InfluenzaA__AFM73068

SEQ ID NO: 150692 - RNA, 1413 nt, Artificial Sequence; identical to SEQ ID NO: 142999
  derived and/or modified CDS sequence (opt3) from neuraminidase__InfluenzaA__AFM73480

SEQ ID NO: 150693 - RNA, 1350 nt, Artificial Sequence
  derived and/or modified CDS sequence (opt3) from neuraminidase__InfluenzaA__AFM78569
augaaccccaaucagaagaucauuaccauaggcagcaucugcauggugauugggaucgucucccugaugcuccaaauuggaaacaugaucucuauauggguuauccacucaauucagacagguaaucagcaucaggccgagaguaucagcaacacuaauccucuuacggaaaaagcuguggcauccguaacccuggccggcaacucuucguuguguccaauuagagggugggcggugcacucaaaggacaauaacaucaggauaggaagcaaaggcgaugucuucgugauucgggagccguuuaucaguugcucccauuuagaaugucgcacauucuuucugacucaaggugcucuacucaaugacaagcacucuaacgggaccguuaaagaucgaagcccccaucguacacugauguccugcccugugggagaggccccaucacccuacaauaguagauucgaaagcgucgcauggucugccuccgcuugucacgacggcaccucauggcuuacuauuggcaucagcgggccugauaacgaggcaguggccguacugaaguauaauggaaucauuacagacaccauaaagaguuggaggaacgauaucuugcggacgcaggagucugaaugcgcuuguguuaaugguuccugcuuuacugugaugaccgacggcccaagcaacgggcaggccucguacaaaauuuucaagauggagaaaggaaaggucgugaaaucuguggaacucgaugcgcccaacuaucacuacgaggaguguuccugcuauccugacgcaggcgaaaucacaugugucugccgcgauaauuggcaugguucaaacagaccauggguuaguuuuaaucagaaccuggaguaccaaauaggguauauuugcagcggaguguucggcgacaauccgaggcccaacgauggcacuggguccuguggaccuaugucuccaaauggugccuacggcguaaagggguuuagcuucaaguacggaaacggcguguggaucggucggaccaaaucaacaaauagucgcuccggguuugaaaugaucugggaccccaacggcuggaccggaacggacagcucuuucucagucaagcaggauauuguggcuaucacugacuggaguggcuauagcggguccuuuguucagcacccugagcugacaggacucgauugcauucgaccauguuucuggguggaauuaauaagagguaggcccaaagagucuaccaucuggacuucgggcagcuccauuucauucugcggggucaauagugacacagugucuuggagcuggccggauggagccgagcugccuuuuaccaucgacaaguga

SEQ ID NO: 150694 - RNA, 1410 nt, Artificial Sequence
  derived and/or modified CDS sequence (opt3) from neuraminidase__InfluenzaA__AFM85180
augaaccccaaucagaagaucauuaccauaggcagcgugucccugacaaucgccacuauuugcuuccucacgcaaaucgcuauucuugucaccacaguuacucugcacuuuaaacaguacgaguguaacucuucaccuaauaaccaggugauguugugcgaaccaaccaucauagagagaaauaucacagaaauuguauauuuaaccaacacuacaaucgagaaggaaauuuguccgaaacuggcagaguacaggaauuggaguaagccccagugcaacaucaccggguucgccccuuuuagcaaagacaauuccauacggcuaucugcgggaggugauauuugggugacgcgcgagccauaugucucguguggccccgacaagugcuaccaauucgcucucgggcagggaacuacccugaacaauggccauucaaacgauacagugcacgaccgaacuccuuaucguacccuucugaugaaugaauuggguguuccauuucaucucgggacaaaacagguguguaucgccuggagcaguuccucuugccacgauggaaaggcauggcugcaugucugugugaccggcgacgauaagaacgccacggcuagcuucauuuacaauggcagacugguagacuccaucgggucauggaguaaaaagauccucaggacucaggagagcgaaugcguuuguauuaacggaacaugcaccguggucaugacugaugguucugcauccggcaaagccgacacaaagauauuauuuaucgaggaggggaagauugugcacaccucacugcuuagcggaagugcucaacacguggaagagugcucuuguuauccccgguacccuggcguccgcugcguuuguagagauaacuggaaagguuccaauaggccaaucguggacauaaacguaaaggauuacagcauugugucgucuuaugucugcuccggguuggugggagacacgccgcggaaaaaugacucaaguagcuccucucauugucuggaucccaacaaugaagagggcggccacgggguuaagggaugggccuucgacgaugguaacgacguguggaugggccgcaccaucagcgaaaaacuacgaucaggguacgagacauuuaaggucaucgagggauggaguaaaccuaauuccaagcuccagauuaacagacaggugaucguagauaggggcaaucggagcgguuauucugggauuuucucaguugaaggcaagaguugcauaaaccguuguuuuuacguggagcugauccgcggaagaaaucaggaaacugagguccuuuggaccagcaacuccauuguggucuucugcggcacaucugggacuuauggaaccgguucguggccagacggcgcggauaucaaucugaugcccaucuga

SEQ ID NO: 150695 - RNA, 1410 nt, Artificial Sequence; identical to SEQ ID NO: 142151
  derived and/or modified CDS sequence (opt3) from neuraminidase__InfluenzaA__AFN11830

SEQ ID NO: 150696 - RNA, 1410 nt, Artificial Sequence
  derived and/or modified CDS sequence (opt3) from neuraminidase__InfluenzaA__AFN11831
augaaccccaaucagaagaucauuaccauaggcagcgugucccugacaaucgccacuauuugcuuccucaugcaaaucgcuauucuugucacgaccguuacacugcacuuuaaacaguacgagugugacucuccugcaaacaaucaggugaugccaugcgaaccgaucauaaucgagagaaacauuacugaaaucguauauuugaccaauacaaccauugagaaggaaaucugucccaaauuaguggaguacaggaacuggucaaagccucagugcaaaauaacuggguucgccccauuuaguaaggauaauagcauucggcuguccgcgggaggugacaucugggucacacgcgagcccuaugugucuugugauccuggcaagugcuaccaauucgcucuagggcagggaaccacgcucgacaacaaacauucgaaugauacuauucacgaccgaaccccacaucguacacugcuuaugaacgaacugggcguucccuuucacuuggguacuagacagguguguaucgccuggucaagcaguuccugccaugaugggaaggcauggcuccacgucugugugaccggauaugacaaaaaugccacagcuucuuucaucuacgauggcaggcugguagacagcauuggcuccuggucaaagaacauacugcggacccaggagagugaaugcguuuguaucaaugggacgugcacuguggucaugacagauggaagcgcaucuggucgcgccgacaccaaaauucucuuuaucgaggagggcaagauagugcacauuuccccuuuaucagggagcgcucaacauguggaagagugcaguuguuauccaagauacccgggagucaggugcguuugucgggauaacuggaagggcucuaaucgccccgugguagacaucaacgugaaagacuacuccaucgucagcucguaugugugcucuggucugguuggggauacuccucgaaacaaugacagauccucaaguagcuacuguaggaacccaaauaacgaaaagggaaaucacggcgugaaaggcugggccuucgaugacgggaacgaugucuggaugggacggacaauuuccgaggaaucucguagcgguuaugagaccuuuaaggugaucggcggguggucaacgcccaauaguaaacuucagauuaaccgccagguaauaguugacuccgauaauagaagcggauacucuggcaucuucucaguggaggguaagaguugcauuaacagguguuuuuaugucgaauugauccgggggcgagagcaggaaacccgcgugugguggacaagcaauuccaucgucguguucugcggcacuucuggaaccuacggcacagggucguggccugacggagcggauauuaaccugaugccaauauga

SEQ ID NO: 150697 - RNA, 1410 nt, Artificial Sequence; identical to SEQ ID NO: 142624
  derived and/or modified CDS sequence (opt3) from neuraminidase__InfluenzaA__AFN11833

SEQ ID NO: 150698 - RNA, 1410 nt, Artificial Sequence; identical to SEQ ID NO: 144559
  derived and/or modified CDS sequence (opt3) from neuraminidase__InfluenzaA__AFN11835

SEQ ID NO: 150699 - RNA, 1410 nt, Artificial Sequence
  derived and/or modified CDS sequence (opt3) from neuraminidase__InfluenzaA__AFN11836
augaaccccaaucagaagaucauuaccauaggcagcgugucccugacaaucgccacuaugugcuuccucaugcaaauugcuauccuugucacgaccguuacacugcacuuuaaacaguacgaguguucuucaccuccaaacaaucaggugaugccgugcgaacccacuauuaucgagagaaacauaaccgaaaucguauauuugacaaauaccacuauugagaaggaaaucuguccuaaauuaguggaguacaggaacuggaguaagccacagugcaaaauuacaggguucgcacccuuuagcaaggacaauuccauccggcugucugccggaggugauauaugggucacccgcgagccuuaugugucgugugacccaggcaagugcuaccaauucgcgcuagggcagggaacgacucucaacaaucgacauucaaacgauaccguucacgaccguacacccuauagaacucugcuuaugaaugaacugggcgugccuuuucauuuggguaccaaacaggucuguauugcuuggagcaguuccucuugccacgaugggaaggccuggcuccauguguguguaacaggacacgacaaaaacgcaaccgccagcuucaucuacgauggcaggcugguugacuccauuggcucauggaguaagaauauccugcggacgcaggagagcgaaugcguguguaucaacgggacuugcacagucgugaugaccgauggaucugcuuccgagcgcgcagacacuaaaauucucuuuauagaggaagguaagaucauucacaucucaccauuaagcggcagugcccaacauguggaggaaugcucuuguuauccgagauaccccggggucaggugcguuugucgggauaauuggaagggauccaaccgcccuauaguggacauuaacguaaaagauuacagcaucgugucgucuuaugucugcuccggccuggugggugacacaccacgaaagaaugacagaucaaguagcuccuacuguaggaaccccaauaacgagaaagggucucacggaguuaagggcugggcuuucgaugacggcaaugauguguggauggggcggaccaucggagaggaacuucguagcgguuaugagacguuuaaagucauuggcggguggucaaccccuaacaguaaguugcagaucaaucgccaggugauuguagacuccggaaacagaagcggcuacucugguauauucucaguugaagggaaaaguugcaucaauagguguuuuuauguggagcugauucggggccgagaacaggagacacgcgucugguggacuagcaacuccaucguggucuucugcggaaccucuggcacauacgggacuggaucguggccagauggugccgacaucaaucuaaugcccauuuga

SEQ ID NO: 150700 - RNA, 1410 nt, Artificial Sequence
  derived and/or modified CDS sequence (opt3) from neuraminidase__InfluenzaA__AFN11839
augaaccccaaucagaagaucauuaccauaggcagcgugucccugacaaucgccacuauuugcuuccucaugcaaaucgcuauucuugucacgaccguuacacugcacuuuaaacaguacgaguguucuucaccuccaaacaaucaggugaugccgugccagcccacuaucauagaaagaaacaucaccgagauuguauauuugacaaauaccacuaucgaaaaggagauuuguccuaaauuaguggaauacaggaacuggaguaagccacaaugcaaaaucacaggguucgcacccuuuagcaaggacaauuccauacggcugucugccggaggugauauuugggucacccgcgagccuuaugugucgugugacccaggcaagugcuaccaguucgcgcuagggcagggaacgacucucaacaaucgacauucaaacgauaccguucacgaccguacacccuauagaacucugcuuaugaaugagcugggcgugccuuuucauuuggguaccaaacaggucuguaucgcuuggagcaguuccucuugccacgaugggaaggccuggcuccauguguguguaacaggacacgacgaaaacgcaaccgccagcuucauuuacgauggcaggcugguugacuccaucggcucauggaguaaaaauauccugcggacgcaagagagcgaaugcguguguauuaacgggacuugcacagucgugaugaccgauggaucugcuuccgagcgcgcagacacuaagauacucuuuaucgaggaagguaaaauugugcacaucucaccauuaagcggcagugcccagcaugucgaggaaugcucuuguuauccgagauaccccgggguuaggugcgugugucgggauaauuggaagggauccaaccgcccuauaguagacauuaacaugaaggauuacagcaucgugucgucuuaugucugcuccggccuggugggugacacaccacgaaagaaugacucaaguagcuccucuuacuguagaaaccccaauaacgagaaagggagccacggaguuaaaggcugggcuuucgaugacggcaaugauguguggauggggaggaccaucucagaggaacuucggaguggauaugagacguuuaaggucauugguggcugguccaccccuaacagcaaauugcagaucaaucgucaggugauuguagacucugggaaccgcucaggauacaguggcauauucagcguugaagguaaguccugcaucaauagauguuuuuauguggagcugauuagggggcggaaacaagaaacaaaggucugguggacuucuaacucgaucguggucuucugcggcaccagcggaacauacggcacuggguccuggccagauggagccgacaucaaucuaaugcccauuuga

SEQ ID NO: 150701 - RNA, 1410 nt, Artificial Sequence
  derived and/or modified CDS sequence (opt3) from neuraminidase__InfluenzaA__AFN11840
augaaccccaaucagaagaucauuaccauaggcagcgugucccugacaaucgccacuauuugcuuccucaugcaaaucgcuauucuugucacgaccguuacacugcacuuuaaacaguacgaguguaacucuccuccaaauaaccaggugauguugugcgaaccgacuaucauagagagaaauaucaccgaaauuguauauuuaacaaacaccacuaucgagaaggaaauuugucccaaacuggcagaguacaggaauuggucaaagccucagugcaaaaucacaggguucgccccauuuaguaaggacaacagcauacggcuauccgcgggaggugauauuugggugacccgcgagcccuaugucucuugugacccuggcaagugcuaccaauucgcucucgggcagggaacgacucugaauaaccgacauucgaaugauaccgugcacgaccguacaccauauagaacucuucugaugaacgaauugggcguucccuuucaucucgguaccaaacagguguguaucgccuggucaagcaguuccugccacgaugggaaggcauggcugcaugucugugugacaggacacgacgagaaugccaccgcuucuuucauuuacgauggcaggcugguagacagcaucggcuccuggaguaaaaacauccuccggacgcaggaaagugagugcguuuguauuaaugggacuugcacaguggucaugaccgauggaagcgcaucugagcgcgccgacacuaagauauuauuuaucgaagaggguaaaauugugcacaucuccccucugucaggcagcgcucaacauguggaagagugcaguuguuauccaagauacccgggggucaggugcguuugucgggauaacuggaagggaucuaaccgccccauaguggacauuaauguaaaggauuacuccaucgugagcucguaugucugcucuggccuugugggugacacaccucgaaagaacgacuccucaaguagcuccuacuguagaaauccaaacaaugaaaaagggucucacggaguuaaaggcugggccuucgaugacggcaacgauguguggauggggaggaccaucggagaggaguugcggagcgguuaugaaacguuuaaggucauuggcggguggucaacccccaauaguaaacugcagaucaaccgucaggugauuguagaccgcggaaauagauccggcuacagcgguauauucucuguugaggggaagucaugcaucaacagguguuuuuauguggagcuaguccggggccgaaaacaggaaacagaagugugguggacuucaaauagcauugucguguucugcggaaccuccggcacauacgggacuggaucuuggccugauggugcggacaucaaccucaugccaaucuga

SEQ ID NO: 150702 - RNA, 1410 nt, Artificial Sequence; identical to SEQ ID NO: 143977
  derived and/or modified CDS sequence (opt3) from neuraminidase__InfluenzaA__AFN11841

SEQ ID NO: 150703 - RNA, 1410 nt, Artificial Sequence; identical to SEQ ID NO: 150065
  derived and/or modified CDS sequence (opt3) from neuraminidase__InfluenzaA__AFN11842

SEQ ID NO: 150704 - RNA, 1410 nt, Artificial Sequence
  derived and/or modified CDS sequence (opt3) from neuraminidase__InfluenzaA__AFN11844
augaaccccaaucagaagaucauuaccauaggcagcgugucccugacaaucucuacuauuugcuucuuuaugcagaucgccauucucaucacgaccgucacacuucacuucaaacaguacgaguuuaacucaccuccaaauaaccagguuaugcugugugaaccgacuauaaucgagagaaauauuaccgaaaucguguauuugacaaacaccacuauugagaaggaaaucugccccaaauuagcugaguacaggaauuggaguaagccucaguguaacauaacaggguucgcaccauuuagcaaagacaauuccauucggcugucugccggaggugauaucuggguaacccgcgagcccuaugugucgugcgacccugauaaguguuaccaauucgcgcuaggccaggggacgacucucaacaauguccauucaaacgacaccgugcgagaucguacaccauauagaacucugcuuaugaaugaacugggaguucccuuucacuugggcaccaaacaggugugcauugcuuggagcaguuccucuugucaugacgguaaggccuggcuccacgucugcgugacaggggaugacaagaacgcaaccgccagcuucaucuacaauggaaggcugguagauuccaucguuucauggaguaaagagauucugcggacgcaggaaagcgagugugugugcauaaacggcacuuguacagucgugaugaccgacggcucugcuuccgggaaggcagauacuaaaauccucuuuauugaggaaggaaagaucgugcauacaucaaccuuaagcgguagugcccaacacgucgaggaaugcucuugcuauccucgcuacccaggcguuagaugugugugcagggacaacuggaagggguccaaucggccgauaguagauauuaacaucaaagacuacagcaucgugucgucuuaugucuguuccggacuggugggcgacacgccccgcaagaaugauucaaguagcuccucucacugccuugacccuaacaaugaggaaggugggcauggaguuaaaggcugggcuuucgaugacggcaacgauguguggauggggcgaaccauuagcgagaaguugagaucaggauacgagacauuuaaagucaucgaagguuggaguaauccaaacuccaagcugcagauuaauaggcaagugauaguagaccggggcaaccguagcggguauucuggaaucuucucaguugagggcaaaaguuguauuaaucgcugcuuuuacguggaacuaaucagagguaggaaggaggaaacugagguccucuggaccagcaacuccaucguggucuucugugggacaucuggcacuuauggaaccggcucguggcccgauggggccgacauuggacugaugccuauguga

SEQ ID NO: 150705 - RNA, 1410 nt, Artificial Sequence; identical to SEQ ID NO: 150624
  derived and/or modified CDS sequence (opt3) from neuraminidase__InfluenzaA__AFN11845

SEQ ID NO: 150706 - RNA, 1410 nt, Artificial Sequence; identical to SEQ ID NO: 150152
  derived and/or modified CDS sequence (opt3) from neuraminidase__InfluenzaA__AFN11847

SEQ ID NO: 150707 - RNA, 1410 nt, Artificial Sequence
  derived and/or modified CDS sequence (opt3) from neuraminidase__InfluenzaA__AFN11848
augaaccccaaucagaagaucauuaccauaggcagcgugucccugacaaucucuacuauuugcuucuuuaugcaaaucgccauucucaucacgaccgucacacuucacuucaaacaguacgaguuuaacucaccuccaaauaaccagguuaugcugugugaaccgacuauaaucgagagaaauauuaccgaaaucguguauuugacaaacaccacuauugagaaggaaaucugccccaaauuagcugaguacaggaauuggaguaagccucaguguaacauaacaggguucgcaccauuuagcaaagacaauuccauucggcugucugccggaggugauaucuggguaacccgcgagcccuaugugucgugcgacccugauaaguguuaccaauucgcgcuaggccaggggacgacucucaacaauguccauucaaacgacaccgugcacgaucgaacaccauaucguacucugcuuaugaaugaacugggaguucccuuucauuugggcaccaaacaggugugcauugcuuggagcaguuccucuugucacgacgguaaggccuggcuccaugucugcgugacaggggaugacgagaacgcaaccgccagcuucaucuacaauggaagacugguagauuccaucguuucauggaguaagaaaauucugaggacgcaggaaagcgagugugugugcauaaacggcacuuguacagucgugaugaccgacggcucugcuuccgggaaggcagauacuaaaauccucuuuauugaggaaggaaagaucgugcacacaucaaccuuaagcgguagugcccaacacgucgaggaaugcucuugcuauccucgguacccaggcguucgcugugugugcagagacaacuggaagggguccaauaggccgauaguagauauuaacaucaaagacuacagcaucgugucgucuuaugucuguuccggacuggugggcgacacgccccggaagaaugauucaaguagcuccucucauugccuugguccuaacaaugaggaagggggacacggcguuaaaggcugggcuuucgacgaugggaacgacguguggaugggacgcaccauuagcgagaaguugcgaucagguuacgagacauuuaaagucaucgaaggcuggaguaauccaaacuccaagcugcagauuaauagacaggugauaguagauagggggaaccggagcggauauucuggcaucuucucaguugaggguaaaaguuguauuaaucguugcuuuuacguggaacuaauccgcgggagaaagcaggagacugaaguccucuggaccagcaacuccaucguggucuucuguggcacaucuggaacuuauggcaccgggucguggcccgacggagccgauauuaaucugaugccuauauga

SEQ ID NO: 150708 - RNA, 1410 nt, Artificial Sequence
  derived and/or modified CDS sequence (opt3) from neuraminidase__InfluenzaA__AFN11850
augaaccccaaucagaagaucauuaccauaggcagcgugucccugacaaucucuacuauuugcuucuuuaugcagaucgccauucucaucacgaccgucacacuucacuucaaacaguacgaguuuaacucaccuccaaauaaccagguuaugcugugugaaccgacuauaaucgagagaaauauuaccgaaaucguguauuugacaaacaccacuauugagaaggaaaucugccccaaauuagcugaguacaggaauuggaguaagccucagugugacauaacaggguucgcaccauuuagcaaagauaacuccauucggcugucugccggaggugacaucuggguaacccgcgagcccuaugugucgugcgauccugacaaguguuaccaauucgcgcuaggccaggggacgacucucaauaacguccauucaaauaacaccgugcgaggacguacaccauauagaacucugcuuaugaaugaacugggcguucccuuucacuuggguaccaaacaggugugcauugcuuggagcaguuccucuugucaugaugggaaggccuggcuccacgucugcaucacaggagacgauaagaacgcaaccgccagcuucaucuacaauggcaggcugguggacuccguaguuucauggaguaaagagauucugcggacgcaggaaagcgagugugugugcauaaacggcacuuguacagucgugaugaccgaugggucugcuuccggaaaggcagacacuaaaauccucuuuauugaggaagguaagaucgugcauacaucaaccuuaagcggcagugcccaacacgucgaggaaugcucuugcuauccucgcuacccagggguuagaugugugugcagggauaacuggaagggauccaaucggccgauaguagacauuaacaucaaagaucacagcaucgugucgucuuacgucuguuccggccuggugggugacacgccccgcaagaaugacucaaguagcuccucucauugccuugauccuaacaaugaggaagggggacacggcguuaaaggcugggcuuucgacgaugggaacgacguguggaugggacgaaccauuagcgagaagucaagauuggguuaugagacauuuaaagucaucgaaggcuggaguaaucauaaguccaaacugcagauuaacaggcaagugauaguagaucgggggaaucguagcggauacucuggcaucuucucaguugaggguaagaguuguauuaaccgcugcuuuuauguggaacuaaucagagggaggaaggaggaaacugagguccucuggaccagcaauuccaucguggucuucuguggcacaucuggaacuuacggcaccgggucguggccagacggagccgaucugaaccuuaugcccauuuga

SEQ ID NO: 150709 - RNA, 1410 nt, Artificial Sequence
  derived and/or modified CDS sequence (opt3) from neuraminidase__InfluenzaA__AFN11851
augaaccccaaucagaagaucauuaccauaggcagcgugucccugacaaucgccacuauuugccuccuuaugcaaaucgcuauucuggucacgaccguuacauugcacuucaaacaguacgaguguaacucuccuccaaauaaccaggugauguuaugcgaaccgacuaucauagagagaaauaucaccaagauuguauaucugacaaacaccacuaucgaaaaagagauuugucccaagcuagcagaauacaggaauuggucaaaaccucagugcaagaucacaggguuugccccauucaguaaggacaacagcauacggcucuccgcgggaggugauauuugggugacccgcgagcccuaugucucuugugacccuggcaaaugcuaccaauuugcucuggggcagggaacgacucuuaauaaccgacauucgaaugauaccgugcacgaccguacaccauauagaacucuguugaugaacgagcucggcguucccuuccaucuggguaccaaacagguguguaucgccuggucaagcaguuccugccacgaugggaaggcauggcugcaugucugugugacaggacacgacgaaaaugccaccgcuucuuuuauuuacgauggcaggcucguagacagcaucggcuccuggucaaagaacaucuuacggacgcaggagagugaaugcguuuguauuaaugggacuugcacaguggucaugaccgauggaagcgcaucugagcgcgccgacacuaaaauacuguucaucgaggaagguaagauugugcacaucuccccucuuucaggcagcgcucaacauguggaggaaugcaguuguuauccaagauacccgggggucaggugcguuugucgggauaacuggaagggaucuaaccgccccauaguggacauuaauguaaaagauuacuccaucgugagcucguaugucugcucuggcuuggugggugacacaccucgaaagaacgacuccucaaguagcuccuacuguagaaauccaaacaaugagaaagggucucacggaguuaagggcugggccuuugaugacggcaacgauguguggauggggaggaccaucagcgaggaacugcggucaggauaugagacguucaaagucauugguggcuggaguaagcccaauuccaaacuacagaucaaccgucaggugauuguagaccgcgggaauagaagcggauacucuggcauauuuucaguugaagguaagaguugcaucaacagguguuucuauguggagcucauucgggggcgaaagcaggaaaccgaggucugguggacaagcaauuccaucguggucuuuugcggcacuucuggaaccuacggcacagggucguggccugauggagcggacaucaaccugaugccaauuuga

SEQ ID NO: 150710 - RNA, 1410 nt, Artificial Sequence; identical to SEQ ID NO: 142375
  derived and/or modified CDS sequence (opt3) from neuraminidase__InfluenzaA__AFN11853

SEQ ID NO: 150711 - RNA, 1410 nt, Artificial Sequence
  derived and/or modified CDS sequence (opt3) from neuraminidase__InfluenzaA__AFN11855
augaaccccaaucagaagaucauuaccauaggcagcgugucccugacaaucucuacuauuugcuucuuuaugcaaacggccauccucauuaccaucgucacacuucacuucaaacaguacgaguuuaacucaccuccaaauaaccagguuaugcugugugaaccgacuauaaucgagagaaauauuaccgaaaucguguauuugacaaacaccacuauugagaaggaaaucugccccaaauuagcugaguacaggaauuggaguaagccucagugugacauaacaggguucgcaccauuuagcaaagauaacuccauucggcugucugccggaggugacaucuggguaacccgcgagcccuaugugucgugcgauccugacaaguguuaccaauucgcgcuaggccaggggacgacucucaauaacguccauucaaaugauaccgugcacgaccgaacaccauaucguacucugcuuaugaacgaacugggaguucccuuucauuugggcaccaaacaggugugcauugcuuggagcaguuccucuugucacgaugguaaggccuggcuccaugucugcaucacaggggacgauaagaaugcaaccgccagcuucaucuacaacggaagacugguggacuccauuguaucauggaguaaagagauacugaggacgcaggaaagcgaguguguuugcaucaauggcacuuguacaguggucaugaccgauggcucugcuuccgggaaggcagacacuaaaauucucuuuaucgaggaaggaaagauagugcacacaucaauuuuaagcgguagugcccaacacguggaggaaugcucuugcuauccucgguacccaggcguccgcuguguuugcagagauaacuggaagggguccaacaggccgaucguggacaucaauauuaaagaccauagcaucguaucgucuuacguguguuccggacuggucggcgauacgccccggaagaacgacucaaguagcuccucucacugccuugauccuaauaacgaggaaggugggcauggagugaaaggcugggcuuucgacgauggcaaugacguuuggauggggcgcaccauuagcgagaagucacgauugggauaugagaccuuuaaagugauagaagguuggaguaacccaaaguccaaacugcagaucaauagacaggucauuguggauaggggcaaccggagcggguacucuggaaucuucucaguagagggcaagaguuguaucaaucguugcuuuuauguugaacuaauucgcgguagaaaggaggaaacagaggugcucuggacuagcaacuccauagucguguucugugggaccucuggcacauacggaacuggcucguggcccgacggggccgauaucaaucugaugccuauuuga

SEQ ID NO: 150712 - RNA, 1410 nt, Artificial Sequence; identical to SEQ ID NO: 143977
  derived and/or modified CDS sequence (opt3) from neuraminidase__InfluenzaA__AFN11857

SEQ ID NO: 150713 - RNA, 1410 nt, Artificial Sequence; identical to SEQ ID NO: 144786
  derived and/or modified CDS sequence (opt3) from neuraminidase__InfluenzaA__AFN17373

SEQ ID NO: 150714 - RNA, 1410 nt, Artificial Sequence; identical to SEQ ID NO: 150419
  derived and/or modified CDS sequence (opt3) from neuraminidase__InfluenzaA__AFN17383

SEQ ID NO: 150715 - RNA, 1410 nt, Artificial Sequence; identical to SEQ ID NO: 144786
  derived and/or modified CDS sequence (opt3) from neuraminidase__InfluenzaA__AFN17393

SEQ ID NO: 150716 - RNA, 1410 nt, Artificial Sequence; identical to SEQ ID NO: 144786
  derived and/or modified CDS sequence (opt3) from neuraminidase__InfluenzaA__AFN17403

SEQ ID NO: 150717 - RNA, 1410 nt, Artificial Sequence; identical to SEQ ID NO: 144786
  derived and/or modified CDS sequence (opt3) from neuraminidase__InfluenzaA__AFN17413

SEQ ID NO: 150718 - RNA, 1410 nt, Artificial Sequence; identical to SEQ ID NO: 144786
  derived and/or modified CDS sequence (opt3) from neuraminidase__InfluenzaA__AFN17423

SEQ ID NO: 150719 - RNA, 1410 nt, Artificial Sequence; identical to SEQ ID NO: 144786
  derived and/or modified CDS sequence (opt3) from neuraminidase__InfluenzaA__AFN17433

SEQ ID NO: 150720 - RNA, 1410 nt, Artificial Sequence; identical to SEQ ID NO: 144786
  derived and/or modified CDS sequence (opt3) from neuraminidase__InfluenzaA__AFN17443

SEQ ID NO: 150721 - RNA, 1410 nt, Artificial Sequence; identical to SEQ ID NO: 144786
  derived and/or modified CDS sequence (opt3) from neuraminidase__InfluenzaA__AFN17453

SEQ ID NO: 150722 - RNA, 1410 nt, Artificial Sequence; identical to SEQ ID NO: 144786
  derived and/or modified CDS sequence (opt3) from neuraminidase__InfluenzaA__AFN17459

SEQ ID NO: 150723 - RNA, 1410 nt, Artificial Sequence; identical to SEQ ID NO: 144786
  derived and/or modified CDS sequence (opt3) from neuraminidase__InfluenzaA__AFN17469

SEQ ID NO: 150724 - RNA, 1410 nt, Artificial Sequence; identical to SEQ ID NO: 144786
  derived and/or modified CDS sequence (opt3) from neuraminidase__InfluenzaA__AFN17479

SEQ ID NO: 150725 - RNA, 1410 nt, Artificial Sequence; identical to SEQ ID NO: 144786
  derived and/or modified CDS sequence (opt3) from neuraminidase__InfluenzaA__AFN17489

SEQ ID NO: 150726 - RNA, 1410 nt, Artificial Sequence; identical to SEQ ID NO: 144786
  derived and/or modified CDS sequence (opt3) from neuraminidase__InfluenzaA__AFN17499

SEQ ID NO: 150727 - RNA, 1410 nt, Artificial Sequence; identical to SEQ ID NO: 144786
  derived and/or modified CDS sequence (opt3) from neuraminidase__InfluenzaA__AFN17509

SEQ ID NO: 150728 - RNA, 1410 nt, Artificial Sequence; identical to SEQ ID NO: 144786
  derived and/or modified CDS sequence (opt3) from neuraminidase__InfluenzaA__AFN17519

SEQ ID NO: 150729 - RNA, 1410 nt, Artificial Sequence; identical to SEQ ID NO: 144786
  derived and/or modified CDS sequence (opt3) from neuraminidase__InfluenzaA__AFN17529

SEQ ID NO: 150730 - RNA, 1410 nt, Artificial Sequence; identical to SEQ ID NO: 144786
  derived and/or modified CDS sequence (opt3) from neuraminidase__InfluenzaA__AFN17539

SEQ ID NO: 150731 - RNA, 1410 nt, Artificial Sequence; identical to SEQ ID NO: 144786
  derived and/or modified CDS sequence (opt3) from neuraminidase__InfluenzaA__AFN17549

SEQ ID NO: 150732 - RNA, 1410 nt, Artificial Sequence; identical to SEQ ID NO: 144786
  derived and/or modified CDS sequence (opt3) from neuraminidase__InfluenzaA__AFN17559

SEQ ID NO: 150733 - RNA, 1410 nt, Artificial Sequence; identical to SEQ ID NO: 144786
  derived and/or modified CDS sequence (opt3) from neuraminidase__InfluenzaA__AFN17569

SEQ ID NO: 150734 - RNA, 1410 nt, Artificial Sequence; identical to SEQ ID NO: 144786
  derived and/or modified CDS sequence (opt3) from neuraminidase__InfluenzaA__AFN17575

SEQ ID NO: 150735 - RNA, 1410 nt, Artificial Sequence; identical to SEQ ID NO: 144786
  derived and/or modified CDS sequence (opt3) from neuraminidase__InfluenzaA__AFN17581

SEQ ID NO: 150736 - RNA, 1410 nt, Artificial Sequence; identical to SEQ ID NO: 144786
  derived and/or modified CDS sequence (opt3) from neuraminidase__InfluenzaA__AFN17587

SEQ ID NO: 150737 - RNA, 1410 nt, Artificial Sequence; identical to SEQ ID NO: 144786
  derived and/or modified CDS sequence (opt3) from neuraminidase__InfluenzaA__AFN17597

SEQ ID NO: 150738 - RNA, 1410 nt, Artificial Sequence; identical to SEQ ID NO: 150419
  derived and/or modified CDS sequence (opt3) from neuraminidase__InfluenzaA__AFN17607

SEQ ID NO: 150739 - RNA, 1410 nt, Artificial Sequence; identical to SEQ ID NO: 144786
  derived and/or modified CDS sequence (opt3) from neuraminidase__InfluenzaA__AFN17617

SEQ ID NO: 150740 - RNA, 1410 nt, Artificial Sequence; identical to SEQ ID NO: 144786
  derived and/or modified CDS sequence (opt3) from neuraminidase__InfluenzaA__AFN17627

SEQ ID NO: 150741 - RNA, 1410 nt, Artificial Sequence; identical to SEQ ID NO: 144786
  derived and/or modified CDS sequence (opt3) from neuraminidase__InfluenzaA__AFN17637

SEQ ID NO: 150742 - RNA, 1410 nt, Artificial Sequence; identical to SEQ ID NO: 144786
  derived and/or modified CDS sequence (opt3) from neuraminidase__InfluenzaA__AFN17647

SEQ ID NO: 150743 - RNA, 1410 nt, Artificial Sequence; identical to SEQ ID NO: 144786
  derived and/or modified CDS sequence (opt3) from neuraminidase__InfluenzaA__AFN17657

SEQ ID NO: 150744 - RNA, 1410 nt, Artificial Sequence; identical to SEQ ID NO: 144786
  derived and/or modified CDS sequence (opt3) from neuraminidase__InfluenzaA__AFN17667

SEQ ID NO: 150745 - RNA, 1410 nt, Artificial Sequence; identical to SEQ ID NO: 144786
  derived and/or modified CDS sequence (opt3) from neuraminidase__InfluenzaA__AFN17677

SEQ ID NO: 150746 - RNA, 1410 nt, Artificial Sequence; identical to SEQ ID NO: 150419
  derived and/or modified CDS sequence (opt3) from neuraminidase__InfluenzaA__AFN17687

SEQ ID NO: 150747 - RNA, 1410 nt, Artificial Sequence; identical to SEQ ID NO: 144786
  derived and/or modified CDS sequence (opt3) from neuraminidase__InfluenzaA__AFN17697

SEQ ID NO: 150748 - RNA, 1410 nt, Artificial Sequence; identical to SEQ ID NO: 150419
  derived and/or modified CDS sequence (opt3) from neuraminidase__InfluenzaA__AFN17707

SEQ ID NO: 150749 - RNA, 1410 nt, Artificial Sequence; identical to SEQ ID NO: 144786
  derived and/or modified CDS sequence (opt3) from neuraminidase__InfluenzaA__AFN17717

SEQ ID NO: 150750 - RNA, 1410 nt, Artificial Sequence; identical to SEQ ID NO: 150419
  derived and/or modified CDS sequence (opt3) from neuraminidase__InfluenzaA__AFN17727

SEQ ID NO: 150751 - RNA, 1410 nt, Artificial Sequence; identical to SEQ ID NO: 144786
  derived and/or modified CDS sequence (opt3) from neuraminidase__InfluenzaA__AFN17737

SEQ ID NO: 150752 - RNA, 1410 nt, Artificial Sequence; identical to SEQ ID NO: 144786
  derived and/or modified CDS sequence (opt3) from neuraminidase__InfluenzaA__AFN17743

SEQ ID NO: 150753 - RNA, 1410 nt, Artificial Sequence; identical to SEQ ID NO: 150419
  derived and/or modified CDS sequence (opt3) from neuraminidase__InfluenzaA__AFN17749

SEQ ID NO: 150754 - RNA, 1410 nt, Artificial Sequence; identical to SEQ ID NO: 144786
  derived and/or modified CDS sequence (opt3) from neuraminidase__InfluenzaA__AFN17759

SEQ ID NO: 150755 - RNA, 1410 nt, Artificial Sequence; identical to SEQ ID NO: 144786
  derived and/or modified CDS sequence (opt3) from neuraminidase__InfluenzaA__AFN17769

SEQ ID NO: 150756 - RNA, 1410 nt, Artificial Sequence; identical to SEQ ID NO: 144786
  derived and/or modified CDS sequence (opt3) from neuraminidase__InfluenzaA__AFN17775

SEQ ID NO: 150757 - RNA, 1410 nt, Artificial Sequence
  derived and/or modified CDS sequence (opt3) from neuraminidase__InfluenzaA__AFN17785
augaaccccaaucagaagaucauuaccauaggcagcgugugcaugacaaucgggauggccaaccugauucuccaaaucggaaauauuaucuccauauggaucucucacucaauucagcuugguaaccagaaucagaucgagacuuguaaccaaagugucauuacguacgaaaauaacaccuggguuaaucagacauaugugaacaucagcaauacuaacuucgcugcaggccaguccguagugucugucaaacuggccggaaauucgucauugugcccugugagcggaugggcgauauacaguaaggacaacuccauuagaaucggcucuaaaggugauguuuuugugauuagggagccauucaucagcuguuccccguuagaaugccggaccuuuuuccugacacagggggcucuacucaaugacaagcauucaaacggaaccaucaaagaucgcagucccuaucgaacucugaugagcuguccuauuggcgaggucccaucucccuacaacucccguuuugaaucaguggccuggagcgcaagugccugccacgacggcauaaauuggcuuacaaucgggauuucuggaccugauaacggugcuguagcaguucugaaguauaauggcaucauaaccgacacgauuaaguccuggagaaacaauaucuugaggacucaagagagcgagugugccugcgugaacgggucguguuucacccucaugacagauggaccaucugacggccaggcuuccuacaaaaucuuucggauugaaaaggguaaaaucgucaagucaguggagaugaaugcccccaacuaucauuacgaagagugcaguuguuacccugauagcuccgagauuacuugcgugugccgcgacaauuggcacgggucuaacagaccaugggucagcuucaaucagaaccuggaauaucagauaggauacaucuguucaggcauuuuuggcgauaauccgaggcccaacgacaaaaccgggaguugcggaccuguuuccagcaauggugcgaacggcgugaagggguucucuuuuaaguauggaaacggcguauggaucggucggacaaaaucaaucaguagccgcaauggguucgagaugauuugggauccaaacggcuggaccggaacggacaauacuuuuuccauaaagcaagacaucgugggcauuaacgaauggucuggguacucggggagcuucguccagcaucccgagcugacaggucucgauuguauccgaccuugcuucuggguggaauuaauuagaggcaggccaaaagagaauaccaucuggacuuccgggucaaguauaucuuuuuguggaguuaacagcgacacagugggcugguccuggcccgauggugcagagcugccguucaccaucgacaaguga

SEQ ID NO: 150758 - RNA, 1410 nt, Artificial Sequence
  derived and/or modified CDS sequence (opt3) from neuraminidase__InfluenzaA__AFN17795
augaaccccaaucagaagaucauuaccauaggcagcgugugcaugacaaucgggauggccaaccugauucuccaaaucggaaauauuaucuccauauggaucucucacucaauucagcuugguaaccagaaucagaucgagacuuguaaccaaagugucauuacguacgaaaauaacaccuggguuaaucagacauaugugaacaucagcaauacuaacuucgcugcaggccaguccguagugucugucaaacuggccgggaacucgucauugugcccugugggaggcugggcgauauacagcaaggacaauaguauuagaaucgguuccaaaggggauguuuuugugauuagggagccauucaucucuuguagcccguuagaaugccggaccuuuuuccugacacagggagcucuacucaaugacaagcauuccaacggcaccaucaaagaucgcucacccuaucgaacucugaugaguuguccuauuggcgaggucccaagccccuacaacucucguuuugaauccguggccuggucagcaagcgccugccacgacgggauaaauuggcuuacaaucggaauuagugguccugauaacggcgcuguagcaguucugaaguauaaugggaucauaaccgacacgauuaagucuuggagaaacaauaucuugaggacucaagaguccgagugugccugcgugaacggaagcuguuucaccgucaugacagauggcccaucggacggucaggcuucuuacaaaaucuuucggauugaaaaggggaaaaucgugaaguccguggagaugaaugcccccaacuaucauuacgaagagugcucauguuacccugauaguagcgagauuacuugcgucugccgcgacaauuggcacggauccaacagaccauggguuucuuucaaucagaaccucgaauaucagauaggcuacaucuguagcggcauuuuuggggauaauccgaggcccaacgacaaaaccggaucaugcgguccugugaguuccaauggcgcgaacgggguaaagggauucagcuuuaaguauggcaacgguguguggaucgggcggacaaaaucuaucucaagucgcaauggcuucgagaugauuugggauccaaacggauggaccggcacggacaauaacuuuagcauaaagcaagacaucgucgggauuaaugaaugguccggauacucugguucguucgugcagcaucccgagcugacuggccuggauuguauccgaccuugcuucuggguugaacucauuagagggaggccaaaagagaacacaaucuggaccagcggauccucaauaaguuuuuguggcgucaauucugacacuguggguuggagcuggcccgauggggcagaguuaccguucacaaucgacaaguga

SEQ ID NO: 150759 - RNA, 1410 nt, Artificial Sequence; identical to SEQ ID NO: 144786
  derived and/or modified CDS sequence (opt3) from neuraminidase__InfluenzaA__AFN17805

SEQ ID NO: 150760 - RNA, 1410 nt, Artificial Sequence
  derived and/or modified CDS sequence (opt3) from neuraminidase__InfluenzaA__AFN17815
augaaccccaaucagaagaucauuaccauaggcagcguguccaugacaaucgggauggccaaccugauucuccaaaucggaaauauuaucucuauauggaucucacacaguauucagcuugguaaccagaaucagaucgagacuugcaaccaaagcgucauuacguacgaaaauaacaccuggguuaaucagacauaugugaacaucuccaauacuaacuucgcugcaggccagucuguagugucggucaaacuggccgggaauagcagcuuguguccugugaguggaugggcgauauacuccaaggacaacucuauuagaaucggcagcaaaggugauguuuuugugauuagggagccauucaucuccugcucaccguuagaaugucggaccuuuuuccugacacagggggcucuacucaaugacaagcauaguaacggaaccaucaaagaucgcagccccuaucgaacucugaugucuugcccuauuggcgaggucccaucccccuacaacucacguuuugaaagcguggccuggagugcaucugccugucacgacggcauaaauuggcuuacaaucgggauuuccggaccugauaacggugcuguagcaguucugaaguauaauggcaucauaaccgacacgauuaagagcuggagaaacaauaucuugaggacucaagagucggagugcgccugugugaacgggucuugcuucaccgucaugacagauggaccauccgacggccaggcuucauacaaaaucuuucggauugaaaaggguaaaaucgugaagaguguggagaugaaugcccccaacuaucauuacgaagaguguagcugcuacccugauuccucugagauuacuugugucugccgcgacaauuggcacgggagcaacagaccauggguuucauucaaucagaaccucgaauaucagauaggauacaucugcaguggcauuuuuggcgauaauccgaggcccaacgacaaaaccggguccuguggaccugugagcucuaauggugcgaacggcguaaagggguucucauuuaaguauggaaacggcguguggaucggucggacaaaaaguaucagcucccgcaauggguucgagaugauuugggauccaaacggcuggaccggaacggacaauaacuuuucuauaaagcaagacaucgucggcauuaaugaauggucgggguacagcggauccuucgugcagcaucccgagcugacuggucuggauugcauccgaccuuguuucuggguugaacucauuagaggcaggccaaaagagaacacaaucuggaccucagggaguucuauaucauuuugcggagucaauuccgacacugugggcuggucauggcccgauggugcagaguuaccguucacaaucgacaaguga

SEQ ID NO: 150761 - RNA, 1410 nt, Artificial Sequence; identical to SEQ ID NO: 144786
  derived and/or modified CDS sequence (opt3) from neuraminidase__InfluenzaA__AFN17825

SEQ ID NO: 150762 - RNA, 1410 nt, Artificial Sequence; identical to SEQ ID NO: 150419
  derived and/or modified CDS sequence (opt3) from neuraminidase__InfluenzaA__AFN17835

SEQ ID NO: 150763 - RNA, 1410 nt, Artificial Sequence; identical to SEQ ID NO: 144786
  derived and/or modified CDS sequence (opt3) from neuraminidase__InfluenzaA__AFN17845

SEQ ID NO: 150764 - RNA, 1410 nt, Artificial Sequence; identical to SEQ ID NO: 144786
  derived and/or modified CDS sequence (opt3) from neuraminidase__InfluenzaA__AFN17855

SEQ ID NO: 150765 - RNA, 1410 nt, Artificial Sequence; identical to SEQ ID NO: 146600
  derived and/or modified CDS sequence (opt3) from neuraminidase__InfluenzaA__AFN17865

SEQ ID NO: 150766 - RNA, 1410 nt, Artificial Sequence; identical to SEQ ID NO: 150419
  derived and/or modified CDS sequence (opt3) from neuraminidase__InfluenzaA__AFN17875

SEQ ID NO: 150767 - RNA, 1410 nt, Artificial Sequence; identical to SEQ ID NO: 150419
  derived and/or modified CDS sequence (opt3) from neuraminidase__InfluenzaA__AFN17885

SEQ ID NO: 150768 - RNA, 1410 nt, Artificial Sequence; identical to SEQ ID NO: 144786
  derived and/or modified CDS sequence (opt3) from neuraminidase__InfluenzaA__AFN17895

SEQ ID NO: 150769 - RNA, 1410 nt, Artificial Sequence; identical to SEQ ID NO: 150419
  derived and/or modified CDS sequence (opt3) from neuraminidase__InfluenzaA__AFN17905

SEQ ID NO: 150770 - RNA, 1410 nt, Artificial Sequence; identical to SEQ ID NO: 144786
  derived and/or modified CDS sequence (opt3) from neuraminidase__InfluenzaA__AFN17911

SEQ ID NO: 150771 - RNA, 1410 nt, Artificial Sequence; identical to SEQ ID NO: 150419
  derived and/or modified CDS sequence (opt3) from neuraminidase__InfluenzaA__AFN17921

SEQ ID NO: 150772 - RNA, 1410 nt, Artificial Sequence
  derived and/or modified CDS sequence (opt3) from neuraminidase__InfluenzaA__AFN17931
augaaccccaaucagaagaucauuaccauaggcagcgugugcaugacaaucgggauggccaaccugauucuccaaaucggaaauauuaucuccauauggaucucucacucaauucagcuugguaaccagaaucagaucgagacuuguaaccaaagugucauuacguacgaaaauaacaccuggguuaaucagacauaugugaacaucagcaauacuaacuucgcugcaggccaguccguagugucugucaaacuggccggaaauucgucauugugcccugugagcggaugggcgauauacaguaaggacaacuccauuagaaucggcucuaggggugauguuuuugugauucgggagccauucaucagcuguuccccguuagaaugccgcaccuuuuuccugacacagggggcucuacucaaugacaaacauucaaacggaaccaucaaggaucgaagucccuaucguacucugaugagcuguccuauuggcgaggucccaucucccuacaacuccagauuugaaucaguggccuggagcgcaagugccugccacgacggcauaaauuggcuuacaaucgggauuucuggaccugauaacggugcuguagcaguucugaaauauaauggcaucauaaccgacacgauuaaguccuggaggaacaauaucuugcggacucaagagagcgagugugccugcgugaacgggucguguuucaccgucaugacagauggaccaucugacggccaggcuuccuacaagaucuuucgcauugaaaaagguaagaucgugaaaucaguggagaugaaugcccccaacuaucauuacgaagagugcaguuguuacccugauagcuccgagauuacuugcgucugcagagacaauuggcacgggucuaacaggccauggguuagcuucaaucagaaccucgaauaucggauaggauacaucuguucaggcauuuuuggcgauaauccgcgccccaacgacaagaccgggaguugcggaccuguguccagcaauggugcgaacggcguaaaaggguucucuuuuaaguauggaaacggcguguggaucggucgaacaaagucaaucaguagcagaaauggguucgagaugauuugggauccaaacggcuggaccggaacggacaauaacuuuuccauaaaacaggacaucgucggcauuaaugaauggucuggguacucggggagcuucgugcaacaucccgagcugacuggucuggauuguaucaggccuugcuucuggguugaacucauucggggccguccaaaggagaacacaaucuggaccuccgggucaaguauaucuuuuuguggagugaauagcgacacugucggcugguccuggcccgauggugcagaguuaccguucacaaucgacaaauga

SEQ ID NO: 150773 - RNA, 1410 nt, Artificial Sequence; identical to SEQ ID NO: 144786
  derived and/or modified CDS sequence (opt3) from neuraminidase__InfluenzaA__AFN17941

SEQ ID NO: 150774 - RNA, 1410 nt, Artificial Sequence; identical to SEQ ID NO: 144786
  derived and/or modified CDS sequence (opt3) from neuraminidase__InfluenzaA__AFN17951

SEQ ID NO: 150775 - RNA, 1410 nt, Artificial Sequence
  derived and/or modified CDS sequence (opt3) from neuraminidase__InfluenzaA__AFN17961
augaaccccaaucagaagaucauuaccauaggcagcgugugcaugacaaucgggauggccaaccugauucuccaaaucggaaauauuaucuccauauggaucucucacucaauucagcuugguaaccagaaucagaucgagacuuguaaccaaagugucauuacguacgaaaauaacaccuggguuaaucagacauaugugaacaucagcaauacuaacuucgcugcaggccaguccguagugucugucaaacuggccggaaauucgucauugugcccugugagcggaugggcgauauacaguaaggacaacuccauuagaaucggcucuaaaggugauguuuuugugauuagggagccauucaucagcuguuccccguuagaaugccggaccuuuuuccugacacagggggcucuacucaaugacaagcauucaaacggaaccaucaaagaucgcagucccuaucgaacucugaugagcuguccuauuggcgaggucccaucucccuacaacucccguuuugaaucaguggccuggagcgcaagugccugccacgacggcauaaauuggcuuacaaucgggauuucuggaccugauaacggugcuguagcaguucugaaguauaauggcaucauaaccgacacgauuaaguccuggagaaacaauaucuugaggacucaagagagcgagugugccugcgugaacgggucguguuucaccgucaugacagauggaccaucugacggccaggcuuccuacaaaaucuuucggauugaaaaggguaaaaucgucaauucaguggagaugaacgcccccaauuaucauuacgaagagugcaguuguuacccugauagcuccgagauuacuugcgugugccgcgacaacuggcacgggucuaauagaccauggguuagcuucaaccagaaucucgaauaucagauaggauacaucuguucaggcauuuuuggcgauaacccgaggcccaaugacaagaccgggaguugcggaccuguguccagcaacggugcgaacggcguaaaaggguucucuuuuaaguauggaaauggcguguggaucggucggacaaagucaaucaguagccgcaacggguucgagaugauuugggauccaaauggcuggaccggaacggacaacaauuuuuccauaaaacaagacaucgucggcauuaacgaauggucuggguacucggggagcuucgugcagcaucccgagcugacuggucuggauuguauccgaccuugcuucuggguugaacucauuagaggcaggccaaaggagaauacaaucuggaccuccgggucaaguauaucuuuuuguggagugaacagcgacacugucggcugguccuggcccgauggugcagaguuaccguucacaaucgacaaauga

SEQ ID NO: 150776 - RNA, 1410 nt, Artificial Sequence; identical to SEQ ID NO: 144786
  derived and/or modified CDS sequence (opt3) from neuraminidase__InfluenzaA__AFN17971

SEQ ID NO: 150777 - RNA, 1410 nt, Artificial Sequence; identical to SEQ ID NO: 144786
  derived and/or modified CDS sequence (opt3) from neuraminidase__InfluenzaA__AFN17981

SEQ ID NO: 150778 - RNA, 1410 nt, Artificial Sequence; identical to SEQ ID NO: 144786
  derived and/or modified CDS sequence (opt3) from neuraminidase__InfluenzaA__AFN17991

SEQ ID NO: 150779 - RNA, 1410 nt, Artificial Sequence
  derived and/or modified CDS sequence (opt3) from neuraminidase__InfluenzaA__AFN18001
augaaccccaaucagaagaucauuaccauaagcuccgugugcaugacaaucggcauggccaaccugauucuccaaaucgggaauauuaucucuauauggaucucacacaguauucagcuuggaaaccagaaucagaucgagacuuguaaccaaagcgucauuacguacgaaaauaacaccuggguuaaucagacauaugugaacaucuccaauacuaacuucgcugcaggucagucuguagugucggucaaacuggccggcaauagcagcuugugcccugugagugggugggcgauauacuccaaggacaacucuauuagaaucggaagcaaaggcgauguuuuugugauuagggagccauucaucuccuguucaccguuagaaugccggaccuuuuuccugacacagggugcucuacucaaugacaagcauaguaacgggaccaucaaagaucgcagccccuaucgaacucugaugucuuguccuauuggagaggucccaucccccuacaacucacguuuugaaagcguggccuggagugcaucugccugccacgacggcauaaauuggcuuacaaucggcauuuccgggccugauaacggagcuguagcaguucugaaguauaaugguaucauaaccgacacgauuaagagcuggagaaacaauaucuugaggacucaagagucggagugugccugcgugaacggcucuuguuucacccucaugacagaugggccauccgacggacaggcuucauacaaaaucuuucggauugaaaagggcaaaaucgucaagaguguggagaugaaugcccccaacuaucauuacgaagagugcagcuguuacccugauuccucugagauuacuugcgugugccgcgacaauuggcacgguagcaacagaccaugggucucauucaaucagaaccuggaauaucagauaggguacaucuguaguggaauuuuuggcgauaauccgaggcccaacgacaaaaccggcuccugcgggccuguuagcucuaauggagcgaacggugugaagggcuucucauuuaaguaugggaacggaguauggaucggccggacaaaaaguaucagcucccgcaaugguuucgagaugauuugggauccaaacggguggaccggcacggacaauaacuuuucuauaaagcaagacaucgugggaauuaaugaauggucgggcuacagcggguccuucguccagcaucccgagcugacuggacucgauuguauccgaccuugcuucuggguggaauuaauuagagguaggccaaaagagaacacaaucuggaccucaggcaguucuauaucauuuugugggguuaauuccgacacugugggauggucauggcccgauggcgcagagcugccguucacaaucgacaaguga

SEQ ID NO: 150780 - RNA, 1410 nt, Artificial Sequence; identical to SEQ ID NO: 144786
  derived and/or modified CDS sequence (opt3) from neuraminidase__InfluenzaA__AFN18011

SEQ ID NO: 150781 - RNA, 1410 nt, Artificial Sequence; identical to SEQ ID NO: 144786
  derived and/or modified CDS sequence (opt3) from neuraminidase__InfluenzaA__AFN18021

SEQ ID NO: 150782 - RNA, 1410 nt, Artificial Sequence
  derived and/or modified CDS sequence (opt3) from neuraminidase__InfluenzaA__AFN18031
augaaccccaaucagaagaucauuaccauaggcagcaucugcaugacaauugggauggccaaccugauccuccaaauuggaaauaucauauccaucuggauuucucacucaauccagcuugguaaccagaaucagauugagacuuguaaccaaagugugaucacguacgaaaauaacaccugggucaaucagacauauguuaacauaagcaauacuaacuucgcugcaggccaguccgugguaucugugaaacuggccggaaauucgucauugugcccugucagcggaugggcgauuuacaguaaggacaacuccaucagaauuggcucuaaaggugauguguuuguuaucagggagccauucaucagcuguuccccguuagaaugccggaccuuuuuccugacacagggggcucuacucaaugacaagcauucaaacggaaccauuaaagaucgcagucccuaucgaacucugaugagcuguccuauaggcgaggugccaucucccuacaacucccguuuugaaucagucgccuggagcgcaagugccugccacgacggcaucaauuggcuuacaauugggaucucuggaccugauaacggugcuguggcaguacugaaguauaauggcauaauuaccgacacgaucaaguccuggagaaacaauaucuugaggacucaagagagcgagugugccugcguuaacgggucguguuucacccucaugacagauggaccaucugacggccaggcuuccuacaaaauuuuucggaucgaaaaggguaaaauugugaagucagucgagaugaaugcccccaacuaucauuacgaagagugcaguuguuacccugauagcuccgagauaacuugcgugugccgcgacaauuggcacgggucuaacagaccaugggugagcuucaaucagaaccuggaauaucagaucggauacauuuguucaggcaucuuuggcgauaauccgaggcccaacgacaaaaccgggaguugcggaccugucuccagcaauggugcgaacggcguuaagggguucucuuuuaaguauggaaacggcguguggaucggucggacaaaaucaauuaguagccgcaauggguucgagaugauaugggauccaaacggcuggaccggaacggacaauaacuuuuccaucaagcaagacauuguaggcaucaaugaauggucuggguacucggggagcuucgugcagcaucccgagcugacuggucucgauuguauucgaccuugcuucugggucgaauuaaucagaggcaggccaaaagagaacacaauauggaccuccgggucaaguaucucuuuuuguggagugaauagcgacacuguuggcugguccuggcccgauggugcagagcugccguucacaauugacaaguga

SEQ ID NO: 150783 - RNA, 1410 nt, Artificial Sequence; identical to SEQ ID NO: 144786
  derived and/or modified CDS sequence (opt3) from neuraminidase__InfluenzaA__AFN18041

SEQ ID NO: 150784 - RNA, 1410 nt, Artificial Sequence; identical to SEQ ID NO: 150419
  derived and/or modified CDS sequence (opt3) from neuraminidase__InfluenzaA__AFN18051

SEQ ID NO: 150785 - RNA, 1410 nt, Artificial Sequence; identical to SEQ ID NO: 150419
  derived and/or modified CDS sequence (opt3) from neuraminidase__InfluenzaA__AFN18061

SEQ ID NO: 150786 - RNA, 1410 nt, Artificial Sequence; identical to SEQ ID NO: 144786
  derived and/or modified CDS sequence (opt3) from neuraminidase__InfluenzaA__AFN18070

SEQ ID NO: 150787 - RNA, 1410 nt, Artificial Sequence; identical to SEQ ID NO: 144786
  derived and/or modified CDS sequence (opt3) from neuraminidase__InfluenzaA__AFN18080

SEQ ID NO: 150788 - RNA, 1410 nt, Artificial Sequence; identical to SEQ ID NO: 144786
  derived and/or modified CDS sequence (opt3) from neuraminidase__InfluenzaA__AFN18090

SEQ ID NO: 150789 - RNA, 1410 nt, Artificial Sequence; identical to SEQ ID NO: 144786
  derived and/or modified CDS sequence (opt3) from neuraminidase__InfluenzaA__AFN18100

SEQ ID NO: 150790 - RNA, 1410 nt, Artificial Sequence; identical to SEQ ID NO: 144786
  derived and/or modified CDS sequence (opt3) from neuraminidase__InfluenzaA__AFN18106

SEQ ID NO: 150791 - RNA, 1410 nt, Artificial Sequence
  derived and/or modified CDS sequence (opt3) from neuraminidase__InfluenzaA__AFN18108
augaaccccaaucagaagaucauuaccauaggcagcgugugcaugacaaucgggauggccaaccugauucuccaaaucggaaauauuaucuccauauggaucucucacucaauucagcuugguaaccagaaucagaucgagacuuguaaccaaagugucauuacguacgaaaauaacaccuggguuaaucagacauaugugaacaucagcaauacuaacuucgcugcaggccaguccguagugucugucaaacuggccggaaauucgucauugugcccugugagcgggugggcgauauacaguaaggacaacuccauuagaaucggcucuaaaggugauguuuuugugauuagggagccauucaucagcuguuccccguuagaaugccggaccuuuuuccugacacagggggcucuacucaaugacaagcauucaaacggaaccaucaaagaucgcagucccuaucgaacucugaugagcuguccuauuggcgaggucccaucucccuacaacucccguuuugaaucaguggccuggagcgcaagugccugccacgacggcauaaauuggcuuacaaucgggauuucuggaccugauaacggugcuguagcaguucugaaguauaauggcaucauaaccgacacgauuaaguccuggagaaacaauaucuugaggacucaagagagcgagugugccugcgugaacgggucguguuucaccgucaugacagauggaccaucugacggccaggcuuccuacaaaaucuuucggauugaaaaggguaaaaucgugaagucaguggagaugaaugcccccaacuaucauuacgaagagugcaguuguuacccugauagcuccgagauuacuugcgucugccgcgacaauuggcacgggucuaacagaccauggguuagcuucaaucagaaccucgaauauaggauaggauacaucuguucaggcauuuuuggcgauaauccgcggcccaacgacaaaaccgggaguugcggaccugugcuguccaauggugcgaacggcguaaagggguucagcuuuaaguauggaaacggcguguggaucggucgcacaaaaucuaucucaagucgaaauggguucgagaugauuugggauccaaacggcuggaccggaacggacaauaacuuuagcauaaagcaggacaucgucggcauuaaugaaugguccggguacucuggaucguucgugcaacaucccgagcugacuggucucgauuguaucagaccuugcuucuggguugaauuaauuaggggccggccaaaagagaacacaaucuggaccagcggguccucaauaaguuuuuguggagucaauucugacacugugggcuggagcuggcccgauggugcagagcugccguucacaaucgacaaguga

SEQ ID NO: 150792 - RNA, 1410 nt, Artificial Sequence
  derived and/or modified CDS sequence (opt3) from neuraminidase__InfluenzaA__AFN18118
augaaccccaaucagaagaucauuaccauaggcagcgugugcaugacaaucgggauggccaaccugauucuccaaaucggaaauaugauuuccaucuggauaucucacucaauccagcuugguaaccagaaucagauugagacuuguaaccaaagugucaucacguacgaaaauaacaccuggguuaaucagacauaugugaaaauuagcaacacuaauuucgcugcaggccaguccguagugucugucaagcuggccgggaacucgucauugugcccugugagcggaugggcgaucuacaguaaagacaauuccauaagaauuggcucuaagggugauguuuuugugaucagggagccauucauuagcuguuccccguuagaaugccggaccuuuuuccugacacagggggcucuacucaacgacaaacauucaaauggaaccaucaaggaucgcagucccuaucgaacucugaugagcuguccuaucggcgaggucccaucucccuacaacucccguuuugaaucaguggccuggagcgcaagugccugccacgacggcauuaacuggcuuacaauagggaucucuggaccugauaauggugcuguagcaguucugaaguauaacggcauuaucaccgacacgauaaaauccuggagaaauaacauuuugaggacucaagagagcgagugugccugcgugaaugggucguguuucacccucaugacagauggaccaucugacggccaggcuuccuacaagaucuuucggaucgaaaaagguaagauugucaaaucaguggagaugaacgcccccaauuaucauuacgaagagugcaguuguuacccugauagcuccgagaucacuugcgugugccgcgacaacuggcacgggucuaauagaccaugggucagcuucaaccagaaucuggaauaucagauuggauacauauguucaggcaucuuuggcgauaacccgaggcccaaugacaagaccgggaguugcggaccuguuuccagcaacggugcgaauggcgugaagggguucucuuuuaaauauggaaacggcguauggauuggucggacaaagucaaucaguagccgcaacggguucgagaugaucugggauccaaauggcuggaccggaacggacaacaauuuuuccauuaaacaagacauagugggcaucaacgaauggucuggguacucggguagcuucguccagcaucccgagcugacuggacucgauuguauucgaccuugcuucuggguggaauuaaucagaggcaggccaaaggagaauacaauuuggaccuccgggucaaguaucucuuuuuguggaguuaacagcgacacugugggcugguccuggcccgauggugcagagcugccguucacaauagacaaauga

SEQ ID NO: 150793 - RNA, 1410 nt, Artificial Sequence; identical to SEQ ID NO: 144786
  derived and/or modified CDS sequence (opt3) from neuraminidase__InfluenzaA__AFN18120

SEQ ID NO: 150794 - RNA, 1410 nt, Artificial Sequence; identical to SEQ ID NO: 144786
  derived and/or modified CDS sequence (opt3) from neuraminidase__InfluenzaA__AFN18122

SEQ ID NO: 150795 - RNA, 1410 nt, Artificial Sequence; identical to SEQ ID NO: 150419
  derived and/or modified CDS sequence (opt3) from neuraminidase__InfluenzaA__AFN18128

SEQ ID NO: 150796 - RNA, 1410 nt, Artificial Sequence; identical to SEQ ID NO: 150419
  derived and/or modified CDS sequence (opt3) from neuraminidase__InfluenzaA__AFN18134

SEQ ID NO: 150797 - RNA, 1410 nt, Artificial Sequence; identical to SEQ ID NO: 144786
  derived and/or modified CDS sequence (opt3) from neuraminidase__InfluenzaA__AFN18136

SEQ ID NO: 150798 - RNA, 1410 nt, Artificial Sequence; identical to SEQ ID NO: 144786
  derived and/or modified CDS sequence (opt3) from neuraminidase__InfluenzaA__AFN18138

SEQ ID NO: 150799 - RNA, 1410 nt, Artificial Sequence
  derived and/or modified CDS sequence (opt3) from neuraminidase__InfluenzaA__AFN18140
augaaccccaaucagaagaucauuaccauaggcagcgugugcaugacaaucgggauggccaaccugauucuccaaaucggaaauauuaucuccauauggaucucucacucaauucagcuugguaaccagaaucagaucgagacuuguaaccaaagugucauuacguacgaaaauaacaccuggguuaaucagacauaugugaacaucagcaauacuaacuucgcugcaggccaguccguagugucugucaaacuggccggaaauucgucauugugcccugugagcggaugggcgauauacaguaaggacaacuccauuagaaucggcucuaaaggugauguuuuugugauuagggagccauucaucagcuguuccccguuagaaugccggaccuuuuuccugacacagggggcucuacucaaugacaagcauucaaacggaaccaucaaagaucgcagucccuaucgaacucugaugagcuguccuauuggcgaggucccaucucccuacaacucccguuuugaaucaguggccuggagcgcaagugccugccacgacggcauaaauuggcuuacaaucgggauuucuggaccugauaacggugcuguagcaguucugaaguauaauggcaucauaaccgacacgauuaaguccuggagaaacaauaucuugaggacucaagagagcgagugugccugcgugaacgggucguguuucaccgucaugacagauggaccaucugacggccaggcuuccuacaaaaucuuucggauugaaaaggguaaaaucgugaagucaguggagaugaaugcccccaacuaucauuacgaagagugcaguuguuacccugauagcuccgagauuacuugcgucugccgcgacaauuggcacgggucuaacagaccauggguuagcuucaaucagaaccucgaauauaggauaggauacaucuguucaggcauuuuuggcgauaauccgcggcccaacgacaaaaccgggaguugcggaccuguguccagcaauggugcgaacggcguaaagggguucucuuuuaaguauggaaacggcaucuggaucggucgcacaaaaucaauuaguagccgaaauggguucgagaugauaugggauccaaacggcuggaccggaacggacaauaacuuuuccaucaagcaggacauugugggcaucaaugaauggucuggguacucggggagcuucguccaacaucccgagcugacuggucuggauuguauuagaccuugcuucuggguggaacucaucaggggccggccaaaagagaacacaauauggaccuccgggucaaguaucucuuuuuguggaguuaauagcgacacugugggcugguccuggcccgauggugcagaguuaccguucacaauugacaaguga

SEQ ID NO: 150800 - RNA, 1410 nt, Artificial Sequence; identical to SEQ ID NO: 144786
  derived and/or modified CDS sequence (opt3) from neuraminidase__InfluenzaA__AFN18144

SEQ ID NO: 150801 - RNA, 1410 nt, Artificial Sequence; identical to SEQ ID NO: 144786
  derived and/or modified CDS sequence (opt3) from neuraminidase__InfluenzaA__AFN18150

SEQ ID NO: 150802 - RNA, 1410 nt, Artificial Sequence; identical to SEQ ID NO: 144786
  derived and/or modified CDS sequence (opt3) from neuraminidase__InfluenzaA__AFN18156

SEQ ID NO: 150803 - RNA, 1410 nt, Artificial Sequence; identical to SEQ ID NO: 144786
  derived and/or modified CDS sequence (opt3) from neuraminidase__InfluenzaA__AFN18158

SEQ ID NO: 150804 - RNA, 1410 nt, Artificial Sequence; identical to SEQ ID NO: 146600
  derived and/or modified CDS sequence (opt3) from neuraminidase__InfluenzaA__AFN18160

SEQ ID NO: 150805 - RNA, 1410 nt, Artificial Sequence
  derived and/or modified CDS sequence (opt3) from neuraminidase__InfluenzaA__AFN18166
augaaccccaaucagaagaucauuaccauaggcagcgugugcaugacaaucgggauggccaaccugauucuccaaaucggaaauauuaucuccauauggaucucucacucaauucagcuugguaaccagaaucagaucgagacuuguaaccaaagugucauuacguacgaaaauaaaaccuggguuaaccagacauaugugaauaucagcaacgcuaauuucgcagccggccaguccguagugucugucaagcuggcggggaacucgucauugugcccugugagcggaugggcuauauacaguaaagacaauuccauuagaaucggcucuaagggugauguuuuugugauuagggagccauucaucagcuguuccccguuagaaugccggaccuuuuuccugacucagggggcccuacucaacgacaaacauucaaauggaacaaucaaggaucgcagucccuaucgaacccugaugagcuguccuauuggcgaggucccaucucccuacaacuccaaguuugaaucaguggcauggagcgccagugcuugccacgacggcauaaacuggcuuacuaucgggauuucuggaccugauaauggugcaguagccguucugaaauauaacggcaucauaacagacaccauuaaguccuggcguaauaacaucuugagaacgcaagagagcgagugugcuugcgugaaugggucguguuucacugucaugaccgauggaccaucugacggccaggccuccuacaaaaucuuuaggauugaaaaggguaaaaucgugaagucaguggagaugaacgcgcccaauuaucauuacgaagagugcaguuguuacccugauagcuccgagauuacaugcgucugccgggacaacuggcacgggucuaaucgcccauggguuagcuucaaccagaaucucgaauaucagauaggauacaucuguucaggcauuuuuggcgauaacccgagacccaaugacaagacugggaguugcggaccuguguccagcaacggugcaaauggcguaaaaggguucucuuuuaaguauggaaacggcguguggaucgguaggaccaaaucaaucaguagccggaacggguucgagaugauuugggauccaaauggcuggacaggaaccgacaacaauuuuuccauaaagcaagacaucgucggcauuaacgaauggucuggguacucggguagcuucgugcagcaucccgagcugacgggacuggauuguauccgcccuugcuucuggguugaacucauucgaggcagaccaaaagagaauacuaucuggacauccgggucaaguauaucuuuuuguggagugaacagcgacaccgucggcugguccuggcccgauggugccgaguuaccguucacuaucgacaaguga

SEQ ID NO: 150806 - RNA, 1410 nt, Artificial Sequence; identical to SEQ ID NO: 144786
  derived and/or modified CDS sequence (opt3) from neuraminidase__InfluenzaA__AFN18172

SEQ ID NO: 150807 - RNA, 1410 nt, Artificial Sequence; identical to SEQ ID NO: 145804
  derived and/or modified CDS sequence (opt3) from neuraminidase__InfluenzaA__AFN18178

SEQ ID NO: 150808 - RNA, 1410 nt, Artificial Sequence
  derived and/or modified CDS sequence (opt3) from neuraminidase__InfluenzaA__AFN18184
augaaccccaaucagaagaucauuaccauaggcagcgugugcaugacaaucgggauggccaaccugauucuccaaaucggaaauauuaucuccauauggaucucucacucaauucagcuugguaaccagaaucagaucgagacuuguaaccaaagugucauuacguacgaaaauaacaccuggguuaaucagacauaugugaacaucagcaauacuaacuucgcugcaggccaguccaugguaucugugaaacuggccggaaauucgucauugugcccugucagcggaugggcgauauacaguaaggacaacuccauuagaaucggcucuaaaggugauguguuuguuauuagggagccauucaucagcuguuccccguuagaaugccggaccuuuuuccugacacagggggcucuacucaaugacaagcauucaaacggaaccaucaaagaucgcagucccuaucgaacucugaugagcuguccuauuggcgaggugccaucucccuacaacucccguuuugaaucagucgccuggagcgcaagugccugccacgacggcauaaauuggcuuacaaucgggauuucuggaccugauaacggugcuguggcaguacugaaguauaauggcaucauaaccgacacgauuaaguccuggagaaacaauaucuugaggacucaagagagcgagugugccugcguuaacgggucguguuucaccgugaugacagauggaccaucugacggccaggcuuccuacaaaaucuuucggauugaaaaggguaaaaucgucaagucaguggagaugaaugcccccaacuaucauuacgaagagugcaguuguuacccugauagcuccgagauuacuugcgugugccgcgacaauuggcacgggucuaacagaccaugggucagcuucaaucagaaccucgaauaucagauaggauacaucuguucaggcauuuuuggcgauaauccgaggcccaacgacaaaaccgggaguugcggaccuguuuccagcaauggugcgaacggcgugaagggguucucuuuuaaguauggaaacggcguauggaucggucggacaaaaucaaucaguagccgcaauggguucgagaugauuugggauccaaacggcuggaccggaacggacaauaacuuuuccauaaagcaagacaucgugggcauuaaugaauggucuggguacucggggagcuucguccagcaucccgagcugacuggucuggauuguauccgaccuugcuucuggguggaacucauuagaggcaggccaaaagagaacacaaucuggaccuccgggucaaguauaucuuuuuguggaguuaauagcgacacugugggcugguccuggcccgauggugcagaguuaccguucacaaucgacaaguga

SEQ ID NO: 150809 - RNA, 1410 nt, Artificial Sequence; identical to SEQ ID NO: 147778
  derived and/or modified CDS sequence (opt3) from neuraminidase__InfluenzaA__AFN18190

SEQ ID NO: 150810 - RNA, 1410 nt, Artificial Sequence; identical to SEQ ID NO: 148799
  derived and/or modified CDS sequence (opt3) from neuraminidase__InfluenzaA__AFN18196

SEQ ID NO: 150811 - RNA, 1410 nt, Artificial Sequence
  derived and/or modified CDS sequence (opt3) from neuraminidase__InfluenzaA__AFN18202
augaaccccaaucagaagaucauuaccauaggcagcgugugcaugacaaucgggauggccaaccugauucuccaaaucggaaauauuaucuccauauggaucucucacucaauucagcuugguaaccagaaucagaucgagacuuguaaccaaagugucauuacguacgaaaauaacaccuggguuaaucagacauaugugaacaucagcaauacuaacuucgcugcaggcagauccguagugucugucaaacuggccggaaauucgucauugugcccugugagcggaugggcgauauacaguaaggacaacuccauuaggaucggcucuaaaggugauguuuuugugauucgggagccauucaucagcuguuccccguuagaaugccgcaccuuuuuccugacacagggggcucuacucaaugacaagcauucaaacggaaccaucaaagaucgaagucccuaucguacucugaugagcuguccuauuggcgaggucccaucucccuacaacuccagauuugaaucaguggccuggagcgcaagugccugccacgacggcauaaauuggcuuacaaucgggauuucuggaccugauaacggugcuguagcaguucugaaguauaauggcaucauaaccgacacgauuaaguccuggaggaacaauaucuugcggacucaggagagcgagugugccugcgugaacgggucguguuucaccgucaugacagauggaccaucugacggccaggcuuccuacaaaaucuuucgcauugaaaaggguaaaaucgugaagucaguggagaugaaugcccccaacuaucauuacgaagagugcaguuguuacccugauagcuccgagauuacuugcgucugcagagacaauuggcacgggucuaacaggccauggguuagcuucaaucaaaaccucgaauaucagauaggauacaucuguucaggcauuuuuggcgauaauccgcggcccaacgacaaaaccgggaguugcggaccuguguccagcaauggugcgaacggcguaaagggguucucuuuuaaguauggaaacggcguguggaucggucgcacaaaaucaaucaguagccgaaauggguucgagaugauuugggauccaaacggcuggaccggaacggacaauaacuuuuccauaaagcaggacaucgucggcauuaaugaauggucuggguacucggggagcuucgugcaacaucccgagcugacuggucuggauuguaucagaccuugcuucuggguugaacucauuaggggccggccaaaagagaacacaaucuggaccuccgggucaaguauaucuuuuuguggagugaauagcgacacugucggcugguccuggcccgauggugcagaguuaccguucacaaucgacaaguga

SEQ ID NO: 150812 - RNA, 1410 nt, Artificial Sequence; identical to SEQ ID NO: 144786
  derived and/or modified CDS sequence (opt3) from neuraminidase__InfluenzaA__AFN18208

SEQ ID NO: 150813 - RNA, 1410 nt, Artificial Sequence
  derived and/or modified CDS sequence (opt3) from neuraminidase__InfluenzaA__AFN18210
augaaccccaaucagaagaucauuaccauaggcagcgugugcaugacaaucgggauggccaaccugauucuccaaaucggaaauauuaucuccauauggaucucucacucaauucagcuugguaaccagaaucagaucgagacuuguaaccaaagugucauuacguacgaaaauaacaccuggguuaaucagacauaugugaacaucagcaauacuaacuucgcugcaggccaguccguagugucugucaaacuggccggaaauucgucauugugcccugugagcggaugggcgauauacaguaaggacaacuccauuagaaucggcucuaaaggugauguuuuugugauuagggagccauucaucagcuguuccccguuagaaugccgggccuuuuuccugacccagggggcucuacucaaugacaagcauucaaacggaacaaucaaagaucgcagucccuaucgaacccugaugagcuguccuauuggcgaggucccaucucccuacaacucccguuuugaaucaguggcauggagcgccagugcuugccacgacggcauaaauuggcuuacuaucgggauuucuggaccugauaacggugcaguagccguucugaaguauaauggcaucauaacagacaccauuaaguccuggagaaacaauaucuugaggacgcaagagagcgagugugcuugcgugaacgggucguguuucacugucaugaccgauggaccaucugacggccaggccuccuacaaaaucuuucggauugaaaaggguaaaaucgugaagucaguggagaugaaugcgcccaacuaucauuacgaagagugcaguuguuacccugauagcuccgagauuacaugcgucugccgcgacaauuggcacgggucuaacagaccauggguuagcuucaaucagaaccucgaauauaggauaggauacaucuguucaggcauuuuuggcgauaauccgcggcccaacgacaaaacugggaguugcggaccuguguccagcaauggugcaaacggcguaaagggguucucuuuuaaguauggaaacggcguguggaucggucgcaccaaaucaaucaguagccgaaauggguucgagaugauuugggauccaaacggcuggacaggaaccgacaauaacuuuuccauaaagcaggacaucgucggcauuaaugaauggucuggguacucggggagcuucgugcaacaucccgagcugacgggucuggauuguaucagaccuugcuucuggguugaacucauuaggggccgguuaaaagagaacacuaucuggacauccgggucaaguauaucuuuuuguggagugaauagcgacaccgucggcugguccuggccagauggugccgagcugcccuucacuaucgacaaguga

SEQ ID NO: 150814 - RNA, 1410 nt, Artificial Sequence; identical to SEQ ID NO: 145369
  derived and/or modified CDS sequence (opt3) from neuraminidase__InfluenzaA__AFN18216

SEQ ID NO: 150815 - RNA, 1410 nt, Artificial Sequence; identical to SEQ ID NO: 147115
  derived and/or modified CDS sequence (opt3) from neuraminidase__InfluenzaA__AFN18226

SEQ ID NO: 150816 - RNA, 1410 nt, Artificial Sequence; identical to SEQ ID NO: 144786
  derived and/or modified CDS sequence (opt3) from neuraminidase__InfluenzaA__AFN18232

SEQ ID NO: 150817 - RNA, 1410 nt, Artificial Sequence; identical to SEQ ID NO: 144786
  derived and/or modified CDS sequence (opt3) from neuraminidase__InfluenzaA__AFN18234

SEQ ID NO: 150818 - RNA, 1410 nt, Artificial Sequence; identical to SEQ ID NO: 144786
  derived and/or modified CDS sequence (opt3) from neuraminidase__InfluenzaA__AFN18244

SEQ ID NO: 150819 - RNA, 1410 nt, Artificial Sequence; identical to SEQ ID NO: 144786
  derived and/or modified CDS sequence (opt3) from neuraminidase__InfluenzaA__AFN18246

SEQ ID NO: 150820 - RNA, 1410 nt, Artificial Sequence; identical to SEQ ID NO: 147115
  derived and/or modified CDS sequence (opt3) from neuraminidase__InfluenzaA__AFN18256

SEQ ID NO: 150821 - RNA, 1410 nt, Artificial Sequence; identical to SEQ ID NO: 144786
  derived and/or modified CDS sequence (opt3) from neuraminidase__InfluenzaA__AFN18262

SEQ ID NO: 150822 - RNA, 1410 nt, Artificial Sequence; identical to SEQ ID NO: 144786
  derived and/or modified CDS sequence (opt3) from neuraminidase__InfluenzaA__AFN18268

SEQ ID NO: 150823 - RNA, 1410 nt, Artificial Sequence; identical to SEQ ID NO: 144786
  derived and/or modified CDS sequence (opt3) from neuraminidase__InfluenzaA__AFN18270

SEQ ID NO: 150824 - RNA, 1410 nt, Artificial Sequence; identical to SEQ ID NO: 147775
  derived and/or modified CDS sequence (opt3) from neuraminidase__InfluenzaA__AFN18272

SEQ ID NO: 150825 - RNA, 1410 nt, Artificial Sequence; identical to SEQ ID NO: 144786
  derived and/or modified CDS sequence (opt3) from neuraminidase__InfluenzaA__AFN18274

SEQ ID NO: 150826 - RNA, 1410 nt, Artificial Sequence; identical to SEQ ID NO: 144786
  derived and/or modified CDS sequence (opt3) from neuraminidase__InfluenzaA__AFN18282

SEQ ID NO: 150827 - RNA, 1410 nt, Artificial Sequence; identical to SEQ ID NO: 144786
  derived and/or modified CDS sequence (opt3) from neuraminidase__InfluenzaA__AFN18304

SEQ ID NO: 150828 - RNA, 1410 nt, Artificial Sequence
  derived and/or modified CDS sequence (opt3) from neuraminidase__InfluenzaA__AFN18306
augaaccccaaucagaagaucauuaccauaggcagcgugugcaugacaaucgggauugccaaccugauccuccaaauuggaaauaucauauccaucuggauuucucacucaauccagcuugguaaccagaaucagauugagacuuguaaccaaagugucaucacguacgaaaauaacaccuggguuaaucagacauaugugaacauaagcaauacuaacuucgcugcaggccaguccguagugucugucaaacuggccggaaauucgucauugugcccugugagcggaugggcgauuuacaguaaggacaacuccaucagaauuggcucuaaaggugauguuuuugugaucagggagccauucaucagcuguuccccguuagaaugccggaccuuuuuccugacacagggggcucuacucaaugacaagcauucaaacggaaccauuaaagaucgcagucccuaucgaacucugaugagcuguccuauaggcgaggucccaucucccuacaacucccguuuugaaucaguggccuggagcgcaagugccugccacgacggcaucaauuggcuuacaauugggaucucuggaccugauaacggugcuguagcaguucugaaguauaauggcauaauuaccgacacgaucaaguccuggagaaacaauaucuugaggacucaagagagcgagugugccugcgugaacgggucguguuucaccgucaugacagauggaccaucugacggccaggcuuccuacaaaauuuuucggaucgaaaaggguaaaauugugaagucaguggagaugaaugcccccaacuaucauuacgaagagugcaguuguuacccugauagcuccgagauaacuugcgucugccgcgacaauuggcacgggucuaacagaccauggguuagcuucaaucagaaccucgaauaucagaucggauacauuuguucaggcaucuuuggcgauaauccgaggcccaacgacaaaaccgggaguugcggaccuguguccagcaauggugcgaacggcguaaagggguucucuuuuaaguauggaaacggcguguggaucggucggacaaaaucaauuaguagccgcaauggguucgagaugauaugggauccaaacggcuggaccggaacggacaauaacuuuuccaucaagcaagacauugucggcaucaaugaauggucuggguacucggggagcuucgugcagcaucccgagcugacuggucuggauuguauucgaccuugcuucuggguugaacucaucagaggcaggccaaaagagaacacaauauggaccuccgggucaaguaucucuuuuuguggagugaauagcgacacugucggcugguccuggcccgauggugcagaguuaccguucacaauugacaaguga

SEQ ID NO: 150829 - RNA, 1410 nt, Artificial Sequence
  derived and/or modified CDS sequence (opt3) from neuraminidase__InfluenzaA__AFN18308
augaaccccaaucagaagaucauuaccauaggcagcgugugcaugacaaucgggauggccaaccugauucuccaaaucggaaauauuaucuccauauggaucucucacucaauucagcuugguaaccagaaucagaucgagacuuguaaccaaagugucauuacguacgaaaauaacaccuggguuaaucagacauaugugaacaucagcaauacuaacuucgcugcaggccaguccguagugucugucaaacuggccggaaauucgucauugugcccugugagcggaugggcgauauacaguaaggacaacuccauuagaaucggcucuaaaggugauguuuuugugauuagggagccauucaucagcuguuccccguuagaaugccggaccuuuuuccugacacagggggcucuacucaaugacaagcauucaaacggaaccaucaaagaucgcagucccuaucgaacucugaugagcuguccuauuggcgaggucccaucucccuacaacucccguuuugaaucaguggccuggagcgcaagugccugccacgacggcauaaauuggcuuacaaucgggauuucuggaccugauaacggugcuguagcaguucugaaguauaauggcaucauaaccgacacgauuaaguccuggagaaacaauaucuugaggacucaagagagcgagugugccugcgugaacgggucguguuucaccgucaugacagauggaccaucugacggccaggcuuccuacaaaaucuuucggauugaaaaggguaaaaucgugaagucaguggagaugaaugcccccaacuaucauuacgaagagugcaguuguuacccugauagcuccgagauuacuugcgucugccgcgacaauuggcacgggucuaacagaccauggguuagcuucaaucagaaccucgaauaucagauaggauacaucuguucaggcauuuuuggcgauaauccgaggcccaacgacaaaaccgggaguugcggaccuguguccagcaagggugcgaauggcguaaagggguucucuuuuaaauauggaaacggcguguggaucggucggacaaagucaaucaguagccgcaacggguucgagaugauuugggauccaaauggcuggaccggaacggacaacaauuuuuccauaaaacaagacaucgucggcauuaacgaauggucuggguacucggggagcuucgugcagcaucccgagcugacuggucuggauuguauccgaccuugcuucuggguugaacucauuagaggcaggccaaaggagaauacaaucuggaccuccgggucaaguauaucuuuuuguggagugaacagcgacacugucggcugguccuggcccgauggugcagaguuaccguucacaaucgacaaauga

SEQ ID NO: 150830 - RNA, 1410 nt, Artificial Sequence
  derived and/or modified CDS sequence (opt3) from neuraminidase__InfluenzaA__AFN18314
augaaccccaaucagaagaucauuaccauaggcagcgugugcaugacaaucgggauggccaaccugauucuccaaaucggaaauauuaucuccauauggaucucucacucaauucagcuugguaaccagaaucagaucgagacuuguaaccaaagugucauuacguacgaaaauaacaccuggguuaaucagacauaugugaacaucagcaauacuaacuucgcugcaggccaguccguagugucugucaaacuggccggaaauucgucauugugcccugugagcggaugggcgauauacaguaaggacaacuccauuagaaucggcucuaaaggugauguuuuugugauuagggagccauucaucagcuguuccccguuagaaugccggaccuuuuuccugacacagggggcucuacucaaugacaagcauucaaacggaaccaucaaagaucgcagucccuaucgaacucugaugagcuguccuauuggcgaggucccaucucccuacaacucccguuuugaaucaguggccuggagcgcaagugccugccacgacggcauaaauuggcuuacaaucgggauuucuggaccugauaacggugcuguagcaguucugaaguauaauggcaucauaaccgacacgauuaaguccuggagaaacaauaucuugaggacucaagagagcgagugugccugcgugaacgggucguguuucaccgucaugacagauggaccaucugacggccaggcuuccuacaaaaucuuucggauugaaaaggguaaaaucgugaagucaguggagaugaaugcccccaacuaucauuacgaagagugcaguuguuacccugauagcuccgagauuacuugcgucugccgcgacaauuggcacgggucuaacagaccauggguuagcuucaaucagaaccucgaauaucagauaggauacaucuguucaggcauuuuuggcgauaauccgaggcccaacgacaaaaccgggaguugcggaccuguguccagcaauggugcgaacggcguaaagggguucucuuuuaaguauggaaacggcguguggaucggucggacaaaaucaaucaguagccgcaauggguucgagaugauuugggauccaaacggcuggaccggaacggacaauaacuuuuccauaaagcaagacaucgucggcauuaaugaauggucuggguacucggggagcuucgugcagcaucccgagcugacuggucuggauuguauccgaccuugcuucuggguugaacucauuagaggcaggccaaaagagaagacaaucuggaccuccgggucaaguauaucuuuuuguggagugaacagcgacacugucggcugguccuggcccgauggugcagaguuaccguucacaaucgacaaauga

SEQ ID NO: 150831 - RNA, 1410 nt, Artificial Sequence; identical to SEQ ID NO: 144786
  derived and/or modified CDS sequence (opt3) from neuraminidase__InfluenzaA__AFN18320

SEQ ID NO: 150832 - RNA, 1410 nt, Artificial Sequence
  derived and/or modified CDS sequence (opt3) from neuraminidase__InfluenzaA__AFN18326
augaaccccaaucagaagaucauuaccauaggcagcgugugcaugacaaucgggauggccaaccugcuccuucaaauuggaaauaucauuuccaucuggauaucucacucaauccagcuggguaaccagaaucagauugagacuuguaaccaaagugucaucacguacgaaaauaacaccuggguuaaucagacauaugugaacauuagcaauacuaacuucgcugcaggccaguccguagugucugucaaauuggccggaaauucgucauuaugcccugugagcggaugggcgaucuacaguaaggacaacuccauaagaauuggcucuaaaggugauguuuuugugaucagggagccauucauuagcuguuccccgcuggaaugccggaccuuuuuccuaacacagggggcucuccugaaugacaagcauucaaacggaaccaucaaagaucgcagucccuaucgaacucuuaugagcuguccuaucggcgaggucccaucucccuacaacucccguuuugaaucaguggccuggagcgcaagugccugccacgacggcauuaauuggcugacaauagggaucucuggaccugauaacggugcuguagcaguuuugaaguauaauggcauuaucaccgacacgauaaaguccuggagaaacaauauucucaggacucaagagagcgagugugccugcgugaacgggucguguuucaccgucaugacagauggaccaucugacggccaggcuuccuacaaaaucuuucggaucgaaaaggguaaaauugugaagucaguggagaugaaugcccccaacuaucauuacgaagagugcaguuguuacccugauagcuccgagaucacuugcgucugccgcgacaauuggcacgggucuaacagaccauggguuagcuucaaucagaaccuggaauaucagauuggauacauauguucaggcaucuuuggcgauaauccgaggcccaacgacaaaaccgggaguugcggaccuguguccagcaauggugcgaacggcguaaagggguucucuuuuaaguauggaaacggcguguggauuggucggacaaaaucaaucaguagccgcaauggguucgagaugaucugggauccaaacggcuggaccggaacggacaauaacuuuuccauuaagcaagacauagucggcaucaaugaauggucuggguacucggggagcuucgugcagcaucccgagcugacuggucucgauuguauucgaccuugcuucuggguugaauuaaucagaggcaggccaaaagagaacacaauuuggaccuccgggucaaguaucucuuuuuguggagugaauagcgacacugucggcugguccuggcccgauggugcagagcugccguucacaauagacaaguga

SEQ ID NO: 150833 - RNA, 1410 nt, Artificial Sequence; identical to SEQ ID NO: 144786
  derived and/or modified CDS sequence (opt3) from neuraminidase__InfluenzaA__AFN18336

SEQ ID NO: 150834 - RNA, 1410 nt, Artificial Sequence; identical to SEQ ID NO: 144786
  derived and/or modified CDS sequence (opt3) from neuraminidase__InfluenzaA__AFN18346

SEQ ID NO: 150835 - RNA, 1410 nt, Artificial Sequence; identical to SEQ ID NO: 150419
  derived and/or modified CDS sequence (opt3) from neuraminidase__InfluenzaA__AFN18356

SEQ ID NO: 150836 - RNA, 1410 nt, Artificial Sequence
  derived and/or modified CDS sequence (opt3) from neuraminidase__InfluenzaA__AFN18366
augaaccccaaucagaagaucauuaccauaggcagcgugugcaugacaaucgggauggccaaccugauucuccaaaucggaaauauuaucuccauauggaucucucacucaauucagcuugguaaccagaaucagaucgagacuuguaaccaaagugucauuacguacgaaaauaacaccuggguuaaucagacauaugugaacaucagcaauacuaacuucgcugcagagcaguccguagugucugucaaacuggccggcaauucgucauugugcccugugagcgggugggcgauauacaguaaggacaacuccauuagaaucggaucuaaaggcgauguuuuugugauuagggaaccauucaucagcuguuccccguuagagugccggaccuuuuuccugacacagggugcucuacucaaugacaagcauucaaacgggaccaucaaagaucgcagucccuaucgaacucugaugagcuguccuauuggagaagucccaucucccuacaacucccguuuugagucaguggccuggagcgcaagugccugccacgacggcauaaauuggcuuacaaucggcauuucugggccugauaacggagcuguagcaguucugaaguauaaugguaucauaaccgacacgauuaaguccuggagaaacaauaucuugaggacucaagagagcgaaugugccugcgugaacggcucguguuucaccgucaugacagaugggccaucugacggacaggcuuccuacaaaaucuuucggauugagaagggcaaaaucgugaagucaguggaaaugaaugcccccaacuaucauuacgaggagugcaguuguuacccugauagcuccgaagucacuugcguuugccgcgacaauuggcacgguucuaacagaccaugggugagcuucaaucagaaccucgaguaucagauuggguacauauguucaggaaucuuuggcgauaauccgaggcccaacgacaaaaccggcaguugcgggccuguauccagcaauggagcgaacggugugaagggcuucucuuuuaaguaugggaacggagucuggauuggccggacaaaaucaaucaguagccgcaaugguuucgaaaugaucugggauccaaacggguggaccggcacggacaauaacuuuuccauuaagcaagacauagugggaaucaaugaguggucuggcuacucggggagcuucguucagcaucccgaacugacuggacuggauuguauucgaccuugcuucuggguggagcucaucagagguaggccaaaagagaacacaauuuggaccuccggcucaaguaucucuuuuuguggggucaauagcgacacugugggaugguccuggcccgauggcgcagaauuaccguucacaauagacaaguga

SEQ ID NO: 150837 - RNA, 1410 nt, Artificial Sequence; identical to SEQ ID NO: 150419
  derived and/or modified CDS sequence (opt3) from neuraminidase__InfluenzaA__AFN18376

SEQ ID NO: 150838 - RNA, 1410 nt, Artificial Sequence; identical to SEQ ID NO: 144786
  derived and/or modified CDS sequence (opt3) from neuraminidase__InfluenzaA__AFN18382

SEQ ID NO: 150839 - RNA, 1410 nt, Artificial Sequence; identical to SEQ ID NO: 144786
  derived and/or modified CDS sequence (opt3) from neuraminidase__InfluenzaA__AFN18392

SEQ ID NO: 150840 - RNA, 1410 nt, Artificial Sequence; identical to SEQ ID NO: 144786
  derived and/or modified CDS sequence (opt3) from neuraminidase__InfluenzaA__AFN18402

SEQ ID NO: 150841 - RNA, 1410 nt, Artificial Sequence; identical to SEQ ID NO: 144786
  derived and/or modified CDS sequence (opt3) from neuraminidase__InfluenzaA__AFN18412

SEQ ID NO: 150842 - RNA, 1410 nt, Artificial Sequence; identical to SEQ ID NO: 144786
  derived and/or modified CDS sequence (opt3) from neuraminidase__InfluenzaA__AFN18422

SEQ ID NO: 150843 - RNA, 1410 nt, Artificial Sequence; identical to SEQ ID NO: 144786
  derived and/or modified CDS sequence (opt3) from neuraminidase__InfluenzaA__AFN18432

SEQ ID NO: 150844 - RNA, 1410 nt, Artificial Sequence; identical to SEQ ID NO: 144786
  derived and/or modified CDS sequence (opt3) from neuraminidase__InfluenzaA__AFN18442

SEQ ID NO: 150845 - RNA, 1410 nt, Artificial Sequence; identical to SEQ ID NO: 144786
  derived and/or modified CDS sequence (opt3) from neuraminidase__InfluenzaA__AFN18452

SEQ ID NO: 150846 - RNA, 1410 nt, Artificial Sequence; identical to SEQ ID NO: 144786
  derived and/or modified CDS sequence (opt3) from neuraminidase__InfluenzaA__AFN18462

SEQ ID NO: 150847 - RNA, 1410 nt, Artificial Sequence
  derived and/or modified CDS sequence (opt3) from neuraminidase__InfluenzaA__AFN18472
augaaccccaaucagaagaucauuaccauaggcagcgugugcaugacaaucgggauggccaaccugauucuccaaaucggaaauauuaucuccauauggaucucucacucaauucagcuugguaaccagaaucagaucgagacuuguaaccaaagugucauuacguacgaaaauaacaccuggguuaaucagacauaugugaacaucagcaauacuaacuucgcugcaggccaguccguagugucugucaaacuggccggaaauucgucauugugcccugugagcggaugggcgauauacaguaaggacaacuccauuagaaucggcucuaaaggugauguuuuugugauuagggagccauucaucagcuguuccccguuagaaugccggaccuuuuuccugacacagggggcucuacucaaugacaagcauucaaacggaaccaucaaagaucgcagucccuaucgaacucugaugagcuguccuauuggcgaggucccaucucccuacaacucccguuuugaaucaguggccuggagcgcaagugccugccacgacggcauaaauuggcuuacaaucgggauuucuggaccugauaacggugcuguagcaguucugaaguauaauggcaucauaaccgacacgauuaaguccuggagaaacaauaucuugaggacucaagagagcgagugugccugcgugaacgggucguguuucaccgucaugacagauggaccaucugacggccaggcuuccuacaaaaucuuucggauugaaaaggguaaaaucgugaagucaguggagaugaaugcccccaacuaucauuacgaagagugcaguuguuacccugauagcuccgagauuacuugcgucugccgcgacaauuggcacgggucuaacagaccauggguuagcuucaaucagaaccucgaauaucagauaggauacaucuguucaggcauuuuuggcgauaauccgaggcccaacgacaaaaccgggaguugcggaccuguguccagcaauggugcgaagggcguaaagggguucucuuuuaaauauggaaacggcguguggaucggucggacaaagucaaucaguagccgcaacggguucgagaugauuugggauccaaauggcuggaccggaacggacaacaauuuuuccauaaaacaagacaucgucggcauuaacgaauggucuggguacucggggagcuucgugcagcaucccgagcugacuggucuggauuguauccgaccuugcuucuggguugaacucauuagaggcaggccaaaggagaauacaaucuggaccuccgggucaaguauaucuuuuuguggagugaacagcgacacugucggcugguccuggcccgauggugcagaguuaccguucacaaucgacaaauga

SEQ ID NO: 150848 - RNA, 1410 nt, Artificial Sequence; identical to SEQ ID NO: 144786
  derived and/or modified CDS sequence (opt3) from neuraminidase__InfluenzaA__AFN18482

SEQ ID NO: 150849 - RNA, 1410 nt, Artificial Sequence; identical to SEQ ID NO: 144786
  derived and/or modified CDS sequence (opt3) from neuraminidase__InfluenzaA__AFN18492

SEQ ID NO: 150850 - RNA, 1410 nt, Artificial Sequence
  derived and/or modified CDS sequence (opt3) from neuraminidase__InfluenzaA__AFN18514
augaaccccaaucagaagaucauuaccauaggcagcgugugcaugacaaucgggauggccaaccugauucuccaaaucggaaauauuaucuccauauggaucucucacucaauucagcuugguaaccagaaucagaucgagacuuguaaccaaagugucauuacguacgaaaauaacaccuggguuaaucagacauaugugaacaucagcaauacuaacuucgcugcaggccaguccguagugucugucaaacuggugggaaauucgucauugugcccuguuagcggaugggccauauacaguaaggacaacuccauuagaaucggcucuaaaggugauguguuugucauuagggagccauucaucagcuguuccccguuagaaugccggaccuuuuuccugacacagggggcgcuacucaaugacaagcauucaaacggaaccaucaaagaucgcagucccuaucgaacucugaugagcuguccuauuggcgaggugccaucucccuacaacucccguuuugaaucaguagcuuggagcgccagugcaugccacgacggcauaaauuggcuuacaaucgggauuucuggaccugauaacggugccguugcugugcugaaguauaauggcaucauaaccgacacgauuaaguccuggagaaacaauaucuugaggacucaagagagcgagugugcaugcgucaacgggucguguuucaccgugaugacagauggaccaucugacggccaggccuccuacaaaaucuuucggauugaaaaggguaaaaucgugaagucagucgagaugaaugcucccaacuaucauuacgaagagugcaguuguuacccugauagcuccgagauuacuugcguuugccgcgacaauuggcacgggucuaacagaccaugggugagcuucaaucagaaccucgaauaucagauaggauacaucuguucaggcauuuuuggcgauaauccgaggcccaacgacaaaaccgggaguugcggaccuguauccagcaauggugccaacggcgugaagggguucucuuuuaaguauggaaacggcgucuggaucggucggacaaaaucaaucaguagccgcaauggguucgagaugauuugggauccaaacggcuggaccggaacggacaauaacuuuuccauaaagcaagacaucgugggcauuaaugaauggucuggguacucggggagcuucguucagcaucccgagcugacuggucuggauuguauccgaccuugcuucuggguggaacucauuagaggcaggccaaaagagaacacaaucuggaccuccgggucaaguauaucuuuuuguggagucaauagcgacacugugggcugguccuggcccgauggugcggaguuaccguucacaaucgacaaguga

SEQ ID NO: 150851 - RNA, 1410 nt, Artificial Sequence
  derived and/or modified CDS sequence (opt3) from neuraminidase__InfluenzaA__AFN18520
augaaccccaaucagaagaucauuaccauaggcagcgugugcaugacaaucgggauggccaaccugauucuccaaaucggaaauauuaucuccauauggaucucucacucaauucagcuugguaaccagaaucagaucgagacuuguaaccaaagugucauuacguacgaaaauaacaccuggguuaaucagacauaugugaacaucagcaauacuaacuucgcugcaggccaguccguagugucugucaaacuggccggaaauucgucauugugcccugugagcggaugggcgauauacaguaaggacaacuccauuagaaucggcucuaaaggugauguuuuugugauuagggagccauucaucagcuguuccccguuagaaugccggaccuuuuuccugacacagggggcucuacucaaugacaagcauucaaacggaaccaucaaagaucgcagucccuaucgaacucugaugagcuguccuauuggcgaggucccaucucccuacaacucccguuuugaaucaguggccuggagcgcaagugccugccacgacggcauaaauuggcuuacaaucgggauuucuggaccugauaacggugcuguagcaguucugaaguauaauggcgugaucaccgacacgauaaaguccuggagaaacaauauuuugaggacucaagagagcgagugugccugcgucaacgggucguguuucacccucaugacagauggaccaucugacggccaggcuuccuacaaaaucuuucggaucgaaaaggguaaaauugugaagucaguggagaugaaugcccccaacuaucauuacgaagagugcaguuguuacccugauagcuccgagaucacuugcgucugccgcgacaauuggcacgggucuaacagaccauggguuagcuucaaucagaaccuggaauaucagauuggauacauauguucaggcaucuuuggcgauaauccgaggcccaacgacaaaaccgggaguugcggaccuguguccagcaauggugcgaacggcguaaagggguucucuuuuaaguauggaaacggcguguggauuggucggacaaaaucaaucaguagccgcaauggguucgagaugaucugggauccaaacggcuggaccggaacggacaauaacuuuuccauuaagcaagacauagucggcaucaaugaauggucuggguacucggggagcuucgugcagcaucccgagcugacuggucucgauuguauucgaccuugcuucuggguugaauuaaucagaggcaggccaaaagagaacacaauuuggaccuccgggucaaguaucucuuuuuguggagugaauagcgacacugucggcugguccuggcccgauggugcagagcugccguucacaauagacaaguga

SEQ ID NO: 150852 - RNA, 1410 nt, Artificial Sequence; identical to SEQ ID NO: 144786
  derived and/or modified CDS sequence (opt3) from neuraminidase__InfluenzaA__AFN18522

SEQ ID NO: 150853 - RNA, 1410 nt, Artificial Sequence; identical to SEQ ID NO: 144786
  derived and/or modified CDS sequence (opt3) from neuraminidase__InfluenzaA__AFN18524

SEQ ID NO: 150854 - RNA, 1410 nt, Artificial Sequence; identical to SEQ ID NO: 150419
  derived and/or modified CDS sequence (opt3) from neuraminidase__InfluenzaA__AFN18530

SEQ ID NO: 150855 - RNA, 1410 nt, Artificial Sequence; identical to SEQ ID NO: 144786
  derived and/or modified CDS sequence (opt3) from neuraminidase__InfluenzaA__AFN18532

SEQ ID NO: 150856 - RNA, 1410 nt, Artificial Sequence; identical to SEQ ID NO: 144786
  derived and/or modified CDS sequence (opt3) from neuraminidase__InfluenzaA__AFN18538

SEQ ID NO: 150857 - RNA, 1410 nt, Artificial Sequence; identical to SEQ ID NO: 144786
  derived and/or modified CDS sequence (opt3) from neuraminidase__InfluenzaA__AFN18544

SEQ ID NO: 150858 - RNA, 1410 nt, Artificial Sequence; identical to SEQ ID NO: 144786
  derived and/or modified CDS sequence (opt3) from neuraminidase__InfluenzaA__AFN18546

SEQ ID NO: 150859 - RNA, 1410 nt, Artificial Sequence; identical to SEQ ID NO: 144786
  derived and/or modified CDS sequence (opt3) from neuraminidase__InfluenzaA__AFN18552

SEQ ID NO: 150860 - RNA, 1410 nt, Artificial Sequence; identical to SEQ ID NO: 144786
  derived and/or modified CDS sequence (opt3) from neuraminidase__InfluenzaA__AFN18558

SEQ ID NO: 150861 - RNA, 1410 nt, Artificial Sequence; identical to SEQ ID NO: 144786
  derived and/or modified CDS sequence (opt3) from neuraminidase__InfluenzaA__AFN18560

SEQ ID NO: 150862 - RNA, 1410 nt, Artificial Sequence; identical to SEQ ID NO: 144786
  derived and/or modified CDS sequence (opt3) from neuraminidase__InfluenzaA__AFN18562

SEQ ID NO: 150863 - RNA, 1410 nt, Artificial Sequence; identical to SEQ ID NO: 144786
  derived and/or modified CDS sequence (opt3) from neuraminidase__InfluenzaA__AFN18564

SEQ ID NO: 150864 - RNA, 1410 nt, Artificial Sequence; identical to SEQ ID NO: 144786
  derived and/or modified CDS sequence (opt3) from neuraminidase__InfluenzaA__AFN18566

SEQ ID NO: 150865 - RNA, 1410 nt, Artificial Sequence; identical to SEQ ID NO: 144786
  derived and/or modified CDS sequence (opt3) from neuraminidase__InfluenzaA__AFN18572

SEQ ID NO: 150866 - RNA, 1410 nt, Artificial Sequence; identical to SEQ ID NO: 144786
  derived and/or modified CDS sequence (opt3) from neuraminidase__InfluenzaA__AFN18582

SEQ ID NO: 150867 - RNA, 1410 nt, Artificial Sequence; identical to SEQ ID NO: 144786
  derived and/or modified CDS sequence (opt3) from neuraminidase__InfluenzaA__AFN18592

SEQ ID NO: 150868 - RNA, 1410 nt, Artificial Sequence; identical to SEQ ID NO: 150419
  derived and/or modified CDS sequence (opt3) from neuraminidase__InfluenzaA__AFN18602

SEQ ID NO: 150869 - RNA, 1410 nt, Artificial Sequence
  derived and/or modified CDS sequence (opt3) from neuraminidase__InfluenzaA__AFN18612
augaaccccaaucagaagaucauuaccauaggcagcgugugcaugacaaucgggauggccaaccugauucuccaaaucggaaauauuaucuccauauggaucucucacucaauucagcuugguaaccagaaucagaucgagacuuguaaccaaagugucauuacguacgaaaauaacaccuggguuaaucagacauaugugaacaucagcaauacuaacuucgcugcaggccaguccguagugucugucaaacuggccggaaauucgucauugugcccugugagcggaugggcgauauacaguaaggacaacuccauuagaaucggcucuaaaggugauguuuuugugauuagggagccauucaucagcuguuccccguuagaaugccggaccuuuuuccugacacagggggcucuacucaaugacaagcauucaaacggaaccaucaaagaucgcagucccuaucgaacucugaugagcuguccuauuggcgaggucccaucucccuacaacucccguuuugaaucaguggccuggagcgcaagugccugccacgacggcauaaauuggcuuacaaucgggauuucuggaccugauaacggugcuguagcaguucugaaguauaauggcaucauaaccgacacgauuaaguccuggagaaacaauaucuugaggacucaagagagcgagugugccugcgugaacgggucguguuucaccgucaugacagauggaccaucugacggccaggcuuccuacaaaaucuuucggauugaaaaggguaaaaucauuaagucaguggagaugaaugcccccaacuaucauuacgaagagugcaguuguuacccugauagcuccgagauaacuugcgugugccgcgacaauuggcacgggucuaacagaccaugggucagcuucaaucagaaccucgaauaucagaucggauacauuuguucaggcaucuuuggcgauaauccgaggcccaacgacaaaaccgggaguugcggaccuguuuccagcaauggugcgaacggcgugaagggguucucuuuuaaguauggaaacggcguauggaucggucggacaaaaucaauuaguagccgcaauggguucgagaugauaugggauccaaacggcuggaccggaacggacaauaacuuuuccaucaagcaagacauugugggcaucaaugaauggucuggguacucggggagcuucguccagcaucccgagcugacuggucuggauuguauucgaccuugcuucuggguggaacucaucagaggcaggccaaaagagaacacaauauggaccuccgggucaaguaucucuuuuuguggaguuaauagcgacacugugggcugguccuggcccgauggugcagaguuaccguucacaauugacaaguga

SEQ ID NO: 150870 - RNA, 1410 nt, Artificial Sequence; identical to SEQ ID NO: 144786
  derived and/or modified CDS sequence (opt3) from neuraminidase__InfluenzaA__AFN18618

SEQ ID NO: 150871 - RNA, 1410 nt, Artificial Sequence; identical to SEQ ID NO: 145612
  derived and/or modified CDS sequence (opt3) from neuraminidase__InfluenzaA__AFN18624

SEQ ID NO: 150872 - RNA, 1410 nt, Artificial Sequence
  derived and/or modified CDS sequence (opt3) from neuraminidase__InfluenzaA__AFN18630
augaaccccaaucagaagaucauuaccauaggcagcgugugcaugacaaucgggauggccaaccugauucuccaaaucggaaauauuaucuccauauggaucucucacucaauucagcuugguaaccagaaucagaucgagacuuguaaccaaagugucauuacguacgaaaauaacaccuggguuaaucagacauaugugaacaucagcaauacuaacuucgcugcaggccaguccguagugucugucaaacuggccggaaauucgucauugugcccugugagcggaugggcgauauacaguaaggacaacuccauuagaaucggcucuaaaggugauguuuuugugauuagggagccauucaucagcuguuccccguuagaaugccggaccuuuuuccugacacagggggcucuacucaaugacaagcauucaaacggaaccaucaaagaucgcagucccuaucgaacucugaugagcuguccuauuggcgaggucccaucucccuacaacucccguuuugaaucaguggccuggagcgcaagugccugccacgacggcauaaauuggcuuacaaucgggauuucuggaccugauaacggugcuguagcaguucugaaguauaauggcaucauaaccgacacgauuaaguccuggagaaacaauaucuugaggacucaagagagcgagugugccugcgugaacgggucguguuucaccgucaugacagauggaccaucugacggccaggcuuccuacaaaaucuuucggauugaaaaggguaaaaucgugaagucaguggagaugaaugcccccaacuaucauuacgaagagugcaguuguuacccugauagcuccgagauuacuugcgucugccgcgacaauuggcacgggucuaacagaccauggguuagcuucaaucagaaccucgaauaucagauaggauacaucuguucaggcauuuuuggcgauaauccgaggcccaacgacaaaaccgggaguugcggaccuguguccagcaauggugcgaacggcguaaagggguucucuuuuaaguauggaaacggcguguggaucggucggacaaaaucaaucaguagccgcaauggguucgagaugauuugggauccaaacggcuggaccggaacggacaauaacuuuuccauaaagcaagacaucgucggcauuaaugaauggucuggguacucggggagcuucgugcagcaucccgagcugacuggucugggcuguauccgaccuugcuucuggguugaacucauuagagggaggccaaaagagaacacaaucuggaccuccggaucaaguauaucuuuuuguggcgugaauagcgauacugucgguugguccuggcccgacggggcagaguuaccguucacaaucgauaaguga

SEQ ID NO: 150873 - RNA, 1410 nt, Artificial Sequence
  derived and/or modified CDS sequence (opt3) from neuraminidase__InfluenzaA__AFN18636
augaaccccaaucagaagaucauuaccauaggcagcgugugcaugacaaucgggauggccaaccugauucuccaaaucggaaauauuaucuccauauggaucucucacucaauucagcuugguaaccagaaucagaucgagacuuguaaccaaagugucauuacguacgaaaauaacaccuggguuaaucagacauaugugaacaucagcaauacuaacuucgcugcaggccaguccguagugucugucaaacuggccggaaauucgucauugugcccugugagcggaugggcgauauacaguaaggacaacuccauuagaaucggcucuaaaggugauguuuuugugauuagggagccauucaucagcuguuccccguuagaaugccggaccuuuuuccugacacagggggcucuacucaaugacaagcauucaaacggaaccaucaaagaucgcagucccuaucgaacucugaugagcuguccuauuggcgaggucccaucucccuacaacucccguuuugaaucaguggccuggagcgcaagugccugccacgacggcauaaauuggcuuacaaucgggauuucuggaccugauaacggugcuguagcaguucugaaguauaauggcaucauaaccgacacgauuaaguccuggagaaacaauaucuugaggacucaagagagcgagugugccugcgugaacgggucguguuucaccgucaugacagauggaccaucugacggccaggcuuccuacaaaaucuuucggauugaaaaggguaaaaucgugaagucaguggagaugaaugcccccaacuaucauuacgaagagugcaguuguuacccugauagcuccgagauuacuugcgucugccgcgacaauuggcacgggucuaacagaccauggguuagcuucaaucagaaccucgaauauaggauaggauacaucuguucaggcauuuuuggcgauaauccgcggcccaacgacaaaaccgggaguugcggaccuguguccagcaauggugcgaacggcguaaagggguucucuuuuaaguauggaaacggcguguggaucggucgcacaaaaucaaucaguagccgaaauggguucgagaugauuugggauccaaacggcuggaccggaacggacaauaacuuuuccauaaagcaggacaucgucggcauuaaugaauggucuggguacucggggagcuucgugcaacaucccgagcugacuggucuggauuguaucagaccuugcuucuggguugaacucauuaggggccgguccaaagagaacacaaucuggaccucagggaguucuauauccuuuuguggagugaauagcgacacugucggcuggucauggccagauggugcagaguuacccuucacaaucgacaaguga

SEQ ID NO: 150874 - RNA, 1410 nt, Artificial Sequence; identical to SEQ ID NO: 144786
  derived and/or modified CDS sequence (opt3) from neuraminidase__InfluenzaA__AFN18646

SEQ ID NO: 150875 - RNA, 1410 nt, Artificial Sequence; identical to SEQ ID NO: 144786
  derived and/or modified CDS sequence (opt3) from neuraminidase__InfluenzaA__AFN18656

SEQ ID NO: 150876 - RNA, 1410 nt, Artificial Sequence
  derived and/or modified CDS sequence (opt3) from neuraminidase__InfluenzaA__AFN18666
augaaccccaaucagaagaucauuaccauaggcagcgugugcaugacaaucgggauggccaaccugauucuccaaaucggaaauauuaucuccauauggaucucucacucaauucagcuugguaaccagaaucagaucgagacuuguaaccaaagugucauuacguacgaaaauaacaccuggguuaaucagacauaugugaacaucagcaauacuaacuucgcugcaggccaguccguagugucugucaaacuggccggaaauucgucauugugcccugugagcggaugggcgauauacaguaaggacaacuccauuagaaucggcucuaaaggugauguuuuugugauuagggagccauucaucagcuguuccccguuagaaugccggaccuuuuuccugacacagggggcucuacucaaugacaagcauucaaacggaaccaucaaagaucgcagucccuaucgaacucugaugagcuguccuauuggcgaggucccaucucccuacaacucccguuuugaaucaguggccuggagcgcaagugccugccacgacggcauaaauuggcuuacaaucgggauuucuggaccugauaacggugcuguagcaguucugaaguauaauggcaucauaaccgacacgauuaaguccuggagaaacaauaucuugaggacucaagagagcgagugugccugcgugaacgggucguguuucaccgucaugacagauggaccaucugacggccaggcuuccuacaaaaucuuucggauugaaaaggguaaaaucgugaagucaguggagaugaaugcccccaacuaucauuacgaagagugcaguuguuacccugauagcuccgagauuacuugcgucugccgcgacaauuggcacgggucuaacagaccauggguuagcuucaaucagaaccucgaauaucagauaggauacaucuguucaggcauuuuuggcgauaauccgaggcccaacgacaaaaccgggaguugcggaccuguguccagcaauggugcgaacggcguaaagggguucucuuuuaaguauggaaacggcguguggaucggucggacaaaaucaaucaguagccgcaauggguucgagaugauuugggauccaaacggcuggaccggaacggacaauaacuuuuccauaaagcaagacaucgucggcauuaaugaauggucuggguacucggggagcuucgugcagcaucccgagcugacuggucuggauuguauccgaccuugcuucuggguugaacucauuagaggcaggccaaaagagaacacaaucuggaccuccgggucaaguauaucuuuuuguggagugaauagcgacacugucggcugguccuggcccgauggugcagaguuaccguucaucauugacaaguga

SEQ ID NO: 150877 - RNA, 1410 nt, Artificial Sequence
  derived and/or modified CDS sequence (opt3) from neuraminidase__InfluenzaA__AFN18676
augaaccccaaucagaagaucauuaccauaggcagcgugugcaugacaaucgggauggccaaccugauucuccaaaucggaaauauuaucuccauauggaucucucacucaauucagcuugguaaccagaaucagaucgagacuuguaaccaaagugucauuacguacgaaaauaacaccuggguuaaucagacauaugugaacaucagcaauacuaacuucgcugcaggccaguccguagugucugucaaacuggccggaaauucgucauugugcccugugagcgggugggcgauauacaguaaggacaacuccauuagaaucggcucuaaaggugauguuuuugugauuagggagccauucaucagcuguuccccguuagaaugccggaccuuuuuccugacacagggggcucuacucaaugacaagcauucaaacggaaccaucaaagaucgcagucccuaucgaacucugaugagcuguccuauuggcgaggucccaucucccuacaacucccguuuugaaucaguggccuggagcgcaagugccugccacgacggcauaaauuggcuuacaaucgggauuucuggaccugauaacggugcuguagcaguucugaaguauaauggcaucauaaccgacacgauuaaguccuggagaaacaauaucuugaggacucaagagagcgagugugccugcgugaacgggucguguuucaccgucaugacagauggaccaucugacggccaggcuuccuacaaaaucuuucggauugaaaaggguaaaaucgugaagucaguggagaugaaugcccccaacuaucauuacgaagagugcaguuguuacccugauagcuccgagauuacuugcgucugccgcgacaauuggcacgggucuaacagaccauggguuagcuucaaucagaaccucgaauauaggauaggauacaucuguucaggcauuuuuggcgauaauccgcggcccaacgacaaaaccgggaguugcggaccuguguccagcaauggugcgaacggcguaaagggguucucuuuuaaguauggaaacggcguguggaucggucgcacaaaaucaaucaguagccgaaauggguucgagaugauuugggauccaaacggcuggaccgaaacggacaauaacuuuuccauaaagcaggacaucgucggaauuaaugaguggucuggcuacucggggagcuucgugcaacaucccgaacugacuggacuggauuguaucagaccuugcuucuggguugagcucauuaggggucggccaaaagagaacacaaucuggaccuccggcucaaguauaucuuuuuguggggugaauagcgacacugucggaugguccuggcccgauggcgcagaauuaccguucacaaucgacaaguga

SEQ ID NO: 150878 - RNA, 1410 nt, Artificial Sequence
  derived and/or modified CDS sequence (opt3) from neuraminidase__InfluenzaA__AFN18686
augaaccccaaucagaagaucauuaccauaggcagcgugugcaugacaaucgggauggccaaccugauucuccaaaucggaaauauuaucuccauauggaucucucacucaauucagcuugguaaccagaaucagaucgagacuuguaaccaaagugucauuacguacgaaaauaacaccuggguuaaucagacauaugugaacaucagcuccacuaauuucgcugcaggccagucuguagugucggucaaacuggccgggaacagcagcuugugcccugugaguggaugggcgauauacuccaaggacaauucuauuagaaucggcagcaaaggugauguuuuugugauuagggagccauucaucuccuguucaccguuagaaugccggaccuuuuuccugacacagggggcucuacucaacgacaagcauaguaauggaaccaucaaagaucgcagccccuaucgaacucugaugucuuguccuauuggcgaggucccaucccccuacaacucacguuuugaaagcguggccuggagugcaucugccugccacgacggcauaaacuggcuuacaaucgggauuuccggaccugauaauggugcuguagcaguucugaaguauaacggcaucauaaccgacacgauuaagagcuggagaaauaacaucuugaggacucaagagucggagugugccugcgugaaugggucuuguuucacccucaugacagauggaccauccgacggccaggcuucauacaaaaucuuucggauugaaaaggguaaaaucgucaagaguguggagaugaacgcccccaauuaucauuacgaagagugcagcuguuacccugauuccucugagauuacuugcgugugccgcgacaacuggcacgggagcaauagaccaugggucucauucaaccagaaucuggaauaucagauaggauacaucuguaguggcauuuuuggcgauaacccgaggcccaaugacaaaaccggguccugcggaccuguuagcucuaacggugcgaauggcgugaagggguucucauuuaaguauggaaacggcguauggaucggucggacaaaaaguaucagcucccgcaacggguucgagaugauuugggauccaaauggcuggaccggaacggacaacaauuuuucuauaaagcaagacaucgugggcauuaacgaauggucgggguacagcggauccuucguccagcaucccgagcugacuggucucgauuguauccgaccuugcuucuggguggaauuaauuagaggcaggccaaaagagaauacaaucuggaccucagggaguucuauaucauuuuguggaguuaacuccgacacugugggcuggucauggcccgauggugcagagcugccguucacaaucgacaaguga

SEQ ID NO: 150879 - RNA, 1410 nt, Artificial Sequence; identical to SEQ ID NO: 144786
  derived and/or modified CDS sequence (opt3) from neuraminidase__InfluenzaA__AFN18696

SEQ ID NO: 150880 - RNA, 1410 nt, Artificial Sequence; identical to SEQ ID NO: 147373
  derived and/or modified CDS sequence (opt3) from neuraminidase__InfluenzaA__AFN18706

SEQ ID NO: 150881 - RNA, 1410 nt, Artificial Sequence; identical to SEQ ID NO: 144786
  derived and/or modified CDS sequence (opt3) from neuraminidase__InfluenzaA__AFN18716

SEQ ID NO: 150882 - RNA, 1410 nt, Artificial Sequence; identical to SEQ ID NO: 144786
  derived and/or modified CDS sequence (opt3) from neuraminidase__InfluenzaA__AFN18727

SEQ ID NO: 150883 - RNA, 1410 nt, Artificial Sequence
  derived and/or modified CDS sequence (opt3) from neuraminidase__InfluenzaA__AFN18737
augaaccccaaucagaagaucauuaccauaggcagcgugugcaugacaaucgggauggccaaccugauucuccaaaucggaaauauuaucuccauauggaucucucacucaauucagcuugguaaccagaaucagaucgagacuuguaaccaaagugucauuacguacgaaaauaacaccuggguuaaucagacauaugugaacaucagcaauacuaacuucgcugcaggccaguccguagugucugucaaacuggccggaaauucgucauugugcccugugagcggaugggcgauauacaguaaggacaacuccauuagaaucggcucuaaaggugauguuuuugugauuagggagccauucaucagcuguuccccguuagaaugccggaccuuuuuccugacacagggggcucuacucaaugacaagcauucaaacggaaccaucaaagaucgcagucccuaucgaacucugaugagcuguccuauuggcgaggucccaucucccuacaacucccguuuugaaucaguggccuggagcgcaagugccugccacgacggcauaaauuggcuuacaaucgggauuucuggaccugauaacggugcuguagcaguucugaaguauaauggcaucauaaccgacacgauuaaguccuggagaaacaauaucuugaggacucaagagagcgagugugccugcgugaacgggucguguuucaccgucaugacagauggaccaucugacggccaggcuuccuacaaaaucuuucggauugaaaaggguaaaaucgugaagucaguggagaugaaugcccccaacuaucauuacgaagagugcaguuguuacccugauagcuccgagauuacuugcgucugccgcgacaauuggcacgggucuaacagaccauggguuagcuucaaucagaaccucgaauaucagauaggauacaucuguucaggcauuuuuggcgauaauccgaggcccaacgacaaaaccgggaguugcggaccuguguccagcaauggugcgaacggcguaaagggguucucuuuuaaguauggaaacggcguguggaucggucggacaaaaucaaucaguagccgcaauggguucgagauggucugggauccaaacggcuggaccggaacggacaauaacuuuuccauuaagcaagacauagugggcaucaaugaauggucuggguacucggggagcuucguucagcaucccgagcugacuggucuggauuguauucgaccuugcuucuggguggaacucaucagaggcaggccaaaagagaacacaauuuggaccuccgggucaaguaucucuuuuuguggagucaauagcgacacugugggcugguccuggcccgauggugcagaguuaccguucacaauagacaaguga

SEQ ID NO: 150884 - RNA, 1410 nt, Artificial Sequence; identical to SEQ ID NO: 144786
  derived and/or modified CDS sequence (opt3) from neuraminidase__InfluenzaA__AFN18743

SEQ ID NO: 150885 - RNA, 1410 nt, Artificial Sequence; identical to SEQ ID NO: 144786
  derived and/or modified CDS sequence (opt3) from neuraminidase__InfluenzaA__AFN18749

SEQ ID NO: 150886 - RNA, 1410 nt, Artificial Sequence; identical to SEQ ID NO: 144786
  derived and/or modified CDS sequence (opt3) from neuraminidase__InfluenzaA__AFN18759

SEQ ID NO: 150887 - RNA, 1410 nt, Artificial Sequence
  derived and/or modified CDS sequence (opt3) from neuraminidase__InfluenzaA__AFN18769
augaaccccaaucagaagaucauuaccauaggcagcgugugcaugacaaucgggauggccaaccugauucuccaaaucggaaauauuaucuccauauggaucucucacucaauucagcuugguaaccagaaucagaucgagacuuguaaccaaagugucauuacguacgaaaauaacaccuggguuaaucagacauaugugaacaucagcaauacuaacuucgcugcaggccaguccguagugucugucaaacuggccggaaauucgucauugugcccugugagcgggugggcgauauacaguaaggacaacuccauuagaaucggcucuaaaggugauguuuuugugauuagggagccauucaucagcuguuccccguuagaaugccggaccuuuuuccugacacagggggcucuacucaaugacaagcauucaaacggaaccaucaaagaucgcagucccuaucgaacucugaugagcuguccuauuggcgaggucccaucucccuacaacucccguuuugaaucaguggccuggagcgcaagugccugccacgacggcauaaauuggcuuacaaucgggauuucuggaccugauaacggugcuguagcaguucugaaguauaauggcaucauaaccgacacgauuaaguccuggagaaacaauaucuugaggacucaagagagcgagugugccugcgugaacgggucguguuucacccucaugacagauggaccaucugacggccaggcuuccuacaaaaucuuucggauugaaaaggguaaaaucgucaagucaguggagaugaaugcccccaacuaucauuacgaagagugcaguuguuacccugauagcaaugagauuacuugcgugugccgcgacaacuggcacggguccaauagaccaugggucucuuucaaccagaaucuggaauaucagauaggauacaucuguagcggcauuuuuggcgauaacccgaggcccaaugacaaaaccgggucaugcggaccuguuaguuccaacggugcgaacggcgugaagggguucagcuuuaaguauggaaauggcguauggaucggucggacaaaaucuaucucaagucgcaacggguucgagaugauuugggauccaaauggcuggaccggaacggacaacaauuuuagcauaaagcaagacaucgugggcauuaacgaaugguccggguacucuggaucguucguccagcaucccgagcugacuggucucgauuguauccgaccuugcuucuggguggaauuaauuagaggcaggccaaaagagaauacaaucuggaccagcggguccucaauaaguuuuuguggaguuaacucugacacugugggcuggagcuggcccgauggugcagagcugccguucacaaucgacaaguga

SEQ ID NO: 150888 - RNA, 1410 nt, Artificial Sequence; identical to SEQ ID NO: 146688
  derived and/or modified CDS sequence (opt3) from neuraminidase__InfluenzaA__AFN18775

SEQ ID NO: 150889 - RNA, 1410 nt, Artificial Sequence; identical to SEQ ID NO: 144786
  derived and/or modified CDS sequence (opt3) from neuraminidase__InfluenzaA__AFN18777

SEQ ID NO: 150890 - RNA, 1410 nt, Artificial Sequence; identical to SEQ ID NO: 144786
  derived and/or modified CDS sequence (opt3) from neuraminidase__InfluenzaA__AFN18779

SEQ ID NO: 150891 - RNA, 1410 nt, Artificial Sequence
  derived and/or modified CDS sequence (opt3) from neuraminidase__InfluenzaA__AFN18785
augaaccccaaucagaagaucauuaccauaggcagcgugugcaugacaaucgggauggccaaccugauucuccaaaucggaaauauuaucuccauauggaucucucacucaauucagcuugguaaccagaaucagaucgagacuuguaaccaaagugucauuacguacgaaaauaacaccuggguuaaucagacauaugugaacaucagcaauacuaacuucgcugcaggccaguccguagugucugucaaacuggccggaaauucgucauugugcccugugagcggaugggcgauauacaguaaggacaacuccauuagaaucggcucuaaaggugauguuuuugugauuagggagccauucaucagcuguuccccguuagaaugccggaccuuuuuccugacacagggggcucuacucaaugacaagcauucaaacggaaccaucaaagaucgcagucccuaucgaacucugaugagcuguccuauuggcgaggucccaucucccuacaacucccguuuugaaucaguggccuggagcgcaagugccugccacgacggcauaaauuggcuuacaaucgggauuucuggaccugauaacggugcuguagcaguucugaaguauaauggcaucauaaccgacacgauuaaguccuggagaaacaauaucuugaggacucaagagagcgagugugccugcgugaacgggucguguuucaccgucaugacagauggaccaucugacggccaggcuuccuacaaaaucuuucggauugaaaaggguaaaaucgugaagucaguggagaugaaugcccccaacuaucauuacgaagagugcaguuguuacccugauagcuccgagauuacuugcgucugccgcgacaauuggcacgggucuaacagaccauggguuagcuucaaucagaaccucgaauaucagauaggauacaucuguucaggcauuuuuggcgauaauccgaggcccaacgacaaaaccgggaguugcggaccuguguccagcaauggugcgaacggcguaaagggguucucuuuuaaguauggaaacggcguguggaucggucggacaaaaucaaucaguagccgcaauggguucgagaugauuugggauccaaacggcuggaccggaacggacaauaacuuuuccauacgacaagacaucgucggcauuaaugaauggucuggguacucggggagcuucgugcagcaucccgagcugacuggucuggauuguaucagaccuugcuucuggguugaacucauuaggggccggccaaaggagaacacaaucuggaccuccgggucaaguauaucuuuuuguggagugaauagcgacacugucggcugguccuggcccgauggugcagaguuaccguucacaaucgacaaauga

SEQ ID NO: 150892 - RNA, 1410 nt, Artificial Sequence
  derived and/or modified CDS sequence (opt3) from neuraminidase__InfluenzaA__AFN18791
augaaccccaaucagaagaucauuaccauaggcagcgugugcaugacaaucgggauggccaaccugauucuccaaaucggaaauauuaucuccauauggaucucucacucaauucagcuugguaaccagaaucagaucgagacuuguaaccaaagugucauuacguacgaaaauaacaccuggguuaaucagacauaugugaacaucagcaauacuaacuucgcugcaggccaguccguagugucugucaaacuggccggaaauucgucauugugcccugugagcggaugggcgauauacaguaaggacaacuccauuagaaucggcucuaaaggugauguuuuugugauuagggagccauucaucagcuguuccccguuagaaugccggaccuuuuuccugacacagggggcucuacucaaugacaagcauucaaacggaaccaucaaagaucgcagucccuaucgaacucugaugagcuguccuauuggcgaggucccaucucccuacaacucccguuuugaaucaguggccuggagcgcaagugccugccacgacggcauaaauuggcuuacaaucgggauuucuggaccugauaacggugcuguagcaguucugaaguauaauggcaucauaaccgacacgauuaaguccuggagaaacaauaucuugaggacucaagagagcgagugugccugcgugaacgggucguguuucaccgucaugacagauggaccaucugacggccaggcuuccuacaaaaucuuucggauugaaaaggguaaaaucgugaagucaguggagaugaaugcccccaacuaucauuacgaagagugcaguuguuacccugagagcuccgaaauuacuugcgucugccgcgauaauuggcacgggucuaacagaccauggguuagcuucaaucagaaccucgaguaucagauaggauacaucuguucaggcauuuuuggcgacaauccgaggcccaacgauaaaaccgggaguugcggaccuguguccagcaauggugcgaacggcguaaagggguucucuuuuaaguauggaaacggcguguggaucggucggacaaaaucaaucaguagccgcaauggguucgaaaugauuugggacccaaacggcuggaccggaacggauaauaacuuuuccauaaagcaagacaucgucggcauuaaugaguggucuggguacucggggagcuucgugcagcaucccgaacugacuggucuggacuguauccgaccuugcuucuggguugagcucauuagaggcaggccaaaagagaacacaaucuggaccuccgggucaaguauaucuuuuuguggagugaauagcgauacugucggcugguccuggcccgacggugcagaauuaccguucacaaucgauaaguga

SEQ ID NO: 150893 - RNA, 1410 nt, Artificial Sequence; identical to SEQ ID NO: 144786
  derived and/or modified CDS sequence (opt3) from neuraminidase__InfluenzaA__AFN18801

SEQ ID NO: 150894 - RNA, 1410 nt, Artificial Sequence; identical to SEQ ID NO: 147205
  derived and/or modified CDS sequence (opt3) from neuraminidase__InfluenzaA__AFN18811

SEQ ID NO: 150895 - RNA, 1410 nt, Artificial Sequence; identical to SEQ ID NO: 144786
  derived and/or modified CDS sequence (opt3) from neuraminidase__InfluenzaA__AFN18817

SEQ ID NO: 150896 - RNA, 1410 nt, Artificial Sequence; identical to SEQ ID NO: 144786
  derived and/or modified CDS sequence (opt3) from neuraminidase__InfluenzaA__AFN18819

SEQ ID NO: 150897 - RNA, 1410 nt, Artificial Sequence; identical to SEQ ID NO: 147778
  derived and/or modified CDS sequence (opt3) from neuraminidase__InfluenzaA__AFN18821

SEQ ID NO: 150898 - RNA, 1410 nt, Artificial Sequence; identical to SEQ ID NO: 144786
  derived and/or modified CDS sequence (opt3) from neuraminidase__InfluenzaA__AFN18823

SEQ ID NO: 150899 - RNA, 1410 nt, Artificial Sequence; identical to SEQ ID NO: 144786
  derived and/or modified CDS sequence (opt3) from neuraminidase__InfluenzaA__AFN18825

SEQ ID NO: 150900 - RNA, 1410 nt, Artificial Sequence; identical to SEQ ID NO: 144786
  derived and/or modified CDS sequence (opt3) from neuraminidase__InfluenzaA__AFN18827

SEQ ID NO: 150901 - RNA, 1410 nt, Artificial Sequence; identical to SEQ ID NO: 144786
  derived and/or modified CDS sequence (opt3) from neuraminidase__InfluenzaA__AFN18829

SEQ ID NO: 150902 - RNA, 1410 nt, Artificial Sequence; identical to SEQ ID NO: 144786
  derived and/or modified CDS sequence (opt3) from neuraminidase__InfluenzaA__AFN18831

SEQ ID NO: 150903 - RNA, 1410 nt, Artificial Sequence; identical to SEQ ID NO: 145923
  derived and/or modified CDS sequence (opt3) from neuraminidase__InfluenzaA__AFN18833

SEQ ID NO: 150904 - RNA, 1410 nt, Artificial Sequence; identical to SEQ ID NO: 145961
  derived and/or modified CDS sequence (opt3) from neuraminidase__InfluenzaA__AFN18835

SEQ ID NO: 150905 - RNA, 1410 nt, Artificial Sequence; identical to SEQ ID NO: 144786
  derived and/or modified CDS sequence (opt3) from neuraminidase__InfluenzaA__AFN18841

SEQ ID NO: 150906 - RNA, 1410 nt, Artificial Sequence
  derived and/or modified CDS sequence (opt3) from neuraminidase__InfluenzaA__AFN18851
augaaccccaaucagaagaucauuaccauaggcagcgugugcaugacaaucgggauggccaaccugauucuccaaaucggaaauaugauuuccaucuggauaucucacucaauccagcuugguaaccagaaucagauugagacuuguaaccaaagugucaucacguacgaaaauaacaccuggguuaaucagacauaugugaacauuagcaauacuaacuucgcugcaggccaguccguagugucugucaaacuggccggaaauucgucauugugcccugugagcggaugggcgaucuacaguaaggacaacuccauaagaauuggcucuaaaggugauguuuuugugaucagggagccauucauuagcuguuccccguuagaaugccggaccuuuuuccugacacagggggcucuacucaaugacaagcauucaaacggaaccaucaaagaucgcagucccuaucgaacucugaugagcuguccuaucggcgaggucccaucucccuacaacucccguuuugaaucaguggccuggagcgcaagugccugccacgacggcauuaauuggcuuacaauagggaucucuggaccugauaacggugcuguagcaguucugaaguauaauggcauuaucaccgacacgauaaaguccuggagaaacaauauuuugaggacucaagagagcgagugugccugcgugaacgggucguguuucaccgucaugacagauggaccaucugacggccaggcuuccuacaaaaucuuucggaucgaaaaggguaaaauugugaagucaguggagaugaaugcccccaacuaucauuacgaagagugcaguuguuacccugauagcuccgagaucacuugcgucugccgcgacaauuggcacgggucuaacagaccauggguuagcuucaaucagaaccucgaauaucagauuggauacauauguucaggcaucuuuggcgauaauccgaggcccaacgacaaaaccgggaguugcggaccuguguccagcaauggugcgaacggcguaaagggguucucuuuuaaguauggaaacggcguguggauuggucggacaaaaucaaucaguagccgcaauggguucgagaugaucugggauccaaacggcuggaccggaacggacaauaacuuuuccauuaagcaagacauagucggcaucaaugaauggucuggguacucggggagcuucgugcagcaucccgagcugacuggucuggauuguauucgaccuugcuucuggguugaacucaucagaggcaggccaaaagagaacacaauuuggaccuccgggucaaguaucucuuuuuguggagugaauagcgacacugucggcugguccuggcccgauggugcagaguuaccguucacaauagacaaguga

SEQ ID NO: 150907 - RNA, 1410 nt, Artificial Sequence; identical to SEQ ID NO: 144786
  derived and/or modified CDS sequence (opt3) from neuraminidase__InfluenzaA__AFN18857

SEQ ID NO: 150908 - RNA, 1410 nt, Artificial Sequence
  derived and/or modified CDS sequence (opt3) from neuraminidase__InfluenzaA__AFN18859
augaaccccaaucagaagaucauuaccauaggcagcgugugcaugacaaucgggcuggccaaccucauucuucaaaucggaaauauuaucuccauauggaucucucacucaauucagcuggguaaccagaaucagaucgagacuuguaaccaaagugucauuacguacgaaaauaacaccuggguuaaucagacauaugugaacaucagcaauacuaacuucgcugcaggccaguccguagugucugucaaauuggccggaaauucgucauuaugcccugugagcggaugggcgauauacaguaaggacaacuccauuagaaucggcucuaaaggugauguuuuugugauuagggagccauucaucagcuguuccccgcuggaaugccggaccuuuuuccuaacacagggggcucuccugaaugacaagcauucaaacggaaccaucaaagaucgcagucccuaucgaacucuuaugagcuguccuauuggcgaggucccaucucccuacaacucccguuuugaaucaguggccuggagcgcaagugccugccacgacggcauaaauuggcugacaaucgggauuucuggaccugauaacggugcuguagcaguuuugaaguauaauggcaucauaaccgacacgauuaaguccuggagaaacaauauccucaggacucaagagagcgagugugccugcgugaacgggucguguuucaccgucaugacagauggaccaucugacggccaggcuuccuacaaaaucuuucggauugaaaaggguaaaaucgugaagucaguggagaugaaugcccccaacuaucauuacgaagagugcaguuguuacccugauagcuccgagauuacuugcgucugccgcgacaauuggcacgggucuaacagaccauggguuagcuucaaucagaaccuggaauaucagauaggauacaucuguucaggcauuuuuggcgauaauccgaggcccaacgacaaaaccgggaguugcggaccuguguccagcaauggugcgaacggcguaaagggguucucuuuuaaguauggaaacggcguguggaucggucggacaaaaucaaucaguagccgcaauggguucgagaugauuugggauccaaacggcuggaccggaacggacaauaacuuuuccauaaagcaagacaucgucggcauuaaugaauggucuggguacucggggagcuucgugcagcaucccgagcugacuggucucgauuguauccgaccuugcuucuggguugaauuaauuagaggcaggccaaaagagaacacaaucuggaccuccgggucaaguauaucuuuuuguggagugaauagcgacacugucggcugguccuggcccgauggugcagagcugccguucacaaucgacaaguga

SEQ ID NO: 150909 - RNA, 1410 nt, Artificial Sequence
  derived and/or modified CDS sequence (opt3) from neuraminidase__InfluenzaA__AFN18861
augaaccccaaucagaagaucauuaccauaggcagcgugugcaugacaaucgggauggccaaccugauucuccaaaucggaaauauuaucuccauauggaucucucacucaauucagcuugguaaccagaaucagaucgagacuuguaaccaaagugucauuacguacgaaaauaacaccuggguuaaucagacauaugugaacaucagcaauacuaacuucgcugcaggccaguccguagugucugucaaacuggccgggaauagcucauugugcagcgugaguggaugggcgauauacuccaaggacaacucuauuagaaucggcagcaaaggugauguuuuugugauuagggagccuuucaucuccuguucaccauuagaaugccggaccuuuuuccugacacagggggcucuacucaaugacaagcauaguaacggaaccaucaaagaucgcagcccguaucgaacucugaugucuugucccauuggcgaggucccuuccccauacaacucacguuuugaaagcguggccuggagugcaucugccugccacgacggcauaaauuggcuuacaaucgggauuuccggacccgauaacggugcuguagcaguucugaaguauaauggcaucauaaccgacacgauuaagagcuggagaaacaauaucuugaggacucaagagucggagugugccugcgugaacgggucuuguuucaccgucaugacagauggaccuuccgacggccaggcuucauacaaaaucuuucggauugaaaaggguaaaaucgugaagaguguggagaugaaugccccaaacuaucauuacgaagagugcagcuguuaccccgauuccucugagauuacuugcgucugccgcgacaauuggcacgggagcaacagaccuuggguuucauucaaucagaaccucgaauaucagauaggauacaucuguaguggcauuuuuggcgauaauccaaggccgaacgacaaaaccggguccugcggacccgugagcucuaauggugcgaacggcguaaagggguucucauuuaaguauggaaacggcguguggaucggucggacaaaaaguaucagcucccgcaauggguucgagaugauuugggauccuaacggcuggaccggaacggacaauaacuuuucuauaaagcaagacaucgucggcauuaaugaauggucgggguacagcggauccuucgugcagcauccagagcugacuggucuggauuguauccgacccugcuucuggguugaacucauuagaggcaggccuaaagagaacacaaucuggaccucagggaguucuauaucguuuuguggagucaauuccgacacugugggcuggucauggccagauggugcagaguuacccuucacaaucgacaaguga

SEQ ID NO: 150910 - RNA, 1410 nt, Artificial Sequence; identical to SEQ ID NO: 144786
  derived and/or modified CDS sequence (opt3) from neuraminidase__InfluenzaA__AFN18867

SEQ ID NO: 150911 - RNA, 1410 nt, Artificial Sequence; identical to SEQ ID NO: 146600
  derived and/or modified CDS sequence (opt3) from neuraminidase__InfluenzaA__AFN18877

SEQ ID NO: 150912 - RNA, 1410 nt, Artificial Sequence; identical to SEQ ID NO: 144786
  derived and/or modified CDS sequence (opt3) from neuraminidase__InfluenzaA__AFN18887

SEQ ID NO: 150913 - RNA, 1410 nt, Artificial Sequence; identical to SEQ ID NO: 145804
  derived and/or modified CDS sequence (opt3) from neuraminidase__InfluenzaA__AFN18893

SEQ ID NO: 150914 - RNA, 1410 nt, Artificial Sequence
  derived and/or modified CDS sequence (opt3) from neuraminidase__InfluenzaA__AFN18895
augaaccccaaucagaagaucauuaccauaggcagcgugugcaugacaaucgggauggccaaccugauucuccaaaucggaaauauuaucuccauauggaucucucacucaauucagcuugguaaccagaaucagaucgagacuuguaaccaaagugucauuacguacgaaaauaacaccuggguuaaucagacauaugugaacaucagcaauacuaacuucgcugcaggccaguccguagugucugucaaacuggccggaaauucgucauugugcccugugagcggaugggcgauauacaguaaggacaacuccauuagaaucggcucuaaaggugauguuuuugugauuagggagccauucaucagcuguuccccguuagaaugccggaccuuuuuccugacacagggggcucuacucaaugacaagcauucaaacggaaccaucaaagaucgcagucccuaucgaacucugaugagcuguccuauuggcgaggucccaucucccuacaacucccguuuugaaucaguggccuggagcgcaagugccugccacgacggcauaaauuggcuuacaaucgggauuucuggaccugauaacggugcuguagcaguucugaaguauaauggcaucauaaccgacacgauuaaguccuggagaaacaauaucuugaggacucaagagagcgagugugccugcgugaacgggucguguuucaccgucaugacagauggaccaucugacggccaggcuuccuacaaaaucuuucggauugaaaaggguaaaaucgugaagucaguggagaugaaugcccccaacuaucauuacgaagagugcaguuguuacccugauagcuccgagauuacuugcgucugccgcgacaauuggcacgggucuaacagaccauggguuagcuucaaucagaaccucgaauauaggauaggauacaucuguucaggcauuuuuggcgauaauccgcggcccaacgacaaaaccgggaguugcggaccuguguccagcaauggugcgaacggcguaaagggguucucuuuuaaguauggaaacggcguguggaucggucgcacaaaaucaaucaguagccgaaauggguucgagaugauuugggauccaaacggcuggaccggaacggacaauaacuuuuccauaaagcaggacaucgucggcauuaaugaauggucuggguacucggggagcuucgugcaacaucccgagcugacuggucuggauuguaucagaccuugcuucuggguugaacucauuaaaggcaggccaaaggagaacacaaucuggaccuccgggucaaguauaucuuuuuguggagugaauagcgacacugucggcugguccuggcccgauggugcagaguuaccguucacaaucgacaaauga

SEQ ID NO: 150915 - RNA, 1410 nt, Artificial Sequence; identical to SEQ ID NO: 146688
  derived and/or modified CDS sequence (opt3) from neuraminidase__InfluenzaA__AFN18905

SEQ ID NO: 150916 - RNA, 1410 nt, Artificial Sequence; identical to SEQ ID NO: 146600
  derived and/or modified CDS sequence (opt3) from neuraminidase__InfluenzaA__AFN18913

SEQ ID NO: 150917 - RNA, 1410 nt, Artificial Sequence
  derived and/or modified CDS sequence (opt3) from neuraminidase__InfluenzaA__AFN18919
augaaccccaaucagaagaucauuaccauaggcagcgugugcaugacaaucgggauggccaaccugauucuccaaaucggaaauauuaucuccauauggaucucucacucaauucagcuugguaaccagaaucagaucgagacuuguaaccaaagugucauuacguacgaaaauaacaccuggguuaaucagacauaugugaacaucagcaauacuaacuucgcugcaggccaguccguagugucugucaaacuggccggaaauucgucauugugcccugugagcggaugggcgauauacaguaaggacaacuccauuagaaucggcucuaaaggugauguuuuugugauuagggagccauucaucagcuguuccccguuagaaugccggaccuuuuuccugacacagggggcucuacucaaugacaagcauucaaacggaaccaucaaagaucgcagucccuaucgaacucugaugagcuguccuauuggcgaggucccaucucccuacaacucccguuuugaaucaguggccuggagcgcaagugccugccacgacggcauaaauuggcuuacaaucgggauuucuggaccugauaacggugcuguagcaguucugaaguauaauggcaucauaaccgacacgauuaaguccuggagaaacaauaucuugaggacucaagagagcgagugugccugcgugaacgggucguguuucaccgucaugacagauggaccaucugacggccaggcuuccuacaaaaucuuucggauugaaaaggguaaaaucgugaagucaguggagaugaaugcccccaacuaucauuacgaagagugcaguuguuacccugauagcuccgagauuacuugcgucugccgcgacaauuggcacgggucuaacagaccauggguuagcuucaaucagaaccucgaauaucagauaggauacaucuguucaggcauuuuuggcgauaauccgaggcccaacgacaaaaccgggaguugcggaccuguguccagcaauggugagaacggcguaaagggguucucuuuuaaguauggaaacggcguguggaucggucggacaaaaucaaucaguagccgcaauggguucgaaaugauuugggauccaaacggcuggaccggaacggacaauaacuuuuccauaaagcaagacaucgucggcauuaaugaguggucuggguacucggggagcuucgugcagcaucccgaacugacuggucuggauuguauccgaccuugcuucuggguugagcucauuagaggcaggccaaaagagaacacaaucuggaccuccgggucaaguauaucuuuuuguggagugaauagcgacacugucggcugguccuggcccgauggugcggaauuaccguucacaaucgacaaguga

SEQ ID NO: 150918 - RNA, 1410 nt, Artificial Sequence
  derived and/or modified CDS sequence (opt3) from neuraminidase__InfluenzaA__AFN18929
augaaccccaaucagaagaucauuaccauaggcagcgugugcaugacaaucgggauggccaaccugauucuccaaaucggaaauauuaucuccauauggaucucucacucaauucagcuugguaaccagaaucagaucgagacuuguaaccaaagugucauuacguacgaaaauaacaccuggguuaaucagacauaugugaacaucagcaauacuaacuucgcugcaggccaguccguagugucugucaaacuggccggaaauucgucauugugcccugugagcggaugggcgauauacaguaaggacaacuccauuagaaucggcucuaaaggugauguuuuugugauuagggagccauucaucagcuguuccccguuagaaugccggaccuuuuuccugacacagggggcucuacucaaugacaagcauucaaacggaaccaucaaagaucgcagucccuaucgaacucugaugagcuguccuauuggcgaggucccaucucccuacaacucccguuuugaaucaguggccuggagcgcaagugccugccacgacggcauaaauuggcuuacaaucgggauuucuggaccugauaacggugcuguagcaguucugaaguauaauggcaucauaaccgacacgauuaaguccuggagaaacaauaucuugaggacucaagagagcgagugugccugcgugaacgggucguguuucacccucaugacagauggaccaucugacggccaggcuuccuacaaaaucuuucggauugaaaaggguaaaaucgucaagucaguggagaugaaugcccccaacuaucauuacgaagagugcaguuguuacccugauagcuccgagauuacuugcgugugccgcgacaauuggcacgggucuaacagaccaugggucagcuucaaucagaaccuggaauaucagauaggauacaucuguucaggcauuuuuggcgauaauccgaggcccaacgacaaaaccgggaguugcggaccuguuuccagcaauggugcgaacggcgugaagggguucucuuuuaaguauggaaacggcguauggaucggucggacaaaaucaaucaguagccgcaauggguucgagaugauuugggauccaaacggcuggaccggaacggacaauaacuuuuccauaaagcaagacaucgugggcauuaaugaauggucuggguacucggggagcuucguccagcaucccgagcugacuggucucgauuguauccgaccuugcuucuggguggaauuaauuagaggcaggccaaaagagaacacaaucuggaccuccgggucaaguauaucuuuuuguggaguuaauagcgacacugugggcugguccuggucagauggugcagagcugcccuucacaaucgacaaguga

SEQ ID NO: 150919 - RNA, 1410 nt, Artificial Sequence; identical to SEQ ID NO: 144786
  derived and/or modified CDS sequence (opt3) from neuraminidase__InfluenzaA__AFN18939

SEQ ID NO: 150920 - RNA, 1410 nt, Artificial Sequence; identical to SEQ ID NO: 144786
  derived and/or modified CDS sequence (opt3) from neuraminidase__InfluenzaA__AFN18953

SEQ ID NO: 150921 - RNA, 1410 nt, Artificial Sequence; identical to SEQ ID NO: 144786
  derived and/or modified CDS sequence (opt3) from neuraminidase__InfluenzaA__AFN18959

SEQ ID NO: 150922 - RNA, 1410 nt, Artificial Sequence; identical to SEQ ID NO: 144786
  derived and/or modified CDS sequence (opt3) from neuraminidase__InfluenzaA__AFN18965

SEQ ID NO: 150923 - RNA, 1410 nt, Artificial Sequence; identical to SEQ ID NO: 148856
  derived and/or modified CDS sequence (opt3) from neuraminidase__InfluenzaA__AFN18975

SEQ ID NO: 150924 - RNA, 1410 nt, Artificial Sequence; identical to SEQ ID NO: 144786
  derived and/or modified CDS sequence (opt3) from neuraminidase__InfluenzaA__AFN18981

SEQ ID NO: 150925 - RNA, 1410 nt, Artificial Sequence
  derived and/or modified CDS sequence (opt3) from neuraminidase__InfluenzaA__AFN18983
augaaccccaaucagaagaucauuaccauaggcagcgugugcaugacaaucgggauggccaaccugauucuccaaaucggaaauauuaucuccauauggaucucucacucaauucagcuugguaaccagaaucagaucgagacuuguaaccaaagugucauuacguacgaaaauaacaccuggguuaaucagacauaugugaacaucagcaauacuaacuucgcugcaggccaguccguagugucugucaaacuggccggaaauucgucauugugcccugugagcgggugggcgauauacaguaaggacaacuccauuagaaucggcucuaaaggugauguuuuugugauuagggagccauucaucagcuguuccccguuagaaugccggaccuuuuuccugacacagggggcucuacucaaugacaagcauucaaacggaaccaucaaagaucgcagucccuaucgaacucugaugagcuguccuauuggcgaggucccaucucccuacaacucccguuuugaaucaguggccuggagcgcaagugccugccacgacggcauaaauuggcuuacaaucgggauuucuggaccugauaacggugcuguagcaguucugaaguauaauggcaucauaaccgacacgauuaaguccuggagaaacaauaucuugaggacucaagagagcgagugugccugcgugaacgggucguguuucaccgucaugacagauggaccaucugacggccaggcuuccuacaaaaucuuucggauugaaaaggguaaaaucgugaagucaguggagaugaaugccaguaacuaucauuacgaagagugcagcuguuaccccgauuccucugagauuacuugcgucugccgcgacaauuggcacgggagcaacagaccuuggguuucauucaaucagaaccucgaauaucagauaggauacaucuguaguggcauuuuuggcgauaauccaaggccgaacgacaaaaccggguccugcggacccgugagcucuaauggugcgaacggcguaaagggguucucauuuaaguauggaaacggcguguggaucggucggacaaaaaguaucagcucccgcaauggguucgagaugauuugggauccuaacggcuggaccggaacggacaauaacuuuucuauaaagcaagacaucgucggcauuaaugaauggucgggguacagcggauccuucgugcagcauccagagcugacuggucuggauuguauccgacccugcuucuggguugaacucauuagaggcaggccuaaagagaacacaaucuggaccucagggaguauaaucucuuuuuguggagugaauagcgacacugucggcugguccuggccagauggugcagaguuacccuucacaauugacaaguga

SEQ ID NO: 150926 - RNA, 1410 nt, Artificial Sequence; identical to SEQ ID NO: 144786
  derived and/or modified CDS sequence (opt3) from neuraminidase__InfluenzaA__AFN18985

SEQ ID NO: 150927 - RNA, 1410 nt, Artificial Sequence
  derived and/or modified CDS sequence (opt3) from neuraminidase__InfluenzaA__AFN18987
augaaccccaaucagaagaucauuaccauaggcagcgugugcaugacaaucgggauggccaaccugauucuccaaaucggaaauauuaucuccauauggaucucucacucaauucagcuugguaaccagaaucagaucgagacuuguaaccaaagugucauuacguacgaaaauaacaccuggguuaaucagacauaugugaacaucagcaauacuaacuucgcugcaggccaguccguagugucugucaaacuggccggaaauucgucauugugcccugugagcggaugggcgauauacaguaaggacaacuccauuagaaucggcucuaaaggugauguuuuugugauuagggagccauucaucagcuguuccccguuagaaugccggaccuuuuuccugacacagggggcucuacucaaugacaagcauucaaacggaaccaucaaagaucgcagucccuaucgaacucugaugagcuguccuauuggcgaggucccaucucccuacaacucccguuuugaaucaguggccuggagcgcaagugccugccacgacggcauaaauuggcuuacaaucgggauuucuggaccugauaacggugcuguagcaguucugaaguauaauggcaucauaaccgacacgauuaaguccuggagaaacaauaucuugaggacucaagagagcgagugugccugcgugaacgggucguguuucaccgucaugacagauggaccaucugacggccaggcuuccuacaaaaucuuucggauugaaaaggguaaaaucgugaagucaguggagaugaaugcccccaacuaucauuacgaagagugcaguuguuacccugauagcuccgagauuacuugcgucugccgcgacaauuggcacgggucuaacagaccauggguuagcuucaaucagaaccucgaauaucagauaggauacaucuguucaggcauuuuuggcgauaauccgaggcccaucgacaaaaccgggaguugcggaccuguguccagcaacggugcgaauggcguaaagggguucucuuuuaaguauggaaacggcguguggaucggucggacaaaaucaauuaguagccgcaacggguucgagaugauaugggauccaaauggcuggaccggaacggacaacaauuuuuccaucaagcaagacauugucggcaucaacgaauggucuggguacucggggagcuucgugcagcaucccgagcugacuggucuggauuguauucgaccuugcuucuggguugaacucaucagaggcaggccaaaagagaauacaauauggaccuccgggucaaguaucucuuuuuguggagugaacagcgacacugucggcugguccuggcccgauggugcagaguuaccguucacaauugacaaguga

SEQ ID NO: 150928 - RNA, 1410 nt, Artificial Sequence; identical to SEQ ID NO: 144786
  derived and/or modified CDS sequence (opt3) from neuraminidase__InfluenzaA__AFN18989

SEQ ID NO: 150929 - RNA, 1410 nt, Artificial Sequence; identical to SEQ ID NO: 144786
  derived and/or modified CDS sequence (opt3) from neuraminidase__InfluenzaA__AFN18995

SEQ ID NO: 150930 - RNA, 1410 nt, Artificial Sequence; identical to SEQ ID NO: 150908
  derived and/or modified CDS sequence (opt3) from neuraminidase__InfluenzaA__AFN19001

SEQ ID NO: 150931 - RNA, 1410 nt, Artificial Sequence; identical to SEQ ID NO: 144786
  derived and/or modified CDS sequence (opt3) from neuraminidase__InfluenzaA__AFN19007

SEQ ID NO: 150932 - RNA, 1410 nt, Artificial Sequence; identical to SEQ ID NO: 144786
  derived and/or modified CDS sequence (opt3) from neuraminidase__InfluenzaA__AFN19024

SEQ ID NO: 150933 - RNA, 1410 nt, Artificial Sequence
  derived and/or modified CDS sequence (opt3) from neuraminidase__InfluenzaA__AFN19025
augaaccccaaucagaagaucauuaccauaggcagcgugugcaugacaaucgggauggccaaccugauucuccaaaucggaaauauuaucuccauauggaucucucacucaauucagcuugguaaccagaaucagaucgagacuuguaaccaaagugucauuacguacgaaaauaacaccuggguuaaucagacauaugugaacaucagcaauacuaacuucgcugcaggccaguccguagugucugucaaacuggccggaaauucgucauugugcccugugagcggaugggcgauauacaguaaggacaacuccauuagaaucggcucuaaaggugauguuuuugugauuagggagccauucaucagcuguuccccguuagaaugccggaccuuuuuccugacacagggggcucuacucaaugacaagcauucaaacggaaccaucaaagaucgcagucccuaucgaacucugaugagcuguccuauuggcgaggucccaucucccuacaacucccguuuugaaucaguggccuggagcgcaagugccugccacgacggcauaaauuggcuuacaaucgggauuucuggaccugauaacggugcuguagcaguucugaaguauaauggcaucauaaccgacacgauuaaguccuggagaaacaaaaucuugaggacucaagagagcgagugugccugcgugaaugggucguguuucaccgucaugacagauggaccaucugacggccaggcuuccuacaagaucuuucggauugaaaaagguaagaucgugaaaucaguggagaugaacgcccccaauuaucauuacgaagagugcaguuguuacccugauagcuccgagauuacuugcgucugccgcgacaacuggcacgggucuaauagaccauggguuagcuucaaccagaaucucgaauaucagauaggauacaucuguucaggcauuuuuggcgauaacccgaggcccaaugacaagaccgggaguugcggaccuguguccagcaacggugcgaauggcguaaagggguucucuuuuaaauauggaaacggcguguggaucggucggacaaagucaaucaguagccgcaacggguucgagaugauuugggauccaaauggcuggaccggaacggacaacaauuuuuccauaaaacaagacaucgucggcauuaacgaauggucuggguacucggggagcuucgugcagcaucccgagcugacuggucuggauuguauccgaccuugcuucuggguugaacucauuagaggcaggccaaaggagaauacaaucuggaccuccgggucaaguauaucuuuuuguggagugaacagcgacacugucggcugguccuggcccgauggugcagaguuaccguucacaaucgacaaauga

SEQ ID NO: 150934 - RNA, 1410 nt, Artificial Sequence; identical to SEQ ID NO: 144786
  derived and/or modified CDS sequence (opt3) from neuraminidase__InfluenzaA__AFN19027

SEQ ID NO: 150935 - RNA, 1410 nt, Artificial Sequence; identical to SEQ ID NO: 144786
  derived and/or modified CDS sequence (opt3) from neuraminidase__InfluenzaA__AFN19032

SEQ ID NO: 150936 - RNA, 1410 nt, Artificial Sequence; identical to SEQ ID NO: 144786
  derived and/or modified CDS sequence (opt3) from neuraminidase__InfluenzaA__AFN19038

SEQ ID NO: 150937 - RNA, 1410 nt, Artificial Sequence; identical to SEQ ID NO: 150419
  derived and/or modified CDS sequence (opt3) from neuraminidase__InfluenzaA__AFN19049

SEQ ID NO: 150938 - RNA, 1410 nt, Artificial Sequence; identical to SEQ ID NO: 144786
  derived and/or modified CDS sequence (opt3) from neuraminidase__InfluenzaA__AFN19055

SEQ ID NO: 150939 - RNA, 1410 nt, Artificial Sequence; identical to SEQ ID NO: 144786
  derived and/or modified CDS sequence (opt3) from neuraminidase__InfluenzaA__AFN19065

SEQ ID NO: 150940 - RNA, 1410 nt, Artificial Sequence; identical to SEQ ID NO: 144786
  derived and/or modified CDS sequence (opt3) from neuraminidase__InfluenzaA__AFN19071

SEQ ID NO: 150941 - RNA, 1410 nt, Artificial Sequence; identical to SEQ ID NO: 144786
  derived and/or modified CDS sequence (opt3) from neuraminidase__InfluenzaA__AFN19077

SEQ ID NO: 150942 - RNA, 1410 nt, Artificial Sequence; identical to SEQ ID NO: 144786
  derived and/or modified CDS sequence (opt3) from neuraminidase__InfluenzaA__AFN19083

SEQ ID NO: 150943 - RNA, 1410 nt, Artificial Sequence; identical to SEQ ID NO: 144786
  derived and/or modified CDS sequence (opt3) from neuraminidase__InfluenzaA__AFN19089

SEQ ID NO: 150944 - RNA, 1410 nt, Artificial Sequence; identical to SEQ ID NO: 144786
  derived and/or modified CDS sequence (opt3) from neuraminidase__InfluenzaA__AFN19099

SEQ ID NO: 150945 - RNA, 1410 nt, Artificial Sequence; identical to SEQ ID NO: 144786
  derived and/or modified CDS sequence (opt3) from neuraminidase__InfluenzaA__AFN19105

SEQ ID NO: 150946 - RNA, 1410 nt, Artificial Sequence; identical to SEQ ID NO: 144786
  derived and/or modified CDS sequence (opt3) from neuraminidase__InfluenzaA__AFN19114

SEQ ID NO: 150947 - RNA, 1410 nt, Artificial Sequence; identical to SEQ ID NO: 144786
  derived and/or modified CDS sequence (opt3) from neuraminidase__InfluenzaA__AFN19126

SEQ ID NO: 150948 - RNA, 1410 nt, Artificial Sequence; identical to SEQ ID NO: 144786
  derived and/or modified CDS sequence (opt3) from neuraminidase__InfluenzaA__AFN19136

SEQ ID NO: 150949 - RNA, 1410 nt, Artificial Sequence; identical to SEQ ID NO: 144786
  derived and/or modified CDS sequence (opt3) from neuraminidase__InfluenzaA__AFN19146

SEQ ID NO: 150950 - RNA, 1410 nt, Artificial Sequence; identical to SEQ ID NO: 144786
  derived and/or modified CDS sequence (opt3) from neuraminidase__InfluenzaA__AFN19156

SEQ ID NO: 150951 - RNA, 1410 nt, Artificial Sequence; identical to SEQ ID NO: 144786
  derived and/or modified CDS sequence (opt3) from neuraminidase__InfluenzaA__AFN19166

SEQ ID NO: 150952 - RNA, 1410 nt, Artificial Sequence; identical to SEQ ID NO: 144786
  derived and/or modified CDS sequence (opt3) from neuraminidase__InfluenzaA__AFN19186

SEQ ID NO: 150953 - RNA, 1410 nt, Artificial Sequence; identical to SEQ ID NO: 150419
  derived and/or modified CDS sequence (opt3) from neuraminidase__InfluenzaA__AFN19196

SEQ ID NO: 150954 - RNA, 1410 nt, Artificial Sequence; identical to SEQ ID NO: 144786
  derived and/or modified CDS sequence (opt3) from neuraminidase__InfluenzaA__AFN19205

SEQ ID NO: 150955 - RNA, 1410 nt, Artificial Sequence; identical to SEQ ID NO: 144786
  derived and/or modified CDS sequence (opt3) from neuraminidase__InfluenzaA__AFN19215

SEQ ID NO: 150956 - RNA, 1410 nt, Artificial Sequence; identical to SEQ ID NO: 144786
  derived and/or modified CDS sequence (opt3) from neuraminidase__InfluenzaA__AFN19225

SEQ ID NO: 150957 - RNA, 1410 nt, Artificial Sequence; identical to SEQ ID NO: 144786
  derived and/or modified CDS sequence (opt3) from neuraminidase__InfluenzaA__AFN19235

SEQ ID NO: 150958 - RNA, 1410 nt, Artificial Sequence; identical to SEQ ID NO: 144786
  derived and/or modified CDS sequence (opt3) from neuraminidase__InfluenzaA__AFN19245

SEQ ID NO: 150959 - RNA, 1410 nt, Artificial Sequence; identical to SEQ ID NO: 144786
  derived and/or modified CDS sequence (opt3) from neuraminidase__InfluenzaA__AFN19251

SEQ ID NO: 150960 - RNA, 1410 nt, Artificial Sequence; identical to SEQ ID NO: 144786
  derived and/or modified CDS sequence (opt3) from neuraminidase__InfluenzaA__AFN19261

SEQ ID NO: 150961 - RNA, 1410 nt, Artificial Sequence; identical to SEQ ID NO: 150419
  derived and/or modified CDS sequence (opt3) from neuraminidase__InfluenzaA__AFN19271

SEQ ID NO: 150962 - RNA, 1410 nt, Artificial Sequence; identical to SEQ ID NO: 146517
  derived and/or modified CDS sequence (opt3) from neuraminidase__InfluenzaA__AFN19281

SEQ ID NO: 150963 - RNA, 1410 nt, Artificial Sequence
  derived and/or modified CDS sequence (opt3) from neuraminidase__InfluenzaA__AFN19287
augaaccccaaucagaagaucauuaccauaggcagcgugugcaugacaaucgggauggccaaccugauucuccaaaucggaaauauuaucuccauauggaucucucacucaauucagcuugguaaccagaaucagaucgagacuuguaaccaaagugucauuacguacgaaaauaacaccuggguuaaucagacauaugugaacaucagcaauacuaacuucgcugcaggccaguccguagugucugucaaacuggccgggaauagcucauugugcccugugagcggaugggcgauauacaguaaggacaacuccauuagaaucggcucuaaaggugauguuuuugugauuagggagccauucaucagcuguuccccguuagaaugccggaccuuuuuccugacacagggggcucuacucucagacaagcauaguaauggaaccaucaaagaucgcagccccuaucgaacucugaugucuuguccuauuggcgaggucccaucccccuacaacucacguuuugaaagcguggccuggagugcaucugccugccacgacggcauaaacuggcuuacaaucgggauuuccggaccugauaauggugcuguagcaguucugaaguauaacggcaucauaaccgacacgauuaagagcuggagaaauaacaucuugaggacucaagagucggagugugccugcgugaaugggucuuguuucaccgucaugacagauggaccauccgacggccaggcuucauacaaaaucuuucggauugaaaaggguaaaaucgugaagaguguggagaugaacgcccccaauuaucauuacgaagagugcagcuguuacccugauuccucugagauuacuugcgucugccgcgacaacuggcacgggagcaauagaccauggguuucauucaaccagaaucucgaauaucagauaggauacaucuguaguggcauuuuuggcgauaacccgaggcccaaugacaaaaccggguccugcggaccugugagcucuaacggugcgaauggcguaaagggguucucauuuaaguauggaaacggcguguggaucggucggacaaaaaguaucagcucccgcaacggguucgagaugauuugggauccaaauggcuggaccggaacggacaacaauuuuucuauaaagcaagacaucgucggcauuaacgaauggucgggguacagcggauccuucgugcagcaucccgagcugacuggucuggauuguauccgaccuugcuucuggguugaacucauuagaggcaggccaaaagagaauacaaucuggaccucagggaguucuauaucguuuuguggagugaacuccgacacugucggcuggucauggcccgauggugcagaguuaccguucacaaucgacaaguga

SEQ ID NO: 150964 - RNA, 1410 nt, Artificial Sequence; identical to SEQ ID NO: 144786
  derived and/or modified CDS sequence (opt3) from neuraminidase__InfluenzaA__AFN19297

SEQ ID NO: 150965 - RNA, 1410 nt, Artificial Sequence; identical to SEQ ID NO: 144786
  derived and/or modified CDS sequence (opt3) from neuraminidase__InfluenzaA__AFN19307

SEQ ID NO: 150966 - RNA, 1410 nt, Artificial Sequence; identical to SEQ ID NO: 144786
  derived and/or modified CDS sequence (opt3) from neuraminidase__InfluenzaA__AFN19317

SEQ ID NO: 150967 - RNA, 1410 nt, Artificial Sequence; identical to SEQ ID NO: 150419
  derived and/or modified CDS sequence (opt3) from neuraminidase__InfluenzaA__AFN19327

SEQ ID NO: 150968 - RNA, 1410 nt, Artificial Sequence; identical to SEQ ID NO: 144786
  derived and/or modified CDS sequence (opt3) from neuraminidase__InfluenzaA__AFN19346

SEQ ID NO: 150969 - RNA, 1410 nt, Artificial Sequence
  derived and/or modified CDS sequence (opt3) from neuraminidase__InfluenzaA__AFN19352
augaaccccaaucagaagaucauuaccauaggcagcgugucccugacaaucucuacuauuugcuucuuuaugcagaucgccauucucaucacgaccgucacacuucacuucaaacaguacgaguuuaacucaccuccaaauaaccagguuaugcugugugaaccgacuauaaucgagagaaauaugaccgaaauuguguauuugacaaacaccacuaucgagaaggaaauuugccccaaaccugcugaguacaggaauuggaguaagccacagugugacaucacaggguucgcacccuuuagcaaagauaacuccauacgguuaucugccggaggugacauuuggguaacccgcgagccuuaugugucgugcgauccagacaaguguuaccaauucgcgcugggccaggggacgacucuaaauaacguccauucaaauaacaccgugcgagaucguacacccuauagaacucuccugaugaaugaacuuggaguuccuuuucaccugggcaccaaacaggugugcaucgcuuggagcaguuccucuugucaugacgguaaggccugguugcacgucugcauuacaggggaugacaagaacgcaaccgccagcuucaucuacaauggaaggcucguggauuccguaguuucauggaguaaagagauccugcggacgcaggaaagcgagugugugugcauuaacggcacuuguacagucgugaugaccgacggcucugcuuccgggaaggcagauacuaaaauacuguuuaucgaggaaggaaagauugugcauacaucaacccucagcgguagugcccaacacgucgaggaaugcucuugcuauccacgcuacccgggcguuagaugugugugcagggacaacuggaagggguccaaucggcccaucguagauauaaacauuaaagaccacagcaucgugucgucuuacgucuguuccggauuagugggcgacacgccucgcaagaaugauucaaguagcuccggucauugccuggacccaaacaaugaggaagggggacacggcguuaaaggcugggcuuucgaugacgggaacgauguguggaugggacgaaccaucaaugagacaucuagacuugguuaugagacuuuuaaggucauugaaggcuggagcaaccccaaaucaaaguugcagaucaauaggcaagugauuguagaccggagugaucguuccggguacagcggaauauucucuguugagggcaaaucauguaucaaccgcugcuuuuauguggaacugauuagagguaggaaggaggaaaccgagguccuauggacaaguaauagcaucguggucuucugugggacuuccggcaccuacggaacaggcucuuggccugacggggccgaucucaaccugaugccaaucuga

SEQ ID NO: 150970 - RNA, 1410 nt, Artificial Sequence
  derived and/or modified CDS sequence (opt3) from neuraminidase__InfluenzaA__AFN19354
augaaccccaaucagaagaucauuaccauaggcagcgugucccugacaaucucuacuauuugcuucuuuaugcagaucgccauucucaucacgaccgucacacuucacuucaaacaguacgaguuuaacucaccuccaaauaaccagguuaugcugugugaaccgacuauaaucgagagaaauauuaccgaaaucguguauuugacaaacaccacuauugagaaggaaaucugccccaaaccugcugaguacaggaauuggaguaagccacagugugacauaacaggguucgcacccuuuagcaaagauaacuccauucgguuaucugccggaggugacaucuggguaacccgcgagccuuaugugucgugcgauccagacaaguguuaccaauucgcgcugggccaggggacgacucuaaauaacguccauucaaauaacaccgugcgagaucguacacccuauagaacucuccugaugaaugaacuuggaguuccuuuucaccugggcaccaaacaggugugcauugcuuggagcaguuccucuugucaugacgguaaggccugguugcacgucugcaucacaggggaugacaagaacgcaaccgccagcuucaucuacaauggaaggcucguggauuccguaguuucauggaguaaagagauucugcggacgcaggaaagcgagugugugugcauaaacggcacuuguacagucgugaugaccgacggcucugcuuccgggaaggcagauacuaaaauccuguuuauugaggaaggaaagaucgugcauacaucaacccucagcgguagugcccaacacgucgaggaaugcucuugcuauccacgcuacccgggcguuagaugugugugcagggacaacuggaagggguccaaucggcccauaguagauauuaacaucaaagaccacagcaucgugucgucuuacgucuguuccggauuagugggcgacacgccucgcaagaaugauucaaguagcuccucucauugccuggacccaaacaaugaggaaggugggcacggaguuaaaggcugggcuuucgaugacggcaacgauguguggauggggcgaaccauuaaugagacaagcagacuuggauaugagacuuuuaaggucaucgaagguuggucaaaccccaaaaguaaguugcagauuaauaggcaagugauaguagaccggggcgaucguuccggguacagcggaaucuucucuguugagggcaaaucauguauuaaccgcugcuuuuauguggaacugaucagagguaggaaggaggaaaccgagguccuauggacaaguaauagcaucguggucuucugugggacuuccggcaccuacggaacaggcucuuggccugacggggccgaucucaaccugaugccaauuuga

SEQ ID NO: 150971 - RNA, 1410 nt, Artificial Sequence; identical to SEQ ID NO: 150970
  derived and/or modified CDS sequence (opt3) from neuraminidase__InfluenzaA__AFN19356

SEQ ID NO: 150972 - RNA, 1410 nt, Artificial Sequence; identical to SEQ ID NO: 150970
  derived and/or modified CDS sequence (opt3) from neuraminidase__InfluenzaA__AFN19358

SEQ ID NO: 150973 - RNA, 1410 nt, Artificial Sequence; identical to SEQ ID NO: 150970
  derived and/or modified CDS sequence (opt3) from neuraminidase__InfluenzaA__AFN19360

SEQ ID NO: 150974 - RNA, 1410 nt, Artificial Sequence
  derived and/or modified CDS sequence (opt3) from neuraminidase__InfluenzaA__AFN19362
augaaccccaaucagaagaucauuaccauaggcagcgugucccugacaaucucuacuauuugcuucuuuaugcagaucgccauucucaucacgaccgucacacuucacuucaaacaguacgaguuuaacucaccuccaaauaaccagguuaugcugugugaaccgacuauaaucgagagaaauauuaccgaaaucguguauuugacaaacaccacuauugagaaggaaaucugccccaaaccugcugaguacaggaauuggaguaagccacagugugacauaacaggguucgcacccuuuagcaaagauaacuccauucgguuaucugccggaggugacaucuggguaacccgcgagccuuaugugucgugcgauccagacaaguguuaccaauucgcgcugggccaggggacgacucuaaauaacguccauucaaauaacaccgugcgagaucguacacccuauagaacucuccugaugaaugaacuuggaguuccuuuucaccugggcaccaaacaggugugcauugcuuggagcaguuccucuugucaugacgguaaggccugguugcacgucugcaucacaggggaugacaagaacgcaaccgccagcuucaucuacaauggaaggcucguggauuccguaguuucauggaguaaagagauucugcggacgcaggaaagcgagugugugugcauaaacggcacuuguacagucgugaugaccgacggcucugcuuccgggaaggcagauacuaaaauccuguuuauugaggaaggaaagaucgugcauacaucaacccucagcgguagugcccaacacgucgaggaaugcucuugcuauccacgcuacccgggcguuagaugugugugcagggacaacuggaagggguccaaucggcccauaguagauauuaacaucaaagaccacagcaucgugucgucuuacgucuguuccggauuagugggcgacacgccucgcaagaaugauucaaguagcuccucucauugccuggacccaaacaaugaggaaggugggcacggaguuaaaggcugggcuuucgaugacggcaacgauguguggauggggcgaaccauuaaugagacaagcagacuuggauaugagacuuuuaaggucaucgaagguuggucaaaccccaaaaguaaguugcagauuaauaggcaagugauaguagaccggggcgaucguuccggguacagcggaaucuucucuguugagggcaaacgcuguauuaacagaugcuuuuauguggaacugaucaggggucggaaggaggaaaccgagguccuauggacaucaaauaguaucguggucuucugugggacuagcggcaccuacggaacaggcuccuggccugacggggccgaucucaaccugaugccaauuuga

SEQ ID NO: 150975 - RNA, 1410 nt, Artificial Sequence; identical to SEQ ID NO: 150970
  derived and/or modified CDS sequence (opt3) from neuraminidase__InfluenzaA__AFN19364

SEQ ID NO: 150976 - RNA, 1410 nt, Artificial Sequence; identical to SEQ ID NO: 147566
  derived and/or modified CDS sequence (opt3) from neuraminidase__InfluenzaA__AFN19366

SEQ ID NO: 150977 - RNA, 1410 nt, Artificial Sequence; identical to SEQ ID NO: 150970
  derived and/or modified CDS sequence (opt3) from neuraminidase__InfluenzaA__AFN19370

SEQ ID NO: 150978 - RNA, 1410 nt, Artificial Sequence
  derived and/or modified CDS sequence (opt3) from neuraminidase__InfluenzaA__AFN19374
augaaccccaaucagaagaucauuaccauaggcagcgugucccugacaaucucuacuauuugcuucuuuaugcagaucgccauucucaucacgaccgucacacuucacuucaaacaguacgaguuuaacucaccuccaaauaaccagguuaugcugugugaaccgacuauaaucgagagaaauauuaccgaaaucguguauuugacaaacaccacuauugagaaggaaaucugccccaaaccugcugaguacaggaauuggaguaagccacagugugggauaacaggauucgcacccuuuagcaaagacaacuccauucgguuaucugccgguggcgauaucuggguaacccgcgagccuuaugugucgugcgacccagauaaguguuaccaauucgcgcuggggcagggaacgacucuaaauaacguccauucaaauaacaccgugcgagaccguacacccuauagaacucuccugaugaaugaacuuggcguuccuuuucaccuggguaccaaacaggugugcauugcuuggagcaguuccucuugucaugaugggaaggccugguugcacgucugcaucacaggagacgauaagaacgcaaccgccagcuucaucuacaauggcaggcucguggacuccguaguuucauggaguaaagagauucugcggacgcaggaaagcgagugugugugcauaaacggcacuuguacagucgugaugaccgaugggucugcuuccggaaaggcagacacuaaaauccuguuuauuaaggaggguaagaucgugcauacaucaacccucagcggcagugcccaacacgucgaagagugcucuugcuauccacgcuacccggggguuagaugugugugcagggauaacuggaaaggauccaaucggcccauaguagacauuaacaucaaggaucacagcaucgugucgucuuacgucuguuccggcuuagugggugacacgccucgcaaaaccgacucaaguagcuccucucauugccuggauccaaauaacgaagaagggggacacggcguuaagggcugggcuuucgacgaugggaaugacguguggaugggacgaacaauuaacgagacuagcagacuugguuaugagaccuuuaaagucaucgagggcuggucaaaucccaagaguaaauugcagauuaacaggcaagugauaguagaucguggggaccgguccggauacagcggcaucuucucuguugaagguaagucauguauuaaucgcugcuuuuauguggagcugaucagagggaggaaggaagagacagaaguccuauggaccaguaacagcaucguggucuucuguggcacuuccggaacauacggcaccgggucuuggccugauggagccgaccucaaucugaugccaauuuga

SEQ ID NO: 150979 - RNA, 1410 nt, Artificial Sequence; identical to SEQ ID NO: 150970
  derived and/or modified CDS sequence (opt3) from neuraminidase__InfluenzaA__AFN19376

SEQ ID NO: 150980 - RNA, 1410 nt, Artificial Sequence; identical to SEQ ID NO: 150970
  derived and/or modified CDS sequence (opt3) from neuraminidase__InfluenzaA__AFN19378

SEQ ID NO: 150981 - RNA, 1410 nt, Artificial Sequence
  derived and/or modified CDS sequence (opt3) from neuraminidase__InfluenzaA__AFN19380
augaaccccaaucagaagaucauuaccauaggcagcgugucccugacaaucucuacuauuugcuucuuuaugcagaucgccauucucaucacgaccgucacacuucacuucaaacaguacgaguuuaacucaccuccaaauaaccagguuaugcugugugaaccgacuauaaucgagagaaauauuaccgaaaucguguauuugacaaacaccacuauugagaaggaaaucugccccaaaccuagugaguacaggaauuggagcaagccacagugugacauaacaggguucgcucccuuuuccaaagauaacucuauucgguuaucggcaggaggugacaucuggguaacccgcgagccuuaugugucaugcgauccagacaaguguuaccaauucgcccugggccaggggacgacucuaaauaacguccauagcaauaacaccgugcgagaucguacacccuauagaacucuccugaugaaugaacuuggaguuccuuuucaccugggcaccaaacaggugugcauugcguggaguuccucuagcugucaugacgguaaggcuugguugcacgucugcaucacaggggaugacaagaacgccaccgcauccuucaucuacaauggaaggcucguggauucaguaguuaguuggagcaaagagauucugcggacgcaggaaucugagugugugugcauaaacggcacuuguacagucgugaugaccgacggcuccgccucagggaaggcugauacuaaaauccuguuuauugaggaaggaaagaucgugcauacaagcacccucagugguucugcacaacacgucgaggaaugcuccugcuauccacgcuacccgggcguuagaugugugugcagggacaacuggaaggggagcaaucggcccauaguagauauuaacaucaaagaccacucgaucgugucuuccuacgucuguucaggauuagugggcgacacgccucgcaagaaugauaguagcuccucuagccauugccuggacccaaacaaugaggaaggugggcacggaguuaaaggcugggccuucgaugacggcaacgauguguggauggggcgaaccauuaaugagacaucaagacuuggauaugagacuuuuaaggucaucgaagguuggaguaaccccaaauccaaguugcagauuaauaggcaagugauaguagaccggggcgaucguagcggguacucuggaaucuucucaguugagggcaaaaguuguauuaaccgcugcuuuuauguggaacugaucagagguaggaaggaggaaaccgagguccuauggacaagcaauuccaucguggucuucugugggacuucuggcaccuacggaacaggcucguggccugacggggcugaucucaaccugaugccaauuuga

SEQ ID NO: 150982 - RNA, 1410 nt, Artificial Sequence; identical to SEQ ID NO: 150978
  derived and/or modified CDS sequence (opt3) from neuraminidase__InfluenzaA__AFN19382

SEQ ID NO: 150983 - RNA, 1410 nt, Artificial Sequence; identical to SEQ ID NO: 150970
  derived and/or modified CDS sequence (opt3) from neuraminidase__InfluenzaA__AFN19384

SEQ ID NO: 150984 - RNA, 1410 nt, Artificial Sequence
  derived and/or modified CDS sequence (opt3) from neuraminidase__InfluenzaA__AFN19386
augaaccccaaucagaagaucauuaccauaggcagcgugucccugacaaucucuacuauuugcuucuuuaugcaaaucgccauucucaucacgaccgucacacuucacuucaaacaguacgaguuuaacucaccuccaaauaaccagguuaugcugugugaaccgacuauaaucgagagaaauauuaccgaaaucguguauuugacaaacaccacuauugagaaggaaaucugccccaaaccugcugaguacaggaauuggaguaagccacagugugacauaacaggguucgcacccuuuagcaaagauaacuccauucgguuaucugccggaggugacaucuggguaacccgcgagccuuaugugucgugcgauccagacaaguguuaccaauucgcgcugggccaggggacgacucuaaauaacguccauucaaauaacaccgugcgagaucguacacccuauagaacucuccugaugaaugaacuuggaguuccuuuucaccugggcaccaaacaggugugcauugcuuggagcaguuccucuugucaugacgguaaggccugguugcacgucugcaucacaggggaugacaagaacgcaaccgccagcuucaucuacaauggaaggcucguggauuccguaguuucauggaguaaagagauucugcggacgcaggaaagcgagugugugugcauaaacggcacuuguacagucgugaugaccgacggcucugcuuccgggaaggcagauacuaaaauccuguuuauugaggaaggaaagaucgugcauacaucaacccucagcgguagugcccaacacgucgaggaaugcucuugcuauccacgcuacccgggcguuagaugugugugcagggacaacuggaagggguccaaucggcccauaguagauauuaacaucaaagaccacagcaucgugucgucuuacgucuguuccggauuagugggcgacacgccucgcaagaaugauucaaguagcuccucucauugccuggacccaaacaaugaggaaggugggcacggaguuaaaggcugggcuuucgaugacggcaacgauguguggauggggcgaaccauuaaugagacaagcagacuuggauaugagacuuuuaaggucaucgaagguuggucaaaccccaaaaguaaguugcagauuaauaggcagauaaucguggaccggggcgaucguuccggguacagcggaauuuucucuguagagggcaaaucauguaucaaccgcugcuuuuauguugaacugaucagagguaggaaggaggaaaccgaggugcuauggacaaguaauagcauugucguguucugugggacuuccggcaccuacggaacaggcucuuggccugacggggccgaucucaaccugaugccaauauga

SEQ ID NO: 150985 - RNA, 1410 nt, Artificial Sequence; identical to SEQ ID NO: 150970
  derived and/or modified CDS sequence (opt3) from neuraminidase__InfluenzaA__AFN19388

SEQ ID NO: 150986 - RNA, 1410 nt, Artificial Sequence; identical to SEQ ID NO: 150970
  derived and/or modified CDS sequence (opt3) from neuraminidase__InfluenzaA__AFN19390

SEQ ID NO: 150987 - RNA, 1410 nt, Artificial Sequence
  derived and/or modified CDS sequence (opt3) from neuraminidase__InfluenzaA__AFN19392
augaaccccaaucagaagaucauuaccauaggcagcgugucccugacaaucucuacuauuugcuucuuuaugcaaaucgccguccucauuacgaccguuacacuucacuucaaacaguacgaguuuaacucaccuccaaauaaccaggugaugcugugugaaccgacuaucauagagagaaauaucaccgaaauuguauauuugacaaacaccacuaucgagaaggaaauuugccccaaaccugcugaguacaggaauuggaguaagccacagugugacaucacaggguucgcacccuuuagcaaagauaacuccauacgguuaucugccggaggugacauuugggugacccgcgagccuuaugucucgugcgauccagacaaguguuaccaauucgcgcugggccaggggacgacucuaaauaacgugcauucaaauaacaccguucgagaucguacacccuauagaacucuccugaugaaugaacuuggagugccuuuucaccugggcaccaagcaggucugcaucgcuuggagcaguuccucuugucaugacgguaaagccugguugcacgugugcauuacaggggaugacaagaacgcaaccgccagcuucaucuacaauggaaggcucguagauuccguugugucauggaguaaagagauccugcggacgcaggaaagcgagugugucugcauuaacggcacuuguacaguggugaugaccgacggcucugcuuccgggaaggcagauacuaaaauacuguuuaucgaggaaggaaagauuguccauacaucaacccucagcgguagugcccaacacguugaggaaugcucuugcuauccacgcuacccgggcgugagauguguaugcagggacaacuggaagggguccaaucggcccaucguggauauaaacauuaaagaccacagcaucgucucgucuuacguguguuccggauuaguuggcgacacgccucgcaagaaugauucaaguagcuccucucauugccuggacccaaacaaugaggaaggugggcacggagugaaaggcugggcuuucgaugacggcaacgaugucuggauggggcgaaccaucaaugagacaagcagacuuggauaugagacuuuuaaggugauugaagguuggucaaaccccaaaaguaaguugcagaucaauaggcagguaauuguugaccggggcgaucguuccggguacagcggaauauucucuguggagggcaaaucauguaucaaccgcugcuuuuaugucgaacugauuagagguaggaaggaggaaaccgaggugcuauggacaaguaauagcaucgucguguucugugggacuuccggcaccuacggaacaggcucuuggccugacggggccgaucucaaccugaugccaaucuga

SEQ ID NO: 150988 - RNA, 1410 nt, Artificial Sequence; identical to SEQ ID NO: 149835
  derived and/or modified CDS sequence (opt3) from neuraminidase__InfluenzaA__AFN19394

SEQ ID NO: 150989 - RNA, 1410 nt, Artificial Sequence
  derived and/or modified CDS sequence (opt3) from neuraminidase__InfluenzaA__AFN19396
augaaccccaaucagaagaucauuaccauaggcagcgugucccugacaaucucuacuauuugcuucuuuaugcaaaucgccauucucaucacgaccgucacacuucacuucaaacaguacgaguuuaacucaccuccaaauaaccagguuaugcugugugaaccgacuauaaucgagagaaauauuaccgaaaucguguauuugacaaacaccacuauugagaaggaaaucugccccaaauuagcugaguacaggaauuggaguaagccucagugugacauaacaggguucgcaccauuuagcaaagauaacuccauucggcugucugccggaggugacaucuggguaacccgcgagcccuaugugucgugcgauccugacaaguguuaccaauucgcgcuaggccaggggacgacucucaauaacguccauucaaauaacaccgugcgagaucguacaccauauagaacucugcuuaugaaugaacugggaguucccuuucacuugggcaccaaacaggugugcauugcuuggagcaguuccucuugucaugacgguaaggccuggcuccacgucugcaucacaggggaugacaagaacgcaaccgccagcuucaucuacaauggaaggcugguggauuccguaguuucauggaguaaagacauucugcggacgcaggagagcgaaugugugugcauaaacggcacuugugcugucgugaugacagauggcucugcauccgggaaggccgacaccaaaauccucuuuauugaggagggaaagaucgugcauacuucaacauuaagcgguagugcucaacacgucgaagagugcucuugcuauccucgcuacccaggcguuagaugugugugcagggauaacuggaagggguccaaucggccgauaguagacauuaacaucaaagaccacagcaucgugucgucuuacgucuguuccggacuggugggcgauacccccaggaagaaugacucaaguagcuccucucauugccuugauccuaacaaugaagagggugggcacggaguuaaaggcugggccuucgacgauggcaacgacguguggauggggcgaacgauuaaugaaaccagcagauugggauaugagacauuuaaggucaucgaggguuggucaaacccaaaaaguaagcugcagauuaaucgccaggugauaguagaucggggcaaccguuccggguacagcggaaucuucucuguugaaggcaaaaauuguauuaaccgcugcuuuuauguggagcuaaucagagguaggaaggaagagacugaaguccucuggaccucaaauaguaucguggucuucugugggacaagcggcacuuacggaaccggcuccuggcccgacggggcggaucugaaccuuaugccuauuuga

SEQ ID NO: 150990 - RNA, 1410 nt, Artificial Sequence
  derived and/or modified CDS sequence (opt3) from neuraminidase__InfluenzaA__AFN19398
augaaccccaaucagaagaucauuaccauaggcagcgugucccugacaaucucuacuauuugcuucuuuaugcaaaucgccauucucaucacgaccgucacacuucacuucaaacaguacgaguuuaacucaccuccaaauaaccagguuaugcugugugaaccgacuauaaucgagagaaauauuaccgaaaucguguauuugacaaacaccacuauugagaaggaaaucugccccaaaccugcugaguacaggaauuggaguaagccacagugugacauaacaggguucgcacccuuuagcaaagauaacuccauucgguuaucugccggaggugacaucuggguaacccgcgagccuuaugugucgugcgauccagacaaguguuaccaauucgcgcugggccaggggacgacucuaaauaacguccauucaaauaacaccgugcgagaucguacacccuauagaacucuccugaugaaugaacuuggaguuccuuuucaccugggcaccaaacaggugugcauugcuuggagcaguuccucuugucaugacgguaaggccugguugcacgucugcaucacaggggaugacaagaacgcaaccgccagcuucaucuacaauggaaggcucguggauuccguaguuucauggaguaaagagauucugcggacgcaggaaagcgagugugugugcauaaacggcacuuguacagucgugaugaccgacggcucugcuuccgggaaggcagauacuaaaauccuguuuauugaggaaggaaagaucgugcauacaucaacccucagcgguagugcccaacacgucgaggaaugcucuugcuauccacgcuacccgggcguuagaugugugugcagggacaacuggcggggguccaaucgccccauaguagauauuaacaucaaggaccacagcaucgugucgucuuacgucuguuccggauuagugggcgacacgccucggaaaaaugauucaaguagcuccucucauugccuggacccaaacaaugaggaaggugggcacggaguuaagggcugggcuuucgaugacggcaacgauguguggauggggagaaccauuaaugagacaagcaggcuuggauaugagacuuuuaaagucaucgaagguuggucaaaccccaagaguaaauugcagauuaaucgacaggugauaguagaccguggcgaucgcuccggguacagcggaaucuucucuguugagggcaagucauguauuaacagaugcuuuuauguggaacugaucaggggucggaaagaggaaaccgagguccuauggacaaguaauagcaucguggucuucugugggacuuccggcaccuacggaacaggcucuuggccugacggggccgaucucaaccugaugccaauuuga

SEQ ID NO: 150991 - RNA, 1410 nt, Artificial Sequence
  derived and/or modified CDS sequence (opt3) from neuraminidase__InfluenzaA__AFN19400
augaaccccaaucagaagaucauuaccauaggcagcgugucccugacaaucucuacuauuugcuucuuuaugcagaucgccauucucaucacgaccgucacacuucacuucaaacaguacgaguuuaacucaccuccaaauaaccagguuaugcugugugaaccgacuauaaucgagagaaauauuaccgaaaucguguauuugacaaacaccacuauugagaaggaaaucugccccaaaccuagugaguacaggaauuggagcaagccacagugugacauaacaggguucgcucccuuuuccaaagauaacucuauucgguuaucggacggaggugauaucuggguaacccgcgagccuuaugugucaugcgacccagauaaguguuaccaauucgcacugggccaggggacgacucuaaauaacguccauagcaauaacaccgugcgagaccguacacccuauagaacucuccugaugaaugaacuuggaguuccuuuucaccugggcaccaaacaggugugcauugccuggaguuccucuagcugucaugaugguaaggcgugguugcacgucugcaucacaggggacgauaagaacgcuaccgccuccuucaucuacaauggaaggcucguggacucaguaguuaguuggagcaaagagauucugcggacgcaggaaucugagugugugugcauaaacggcacuuguacagucgugaugaccgauggcuccgcaucagggaaggccgacacuaaaauccuguuuauugaggaaggaaagaucgugcauacaagcacccucagugguucugcucaacacgucgaggaaugcuccugcuauccacgcuacccgggcguuagaugugugugcagggauaacuggaaggggagcaaucggcccauaguagacauuaacaucaaagaccacucgaucgugucuuccuacgucuguucaggauuagugggcgauacgccucgcaagaaugacaguagcuccucuagccauugccuggauccaaacaaugaggaaggugggcacggaguuaaaggcugggcauucgacgauggcaacgacguguggauggggcgaaccauuaaugagacaucaagacuuggauaugagacuuuuaaggucaucgaagguuggaguaaccccaaauccaaguugcagauuaauaggcaagugauaguagaucggggcgaccguagcggguacucuggaaucuucucaguugagggcaaaaguuguauuaaccgcugcuuuuauguggaacugaucagagguaggaaggaggaaaccgagguccuauggacaagcaauuccaucguggucuucugugggacuucuggcaccuacggaacaggcucguggccugauggggccgaccucaaccugaugccaauuuga

SEQ ID NO: 150992 - RNA, 1410 nt, Artificial Sequence; identical to SEQ ID NO: 150970
  derived and/or modified CDS sequence (opt3) from neuraminidase__InfluenzaA__AFN19402

SEQ ID NO: 150993 - RNA, 1410 nt, Artificial Sequence; identical to SEQ ID NO: 150970
  derived and/or modified CDS sequence (opt3) from neuraminidase__InfluenzaA__AFN19404

SEQ ID NO: 150994 - RNA, 1410 nt, Artificial Sequence; identical to SEQ ID NO: 150970
  derived and/or modified CDS sequence (opt3) from neuraminidase__InfluenzaA__AFN19406

SEQ ID NO: 150995 - RNA, 1410 nt, Artificial Sequence; identical to SEQ ID NO: 150970
  derived and/or modified CDS sequence (opt3) from neuraminidase__InfluenzaA__AFN19410

SEQ ID NO: 150996 - RNA, 1410 nt, Artificial Sequence; identical to SEQ ID NO: 150970
  derived and/or modified CDS sequence (opt3) from neuraminidase__InfluenzaA__AFN19412

SEQ ID NO: 150997 - RNA, 1410 nt, Artificial Sequence; identical to SEQ ID NO: 150970
  derived and/or modified CDS sequence (opt3) from neuraminidase__InfluenzaA__AFN19414

SEQ ID NO: 150998 - RNA, 1410 nt, Artificial Sequence; identical to SEQ ID NO: 150970
  derived and/or modified CDS sequence (opt3) from neuraminidase__InfluenzaA__AFN19416

SEQ ID NO: 150999 - RNA, 1410 nt, Artificial Sequence
  derived and/or modified CDS sequence (opt3) from neuraminidase__InfluenzaA__AFN19418
augaaccccaaucagaagaucauuaccauaggcagcgugucccugacaaucucuacuauuugcuucuuuaugcaaaucgccauucucaucacgaccgucacacuucacuucaaacaguacgaguuuaacucaccuccaaauaaccagguuaugcugugugaaccgacuauaaucgagagaaauauuaccgaaaucguguauuugacaaacaccacuauugagaaggaaaucugccccaaaccugcugaguacaggaauuggaguaagccacagugugacauaacaggguucgcacccuuuagcaaagauaacuccauucgguuaucugccggaggugacaucuggguaacccgcgagccuuaugugucgugcgauccagacaaguguuaccaauucgcgcugggccaggggacgacucuaaauaacguccauucaaauaacaccgugcgagaucguacacccuauagaacucuccugaugaaugaacuuggaguuccuuuucaccugggcaccaaacaggugugcauugcuuggagcaguuccucuugucaugacgguaaggccugguugcacgucugcaucacaggggaugacaagaacgcaaccgccagcuucaucuacaauggaaggcucguggauuccguaguuucauggaguaaagagauucugcggacgcaggaaagcgagugugugugcauaaacggcacuuguacagucgugaugaccgacggcucugcuuccgggcgcgcagauacuaagauccuguuuauugaggaaggaaaaaucgugcauacaucaacccucagcgguagugcccaacacgucgaggaaugcucuugcuauccaagauacccgggcguuaggugugugugccgggacaacuggaagggguccaaucgccccauaguagauauuaacaucaaggaccacagcaucgugucgucuuacgucuguuccggauuagugggcgacacgccucggaaaaaugauucaaguagcuccucucauugccuggacccaaacaaugaggaaggugggcacggaguuaagggcugggcuuucgaugacggcaacgauguguggauggggagaaccauuaaugagacaagcaggcuuggauaugagacuuuuaaagucaucgaagguuggucaaaccccaagaguaaauugcagauuaaucgacaggugauaguagaccguggcgaucgcuccggguacagcggaaucuucucuguugagggcaagucauguauuaacagaugcuuuuauguggaacugaucaggggucggaaagaggaaaccgagguccuauggacaaguaauagcaucguggucuucugugggacuuccggcaccuacggaacaggcucuuggccugacggggccgaucucaaccugaugccaauuuga

SEQ ID NO: 151000 - RNA, 1410 nt, Artificial Sequence
  derived and/or modified CDS sequence (opt3) from neuraminidase__InfluenzaA__AFN19420
augaaccccaaucagaagaucauuaccauaggcagcgugucccugacaaucucuacuauuugcuucuuuaugcagaucgccauucucaucacgaccgucacacuucacuucaaacaguacgaguuuaacucaccuccaaauaaccagguuaugcugugugaaccgacuauaaucgagagaaauaugaccgaaauuguguauuugacaaacaccacuaucgagaaggaaauuugccccaaaccugcugaguacaggaauuggaguaagccacagugugacaucacaggguucgcacccuuuagcaaagauaacuccauacgguuaucugccggaggugacauuuggguaacccgcgagccuuaugugucgugcgauccagacaaguguuaccaauucgcgcugggccaggggacgacucuaaauaacguccauucaaauaacaccgugcgagaucguacacccuauagaacucuccugaugaaugaacuuggaguuccuuuucaccugggcaccaaacaggugugcaucgcuuggagcaguuccucuugucaugacgguaaggccugguugcacgucugcauuacaggggaugacaagaacgcaaccgccagcuucaucuacaauggaaggcucguggauuccguaguuucauggaguaaagagauccugcggacgcaggaaagcgagugugugugcauuaacggcacuuguacagucgugaugaccgacggcucugcuuccgggaaggcagauacuaaaauacuguuuaucgaggaaggaaagauugugcauacaucaacccucagcgguagugcccaacacgucgaggaaugcucuugcuauccacgcuacccgggcguuagaugugugugcagggacaacuggaagggguccaaucggcccaucguagauauaaacauuaaagaccacagcaucgugucgucuuacgucuguuccggauuagugggcgacacgccucgcaagaaugauucaaguagcuccucucauugccuggacccaaacaaugaggaaggugggcacggaguuaaaggcugggcuuucgaugacggcaacgauguguggauggggcgaaccaucaaugagacaagcagacuuggauaugagacuuuuaaggucauugaagguuggucaaaccccaaaaguaaguugcagaucaauaggcaagugauuguagaccggggcgaucguuccggguacagcggaauauucucuguugagggcaaaucauguaucaaccgcugcuuuuauguggaacugauuagagguaggaaggaggaaaccgagguccuauggacaaguaauagcaucguggucuucugugggacuuccggcaccuacggaacaggcucuuggccugacggggccgaucucaaccugaugccaaucuga

SEQ ID NO: 151001 - RNA, 1410 nt, Artificial Sequence
  derived and/or modified CDS sequence (opt3) from neuraminidase__InfluenzaA__AFN19422
augaaccccaaucagaagaucauuaccauaggcagcgugucccugacaaucucuacuauuugcuucuuuaugcaaaucgccauucucaucacgaccgucacacuucacuucaaacaguacgaguuuaacucaccuccaaauaaccagguuaugcugugugaaccgacuauaaucgagagaaauauuaccgaaaucguguauuugacaaacaccacuauugagaaggaaaucugccccaaaccugcugaguacaggaauuggaguaagccacagugugggauaacaggauucgcacccuuuagcaaagacaacuccauucgguuaucugccgguggcgauaucuggguaacccgcgagccuuaugugucgugcgacccagauaaguguuaccaauucgcgcuggggcagggaacgacucuaaauaacguccauucaaauaacaccgugcgagaccguacacccuauagaacucuccugaugaaugaacuuggcguuccuuuucaccuggguaccaaacaggugugcauugcuuggagcaguuccucuugucaugaugggaaggccugguugcacgucugcaucacaggaaacgacaagaaugcaaccgccagcuucaucuacaacggcaggcucguggauuccguaguuucauggaguaaagaggugcugcggacgcaggaaagcgagugugucugcauuaacggcacuuguacaguggugaugaccgacgggucugcuuccggaaaggcagauacuaaaauacuguuuaucgaggaagguaagauuguccauacaucaacccucagcggcagugcccaacacguugaggaaugcucuugcuauccacgcuacccgggggugagauguguaugcagggacaauuggaagggauccaaccggcccaucguggauauaaauauuaaagaccacagcaucgucucgucuuacguguguuccggcuuaguuggugauacgccucgcaagaacgacucaaguagcuccucucauugccuggacccaaauaacgaggaagggggacacggcgugaaaggcugggcuuucgaugacgggaaugaugucuggaugggacgaaccaucaacgagacaagcagacuugguuaugagacuuuuaaggugauugaaggcuggucaaaucccaaaaguaaguugcagaucaacaggcagguaauuguugaccguggggaucgguccggauacagcggcauauucucuguggaggguaaaucauguaucaaucgcugcuuuuaugucgaacugauuagagggaggaaggaggaaaccgaggugcuauggacaaguaacagcaucgucguguucuguggcacuuccggaaccuacggcacagggucuuggccugacggagccgaucucaaucugaugccaaucuga

SEQ ID NO: 151002 - RNA, 1410 nt, Artificial Sequence
  derived and/or modified CDS sequence (opt3) from neuraminidase__InfluenzaA__AFN19426
augaaccccaaucagaagaucauuaccauaggcagcgugucccugacaaucucuacuauuugcuucuuuaugcagaucgccauucucaucacgaccgucacacuucacuucaaacaguacgaguuuaacucaccuccaaauaaccagguuaugcugugugaaccgacuauaaucgagagaaauauuaccgaaaucguguauuugacaaacaccacuauugagaaggaaaucugccccaaaccugcugaguacaggaauuggaguaagccacagugugacauaacaggguucgcacccuuuagcaaagauaacuccauucgguuaucugccggaggugacaucuggguaacccgcgagccuuaugugucgugcgauccagacaaguguuaccaauucgcgcugggccaggggacgacucuaaauaacguccauucaaauaacaccgugcgagaucguacacccuauagaacucuccugaugaaugaacuuggaguuccuuuucaccugggcaccaaacaggugugcauugcuuggagcaguuccucuugucaugacgguaaggccugguugcacgucugcaucacaggggaugacgagaacgcaaccgccagcuucaucuacaauggaaggcucguggauuccguaguuucauggaguaaggaaauucugcggacgcaggagagcgagugugugugcauaaacggcacuuguacagucgugaugaccgacggcucugcuuccgggaaagcagauacuaagauccuguuuauugaagagggaaaaaucgugcauacaucaacccucagcgguagugcccaacacgucgaagagugcucuugcuauccacgcuacccgggcguuagaugugugugcagggacaacuggaagggguccaaucggcccauaguagauauuaacaucaaggaccacagcaucgugucgucuuacgucuguuccggauuagugggcgacacgccucgcaaaaaugauucaaguagcuccucucauugccuggacccaaacaaugaagagggugggcacggaguuaagggcugggcuuucgaugacggcaacgauguguggauggggcgaaccauuaaugagacaagcagacuuggauaugaaacuuuuaaagucaucgaggguuggucaaaccccaagaguaaauugcagauuaauaggcaagugauaguagaccggggcgaucguuccggguacagcggaaucuucucuguugaaggcaagucauguauuaaccgcugcuuuuauguggagcugaucagagguaggaaagaagagaccgagguccuauggacaaguaauagcaucguggucuucugugggacuuccggcaccuacggaacaggcucuuggccugacggggccgaucucaaccugaugccaauuuga

SEQ ID NO: 151003 - RNA, 1410 nt, Artificial Sequence; identical to SEQ ID NO: 150970
  derived and/or modified CDS sequence (opt3) from neuraminidase__InfluenzaA__AFN19428

SEQ ID NO: 151004 - RNA, 1410 nt, Artificial Sequence
  derived and/or modified CDS sequence (opt3) from neuraminidase__InfluenzaA__AFN19430
augaaccccaaucagaagaucauuaccauaggcagcgugucccugacaaucucuacuauuugcuucuuuaugcagaucgccauucucaucauaacggucacccuucacuucaaacaguacgaguuuaacucaccuccaaauaaccagguuaugcugugugaaccgacaaucauugagagaaauaugacugaaaucguguauuugaccaacacaaccauugagaaggaaaucugccccaaaccugcugaguacaggaauuggaguaagccacagugugacauaacuggguucgcacccuuuagcaaagauaacuccauucgguuaucugccggaggugacaucuggguaacacgcgagccuuaugugucgugcgauccagacaaguguuaccaauucgcgcugggccaggggaccacgcuaaauaacguccauucaaauaacacugugcgagaucguacccccuauagaacacuccugaugaaugaacuuggaguuccuuuucaccugggcacuaaacaggugugcauugcuuggagcaguuccucuugucaugacgguaaggccugguugcacgucugcaucaccggggaugacaagaacgcaacagccagcuucaucuacaauggaaggcucguggauuccguaguuucauggaguaaagagauucugcggacccaggaaagcgagugugugugcauaaacggcacguguacugucgugaugacagacggcucugcuuccgggaaggcagauaccaaaauccuguuuauugaggaaggaaagaucgugcauacuucaacacucagcgguagugcccaacacgucgaggaaugcucuugcuauccacgcuacccgggcguuagaugugugugcagggacaacuggaagggguccaaucggcccauaguagauauuaacaucaaagaccacagcaucgugucgucuuacgucuguuccggauuagugggcgacaccccucgcaagaaugauucaaguagcuccucucauugccuggacccaaacaaugaggaaggugggcacggaguuaaaggcugggcuuucgaugacggcaacgauguguggauggggcgaacgauuaaugagaccagcagacuuggauaugagacauuuaaggucaucgaagguuggucaaaccccaaaaguaaguugcagauuaauaggcaagugauaguagaccgguccgaucguagcggcuacucugggaucuucucaguugagggaaaaaguuguauuaaccgcugcuuuuauguggaacugaucagaggcaggaaggaggaaacugagguccuauggaccagcaauuccaucguggucuucugugguacaucugggacuuacggcaccggaucguggccugacggcgccgaucucaaccugaugccaauuuga

SEQ ID NO: 151005 - RNA, 1410 nt, Artificial Sequence
  derived and/or modified CDS sequence (opt3) from neuraminidase__InfluenzaA__AFN19432
augaaccccaaucagaagaucauuaccauaggcagcgugucccugacaaucucuacuauuugcuucuuuaugcagaucgccauucucaucacgaccgucacacuucacuucaaacaguacgaguuuaacucaccuccaaauaaccagguuaugcugugugaaccgacuauaaucgagagaaauauuaccgaaaucguguauuugacaaacaccacuauugagaaggaaaucugccccaaaccugcugaguacaggaauuggaguaagccacagugugacauaacaggguucgcacccuuuagcaaagauaacuccauucgguuaucugccggaggugacaucuggguaacccgcgagccuuaugugucgugcgauccagacaaguguuaccaauucgcgcugggccaggggacgacucuaaauaacguccauucaaauaacaccgugcgagaucguacaccccacagaacucuccugaugaaugaacuuggaguuccuuuucaucugggcaccaaacaggugugcauugcuuggagcaguuccucuugucacgacgguaaggccugguugcaugucugcaucacaggggaugacaagaacgcaaccgccagcuucaucuauaauggaaggcucguggauuccguaguuucauggaguaaagagauucugcggacgcaggaaagcgagugugugugcauaaacggcacuuguacagucgugaugaccgacggcucugcuuccgggaaggcagauacuaaaauccuguuuauugaggaaggaaagaucgugcacacaucaacccucagcgguagugcccaacacgucgaggaaugcucuugcuacccacgcuauccgggcguuagaugugugugcagggacaacuggaagggguccaaucggcccauaguagauauuaacaucaaagaccauagcaucgugucgucuuacgucuguuccggauuagugggcgacacgccucgcaagaaugauucaaguagcuccucucacugccuggacccaaacaaugaggaaggugggcauggaguuaaaggcugggcuuucgaugacggcaacgauguguggauggggcgaaccauuaaugagacaagcagacuuggauacgagacuuuuaaggucaucgaagguuggucaaaccccaaaaguaaguugcagauuaauaggcaagugauaguagaccggggcgaucguuccggguauagcggaaucuucucuguugagggcaaaucauguauuaaccgcugcuuuuacguggaacugaucagagguaggaaggaggaaaccgagguccuauggacaaguaauagcaucguggucuucugugggacuuccggcaccuauggaacaggcucuuggccugacggggccgaucucaaccugaugccaauuuga

SEQ ID NO: 151006 - RNA, 1410 nt, Artificial Sequence
  derived and/or modified CDS sequence (opt3) from neuraminidase__InfluenzaA__AFN19434
augaaccccaaucagaagaucauuaccauaggcagcgugucccugacaaucucuacuauuugcuucuuuaugcagaucgccauucucaucacgaccgucacacuucacuucaaacaguacgaguuuaacucaccuccaaauaaccagguuaugcugugugaaccgacuauaaucgagagaaauaugaccgaaauuguguauuugacaaacaccacuaucgagaaggaaauuugccccaaaccugcugaguacaggaauuggaguaagccacagugugacaucacaggguucgcacccuuuagcaaagauaacuccauacgguuaucugccggaggugacauuuggguaacccgcgagccuuaugugucgugcgauccagacaaguguuaccaauucgcgcugggccaggggacgacucuaaauaacguccauucaaauaacaccgugcgagaucguacacccuauagaacucuccugaugaaugaacuuggaguuccuuuucaccugggcaccaaacaggugugcaucgcuuggagcaguuccucuugucaugacgguaaggccugguugcacgucugcauuacaggggaugacaagaacgcaaccgccagcuucaucuacaauggaaggcucguggauuccguaguuucauggaguaaagagauccugcggacgcaggaaagcgagugugugugcauuaacggcacuuguacagucgugaugaccgacggcucugcuuccgggaaggcagauacuaaaauacuguuuaucgaggaaggaaagauugugcauacaucaacccucagcgguagugcccaacacgucgaggaaugcucuugcuauccacgcuacccgggcguuagaugugugugcagggacaacuggaagggguccaaucggcccaucguagauauaaacauuaaagaccacagcaucgugucgucuuacgucuguuccggauuagugggcgacacgccucgcaagaaugauucaaguagcuccucucauugccuggacccaaacaaugaggaaggugggcacggaguuaaaggcugggcuuucgaugacggcaacgauguguggauggggcgaaccaucaaugagacaagcagacuuggauaugagacuuuuaaggucauugaagguuggucaaaccccaaaaguaaguugcagaucaauaggcaagugauuguagaccgguccgaucguagcggcuacucugggauauucucaguugagggaaaaaguuguaucaaccgcugcuuuuauguggaacugauuagaggcaggaaggaggaaaccgagguccuauggacaagcaauuccaucguggucuucugugguacuucugggaccuacggcacaggaucguggccugacggcgccgaucucaaccugaugccaaucuga

SEQ ID NO: 151007 - RNA, 1410 nt, Artificial Sequence; identical to SEQ ID NO: 150194
  derived and/or modified CDS sequence (opt3) from neuraminidase__InfluenzaA__AFN19436

SEQ ID NO: 151008 - RNA, 1410 nt, Artificial Sequence
  derived and/or modified CDS sequence (opt3) from neuraminidase__InfluenzaA__AFN19438
augaaccccaaucagaagaucauuaccauaggcagcgugucccugacaaucucuacuauuugcuucuuuaugcagaucgccauucucaucacgaccgucacacuucacuucaaacaguacgaguuuaacucaccuccaaauaaccagguuaugcugugugaaccgacuauaaucgagagaaauaugaccgaaauuguguauuugacaaacaccacuaucgagaaggaaauuugccccaaaccugcugaguacaggaauuggaguaagccacagugugacaucacaggguucgcacccuuuagcaaagauaacuccauacgguuaucugccggaggugacauuuggguaacccgcgagccuuaugugucgugcgauccagacaaguguuaccaauucgcgcugggccaggggacgacucuaaauaacguccauucaaauaacaccgugcgagaucguacacccuauagaacucuccugaugaaugaacuuggaguuccuuuucaccugggcaccaaacaggugugcaucgcuuggagcaguuccucuugucaugacgguaaggccugguugcacgucugcauuacaggggaugacaagaacgcaaccgccagcuucaucuacaauggaaggcucguggauuccguaguuucauggaguaaagagauccugcggacgcaggaaagcgagugugugugcauuaacggcacuuguacagucgugaugaccgacggcucugcuuccgggaaggcagauacuaaaauacuguuuaucgaggaaggaaagauugugcauacaucaacccucagcgguagugcccaacacgucgaggaaugcucuugcuauccacgcuacccgggcguuagaugugugugcagggacaacuggaagggguccaaucggcccaucguagauauaaacauuaaagaccacagcaucgugucgucuuacgucuguuccggauuagugggcgacacgccucgcaagaaugauucaaguagcuccucucauugccuggacccaaacaaugaggaaggugggcacggaguuaaaggcugggcuuucgaugacggcaacgauguguggauggggcgaaccaucaaugagacaagcagacuuggauaugagacuuuuaaggucauugaagguuggucaaaccccaaaaguaaguugcagaucaauaggcaagugauuguagaccgguccgaucguagcggcuacucugggauauucucaguugagggaaaaaguuguaucaaccgcugcuuuuauguggaacugauuagaggcaggaaggaggaaaccgagguccuauggacaagcaauuccaucguggucuucugugguacuucugggaccuacggcacaggaucguggccugacggcgccgaucucaaccugaugagcaucuga

SEQ ID NO: 151009 - RNA, 1410 nt, Artificial Sequence
  derived and/or modified CDS sequence (opt3) from neuraminidase__InfluenzaA__AFN19442
augaaccccaaucagaagaucauuaccauaggcagcgugucccugacaaucucuacuauuugcuucuuuaugcagaucgccauucucaucacgaccgucacacuucacuucaaacaguacgaguuuaacucaccuccaaauaaccagguuaugcugugugaaccgacuauaaucgagagaaauauuaccgaaaucguguauuugacaaacaccauuaucgagaaggaaauaugccccaaaccuacugaguacaggaauuggaguaagccacagugugacauuacaggguucgcucccuuuagcaaagauaacuccauccgguuaucugcaggaggugacauuuggguaacccgcgagccuuaugugucgugcgauccagacaaguguuaccaauucgcccugggccaggggacgacucuaaauaacguccauucaaauaacaccgugcgagaucguacacccuauagaacucuccugaugaaugaacuuggaguuccuuuucaccugggcaccaaacaggugugcaucgcguggagcaguuccucuugucaugacgguaaggcuugguugcacgucugcaucacaggggaugacaagaacgccaccgccagcuucauuuacaauggaaggcucguggauuccguaguuucauggaguaaagagauacugcggacgcaggaaagcgagugugugugcaucaacggcacuuguacagucgugaugaccgacggcucugcauccgggaaggcugauacuaaaauucuguuuaucgaggaaggaaagauagugcauacaucaacccucagcgguagugcacaacacgucgaggaaugcucuugcuauccacgcuacccgggcguuagaugugugugcagggacaacuggaagggguccaaucggcccauuguagauaucaacaucaaagaccacagcauugugucgucuuacgucuguuccggauuagugggcgacacgccucgcaagaaugauucaaguagcuccucucauugccuggacccaaacaaugaggaaggugggcacggaguuaaaggcugggccuucgaugacggcaacgauguguggauggggcgaaccaucaaugagacaagcagacuuggauaugagacuuuuaaggucauugaagguuggucaaaccccaaaaguaaguugcagauaaauaggcaagugaucguagaccggggcgaucguuccggguacagcggaauuuucucuguugagggcaaaucauguaucaaccgcugcuuuuauguggaacugaucagagguaggaaggaggaaaccgagguccuauggacaaguaauagcauuguggucuucugugggacuuccggcaccuacggaacaggcucuuggccugacggggcugaucucaaccugaugcauauauga

SEQ ID NO: 151010 - RNA, 1410 nt, Artificial Sequence; identical to SEQ ID NO: 150194
  derived and/or modified CDS sequence (opt3) from neuraminidase__InfluenzaA__AFN19446

SEQ ID NO: 151011 - RNA, 1410 nt, Artificial Sequence; identical to SEQ ID NO: 150194
  derived and/or modified CDS sequence (opt3) from neuraminidase__InfluenzaA__AFN19448

SEQ ID NO: 151012 - RNA, 1410 nt, Artificial Sequence; identical to SEQ ID NO: 150970
  derived and/or modified CDS sequence (opt3) from neuraminidase__InfluenzaA__AFN19458

SEQ ID NO: 151013 - RNA, 1410 nt, Artificial Sequence
  derived and/or modified CDS sequence (opt3) from neuraminidase__InfluenzaA__AFN19460
augaaccccaaucagaagaucauuaccauaggcagcgugucccugacaaucucuacuauuugcuucuuuaugcaaaucgccauucucaucacgaccgucacacuucacuucaaacaguacgaguuuaacucaccuccaaauaaccagguuaugcugugugaaccgacuauaaucgagagaaauauuaccgaaaucguguauuugacaaacaccacuauugagaaggaaaucugccccaaaccugcugaguacaggaauuggaguaagccacagugugggauaacaggauucgcacccuuuagcaaagacaacuccauucgguuaucugccgguggcgauaucuggguaacccgcgagccuuaugugucgugcgacccagauaaguguuaccaauucgcgcuggggcagggaacgacucuaaauaacaugcauucaaauaacaccguccgagaccguacacccuauagaacucuccugaugaaugaacuuggcgugccuuuucaccuggguaccaagcagguuugcauugcuuggagcaguuccucuugucaugaugggaaagccugguugcacgugugcaucacaggagacgauaagaacgcaaccgccagcuucaucuacaauggcaggcucgucgacuccgugguaucauggaguaacgagauucugcggacgcaggaaagcgaguguguuugcauaaacggcacuuguacaguggucaugaccgaugggucugcuuccggaaaagcagacacuaagauccuguuuauugaggaagguaaaaucgugcauacaucaacccucagcggcagugcccaacacguggaggaaugcucuugcuauccacgcuacccgggggucagauguguuugcagggauaauuggaagggauccaaccggcccauaguggacauuaauaucaaggaucacagcaucguaucgucuuacguguguuccggcuuagucggugacacgccucgcaaaaacgacucaaguagcuccucucauugccuggauccaaauaacgaggaagggggacacggcgugaagggcugggcuuucgacgaugggaaugacguuuggaugggacgaaccauuaacgagacaagcagacuugguuaugagacuuuuaaagugaucgaaggcuggucaaaucccaagaguaaauugcagauuaacaggcaggucauaguggaucguggggaccgguccggauacagcggcaucuucucuguagaggguaagucauguauuaaucgcugcuuuuauguugaacugaucagagggaggaaagaggaaaacgaggugcuauggaccaguaauagcaucgucguguucuguggcacauccggaacuuacggcaccgggucuuggccugauggagccgaccucaaccugaugccaauuuga

SEQ ID NO: 151014 - RNA, 1410 nt, Artificial Sequence; identical to SEQ ID NO: 150194
  derived and/or modified CDS sequence (opt3) from neuraminidase__InfluenzaA__AFN19462

SEQ ID NO: 151015 - RNA, 1410 nt, Artificial Sequence
  derived and/or modified CDS sequence (opt3) from neuraminidase__InfluenzaA__AFN19466
augaaccccaaucagaagaucauuaccauaggcagcgugucccugacaaucucuacuauuugcuucuuuaugcagaucgccauucucaucacgaccgucacacuucacuucaaacaguacgaguuuaacucaccuccaaauaaccagguuaugcugugugaaccgacuauaaucgagagaaauauuaccgaaaucguguauuugacaaacaccacuauugagaaggaaaucugccccaaaccugcugaguacaggaauuggaguaagccacagugugacauagcaggguucgcccccuuuagcaaagauaacuccauucgguuaucugcgggaggugacaucuggguaacacgcgagccuuaugugucgugcgauccagacaaguguuaccaauucgcucugggccaggggaccacgcuaaauaacguccauucaaauaacacugugcgagaucguacccccuauagaacacuccugaugaaugaacuuggaguuccuuuucaccugggcacuaaacaggugugcauugccuggagcaguuccucuugucaugacgguaaggcaugguugcacgucugcaucaccggggaugacaagaacgccacagcuagcuucaucuacaauggaaggcucguggauuccguaguuucauggaguaaagagauucugcggacccaggaaagcgagugugugugcauaaacggcacguguacugucgugaugacagacggcucugcauccgggaaggccgauaccaaaauccuguuuauugaggaaggaaagaucgugcauacuucaacacucagcgguagugcucaacacgucgaggaaugcucuugcuauccacgcuacccgggcguuagaugugugugcagggacaacuggaagggguccaaucggcccauaguagauauuaacaucaaagaccacagcaucgugucgucuuacgucuguuccggauuagugggcgacaccccucgcaagaaugauucaaguagcuccucucauugccuggacccaaacaaugaggaaggugggcacggaguuaaaggcugggccuucgaugacggcaacgauguguggauggggcgaacgauuaaugagaccagcagacuuggauaugagacauuuaaggucaucgaagguuggucaaaccccaaaaguaaguugcagauuaauaggcaagugauaguagaccggggcgaucguuccggguacagcggaaucuucucuguugagggcaaaucauguauuaaccgcugcuuuuauguggaacugaucagagguaggaaggaggaaacugagguccuauggaccaguaauagcaucguggucuucugugggacauccggcacuuacggaaccggcucuuggccugacggggcggaucucaaccugaugccaauuuga

SEQ ID NO: 151016 - RNA, 1410 nt, Artificial Sequence; identical to SEQ ID NO: 150194
  derived and/or modified CDS sequence (opt3) from neuraminidase__InfluenzaA__AFN19468

SEQ ID NO: 151017 - RNA, 1410 nt, Artificial Sequence
  derived and/or modified CDS sequence (opt3) from neuraminidase__InfluenzaA__AFN19470
augaaccccaaucagaagaucauuaccauaggcagcgugucccugacaaucucuacuauuugcuucuuuaugcagaucgccauucucaucacgaccgucacacuucacuucaaacaguacgaguuuaacucaccuccaaauaaccagguuaugcugugugaaccgacuauaaucgagagaaauaugaccgaaauuguguauuugacaaacaccacuaucgagaaggaaauuugccccaaaccugcugaguacaggaauuggaguaagccacagugugacaucacaggguucgcacccuuuagcaaagauaacuccauacgguuaucugccggaggugacauuuggguaacccgcgagccuuaugugucgugcgauccagacaaguguuaccaauucgcgcugggccaggggacgacucuaaauaacguccauucaaauaacaccgugcgagaucguacacccuauagaacucuccugaugaaugaacuuggaguuccuuuucaccugggcaccaaacaggugugcaucgcuuggagcaguuccucuugucaugacgguaaggccugguugcacgucugcauuacaggggaugacaagaacgcaaccgccagcuucaucuacaauggaaggcucguggauuccguaguuucauggaguaaagagauccugcggacgcaggaaagcgagugugugugcauuaacggcacuuguacagucgugaugaccgacggcucugcuuccgggaaggcagauacuaaaauacuguuuaucgaggaaggaaagauugugcauacaucaacccucagcgguagugcccaacacgucgaggaaugcucuugcuauccacgcuacccgggcguuagaugugugugcagggacaacuggaagggguccaaucggcccaucguagauauaaacauuaaagaccacagcaucgugucgucuuacgucuguuccggauuagugggcgacacgccucgcaagaaugauucaaguagcuccucucauugccuggacccaaacaaugaggaaggugggcacggaguuaaaggcugggcuuucgaugacggcaacgauguguggauggggcgaaccaucaaugagacaagcagacuuggauaugagacuuuuaaggucauugaagguuggucaaaccccaaaaguaaguugcagaucaauaggcaagugauuguaaacaaauccgaccggagcggcuacucugggauauucucaguugagggaaagaguuguaucaaucguugcuuuuauguggaacugauucgcggcagaaaggaggaaaccgagguccuauggacaagcaacuccaucguggucuucugugguacuucugggaccuacggcacaggaucguggccugauggcgccgaccucaaucugaugccaaucuga

SEQ ID NO: 151018 - RNA, 1410 nt, Artificial Sequence; identical to SEQ ID NO: 150970
  derived and/or modified CDS sequence (opt3) from neuraminidase__InfluenzaA__AFN19472

SEQ ID NO: 151019 - RNA, 1410 nt, Artificial Sequence
  derived and/or modified CDS sequence (opt3) from neuraminidase__InfluenzaA__AFN19476
augaaccccaaucagaagaucauuaccauaggcagcgugucccugacaaucucuacuauuugcuucuuuaugcagaucgccauucucaucacgaccgucacacuucacuucaaacaguacgaguuuaacucaccuccaaauaaccagguuaugcugugugaaccgacuauaaucgagagaaauauuaccgaaaucguguauuugacaaacaccacuauugagaaggaaaucugccccaaaccugcugaguacaggaauuggaguaagccacagugugggauaacaggauucgcacccuuaagcaaagacaacuccauucggcugucugccgguggcgauaucuggguaacccgcgagccuuaugugucgugcgacccagauaaguguuaccaauuugcgcuagggcagggaacgacucucaauaacguccauucaaauaacaccgugcgagaccguacacccuauagaacucugcuuaugaaugaacugggcguuccuuuccacuuggguaccaaacaggugugcauugcuuggagcaguuccucuugucaugaugggaaggccuggcuccacgucugcaucacaggagacgauaagaacgcaaccgccagcuuuaucuacaauggcaggcugguggacuccguaguuucauggaguaaagagauucugcggacgcaggaaagcgagugugugugcauaaacggcacuuguacagucgugaugaccgaugggucugcuuccggaaaggcagacacuaaaauccucuucauugaggaagguaagaucgugcauacaucaaccuuaagcggcagugcccaacacgucgaggaaugcucuugcuauccacgcuacccggggguuagaugugugugcagggauaacuggaagggauccaaucggcccauaguagacauuaacaucaaagaucacagcaucgugucgucuuacgucuguuccggccuggugggugacacgccucgcaagaaugacucaaguagcuccucucauugccuugauccaaacaaugaggaagggggacacggcguuaaaggcugggcuuuugacgaugggaacgacguguggaugggacgaaccauuaaugagacaagcagauuggguuaugagacuuucaaggucaucgaaggcuggucaaaccccaaaaguaagcugcagauuaauaggcaagugauaguagaucguggggaccgguccggauacagcggcaucuuuucuguugaggguaaaucauguauuaaccgcugcuucuauguggaacuaaucagagggaggaaggaggaaaccgagguccucuggacaaguaauagcaucguggucuuuuguggcacuuccggaaccuacggcacagggucuuggccugauggagccgaccugaaccuuaugccaauuuga

SEQ ID NO: 151020 - RNA, 1410 nt, Artificial Sequence; identical to SEQ ID NO: 150970
  derived and/or modified CDS sequence (opt3) from neuraminidase__InfluenzaA__AFN19478

SEQ ID NO: 151021 - RNA, 1410 nt, Artificial Sequence
  derived and/or modified CDS sequence (opt3) from neuraminidase__InfluenzaA__AFN19480
augaaccccaaucagaagaucauuaccauaggcagcgugucccugacaaucucuacuauuugcuucuuuaugcaaaucgccauucucaucacgaccgucacacuucacuucaaacaguacgaguuuaacucaccuccaaauaaccagguuaugcugugugaaccgacuauaaucgagagaaauaugaccgaaauuguguauuugacaaacaccacuaucgagaaggaaauuugccccaaaccugcugaguacaggaauuggaguaagccacagugugacaucacaggguucgcacccuuuagcaaagauaacuccauacgguuaucugccggaggugacauuuggguaacccgcgagccuuaugugucgugcgauccagacaaguguuaccaauucgcgcugggccaggggacgacucuaaauaacguccauucaaauaacaccgugggagaucgaacacccuaucguacucuccugaugaaugaacuuggcguuccuuuucaccuggguaccaaacaggugugcaucgcuuggagcaguuccucuugucaugacgggaaggccugguugcacgucugcauuacaggagaugacaagaacgcaaccgccagcuucaucuacaauggcagacucguggauuccguaguuucauggaguaaagagauccugaggacgcaggaaagcgagugugugugcauuaacggcacuuguacagucgugaugaccgacgggucugcuuccggaaaggcagauacuaaaauacuguuuaucgaggaagguaagauugugcauacaucaacccucagcggcagugcccaacacgucgaggaaugcucuugcuauccacgguacccggggguucgcugugugugcagagacaacuggaagggauccaauaggcccaucguagauauaaacauuaaagaccacagcaucgugucgucuuacgucuguuccggcuuagugggugacacgccucggaagaaugauucaaguagcuccucucauugccuggacccaaacaaugaggaagggggacacggcguuaaaggcugggcuuucgaugacgggaacgauguguggaugggacgcaccaucaaugagacaagccgacuugguuaugagacuuuuaaggucauugaaggcuggucaaaccccaaaaguaaguugcagaucaauagacaggugauuguagacagguccgaucggagcggguacucuggaauauucucaguugagggcaaaaguuguaucaaccguugcuuuuauguggaacugauucgcgguagaaaggaggaaaccgagguccuauggacaagcaauuccaucguggucuucugugggacuucuggcaccuacggaacaggcucguggccugacggggccgaucucaaccugaugccaaucuga

SEQ ID NO: 151022 - RNA, 1410 nt, Artificial Sequence
  derived and/or modified CDS sequence (opt3) from neuraminidase__InfluenzaA__AFN19482
augaaccccaaucagaagaucauuaccauaggcagcgugucccugacaaucucuacuauuugcuucuuuaugcagaucgccauucucaucacgaccgucacacuucacuucaaacaguacgaguuuaacucaccuccaaauaaccagguuaugcugugugaaccgacuauaaucgagagaaauauuaccgaaaucguguauuugacaaacaccacuauugagaaggaaaucugccccaaaccugcuaaguacaggaauuggaguaaaccacagugugacauaacaggguucgcacccuuuagcaaggauaacuccauucgguuaucugccggaggugacaucuggguaacccgcgagccuuaugugucgugcgauccagacaaguguuaccaauucgcgcugggccaggggacgacucuaaauaacguccauucaaauaacaccgugcgagaucguacacccuauagaacucuccugaugaaugagcuuggaguuccuuuucaccugggcaccaaacaggugugcauugcuuggagcaguuccucuugucaugacgguaaggccugguugcacgucugcaucacaggggaugacaaaaacgcaaccgccagcuucaucuacaauggaaggcucguggauuccguaguuucauggaguaaggaaauucugcggacgcaggagagcgaaugugugugcauaaacggcacuuguacagucgugaugaccgacggcucugcuuccgggaaagcagauacuaagauccuguuuauugaggagggaaagaucgugcauacaucaacccucagcgguagugcccaacacgucgaagagugcucuugcuauccacgcuacccgggcguuagaugugugugcagggacaacuggaaaggguccaaucggcccauaguagauauuaacaucaaggaccacagcaucgugucgucuuacgucuguuccggauuagugggcgacacgccucgcaaaaaugauucaaguagcuccucucauugccuggacccaaacaaugaagagggugggcacggaguuaagggcugggcuuucgaugacggcaacgauguguggauggggcgaaccauuaaugaaacaagcagacuuggauaugagacuuuuaaagucaucgaggguuggucaaaccccaagaguaaauugcagauuaauaggcaagugauaguagaccgguccgaucguagcggcuacucugggaucuucucaguugaaggaaagaguuguauuaaccgcugcuuuuauguggagcugaucagaggcaggaaggaagagaccgaaguccuauggacaagcaauuccaucguggucuucugugguacuucugggaccuacggcacaggaucguggccugacggcgccgaucucaaccugaugccaauuuga

SEQ ID NO: 151023 - RNA, 1410 nt, Artificial Sequence; identical to SEQ ID NO: 150194
  derived and/or modified CDS sequence (opt3) from neuraminidase__InfluenzaA__AFN19484

SEQ ID NO: 151024 - RNA, 1410 nt, Artificial Sequence; identical to SEQ ID NO: 150970
  derived and/or modified CDS sequence (opt3) from neuraminidase__InfluenzaA__AFN19488

SEQ ID NO: 151025 - RNA, 1410 nt, Artificial Sequence
  derived and/or modified CDS sequence (opt3) from neuraminidase__InfluenzaA__AFN19492
augaaccccaaucagaagaucauuaccauaggcagcgugucccugacaaucucuacuauuugcuucuuuaugcaaaucgccauucucaucacgaccgucacacuucacuucaaacaguacgaguuuaacucaccuccaaauaaccagguuaugcugugugaaccgacuauaaucgagagaaauauuaccgaaaucguguauuugacaaacaccacuauugagaaggaaaucugccccaaaccugcugaguacaggaauuggaguaagccacagugugacauaacaggguucgcacccuuuagcaaagauaacuccauucgguuaucugccggaggugacaucuggguaacccgcgagccuuaugugucgugcgauccagacaaguguuaccaauucgcgcugggccaggggacgacucuaaauaacguccauucaaauaacaccgugcgagaucguacacccuauagaacucuccugaugaaugaacuuggaguuccuuuucaccugggcaccaaacaggugugcauugcuuggagcaguuccucuugucaugacgguaaggccugguugcacgucugcaucacaggggaugacaagaacgcaaccgccagcuucaucuacaauggaaaacucguggauuccguaguuucauggaguaaggagauucugaggacgcaggaaagcgagugugugugcauaaacggcacuuguacagucgugaugaccgacggcucugcuuccgggaaagcagauacuaagauccuguuuauugaggaaggaaagaucgugcauacaucaacccucagcgguagugcccaacacgucgaggaaugcucuugcuauccacgguacccgggcguucgcugugugugcagagacaacuggaaaggguccaauaggcccauaguagauauuaacaucaaggaccacagcaucgugucgucuuacgucuguuccggauuagugggcgacacgccucggaaaaaugauucaaguagcuccucucauugccuggacccaaacaaugaggaaggugggcacggaguuaagggcugggcuuucgaugacggcaacgauguguggauggggcgcaccauuaaugagacaagccgacuuggauaugagacuuuuaaagucaucgaagguuggucaaaccccaagaguaaauugcagauuaauagacaggugauaguagacaggggcgaucgguccggguacagcggaaucuucucuguugagggcaagucauguauuaaccguugcuuuuauguggaacugauccgcgguagaaaggaggaaaccgagguccuauggacaaguaauagcaucguggucuucugugggacuuccggcaccuacggaacaggcucuuggccugacggggccgaucucaaccugaugccaauuuga

SEQ ID NO: 151026 - RNA, 1410 nt, Artificial Sequence
  derived and/or modified CDS sequence (opt3) from neuraminidase__InfluenzaA__AFN19494
augaaccccaaucagaagaucauuaccauaggcagcgugucccugacaaucucuacuauuugcuucuuuaugcaaaucgccauucucaucacgaccgucacacuucacuucaaacaguacgaguuuaacucaccuccaaauaaccagguuaugcugugugaaccgacuauaaucgagagaaauauuaccgaaaucguguauuugacaaacaccacuauugagaaggaaaucugccccaaauuagcugaguacaggaauuggaguaagccucagugugacauaacaggguucgcaccauuuagcaaagauaacuccauucggcugucugccggaggugacaucuggguaacccgcgagcccuaugugucgugcgauccugacaaguguuaccaauucgcgcuaggccaggggacgacucucaauaacaugcauucaaauaacaccguccgagaucguacaccauauagaacucugcuuaugaaugaacugggagugcccuuucacuugggcaccaagcagguuugcauugcuuggagcaguuccucuugucaugacgguaaagccuggcuccacgugugcaucacaggggaugacaagaacgcaaccgccagcuucaucuacaauggaaggcuggucgauuccgugguaucauggaguaaagagauucugcggacgcaggaaagcgaguguguuugcauaaacggcacuuguacaguggucaugaccgacggcucugcuuccgggaaggcagauacuaaaauccucuuuauugaggaaggaaagaucgugcauacaucaaccuuaagcgguagugcccaacacguggaggaaugcucuugcuauccucgcuacccaggcgucagauguguuugcagggacaacuggaagggguccaaucggccgauaguggauauuaacaucaaagaccacagcaucguaucgucuuacguguguuccggacuggucggcgacacgccccgcaagaaugauucaaguagcuccucucauugccuugacccuaacaaugaggaaggugggcacggagugaaaggcugggcuuucgaugacggcaacgauguuuggauggggcgaaccauuaaugagacaagcagauugggauaugagacuuuuaaggugaucgaagguuggucaaacccaaaaaguaagcugcagauuaauaggcaggucauaguggaccggggcaaccguuccggguacagcggaaucuucucuguagagggcaaaucauguauuaaucgcugcuuuuauguugaacuaaucagagguaggaaggaggaaaccgaggugcucuggacaaguaacagcaucgucguguucugugggacuuccggcaccuacggaacaggcucuuggcccgauggggccgaccugaaucuuaugccuauuuga

SEQ ID NO: 151027 - RNA, 1410 nt, Artificial Sequence; identical to SEQ ID NO: 149835
  derived and/or modified CDS sequence (opt3) from neuraminidase__InfluenzaA__AFN19496

SEQ ID NO: 151028 - RNA, 1410 nt, Artificial Sequence
  derived and/or modified CDS sequence (opt3) from neuraminidase__InfluenzaA__AFN19498
augaaccccaaucagaagaucauuaccauaggcagcgugucccugacaaucucuacuauuugcuucuuuaugcaaaucgccauucucaucacgaccgucacacuucacuucaaacaguacgaguuuaacucaccuccaaauaaccagguuaugcugugugaaccgacuauaaucgagagaaauauuaccgaaaucguguauuugacaaacaccacuauugagaaggaaaucugccccaaauuagcugaguacaggaauuggaguaagccucagugugacauaacaggguucgcaccauuuagcaaagauaacuccauucggcugucugccggaggugacaucuggguaacccgcgagcccuaugugucgugcgauccugacaaguguuaccaauucgcgcuaggccaggggacgacucucaauaacguccauucaaauaacaccgugcgagaucguacaccauauagaacucugcuuaugaaugaacugggaguucccuuucacuugggcaccaaacaggugugcauugcuuggagcaguuccucuugucaugacgguaaggccuggcuccacgucugcaucacaggggaugacaagaacgcaaccgccagcuucaucuacaauggaaaacugguggauuccguaguuucauggaguaaggagauucugaggacgcaggaaagcgagugugugugcauaaacggcacuuguacagucgugaugaccgacggcucugcuuccgggaaagcagauacuaagauccucuuuauugaggaaggaaagaucgugcauacaucaaccuuaagcgguagugcccaacacgucgaggaaugcucuugcuauccucgguacccaggcguucgcugugugugcagagacaacuggaaaggguccaauaggccgauaguagauauuaacaucaaggaccacagcaucgugucgucuuacgucuguuccggacuggugggcgacacgccccggaaaaaugauucaaguagcuccucucauugccuugacccuaacaaugaggaaggugggcacggaguuaagggcugggcuuucgaugacggcaacgauguguggauggggcgcaccauuaaugagacaagccgauugggauaugagacuuuuaaagucaucgaagguuggucaaacccaaagaguaaacugcagauuaauagacaggugauaguagacaggggcaaccgguccggguacagcggaaucuucucuguugagggcaagucauguauuaaucguugcuuuuauguggaacuaauccgcgguagaaccgaggaaacagagguccucuggaccaguaacagcaucguggucuucugugggacuuccggcacauacggaaccggcucuuggcccgauggggccgaccugaaucuuaugccuauuuga

SEQ ID NO: 151029 - RNA, 1410 nt, Artificial Sequence; identical to SEQ ID NO: 150978
  derived and/or modified CDS sequence (opt3) from neuraminidase__InfluenzaA__AFN19500

SEQ ID NO: 151030 - RNA, 1410 nt, Artificial Sequence; identical to SEQ ID NO: 150970
  derived and/or modified CDS sequence (opt3) from neuraminidase__InfluenzaA__AFN19502

SEQ ID NO: 151031 - RNA, 1410 nt, Artificial Sequence; identical to SEQ ID NO: 147566
  derived and/or modified CDS sequence (opt3) from neuraminidase__InfluenzaA__AFN19504

SEQ ID NO: 151032 - RNA, 1410 nt, Artificial Sequence; identical to SEQ ID NO: 147566
  derived and/or modified CDS sequence (opt3) from neuraminidase__InfluenzaA__AFN19506

SEQ ID NO: 151033 - RNA, 1410 nt, Artificial Sequence; identical to SEQ ID NO: 150978
  derived and/or modified CDS sequence (opt3) from neuraminidase__InfluenzaA__AFN19508

SEQ ID NO: 151034 - RNA, 1410 nt, Artificial Sequence; identical to SEQ ID NO: 150970
  derived and/or modified CDS sequence (opt3) from neuraminidase__InfluenzaA__AFN19510

SEQ ID NO: 151035 - RNA, 1410 nt, Artificial Sequence; identical to SEQ ID NO: 150970
  derived and/or modified CDS sequence (opt3) from neuraminidase__InfluenzaA__AFN19512

SEQ ID NO: 151036 - RNA, 1410 nt, Artificial Sequence; identical to SEQ ID NO: 150970
  derived and/or modified CDS sequence (opt3) from neuraminidase__InfluenzaA__AFN19516

SEQ ID NO: 151037 - RNA, 1410 nt, Artificial Sequence; identical to SEQ ID NO: 150978
  derived and/or modified CDS sequence (opt3) from neuraminidase__InfluenzaA__AFN19518

SEQ ID NO: 151038 - RNA, 1410 nt, Artificial Sequence; identical to SEQ ID NO: 150978
  derived and/or modified CDS sequence (opt3) from neuraminidase__InfluenzaA__AFN19520

SEQ ID NO: 151039 - RNA, 1410 nt, Artificial Sequence; identical to SEQ ID NO: 150970
  derived and/or modified CDS sequence (opt3) from neuraminidase__InfluenzaA__AFN19522

SEQ ID NO: 151040 - RNA, 1410 nt, Artificial Sequence
  derived and/or modified CDS sequence (opt3) from neuraminidase__InfluenzaA__AFN19524
augaaccccaaucagaagaucauuaccauaggcagcgugucccugacaaucucuacuauuugcuucuuuaugcagaucgccauucucaucacgaccgucacacuucacuucaaacaguacgaguuuaacucaccuccaaauaaccagguuaugcugugugaaccgacuauaaucgagagaaauauuaccgaaaucguguauuugacaaacaccacuauugagaaggaaaucugccccaaaccugcugaguacaggaauuggaguaagccacagugugacauaacaggguucgcacccuuuagcaaagauaacuccauucgguuaucugccggaggugacaucuggguaacccgcgagccuuaugugucgugcgauccagacaaguguuaccaauucgcgcugggccaggggacgacucuaaauaacguccauucaaauaacaccgugcgagaucguacacccuauagaacucuccugaugaaugaacuuggaguuccuuuucaccugggcaccaaacaggugugcauugcuuggagcaguuccucuugucaugacgguaaggccugguugcacgucugcaucacaggggaugacaagaacgcaaccgccagcuucaucuacaauggaaggcucguggauuccguaguuucauggaguaaagagauucugcggacgcaggaaagcgagugugugugcauaaacggcacuuguacagucgugaugaccgacggcucugcuuccgggaaggcagauacuaaaauccuguuuauugaggaaggaaagaucgugcauacaucaacccucagcgguagugcccaacacgucgaggaaugcucuugcuauccacgcuacccgggcguuagaugugugugcagggacaacuggaagggguccaaucggcccauaguagauauuaacaucaaagaccacagcaucgugucgucuuacgucuguuccggauuagugggcgacacgccucgcaagaaugauucaaguagcuccucucauugccuggacccaaacaaugaggaaggugggcacggaguuaaaggcugggcuuucgaugacggcaacgauguguggauggggcgaaccauuaaugagacaagcagacuuggauaugagacuuuuaaggucaucgaagguuggucaaaccccaaaaguaaguugcagauuaauaggcaagugauaguagaccggggcgaucguuccggguacagcggaaucuucucuguugagggcaaaucauguauuaaccgcugcuuuuauguggaacugaucagagguaggaaggaggaaaccgagguccuauggacaaguaauagcaucguggucuucugugggacuuccggcaccuacggaacaggcucuuggccugacggggccgaucucucgcugaugccaauuuga

SEQ ID NO: 151041 - RNA, 1410 nt, Artificial Sequence
  derived and/or modified CDS sequence (opt3) from neuraminidase__InfluenzaA__AFN19526
augaaccccaaucagaagaucauuaccauaggcagcgugucccugacaaucucuacuauuugcuucuuuaugcagaucgccauucucaucacgaccgucacacuucacuucaaacagugugaguuuaacucaccuccaaauaaccagguuaugcugugcgaaccgacuauaaucgagagaaauauuaccgaaaucguguacuugacaaacaccacuacagagaaggaaauuugucccaaaccugcugaguauaggaauuggaguaagccacagugcgacaucaccggguucgcacccuuuagcaaagauaacuccauacgguuaucugccggaggugacauuuggguaacgcgcgagccuuacgugucgugugauccagacaagugcuaucaauucgcgcugggccaggggacuacccuaaauaacguccauucaaauaacacagugcgagaucguacucccuacagaacccuccugaugaaugaacuuggaguuccuuuucaccugggcacaaaacagguguguaucgcuuggagcaguuccucuugccaugacgguaaggccugguugcacgucuguauuaccggggaugacaagaacgcaacggccagcuucaucuauaauggaaggcucguggauuccguaguuucauggaguaaagagauccugcggacucaggaaagcgagugcguguguauuaacggcacaugcaccgucgugaugacugacggcucugcuuccgggaaggcagauacaaaaauacuguuuaucgaggaaggaaagauugugcauaccucaacgcucagcgguagugcccaacacgucgaggaaugcucuuguuacccacgcuauccgggcguuagaugcguguguagggacaacuggaagggguccaaucggcccaucguagauauaaacauuaaagaccacagcaucgugucgucuuacgucugcuccggauuagugggcgacaccccucgcaagacagauucaaguagcuccucucauugucuggacccaaauaacgaggaaggugggcacggaguuaaaggcugggcuuucgaugacggcaaugauguguggauggggcgaacuaucaacgagaccagcagacuuggauacgagacauuuaaggucauugaagguuggucaaaucccaaaaguaaguugcagaucaacaggcaagugauuguagaccggggcgaucguuccggguauagcggaauauucucuguugagggcaaaucaugcaucaaucgcuguuuuuacguggaacugauuagagguaggaaggaggaaacugagguccuauggaccaguaacagcaucguggucuucugcgggacauccggcaccuauggaacuggcucuuggccugacggggccgaucucaaucugaugccaaucuga

SEQ ID NO: 151042 - RNA, 1410 nt, Artificial Sequence
  derived and/or modified CDS sequence (opt3) from neuraminidase__InfluenzaA__AFN19528
augaaccccaaucagaagaucauuaccauaggcagcgugucccugacaaucucuacuauuugcuucuuuaugcagaucgccauucucaucacgaccgucacacuucacuucaaacaguacgaguuuaacucaccuccaaauaaccagguuaugcugugugaaccgacuauaaucgagagaaauaugaccgaaauuguguauuugacaaacaccacuaucgagaaggaaauuugccccaaaccugcugaguacaggaauuggaguaagccacagugugacaucacaggguucgcacccuuuagcaaagauaacuccauacgguuaucugccggaggugacauuuggguaacccgcgagccuuaugugucgugcgauccagacaaguguuaccaauucgcgcugggccaggggacgacucuaaauaacguccauucaaauaacaccgugcgagaucguacacccuauagaacucuccugaugaaugaacuuggaguuccuuuucaccugggcaccaaacaggugugcaucgcuuggagcaguuccucuugucaugacgguaaggccugguugcacgucugcauuacaggggaugacaagaacgcaaccgccagcuucaucuacaauggaaggcucguggauuccguaguuucauggaguaaagagauccugcggacgcaggaaagcgagugugugugcauuaacggcacuuguacagucgugaugaccgacggcucugcuuccgggaagucagauacuaaaauacuguuuaucgaggaaggaaagauugugcauacaagcacccucagugguucugcacaacacgucgaggaaugcuccugcuauccacgcuacccgggcguuagaugugugugcagggacaacuggaaggggagcaaucggcccaucguagauauaaacauuaaagaccacucgaucgugucuuccuacgucuguucaggauuagugggcgacacgccucgcaagaaugauaguagcuccucuagccauugccuggacccaaacaaugaggaaggugggcacggaguuaaaggcugggccuucgaugacggcaacgauguguggauggggcgaaccaucaaugagacaucaagacuuggauaugagacuuuuaaggucauugaagguuggaguaaccccaaauccaaguugcagaucaauaggcaagugauuguagaccggagcgaucguucuggcuacucagggauauucaguguugagggaaaaagcuguaucaaccgcugcuuuuauguggaacugauuagaggcaggaaggaggaaaccgagguccuauggacauccaauucuaucguggucuucugugguacuucggggaccuacggcacaggaagcuggccugacggcgcugaucucaaccugaugccaaucuga

SEQ ID NO: 151043 - RNA, 1410 nt, Artificial Sequence; identical to SEQ ID NO: 151006
  derived and/or modified CDS sequence (opt3) from neuraminidase__InfluenzaA__AFN19530

SEQ ID NO: 151044 - RNA, 1410 nt, Artificial Sequence; identical to SEQ ID NO: 150970
  derived and/or modified CDS sequence (opt3) from neuraminidase__InfluenzaA__AFN19532

SEQ ID NO: 151045 - RNA, 1410 nt, Artificial Sequence; identical to SEQ ID NO: 151006
  derived and/or modified CDS sequence (opt3) from neuraminidase__InfluenzaA__AFN19534

SEQ ID NO: 151046 - RNA, 1410 nt, Artificial Sequence; identical to SEQ ID NO: 150970
  derived and/or modified CDS sequence (opt3) from neuraminidase__InfluenzaA__AFN19536

SEQ ID NO: 151047 - RNA, 1410 nt, Artificial Sequence; identical to SEQ ID NO: 150970
  derived and/or modified CDS sequence (opt3) from neuraminidase__InfluenzaA__AFN19538

SEQ ID NO: 151048 - RNA, 1410 nt, Artificial Sequence; identical to SEQ ID NO: 150970
  derived and/or modified CDS sequence (opt3) from neuraminidase__InfluenzaA__AFN19544

SEQ ID NO: 151049 - RNA, 1410 nt, Artificial Sequence
  derived and/or modified CDS sequence (opt3) from neuraminidase__InfluenzaA__AFN19546
augaaccccaaucagaagaucauuaccauaggcagcgugucccugacaaucucuacuauuugcuucuuuaugcagaucgccauucucaucacgaccgucacacuucacuucaaacaguacgaguuuaacucaccuccaaauaaccagguuaugcugugugaaccgacuauaaucgagagaaauauuaccgaaaucguguauuugacaaacaccacuauugagaaggaaaucugccccaaaccugcugaguacaggaauuggaguaagccacagugugggauaacaggauucgcacccuuuagcaaagacaacuccauucgguuaucugccgguggcgauaucuggguaacccgcgagccuuaugugucgugcgacccagauaaguguuaccaauucgcgcuggggcagggaacgacucuaaauaacguccauucaaauaacaccgugcgagaccguacacccuauagaacucuccugaugagcgaacuuggcguuccuuuucaccuggguaccaaacaggugugcauugcuuggaguuccucuagcugucaugaugggaaggccugguugcacgucugcaucacaggagacgauaagaaugcaaccgccuccuucaucuacaacggcaggcucguggacucaguaguuaguuggagcaaagagauucugcggacgcaggaaucugagugugugugcauaaauggcacuuguacagucgugaugaccgauggguccgcuucaggaaaggcagacacuaaaauccuguuuauugaggaagguaagaucgugcauacaagcacccucaguggcucugcccaacacgucgaggaaugcuccugcuauccacgcuacccggggguuagaugugugugcagggauaacuggaagggaagcaaccggcccauaguagacauuaauaucaaagaucacucgaucgugucuuccuacgucuguucaggcuuagugggugacacgccucgcaagaacgacaguagcuccucuagccauugccuggauccaaauaacgaggaagggggacacggcguuaaaggcugggcuuucgacgaugggaaugacguguggaugggacgaaccauuaacgagacaucaagacuugguuaugagacuuuuaaggucaucgaaggcuggaguaaucccaaauccaaguugcagauuaacaggcaagugauaguagaucguggggaccggagcggauacucuggcaucuucucaguugaggguaaaaguuguauuaaucgcugcuuuuauguggaacugaucagagggaggaaggaggaaaccgagguccuauggacaagcaacuccaucguggucuucuguggcacuucuggaaccuacggcacagggucguggccugauggagccgaccucaaucugaugccaauuuga

SEQ ID NO: 151050 - RNA, 1410 nt, Artificial Sequence
  derived and/or modified CDS sequence (opt3) from neuraminidase__InfluenzaA__AFN19548
augaaccccaaucagaagaucauuaccauaggcagcgugucccugacaaucucuacuauuugcuucuuuaugcagaucgccauucucaucacgaccgucacacuucacuucaaacaguacgaguuuaacucaccuccaaauaaccagguuaugcugugugaaccgacuauaaucgagagaaauauuaccgaaaucguguauuugacaaacaccacuauugagaaggaaaucugccccaaaccugcugaguacaggaauuggaguaagccacagugugacauaacaggguucgcacccuuuagcaaagauaacuccauucgguuaucugccggaggugacaucuggguaacccgcgagccuuaugugucgugcgauccagacaaguguuaccaauucgcgcugggccaggggacgacucuaaauaacguccauucaaauaacaccgugcgagaucguacacccuauagaacucuccugaugaaugaacuuggaguuccuuuucaccugggcaccaaacaggugugcauugcuuggagcaguuccucuugucaugacgguaaggccugguugcacgucugcaucacaggggaugacaagaacgcaaccgccagcuucaucuacaauggaaggcucguggauuccguaguuucauggaguaaagagauucugcggacgcaggaaagcgagugugugugcauaaacggcacuuguacagucgugaugaccgacggcucugcuuccgggaaggcagauacuaaaauccuguuuauugaggaaggaaagaucgugcauacaucaacccucagcgguagugcccaacacgucgaggaaugcucuugcuauccacgcuacccgggcguuagaugugugugcagggacaacuggaagggguccaaucggcccauaguagauauuaacaucaaagaccacagcaucgugucgucuuacgucuguuccggauuagugggcgacacgccucgcaagaaugauucauucaguagcucccauugccuggacccaaacaaugaggaaggugggcacggaguuaaaggcugggcuuuugaugacggcaacgauguguggauggggcgaaccauuaaugagacaucuagacuuggauaugagacuuucaaggucaucgaagguuggagcaaccccaaaucaaaguugcagauuaauaggcaagugauaguagaccggggcgaucguaguggguacuccggaaucuuuagcguugagggcaaaucuuguauuaaccgcugcuucuauguggaacugaucagagguaggaaggaggaaaccgagguccuauggacaucaaauaguaucguggucuucugugggacuagcggcaccuacggaacaggcuccuggccugacggggccgaucucaaccugaugccaauuuga

SEQ ID NO: 151051 - RNA, 1410 nt, Artificial Sequence
  derived and/or modified CDS sequence (opt3) from neuraminidase__InfluenzaA__AFN19550
augaaccccaaucagaagaucauuaccauaggcagcgugucccugacaaucucuacuauuugcuucuuuaugcaaaucgccauucucaucacgaccgucacacuucacuucaaacaguacgaguuuaacucaccuccaaauaaccagguuaugcugugugaaccgacuauaaucgagagaaauauuaccgaaaucguguauuugacaaacaccacuauugagaaggaaaucugccccaaauuagcugaguacaggaauuggaguaagccucagugugacauaacaggguucgcaccauuuagcaaagauaacuccauucggcugucugccggaggugacaucuggguaacccgcgagcccuaugugucgugcgauccugacaaguguuaccaauucgcgcuaggccaggggacgacucucaauaacguccauucaaauaacaccgugcgagaucguacaccauauagaacucugcuuaugaaugaacugggaguucccuuucacuugggcaccaaacaggugugcauugcuuggagcaguuccucuugucaugacgguaaggccuggcuccacgucugcaucacaggggaugacaagaacgcaaccgccagcuucaucuacaauggaaggcugguggauuccguaguuucauggaguaaagagauucugcggacgcaggaaagcgagugugugugcauaaacggcacuuguacagucgugaugaccgacggcucugcuuccggggaggcagauacuaagauccucuuuauugaagagggaaaaaucauacauacaucaaccuuaagcgguagugcccaacacguggaagagugcucuugcuauccucgcuacccaggcgucagauguguuugcagggacaacuggaagggguccaaucggccgauuguggauaucaacaucaaggaccacagcauuguaucgucuuacguguguuccggacuggucggcgacacgccccgcaaaaaugauucaaguagcuccucucauugccuugacccuaacaaugaagagggugggcacggagugaagggcugggcuuucgaugacggcaacgauguuuggauggggcgaaccaucaaugagacaagcagauugggauaugaaacuuuuaaagugauugaggguuggucaaacccaaagaguaaacugcagauaaauaggcaggucaucguggaccggggcaaccguuccggguacagcggaauuuucucuguagaaggcaagucauguaucaaucgcugcuuuuauguugagcuaaucagagguaggaaagaagagaccgaggugcucuggacaaguaacagcauugucguguucugugggacuuccggcaccuacggaacaggcucuuggcccgauggggccgaccugaaucuuaugccuauauga

SEQ ID NO: 151052 - RNA, 1410 nt, Artificial Sequence; identical to SEQ ID NO: 150970
  derived and/or modified CDS sequence (opt3) from neuraminidase__InfluenzaA__AFN19552

SEQ ID NO: 151053 - RNA, 1410 nt, Artificial Sequence; identical to SEQ ID NO: 150194
  derived and/or modified CDS sequence (opt3) from neuraminidase__InfluenzaA__AFN19554

SEQ ID NO: 151054 - RNA, 1410 nt, Artificial Sequence; identical to SEQ ID NO: 150194
  derived and/or modified CDS sequence (opt3) from neuraminidase__InfluenzaA__AFN19556

SEQ ID NO: 151055 - RNA, 1410 nt, Artificial Sequence
  derived and/or modified CDS sequence (opt3) from neuraminidase__InfluenzaA__AFN19558
augaaccccaaucagaagaucauuaccauaggcagcgugucccugacaaucucuacuauuugcuucuuuaugcagaucgccauucucaucacgaccgucacacuucacuucaaacaguacgaguuuaacucaccuccaaauaaccagguuaugcugugugaaccgacuauaaucgagagaaauauuaccgaaaucguguauuugacaaacaccacuauugagaaggaaaucugccccaaaccugcugaguacaggaauuggaguaagccacagugugacauaacaggguucgcacccuuuagcaaagauaacuccauucgguuaucugccggaggugacaucuggguaacccgcgagccuuaugugucgugcgauccagacaaguguuaccaauucgcgcugggccaggggacgacucuaaauaacguccauucaaauaacaccgugcgagaucguacacccuauagaacucuccugaugaaugaacuuggaguuccuuuucaccugggcaccaaacaggugugcauugcuuggagcaguuccucuugucaugacgguaaggccugguugcacgucugcaucacaggggaugacaagaacgcaaccgccagcuucaucuacaauggaaggcucguggauuccguaguuucauggaguaaagagauucugcggacgcaggaaagcgagugugugugcauaaacggcacuuguacagucgugaugaccgacggcucugcuuccgggaaggcagauacuaaaauccuguuuauugaggaaggaaagaucgugcauacaucaacccucagcgguagugcccaacacgucgaggaaugcucuugcuauccacgcuacccgggcguuagaugugugugcagggacaacuggaagggguccaaucggcccauaguagauauuaacaucaaagaccacagcaucgugucgucuuacgucuguuccggauuagugggcgacacgccucgcaagaaugauucaaguagcuccucucauugccuggacccaaacaaugaggaaggugggcacggaguuaaaggcugggcuuucgaugacggcaacgauguguggauggggcgaaccauuaaugagacaagcagacuuggauaugagacuuuuaaggucaucgaagguuggucaaaccccaaaaguaaguugcagaugaauaggcaagugauuguagaccggggcgaucguuccggguacagcggaauauucucuguugagggcaaaucauguaucaaccgcugcuuuuauguggaacugauuagagguaggaaggaggaaaccgagguccuauggacaaguaauagcaucguggucuucugugggacuuccggcaccuacggaacaggcucuuggccugacggggccgaucucaaccugaugccaaucuga

SEQ ID NO: 151056 - RNA, 1410 nt, Artificial Sequence
  derived and/or modified CDS sequence (opt3) from neuraminidase__InfluenzaA__AFN19560
augaaccccaaucagaagaucauuaccauaggcagcgugucccugacaaucucuacuauuugcuucuuuaugcagaucgccauucucaucacgaccgucacacuucacuucaaacaguacgaguuuaacucaccuccaaauaaccagguuaugcugugugaaccgacuauaaucgagagaaauauuaccgaaaucguguauuugacaaacaccacuauugagaaggaaaucugccccaaaccugcugaguacaggaauuggaguaagccacagugugggauaacaggauucgcacccuuuagcaaagacaacuccauucgguuaucugccgguggcgauaucuggguaacccgcgagccuuaugugucgugcgacccagauaaguguuaccaauucgcgcuggggcagggaacgacucuaaauaacguccauucaaauaacaccgugcgagaccguacacccuauagaacucuccugaugaaugaacuuggcguuccuuuucaccuggguaccaaacaggugugcauugcuuggagcaguuccucuugucaugaugggaaggccugguugcacgucugcaucacaggagacgauaagaacgcaaccgccagcuucaucuacaauggcaggcucguggacuccguaguuucauggaguaaagagauucugcggacgcaggaaagcgagugugugugcauaaacggcacuuguacagucgugaugaccgaugggucugcuuccggaaaggcagacacuaaaauccuguuuauugaggaagguaagaucgugcauacaucaacccucagcggcagugcccaacacgucgaggaaugcucuugcuauccacgcuacccggggguuagaugugugugcagggauaacuggaagggauccaaucggcccauaguagacauuaacaucaaagaucacagcaucgugucgucuuacgucuguuccggcuuagugggugacacgccucgcaagaaugacucaaguagcuccucucauugccuggauccaaacaaugaagggggaggccacggcguuaaagggugggcuuucgacgauggaaacgacguguggaugggucgaaccauuaaugagacaagcagacuuggcuaugagacuuuuaaggucaucgagggguggucaaaccccaaaaguaaguugcagauuaauaggcaagugauaguagaucggggagaccguuccggcuacagcgguaucuucucuguugaagggaaaucauguauuaaccgcugcuuuuauguggagcugaucagaggcaggaaggaagagaccgaaguccuauggacaaguaauagcaucguggucuucuguggaacuuccggcaccuacgggacaggaucuuggccugauggugccgaccucaaccugaugccaauuuga

SEQ ID NO: 151057 - RNA, 1410 nt, Artificial Sequence; identical to SEQ ID NO: 151017
  derived and/or modified CDS sequence (opt3) from neuraminidase__InfluenzaA__AFN19562

SEQ ID NO: 151058 - RNA, 1410 nt, Artificial Sequence
  derived and/or modified CDS sequence (opt3) from neuraminidase__InfluenzaA__AFN19564
augaaccccaaucagaagaucauuaccauaggcagcgugucccugacaaucucuacuauuugcuucuuuaugcagaucgccauucucaucacgaccgucacacuucacuucaaacaguacgaguuuaacucaccuccaaauaaccagguuaugcugugugaaccgacuauaaucgagagaaauauuaccgaaaucguguauuugacaaacaccacuauugagaaggaaaucugccccaaaccugcugaguacaggaauuggaguaagccacagugugggauaacaggauucgcacccuuuagcaaagacaacuccauucgguuaucugccgguggcgauaucuggguaacccgcgagccuuaugugucgugcgacccagauaaguguuaccaauucgcgcuggggcagggaacgacucuaaauaacguccauucaaauaacaccgugcgagaccguacacccuauagaacucuccugaugaaugaacuuggcguuccuuuucaccuggguaccaaacaggugugcauugcuuggagcaguuccucuugucaugaugggaaggccugguugcacgucugcaucacaggagacgauaagaacgcaaccgccagcuucaucuacaauggcaggcucguggacuccguaguuucauggaguaaagagauucugcggacgcaggaaagcgagugugugugcauaaacggcacuuguacagucgugaugaccgaugggucugcuuccggaaaggcagacacuaaaauccuguuuauugaggaagguaagaucgugcauacaucaacccucagcggcagugcccaacacgucgaggaaugcucuugcuauccacgcuacccggggguuagaugugugugcagggauaacuggaagggauccaaucggcccauaguagacauuaacaucaaagaucacagcaucgugucgucuuacgucuguuccggcuuagugggugacacgccucgcaagaccgacucaaguagcuccucucauugccuggauccaaauaacgaggaagggggacacggcguuaaaggcugggcuuucgacgaugggaaugacguguggaugggacgaacaauuaacgagacuagcagacuugguuaugagaccuuuaaggucaucgaaggcuggucaaaucccaaaaguaaguugcagauuaacaggcaagugauaguagaucguggggaccgguccggauacagcggcaucuucucuguugaggguaaaucauguauuaaucgcugcuuuuauguggaacugaucagagggaggaaggaggaaacagagguccuauggaccaguaacagcaucguggucuucuguggcacuuccggaacauacggcaccgggucuuggccugauggagccgaccucaaucugaugccaauuuga

SEQ ID NO: 151059 - RNA, 1410 nt, Artificial Sequence
  derived and/or modified CDS sequence (opt3) from neuraminidase__InfluenzaA__AFN19566
augaaccccaaucagaagaucauuaccauaggcagcgugucccugacaaucucuacuauuugcuucuuuaugcagaucgccauucucaucacgaccgucacacuucacuucaaacaguacgaguuuaacucaccuccaaauaaccagguuaugcugugugaaccgacuauaaucgagagaaauauuaccgaaaucguguauuugacaaacaccacuauugagaaggaaaucugccccaaaccugcugaguacaggaauuggaguaagccacagugugggauaacaggauucgcacccuuuagcaaagacaacuccauucgguuaucugccgguggcgauaucuggguaacccgcgagccuuaugugucgugcgacccagauaaguguuaccaauucgcgcuggggcagggaacgacucuaaauaacguccauucaaauaacaccgugcgagaccguacacccuauagaacucuccugaugaaugaacuuggcguuccuuuucaccuggguaccaaacaggugugcauugcuuggagcaguuccucuugucaugaugggaaggccugguugcacgucugcaucacaggagacgauaagaacgcaaccgccagcuucaucuacaauggcaggcucguggacuccguaguuucauggaguaacgagauucugcggacgcaggaaagcgagugugugugcauaaacggcacuuguacagucgugaugaccgaugggucugcuuccggaaaagcagacacuaagauccuguuuauugaggaagguaaaaucgugcauacaucaacccucagcggcagugcccaacacgucgaggaaugcucuugcuauccacgcuacccggggguuagaugugugugcagggauaauuggaagggauccaaccggcccauaguagacauuaauaucaaggaucacagcaucgugucgucuuacgucuguuccggcuuagugggugacacgccucgcaaaaacgacucaaguagcuccucucauugccuggauccaaauaacgaggaagggggacacggcguuaagggcugggcuuucgacgaugggaaugacguguggaugggacgaaccauuaacgagacaagcagacuugguuaugagacuuuuaaagucaucgaaggcuggucaaaucccaagaguaaauugcagauuaacaggcaagugauaguagaucguggggaccgguccggauacagcggcaucuucucuguugaggguaagucauguauuaaucgcugcuuuuauguggaacugaucagagggaggaaagaggaaaacgagguccuauggaccaguaauagcaucguggucuucuguggcacauccggaacuuacggcaccgggucuuggccugauggagccgaccucaaccugaugccaauuuga

SEQ ID NO: 151060 - RNA, 1410 nt, Artificial Sequence
  derived and/or modified CDS sequence (opt3) from neuraminidase__InfluenzaA__AFN19568
augaaccccaaucagaagaucauuaccauaggcagcgugucccugacaaucucuacuauuugcuucuuuaugcagaucgccauucucaucacgaccgucacacuucacuucaaacaguacgaguuuaacucaccuccaaauaaccagguuaugcugugugaaccgacuauaaucgagagaaauauuaccgaaaucguguauuugacaaacaccacuauugagaaggaaaucugccccaaaccugcugaguacaggaauuggaguaagccacagugugggauaacaggauucgcacccuuuagcaaagacaacuccauucgguuaucugccgguggcgauaucuggguaacccgcgagccuuaugugucgugcgacccagauaaguguuaccaauucgcgcuggggcagggaacgacucuaaauaacguccauucaaauaacaccgugcgagaccguacacccuauagaacucuccugaugaaugaacuuggcguuccuuuucaccuggguaccaaacaggugugcauugcuuggagcaguuccucuugucaugaugggaaggccugguugcacgucugcaucacaggagacgauaagaacgcaaccgccagcuucaucuacaauggcaggcucguggacuccguaguuucauggaguaaagagauucugcggacgcaggaaagcgagugugugugcauaaacggcacuuguacagucgugaugaccgaugggucugcuuccggaaaggcagacacuaaaauccuguuuauugaggaagguaagaucgugcauacaucaacccucagcggcagugcccaacacgucgaggaaugcucuugcuauccacgcuacccggggguuagaugugugugcagggauaacuggaagggauccaaucggcccauaguagacauuaacaucaaagaucacagcaucgugucgucuuacgucuguuccggcuuagugggugacacgccucgcaagaaugacucaaguagcuccucucauugccuggauccaaacaaugaggaagggggacacggcguuaaaggcugggcuuucgacgaugggaacgacguguggaugggacgaaccauuaaugagacaagcagacuugguuaugagacuuuuaaggucaucgaaggcuggucaaaccccaaaaguaaguugcaagugaauaggcagguaauuguugaucguggggaccgguccggauacagcggcauauucucuguggaggguaaaucauguaucaaccgcugcuuuuaugucgaacugauuagagggaggaaggaggaaaucgaggugcuauggaccaguaauagcaucgucguguucuguggcacauccggaacuuacggcaccgggucuuggccugauggagccgaccucaaccugaugccaauuuga

SEQ ID NO: 151061 - RNA, 1410 nt, Artificial Sequence
  derived and/or modified CDS sequence (opt3) from neuraminidase__InfluenzaA__AFN19570
augaaccccaaucagaagaucauuaccauaggcagcgugucccugacaaucucuacuauuugcuucuuuaugcaaaucgccauucucaucacgaccgucacacuucacuucaaacaguacgaguuuaacuauccuccaaauaaccagguuaugcugugugaaccgacuauaaucgagagaaauauuaccgaaaucguguacuugacaaacaccacuauugagaaggaaaucugccccaaaccugcugaguauaggaauuggucaaagccacagugugggauaacaggauucgcacccuuuaguaaagacaacagcauucgguuauccgccgguggcgauaucuggguaacccgcgagccuuacgugucuugcgacccagauaaguguuaucaauucgcgcuggggcagggaacgacucuaaauaacaugcauucgaauaacaccguccgagaccguacacccuacagaacucuccugaugaaugaacuuggcgugccuuuucaccuggguaccaagcagguuugcauugcuuggucaagcaguuccugucaugaugggaaagccugguugcacgugugcaucacaggagacgauaagaacgcaaccgccucuuucaucuauaauggcaggcucgucgacagcgugguauccuggucaaacgagauucugcggacgcaggaaagugaguguguuugcauaaacggcacuuguacaguggucaugaccgaugggagcgcuucuggaaaagcagacacuaagauccuguuuauugaggaagguaaaaucgugcauacauccacccucucaggcagcgcccaacacguggaggaaugcaguugcuacccacgcuacccgggggucagauguguuugcagggauaauuggaagggaucuaaccggcccauaguggacauuaauaucaaggaucacuccaucguaagcucguauguguguucuggcuuagucggugacacgccucgcaaaaacgacuccucaaguagcucccauugccuggauccaaauaacgaggaagggggacacggcgugaagggcugggcuuucgacgaugggaaugacguuuggaugggacgaaccauuaacgagacaucuagacuugguuacgagacuuuuaaagugaucgaaggcuggagcaaucccaagucaaaauugcagauuaacaggcaggucauaguggaucguggggaccggaguggauauuccggcaucuucagcguagaggguaagucuuguauuaaucgcugcuuuuacguugaacugaucagagggaggaaagaggaaaacgaggugcuauggaccucaaauaguaucgucguguucuguggcacaagcggaacuuauggcaccggguccuggccugauggagccgaccucaaccugaugccaauuuga

SEQ ID NO: 151062 - RNA, 1410 nt, Artificial Sequence
  derived and/or modified CDS sequence (opt3) from neuraminidase__InfluenzaA__AFN19572
augaaccccaaucagaagaucauuaccauaggcagcgugucccugacaaucucuacuauuugcuucuuuaugcaaaucgccauucucaucacgaccgucacacuucacuucaaacaguacgaguuuaacucaccuccaaauaaccagguuaugcugugugaaccgacuauaaucgagagaaauauuaccgaaaucguguauuugacaaacaccacuauugagaaggaaaucugccccaaaccugcugaguacaggaauuggaguaagccacagugugacauaacaggguucgcacccuuuagcaaagauaacuccauucggaucucugccggaggugacauuuggguaacccgcgagccuuaugugucgugcgauccagacaaguguuaccaauucgcguuaggccaggggacgacucugaauaacguccauucaaauaacaccgugcgagaucguacacccuauagaacucuacucaugaaugaacugggaguuccuuuucaccuuggcaccaaacaggugugcaucgcuuggagcaguuccucuugucaugacgguaaggccuggcugcacgucugcaucacaggggaugacaagaacgcaaccgccagcuucauuuacaauggaaaauugguggauuccguaguuucauggaguaaggagauacucaggacgcaggaaagcgagugugugugcaucaacggcacuuguacagucgugaugaccgacggcucugcuuccgggaaagcagauacuaagauucuguuuaucgaggaaggaaagauagugcauacaucaacccugagcgguagugcccaacacgucgaggaaugcucuugcuauccacgguacccgggcguucgcugugugugcagagacaacuggaaaggguccaauaggcccauuguagauaucaacaucaaggaccacagcauugugucgucuuacgucuguuccggacucgugggcgacacgccucggaaaaaugauucaaguagcuccucucauugcuuagacccaaacaaugaggaaggugggcacggaguuaagggcugggcuuucgaugacggcaacgauguguggauggggcgcaccaucaaugagacaagccgacugggauaugagacuuuuaaagucauugaagguuggucaaaccccaagaguaaacuucagauaaauagacaggugaucguagacaggggcgaucgguccggguacagcggaauuuucucuguugagggcaagucauguaucaaccguugcuuuuauguggaauugauccgcgguagaaaggaggaaaccgagguccuguggacaaguaauagcauuguggucuucugugggacuuccggcaccuacggaacaggcucuuggccugacggggccgaucuaaaccucaugccaauauga

SEQ ID NO: 151063 - RNA, 1410 nt, Artificial Sequence
  derived and/or modified CDS sequence (opt3) from neuraminidase__InfluenzaA__AFN19574
augaaccccaaucagaagaucauuaccauaggcagcgugucccugacaaucucuacuauuugcuucuuuaugcagaucgccauucucaucacgaccgucacacuucacuucaaacaguacgaguuuaacucaccuccaaauaaccagguuaugcugugugaaccgacuauaaucgagagaaauauuaccgaaaucguguauuugacaaacaccacuauugagaaggaaaucugccccaaauuagcugaguacaggaauuggaguaagccucagugugacauaacaggguucgcaccauuuagcaaagauaacuccauucggcugucugccggaggugacaucuggguaacccgcgagcccuaugugucgugcgauccuaauaaguguuaccaauucgcgcuaggccaggggacgacucucaacaauguccauucaaacaauaccgugcgagaccguacaccauauagaacucugcuuaugaacgaacugggaguucccuuucacuugggcaccaaacaggugugcauugcuuggagcaguuccucuugucaugaugguaaggccuggcuccacgucugcaucacaggggacgauaagaaugcaaccgccagcuucaucuacaacggaaggcugguggacuccguaguuucauggaguaaaaagauucugcggacgcaggagagcgaaugugugugcauaaacggcacuuguacagucgugaugaccgauggcucugcuuccgggaaagcagacacuaagauccucuuuauugaggagggaaagaucgugcauacaucaaccuuaagcgguagugcccaacacgucgaagagugcucuugcuauccucgcuacccaggcguuagaugugugugcagggauaauuggaaaggguccaaccggccgauaguagacauuaauaugaaggaucacagcaucgugucgucuuacgucuguuccggacuggugggcgacacgccccgcaaaaacgacucaaguagcuccucucauugcuucgauccuaaugacgaagagggugggcacggaguuaagggcugggcuuuugaugacggcaacgauguguggauggggcgaaccaucagcgaaaaaucaagacuuggauaugagacauucaaggucauugaggguuggaguaauccaaaauccaaguugcagaucaacaggcaagugauuguagaccggggcgaucguagcggguacucuggaauauuuucaguugaaggcaagaguuguaucaaucgcugcuucuauguggagcugauuagagguagcaaagaagagacugaaguccuauggaccuccaacucuaucguggucuucugugggacaucgggcacuuacggaaccggcagcuggcccgacggggccgauaucaaucucaugccuauuuga

SEQ ID NO: 151064 - RNA, 1410 nt, Artificial Sequence
  derived and/or modified CDS sequence (opt3) from neuraminidase__InfluenzaA__AFN19576
augaaccccaaucagaagaucauuaccauaggcagcgugucccugacaaucucuacuauuugcuucuuuaugcaaaucgccauucucaucacgaccgucacacuucacuucaaacaguacgaguuuaacucaccuccaaauaaccagaugaugcugugugaaccgacuauaaucgagagaaauauuaccgaaaucguuuauuugacaaacaccacuauugagaaggaaaucugccccaaaccugcugaguacaggaauuggaguaagccacagugugacauaacaggguucgcacccuuuagcaaagauaacuccauucgguuaucugccggaggugacaucugggugacccgcgagccuuauguaucgugcgauccagacaaguguuaccaauucgcgcugggccaggggacgacucuaaauaacgugcauucaaauaacaccguccgagaucguacacccuauagaacucuccugaugaaugaacuuggagugccuuuucaccugggcaccaagcagguuugcauugcuuggagcaguuccucuugucaugacgguaaagccugguugcacgugugcaucacaggggaugacaagaacgcaaccgccagcuucaucuacaauggaaggcucgucgauuccgugguaucauggaguaaagagauucugcggacgcaggaaagcgaguguguuugcauaaacggcacuuguacaguggucaugaccgacggcucugcuuccgggaaggcagauacuaaaauccuguuuauugaggaaggaaagaucgugcauacaucaacccucagcgguagugcccaacacguggaggaaugcucuugcuauccacgcuacccgggcgucagauguguuugcagggacaacuggaagggguccaaucggcccauaguggauauuaacaucaaagaccacagcaucguaucgucuuacguguguuccggauuagucggcgacacgccucgcaagaaugauucaaguagcuccucucauugccuggacccaaacaaugaggaaggugggcacggagugaaaggcugggcuuucgaugacggcaacgauguuuggauggggcgaaccauuaaugagacaagcagacuuggauaugagacuuuuaaggugaucgaagguuggucaaaccccaaaaguaaguugcagauuaauaggcaggucauaguggaccggggcgaucguuccggguacagcggaaucuucucuguagagggcaaaucauguauuaaccgcugcuuuuauguugaacugaucagagguaggaaggaggaaaccgaggugcuauggacaaguaauagcaucgucguguucugugggacuuccggcaccuacggaacaggcucuuggccugacggggccgaucucaaccugaugccaauuuga

SEQ ID NO: 151065 - RNA, 1410 nt, Artificial Sequence; identical to SEQ ID NO: 150970
  derived and/or modified CDS sequence (opt3) from neuraminidase__InfluenzaA__AFN19578

SEQ ID NO: 151066 - RNA, 1410 nt, Artificial Sequence; identical to SEQ ID NO: 150970
  derived and/or modified CDS sequence (opt3) from neuraminidase__InfluenzaA__AFN19582

SEQ ID NO: 151067 - RNA, 1410 nt, Artificial Sequence; identical to SEQ ID NO: 150970
  derived and/or modified CDS sequence (opt3) from neuraminidase__InfluenzaA__AFN19584

SEQ ID NO: 151068 - RNA, 1410 nt, Artificial Sequence; identical to SEQ ID NO: 150970
  derived and/or modified CDS sequence (opt3) from neuraminidase__InfluenzaA__AFN19588

SEQ ID NO: 151069 - RNA, 1410 nt, Artificial Sequence; identical to SEQ ID NO: 150970
  derived and/or modified CDS sequence (opt3) from neuraminidase__InfluenzaA__AFN19590

SEQ ID NO: 151070 - RNA, 1410 nt, Artificial Sequence; identical to SEQ ID NO: 151006
  derived and/or modified CDS sequence (opt3) from neuraminidase__InfluenzaA__AFN19592

SEQ ID NO: 151071 - RNA, 1410 nt, Artificial Sequence; identical to SEQ ID NO: 150970
  derived and/or modified CDS sequence (opt3) from neuraminidase__InfluenzaA__AFN19594

SEQ ID NO: 151072 - RNA, 1410 nt, Artificial Sequence; identical to SEQ ID NO: 150978
  derived and/or modified CDS sequence (opt3) from neuraminidase__InfluenzaA__AFN19596

SEQ ID NO: 151073 - RNA, 1410 nt, Artificial Sequence; identical to SEQ ID NO: 150978
  derived and/or modified CDS sequence (opt3) from neuraminidase__InfluenzaA__AFN19600

SEQ ID NO: 151074 - RNA, 1410 nt, Artificial Sequence
  derived and/or modified CDS sequence (opt3) from neuraminidase__InfluenzaA__AFN19602
augaaccccaaucagaagaucauuaccauaggcagcgugucccugacacucucuacuaucugcuucuuuaugcagauugccauccuuauuacgaccgucacacugcacuucaaacaguacgaguuuaacucaccuccaaauaaccagguuauguugugugaaccgacuaucauagagagaaauaugaccgaaaucguguauuuaacaaacaccacuauugagaaggaaaucugccccaaaccugcugaguacaggaauuggaguaagccacagugugacauuacaggguucgcacccuuuagcaaagauaacuccauccggcugucugccggaggugacauauggguaacccgcgagccuuaugugucgugcgauccagacaaguguuaccaauucgcgcuaggccaggggacgacucucaauaacguccauucaaauaacaccgugcgagaucguacacccuauagaacucugcuuaugaaugaacugggaguuccuuuucacuugggcaccaaacaggugugcauugcuuggagcaguuccucuugucaugacgguaaggccuggcuccacgucugcaucacaggggaugacaagaacgcaaccgccagcuucauuuacaauggaaggcugguggauuccguaguuucauggaguaaagagauccugcggacgcaggaaagcgagugugugugcaucaacggcacuuguacagucgugaugaccgacggcucugcuuccgggaaggcagauacuaaaauucucuuuauagaggaaggaaagaucgugcauacaucaaccuuaagcgguagugcccaacacgucgaggaaugcucuugcuauccacgcuacccgggcguuagaugugugugcagggacaacuggaagggguccaaucggcccauuguagauaucaacauaaaagaccacagcauugugucgucuuacgucuguuccggacuggugggcgacacgccucgcaagaaugauucaaguagcuccucucauugccuugacccaaacaaugaggaaggugggcacggaguuaaaggcugggcuuucgaugacggcaacgauguguggauggggcgaaccaucaaugagacaagcagauugggauaugagacuuuuaaggucaucgaagguuggucaaaccccaaaaguaagcugcagauuaauaggcaagugaucguagaccgguccgaucguagcggcuacucugggauuuucucaguugagggaaaaaguuguauaaaccgcugcuuuuauguggaacuaaucagaggcaggaaggaggaaaccgagguccucuggacaagcaauuccauuguggucuucugugguacuucugggaccuacggcacaggaucguggccugacggcgccgaucugaaccuuaugccaaucuga

SEQ ID NO: 151075 - RNA, 1410 nt, Artificial Sequence; identical to SEQ ID NO: 150970
  derived and/or modified CDS sequence (opt3) from neuraminidase__InfluenzaA__AFN19604

SEQ ID NO: 151076 - RNA, 1410 nt, Artificial Sequence; identical to SEQ ID NO: 150970
  derived and/or modified CDS sequence (opt3) from neuraminidase__InfluenzaA__AFN19606

SEQ ID NO: 151077 - RNA, 1410 nt, Artificial Sequence; identical to SEQ ID NO: 150970
  derived and/or modified CDS sequence (opt3) from neuraminidase__InfluenzaA__AFN19608

SEQ ID NO: 151078 - RNA, 1410 nt, Artificial Sequence; identical to SEQ ID NO: 150970
  derived and/or modified CDS sequence (opt3) from neuraminidase__InfluenzaA__AFN19610

SEQ ID NO: 151079 - RNA, 1410 nt, Artificial Sequence; identical to SEQ ID NO: 150978
  derived and/or modified CDS sequence (opt3) from neuraminidase__InfluenzaA__AFN19612

SEQ ID NO: 151080 - RNA, 1410 nt, Artificial Sequence; identical to SEQ ID NO: 150194
  derived and/or modified CDS sequence (opt3) from neuraminidase__InfluenzaA__AFN19614

SEQ ID NO: 151081 - RNA, 1410 nt, Artificial Sequence
  derived and/or modified CDS sequence (opt3) from neuraminidase__InfluenzaA__AFN19618
augaaccccaaucagaagaucauuaccauaggcagcgugucccugacaaucucuacuauuugcuucuuuaugcagaucgccauucucaucacgaccgucacacuucacuucaaacaguacgaguuuaacucaccuccaaauaaccagguuaugcugugugaaccgacuauaaucgagagaaauauuaccgaaaucguguauuugacaaacaccacuauugagaaggaaaucugccccaaaccugcugaguacaggaauuggaguaagccacagugugggauaacaggauucgcacccuuuagcaaagacaacuccauucgguuaucugccgguggcgauaucuggguaacccgcgagccuuaugugucgugcgacccagauaaguguuaccaauucgcgcuggggcagggaacgacucuaaauaacguccauucaaauaacaccgugcgagaccguacacccuauagaacucuccugaugaaugaacuuggcguuccuuuucaccuggguaccaaacaggugugcauugcuuggagcaguuccucuugucaugaugggaaggccugguugcacgucugcaucacaggagacgauaagaacgcaaccgccagcuucaucuacaauggcaggcucguggacuccguaguuucauggaguaacgagauucugcggacgcaggaaagcgagugugugugcauaaacggcacuuguacagucgugaugaccgaugggucugcuuccggaaaagcagacacuaagauccuguuuauugaggaagguaaaaucgugcauacaucaacccucagcggcagugcccaacacgucgaggaaugcucuugcuauccacgcuacccggggguuagaugugugugcagggauaauuggaagggauccaaccggcccauaguagacauuaauaucaaggaucacagcaucgugucgucuuacgucuguuccggcuuagugggugacacgccucgcaaaaacgacucaaguagcuccucucauugccuggauccaaauaacgaggaagggggacacggcguuaagggcugggcuuucgacgaugggaaugacguguggaugggacgaaccauuaacgagacaagcagacuugguuaugagacuuuuaaagucaucgaaggcuggucaaaucccaagaguaaauugcagauuaacaggcaagugauaguagaucguggggaccgguccggauacagcggcaucuucucuguugaggguaagucauguauuaaucgcugcuuuuauguggaacugaucagagggaggaaagaggaaaccgagguccuauggacaaguaacagcaucguggucuucuguggcacuuccggaaccuacggcacagggucuuggccugauggagccgaccucaaucugaugccaauuuga

SEQ ID NO: 151082 - RNA, 1410 nt, Artificial Sequence; identical to SEQ ID NO: 150970
  derived and/or modified CDS sequence (opt3) from neuraminidase__InfluenzaA__AFN19620

SEQ ID NO: 151083 - RNA, 1410 nt, Artificial Sequence; identical to SEQ ID NO: 151006
  derived and/or modified CDS sequence (opt3) from neuraminidase__InfluenzaA__AFN19624

SEQ ID NO: 151084 - RNA, 1410 nt, Artificial Sequence; identical to SEQ ID NO: 150970
  derived and/or modified CDS sequence (opt3) from neuraminidase__InfluenzaA__AFN19630

SEQ ID NO: 151085 - RNA, 1410 nt, Artificial Sequence
  derived and/or modified CDS sequence (opt3) from neuraminidase__InfluenzaA__AFN19632
augaaccccaaucagaagaucauuaccauaggcagcgugucccugacaaucucuacuauuugcuucuuuaugcagaucgccauucucaucacgaccgucacacuucacuucaaacaguacgaguuuaacucaccuccaaauaaccagguuaugcugugugaaccgacuauaaucgagagaaauauuaccgaaaucguguauuugacaaacaccacuauugagaaggaaaucugccccaaaccuacagaguacaggaauuggaguaagccacagugugacauaaccggguucgcucccuuuagcaaagauaacuccauucgguuaucugcaggaggugacaucuggguaacgcgcgagccuuaugugucgugcgauccagacaaguguuaccaauucgcccugggccaggggacuacccuaaauaacguccauucaaauaacacagugcgagaucguacucccuauagaacccuccugaugaaugaacuuggaguuccuuuucaccugggcacaaaacaggugugcauugcguggagcaguuccucuugucaugacgguaaggcuugguugcacgucugcaucaccggggaugacaagaacgccacggcaaguuucaucuacaauggaaggcucguggauuccguaguuucauggaguaaagagauucugcggacucaggaaagcgagugugugugcauaaacggcacauguaccgucgugaugacugacggcucugccuccgggaaggcugauacaaaaauccuguuuauugaggaaggaaagaucgugcauaccucaacgcucagcgguagugcacaacacgucgaggaaugcucuugcuauccacgcuacccgggcguuagaugugugugcagggacaacuggaagggguccaaucggcccauaguagauauuaacaucaaagaccacagcaucgugucgucuuacgucuguuccggauuagugggcgacaccccucgcaagaaugauucaaguagcuccucucauugccuggacccaaacaaugaggaaggugggcacggaguuaaaggcugggccuucgaugacggcaacgauguguggauggggcgaacaauuaaugagacuagcagacuuggauaugagaccuuuaaggucaucgaagguuggucaaaccccaaaaguaaguugcagauuaauaggcaagugauaguagaccggggcgaucguuccggguacagcggaaucuucucuguugagggcaaaucauguauuaaccgcugcuuuuauguggaacugaucagagguaggaaggaggaaacagagguccuauggacuagcaauagcaucguggucuucugugggaccuccggcacauacggaaccggcucuuggccugacggggcugaucucaaccugaugccaauuuga

SEQ ID NO: 151086 - RNA, 1410 nt, Artificial Sequence
  derived and/or modified CDS sequence (opt3) from neuraminidase__InfluenzaA__AFN19634
augaaccccaaucagaagaucauuaccauaggcagcgugucccugacaaucucuacuauuugcuucuuuaugcagaucgccauucucaucacgaccgucacacuucacuucaaacaguacgaguuuaacucaccuccaaauaaccagguuaugcugugugaaccgacuauaaucgagagaaauauuaccgaaaucguguauuugacaaacaccacuauugagaaggaaaucugccccaaaccugcugaguacaggaauuggaguaagccacagugugacauaacaggguucgcacccuuuagcaaagauaacuccauucgguuaucugccggaggugacaucuggguaacccgcgagccuuaugugucgugcgauccagacaaguguuaccaauucgcgcugggccaggggacgacucuaaauaacguccauucaaauaacaccgugcgagaucguacaagcuauagaacucuccugaugaaugaacuuggaguucccuuucaccugggcaccaaacaggugugcauugcuuggaguuccucuagcugucaugacgguaaggccugguugcacgucugcaucacaggggaugacaagaacgcaaccgccuccuucaucuacaauggaaggcucguggauucaguaguuaguuggagcaaagagauucugcggacgcaggaaucugagugugugugcauaaacggcacuuguacagucgugaugaccgacggcuccgcuucagggaaggcagauacuaaaauccuguuuauugaggaaggaaagaucgugcauacaagcacccucagugguucugcccaacacgucgaggaaugcuccugcuauccucgcuacccaggcguuagaugugugugcagggacaacuggaaggggagcaaucggccgauaguagauauuaacaucaaagaccacucgaucgugucuuccuacgucuguucaggauuagugggcgacacgccccgcaagaaugauaguagcuccucuagccauugccuggacccuaacaaugaggaaggugggcacggaguuaaaggcugggcuuucgaugacggcaacgauguguggauggggcgaaccauuaaugagacaucaagacuuggauaugagacuuuuaaggucaucgaagguuggaguaacccaaaauccaaguugcagauuaauaggcaagugauaguagaccggggcgaucguagcggguacucuggaaucuucucaguugagggcaaaaguuguauuaaccgcugcuuuuauguggaacugaucagagguaggaaggaggaaaccgagguccuauggacaagcaauuccaucguggucuucugugggacuucuggcaccuacggaacaggcucguggcccgacggggccgaucucaaccugaugccuauuuga

SEQ ID NO: 151087 - RNA, 1410 nt, Artificial Sequence
  derived and/or modified CDS sequence (opt3) from neuraminidase__InfluenzaA__AFN19636
augaaccccaaucagaagaucauuaccauaggcagcgugucccugacaaucucuacuauuugcuucuuuaugcagaucgccauucucaucacgaccgucacacuucacuucaaacaguacgaguuuaacucaccuccaaauaaccagguuaugcugugugaaccgacuauaaucgagagaaauauuaccgaaaucguguauuugacaaacaccauuaucgagaaggaaauaugccccaaaccuacugaguacaggaauuggaguaagccacagugugacauuacaggguucgcucccuuuagcaaagauaacuccauccgguuaucugcaggaggugacauuuggguaacccgcgagccuuaugugucgugcgauccagacaaguguuaccaauucgcccugggccaggggacgacucuaaauaacguccauucaaauaacaccgugcgagaucguacacccuauagaacucuccugaugaaugaacuuggaguuccuuuucaccugggcaccaaacaggugugcaucgcguggagcaguuccucuugucaugacgguaaggcuugguugcacgucugcaucacaggggaugacaagaacgccaccgccagcuucauuuacaauggaaggcucguggauuccguaguuucauggaguaaagagauacugcggacgcaggaaagcgagugugugugcaucaacggcacuuguacagucgugaugaccgacggcucugcauccgggaaggcugauacuaaaauucuguuuaucgaggaaggaaagauagugcauacaucaacccucagcgguagugcacaacacgucgaggaaugcucuugcuauccacgcuacccgggcguuagaugugugugcagggacaacuggaagggguccaaucggcccauuguagauaucaacaucaaagaccacagcauugugucgucuuacgucuguuccggauuagugggcgacacgccucgcaagaaugauucaaguagcuccucucauugccuggacccaaacaaugaggaaggugggcacggaguuaaaggcugggccuucgaugacggcaacgauguguggauggggcgaaccaucaaugagacaagcagacuuggauaugagacuuuuaaggucauugaagguuggucaaaccccaaaaguaaguugcagauaaauaggcaagugaucguagaccggggcgaucguuccggguacagcggaauuuucucuguugagggcaaaucauguaucaaccgcugcuuuuauguggaacugaucagagguaggaaggaggaaaccgagguccuauggacaaguaauagcauuguggucuucugugggacuuccggcaccuacggaacaggcucuuggccugacggggcugaucucaaccugaugccaauauga

SEQ ID NO: 151088 - RNA, 1410 nt, Artificial Sequence; identical to SEQ ID NO: 151087
  derived and/or modified CDS sequence (opt3) from neuraminidase__InfluenzaA__AFN19638

SEQ ID NO: 151089 - RNA, 1410 nt, Artificial Sequence; identical to SEQ ID NO: 150970
  derived and/or modified CDS sequence (opt3) from neuraminidase__InfluenzaA__AFN19640

SEQ ID NO: 151090 - RNA, 1410 nt, Artificial Sequence
  derived and/or modified CDS sequence (opt3) from neuraminidase__InfluenzaA__AFN19642
augaaccccaaucagaagaucauuaccauaggcagcgugucccugacaaucucuacuauuugcuucuuuaugcaaaucgccauucucaucacgaccgucacacuucacuucaaacaguacgaguuuaacucaccuccaaauaaccagguuaugcugugugaaccgacuauaaucgagagaaauaugaccgaaauuguguauuugacaaacaccacuaucgagaaggaaauuugccccaaaccugcugaguacaggaauuggaguaagccacagugugacaucacaggguucgcacccuuuagcaaagauaacuccauacgguuaucugccggaggugacauuuggguaacccgcgagccuuaugugucgugcgauccagacaaguguuaccaauucgcgcugggccaggggacgacucuaaauaacguccauucaaauaacaccgugagcgaucgaacacccuaucguacucuccugaugaaugaacuuggaguuccuuuucaccugggcaccaaacaggugugcaucgcuuggaguuccucuagcugucaugacgguaaggccugguugcacgucugcauuacaggggaugacaagaacgcaaccgccuccuucaucuacaauggaagacucguggauucaguaguuaguuggagcaaagagauccugaggacgcaggaaucugagugugugugcauuaacggcacuuguacagucgugaugaccgacggcuccgcuucagggaaggcagauacuaaaauacuguuuaucgaggaaggaaagauugugcauacaagcacccucagugguucugcccaacacgucgaggaaugcuccugcuauccacgguacccgggcguucgcugugugugcagagacaacuggaaggggagcaauaggcccaucguagauauaaacauuaaagaccacucgaucgugucuuccuacgucuguucaggauuagugggcgacacgccucggaagaaugauaguagcuccucuagccauugccuggacccaaacaaugaggaaggugggcacggaguuaaaggcugggcuuucgaugacggcaacgauguguggauggggcgcaccaucaaugagacaucacgacuuggauaugagacuuuuaaggucauugaagguuggaguaaccccaaauccaaguugcagaucaauagacaggugauuguagacaggagcgaucggucuggcuacucagggauauucaguguugagggaaaaagcuguaucaaccguugcuuuuauguggaacugauucgcggcagaaaggaggaaaccgagguccuauggacauccaauucuaucguggucuucugugguacuucggggaccuacggcacaggaagcuggccugacggcgccgaucucaaccugaugccaaucuga

SEQ ID NO: 151091 - RNA, 1410 nt, Artificial Sequence; identical to SEQ ID NO: 151087
  derived and/or modified CDS sequence (opt3) from neuraminidase__InfluenzaA__AFN19644

SEQ ID NO: 151092 - RNA, 1410 nt, Artificial Sequence
  derived and/or modified CDS sequence (opt3) from neuraminidase__InfluenzaA__AFN19646
augaaccccaaucagaagaucauuaccauaggcagcgugucccugacaaucucuacuauuugcuucuuuauccagauugccauccucauaacgaccgucacacuucacuucaaacaguacgaguuuaacucaccuccaaauaaccagguuaugcugugugaaccgacuaucauugagagaaauaucaccgaaauuguguauuugacaaacaccacuaucgagaaggaaauaugccccaaaccugcugaguacaggaauuggaguaagccacagugugacauuacaggguucgcacccuuuagcaaagauaacuccauccgguuaucugccggaggugacauuuggguaacccgcgagccuuaugugucgugcgauccagacaaguguuaccaauucgcgcugggccaggggacgacucuaaauaacguccauucaaauaacaccgugcgagaucguacacccuauagaacucuccugaugaaugaacuuggaguuccuuuucaccugggcaccaaacaggugugcaucgcuuggagcaguuccucuugucaugacgguaaggccugguugcacgucugcaucacaggggaugacaagaacgcaaccgccagcuucauuuacaauggaaggcucguggauuccguaguuucauggaguaaagagauacugcggacgcaggaaagcgagugugugugcaucaacggcacuuguacagucgugaugaccgacggcucugcuuccgggaaggcagauacuaaaauucuguuuaucgaggaaggaaagauagugcauacaucaacccucagcgguagugcccaacacgucgaggaaugcucuugcuauccacgcuacccgggcguuagaugugugugcagggacaacuggaagggguccaaucggcccauuguagauaucaacaucaaagaccacagcauugugucgucuuacgucuguuccggauuagugggcgacacgccucgcaagaaugauucaaguagcuccucucauugccuggacccaaacaaugaggaaggugggcacggaguuaaaggcugggcuuucgaugacggcaacgauguguggauggggcgaaccaucaaugagacaagcagacuuggauaugagacuuuuaaggucauugaagguuggucaaaccccaaaaguaaguugcagauaaauaggcaagugaucguaaaccgguccgaccguagcggcuacucugggauuuucucaguugagggaaaaaguuguaucaaucgcugcuuuuauguggaacugaucagaggcaggaaggaggaaaccgagguccuauggacaagcaacuccauuguggucuucugugguacuucugggaccuacggcacaggaucguggccugauggcgccgaccucaaucugaugccaauauga

SEQ ID NO: 151093 - RNA, 1410 nt, Artificial Sequence; identical to SEQ ID NO: 150970
  derived and/or modified CDS sequence (opt3) from neuraminidase__InfluenzaA__AFN19648

SEQ ID NO: 151094 - RNA, 1410 nt, Artificial Sequence; identical to SEQ ID NO: 151006
  derived and/or modified CDS sequence (opt3) from neuraminidase__InfluenzaA__AFN19650

SEQ ID NO: 151095 - RNA, 1410 nt, Artificial Sequence
  derived and/or modified CDS sequence (opt3) from neuraminidase__InfluenzaA__AFN19652
augaaccccaaucagaagaucauuaccauaggcagcgugucccugacaaucucuacuauuugcuucuuuaugcaaaucgccauucucaucacgaccgucacacuucacuucaaacaguacgaguuuaacucaccuccaaauaaccagguuaugcugugugaaccgacuauaaucgagagaaauauuaccgaagugguauauuugacaaacaccacuaucgagaaggaaauuugccccaaaccugcugaguacaggaauuggaguaagccacagugugacaucacaggguucgcacccuuuagcaaagauaacuccauacgguuaucugccggaggugacauuugggugacccgcgagccuuaugucucgugcgauccagacaaguguuaccaauucgcgcugggccaggggacgacucuaaauaacgugcauucaaauaacaccguucgagaucguacacccuauagaacucuccugaugaaugaacuuggagugccuuuucaccugggcaccaagcaggucugcaucgcuuggagcaguuccucuugucaugacgguaaagccugguugcacgugugcauuacaggggaugacaagaacgcaaccgccagcuucaucuacaauggaaggcucguagauuccguugugucauggaguaaagagauccugcggacgcaggaaagcgagugugucugcauuaacggcacuuguacaguggugaugaccgacggcucugcuuccgggaaggcagauacuaaaauacuguuuaucgaggaaggaaagauuguccauacaucaacccucagcgguagugcccaacacguugaggaaugcucuugcuauccacgcuacccgggcgugagauguguaugcagggacaacuggaagggguccaaucggcccaucguggauauaaacauuaaagaccacagcaucgucucgucuuacguguguuccggauuaguuggcgacacgccucgcaagaaugauucaaguagcuccucucauugccuggacccaaacaaugaggaaggugggcacggagugaaaggcugggcuuucgaugacggcaacgaugucuggauggggcgaaccaucaaugagacaagcagacuuggauaugagacuuuuaaggugauugaagguuggucaaaccccaaaaguaaguugcagaucaauaggcagguaauuguugaccggggcgaucguuccggguacagcggaauauucucuguggagggcaaaucauguaucaaccgcugcuuuuaugucgaacugauuagagguaggaaggaggaaaccgaggugcuauggacaaguaauagcaucgucguguucugugggacuuccggcaccuacggaacaggcucuuggccugacggggccgaucucaaccugaugccaaucuga

SEQ ID NO: 151096 - RNA, 1410 nt, Artificial Sequence
  derived and/or modified CDS sequence (opt3) from neuraminidase__InfluenzaA__AFN19654
augaaccccaaucagaagaucauuaccauaggcagcgugucccugacaaucucuacuauuugcuucuuuaugcagaucgccauucucaucacgaccgucacacuucacuucaaacaguacgaguuuaacucaccuccaaauaaccagguuaugcugugugaaccgacuauaaucgagagaaauauuaccgaaaucguguauuugacaaacaccacuauugagaaggaaacaugccccaaaccuaccgaguacaggaauuggaguaagccacagugugacaucacgggguucgcucccuuuagcaaagauaacuccauacgguuaucugcaggaggugacauuuggguaacucgcgagccuuaugugucgugcgauccagacaaguguuaccaauucgcccugggccaggggaccacacuaaauaacguccauucaaauaacacugugcgagaucguacccccuauagaacacuccugaugaaugaacuuggaguuccuuuucaccugggcaccaaacaggugugcaucgcguggagcaguuccucuugucaugacgguaaggcuugguugcacgucugcauuacgggggaugacaagaacgccacugccagcuucaucuacaauggaaggcucguggauuccguaguuucauggaguaaagagauccugcggacacaggaaagcgagugugugugcauuaacggcaccuguacugucgugaugacagacggcucugcauccgggaaggcugauaccaaaauacuguuuaucgaggaaggaaagauugugcauacgucaacccucagcgguagugcacaacacgucgaggaaugcucuugcuauccacgcuacccgggcguuagaugugugugcagggacaacuggaagggguccaaucggcccaucguagauauaaacauuaaagaccacagcaucgugucgucuuacgucuguuccggauuagugggcgacacaccucgcaagaaugauucaaguagcuccucucauugccuggacccaaacaaugaggaaggugggcacggaguuaaaggcugggccuucgaugacggcaacgauguguggauggggcgaacuaucaaugagaccagcagacuuggauaugagacauuuaaggucauugaagguuggucaaaccccaaaaguaaguugcagaucaauaggcaagugauuguagaccggggcgaucguuccggguacagcggaauauucucuguugagggcaaaucauguaucaaccgcugcuuuuauguggaacugauuagagguaggaaggaggaaacugagguccuauggaccaguaauagcaucguggucuucugugggacauccggcaccuacggaacuggcucuuggccugacggggcugaucucaaccugaugccaaucuga

SEQ ID NO: 151097 - RNA, 1410 nt, Artificial Sequence; identical to SEQ ID NO: 150970
  derived and/or modified CDS sequence (opt3) from neuraminidase__InfluenzaA__AFN19656

SEQ ID NO: 151098 - RNA, 1410 nt, Artificial Sequence; identical to SEQ ID NO: 150194
  derived and/or modified CDS sequence (opt3) from neuraminidase__InfluenzaA__AFN19658

SEQ ID NO: 151099 - RNA, 1410 nt, Artificial Sequence; identical to SEQ ID NO: 151087
  derived and/or modified CDS sequence (opt3) from neuraminidase__InfluenzaA__AFN19660

SEQ ID NO: 151100 - RNA, 1410 nt, Artificial Sequence; identical to SEQ ID NO: 150194
  derived and/or modified CDS sequence (opt3) from neuraminidase__InfluenzaA__AFN19662

SEQ ID NO: 151101 - RNA, 1410 nt, Artificial Sequence
  derived and/or modified CDS sequence (opt3) from neuraminidase__InfluenzaA__AFN19664
augaaccccaaucagaagaucauuaccauaggcagcgugucccugacaaucucuacuauuugcuucuuuaugcagaucgccauucucaucacgaccgucacacuucacuucaaacaguacgaguuuaacucaccuccaaauaaccagguuaugcugugugaaccgacuauaaucgagagaaauauuaccgaaaucguguauuugacaaacaauaccauugagaaggaaaucugccccaaaccugcugaguacaggaacuggaguaagccacagugugggauaacuggauucgcacccuuuagcaaagacaauuccauucgguuaucugccgguggcgauaucuggguaacacgcgagccuuaugugucgugcgacccagauaaguguuaccaauucgcgcuggggcagggaaccacgcuaaacaauguccauucaaacaauacugugcgagaccguacccccuauagaacacuccugaugaacgaacuuggcguuccuuuucaccuggguacuaaacaggugugcauugcuuggagcaguuccucuugucaugaugggaaggccugguugcacgucugcaucaccggagacgauaagaaugcaacagccagcuucaucuacaacggcaggcucguggacuccguaguuucauggaguaaagagauucugcggacccaggaaagcgagugugugugcauaaacggcacguguacugucgugaugacagaugggucugcuuccggaaaggcagacaccaaaauccuguuuauugaggaagguaagaucgugcauacuucaacacucagcggcagugcccaacacgucgaggaaugcucuugcuauccacgcuacccggggguuagaugugugugcagggauaauuggaagggauccaaccggcccauaguagacauuaauaucaaagaucacagcaucgugucgucuuacgucuguuccggcuuagugggugacaccccucgcaagaacgacucaaguagcuccucucauugccuggauccaaauaacgaggaagggggacacggcguuaaaggcugggcuuucgacgaugggaaugacguguggaugggacgaacgauuaacgagaccagcagacuugguuaugagacauuuaaggucaucgaaggcuggucaaaucccaaaaguaaguugcagauuaacaggcaagugauaguagaucguggggaccgguccggauacagcggcaucuucucuguugaggguaaaucauguauuaaucgcugcuuuuauguggaacugaucagagggaggaaggaggaaacugagguccuauggaccaguaacagcaucguggucuucuguggcacauccggaacuuacggcaccgggucuuggccugauggagccgaccucaaucugaugccaauuuga

SEQ ID NO: 151102 - RNA, 1410 nt, Artificial Sequence
  derived and/or modified CDS sequence (opt3) from neuraminidase__InfluenzaA__AFN19666
augaaccccaaucagaagaucauuaccauaggcagcgugucccugacaaucucuacuauuugcuucuuuaugcagaucgccauucucaucacgaccgucacacuucacuucaaacaguacgaguuuaacucaccuccaaauaaccagguuaugcugugugaaccgacuauaaucgagagaaauaugaccgaaauuguguauuugacaaacaccacuaucgagaaggaaauuugccccaaaccugcugaguacaggaauuggaguaagccacagugugacaucacaggguucgcacccuuuagcaaagauaacuccauacgguuaucugccggaggugacauuuggguaacccgcgagccuuaugugucgugcgauccagacaaguguuaccaauucgcgcugggccaggggacgacucuaaauaacguccauucaaauaacaccgugcgagaucguacacccuauagaacucuccugaugaaugaacuuggaguuccuuuucaccugggcaccaaacaggugugcaucgcuuggagcaguuccucuugucaugacgguaaggccugguugcacgucugcauuacaggggaugacaagaacgcaaccgccagcuucaucuacaauggaaggcucguggauuccguaguuucauggaguaaagagauccugcggacgcaggaaagcgagugugugugcauuaacggcacuuguacagucgugaugaccgacggcucugcuuccgggaaggcagauacuaaaauacuguuuaucgaggaaggaaagauugugcauacaucaacccucagcgguagugcccaacacgucgaggaaugcucuugcuauccacgcuacccgggcguuagaugugugugcagggacaacuggaagggguccaaucggcccaucguagauauaaacauuaaagaccacagcaucgugucgucuuacgucuguuccggauuagugggcgacacgccucgcaagaaugauucaaguagcuccucucauugccuggacccaaacaaugaggaaggugggcacggaguuaaaggcugggcuuucgaugacggcaacgauguguggauggggcgaaccaucaaugagacaagcagacuuggauaugagacuuuuaaggucauugaagguuggucaaaccccaaaaguaaguugcagaucaauaggcaagugauuguaaaccgguccgaccguagcggcuacucugggauauucucaguugagggaaaaaguuguaucaaucgcugcuuuuauguggaacugauuagaggcaggaaggaggaaaccgagguccuauggacaagcaacuccaucguggucuucugugguacuucugggaccuacggcacaggaucguggccugauggcgccgaccucaaucugaugccaaucuga

SEQ ID NO: 151103 - RNA, 1410 nt, Artificial Sequence
  derived and/or modified CDS sequence (opt3) from neuraminidase__InfluenzaA__AFN19668
augaaccccaaucagaagaucauuaccauaggcagcgugucccugacaaucucuacuauuugcuucuuuaugcaaaucgccauucucaucacgaccgucacacuucacuucaaacaguacgaguuuaacucaccuccaaauaaccagguuaugcugugugaaccgacuauaaucgagagaaauaugaccgaaauuguguauuugacaaacaccacuaucgagaaggaaauuugccccaaaccugcugaguacaggaauuggaguaagccacagugugacaucacaggguucgcacccuuuagcaaagauaacuccauacgguuaucugccggaggugacauuuggguaacccgcgagccuuaugugucgugcgauccagacaaguguuaccaauucgcgcugggccaggggacgacucuaaauaacgaacauucaaauaacaccguccgagaucguacacccuauagaacucuccugaugaaugagcuuggagugccuuuucaccugggcaccaagcagguuugcaucgcuuggagcaguuccucuugucaugacgguaaagccugguugcacgugugcauuacaggggaugacaagaacgcaaccgccagcuucaucuacaauggaaggcucgucgauuccgugguaucauggaguaaagaaauccugcggacgcaggagagcgaguguguuugcauuaacggcacuuguacaguggucaugaccgacggcucugcuuccgggaaggcagauacuaaaauacuguuuaucgaagagggaaagauugugcauacaucaacccucagcgguagugcccaacacguggaagagugcucuugcuauccacgcuacccgggcgucagauguguuugcagggacaacuggaagggguccaaucggcccaucguggauauaaacauuaaagaccacagcaucguaucgucuuacguguguuccggauuagucggcgacacgccucgcaagaaugauucaaguagcuccucucauugccuggacccaaacaaugaagagggugggcacggagugaaaggcugggcuuucgaugacggcaacgauguuuggauggggcgaaccaucaaugagacaagcagacuuggauaugaaacuuuuaaggugauugaggguuggucaaaccccaaaaguaaguugcagaucaauaggcaggucauuguggaccgguccgaucguagcggcuacucugggauauucucaguagaaggaaaaaguuguaucaaccgcugcuuuuauguugagcugauuagaggcaggaaggaagagaccgaggugcuauggacaagcaauuccaucgucguguucugugguacuucugggaccuacggcacaggaucguggccugacggcgccgaucucaaccugaugccaaucuga

SEQ ID NO: 151104 - RNA, 1410 nt, Artificial Sequence; identical to SEQ ID NO: 151006
  derived and/or modified CDS sequence (opt3) from neuraminidase__InfluenzaA__AFN19670

SEQ ID NO: 151105 - RNA, 1410 nt, Artificial Sequence; identical to SEQ ID NO: 150194
  derived and/or modified CDS sequence (opt3) from neuraminidase__InfluenzaA__AFN19673

SEQ ID NO: 151106 - RNA, 1410 nt, Artificial Sequence; identical to SEQ ID NO: 150970
  derived and/or modified CDS sequence (opt3) from neuraminidase__InfluenzaA__AFN19675

SEQ ID NO: 151107 - RNA, 1410 nt, Artificial Sequence
  derived and/or modified CDS sequence (opt3) from neuraminidase__InfluenzaA__AFN19677
augaaccccaaucagaagaucauuaccauaggcagcgugucccugacaaucucuauuaucugcuucuuuaugcagauugccauccucauaacuacggucacccuucacuucaaacaguacgaguuuaacucaccuccaaauaaccagguuaugcugugugaaccgacaaucauugagagaaauaucacugaaauuguguauuugaccaacacaaccaucgagaaggaaauaugccccaaaccugcugaguacaggaauuggaguaagccacagugugacauuacuggguucgcacccuuuagcaaagauaacuccauccgguuaucugccggaggugacauuuggguaacacgcgagccuuaugugucgugcgauccagacaaguguuaccaauucgcgcugggccaggggaccacgcuaaauaacguccauucaaauaacacugugcgagaucguacccccuauagaacacuccugaugaaugaacuuggaguuccuuuucaccugggcacuaaacaggugugcaucgcuuggagcaguuccucuugucaugacgguaaggccugguugcacgucugcaucaccggggaugacaagaacgcaacagccagcuucauuuacaauggaaggcucguggauuccguaguuucauggaguaaagagauacugcggacccaggaaagcgagugugugugcaucaacggcacguguacugucgugaugacagacggcucugcuuccgggaaggcagauaccaaaauucuguuuaucgaggaaggaaagauagugcauacuucaacacucagcgguagugcccaacacgucgaggaaugcucuugcuauccacgcuacccgggcguuagaugugugugcagggacaacuggaagggguccaaucggcccauuguagauaucaacaucaaagaccacagcauugugucgucuuacgucuguuccggauuagugggcgacaccccucgcaagaaugauucaaguagcuccucucauugccuggacccaaacaaugaggaaggugggcacggaguuaaaggcugggcuuucgaugacggcaacgauguguggauggggcgaacgaucaaugagaccagcagacuuggauaugagacauuuaaggucauugaagguuggucaaaccccaaaaguaaguugcagauaaauaggcaagugaucguagaccggggcgaucguuccggguacagcggaauuuucucuguugagggcaaaucauguaucaaccgcugcuuuuauguggaacugaucagagguaggaaggaggaaacugagguccuauggaccaguaauagcauuguggucuucugugggacauccggcacuuacggaaccggcucuuggccugacggggccgaucucaaccugaugccaauauga

SEQ ID NO: 151108 - RNA, 1410 nt, Artificial Sequence; identical to SEQ ID NO: 151006
  derived and/or modified CDS sequence (opt3) from neuraminidase__InfluenzaA__AFN19683

SEQ ID NO: 151109 - RNA, 1410 nt, Artificial Sequence; identical to SEQ ID NO: 150970
  derived and/or modified CDS sequence (opt3) from neuraminidase__InfluenzaA__AFN19685

SEQ ID NO: 151110 - RNA, 1410 nt, Artificial Sequence; identical to SEQ ID NO: 150970
  derived and/or modified CDS sequence (opt3) from neuraminidase__InfluenzaA__AFN19687

SEQ ID NO: 151111 - RNA, 1410 nt, Artificial Sequence; identical to SEQ ID NO: 150970
  derived and/or modified CDS sequence (opt3) from neuraminidase__InfluenzaA__AFN19689

SEQ ID NO: 151112 - RNA, 1410 nt, Artificial Sequence; identical to SEQ ID NO: 150194
  derived and/or modified CDS sequence (opt3) from neuraminidase__InfluenzaA__AFN19691

SEQ ID NO: 151113 - RNA, 1410 nt, Artificial Sequence
  derived and/or modified CDS sequence (opt3) from neuraminidase__InfluenzaA__AFN19693
augaaccccaaucagaagaucauuaccauaggcagcgugucccugacaaucucuacuauuugcuucuuuaugcaaaucgccauucucaucacgaccgucacacuucacuucaaacaguacgaguuuaacucaccuccaaauaaccagguuaugcugugugaaccgacuauaaucgagagaaauauuaccgaaaucguguauuugacaaacaccacuauugagaaggaaaucugccccaaauuagcugaguacaggaauuggaguaagccucagugugacauaacaggguucgcaccauuuagcaaagauaacuccauucggcugucugccggaggugacaucuggguaacccgcgagcccuaugugucgugcgauccugacaaguguuaccaauucgcgcuaggccaggggacgacucucaauaacguccauucaaauaacaccgugcgagaucguacaccauauagaacucugcuuaugaaugaacugggaguucccuuucacuugggcaccaaacaggugugcauugcuuggagcaguuccucuugucaugacgguaaggccuggcuccacgucugcaucacaggggaugacaagaacgcaaccgccagcuucaucuacaauggaaggcugguggauuccguaguuucauggaguaaagacauucugcggacgcaggagagcgaaugugugugcauaaacggcacuugugcugucgugaugacagauggcucugcauccgggaaggccgacaccaaaauccucuuuauugaggagggaaagaucgugcauacuucaacauuaagcgguagugcucaacacgucgaagagugcucuugcuauccucgcuacccaggcguuagaugugugugcagggauaacuggaagggguccaaucggccgauaguagacauuaacaucaaagaccacagcaucgugucgucuuacgucuguuccggacuggugggcgauacccccaggaagaaugacucaaguagcuccucuaacugccuugauccuaauaacgaagagggugggcauggaguuaaaggcugggccuucgacgauggcaaugacguguggauggggcgaacgauuaacgaaaccagcagauugggauaugagacauuuaaggucaucgaggguuggucaaauccaaaaaguaagcugcagauuaaccgccaggugauaguagaucggggcaaucguuccggguacagcggaaucuucucuguugaaggcaaaaacuguauuaaucgcugcuuuuauguggagcuaaucagagguaggaaggaagagacugaaguccucuggaccucaaacaguaucguggucuucugugggacaagcggcacuuacggaaccggcuccuggcccgacggggcggaucugaaucuuaugccuauuuga

SEQ ID NO: 151114 - RNA, 1410 nt, Artificial Sequence
  derived and/or modified CDS sequence (opt3) from neuraminidase__InfluenzaA__AFN19697
augaaccccaaucagaagaucauuaccauaggcagcgugucccugacaaucucuacuauuugcuucuuuaugcagaucgccauucucaucacgaccgucacacuucacuucaaacaguacgaguuuaacucaccuccaaauaaccagguuaugcugugugaaccgacuauaaucgagagaaauauuaccgaaaucguguauuugacaaacaccacuauugagaaggaaaucugccccaaaccugcugaguacaggaauuggaguaagccacagugugggauaacaggauucgcacccuuuagcaaagacaacuccauucgguuaucugccgguggcgauaucuggguaacccgcgagccuuaugugucgugcgacccagauaaguguuaccaauucgcgcuggggcagggaacgacucuaaauaacguccauucaaauaacaccgugcgagaccguacacccuauagaacucuccugaugaaugaacuuggcguuccuuuucaccuggguaccaaacaggugugcauugcuuggagcaguuccucuugucaugaugggaaggccugguugcacgucugcaucacaggagacgauaagaacgcaaccgccagcuucaucuacaauggcaggcucguggacuccguaguuucauggaguaaagagacgcugcggacucaggaaagcgagugugugugcauuaacggcacauguaccgucgugaugacugaugggucugcuuccggaaaggcagacacaaaaauacuguuuaucgaggaagguaagauugugcauaccucaacgcucagcggcagugcccaacacgucgaggaaugcucuugcuauccacgcuacccggggguuagaugugugugcagggauaacuggaagggauccaaucggcccaucguagacauaaacauuaaagaucacagcaucgugucgucuuacgucuguuccggcuuagugggugacaccccucgcaagaaugacucaaguagcuccucucauugccuggauccaaacaaugaggaagggggacacggcguuaaaggcugggcuuucgacgaugggaacgacguguggaugggacgaacaaucaaugagacuagcagacuugguuaugagaccuuuaaggucauugaaggcuggucaaaccccaaaaguaaguugcagaucaauaggcaagugauuguagaucguggggaccgguccggauacagcggcauauucucuguugaggguaaaucauguaucaaccgcugcuuuuauguggaacugauuagagggaggaaggaggaaacagagguccuauggaccaguaauagcaucguggucuucuguggcacuuccggaacauacggcaccgggucuuggccugauggagccgaccucaaccugaugccaaucuga

SEQ ID NO: 151115 - RNA, 1410 nt, Artificial Sequence; identical to SEQ ID NO: 150970
  derived and/or modified CDS sequence (opt3) from neuraminidase__InfluenzaA__AFN19699

SEQ ID NO: 151116 - RNA, 1410 nt, Artificial Sequence; identical to SEQ ID NO: 151006
  derived and/or modified CDS sequence (opt3) from neuraminidase__InfluenzaA__AFN19701

SEQ ID NO: 151117 - RNA, 1410 nt, Artificial Sequence
  derived and/or modified CDS sequence (opt3) from neuraminidase__InfluenzaA__AFN19703
augaaccccaaucagaagaucauuaccauaggcagcgugucccugacaaucucuacuauuugcuucuuuaugcagaucgccauucucaucacgaccgucacacuucacuucaaacaguacgaguuuaacucaccuccaaauaaccagguuaugcugugugaaccgacuauaaucgagagaaauauuaccgaaaucguguauuugacaaacaccacuauugagaaggaaaucugccccaaaccugcugaguacaggaauuggaguaagccacagugugggauaacaggauucgcacccuuuagcaaagacaacuccauucgguuaucugccgguggcgauaucuggguaacccgcgagccuuaugugucgugcgacccagauaaguguuaccaauucgcgcuggggcagggaacgacucuagacaauguccauucaaacaauaccgugcgagaucguacacccuauagaacucuccugaugaacgaacuuggcguuccuuuucaccuggguaccaaacaggugugcauugcuuggagcaguuccucuugucaugacgggaaggccugguugcacgucugcaucacaggagaugacaagaaugcaaccgccagcuucaucuacaacggcaggcucguggauuccguaguuucauggaguaaagagauucugcggacgcaggaaagcgagugugugugcauaaauggcacuuguacagucgugaugaccgacgggucugcuuccggaaaggcagauacuaaaauccuguuuauugaggaagguaagaucgugcauacaucaacccucagcggcagugcccaacacgucgaggaaugcucuugcuauccacgcuacccggggguuagaugugugugcagggacaacuggaagggauccaaccggcccauaguagauauuaauaucaaagaccacagcaucgugucgucuuacgucuguuccggcuuagugggugacacgccucgcaagaacgauucaaguagcuccucucauugccuggacccaaauaacgaggaagggggacacggcguuaaaggcugggcuuucgaugacgggaaugauguguggaugggacgaaccauuaacgagacaagcagacuugguuaugagacuuuuaaggucaucgaaggcuggucaaaucccaaaaguaaguugcagauuaacaggcaagugauaguagaccguggggaucgguccggauacagcggcaucuucucuguugaggguaaaucauguauuaaucgcugcuuuuauguggaacugaucagagggaggaaggaggaaaccgagguccuauggacaaguaacagcaucguggucuucuguggcacuuccggaaccuacggcacagggucuuggccugacggagccgaucucaaucugaugccaauuuga

SEQ ID NO: 151118 - RNA, 1410 nt, Artificial Sequence; identical to SEQ ID NO: 148305
  derived and/or modified CDS sequence (opt3) from neuraminidase__InfluenzaA__AFN19711

SEQ ID NO: 151119 - RNA, 1410 nt, Artificial Sequence
  derived and/or modified CDS sequence (opt3) from neuraminidase__InfluenzaA__AFN19721
augaaccccaaucagaagaucauuaccauaggcagcgugugcaugacaaucgggauggccaaccugauucuccaaaucggaaauauuaucuccauauggaucucucacucaauucagcuugguaaccagagucagaucgagacuuguaaucaaagcgucauuacguacgaaaacaauaccuggguuaaccagacauaugugaauaucuccaacacuaauuucgcugcaggccagucuguagugucggucaaacuggccgggaacagcucauugugcccugugaguggaugggcgauauacuccaaggacaauucuauuagaaucggcagcaaaggugauguuuuugugauuagggagccauucaucuccuguucaccgauggaaugccggaccuuuuucuuaacacagggggcucugcuaaacgacaagcauaguaauggaaccaucaaagaucgcagccccuaucgaacucucaugucuuguccuauuggcgaggucccaucccccuacaacucacguuuugaaagcguggccuggagugcaucugccugccacgacggcauaaacuggcugacaaucgggauuuccggaccugauaauggugcuguagcaguucuuaaguauaacggcaucauaaccgacacgauuaagagcuggagaaauaacauccugaggacucaagagucggagugugccugcgugaaugggucuuguuucaccaucaugacagauggaccauccgacggccaggcuucauacaaaauuuuucggaucgaaaaggguaaaauugucaagaguguggagaugaacgcccccaauuaucauuacgaagagugcagcuguuacccugauuccucugagauaacuugcgugugccgcgacaacuggcacgggagcaauagaccaugggucucauucaaccagaauuuggaauaucagaucggauacauuuguaguggcaucuuuggcgauaacccgaggcccaaugacaaaaccggguccugcggaccuguuagcucuaacggugcgaauggcgugaagggguucucauuuaaguauggaaacggcguauggaucggucggacaaaaaguauuagcucccgcaagggguucgagaugauaugggauccaaacggcuggaccggaacggacaauaacuuuucuaucaaacaagacauugugggcaucaaugaauggucgggguacagcggauccuucguccagcaucccgagcucacuggucuggauuguauucgaccuugcuucuggguggaacugaucagaggcaggccaaaggagaacacaauauggaccucagggaguucuaucagcuuuuguggaguuaauuccgacacugugggcuggucauggcccgauggugcagagcucccguucacaauugacaaauga

SEQ ID NO: 151120 - RNA, 1410 nt, Artificial Sequence; identical to SEQ ID NO: 149126
  derived and/or modified CDS sequence (opt3) from neuraminidase__InfluenzaA__AFN19731

SEQ ID NO: 151121 - RNA, 1410 nt, Artificial Sequence; identical to SEQ ID NO: 148305
  derived and/or modified CDS sequence (opt3) from neuraminidase__InfluenzaA__AFN19737

SEQ ID NO: 151122 - RNA, 1410 nt, Artificial Sequence
  derived and/or modified CDS sequence (opt3) from neuraminidase__InfluenzaA__AFN19747
augaaccccaaucagaagaucauuaccauaggcagcgugugcaugacaaucgggauggccaaccugauucuccaaaucggaaauauuaucuccauauggaucucucacucaauucagcuugguaaccagaaucagaucgagacuuguaaccaaagugucauuacgcaugaaaauaacaccuggguuaaucagacauacgugaacaucagcaauacuaacuucgcugcaggccaguccguagugucugucaaacuggccggaaauucgucauugugcccugugagcgggugggcgauauauaguaaggacaacuccauuagaaucggcucuaaaggugauguuuuugugauuagggagccauucaucagcuguuccccguuagaaugccggaccuuuuuccugacacagggggcucuacucaaugacaagcacucaaacggaaccaucaaagaucgcagucccuaccgaacucugaugagcuguccuauuggcgaggucccaucucccuauaacucccguuuugaaucaguggccuggagcgcaagugccugccaugacggcauaaauuggcuuacaaucgggauuucuggaccugauaacggugcuguagcaguucugaaguacaauggcaucauaaccgacacgauuaaguccuggagaaacaauaucuugaggacucaagagagcgagugugccugcgugaacgggucguguuucaccgucaugacagauggaccaucugacggccaggcuuccuauaaaaucuuucggauugaaaaggguaaaaucgugaagucaguggagaugaaugcccccaacuaccacuaugaagagugcaguuguuacccugauagcuccgagauuacuugcgucugccgcgacaauuggcauggggcgaacagaccauggguuucuuucaaucagaaccucgaauaccagauaggauauaucuguagcggcauuuuuggcgauaauccgaggcccaacgacaaaaccgggucaugcggaccugugaguuccaauggugcaaacggcguaaagggguucagcuuuaaguacggaaacggcguguggaucggucggacaaaaucuaucucaagucgcaauggguucgagaugauuugggauccaaacggcuggaccggaacggacaauaacuuuagcauaaagcaagacaucgucggcauuaaugaaugguccggguauucuggaucguucgugcagcaccccgagcugacuggucuggauuguauccgaccuugcuucuggguugaacucauuagaggcaggccaaaagagaacacaaucuggaccagcggguccucaauaaguuuuuguggagucaauucugacacugugggcuggagcuggcccgauggugccgaguuaccguucacaaucgacaaguga

SEQ ID NO: 151123 - RNA, 1410 nt, Artificial Sequence; identical to SEQ ID NO: 148305
  derived and/or modified CDS sequence (opt3) from neuraminidase__InfluenzaA__AFN19749

SEQ ID NO: 151124 - RNA, 1410 nt, Artificial Sequence; identical to SEQ ID NO: 148305
  derived and/or modified CDS sequence (opt3) from neuraminidase__InfluenzaA__AFN19759

SEQ ID NO: 151125 - RNA, 1410 nt, Artificial Sequence
  derived and/or modified CDS sequence (opt3) from neuraminidase__InfluenzaA__AFN19769
augaaccccaaucagaagaucauuaccauaggcagcgugugcaugacaaucgggauggccaaccugauucuccaaaucggaaauauuaucuccauauggaucucucacucaauucagcuugguaaccagagucagaucgagacuuguaaucaaagcgucauuacguacgaaaacaauaccuggguuaaccagacauaugugaauaucuccaacacuaauuucgcugcaggccagucuguagugucggucaaacuggccgggaacagcucauugugcccugugaguggaugggcgauauacuccaaggacaauucuauuagaaucggcagcaaaggugauguuuuugugauuagggagccauucaucuccuguucaccguuagaaugccggaccuuuuuccugacacagggggcucuacucaacgacaagcauaguaauggaaccaucaaagaucgcagccccuaucgaacucugaugucuuguccuauuggcgaggucccaucccccuacaacucacguuuugaaagcguggccuggagugcaucugccugccacgacggcauaaacuggcuuacaaucgggauuuccggaccugauaauagagcuguagcaguucugaaguauaacgguaucauaaccgacacgauuaagagcuggaggaauaacaucuugcggacucaagagucggagugugccugcgugaauggcucuuguuucaccaucaugacagaugggccauccgacggacaggcuucauacaaaauuuuucgcaucgaaaagggcaaaauugucaagaguguggagaugaacgcccccaauuaucauuacgaagagugcagcuguuacccugauuccucugagauaacuugcgugugcagagacaacuggcacgguagcaauaggccaugggucucauucaaccagaaucucgaauaucagaucggguacauuuguaguggaaucuuuggcgauaacccgcggcccaaugacaaaaccggcuccugcgggccuguuagcucuaacggagcgaauggugugaagggcuucucauuuaaguaugggaacggaguauggaucggccgcacaaaaaguauuagcucccgaaaggguuucgagaugauaugggauccaaacggguggaccggcacggacaauaacuuuucuaucaaacaagacauugugggaaucaaugaauggucgggcuacagcggguccuucguccagcaucccgagcugacuggacuggauuguauuagaccuugcuucuggguggaacucaucaggggucggccaaaggagaacacaauauggaccucaggcaguucuaucagcuuuugugggguuaauuccgacacugugggauggucauggcccgauggcgcagaguuaccguucacaauugacaaauga

SEQ ID NO: 151126 - RNA, 1410 nt, Artificial Sequence; identical to SEQ ID NO: 148305
  derived and/or modified CDS sequence (opt3) from neuraminidase__InfluenzaA__AFN19783

SEQ ID NO: 151127 - RNA, 1410 nt, Artificial Sequence; identical to SEQ ID NO: 149006
  derived and/or modified CDS sequence (opt3) from neuraminidase__InfluenzaA__AFN19793

SEQ ID NO: 151128 - RNA, 1410 nt, Artificial Sequence; identical to SEQ ID NO: 148305
  derived and/or modified CDS sequence (opt3) from neuraminidase__InfluenzaA__AFN19807

SEQ ID NO: 151129 - RNA, 1410 nt, Artificial Sequence
  derived and/or modified CDS sequence (opt3) from neuraminidase__InfluenzaA__AFN19809
augaaccccaaucagaagaucauuaccauaggcagcgugugcaugaucauugggauggccaaccugaugcuccaaaucggaaauauuaucuccauauggaucucucacucaauucagcuugguaaccagaaucagaucgagacauguaaccaaagugucauuacuuacgaaaauaacacguggguuaaucagaccuaugugaacaucagcaauacaaacuucgcugcaggccaguccguaauaucugugaaacuggccggaaauucgucauugugcccugucagcgggugggcgauuuacaguaaggacaacuccaucagaauuggcucuaaaggugauguguuuguuaucagggagccauucaucagcuguuccccguuagaaugccggaccuuuuuccugacucagggggcucuacucaaugacaagcauucaaacggaacaauuaaagaucgcagucccuaucgaacccugaugagcuguccuauaggcgaggugccaucucccuacaacucccguuuugaaucagucgccuggagcgcaagugccugccacgacggcaucaauuggcuuacuauugggaucucuggaccugauaacggugcuguggcaguacugaaguauaauggcauaauuacagacaccaucaaguccuggagaaacaauaucuugaggacgcaagagagcgagugugccugcguuaacgggucguguuucacugugaugaccgauggaccaucugacggccaggcuuccuacaaaauuuuucggaucgaaaaggguaaaauugucaagucaguggagaugaaugcccccaacuaucauuacgaagagugcaguuguuacccugauagcuccgagauaacaugcgugugccgcgacaauuggcacgggucuaacagaccaugggucagcuucaaucagaaccucgaauaucagaucggauacauuuguucaggcaucuuuggcgauaauccgaggcccaacgacaaaacugggaguugcggaccuguuuccaccaauggugcgaacggcgugaagggguucagcuuuaaguauggaaacggcguauggaucggucggacaaaaucuauuucaagucgcaauggguucgagaugauaugggauccaaacggcuggaccggaacggacaauaaguuuagcaucaaacaagacauugugggcaucaacgaaugguccggguacucuggaucguucguccagcaucccgagcugacuggucuggauuguauucgaccuugcuucuggguggaacucaucagaggcaggccaaaggagaauacaauauggaccagcggguccucaaucaguuuuuguggaguuaacucugacacugugggcuggagcuggcccgauggugcagaguuaccguucacaauugacaaauga

SEQ ID NO: 151130 - RNA, 1410 nt, Artificial Sequence; identical to SEQ ID NO: 149128
  derived and/or modified CDS sequence (opt3) from neuraminidase__InfluenzaA__AFN19815

SEQ ID NO: 151131 - RNA, 1410 nt, Artificial Sequence
  derived and/or modified CDS sequence (opt3) from neuraminidase__InfluenzaA__AFN19833
augaaccccaaucagaagaucauuaccauaggcagcgugugcaugacaaucgggauggccaaccugauucuccaaaucggaaauauuaucuccauauggaucucucacucaauucagcuugguaaccagagucagaucgagacuuguaaucaaagcgucauuacguacgaaaacaauaccuggguuaaccagacauaugugaauaucuccaacacuaauuucgcugcaggccagucuguagugucggucaaacuggccgggaacagcucauugugcccugugaguggaugggcgauauacuccaaggacaauucuauuagaaucggcagcaaaggugauguuuuugugauuagggagccauucaucuccuguucaccguuagaaugccggaccuuuuuccugacacagggggcucuacucaacgacaagcauaguaauggaaccaucaaagaucgcagccccuaucgaacucugaugucuuguccuauuggcgaggucccaucccccuacaacucacguuuugaaagcguggccuggagugcaucugccugccacgacggcauaaacuggcuuacaaucgggauuuccggaccugauaauggugcuguagcaguucugaaguauaacggcaucauaaccgacacgauuaagagcuggaaaaauaacaucuugagaacucaagagucggagugugccugcgugaaugggucuuguuucaccaucaugacagauggaccauccgacggccaggcuucauacaagauuuuuaggaucgaaaaagguaagauugucaaaaguguggagaugaacgcccccaauuaucauuacgaagagugcagcuguuacccugauuccucugagauaacuugcgugugccgggacaacuggcacgggagcaaucgcccaugggucucauucaaccagaaucucgaauaucagaucggauacauuuguaguggcaucuuuggcgauaacccgagacccaaugacaagaccggguccugcggaccuguuagcucuaacggugcgaauggcgugaagggguucucauuuaaauauggaaacggcguauggaucgguaggacaaagaguauuagcucccggaaaggguucgagaugauaugggauccaaacggcuggaccggaacggacaauaacuuuucuaucaagcaagacauugugggcaucaaugaauggucgggguacagcggauccuucguccagcaucccgagcugacuggucuggauuguauucgcccuugcuucuggguggaacucauccgaggcagaccaaaagagaacacaauauggaccucagggaguucuaucagcuuuuguggaguuaauuccgacacugugggcuggucauggcccgauggugcagaguuaccguucacaauugacaaguga

SEQ ID NO: 151132 - RNA, 1410 nt, Artificial Sequence; identical to SEQ ID NO: 148764
  derived and/or modified CDS sequence (opt3) from neuraminidase__InfluenzaA__AFN19851

SEQ ID NO: 151133 - RNA, 1410 nt, Artificial Sequence; identical to SEQ ID NO: 148305
  derived and/or modified CDS sequence (opt3) from neuraminidase__InfluenzaA__AFN19857

SEQ ID NO: 151134 - RNA, 1410 nt, Artificial Sequence
  derived and/or modified CDS sequence (opt3) from neuraminidase__InfluenzaA__AFN19867
augaaccccaaucagaagaucauuaccauaggcagcgugugcaugacaaucgggauggccaaccugauucuccaaaucggaaauauuaucuccauauggaucucucacucaauucagaucgguaaccagaaucagauugagacuuguaaccaaagugucaucacguacgaaaauaacaccuggguuaaucagacauaugugaacauaagcaauacuaacuucgcugcaggccaguccguagugucugucaaacuugccggaaauucgucacugugcccugugagcggaugggcgauuuacaguaaggacaacuccaucagaauuggcucuaaaggugauguuuuugugaucagggagccauucaucagcuguuccccguuggaaugccggaccuuuuucuuaacacagggggcucugcuaaaugacaagcauucaaacggaaccauuaaagaucgcagucccuaucgaacucucaugagcuguccuauaggcgaggucccaucucccuacaacucccguuuugaaucaguggccuggagcgcaagugccugccacgacggcaucaauuggcugacaauugggaucucuggaccugauaacggugcuguagcaguucuuaaguauaauggcauaauuaccgacacgaucaaguccuggagaaacaauauccugaggacucaagagagcgagugugccugcgugaacgggucguguuucaccauuaucacagauggaccaucugacggccaggcuuccuacaaaauuuuucggauagaaaaggguaaaaucgucaagucaguggagaugaaugcccccaacuaucauuacgaagagugcaguuguuacccugauagcuccgagauuacuugcgugugccgcgacaauuggcacgggucuaacagaccaugggucagcuucaaucagaacuuggaauaucagaucggauacaucuguucaggcauuuuuggcgauaauccgaggcccaacgacaaaaccgggaguugcggaccuguuuccagcaauggugcgaacggcgugaagggguucucuuuuaaguauggaaacggcguauggauaggucggacaaaaucaaucaguagccgcaagggguucgagaugauuugggauccaaauggcuggaccggaacggacaacaauuuuuccaucaaacaagacauugugggcaucaacgaauggucuggguacucggggagcuucguccagcaucccgagcucacuggucuggauuguauacgaccuugcuucuggguggaacugaucagaggcaggccaaaggagaauacaauuuggaccuccgggucaaguaucucuuuuuguggaguuaacagcgacacugugggcugguccuggcccgauggugcagagcucccguucacaauugacaaauga

SEQ ID NO: 151135 - RNA, 1410 nt, Artificial Sequence; identical to SEQ ID NO: 148757
  derived and/or modified CDS sequence (opt3) from neuraminidase__InfluenzaA__AFN19877

SEQ ID NO: 151136 - RNA, 1410 nt, Artificial Sequence; identical to SEQ ID NO: 148305
  derived and/or modified CDS sequence (opt3) from neuraminidase__InfluenzaA__AFN19887

SEQ ID NO: 151137 - RNA, 1410 nt, Artificial Sequence
  derived and/or modified CDS sequence (opt3) from neuraminidase__InfluenzaA__AFN19897
augaaccccaaucagaagaucauuaccauaggcagcgugugcaugacaaucgggauggccaaccugauucuccaaaucggaaauauuaucuccauauggaucucucacucaauucagcuugguaaccagagucagaucgagacuuguaaucaaagcgucauuacguacgaaaacaauaccuggguuaaccagacauaugugaauaucuccaacacuaauuucgcugcaggccagucuguagugucggucaaacuggccgggaacagcucauugugcccugugaguggaugggcgauauacuccaaggacaauucuauuagaaucggcagcaaaggugauguuuuugugauuagggagccauucaucuccuguucaccguuagaaugccggaccuuuuuccugacacagggggcucuacucaacgacaagcauaguaauggaaccaucaaagaucgcagccccuaucgaacucugaugucuuguccuauuggcgaggucccaucccccugcaacucacguuuugaaagcguggccuggagugcaucugccugucacgacggcauaaacuggcuuacaaucgggauuuccggaccugauaauggugcuguagcaguucugaaguacaacggcaucauaaccgacacgauuaagagcuggagaaauaacaucuugaggacucaagagucggagugcgccugugugaaugggucuugcuucaccaucaugacagauggaccauccgacggccaggcuucauauaaaauuuuucggaucgaaaaggguaaaauugucaagaguguggagaugaacgcccccaauuaccauuaugaagaguguagcugcuacccugauuccucugagauaacuugcgugugucgcgacaacuggcacgggagcaauagaccaugggucucauucaaccagaaucucgaauaccagaucggauauauuugcaguggcaucuuuggcgauaacccgaggcccaaugacaaaaccggguccuguggaccuguuagcucuaacggugcgaauggcgugaagggguucucauuuaaguacggaaacggcguauggaucggucggacaaaaaguauuagcucccgcaagggguucgagaugauaugggauccaaacggcuggaccggaacggacaauaacuuuucuaucaaacaagacauugugggcaucaaugaauggucgggguauagcggauccuucguccagcaucccgagcugacuggucuggauugcauucgaccuuguuucuggguggaacucaucagaggcaggccaaaggagaacacaauauggaccucagggaguucuaucagcuuuugcggaguuaauuccgacacugugggcuggucauggcccgauggugcagaguuaccguucacaauugacaaauga

SEQ ID NO: 151138 - RNA, 1410 nt, Artificial Sequence; identical to SEQ ID NO: 148305
  derived and/or modified CDS sequence (opt3) from neuraminidase__InfluenzaA__AFN19907

SEQ ID NO: 151139 - RNA, 1410 nt, Artificial Sequence; identical to SEQ ID NO: 148764
  derived and/or modified CDS sequence (opt3) from neuraminidase__InfluenzaA__AFN19917

SEQ ID NO: 151140 - RNA, 1410 nt, Artificial Sequence
  derived and/or modified CDS sequence (opt3) from neuraminidase__InfluenzaA__AFN19923
augaaccccaaucagaagaucauuaccauaggcagcgugugcaugacaaucgggauggccaaccugauucuccaaaucggaaauauuaucuccauauggaucucucacucaauucagcuugguaaccagagucagaucgagacuuguaaucaaaacgucauuacguacgaaaauaacaccuggguuaaucagacauaugugaacaucagcaauacuaacuucgcugcaggccaguccguagugucugucaaacuggccggaaauucgucauugugcccugugagcggaugggcgauauacaguaaggacaacuccauuagaaucggcucuaaaggugauguuuuugugauuagggagccauucaucagcuguuccccguuagaaugccggaccuuuuuccugacacagggggcucuacucaaugacaagcauucaaacggaaccaucaaagaucgcagucccuaucgaacucugaugagcuguccuauuggcgaggucccaucucccuacaacucccguuuugaaucaguggccuggagcgcaagugccugccacgacggcauaaauuggcuuacaaucgggauuucuggaccugauaacggugcuguagcaguucugaaguauaauggcaucauaaccgacacgauuaaguccuggagaaacaauaucuugaggacucaagagagcgagugugccugcgugaacgggucguguuucaccaucaugacagauggaccaucugacggccaggcuuccuacaaaauuuuucggaucgaaaaggguaaaauugucaagucaguggagaugaaugcccccaacuaucauuacgaagagugcaguuguuacccugauagcuccgagauaacuugcgugugccgcgacaauuggcacgggucuaacagaccaugggucagcuucaaucagaaccucgaauaucagaucggauacauuuguucaggcaucuuuggcgauaauccgaggcccaacgacaaaaccgggaguugcggaccuguuuccagcaauggugcgaacggcgugaagggguucucuuuuaaguauggaaacggcguauggaucggucggacaaaaucaauuaguagccgcaagggguucgagaugauaugggauccaaauggcuggaccggaacggacaacaauuuuuccaucaaacaagacauugugggcaucaacgaauggucuggguacucggggagcuucguccagcaucccgagcugacuggucuggauuguauucgaccuugcuucuggguggaacucaucagaggcaggccaaaggagaauacaauauggaccuccgggucaaguaucucuuuuuguggaguuaacagcgacacugugggcugguccuggcccgauggugcagaguuaccguucacaauugacaaauga

SEQ ID NO: 151141 - RNA, 1410 nt, Artificial Sequence; identical to SEQ ID NO: 148305
  derived and/or modified CDS sequence (opt3) from neuraminidase__InfluenzaA__AFN19933

SEQ ID NO: 151142 - RNA, 1410 nt, Artificial Sequence; identical to SEQ ID NO: 148764
  derived and/or modified CDS sequence (opt3) from neuraminidase__InfluenzaA__AFN19943

SEQ ID NO: 151143 - RNA, 1410 nt, Artificial Sequence
  derived and/or modified CDS sequence (opt3) from neuraminidase__InfluenzaA__AFN19953
augaaccccaaucagaagaucauuaccauaggcagcgugugcaugacaaucgggauggccaaccugauucuccaaaucggaaauauuaucuccauauggaucucucacucaauucagcuugguaaccagagucagaucgagacuuguaaucaaagagucauuacguacgaaaacaauaccuggguuaaccagacauaugugaauaucagcaacacuaauuucgcugcaggccaguccguagugucugucaaacuggccgggaacucgucauugugcccugugagcggaugggcgauauacaguaaggacaauuccauuaggaucggcucuaaaggugauguuuuugugauucgggagccauucaucagcuguuccccguuagaaugccgcaccuuuuuccugacacagggggcucuacucaacgacaagcauucaaauggaaccaucaaagaucgaagucccuaucguacucugaugagcuguccuauuggcgaggucccaucucccuacaacuccagauuugaaucaguggccuggagcgcaagugccugccacgacggcauaaacuggcuuacaaucgggauuucuggaccugauaauggugcuguagcaguucugaaguauaacggcaucauaaccgacacgauuaaguccuggaggaauaacaucuugcggacucaagagagcgagugugccugcgugaaugggucguguuucaccaucaugacagauggaccaucugacggccaggcuuccuacaaaauuuuucgcaucgaaaaggguaaaauugucaagucaguggagaugaacgcccccaauuaucauuacgaagagugcaguuguuacccugauagcuccgagauaacuugcgugugcagagacaacuggcacgggucuaauaggccaugggucagcuucaaccagaaucucgaauaucagaucggauacauuuguucaggcaucuuuggcgauaacccgcggcccaaugacaaaaccgggaguugcggaccuguuuccagcaacggugcgaauggcgugaagggguucucuuuuaaguauggaaacggcguauggaucggucgcacaaaaucaauuaguagccgaaagggguucgagaugauaugggauccaaacggcuggaccggaacggacaauaacuuuuccaucaaacaagacauuguggaaaucaaugaguggucuggcuacucggggagcuucguccagcaucccgaacugacuggacuggauuguauuagaccuugcuucuggguggagcucaucaggggucggccaaaggagaacacaauauggaccuccggcucaaguaucucuuuuugugggguuaauagcgacacugugggaugguccuggcccgauggcgcagaauuaccguucacaauugacaaauga

SEQ ID NO: 151144 - RNA, 1410 nt, Artificial Sequence
  derived and/or modified CDS sequence (opt3) from neuraminidase__InfluenzaA__AFN19967
augaaccccaaucagaagaucauuaccauaggcagcgugugcaugacaaucgggauggccaaccugauucuccaaaucggaaauauuaucuccauauggaucucucacucaauucagcuugguaaccagagucagaucgagacuuguaaucaaagcgucauuacguacgaaaacaauaccuggguuaaccagacauaugugaauaucuccaacacuaauuucgcugcaggccagucuguagugucggucaaacuggccgggaacagcucauugugcccugugaguggaugggcgauauacuccaaggacaauucuauuagaaucggcagcaaaggugauguuuuugugauuagggagccauucaucuccuguucaccguuagaaugccggaccuuuuuccugacacagggggcucuacucaacgacaagcauaguaauggaaccaucaaagaucgcagccccuaucgaacucugaugucuuguccuauuggcgaggucccaucccccuacaacucacguuuugaaagcguggccuggagugcaucugccugccacgacggcauaaacuggcuuacaaucgggauuuccggaccugauaauggugcuguagcaguucugaaguauaacggcaucauaaccgacacgauuaagagcuggagaucgaauaucuugaggacucaagagucugagugugccugcgugaacggguccuguuucaccaucaugacagauggaccaucagacggccaggcuaguuacaaaauuuuucggaucgaaaaggguaaaauugucaagagcguggagaugaaugcccccaacuaucauuacgaagagugcuccuguuacccugauucuagcgagauaacuugcgugugccgcgacaauuggcacgggucaaacagaccaugggucaguuucaaucagaaccucgaauaucagaucggauacauuuguuccggcaucuuuggcgauaauccgaggcccaacgacaaaaccgggagcugcggaccuguuucuucaaauggugcgaacggcgugaagggguucaguuuuaaguauggaaauggcguauggaucggucggacaaaaagcauuuccucucgcaagggguucgagaugauaugggauccaaacggcuggaccggaacggacaacaauuuuucgaucaaacaagacauugugggcaucaacgaauggagcggguacuccggaucauucguccagcaucccgagcugacuggucuggauuguauucgaccuugcuucuggguggaacucaucagaggcaggccaaaggagaauacaauauggaccagugggucuagcaucuccuuuuguggaguuaacucagacacugugggcuggagcuggcccgauggugcagaguuaccguucacaauugacaaauga

SEQ ID NO: 151145 - RNA, 1410 nt, Artificial Sequence
  derived and/or modified CDS sequence (opt3) from neuraminidase__InfluenzaA__AFN19973
augaaccccaaucagaagaucauuaccauaggcagcgugugcaugacaaucgggauggccaaccugauucuccaaaucggaaauauuaucuccauauggaucucucacucaauucagcuugguaaccagagucagaucgagacuuguaaucaaagcgucauuacguacgaaaacaauaccuggguuaaccagacauaugugaauaucuccaacacuaauuucgcugcaggccagucuguagugucggucaaacuggccgggaacagcucauugugcccugugaguggaugggcgauauacuccaaggacaauucuauuagaaucggcagcaaaggugauguuuuugugauuagggagccauucaucuccuguucaccguuagaaugccggaccuuuuuccugacacagggggcucuacucaacgacaagcauaguaauggaaccaucaaagaucgcagccccuaucgaacucugaugucuuguccuauuggcgaggucccaucccccuacaacucacguuuugaaagcguggccuggagugcaucugccugccacgacggcauaaacuggcuuacaaucgggauuuccggaccugauaauggugcuguagcaguucugaaguauaacggcaucauaaccgacacgauuaagagcuggagaaauaacaucuugaggacucaagagucggagugugccugcgugaaugggucuuguuucaccaucaugacagauggauccucagacggccaggcuaguuacaaaauuuuucggaucgaaaaggguaaaauugucaagagcguggagaugaacgccccaaauuaucauuacgaagagugcuccuguuaccccgauucuagcgagauaacuugcgugugccgcgacaacuggcacgggucaaauagaccuugggucaguuucaaccagaaucucgaauaucagaucggauacauuuguuccggcaucuuuggcgauaacccaaggccgaaugacaaaaccgggagcugcggacccguuucuucaaacggugcgaauggcgugaagggguucaguuuuaaguauggaaacggcguauggaucggucggacaaaaagcauuuccucucgcaagggguucgagaugauaugggauccuaacggcuggaccggaacggacaauaacuuuucgaucaaacaagacauugugggcaucaaugaauggagcggguacuccggaucauucguccagcauccagagcugacuggucuggauuguauucgacccugcuucuggguggaacucaucagaggcaggccuaaggagaacacaauauggaccagugggucuagcaucuccuuuuguggaguuaauucagacacugugggcuggagcuggccagauggugcagaguuacccuucacaauugacaaauga

SEQ ID NO: 151146 - RNA, 1410 nt, Artificial Sequence; identical to SEQ ID NO: 148305
  derived and/or modified CDS sequence (opt3) from neuraminidase__InfluenzaA__AFN19979

SEQ ID NO: 151147 - RNA, 1410 nt, Artificial Sequence
  derived and/or modified CDS sequence (opt3) from neuraminidase__InfluenzaA__AFN19985
augaaccccaaucagaagaucauuaccauaggcagcgugugcaugacaaucgggauggccaaccugauucuccaaaucggaaauauuaucuccauauggaucucucacucaauucagcuugguaaccagagucagaucgagacuuguaaucaaagcgucauuacguacgaaaacaauaccuggguuaaccagacauaugugaauaucuccaacacuaauuucgcugcaggccagucuguagugucggucaaacuggccgggaacagcagcuugugcccugugaguggaugggcgauauacuccaaggacaauucuauuagaaucggcagcaaaggugauguuuuugugauuagggagccauucaucuccuguucaccguuagaaugccggaccuuuuuccugacacagggggcucuacucaacgacaagcauaguaauggaaccaucaaagaucgcagccccuaucgaacucugaugucuuguccuauuggcgaggucccaucccccuacaacucacguuuugaaagcguggccuggagugcaucugccugccacgacggcauaaacuggcuuacaaucgggauuuccggaccugauaauggugcuguagcaguucugaaguauaacggcaucauaaccgacacgauuaagagcuggagaaauaacaucuugaggacucaagagucggagugugccugcgugaaugggucuuguuucaccaucaugacagauggaccauccgacggccaggcuucauacaaaauuuuucggaucgaaaaggguaaaauugucaagaguguggagaugaacgcccccaauuaucauuacgaagagugcagcuguuacccugauuccucugagauaacuugcgugugccgcgacaacuggcacgggagcaauagaccaugggucucauucaaccagaaucucgaauaucagaucggauacauuuguaguggcaucuuuggcgauaacccgaggcccaaugacaaaaccggguccugcggaccuguuagcucuaacggugcgaauggcgugaagggguucucauuuaaguauggaaacggcguauggaucggucggacaaaaagugugagcucccgcaagggguucgagaugauuugggauccaaacggcuggaccggaacggacaauaacuuuucuauaaaacaagacaucgucggcauuaaugaauggucgggguacagcggauccuucgugcagcaucccgagcugacuggucuggauuguauccgaccuugcuucuggguugaacucauuagaggcaggccaaaggagaacacaaucuggaccucagggaguucuauaucauuuuguggagucaauuccgacacugugggcuggucauggcccgauggugcagaguuaccguucacaaucgacaaauga

SEQ ID NO: 151148 - RNA, 1410 nt, Artificial Sequence
  derived and/or modified CDS sequence (opt3) from neuraminidase__InfluenzaA__AFN19995
augaaccccaaucagaagaucauuaccauaggcagcgugugcaugacaaucgggauggccaaccugauucuccaaaucggaaauauuaucuccauauggaucucucacucaauucagcuugguaaccagagucagacugagacguguaaucaaagcgucaucaccuacgaaaacaauacauggguuaaccagacuuaugugaauauuuccaacaccaauuucgcugcaggccagucuguagugucggucaaacuggccgggaacagcagcuugugcccugugaguggaugggcgaucuacuccaaggacaauucuauaagaauuggcagcaaaggugauguuuuugugaucagggagccauucauuuccuguucaccguuagaaugccggacauuuuuccugacccagggggcucuacucaacgacaagcauaguaauggaacuaucaaagaucgcagccccuaucgaacacugaugucuuguccuaucggcgaggucccaucccccuacaacucacguuuugaaagcguggccuggagugcaucugccugccacgacggcauuaacuggcuuaccauagggaucuccggaccugauaauggugcuguagcaguucugaaguauaacggcauuaucacggacacuauaaagagcuggagaaauaacauuuugaggacccaagagucggagugugccugcgugaaugggucuuguuucacaaucaugacugauggaccauccgacggccaggcuucauacaaaaucuuucggauugaaaaggguaaaaucgucaagaguguggagaugaacgcccccaauuaucauuacgaagagugcagcuguuacccugauuccucugagauuaccugcgugugccgcgacaacuggcacgggagcaauagaccaugggucucauucaaccagaaucucgaauaucagauaggauacaucuguaguggcauuuuuggcgauaacccgaggcccaaugacaaaacaggguccugcggaccuguuagcucuaacggugcgaauggcgugaagggguucucauuuaaguauggaaacggcguauggaucggucggaccaaaaguaucagcucccgcaagggguucgagaugauuugggauccaaacggcuggacgggaacugacaauaacuuuucuauaaaacaagacaucgugggcauuaaugaauggucgggguacagcggauccuucguccagcaucccgagcugacaggucuggauuguauccgaccuugcuucuggguggaacucauuagaggcaggccaaaggagaacaccaucuggacuucagggaguucuauaucauuuuguggaguuaauuccgacacagugggcuggucauggcccgauggugcagaguuaccguucaccaucgacaaauga

SEQ ID NO: 151149 - RNA, 1410 nt, Artificial Sequence; identical to SEQ ID NO: 148305
  derived and/or modified CDS sequence (opt3) from neuraminidase__InfluenzaA__AFN20001

SEQ ID NO: 151150 - RNA, 1410 nt, Artificial Sequence
  derived and/or modified CDS sequence (opt3) from neuraminidase__InfluenzaA__AFN20013
augaaccccaaucagaagaucauuaccauaggcagcgugugcaugacaaucgggauggccaaccugauucuccaaaucggaaauauuaucuccauauggaucucucacucaauucagcuugguaaccagagucagaucgagacuuguaaucaaagcgucauuacguacgaaaacaauaccuggguuaaccagacauaugugaauaucuccaacacuaauuucgcugcaggccagucuguagugucggucaaacuggccgggaacagcucauugugcccugugaguggaugggcgauauacuccaaggacaauucuauuagaaucggcagcaaaggugauguuuuugugauuagggagccauucaucuccuguucaccguuagaaugccggaccuuuuuccugacacagggggcucuacucaacgacaagcauaguaauggaaccaucaaagaucgcagccccuaucgaacucugaugucuuguccuauuggcgaggucccaucccccuacaacucacguuuugaaagcguggccuggagugcaucugccugccacgacggcauaaacuggcuuacaaucgggauuuccggaccugauaauggugcuguagcaguucugaaguauaacggcaucauaaccgacacgauuaagagcuggagaaauaacaucuugaggacucaagagucggagugugccugcgugaaugggucuuguuucaccaucaugacagauggaccauccgacggccaggcuucauacaaaauuuuucggaucgaaaaggguaaaauugucaagaguguggagaugaacgcccccaauuaucauuacgaagagugcagcuguuacccugauuccucugagauaacuugcgugugccgcgacaacuggcacgggagcaauagaccaugggucucauucaaccagaaucucgaauaucagaucggauacauuuguaguggcaucuuuggcgauaacccgaggcccaaugacaaaaccggguccugcgauccuguuagcucuaacggagcgaauggugugaagggcuucucauuuaaguaugggaacggaguauggaucggccggacaaaaaguauuagcucccgcaaggguuucgagaugauaugggacccaaacggguggaccggcacggacaauaacuuuucuaucaaacaagauauugugggaaucaaugaauggucgggcuacagcggguccuucguccagcaucccgagcugacuggacuggacuguauucgaccuugcuucuggguggaacucaucagagguaggccaaaggagaacacaauauggaccucaggcaguucuaucagcuuuugugggguuaauuccgauacugugggauggucauggcccgacggcgcagaguuaccguucacaauugauaaauga

SEQ ID NO: 151151 - RNA, 1410 nt, Artificial Sequence
  derived and/or modified CDS sequence (opt3) from neuraminidase__InfluenzaA__AFN20020
augaaccccaaucagaagaucauuaccauaggcagcgugugcaugacaaucgggauggccaaccugauucuccaaaucggaaauauuaucuccauauggaucucucacucaauucagcuugguaaccagagucagaucgagacuuguaaucaaagcgucauuacguacgaaaacaauaccuggguuaaccagacauaugugaauaucuccaacacuaauuucgcugcaggccagucuguagugucggucaaacuggccgggaacagcagcuugugcccugugaguggaugggcgauauacuccaaggacaauucuauuagaaucggcagcaaaggugauguuuuugugauuagggagccauucaucuccuguucaccguuagaaugccggaccuuuuuccugacacagggggcucuacucaacgacaagcauaguaauggaaccaucaaagaucgcagccccuaucgaacucugaugucuuguccuauuggcgaggucccaucccccuacaacucacguuuugaaagcguggccuggagugcaucugccugccacgacggcauaaacuggcuuacaaucgggauuuccggaccugauaauggugcuguagcaguucugaaguauaacggcaucauaaccgacacgauuaagagcuggagaaauaacaucuugaggacucaagagucggagugugccugcgugaaugggucuuguuucaccaucaugacagauggaccauccgacggccaggcuucauacaaaauuuuucggaucgaaaaggguaaaauugucaagaguguggagaugaacgcccccaauuaucauuacgaagagugcagcuguuacccugauuccucugagauaacuugcgugugccgcgacaacuggcacgggagcaauagaccaugggucucauucaaccagaaucucgaauaucagaucggauacauuuguaguggcaucuuuggcgauaacccgaggcccaaugacaaaaccggguccugcggaccuguuagcucuaacggugcgaauggcgugaagggguucucauuuaaguauggaaacggcguauggaucggucggacaaaaaguauuagcucccgcaagggguucgagaugauaugggauccaaacggcuggaccggaacggacaauaacuuuucuaucaaacaagacauugugggccugaaugaauggucgggguacagcggauccuucguccagcaucccgagcugacuggucucgauuguauccgaccuugcuucuggguggaauuaauuagaggcaggccaaaggagaacacaaucuggaccucagggaguucuauaucauuuuguggaguuaauuccgacacugugggcuggucauggcccgauggugcagagcugccguucacaaucgacaaauga

SEQ ID NO: 151152 - RNA, 1410 nt, Artificial Sequence; identical to SEQ ID NO: 148305
  derived and/or modified CDS sequence (opt3) from neuraminidase__InfluenzaA__AFN20022

SEQ ID NO: 151153 - RNA, 1410 nt, Artificial Sequence
  derived and/or modified CDS sequence (opt3) from neuraminidase__InfluenzaA__AFN20035
augaaccccaaucagaagaucauuaccauaggcagcgugugcaugacaaucgggauugccaaccugauccuccaaauuggaaauaucauauccaucuggauuucucacucaauccagcuugguaaccagagucagauugagacuuguaaucaaagcgucaucacguacgaaaacaauaccuggguuaaccagacauaugugaauauauccaacacuaauuucgcugcaggccagucuguagugucggucaaacuggccgggaacagcucauugugcccugugaguggaugggcgauuuacuccaaggacaauucuaucagaauuggcagcaaaggugauguuuuugugaucagggagccauucaucuccuguucaccguuagaaugccggaccuuuuuccugacacagggggcucuacucaacgacaagcauaguaauggaaccauuaaagaucgcagccccuaucgaacucugaugucuuguccuauaggcgaggucccaucccccuacaacucacguuuugaaagcguggccuggagugcaucugccugccacgacggcaucaacuggcuuacaauugggaucuccggaccugauaauggugcuguagcaguucugaaguauaacggcauaauuaccgacacgaucaagagcuggagaaauaacaucuugaggacucaagagucggagugugccugcgugaaugggucuuguuucaccauuaugacagauggaccauccgacggccaggcuucauacaaaaucuuucggauugaaaaggguaaaauagucaagaguguggagaugaacgcccccaauuaucauuacgaagagugcagcuguuacccugauuccucugagaucacuugcgugugccgcgacaacuggcacgggagcaauagaccaugggucucauucaaccagaaucucgaauaucagauuggauacaucuguaguggcaucuuuggcgauaacccgaggcccaaugacaaaaccggguccugcggaccuguuagcucuaacggugcgaauggcgugaagggguucucauuuaaguauggaaacggcguauggauuggucggacaaaaaguauaagcucccgcaagggguucgagaugaucugggauccaaacggcuggaccggaacggacaauaacuuuucuauuaaacaagacaucgugggcauuaaugaauggucgggguacagcggauccuucguccagcaucccgagcugacuggucuggauuguauccgaccuugcuucuggguggaacucauaagaggcaggccaaaggagaacacaaucuggaccucagggaguucuauuagcuuuuguggaguuaauuccgacacugugggcuggucauggcccgauggugcagaguuaccguucacaaucgacaaauga

SEQ ID NO: 151154 - RNA, 1410 nt, Artificial Sequence; identical to SEQ ID NO: 148305
  derived and/or modified CDS sequence (opt3) from neuraminidase__InfluenzaA__AFN20041

SEQ ID NO: 151155 - RNA, 1410 nt, Artificial Sequence; identical to SEQ ID NO: 148305
  derived and/or modified CDS sequence (opt3) from neuraminidase__InfluenzaA__AFN20047

SEQ ID NO: 151156 - RNA, 1410 nt, Artificial Sequence; identical to SEQ ID NO: 149128
  derived and/or modified CDS sequence (opt3) from neuraminidase__InfluenzaA__AFN20063

SEQ ID NO: 151157 - RNA, 1410 nt, Artificial Sequence
  derived and/or modified CDS sequence (opt3) from neuraminidase__InfluenzaA__AFN20077
augaaccccaaucagaagaucauuaccauaggcagcgugugcaugacaaucgggauggccaaccugauucuccaaaucggaaauauuaucuccauauggaucucucacucaauucagcuugguaaccagagucagaucgagacuuguaaucaaagcgucauuacguacgaaaacaauaccuggguuaaccagacauaugugaauaucuccaacacuaauuucgcugcaggccagucuguagugucggucaaacuggccgggaacagcucauugugcccugugaguggaugggcgauauacuccaaggacaauucuauuagaaucggcagcaaaggugauguuuuugugauuagggagccauucaucuccuguucaccguuagaaugccggaccuuuuuccugacacagggggcucuacucaacgacaagcauaguaauggaaccaucaaagaucgcagccccuaucgaacucugaugucuuguccuauuggcgaggucccaucccccuacaacucacguuuugaaagcguggccuggagugcaucugccugccacgacggcauaaacuggcuuacaaucgggauuuccggaccugauaauggugcuguagcaguucugaaguauaacggcaucauaaccgacacgauuaagagcuggagaaauaacaucuugaggacucaagagucggagugugccugcgugaaugggucuuguuucaccaucaugacagauggaccauccgacggccaggcuucauacaaaauuuuuaagaucgaaaaagguaagauugucaaaaguguggagaugaacgcccccaauuaucauuacgaagagugcagcuguuacccugauuccucugagauaacuugcgugugccgggacaacuggcacgggagcaaucgcccaugggucucauucaaccagaaucucgaauaucagaucggauacauuuguaguggcaucuuuggcgauaacccgagacccaaugacaagaccggguccugcggaccuguuagcucuaacggugcgaauggcgugaagggguucucauuuaaauauggaaacggcguauggaucgguaggacaaagaguauuagcucccggaaaggguucgagaugauaugggauccaaacggcuggaccggaacggacaauaacuuuucuaucaagcaagacauugugggcaucaaugaauggucgggguacagcggauccuucguccagcaucccgagcugacuggucuggauuguauucgcccuugcuucuggguggaacucauccgaggcagaccaaaagagaacacaauauggaccucagggaguucuaucagcuuuuguggaguuaauuccgacacugugggcuggucauggcccgauggugcagaguuaccguucacaauugacaaguga

SEQ ID NO: 151158 - RNA, 1410 nt, Artificial Sequence; identical to SEQ ID NO: 148305
  derived and/or modified CDS sequence (opt3) from neuraminidase__InfluenzaA__AFN20083

SEQ ID NO: 151159 - RNA, 1410 nt, Artificial Sequence
  derived and/or modified CDS sequence (opt3) from neuraminidase__InfluenzaA__AFN20094
augaaccccaaucagaagaucauuaccauaggcagcgugugcaugacaaucgggauggccaaccugauucuccaaaucggaaauauuaucuccauauggaucucucacucaauucagcuugguaaccagagucagaucgagacuuguaaucaaagcgucauuaucuacgaaaacaauacguggguuaaccagaccuaugugaauauauccaacacaaauuucgcugcaggccagucuguagugucggucaaacuggccgggaacagcucauugugcccugugaguggaugggcgauuuacuccaaggacaauucuaucagaauuggcagcaaaggugauguuuuugugaucagggagccauucaucuccuguucaccguuagaaugccggaccuuuuuccugacucagggggcucuacucaacgacaagcauaguaauggaacaauuaaagaucgcagccccuaucgaacccugaugucuuguccuauaggcgaggucccaucccccuacaacucacguuuugaaagcguggccuggagugcaucugccugccacgacggcaucaacuggcuuacuauugggaucuccggaccugauaauggugcuguagcaguucugaaguauaacggcauaauuacagacaccaucaagagcuggagaaauaacaucuugaggacgcaagagucggagugugccugcgugaaugggucuuguuucacuauuaugaccgauggaccauccgacggccaggcuucauacaaaaucuuucggauugaaaaggguaaaauagucaagaguguggagaugaacgcccccaauuaucauuacgaagagugcagcuguuacccugauuccucugagaucacaugcgugugccgcgacaacuggcacgggagcaauagaccaugggucucauucaaccagaaucucgaauaucagauuggauacaucuguaguggcaucuuuggcgauaacccgaggcccaaugacaaagcgggguccugcggaccuguuagcucuaacggugcaaauggcgugaagggguucucauuuaaguauggaaacggcguauggauuggucggacuaaaaguauaagcucccgcaagggguucgagaugaucugggauccaaacggcuggaccggaacagacaauaacuuuucuauuaaacaagacaucgugggcauuaaugaauggucgggguacagcggauccuucguccagcaucccgagcugaccggucuggauuguauccgaccuugcuucuggguggaacucauaagaggcaggccaaaggagaacacgaucuggacuucagggaguucuauuagcuuuuguggaguuaauuccgacacaaugggcuggucauggcccgauggugccgaguuaccguucaccaucgacaaauga

SEQ ID NO: 151160 - RNA, 1410 nt, Artificial Sequence; identical to SEQ ID NO: 148764
  derived and/or modified CDS sequence (opt3) from neuraminidase__InfluenzaA__AFN20100

SEQ ID NO: 151161 - RNA, 1410 nt, Artificial Sequence
  derived and/or modified CDS sequence (opt3) from neuraminidase__InfluenzaA__AFN20114
augaaccccaaucagaagaucauuaccauaggcagcgugugcaugacaaucgggauggccaaccugauucuccaaaucggaaauauuaucuccauauggaucucucacucaauucagcuugguaaccagaaucagaucgagacuuguaaccaaagugucauuacguacgaaaauaacaccuggguuaaucagacauaugugaacaucagcaauacuaacuucgcugcaggccaguccguagugucugucaaacuggccgggaauaguucauugugcccugugagcggaugggcgauauacaguaaggacaacuccauuagaaucggcucuaaaggugauguuuuugugauuagggagccauucaucagcuguuccccguuagaaugccggaccuuuuuccugacacagggggcucuacucaaugacaagcauucaaacggaaccaucaaagaucgcagucccuaucgaacucugaugagcuguccuauuggcgaggucccaucucccuacaacucccguuuugaaucaguggccuggagcgcaagugccugccacgacggcauaaauuggcuuacaaucgggauuucuggaccugauaacggugcuguagcaguucugaaguauaauggcaucauaaccgacacgauuaaguccuggagaaacaauaucuugaggacucaagagagcgagugugccugcgugaacgggucguguuucaccgucaugacagauggaccaucugacggccaggcuuccuacaaaaucuuuaagauugaaaaagguaagaucgugaaaucaguggagaugaaugcccccaacuaucauuacgaagagugcaguuguuacccugauagcuccgagauuacuugcgucugccgggacaauuggcacgggucuaaccgcccauggguuagcuucaaucagaaccucgaauaucagauaggauacaucuguucaggcauuuuuggcgauaauccgagacccaacgacaagaccgggaguugcuccccugugagcucuaauggagcgaacgguguaaagggcuucucauuuaaauaugggaacggaguguggaucggcaggacaaagaguaccagcucccggaaugguuucgagaugaucugggauccaaacggguggacgggcacugacaauucuuuuucgaugaaacaagacauugucggaauaaacgaauggagcggcuacuccgggucauucgugcagcaucccgagcugacaggacuggauuguauccgcccuugcuucuggguugaacucauucgagguagaccaaaggagaauaccguguggacuucgggcucuagcaucuccuuuuguggggucaacucagacacagugggauggagcuggcccgauggcgcagaguuaccguucaccauugacaaauga

SEQ ID NO: 151162 - RNA, 1410 nt, Artificial Sequence
  derived and/or modified CDS sequence (opt3) from neuraminidase__InfluenzaA__AFN20128
augaaccccaaucagaagaucauuaccauaggcagcgugugcaugacaaucgggauggccaaccugauucuccaaaucggaaauauuaucuccauauggaucucucacucaauucagcuugguaaccagagucagaucgagacuuguaaucaaagcgucauuacguacgaaaacaauaccuggguuaaccagacauaugugaauaucuccaacacuaauuucgcugcaggccagucuguagugucggucaaacuggccgggaacucaucauugugcccugugaguggaugggcgauauacuccaaggacaauucuauuagaaucggcagcaaaggugauguuuuugugauuagggagccauucaucuccuguucaccguuagaaugccggaccuuuuuccugacacagggggcucuacucaacgacaagcauaguaauggaaccaucaaagaucgcagccccuaucgaacucugaugucuuguccuauuggcgaggucccaucccccuacaacucacguuuugaaagcguggccuggagugcaucugccugccacgacggcauaaacuggcuuacaaucgggauuuccggaccugauaauggugcuguagcaguucugaaguauaacggcaucauaaccgacacgauuagaagcuggaggaauaacaucuugcggacucaagagucggagugugccugcgugaaugggucuuguuucaccaucaugacagauggaccauccgacggccaggcuucauacaagauuuuucgcaucgaaaaagguaagauuauaaaaagugucgagaugaacgcccccaauuaucauuacgaagagugcagcuguuacccugauuccucugagaucacuugcgugugcagagacaacuggcacgggagcaauaggccaugggugucauucaaccagaaucucgaauaucagauuggauacaucuguaguggcaucuuuggcgauaacccgcgguccaaugacaagaccgggagcugcggacccgucucuucaaacggugcgaauggcguuaaaggguucaguuuuaaguauggaaacggcguguggauuggucgcacaaagagcauauccucucgaaaaggguucgagaugaucugggauccuaacggcuggaccggaacggacaauaacuuuucgauuaagcaagacaucguaggcauuaaugaauggagcggguacuccggaucauucgugcagcauccagagcugacuggucuggauuguaucagacccugcuucugggucgaacucauaaggggccggccuaaagagaacacaaucuggaccagugggucuagcauuuccuuuuguggagugaauagcgacacuguuggcuggagcuggccagauggugcagaguuacccuucacaaucgacaaguga

SEQ ID NO: 151163 - RNA, 1410 nt, Artificial Sequence; identical to SEQ ID NO: 148305
  derived and/or modified CDS sequence (opt3) from neuraminidase__InfluenzaA__AFN87935

SEQ ID NO: 151164 - RNA, 1410 nt, Artificial Sequence
  derived and/or modified CDS sequence (opt3) from neuraminidase__InfluenzaA__AFN87937
augaaccccaaucagaagaucauuaccauaggcagcgugugcaugacaaucgggauggccaaccugauucuccaaaucggaaauauuaucuccauauggaucucucacucaauucagcuugguaaccagaaucagaucgagacuuguaaccaaagugucauuacguacgaaaauaacaccuggguuaaucagacauaugugaacaucagcaauacuaacuucgcugcaggccaguccguagugucugucaaacuggccggaaauucgucauugugcccugugagcgggugggcgauauacaguaaggacaacuccauuagaaucggcucuaaaggugauguuuuugugauuagggagccauucaucagcuguuccccguuagaaugccggaccuuuuuccugacacagggggcucuacucaaugacaagcauucaaacggaaccaucaaagaucgcagucccuaucgaacucugaugagcuguccuauuggcgaggucccaucucccuacaacucccguuuugaaucaguggccuggagcgcaagugccugccacgacggcauaaauuggcuuacaaucgggauuucuggaccugauaacggugcuguagcaguucugaaguauaauggcaucauaaccgacacgauuaaguccuggagaaacaauaucuugaggacucaagagagcgagugugccugcgugaacgggucguguuucaccgucaugacagauggaccaucugacggccaggcuuccuacaaaaucuuuaagauugaaaaagguaagaucgugaaaucaguggagaugaaugcccccaacuaucauuacgaagagugcaguuguuacccugauagcuccgagauuacuugcgucugccgggacaauuggcacgggucuaaccgcccauggguuagcuucaaucagaaccucgaauaucagauaggauacaucuguucaggcauuuuuggcgauaauccgagacccaacgacaagaccgggaguugcggaccuguguccagcaauggugcgaacggcguaaagggguucucuuuuaaauauggaaacggcguguggaucgguaggacaaagucaaccaguagccggaauggguucgagaugaucugggauccaaacggcuggacgggaacugacaauuccuuuucuaugaaacaagacauugucggcauaaacgaauggucgggguacagcggauccuucgugcagcaucccgagcugacaggucuggauuguauccgcccuugcuucuggguugaacucauucgaggcagaccaaaggagaauaccguguggacuucagggaguucuaucagcuuuuguggagucaacuccgacacagugggcuggucauggcccgauggugcagaguuaccguucaccauugacaaauga

SEQ ID NO: 151165 - RNA, 1410 nt, Artificial Sequence
  derived and/or modified CDS sequence (opt3) from neuraminidase__InfluenzaA__AFN87940
augaaccccaaucagaagaucauuaccauaggcagcgugugcaugacaaucgggauggccaaccugauucuccaaaucggaaauauuaucuccauauggaucucucacucaauucagcuugguaaccagaaucagaucgagacuuguaaccaaagugucauuacguacgaaaauaacaccuggguuaaucagacauaugugaacaucagcaauacuaacuucgcugcaggccaguccguagugucugucaaacuggccggaaauucgucauugugcccugugagcgggugggcgauauacaguaaggacaacuccauuagaaucggcucuaaaggugauguuuuugugauuagggagccauucaucagcuguuccccguuagaaugccggaccuuuuuccugacacagggggcucuacucaaugacaagcauucaaacggaaccaucaaagaucgcagucccuaucgaacucugaugagcuguccuauuggcgaggucccaucucccuacaacucccguuuugaaucaguggccuggagcgcaagugccugccacgacggcauaaauuggcuuacaaucgggauuucuggaccugauaacggugcuguagcaguucugaaguauaauggcaucauaaccgacacgauuaaguccuggagaaacaauaucuugaggacucaagagagcgagugugccugcgugaacgggucguguuucaccgucaugacagauggaccaucugacggccaggcuuccuacaaaaucuuuaagauugaaaaagguaagaucgugaaaucaguggagaugaaugcccccaacuaucauuacgaagagugcaguuguuacccugauagcuccgagauuacuugcgucugccgggacaauuggcacgggucuaaccgcccauggguuagcuucaaucagaaccucgaauaucagauaggauacaucuguucaggcauuuuuggcgauaauccgagacccaacgacaagaccgggaguugcggaccuguguccagcaauggugcgaacggcguaaagggguucucuuuuaaauauggaaacggcguguggaucgguaggacaaagucaaccaguagccggaauggguucgagaugaucugggauccaaacggcuggacgggaacugacaauuccuuuucuauuaaacaagacauagucggcaucaacgaauggucgggguacagcggauccuucgugcagcaucccgagcugacaggucuggauuguauucgcccuugcuucuggguugaacucauccgaggcagaccaaaggagaauaccauuuggacuucagggaguucuaucagcuuuuguggagugaacuccgacacagucggcuggucauggcccgauggugcagaguuaccguucaccauagacaaauga

SEQ ID NO: 151166 - RNA, 1410 nt, Artificial Sequence; identical to SEQ ID NO: 144786
  derived and/or modified CDS sequence (opt3) from neuraminidase__InfluenzaA__AFN87942

SEQ ID NO: 151167 - RNA, 1410 nt, Artificial Sequence; identical to SEQ ID NO: 151164
  derived and/or modified CDS sequence (opt3) from neuraminidase__InfluenzaA__AFN87944

SEQ ID NO: 151168 - RNA, 1410 nt, Artificial Sequence
  derived and/or modified CDS sequence (opt3) from neuraminidase__InfluenzaA__AFN87946
augaaccccaaucagaagaucauuaccauaggcagcgugugcaugacaaucgggauggccaaccugacucuccaaauuggaaauaucauuuccaucuggauaucucacucaauccagcuugguaaccagaaucagauugagacguguaaccaaagugucaucaauuacgaaaacaauaccuggguuaaccagacauaugugaauauuagcaacacuaauuucgcugcaggccaguccguagugucugucaaacuggccgggaacucgucauugugcccugugagcggaugggcgaucuacaguaaggacaauuccauaagaauuggcucuaaaggugauguuuuugugaucagggagccauucgucagcuguuccccguuagaaugccggaccuuuuuccugacacagggggcucuacucaacgacaagcauucaaacggaaccauuaaagaucgcagucccuaucgaacucugaugagcuguccuaucggcgaggugccaucucccuacaauucccguuuugaaucaguagccuggagcgcaagugccugccacgacggcaucaacuggcuuacaauugggauaucuggaccugauaauggugcuguugcagugcugaaguauaacggcaucauuaccgacacgaucaaguccuggagaaauaacauauugaggacucaagagagcgagugugccugcgucaaugggucguguuucaccgugaugacagauggaccaucugacggccaggcuuccuacaaaauuuuucggaucgaaaaggguaaaaucgugaagucagucgagaugaacgcccccaauuaucauuacgaagagugcaguuguuacccugauagcuccgagguuacuugcgugugccgcgacaacuggcacgggucuaauagaccaugggugagcuucaaccagaaucucgaauaucagauuggauacaucuguucaggcauuuuuggcgauaacccgaggcccaaugacaaaaccgggaguugcggaccuguauccagcaacggugcgaacggcgucaagggguucucuuuuaaguauggaaauggcguguggauaggucggacaaaaucaaucaguagccgcaacggguucgagaugauuugggauccaaauggcuggaccggaacggacaacaauuuuuccaucaagcaagacaucguuggcauuaacgaauggucuggguacucggguagcuucgugcagcaucccgagcugacuggacuggauuguauacgaccuugcuucugggucgaacucaucagaggcaggccaaaagagaauacaauuuggaccuccgggucaaguaucucuuuuuguggagugaacagcgacacuguaggcugguccuggcccgauggugcagaguuaccguucacaauugacaaguga

SEQ ID NO: 151169 - RNA, 1410 nt, Artificial Sequence
  derived and/or modified CDS sequence (opt3) from neuraminidase__InfluenzaA__AFN87948
augaaccccaaucagaagaucauuaccauaggcagcgugugcaugacaaucgggauggccaaccugauucuccaaaucggaaauauuaucuccauauggaucucucacucaauucagcuugguaaccagaaucagaucgagacuuguaaccaaagugucauuacguacgaaaauaacaccuggguuaaucagacauaugugaacaucagcaauacuaacuucgcugcaggccaguccguagugucugucaaacuggccggaaauucgucauugugcccugugagcgggugggcgauauacaguaaggacaacuccauuagaaucggcucuaaaggugauguuuuugugauuagggagccauucaucagcuguuccccguuagaaugccggaccuuuuuccugacacagggggcucuacucaaugacaagcauucaaacggaaccaucaaagaucgcagucccuaucgaacucugaugagcuguccuauuggcgaggucccaucucccuacaacucccguuuugaaucaguggccuggagcgcaagugccugccacgacggcauaaauuggcuuacaaucgggauuucuggaccugauaacggugcuguagcaguucugaaguauaauggcaucauaaccgacacgauuaaguccuggagaaacaauaucuugaggacucaagagagcgagugugccugcgugaacgggucguguuucaccgucaugacagauggaccaucugacggccaggcuuccuacaaaaucuuuaagauugaaaaagguaagaucgugaaaucaguggagaugaaugcccccaacuaucauuacgaagagugcaguuguuacccugauagcuccgagauuacuugcgucugccgggacaauuggcacgggucuaaccgcccauggguuagcuucaaucagaaccucgaauaucagauaggauacaucuguucaggcauuuuuggcgauaauccgagacccaacgacaagaccgggaguugcggaccuguguccagcaauggugcgaacggcguaaagggguucucuuuuaaauauggaaacggcguguggaucgguaggacaaagucaaccaguagccggaauggguucgagaugaucugggauccaaacggcuggacgggaacugacaauuccuuuucuauuaaacaagacauagucggcaucaacgaauggucgggguacagcggauccuucgugcagcaucccgagcugacaggucuggauuguauucgcccuugcuucuggguugaacucauccgaggcagaccaaaggagaauaccauuuggacuucagggaguucuaucagcuuuuguggagugaacuccgacauagucggcuggucauggcccgauggugcagaguuaccguucacaaucgacaaauga

SEQ ID NO: 151170 - RNA, 1410 nt, Artificial Sequence
  derived and/or modified CDS sequence (opt3) from neuraminidase__InfluenzaA__AFN87950
augaaccccaaucagaagaucauuaccauaggcagcgugugcaugacaaucgggauggccaaccugauucuccaaaucggaaauauuaucuccauauggaucucucacucaauucagcuugguaaccagagucagaucgagacuuguaaucaaagcgucauuacguacgaaaacaauaccuggguuaaccagacauaugugaauaucuccaacacuaauuucgcugcaggccagucuguagugucggucaaacuggccgggaacagcucauugugcccugugaguggaugggcgauauacuccaaggacaauucuauuagaaucggcagcaaaggugauguuuuugugauuagggagccauucaucuccuguucaccguuagaaugccggaccuuuuuccugacacagggggcucuacucaacgacaagcauaguaauggaaccaucaaagaucgcagccccuaucgaacucugaugucuuguccuauuggcgaggucccaucccccuacaacucacguuuugaaagcguggccuggagugcaucugccugccacgacggcauaaacuggcuuacaaucgggauuuccggaccugauaauggugcuguagcaguucugaaguauaacggcaucauaaccgacacgauuaagagcuggagaaauaacaucuugaggacucaagagucggagugugccugcgugaaugggucuuguuucaccgucaugacagauggaccauccgacggccaggcuucauacaaaaucuuucggauugaaaaggguaaaaucgugaagaguguggagaugaacgcccccaauuaucauuacgaagagugcagcuguuacccugauuccucugagauuacuugcgucugccgcgacaacuggcacgggagcaauagaccauggguuucauucaaccagaaucucaaauaucagauaggauacaucuguaguggcauuuuuggcgauaacccgaggcccaaugacaagaccggguccugcggaccugugagcucuaacggugcgaauggcguaaagggguucucauuuaaauauggaaacggcguguggaucggucggacaaagaguaucagcucccgcaaaggguucgaaaugauuugggauccaaacggcuggaccggaacggacaauaacuuuucuauaaagcaagacaucauuggcaucaaugaguggucgggguacagcggauccuucguccagcaucccgaacugacuggucuggauuguauucgaccuugcuucuggguggagcucaucagaggcaggccaaaagaaaacacaauauggaccucagggaguucuaucagcuuuuguggaguuaauuccgacacugugggcuggucauggcccgauggugcagaguuaccguucacaauugacaaguga

SEQ ID NO: 151171 - RNA, 1410 nt, Artificial Sequence; identical to SEQ ID NO: 148757
  derived and/or modified CDS sequence (opt3) from neuraminidase__InfluenzaA__AFN87952

SEQ ID NO: 151172 - RNA, 1410 nt, Artificial Sequence
  derived and/or modified CDS sequence (opt3) from neuraminidase__InfluenzaA__AFN87954
augaaccccaaucagaagaucauuaccauaggcagcgugugcaugacaaucgggauggccaaccugauucuccaaaucggaaauauuaucuccauauggaucucucacucaauucagcuugguaaccagaaucagaucgagacuuguaaccaaagugucauuacguacgaaaauaacaccuggguuaaucagacauaugugaacaucagcaauacuaacuucgcugcaggccaguccguagugucugucaaacuggccggaaauucgucauugugcccugugagcggaugggcgauauacaguaaggacaacuccauuagaaucggcucuaaaggugauguuuuugugauuagggagccauucaucagcuguuccccguuagaaugccggaccuuuuuccugacacagggggcucuacucaaugacaagcauucaaacggaaccaucaaagaucgcagucccuaucgaacucugaugagcuguccuauuggcgaggucccaucucccuacaacucccguuuugaaucaguggccuggagcgcaagugccugccacgacggcauaaauuggcuuacaaucgggauuucuggaccugauaacggugcuguagcaguucugaaguauaauggcaucauaaccgacacgauuaaguccuggagaaacaauaucuugaggacucaagagagcgagugugccugcgugaacgggucguguuucaccgucaugacagauggaccaucugacggccaggcuuccuacaaaaucuuucggauugaaaaggguaaaaucgugaagucaguggagaugaaugcccccaacuaucauuacgaagagugcaguuguuacccugauagcuccgagauuacuugcgucugccgcgacaauuggcacgggucuaacagaccauggguuagcuucaaucagaaccucgaauaucagauaggauacaucuguucaggcauuuuuggcgauaauccgaggcccaacgacaaaaccgggaguugcggaccuguguccagcaauggugcgaacggcguaaagggguucucuuuuaaguauggaaacggcguguggaucggucggacaaaaucaaucaguagccgcaagggguucgagaugauuugggauccaaauggcuggaccggaacggacaacaauuuuuccauaaaacaagacaucgucggcauuaacgaauggucuggguacucggggagcuucgugcagcaucccgagcugacuggucuggauuguauccgaccuugcuucuggguugaacucauuagaggcaggccaaaggagaauacaaucuggaccuccgggucaaguauaucuuuuuguggagugaacagcgacacuaugggcugguccuggcccgauggugcagaguuaccguucacaaucgacaaauga

SEQ ID NO: 151173 - RNA, 1410 nt, Artificial Sequence
  derived and/or modified CDS sequence (opt3) from neuraminidase__InfluenzaA__AFN87956
augaaccccaaucagaagaucauuaccauaggcagcgugugcaugacaaucgggauggccaaccugauucuccaaaucggaaauauuaucuccauauggaucucucacucaauucagcuugguaaccagagucagaucgagacuuguaaucaaagcgucauuacguacgaaaacaauaccuggguuaaccagacauaugugaauaucuccaacacuaauuucgcugcaggccagucuguagugucggucaaacugguggggaacagcagcuugugcccuguuaguggaugggccauauacuccaaggacaauucuauuagaaucggcagcaaaggugauguguuugucauuagggagccauucaucuccuguucaccguuagaaugccggaccuuuuuccugacacagggggcgcuacucaacgacaagcauaguaauggaaccaucaaagaucgcagccccuaucgaacucugaugucuuguccuauuggcgaggugccaucccccuacaacucacguuuugaaagcguagcuuggagugccucugcaugccacgacggcauaaacuggcuuacaaucgggauuuccggaccugauaauggugccguugcugugcugaaguauaacggcaucauaaccgacacgauuaagagcuggagaaauaacaucuugaggacucaagagucggagugugcaugcgucaaugggucuuguuucaccaucaugacagauggaccauccgacggccaggccucauacaaaauuuuucggaucgaaaaggguaaaauugugaagaguguggagaugaacgcucccaauuaucauuacgaagagugcagcuguuacccugauuccucugagauaacuugcgucugccgcgacaacuggcacgggagcaauagaccauggguuucauucaaccagaaucucgaauaucagaucggauacauuuguaguggcaucuuuggcgauaacccgaggcccaaugacaaaaccggguccugcggaccugugagcucuaacggugccaauggcguaaagggguucucauuuaaguauggaaacggcguguggaucggucggacaaaaaguauuagcucccgcaagggguucgagaugauaugggauccaaacggcuggaccggaacggacaauaacuuuucuaucaaacaagacauugucggcacuaaugaauggucgggguacagcggauccuucgugcagcaucccgagcugacaggucuggauuguauccgaccuugcuucuggguugaacucauuagaggcaggccaaaggagaacaccaucuggacuucagggaguucuauaucauuuuguggagucaauuccgacacagugggcuggucauggcccgauggugcggaguuaccguucaccaucgacaacuga

SEQ ID NO: 151174 - RNA, 1410 nt, Artificial Sequence
  derived and/or modified CDS sequence (opt3) from neuraminidase__InfluenzaA__AFN87958
augaaccccaaucagaagaucauuaccauaggcagcgugugcaugacaaucgggauggccaaccugauucuccaaaucggaaauauuaucuccauauggaucucucacucaauucagcuugguaaccagaaucagaucgagacuuguaaccaaagugucauuacguacgaaaauaacaccuggguuaaucagacauaugugaacaucagcaauacuaacuucgcugcaggccaguccguagugucugucaaacuggccggaaauucgucauugugcccugugagcgggugggcgauauacaguaaggacaacuccauuagaaucggcucuaaaggugauguuuuugugauuagggagccauucaucagcuguuccccguuagaaugccggaccuuuuuccugacacagggggcucuacucaaugacaagcauucaaacggaaccaucaaagaucgcagucccuaucgaacucugaugagcuguccuauuggcgaggucccaucucccuacaacucccguuuugaaucaguggccuggagcgcaagugccugccacgacggcauaaauuggcuuacaaucgggauuucuggaccugauaacggugcuguagcaguucugaaguauaauggcaucauaaccgacacgauuaaguccuggagaaacaauaucuugaggacucaagagagcgagugugccugcgugaacgggucguguuucaccgucaugacagauggaccaucugacggccaggcuuccuacaaaaucuuuaagauugaaaaagguaagaucgugaaaucaguggagaugaaugcccccaacuaucauuacgaagagugcaguuguuacccugauagcuccgagauuacuugcgucugccgggacaauuggcacgggucuaaccgcccauggguuagcuucaaucagaaccucgaauaucagauaggauacaucuguucaggcauuuuuggcgauaauccgagacccaacgacaagaccgggaguugcggaccugcguccagcaauggugcaaacggcgugaagggguucucuuuuaaauauggaaacggcguauggaucgguaggacaaagucaaccaguagccggaauggguucgagaugaucugggauccaaacggcuggacgggaacugacaauuccuuuucuaugaaacaagacauugugggcauaaacgaauggucgggguacagcggauccuucguccagcaucccgagcugacaggucuggauuguauccgcccuugcuucuggguggaacucauucgaggcagaccaaaggagaauaccguuuggacuucagggaguucuaucagcuuuuguggagugaacuccgacacagucggcuggucauggcccgauggugccgaguuaccguucaccauugacaaauga

SEQ ID NO: 151175 - RNA, 1410 nt, Artificial Sequence
  derived and/or modified CDS sequence (opt3) from neuraminidase__InfluenzaA__AFN87960
augaaccccaaucagaagaucauuaccauaggcagcgugugcaugacaaucgggauggccaaccugauucuccaaaucggaaauauuaucuccauauggaucucucacucaauucagcuugguaaccagagucagaucgagacuuguaaucaaagcgucauuacguacgaaaacaauaccuggguuaaccagacauaugugaauaucuccaacacuaauuucgcugcaggccagucuguagugucggucaaacuggccgggaacucauccuugugcccugugaguggaugggcgauauacuccaaggacaauucuauuagaaucggcagcaaaggugauguuuuugugauuagggagccauucaucuccuguucaccguuagaaugccggaccuuuuuccugacacagggggcucuacucaacgacaagcauaguaauggaaccaucaaagaucgcagccccuaucgaacucugaugucuuguccuauuggcgaggucccaucccccuacaacucacguuuugaaagcguggccuggagugcaucugccugccacgacggcauaaacuggcuuacaaucgggauuuccggaccugauaauggugcuguagcaguucugaaguauaacggcaucauaaccgacacgauuaagagcuggagaaauaacaucuugaggacucaagagucggagugugccugcgugaaugggucuuguuucaccaucaugacagauggaccauccgacggccaggcuucauacaaaauuuuucggaucgaaaaggguaaaauugucaagaguguggagaugaacgcccccaauuaucauuacgaagagugcagcuguuacccugauuccucugagauaacuugcgugugccgcgacaacuggcacgggagcaauagaccaugggucucauucaaccagaaucucgaauaucagaucggauacauuuguaguggcaucuuuggcgauaacccgaggcccaaugacaaaaccggguccugcggaccuguuagcucuaacggugcgaauggcgugaagggguucucauuuaaguauggaaacggcguauggaucggucggacaaaaaguauuagcucccgcaagggguucgagaugauaugggauccaaacggcuggaccggaacggacaauaacuuuucuaucaaacaagacauugugggcaucaaugaauggucgggguacagcggauccuucguccagcaucccgagcugacuggucuggauuguauucgaccuugcuucuggaucgaacucauaagaggcaggccaaaggagaacacaaucuggaccucagggaguucuauuagcuuuuguggagugaauagcgacacuguuggcuggucauggcccgauggugcagaguuaccguucacaaucgacaaauga

SEQ ID NO: 151176 - RNA, 1413 nt, Artificial Sequence
  derived and/or modified CDS sequence (opt3) from neuraminidase__InfluenzaA__AFO64805
augaaccccaaucagaagaucauuaccauaggcagcaucuccauugccaucgggauuaucucucugaugcuccaaauaggaaacaucauuucaaucugggcuagucacagcauucagacagguucccagaaucauacuggcaucugcaaccagagaauaauuacguacgaaaauucuaccugggugaaccacacauaugucaauaucaacaauacuaacguuguggcagggaaagacaagaccucgguaacacuugccggaaauucaagccuguguaguauuuccggcugggcgaucuacaccaaagauaacucuaucaggauugguagcaagggggacguguucgucauacgggagccuuuuaucuccugcucacauuuggagugucgcacuuucuuuuuaacacaaggagcucugcuaaaugauaaacacaguaacggcaccgugaaggaccgaagcccauaucgugcccucaugucuugcccgcugggcgaagcacccuccccuuacaauucaaaguucgagagcguugccuggagugcuucugcaugucaugaugggaugggauggcuuacgauugguaucuccggcccagacaacggggccguggcuguccugaaauauaacggaauaauuacugaaaccaucaagagcuggaaaaagagaaucuugaggacacaggagucggagugcguguguguaaauggcucuugcuuuacuauuaugaccgauggucccaacaauggggccgcguccuacaaaaucuucaagauugaaaagggaaaaguuacaaagucaauagagcucaacgcaccuaauagucacuaugaagaguguagcugcuacccagacaccggcacggugaugugugucugccgggauaacuggcacggcuccaaucgccccugggugucuuuuaaccagaaucuggacuaccagaucggguauauuugcagcggaguguucggugauaacccuagaccaaaagacggcgaggggucauguaauccggucacuguugauggagccgacggcgugaaggguuuuaguuacaaauaugggaacggcguauggaucggaaggacaaaguccaaucggcugcgcaaaggcuucgaaaugaucugggaccccaacggguggaccgauacugacagcgauuuuucugugaagcaagacgucguggcuauuacagauuggucaggauacagugguagcuucguucagcauccugagcucaccggcuuagacugcauacgaccauguuuuuggguggaacuggucagagggcuucccagggagaauacgaccaucuggacauccggaucuucgauuagcuucugcggcgugaacuccgauacugccaacuggucauggccugacggugcagaauugccauucaccaucgauaaguga

SEQ ID NO: 151177 - RNA, 1413 nt, Artificial Sequence
  derived and/or modified CDS sequence (opt3) from neuraminidase__InfluenzaA__AFO64816
augaaccccaaucagaagaucauuaccauaggcagcaucugcauggccauugggaucauuucccugauccuccaaauaggaaacaucgugucuauuuggaucucacacaguauucagacagguagccagaauuacacuggcaucuguaaccagagaauaauuacguaugaaaauuccaccugggucaaccaaacauacguuaauaucaacaauacuaacgugguagcugggcaggacaccacaucuguggcacuugccggaaauucgucacugugcccuauuagcggcugggcgaucuauaguaaagauaacuccaucaggauugguucuaagggggacgucuucgugauacgggagccauuuaucagcuguucccauuuggagugccgcaccuucuuuuuaacucagggagcucugcuaaaugauaaacacucaaacggcacaguuaaggaccgaaguccguaccgugcccucaugagcugucccauuggcgaagcaccuucuccauauaauuccagauucgagucaguggccuggagcgcuagugcaugccaugaugggaugggauggcugaccaucgguauaucuggccccgacgauggggccgucgcugugcuuaaauacaacggaauuaucacggaaacuaucaaguccuggaggcggcgcauucugagaacccaggagagcgaguguguaugcguuaacggcucguguuuuacaaucaugacugacgguccuaauaacgggccagccucuuauaagauuuucaaaauagaaaagggaaaagugaccaaguccaucgaguuggaugcgcccaauucacacuacgaagagugcaguuguuacccugacgcaggcacagucaugugcgugugcagggauaacuggcauggcagcaaucggccauggguguccuuuaaccaaaaucucgacuaucagauuggguacaucuguucuggagucuucggugauaacccgcgccccaaagacggcaaggggagcugcgacccuguuaccguggauggagccgacggcguaaaggguuuuucauaucgauacgggaauggcguguggaucggaagaacgaaaaguaacuccagcaggcggggcuucgagaugauuugggauccaaauggguggacugacacagauucuaaguuucuggucaaacaggacgugguugcuaugaccgauuggucaggauauagugguagcuucgugcagcaccccgaacugacuggccucgacuguaugcguccuugcuuuugggucgaguuaauacgcgggagaccaagggaaaacacaaccaucuggacguccggaucuucgauuagcuucuguggcgugaauggugauaccgccaacugguccuggcccgacggggcagagcugccguucacaaucgauaaguga

SEQ ID NO: 151178 - RNA, 1413 nt, Artificial Sequence
  derived and/or modified CDS sequence (opt3) from neuraminidase__InfluenzaA__AFO64827
augaaccccaaucagaagaucauuaccauaggcagcaucuccauggccauugggaucauuucucugauccuccaaauaggaaacaucauuucaaucugggugagucacagcauucagacagguucccagaaucauacuggcaucugcaaccagagaauaauuacguacgaaaauucuaccugggucaaccaaacauauguuaauaucaacaauacuaacgugauugcugggaaagacaagaccucgguaacacuugcaggaaauucaagccuguguccuaucaggggcugggccaucuacaccaaagauaacaguauucggauagguuccaagggggacguguucgucauccgcgagccauuuauuucuugcagccacuuggagugucgaacuuucuuuuuaacacagggagcgcugcuaaaugauaaacauuccaacggcaccgugaaggaccguucaccguauagagcucucaugaguugcccccugggcgaagccccuagcccauacaauucuagguucgaguccguugcauggucagccagcgcuugucacgaugggaugggauggcuuacgaucgguauaaguggccccgacgauggggcaguggccguccugaaguauaacggaauuaucacugaaaccaucaaaucuuggaagaaacggauuuugcgcacacaggaguccgagugcguguguguaaacggcagcugcuuuacuaucaugaccgacgguccuucgaauggggcugccucuuacagaauuuucaagauagaaaaaggaaagguuacaaaguccaucgagcucgaugcgccaaacucacauuaugaagaguguaguugcuaccccgacaccggcacggugaugugugucugcagggauaauuggcacggcagcaaccggccuuggguguccuuuaaucagaaccuggacuaccaaauuggguauaucugcucuggaguguucggugauaauccacgcccgaaagacggcaaggggagcugugaccccgucacuguugauggagcagacggcgugaaagguuuuucauaccgauaugggaacggcguauggaucggaagaacaaagaguaauagguuccggaaaggcuuugagaugauuugggauccuaacggguggaccgacacugauuccgacuuccuggugaagcaggaugucguggccaugacagacuggagcggauacucugguucauuuguucagcacccagaacucaccggcuuagauugcaugcgucccuguuucuggguggagcugguccgcgggagaccuagggaaaauacgaccauauggacaaguggaagcuccaucucuuucugcggcgugaacucggacacugcuaauuggagcuggccagauggugccgagcuucccuuuaccauugacaaauga

SEQ ID NO: 151179 - RNA, 1413 nt, Artificial Sequence
  derived and/or modified CDS sequence (opt3) from neuraminidase__InfluenzaA__AFO64838
augaaccccaaucagaagaucauuaccauaggcagcaucuccauggccauugggaucauuucucugauccuccaaauaggaaacaucauuucaaucugggcuagucacagcauucagacagguucccagaaucauacuggcaucugcaaccagagaauaauuacguacgaaaauucuaccugggugaaccaaacauaugucaauaucaacaauacuaacguuguggcagggaaagacaagaccucgguaacacuugccggaaauucaagccuguguccuauuaggggcugggcgaucuacaccaaagauaacaguauccggauugguuccaagggggacguguucgucauacgcgagccauuuaucucuugcagccacuuggagugucgaacuuucuuuuuaacacagggagcucugcuaaaugauaaacauuccaacggcaccgugaaggaccguucaccguauagagcccucaugaguugcccccugggcgaagcaccuagcccauacaauucuagguucgaguccguugccuggucagcuagcgcaugucacgaugggaugggauggcuuacgauugguaucaguggccccgacaacggggccguggcuguccugaaguauaacggaauaauuacugaaaccaucaaaucuuggaagaaacggaucuugcgcacacaggaguccgagugcguguguguaaauggcagcugcuuuacuauuaugaccgaugguccuucgaacggggccgcgucuuacagaaucuucaagauugaaaaaggaaggguuacaaaguccauagagcucgacgcaccaaauuaucauuacgaagaguguucaugcuaccccgauaccggcacggugaugugugucugccgggacaacuggcacggcaguaaucgcccuugggugagcuuuaaccagaaucuggauuaucaaaucggguacauuugcuccggaguguucggugacaacccacgaccgaaggauggcgaggggucuuguaaucccgucacuguugacggagccgacggcgugaaagguuuuagcuauagauacgggaacggcguauggaucggaaggacaaagucaaaucggcugcguaaaggcuucgaaaugaucugggauccuaacggguggaccgacacugauagugacuuuuccaugaagcaggauguggucgcuaugacagacuggagcggauauucugguucauucgugcagcacccagagcucaccggcuuagauugcaugcgccccuguuuuuggguugaacuggugagagggcuuccuagggagaauacgaccauuuggacaaguggaagcuccauaucuuucugcggcgucaacucggacacugccaauuggagcuggccagauggugcagaauugcccuucaccaucgacaaauga

SEQ ID NO: 151180 - RNA, 1413 nt, Artificial Sequence
  derived and/or modified CDS sequence (opt3) from neuraminidase__InfluenzaA__AFO64849
augaaccccaaucagaagaucauuaccauaggcagcaucuccauggccauugggaucauuucucugauccuccaaauaggaaacaucauuucaaucugggcuagucacagcauucagacagguucccagaaucauacuggcaucugcaaccagagaauaauuacguacgaaaauucuaccugggugaaccaaacauaugucaauaucaacaauacuaacguuguggcagggaaagacaagaccucgguaacacuugccggaaauucaagccuguguccuauuaggggcugggcgaucuacaccaaagauaacaguauccggauugguuccaagggggacguguucgucauacgcgagccauuuaucucuugcagccacuuggagugucgaacuuucuuuuuaacacagggagcucugcuaaaugauaaacauuccaacggcaccgugaaggaccguucaccguauagagcccucaugaguugcccccugggcgaagcaccuagcccauacaauucuagguucgaguccguugccuggucagcuagcgcaugucacgaugggaugggauggcuuacgauugguaucaguggccccgacaacggggccguggcuguccugaaguauaacggaauaauuacugaaaccaucaaaucuuggaagaaacagaucuugcggacacaggaguccgagugcguguguguaaauggcagcugcuuuacuauuaugaccgaugguccuucgaacggggccgcgucuuaccgcaucuucaagauugaaaaaggaaagauaacaaaguccaucgagcucgacgcaccaaauucacauuaugaagaguguaguugcuaccccgauaccggcacgguuaugugugugugcagagacaacuggcacggcagcaauaggccuugggucuccuuuaaccaaaaucuggauuaccagauuggguauaucugcucuggaguguucggugacaacccacggccgaaagauggcgaggggagcuguaaucccgugacugucgacggagccgacggcguuaaggguuuuucauaccgcuaugggaacggcguguggaucggacgaacaaaaaguaauagacugaggaagggcuucgaaaugauuugggauccuaacggguggaccgacacugauuccgacuuuagcguaaaacaggauguggucgcuaugacagacuggucuggauacucagguaguuucgugcagcacccagagcucaccggcuuagauugcaugcggcccuguuuuuggguugaacuggugcgugggcgcccuagagagaaugccacgauauggaccagcggauccucuaucucguucugcggcgucaacagcgacacagcaaauugguccuggccagauggugcugaacuucccuucacuauugacaaguga

SEQ ID NO: 151181 - RNA, 1413 nt, Artificial Sequence; identical to SEQ ID NO: 143016
  derived and/or modified CDS sequence (opt3) from neuraminidase__InfluenzaA__AFO64860

SEQ ID NO: 151182 - RNA, 1413 nt, Artificial Sequence
  derived and/or modified CDS sequence (opt3) from neuraminidase__InfluenzaA__AFO64871
augaaccccaaucagaagaucauuaccauaggcagcaucuccauugccaucgggauuaucucucugauacuccaaaucggaaacauuaucucaauuugggcuagucacagcauccagacagguucccagaaucauacuggcgugugcaaccagagaauaauuacguacgaaaauucuaccugggucaaccaaacauauguuaauaucaacaauacuaacgugguagcagggaaagacaagaccucgaugacacuugccggaaauucaagccuguguccuauuaggggcugggcgaucuacaccaaagauaacaguauccggauugguuccaagggggacguguucgucauacgcgagccauuuaucucuugcagccacuuggagugucgaacuuucuuuuuaacacagggagcucugcuaaaugauaaacauuccaacggcaccgugaaggaccguucaccguauagagcccucaugaguugcccccugggcgaagcaccuagcccauacaauucuagguucgaguccguugccuggucagcuagcgcaugucacgaugggcuuggauggcugacgauugguaucaguggccccgacaacggggccguggcugucuugaaguauaacggaauaauuacugaaaccaucaaaucuuggaagaaacggauccuccgcacacaggaguccgagugcguguguaugaauggcagcugcuuuacuauuaugaccgaugguccuucgaacggggccgcgucuuacagaaucuucaagauugaaaaaggaaggguaacaaaguccauagagcuggacgcaccaaauuaucauuacgaagaguguucaugcuaccccgauaccggcacgguuaugugugugugccgggacaacuggcacggcaguaaucgcccuugggucagcuuuaaccagaaucuggauuaucaaaucggguacauuugcuccggaguguucggugacaacccacgaccgaaggauggcgaggggucuuguaaucccgugacugucgacggagccgacggcguuaaagguuuuagcuauagauacgggaacggcguguggaucggaaggacaaagucaaaucggcuccguaaaggcuucgaaaugaucugggauccuaacggguggaccgacacugauagugacuuuuccaugcgccaggauauuguagcuaugacagacuggagcggauauucugguucauucgugcagcacccagaguuaaccggccuggauugcaugagacccuguuuuugggucgaacuugugaggggguugccucgggagaauacgaccauauggacaaguggaagcuccaucucuuucugcggcguuaacucggacacugccaauuggagcuggccagauggugcagaacugcccuucaccauugacaaguga

SEQ ID NO: 151183 - RNA, 1413 nt, Artificial Sequence
  derived and/or modified CDS sequence (opt3) from neuraminidase__InfluenzaA__AFO64882
augaaccccaaucagaagaucauuaccauaggcagcaucuccauugccaucgggauuaucucucugaugcuccaaauaggaaacaucauuucaaucugggcuagucacagcauucagacagguucccagaaucauacuggcaucugcaaccagagaauaauuacguacgaaaauucuaccugggugaaccacacauaugugaauaucaacaauacuaacguuguggcagggaaagacaagaccucgguaacacuugccggaaauucaagccuguguaguauuuccggcugggcgaucuacaccaaagauaacucuaucaggauugguagcaagggggacguguucgucauacgggagccuuuuaucuccugcucacauuuggagugucgcacuuucuuuuuaacacaaggagcucugcuaaaugauaaacacaguaacggcaccgugaaggaccgaagcccauaucgugcccucaugucuugcccgcugggcgaagcacccuccccuuacaauucaaaguucgagagcguugccuggagugcuucugcaugucaugaugggaugggauggcuuacgauugguaucuccggcccagacaacggggccguggcuguccugaaauauaacggaauaauuacugaaaccaucaagagcuggaaaaagagaaucuugaggacacaggagucggagugcguguguguaaauggcucuugcuuuacuauuaugaccgauggucccuccaacggggccgcgucauacaaaaucuucaagauugaaaagggaaaaguuacaaagaguauagagcucaaugcaccuaacagccacuaugaagaguguuccugcuacccagacaccggcacggugaugugugucugccgggauaauuggcacggcucuaaccgccccugggugagcuuuaaucagaaccuggacuaccagaucggguauauuugcucaggaguguucggugauaauccuagaccaaaagacggcgaggggaguuguaacccggucacuguugauggagccgacggcgugaaggguuuuuccuacaaauaugggaauggcguauggaucggaaggacaaagagcaaccggcugcgcaaaggcuucgaaaugaucugggaccccaauggguggaccgauacugacucugauuuuucagugaagcaagacgucguggcuauuacagauuggaguggauacagcgguuccuucguucagcauccugagcucaccggcuuagacugcauacgaccauguuuuuggguggaacuggucagagggaggccccgggagaacacgaccaucuggacaucuggaucgagcauuuccuucugcggcgucaauucagauacugccaacuggaguuggccugacggugcagaacuuccauucaccaucgauaaguga

SEQ ID NO: 151184 - RNA, 1413 nt, Artificial Sequence
  derived and/or modified CDS sequence (opt3) from neuraminidase__InfluenzaA__AFO64893
augaaccccaaucagaagaucauuaccauaggcagcaucuccguggccauugggaucauuucucugaugcuccaaaucggaaacauaaucucaauuugggcuagucacagcauccagacagguucccagaaucauacuggcauuugcaaccagagaaucauaacguacgaaaauucuaccugggucaaccacacauauguuaauauuaacaauacuaacgugguagcagggaaagacaagaccucggugacacuugccggaaauucaagccuguguaguaucuccggcugggcgauuuacaccaaagauaacucuaucaggaucgguagcaagggggacgucuucgugauucgggagccuuuuauauccugcucacauuuggagugucgcacuuucuuuuuaacacaaggagcucugcuaaaugauaaacacaguaacggcaccguuaaggaccgaagcccauaucgugcccucaugucuugcccgcugggcgaagcacccuccccuuacaauucaaaguucgagagcguggccuggagugcuucugcaugucaugaugggaugggauggcuuacgaucgguauuuccggcccagacaacggggccgucgcugugcugaaauauaacggaaucauaacugaaaccauuaagagcuggaaaaagagaaucuugaggacacaggagucggagugcguauguguuaauggcucuugcuuuacuaucaugaccgauggucccuccgacggggccgcgucauacaaaauuuucaagaucgaaaagggaaaagugacaaagaguauugagcucaacgcaccuaauagccacuaugaagaguguuccugcuacccagauaccggcacggucaugugugugugccgggacaacuggcacggcucuaaucgccccugggugagcuuuaaccagaaucuggauuaccagauaggguauaucugcucaggagucuucggugacaacccuagaccaaaagauggcgaggggaguuguaauccgguuacuguggacggagccgacggcguaaaggguuuuuccuacaaauaugggaacggcguguggauuggaaggacaaagagcaaucgguuccgcaaaggcuuugaaaugaucugggaucccaacggguggaccgacacugauucugacuucucagucaagcaagaugugguugcuaucacagacuggaguggauacagcgguuccuuugugcagcauccugagcugaccggccucgauugcauucgaccauguuucugggucgaauuagugagagggaggccccgggagaauacgaccauauggacaucuggaucgagcaucuccuucugcggcguaaacucagacacugccaauuggaguuggccugauggugcagaacugccauuuaccauugacaaguga

SEQ ID NO: 151185 - RNA, 1413 nt, Artificial Sequence
  derived and/or modified CDS sequence (opt3) from neuraminidase__InfluenzaA__AFO64904
augaaccccaaucagaagaucauuaccauaggcagcaucuccguggccauugggaucauuucucugauccuccaaauaggaaacaucauuucaaugugggcuagucacagcauccagacagguucccagaauuacacuggcauuugcaaccagagaaucauaacguaugagaauaacaccugggucaaucaaacauacguuaacauuaauaacacuaaugugguagcagggaaagacaagaucucuaugacccuugccggaaacucgucacuguguccuauuaggggcugggcgaucuauacaaaagauaauagcauccggauugguaguaagggggacguguucgucauacgcgaaccauuuaucuccugcucucauuuggagugucgaaccuucuuuuuaacucagggagcucugcuaaacgauaaacacagcaauggcacagugaaggaccguuccccguacagagcccucaugucaugcccccugggcgaagcaccuaguccauauaacagcagguucgagucuguugccugguccgcuucagcaugucaugaugggcuuggauggcugaccauugguaucagcggccccgacaacggggccguggcugucuugaaguacaauggaauaauuacggaaacuaucaaaaguuggaagaaacagauccuccggacccaggagucugagugcguguguguaaacggcuccugcuuuacaauuaugacugaugguccuagcaaucgcgccgcgucguauagaaucuucaagauugaaaaagggaggguuaccaagucuauagagcuggacgcaccaaacuaccacuacgaagaguguuccugcuaucccgauacaggaaccgugaugugugucugccgggacaauuggcauggcucaaaccgcccuugggugaguuuuaaucaaaaccuggauuaccagaucggcuauauuugcagcgggguguucggagacaauccacgaccgaaggauggugagggcuccuguaaccccgucacgguugacggggccgacggagugaaaggcuuuucuuacaaguaugguaaugggguauggaucggcagaacuaaaagcaacaggcuccggaagggauucgaaaugaucugggauccuaauggcuggacagacaccgauucagacuuuaguaugaaacaggauguggucgcuaugacugacugguccggguacagcggaucuuucgugcagcacccagaguuaacaggucuggauugcaugcgucccuguuuuuggguugaacuugugcgcggcuugccuagagagaacaccacgauuuggaccucagggaguagcauauccuucugcggagucaauucugaaacagccaacuggucguggccagacggcgcagagcugcccuucacuaucgauaaguga

SEQ ID NO: 151186 - RNA, 1413 nt, Artificial Sequence
  derived and/or modified CDS sequence (opt3) from neuraminidase__InfluenzaA__AFO65019
augaaccccaaucagaagaucauuaccauaggcagcaucuccauugccaucgggauuaucucucugaugcuccaaauaggaaacaucauuucaaucugggcuagucacagcauucagacagguucccagaaucauacuggcaucugcaaccagagaauaauuacguacgaaaauucuaccugggugaaccacacauaugucaauaucaacaauacuaacguuguggcagggaaagacaagaccucgguaacacuugccggaaauucaagccuguguaguauuuccggcugggcgaucuacaccaaagauaacucuaucaggauugguagcaagggggacguguucgucauacgggagccuuuuaucuccugcucacauuuggagugucgcacuuucuuuuuaacacaaggagcucugcuaaaugauaaacacaguaacggcaccgugaaggaccgaagcccauaucgugcccucaugucuugcccgcugggcgaagcacccuccccuuacaauucaaaguucgagagcguugccuggagugcuucugcaugucaugaugggaugggauggcuuacgauugguaucuccggcccagacaacggggccguggcuguccugaaauauaacggaauaauuacugaaaccaucaagagcuggaaaaagagaaucuugaggacacaggagucggagugcguguguguaaauggcucuugcuuuacuauuaugaccgauggucccuccaacggggccgcgucauacaaaaucuucaagauugaaaagggaaaaguuacaaagaguauagagcucaaugcaccuaacagccacuaugaagaguguuccugcuacccagacaccggcacggugaugugugucugccgggauaauuggcacggcucuaaccgccccugggugagcuuuaaucagaaccuggacuaccagaucggguauauuugcucaggaguguucggugauaauccuagaccaaaagacggcgaggggaguuguaacccggucacugccgauggagcugacggcguuaaggguuuuuccuacaaauaugggaauggcguguggaucggaaggacaaagagcaaccggcugcgcaaaggcuucgaaaugaucugggaccccaauggguggaccgauacugacucugauuuuucaguaaagcaagacguggucgccauuacagauuggaguggauacagcgguuccuucgugcagcauccugagcucaccggcuuagacugcauacgaccauguuuuuggguugaacuggugagagggaggccccgggagaacacgaccaucuggacaucuggaucgagcauuuccuucugcggcgucaauucagauacugcaaacuggaguuggccugacggugcugaacuuccauucaccaucgauaaguga

SEQ ID NO: 151187 - RNA, 1413 nt, Artificial Sequence; identical to SEQ ID NO: 144501
  derived and/or modified CDS sequence (opt3) from neuraminidase__InfluenzaA__AFO65030

SEQ ID NO: 151188 - RNA, 1413 nt, Artificial Sequence
  derived and/or modified CDS sequence (opt3) from neuraminidase__InfluenzaA__AFO65041
augaaccccaaucagaagaucauuaccauaggcagcaucuccauugccaucgggauuaucucucugaugcuccaaauaggaaacaucauuucaaucugggcuagucacagcauucagacagguucccagaaucauacuggcgugugcaaccagagaaucauaacguacgaaaauucuaccugggucaaccacacauauguuaauauuaacaauacuaacgugguagcagggaaagacaagaccucggugacacuugccggaaauucaagccuguguaguaucuccggcugggcgauuuacaccaaagauaacucuaucaggaucgguagcaagggggacgucuucgugauucgggagccuuuuauauccugcucacauuuggagugucgcacuuucuuuuuaacacaaggagcucugcuaaaugauaaacacaguaacggcaccguuaaggaccgaagcccauaucgugcccucaugucuugcccgcugggcgaagcacccuccccuuacaauucaaaguucgagagcguggccuggagugcuucugcaugucaugaugggaugggauggcuuacgaucgguauuuccggcccagacaacggggccgucgcugugcugaaauauaacggaaucauaacugaaaccauuaagagcuggaaaaagcagaucuugagaacacaggagucggagugcguauguguuaauggcucuugcuuuacuaucaugaccgauggucccuccaacggggccgcgucauacaaaauuuucaagaucgaaaagggaaaagugacaaagaguauugagcucaaugcaccuaacuuucacuaugaagaguguagcugcuacccagacaccggcacggucaugugugugugcagggauaauuggcacggcuccaaccggcccugggugucuuucaaucagaaccuggacuaccaaauaggguauaucugcagcggagucuuuggugauaauccucgcccaaaagacggcgaggggucauguaacccgguuacuguggauggagccaauggcguaaaggguuucaguuacaaauaugggaacggcguguggauuggaagaacaaaguccaauaggcugcggaaaggcuuugaaaugaucugggaccccaacggguggaccgacacugauagcgacuucucugucaagcaggaugugguugcuaucacagacuggucaggauacagugguagcuuugugcagcauccugagcucaccggcuuagauugcauucgcccauguuucugggucgaacuggugcgagggcuucccagagagaauacgaccauauggacauccggaucuucgaucagcuucugcggcguaaacuccgacacugccaacuggucauggccugauggugcagaauugccauuuaccauugacaaguga

SEQ ID NO: 151189 - RNA, 1413 nt, Artificial Sequence
  derived and/or modified CDS sequence (opt3) from neuraminidase__InfluenzaA__AFO65052
augaaccccaaucagaagaucauuaccauaggcagcaucuccauugccaucgggauuaucucucugaugcuccaaauaggaaacaucauuucaaucugggcuagucacagcauucagacagguucccagaaucauacuggcgugugcaaccagagaaucauaacguacgaaaauucuaccugggucaaccacacauauguuaauauuaacaauacuaacgugaucgcagggaaagacaagaccucgaugacacuugccggaaauucaagccuguguaguauuuccggcugggcgaucuacaccaaagauaacucuaucaggauugguagcaagggggacguauucgugauacgggagccuuuuaucuccugcucacauuuggagugucgcacuuucuuuuuaacacaaggagcucugcuaaaugauaaacacaguaacggcaccgucaaggaccgaagcccauaucgugcccucaugucuugcccgcugggcgaagcacccuccccuuacaauucaaaguucgagagcguggccuggagugcuucugcauguaacgaugggaugggauggcuuacgauugguaucuccggcccagacaacggggccguugcugugcugaaauauaauggaauaauuacugaaaccaucaagagcuggaaaaagcagaucuugagaacacaggagucggagugcgucugugugaacggcucuugcuuuacuauuaugaccgauggucccuccaauggggccgcgucauacaaaaucuucaagauugaaaagggaaaaguaacaaagaguauagagcucaacgcaccuaauuuucauuaugaagaguguagcugcuacccagacaccggcacgguuaugugugugugcagggauaacuggcacggcuccaaucggcccugggucucuuucaaccagaaucuggacuaccaaaucggguauauuugcagcggaguguuuggugauaacccucgcccaaaagacggcgaggggucauguaauccggugacugucgauggagccaacggcguuaaggguuucaguuacaaauaugggaauggcguguggaucggaagaacaaaguccaacaggcugcggaaaggcuuugaaaugaucugggaccccaauggguggaccgacacugauagcgacuucucuguaaagcaggauguggucgcuauuacagacuggucaggauacagugguagcuuugugcagcacccugagcucaccggcuuagauugcauacgcccauguuucuggguugaacuggugcgagggcuucccagagagaacacgaccaucuggacauccggaucuucgauuagcuucugcggcgucaacuccgacacugccaauuggucauggccugauggugcagaauugccauuuaccaucgacaaguga

SEQ ID NO: 151190 - RNA, 1413 nt, Artificial Sequence; identical to SEQ ID NO: 142876
  derived and/or modified CDS sequence (opt3) from neuraminidase__InfluenzaA__AFO66139

SEQ ID NO: 151191 - RNA, 1413 nt, Artificial Sequence
  derived and/or modified CDS sequence (opt3) from neuraminidase__InfluenzaA__AFO66150
augaaccccaaucagaagaucauuaccauaggcagcaucuccguggccauugggaucauuucucugauccuccaaauaggaaacaucauuucaaucugggcuagucacagcauucagacagguucccagaauuacacuggcaucugcaaccagagaauaauuacguaugagaauaggaccugggucaaccaaacauacguuaauaucaacaauacuaacgugguagcagggaaagacaagaccucuaugacacuugccggaaauucgucacuguguccuauucggggcugggcgaucuauaccaaagauaacagcauccgcauugguaguaagggggacguguucgucauacgagaaccauuuaucuccugcucucauuuggagugucguacuuucuuuuuaacacagggagcucugcuaaaugauaaacacagcaacggcaccauuaaggacagauccccguucagggcccucaugucaugcccccugggcgaagcaccuaguccauacaauagccgguuugagucuguggccugguccgcuucagcaugucaugaugggcuuggauggcugacgaucgguauaagcggccccgacaacggggccguugcuguguugaaguauaacggaauuaucacugaaaccaucaaaaguuggaagaaacagauucuccgcacacaggagucugagugcgucugugugaauggcuccugcuucacuaucaugaccgaugguccuagcaacagagccgcgucguacaggauuuuuaagauagaaaaagggcggguaacaaagucuaucgagcuggacgcaccaaauuaucacuacgaagaguguuccugcuaccccgauaccggaacgguuaugugugugugccgcgacaacuggcauggcucaaaucgaccuugggucaguuucaaccaaaaucuggauuaucagauuggcuacaucugcagcgggguguuuggagacaacccaagaccgaaggauggugagggcuccuguaaucccgugacugucgacggggccgacggaguuaaaggcuucucuuauagguacgguaacgggguguggaucggccggacaaagagcaaucguauucgcaaaggauuugaaaugauaugggauccuaacggcuggaccgacacugauucagacuucaguaugaagcaggauguaguggcuaugacagacugguccggguauagcggaucuuuuguccagcacccagagcucaccgguuuagauugcaugagacccuguuucuggguggaacugguuaggggccuuccucgggagaauacgaccaucuggacaucagggaguagcauuuccuucugcggagugaacucugaaacugccaauuggucguggccagacggcgcagaguugcccuuuaccaucgauaaauga

SEQ ID NO: 151192 - RNA, 1413 nt, Artificial Sequence
  derived and/or modified CDS sequence (opt3) from neuraminidase__InfluenzaA__AFO66161
augaaccccaaucagaagaucauuaccauaggcagcaucuccauugccaucgggauuaucucucugaugcuccaaauaggaaacaucauuucaaucugggcuagucacagcauucagacagguucccagaaucauacuggcgugugcaaccagagaaucauaacguacgaaaauucuaccugggucaaccacacauauguuaauauuaacaauacuaacgugaucgcagggaaagacaagaccucgguaacacuugccggaaauucaagccuguguaguauuuccggcugggcgaucuacaccaaagauaacucuaucaggauugguagcaagggggacguguucgucauacgggagccuuuuaucuccugcucacauuuggagugucgcacuuucuuuuuaacacaaggagcucugcuaaaugauaaacacaguaacggcaccgugaaggaccgaagcccauaucgugcccucaugucuugcccgcugggcgaagcacccuccccuuacaauucaaaguucgagagcguugccuggagugcuucugcaugucaugaugggaugggauggcuuacgauugguaucuccggcccagacaacggggccguggcuguccugaaauauaacggaauaauuacugaaaccaucaagagcuggaaaaagcagaucuugagaacacaggagucggagugcguguguguaaauggcucuugcuuuacuauuaugaccgauggucccuccaacggggccgcgucauacaaaaucuucaagauugaaaagggaaaaguuacaaagaguauagagcucaaugcaccuaacuuucacuaugaagaguguagcugcuacccagacaccggcacggugaucugugucugcagggauaauuggcacggcuccaaccggcccugggugucuuucaaucagaaccuggacuaccaaauuggguauaucugcagcggaguguuuggugauaauccucgcccaaaagacggcgaggggucauguaacccggucacuguugauggagccaauggcgugaaggguuucaguuacaaauaugggaacggcguauggaucggaagaacaaaguccaauaggcugcggaaaggcuuugaaaugauuugggaccccaacggguggaccgacacugauagcgacuucucugugaagcaggaugucguggcuauaacagacuggucaggauacagugguagcuuuguucagcauccugagcucaccggcuuagauugcauccgcccauguuucuggguggaacugguccgagggcuucccaaggagaauacgaccauuuggacauccggaucuucgaucagcuucugcggcgugaacuccgacacugccaacuggucauggccugauggugcagaauugccauuuaccauugacaaauga

SEQ ID NO: 151193 - RNA, 1413 nt, Artificial Sequence
  derived and/or modified CDS sequence (opt3) from neuraminidase__InfluenzaA__AFO66172
augaaccccaaucagaagaucauuaccauaggcagcaucuccauugccaucgggauuaucucucugaugcuccaaauaggaaacaucauuucaaucugggcuagucacagcauucagacagguucccagaaucauacuggcaucugcaaccagagaauaauuacguacgaaaauucuaccugggugaaccacacauaugucaauaucaacaauacuaacguuguggcagggaaagacaagaccucgguaacacuugccggaaauucaagccuguguaguauuuccggcugggcgaucuacaccaaagauaacucuaucaggauugguagcaagggggacguguucgucauacgggagccuuuuaucuccugcucacauuuggagugucgcacuuucuuuuuaacacaaggagcucugcuaaaugauaaacacaguaacggcaccgugaaggaccgaagcccauaucgugcccucaugucuugcccgcugggcgaagcacccuccccuuacaauucaaaguucgagagcguugccuggagugcuucugcaugucaugaugggaugggauggcuuacgauugguaucuccggcccagacaacggggccguggcuguccugaaauauaacggaauaauuacugaaaccaucaagagcuggaaaaagagaaucuugaggacacaggagucggagugcguguguaugaauggcucuugcuuuacuauuaugaccgauggucccuccaacggggccgcgucauacaaaaucuucaagauugaaaagggaaaaguaacaaagaguauagagcucaaugcaccuaacuuucacuaugaagaguguagcugcuacccagacaccggcacgguuaugugugugugccgggauaauuggcacggcuccaaccgccccugggucucuuucaaucagaaccuggacuaccagaucggguauauuugcagcggaguguuuggugauaauccuagaccaaaagacggcgaggggucauguaacccggugacugucgauggagccgacggcguuaaggguuucaguuacaaauaugggaauggcguguggaucggaaggacaaaguccaaccggcugcgcaaaggcuuugaaaugaucugggaccccaauggguggaccgauacugacagcgauuucucuguaaagcaagacguggucgcuauuacagauuggucaggauacagugguagcuuugugcagcauccugagcucaccggcuuagacugcauacgaccauguuucuggguugaacuggugagagggcuucccagggagaacacgaccaucuggacauccggaucuucgauuagcuucugcggcgucaauuccgauacugccaacuggucauggccugacggugcagaauugccauuuaccaucgauaaguga

SEQ ID NO: 151194 - RNA, 1413 nt, Artificial Sequence; identical to SEQ ID NO: 142978
  derived and/or modified CDS sequence (opt3) from neuraminidase__InfluenzaA__AFO66183

SEQ ID NO: 151195 - RNA, 1413 nt, Artificial Sequence
  derived and/or modified CDS sequence (opt3) from neuraminidase__InfluenzaA__AFO66194
augaaccccaaucagaagaucauuaccauaggcagcaucuccauugccaucgggauuaucucucugaugcuccaaauaggaaacaucauuucaaucugggcuagucacagcauucagacagguucccagaaucauacuggcgugugcaaccagagaaucauaacguacgaaaauucuaccugggucaaccacacauauguuaauauuaacaauacuaacgugaucgcagggaaagacaagaccucgguaacacuugccggaaauucaagccuguguaguauuuccggcugggcgaucuacaccaaagauaacucuaucaggauugguagcaagggggacguguucgucauacgggagccuuuuaucuccugcucacauuuggagugucgcacuuucuuuuuaacacaaggagcucugcuaaaugauaaacacaguaacggcaccgugaaggaccgaagcccauaucgugcccucaugucuugcccgcugggcgaagcacccuccccuuacaauucaaaguucgagagcguugccuggagugcuucugcaugucaugaugggaugggauggcuuacgauugguaucuccggcccagacaacggggccguggcuguccugaaauauaacggaauaauuacugaaaccaucaagagcuggaaaaagcagaucuugagaacacaggagucggagugcguguguguaaauggcucuugcuuuacuauuaugaccgauggucccuccaacggggccgcgucauacaaaaucuucaagauugaaaagggaaaaguuacaaagaguauagagcucaaugcaccuaacuuucacuaugaagaguguagcugcuacccagacaccggcacggugaugugugucugcagggauaauuggcacggcuccaaccggcccugggugucuuucaaucagaaccuggacuaccaaaucggguauauuugcagcggaguguuuggugauaauccucgcccaaaagacggcgaggggucauguaacccggucacuguugauggagccaauggcgugaaggguuucaguuacaaauaugggaacggcguauggaucggaagaacaaaguccaauaggcugcggaaaggcuuugaaaugaucugggaccccaacggguggaccgacacugauagcgacuucucugugaagcaggauauugucgcuauaacagacuggucaggauacagugguagcuuugugcagcauccugagcucaccggcuuagauugcauccgcccauguuucuggguugaacuggugcgagggcuucccaaggagaauacgaccauuuggacauccggaucuucgaucagcuucugcggcgucaacuccgacacugccaacuggucauggccugauggugcagaauugccauuuaccauugacaaauga

SEQ ID NO: 151196 - RNA, 1410 nt, Artificial Sequence; identical to SEQ ID NO: 144603
  derived and/or modified CDS sequence (opt3) from neuraminidase__InfluenzaA__AFO66205

SEQ ID NO: 151197 - RNA, 1413 nt, Artificial Sequence; identical to SEQ ID NO: 142463
  derived and/or modified CDS sequence (opt3) from neuraminidase__InfluenzaA__AFO66216

SEQ ID NO: 151198 - RNA, 1413 nt, Artificial Sequence; identical to SEQ ID NO: 142434
  derived and/or modified CDS sequence (opt3) from neuraminidase__InfluenzaA__AFO66227

SEQ ID NO: 151199 - RNA, 1413 nt, Artificial Sequence
  derived and/or modified CDS sequence (opt3) from neuraminidase__InfluenzaA__AFO66238
augaaccccaaucagaagaucauuaccauaggcagcaucuccauugccaucgggauuaucucucugaugcuccaaauaggaaacaucauuucaaucugggcuagucacagcauucagacagguucccagaaucauacuggcaucugcaaccagagaauaauuacguacgaaaauucuaccugggugaaccacacauaugucaauaucaacaauacuaacguuguggcagggaaagacaagaccucgguaacacuugccggaaauucaagccuguguaguauuuccggcugggcgaucuacaccaaagauaacucuaucaggauugguagcaagggggacguguucgucauacgggagccuuuuaucuccugcucacauuuggagugucgcacuuucuuuuuaacacaaggagcucugcuaaaugauaaacacaguaacggcaccgugaaggaccgaagcccauaucgugcccucaugucuugcccgcugggcgaagcacccuccccuuacaauucaaaguucgagagcguugccuggagugcuucugcaugucaugaugggaugggauggcuuacgauugguaucuccggcccagacaacggggccguggcuguccugaaauauaacggaauaauuacugaaaccaucaagagcuggaaaaagcagaucuugagaacacaggagucggagugcguguguaugaauggcucuugcuuuacuauuaugaccgauggucccuccaacggggccgcgucauacaaaaucuucaagauugaaaagggaaaaguaacaaagaguauagagcucaaugcaccuaacuuucacuaugaagaguguagcugcuacccagacaccggcacgguuaugugugugugcagggauaauuggcacggcuccaaccggcccugggucucuuucaaucagaaccuggacuaccaaaucggguauauuugcagcggaguguuuggugauaauccucgcccaaaagacggcgaggggucauguaacccggugacugucgauggagccgacggcguuaaggguuucaguuacaaauaugggaauggcguguggaucggaagaacaaaguccaacaggcugcggaaaggcuuugaaaugaucugggaccccaauggguggaccaacacugauagcgacuucucuguaaagcaggauguggucgcuauuacagacuggucaggauacagugguagcuuugugcagcauccugagcucaccggcuuagauugcauacgcccauguuucuggguugaacuggugcgagggcuucccagagagaauacgaccaucuggacauccggaucuucgauuagcuucugcggcgucaacuccgacacugccaacuggucauggccugauggugcagaauugccauuuaccaucgacaaguga

SEQ ID NO: 151200 - RNA, 1413 nt, Artificial Sequence
  derived and/or modified CDS sequence (opt3) from neuraminidase__InfluenzaA__AFO66249
augaaccccaaucagaagaucauuaccauaggcagcaucuccauugccaucgggauuaucucucugaugcuccaaauaggaaacaucauuucaaucugggcuagucacagcauucagacagguucccagaaucauacuggcaucugcaaccagagaauaauuacguacgaaaauucuaccugggugaaccacacauaugucaauaucaacaauacuaacguuguggcagggaaagacaagaccucgguaacacuugccggaaauucaagccuguguaguauuuccggcugggcgaucuacaccaaagauaacucuaucaggauugguagcaagggggacguguucgucauacgggagccuuuuaucuccugcucacauuuggagugucgcacuuucuuuuuaacacaaggagcucugcuaaaugauaaacacaguaacggcaccgugaaggaccgaagcccauaucgugcccucaugucuugcccgcugggcgaagcacccuccccuuacaauucaaaguucgagagcguugccuggagugcuucugcaugucaugaugggaugggauggcuuacgauugguaucuccggcccagacaacggggccguggcuguccugaaauauaacggaauaauuacuggcaccaucaagagcuggaaaaagcagaucuugagaacacaggaaucggagugcguguguaugaaugguucuugcuuuacuauuaugaccgaugggcccuccaacggagccgcgucauacaaaaucuucaagauugagaagggcaaaguaacaaagaguauagaacucaaugcaccuaacuuucacuaugaggaauguagcugcuacccagacaccggcacgguuaugugugugugcagggauaauuggcacggguccaaccggcccugggucucuuucaaucagaaccuggacuaccaaaucggauauauuugcagcgguguguuuggcgauaauccucgcccaaaagacggggagggaucauguaacccggugacugucgauggcgccgacgguguuaagggguucaguuacaaauauggcaauggaguguggaucggcagaacaaaguccaacaggcugcggaaaggguuugagaugaucugggaccccaauggauggaccaacacugauagcgacuucucuguaaagcaggauguggucgcuauuacagacuggucagguuacaguggcagcuuugugcagcauccugaacucaccggguuagauugcauacgcccauguuucuggguugagcuggugcgaggacuucccagagaaaauacgaccaucuggacauccgguucuucgauuagcuucugcggcgucaacuccgacacugccaacuggucauggccugauggggcagaguugccauuuaccaucgacaaguga

SEQ ID NO: 151201 - RNA, 1413 nt, Artificial Sequence
  derived and/or modified CDS sequence (opt3) from neuraminidase__InfluenzaA__AFP33330
augaaccccaaucagaagaucauuaccauaggcagcaucuccguggccauugggaucauuucucugauccuccaaauaggaaacaucauuucaaucugggcuagucacagcauucaggcagguucccagaauuacacaggcaucugcaaccagaaaauaauuacuuaugagaauagaacgugggucaaccaaaccuacguuaauaucaacaauacaaacgugguagccgggaaggacaaaacuucuaugacccuugcgggaaauucgucacuguguccuauuaggggcugggcuaucuauacaaaggauaacagcauccggauugguaguaaaggggacguguucgucauacgcgaaccauuuaucuccugcucucauuuggagugucgaaccuucuuuuuaacucagggagcccugcuaaaugauaagcacagcaacggcacaauuaaggaccguuccccguucagagcacucaugucaugcccccugggcgaagccccuaguccauacaauagcagguuugagucuguggcuugguccgcaucagccugucaugaugggcuuggauggcugaccaucgguauaagcggccccgacaacggggcuguugccguguugaaauauaacggaauuaucacggaaacuaucaagaguuggaaaaagcagauucuccggacccaggagucugagugcgucugugugaauggcuccugcuucacaaucaugacugaugguccuagcaaccgcgcggcaucguacagaauuuuuaaaauagaaaaggggaggguaaccaagucuaucgagcuggacgccccaaauuaucacuacgaagaguguuccugcuaccccgauacaggaaccguuaugugugugugccgggacaacuggcauggcucaaaucgcccuugggucaguuucaaccaaaaucuggauuaucagauuggcuacaucugcagcgggguguuuggagacaacccacgaccgaaagauggugagggcuccuguaaucccgugacggucgacggggcugacggaguuaagggcuucucuuauagauacgguaacgggguguggaucggcaggacuaaaagcaaucggcuccguaagggauuugaaaugauuugggauccuaacggcuggacagacaccgauucagacuucaguaugaaacaggauguaguggccaugacugacugguccggguauagcggaucuuuuguccagcacccagaguuaacaggucuggauugcaugcgccccuguuucuggguggaacuuguuagaggcuugccuagggagaauaccacgauauggaccucagggaguagcaucuccuucugcggagugaacucugaaacagcaaauuggucguggccagacggcgcugagcugcccuuuacuauugauaaguga

SEQ ID NO: 151202 - RNA, 1413 nt, Artificial Sequence
  derived and/or modified CDS sequence (opt3) from neuraminidase__InfluenzaA__AFP33331
augaaccccaaucagaagaucauuaccauaggcagcaucuccauugccaucgggauuaucucucugaugcuccaaauaggaaacaucauuucaaucugggcuagucacagcauucagacagguucccagaaucauacuggcaucugcaaccagagaauaauuacguacgaaaauucuaccugggugaaccacacauaugucaauaucaacaauacuaacguuauugcagggaaagacaagaccucggugacacuugccggaaauucaagccuguguaguaucuccggcugggcgaucuacaccaaagauaacucuauuaggauagguagcaagggggacguauucgugauccgggagccuuuuauuuccugcucacauuuggagugucgcacuuucuuuuuaacacaaggagcucugcuaaaugauaaacacaguaacggcaccgucaaggaccgaagcccauaucgugcccucaugucuugcccgcugggcgaagcacccuccccuuacaauucaaaguucgagagcguggccuggagugcuucugcaugucaugaugggaugggauggcuuacgaucgguauauccggcccagacaacggggccguugcugugcugaaauauaacggaauuaucacugaaaccaucaagagcuggaaaaagagaauuuugaggacacaggagucggagugcgucugugugaauggcucuugcuuuacuaucaugaccgauggucccuccaacggggccgcgucauacaaaauuuucaagauagaaaagggaaaaguaacaaagaguaucgagcucaaugcaccuaacuuucacuaugaagaguguagcugcuacccagacaccggcacgguuaugugugugugccgggauaauuggcacggcuccaaccgccccugggucucuuucaaucagaaccuggacuaccagauuggguauaucugcagcggaguguuuggugauaauccuagaccaaaagacggcgaggggucauguaacccggugacugucgauggagccgacggcguuaaggguuucaguuacaaauaugggaauggcguguggaucggaaggacaaaguccaaccggcugcgcaaaggcuuugaaaugauuugggaccccaauggguggaccgauacugacagcgauuucucuguaaagcaagacguggucgcuauaacagauuggucaggauacagugguagcuuugugcagcauccugagcucaccggcuuagacugcauccgaccauguuucuggguugaacuggugagagggcuucccagggagaacacgaccauuuggacauccggaucuucgaucagcuucugcggcgucaauuccgauacugccaacuggucauggccugacggugcagaauugccauuuaccauugauaaguga

SEQ ID NO: 151203 - RNA, 1410 nt, Artificial Sequence; identical to SEQ ID NO: 149191
  derived and/or modified CDS sequence (opt3) from neuraminidase__InfluenzaA__AFQ32576

SEQ ID NO: 151204 - RNA, 1410 nt, Artificial Sequence
  derived and/or modified CDS sequence (opt3) from neuraminidase__InfluenzaA__AFQ37282
augaaccccaaucagaagaucauuaccauaggcagcgugugcaugacaaucgggauggccaaccugauucuccaaaucggaaauauuaucuccauauggaucucucacucaauucagcuugguaaccagaaucagaucgagacuuguaaccaaagugucauuacguacgaaaauaacaccuggguuaaucagacauaugugaacaucagcaauacuaacuucgcugcaggccaguccguagugucugucaaacuggccggaaauucgucauugugcccugugagcggaugggcgauauacaguaaggacaacuccauuagaaucggcucuaaaggugauguuuuugugauuagggagccauucaucagcuguuccccguuagaaugccggaccuuuuuccugacacagggggcucuacucaaugacaagcauucaaacggaaccaucaaagaucgcagucccuaucgaacucugaugagcuguccuauuggcgaggucccaucucccuacaacucccguuuugaaucaguggccuggagcgcaagugccugccacgacggcauaaauuggcuuacaaucgggauuucuggaccugauaacggugcuguagcaguucugaaguauaauggcaucauaaccgacacgauuaaguccuggagaaacaauaucuugaggacucaagagagcgagugugccugcgugaacgggucguguuucaccgucaugacagauggaccaucugacggccaggcuuccuacaaaaucuuucggauugaaaaggguaaaaucgugaagucaguggagaugaaugcccccaacuaucauuacgaagagugcaguuguuacccugauagcuccgagauuacuugcgucugccgcgacaauuggcacgggucuaacagaccauggguuagcuucaaucagaaccucgaauaucagauaggauacaucuguucaggcauuuuuggcgauaauccgaggcccaacgacaaaaccgggaguugcggaccuguguccagcaauggugcgaacggcguaaagggguucucuuuuaaguauggaaacggcguguggaucggucggacaaaaucaaucaguagccgcaauggguucgagaugauuugggauccaaacggcuggaccggaacggacaauaacuuuuccauaaagcaagacaucgucggcauuaaugaauggucuggguacucggggagcuucgugcagcaucccgagcugacuggucuggauuguauccgaccuugcuucuggguugaacucauuagaggcaggccaaaagagaacacaaucuggaccgggggauccucaauaaguuuuuguggcgucaauucugacacuguggguuggagcuggcccgauggggcagaguuaccguucacaaucgacaaguga

SEQ ID NO: 151205 - RNA, 1410 nt, Artificial Sequence
  derived and/or modified CDS sequence (opt3) from neuraminidase__InfluenzaA__AFQ55691
augaaccccaaucagaagaucauuaccauaggcguggucaacacaacucugagcacgaucgcccuccuuauugggguuggaaaucugguguucaacaccguaauccacgagaaaauuggugaccaucaaacagugacucacccuaccacaaccacuccagcuaucccgaauugcuccgauacaauaaucaccuacaacaauacgauuaucaacaauauuacuaccacaaucauaacugaagcagagagacccuuuaagucuccuuugccauuaugucccuucaggggcuuuuucccuuuucauaaagacaacgccauucggcugggggaaaauaaggaugucaucgugacccgcgagccauauguuucaugcgacaacgauaauuguuggaguuucgcgcuagcucagggagcccuccugggcacaaaacacagcaacgguaccauuaaggaccgaacgcccuaccguucccuuaucagauuuccuaucgggacugcaccagugcugggaaauuauaaggaaauuugcauagccuggucuucgucaagcuguuucgauggcaaagaguggaugcaugucugcaugacaggcaacgacaacgaugcuagugcacagaucauuuacgccgggaagaugaccgacuccaucaaaucuuggaggaaggauauauugcggacucaggagagcgaaugucaaugcauugacggaacaugugugguagcuguuaccgaugguccggccgcguccucagcagaccaccgcaucuauuggaucagagagggcaaaauuaucaaguacgaagacgugcccaagacgaaaauucagcaccucgaggagugcaguuguuaugucgauguggacguguacugcauaugcagggauaauuggaaggggagcaaccggccuuggaugcgcaucaauaacgaaaccauucuggagacaggauacgucuguucuaaauuucauuccgacacuccacgacccgccgauccuucaaccguuagcugcgacaguccaucuaaugugaacggcggucccgggguaaagggauucggcuuuaaagcuggcaaugauguguggcuggggagaacagucuccacuagcggaaggucggguuucgaaaucaucaaggugaccgagggcuggauuaacucuccgaaucacgccaaauccauaacacagacccucaugucaaacaaugacuggaguggguauagcggauccuuuaucauuaagacuaaggauuguuuccagccuugcuucuacguugaauuaauccggggccgucccaacaaaaaugacgaugugucuuggacgagcaacucaauugucacauuuuguggucuggacaaugagccagggaguggcaacuggccugacggauccaacaucggcuucaugcccaaguga

SEQ ID NO: 151206 - RNA, 1410 nt, Artificial Sequence
  derived and/or modified CDS sequence (opt3) from neuraminidase__InfluenzaA__AFR68156
augaaccccaaucagaagaucauuaccauaggcagcgugugcaugacaaucgggauggccaaccugauucuccaaaucggaaauauuaucuccauauggaucucucacucaauucagcuuagaaaccagagucagaucgagacuuguaaucaaagcgucauuacguacgaaaacaauaccuggguuaaccagacauaugugaauaucuccaacacuaauuucgcugcaggucagucuguagugucggucaaacuggccggcaacagcucauugugcccugugagugggugggcgauauacuccaaggacaauucuauuaggaucggaagcaaaggcgauguuuuugugauucgggagccauucaucuccuguucaccguuagaaugccgcaccuuuuuccugacacagggugcucuacucaacgacaagcauaguaaugggaccaucaaagaucgaagccccuaucguacucugaugucuuguccuauuggagaggucccaucccccuacaacucaagauuugaaagcguggccuggagugcaucugccugccacgacggcauaaacuggcuuacaaucggcauuuccgggccugauaauggagcuguagcaguucugaaguauaacgguaucauaaccgacacgauuaagagcuggaggaauaacaucuugcggacucaagagucggagugugccugcgugaauggcucuuguuucaccaucaugacagaugggccauccgacggacaggcuucauacaaaauuuuucgcaucgaaaagggcaaaauugucaagaguguggagaugaacgcccccaauuaucauuacgaagagugcagcuguuacccugauuccucugagauaacuugcgugugcagagacaacuggcacgguagcaauaggccaugggucucauucaaccagaaucucgaauaucagaucggguacauuuguaguggaaucuuuggcgauaacccgcggcccaaugacaaaaccggcuccugcgggccuguuagcucuaacggagcgaauggugugaagggcuucucauuuaaguaugggaacggaguauggaucggccgcacaaaaaguauuagcucccgaaaggguuucgagaugauaugggauccaaacggguggaccggcacggacaauaacuuuucuaucaaacaagacauugugggaaucaaugaauggucgggcuacagcggguccuucguccagcaucccgagcugacuggacuggauuguauuagaccuugcuucuggguggaacucaucaggggucggccaaaggagaacacaauauggaccucaggcaguucuaucagcuuuugugggguuaauuccgacacugugggauggucauggcccgauggcgcagaguuaccguucacaauugacaaauga

SEQ ID NO: 151207 - RNA, 1410 nt, Artificial Sequence; identical to SEQ ID NO: 151206
  derived and/or modified CDS sequence (opt3) from neuraminidase__InfluenzaA__AFR68166

SEQ ID NO: 151208 - RNA, 1410 nt, Artificial Sequence
  derived and/or modified CDS sequence (opt3) from neuraminidase__InfluenzaA__AFR68176
augaaccccaaucagaagaucauuaccauaggcagcgugucccugacaaucucuacuauuugcuucuuuaugcaaaucgccauucucaucacgaccgucacacuucacuucaaacaguacgaguuuaacucaccuccaaauaaccagguuaugcugugugaaccgacuauaaucgagagaaauauuaccgaaaucguguauuugacaaacaccacuauugagaaggaaaucugccccaaauuagcugaguacaggaauuggaguaagccucagugugacauaacaggguucgcaccauuuagcaaagauaacuccauucggcugucugccggaggugacaucuggguaacccgcgagcccuaugugucgugcgauccugacaaguguuaccaauucgcgcuaggccaggggacgacucucaauaacguccauucaaauaacaccgugcgagaucguacaccauauagaacucugcuuaugaaugaacugggaguucccuuucacuugggcaccaaacaggugugcauugcuuggagcaguuccucuugucaugacgguaaggccuggcuccacgucugcaucacaggggaugacaagaacgcaaccgccagcuucaucuacaauggaaggcugguggauuccguagcuucauggaguaaagacauucugcggacgcaggagagcgaauguguuugcauaaacggcacuugugcaguggucaugacagauggcucugccuccgggaaggcugacaccaaaauccucuuuauuaaggagggaaagaucgugcauacuucaacauuaagcgguagugcccaacacguggaggaaugcucuugcuauccucgcuacccaggcgucagauguguuugcagggauaacuggaaaggguccaaucggccgauaguggacauuaacaucaaggaccacagcaucguaucgucuuacguguguuccggacuggucggcgauacgccccgcaaaaaugacucaaguagcuccggucauugccuugauccuaacaaugaggaagggggacacggcgugaagggcugggcguucgacgaugggaacgacguuuggaugggacgaaccauuaaugagaccucuagauuggguuaugaaacauuuaaagugaucgagggcuggagcaacccaaagucaaaacugcagauuaauaggcaggucauaguggaucgggggaaccguaguggauacuccggcaucuucagcguagaggguaagaauuguauuaaccgcugcuuuuauguugaacuaaucagagggaggaaggaggaaacugaggugcucuggaccucuaauucaaucgucguguucuguggcacaaguggaacuuacggcaccgggagcuggcccgacggagcagaucugaaccuuaugccuauuuga

SEQ ID NO: 151209 - RNA, 1410 nt, Artificial Sequence; identical to SEQ ID NO: 144786
  derived and/or modified CDS sequence (opt3) from neuraminidase__InfluenzaA__AFR84677

SEQ ID NO: 151210 - RNA, 1410 nt, Artificial Sequence; identical to SEQ ID NO: 145673
  derived and/or modified CDS sequence (opt3) from neuraminidase__InfluenzaA__AFR84687

SEQ ID NO: 151211 - RNA, 1410 nt, Artificial Sequence; identical to SEQ ID NO: 144776
  derived and/or modified CDS sequence (opt3) from neuraminidase__InfluenzaA__AFR84696

SEQ ID NO: 151212 - RNA, 1410 nt, Artificial Sequence; identical to SEQ ID NO: 144786
  derived and/or modified CDS sequence (opt3) from neuraminidase__InfluenzaA__AFR84706

SEQ ID NO: 151213 - RNA, 1410 nt, Artificial Sequence; identical to SEQ ID NO: 144776
  derived and/or modified CDS sequence (opt3) from neuraminidase__InfluenzaA__AFR84716

SEQ ID NO: 151214 - RNA, 1410 nt, Artificial Sequence; identical to SEQ ID NO: 144776
  derived and/or modified CDS sequence (opt3) from neuraminidase__InfluenzaA__AFR84726

SEQ ID NO: 151215 - RNA, 1410 nt, Artificial Sequence; identical to SEQ ID NO: 144776
  derived and/or modified CDS sequence (opt3) from neuraminidase__InfluenzaA__AFR84736

SEQ ID NO: 151216 - RNA, 1410 nt, Artificial Sequence; identical to SEQ ID NO: 144776
  derived and/or modified CDS sequence (opt3) from neuraminidase__InfluenzaA__AFR84746

SEQ ID NO: 151217 - RNA, 1410 nt, Artificial Sequence; identical to SEQ ID NO: 144776
  derived and/or modified CDS sequence (opt3) from neuraminidase__InfluenzaA__AFR84756

SEQ ID NO: 151218 - RNA, 1410 nt, Artificial Sequence; identical to SEQ ID NO: 144776
  derived and/or modified CDS sequence (opt3) from neuraminidase__InfluenzaA__AFR84766

SEQ ID NO: 151219 - RNA, 1410 nt, Artificial Sequence; identical to SEQ ID NO: 144776
  derived and/or modified CDS sequence (opt3) from neuraminidase__InfluenzaA__AFR84776

SEQ ID NO: 151220 - RNA, 1410 nt, Artificial Sequence; identical to SEQ ID NO: 144776
  derived and/or modified CDS sequence (opt3) from neuraminidase__InfluenzaA__AFR84786

SEQ ID NO: 151221 - RNA, 1410 nt, Artificial Sequence; identical to SEQ ID NO: 144776
  derived and/or modified CDS sequence (opt3) from neuraminidase__InfluenzaA__AFR84796

SEQ ID NO: 151222 - RNA, 1410 nt, Artificial Sequence; identical to SEQ ID NO: 144786
  derived and/or modified CDS sequence (opt3) from neuraminidase__InfluenzaA__AFR84806

SEQ ID NO: 151223 - RNA, 1410 nt, Artificial Sequence; identical to SEQ ID NO: 144776
  derived and/or modified CDS sequence (opt3) from neuraminidase__InfluenzaA__AFR84816

SEQ ID NO: 151224 - RNA, 1410 nt, Artificial Sequence; identical to SEQ ID NO: 144786
  derived and/or modified CDS sequence (opt3) from neuraminidase__InfluenzaA__AFR84826

SEQ ID NO: 151225 - RNA, 1410 nt, Artificial Sequence
  derived and/or modified CDS sequence (opt3) from neuraminidase__InfluenzaA__AFR84836
augaaccccaaucagaagaucauuaccauaggcagcgugugcaugacaaucgggauggccaaccugauucuccaaaucggaaauauuaucuccauauggaucucucacucaauucagcuugguaaccagaaucagaucgagacuuguaaccaaagugucauuacguacgaaaauaacaccuggguuaaucagacauaugugaacaucagcaauacuaacuucgcugcaggccaguccguagugucugucaaacuggccgggaacucgucauugugcccugugggaggcugggcgauauacagcaaggacaauaguguuagaauugguuccaaaggggauguguuugucaucagggagccauucauuucuuguagcccguuagaaugccggaccuuuuuccugacacagggagcucuacucaaugacaagcauuccaacggcaccaucaaagaucgcucacccuaucgaacucugaugaguuguccuaucggcgaggugccaagccccuacaacucucguuuugaauccguagccuggucagcaagcgccugccacgacgggauuaauuggcuuacaauaggaaucagugguccugauaacggcgcuguugcagugcugaaguauaaugggauuaucaccgacacgauaaagucuuggagaaacaauauuuugaggacucaagaguccgagugugccugcgucaacggaagcuguuucaccgugaugacagauggcccaucgaauggucaggcuucuuacaaaaucuuucggaucgaaaaggggaaaauugugaaguccgucgagaugaacgcccccaauuaucauuacgaagagugcucauguuacccugacaguagcgagaucacuugcguuugccgcgauaacuggcacggauccaauagaccaugggugucuuucaaccagaaucucgaauaucagauuggcuacauauguagcggcaucuuuggggacaacccgaggcccaaugauaaaaccggaucaugcgguccuguaaguuccaacggcgcgaacggggugaagggauucagcuuuaaguauggcaauggugucuggauugggcggacaaaaucuaucucaagucgcaacggcuucgagaugaucugggacccaaauggauggaccgaaacggauaacaauuuuagcauuaagcaagacauagugggcaucaacgagugguccggguacucuggaucguucguucagcaucccgaacugacuggucuggacuguauucgaccuugcuucuggguggagcucaucagaggcaggccaaaagagaauacaauuuggaccagcggguccucaaucaguuuuuguggagucaacucugauacugugggcuggagcuggcccgacggugcagaauuaccguucacaauagauaaguga

SEQ ID NO: 151226 - RNA, 1410 nt, Artificial Sequence; identical to SEQ ID NO: 145590
  derived and/or modified CDS sequence (opt3) from neuraminidase__InfluenzaA__AFR84846

SEQ ID NO: 151227 - RNA, 1410 nt, Artificial Sequence; identical to SEQ ID NO: 144786
  derived and/or modified CDS sequence (opt3) from neuraminidase__InfluenzaA__AFR84856

SEQ ID NO: 151228 - RNA, 1410 nt, Artificial Sequence
  derived and/or modified CDS sequence (opt3) from neuraminidase__InfluenzaA__AFR84866
augaaccccaaucagaagaucauuaccauaggcagcgugugcaugacaaucgggauggccaaccugauucuccaaaucggaaauauuaucuccauauggaucucucacucaauucagcuugguaaccagaaucagaucgagacuuguaaccaaagugucauuacguacgaaaauaacaccuggguuaaucagacauaugugaacaucagcaauacuaacuucgcugcaggccaguccguagugucugucaaacuggccggaaauucgucauugugcccugugagcggaugggcgauauacaguaaggacaacuccauuagaaucggcucuaaaggugauguuuuugugauuagggagccauucaucagcuguuccccguuagaaugccggaccuuuuuccugacacagggggcucuacucaaugacaagcauucaaacggaaccaucaaagaucgcagucccuuucgaacucugaugagcuguccuauuggcgaggucccaucucccuauaacucccguuucgaaucaguggccuggagcgcaagugccugccacgacggcauaaauuggcuuacaaucgggauuucuggaccugauaacggugcuguagcaguucugaaguacaauggcaucauaaccgacacgauuaaguccuggagaaacaauaucuugaggacucaagagagcgagugugccugcgugaacgggucguguuuuaccgucaugacagauggaccaucugacggccaggcuuccuauaaaaucuuccggauugaaaaggguaaaaucgugaagucaguggagaugaaugcccccaacuaccauuaugaagagugcaguuguuacccugauagcuccgagauuacuugcgucugccgcgacaauuggcacgggucuaacagaccauggguuagcuuuaaucagaaccucgaauaccagauaggauauaucuguucaggcauuuucggcgauaauccgaggcccaacgacaaaaccgggaguugcggaccuguguccagcaauggugcgaacggcguaaagggguuuucuuucaaguacggaaacggcguguggaucggucggacaaaaucaaucaguagccgcaauggguuugagaugauuugggauccaaacggcuggaccggaacggacaauaacuucuccauaaagcaagacaucgucggcauuaaugaauggucuggguauucggggagcuucgugcagcaucccgagcugacuggucuggauuguauccgaccuugcuuuuggguugaacucauuagaggcaggccaaaagagaacacaaucuggaccuccgggucaaguauaucuuucuguggagugaauagcgacacugucggcugguccuggcccgauggugcagaguuaccguuuacaaucgacaaguga

SEQ ID NO: 151229 - RNA, 1410 nt, Artificial Sequence; identical to SEQ ID NO: 145494
  derived and/or modified CDS sequence (opt3) from neuraminidase__InfluenzaA__AFR84876

SEQ ID NO: 151230 - RNA, 1410 nt, Artificial Sequence; identical to SEQ ID NO: 145590
  derived and/or modified CDS sequence (opt3) from neuraminidase__InfluenzaA__AFR84895

SEQ ID NO: 151231 - RNA, 1410 nt, Artificial Sequence; identical to SEQ ID NO: 145590
  derived and/or modified CDS sequence (opt3) from neuraminidase__InfluenzaA__AFR84905

SEQ ID NO: 151232 - RNA, 1410 nt, Artificial Sequence; identical to SEQ ID NO: 145590
  derived and/or modified CDS sequence (opt3) from neuraminidase__InfluenzaA__AFR84915

SEQ ID NO: 151233 - RNA, 1410 nt, Artificial Sequence; identical to SEQ ID NO: 145590
  derived and/or modified CDS sequence (opt3) from neuraminidase__InfluenzaA__AFR84925

SEQ ID NO: 151234 - RNA, 1353 nt, Artificial Sequence
  derived and/or modified CDS sequence (opt3) from neuraminidase__InfluenzaA__AFU83119
augaaccccaaucagaagaucauuaccauaggcagcgugucccugacaaucgccacugucugcuuccucaugcaaauugcuauccuugcaacgaccguuacacugcacuuuaaacagaacgaguguucuauuccuucaaguaaucaggugguaccaugcgaaccgaucauaguggagagaaacgucacugaauacagggacuggagcaagccccagugucaaaucaccggguucgccccuuuuuccaaagauaauucuauucgguugucggcgggaggugacaucugggugacacgcgagccauauguuucaugcagccccgauaaguguuaccaguucgcuuuaggccaggggaccacucuggacaacaaacauaguaauggaacaauucacgaucgaaucccucaucguacccuacucaugaacgaacugggcgugccauuucaccuugguacgaagcaggucugcauagccugguccucuagcuccugucaugacgggagagcauggcugcacgugugcguaacuggagaugacaggaaugccaccgcuucauucauuuaugauggcguuuugguggacaguaucggcagcuggucucaaaacauucuccggacacaggaguccgagugugucugcaucaaugggacuuguaccguggugaugacagauggaucagcaagcggucgcgccgacaccagaauccuguuuauuaaggaaggcaaaauaguccacguuaguccccugucuggguccgcucagcauaucgaggaaugcagcugcuacccuagguauccagaugugcgguguguaugccgcgacaacuggaagggaucgaaucgaccgauuaucgacauaucuauggccgauuacggcauugacuccucauauguguguaguggucucgucggggauacgcccagaaacgacgauagcuccucuaauagcaacugcaaagacccuaacaaugagaggggaaacccaggcgugaagggcugggcguucgauuacgggaaugacguuuggaugggacggacuaucucaaaagauagucguuccgguuacgagacauuucgcgugaucggcggguggaccauugcaaacagcaagucucaggucaauagacaagugaucguagacaacaauaacuggucaggauauaguggcauuuucagcguugaagguaaguccuguauaaauaggugcuuuuacguggaguuaauccgggggcgaccccaggaaacucgcgucugguggacaucuaacucgauuguggccuucuguggcaccagcggaacguauggcaccggguccuggccugauggagcuaauaucaacuuuaugccaaucuga

SEQ ID NO: 151235 - RNA, 1410 nt, Artificial Sequence
  derived and/or modified CDS sequence (opt3) from neuraminidase__InfluenzaA__AFV53208
augaaccccaaucagaagaucauuaccauaggcagcgugucccugacaaucgccacugucugcuuccucauucaaaucgcuauucuuguuacgaccgugacacugcacuuuaaacagcaugagugugacucuccugcaucaaaccagguaaugccaugcgaaccgaucauaaucgagagaaauauuacugaaaucguguacuugaacaauaccacaauugagaaggaaaucugucccaaagucguggaguauaggaacuggaguaagccucagugccaaauaaccggguucgccccauuuagcaaagauaauuccauucgguuaucugcgggaggugacaucuggguuacucgcgagcccuacgugucgugugauccuggcaagugcuaucaguucgcucuggggcagggaacaacccuagacaacaagcacucaaaugauacgauucaugaccgaaucccacaccguacucuccugaugaacgaacuuggcguccccuuucaucuggguaccagacagguguguaucgccuggagcaguuccucuugccacgaugggaaagcaugguugcacguauguauuacaggagacgauaagaaugccacugcuagcuucauauacgacggcaggcucauggauuccaucggcucauggagucaaaacauucugcggacccaggagagcgaaugcguuuguaucaaugggacaugcaccguggucaugacggacggaucugcauccggucgcgccgauacuagaauacuguuuauugaggagggcaaaaucgugcauaucucaccucucagcgggagugcucagcacguggaagagugcucuuguuauccaagguacccgggaguccggugcauuugucgcgacaacuggaagggcuccaaucgacccguuaucgacauuaacauggaagauuauagcauagacucgucuuacgugugcuccgguuuaguaggggauacaccuagaaacgacgauaggucaaguaauagcaacugucggaauccaaacaaugagcguggaaaccagggcgugaaaggcugggccuucgacaauggggaugacgucuggaugggacgcaccaucuccaaggaucugagaucugguuacgaaacuuuuaaggugauuggcggguggagcacacccaacucaaaaagucaaaucaauaggcagguuaucguggacuccgauaaccggagcggauauucuggcauuuucucagucgaggguaagaguugcauaaaucgauguuuuuacguggagcuuauccgcgggagaaaacaggaaaccaggguaugguggacgagcaacuccauuguuguguucugcggcaccucuggaacauauggcacugggucguggccugacggagcgaauaucaacuuuaugccaauuuga

SEQ ID NO: 151236 - RNA, 1410 nt, Artificial Sequence
  derived and/or modified CDS sequence (opt3) from neuraminidase__InfluenzaA__AFV53219
augaaccccaaucagaagaccaucacaauuggcagcgugucccugacuauagccacggucugcuuccucaugcaaaucgcuauucuugcaaccacaguuacucugcacuuuaaacagcaugagugugacucuccugccucaaaccaggugaugccaugcgaaccgaucauuaucgagagaaauauaaccgaaaucguauacuugaacaauacaaccauugagaaggaaaucugucccgagguggucgaguauaggaacuggaguaaaccucagugccaaauuacuggguucgcgccauuuagcaaggauaauuccauccgguuaucugcuggaggugacauaugggugacacgcgaacccuacguuucgugugauccuggcaaaugcuaucaguucgcccuggggcagggaaccacgcuagacaacaagcacucaaauggcacuauucaugaucgaaucccacaccguacccuccugaugaacgagcuuggugugcccuuucaucuggggacaaagcaggucuguguggcauggagcaguuccucuugccacgacggaaaagccugguugcacguauguguuacuggcgaugacagaaaugcuaccgccagcuucauuuacgauggcaggcucguggacuccaucgggucauggagucaaaacauccugcggacacaggaaagcgagugcgucuguauuaauggaaccugcacgguggugaugacugaugguucugcauccggccgcgcugacacaagaauacuguuuaucaaggaggggaaaauuguccauaucucaccucucagcggaagugcccagcacauagaagagugcucuuguuauccaagguacccggauguucggugcauuugucgcgacaacuggaagggcuccaaucgacccgugaucgacaucaacauggaagauuauagcauugacucgucuuacguaugcuccgguuuagugggggauaccccuagaaacgacgauucaaguagcaauuccaacuguagggacccaaauaacgagcggggaaaucccggcgucaaaggcugggcguucgauaacggggacgauguguggaugggacguacuaucaauaaggaaucucgcagcgguuacgagacauuuaagguuauuggcggguggucaaccccuaacaguaaaucccaggugaauagacaagucauaguggacaacaauaacuggagcggauauucuggcaucuucucaguagaggguaagaguugcauuaauagguguuuuuacguugaacugauccgggggcgaccacaggagacgcgcgugugguggaccagcaacuccaucgucguguucugcggcacaucuggaacuuauggcaccgggucguggcccgauggagcaaauauuaacuuuaugccgauauga

SEQ ID NO: 151237 - RNA, 1410 nt, Artificial Sequence
  derived and/or modified CDS sequence (opt3) from neuraminidase__InfluenzaA__AFV53230
augaaccccaaucagaagaucauuaccauaggcagcgugucccugacaaucgccacugucugcuuccucaugcaaauugcuauccuuguuacgaccgugacacugcacuuuaaacagcaugagugugacucuccugcaucaaaccagguaaugccaugcgaaccgauuaucauagagagaaauaucacugaaauuguguacuugaacaauaccacaaucgagaaggaaauuugucccaaagucguggaguauaggaacuggaguaagccucagugcaaaaucaccggguucgccccauuuagcaaggauaauuccauacgguuaucugcgggaggugacauuuggguuacucgcgagcccuacgugucgugugauccuggcaagugcuaucaauucgcucuggggcagggaacaacccuagacaacaaacacucaaaugauacgauccaugaccguauuccacaccgaacucuccugaugaacgaacuuggcguccccuuucaucuggguaccagacagguguguaucgccuggagcaguuccucuugccacgaugggaaggcaugguugcacguauguguuacaggagacgauaaaaaugccacugcuagcuucaucuacgacggcaggcucguggauuccauuggcucauggagucagaacauacugcggacccaagagagcgaaugcgucuguaucaaugggacaugcaccguggugaugacggacggaucugcauccggucgcgccgauacuaagauucuguuuaucgaggagggcaaaauaguccauauuucaccucucagcgggagugcucagcacguugaagagugcucuuguuauccaagauacccggacgugaggugcaucugucgggacaacuggaagggauccaaucgccccguaguggauaucagcauggaagacuauucgauugauucuuccuacgucugcucaggcuuagugggugacacaccucgaaacgaugacagaaguagcaacuccaauuguaggaacccaaauaacgagcgggggaaucagggaguuaagggcugggccuucgauaacggcgacgauguguggauggggcguaccaucucuaaagaccugcgcagcggauacgaaacuuuuaaggucauugguggcuggucaacacccaauaguaaaucccagauaaacagacaagugaucguagauagcgacaauaggucuggguauucaggaauuuucaguguugagggcaagagcugcaucaaccgguguuuuuacguggagcuuauccgaggucgcaaacaggaaaccagagucugguggacguccaauucuauuguggucuucugcgggaccucgggcacauauggaacuggcagcuggccugacggggcgaacauaaauuugaugccaaucuga

SEQ ID NO: 151238 - RNA, 1410 nt, Artificial Sequence; identical to SEQ ID NO: 144453
  derived and/or modified CDS sequence (opt3) from neuraminidase__InfluenzaA__AFV53241

SEQ ID NO: 151239 - RNA, 1410 nt, Artificial Sequence; identical to SEQ ID NO: 142139
  derived and/or modified CDS sequence (opt3) from neuraminidase__InfluenzaA__AFV53252

SEQ ID NO: 151240 - RNA, 1413 nt, Artificial Sequence
  derived and/or modified CDS sequence (opt3) from neuraminidase__InfluenzaA__AFV53263
augaaccccaaucagaagaucauuaccauaggcagcaucugcauggccauugggacaaucucccugauucuccaaaucggaaacauaaucucuauuuggaucucacacaguauucagacugguagccagaaucauacgggcaucuguaaccagagaauaauuaccuacgagaauaacacaugggugaaucaaacuuaugucaacaucuccaauaccaacguuguggcugggaaagacacaaccucuaugauucuugcaggaaauucgucacugugcccuaucaggggcugggccaucuacagcaaggauaacaguauucggauagguuccaaaggggacguauucgugauccgcgaaccauuuauuucuuguagccacuuggagugccgaacuuucuuuuuaacacagggagcgcugcuaaaugauaagcauuccaacggcaccgucaaagaccguucaccguauagagcucucaugaguugucccaucggcgaagccccuagcccauacaauucuagguucgaguccguggcauggucagccagcgcuugccacgaugggaugggauggcugacgauagguauuaguggccccgacgauggggcaguugccgugcuuaaguauaacggaaucaucacugaaauuaucaagucuuggcggaaacagauucugcgcacccaggaguccgagugugucugcgugaacggcagcuguuuuacaauaaugacugacgguccuucgaauagaccagcuucuuacaggaucuucaagauugaaaaagggaagaucaccaaauccaucgaguuggaugcccccaacucacauuaugaagagugcaguuguuacccugacacaggaaagguaaugugcguuugccgggauaauuggcacggcagcaaccgcccauggguguccuuuaaucaaaaccucgacuaccagauuggcuauauauguucuggggucuucggagauaauccgcgacccaaggacgguaaaggcagcugcgacccugugaacguggauggggcggacggagucaagggcuuuucauacagauaugguaaugggguuuggaucggcaggaccaaaaguaacuccagccggaagggauucgagaugauuugggauccaaauggcuggacgaacacugacgggaauuuuucugugaaacaggauguaguggcaaugacagacuggucaggauacagugguagcuucguccagcaccccgaacugaccggccuggauuguauccguccuugcuuuuggguggagcucauucgcgggagaccaagggaagagacuacaaucuggaccuccggaucuucgaucagcuucuguggcguuaacuccgacacggugaauuggucauggcccgauggugccgaauuaccguucaccauagacaaguga

SEQ ID NO: 151241 - RNA, 1410 nt, Artificial Sequence
  derived and/or modified CDS sequence (opt3) from neuraminidase__InfluenzaA__AFV53274
augaaccccaaucagaagaucauuaccauaggcagcgugucccugaucauugccacagucugcuuccucaugcaaaucgcuauucuuguuacuacggugacccugcacuuuaaacagcaugagugugacucuccugcaucaaaccagguaaugccaugcgaaccgaucauaaucgagagaaauauuacagaaaucguguacuugaacaauacuaccauugagaaggaaaucugucccaaagucguggaguauaggaacuggaguaagccucagugccaaauaacaggguucgccccauuuagcaaagauaauuccauucgguuaucugcgggaggugacaucuggguuacccgcgagcccuacgugucgugugauccuggcaagugcuaucaguucgcucuggggcagggaacuacacuagacaacaagcacucaaaugauaccauucaugaccgaaucccacaccguacgcuccugaugaacgaacuuggcguccccuuucaucuggguacuagacagguguguguagccuggagcaguuccucuugccacgaugggaaagcaugguugcacguuugugugaccggagacgauaagaaugccacagcuagcuucaucuacgacggcaggcucgucgauuccauuggcucauggagucaaaacauacugcggacucaggagagcgaaugcguguguaucaaugggaccugcacaguggucaugaccgacggaucugcauccggucgcgccgauacgaggauucuguuuaucgaggagggcaaaauaguucauauuucaccucucagcgggagugcucagcacguggaagagugcucuuguuauccaagauacccggacguacggugcaucugucgcgacaacuggaagggauccaaucgacccgugaucgauauuaacauggaagacuauagcaucgauucgucuuacgucugcuccggcuuagugggugacacuccuagaaacgaugacaggucaaguaauagcaacugucggaauccaaacaaugagcgugggaaccccggaguuaaaggcugggccuucgauaauggcgacgauguguggauggggcgcacaauuuccaaggaccugagaucuggauacgaaaccuuuaaggucauagguggcuggagcacuccuaacucaaaaagucagaucaauaggcaagugauuguagauuccaacaauuggagcggguauucuggaaucuucucaguugagggcaagaguugcaucaaccgguguuuuuacguggagcuuauucgaggucgccagcaggaaacaagagucugguggaccagcaauuccauaguggucuucugcgggacgucuggcaccuauggaacaggcucguggccagacggggcgaacaucaauuuuaugcccauuuga

SEQ ID NO: 151242 - RNA, 1410 nt, Artificial Sequence
  derived and/or modified CDS sequence (opt3) from neuraminidase__InfluenzaA__AFV53285
augaaccccaaucagaagaucauuaccauaggcagcgugucccugacaaucgccacugucugcuuccucaugcaaauugcuauccuugcaacgaccguuacacugcacuuuaaacagcaugagugugacucuccugccucaaaccaggugaugccaugcgaaccgauuaucauagagagaaauaucacugaaauuguauacuugaacaauaccacaaucgagaaggaaauuugucccgagguggucgaguauaggaacuggaguaaaccucagugccaaaucaccggguucgcgccauuuagcaaggauaauuccauacgguuaucugcuggaggugacauuugggugacucgcgaacccuacguuucgugugauccuggcaaaugcuaucaguucgcccuggggcagggaacaacccuagacaacaagcacucaaauggcacgauccaugaucguauuccacaccgaacucuccugaugaacgagcuuggugugcccuuucaucuggggaccaagcaggucuguguggcauggagcaguuccucuugccacgacggaaaagccugguugcacguauguguuacaggcgaugacagaaaugcuacugccagcuucaucuacgauggcaggcucguggacuccaucgggucauggagucaaaacauucugcggacccaggaaagcgagugcgucuguauaaauggaacaugcaccguggugaugacggaugguucugcauccggccgcgcugacacuagaauccuguuuauuaaggaggggaaaaucguccauauaucaccucucagcggaagugcccagcacauugaagagugcucuuguuauccaaggcauccggauguucggugcaucugucgcgacaacuggaagggcuccaaucgacccgugaucaacauuaacauggaagacuacagcaucgauucgucuuauguaugcuccgguuuagugggggacacaccuagaaaugaugacucaaguagcaacuccaauuguagggauccaaacaaugagcggggaaaccccggcgucaaaggcugggcguucgacaauggggaugacguguggaugggacguaccauuaacaaggauucucgcagcgguuacgaaacuuuuaagguuauaggcggguggucaacaccuaauaguaaaucccaggugaacagacaagucaucguggacaauaacaauuggagcggauacucuggcauuuucucaguagaggguaagaguugcaucaacagguguuuuuauguugagcugauccgggggcgaccacaggaaacccgcgugugguggacgagcaauuccauugucguguucugcggcaccucuggaacauacggcacugggucguggcccgauggagcaaacauaaacuuuaugccgaucuga

SEQ ID NO: 151243 - RNA, 1410 nt, Artificial Sequence
  derived and/or modified CDS sequence (opt3) from neuraminidase__InfluenzaA__AFV53296
augaaccccaaucagaagaucauuauaaucggcagcgugucccugaccauugccacagucugcuuccucaugcaaaucgcuauucuuguuacuacggugacccugcacuuuaaacagcaugagugugacucuccugcaucaaaccagguaaugccaugcgaaccgaucauaaucgagagaaauauuacagaaaucguguacuugaacaauacuaccauugagaaggaaaucugucccgaggucguggaguauaggaacuggaguaaaccucagugccaaauaacaggguucgccccauuuagcaaggauaauuccauucgguuaucugcgggaggugacaucuggguuacccgcgaacccuacgugucgugugauccuucaaaaugcuaucaguucgcucugggccaggggacuacacuagacaacaagcacagcaaugauaccauucaugaccgaaucccacaccguacgcuccugaugaacgagcuuggaguccccuuucaucugggcacuagacagguguguguagccuggaguuccucuagcugccacgaugguaaggcaugguugcacguuugugugaccggggacgauaaaaaugccacagcuuccuucaucuacgacggaaggcucgucgauucaauuggcaguuggagccaaaacauacugcggacucaggaaucugagugcguguguaucaaugggaccugcacaguggucaugaccgacggcuccgcaucaggacgcgccgauacgaggauucuguuuaucgaggaagguaagauaguucauauuagcccucucaguggcucugcucagcacguggaggaaugcuccuguuauccaagauacccggacguacggugcaucugucgcgacaacuggaaagggagcaaucgacccgugaucgauauuaacauggaggacuauucgaucgauucuuccuacgucugcucaggauuagugggcgacacuccuagaaacgaugacaggaguagcaauuccaacugucgggauccaaauaacgaacgugguaaucccgggguuaagggaugggccuucgacaacggcgaugacguguggaugggccgcacaauuucuaaagaucugagaagcggguacgagaccuuuaaggucauaggagguuggucaacuccuaauaguaagucccagaucaacaggcaagugauuguagacagcaauaacuggucuggcuauucagggaucuucaguguugagggaaaaagcugcaucaaucgguguuuuuacguggaacuuauucgaggccgccagcaggagacaagagucugguggaccuccaacucuauaguggucuucugcgguacgucggggaccuauggcacaggaagcuggccagacggcgcgaauaucaacuuuaugcccauuuga

SEQ ID NO: 151244 - RNA, 1410 nt, Artificial Sequence
  derived and/or modified CDS sequence (opt3) from neuraminidase__InfluenzaA__AFV53307
augaaccccaaucagaagaucauuaccauaggcagcgugucccugacaaucgccacugucugcuuccucaugcaaauugcuauccuugcaacgaccguuacacugcacuuuaaacagcaugagugugacucuccugccucaaaccaggugaugccaugcgaaccgauuaucauagagagaaauaucacugaaauuguauacuugaacaauaccacaaucgagaaggaaauuugucccgagguggucgaguauaggaacuggaguaaaccucagugccaaaucaccggguucgcgccauuuagcaaggauaauuccauacgguuaucugcuggaggugacauuugggugacucgcgaacccuacguuucgugugauccuggcaaaugcuaucaguucgcccuggggcagggaacaacccuagacaacaagcacucaaauggcacgauccaugaucguauuccacaccgaacucuccugaugaacgagcuuggugugcccuuucaucuggggaccaagcaggucuguguggcauggagcaguuccucuugccacgacggaaaagccugguugcacguauguguuacaggcgaugacagaaaugcuacugccagcuucaucuacgauggcaggcucguggacuccaucgggucauggagucaaaacauucugcggacccaggaaagcgagugcgucuguauaaauggaacaugcaccguggugaugacggaugguucugcauccggccgcgcugacacuagaauccuguuuauuaaggaggggaaaaucguccauauaucaccucucagcggaagugcccagcacguugaagagugcucuuguuauccaagguacccggaugugcggugcauuugucgcgacaacuggaagggcuccaaucgacccguaaucgacaucaacauggaagauuauagcauugacucgucuuacgugugcuccgguuuagucggggauacaccuagaaacgacgauucaaguagcaauuccaacuguagggacccaaauaacgagcggggaaaucccggcgugaaaggcugggcguucgauaacggggacgauguuuggaugggacguaccaucaauaaggacucucgcagcgguuacgaaacuuuuaaggugauuggcggguggucaacaccuaacaguaaaucccaggucaauagacaagugauaguagauaacaauaacuggagcggauauucuggcaucuucucaguugaggguaagaguugcauuaauagguguuuuuacguggagcugauccgggggcgaccacaggaaacccgcgucugguggacgagcaacuccaucguggucuucugcggcaccucuggaacauauggcacugggucguggcccgacggagcaaauauuaacuuuaugccgauauga

SEQ ID NO: 151245 - RNA, 1410 nt, Artificial Sequence
  derived and/or modified CDS sequence (opt3) from neuraminidase__InfluenzaA__AFV53317
augaaccccaaucagaagaucauuaccauaggcagcgugucccugacaaucgccacugucugcuuccucaugcaaauugcuauccuugcaacgaccguuacacugcacuuuaaacagcaugagugugacucuccugccucaaaccaggugaugccaugcgaaccgauuaucauagagagaaauaucacugaaauuguauacuugaacaauaccacaaucgagaaggaaauuugucccgagguggucgaguauaggaacuggaguaaaccucagugccaaaucaccggguucgcgccauuuagcaaggauaauuccauacgguuaucugcuggaggugacauuugggugacucgcgaacccuacguuucgugugauccuggcaaaugcuaucaguucgcccuggggcagggaacaacccuagacaacaagcacucaaauggcacgauccaugaucgaagcccacaccguacucuccugaugaacgagcuuggugugcccuuucaucuggggaccaagcaggucugugcagccuggaguuccucuagcugccacgacggaaaggcuugguugcacguguguguaacaggcgaugacagaaaugcaacugccuccuucauuuacgauggcaggcucguugacucaaucgggaguuggagccaaaacauccugcggacccaggaaucugagugcguguguauuaauggaacaugcaccgucgugaugacggaugguuccgcuucaggccgcgccgacacuagaauacuguuuaucaaagaggggaaaauugugcauaucggaccucucagcggcagugcgcagcacauagaagagugcucuuguuauccaagguacccggauguccggugcauuugucgcgacaacuggaaggguuccaaucgacccguuaucgacaucaacauggaagauuauagcauugacucgucuuacgugugcuccggguuaguaggagauacaccuagaaacgacgauucaaguagcaauuccaacuguagggacccaaauaacgagcggggcaaucccggcgugaaagggugggcauucgauaacggagacgaugucuggaugggucguaccaucucuaaggaccugcgcagcggcuacgaaacuuuuaaggugauugggggauggucaacaccuaauaguaaaucccagguuaacagacaagugauagucgauaauaacaauuggagcggcuauucugguaucuucucaguggaggggaagaguugcauuaacagguguuuuuacguagagcuuauccggggccgaccacaggaaacccgcguuugguggacgagcaauuccaucguggucuucugcggaaccucuggcacauaugggacuggaucguggcccgacggugccaacauuaauuuuaugccgauauga

SEQ ID NO: 151246 - RNA, 1410 nt, Artificial Sequence
  derived and/or modified CDS sequence (opt3) from neuraminidase__InfluenzaA__AFV53328
augaaccccaaucagaagaucauuaccauaggcagcgugucccugacaaucgccacugucugcuuccucaugcacauugcuauccuugcaacgaccguuacacugcauuuuaaacaacacgagugugacucuccugccucaaaccaggcgaugccaugcgaaccgauuaucauagagagaaauaucacugaaauuguguacuugaacaauaccacaaucgagaaggaaauuugucccgagguaguggaguauaggaacuggaguaaaccucagugccagaucaccggguucgcuccauuuagcaaggauaauuccauacgguuaucugccggaggugacauuugggucacucgcgaacccuacgugucgugugauccuggcaaaugcuaucaauucgcacuggggcagggaacaacccuagacaacaagcauucaaauggcacgauccacgaucgaaucccacaucguacucuccugaugaacgagcuugguguucccuuucaccuggggaccaaacaggugugugucgccuggagcaguuccucuugccacgacggaaaggcuugguugcauguguguauuacaggcgaugacagaaaugcaacugccagcuucaucuacgauggcaggcucguagacuccauugggucauggagucagaacauacugcggacccaagaaagcgagugcguuuguaucaauggaacaugcaccguggucaugacggaugguucugcuuccggccgcgccgacacuaggauucuguuuaucaaggaggggaaaauagugcacauuucaccucucagcggaagugcgcagcauaucgaagagugcucuuguuauccaagauacccggaugugcggugcaucugucgcgacaacuggaagggcuccaaucgacccgucauugacaucaacauggaagauuauagcauugacucgucuuacguuugcuccgguuuagugggggauacaccuagaaacgacgauucaaguagcaauuccaacuguagggacccaaauaacgagcggggaaaucccggcguaaaaggcugggcauucgauaacggggacgauguguggaugggacguaccauaucuaaggaccugcgcagcgguuacgaaacuuuuaaggucaucggcggguggucaacaccuaauaguaaaucccaggugaacagacagguuauuguggauaauaacaauuggagcggauauucuggcaucuucucagucgaggguaagaguugcaucaacagguguuuuuacguggagcuuauucgggggcgaccacaagaaacccgcguaugguggacgagcaauuccauaguuguguucugcggcaccucuggaacauauggcacugggucguggcccgacggagccaacaucaauuuuaugccgauuuga

SEQ ID NO: 151247 - RNA, 1410 nt, Artificial Sequence
  derived and/or modified CDS sequence (opt3) from neuraminidase__InfluenzaA__AFV53339
augaaccccaaucagaagaucauuaccauaggcagcgccucccugacaaucgcuacugugugcuuccucaugcaaauugcaauccuugucacgaccguuacacugcacuuuaaacagcaugagugugacucuccugccucaaaccaggugaugccaugcgaaccgauuaucauagagagaaauaucacugaaauuguauacuugaacaauaccacaaucgagaaggaaauuugucccaaaguggucgaguauaggaacuggaguaagccucagugcaaaaucaccggguucgcgccauuuagcaaggauaauuccauacgguuaucugcuggaggugacauuugggugacucgcgagcccuacguuucgugugauccuggcaagugcuaucaauucgcccuggggcagggaacaacccuagacaacaaacacucaaaugauacgauccaugaccgaaucccacaccguacucuccugaugaacgaacuuggcgugcccuuucaucuggguaccagacaggucuguauugcauggagcaguuccucuugccacgaugggaaggccugguugcacguguguguaacaggagacgauaaaaaugcuacugccagcuucaucuacgacggcaggcucguugauuccauuggcucauggagucagaacauacugcggacccaagagagcgaaugcguguguaucaaugggacaugcaccgucgugaugacggacggaucugcauccggucgcgcugauacuaggauucuguuuaucgaggagggcaagauagugcauaugucaccucucagcgggagugcccagcacgucgaagagugcucuuguuauccaagauacccggacguucggugcauuugucgcgacaacuggaaaggauccaaucgacccgugguagauaucaacauggaagacuauagcaucgauucgucuuacgugugcuccggcuuagucggugacacaccuagaaacgaugacaggucaaguaauagcaacugucggaauccaaacaaugagaaggggaaccagggagugaagggcugggcguucgauaauggcgacgauguuuggauggggcguaccauuuccaaagaccugcgcucuggauacgaaacuuuuaaggugaucgguggcuggagcacacccaacucaaaaagucagauuaauagacaagucauaguggauuccgacaacaggagcggguauucuggaaucuucucaguagagggcaagaguugcauuaaucgguguuuuuacguugagcuuauccgaggucgcaaacaggaaaccagagugugguggacgagcaacuccaucgucguguucugcgggaccucuggcacauauggaacuggcucguggccugacggggcaaauauuaacuugaugccaauauga

SEQ ID NO: 151248 - RNA, 1410 nt, Artificial Sequence; identical to SEQ ID NO: 144786
  derived and/or modified CDS sequence (opt3) from neuraminidase__InfluenzaA__AFX96367

SEQ ID NO: 151249 - RNA, 1410 nt, Artificial Sequence; identical to SEQ ID NO: 144786
  derived and/or modified CDS sequence (opt3) from neuraminidase__InfluenzaA__AFX96386

SEQ ID NO: 151250 - RNA, 1410 nt, Artificial Sequence; identical to SEQ ID NO: 145140
  derived and/or modified CDS sequence (opt3) from neuraminidase__InfluenzaA__AFX96401

SEQ ID NO: 151251 - RNA, 1410 nt, Artificial Sequence; identical to SEQ ID NO: 145140
  derived and/or modified CDS sequence (opt3) from neuraminidase__InfluenzaA__AFX96411

SEQ ID NO: 151252 - RNA, 1410 nt, Artificial Sequence; identical to SEQ ID NO: 145140
  derived and/or modified CDS sequence (opt3) from neuraminidase__InfluenzaA__AFX96421

SEQ ID NO: 151253 - RNA, 1410 nt, Artificial Sequence; identical to SEQ ID NO: 145140
  derived and/or modified CDS sequence (opt3) from neuraminidase__InfluenzaA__AFX96431

SEQ ID NO: 151254 - RNA, 1410 nt, Artificial Sequence; identical to SEQ ID NO: 145140
  derived and/or modified CDS sequence (opt3) from neuraminidase__InfluenzaA__AFX96441

SEQ ID NO: 151255 - RNA, 1410 nt, Artificial Sequence; identical to SEQ ID NO: 145140
  derived and/or modified CDS sequence (opt3) from neuraminidase__InfluenzaA__AFX96451

SEQ ID NO: 151256 - RNA, 1410 nt, Artificial Sequence; identical to SEQ ID NO: 145140
  derived and/or modified CDS sequence (opt3) from neuraminidase__InfluenzaA__AFX96461

SEQ ID NO: 151257 - RNA, 1410 nt, Artificial Sequence; identical to SEQ ID NO: 144786
  derived and/or modified CDS sequence (opt3) from neuraminidase__InfluenzaA__AFX96471

SEQ ID NO: 151258 - RNA, 1410 nt, Artificial Sequence; identical to SEQ ID NO: 144786
  derived and/or modified CDS sequence (opt3) from neuraminidase__InfluenzaA__AFX96481

SEQ ID NO: 151259 - RNA, 1410 nt, Artificial Sequence; identical to SEQ ID NO: 144786
  derived and/or modified CDS sequence (opt3) from neuraminidase__InfluenzaA__AFX96491

SEQ ID NO: 151260 - RNA, 1410 nt, Artificial Sequence; identical to SEQ ID NO: 144786
  derived and/or modified CDS sequence (opt3) from neuraminidase__InfluenzaA__AFX96501

SEQ ID NO: 151261 - RNA, 1410 nt, Artificial Sequence; identical to SEQ ID NO: 144786
  derived and/or modified CDS sequence (opt3) from neuraminidase__InfluenzaA__AFX96511

SEQ ID NO: 151262 - RNA, 1410 nt, Artificial Sequence
  derived and/or modified CDS sequence (opt3) from neuraminidase__InfluenzaA__AFX96521
augaaccccaaucagaagaucauuaccauaggcagcgugugcaugacaaucgggauggccaaccugauucuccaaaucggaaauauuaucuccauauggaucucucacucaauucagcuugguaaccagaaucagaucgagacuuguaaccaaagugucauuacguacgaaaauaacaccuggguuaaucagacauaugugaacaucagcaauacuaacuucgcugcaagacaguccguagugucugucaaacuggccggcaauucgucauugugcccugugagcgggugggcgauauacaguaaggacaacuccauuaggaucggaucuaaaggcgauguuuuugugauucgggagccauucaucagcuguuccccguuagaaugccgcaccuuuuuccugacacagggugcucuacucaaugacaagcauucaaacgggaccaucaaagaucgaagucccuaucguacucugaugagcuguccuauuggagaggucccaucucccuacaacuccagauuugaaucaguggccuggagcgcaagugccugccacgacggcauaaauuggcuuacaaucggcauuucugggccugauaacggagcuguagcaguucugaaguauaaugguaucauaaccgacacgauuaaguccuggaggaacaauaucuugcggacucaagagagcgagugugccugcgugaacggcucguguuucaccgucaugacagaugggccaucugacggacaggcuuccuacaaaaucuuucgcauugaaaagggcaaaaucgugaagucaguggagaugaaugcccccaacuaucauuacgaagagugcaguuguuacccugauagcuccgagauuacuugcgucugcagagacaauuggcacgguucuaacaggccauggguuagcuucaaucagaaccucgaauaucagauaggguacaucuguucaggaauuuuuggcgauaauccgcggcccaacgacaaaaccggcaguugcgggccuguguccagcaauggagcgaacgguguaaagggcuucucuuuuaaguaugggaacggaguguggaucggccgcacaaaaucaaucaguagccgaaaugguuucgagaugauuugggauccaaacggguggaccggcacggacaauaacuuuuccauaaagcaagacaucgucggaauuaaugaauggucuggcuacucggggagcuucgugcagcaucccgagcugacuggacuggauuguaucagaccuugcuucuggguugaacucauuaggggucggccaaaagagaacacaaucuggaccuccggcucaaguauaucuuuuuguggggugaauagcgacacugucggaugguccuggcccgauggcgcagaguuaccguucacaaucgacaaguga

SEQ ID NO: 151263 - RNA, 1410 nt, Artificial Sequence; identical to SEQ ID NO: 144786
  derived and/or modified CDS sequence (opt3) from neuraminidase__InfluenzaA__AFX96531

SEQ ID NO: 151264 - RNA, 1410 nt, Artificial Sequence; identical to SEQ ID NO: 144786
  derived and/or modified CDS sequence (opt3) from neuraminidase__InfluenzaA__AFX96541

SEQ ID NO: 151265 - RNA, 1410 nt, Artificial Sequence; identical to SEQ ID NO: 144786
  derived and/or modified CDS sequence (opt3) from neuraminidase__InfluenzaA__AFX96551

SEQ ID NO: 151266 - RNA, 1410 nt, Artificial Sequence; identical to SEQ ID NO: 149310
  derived and/or modified CDS sequence (opt3) from neuraminidase__InfluenzaA__AFX96561

SEQ ID NO: 151267 - RNA, 1410 nt, Artificial Sequence; identical to SEQ ID NO: 144786
  derived and/or modified CDS sequence (opt3) from neuraminidase__InfluenzaA__AFX96571

SEQ ID NO: 151268 - RNA, 1410 nt, Artificial Sequence; identical to SEQ ID NO: 144786
  derived and/or modified CDS sequence (opt3) from neuraminidase__InfluenzaA__AFX96581

SEQ ID NO: 151269 - RNA, 1410 nt, Artificial Sequence; identical to SEQ ID NO: 144786
  derived and/or modified CDS sequence (opt3) from neuraminidase__InfluenzaA__AFX96591

SEQ ID NO: 151270 - RNA, 1410 nt, Artificial Sequence; identical to SEQ ID NO: 144786
  derived and/or modified CDS sequence (opt3) from neuraminidase__InfluenzaA__AFX96601

SEQ ID NO: 151271 - RNA, 1410 nt, Artificial Sequence; identical to SEQ ID NO: 144786
  derived and/or modified CDS sequence (opt3) from neuraminidase__InfluenzaA__AFX96611

SEQ ID NO: 151272 - RNA, 1410 nt, Artificial Sequence; identical to SEQ ID NO: 144786
  derived and/or modified CDS sequence (opt3) from neuraminidase__InfluenzaA__AFX96621

SEQ ID NO: 151273 - RNA, 1410 nt, Artificial Sequence; identical to SEQ ID NO: 144786
  derived and/or modified CDS sequence (opt3) from neuraminidase__InfluenzaA__AFX96631

SEQ ID NO: 151274 - RNA, 1410 nt, Artificial Sequence
  derived and/or modified CDS sequence (opt3) from neuraminidase__InfluenzaA__AFX96641
augaaccccaaucagaagaucauuaccauaggcagcgugugcaugacaaucgggauggccaaccugauucuccaaaucggaaauauuaucuccauauggaucucucacucaauucagcuugguaaccagaaucagaucgagacuuguaaccaaagugucauuacguacgaaaauaacaccuggguuaaucagacauaugugaacaucagcaauacuaacuucgcugcaggccaguccguagugucugucaaacuggccggaaauucgucauugugcccugugagcggaugggcgauauacaguaaggacaacuccauuagaaucggcucuaaaggugauguuuuugugauuagggagccauucaucagcuguuccccguuagaaugccggaccuuuuuccugacacagggggcucuacucaaugacaagcauucaaacggaaccaucaaagaucgcagucccuaucgaacucugaugagcuguccuauuggcgaggucccaucucccuacaacuccaaguuugaaucaguggccuggagcgcaagugccugccacgacggcauaaauuggcuuacaaucgggauuucuggaccugauaacggugcuguagcaguucugaaguauaauggcaucauaaccgacacgauuaaauccuggcguaacaauaucuugagaacucaagagagcgagugugccugcgugaacgggucguguuucaccgucaugacagauggaccaucugacggccaggcuuccuacaagaucuuuaggauugaaaaagguaagaucgugaaaucaguggagaugaaugcccccaacuaucauuacgaagagugcaguuguuacccugauagcuccgagauuacuugcgucugccgggacaauuggcacgggucuaaccgcccauggguuagcuucaaucagaaccucgaauaucagauaggauacaucuguucaggcauuuuuggcgauaauccgagacccaacgacaagaccgggaguugcggaccuguguccagcaauggugcgaacggcguaaagggguucucuuuuaaauauggaaacggcguguggaucgguaggacaaagucaaucaguagccggaauggguucgagaugauuugggauccaaacggcuggaccggaacggacaauaacuuuuccauaaaacaagacaucgucggcauuaaugaauggucuggguacucggggagcuucgugcagcaucccgagcugacuggucuggauuguauccgcccuugcuucuggguugaacucauucgaggcagaccaaaggagaacacaaucuggaccuccgggucaaguauaucuuuuuguggagugaauagcgacacugucggcugguccuggcccgauggugcagaguuaccguucacaaucgacaaauga

SEQ ID NO: 151275 - RNA, 1410 nt, Artificial Sequence; identical to SEQ ID NO: 144786
  derived and/or modified CDS sequence (opt3) from neuraminidase__InfluenzaA__AFX96651

SEQ ID NO: 151276 - RNA, 1410 nt, Artificial Sequence; identical to SEQ ID NO: 144786
  derived and/or modified CDS sequence (opt3) from neuraminidase__InfluenzaA__AFX96661

SEQ ID NO: 151277 - RNA, 1410 nt, Artificial Sequence; identical to SEQ ID NO: 144786
  derived and/or modified CDS sequence (opt3) from neuraminidase__InfluenzaA__AFX96671

SEQ ID NO: 151278 - RNA, 1410 nt, Artificial Sequence; identical to SEQ ID NO: 144786
  derived and/or modified CDS sequence (opt3) from neuraminidase__InfluenzaA__AFX96681

SEQ ID NO: 151279 - RNA, 1410 nt, Artificial Sequence; identical to SEQ ID NO: 144786
  derived and/or modified CDS sequence (opt3) from neuraminidase__InfluenzaA__AFX96691

SEQ ID NO: 151280 - RNA, 1410 nt, Artificial Sequence
  derived and/or modified CDS sequence (opt3) from neuraminidase__InfluenzaA__AFX96701
augaaccccaaucagaagaucauuaccauaggcagcgugugcaugacaaucgggauggccaaccugauucuccaaaucggaaauauuaucuccauauggaucucucacucaauucagcuugguaaccagaaucagaucgagacuuguaaccaaaguauuaucacguacgaaaauaacaccugggucaaucagacauauguuaacauaagcaauacuaacuucgcugcaggccaguccgugguaucugugaaacuggccggaaauucgucauugugcccugucagcgggugggcgauuuacaguaaggacaacuccaucagaauuggcucuaaaggugauguguuuguuaucagggagccauucaucagcuguuccccguuagaaugccggaccuuuuuccugacacagggggcucuacucaaugacaagcauucaaacggaaccauuaaagaucgcagucccuaucgaacucugaugagcuguccuauaggcgaggugccaucucccuacaacucccguuuugaaucagucgccuggagcgcaagugccugccacgacggcaucaauuggcuuacaauugggaucucuggaccugauaacggugcuguggcaguacugaaguauaauggcauaauuaccgacacgaucaaguccuggagaaacaauaucuugaggacucaagagagcgagugugccugcguuaacgggucguguuucaccgugaugacagauggaccaucugacggccaggcuuccuacaaaauuuuucggaucgaaaaggguaaaauugucaagucaguggagaugaaugcccccaacuaucauuacgaagagugcaguuguuacccugauagcuccgagauaacuugcgugugccgcgacaauuggcacgggucuaacagaccaugggucagcuucaaucagaaccucgaauaucagaucggauacauuuguucaggcaucuuuggcgauaauccgaggcccaacgacaaaaccgggaguugcggaccuguuuccuucaauggugcgaacggcgugaagggguuuagcuucaaguauggaaacggcguauggaucggucggacaaaaucuauuucaagucgcaauggguuugagaugauaugggauccaaacggcuggaccggaacggacaauaacuucagcaucaagcaagacauugugggcaucaaugaaugguccggguacucuggaucguucguccagcaucccgagcugacuggucuggauuguauucgaccuugcuuuuggguggaacucaucagaggcaggccaaaagagaacacaauauggaccagcggguccaucauuucauucuguggaguuaauagugacacugugggcuggucuuggcccgauggugcagaguuaccguuuacaaucgacaaguga

SEQ ID NO: 151281 - RNA, 1410 nt, Artificial Sequence; identical to SEQ ID NO: 144786
  derived and/or modified CDS sequence (opt3) from neuraminidase__InfluenzaA__AFX96711

SEQ ID NO: 151282 - RNA, 1410 nt, Artificial Sequence
  derived and/or modified CDS sequence (opt3) from neuraminidase__InfluenzaA__AFX96721
augaaccccaaucagaagaucauuaccauaggcagcgugugcaugacaaucgggauggccaaccugauucuccaaaucggaaauauuaucuccauauggaucucucacucaauucagcuugguaaccagaaucagaucgagacuuguaaccaaagugucauuacguacgaaaauaacaccuggguuaaucagacauaugugaacaucagcaauacuaacuucgcugcaggccaguccguagugucugucaaacuggccggaaauucgucauugugcccugugagcggaugggcgauauacaguaaggacaacuccauuagaaucggcucuaaaggugauguuuuugugauuagggagccauucaucagcuguuccccguuagaaugccggaccuuuuuccugacacagggggcucuacucaaugacaagcauucaaacggaaccaucaaagaucgcagucccuaucgaacucugaugagcuguccuauuggcgaggucccaucucccuacaacucccguuuugaaucaguggccuggagcgcaagugccugccacgacggcauaaauuggcuuacaaucgggauuucuggaccugauaacggugcuguagcaguucugaaguauaauggcaucauaaccgacacgauuaaguccuggagaaacaauaucuugaggacucaagagagcgagugugccugcgugaacgggucguguuucaccgucaugacagauggaccaucugacggccaggcuuccuacaaaaucuuucggauugaaaaggguaaaaucgugaagucaguggagaugaaugcccccaacuaucauuacgaagagugcaguuguuacccugauagcuccgagauuacuugcgucugccgcgacaauuggcacgggucuaacagaccauggguuagcuucaaucagaaccucgaauaucagauaggauacaucuguucaggcauuuuuggcgauaauccgaggcccaacgacaaaaccgggaguugcggaccuguguccagcaauggugcgaacggcguaaagggguucucuuuuaaguauggaaacggcguguggaucggucggacaaaaucaaucaguagccgcaauggguucgagaugauuugggauccaaacggcuggaccggaacggacaauaacuuuuccauaaagcaagacaucgucggcauuaaugaauggucuggguacucggggagcuucgugcagcaucccgagcugacuggucuggauuguauccgaccuugcuucuggguugaacucauuagaggcaggccaaaagagaacacaguguggaccuccgggucaaguaucucuuuuuguggagucaauagcgacacugugggcugguccuggcccgauggugcagaguuaccguucacaauagacaaguga

SEQ ID NO: 151283 - RNA, 1410 nt, Artificial Sequence; identical to SEQ ID NO: 151282
  derived and/or modified CDS sequence (opt3) from neuraminidase__InfluenzaA__AFX96731

SEQ ID NO: 151284 - RNA, 1410 nt, Artificial Sequence; identical to SEQ ID NO: 144786
  derived and/or modified CDS sequence (opt3) from neuraminidase__InfluenzaA__AFX96741

SEQ ID NO: 151285 - RNA, 1410 nt, Artificial Sequence; identical to SEQ ID NO: 144786
  derived and/or modified CDS sequence (opt3) from neuraminidase__InfluenzaA__AFX96751

SEQ ID NO: 151286 - RNA, 1410 nt, Artificial Sequence; identical to SEQ ID NO: 145804
  derived and/or modified CDS sequence (opt3) from neuraminidase__InfluenzaA__AFX96761

SEQ ID NO: 151287 - RNA, 1410 nt, Artificial Sequence; identical to SEQ ID NO: 144786
  derived and/or modified CDS sequence (opt3) from neuraminidase__InfluenzaA__AFX96771

SEQ ID NO: 151288 - RNA, 1410 nt, Artificial Sequence
  derived and/or modified CDS sequence (opt3) from neuraminidase__InfluenzaA__AFX96791
augaaccccaaucagaagaucauuaccauaggcagcgugugcaugacaaucgggauggccaaccugauucuccaagucggaaauaucauuuccaucuggauaucucacucaauccagcuugguaaccagaaucagauugagacuuguaaccaaaguguuaucacguacgaaaauaacaccugggugaaucagacauauguaaacauuagcaauacuaacuucgcugcaggccaguccguggucucugugaaacuggccggaaauucgucauugugcccuguuagcggaugggcgaucuacaguaaggacaacuccauaagaauuggcucuaaaggugauguguuugucaucagggagccauucauuagcuguuccccguuagaaugccggaccuuuuuccugacacagggggcucuacucaaugacaagcauucaaacggaaccaucaaagaucgcagucccuaucgaacucugaugagcuguccuaucggcgaggugccaucucccuacaacucccguuuugaaucaguagccuggagcgcaagugccugccacgacggcauuaauuggcuuacaauagggaucucuggaccugauaacggugcuguugcagugcugaaguauaauggcauuaucaccgacacgauaaaguccuggagaaacaauauuuugaggacucaagagagcgagugugccugcaucaacgggucguguuucaccgucaugacagauggaccaucugacggccaggcuuccuacaaaaucuuucggauugaaaaggguaaaaucgugaagucaguggagaugaaugcccccaacuaucauuacgaagagugcaguuguuacccugauagcuccgagauuacuugcgucugccgcgacaauuggcacgggucuaacagaccauggguuagcuucaaucagaaccucgaauaucagauaggauacaucuguucaggcauuuuuggcgauaauccgaggcccaacgacaaaaccgggaguugcggaccuguguccagcaauggugcgaacggcguaaagggguucucuuuuaaguauggaaacggcguguggaucggucggacaaaaucaaucaguagccgcaauggguucgagaugauuugggauccaaacggcuggaccggaacggacaauaacuuuuccauaaagcaagacaucgucggcauuaaugaauggucuggguacucggggagcuucgugcagcaucccgagcugacuggucuggauuguauccgaccuugcuucuggguugaacucauuagaggcaggccaaaagagaacacaaucuggaccuccgggucaaguauaucuuuuuguggagugaauagcgacacugucggcugguccuggcccgauggugcagaguuaccguucacaaucgacaaguga

SEQ ID NO: 151289 - RNA, 1410 nt, Artificial Sequence; identical to SEQ ID NO: 151288
  derived and/or modified CDS sequence (opt3) from neuraminidase__InfluenzaA__AFX96801

SEQ ID NO: 151290 - RNA, 1410 nt, Artificial Sequence
  derived and/or modified CDS sequence (opt3) from neuraminidase__InfluenzaA__AFX96811
augaaccccaaucagaagaucauuaccauaggcagcgugugcaugacaaucgggauggccaaccugauucuccaaaucggaaauauuaucuccauauggaucucucacucaauucagcuugguaaccagaaucagaucgagacuuguaaccaaagugucauuacguacgaaaauaacaccuggguuaaucagacauaugugaacaucagcaauacuaacuucgcugcaggccaguccguagugucugucagacuggccggaaauucgucauugugcccugugagcggaugggcgauauacaguaaagacaacuccauuaggaucggcucuaagggugauguuuuugugauucgggagccauucaucagcuguuccccguuagaaugccgcaccuuuuuccugacacagggggcucuacucaaugacaaacauucaaacggaaccaucaaggaucgaagucccuaucguacucugaugagcuguccuauuggcgaggucccaucucccuacaacuccagauuugaaucaguggccuggagcgcaagugccugccacgacggcauaaauuggcuuacaaucgggauuucuggaccugauaacggugcuguagcaguucugaaauauaauggcaucauaaccgacacgauuaaguccuggaggaacaauaucuugcggacucaagagagcgagugugccugcgugaacgggucguguuucaccgucaugacagauggaccaucugacggccaggcuuccuacaagaucuuucgcauugaaaaagguaagaucgugaaaucaguggagaugaaugcccccaacuaucauuacgaagagugcaguuguuacccugauagcuccgagauuacuugcgucugcagagacaauuggcacgggucuaacaggccauggguuagcuucaaucagaaccucgaauaucagauaggauacaucuguucaggcauuuuuggcgauaauccgcggcccaacgacaagaccgggaguugcggaccuguguccagcaauggugcgaacggcguaaaaggguucucuuuuaaguauggaaacggcguguggaucggucgcacaaagucaaucaguagccgaaauggguucgagaugauuugggauccaaacggcuggaccggaacggacaauaacuuuuccauaaaacaagacaucgucggcauuaaugaauggucuggguacucggggagcuucgugcagcaucccgagcugacuggucuggauuguaucagaccuugcuucuggguugaacucauuaggggccggccaaaggagaacacaaucuggaccuccgggucaaguauaucuuuuuguggagugaauagcgacacugucggcugguccuggcccgauggugcagaguuaccguucacaaucgacaaauga

SEQ ID NO: 151291 - RNA, 1410 nt, Artificial Sequence; identical to SEQ ID NO: 144786
  derived and/or modified CDS sequence (opt3) from neuraminidase__InfluenzaA__AFX96821

SEQ ID NO: 151292 - RNA, 1410 nt, Artificial Sequence; identical to SEQ ID NO: 151288
  derived and/or modified CDS sequence (opt3) from neuraminidase__InfluenzaA__AFX96831

SEQ ID NO: 151293 - RNA, 1410 nt, Artificial Sequence
  derived and/or modified CDS sequence (opt3) from neuraminidase__InfluenzaA__AFX96841
augaaccccaaucagaagaucauuaccauaggcagcgugugcaugacaaucgggauggccaaccugauucuccaaaucggaaauauuaucuccauauggaucucucacucaauucagcuugguaaccagaaucagaucgagacuuguaaccaaagugucauuacguacgaaaauaacaccuggguuaaucagacauaugugaacaucagcaauacuaacuucgcugcaggccaguccguagugucugucagacuggccggaaauucgucauugugcccugugagcggaugggcgauauacaguaaagacaacuccauuaggaucggcucuaagggugauguuuuugugauucgggagccauucaucagcuguuccccguuagaaugccgcaccuuuuuccugacacagggggcucuacucaaugacaaacauucaaacggaaccaucaaggaucgaagucccuaucguacucugaugagcuguccuauuggcgaggucccaucucccuacaacuccagauuugaaucaguggccuggagcgcaagugccugccacgacggcauaaauuggcuuacaaucgggauuucuggaccugauaacggugcuguagcaguucugaaauauaauggcaucauaaccgacacgauuaaguccuggaggaacaauaucuugcggacucaagagagcgagugugccugcgugaacgggucguguuucaccgucaugacagauggaccaucugacggccaggcuuccuacaagaucuuucgcauugaaaaagguaagaucgugaaaucaguggagaugaaugcccccaacuauuacuacgaagagugcaguuguuauccugauagcuccgagauuacuugcgucugcagagacaauuggcaugggucuaacaggccauggguuagcuucaaucagaaccucgaauaccagauaggauauaucuguucaggcauuuuuggcgauaauccgcggcccaacgacaagaccgggaguugcggaccuguguccagcaauggugcgaacggcguaaaaggguucucuuuuaaguacggaaacggcguguggaucggucgcacaaagucaaucaguagccgaaauggguucgagaugauuugggauccaaacggcuggaccggaacggacaauaacuuuuccauaaaacaagacaucgucggcauuaaugaauggucuggguauucggggagcuucgugcagcaccccgagcugacuggucuggauuguaucagaccuugcuucuggguugaacucauuaggggccggccaaaggagaacacaaucuggaccuccgggucaaguauaucuuuuuguggagugaauagcgacacugucggcugguccuggcccgauggugcagaguuaccguucacaaucgacaaauga

SEQ ID NO: 151294 - RNA, 1410 nt, Artificial Sequence; identical to SEQ ID NO: 144786
  derived and/or modified CDS sequence (opt3) from neuraminidase__InfluenzaA__AFX96859

SEQ ID NO: 151295 - RNA, 1410 nt, Artificial Sequence; identical to SEQ ID NO: 144786
  derived and/or modified CDS sequence (opt3) from neuraminidase__InfluenzaA__AFX96907

SEQ ID NO: 151296 - RNA, 1410 nt, Artificial Sequence; identical to SEQ ID NO: 144786
  derived and/or modified CDS sequence (opt3) from neuraminidase__InfluenzaA__AFX96917

SEQ ID NO: 151297 - RNA, 1410 nt, Artificial Sequence; identical to SEQ ID NO: 144786
  derived and/or modified CDS sequence (opt3) from neuraminidase__InfluenzaA__AFX96927

SEQ ID NO: 151298 - RNA, 1410 nt, Artificial Sequence
  derived and/or modified CDS sequence (opt3) from neuraminidase__InfluenzaA__AFX96937
augaaccccaaucagaagaucauuaccauaggcagcgugugcaugacaaucgggauggccaaccugauucuccaaaucggaaauauuaucuccauauggaucucucacucaauucagcuugguaaccagaaucagaucgagacuuguaaccaaagugucauuacguacgaaaauaacaccuggguuaaucagacauaugugaacaucagcuccacuaauuucgcugcaggccagucuguagugucggucaaacuggccgggaacagcagcuugugcccugugaguggaugggcgauauacuccaaggacaauucuauuagaaucggcagcaaaggugauguuuuugugauuagggagccauucaucuccuguucaccguuagaaugccggaccuuuuuccugacacagggggcucuacucaacgacaagcauaguaauggaaccaucaaagaucgcagccccuaucgaacucugaugucuuguccuauuggcgaggucccaucccccuacaacucacguuuugaaagcguggccuggagugcaucugccugccacgacggcauaaacuggcuuacaaucgggauuuccggaccugauaauggugcuguagcaguucugaaguauaacggcaucauaaccgacacgauuaagagcuggagaaauaacaucuugaggacucaagagucggagugugccugcgugaaugggucuuguuucaccgucaugacagauggaccauccgacggccaggcuucauacaaaaucuuucggauugaaaaggguaaaaucgugaagaguguggagaugaacgcccccaauuaucauuacgaagagugcagcuguuacccugauuccucugagauuacuugcgucugccgcgacaacuggcacgggagcaauagaccauggguuucauucaaccagaaucucgaauaucagauaggauacaucuguaguggcauuuuuggcgauaacccgaggcccaaugacaaaaccggguccugcggaccugugagcucuaacggugcgaauggcguaaagggguucucauuuaaguauggaaacggcguguggaucggucggacaaaaaguaucagcucccgcaacggguucgagaugauuugggauccaaauggcuggaccggaacggacaacaauuuuucuauaaagcaagacaucgucggcauuaacgaauggucgggguacagcggauccuucgugcagcaucccgagcugacuggucuggauuguauccgaccuugcuucuggguugaacucauuagaggcaggccaaaagagaauacaaucuggaccucagggaguucuauaucauuuuguggagugaacuccgacacugucggcuggucauggcccgauggugcagaguuaccguucacaaucgacaaguga

SEQ ID NO: 151299 - RNA, 1410 nt, Artificial Sequence; identical to SEQ ID NO: 144776
  derived and/or modified CDS sequence (opt3) from neuraminidase__InfluenzaA__AFY23991

SEQ ID NO: 151300 - RNA, 1410 nt, Artificial Sequence; identical to SEQ ID NO: 144786
  derived and/or modified CDS sequence (opt3) from neuraminidase__InfluenzaA__AFY24001

SEQ ID NO: 151301 - RNA, 1410 nt, Artificial Sequence; identical to SEQ ID NO: 144786
  derived and/or modified CDS sequence (opt3) from neuraminidase__InfluenzaA__AFY24022

SEQ ID NO: 151302 - RNA, 1410 nt, Artificial Sequence; identical to SEQ ID NO: 144786
  derived and/or modified CDS sequence (opt3) from neuraminidase__InfluenzaA__AFY24043

SEQ ID NO: 151303 - RNA, 1410 nt, Artificial Sequence
  derived and/or modified CDS sequence (opt3) from neuraminidase__InfluenzaA__AFY24153
augaaccccaaucagaagaucauuaccauaggcagcgugucccugacaaucucuacuauuugcuucuuuaugcaaaucgccauucucaucacgaccgucacacuucacuucaaacaguacgaguuuaacucaccuccaaauaaccagguuaugcugugugaaccgacuauaaucgagagaaauauuaccgaaaucguguauuugacaaacaccacuauugagaaggaaaucugccccaaauuagcugaguacaggaauuggaguaagccucaguguaacauaacaggguucgcaccauuuagcaaagacaauuccauucggcugucugccggaggugauaucuggguaacccgcgagcccuaugugucgugcgacccugauaaguguuaccaauucgcgcuaggccaggggacgacucucaacaauguccauucaaacgacaccgugcacgaucgaacaccauaucguacucugcuuaugaaugaacugggaguucccuuucauuugggcaccaaacaggugugcauugcuuggagcaguuccucuugucacgacgguaaggccuggcuccaugucugcgugacaggggaugacaagaacgcaaccgccagcuucaucuacaauggaagacugguagauuccaucguuucauggaguaaagagauucugaggacgcaggaaagcgagugugugugcauaaacggcacuuguacagucgugaugaccgacggcucugcuuccgggaaggcagauacuaaaauccucuuuauugaggaaggaaagaucgugcacacaucaaccuuaagcgguagugcccaacacgucgaggaaugcucuugcuauccucgguacccaggcguucgcugugugugcagagacaacuggaagggguccaauaggccgauaguagauauuaacaucacggacuacagcaucgugucgucuuaugucuguuccggacuggugggcgacacaccccggaaaaaugauucaaguagcuccucucauugccuugacccuaacaaugaggaaggugggcacggaguuaagggcugggcuuucgaugacggcaacgauguguggauggggcgcaccauuagcgagaaauugcgaucaggauacgagacuuuuaaggucaucgaagguuggaguaauccaaacuccaaacugcagauuaauagacaggugauaguagacaggggcaaccggagcggguauucuggaaucuucucaguugagggcaagaguuguauuaaucguugcuuuuacguggaacuaauccgcgguagaaaagaggaaaccgagguccucuggacaagcaacuccaucguggucuucugugggacuucuggcaccuauggaacaggcucguggcccgauggggccgacauuaaucugaugccuauauga

SEQ ID NO: 151304 - RNA, 1410 nt, Artificial Sequence
  derived and/or modified CDS sequence (opt3) from neuraminidase__InfluenzaA__AFY24208
augaaccccaaucagaagaucauuaccauaggcagcgugucccugacaaucucuacuauuugcuucuuuaugcagaucgccauucucaucacgaccgucacacuucacuucaaacaguacgaguuuaacucaccuccaaauaaccagguuaugcugugugaaccgacuauaaucgagagaaauauuaccgaaaucguguauuugacaaacaccacuauugagaaggaaaucugccccaaauuagcugaguacaggaauuggaguaagccucaguguaacauaacaggguucgcaccauuuagcaaagacaauuccauucggcugucugccggaggugauaucuggguaacccgcgagcccuaugugucgugcgacccugauaaguguuaccaauucgcgcuaggccaggggacgacucucaacaauguccauucaaacgacaccgugcacaaucgaacaccauaucguacucugcuuaugaacgaacugggaguucccuuucauuugggcaccaaacaggugugcauugcuuggagcaguuccucuugucacgaugguaaggccuggcuccaugucugcgugacaggggacgaugagaaugcaaccgccagcuucaucuacaacggaagacugguagacuccaucguuucauggaguaagaaaauucugaggacgcaggaaagcgagugugugugcauaaacggcacuuguacagucgugaugaccgauggcucugcuuccgggaaggcagacacuaaaauccucuuuauugaggaaggaaagaucgugcacacaucaaccuuaagcgguagugcccaacacgucgaggaaugcucuugcuauccucgguacccaggcguucgcugugugugcagagauaauuggaagggguccaacaggccgauaguagacauuaauaucaaagauuacagcaucgugucgucuuaugucuguuccggacuggugggcgacacgccccggaagaacgacucaaguagcuccucucauugccuugauccuaauaacgaggaaggugggcacggaguuaaaggcugggcuuucgacgauggcaaugacguguggauggggcgcaccauuagcgagcgauugagaucaggauacgagacauuuaaggucaucgaagguuggaguaacccaaauuccaaacugcagauuaacaggcaagugauaguagaucggggcaaucguagcggguauucuggaaucuucucaguugagggcaagaguuguauuaaccgcugcuuuuacguggaacuaaucagagguaggaaacaggagacugaaguccucuggaccagcaauuccaucguggucuucugugggacaucuggcacuuauggaaccggcucguggcccgacggggccgauauuaaccugaugccuauauga

SEQ ID NO: 151305 - RNA, 1410 nt, Artificial Sequence; identical to SEQ ID NO: 143977
  derived and/or modified CDS sequence (opt3) from neuraminidase__InfluenzaA__AFY24219

SEQ ID NO: 151306 - RNA, 1410 nt, Artificial Sequence
  derived and/or modified CDS sequence (opt3) from neuraminidase__InfluenzaA__AGB12978
augaaccccaaucagagaaucauuaccauaggcagcgugugcaugacaaucgggauggccaaccugauucuccaaaucggaaauauuaucuccauauggaucucucacucaauucagcuugguaaccagaaucagaucgagacuuguaaccaaagugucauuacguacgaaaauaacaccuggguuaaucagacauaugugaacaucagcaauacuaacuucgcugcaaggcaguccguagugucugucaagcuggccggcaauucgucauugugcccugugagcgggugggcgauauacaguaaagacaacuccauucggaucggaucuaagggcgauguuuuugugauucgcgagccauucaucagcuguuccccguuagaaugccgaaccuuuuuccugacacagggugcucuacucaaugacaaacauucaaacgggaccaucaaggaucguagucccuauagaacucugaugagcuguccuauuggagaggucccaucucccuacaacuccagguuugaaucaguggccuggagcgcaagugccugccacgacggcauaaauuggcuuacaaucggcauuucugggccugauaacggagcuguagcaguucugaaauauaaugguaucauaaccgacacgauuaaguccuggcggaacaauaucuugcgcacucaagagagcgagugugccugcgugaacggcucguguuucaccaucaugacagaugggccaucugacggacaggcuuccuacaagauuuuuagaaucgaaaaaggcaagauugucaaaucaguggagaugaaugcccccaacuaucauuacgaagagugcaguuguuacccugauagcuccgagauaacuugcgugugcagggacaauuggcacgguucuaaccggccaugggucagcuucaaucagaaccucgaauaucagaucggguacauuuguucaggaaucuuuggcgauaauccgcgccccaacgacaagaccggcaguugcgggccuguuuccagcaauggagcgaacggugugaaaggcuucucuuuuaaguaugggaacggaguauggaucggccgaacaaagucaauuaguagcagaaaagguuucgagaugauaugggauccaaauggguggaccggcacggacaacaauuuuuccaucaagcaagacauugugggaaucaacgaauggucuggcuacucggggagcuucguccagcaucccgagcugacuggacuggauuguauuaggccuugcuucuggguggaacucauccggggucguccaaaagagaauacaauauggaccuccggcucaaguaucucuuuuugugggguuaacagcgacacugugggaugguccuggcccgauggcgcagaguuaccguucacaauugacaaguga

SEQ ID NO: 151307 - RNA, 1410 nt, Artificial Sequence; identical to SEQ ID NO: 148305
  derived and/or modified CDS sequence (opt3) from neuraminidase__InfluenzaA__AGB12989

SEQ ID NO: 151308 - RNA, 1410 nt, Artificial Sequence; identical to SEQ ID NO: 148757
  derived and/or modified CDS sequence (opt3) from neuraminidase__InfluenzaA__AGB13009

SEQ ID NO: 151309 - RNA, 1410 nt, Artificial Sequence; identical to SEQ ID NO: 148757
  derived and/or modified CDS sequence (opt3) from neuraminidase__InfluenzaA__AGB13019

SEQ ID NO: 151310 - RNA, 1410 nt, Artificial Sequence; identical to SEQ ID NO: 148757
  derived and/or modified CDS sequence (opt3) from neuraminidase__InfluenzaA__AGB13029

SEQ ID NO: 151311 - RNA, 1410 nt, Artificial Sequence; identical to SEQ ID NO: 149006
  derived and/or modified CDS sequence (opt3) from neuraminidase__InfluenzaA__AGB13039

SEQ ID NO: 151312 - RNA, 1410 nt, Artificial Sequence; identical to SEQ ID NO: 148757
  derived and/or modified CDS sequence (opt3) from neuraminidase__InfluenzaA__AGB13051

SEQ ID NO: 151313 - RNA, 1410 nt, Artificial Sequence
  derived and/or modified CDS sequence (opt3) from neuraminidase__InfluenzaA__AGB13069
augaaccccaaucagaagaucauuaccauaggcagcaucugcaugacaauugggauggccaaccugauccuccaaauuggaaauaucauauccaucuggauuucucacucaauccagcuugguaaccagaaucagauugagacuuguaaccaaagugugaucacguacgaaaauaacaccugggucaaucagacauauguuaacauaagcaauacuaacuucgcugcaggccaguccgugguaucugugaaacuggccggaaauucgucauugugcccugucagcggaugggcgauuuacaguaaggacaacuccaucagaauuggcucuaaaggugauguguuuguuaucagggagccauucaucagcuguuccccguuagaaugccggaccuuuuuccugacacagggggcucuacucaaugacaagcauucaaacggaaccauuaaagaucgcagucccuaucgaacucugaugagcuguccuauaggcgaggugccaucucccuacaacucccguuuugaaucagucgccuggagcgcaagugccugccacgacggcaucaauuggcuuacaauugggaucucuggaccugauaacggugcuguggcaguacugaaguauaauggcauaauuaccgacacgaucaaguccuggagaaacaauaucuugaggacucaagagagcgagugugccugcguuaacgggucguguuucaccgugaugacagauggaccaucugacggccaggcuuccuacaaaauuuuucggaucgaaaaggguaaaauugucaagucaguggagaugaaugcccccaacuaucauuacgaagagugcaguuguuacccugauagcuccgagauaacuugcgugugccgcgacaauuggcacgggucuaacagaccauggaucagcuucaaucagaaccucgaauaucagauuggauacaucuguucaggcaucuuuggcgauaauccgaggcccaacgacaaaaccgggaguugcggaccugucuccagcaauggugcgaacggcguuaagggguucucuuuuaaguauggaaacggcguguggauuggucggacaaaaucaauaaguagccgcaauggguucgagaugaucugggauccaaacggcuggaccggaacggacaauaacuuuuccauuaagcaagacaucguaggcauuaaugaauggucuggguacucggggagcuucgugcagcaucccgagcugacuggucuggauuguauccgaccuugcuucugggucgaacucauaagaggcaggccaaaagagaacacaaucuggaccuccgggucaaguauuucuuuuuguggagugaauagcgacacuguuggcugguccuggcccgauggugcagaguuaccguucacaaucgacaaguga

SEQ ID NO: 151314 - RNA, 1410 nt, Artificial Sequence
  derived and/or modified CDS sequence (opt3) from neuraminidase__InfluenzaA__AGB13074
augaaccccaaucagaagaucauuaccauaggcagcgugugcaugacaaucgggauggccaaccugauucuccaaaucggaaauauuaucuccauauggaucucucacucaauucagcuugguaaccagaaucagaucgagacuuguaaccaaagugucauuacguacgaaaauaacaccuggguuaaucagacauaugugaacaucagcaauacuaacuucgcugcaggccaguccguagccucugugaaacuggcgggaaauucgucauugugcccugucagcggaugggcuauauacaguaaggacaacuccgugagaauuggcucuaaaggugauguuuuugugaucagggagccauucauuagcuguuccccguuagaaugccggaccuuuuuccugacacagggggcccuacucaaugacaagcauucaaacggaaccaucaaagaucgcagucccuaucgaacucugaugagcuguccuaucggcgaggucccaucucccuacaacucccguuuugaaucaguggcauggagcgccagugcuugccacgacggcauuaauuggcuuacaauagggaucucuggaccugauaacggugcaguagccguucugaaguauaauggcauuaucaccgacacgauaaaguccuggagaaacaauauuuugaggacucaagagagcgagugugcuugcgugaacgggucguguuucaccgucaugacagauggaccaucugacggccaggccuccuacaaaaucuuucggaucgaaaaggguaaaauugugaagucaguggagaugaaugcgcccaacuaucauuacgaagagugcaguuguuacccugauagcuccgagaucacuugcgucugccgcgacaauuggcacgggucuaacagaccauggguuagcuucaaucagaaccucgaauaucagauuggauacauauguucaggcaucuuuggcgauaauccgaggcccaacgacaaaaccgggaguugcggaccuguguccagcaauggugcaaacggcguaaagggguucucuuuuaaguauggaaacggcguguggauuggucggacaaaaucaaucaguagccgcaauggguucgagaugaucugggauccaaacggcuggaccggaacggacaauaacuuuuccauuaagcaagacauagucggcaucaaugaauggucuggguacucggggagcuucgugcagcaucccgagcugacuggucuggauuguauucgaccuugcuucuggguugaacucaucagaggcaggccaaaagagaacacaauuuggaccuccgggucaaguaucucuuuuuguggagugaauagcgacacugucggcugguccuggcccgauggugccgaguuaccguucacaauagacaaguga

SEQ ID NO: 151315 - RNA, 1410 nt, Artificial Sequence
  derived and/or modified CDS sequence (opt3) from neuraminidase__InfluenzaA__AGB13115
augaaccccaaucagaagaucauuaccauaggcagcgugugcaugacaaucgggauggccaaccugauucuccaaaucggaaauauuaucuccauauggaucucucacucaauucagcuugguaaccagaaucagaucgagacuuguaaccaaagugucauuacguacgaaaauaacaccuggguuaaucagacauaugugaacaucagcaauacuaacuucgcugcaggccaguccguagugucugucaaacuggccggaaauucgucauugugcccugugagcggaugggcgauauacaguaaggacaacuccauuagaaucggcucuaaaggugauguuuuuguguuaagggagccauucauuagcuguuccccgcuggaaugccggaccuuuuuccuaacacagggggcucuccugaaugacaagcauucaaacggaaccaucaaagaucgcagucccuaucgaacucuuaugagcuguccuaucggcgaggucccaucucccuacaacucccguuuugaaucaguggccuggagcgcaagugccugccacgacggcauuaauuggcugacaauagggaucucuggaccugauaacggugcuguagcaguuuugaaguauaauggcauuaucaccgacacgauaaaguccuggagaaacaauauucucaggacucaagagagcgagugugccugcgugaacgggucguguuucaccaucaugacagauggaccaucugacggccaggcuuccuacaaaaucuuucggauugaaaaggguaaaaucgucaagucaguggagaugaaugcccccaacuaucauuacgaagagugcaguuguuacccugauagcuccgagauuacuugcgugugccgcgacaauuggagagggucuaacaggccaugggucagcuucaaucagaaccuggaauaucagauaggauacaucuguucaggcauuuuuggcgauaauccgcggcccaacgacaaaaccgggaguugcggaccuguuuccagcaauggugcgaacggcgugaagggguucucuuuuaaguauggaaacggcguauggaucggucgcacaaaaucaaucaguagccgaaagggguucgagaugauuugggauccaaauggcuggaccggaacggacaacaauuuuuccauaaaacaagacaucgugggcauuaacgaauggucuggguacucggggagcuucguccagcaccccgagcugacuggucucgauuguaucagaccuugcuucuggguggaauuaauuaggggccggccaaaggagaauacaaucuggaccuccgggucaaguauaucuuuuuguggaguuaacagcgacacugugggcugguccuggcccgauggugcagagcugccguucacaaucgacaaauga

SEQ ID NO: 151316 - RNA, 1410 nt, Artificial Sequence; identical to SEQ ID NO: 148757
  derived and/or modified CDS sequence (opt3) from neuraminidase__InfluenzaA__AGB13133

SEQ ID NO: 151317 - RNA, 1410 nt, Artificial Sequence; identical to SEQ ID NO: 148305
  derived and/or modified CDS sequence (opt3) from neuraminidase__InfluenzaA__AGB13152

SEQ ID NO: 151318 - RNA, 1410 nt, Artificial Sequence; identical to SEQ ID NO: 148305
  derived and/or modified CDS sequence (opt3) from neuraminidase__InfluenzaA__AGB13162

SEQ ID NO: 151319 - RNA, 1410 nt, Artificial Sequence; identical to SEQ ID NO: 149128
  derived and/or modified CDS sequence (opt3) from neuraminidase__InfluenzaA__AGB13173

SEQ ID NO: 151320 - RNA, 1410 nt, Artificial Sequence
  derived and/or modified CDS sequence (opt3) from neuraminidase__InfluenzaA__AGB13183
augaaccccaaucagaagaucauuaccauaggcagcgugugcaugacaaucgggauggccaaccugauucuccaaaucggaaauauuaucuccauauggaucucucacucaauucagcuugguaaccagaaucagaucgagacuuguaaccaaagugucauuacguacgaaaauaacaccuggguuaaucagacauaugugaacaucagcaauacuaacuucgcugcaggccaguccguagugucugucaaacuggccggaaauucgucauugugcccugugagcggaugggcgauauacaguaaggacaacuccauuagaaucggcucuaaaggugauguuuuugugauuagggagccauucaucagcuguuccccguuagaaugccggaccuuuuuccugacacagggggcucuacucaaugacaagcauucaaacggaaccaucaaagaucgcagucccuaucgaacucugaugagcuguccuauuggcgaggucccaucucccuacaacucccguuuugaaucaguggccuggagcgcaagugccugccacgacggcauaaauuggcuuacaaucgggauuucuggacaagauaacggugcuguagcaguucugaaguauaauggcaucauaaccgacacgauuaaguccuggagaaacaauaucuugaggacucaggagagcgagugugccugcgugaacgggucguguuucaccaucaugacagauggaccuucugacggccaggcuuccuacaaaauuuuucggaucgaaaaggguaaaauugucaagucaguggagaugaaugccccaaacuaucauuacgaagagugcaguuguuaccccgauagcuccgagauaacuugcgugugccgcgacaauuggcacgggucuaacagaccuugggucagcuucaaucagaaccucgaauaucaaaucggauacauuuguucaggcaucuuuggcgauaauccaaggccgaacgacaaaaccgggaguugcggacccguuuccagcaauggugcgaacggcgugaagggguucucuuuuaaguauggaaacggcguauggaucggucggacaaaaucaauuaguagccgcaagggguucgagaugauaugggauccuaauggcuggaccggaacggacaacaauuuuuccaucaaacaggacauugugggcaucaacgaauggucuggguacucggggagcuucguccagcauccagagcugacuggucuggauuguauucgacccugcuucuggguggaacucaucagaggcaggccuaaggagaauacaauauggaccuccgggucaaguaucucuuuuuguggaguuaacagcgacacugugggcugguccuggccagauggugcagaguuacccuucacaauugacaaauga

SEQ ID NO: 151321 - RNA, 1410 nt, Artificial Sequence; identical to SEQ ID NO: 148757
  derived and/or modified CDS sequence (opt3) from neuraminidase__InfluenzaA__AGB13193

SEQ ID NO: 151322 - RNA, 1410 nt, Artificial Sequence; identical to SEQ ID NO: 148824
  derived and/or modified CDS sequence (opt3) from neuraminidase__InfluenzaA__AGB13203

SEQ ID NO: 151323 - RNA, 1410 nt, Artificial Sequence; identical to SEQ ID NO: 148757
  derived and/or modified CDS sequence (opt3) from neuraminidase__InfluenzaA__AGB13213

SEQ ID NO: 151324 - RNA, 1410 nt, Artificial Sequence; identical to SEQ ID NO: 148757
  derived and/or modified CDS sequence (opt3) from neuraminidase__InfluenzaA__AGB13223

SEQ ID NO: 151325 - RNA, 1410 nt, Artificial Sequence; identical to SEQ ID NO: 148757
  derived and/or modified CDS sequence (opt3) from neuraminidase__InfluenzaA__AGB13233

SEQ ID NO: 151326 - RNA, 1410 nt, Artificial Sequence
  derived and/or modified CDS sequence (opt3) from neuraminidase__InfluenzaA__AGB13243
augaaccccaaucagaagaucauuaccauaggcagcgugugcaugacaaucgggauggccaaccugauucuccaaaucggaaauauuaucuccauauggaucucucacucaauucagcuugguaaccagaaucagaucgagacuuguaaccaaagugucauuacguacgaaaauaacaccuggguuaaucagacauaugugaacaucagcaauacuaacuucgcugcaggccaguccguagugucugucaaacuggccggaaauucgucauugugcccugugagcggaugggcgauauacaguaaggacaacuccauuagaaucggcucuaaaggugauguuuuugugauuagggagccauucaucagcuguuccccguuagaaugccggaccuuuuuccugacacagggggcucuacucaaugacaagcauucaaacggaaccaucaaagaucgcagucccuaucgaacucugaugagcuguccuauuggcgaggucccaucucccuacaacucccguuuugaaucaguggccuggagcgcaagugccugccacgacggcauaaauuggcuuacaaucgggauuucuggaccugauaacggugcuguagcaguucugaaguauaauggcaucauaaccgacacgauuaaguccuggagaaacaauaucuugaggacucaagagagcgagugugccugcgugaacgggucguguuucaccaucaugacagauggaccaucugacggccaggcuuccuacaaaauuuuucggaucgaacgcgguaagauugucaaaucaguggagaugaaugcccccaacuauuacuacgaagagugcaguuguuauccugauagcuccgagauaacuugcgugugcagagacaauuggcaugggucuaacaggccaugggucagcuucaaucagaaccucgaauaccagaucggauauauuuguucaggcguuuuuggcgauaauccgcggcccaacgacaagaccgggaguugcggaccuguguccagcaauggugcgaacggcguaaaaggguucucuuuuaaguacggaaacggcguguggaucggucgcacaaagucaaucaguagccgaaaaggguucgagaugauuugggauccaaauggcuggaccggaacggacaacaauuuuuccauaaagcaagacaucgucggcauuaacgaauggucuggguauucggggagcuucgugcagcaccccgagcugacuggucuggauuguaucagaccuugcuucuggguugaacucauuaggggccggccaaaagagaauacaaucuggaccuccgggucaaguauaucuuuuuguggagugaacagcgacacugucggcugguccuggcccgauggugcagaguuaccguucacaaucgacaaguga

SEQ ID NO: 151327 - RNA, 1410 nt, Artificial Sequence; identical to SEQ ID NO: 148824
  derived and/or modified CDS sequence (opt3) from neuraminidase__InfluenzaA__AGB13253

SEQ ID NO: 151328 - RNA, 1410 nt, Artificial Sequence
  derived and/or modified CDS sequence (opt3) from neuraminidase__InfluenzaA__AGB13263
augaaccccaaucagaagaucauuaccauaggcagcgugugcaugacaaucgggauggccaaccugauucuccaaaucggaaauauuaucuccauauggaucucucacucaauucagcuugguaaccagaaucagacugagacguguaaccaaagugucaucaccuacgaaaauaacacauggguuaaucagacuuaugugaacauuagcaauaccaacuucgcugcaggccaguccguagugucugucaaacuggccggaaauucgucauugugcccugugagcggaugggcgaucuacaguaaggacaacuccauaagaauuggcucuaaaggugauguuuuugugaucagggagccauucauuagcuguuccccguuagaaugccggacauuuuuccugacccagggggcucuacucaaugacaagcauucaaacggaacuaucaaagaucgcagucccuaucgaacacugaugagcuguccuaucggcgaggucccaucucccuacaacucccguuuugaaucaguggccuggagcgcaagugccugccacgacggcauuaauuggcuuaccauagggaucucuggaccugauaacggugcuguagcaguucugaaguauaauggcauuaucacggacacuauaaaguccuggagaaacaauauuuugaggacccaagagagcgagugugccugcgugaacgggucguguuucacagucaugacugauggaccaucugacggccaggcuuccuacaaaaucuuucggaucgaaaaggguaaaauugugaagucaguggagaugaaagcccccaauuaucauuacgaagagugcaguuguuacccugauagcuccgagauuaccugcgucugccgcgacaacuggcacgggucuaauagaccauggguuagcuucaaccagaaucucgaauauaggaucggauacauauguucaggcaucuuuggcgauaacccgcggcccaaugacaagacagggaguugcggaccuguguccagcaacggugcgaauggcguaaagggguucucuuuuaaauauggaaacggcguguggauuggucgcaccaagucaaucaguagccgaaacggguucgagaugaucugggauccaaauggcuggacgggaacugacaacaauuuuuccauuaaacaggacauaaucggcauuaacgaauggucuggguacucggggagcuucguccaacaucccgagcugacaggucuggauuguaucagaccuugcuucuggguggaacucauuaggggccggccaaaggagaauaccaucuggacuuccgggucaaguauaucuuuuuguggaguuaacagcgacacagugggcugguccuggcccgauggugcagaguuaccguucaccgucgacaaauga

SEQ ID NO: 151329 - RNA, 1410 nt, Artificial Sequence; identical to SEQ ID NO: 148757
  derived and/or modified CDS sequence (opt3) from neuraminidase__InfluenzaA__AGB13273

SEQ ID NO: 151330 - RNA, 1410 nt, Artificial Sequence
  derived and/or modified CDS sequence (opt3) from neuraminidase__InfluenzaA__AGB13283
augaaccccaaucagaagaucauuaccauaggcagcgugugcaugacaaucgggauggccaaccugauucuccaaaucggaaauauuaucuccauauggaucucucacucaauucagcuugguaaccagaaucagaucgagacuuguaaccaaagugucauuacguacgaaaauaacaccuggguuaaucagacauaugugaacaucagcaauacuaacuucgcugcaggccaguccguagugucugucaaacuggccggaaauucgucauugugcccugugagcggaugggcgauauacaguaaggacaacuccauuagaaucggcucuaaaggugauguuuuugugauuagggagccauucaucagcuguuccccguuagaaugccggaccuuuuuccugacacagggggcucuacucaaugacaagcauucaaacggaaccaucaaagaucgcagucccuaucgaacucugaugagcuguccuauuggcgaggucccaucucccuacaacucccguuuugaaucaguggccuggagcgcaagugccugccacgacggcauaaauuggcuuacaaucgggauuucuggaccugauaacggugcuguagcaguucugaaguauaauggcaucauaaccgacacgauuaaguccuggagaaacaauaucuugaggacucaagagagcgagugugccugcgugaacgggucguguuucaccaucaugacagauggaccaucugacggccaggcuuccuacaaaauuuuucggaucgaaaaggguaaaauugucaagucaguggagaugaaugcccccaacuaucauuacgaagagugcaguuguuacccugauagcuccgagauaacuugcgugugccgcgacaauuggcacgggucuaacagaccaugggucagcuucaaucagaaccucgaauaucagaucggauacauuuguucaggcaucuuuggcgauaauccgaggcccaacgacaaaaccgggaguugcggaccuguuuccagcaauggugcgaacggcgugaagggguucucuuuuaaguauggaaacggcguauggaucggucggacaaaaucaauuaguagccgccgaggguucgagaugauaugggauccaaauggcuggaccggaacggacaacaauuuuuccaucaagcaagacauugugggcaucaacgaauggucuggguacucggggagcuucguccagcaucccgagcugacuggucuggauuguauuagaccuugcuucuggguggaacucaucaggggccggccaaaagagaauacaauauggaccuccgggucaaguaucucuuuuuguggaguuaacagcgacacugugggcugguccuggcccgauggugcagaguuaccguucacaauugacaaguga

SEQ ID NO: 151331 - RNA, 1410 nt, Artificial Sequence; identical to SEQ ID NO: 148757
  derived and/or modified CDS sequence (opt3) from neuraminidase__InfluenzaA__AGB13293

SEQ ID NO: 151332 - RNA, 1410 nt, Artificial Sequence; identical to SEQ ID NO: 148757
  derived and/or modified CDS sequence (opt3) from neuraminidase__InfluenzaA__AGB13303

SEQ ID NO: 151333 - RNA, 1410 nt, Artificial Sequence
  derived and/or modified CDS sequence (opt3) from neuraminidase__InfluenzaA__AGB13313
augaaccccaaucagaagaucauuaccauaggcagcgugugcaugacaaucgggauggccaaccugauucuccaaaucggaaauauuaucuccauauggaucucucacucaauucagcuugguaaccagaaucagaucgagacuuguaaccaaagugucauuacguacgaaaauaacaccuggguuaaucagacauaugugaacaucagcaauacuaacuucgcugcaggccaguccguagugucugccaaacuggcgggaaauucgucauugugcccugucagcggaugggcuauauacaguaaggacaacuccauuagaaucggcucuaaaggugauguguuuguuauuagggagccauucaucagcuguuccccguuagaaugccggaccuuuuuccugacacagggggcccuacucaaugacaagcauucaaacggaaccaucaaagaucgcagucccuaucgaacucugaugagcuguccuauuggcgaggugccaucucccuacaacucccguuuugaaucagucgcauggagcgccagugcuugccacgacggcauaaauuggcuuacaaucgggauuucuggaccugauaacggugcaguggccguacugaaguauaauggcaucauaaccgacacgauuaaguccuggagaaacaauaucuugaggacucaagagagcgagugugcuugcguuaacgggucguguuucaccgugaugacagauggaccaucugacggccaggccuccuacaaaaucuuucggauugaaaaggguaaaaucgucaagucaguggagaugaaugcgcccaacuaucauuacgaagagugcaguuguuacccugauagcuccgagauuacuugcgugugccgcgacaauuggcacgggucuaacagaccaugggucagcuucaaucagaaccucgaauaucagauaggauacaucuguucaggcauuuuuggcgauaauccgaggcccaacgacaaaaaggggaguugcggaccuguuuccagcaauggugcaaacggcgugaagggguucucuuuuaaauauggaaacggcguauggaucggucggaccaagucaaucaguagccgcaauggguucgagaugauuugggauccaaacggcuggacaggaaccgacaauaacuuuuccauaaaacaagacaucgugggcauuaaugaauggucuggguacucggggagcuucguccagcaucccgagcugacgggucuggauuguauccgaccuugcuucuggguggaacucauuagaggcaggccaaaggagaacacuaucuggacauccgggucaaguauaucuuuuuguggaguuaauagcgacaccgugggcugguccuggcccgauggugccgaguuaccguucacuaucgacaaauga

SEQ ID NO: 151334 - RNA, 1410 nt, Artificial Sequence; identical to SEQ ID NO: 148757
  derived and/or modified CDS sequence (opt3) from neuraminidase__InfluenzaA__AGB13323

SEQ ID NO: 151335 - RNA, 1410 nt, Artificial Sequence
  derived and/or modified CDS sequence (opt3) from neuraminidase__InfluenzaA__AGB13333
augaaccccaaucagaagaucauuaccauaggcagcgugugcaugacaaucgggauggccaaccugauucuccaaaucggaaauauuaucuccauauggaucucucacucaauucagcuugguaaccagagucagaucgagacuuguaaucaaagcgucauuacguacgaaaacaauaccuggguuaaccagacauaugugaauaucuccaacacuaauuucgcugcaggccagucugccguaucggugaaacuggcggggaacucauccuugugcccugucaguggaugggcuauauacuccaaggacaauucuauuagaaucggcagcaaaggugauguguuuguuauuagggagccauucaucuccuguucaccguuagaaugccggaccuuuuuccugacacagggggcccuacucaacgacaagcauaguaauggaaccaucaaagaucgcagccccuaucgaacucugaugucuuguccuauuggcgaggugccaucccccuacaacucacguuuugaaagcgucgcauggagugccucugcuugccacgacggcauaaacuggcuuacaaucgggauuuccggaccugauaauggugcaguggccguacugaaguauaacggcaucauaaccgacacgauuaagagcuggagaaauaacaucuugaggacucaagagucggagugugcuugcguuaaugggucuuguuucaccaucaugacagauggaccauccgacggccaggccucauacaaaauuuuucggaucgaaaaggguaaaauugugaagagugucgagaugaacgcgcccaauuaucauuacgaagagugcagcuguuacccugauuccucugagauaacuugcgugugccgcgacaacuggcacgggagcaauagaccaugggugucauucaaccagaaucucgaauaucagaucggauacauuuguaguggcaucuuuggcgauaacccgaggcccaaugacaaaaccggguccugcggaccugucagcucuaacggugcaaauggcguuaagggguucucauuuaaguauggaaacggcguguggaucggucggacaaaaaguauuagcucccgcaagggguucgagaugauaugggauccaaacggcuggaccggaacggacaauaacuuuucuaucaaacaagacauuguaggcaucaaugaauggucgggguacagcggauccuucgugcagcaucccgagcugacuggucuggauuguauucgaccuugcuucugggucgaacucaucagaggcaggccaaaggagaacacaauauggaccucagggaguucuaucagcuuuuguggagugaauagcgacacuguuggcuggucauggcccgauggugccgaguuaccguucacaauugacaaauga

SEQ ID NO: 151336 - RNA, 1410 nt, Artificial Sequence; identical to SEQ ID NO: 148757
  derived and/or modified CDS sequence (opt3) from neuraminidase__InfluenzaA__AGB13343

SEQ ID NO: 151337 - RNA, 1410 nt, Artificial Sequence; identical to SEQ ID NO: 149006
  derived and/or modified CDS sequence (opt3) from neuraminidase__InfluenzaA__AGB13353

SEQ ID NO: 151338 - RNA, 1410 nt, Artificial Sequence
  derived and/or modified CDS sequence (opt3) from neuraminidase__InfluenzaA__AGB13363
augaaccccaaucagaagaucauuaccauaggcagcgugugcaugacaaucgggauggccaaccugauucuccaaaucggaaauauuaucuccauauggaucucucacucaauucagcuugguaaccagaaucagaucgagacuuguaaccaaagugucauuacguacgaaaauaacaccuggguuaaucagacauaugugaacaucagcaauacuaacuucgcugcaggccaguccguagccucugugaaacuggcgggaaauucgucauugugcagcgucagugggugggcuauauacuccaaggacaacucuauuagaaucggcagcaaaggugauguguuuguuauuagggagccuuucaucuccuguucaccauuagaaugccggaccuuuuuccugacacagggggcccuacucaaugacaagcauaguaacggaaccaucaaagaucgcagcccguaucgaacucugaugucuugucccauuggcgaggugccuuccccauacaacucacguuuugaaagcgucgcauggagugccucugcuugccacgacggcauaaauuggcuuacaaucgggauuuccggacccgauaacggugcaguggccguacugaaguauaauggcaucauaaccgacacgauuaagagcuggagaaacaauaucuugaggacucaagagucggagugugcuugcguuaacgggucuuguuucaccaucaugacagauggaccuuccgacggccaggccucauacaaaauuuuucggaucgaaaaggguaaaauugugaagagugucgagaugaaugcgccaaacuaucauuacgaagagugcagcuguuaccccgauuccucugagauaacuugcgugugccgcgacaauuggcacgggagcaacagaccuugggugucauucaaucagaaccucgaauaucagaucggauacauuuguaguggcaucuuuggcgauaauccaaggccgaacgacaaaaccggguccugcggacccgucagcucuaauggugcaaacggcguuaagggguucucauuuaaguauggaaacggcguguggaucggucggacaaaaaguauuagcucccgcaagggguucgagaugauaugggauccuaauggcuggaccggaacggacaacaauuuuucuaucaaacaagacauuguaggcaucaacgaauggucgggguacagcggauccuucgugcagcauccagagcugacuggucuggauuguauucgacccugcuucugggucgaacucaucagaggcaggccuaaggagaauacaauauggaccucagggaguucuaucagcuuuuguggagugaacuccgacacuguuggcuggucauggccagauggugccgaguuacccuucacaauugacaaauga

SEQ ID NO: 151339 - RNA, 1410 nt, Artificial Sequence
  derived and/or modified CDS sequence (opt3) from neuraminidase__InfluenzaA__AGB13383
augaaccccaaucagaagaucauuaccauaggcagcgugugcaugacaaucgggauggccaaccugauucuccaaaucggaaauauuaucuccauauggaucucucacucaauucagcuugguaaccagaaucagaucgagacuuguaaccaaagugucauuacguacgaaaauaacaccuggguuaaucagacauaugugaacaucagcaauacuaacuucgcugcaggccaguccguagugucugucaaacuggccggaaauucgucauugugcccugugagcgggugggcgauauacaguaaggacaacuccauuagaaucggcucuaaaggugauguuuuugugauuagggagccauucaucagcuguuccccguuagaaugccggaccuuuuuccugacacagggggcucuacucaaugacaagcauucaaacggaaccaucaaagaucgcagucccuaucgaacucugaugagcuguccuauuggcgaggucccaucucccuacaacucccguuuugaaucaguggccuggagcgcaagugccugccacgacggcauaaauuggcuuacaaucgggauuucuggaccugauaacggugcuguagcaguucugaaguauaauggcaucauaaccgacacgauuaaguccuggagaaacaauaucuugaggacucaagagagcgagugugccugcgugaacgggucguguuucaccaucaugacagauggaccaucugacggccaggcuuccuacaaaauuuuucggaucgaaaaggguaaaauugucaagucaguggagaugaaugcccccaacuaucauuacgaagagugcaguuguuacccugauagcuccgagauaacuugcgugugccgcgacaauuggcacgggucuaacagaccaugggucagcuucaaucagaaccucgaauaucagaucggauacauuuguucaggcaucuuuggcgauaauccgaggcccaacgacaaaaccgggaguugcggaccuguuuccagcaauggugcgaacggcgugaagggguucucuuuuaaguauggaucaggcguauggaucggucggacaaaaaguauuagcucccgcaagggguucgagaugauaugggauccaaacggcuggaccggaacggacaauaacuuuucuaucaaacaagacauugugggcaucaaugaauggucgggguacagcggauccuucguccagcaucccgagcugacuggucuggauuguauucgaccuugcuucuggguggaacucaucagaggcaggccaaaggagaacacaauauggaccucagggaguucuaucagcuuuuguggaguuaauuccgacacugugggcuggucauggcccgauggugcagaguuaccguucacaauugacaaauga

SEQ ID NO: 151340 - RNA, 1410 nt, Artificial Sequence; identical to SEQ ID NO: 148305
  derived and/or modified CDS sequence (opt3) from neuraminidase__InfluenzaA__AGB13393

SEQ ID NO: 151341 - RNA, 1410 nt, Artificial Sequence; identical to SEQ ID NO: 149005
  derived and/or modified CDS sequence (opt3) from neuraminidase__InfluenzaA__AGB13403

SEQ ID NO: 151342 - RNA, 1410 nt, Artificial Sequence; identical to SEQ ID NO: 148305
  derived and/or modified CDS sequence (opt3) from neuraminidase__InfluenzaA__AGB13413

SEQ ID NO: 151343 - RNA, 1410 nt, Artificial Sequence; identical to SEQ ID NO: 148305
  derived and/or modified CDS sequence (opt3) from neuraminidase__InfluenzaA__AGB13423

SEQ ID NO: 151344 - RNA, 1410 nt, Artificial Sequence; identical to SEQ ID NO: 149005
  derived and/or modified CDS sequence (opt3) from neuraminidase__InfluenzaA__AGB13433

SEQ ID NO: 151345 - RNA, 1410 nt, Artificial Sequence; identical to SEQ ID NO: 149005
  derived and/or modified CDS sequence (opt3) from neuraminidase__InfluenzaA__AGB13443

SEQ ID NO: 151346 - RNA, 1410 nt, Artificial Sequence
  derived and/or modified CDS sequence (opt3) from neuraminidase__InfluenzaA__AGB13453
augaaccccaaucagaagaucauuaccauaggcagcgugugcaugacaaucgggauggccaaccugauucuccaaaucggaaauauuaucuccauauggaucucucacucaauucagcuugguaaccagagucagaucgagacuuguaaucaaagcgucauuacguacgaaaacaauaccuggguuaaccagacauaugugaauaucuccaacacuaauuucgcugcaggccagucuguagugucggucaaacuggccgggaacagcagcuugugcccugugaguggaugggcgauauacuccaaggacaauucuauuagaaucggcagcaaaggugauguuuuugugauuagggagccauucaucuccuguucaccguuagaaugccggaccuuuuuccugacacagggggcucuacucaacgacaagcauaguaauggaaccaucaaagaucgcagccccuaucgaacucugaugucuuguccuauuggcgaggucccaucccccuacaacucacguuuugaaagcguggccuggagugcaucugccugccacgacggcauaaacuggcuuacaaucgggauuuccggaccugauaauggugcuguagcaguucugaaguauaacggcaucauaaccgacacgauuaagagcuggagaaauaacaucuugaggacucaagagucggagugugccugcgugaaugggucuuguuucaccaucaugacagauggaccauccgacggccaggcuucauacaaaauuuuucggaucgaaaaggguaaaauugucaagaguguggagaugaacgcccccaauuaucauuacgaagagugcagcuguuacccugauuccucugagauaacuugcgugugccgcgacaacuggcacgggagcaauagaccaugggucucauucaaccagaaucucgaauaucagaucggauacauuuguaguggcaucuuuggcgauaacccgaggcccaaugacaaaaccggguccugcggaccuguuagcucuaacggugcgaauggcgugaagggguucucauuuaaguauggaaacggcguauggaucggucggacaaaaaguuucagcucccgcaagggguuugagaugauuugggauccaaacggcuggaccggaacggacaauaacuucucuauaaaacaagacaucgugggcauuaaugaauggucgggguacagcggauccuucguccagcaucccgagcugacuggucuggauuguauccgaccuugcuuuuggguggaacucauuagaggcaggccaaaggagaacacaaucuggaccucagggaguucuauaucauucuguggaguuaauuccgacacugugggcuggucauggcccgauggugcagaguuaccguuuacaaucgacaaauga

SEQ ID NO: 151347 - RNA, 1410 nt, Artificial Sequence; identical to SEQ ID NO: 148305
  derived and/or modified CDS sequence (opt3) from neuraminidase__InfluenzaA__AGB13463

SEQ ID NO: 151348 - RNA, 1410 nt, Artificial Sequence; identical to SEQ ID NO: 148757
  derived and/or modified CDS sequence (opt3) from neuraminidase__InfluenzaA__AGB13473

SEQ ID NO: 151349 - RNA, 1410 nt, Artificial Sequence
  derived and/or modified CDS sequence (opt3) from neuraminidase__InfluenzaA__AGB13483
augaaccccaaucagaagaucauuaccauaggcagcgugugcaugacaaucgggauggccaaccugauucuccaaaucggaaauauuaucuccauauggaucucucacucaauucagcuugguaaccagagucagaucgagacuuguaaucaaagcgucauuacguacgaaaacaauaccuggguuaaccagacauaugugaauaucuccaacacuaauuucgcugcaggccagucuguagugucggucaaacuggccgggaacagcucauugugcccugugaguggaugggcgauauacuccaaggacaauucuauuagaaucggcagcaaaggugauguuuuugugauuagggagccauucaucuccuguucaccguuagaaugccggaccuuuuuccugacacagggggcucuacucaacgacaagcauaguaauggaaccaucaaagaucgcagccccuaucgaacucugaugucuuguccuauuggcgaggucccaucccccuacaacucacguuuugaaagcguggccuggagugcaucugccugccacgacggcauaaacuggcuuacaaucgggauuuccggaccugauaauggugcuguagcaguucugaaguauaacggcaucauaaccgacacgauuaagagcuggagaaauaacaucuugaggacucaagagucggagugugccugcgugaaugggucuuguuucaccaucaugacagauggaccauccgacggccaggcuucauacaaaauuuuucggaucgaaaaggguaaaauugucaagaguguggagaugaacgcccccaauuaucauuacgaagagugcagcuguuacccugauuccucugagauaacuugcgugugccgcgacaacuggcacgggagcaauagaccaugggucucauucaaccagaaucucgaauaucagaucggauacauuuguaguggcaucuuuggcgauaacccgaggcccaaugacaaaaccggguccugcggaccuguuagcucuaacggugcgaauggcgugaagggguucucauuuaaguauggaaacggcguauggaucggucggacaaaaaguauuagcucccgcaagggguucgagaugauaugggauccaaacggcuggaccggaacggacaauaacuuuucuaucaaacaagacauugugggcaucaaugaauggucgggguacagcggauccuucguccagcaucccgagcugacuggucuggauuguauucgaccuugcuucuggguggaacucaucagaggccagccaaaggagaacacaauauggaccucagggaguucuaucagcuuuuguggaguuaauuccgacacugugggcuggucauggcccgauggugcagaguuaccguucacaauugacaaauga

SEQ ID NO: 151350 - RNA, 1410 nt, Artificial Sequence; identical to SEQ ID NO: 149042
  derived and/or modified CDS sequence (opt3) from neuraminidase__InfluenzaA__AGB13493

SEQ ID NO: 151351 - RNA, 1410 nt, Artificial Sequence; identical to SEQ ID NO: 148834
  derived and/or modified CDS sequence (opt3) from neuraminidase__InfluenzaA__AGB13503

SEQ ID NO: 151352 - RNA, 1410 nt, Artificial Sequence; identical to SEQ ID NO: 146248
  derived and/or modified CDS sequence (opt3) from neuraminidase__InfluenzaA__AGB13513

SEQ ID NO: 151353 - RNA, 1410 nt, Artificial Sequence; identical to SEQ ID NO: 149040
  derived and/or modified CDS sequence (opt3) from neuraminidase__InfluenzaA__AGB13523

SEQ ID NO: 151354 - RNA, 1410 nt, Artificial Sequence; identical to SEQ ID NO: 149040
  derived and/or modified CDS sequence (opt3) from neuraminidase__InfluenzaA__AGB13533

SEQ ID NO: 151355 - RNA, 1410 nt, Artificial Sequence; identical to SEQ ID NO: 148757
  derived and/or modified CDS sequence (opt3) from neuraminidase__InfluenzaA__AGB13543

SEQ ID NO: 151356 - RNA, 1410 nt, Artificial Sequence; identical to SEQ ID NO: 148757
  derived and/or modified CDS sequence (opt3) from neuraminidase__InfluenzaA__AGB13553

SEQ ID NO: 151357 - RNA, 1410 nt, Artificial Sequence
  derived and/or modified CDS sequence (opt3) from neuraminidase__InfluenzaA__AGB13563
augaaccccaaucagaagaucauuaccauaggcagcgugugcaugacaaucggggucgccaaccugauucuccaaaucggaaauauuaucuccauauggaucucucacucaauucagcuugguaaccagaaucagaucgagacuuguaaccaaaguguuauuacguacgaaaauaacaccugggugaaucagacauauguaaacaucagcaauacuaacuucgcugcaggccaguccguggucucugugaaucuggccgggaacucgucauugugcccuguuagcggaugggcgauauacaguaaagacaauuccauuagaaucggcucuaagggugauguguuugucauuagggagccauucaucagcuguuccccguuagaaugccggaccuuuuuccugacacagggggcucuacucaacgacaaacauucaaacggaaccaucaaggaucgcagucccuaucgaacucugaugagcuguccuauuggcgaggugccaucucccuacaauucccguuuugaaucaguagccuggagcgcaagugccugccacgacggcauaaacuggcuuacaaucgggauuucuggaccugauaauggugcuguugcagugcugaaauauaacggcaucauaaccgacacgauuaaguccuggagaaauaacaucuugaggacucaagagagcgagugugccugcgucaaugggucguguuucaccaucaugacagauggaccaucugacggccaggcuuccuacaagauuuuucggaucgaaaaagguaagauugugaaaucaguggagaugaacgcccccaauuaucauuacgaagagugcaguuguuacccugauagcuccgagauaacuugcgucugccgcgacaacuggcacgggucuaauagaccauggguuagcuucaaccagaaucucgaauaucagaucggauacauuuguucaggcaucuuuggcgauaacccgaggcccaaugacaagaccgggaguugcggaccuguguccagcaacggugcgaacggcguaaaaggguucucuuuuaaguauggaaauggcguguggaucggucggacaaagaacauuucaagucgcaaaggguucgagaugauaugggauccaaauggcuggaccggaacggacaacaauuuuagcaucaagcaagacauugucggcaucaacgaaugguccggguacucuggaucguucgugcagcaucccgagcugacuggucuggauuguauucgaccuugcuucuggguugaacucaucagaggcaggccaaaagagaauacaauauggaccagcggguccucaaucaguuuuuguggagugaacucugacacugucggcuggagcuggcccgauggugcagaguuaccguucacaauugacaaguga

SEQ ID NO: 151358 - RNA, 1410 nt, Artificial Sequence; identical to SEQ ID NO: 148757
  derived and/or modified CDS sequence (opt3) from neuraminidase__InfluenzaA__AGB13573

SEQ ID NO: 151359 - RNA, 1410 nt, Artificial Sequence
  derived and/or modified CDS sequence (opt3) from neuraminidase__InfluenzaA__AGB13583
augaaccccaaucagaagaucauuaccauaggcagcgugugcaugacaaucgggauggccaaccugauucuccaaaucggaaauauuaucuccauauggaucucucacucaauucagcuugguaaccagaaucagaucgagacuuguaaccaaagugucauuacguacgaaaauaacaccuggguuaaucagacauaugugaacaucagcaauacuaacuucgcugcaggccaguccguagggucugugaaacuggccggaaauucgucauugugcccugucagcggcugggcgauauacaguaaggacaacuccauuagaaucgguucuaaaggggauguguuuguuauuagggagccauucaucagcuguuccccguuagaaugccggaccuuuuuccugacacagggagcucuacucaaugacaagcauucaaacggcaccaucaaagaucgcagucccuaucgaacucugaugagcuguccuauuggcgaggugccaucucccuacaacucccguuuugaaucagucgccuggagcgcaagugccugccacgacgggauaaauuggcuuacaaucggaauuucugguccugauaacggcgcuguggcaguacugaaguauaaugggaucauaaccgacacgauuaaguccuggagaaacaauaucuugaggacucaagagagcgagugugccugcguuaacggaucguguuucaccaucaugacagauggcccaucugacggucaggcuuccuacaaaauuuuucggaucgaaaaggggaaaauugugaagucagucgagaugaaugcccccaacuaucauuacgaagagugcaguuguuacccugauagcuccgagauaacuugcgugugccgcgacaauuggcacggaucuaacagaccaugggugagcuucaaucagaaccucgaauaucagaucggcuacauuuguucaggcaucuuuggggauaauccgaggcccaacgacaaaaccggaaguugcgguccugucuccagcaauggcgcgaacgggguuaagggauucucuuuuaaguauggcaacgguguguggaucgggcggacaaaaucaauuaguagccgcaagggcuucgagaugauaugggauccaaauggauggaccggcacggacaacaauuuuuccaucaaacaagacauuguagggaucaacgaauggucuggauacucggguagcuucgugcagcaucccgagcugacuggccuggauuguauucgaccuugcuucugggucgaacucaucagagggaggccaaaggagaauacaauauggaccuccggaucaaguaucucuuuuuguggcgugaacagcgacacuguugguugguccuggcccgauggggcagaguuaccguucacaauugacaaauga

SEQ ID NO: 151360 - RNA, 1410 nt, Artificial Sequence; identical to SEQ ID NO: 148757
  derived and/or modified CDS sequence (opt3) from neuraminidase__InfluenzaA__AGB13593

SEQ ID NO: 151361 - RNA, 1410 nt, Artificial Sequence; identical to SEQ ID NO: 148757
  derived and/or modified CDS sequence (opt3) from neuraminidase__InfluenzaA__AGB13603

SEQ ID NO: 151362 - RNA, 1410 nt, Artificial Sequence; identical to SEQ ID NO: 148757
  derived and/or modified CDS sequence (opt3) from neuraminidase__InfluenzaA__AGB13613

SEQ ID NO: 151363 - RNA, 1410 nt, Artificial Sequence; identical to SEQ ID NO: 148757
  derived and/or modified CDS sequence (opt3) from neuraminidase__InfluenzaA__AGB13623

SEQ ID NO: 151364 - RNA, 1410 nt, Artificial Sequence
  derived and/or modified CDS sequence (opt3) from neuraminidase__InfluenzaA__AGB13633
augaaccccaaucagaagaucauuaccauaggcagcgugugcaugacaaucgggauggccaaccugauucuccaaaucggaaauauuaucuccauauggaucucucacucaauucagcuugguaaccagagucagaucgagacuuguaaucaaagcgucauuacguacgaaaacaauaccuggguuaaccagacauaugugaauaucuccaacacuaauuucgcugcaggccagucuguagugucggucaaacuggccgggaacagcucauugugcccugugaguggaugggcgauauacuccaaggacaauucuauuagaaucggcagcaaaggugauguuuuugugauuagggagccauucaucuccuguucaccguuagaaugccggaccuuuuuccugacacagggggcucuacucaacgacaagcauaguaauggaaccaucaaagaucgcagccccuaucgaacucugaugucuuguccuauuggcgaggucccaucccccuacaacucacguuuugaaagcguggccuggagugcaucugccugccacgacggcauaaacuggcuuacaaucgggauuuccggaccugauaauggugcuguagcaguucugaaguauaacggcaucauaaccgacacgauuaagagcuggagaaauaacaucuugaggacucaagagucggagugugccugcgugaaugggucuuguuucaccaucaugacagauggaccauccgacggccaggcuucauacaaaauuuuucggaucgaaaaggguaaaauugucaagaguguggagaugaacgcccccaauuaucauuacgaagagugcagcuguuacccugauuccucugagauaacuugcgugugccgcgacaacuggcacgggagcaauagaccaugggucucauucaaccagaaucucgaauaucagaucggauacauuuguaguggcaucuuuggcgauaacccgaggcccaaugacaaaaccggguccugcggaccuguuagcucuaacggugcgaauggcgugaagggguucucauuuaaguauggaaacggcguauggaucggucggacaaaaaguauuagcucccgcaagggguucgagaugauaugggauccaaacggcuggaccggaacggacaauaacuuuucuaucaaacaagacauugugggcaucaaugaauggucgggguacagcggauccuucguccagcaucccgagcugacuggucuggauuguauucgaccuugcuucuggguggaacucaucagaggcaggccaaaggagaacacaauauggaccucagggaguaucauuucuuuuuguggaguuaauagcgacacugugggcugguccuggcccgauggugcagaguuaccguucacaaucgacaaauga

SEQ ID NO: 151365 - RNA, 1410 nt, Artificial Sequence
  derived and/or modified CDS sequence (opt3) from neuraminidase__InfluenzaA__AGB13643
augaaccccaaucagaagaucauuaccauaggcagcgugugcaugacaaucgggauggccaaccugauucuccaaaucggaaauauuaucuccauauggaucucucacucaauucagcuugguaaccagaaucagaucgagacuuguaaccaaagugucauuacguacgaaaauaacaccuggguuaaucagacauaugugaacaucagcaauacuaacuucgcugcaggccaguccguagugucugucaaacuggccggaaauucgucauugugcccugugagcgggugggcgauauacaguaaggacaacggcauuagaaucgguuccaaaggggauguuuuugugauuagggagccauucaucucuuguagcccguuagaaugccggaccuuuuuccugacacagggagcucuacucaaugacaagcauuccaacggcaccaucaaagaucgcucacccuaucgaacucugaugaguuguccuauuggcgaggucccaagccccuacaacucucguuuugaauccguggccuggucagcaagcgccugccacgacgggauaaauuggcuuacaaucggaauuagugguccugauaacggcgcuguagcaguucugaaguauaaugggaucauaaccgacacgauuaagucuuggagaaacaauaucuugaggacucaagaguccgagugugugugcgucaacggaagcuguuucaccgugaugacagauggcccaucggacggucaggccucuuacaaaaucuuucggauugaaaaggggaaaaucgugaaguccgucgagaugaaugcucccaacuaucauuacgaagagugcucauguuacccugauaguagcgagauuacuugcguuugccgcgacaauuggcacggauccaacagaccaugggugucuuucaaucagaaccucgaauaucagauaggcuacaucuguagcggcauuuuuggggauaauccgaggcccaacgacaaaaccggaucaugcgguccuguaaguuccaauggcgccaacggggugaagggauucagcuuuaaguauggcaacggugucuggaucgggcggacaaaaucuaucucaagucgcaauggcuucgagaugauuugggauccaaacggauggaccggcacggacaauaacuuuagcgugaagcaagacauaaucgggauuaaugaaugguccggauacucugguucguucguucagcaucccgagcugacuggccuggauuguauccgaccuugcuucuggguggaacucauuagagggaggccaaaagagaacacaaucuggaccagcggauccucaauaaguuuuuguggcgucaauucugacacuguggguuggagcuggcccgauggggcggaguuaccguucacaaucgacaaguga

SEQ ID NO: 151366 - RNA, 1410 nt, Artificial Sequence
  derived and/or modified CDS sequence (opt3) from neuraminidase__InfluenzaA__AGB13653
augaaccccaaucagaagaucauuaccauaggcagcgugugcaugacaaucgggauggccaaccugauucuccaaaucggaaauauuaucuccauauggaucucucacucaauucagcuugguaaccagaaucagaucgagacuuguaaccaaagugucauuacguacgaaaauaacaccuggguuaaucagacauaugugaacaucagcaauacuaacuucgcugcaggccaguccguagugucugucaaacuggccggaaauucgucauugugcccugugagcggaugggcgauauacaguaaggacaacuccauuagaaucggcucuaaaggugauguuuuugugauuagggagccauucaucagcuguuccccguuagaaugccggaccuuuuuccugacacagggggcucuacucaaugacaagcauucaaacggaaccaucaaagaucgcagucccuaucgaacucugaugagcuguccuauuggcgaggucccaucucccuacaacucccguuuugaaucaguggccuggagcgcaagugccugccacgacggcauaaauuggcuuacaaucgggauuucuggaccugauaacggugcuguagcaguucugaaguauaauggcaucauaaccgacacgauuaaguccuggagaaacaauaucuugaggacucaagagagcgagugugugugcgucaacgggucguguuucaccgugaugacagauggaccaucugacggccaggccuccuacaaaaucuuucggauugaaaaggguaaaaucgugaagucagucgagaugaaugcucccaacuaucauuacgaagagugcaguuguuacccugauagcuccgagauuacuugcguuugccgcgacaauuggcacgggucuaacagaccaugggugagcuucaaucagaaccucgaauaucagauaggauacaucuguucaggcauuuuuggcgauaauccgaggcccaacgacaaaaccgggaguugcggaccuguauccagcaauggugccaacggcgugaagggguucucuuuuaaguauggaaacggcgucuggaucggucggacaaaaucaaucaguagccgcaauggguucgagaugauuugggauccaaacggcuggaccggaacggacaauaacuuuuccgugaagcaagacauaaucggcauuaaugaauggucuggguacucggggagcuucguucagcaucccgagcugacuggucuggauuguauccgaccuugcuucuggguggaacucauuagaggcaggccaaaagagaacacaaucuggaccuccgggucaaguauaucuuuuuguggagucaauagcgacacugugggcugguccuggcccgauggugcggaguuaccguucacaaucgacaaguga

SEQ ID NO: 151367 - RNA, 1410 nt, Artificial Sequence; identical to SEQ ID NO: 148305
  derived and/or modified CDS sequence (opt3) from neuraminidase__InfluenzaA__AGB13663

SEQ ID NO: 151368 - RNA, 1410 nt, Artificial Sequence; identical to SEQ ID NO: 148305
  derived and/or modified CDS sequence (opt3) from neuraminidase__InfluenzaA__AGB13724

SEQ ID NO: 151369 - RNA, 1410 nt, Artificial Sequence; identical to SEQ ID NO: 148757
  derived and/or modified CDS sequence (opt3) from neuraminidase__InfluenzaA__AGB13734

SEQ ID NO: 151370 - RNA, 1410 nt, Artificial Sequence; identical to SEQ ID NO: 145262
  derived and/or modified CDS sequence (opt3) from neuraminidase__InfluenzaA__AGB51359

SEQ ID NO: 151371 - RNA, 1410 nt, Artificial Sequence
  derived and/or modified CDS sequence (opt3) from neuraminidase__InfluenzaA__AGB97270
augaaccccaaucagaagaucauuaccauaggcagcgugugcaugacaaucgggauggccaaccugauucuccaaaucggaaauauuaucuccauauggaucucucacucaauucagcuuagaaaccagaaucagaucgagacuuguaaccaaagugucauuacguacgaaaauaacaccuggguuaaucagacauaugugaacaucagcaauacuaacuucgcugcaggucaguccguagugucugucaaacuggccggcaauucgucauugugcccugugagcgggugggcgauauacaguaaggacaacuccauuaggaucggaucuaaaggcgauguuuuugugauucgggagccauucaucagcuguuccccguuagaaugccgcaccuuuuuccugacacagggugcucuacucaaugacaagcauucaaacgggaccaucaaagaucgaagucccuaucguacucugaugagcuguccuauuggagaggucccaucucccuacaacuccagauuugaaucaguggccuggagcgcaagugccugccacgacggcauaaauuggcuuacaaucggcauuucugggccugauaacggagcuauggcaguacugaaguauaaugguaucauaaccgacacgauuaaguccuggaggaacaauaucuugcggacucaagagagcgagugugccugcguuaacggcucguguuucaccaucaugacagaugggccaucugacggacaggcuuccuacaaaauuuuucgcaucgaaaagggcaaaauugugaagucagucgagaugaaugcccccaacuaucauuacgaagagugcaguuguuacccugauagcuccgagauaacuugcgugugcagagacaauuggcacgguucuaacaggccaugggugagcuucaaucagaaccucgaauaucagaucggguacauuuguucaggaaucuuuggcgauaauccgcggcccaacgacaaaaccggcaguugcgggccugucuccagcaauggagcgaacgguguuaagggcuucucuuuuaaguaugggaacggaguguggaucggccgcacaaaaucaauuaguagccgaaaggguuucgagaugauaugggauccaaauggguggaccggcacggacaacaauuuuuccaucaaacaagacauuguaggaaucaacgaauggucuggcuacucggggagcuucgugcagcaucccgagcugacuggacuggauuguauuagaccuugcuucugggucgaacucaucaggggucggccaaaggagaauacaauauggaccuccggcucaaguaucucuuuuuguggggugaacagcgacacuguuggaugguccuggcccgauggcgcagaguuaccguucacaauugacaaauga

SEQ ID NO: 151372 - RNA, 1410 nt, Artificial Sequence
  derived and/or modified CDS sequence (opt3) from neuraminidase__InfluenzaA__AGB97274
augaaccccaaucagaagaucauuaccauaggcagcgugugcaugacaaucgggauggccaaccugauucuccaaaucggaaauauuaucuccauauggaucucucacucaauucagcuuagaaaccagaaucagaucgagacuuguaaccaaagugucauuacguacgaaaauaacaccuggguuaaucagacauaugugaacaucagcaauacuaacuucgcugcaggucaguccguagugucugucaaacuggccggcaauucgucauugugcccugugagcgggugggcgauauacaguaaggacaacuccauuaggaucggaucuaaaggcgauguuuuugugauucgggagccauucaucagcuguuccccguuagaaugccgcaccuuuuuccugacacagggugcucuacucaaugacaagcauucaaacgggaccaucaaagaucgaagucccuaucguacucugaugagcuguccuauuggagaggucccaucucccuacaacuccagauuugaaucaguggccuggagcgcaagugccugccacgacggcauaaauuggcuuacaaucggcauuucugggccugauaacggagcuguagcaguucugaaguauaaugguaucauaaccgacacgauuaaguccuggaggaacaauaucuugcggacucaagagagcgagugugccugcgugaacggcucguguuucaccaucaugacagaugggccaucugacggacaggcuuccuacaaaauuuuucgcaucgaaaagggcaaaauugucaagucaguggagaugaaugcccccaacuaucauuacgaagagugcaguuguuacccugauagcuccgagauaacuugcgugugcagagacaauuggcacgguucuaacaggccaugggucagcuucaaucagaaccucgaauaucagaucggguacauuuguucaggaaucuuuggcgauaauccgcggcccaacgacaaaaccggcaguugcgggccuguuuccagcaauggagcgaacggugugaagggcuucucuuuuaaguaugggaacggaguauggaucggccgcacaaaaucaauuaguagccgaaaggguuucgagaugauaugggauccaaauggguggaccggcacggacaacaauuuuuccaucaaacaagacauugugggaaucaacgaauggucuggcuacucggggagcuucguccagcaucccgagcugacuggacuggauuguauuagaccuugcuucuggguggaacucaucaggggucggccaaaggagaauacaauauggaccuccggcucaaguaucucuuuuugugggguuaacagcgacacugugggaugguccuggcccgauggcgcagaguuaccguucacaauugacaaauga

SEQ ID NO: 151373 - RNA, 1410 nt, Artificial Sequence; identical to SEQ ID NO: 150194
  derived and/or modified CDS sequence (opt3) from neuraminidase__InfluenzaA__AGB97289

SEQ ID NO: 151374 - RNA, 1410 nt, Artificial Sequence
  derived and/or modified CDS sequence (opt3) from neuraminidase__InfluenzaA__AGE15475
augaaccccaaucagaagaucauuaccauaggcagcgugugcaugacaaucgggauggccaaccugauucuccaaaucggaaauauuaucuccauauggaucucucacucaauucagcuugguaaccagagucagaucgagacuuguaaucaaagcgucauuacguacgaaaacaauaccuggguuaaccagacauaugugaauaucuccaacacuaauuucgcugcaggccagucuguagugucggucaaacuggccgggaacagcucauugugcccugugaguggaugggcgauauacuccaaggacaauucuauuagaaucggcagcaaaggugauguuuuugugauuagggagccauucaucuccuguucaccguuagaaugccggaccuuuuuccugacacaggggagucuacucaacgacaagcauagcaauggaaccaucaaagaucgcucucccuaucgaacucugauguccuguccuauuggcgaggucccaucacccuacaacagccguuuugaaaguguggcuuggucugccuccgcaugccacgacggcauaaacuggcuuacaaucgggauuagcggaccugauaauggugccguagcuguucugaaguauaacggcaucauaaccgacacgauuaagucguggagaaauaacaucuugaggacucaagagucugagugugcaugcgugaauggguccuguuucaccaucaugacagauggaccaucagacggccaggccaguuacaaaauuuuucggaucgaaaaggguaaaauugucaagagcguggagaugaacgcucccaauuaucauuacgaagagugcuccuguuacccugauucuagcgagauaacuugcgugugccgcgacaacuggcacgggucaaauagaccaugggucaguuucaaccagaaucucgaauaucagaucggauacauuuguuccggcaucuuuggcgauaacccgaggcccaaugacaaaaccgggagcugcggaccuguuucuucaaacggugccaauggcgugaagggguucaguuuuaaguauggaaacggcguauggaucggucggacaaaaagcauuuccucucgcaagggguucgagaugauaugggauccaaacggcuggaccggaacggacaauuacuuuucgaucaaacaagacauugugggcaucaacgaauggagcggguauuccggaucauucguccagcaucccgagcugacuggucuggauuguauucgaccuugcuucuggguggaacucaucagaggcaggccaaaggagaauacaauauggaccagugggucuagcaucuccuuuuguggaguuaacucagacacugugggcuggagcuggcccgauggugcggaguuaccguucucuauugacaaauga

SEQ ID NO: 151375 - RNA, 1410 nt, Artificial Sequence
  derived and/or modified CDS sequence (opt3) from neuraminidase__InfluenzaA__AGE15476
augaaccccaaucagaagaucauuaccauaggcagcgugugcaugacaaucgggauggccaaccugauucuccaaaucggaaauauuaucuccauauggaucucucacucaauucagcuugguaaccagagucagaucgagacuuguaaucaaagcgucauuacguacgaaaacaauaccuggguuaaccagacauaugugaauaucuccaacacuaauuucgcugcaggccagucuguagugucggucaaacuggccgggaacagcucauugugcccugugaguggaugggcgauauacuccaaggacaauucuauuagaaucggcagcaaaggugauguuuuugugauuagggagccauucaucuccuguucaccguuagaaugccggaccuuuuuccugacacaggggagucuacucaacgacaagcauagcaauggaaccaucaaagaucgcucucccuaucgaacucugauguccuguccuauuggcgaggucccaucacccuacaacagccguuuugaaaguguggcuuggucugccuccgcaugccacgacggcauaaacuggcuuacaaucgggauuagcggaccugauaauggugccguagcuguucugaaguauaacggcaucauaaccgacacgauuaagucguggagaaauaacaucuugaggacucaagagucugagugugcaugcgugaauggguccuguuucaccaucaugacagauggaccaucagacggccaggccaguuacaaaauuuuucggaucgaaaaggguaaaauugucaagagcguggagaugaacgcucccaauuaucauuacgaagagugcuccuguuacccugauucuagcgagauaacuugcgugugccgcgacaacuggcacgggucaaauagaccaugggucaguuucaaccagaaucucgaauaucagaucggauacauuuguuccggcaucuuuggcgauaacccgaggcccaaugacaaaaccgggagcugcggaccuguuucuucaaacggugccaauggcgugaagggguucaguuuuaaguauggaaacggcguauggaucggucggacaaaaagcauuuccucucgcaagggguucgagaugauaugggauccaaacggcuggaccggaacggacaauuacuuuucgaucaaacaagacauugugggcaucaacgaauggagcggguauuccggaucauucguccagcaucccgagcugacuggucuggauuguauucgaccuugcuucuggguggaacucaucagaggcaggccaaaggagaauacaauauggaccagugggucuagcaucuccuuuuguggaguuaacucagacacugugggcuggagcuggcccgauggugcggaguuaccguucacaauugacaaauga

SEQ ID NO: 151376 - RNA, 1410 nt, Artificial Sequence; identical to SEQ ID NO: 151206
  derived and/or modified CDS sequence (opt3) from neuraminidase__InfluenzaA__AGE15477

SEQ ID NO: 151377 - RNA, 1410 nt, Artificial Sequence
  derived and/or modified CDS sequence (opt3) from neuraminidase__InfluenzaA__AGE15478
augaaccccaaucagaagaucauuaccauaggcagcgugugcaugacaaucgggauggccaaccugauucuccaaaucggaaauauuaucuccauauggaucucucacucaauucagcuugguaaccagagucagaucgagacuuguaaucaaagcgucauuacguacgaaaacaauaccuggguuaaccagacauaugugaauaucuccaacacuaauuucgcugcaggccagucuguagugucggucaaacuggccgggaacagcucauugugcccugugaguggaugggcgauauacuccaaggacaauucuauuagaaucggcagcaaaggugauguuuuugugauuagggagccauucaucuccuguucaccguuagaaugccggaccuuuuuccugacacaggggagucuacucaacgacaagcauagcaauggaaccaucaaagaucgcucucccuaucgaacucugauguccuguccuauuggcgaggucccaucacccuacaacagccguuuugaaaguguggcuuggucugccuccgcaugccacgacggcauaaacuggcuuacaaucgggauuagcggaccugauaauggugccguagcuguucugaaguauaacggcaucauaaccgacacgauuaagucguggagaaauaacaucuugaggacucaagagucugagugugcaugcgugaauggguccuguuucaccaucaugacagauggaccaucagacggccaggccaguuacaaaauuuuucggaucgaaaaggguaaaauugucaagagcguggagaugaacgcucccaauuaucauuacgaagagugcuccuguuacccugauucuagcgagauaacuugcgugugccgcgacaacuggcacgggucaaauagaccaugggucaguuucaaccagaaucucgaauaucagaucggauacauuuguuccggcaucuuuggcgauaacccgaggcccaaugacaaaaccgggagcugcggaccuguuucuucaaacggugccaauggcgugaagggguucaguuuuaaguauggaaacggcguauggaucggucggacaaaaagcauuuccucucgcaagggguucgagaugauaugggauccaaacggcuggaccggaacggacaauuacuuuucgaucaaacaagacauugugggcaucaacgaauggagcggguauuccggaucauucguccagcaucccgagcugacuggucuggauuguauucgaccuugcuucuggguggaacucaucagaggcaggccaaaggagaauacaauauggaccagugggucuagcaucuccuuuuguggaguuaaaucagacacugugggcuggagcuggcccgauggugcggaguuaccguucacaauugacaaguga

SEQ ID NO: 151378 - RNA, 1410 nt, Artificial Sequence
  derived and/or modified CDS sequence (opt3) from neuraminidase__InfluenzaA__AGE15479
augaaccccaaucagaagaucauuaccauaggcagcgugugcaugacaaucgggauggccaaccugauucuccaaaucggaaauauuaucuccauauggaucucucacucaauucagcuugguaaccagagucagaucgagacuuguaaucaaagcgucauuacguacgaaaacaauaccuggguuaaccagacauaugugaauaucuccaacacuaauuucgcugcaggccagucuguagugucggucaaacuggccgggaacagcucauugugcccugugaguggaugggcgauauacuccaaggacaauucuauuagaaucggcagcaaaggugauguuuuugugauuagggagccauucaucuccuguucaccguuagaaugccggaccuuuuuccugacacaggggagucuacucaacgacaagcauagcaauggaaccaucaaagaucgcucucccuaucgaacucugauguccuguccuauuggcgaggucccaucacccuacaacagccguuuugaaaguguggcuuggucugccuccgcaugccacgacggcauaaacuggcuuacaaucgggauuagcggaccugauaauggugccguagcuguucugaaguauaacggcaucauaaccgacacgauuaagucguggagaaauaacaucuugaggacucaagagucugagugugcaugcgugaauggguccuguuucaccaucaugacagauggaccaauugacggccaggccucauacaaaaucuuucggauugaaaaggguaaaauagucaagaguguggagaugaacgcucccaauuaucauuacgaagagugcagcuguuacccugauuccucugagaucacuugcgugugccgcgacaacuggcacgggagcaauagaccaugggucucauucaaccagaaucucgaauaucagauuggauacaucuguaguggcaucuuuggcgauaacccgaggcccaaugacaaaaccggguccugcggaccuguuagcucuaacggugccaauggcgugaagggguucucauuuaaguauggaaacggcguauggauuggucggacaaaaaguauaagcucccgcaagggguucgagaugaucugggauccaaacggcuggaccggaacggacaauuacuuuucuauuaaacaagacaucgugggcauuaacgaauggucgggguauagcggauccuucguccagcaucccgagcugacuggucuggauuguauccgaccuugcuucuggguggaacucauaagaggcaggccaaaggagaauacaaucuggaccucagggaguucuauuagcuuuuguggaguuaacuccgacacugugggcuggucauggcccgauggugcggaguuaccguucacaaucgacaaauga

SEQ ID NO: 151379 - RNA, 1410 nt, Artificial Sequence; identical to SEQ ID NO: 151206
  derived and/or modified CDS sequence (opt3) from neuraminidase__InfluenzaA__AGE15480

SEQ ID NO: 151380 - RNA, 1410 nt, Artificial Sequence; identical to SEQ ID NO: 146248
  derived and/or modified CDS sequence (opt3) from neuraminidase__InfluenzaA__AGE89270

SEQ ID NO: 151381 - RNA, 1410 nt, Artificial Sequence; identical to SEQ ID NO: 146248
  derived and/or modified CDS sequence (opt3) from neuraminidase__InfluenzaA__AGE89280

SEQ ID NO: 151382 - RNA, 1410 nt, Artificial Sequence
  derived and/or modified CDS sequence (opt3) from neuraminidase__InfluenzaA__AGE89290
augaaccccaaucagaagaucauuaccauaggcagcgugucccugacaaucucuacuauuugcuucuuuaugcaaaucgccauucucaucacgaccgucacacuucacuucaaacaguacgaguuuaacucaccuccaaauaaccagguuaugcugugugaaccgacuauaaucgagagaaauauuaccgaaaucguguauuugacaaacaccacuauugagaaggaaaucugccccaaauuagcugaguacaggaauuggaguaagccucagugugacauaacaggguucgcaccauuuagcaaagauaacuccauucggcugucugccggaggugacaucuggguaacccgcgagcccuaugugucgugcgauccugacaaguguuaccaauucgcgcuaggccaggggacgacucucaauaacguccauucaaauaacaccgugcgagaucguacaccauauagaacucugcuuaugaaugaacugggaguucccuuucacuugggcaccaaacaggugugcauugcuuggagcaguuccucuugucaugacgguaaggccuggcuccacgucugcaucacaggggaugacaagaacgcaaccgccagcuucaucuacaauggaaaacugguggauuccguaguuucauggaguaaggagauucugaggacgcaggaaagcgagugugugugcauaaacggcacuuguaucgucgugaugacagacggcucugcuuccgggaaagcagauaccaagauucucuuuguggaggaaggaaagaucguccauacuucaacauuaagcgguagugcccaacacguugaggaaugcucuugcuauccucgguacccaggcgugcgcuguguaugcagagacaacuggaaaggguccaauaggccgauaguggauauuaacaucaaggaccacagcaucauuucgucuuacgucuguuccggacuggugggcgacacgccccggaaaaaugauucaaguagcuccucucauugccuugacccuaacaaugaggaaggugggcacggaguuaagggcugggcuuucgaugacggcaacgauguguggauggggcgcaccaucaaugagaccagccgauugggauaugagacauuuaaagucauugaagguuggucaaacccaaagaguaaacugcagauaaauagacaggugaucguagacaggggcaaccgguccggguacagcggaauuuucucuguugagggcaagucauguaucaaucguugcuuuuauguggaacuaauccgcgguagaaaggaggaaacugagguccucuggaccaguaacagcauuguggucuucugugggacauccggcacuuacggaaccggcucuuggcccgauggggccgaccugaaucuuaugccuauauga

SEQ ID NO: 151383 - RNA, 1410 nt, Artificial Sequence; identical to SEQ ID NO: 148305
  derived and/or modified CDS sequence (opt3) from neuraminidase__InfluenzaA__AGE89301

SEQ ID NO: 151384 - RNA, 1410 nt, Artificial Sequence
  derived and/or modified CDS sequence (opt3) from neuraminidase__InfluenzaA__AGE89311
augaaccccaaucagaagaucauuaccauaggcagcgugugcaugacaaucgggauggccaaccugauucuccaaaucggaaauauuaucuccauauggaucucucacucaauucagcuugguaaccagaaucagaucgagacuuguaaccaaagugucauuacguacgaaaauaacaccuggguuaaucagacauaugugaacaucagcaauacuaacuucgcugcaggccaguccguagugucugucaaacuggccggaaauucgucauugugcccugugagcggaugggcgauauacaguaaggacaacuccauuagaaucggcucuaaaggugauguuuuugugauuagggagccauucaucagcuguuccccguuagaaugccggaccuuuuuccugacacagggggcucuacucaaugacaagcauucaaacggaaccaucaaagaucgcagucccuaucgaacucugaugagcuguccuauuggcgaggucccaucucccuacaacucccguuuugaaucaguggccuggagcgcaagugccugccacgacggcauaaauuggcuuacaaucgggauuucuggaccugauaacggugcuguagcaguucugaaguauaauggcaucauaaccgacacgauuaaguccuggaaaaacaauaucuugagaacucaagagagcgagugugccugcgugaacgggucguguuucaccgucaugacagauggaccaucugacggccaggcuuccuacaagaucuuuaggauugaaaaagguaagaucgugaaaucaguggagaugaaugcccccaacuaucauuacgaagagugcaguuguuacccugauagcuccgagauuacuugcgucugccgggacaauuggcacgggucuaaccgcccauggguuagcuucaaucagaaccucgaauauagaauaggauacaucuguucaggcauuuuuggcgauaauccgaggcccaacgacaagaccgggaguugcggaccuguguccagcaauggugcgaacggcguaaagggguucucuuuuaaauauggaaacggcguguggaucggucggacaaagucaaucaguagccgcaauggguucgagaugauuugggauccaaacggcuggaccggaacggacaauaacuuuuccaaaaagcaggacauaaucggcauuaaugaauggucuggguacucggggagcuucguccaacaucccgagcugacuggucuggauuguauccgaccuugcuucuggguggaacucauuagaggcaggccaaaagagaacacaaucuggaccuccgggucaaguaugucuuuuuguggaguuaauagcgacacugugggcugguccuggcccgauggugcagaguuaccguucacaauagacaaguga

SEQ ID NO: 151385 - RNA, 1410 nt, Artificial Sequence; identical to SEQ ID NO: 149835
  derived and/or modified CDS sequence (opt3) from neuraminidase__InfluenzaA__AGE89321

SEQ ID NO: 151386 - RNA, 1410 nt, Artificial Sequence; identical to SEQ ID NO: 149191
  derived and/or modified CDS sequence (opt3) from neuraminidase__InfluenzaA__AGE89332

SEQ ID NO: 151387 - RNA, 1410 nt, Artificial Sequence; identical to SEQ ID NO: 148305
  derived and/or modified CDS sequence (opt3) from neuraminidase__InfluenzaA__AGE89343

SEQ ID NO: 151388 - RNA, 1410 nt, Artificial Sequence
  derived and/or modified CDS sequence (opt3) from neuraminidase__InfluenzaA__AGE89353
augaaccccaaucagaagaucauuaccauaggcagcgugucccugacaaucucuacuauuugcuucuuuaugcaaaucgccauucucaucacgaccgucacacuucacuucaaacaguacgaguuuaacucaccuccaaauaaccagguuaugcugugugaaccgacuauaaucgagagaaauauuaccgaaaucguguauuugacaaacauuaccaucgagaaggaaauaugccccaaauuagcugaguacaggaauuggaguaagccucagugugacauuacuggguucgcaccauuuagcaaagauaacuccauccggcugucugccggaggugacauuuggguaacacgcgagcccuaugugucgugcgauccugacaaguguuaccaauucgcgcuaggccaggggaccacgcucaauaacguccauucaaauaacacugugcgagaucguaccccauauagaacacugcuuaugaaugaacugggaguucccuuucacuugggcacuaaacaggugugcaucgcuuggagcaguuccucuugucaugacgguaaggccuggcuccacgucugcaucaccggggaugacaagaacgcaacagccagcuucauuuacaauggaaggcugguggauuccguaguuucauggaguaaagagauacugcggacccaggaaagcgagugugugugcaucaacggcacguguacugucgugaugacagacggcucugcuuccgggaaggcagauaccaaaauucucuuuaucgaggaaggaaagauagugcauacuucaacauuaagcgguagugcccaacacgucgaggaaugcucuugcuauccucgcuacccaggcguuagaugugugugcagggacaacuggaagggguccaaucggccgauuguagauaucaacaucaaagaccacagcauugugucgucuuacgucuguuccggacuggugggcgacacccccaggaagaaugauucaaguagcuccucucauugccuugacccuaacaaugaggaaggugggcacggaguuaaaggcugggcuuucgaugacggcaacgauguguggauggggcgaacgaucaaugagaccagcagauugggauaugagacauuuaaggucauugaagguuggucaaacccaaaaaguaagcugcagauaaaucgccaggugaucguagacaaaggcaaccgguccggguacagcggaauuuucucuguugagggcaagucauguaucaaucguugcuuuuauguggaacuaauccgcgguagaaaggaggaaacugagguccucuggaccaguaacagcauuguggucuucugugggacauccggcacuuacggaaccggcucuuggcccgauggggccgaccugaaucuuaugccuauauga

SEQ ID NO: 151389 - RNA, 1410 nt, Artificial Sequence; identical to SEQ ID NO: 149042
  derived and/or modified CDS sequence (opt3) from neuraminidase__InfluenzaA__AGE89364

SEQ ID NO: 151390 - RNA, 1410 nt, Artificial Sequence; identical to SEQ ID NO: 149835
  derived and/or modified CDS sequence (opt3) from neuraminidase__InfluenzaA__AGE89374

SEQ ID NO: 151391 - RNA, 1410 nt, Artificial Sequence
  derived and/or modified CDS sequence (opt3) from neuraminidase__InfluenzaA__AGE89385
augaaccccaaucagaagaucauuaccauaggcagcgugugcaugacaaucgggauggccaaccugauucuccaaaucggaaauauuaucuccauauggaucucucacucaauucagcuugguaaccagaaucagaucgagacuuguaaccaaagugucauuacguacgaaaauaacaccuggguuaaucagacauaugugaacaucagcaauacuaacuucgcugcaggccaguccguagccucugugaaacuggcgggaaauucgucauugugcccugucagcggaugggcuauauacaguaaggacaacuccauuagaaucggcucuaaaggugauguguuuguuauuagggagccauucaucagcuguuccccguuagaaugccggaccuuuuuccugacacagggggcccuacucaaugacaagcauucaaacggaaccaucaaagaucgcagucccuaucgaacucugaugagcuguccuauuggcgaggugccaucucccuacaacucccguuuugaaucagucgcauggagcgccagugcuugccacgacggcauaaauuggcuuacaaucgggauuucuggaccugauaacggugcaguggccguacugaaguauaauggcaucauaaccgacacgauuaaguccuggagaaacaauaucuugaggacucaagagagcgagugugcuugcguuaacgggucguguuucaccaucaugacagauggaccaucugacggccaggccuccuacaaaauuuuucggaucgaaaaggguaaaauugugaagucagucgagaugaaugcgcccaacuaucauuacgaagagugcaguuguuacccugauagcuccgagauaacuugcgugugccgcgacaauuggcacgggucuaacagaccaugggugagcuucaaucagaaccucgaauaucagaucggauacauuuguucaggcaucuuuggcgauaauccgaggcccaacgacaaaaccgggaguugcggaccugucuccagcaauggugcaaacggcguuaagggguucucuuuuaaguauggaaacggcguguggaucggucggacaaaaucaauuaguagccgcaagggguucgagaugauaugggauccaaauggcuggaccggaacggacaacaauuuuuccaucaaacaagacauuguaggcaucaacgaauggucuggguacucggggagcuucgugcagcaucccgagcugacuggucuggauuguauucgaccuugcuucugggucgaacucaucagaggcaggccaaaggagaauacaauauggaccuccgggucaaguaucucuuuuuguggagugaacagcgacacuguuggcugguccuggcccgauggugccgaguuaccguucacaauugacaaauga

SEQ ID NO: 151392 - RNA, 1410 nt, Artificial Sequence
  derived and/or modified CDS sequence (opt3) from neuraminidase__InfluenzaA__AGE89395
augaaccccaaucagaagaucauuaccauaggcagcgugucccugacaaucucuacuauuugcuucuuuaugcagaucgccauucucaucacgaccgucacacuucacuucaaacaguacgaguuuaacucaccuccaaauaaccagguuaugcugugugaaccgacuauaaucgagagaaauauuaccgaaaucguguauuugacaaacaccacuauugagaaggaaaucugccccaaaccugcugaguacaggaauuggaguaagccacagugugacauaacaggguucgcacccuuuagcaaagauaacuccauucgguuaucugccggaggugacaucuggguaacccgcgagccuuaugugucgugcgauccagacaaguguuaccaauucgcgcugggccaggggacgacucuaaauaacguccauucaaauaacaccgugcgagaucguacacccuauagaacucuccugaugaaugaacuuggaguuccuuuucaccugggcaccaaacaggugugcauugcuuggagcaguuccucuugucaugacgguaaggccugguugcacgucugcaucacaggggaugacaagaacgcaaccgccagcuucaucuacaauggaaggcucguggauuccguaguuucauggaguaaagagauucugcggacgcaggaaagcgagugugugugcauaaacggcacuuguacagucgugaugaccgacggcucugcuuccgggaaggcagauacuaaaauccuguuuauugaggaaggaaagaucgugcauacaucaacccucagcgguagugcccaacacgucgaggaaugcucuugcuauccacgcuacccgggcguuagaugugugugcagggacaacuggaagggguccaaucggcccauaguagauauuaacaucaaagaccacagcaucgugucgucuuacgucuguuccggauuagugggcgacacgccucgcaagaaugauucaaguagcuccucucauugccuggacccaaacaaugaggaaggugggcacggaguuaaaggcugggcuuucgaugacggcaacgauguguggauggggcgaaccauuaaugagacaagcagacuuggauaugagacuuuuaaggucaucgaagguuggucaaaccccaaaaguaaguugcagauuaauaggcaagugauaguagaccggggcaaccguuccggguacagcggaaucuucucuguugagggcaaaucauguauuaaucgcugcuuuuauguggaacugaucagagguaggaaggaggaaaccgagguccuauggacaaguaacagcaucguggucuucugugggacuuccggcaccuacggaacaggcucuuggccugauggggccgaccucaaucugaugccaauuuga

SEQ ID NO: 151393 - RNA, 1410 nt, Artificial Sequence; identical to SEQ ID NO: 146248
  derived and/or modified CDS sequence (opt3) from neuraminidase__InfluenzaA__AGE89425

SEQ ID NO: 151394 - RNA, 1410 nt, Artificial Sequence; identical to SEQ ID NO: 147566
  derived and/or modified CDS sequence (opt3) from neuraminidase__InfluenzaA__AGE89722

SEQ ID NO: 151395 - RNA, 1410 nt, Artificial Sequence
  derived and/or modified CDS sequence (opt3) from neuraminidase__InfluenzaA__AGE89733
augaaccccaaucagaagaucauuaccauaggcagcgugugcaugacaaucgggauggccaaccugauucuccaaaucggaaauauuaucuccauauggaucucucacucaauucagcuugguaaccagaaucagaucgagacuuguaaccaaagugucauuacguacgaaaauaacaccuggguuaaucagacauaugugaacaucagcaauacuaacuucgcugcaggccaguccguagugucugucaaacuggccggaaauucgucauugugcccugugagcgggugggcgauauacaguaaggacaacuccauuagaaucggcucuaaaggugauguuuuugugauuagggagccauucaucagcuguuccccguuagaaugccggaccuuuuuccugacacagggggcucuacucaaugacaagcauucaaacggaaccaucaaagaucgcagucccuaucgaacucugaugagcuguccuauuggcgaggucccaucucccuacaacucccguuuugaaucaguggccuggagcgcaagugccugccacgacggcauaaauuggcuuacaaucgggauuucuggaccugauaacggugcuguagcaguucugaaguauaauggcaucauaaccgacacgauuaaguccuggagaaacaauaucuugaggacucaagagagcgagugugccugcgugaacgggucguguuucaccaucaugacagauggaccaaaugacggccaggcuucuuacaaaauuuuucggaucgaaaaggguaaaauugucaaguccguggagaugaacgcccccaauuaucauuacgaagagugcucauguuacccugauaguagcgagauaacuugcgugugccgcgacaacuggcacggguccaauagaccaugggucucuuucaaccagaaucucgaauaucagaucggauacauuuguagcggcaucuuuggcgauaacccgaggcccaaugacaaaaccgggucaugcggaccuguuaguuccaacggugcgaacggcgugaagggguucagcuuuaaguauggaaauggcguauggaucggucggacaaaaucuauuucaagucgcaagggguucgagaugauaugggauccaaacggcuggaccggaacggacaauaacuuuagcaucaaacaagacauugugggcaucaaugaaugguccggguacucuggaucguucguccagcaucccgagcugacuggucuggauuguauucgaccuugcuucuggguggaacucaucagaggcaggccaaaggagaacacaauauggaccagcggguccucaaucaguuuuuguggaguuaauucugacacugugggcuggagcuggcccgauggugcagaguuaccguucacaauugacaaauga

SEQ ID NO: 151396 - RNA, 1410 nt, Artificial Sequence
  derived and/or modified CDS sequence (opt3) from neuraminidase__InfluenzaA__AGE89743
augaaccccaaucagaagaucauuaccauaggcagcgugucccugacaaucucuacuauuugcuucuuuaugcagaucgccauucucaucacgaccgucacacuucacuucaaacaguacgaguuuaacucaccuccaaauaaccagguuaugcugugugaaccgacuauaaucgagagaaauauuaccgaaaucguguauuugacaaacaccacuauugagaaggaaaucugccccaaauuagcugaguacaggaauuggaguaagccucagugugacauaacaggguucgcaccauuuagcaaagauaacuccauucggcugucugccggaggugacaucuggguaacccgcgagcccuaugugucgugcgauccugacaaguguuaccaauucgcgcuaggccaggggacgacucucaauaacguccauucaaauaacaccgugcgagaucguacaccauauagaacucugcuuaugaaugaacugggaguucccuuucacuugggcaccaaacaggugugcauugcuuggagcaguuccucuugucaugacgguaaggccuggcuccacgucugcaucacaggggaugacaagaacgcaaccgccagcuucaucuacaauggaaggcugguggauuccguaguuucauggaguaaagagauucugcggacgcaggaaagcgagugugugugcauaaacggcacuuguacagucgugaugaccgacggcucugcuuccgggaaggcagauacuaaaauccucuuuauugaggaaggaaagaucgugcauacaucaaccuuaagcgguagugcccaacacgucgaggaaugcucuugcuauccucgcuacccaggcguuagaugugugugcagggacaacuggaagggguccaaucggccgauaguagauauuaacaucaaagaccacagcaucgugucgucuuacgucuguuccggacuggugggcgacacgccccgcaagaaugauucaaguagcuccucucauugccuugacccuaacaaugaggaaggugggcacggaguuaaaggcugggcuuucgaugacggcaacgauguguggauggggcgaaccauuaaugagacaagcagauugggauaugagacuuuuaaggucaucgaagguuggucaaacccaaaaaguaagcugcagauuaauaggcaagugauaguagacaaagauaaccgguccggcuacagcgggaucuucucuguugagggaaagucauguauuaaucguugcuuuuauguggaacuaauccgcggcagaaaggaggaaaccgagguccucuggacaaguaacagcaucguggucuucugugguacuuccgggaccuacggcacaggaucuuggcccgacggcgccgaucugaaucuuaugccuauuuga

SEQ ID NO: 151397 - RNA, 1410 nt, Artificial Sequence; identical to SEQ ID NO: 149835
  derived and/or modified CDS sequence (opt3) from neuraminidase__InfluenzaA__AGE89754

SEQ ID NO: 151398 - RNA, 1410 nt, Artificial Sequence; identical to SEQ ID NO: 149835
  derived and/or modified CDS sequence (opt3) from neuraminidase__InfluenzaA__AGE89765

SEQ ID NO: 151399 - RNA, 1410 nt, Artificial Sequence
  derived and/or modified CDS sequence (opt3) from neuraminidase__InfluenzaA__AGG13414
augaaccccaaucagaagaucauuaccauaggcagcgugucccugacaaucucuacuauuugcuucuuuaugcaaaucgccauucucaucacgaccgucacacuucacuucaaacaguacgaguuuaacucaccuccaaauaaccagguuaugcugugugaaccgacuauaaucgagagaaauauuaccgaaaucguguauuugacaaacaccacuauugagaaggaaaucugccccaaaccugcugaguacaggaauuggaguaagccacagugugacauaacaggguucgcacccuuuagcaaagauaacuccauucgguuaucugccggaggugacaucuggguaacccgcgagccuuaugugucgugcgauccagacaaguguuaccaauucgcgcugggccaggggacgacucuaaauucaguccauagcaacaauaccgugcgagaucguacacccuauagaacucuccugaugaacgaacuuggaguuccuuuucaccugggcaccaaacaggugugcauugcuuggaguuccucuagcugucaugacgguaaggccugguugcacgucugcaucacaggggaugacaagaaugcaaccgccuccuucaucuacaacggaaggcucguggauucaguaguuaguuggagcaaagagauucugcggacgcaggaaucugagugugugugcauaaauggcacuuguacagucgugaugaccgacggcuccgcuucagggaaggcagauacuaaaauccuguuuauugaggaaggaaagaucgugcauacaagcacccucagugguucugcccaacacgucgaggaaugcuccugcuauccacgcuacccgggcguuagaugugugugcagggacaacuggaaggggagcaaccggcccauaguagauauuaauaucaaagaccacucgaucgugucucgcuacgucuguuccggauuagugggcgacacgccucgaaagaacgauucaaguagcuccucucauugccuggacccaaauaacgaggaaggugggcacggaguuaaaggcugggcuuucgaugacggcaaugauguguggauggggagaaccauuaacgagacaagcaggcuuggauaugagacuuuuaaggucaucgaagguuggucaaaucccaaaaguaaguugcagauuaacaaacaggugauaguagaccggggcgaucguuccggguacagcggaaucuucucuguugagggcaagucauguauuaaucgcugcuuuuauguggaacugaucagagguaggaaggaggaaaccgagguccuauggacaaguaacagcaucguggucuucugugggacuuccggcaccuacggaacaggcucuuggccugacggggccgaucucaaucugaugccaauuuga

SEQ ID NO: 151400 - RNA, 1410 nt, Artificial Sequence; identical to SEQ ID NO: 150194
  derived and/or modified CDS sequence (opt3) from neuraminidase__InfluenzaA__AGG13426

SEQ ID NO: 151401 - RNA, 1410 nt, Artificial Sequence; identical to SEQ ID NO: 150194
  derived and/or modified CDS sequence (opt3) from neuraminidase__InfluenzaA__AGG13438

SEQ ID NO: 151402 - RNA, 1410 nt, Artificial Sequence
  derived and/or modified CDS sequence (opt3) from neuraminidase__InfluenzaA__AGG13498
augaaccccaaucagaagaucauuaccauaggcagcgugucccugacaaucucuacuauuugcuucuuuaugcaaaucgccauucucaucacgaccgucacacuucacuucaaacaguacgaguuuaacucaccuccaaauaaccagguuaugcugugugaaccgacuauaaucgagagaaauauuaccgaaaucguguauuugacaaacaccacuauugagaaggaaaucugccccaaauuagcugaguacaggaauuggaguaagccucagugugacauaacaggguucgcaccauuuagcaaagauaacuccauucggcugucugccggaggugacaucuggguaacccgcgagcccuaugugucgugcgauccugacaaguguuaccaauucgcgcuaggccaggggacgacucucaauaacguccauucaaauaacaccgugcgagaucguacaccauauagaacucugcuuaugaaugaacugggaguucccuuucacuugggcaccaaacaggugugcauugcuuggagcaguuccucuugucaugacgguaaggccuggcuccacgucugcaucacaggggaugacaagaacgcaaccgccagcuucaucuacaauggaaggcugguggauuccguaguuucauggaguaaagacauucugcggacgcaggagagcgaaugugugugcauaaacggcacuugugcugucgugaugacagauggcucugcauccgggaaggccgacaccaaaauccucuuuauugaggagggaaagaucgugcauacuucaacauuaagcgguagugcucaacacgucgaagagugcucuugcuauccucgcuacccaggcguuagaugugugugcagggauaacuggaagggguccaaucggccgauaguagacauuaacaucaaagaccacagcaucgugucgucuuacgucuguuccggacuggugggcgauacccccaggaagaaugacucaaguagcuccggucauugccuugauccuaacaaugaagaagggggacacggcguuaaaggcugggccuucgacgaugggaacgacguguggaugggacgaacgauuaaugagaccucuagauuggguuaugagacauuuaaggucaucgagggcuggagcaacccaaaaucaaagcugcagauuaaucgccaggugauaguagaucgggggaaccguaguggauacuccggcaucuucagcguugaagguaaaaauuguauuaaccgcugcuuuuauguggagcuaaucagagggaggaaggaagagacugaaguccucuggaccucuaauucaaucguggucuucuguggcacaaguggaacuuacggcaccgggagcuggcccgacggagcggaucugaaccuuaugccuauuuga

SEQ ID NO: 151403 - RNA, 1410 nt, Artificial Sequence; identical to SEQ ID NO: 150194
  derived and/or modified CDS sequence (opt3) from neuraminidase__InfluenzaA__AGG13510

SEQ ID NO: 151404 - RNA, 1410 nt, Artificial Sequence; identical to SEQ ID NO: 151402
  derived and/or modified CDS sequence (opt3) from neuraminidase__InfluenzaA__AGG13522

SEQ ID NO: 151405 - RNA, 1410 nt, Artificial Sequence
  derived and/or modified CDS sequence (opt3) from neuraminidase__InfluenzaA__AGG13534
augaaccccaaucagaagaucauuaccauaggcagcgugucccugacaaucucuacugucugcuucuuuaugcaaauugccauccucauuacgaccguuacacuucacuucaaacaguacgaguuuaacucaccuccaaauaaccaggugaugcugugugaaccgacuaucauagagagaaauaucaccgaaauuguauauuugacaaacaccacuaucgagaaggaaauuugccccaaaccugcugaguacaggaauuggaguaagccacagugugggaucacaggauucgcacccuuuagcaaagacaacuccauacgguuaucugccgguggcgauauuugggugacccgcgagccuuaugucucgugcgacccagauaaguguuaccaauucgcgcuggggcagggaacgacucuaaauaacgugcauucaaauaacaccguucgagaccguacacccuauagaacucuccugaugaaugaacuuggcgugccuuuucaccuggguaccaagcaggucugcaucgcuuggagcaguuccucuugucaugaugggaaagccugguugcacgugugcauuacaggagacgauaagaacgcaaccgccagcuucaucuacaauggcaggcucguagacuccguugugucauggaguaaagagauccugcggacgcaggaaagcgagugugucugcauuaacggcacuuguacaguggugaugaccgaugggucugcuuccggaaaggcagacacuaaaauacuguuuaucgaggaagguaagauuguccauacaucaacccucagcggcagugcccaacacguugaggaaugcucuugcuauccacgcuacccgggggugagauguguaugcagggauaacuggaagggauccaaucggcccaucguggacauaaacauuaaagaucacagcaucgucucgucuuacguguguuccggcuuaguuggugacacgccucgcaagaaugacucaaguagcuccucucauugccuggauccaaacaaugaggaagggggacacggcgugaaaggcugggcuuucgacgaugggaacgacgucuggaugggacgaaccaucaaugagacaagcagacuugguuaugagacuuuuaaggugauugaaggcuggucaaaccccaaaaguaaguugcagaucaauaggcagguaauuguugaucguggggaccgguccggauacagcggcauauucucuguggaggguaaaucauguaucaaccgcugcuuuuaugucgaacugauuagagggaggaaggaggaaaccgaggugcuauggacaaguaauagcaucgucguguucuguggcacuuccggaaccuacggcacagggucuuggccugauggagccgaccucaaccugaugccaaucuga

SEQ ID NO: 151406 - RNA, 1410 nt, Artificial Sequence
  derived and/or modified CDS sequence (opt3) from neuraminidase__InfluenzaA__AGG13546
augaaccccaaucagaagaucauuaccauaggcagcgugucccugacaaucucuacuauuugcuucuuuaugcaaaucgccauucucaucacgaccgucacacuucacuucaaacaguacgaguuuaacucaccuccaaauaaccagguuaugcugugugaaccgacuauaaucgagagaaauauuaccgaaaucguguauuugacaaacaccacuauugagaaggaaaucugccccaaaccugcugaguacaggaauuggaguaagccacagugugggauaacaggauucgcacccuuuagcaaagacaacuccauucgguuaucugccgguggcgauaucuggguaacccgcgagccuuaugugucgugcgacccagauaaguguuaccaauucgcgcuggggcagggaacgacucuaaauaacguccauucaaauaacaccgugcgagaccguacacccuauagaacucuccugaugaaugaacuuggcguuccuuuucaccuggguaccaaacaggugugcauugcuuggagcaguuccucuugucaugaugggaaggccugguugcacgucugcaucacaggagacgauaagaacgcaaccgccagcuucaucuacaauggcaggcucguggacuccguaguuucauggaguaaagagauucugcggacgcaggaaagcgagugugugugcauaaacggcacuuguacagucgugaugaccgaugggucugcuuccggaaaggcagacacuaaaauccuguuuauugaggaagguaagaucgugcauacaucaacccucagcggcagugcccaacacgucgaggaaugcucuugcuauccacgcuacccggggguuagaugugugugcagggauaacuggcggggauccaaucgccccauaguagacauuaacaucaaggaucacagcaucgugucgucuuacgucuguuccggcuuagugggugacacgccucggaaaaaugacucaaguagcuccucucauugccuggauccaaacaaugaggaagggggacacggcguuaagggcugggcuuucgacgaugggaacgacguguggaugggaagaaccauuaaugagacaagcaggcuugguuaugagacuuuuaaagucaucgaaggcuggucaaaccccaagaguaaauugcagauuaaucgacaggugauaguagaucguuccgaccgcagcggguacucuggaaucuucucaguugagggcaagaguuguauuaacagaugcuuuuauguggaacugaucaggggucggaaagaggaaaccgagguccuauggacaagcaauuccaucguggucuucugugggacuucuggcaccuacggaacaggcucguggccugauggggccgaccucaaccugaugccaauuuga

SEQ ID NO: 151407 - RNA, 1410 nt, Artificial Sequence; identical to SEQ ID NO: 150194
  derived and/or modified CDS sequence (opt3) from neuraminidase__InfluenzaA__AGG13558

SEQ ID NO: 151408 - RNA, 1410 nt, Artificial Sequence; identical to SEQ ID NO: 150194
  derived and/or modified CDS sequence (opt3) from neuraminidase__InfluenzaA__AGG13570

SEQ ID NO: 151409 - RNA, 1410 nt, Artificial Sequence
  derived and/or modified CDS sequence (opt3) from neuraminidase__InfluenzaA__AGG13582
augaaccccaaucagaagaucauuaccauaggcagcgugucccugacaaucucuacuauuugcuucuuuaugcagaucgccauucucaucacgaccgucacacuucacuucaaacaguacgaguuuaacucaccuccaaauaaccagguuaugcugugugaaccgacuauaaucgagagaaauauuaccgaaaucguguauuugacaaacaccacuauugagaaggaaaucugccccaaaccugcugaguacaggaauuggaguaagccacagugugggauaacaggauucgcacccuuuagcaaagacaacuccauucgguuaucugccgguggcgauaucuggguaacccgcgagccuuaugugucgugcgacccagauaaguguuaccaauucgcgcuggggcagggaacgacucuaaauaacguccauucaaauaacaccgugcgagaccguacacccuauagaacucuccugaugaaugaacuuggcguuccuuuucaccuggguaccaaacaggugugcauugcuuggagcaguuccucuugucaugaugggaaggccugguugcacgucugcaucacaggagaggacaagaacgcaaccgccagcuucaucuacaauggcaggcucguggauuccguaguuucauggaguaaagaaacgcugcggacucaggagagcgagugugugugcauuaacggcacauguaccgucgugaugacugacgggucugcuuccggaaaggcagauacaaaaauacuguuuaucgaagaggguaagauugugcauaccucaacgcucagcggcagugcccaacacgucgaagagugcucuugcuauccacgcuacccggggguuagaugugugugcagggacaacuggaagggauccaaucggcccaucguagauauaaacauuaaagaccacagcaucgugucgucuuacgucuguuccggcuuagugggugauaccccucgcaagaaugacucaaguagcuccucucauugccuggacccaaacaaugaagaagggggacacggcguuaaaggcugggcuuucgaugacgggaacgauguguggaugggacgaacaaucaaugagacuagcagacuugguuaugagaccuuuaaggucauugagggcuggucaaaccccaaaaguaaguugcagaucaauaggcaagugauuguagaccguggggaucgguccggauacagcggcauauucucuguugaagguaaaucauguaucaaccgcugcuuuuauguggagcugauuagagggaggaaggaagagacagagguccuauggaccaguaauagcaucguggucuucuguggcacuuccggaacauacggcaccgggucuuggccugacggagccgaucucaaccugaugccaaucuga

SEQ ID NO: 151410 - RNA, 1410 nt, Artificial Sequence; identical to SEQ ID NO: 150194
  derived and/or modified CDS sequence (opt3) from neuraminidase__InfluenzaA__AGG13606

SEQ ID NO: 151411 - RNA, 1410 nt, Artificial Sequence
  derived and/or modified CDS sequence (opt3) from neuraminidase__InfluenzaA__AGG13618
augaaccccaaucagaagaucauuaccauaggcagcgugucccugacaaucucuacuauuugcuucuuuaugcaaaucgccauucucaucacgaccgucacacuucacuucaaacaguacgaguuuaacucaccuccaaauaaccagguuaugcugugugaaccgacuauaaucgagagaaauauuaccgaaaucguguauuugacaaacaccacuauugagaaggaaaucugccccaaaccugcugaguacaggaauuggaguaagccacagugugggauaacaggauucgcacccuuuagcaaagacaacuccauucgguuaucugccgguggcgauaucuggguaacccgcgagccuuaugugucgugcgacccagauaaguguuaccaauucgcgcuggggcagggaacgacucuaaauaacguccauucaaauaacaccgugcgagaccguacacccuauagaacucuccugaugaaugaacuuggcguuccuuuucaccuggguaccaaacaggugugcauugcuuggagcaguuccucuugucaugaugggaaggccugguugcacgucugcaucacaggagacgauaagaacgcaaccgccagcuucaucuacaauggcaggcucguggacuccguaguuucauggaguaaagagauucugcggacgcaggaaagcgagugugugugcauaaacggcacuuguacagucgugaugaccgaugggucugcuuccggaaaggcagacacuaaaauccuguuuauugaggaagguaagaucgugcauacaucaacccucagcggcagugcccaacacgucgaggaaugcucuugcuauccacgcuacccggggguuagaugugugugcagggauaacuggaagggauccaaucggcccauaguagacauuaacaucaaagaucacagcaucgugucgucuuacuuauguuccggccuggucggugacacgccucgcaagaaugacgggucaaguagcucccauugccuugauccaaacaaugaggaaggaggccacggcgugaaagggugggcuuucgacgauggaaacgacguuuggaugggucgaaccauuaaugagacaucuagauugggcuaugagacuuuuaaggugaucgaaggguggagcaaccccaaaucaaagcugcagauuaauaggcagauaaucgucgaucggggagaccguaguggcuacuccgguauuuucagcguggaggggaaaucuuguaucaaccgcugcuuuuauguagaacuaaucagaggcaggaaggaggaaaccgagguucucuggacaucaaauaguauuguggucuucuguggaacuagcggcaccuacgggacaggauccuggccugauggugccgaccugaaccuuaugccaauauga

SEQ ID NO: 151412 - RNA, 1410 nt, Artificial Sequence
  derived and/or modified CDS sequence (opt3) from neuraminidase__InfluenzaA__AGG13630
augaaccccaaucagaagaucauuaccauaggcagcgugucccugacaaucucuacuauuugcuucuuuaugcagaucgccauucucaucacgaccgucacacuucacuucaaacaguacgaguuuaacucaccuccaaauaaccagguuaugcugugugaaccgacuauaaucgagagaaauauuaccgaaaucguguauuugacaaacaccacuauugagaaggaaaucugccccaaaccugcugaguacaggaauuggaguaagccacagugugggauaacaggauucgcacccuuuagcaaagacaacuccauucgguuaucugccgguggcgauaucuggguaacccgcgagccuuaugugucgugcgacccagauaaguguuaccaauucgcgcuggggcagggaacgacucuaaauaacguccauucaaauaacaccgugcgagaccguacacccuauagaacucuccugaugaaugaacuuggcguuccuuuucaccuggguaccaaacaggugugcauugcuuggagcaguuccucuugucaugaugggaaggccugguugcacgucugcaucacaggagaggacaagaacgcaaccgccagcuucaucuacaauggcaggcucguggauuccguaguuucauggaguaaagaaauucugcggacgcaggagagcgagugugugugcauaaacggcacuuguacagucgugaugaccgacgggucugcuuccggaaaggcagauacuaaaauccuguuuauugaagaggguaagaucgugcauacaucaacccucagcggcagugcccaacacgucgaagagugcucuugcuauccacgcuacccggggguuagaugugugugcagggacaacuggaagggauccaaucggcccauaguagauauuaacaucaaagaccacagcaucgugucgucuuacgucuguuccggcuuagugggugauacgccucgcaagaaugacucaaguagcuccucucauugccuggacccaaacaaugaagaagggggacacggcguuaaaggcugggcuuucgaugacgggaacgauguguggaugggacgaaccauuaaugagacaagcagacuugguuaugagacuuuuaaggucaucgagggcuggucaaaccccaaaaguaaguugcagauuaauaggcaagugauaguagaccguggggaucgguccggauacagcggcaucuucucuguugaagguaaaucauguauuaaccgcugcuuuuauguggagcugaucagagggaggaaggaagagaccgagguccuauggacaaguaauagcaucguggucuucuguggcacuuccggaaccuacggcacagggucuuggccugacggagccgaucucaaccugaugccaauuuga

SEQ ID NO: 151413 - RNA, 1410 nt, Artificial Sequence; identical to SEQ ID NO: 150194
  derived and/or modified CDS sequence (opt3) from neuraminidase__InfluenzaA__AGG13642

SEQ ID NO: 151414 - RNA, 1410 nt, Artificial Sequence
  derived and/or modified CDS sequence (opt3) from neuraminidase__InfluenzaA__AGG13654
augaaccccaaucagaagaucauuaccauaggcagcgugucccugacaaucucuacuauuugcuucuuuaugcaaaucgccauucucaucacgaccgucacacuucacuucaaacaguacgaguuuaacucaccuccaaauaaccagguuaugcugugugaaccgacuauaaucgagagaaauauuaccgaaaucguguauuugacaaacaccacuauugagaaggaaaucugccccaaauuagcugaguacaggaauuggaguaagccucagugugacauaacaggguucgcaccauuuagcaaagauaacuccauucggcugucugccggaggugacaucuggguaacccgcgagcccuaugugucgugcgauccugacaaguguuaccaauucgcgcuaggccaggggacgacucucaauaacguccauucaaauaacaccgugcgagaucguacaccauauagaacucugcuuaugaaugaacugggaguucccuuucacuugggcaccaaacaggugugcauugcuuggagcaguuccucuugucaugacgguaaggccuggcuccacgucugcaucacaggggaugacaagaacgcaaccgccagcuucaucuacaauggaaggcugguggauuccguaguuucauggaguaaagacauucugcggacgcaggagagcgaaugugugugcauaaacggcacuugugcugucgugaugacagauggcucugcauccgggaaggccgacaccaaaauccucuuuauugaggagggaaagaucgugcaaacuucaacauuaagcgguagugcucagcaugucgaagagugcucuugcuauccucgcuacccaggcguuagaugugugugcagggauaacuggaagggguccaaucggccgauaguagacauuaacaucaaagaccacagcaucgugucgucuuacgucuguuccggacuggugggcgauacccccaggaagaaugacucaaguagcuccggucacugccuugauccuaacaaugaagaagggggacauggcguuaaaggcugggccuucgacgaugggaacgacguguggaugggacgaacgauuaaugagaccucuagauuggguuaugagacauuuaaggucaucgagggcuggagcaacccaaaaucaaagcugcagauuaaucgccaggugauaguagaucgggggaaccguaguggauacuccggcaucuucagcguugaagguaaaaauuguauuaaccgcugcuuuuauguggagcuaaucagagggaggaaggaagagaucgaaguccucuggacuucuaauucaauuguggucuucuguggcaccaguggaacauacggcacugggagcuggcccgacggagcggaucugaaccuuaugccuauauga

SEQ ID NO: 151415 - RNA, 1410 nt, Artificial Sequence; identical to SEQ ID NO: 151405
  derived and/or modified CDS sequence (opt3) from neuraminidase__InfluenzaA__AGG13666

SEQ ID NO: 151416 - RNA, 1410 nt, Artificial Sequence
  derived and/or modified CDS sequence (opt3) from neuraminidase__InfluenzaA__AGG13678
augaaccccaaucagaagaucauuaccauaggcagcgugucccugacaaucucuacuauuugcuucuuuaugcagaucgccauucucaucacgaccgucacacuucacuucaaacaguacgaguuuaacucaccuccaaauaaccagguuaugcugugugaaccgacuauaaucgagagaaauauuaccgaaaucguguauuugacaaacaccacuauugagaaggaaaucugccccaaaccugcugaguacaggaauuggaguaagccacagugugggauaacaggauucgcacccuuaagcaaagacaacuccauucggcugucugccgguggcgauaucuggguaacccgcgagccuuaugugucgugcgacccagauaaguguuaccaauuugcgcuagggcagggaacgacucucaauaacguccauucaaauaacaccgugcgagaccguacacccuauagaacucugcuuaugaaugaacugggcguuccuuuccacuuggguaccaaacaggugugcauugcuuggagcaguuccucuugucaugaugggaaggccuggcuccacgucugcaucacaggagacgauaagaacgcaaccgccagcuuuaucuacaauggcaggcugguggacuccguaguuucauggaguaaagagauucugcggacgcaggaaagcgagugugugugcauaaacggcacuuguacagucgugaugaccgaugggucugcuuccggaaaggcagacacuaaaauccucuucauugaggaagguaagaucgugcauacaucaaccuuaagcggcagugcccaacacgucgaggaaugcucuugcuauccacgcuacccggggguuagaugugugugcagggauaacuggaagggauccaaucggcccauaguagacauuaacaucaaagaucacagcaucgugucgucuuacgucuguuccggccuggugggugacacgccucgcaagaaugacucaaguagcuccucucauugccuugggccaaacaaugaggaaggaggccacggcguuaaagggugggcuuuugaugacggaaacgauguguggaugggucgaaccauuaaugagacaagcagauugggcuaugagacuuucaaggucaucgaaggguggucaaaccccaaaaguaagcugcagauuaauaggcaagugauaguagaccggggagaucguuccggcuacagcgguaucuuuucuguugaggggaaaucauguauuaaccgcugcuucuauguggaacuaaucagaggcaggaaggaggaaaccgagguccucuggacaaguaauagcaucguggucuuuuguggaacugccggcaccuacgggacaggauccuggccugacggugcggaucugaaccuuaugccaauuuga

SEQ ID NO: 151417 - RNA, 1410 nt, Artificial Sequence; identical to SEQ ID NO: 150194
  derived and/or modified CDS sequence (opt3) from neuraminidase__InfluenzaA__AGG13690

SEQ ID NO: 151418 - RNA, 1410 nt, Artificial Sequence
  derived and/or modified CDS sequence (opt3) from neuraminidase__InfluenzaA__AGG13702
augaaccccaaucagaagaucauuaccauaggcagcgugucccugacaaucucuacuauuugcuucuuuaugcaaaucgccauucucaucacgaccgucacacuucacuucaaacaguacgaguuuaacucaccuccaaauaaccagguuaugcugugugaaccgacuauaaucgagagaaauauuaccgaaaucguguauuugacaaacaccacuauugagaaggaaaucugccccaaaccugcugaguacaggaauuggaguaagccacagugugacauaacaggguucgcacccuuuagcaaagauaacuccauucgguuaucugccggaggugacaucuggguaacccgcgagccuuaugugucgugcgauccagacaaguguuaccaauucgcgcugggccaggggacgacucuaaauaacguccauucaaauaacaccgugcgagaucguacacccuauagaacucuccugaugaaugaacuuggaguuccuuuucaccugggcaccaaacaggugugcauugcuuggagcaguuccucuugucaugacgguaaggccugguugcacgucugcaucacaggggaugacaagaacgcaaccgccagcuucaucuacaauggaaggcucguggauuccguaguuucauggaguaaagagauucugcggacgcaggaaagcgagugugugugcauaaacggcacuuguacagucgugaugaccgacggcucugcuuccgggaaggcagauacuaaaauccuguuuauugaggaaggaaagaucgugcauacaucaacccucagcgguaacgcccaacacgucgaggaaugcaguugcuauccacgcuacccgggcguuagaugugugugcagggacaauuggaaggggucuaaccggcccauaguagauauuaauaucaaagaccacuccaucgugagccgcuacgucuguucgggauuagugggcgacacgccucgaaagaacgauucuuccucaaguagccauugccuggacccaaauaacgaggaaggugggcacggaguuaaaggcugggcuuucgaugacggcaaugauguguggauggggagaaccauuaacgagacauccaggcuuggauaugagacuuuuaaggucaucgaagguuggucuaaucccaaaagcaaguugcagauuaaccgucaggugauaguagaccggggcgaucgcucaggguacaguggaaucuucuccguugagggcaaaagcuguauuaauagaugcuuuuauguggaacugaucaggggucggaaggaggaaaccgagguccuauggacaucuaacucaaucguggucuucugugggaccaguggcacuuacggaacaggcagcuggccugacggggccgaucucaaucugaugccaauuuga

SEQ ID NO: 151419 - RNA, 1410 nt, Artificial Sequence; identical to SEQ ID NO: 151402
  derived and/or modified CDS sequence (opt3) from neuraminidase__InfluenzaA__AGG13714

SEQ ID NO: 151420 - RNA, 1410 nt, Artificial Sequence; identical to SEQ ID NO: 150194
  derived and/or modified CDS sequence (opt3) from neuraminidase__InfluenzaA__AGG13726

SEQ ID NO: 151421 - RNA, 1410 nt, Artificial Sequence; identical to SEQ ID NO: 150194
  derived and/or modified CDS sequence (opt3) from neuraminidase__InfluenzaA__AGG13738

SEQ ID NO: 151422 - RNA, 1410 nt, Artificial Sequence; identical to SEQ ID NO: 150194
  derived and/or modified CDS sequence (opt3) from neuraminidase__InfluenzaA__AGG13750

SEQ ID NO: 151423 - RNA, 1410 nt, Artificial Sequence
  derived and/or modified CDS sequence (opt3) from neuraminidase__InfluenzaA__AGG13762
augaaccccaaucagaagaucauuaccauaggcagcgugucccugacaaucucuacuauuugcuucuuuaugcaaaucgccauucucaucacgaccgucacacuucacuucaaacaguacgaguuuaacucaccuccaaauaaccagguuaugcugugugaaccgacuauaaucgagagaaauauuaccgaaaucguguauuugacaaacaccacuauugagaaggaaaucugccccaaaccugcugaguacaggaauuggaguaagccacagugugacauaacaggguucgcacccuuuagcaaagauaacuccauucgguuaucugccggaggugacaucuggguaacccgcgagccuuaugugucgugcgauccagacaaguguuaccaauucgcgcugggccaggggacgacucuaaauaacguccauucaaauaacaccgugcgagaucguacacccuauagaacucuccugaugaaugaacuuggaguuccuuuucaccugggcaccaaacaggugugcauugcuuggagcaguuccucuugucaugacgguaaggccugguugcacgucugcaucacaggggaugacaagaacgcaaccgccagcuucaucuacaauggaaggcucguggauuccguaguuucauggaguaaagagauucugcggacgcaggaaagcgagugugugugcauaaacggcacuuguacagucgugaugaccgacggcucugcuuccgggaaggcagauacuaaaauccuguuuauugaggaaggaaagaucgugcauacaucaacccucagcgguagugcccaacacgucgaggaaugcucuugcuauccacgcuacccgggcguuagaugugugugcagggacaacuggaagggguccaaucggcccauaguagauauuaacaucaaagaccacagcaucgugucgcgcuacgucuguucuggauuagugggcgacacgccucgaaagaaugauuccucaaguagcucccauugccuggacccaaacaaugaggaaggugggcacggaguuaaaggcugggcuuucgaugacggcaacgauguguggauggggagaaccauuaaugagacaucuaggcuuggauaugagacuuuuaaggucaucgaagguuggagcaaccccaaaucaaaguugcagauuaaucgucaggugauaguagaccggggcgaucgcaguggguacuccggaaucuucagcguugagggcaaaucuuguauuaacagaugcuuuuauguggaacugaucaggggucggaaggaggaaaccgagguccuauggacaucaaauaguaucguggucuucugugggacuagcggcaccuacggaacaggcuccuggccugacggggccgaucucaaccugaugccaauuuga

SEQ ID NO: 151424 - RNA, 1410 nt, Artificial Sequence
  derived and/or modified CDS sequence (opt3) from neuraminidase__InfluenzaA__AGG13774
augaaccccaaucagaagaucauuaccauaggcagcgugucccugacaaucucuacuauuugcuucuuuaugcagaucgccauucucaucacgaccgucacacuucacuucaaacaguacgaguuuaacucaccuccaaauaaccagguuaugcugugugaaccgacuaccauagagagaaauaucacagaaauuguguauuugaccaacacuacaaucgagaaggaaauuugccccaaauuagcugaguacaggaauuggaguaagccucagugugacaucaccggguucgcaccauuuagcaaagauaacuccauacggcugucugccggaggugacauuuggguaacgcgcgagcccuaugugucgugcgauccugacaaguguuaccaauucgcgcuaggccaggggacuacccucaauaacguccauucaaauaacacagugcgagaucguacuccauauagaacccugcuuaugaaugaacugggaguucccuuucacuugggcacaaaacaggugugcaucgcuuggagcaguuccucuugucaugacgguaaggccuggcuccacgucugcauuaccggggaugacaagaacgcaacggccagcuucaucuacaauggaaggcugguggauuccguaguuucauggaguaaagacauccugcggacucaggagagcgaaugugugugcauuaacggcacaugugcugucgugaugaccgauggcucugcauccgggaaggccgacacuaaaauacucuuuaucgaggagggaaagauugugcauacaucaaccuuaagcgguagugcucaacacgucgaagagugcucuugcuauccucgcuacccaggcguuagaugugugugcagggauaacuggaagggguccaaucggccgaucguagacauaaacauuaaagaccacagcaucgugucgucuuacgucuguuccggacuggugggcgauacgccccgcaagaaugacucaaguagcuccggucauugccuugauccuaacaaugaagaagggggacacggcguuaaaggcugggccuucgacgaugggaacgacguguggaugggacgaaccaucaaugagacaucuagauuggguuaugagacuuuuaaggucauugagggcuggagcaacccaaaaucaaagcugcagaucaauaggcaagugauuguagaucgggggaaccguaguggauacuccggcauauucagcguugaagguaaaaauuguaucaaccgcugcuuuuauguggagcuaauuagagggaggaaggaagagaccgaaguccucuggacaucuaauucaaucguggucuucuguggcaccaguggaacuuacggcacagggagcuggcccgacggagcggaucugaaccuuaugccuaucuga

SEQ ID NO: 151425 - RNA, 1410 nt, Artificial Sequence
  derived and/or modified CDS sequence (opt3) from neuraminidase__InfluenzaA__AGG13786
augaaccccaaucagaagaucauuaccauaggcagcgugucccugacaaucucuacuauuugcuucuuuaugcaaaucgccauucucaucacgaccgucacacuucacuucaaacaguacgaguuuaacucaccuccaaauaaccagguuaugcugugugaaccgacuauaaucgagagaaauauuaccgaaaucguguauuugacaaacaccacuauugagaaggaaaucugccccaaaccugcugaguacaggaauuggaguaagccacagugugggauaacaggauucgcacccuuuagcaaagacaacuccauucgguuaucugccgguggcgauaucuggguaacccgcgagccuuaugugucgugcgacccagauaaguguuaccaauucgcgcuggggcagggaacgacucuaaauaaccuccauucaaauaacaccguccgagaccguacacccuauagaacucugcuuaugaaugaacugggcgugccuuuucacuuggguaccaagcagguuugcauugcuuggagcaguuccucuugucaugaugggaaagccuggcuccacgugugcaucacaggagacgauaagaacgcaaccgccagcuucaucuacaauggcaggcuggucgacuccgugguaucauggaguaaagagauucugcggacgcaggaaagcgaguguguuugcauaaacggcacuuguacaguggucaugaccgaugggucugcuuccggaaaggcagacacuaaaauccucuuuauugaggaagguaagaucgugcauacaucaaccuuaagcggcagugcccaacacguggaggaaugcucuugcuauccacgcuacccgggggucagauguguuugcagggauaacuggaagggauccaaucggcccauaguggacauuaacaucaaagaucacagcaucguaucgucuuacguguguuccggccuggucggugacacgccucgcaagaaugacucaaguagcuccucucauugccuugauccaaacaaugaggaagggggacacggcgugaaaggcugggcuuucgacgaugggaacgacguuuggaugggacgaaccauuaaugagacaagcagauuggguuaugagacuuuuaaggugaucgaaggcuggucaaaccccaaaaguaagcugcagauuaauaggcaggucauaguggaucguggggaccgguccggauacagcggcaucuucucuguagaggguaaaucauguauuaaccgcugcuuuuauguugaacuaaucagagggaggaaggaggaaaccgaggugcucuggacaaguaauagcaucgucguguucuguggcacuuccggaaccuacggcacagggucuuggccugauggagccgaccugaaccuuaugccaauuuga

SEQ ID NO: 151426 - RNA, 1410 nt, Artificial Sequence; identical to SEQ ID NO: 151402
  derived and/or modified CDS sequence (opt3) from neuraminidase__InfluenzaA__AGG13798

SEQ ID NO: 151427 - RNA, 1410 nt, Artificial Sequence
  derived and/or modified CDS sequence (opt3) from neuraminidase__InfluenzaA__AGG13810
augaaccccaaucagaagaucauuaccauaggcagcgugucccugacaaucucuacuauuugcuucuuuaugcagaucgccauucucaucacgaccgucacacuucacuucaaacaguacgaguuuaacucaccuccaaauaaccagguuaugcugugugaaccgacuauaaucgagagaaauauuaccgaaaucguguauuugacaaacaccacuauugagaaggaaaucugccccaaaccugcugaguacaggaauuggaguaagccacagugugacauaacaggguucgcacccuuuagcaaagauaacuccauucgguuaucugccggaggugacaucuggguaacccgcgagccuuaugugucgugcgauccagacaaguguuaccaauucgcgcugggccaggggacgacucuaaauaacguccauucaaauaacaccgugcgagaucguacacccuauagaacucuccugaugaaugaacuuggaguuccuuuucaccugggcaccaaacaggugugcauugcuuggagcaguuccucuugucaugacgguaaggccugguugcacgucugcaucacaggggaugacaagaacgcaaccgccagcuucaucuacaauggaaggcucguggauuccguaguuucauggaguaaagagauucugcggacgcaggaaagcgagugugugugcauaaacggcacuuguacagucgugaugaccgacggcucugcuuccgggaaggcagauacuaaaauccuguuuauugaggaaggaaagaucgugcauacaucaacccucagcgguagugcccaacacgucgaggaaugcucuugcuauccacgcuacccgggcguuagaugugugugcagggacaacuggaagggguccaaucggcccauaguagauauuaacaucaaagaccacagcaucgugucgcgcuacgucuguucuggauuagugggcgacacgccucgaaagaaugauuccucaaguagcucccauugccuggguccaaacaaugaggaagggggacacggcguuaaaggcugggcuuucgacgaugggaacgacguguggaugggaagaaccauuaaugagacaucuaggcuugguuaugagacuuuuaaggucaucgaaggcuggagcaaccccaaaucaaaguugcagauuaaucggcaagugauaguagaucguggggaccgcaguggauacuccggcaucuucagcguugaggguaaaucuuguauuaacagaugcuuuuauguggaacugaucagggggcggaaggaggaaaccgagguccuauggacaucaaauaguaucguggucuucuguggcacuagcggaaccuacggcacaggguccuggccugauggagccgaccucaaccugaugccaauuuga

SEQ ID NO: 151428 - RNA, 1410 nt, Artificial Sequence; identical to SEQ ID NO: 151402
  derived and/or modified CDS sequence (opt3) from neuraminidase__InfluenzaA__AGG13822

SEQ ID NO: 151429 - RNA, 1410 nt, Artificial Sequence; identical to SEQ ID NO: 151402
  derived and/or modified CDS sequence (opt3) from neuraminidase__InfluenzaA__AGG13834

SEQ ID NO: 151430 - RNA, 1410 nt, Artificial Sequence; identical to SEQ ID NO: 151423
  derived and/or modified CDS sequence (opt3) from neuraminidase__InfluenzaA__AGG13846

SEQ ID NO: 151431 - RNA, 1410 nt, Artificial Sequence; identical to SEQ ID NO: 150194
  derived and/or modified CDS sequence (opt3) from neuraminidase__InfluenzaA__AGG13858

SEQ ID NO: 151432 - RNA, 1410 nt, Artificial Sequence
  derived and/or modified CDS sequence (opt3) from neuraminidase__InfluenzaA__AGG13870
augaaccccaaucagaagaucauuaccauaggcagcgugucccugacaaucucuacuauuugcuucuuuaugcaaaucgccauucucaucacgaccgucacacuucacuucaaacaguacgaguuuaacucaccuccaaauaaccagguuaugcugugugaaccgacuauaaucgagagaaauauuaccgaaaucguguauuugacaaacaccacuauugagaaggaaaucugccccaaaccugcugaguacaggaauuggaguaagccacagugugggauaacaggauucgcacccuuuagcaaagacaacuccauucgguuaucugccgguggcgauaucuggguaacccgcgagccuuaugugucgugcgacccagaucgauguuaccaauucgcgcuggggcagggaacgacucuaaauaacaugcauucaaauaacaccguccgugacagaacacccuauaggacucuccugaugaaugaacuuggcgugccuuuucaccuggguaccaagcagguuugcauugcuuggagcaguuccucuugucaugaugggaaggccugguugcacgugugcaucacaggagacgauaaaaacgcaaccgccagcuucaucuacaauggccggcucgucgacuccgugguaucauggaguaaggagauucugcgcacgcaggaaagcgaguguguuugcauaaacggcacuuguacaguggucaugaccgaugggucugcuuccggaaaagcagacacuaagauccuguuuauugaggaagguaaaaucgugcauacaucaacccucagcggcagugcccaacacguggaggaaugcucuugcuauccaagauacccgggggucagguguguuugccgggauaacuggaagggauccaaucgccccauaguggacauuaacaucaaggaucacagcaucguaucgucuuacguguguuccggcuuagucggugacacgccucgaaagaaugacucaaguagcuccucucauugccuggauccaaacaaugaggaagggggacacggcgugaaaggcugggcuuucgacgaugggaacgacguuuggaugggaagaaccauuaaugagacaagcaggcuugguuaugagacuuuuaaagugaucgaaggcuggucaaaccccaagaguaaauugcagauuaaucggcaggucauaguggaucguggggaccgcuccggauacagcggcaucuucucuguagaggguaccucauguauuaacagaugcuuuuauguugaacugaucagggggcggaaggaggaaacagaggugcuauggaccaguaauagcaucgucguguucuguggcacuuccggaacauacggcaccgggucuuggccugauggagccgaccucaaccugaugccaauuuga

SEQ ID NO: 151433 - RNA, 1410 nt, Artificial Sequence
  derived and/or modified CDS sequence (opt3) from neuraminidase__InfluenzaA__AGG13894
augaaccccaaucagaagaucauuaccauaggcagcgugucccugacaaucucuacugucugcuucuuuaugcaaauugccauccucauuacgaccguuacacuucacuucaaacaguacgaguuuaacucaccuccaaauaaccaggugaugcugugugaaccgacuaucauagagagaaauguaaccgaaaucguguauuugacaaacaccacuauugagaaggaaaucugccccaaaccugcugaguacaggaauuggaguaagccacagugugggauuacaggauucgcacccuuuagcaaagacaacuccauccgguuaucugccgguggcgauauaugggucacccgcgagccuuaugugucgugcgacccagauaaguguuaccaauucgcgcuggggcagggaacgacucuaaauaacguucauucaaauaacaccgugcgagaccguacacccuauagaacucuccugaugaaugaacuuggcgucccuuuucaccuggguaccaaacaggugugcauugcuuggagcaguuccucuugucaugaugggaaggccugguugcacguaugcaucacaggagacgauaagaacgcaaccgccagcuucauuuacaauggcaggcucguugacuccguggucucauggaguaaagagauccugcggacgcaggaaagcgagugugugugcaucaacggcacuuguacaguggucaugaccgaugggucugcuuccggaaaggcagacacuaaaauucuguuuauagaggaagguaagaucguucauacaucaacccucagcggcagugcccaacacguggaggaaugcucuugcuauccacgcuacccggggguaagaugugugugcagggauaacuggaagggauccaaucggcccauugucgacaucaacauaaaagaucacagcauugugucgucuuacguuuguuccggcuuagugggugacacgccucgcaagaaugacucaaguagcuccucucauugccuggauccaaacaaugaggaagggggacacggcgucaaaggcugggcuuucgacgaugggaacgacguguggaugggacgaaccaucaaugagacaagcagacuugguuaugagacuuuuaagguaaucgaaggcuggucaaaccccaaaaguaaguugcagauuaauaggcagguuaucguggaucguggggaccgguccggauacagcggcauuuucucugucgaggguaaaucauguauaaaccgcugcuuuuauguggaacugaucagagggaggaaggaggaaaccgagguccuauggacaaguaauagcauugugguuuucuguggcacuuccggaaccuacggcacagggucuuggccugauggagccgaccucaaccugaugccaaucuga

SEQ ID NO: 151434 - RNA, 1410 nt, Artificial Sequence; identical to SEQ ID NO: 151402
  derived and/or modified CDS sequence (opt3) from neuraminidase__InfluenzaA__AGG13906

SEQ ID NO: 151435 - RNA, 1410 nt, Artificial Sequence
  derived and/or modified CDS sequence (opt3) from neuraminidase__InfluenzaA__AGG13930
augaaccccaaucagaagaucauuaccauaggcagcgugucccugacaaucucuacuauuugcuucuuuaugcagaucgccauucucaucacgaccgucacacuucacuucaaacaguacgaguuuaacucaccuccaaauaaccagguuaugcugugugaaccgacuauaaucgagagaaauauuaccgaaaucguguauuugacaaacaccacuauugagaaggaaaucugccccaaaccugcugaguacaggaauuggaguaagccacagugugggauaacaggauucgcacccuuuagcaaagacaacuccauucgguuaucugccgguggcgauaucuggguaacccgcgagccuuaugugucgugcgacccagauaaguguuaccaauucgcgcuggggcagggaacgacucuaaauaacguccauucaaauaacaccgugcgagaccguacacccuauagaacucuccugaugaaugaacuuggcguuccuuuucaccuggguaccaaacaggugugcauugcuuggagcaguuccucuugucaugaugggaaggccugguugcacgucugcaucacaggagacgauaagaacgcaaccgccagcuucaucuacaauggcaggcucguggacuccguaguuucauggaguaaagagauucugcggacgcaggaaagcgagugugugugcauaaacggcacuuguacagucgugaugaccgaugggucugcuuccggaaaggcagacacuaaaauccuguuuauugaggaagguaagaucgugcauacaucaacccucagcggcagugcccaacacgucgaggaaugcucuugcuauccacgcuacccggggguuagaugugugugcagggauaacuggaagggauccaaucggcccauaguagacauuaacaucaaagaucacagcaucgugucgucuuacgucuguuccggcuuagugggugacacgccucgcaagaaugaccgaucaaguagcucccauugccuggauccaaacaaugaggaagggggacacggcguuaaaggcugggcuuucgacgaugggaacgacguguggaugggaagaaccauuaaugagacaucuaggcuugguuaugagacuuuuaaggucaucgaaggcuggagcaaccccaaaucaaaguugcagauuaaucggcaagugauaguagaucguggggaccgcaguggauacuccggcaucuucagcguugaggguaaaucuuguauuaacagaugcuuuuauguggaacugaucagggggcggaaggaggaaaccgagguccuauggacaucaaauaguaucguggucuucuguggcacuagcggaaccuacggcacaggguccuggccugauggagccgaccucaaccugaugccaauuuga

SEQ ID NO: 151436 - RNA, 1410 nt, Artificial Sequence; identical to SEQ ID NO: 151412
  derived and/or modified CDS sequence (opt3) from neuraminidase__InfluenzaA__AGG13942

SEQ ID NO: 151437 - RNA, 1410 nt, Artificial Sequence
  derived and/or modified CDS sequence (opt3) from neuraminidase__InfluenzaA__AGG13965
augaaccccaaucagaagaucauuaccauaggcagcgugugcaugacaaucgggauggccaaccugauucuccaaaucggaaauauuaucuccauauggaucucucacucaauucagcuugguaaccagagucagaucgagacuuguaaucaaagcgucauuacguacgaaaacaauaccuggguuaaccagacauaugugaauaucuccaacacuaauuucgcugcaggccagucuguagugucggucaaacuggccgggaacagcagcuugugcccugugaguggaugggcgauauacuccaaggacaauucuguuagaauuggcagcaaaggugauguguuugucaucagggagccauucauuuccuguucaccguuagaaugccggaccuuuuuccugacacagggggcucuacucaacgacaagcauaguaauggaaccaucaaagaucgcagccccuaucgaacucugaugucuuguccuaucggcgaggugccaucccccuacaacucacguuuugaaagcguagccuggagugcaucugccugccacgacggcauuaacuggcuuacaauagggaucuccggaccugauagcggugcuguugcagugcugaaguauaauggcauuaucaccgacacgauaaagucguggagaaacaauauuuugaggacucaagagucugagugugccugcgucaacggguccuguuucaccaucaugacagauggaccaucagacggccaggcuaguuacaaaaucuuucggauugaaaaggguaaaaucgugaagucaguggagaugaaugcccccaacuaucauuacgaagagugcuccuguuacccugauucuagcgagauuacuugcgucugccgcgacaauuggcacgggucaaacagaccauggguuaguuucaaucagaaccucgaauaucagauaggauacaucuguuccggcauuuuuggcgauaauccgaggcccaacgacaaaaccgggagcugcggaccugugucuucaaauggugcgaacggcguaaagggguucaguuuuaaguauggaaauggcguguggaucggucggacaaaaagcaucuccucucgcaagggguucgagaugauuugggauccaaacggcuggaccggaacggacaacaauuuuucgauaaaacaagacaucgucggcauuaacgaauggagcggguacuccggaucauucgugcagcaucccgagcugacuggucuggauuguauccgaccuugcuucuggguugaacucauuagaggcaggccaaaggagaauacaaucuggaccagugggucuagcauauccuuuuguggagugaacucagacacugucggcuggagcuggcccgauggugcagaguuaccguucacaaucgacaaauga

SEQ ID NO: 151438 - RNA, 1410 nt, Artificial Sequence; identical to SEQ ID NO: 151405
  derived and/or modified CDS sequence (opt3) from neuraminidase__InfluenzaA__AGG13976

SEQ ID NO: 151439 - RNA, 1410 nt, Artificial Sequence; identical to SEQ ID NO: 151405
  derived and/or modified CDS sequence (opt3) from neuraminidase__InfluenzaA__AGG13988

SEQ ID NO: 151440 - RNA, 1410 nt, Artificial Sequence; identical to SEQ ID NO: 151405
  derived and/or modified CDS sequence (opt3) from neuraminidase__InfluenzaA__AGG14000

SEQ ID NO: 151441 - RNA, 1410 nt, Artificial Sequence; identical to SEQ ID NO: 151405
  derived and/or modified CDS sequence (opt3) from neuraminidase__InfluenzaA__AGG14012

SEQ ID NO: 151442 - RNA, 1410 nt, Artificial Sequence; identical to SEQ ID NO: 151423
  derived and/or modified CDS sequence (opt3) from neuraminidase__InfluenzaA__AGG14024

SEQ ID NO: 151443 - RNA, 1410 nt, Artificial Sequence
  derived and/or modified CDS sequence (opt3) from neuraminidase__InfluenzaA__AGG14036
augaaccccaaucagaagaucauuaccauaggcagcgugucccugacaaucucuacuauuugcuucuuuaugcaaaucgccauucucaucacgaccgucacacuucacuucaaacaguacgaguuuaacucaccuccaaauaaccagguuaugcugugugaaccgacuauaaucgagagaaauauuaccgaaaucguguauuugacaaacaccacuauugagaaggaaaucugccccaaauuagcugaguacaggaauuggaguaagccucagugugacauaacaggguucgcaccauuuagcaaagauaacuccauucggcugucugccggaggugacaucuggguaacccgcgagcccuaugugucgugcgauccugacaaguguuaccaauucgcgcuaggccaggggacgacucucaauaacguccauucaaauaacaccgugcgagaucguacaccauauagaacucugcuuaugaaugaacugggaguucccuuucacuugggcaccaaacaggugugcauugcuuggagcaguuccucuugucaugacgguaaggccuggcuccacgucugcaucacaggggaugacaagaacgcaaccgccagcuucaucuacaauggaaggcugguggauuccguaguuucauggaguaaagacauucugcggacgcaggagagcgaaugugugugcauaaacggcacuugugcugucgugaugacagauggcucugcauccgggaaggccgacaccaaaauccucuuuauugaggagggaaagaucgugcauacuucaacauuaagcgguagugcucaacacgucgaagagugcucuugcuauccucgcuacccaggcguuagaugugugugcagggauaacuggaagggguccaaucggccgauaguagacauuaacaucaaagaccacagcaucgugucgucuuacauguguuccggacuggucggcgauacgccccgcaagaaugacucaaguagcuccggucauugccuugauccuaacaaugaagaagggggacacggcgugaaaggcugggccuucgacgaugggaacgacguuuggaugggacgaaccauuaaugagaccucuagauuggguuaugagacauuuaaggugaucgagggcuggagcaacccaaaaucaaagcugcagauuaauaggcaggucauaguggaucgggggaaccguaguggauacuccggcaucuucagcguagaagguaaaaauuguauuaaccgcugcuuuuauguugagcuaaucagagggaggaaggaagagacugaagugcucuggaccucuaauucaaucgucguguucuguggcacaaguggaacuuacggcaccgggagcuggcccgacggagcggaucugaaccuuaugccuauuuga

SEQ ID NO: 151444 - RNA, 1410 nt, Artificial Sequence; identical to SEQ ID NO: 151423
  derived and/or modified CDS sequence (opt3) from neuraminidase__InfluenzaA__AGG14321

SEQ ID NO: 151445 - RNA, 1410 nt, Artificial Sequence; identical to SEQ ID NO: 150194
  derived and/or modified CDS sequence (opt3) from neuraminidase__InfluenzaA__AGG14333

SEQ ID NO: 151446 - RNA, 1410 nt, Artificial Sequence; identical to SEQ ID NO: 149835
  derived and/or modified CDS sequence (opt3) from neuraminidase__InfluenzaA__AGG84182

SEQ ID NO: 151447 - RNA, 1398 nt, Artificial Sequence
  derived and/or modified CDS sequence (opt3) from neuraminidase__InfluenzaA__AGJ51955
augaaccccaaucagaagauccugugcaccagcgccacagcuauuauaaucggcgcaauugccgugcucaucgggauugcgaaccuuggacugaauaucgguuugcacuuaaaaccuggcuguaacugcucccauucucaaccagagacuacgaauaccucacagacaauaaucaacaauuacuauaacgaaacuaauauuaccaacauccagauggaggaaagaacaaguaggaauuucaacaaucugaccaaggggcuauguacuauuaacagcuggcacaucuacggaaaagacaaugcuguccggauaggcgaguccucugauguucucgugacacgcgaaccguauguaucgugcgaccccgaugagugucgauuuuacgcccugucacaggguaccacgauucgugggaagcauagcaacggaacuauccacgacagaagucaauauagggcacuuauuuccuggccucugucuagcccacccaccguguacaacucccgggucgagugcaucggcuggucaaguacaagcugucaugauggcaaaucucgcauguccaucugcauuucagggccuaauaacaaugccagcgcugugguuugguauaacagaaggccaguggcagaaauaaauacuugggcccggaacaucuugcgcacccaggagagugaaugugucugccacaauggagugugucccguaguuuucacagacgguucugcuaccggcccugccgauacgcgaauuuacuacuuuaaggaggggaagauccucaaaugggagucccugacuggaacagcgaagcacauagaagagugcagcugcuauggcgaaagaaccgguauuacuuguacaugcagggacaacuggcaggggucgaaucggccagugauccagaucgauccggucgcaaugacccauacgucucaauacauuuguucccccgugcugaccgacaacccucguccaaaugaucccaacaucggaaaaugcaaugacccuuauccaggcaacaauaacaacggcgugaagggguucucauaccucgauggagccaauacaugguuaggucgcacuauuaguaccgcuagcagauccggcuaugagaugcugaaaguccccaacgcccuuacagacgacaggucuaagccgauacaggggcagacuaucguuuugaaugcagauuggagcggauacucaggcaguuuuauggacuauugggcugaaggugauuguuaccgggccugcuucuacguggagcugauucgagggcgcccuaaggaggacaaaguacuauggaccggcgauuccaucgugagcauguguucuucaacagaauuucucggacaguggaacuggcccgacggcgcgaagaucgaguauuuccuguga

SEQ ID NO: 151448 - RNA, 1398 nt, Artificial Sequence
  derived and/or modified CDS sequence (opt3) from neuraminidase__InfluenzaA__AGJ72863
augaaccccaaucagaagauccugugcaccagcgccacagcuauuauaaucggcgcaauugccgugcucaucgggauugcgaaccuuggacugaauaucgguuugcacuuaaaaccuggcuguaacugcucccauucucaaccagagacuacgaauaccucacagacaauaaucaacaauuacuauaacgaaacuaauauuaccaacauccagauggaggaaagaacaaguaggaauuucaacaaucugaccaaggggcuauguacuauuaacagcuggcacaucuacggaaaagacaaugcuguccggauaggcgaguccucugauguucucgugacacgcgaaccguauguaucgugcgaccccgaugagugucgauuuuacgcccugucacaggguaccacgauucgugggaagcauagcaacggaacuauccacgacagaagucaauauagggcacuuauuuccuggccucugucuagcccacccaccguguacaacucccgggucgagugcaucggcuggucaaguacaagcugucaugauggcaaaucucgcauguccaucugcauuucagggccuaauaacaaugccagcgcugugguuugguauaacagaaggccaguggcagaaauaaauacuugggcccggaacaucuugcgcacccaggagagugaaugugucugccacaauggagugugucccguaguuuucacagacgguucugcuaccggcccugccgauacgcgaauuuacuacuuuaaggaggggaagauccucaaaugggagucccugacuggaacagcgaagcacauagaagagugcagcugcuauggcgaaagaaccgguauuacuuguacaugcagggacaacuggcaggggucgaaucggccagugauccagaucgauccggucgcaaugacccauacgucucaauacauuuguucccccgugcugaccgacaacccucguccaaaugaucccaacaucggaaaaugcaaugacccuuauccaggcaacaauaacaacggcgugaagggguucucauaccucgauggagccaauacaugguuaggucgcacuauuaguaccgcuagcagauccggcuaugagaugcugaaaguccccaacgcccuuacagacgacaggucuaagccgauacaggggcagacuaucguuuugaaugcagauuggagcggauacucaggcaguuuuauggacuauugggcugaaggugauuguuaccgggccugcuucuacguggagguaauucgagggcgcccuaaggaggacaaaguguggugggcgggcaacuccaucgucagcauguguucuucaaccgaauuucugggacaguggaauuggcccgauggcgccaagaucgaguauuuccuauga

SEQ ID NO: 151449 - RNA, 1410 nt, Artificial Sequence
  derived and/or modified CDS sequence (opt3) from neuraminidase__InfluenzaA__AGJ73328
augaaccccaaucagaagaucauuaccauaggcagcgugugcaugacaaucgggauggccaaccugauucuccaaaucggaaauauuaucuccauauggaucucucacucaauucagcuugguaaccagagucagaucgagacuuguaaucaaagcgucauuacguacgaaaacaauaccuggguuaaccagacauaugugaauaucuccaacacuaauuucgcugcaggccagucuguagugucggucaaacuggccgggaacucaucauugugcccugugaguggaugggcgauauacuccaaggacaauucuguuagaauuggcagcaaaggugauguguuugucaucagggagccauucauuuccuguucaccguuagaaugccggaccuuuuuccugacacagggggcucuacucaacgacaagcauaguaauggaaccaucaaagaucgcagccccuaucgaacucugaugucuuguccuaucggcgaggugccaucccccuacaacucacguuuugaaagcguagccuggagugcaucugccugccacgacggcauuaacuggcuuacaauagggaucuccggaccugauagcggugcuguugcagugcugaaguauaauggcauuaucaccgacacgauaaagucguggagaaacaauauuuugaggacucaagagucugagugugccugcgucaacggguccuguuucaccaucaugacagauggaccaucagacggccaggcuaguuacaaaaucuuucggauugaaaaggguaaaaucgucaagagcguggagaugaaugcccccaacuaucauuacgaagagugcuccuguuacccugauucuagcgagauuacuugcgugugccgcgacaauuggcacgggucaaacagaccauggguuaguuucaaucagaaccucgaauaucagauaggauacaucuguuccggcauuuuuggcgauaauccgaggcccaacgacaaaaccgggagcugcggaccugugucuucaaauggugcgaacggcguaaagggguucaguuuuaaguauggaaauggcguguggaucggucggacaaaaagcaucuccucucgcaagggguucgagaugauuugggauccaaacggcuggaacggaaccgacaauaacuuuucgauaaaacaagacaucgucggcauuaaugaauggagcggguacuccggaucauucgugcagcaucccgagcugacgggucuggauuguauccgaccuugcuucuggguugaacucauuagaggcaggccaaaggagaacacuaucuggacaagugggucuagcauauccuuuuguggagugaauagcgacaccgucggcuggagcuggcccgauggugcagaguuaccguucacuaucgacaaauga

SEQ ID NO: 151450 - RNA, 1410 nt, Artificial Sequence; identical to SEQ ID NO: 148305
  derived and/or modified CDS sequence (opt3) from neuraminidase__InfluenzaA__AGJ73330

SEQ ID NO: 151451 - RNA, 1410 nt, Artificial Sequence
  derived and/or modified CDS sequence (opt3) from neuraminidase__InfluenzaA__AGJ73332
augaaccccaaucagaagaucauuaccauaggcagcgugugcaugacaaucgggauggccaaccugauucuccaaaucggaaauauuaucuccauauggaucucucacucaauucagcuugguaaccagaaucagaucgagacuuguaaccaaagugucauuacguacgaaaauaacaccuggguuaaucagacauaugugaacaucagcaauacuaacuucgcugcaggccaguccguagugucugucaaacuggccggaaauucgucauugugcccugugagcggaugggcgauauacaguaaggacaacuccauuagaaucggcucuaaaggugauguuuuugugauuagggagccauucaucagcuguuccccguuagaaugccggaccuuuuuccugacacagggggcucuacucaaugacaagcauucaaacggaaccaucaaagaucgcagucccuaucgaacucugaugagcuguccuauuggcgaggucccaucucccuacaacucccguuuugaaucaguggccuggagcgcaagugccugccacgacggcauaaauuggcuuacaaucgggauuucuggaccugauaacggugcuguagcaguucugaaguauaauggcaucauaaccgacacgauuaaguccuggagaaacaauaucuugaggacucaagagagcgagugugccugcgugaacgggucguguuucaccgucaugacagauggaccaucugacggccaggcuuccuacaaaaucuuucggauugaaaaggguaaaaucgugaagucaguggagaugaaugcccccaacuaucauuacgaagagugcaguuguuacccugauagcuccgagauuacuugcgucugccgcgacaauuggcacgggucuaacagaccauggguuagcuucaaucauaaccucgaauaucagauaggauacaucuguucaggcauuuuuggcgauaauccgaggcccaacgacaaaaccgggaguugcggaccuguguccagcaauggugcgaacggcguaaagggguucucuuuuaaguauggaaacggcguguggaucggucggacaaaaucaaucaguagccgcaauggguucgagaugauuugggauccaaacggcuggaccggaacggacaauaacuuuuccauaaagcaggacaucauuggcaucaaugaauggucuggguacucggggagcuucguccaacaccccgagcugacuggucuggauuguauucgaccuugcuucuggguggaacucaucagaggcaggccaaaagagaacacaauauggaccuccgggucaaguaucucuuuuuguggaguuaauagcgacacugugggcugguccuggcccgauggugcagaguuaccguucacaauugacaaguga

SEQ ID NO: 151452 - RNA, 1410 nt, Artificial Sequence; identical to SEQ ID NO: 148305
  derived and/or modified CDS sequence (opt3) from neuraminidase__InfluenzaA__AGJ73334

SEQ ID NO: 151453 - RNA, 1410 nt, Artificial Sequence; identical to SEQ ID NO: 148305
  derived and/or modified CDS sequence (opt3) from neuraminidase__InfluenzaA__AGJ73336

SEQ ID NO: 151454 - RNA, 1410 nt, Artificial Sequence; identical to SEQ ID NO: 148305
  derived and/or modified CDS sequence (opt3) from neuraminidase__InfluenzaA__AGJ73338

SEQ ID NO: 151455 - RNA, 1410 nt, Artificial Sequence
  derived and/or modified CDS sequence (opt3) from neuraminidase__InfluenzaA__AGJ73340
augaaccccaaucagaagaucauuaccauaggcagcgugugcaugacaaucgggauggccaaccugauucuccaaaucggaaauauuaucuccauauggaucucucacucaauucagcuugguaaccagagucagaucgagacuuguaaucaaagcgucauuacguacgaaaacaauaccuggguuaaccagacauaugugaauaucuccaacacuaauuucgcugcaggccagucuguagugucggucaaacuggccgggaacucauccuugugcccugcgaguggaugggcuauauacuccaaggacaauucuauuagaaucggcagcaaaggugauguguuuguuauuagggagccauucaucuccuguucaccguuagaaugccggaccuuuuuccugacacagggggcccuacucaacgacaagcauaguaauggaaccaucaaagaucgcagccccuaucgaacucugaugucuuguccuauuggcgaggugccaucccccuacaacucacguuuugaaagcgucgcauggagugccucugcuugccacgacggcauaaacuggcuuacaaucgggauuuccggaccugauaauggugcaguggccguacugaaguauaacggcaucauaaccgacacgauuaagagcuggagaaauaacaucuugaggacucaagagucggagugugcuugcguuaaugggucuuguuucaccaucaugacagauggaccauccgacggccaggccucauacaaaauuuuucggaucgaaaaggguaaaauugugaagagugucgagaugaacgcgcccaauuaucauuacgaagagugcagcuguuacccugauuccucugagauaacuugcgugugccgcgacaacuggcacgggagcaauagaccaugggugucauucaaccagaaucucgaauaucagaucggauacauuuguaguggcaucuuuggcgauaacccgaggcccaaugacaaaaccggguccugcggaccugucagcucuaacggugcaaauggcguuaagggguucucauuuaaguauggaaacggcguguggaucggucggacaaaaaguauuagcucccgcaagggguucgagaugauaugggauccaaacggcuggaccggaacggacaauaacuuuucuaucaaacaagacauuguaggcaucaaugaauggucgggguacagcggauccuucgugcagcaucccgagcugacuggucuggauuguauucgaccuugcuucugggucgaacucaucagaggcaggccaaaggagaacacaauauggaccucagggaguucuaucagcuuuuguggagugaauagcgacacuguuggcuggucauggcccgauggugccgaguuaccguucacaauugacaaauga

SEQ ID NO: 151456 - RNA, 1410 nt, Artificial Sequence
  derived and/or modified CDS sequence (opt3) from neuraminidase__InfluenzaA__AGJ73342
augaaccccaaucagaagaucauuaccauaggcagcgugugcaugacaaucgggauggccaaccugauucuccaaaucggaaauauuaucuccauauggaucucucacucaauucagcuugguaaccagagucagaucgagacuuguaaucaaagcgucauuacguacgaaaacaauaccuggguuaaccagacauaugugaauaucuccaacacuaauuucgcugcaggccagucuguagugucggucaaacuggccgggaacagcucauugugcccugugaguggaugggcgauauacuccaaggacaauucuauuagaaucggcagcaaaggugauguuuuugugauuagggagccauucaucuccuguucaccguuagaaugccggaccuuuuuccugacacagggggcucuacucaacgacaagcauaguaauggaaccaucaaagaucgcagccccuaucgaacucugaugucuuguccuauuggcgaggucccaucccccuacaacucacguuuugaaagcguggccuggagugcaucugccugccacgacggcauaaacuggcuuacaaucgggauuuccggaccugauaauggugcuguagcaguucugaaguauaacggcaucauaaccgacacgauuaagagcuggagaaauaacaucuugaggacucaagagucggagugugccugcgugaaugggucuuguuucaccaucaugacagauggaccauccgacggccaggcuucauacaaaauuuuucggaucgaaaaggguaaaauugucaagaguguggagaugaacgcccccaauuaucauuacgaagagugcagcuguuacccugauuccucugagauaacuugcgugugccgcgacaacuggcacgggagcaauagaccaugggucucauucaaccagaaucucgaauaucagaucggauacauuuguaguggcaucuuuggcgauaacccgaggcccaaugacaaaaccggguccugcggaccuguuagcucuaacggugcgaauggcgugaagggguucucauuuaaguauggaaacggcguauggaucggucggacaaaaaguauuagcucccgcaagggguucgagaugauaugggauccaaacggcuggaccggaacggacaauaacuuuucuaucaaacaagacauugugggcaucaaugaauggucgggguacagcggauccuucguccagcaucccgagcugacuggucuggauuguauucgaccuugcuucuggguggaacucaucagaggcaggccaaaggagaacacaauauggaccucagggaguucuaucagcuuuuguggaguuaauuccggcacuguggguuggucauggcccgacggggcagaguuaccguucacaauugauaaauga

SEQ ID NO: 151457 - RNA, 1410 nt, Artificial Sequence; identical to SEQ ID NO: 148757
  derived and/or modified CDS sequence (opt3) from neuraminidase__InfluenzaA__AGJ73344

SEQ ID NO: 151458 - RNA, 1410 nt, Artificial Sequence
  derived and/or modified CDS sequence (opt3) from neuraminidase__InfluenzaA__AGJ73346
augaaccccaaucagaagaucauuaccauaggcagcgugugcaugacaaucgggauggccaaccugauucuccaaaucggaaauauuaucuccauauggaucucucacucaauucagcuugguaaccagaaucagaucgagaaauguaaccaaagugucauuacuuacgaaaauaacacguggguuaaucagaccuaugugaacaucagcaauacaaacuucgcugcaggccaguccguagugucugucaagcuggccggaaauucgucauugugcccugugagcggaugggcgauauacaguaaagacaacuccauuagaaucggcucuaagggugauguuuuugugauuagggagccauucaucagcuguuccccguuagaaugccggaccuuuuuccugacucagggggcucuacucaaugacaaacauucaaacggaacaaucaaggaucgcagucccuaucgaacccugaugagcuguccuauuggcgaggucccaucucccuacaacucccguuuugaaucaguggccuggagcgcaagugccugccacgacggcauaaauuggcuuacuaucgggauuucuggaccugauaacggugcuguagcaguucugaaguauaauggcaucauaacagacaccauuaaauccuggagaaacaauaucuugaggacgcaagagagcgagugugccugcgugaacgggucguguuucacuaucaugaccgauggaccaucugacggccaggcuuccuacaagauuuuucggaucgaaaaagguaagauugucaaaucaguggagaugaaugcccccaacuaucauuacgaagagugcaguuguuacccugauagcuccgagauaacaugcgugugccgcgacaauuggcacgggucuaacagaccaugggucagcuucaaucagaaccucgaauaucagaucggauacauuuguucaggcaucuuuggcgauaauccgaggcccaacgacaagacugggaguugcggaccuguuuccagcaauggugcgaacggcgugaagggguucucuuuuaaauauggaaacggcguauggaucggucggaccaagucaauuaguagccgcaaaggguucgagaugauaugggauccaaauggcuggacaggaaccgacaacaauuuuuccaucaagcaagacauugugggcaucaacgaauggucuggguacucggggagcuucguccagcaucccgagcugacgggucuggauuguauucgaccuugcuucuggguggaacucaucagaggcaggccaaaagaguccacuauauggacaucagggaguucuaucagcuuuuguggaguuaauuccgacaccgugggcuggucauggcccgauggugcagaguuaccguucacuauugacaaguga

SEQ ID NO: 151459 - RNA, 1410 nt, Artificial Sequence
  derived and/or modified CDS sequence (opt3) from neuraminidase__InfluenzaA__AGJ73348
augaaccccaaucagaagaucauuaccauaggcagcgugugcaugacaaucgggauggccaaccugauucuccaaaucggaaauauuaucuccauauggaucucucacucaauucagcuugguaaccagaaucagaucgagacuuguaaccaaagugucauuacguacgaaaauaacaccuggguuaaucagacauaugugaacaucagcaauacuaacuucgcugcaggccaguccguaauaucugugaaacuggccggaaauucgucauugugcccugucagcggaugggcgauuuacaguaaggacaacuccaucagaauuggcucuaaaggugauguguuuguuaucagggagccauucaucagcuguuccccguuagaaugccggaccuuuuuccugacacagggggcucuacucaaugacaagcauucaaacggaaccauuaaagaucgcagucccuaucgaacucugaugagcuguccuauaggcgaggugccaucucccuacaacucccguuuugaaucagucgccuggagcgcaagugccugccacgacggcaucaauuggcuuacaauugggaucucuggaccugauaacggugcuguggcaguacugaaguauaauggcauaauuaccgacacgaucaaguccuggagaaacaauaucuugaggacucaagagagcgagugugccugcguuaacgggucguguuucaccauuaugacagauggaccaucugacggccaggcuuccuacaaaaucuuucggauugaaaaggguaaaauagugaagucagucgagaugaaugcccccaacuaucauuacgaagagugcaguuguuacccugauagcuccgagaucacuugcgugugccgcgacaauuggcacgggucuaacagaccaugggugagcuucaaucagaaccucgaauaucagauuggauacaucuguucaggcaucuuuggcgauaauccgaggcccaacgacaaaaccgggaguugcggaccugucuccagcaauggugcgaacggcguuaagggguucucuuuuaaguauggaaacggcguguggauuggucggacaaaaucaauaaguagccgcaagggguucgagaugaucugggauccaaauggcuggaccggaacggacaacaauuuuuccauuaaacaagacaucguaggcauuaacgaauggucuggguacucggggagcuucgugcagcaucccgagcugacuggucuggauuguauccgaccuugcuucugggucgaacucauaagaggcaggccaaaggagaauacaaucuggaccuccgggucaaguauuucuuuuuguggagugaacagcgacacuguuggcugguccuggcccgauggugcagaguuaccguucacaaucgacaaauga

SEQ ID NO: 151460 - RNA, 1410 nt, Artificial Sequence
  derived and/or modified CDS sequence (opt3) from neuraminidase__InfluenzaA__AGJ73350
augaaccccaaucagaagaucauuaccauaggcagcgugugcaugacaaucgggauggccaaccugauucuccaaaucggaaauauuaucuccauauggaucucucacucaauucagcuugguaaccagaaucagaucgagacuuguaaccaaagugucauuacguacgaaaauaacaccuggguuaaucagacauaugugaacaucagcaauacuaacuucgcugcaggccaguccguagugucugucaaacuggccggaaauucgucauugugcccugugagcggaugggcgauauacaguaaggacaacuccauuagaaucggcucuaaaggugauguuuuugugauuagggagccauucaucagcuguuccccguuagaaugccggaccuuuuuccugacacagggggcucuacucaaugacgagcauucaaacggaaccaucaaggaucgcagucccuaucgaacucugaugagcuguccuauuggcgaagucccaucucccuacaacucccguuuugagucaguggccuggagcgcaagugccugccacgacggcauaaauuggcuuacaaucgggauuucuggaccugauaacggugcuguagcaguucugaaauauaauggcaucauaaccgacacgauuaaguccuggagaaacaauaucuugaggacucaagagagcgaaugugccugcgugaacgggucguguuucaccaucaugacagauggaccaucugacggccaggcuuccuacaagauuuuucggaucgagaaagguaagauugucaaaucaguggugaugaaugcccccaacuaucauuacgaagagugcaguuguuacccugauagcuccgagauaacuugcgucugccgcgacaauuggcacgggucuaacagaccauggguuagcuucaaucagaaccucgaauaucagaucggauacauuuguucaggcaucuuuggcgauaauccgaggcccaacgacaagaccgggaguugcggaccuguguccagcaauggugcgaacggcguaaaaggguucucuuuuaaguauggaaacggcguguggaucggucggacaaagucaauuaguagccgcaaaggguucgagaugauaugggauccaaauggcuggaccggaacggacaacaauuuuuccaucaagcaagacauugucggcaucaacgaauggucuggguacucggggagcuucgugcagcaucccgagcugacuggucuggauuguauucgaccuugcuucuggguugaacucaucagaggcaggccaaaagagaauacaauauggaccuccgggucaaguaucucuuuuuguggagugaacagcgacacugucggcugguccuggcccgauggugcagaguuaccguucacaauugacaaguga

SEQ ID NO: 151461 - RNA, 1410 nt, Artificial Sequence
  derived and/or modified CDS sequence (opt3) from neuraminidase__InfluenzaA__AGJ73352
augaaccccaaucagaagaucauuaccauaggcagcgugugcaugacaaucgggauggccaaccugauucuccaaaucggaaauauuaucuccauauggaucucucacucaauucagcuugguaaccagagucagaucgagacuuguaaucaaagcgucauuacguacgaaaacaauaccuggguuaaccagacauaugugaauaucuccaacacuaauuucgcugcaggccagucuguagugucggucaaacugguggggaacagcucauugugcccuguuaguggaugggccauauacuccaaggacaauucuauuagaaucggcagcaaaggugauguguuugucauuagggagccauucaucuccuguucaccguuagaaugccggaccuuuuuccugacacagggggcgcuacucaacgacaagcauaguaauggaaccaucaaagaucgcagccccuaucgaacucugaugucuuguccuauuggcgaggugccaucccccuacaacucacguuuugaaagcguagcuuggagugccucugcaugccacgacggcauaaacuggcuuacaaucgggauuuccggaccugauaauggugccguugcugugcugaaguauaacggcaucauaaccgacacgauuaagagcuggagaaauaacaucuugaggacucaagagucggagugugcaugcgucaaugggucuuguuucaccaucaugacagauggaccauccgacggccaggccucauacaaaauuuuucggaucgaaaaggguaaaauugugaagaguguggagaugaacgcucccaauuaucauuacgaagagugcagcuguuacccugauuccucugagauaacuugcgucugccgcgacaacuggcacgggagcaauagaccauggguuucauucaaccagaaucucgaauaucagaucggauacauuuguaguggcaucuuuggcgauuccccgaggcccaacgacaaaaccgggagcugcggaccugugucuucaaauggugccaacggcguaaagggguucaguuuuaaguauggaaauggcguguggaucggucggacaaaaagcauuuccucucgcaagggguucgagaugauaugggauccaaacggcuggaccggaacggacaacaauuuuucgaucaaacaagacauugucggcaucaacgaauggagcggguacuccggaucauucgugcagcaucccgagcugacuggucuggauuguauucgaccuugcuucuggguugaacucaucagaggcaggccaaaggagaauacaauauggaccagugggucuagcaucuccuuuuguggagugaacucagacacugucggcuggagcuggcccgauggugcggaguuaccguucacaauugacaaauga

SEQ ID NO: 151462 - RNA, 1410 nt, Artificial Sequence; identical to SEQ ID NO: 148757
  derived and/or modified CDS sequence (opt3) from neuraminidase__InfluenzaA__AGJ73354

SEQ ID NO: 151463 - RNA, 1410 nt, Artificial Sequence
  derived and/or modified CDS sequence (opt3) from neuraminidase__InfluenzaA__AGJ73356
augaaccccaaucagaagaucauuaccauaggcagcgugugcaugacaaucgggauggccaaccugauucuccaaaucggaaauauuaucuccauauggaucucucacucaauucagcuugguaaccagagucagaucgagacuuguaaucaaagcgucauuacguacgaaaacaauaccuggguuaaccagacauauuucaauaucuccaacacuaauuuugcugcaggccagucugugguaucggugaaacuggccgggaacucauccuugugcccugucaguggaugggcgauauacuccaaggacaauucuauuagaaucggcagcaaaggugauguguucguuauuagggagccauuuaucuccuguucaccguuagaaugccggaccuucuuucugacacagggggcucuacucaacgacaagcauaguaauggaaccaucaaagaucgcagccccuaucgaacucugaugucuuguccuauuggcgaggugccaucccccuacaacucacguuucgaaagcgucgccuggagugcaucugccugccacgacggcauaaacuggcuuacaaucgggauuuccggaccugauaauggugcuguggcaguacugaaguauaacggcaucauaaccgacacgauuaagagcuggagaaauaacaucuugaggacucaagagucggagugugccugcguuaaugggucuuguuuuaccaucaugacagauggaccauccgacggccaggcuucauacaaaauuuuccggaucgaaaaggguaaaauugugaagagugucgagaugaacgcccccaauuaucauuacgaagagugcagcuguuacccugauuccucugagauaacuugcgugugccgcgacaacuggcacgggagcaauagaccaugggugucauuuaaccagaaucucgaauaucagaucggauacauuuguaguggcaucuucggcgauaacccgaggcccaaugacaaaaccggguccugcggaccugucagcucuaacggugcgaauggcguuaagggguuuucauucaaguauggaaacggcguguggaucggucggacaaaaaguauuagcucccgcaagggguuugagaugauaugggauccaaacggcuggaccggaacggacaauaacuucucuaucaaacaagacauuguaggcaucaaugaauggucgggguacagcggauccuucgugcagcaucccgagcugacuggucuggauuguauucgaccuugcuuuugggucgaacucaucagaggcaggccaaaggagaacacaauauggaccucagggaguucuaucagcuucuguggagugaauagcgacacuguuggcuggucauggcccgauggugcagaguuaccguuuacaauugacaaauga

SEQ ID NO: 151464 - RNA, 1410 nt, Artificial Sequence; identical to SEQ ID NO: 148757
  derived and/or modified CDS sequence (opt3) from neuraminidase__InfluenzaA__AGJ73358

SEQ ID NO: 151465 - RNA, 1410 nt, Artificial Sequence; identical to SEQ ID NO: 148757
  derived and/or modified CDS sequence (opt3) from neuraminidase__InfluenzaA__AGJ73360

SEQ ID NO: 151466 - RNA, 1410 nt, Artificial Sequence
  derived and/or modified CDS sequence (opt3) from neuraminidase__InfluenzaA__AGJ73362
augaaccccaaucagaagaucauuaccauaggcagcgugugcaugacaaucgggauggccaaccugauucuccaaaucggaaauauuaucuccauauggaucucucacucaauucagcuugguaaccagagucagaucgagacuuguaaucaaagcgucauuacguacgaaaacaauaccuggguuaaccagacauaugugaauaucuccaacacuaauuucgcugacggccagucuguagugucggucaaacuggcagggaacagcucauugugcccugugaguggaugggccauauacuccaaggauaauucuauuagaaucggcagcaaaggugacguuuuugugauuagggagccauucaucuccuguucaccguuagaaugccggaccuuuuuccugacacagggggcgcuacucaacgauaagcauaguaauggaaccaucaaagaccgcagccccuaucgaacucugaugucuuguccuauuggcgaggucccaucccccuacaacucacguuuugaaagcguggcuuggagugccucugcaugccacgauggcauaaacuggcuuacaaucgggauuuccggaccugacaauggugccguagcuguucugaaguauaacggcaucauaaccgauacgauuaagagcuggagaaauaacaucuugaggacucaagagucggagugugcaugcgugaaugggucuuguuucaccaucaugacagacggaccauccgauggccaggccucauacaaaauuuuucggaucgaaaaggguaaaauugucaagaguguggagaugaacgcucccaauuaucauuacgaagagugcagcuguuacccugacuccucugagauaacuugcgugugccgcgauaacuggcacgggagcaauagaccaugggucucauucaaccagaaucucgaauaucagaucggauacauuuguaguggcaucuuuggcgacaacccgaggcccaaugauaaaaccggguccugcggaccuguuagcucuaacggugccaauggcgugaagggguucucauuuaaguauggaaacggcguauggaucggucggacaaaaaguauuagcucccgcaagggguucgagaugauaugggacccaaacggcuggaccggaacggacaauaacuuuucuaucaaacaagauauugugggcaucaaugaauggucgggguacagcggauccuucguccagcaucccgagcugacuggucuggacuguauucgaccuugcuucuggguggaacucaucagaggcaggccaaaggagaacacaauauggaccucagggaguucuaucagcuuuuguggaguuaauuccgauacugugggcuggucauggcccgacggugcggaguuaccguucacaauugauaaauga

SEQ ID NO: 151467 - RNA, 1410 nt, Artificial Sequence; identical to SEQ ID NO: 149880
  derived and/or modified CDS sequence (opt3) from neuraminidase__InfluenzaA__AGJ73364

SEQ ID NO: 151468 - RNA, 1410 nt, Artificial Sequence; identical to SEQ ID NO: 148757
  derived and/or modified CDS sequence (opt3) from neuraminidase__InfluenzaA__AGJ73366

SEQ ID NO: 151469 - RNA, 1410 nt, Artificial Sequence; identical to SEQ ID NO: 148305
  derived and/or modified CDS sequence (opt3) from neuraminidase__InfluenzaA__AGJ73370

SEQ ID NO: 151470 - RNA, 1410 nt, Artificial Sequence
  derived and/or modified CDS sequence (opt3) from neuraminidase__InfluenzaA__AGJ73372
augaaccccaaucagaagaucauuaccauaggcagcgugugcaugacaaucgggauggccaaccugauucuccaaaucggaaauauuaucuccauauggaucucucacucaauucagcuugguaaccagaaucagaucgagacuuguaaccaaagugucauuacguacgaaaauaacaccuggguuaaucagacauaugugaacaucagcaauacuaacuucgcugcaggccaguccguagugucugucaaacuggccggaaauucgucauugugcccugugagcggaugggcgauauacaguaaggacaacuccauuagaaucggcucuaaaggugauguuuuugugauuagggagccauucaucagcuguuccccguuagaaugccggaccuuuuuccugacacagggggcucuacucaaugacaagcauucaaacggaaccaucaaagaucgcagucccuaucgaacucugaugagcuguccuauuggcgaggucccaucucccuacaacucccguuuugaaucaguggccuggagcgcaagugccugccacgacggcauaaauuggcuuacaaucgggauuucuggaccugauaacggugcuguagcaguucugaaguauaauggcaucauaaccgacacgauuaaguccuggagaaacaauaucuugaggacucaagagagcgagugugccugcgugaacgggucguguuucaccaucaugacagauggaccaucugacggccaggcuuccuacaaaauuuuucggaucgaaaaggguaaaauugucaagucaguggagaugaaugcccccaacuaucauuacgaagagugcaguuguuacccugauagcuccgagauaacuugcgugugccgcgacaauuggcacgggucuaacagaccaugggucagcuucaaucauaaccucgaauaucagaucggauacauuuguucaggcaucuuuggcgauaauccgaggcccaacgacaaaaccgggaguugcggaccuguuuccagcaauggugcgaacggcgugaagggguucucuuuuaaguauggaaacggcguauggaucggucggacaaaaucaauuaguagccgcaagggguucgagaugauaugggauccaaauggcuggaccggaacggacaacaauuuuuccaucaaacaggacauugugggcaucaacgaauggucuggguacucggggagcuucguccaacaccccgagcugacuggucuggauuguauucgaccuugcuucuggguggaacucaucagaggcaggccaaaggagaauacaauauggaccuccgggucaaguaucucuuuuuguggaguuaacagcgacacugugggcugguccuggcccgauggugcagaguuaccguucacaauugacaaauga

SEQ ID NO: 151471 - RNA, 1410 nt, Artificial Sequence; identical to SEQ ID NO: 148305
  derived and/or modified CDS sequence (opt3) from neuraminidase__InfluenzaA__AGJ73374

SEQ ID NO: 151472 - RNA, 1410 nt, Artificial Sequence
  derived and/or modified CDS sequence (opt3) from neuraminidase__InfluenzaA__AGJ73376
augaaccccaaucagaagaucauuaccauaggcagcgugugcaugacaaucgggauggccaaccugauucuccaaaucggaaauauuaucuccauauggaucucucacucaauucagcuugguaaccagagucagaucgagacuuguaaucaaagcgucauuacguacgaaaacaauaccuggguuaaccagacauaugugaauaucuccaacacuaauuucgcugcaggccagucuguagugucggucaaacuggccgggaacaguagcuugugcccugugaguggaugggcgauauacuccaaggacaauucuguuagaauuggcagcaaaggugauguguuugucaucagggagccauucauuuccuguucaccguuagaaugccggaccuuuuuccugacacagggggcucuacucaacgacaagcauaguaauggaaccaucaaagaucgcagccccuaucgaacucugaugucuuguccuaucggcgaggugccaucccccuacaacucacguuuugaaagcguagccuggagugcaucugccugccacgacggcauuaacuggcuuacaauagggaucuccggaccugauagcggugcuguugcagugcugaaguauaauggcauuaucaccgacacgauaaagucguggagaaacaauauuuugaggacucaagagucugagugugccugcgucaacggguccuguuucaccaucaugacagauggaccaucagacggccaggcuaguuacaaaauccuccggauugaaaaggguaaaaucgucaagagcguggagaugaaugcccccaacuaucauuacgaagagugcuccuguuacccugauucuagcgagauuacuugcgugugccgcgacaauuggcacgggucaaacagaccauggguuaguuuuaaucagaaccuggaauaucagauaggauacaucuguuccggcauuuucggcgauaauccgaggcccaacgacaaaaccgggagcugcggaccugugucuucaaauggugcgaacggcguaaagggguuuaguuucaaguauggaaauggcguguggaucggucggacaaaaagcaucuccucucgcaagggguuugagaugauuugggauccaaacggcuggaccggaacggacaacaauuucucgacuaaacaagacauagucggcaucaacgaauggagcggguacuccggaucauuugugcagcaucccgagcugacaggucucgauuguauucgaccuugcuucuggguugaauuaaucagaggcaggccaaaggagaauaccauuuggacuucagggucuagcaucuccuucuguggagugaacucagacacagucggcuggagcuggcccgauggugcagagcugccguuuaccauagacaaauga

SEQ ID NO: 151473 - RNA, 1410 nt, Artificial Sequence
  derived and/or modified CDS sequence (opt3) from neuraminidase__InfluenzaA__AGJ73379
augaaccccaaucagaagaucauuaccauaggcagcgugugcaugacaaucgggauggccaaccugauucuccaaaucggaaauauuaucuccauauggaucucucacucaauucagcuugguaaccagagucagaucgagacuuguaaucaaagcgucauuacguacgaaaacaauaccuggguuaaccagacauaugugaauaucuccaacacuaauuucgcugcaggccagucuguagugucggucaaacuggccgggaacagcagcuugugcccugugaguggaugggcgauauacuccaaggacaauucuguuagaauuggcagcaaaggugauguguuugucaucagggagccauucauuuccuguucaccguuagaaugccggaccuuuuuccugacacagggggcucuacucaacgacaagcauaguaauggaaccaucaaagaucgcagccccuaucgaacucugaugucuuguccuaucggcgaggugccaucccccuacaacucacguuuugaaagcguagccuggagugcaucugccugccacgacggcauuaacuggcuuacaauagggaucuccggaccugauagcggugcuguugcagugcugaaguauaauggcauuaucaccgacacgauaaagucguggagaaacaauauuuugaggacucaagagucugagugugccugcgucaacggguccuguuucaccaucaugacagauggaccaucagacggccaggcuaguuacaaaaucuuucggauugaaaaggguaaaaucgugaagucaguggagaugaaugcccccaacuaucauuacgaagagugcuccuguuacccugauucuagcgagauuacuugcgucugccgcgacaauuggcacgggucaaacagaccauggguuaguuucaaucagaaccucgaauaucagauaggauacaucuguuccggcauuuuuggcgauaauccgaggcccaacgacaaaaccgggagcugcggaccugugucuucaaauggugcgaacggcguaaagggguucaguuuuaaguauggaaauggcguguggaucggucggacaaaaagcaucuccucucgcaagggguucgagaugauuugggauccaaacggcuggaccggaacggacaacaauuuuucgauaaaacaagacaucauuggcaucaacgaauggagcggguacuccggaucauucguccagcaucccgagcugacuggucuggauuguauucgaccuugcuucuggguggaacucaucagaggcaggccaaaggagaauacaauauggaccagugggucuagcaucuccuuuuguggaguuaacucagacacugugggcuggagcuggcccgauggugcagaguuaccguucacaauugacaaauga

SEQ ID NO: 151474 - RNA, 1410 nt, Artificial Sequence
  derived and/or modified CDS sequence (opt3) from neuraminidase__InfluenzaA__AGJ73381
augaaccccaaucagaagaucauuaccauaggcagcgugugcaugacaaucgggauggccaaccugauucuccaaaucggaaauauuaucuccauauggaucucucacucaauucagcuugguaaccagagucagaucgagacuuguaaucaaagcgucauuacguacgaaaacaauaccuggguuaaccagacauaugugaauaucuccaacacuaauuucgcugcaggccagucuguagugucggucaaacuggccgggaacagcucauugugcccugugaguggaugggcgauauacuccaaggacaauucuguuagaauuggcagcaaaggugauguguuugucaucagggagccauucauuuccuguucaccguuagaaugccggaccuuuuuccugacacagggggcucuacucaacgacgagcauaguaauggaaccaucaaggaucgcagccccuaucgaacucugaugucuuguccuaucggcgaagugccaucccccuacaacucacguuuugagagcguagccuggagugcaucugccugccacgacggcauuaacuggcuuacaauagggaucuccggaccugauagcggugcuguugcagugcugaaauauaauggcauuaucaccgacacgauaaagucguggagaaacaauauuuugaggacucaagagucugaaugugccugcgucaacggguccuguuucaccaucaugacagauggaccaucagacggccaggcuaguuacaagaucuuucggauugagaaagguaagaucgugaaaagcguggaaaugaaugcccccaacuaucauuacgaggagugcuccuguuacccugauucuagcgaaauuacuugcgucugccgcgacaauuggcacgggucaaacagaccauggguuaguuucaaucagaaccucgaguaucagauaggauacaucuguuccggcauuuuuggcgauaauccgaggcccaacgacaagaccgggagcugcggaccugugucuucaaauggugcgaacggcguaaaaggguucaguuuuaaguauggaaauggcguguggaucggucggacaaagagcaucuccucucgcaaaggguucgaaaugauuugggauccaaacggcuggaccggaacggacaacaauuuuucgauaaagcaagacaucgucggcauuaacgaguggagcggguacuccggaucauucgugcagcaucccgaacugacuggucuggauuguauccgaccuugcuucuggguugagcucauuagaggcaggccaaaagagaauacaaucuggaccagugggucuagcauauccuuuuguggagugaacucagacacugucggcuggagcuggcccgauggugcagaauuaccguucacaaucgacaaguga

SEQ ID NO: 151475 - RNA, 1410 nt, Artificial Sequence
  derived and/or modified CDS sequence (opt3) from neuraminidase__InfluenzaA__AGK62992
augaaccccaaucagaagaucauuaccauaggcagcgugucccugacaaucucuacuauuugcuucuuuaugcagaucgccauucucaucacgaccgucacacuucacuucaaacaguacgaguuuaacucaccuccaaauaaccagguuaugcugugugaaccgacuauaaucgagagaaauauuaccgaaaucguguauuugacaaacaccacuauugagaaggaaaucugccccaaaccugcugaguacaggaauuggaguaagccacagugugacauaacaggguucgcacccuuuagcaaagauaacuccauucgguuaucugccggaggugacaucuggguaacccgcgagccuuaugugucgugcgauccagacaaguguuaccaauucgcgcugggccaggggacgacucuaaauaacguccauucaaauaacaccgugcgagaucguacacccuauagaacucuccugaugaaugaacuuggaguuccuuuucaccugggcaccaaacaggugugcauugcuuggagcaguuccucuugucaugacgguaaggccugguugcacgucugcaucacaggggaugacaagaacgcaaccgccagcuucaucuacaauggaaggcucguggauuccguaguuucauggaguaaagagauucugcggacgcaggaaagcgagugugugugcauaaacggcacuuguacagucgugaugaccgacggcucugcuuccgggaaggcagauacuaaaauccuguuuauugaggaaggaaagaucgugcauacaucaacccucagcgguagugcccaacacgucgaggaaugcucuugcuauccacgcuacccgggcguuagaugugugugcagggacaacuggaagggguccaaucggcccauaguagauauuaacaucaaagaccacagcaucgugucgucuuacgucuguuccggauuagugggcgacacgccucgcaagaaugauucaaguagcuccucucauugccuggacccaaacaaugaggaaggugggcacggaguuaaaggcugggcuuucgaugacggcaacgauguguggauggggcgaaccauuaaugagacaagcagacuuggauaugagacuuuuaaggucaucgaagguuggucaaaccccaaaaguaaguugcagauuaauaggcaagugauaguagaccggggcgaucguuccggguacagcggaaucuucucuguugaggugaaaucauguauuaaccgcugcuuuuaugucgaacugaucagaggcaggaaggaggaaaccgaggugcuauggacaaguaauagcaucgucguguucugugguacuuccgggaccuacggcacaggaucuuggccugacggcgccgauauuaaccucaugccaauauga

SEQ ID NO: 151476 - RNA, 1410 nt, Artificial Sequence
  derived and/or modified CDS sequence (opt3) from neuraminidase__InfluenzaA__AGK62996
augaaccccaaucagaagaucauuaccauaggcagcgugucccugaucauuucuacaaucugcuucuuuaugcagauugccauccucauaacuacggucacccuucacuucaaacaguacgaguuuaacucaccuccaaauaaccagguuaugcugugugaaccgacaaucauugagagaaauaucacugaaauuguguauuugaccaacacaaccaucgagaaggaaauaugccccaaaccugcugaguacaggaauuggaguaagccacagugugacauuacuggguucgcacccuuuagcaaagauaacuccauccgguuaucugccggaggugacauuuggguaacacgcgagccuuaugugucgugcgauccagacaaguguuaccaauucgcgcugggccaggggaccacgcuaaauaacguccauucaaauaacacugugcgagaucguacccccuauagaacacuccugaugaaugaacuuggaguuccuuuucaccugggcacuaaacaggugugcaucgcuuggagcaguuccucuugucaugacgguaaggccugguugcacgucugcaucaccggggaugacaagaacgcaacagccagcuucauuuacaauggaaggcucguggauuccguaguuucauggaguaaagagauacugcggacccaggaaagcgagugugugugcaucaacggcacguguacugucgugaugacagacggcucugcuuccgggaaggcagauaccaaaauucuguuuaucgaggaaggaaagauagugcauacuucaacacucagcgguagugcccaacacgucgaggaaugcucuugcuauccacgcuacccgggcguuagaugugugugcagggacaacuggaagggguccaaucggcccauuguagauaucaacaucaaagaccacagcauugugucgucuuacgucuguuccggauuagugggcgacaccccucgcaagaaugauucaaguagcuccucucauugccuggacccaaacaaugaggaaggugggcacggaguuaaaggcugggcuuucgaugacggcaacgauguguggauggggcgaacgaucaaugagaccagcagacuuggauaugagacauuuaaggucauugaagguuggucaaaccccaaaaguaaguugcagauaaauaggcaagugaucguagaccggggcgaucguuccggguacagcggaauuuucucuguugagucaaaaaguuguaucaaccgcugcuuuuauguggaacugaucagaggcaggaaggaggaaacugagguccuauggaccagcaauuccauuguggucuucugugguacaucugggacuuacggcaccggaucguggccugacggcgccgauauaaaccucaugccaaucuga

SEQ ID NO: 151477 - RNA, 1410 nt, Artificial Sequence
  derived and/or modified CDS sequence (opt3) from neuraminidase__InfluenzaA__AGK62998
augaaccccaaucagaagaucauuaccauaggcagcgugucccugacaaucgccacuauuugcuucuuuaugcaaaucgcuauucucaucacgaccgucacacuucacuucaaacagugugaguuuaacucuccuccaaauaaccagguuaugcugugcgaaccgacuauaaucgagagaaauauuaccgaaaucguguacuugacaaacaccacuauugagaaggaaaucugucccaaauuagcagaguauaggaauuggucaaagccucagugcgacauaacaggguucgccccauuuaguaaagauaacagcauucggcuguccgcgggaggugacaucuggguaacccgcgagcccuacgugucuugugauccugacaagugcuaucaauucgcucuaggccaggggacgacucucaauaacguccauucgaauaacaccgugcgagaucguacaccauacagaacucugcuuaugaaugaacugggaguucccuuucacuugggcaccaaacagguguguauggccuggucaagcaguuccugccaugacgguaaggcauggcuccacgucuguauuacaggggaugacaagaacgccaccgcuucuuucaucuauaauggaaggcugguggauagcguaguuuccuggucaaaagagauccugcggacgcaggaaagugagugcguguguauuaacggcacuugcacagucgugaugaccgacggcagcgcaucugggaaggccgauacuaaaauacucuuuaucgaggaaggaaagauugugcauacauccaccuuaucagguagcgcucaacacgucgaggaaugcaguuguuacccucgcuauccaggcguuagaugcguguguagggacaacuggaaggggucuaaucggccgaucguagauauaaacauuaaagaccacuccaucgugagcucguacgucugcucuggacugcuuggcgacacgccccgcaagaaugauuccucaaguagcucccauuguuuggacccuaacaaugaggaaggugggcacggagugaaaggcugggccuucgaugacggcaacgauguuuggauggggcgaaccaucucugaaaagagcagacugggauacgagacauuuaaagugauugaggguuggucaaauccaaagaguaaacuacagaucaacaggcaggucauuguggaccggggcgaucguuccggguauagcggaauauucucuguagagucaaagaguugcaucaaucgcuguuuuuacguugaacucauuagaggcaggaaggaggaaacugaggugcuguggaccagcaacuccaucgucguguucugcgguacaucugggacuuauggcaccggaucguggcccgacggcgcggauaucaaucuuaugccuauuuga

SEQ ID NO: 151478 - RNA, 1410 nt, Artificial Sequence
  derived and/or modified CDS sequence (opt3) from neuraminidase__InfluenzaA__AGK63000
augaaccccaaucagaagaucauuaccauaggcagcgugucccugacaaucgccacuauuugcuucuuuaugcaaaucgcuauucucaucacgaccgucacacuucacuucaaacagugugacuuuaacucuccuccaaauaaccagguuaugcugugcgagccgacuauaaucgaaagaaauauuaccgagaucguguacuugacaaacaccacuauugaaaaggagaucugucccaaauuagcagaauauaggaauuggucaaagccucagugcgauauaacaggguucgccccauuuaguaaagacaacagcauucggcuguccgcgggaggugauaucuggguaacccgcgagcccuacgugucuugugacccugauaagugcuaucaauucgcucuaggccaggggacgacucucaauaacguccauucgaauaacaccgugcgagaccguacaccauacagaacucugcuuaugaaugagcugggaguucccuuucacuugggcaccaaacagguguguauggccuggucaagcaguuccugccaugaugguaaggcauggcuccacgucuguauuacaggggacgauaagaacgccaccgcuucuuucaucuauaauggaaaacugguggacagcguaguuuccuggucaaaggaaauccugaggacgcaggagagugaaugcguguguauuaacggcacuugcacagucgugaugaccgauggcagcgcaucugggaaagccgacacuaagauacucuuuaucgaggagggaaagauugugcauacauccaccuuaucagguagcgcucaacacgucgaagagugcaguuguuacccucgguauccaggcguucgcugcguguguagagauaacuggaaagggucuaauaggccgaucguagacauaaacauuaaggaccacuccaucgugagcucguacgucugcucuggacuggugggcgauacgccccggaaaaaugacuccucaaguagcucccauugucuugauccuaacaaugaagagggugggcacggaguuaagggcugggccuucgacgauggcaacgacguguggauggggcgcaccaucaaugaaacaucucgauugggauacgagacuuuuaaagucauugaggguuggagcaacccaaagucaaaacugcagaucaauagacaggugauuguagauaggggcgaccggaguggguauuccggaauauucagcguugaaggcaagucuugcaucaaccguuguuuuuacguggagcuaauucgcgguagaaaggaagagaccgaaguccucuggacaucaaauaguaucguggucuucugcgggacuagcggcaccuauggaacaggcuccuggcccgauggggcggacaucaaccugaugccuauuuga

SEQ ID NO: 151479 - RNA, 1410 nt, Artificial Sequence
  derived and/or modified CDS sequence (opt3) from neuraminidase__InfluenzaA__AGK63002
augaaccccaaucagaagaucauuaccauaggcagcgugucccugacaaucucuacuauuugcuucuuuaugcagaucgccauucucaugacgaccgucacacuucacuucaaacagugugaguuuaacucaccuccaaauaaccagguuaugcugugcgaaccgacuaucauagagagaaauaucaccgaaauuguguacuugacaaacaccacuaucgagaaggaaauuugucccaaauuagcugaguauaggaauuggaguaagccucagugcgacaucacaggguucgcaccauuuagcaaagauaacuccauacggcugucugccggaggugacauuuggguaacccgcgagcccuacgugucgugugauccugacaagugcuaucaauucgcgcuaggccaggggacgacucucaauaacguccauucaaauaacaccgugcgagaucguacaccauacagaacucugcuuaugaaugaacugggaguucccuuucacuugggcaccaaacagguguguauggcuuggagcaguuccucuugccaugacgguaaggccuggcuccacgucuguaucacagggaacgauaagaaugcaaccgccagcuucauuuauaacggaaggcugguggacuccguaguuucauggaguaaagagauccugcggacgcaggaaagcgagugcguguguaucaacggcacuugcacagucgugaugaccgauggcucugcuuccgggaaggcagacacuaaaauucucuuuauagaggaaggaaagaucgugcauacaucaaccuuaagcgguagugcccaacacgucgaggaaugcucuuguuacccucgcuauccaggcguuagaugcguguguagggauaauuggaagggguccaaccggccgauuguagacaucaauauaaaagaucacagcauugugucgucuuacgucugcuccggacuggugggcgacacgccccgcaagaacgacucaaguagcuccucucauugucuugauccuaauaacgaggaaggugggcacggaguuaaaggcugggcuuucgacgauggcaaugacguguggauggggcgaaccaucacagagacuagcagauugggauacgagaccuuuaaggucaucgaagguuggucaaacccaaaaaguaagcugcagauuaauaggcaagugaucguagaucggggcgaccguuccggguauagcggaauuuucucuguugagggcaaaucaugcauaaaccgcuguuuuuacguggaacuaaucagagguaggaaggaggaaacagagguccucuggaccaguaauagcauuguggucuucugcgggacuuccggcacauauggaaccggcucuuggcccgauggggccgacaucaaccugaugccuaucuga

SEQ ID NO: 151480 - RNA, 1410 nt, Artificial Sequence
  derived and/or modified CDS sequence (opt3) from neuraminidase__InfluenzaA__AGK63004
augaaccccaaucagaagaucauuaccauaggcagcgugucccugacaaucucuacuauuugcuucuuuaugcagaucgccauucucaucacgaccgucacacuucacuucaaacaguacgaguuuaacucaccuccaaauaaccagguuaugcugugugaaccgacuauaaucgagagaaauauuaccgaaaucguguauuugacaaacaccacuauugagaaggaaaucugccccaaaccugcugaguacaggaauuggaguaagccacagugugacauaacaggguucgcacccuuuagcaaagauaacuccauucgguuaucugccggaggugacaucuggguaacccgcgagccuuaugugucgugcgauccagacaaguguuaccaauucgcgcugggccaggggacgacucuaaauaacguccauucaaauaacaccgugcgagaucguacacccuauagaacucuccugaugaaugaacuuggaguuccuuuucaccugggcaccaaacaggugugcauugcuuggagcaguuccucuugucaugacgguaaggccugguugcacgucugcaucacaggggaugacaagaacgcaaccgccagcuucaucuacaauggaaggcucguggauuccguaguuucauggaguaaagagauucugcggacgcaggaaagcgagugugugugcauaaacggcacuuguacagucgugaugaccgacggcucugcuuccgggaaggcagauacuaaaauccuguuuauugaggaaggaaagaucgugcauacaucaacccucagcgguaguucucaacacgucgaggaaugcuccugcuauccacgcuacccgggcguuagaugugugugcagggacaacuggaaggggagcaaucggcccauaguagauauuaacaucaaagaccacucgaucgugucuuccuacgucuguucaggauuagugggcgacacgccucgcaagaaugauaguagcuccucuagccauugccuggacccaaacaaugaggaaggugggcacggaguuaaaggcugggccuucgaugacggcaacgauguguggauggggcgaaccauuaaugagacaucaagacuuggauaugagacuuuuaaggucaucgaagguuggaguaaccccaaauccaaguugcagauuaauaggcaagugauaguagaccggggcgaucguagcggguacucuggaaucuucucaguugagggcaaaaguuguauuaaccgcugcuuuuauguggaacugaucagagguaggaaggaggaaaccgagguccuauggacaagcaauuccaucguggucuucugugggacuucuggcaccuacggaacaggcucguggccugacggggcugauauuaaccucaugccaauauga

SEQ ID NO: 151481 - RNA, 1410 nt, Artificial Sequence
  derived and/or modified CDS sequence (opt3) from neuraminidase__InfluenzaA__AGK63006
augaaccccaaucagaagaucauuaccauaggcagcgugucccugacaaucgccacuauuugcuucuuuaugcagaucgcuauucucaucacgaccgucacacuucacuucaaacaguacgaguuuaacucuccuccaaauaaccagguuaugcugugugaaccgacuauaaucgagagaaauauuaccgaaaucguguauuugacaaacaccacuauugagaaggaaaucugccccaaaccugcagaguacaggaauuggucaaagccacagugugacauaacaggguucgcccccuuuaguaaagauaacagcauucgguuauccgcgggaggugacaucuggguaacccgcgagccuuaugugucuugcgauccagacaaguguuaccaauucgcucugggccaggggacgacucuaaauaacguccauucgaauaacaccgugcgagaucguacacccuauagaacucuccugaugaaugaacuuggaguuccuuuucaccugggcaccaaacaggugugcauugccuggucaagcaguuccugucaugacgguaaggcaugguugcacgucugcaucacaggggaugacaagaacgccaccgcuucuuucaucuacaauggaaggcucguggauagcguaguuuccuggucaaaagagauucugcggacgcaggaaagugagugugugugcauaaacggcacuuguacagucgugaugaccgacggcagcgcaucugccaaggcugauacuaaaauccuguuuauugaggaagggaagaucgugcauacauccacccucucaggaagcgcccaacacgucgaggaaugcaguugcuauccacgcuacucugguguuagaugugugugcagggacaacuggaagggcuccaaucggccgauaguagauauuaacaucaaagaccacagcaucgugucgucuuacgucuguuccggguuagugggagacacgccccgcaagaaugauucaaguagcuccucucauugccuggacccuaacaaugaggaaggcggucacgggguuaaaggaugggcguucgaugacggcaacgauguguggaugggccgaaccauuaaugagacaagcagacuuggguaugagacuuuuaaggucaucgaaggauggucaaacccaaaaagucaguugcagauuaauaggcaagugauaguagaccggggugaucguuccggcuacagcgggaucuucucuguugagucaaagaguuguauuaaccgcugcuuuuauguggaacugaucagaggaaggaaagaggaaaccgagguccuauggacaagcaauuccaucguggucuucuguggcacuucugguaccuacgggacaggcucguggcccgacggagcagauauuaaccucaugccuauauga

SEQ ID NO: 151482 - RNA, 1410 nt, Artificial Sequence
  derived and/or modified CDS sequence (opt3) from neuraminidase__InfluenzaA__AGK63008
augaaccccaaucagaagaucauuaccauaggcagcgugucccugacaaucgccacuauuugcuucuuuaugcaaaucgcuauucucaucacgaccgucacacuucacuucaaacagugugaguuuaacucuccuccaaauaaccagguuaugcugugcgaaccgacuauaaucgagagaaauauuaccgaaaucguguacuugacaaacaccacuauugagaaggaaaucugucccaaauuagcagaguauaggaauuggucaaagccucagugcgacauaacaggguucgccccauuuaguaaagauaacagcauucggcuguccgcgggaggugacaucuggguaacccgcgagcccuacgugucuugugauccugacaagugcuaucaauucgcucuaggccaggggacgacucucaauaacguccauucgaauaacaccgugcgagaucguacaccauacagaacucugcuuaugaaugaacugggaguucccuuucacuugggcaccaaacagguguguauggccuggucaagcaguuccugccaugacgguaaggcauggcuccacgucuguauuacaggggaugacaagaacgccaccgcuucuuucaucuauaauggaaaacugguggauagcguaguuuccuggucaaaggagauccugaggacgcaggaaagugagugcguguguauuaacggcacuugcacagucgugaugaccgacggcagcgcaucugggaaagccgauacuaagauacucuuuaucgaggaaggaaagauugugcauacauccaccuuaucagguagcgcucaacacgucgaggaaugcaguuguuacccucgguauccaggcguucgcugcguguguagagacaacuggaaagggucuaauaggccgaucguagauauaaacauuaaggaccacuccaucgugagcucguacgucugcucuggacuggugggcgacacgccccggaaaaaugauuccucaaguagcucccauugucuugacccuaacaaugaggaaggugggcacggaguuaagggcugggccuucgaugacggcaacgauguguggauggggcgcaccaucaaugagacaucucgauugggauacgagacuuuuaaagucauugaagguuggagcaacccaaagucaaaacugcagaugaauagacaggugaucguagacaggggcgaucggaguggguauuccggaauuuucagcguugagggcaagucuugcauaaaccguuguuuuuacguggaacuaauccgcgguagaaaggaggaaaccgagguccucuggacaucaaauaguauuguggucuucugcgggacuagcggcaccuauggaacaggcuccuggcccgacggggcggauaucaaccugaugccuaucuga

SEQ ID NO: 151483 - RNA, 1410 nt, Artificial Sequence
  derived and/or modified CDS sequence (opt3) from neuraminidase__InfluenzaA__AGK63010
augaaccccaaucagaagaucauuaccauaggcagcgugucccugacaaucgccacuauuugcuucuuuaugcaaaucgcuauucucaucacgaccgucacacuucacuucaaacagugugaguuuaacucuccuccaaauaaccagguuaugcugugcgaaccgacuauaaucgagagaaauauuaccgaaaucguguacuugacaaacaccacuauugagaaggaaaucugucccaaauuagcagaguauaggaauuggucaaagccucagugcgacauaacaggguucgccccauuuaguaaagauaacagcauucggcuguccgcgggaggugacaucuggguaacccgcgagcccuacgugucuugugauccugacaagugcuaucaauucgcucuaggccaggggacgacucucaauaacguccauucgaauaacaccgugcgagaucguacaccauacagaacucugcuuaugaaugaacugggaguucccuuucacuugggcaccaaacagguguguauggccuggucaagcaguuccugccaugacgguaaggcauggcuccacgucuguauuacaggggaugacaagaacgccaccgcuucuuucaucuauaauggaaaacugguggauagcguaguuuccuggucaaaggagauccugaggacgcaggaaagugagugcguguguauuaacggcacuugcacagucgugaugaccgacggcagcgcaucugggaaagccgauacuaagauacucuuuaucgaggaaggaaagauugugcauacauccaccuuaucagguagcgcucaacacgucgaggaaugcaguuguuacccucgguauccaggcguucgcugcguguguagagacaacuggaaagggucuaauaggccgaucguagauauaaacauuaaggaccacuccaucgugagcucguacgucugcucuggacuggugggcgacacgccccggaaaaaugauuccucaaguagcucccauugucuugacccuaacaaugaggaaggugggcacggaguuaagggcugggccuucgaugacggcaacgauguguggauggggcgcaccaucaaugagacaucucgauugggauacgagacuuuuaaagucauugaagguuggagcgacccaaagucaaaacugcagaucaacagacaggugauuguagauaggggcgaccggaguggguauuccggaauauucagcguugagggcaagucuugcaucaaucguuguuuuuacguggaacuaauucgcgguagaaaggaggaaaccgagguccucuggacaucaaacaguaucguggucuucugcgggacuagcggcaccuauggaacaggcuccuggcccgauggggcggacaucaaucugaugccuauuuga

SEQ ID NO: 151484 - RNA, 1410 nt, Artificial Sequence
  derived and/or modified CDS sequence (opt3) from neuraminidase__InfluenzaA__AGK63012
augaaccccaaucagaagaucauuaccauaggcagcgugucccugacaaucucuacuauuugcuucuuuaugcagaucgccauucucaucacgaccgucacacuucacuucaaacaguacgaguuuaacucaccuccaaauaaccagguuaugcugugugaaccgacuauaaucgagagaaauauuaccgaaaucguguauuugacaaacaccacuauugagaaggaaaucugccccaaaccugcugaguacaggaauuggaguaagccacagugugacauaacaggguucgcacccuuuagcaaagauaacuccauucgguuaucugccggaggugacaucuggguaacccgcgagccuuaugugucgugcgauccagacaaguguuaccaauucgcgcugggccaggggacgacucuaaauaacguccauucaaauaacaccgugcgagaucguacacccuauagaacucuccugaugaaugaacuuggaguuccuuuucaccugggcaccaaacaggugugcauugcuuggagcaguuccucuugucaugacgguaaggccugguugcacgucugcaucacaggggaugacaagaacgcaaccgccagcuucaucuacaauggaaggcucguggauuccguaguuucauggaguaaagagauucugcggacgcaggaaagcgagugugugugcauaaacggcacuuguacagucgugaugaccgacggcucugcuuccgggaaggcagauacuaaaauccuguuuauugaggaaggaaagaucgugcauacaucaacccucagcgguagugcccaacacgucgaggaaugcucuugcuauccacgcuacccgggcguuagaugugugugcagggacaacuggaagggguccaaucggcccauaguagauauuaacaucaaagaccacagcaucgugucgucuuacgucuguuccggauuagugggcgacacgccucgcaagaaugauucaaguagcuccucucauugccuggacccaaacaaugaggaaggugggcacggaguuaaaggcugggcuuucgaugacggcaacgauguguggauggggcgaaccauuaaugagacaagcagacuuggauaugagacuuuuaaggucaucgaagguuggucaaaccccaaaaguaaguugcagauuaauaggcaagugauaguagaccggggcuaccguuccggguauagcggaaucuucucuguugagggcaaaucauguauuaaccgcugcuuuuacguggaucugaucagagguaggaaggaagagaccgaaguccuauggacaaguaauagcaucguggucuucugugggacuuccggcaccuauggaacaggcucuuggccugacggggccgauauuaaccucaugccaauauga

SEQ ID NO: 151485 - RNA, 1410 nt, Artificial Sequence
  derived and/or modified CDS sequence (opt3) from neuraminidase__InfluenzaA__AGK63014
augaaccccaaucagaagaucauuaccauaggcagcgugucccugacaaucucuacuauuugcuucuuuaugcagaucgccauucucaucacgaccgucacacuucacuucaaacaguacgaguuuaacucaccuccaaauaaccagguuaugcugugugaaccgacuauaaucgagagaaauauuaccgaaaucguguauuugacaaacaccacuauugagaaggaaaucugccccaaaccugcugaguacaggaauuggaguaagccacagugugacauaacaggguucgcacccuuuagcaaagauaacuccauucgguuaucugccggaggugacaucuggguaacccgcgagccuuaugugucgugcgauccagacaaguguuaccaauucgcgcugggccaggggacgacucuaaauaacguccauucaaauaacaccgugcgagaucguacacccuauagaacucuccugaugaaugaacuuggaguuccuuuuccacugggcaccaaacaggugugcauugcuuggagcaguuccucuugucacgacgguaaggccugguugcaugucugcaucacaggggaugacaagaacgcaaccgccagcuucaucuacaauggaaggcucguggauuccguaguuucauggaguaaagagauucaccggacgcaggaaagcgagugugugugcauaaacggcacuuguacagucgugaugaccgacggcucugcuuccgggaaggcagauacuaaaauccuguuuauugaggaaggaaagaucgugcauacaucaacccugagcgguagugcccaacacgucgaggaaugcucuugcuauccgcgcuaccccggcguuagaugugugugcagggacaacuggaagggguccaaucggccuauaguagauauuaacaucaaagaccacagcaucgugucgucuuacgucuguuccggacucgugggcgacacgccacgcaagaaugauucaaguagcuccucucauugcuuagaccccaacaaugaggaaggugggcacggaguuaaaggcugggcuuucgaugacggcaacgauguguggauggggcgaaccauuagcgagaagucaagacugggauaugagacauuuaaagucaucgaagguuggaguaauccuaaguccaaacuucagauuaacaggcaagugauaguagaccggggcaaucguagcggguacucuggaaucuucucaguugagggcaagaguuguauuaaccgcugcuuuuauguggaauugaucagagguaggaaggaggaaacugagguccuguggaccagcaauuccaucguggucuucugugggacaucuggcacuuacggaaccggcucguggccagauggggccgacauuaaccuaaugcccauauga

SEQ ID NO: 151486 - RNA, 1410 nt, Artificial Sequence
  derived and/or modified CDS sequence (opt3) from neuraminidase__InfluenzaA__AGK63018
augaaccccaaucagaagaucauuaccauaggcagcgugucccugacaaucucuacuauuugcuucuuuaugcaaaucgccauucucaucacgaccgucacacuucacuucaaacagugugaguuuaacucaccuccaaauaaccagguuaugcugugcgaaccgacuauaaucgagagaaauauuaccgaaaucguguacuugacaaacaccacuauugagaaggaaaucugucccaaauuagcugaguauaggaauuggaguaagccucagugcgacauaacaggguucgcaccauuuagcaaagauaacuccauucggcugucugccggaggugacaucuggguaacccgcgagcccuacgugucgugugauccugacaagugcuaucaauucgcgcuaggccaggggacgacucucaauaacguccauucaaauaacaccgugcgagaucguacaccauacagaacucugcuuaugaaugaacugggaguucccuuucacuugggcaccaaacagguguguauggcuuggagcaguuccucuugccaugacgguaaggccuggcuccacgucuguauuacaggggaugacaagaacgcaaccgccagcuucaucuauaauggaaaacugguggauuccguaguuucauggaguaaggagauccugaggacgcaggaaagcgagugcguguguauuaacggcacuugcacagucgugaugaccgacggcucugcuuccgggaaagcagauacuaagauacucuuuaucgaggaaggaaagauugugcauacaucaaccuuaagcgguagugcccaacacgucgaggaaugcucuuguuacccucgguauccaggcguucgcugcguguguagagacaacuggaaaggguccaauaggccgaucguagauauaaacauuaaggaccacagcaucgugucgucuuacgucugcuccggacuggugggcgacacgccccggaaaaaugauucaaguagcuccucucauugucuugacccuaacaaugaggaaggugggcacggaguuaagggcugggcuuucgaugacggcaacgauguguggauggggcgcaccaucaaugagacaagccgauugggauacgagacuuuuaaagucauugaagguuggucaaacccaaagaguaaacugcagaucaauagacaggugauuguagacaggggcgaucgguccggguauagcggaauauucucuguugagggcaagucaugcaucaaccguuguuuuuacguggaacuaauucgcgguagaaaggaggaaaccgagguccucuggacaaguaauagcaucguggucuucugcgggacuuccggcaccuauggaacaggcucuuggcccgacggggccgauaucaaccugaugccuauuuga

SEQ ID NO: 151487 - RNA, 1410 nt, Artificial Sequence
  derived and/or modified CDS sequence (opt3) from neuraminidase__InfluenzaA__AGK63020
augaaccccaaucagaagaucauuaccauaggcagcgugucccugacaaucucuacuauuugcuucuuuaugcagaucgccauucucaucacgaccgucacacuucacuucaaacaguacgaguuuaacucaccuccaaauaaccagguuaugcugugugaaccgacuauaaucgagagaaauauuaccgaaaucguguauuugacaaacaccacuauugagaaggaaaucugccccaaaccugcugaguacaggaauuggaguaagccacagugugacauaacaggguucgcacccuuuagcaaagauaacuccauucgguuaucugccggaggugacaucuggguaacccgcgagccuuaugugucgugcgauccagacaaguguuaccaauucgcgcugggccaggggacgacucuaaauaacguccauucaaauaacaccgugcgagaucguacacccuauagaacucuccugaugaaugaacuuggaguuccuuuucaccugggcaccaaacaggugugcauugcuuggagcaguuccucuugucaugacgguaaggccugguugcacgucugcaucacaggggaugacaagaacgcaaccgccagcuucaucuacaauggaaggcucguggauuccguaguuucauggaguaaagagauucugcggacgcaggaaagcgagugugugugcauaaacggcacuuguacagucgugaugaccgacggcucugcuuccgggaaggcagauacuaaaauccuguuuauugaggaaggaaagaucgugcauacaucaacccucagcgguagugcccaacacgucgaggaaugcucuugcuauccacgcuacccgggcguuagaugugugugcagggacaacuggaagggguccaaucggcccauaguagauauuaacaucaaagaccacagcaucgugucgucuuacgucuguuccggauuagugggcgacacgccucgcaagaaugauucaaguagcuccucucauugccuggacccaaacaaugaggaaggugggcacggaguuaaaggcugggcuuucgaugacggcaacgauguguggauggggcgaaccauuaaugagacaagcagacuuggauaugagacuuuuaaggucaucgaagguuggucaaaccccaaaaguaaguugcagauuaauaggcaagugauaguagaccggggcgaucguuccggguacagcggaaucuucucuguugagggcaaaucauguauuaaccgcugcuuuuauguggaacugaucagagguaggaaggaggaaaccgagguccuauggacaaguaauagcaucguggucuucugugggacuuccggcaccuacggaacaggcucuuggccugacggggccgauauuaaccucaugccaauauga

SEQ ID NO: 151488 - RNA, 1410 nt, Artificial Sequence
  derived and/or modified CDS sequence (opt3) from neuraminidase__InfluenzaA__AGK63022
augaaccccaaucagaagaucauuaccauaggcagcgugucccugacaaucucuacuauuugcuucuuuaugcaaaucgccauucucaucacgaccgucacacuucacuucaaacagugugaguuuaacucaccuccaaauaaccagguuaugcugugcgaaccgacuauaaucgagagaaauauuaccgaaaucguguacuugacaaacaccacuauugagaaggaaaucugucccaaauuagcugaguauaggaauuggaguaagccucagugcgacauaacaggguucgcaccauuuagcaaagauaacuccauucggcugucugccggaggugacaucuggguaacccgcgagcccuacgugucgugugauccugacaagugcuaucaauucgcgcuaggccaggggacgacucucaauaacguccauucaaauaacaccgugcgagaucguacaccauacagaacucugcuuaugaaugaacugggaguucccuuucacuugggcaccaaacagguguguauggcuuggagcaguuccucuugccaugacgguaaggccuggcuccacgucuguauuacaggggaugacaagaacgcaaccgccagcuucaucuauaauggaaaacugguggauuccguaguuucauggaguaaggagauccugaggacgcaggaaagcgagugcguguguauuaacggcacuugcacagucgugaugaccgacggcucugcuuccgggaaagcagauacuaagauacucuuuaucgaggaaggaaagauugugcauacaucaaccuuaagcgguagugcccaacacgucgaggaaugcucuuguuacccucgguauccaggcguucgcugcguguguagagacaacuggaaaggguccaauaggccgaucguagauauaaacauuaaggaccacagcaucgugucgucuuacgucugcuccggacuggugggcgacacgccccggaaaaaugauucaaguagcuccucucauugucuugacccuaacaaugaggaaggugggcacggaguuaagggcugggcuuucgaugacggcaacgauguguggauggggcgcaccaucaaugagacaagccgauugggauacgagacuuuuaaagucauugaagguuggucaaacccaaagaguaaacugcagaucaauagacaggugauuguagacaggggcgaucgguccggguauagcggaauauucucuguugagggcaagucaugcaucaaccguuguuuuuacguggaccuaauucgcgguagaaaggaagagaccgaaguccucuggacaaguaauagcaucguggucuucugcgggacuuccggcaccuauggaacaggcucuuggcccgauggggccgacaucaaccugaugccuauuuga

SEQ ID NO: 151489 - RNA, 1410 nt, Artificial Sequence; identical to SEQ ID NO: 151487
  derived and/or modified CDS sequence (opt3) from neuraminidase__InfluenzaA__AGK63024

SEQ ID NO: 151490 - RNA, 1410 nt, Artificial Sequence; identical to SEQ ID NO: 151487
  derived and/or modified CDS sequence (opt3) from neuraminidase__InfluenzaA__AGK63026

SEQ ID NO: 151491 - RNA, 1410 nt, Artificial Sequence
  derived and/or modified CDS sequence (opt3) from neuraminidase__InfluenzaA__AGK63028
augaaccccaaucagaagaucauuaccauaggcagcgugucccugacaaucucuacuauuugcuucuuuaugcaaaucgccauucucaucacgaccgucacacuucacuucaaacaguacgaguuuaacucaccuccaaauaaccagguuaugcugugugaaccgacuauaaucgagagaaauaagaccgaaauuguguauuugacaaacaccacuaucgagaaagaaauuugccccaagccugcugaguacaggaauuggaguaaaccacagugugacaucacaggguucgcacccuuuagcaaggauaacuccauacgguuaucugccggaggugacauuuggguaacccgcgagccuuaugugucgugcgauccagacaaguguuaccaauucgcgcugggccaggggacgacucuaaauaacguccauucaaauaacaccgugcgagaucguacacccuauagaacucuccugaugaaugaacuuggaguuccuuuucaccugggcaccaaacaggugugcaucgcuuggagcaguuccucuugucaugacgguaaggccugguugcacgucugcauuacaggggaugacaaaaacgcaaccgccagcuucaucuacaauggaaggcucguggauuccguaguuucauggaguaaggagauccugcggacgcaggaaagcgagugugugugcauuaacggcacuuguacagucgugaugaccgacggcucugcuuccgggaaagcagauacuaagauacuguuuaucgaggaaggaaaggugguccauacaucaacccucagcgguagugcccaacacguugaggaaugcucuugcuauccacgcuacccgggcgugagauguguaugcagggacaacuggaaaggguccaaucggcccauuguggauaucaacauaaaggaccacagcauugucucgucuuacguguguuccggauuaguuggcgacacgccucgcaaaaaugauucaaguagcuccucucauugccuggacccaaacaaugaggaaggugggcacggagugaagggcugggcuuucgaugacggcaacgaugucuggauggggcgaaccaucaaugagacaagcagacuuggauaugagacuuuuaaagugaucgaagguuggucaaaccccaagaguaaauugcagauuaauaggcagguaaucguugaccggggcgaucguuccggguacagcggaauuuucucuguggaggccaagucauguauaauccgcugcuuuuaugucgaacugauuagaggcaggaaggaggaaaccgaggugcuauggacaaguaacagcaucgucguguucugugguacuuccgggaccuacggcacaggaucuuggccugacggcgcggauaucaaucucaugccaauuuga

SEQ ID NO: 151492 - RNA, 1410 nt, Artificial Sequence; identical to SEQ ID NO: 151486
  derived and/or modified CDS sequence (opt3) from neuraminidase__InfluenzaA__AGK63030

SEQ ID NO: 151493 - RNA, 1410 nt, Artificial Sequence
  derived and/or modified CDS sequence (opt3) from neuraminidase__InfluenzaA__AGK63032
augaaccccaaucagaagaucauuaccauaggcagcgugucccugacaaucucuacuauuugcuucuuuaugcaaaucgccauucucaucacgaccgucacacuucacuucaaacaguacgaguuuaacucaccuccaaauaaccagguuaugcugugugaaccgacuauaaucgagagaaauauuaccgaaaucguguauuugacaaacaccacuauugagaaggaaaucugccccaaauuagcugaguacaggaauuggaguaagccucagugugacauaacaggguucgcaccauuuagcaaagauaacuccauucggcugucugccggaggugacaucuggguaacccgcgagcccuaugugucgugcgauccugacaaguguuaccaauucgcgcuaggccaggggacgacucucaauaacguccauucaaauaacaccgugcgagaucguacaccauauagaacucugcuuaugaaugaacugggaguucccuuucacuugggcaccaaacaggugugcauggcuuggagcaguuccucuugucaugacgguaaggccuggcuccacgucugcauuacaggggaugacaagaacgcaaccgccagcuucaucuacaauggaaaacugguggauuccguaguuucauggaguaaggagauccugaggacgcaggaaagcgagugugugugcauuaacggcacuuguacagucgugaugaccgacggcucugcuuccgggaaagcagauacuaagauacucuuuaucgaggaaggaaagauugugcauacaucaaccuuaagcgguagugcccaacacgucgaggaaugcucuugcuauccucgguacccaggcguucgcugugugugcagagacaacuggaaaggguccaauaggccgaucguagauauaaacauuaaggaccacagcaucgugucgucuuacgucuguuccggacuggugggcgacacgccccggaaaaaugauucaaguagcuccucucauugccuugacccuaacaaugaggaaggugggcacggaguuaagggcugggcuuucgaugacggcaacgauguguggauggggcgcaccaucacagagacuagccgauugggauaugagaccuuuaaagucauugaagguuggucaaauccaaagaguaaacugcagaucaacagacaggugauuguagacaggggcaaucgguccggguacagcggaauauucucuguugagggcaagucauguaucaaccguugcuuuuauguggaacuaauucgcgguagaaaggaggaaacagagguccucuggaccaguaauagcaucguggucuucugugggacuuccggcacauacggaaccggcucuuggcccgauggggccgacaucaaccugaugccuauuuga

SEQ ID NO: 151494 - RNA, 1410 nt, Artificial Sequence
  derived and/or modified CDS sequence (opt3) from neuraminidase__InfluenzaA__AGK63034
augaaccccaaucagaagaucauuaccauaggcagcgugucccugacaaucucuacuauuugcuucuuuaugcaaaucgccauucucaucacgaccgucacacuucacuucaaacagugugaguuuaacucaccuccaaauaaccagguuaugcugugcgaaccgacuauaaucgagagaaauauuaccgaaaucguguacuugacaaacaccacuauugagaaggaaaucugucccaaauuagcugaguauaggaauuggaguaagccucagugcgacauaacaggguucgcaccauuuagcaaagauaacuccauucggcugucugccggaggugacaucuggguaacccgcgagcccuacgugucgugugauccugacaagugcuaucaauucgcgcuaggccaggggacgacucucaauaacguccauucaaauaacaccgugcgagaucguacaccauacagaacucugcuuaugaaugaacugggaguucccuuucacuugggcaccaaacagguguguauggcuuggagcaguuccucuugccaugacgguaaggccuggcuccacgucuguauuacaggggaugacaagaacgcaaccgccagcuucaucuauaauggaaaacugguggauuccguaguuucauggaguaaggagauccugaggacgcaggaaagcgagugcguguguauuaacggcacuugcacagucgugaugaccgacggcucugcuuccgggaaagcagauacuaagauacucuuuaucgaggaaggaaagauugugcauacaucaaccuuaagcgguagugcccaacacgucgaggaaugcucuuguuacccucgguauccaggcguucgcugcguguguagagacaacuggaaaggguccaauaggccgaucguagauauaaacauuaaggugcacagcaucgucucgucuuacgugugcuccggacugguuggcgacacgccccggaaaaaugacucaaguagcuccucucauugucuugauccuaacaaugaggaaggugggcacggagugaagggcugggcuuucgacgauggcaacgacgucuggauggggcgcaccaucaaugagacaagccgauugggauacgagacuuuuaaagugauugaagguuggucaaacccaaagaguaaacugcagaucaauagacagguaauuguugauaggggcgaccgguccggguauagcggaauauucucuguggagggcaagucaugcaucaaccguuguuuuuacgucgaacuaauucgcgguagaaagaaagagaccgaagugcucuggacaaguaauagcaucgucguguucugcgggacuuccggcaccuauggaacaggcucuuggcccgauggggccgacaucaaccugaugccuauuuga

SEQ ID NO: 151495 - RNA, 1410 nt, Artificial Sequence
  derived and/or modified CDS sequence (opt3) from neuraminidase__InfluenzaA__AGK63036
augaaccccaaucagaagaucauuaccauaggcagcgugucccugacaaucucuacuauuugcuucuuuaugcagaucgccauucucaucacgaccgucacacuucacuucaaacaguacgaguuuaacucaccuccaaauaaccagguuaugcugugugaaccgacuauaaucgagagaaauauuaccgaaaucguguauuugacaaacaccacuauugagaaggaaaucugccccaaaccugcugaguacaggaauuggaguaagccacagugugacauaacaggguucgcacccuuuagcaaagauaacuccauucgguuaucugccggaggugacaucuggguaacccgcgagccuuaugugucgugcgauccagacaaguguuaccaauucgcgcugggccaggggacgacucuaaauaacguccauucaaauaacaccgugcgagaucguacacccuauagaacucuccugaugaaugaacuuggaguuccuuuucaccugggcaccaaacaggugugcauugcuuggagcaguuccucuugucaugacgguaaggccugguugcacgucugcaucacaggggaugacaagaacgcaaccgccagcuucaucuacaauggaaggcucguggauuccguaguuucauggaguaaagagauucugcggacgcaggaaagcgagugugugugcauaaacggcacuuguacagucgugaugaccgacggcucugcuuccgggaaggcagauacuaaaauccuguuuauugaggaaggaaagaucgugcauacaucaacccucagcgguagugcccaacacgucgaggaaugcucuugcuauccacgcuacccgggcguuagaugugugugcagggacaacuggaagggguccaaucggcccauaguagauauuaacaucaaagaccacagcaucgugucgucuuacgucuguuccggauuagugggcgacacgccucgcaagaaugauucaaguagcuccucucauugccuggacccaaacaaugaggaaggugggcacggaguuaaaggcugggcuuucgaugacggcaacgauguguggauggggcgaaccauuaaugagacaagcagauuuggauaugagacuaucaaggucauugaagguuggucaaaccccaaaaguaaucuucagauaaacaggcaagugaucguagaccggggcaaucguuccggguacagcggaauuuucucuguugagggcaagucauguaucaaccgcugcuuuuauguggaauugaucagagguaggaaagaggaaaccgagguccuguggacaaguaauagcauuguggucuucugugggacuuccggcaccuacggaacaggcucuuggccugauggggccgacauaaaccuaaugccaaucuga

SEQ ID NO: 151496 - RNA, 1410 nt, Artificial Sequence
  derived and/or modified CDS sequence (opt3) from neuraminidase__InfluenzaA__AGK63038
augaaccccaaucagaagaucauuaccauaggcagcgugucccugacaaucucuacuauuugcuucuuuaugcaaaucgccauucucaucacgaccgucacacuucacuucaaacaguacgaguuuaacucaccuccaaauaaccagguuaugcugugugaaccgacuauaaucgagagaaauauuaccgaaaucguguauuugacaaacaccacuauugagaaggaaaucugccccaaauuagcugaguacaggaauuggaguaagccucagugugacauaacaggguucgcaccauuuagcaaagauaacuccauucggcugucugccggaggugacaucuggguaacccgcgagcccuaugugucgugcgauccugacaaguguuaccaauucgcgcuaggccaggggacgacucucaauaacguccauucaaauaacaccgugcgagaucguacaccauauagaacucugcuuaugaaugaacugggaguucccuuucacuugggcaccaaacaggugugcauggcuuggagcaguuccucuugucaugacgguaaggccuggcuccacgucugcauuacaggggaugacaagaacgcaaccgccagcuucaucuacaauggaaaacugguggauuccguaguuucauggaguaaggagauccugaggacgcaggaaagcgagugugugugcauuaacggcacuuguacagucgugaugaccgacggcucugcuuccgggaaagcagauacuaagauacucuuuaucgaggaaggaaagauugugcauacaucaaccuuaagcgguagugcccaacacgucgaggaaugcucuugcuauccucgguacccaggcguucgcugugugugcagagacaacuggaaaggguccaauaggccgaucguagauauaaacauuaaggaccacagcaucgugucgucuuacgucuguuccggacuggugggcgacacgccccggaaaaaugauucaaguagcuccucucauugccuugacccuaacaaugaggaaggugaucacgggguuaagggaugggcuuucgacgauggcaacgacguguggaugggccgcaccaucaaugagacaagccgauugggguaugagacuuuuaaagucauugaaggauggucaaacccaaagaguaaacugcagaucaauagacaggugauuguagauagggguaaccgguccggcuacagcgggauauucucuguugagucaaagaguuguaucaaucguugcuuuuauguggaacuaauucgcggaagaaaggaggaaaccgagguccucuggacaagcaacuccaucguggucuucuguggcacuucugguaccuacgggacaggcucguggcccgacggagccgauaucaaucugaugccuauuuga

SEQ ID NO: 151497 - RNA, 1410 nt, Artificial Sequence
  derived and/or modified CDS sequence (opt3) from neuraminidase__InfluenzaA__AGK63040
augaaccccaaucagaagaucauuaccauaggcagcgugucccugacaaucucuacuauuugcuucuuuaugcaaaucgccauucucaucacgaccgucacacuucacuucaaacagugugaguuuaacucaccuccaaauaaccagguuaugcugugcgaaccgacuauaaucgagagaaauauuaccgaaaucguguacuugacaaacaccacuauugagaaggaaaucugucccaaauuagcugaguauaggaauuggaguaagccucagugcaacauaacaggguucgcaccauuuagcaaagacaauuccauucggcugucugccggaggugauaucuggguaacccgcgagcccuacgugucgugugacccugauaagugcuaucaauucgcgcuaggccaggggacgacucucaacaauguccauucaaacaauaccgugcgagaccguacaccauacagaacucugcuuaugaacgaacugggaguucccuuucacuugggcaccaaacagguguguauggcuuggagcaguuccucuugccaugaugguaaggccuggcuccacgucuguauuacaggggacgauaagaaugcaaccgccagcuucaucuauaacggaaaacugguggacuccguaguuucauggaguaaggagauccugaggacgcaggaaagcgagugcguguguauuaacggcacuugcacagucgugaugaccgauggcucugcuuccgggaaagcagacacuaagauacucuuuaucgaggaaggaaagauugugcauacaucaaccuuaagcgguagugcccaacacgucgaggaaugcucuuguuacccucgguauccaggcguucgcugcguguguagagauaauuggaaaggguccaacaggccgaucguagacauaaauauuaaggaucacagcaucgugucgucuuacgucugcuccggacuggugggcgacacgccccggaaaaacgacucaaguagcuccucucauugucuugauccuaauaacgaggaaggugggcacggaguuaagggcugggcuuucgacgauggcaaugacguguggauggggcgcaccaucaacgagacaagccgauugggauacgagacuuuuaaagucauugaagguuggucaaauccaaagaguaaacugcagaucaacagacaggugauuguagauaggggcgaccgguccggguauagcggaauauucucuguugagggcaagucaugcaucaaucguuguuuuuacguggaacuaauucgcgguagaaaggaggaaaccgagguccucuggacaaguaacagcaucguggucuucugcgggacuuccggcaccuauggaacaggcucuuggcccgauggggccgacaucaaucugaugccuauuuga

SEQ ID NO: 151498 - RNA, 1410 nt, Artificial Sequence
  derived and/or modified CDS sequence (opt3) from neuraminidase__InfluenzaA__AGK63042
augaaccccaaucagaagaucauuaccauaggcagcgugucccugacaaucucuacuauuugcuucuuuaugcaaaucgccauucucaucacgaccgucacacuucacuucaaacagugugaguuuaacccuccaccgaauaaccagguuaugcugugcgaacccacuauaaucgagagaaauauuaccgaaaucguguacuugacaaacaccacuauugagaaggaaaucuguccuaaauuagcugaguauaggaauuggucaaagccacagugcgacauaacaggguucgcacccuuuaguaaagauaacagcauucggcuguccgccggaggugacaucuggguaacccgcgagccuuacgugucuugugauccagacaagugcuaucaauucgcgcuaggccaggggacgacucucaauaacguccauucgaauaacaccgugcgagaucguacacccuacagaacucugcuuaugaaugaacugggaguuccuuuucacuugggcaccaaacagguguguauggcuuggucaagcaguuccugccaugacgguaaggccuggcuccacgucuguauuacaggggaugacaagaacgcaaccgccucuuucaucuauaauggaaaacugguggauagcguaguuuccuggucaaaggagauccugaggacgcaggaaagugagugcguguguauuaacggcacuugcacagucgugaugaccgacggcagcgcuucugggaaagcagauacuaagauacucuuuaucgaggaaggaaagauugugcauacauccaccuuaucagguagcgcccaacacgucgaggaaugcaguuguuacccacgguauccgggcguucgcugcguguguagagacaacuggaaagggucuaauaggcccaucguagauauaaacauuaaggaccacuccaucgugagcucguacgucugcucuggacuggugggcgacacgccucggaaaaaugauuccucaaguagcucccauugucuugacccaaacaaugaggaaggugggcacggaguuaagggcugggcuuucgaugacggcaacgauguguggauggggcgcaccaucaaugagacaucucgauugggauacgagacuuuuaaagucauugaagguuggagcaaccccaagucaaaacugcagaucaauagacaggugauuguagacaggggcgaucggaguggguauuccggaauauucagcguugagggcaagucuugcaucaaccguuguuuuuacguggaacuaauucgcgguagaaaggaggaaaccgagguccucuggacaucaaauaguaucguggucuucugcgggacuagcggcaccuauggaacaggcuccuggccugacggggccgauaucaaccugaugccaauuuga

SEQ ID NO: 151499 - RNA, 1410 nt, Artificial Sequence
  derived and/or modified CDS sequence (opt3) from neuraminidase__InfluenzaA__AGK63044
augaaccccaaucagaagaucauuaccauaggcagcgugucccugacaaucucuacuauuugcuucuuuaugcaaaucgccauucucaucacgaccgucacacuucacuucaaacagugugaguuuaacucaccuccaaauaaccagguuaugcugugcgaaccgacuauaaucgagagaaauauuaccgaaaucguguacuugacaaacaccacuauugagaaggaaaucugucccaaauuagcugaguauaggaauuggaguaagccucagugcgacauaacaggguucgcaccauuuagcaaagauaacuccauucggcugucugccggaggugacaucuggguaacccgcgagcccuacgugucgugugauccugacaagugcuaucaauucgcgcuaggccaggggacgacucucaauaacguccauucaaauaacaccgugcgagaucguacaccauacagaacucugcuuaugaaugaacugggaguucccuuucacuugggcaccaaacagguguguauggcuuggagcaguuccucuugccaugacgguaaggccuggcuccacgucuguauuacaggggaugacaagaacgcaaccgccagcuucaucuauaauggaaaacugguggauuccguaguuucauggaguaaggagauccugaggacgcaggaaagcgagugcguguguauuaacggcacuugcacagucgugaugaccgacggcucugcuuccgggaaagcagauacuaagauacucuuuaucgaggaaggaaagauugugcauacaucaaccuuaagcgguagugcccaacacgucgaggaaugcucuuguuacccucgguauccaggcguucgcugcguguguagagacaacuggaaaggguccaauaggccgaucguagauauaaacauuaaggaccacagcaucgugucgucuuacgucugcuccggacuggugggcgacacgccccggaaaaaugauucaaguagcuccucucauugucuugacccuaacaaugaggaaggugggcacggaguuaagggcugggcuuucgaugacggcaacgauguguggauggggcgcaccaucaaugagacaagccgauugggauacgagacuuuuaaagucauugaagguuggucaaacccaaagaguaaacugcagaucaauagacaggugauuguagacaggggcuaucgguccggguacagcggaauauucucuguugagucaaagaguugcaucaaccguuguuuuuauguggaacuacuccgcggcagaaaggaggaaaccgagguccuguggacaagcaauuccauuguggucuucugcgguacuucugggaccuacggcacaggaucguggcccgauggcgccgacaucaaccuuaugccuaucuga

SEQ ID NO: 151500 - RNA, 1410 nt, Artificial Sequence
  derived and/or modified CDS sequence (opt3) from neuraminidase__InfluenzaA__AGK63046
augaaccccaaucagaagaucauuaccauaggcagcgugucccugacaaucucuacuauuugcuucuuuaugcagaucgccauucucaucacgaccgucacacuucacuucaaacauuacgaguuuaacucaccuccaaauaaccagguuaugcugugugaaccgacuauaaucgagagaaauauuaccgaaaucguguauuugacaaacaccacuauugagaaggaaaucugccccaaaccugcugaguacaggaauuggaguaagccacagugugacauaacaggguucgcacccuuuagcaaagauaacuccauucgguuaucugccggaggugacaucuggguaacccgcgagccuuaugugucgugcgauccagacaaguguuaccaguucgcgcugggccaagggacgacucuaaauaacguccacucaaauaacaccgugcgagaucguacacccuauagaacucuccugaugaaugaacuuggaguuccuuuucaucugggcaccaaacaggugugcauugcuuggagcaguuccucuugucacgacgguaaggccugguugcaugucugcaucacaggggaugacaagaacgcaaccgccagcuucaucuacaauggaaggcucguggauuccguaguuucauggaguaaagagauucugcggacgcaggaaagcgagugugugugcauaaacggcacuuguacagucgugaugaccgacggcucugcuuccgggaaggcagauacuaaaauccuguuuauugaggaaggaaagaucgugcacacaucaacccucagcgguagugcccagcacgucgaggaaugcucuugcuauccacgcuacccgggcguuagaugugugugcagggacaacuggaagggguccaaucggcccauaguagauauuaacaucaaagaccauagcaucgugucgucuuacgucuguuccggauuagugggcgacacgccucgcaagaaugauucaaguagcuccucucacugccuggacccaaacaaugaggaaggugggcauggaguuaaaggcugggcuuucgaugacggcaacgauguguggauggggcgaaccauuaaugagacaagcagacuuggauaugagacuuuuaaggucaucgaagguuggucaaaccccaaaaguaaguugcaaauuaauaggcaagugauaguagaccggggcgaucguuccggguacagcggaaucuucucuguugagggcaaaucauguauuaaccgcugcuuuuauguggaccugaucagagguaggaaggaagagaccgaaguccuauggacaaguaauagcaucguggucuucugugggacuuccggcaccuacggaacaggcucuuggccugauggggccgacauuaaccucaugccaauauga

SEQ ID NO: 151501 - RNA, 1398 nt, Artificial Sequence
  derived and/or modified CDS sequence (opt3) from neuraminidase__InfluenzaA__AGK82159
augaaccccaaucagaagauccugugcaccagcgccacagcuauuauaaucggcgcaauugccgugcucaucgggauugcgaaccuuggacugaauaucgguuugcacuuaaaaccuggcuguaacugcucccauucucaaccagagacuacgaauaccucacagacaauaaucaacaauuacuauaacgaaacuaauauuaccaacauccagauggaggaaagaacaaguaggaauuucaacaaucugaccaaggggcuauguacuauuaacagcuggcacaucuacggaaaagacaaugcuguccggauaggcgaguccucugauguucucgugacacgcgaaccguauguaucgugcgaccccgaugagugucgauuuuacgcccugucacaggguaccacgauucgugggaagcauagcaacgagacuauccacgacagaagucaauauagggcacuuauuuccuggccucugucuagcccacccaccguguacaacucccgggucgaaugcaucggauggucaaguacaagcugucaugauggcaaaucucgcauguccaucugcauuucaggcccuaauaacaaugccagcgcugugguuugguauaacagaaggccaguggcagagauaaauacuugggcccggaacaucuugcgcacccaggaaagugagugugucugccacaauggggugugucccguaguuuucacagacggaucugcuaccgguccugccgauacgcgaauuuacuacuuuaaggagggcaagauccucaaaugggaaucccugacugggacagcgaagcacauagaggaaugcagcugcuauggagagagaaccggcauuacuuguacaugcagggacaacuggcaggguucgaaucggccagugauccagaucgauccggucgcaaugacccauacgucucaauacauuuguucccccgugcugaccgacaacccucguccaaaugaucccaacaucgggaaaugcaaugacccuuauccaggaaacaauaacaacggcgugaagggcuucucauaccucgauggggccaauacaugguuaggacgcacuauuaguaccgcuagcagauccgguuaugaaaugcugaaaguccccaacgcccuuacagacgacaggucuaagccgauacagggccagacuaucguuuugaaugcagauuggagcggguacucaggaaguuuuauggacuauugggcugagggcgauuguuaccgggccugcuucuacguggagcugauucgaggucgcccuaaggaagacaaaguaugguggaccuccaacagcaucgugucuauguguucaaguacagaguuucuagggcaguggaauuggcccgauggcgcgaagaucgaauauuuccucuga

SEQ ID NO: 151502 - RNA, 1398 nt, Artificial Sequence
  derived and/or modified CDS sequence (opt3) from neuraminidase__InfluenzaA__AGK84858
augaaccccaaucagaagauccugugcaccagcgccacagcuauuauaaucggcgcaauugccgugcucaucgggauugcgaaccuuggacugaauaucgguuugcacuuaaaaccuggcuguaacugcucccauucucaaccagagacuacgaauaccucacagacaauaaucaacaauuacuauaacgaaacuaauauuaccaacauccagauggaggaaagaacaaguaggaauuucaacaaucugaccaaggggcuauguacuauuaacagcuggcacaucuacggaaaagacaaugcuguccggauaggcgaguccucugauguucucgugacacgcgaaccguauguaucgugcgaccccgaugagugucgauuuuacgcccugucacaggguaccacgauucgugggaagcauagcaacggaacuauccacgacagaagucaauauagggcacuuauuuccuggccucugucuagcccacccaccguguacaacucccgggucgagugcaucggcuggucaaguacaagcugucaugauggcaaaucucgcauguccaucugcauuucagggccuaauaacaaugccagcgcugugguuugguauaacagaaggccaguggcagaaauaaauacuugggcccggaacaucuugcgcacccaggagagugaaugugucugccacaauggagugugucccguaguuuucacagacgguucugcuaccggcccugccgauacgcgaauuuacuacuuuaaggaggggaagauccucaaaugggagucccugacuggaacagcgaagcacauagaagagugcagcugcuauggcgaaagaaccgguauuacuuguacaugcagggacaacuggcaggggucgaaucggccagugauccagaucgauccggucgcaaugacccauacgucucaauacauuuguucccccgugcugaccgacaacccucguccaaaugaucccaacaucggaaaaugcaaugacccuuauccaggcaacaauaacaacggcgugaagggguucucauaccucgauggagccaauacaugguuaggucgcacuauuaguaccgcuagcagauccggcuaugagaugcugaaaguccccaacgcccuuacagacgacaggucuaagccgauacaggggcagacuaucguuuugaaugcagauuggagcggauacucaggcaguuuuauggacuauugggcugaaggugauuguuaccgggccugcuucuacguggagcugauucgagggcgcccuaaggaggacaaaguaugguggaccuccaacagcaucgugucuauguguucaaguacagaauuucuaggccaguggaauuggcccgauggagcgaagaucgaguauuuccucuga

SEQ ID NO: 151503 - RNA, 1398 nt, Artificial Sequence
  derived and/or modified CDS sequence (opt3) from neuraminidase__InfluenzaA__AGK84861
augaaccccaaucagaagauccugugcaccagcgccacagcuauuauaaucggcgcaauugccgugcucaucgggauugcgaaccuuggacugaauaucgguuugcacuuaaaaccuuccuguaacugcucucauucacaaccagagacuacgaauaccagucagacaauaaucaacaauuacuauaacgaaacuaauauuaccaacauccagauggaggaaagaacaagcaggaauuucaacaaucugaccaagggccuauguacuauuaacuccuggcacaucuacgggaaagacaaugcuguccggauaggagagucuucggauguucucgugacacgcgaaccguauguaucaugcgaccccgaugagugucgauuuuacgcccugagccagggcaccacgauucgugguaagcauaguaacgggacuauccacgacagaucccaauauagggcacuuauuucuuggccucugagcuccccacccaccguguacaacucacgggucgagugcaucggauggaguagcacaucuugucaugauggcaaaucccgcaugucaaucugcauuagcggcccuaauaacaaugccagugcugugguuugguauaacagaaggccaguggcagaaauaaauacuugggcccggaacaucuugcgcacccaggagucugaaugugucugccacaauggggugugucccguaguuuucacagacggauccgcuaccgguccugccgauacgcgaauuuacuacuuuaaggagggcaagauccucaaaugggagagccugacugggacagcgaagcacauagaagagugcucgugcuauggagaaagaaccggcauuacuuguacaugcagggacaacuggcaggguucuaaucggccagugguccagaucgauccgguggcaaugacccauacgucccaauacaucuguucacccgugcugaccgacaacccucguccaaaugaucccaacauugggaaaugcaaugacccuuauccaggaaucaacaauaacggcgucaagggcuucaguuaccucgauggggccaacacaugguuaggacgcacuauuagcaccgcuuccagaucugguuaugagaugcugaaaguucccaaugcccuuacagacgacaggagcaagccgauacagggccagacuaucguguugaacgcagauuggucaggguacaguggauccuuuauggacuauugggcugaaggcgauuguuaccgggccugcuucuacguagagcugauucgaggucgcccuaaggaggacaaagugugguggaccagcaauucuaucgucucaauguguaguagcacagaauuucuagggcaguggaacuggcccgauggcgcgaagaucgaguauuuccucuga

SEQ ID NO: 151504 - RNA, 1398 nt, Artificial Sequence; identical to SEQ ID NO: 151502
  derived and/or modified CDS sequence (opt3) from neuraminidase__InfluenzaA__AGK84864

SEQ ID NO: 151505 - RNA, 1398 nt, Artificial Sequence
  derived and/or modified CDS sequence (opt3) from neuraminidase__InfluenzaA__AGL95090
augaaccccaaucagaagauccugugcaccagcgccacagcuauuauaaucggcgcaauugccgugcucaucgggauugcgaaccuuggacugaauaucgguuugcacuuaaaaccuggcuguaacugcucccauucucaaccagagacuacgaauaccucacagacaauaaucaacaauuacuauaacgaaacuaauauuaacaauauccagauggaggaaagaaccaguaggaacuucaauaaccugacaaaggggcuauguaccauuaauagcuggcacaucuacggaaaagacaacgcuguccggauaggcgaguccucugauguucucgugacucgcgaaccguauguaucgugcgaccccgaugagugucgauuuuacgcccugucacaggguacaaccauucgugggaagcauagcaacggaacgauccacgacagaagucaauauagggcacuuauuuccuggccucugucuagcccacccacuguguacaauucccgggucgagugcaucggcuggucaaguaccagcugucaugauggcaaaucucgcauguccaucugcauuucagggccuaacaauaacgccagcgcugugguuugguauaauagaaggccaguggcagaaauaaacacaugggcccggaauaucuugcgcacucaggagagugaaugugucugccacaacggagugugucccguaguuuucaccgacgguucugcuacaggcccugccgauacccgaauuuacuacuuuaaggaggggaagauccucaaaugggagucccugacgggaacugcgaagcacauagaagagugcagcugcuauggcgaaagaacagguauuaccuguacuugcaaagacaauuggcaggggucgaacaggccagugauccagaucgauccggucgcaaugacacauaccucucaauacauuuguucccccgugcugacggacaauccucggccaaacgaucccaauaucggaaagugcaacgacccuuauccaggcaauaacaacaauggcgugaaaggguucucauaccucgauggagccaacaccugguuaggucguacaauuaguacugcuagccgcuccggcuaugagaugcugaagguccccaaugcccuuaccgacgacagaucuaagccgauacaggggcagacaaucguuuugaacgcagauuggagcggauacucaggcaguuuuauggacuauugggcugaaggugauuguuacagggccugcuucuacguggagcugauucgggggcgaccuaaagaggacaagguaugguggacuuccaauagcaucgugucuauguguucaaguaccgaauuucuaggccaguggaacuggcccgauggagcgaaaaucgaguauuuccucuga

SEQ ID NO: 151506 - RNA, 1413 nt, Artificial Sequence; identical to SEQ ID NO: 144680
  derived and/or modified CDS sequence (opt3) from neuraminidase__InfluenzaA__AGL96802

SEQ ID NO: 151507 - RNA, 1413 nt, Artificial Sequence; identical to SEQ ID NO: 144680
  derived and/or modified CDS sequence (opt3) from neuraminidase__InfluenzaA__AGL96807

SEQ ID NO: 151508 - RNA, 1413 nt, Artificial Sequence
  derived and/or modified CDS sequence (opt3) from neuraminidase__InfluenzaA__AGL96808
augaaccccaaucagaagaucauuaccauaggcagcaucuccauugccaucgggauuaucucucugaugcuccaaauaggaaacaucauuucaaucugggcuagucacagcauucagacagguucccagaauaacacuggcaucugcaaucagagaauaauuacguacgagaacucuaccugggugaaucauacauaugucaacaucaauaacacuaauguuguggcaggggaagacaaaaccucgguaacacuugccggaaacucaagccuguguaguauuuccggcugggcgaucuacaccaaggauaauucuaucaggauugguagcaaaggggacguguucgucauacgggagccuuuuaucuccugcucacacuuggaaugucgcacuuucuuuuuaacacaaggagcucugcuaaacgauaagcauaguaauggcaccgugaaagaccgaagcccauaucgugcccucaugucuugcccgcugggcgaggcacccuccccuuacaacucaaaguucgaaagcguugccuggagugcuucugcaugucacgaugggaugggauggcuuacgauugguaucuccggcccagacaacggggccguggcuguccugaaguauaauggaauaauuacuggcaccaucaaaagcuggaagaaacagaucuugagaacacaggagucggagugcguguguaugaacgguucuugcuuuacuauuaugaccgaugggcccuccaauaaggccgcgucauacaaaaucuucaagauugaaaagggaaaaguaacaaagaguauagagcucaacgcaccuaauuuucauuaugaagaguguagcugcuacccagacaccggcaucguuaugugugugugcagggauaacuggcacggcuccaaucggcccugggucucuuucaaccagaaucuggacuaccaaauuggguauaucugcagcggaguguuuggugauaacccucgcccagaggacggcgaagggucauguaauccggugacggucgauggagccaacggcguuaaagguuucaguuacaaguaugacaaugggguguggaucggcagaacuaaauccaacaggcugcggaagggauuugagaugauuugggaccccaauggcuggacaaacaccgauagcuucuuuucuguaaaacaggacguggucgcuauaacugauuggucaggguacagugguagcuucgugcagcacccugaacucacaggauuagacugcauccgcccauguuucuggguugagcuggugcgaggccuucccagagaaaacaccacgauuuggaccuccgggucuucgaucagcuuuugcggagucaauuccgauacagccaacuggucauggccugacggcgcagaguugccauucacuauugauaaguga

SEQ ID NO: 151509 - RNA, 1413 nt, Artificial Sequence
  derived and/or modified CDS sequence (opt3) from neuraminidase__InfluenzaA__AGL96809
augaaccccaaucagaagaucauuaccauaggcagcaucuccauugccaucgggauuaucucucugaugcuccaaauaggaaacaucauuucaaucugggcuagucacagcauucagacagguucccagaauaacacuggcaucugcaaucagagaauaauuacguacgagaacucuaccugggugaaucauacauaugucaacaucaauaacacuaauguuguggcaggggaagacaaaaccucgguaacacuugccggaaacucaagccuguguaguauuuccggcugggcgaucuacaccaaggauaauucuaucaggauugguagcaaaggggacguguucgucauacgggagccuuuuaucuccugcucacacuuggaaugucgcacuuucuuuuuaacacaaggagcucugcuaaacgauaagcauaguaauggcaccgugaaagaccgaagcccauaucgugcccucaugucuugcccgcugggcgaggcacccuccccuuacaacucaaaguucgaaagcguugccuggagugcuucugcaugucacgaugggaugggauggcuuacgauugguaucuccggcccagacaacggggccguggcuguccugaaguauaauggaauaauuacuggcaccaucaaaagcuggaagaaacagaucuugagaacacaggagucggagugcguguguaugaacgguucuugcuuuacuauuaugaccgaugggcccuccaauaagacagccucauacaaaaucuucaagauugaaaagggaaaaguaaccaagaguauagagcucaacgcgccuaauuuucauuaugaagaguguagcugcuacccagacacgggcaucguuaugugugugugcagggauaacuggcacggcuccaaucggcccugggucucuuucaaccagaaucuggacuaccaaauuggguauaucugcagcggaguguuuggugauaacccucgcccagaggacggcgaagggucauguaauccggugacugucgauggagcaaacggcguuaaagguuucaguuacaaguaugacaaugggguguggaucggcagaacaaaauccaacaggcugcggaagggauuugagaugauuugggaccccaauggcuggaccaacacugauagcgacuucucuguaaaacaggauguggucgccauaacagacuggucaggguacagugguagcuuugugcagcacccugaacucaccggauuagauugcauccgcccauguuucuggguugagcuggugcgaggccuucccagagaaaacacgaccauuuggacauccgggucuucgaucagcuucugcggagucaauuccgacacugcuaacuggucauggccugauggcgccgaguugccauuuaccauugacaaguga

SEQ ID NO: 151510 - RNA, 1413 nt, Artificial Sequence; identical to SEQ ID NO: 144680
  derived and/or modified CDS sequence (opt3) from neuraminidase__InfluenzaA__AGL96818

SEQ ID NO: 151511 - RNA, 1413 nt, Artificial Sequence
  derived and/or modified CDS sequence (opt3) from neuraminidase__InfluenzaA__AGL96820
augaaccccaaucagaagaucauuaccacaggcagcauauccaucgccauugggaucauuucucugaugcuccaaaucggaaacauaaucucaauuugggcuagucacagcauccagacugguucccagaauaacacgggcauuugcaaucagagaaucauaaccuacgagaacucuacaugggugaaucauacuuaugucaacauuaauaacaccaauguuguggcaggggaagacaaaacaucgguaacccuugccggaaacucaagccuguguaguaucuccggcugggcgauuuacacuaaggauaauucuaucaggaucgguagcaaaggggacguguucgucauucgggagccuuuuauauccugcucacacuuggaaugucgcacauucuuuuuaacccaaggagcucugcuaaacgauaagcauaguaauggcacggugaaagaccgaagcccauaucgugcccucaugucuugcccgcugggcgaggcacccuccccuuacaacucaaaguucgaaagcguugccuggagugcuucugcaugucacgaugggaugggauggcuuacuaucgguauuuccggcccagacaacggggccguggcuguccugaaguauaauggaaucauaaccggcacaauuaaaagcuggaagaaacagaucuugagaacucaggagucggagugcguguguaugaacgguucuugcuuuaccaucaugacagaugggcccuccaauaaggccgcgucauacaaaauuuucaagaucgaaaagggaaaaguaaccaagaguauugagcucaacgcaccuaauuuucauuaugaagaguguagcugcuacccagacacgggcauaguuaugugugugugcagggauaacuggcacggcuccaaucggcccugggucucuuucaaccagaaucuggacuaccaaaucggguauauuugcagcggaguguuuggugauaacccucgcccagaggacggcgaagggucauguaauccggugacugucgauggagccaacggcguuaaagguuucaguuacaaguaugacaaugggguguggaucggcagaacaaaauccaacaggcugcggaagggauuugagaugaucugggaccccaauggcuggaccaacacugauagcgacuucucuguaaaacaggauguggucgcuauuacagacuggucaggguacagugguagcuuugugcagcacccugaacucaccggauuagauugcauacgcccauguuucuggguugagcuggugcgaggccuucccagagaaaacacgaccaucuggacauccgggucuucgauuagcuucugcggagucaauuccgacacugccaacuggucauggccugauggcgcagaguugccauuuaccaucgacaaguga

SEQ ID NO: 151512 - RNA, 1413 nt, Artificial Sequence
  derived and/or modified CDS sequence (opt3) from neuraminidase__InfluenzaA__AGL96821
augaaccccaaucagaagaucauuaccauaggcagcaucuccauugccaucgggauuaucucucugaugcuccaaauaggaaacaucauuucaaucugggcuagucacagcauucagacagguucccagaauaacacuggcaucugcaaucagagaauaauuacguacgagaacucuaccugggugaaucauacauaugucaacaucaauaacacuaauguuguggcaggggaagacaaaaccucgguaacacuugccggaaacucaagccuguguaguauuuccggcugggcgaucuacaccaaggauaauucuaucaggauugguagcaaaggggacguguucgucauacgggagccuuuuaucuccugcucacacuuggaaugucgcacuuucuuuuuaacacaaggagcucugcuaaacgauaagcauaguaauggcaccgugaaagaccgaagcccauaucgugcccucaugucuugcccgcugggcgaggcacccuccccuuacaacucaaaguucgaaagcguugccuggagugcuucugcaugucacgaugggaugggauggcuuacgauugguaucuccggcccagacaacggggccguggcuguccugaaguauaauggaauaauuacuggcaccaucaaaagcuggaagaaacagaucuugagaacacaggagucggagugcguguguaugaacgguucuugcuuuacuauuaugaccgaugggcccuccaauaaggccgcgucauacaaaaucuucaagauugaaaagggaaaaguaacaaagaguauagagcucaacgcaccuaauuuucauuaugaagaguguagcugcuacccagacaccggcaucguuaugugugugugcagggauaacuggcacggcuccaaucggcccugggucucuuucaaccagaaucuggacuaccaaauuggguauaucugcagcggaguguuuggugauaacccucgcccagaggacggcgaagggucauguaauccggugagugucgauggagccaacggcguuaaagguuucuccuacaaguaugacaaugggguguggaucggcagaacgaaaagcaacaggcugcggaagggauuugagaugauuugggaccccaauggcuggacuaacacagauucugacuucucaguaaaacaggauguggucgcuauaaccgacuggaguggguacagcggauccuuugugcagcacccugaacucacugguuuagauugcauccgcccauguuucuggguugagcuggugcgaggccuucccagagaaaacacaaccauuuggacgucugggucgagcaucuccuucugcggagucaauucagacaccgccaacuggaguuggccugauggcgcagaguugccauuuacaauugacaaguga

SEQ ID NO: 151513 - RNA, 1410 nt, Artificial Sequence
  derived and/or modified CDS sequence (opt3) from neuraminidase__InfluenzaA__AGN69269
augaucaccaaccagagaauuauaacaaucggcacugugugccugauugucgggaucguuagccuccuucugcaaauuggaaauaucguguccuuguggauaucucacucaauccagacgggugagaagaaccauagugaaauuuguaaucagaacaccaucacauacgagaauaacacuuggguaaaucagaccuaugugaacauuagcaauacaaacaucgccgacggccaaggggucaccuccauaauuuuagcuggaaauucuucgcugugccccaucucaggcugggcaauuuacagcaaagauaacaguaucaggaucgguuccaagggggacauuuucgugauacgggaaccuuuuaucucuuguagccaccuagagugccgcacuuucuuucucacacagggagcccugcuuaaugaucgacauuccaacggcaccguuaaagaccguucaccauauagaacgcugaugaguuguccgauuggcgaagcgcccagcccuuacaauucuagguucgaguccguggcuuggucagccagcgcaugccacgaugggaugggauggaucacuauagguauuaguggcccagacaacggggccgucgcuguguugaaguauaacggaaucaucaccgauacaauuaaaucuuggcggaauaagauccuccgcacucaggaguccgaauguguaugcauuaacggcagcuguuuuaccauaaugacagacggucccucgaaugggcaggcaucuuacaagaucuucaaaauggagaagggaaaaauuaucaaguccguugaacuggaugccccuaacuaucauuacgaggagugcucauguuacccagacaccggcaaaguggucugcgugugcagagauaauuggcacgcuaguaacaggcccugggugagcuuugaccaaaaucuggauuaucagaucggcuacauuuguuccggggucuucggagacaacccucggucuaaugacgguaagggcaacugcgggccagcccucagcaauggagcgaacggcguuaaggguuuuucauuccgcuaugggaauggcguguggauaggacgaacgaaaaguaucuccagcagaucuggcuuugaaaugauuugggauccgaacggguggacugagacagacucaaguuucagcaugaagcaggauaucauugcauuaaccgacugguccggauacucugguucguuuguacagcaccccgaacugacuggcaugaauuguaucaggccuugcuucuggguggagcuuauacgggggcaaccaaaagaaagcacaaucuggaccuccggaucaaguauuucuuucuguggcgucgauagcgagacggccuccuggucauggcccgacggugcugauuugccuuuuaccaucgacaaguga

SEQ ID NO: 151514 - RNA, 1410 nt, Artificial Sequence
  derived and/or modified CDS sequence (opt3) from neuraminidase__InfluenzaA__AGN69280
augaacaccaaucagagaaucauuacaauaggcacugugugccugaucgucgggauuguuagccuccuucugcaaaucggaaacauuguguccuuguggaucucucacucaauacagacgggugagaagaaucauagugaaaucuguaaccagaauaccauuacauacgagaacaauacuuggguaaaccagaccuaugugaauaucagcaacacaaauauugccgacggccaaggggucaccuccaucauauuagcuggaaacucuucgcugugccccauuucaggcugggcaaucuacagcaaagauaauaguauuaggaucgguuccaagggggacaucuucgugauucgggaaccuuuuauaucuuguagccaccuagagugccgcacuuucuuucucacacagggagcccugcuuaacgaucgacauuccaauggcaccguuaaagaccguucaccauauagaacgcugaugaguuguccgaucggcgaagcgcccagcccuuacaacucuagguucgaguccguggcuuggucagccagcgcaugccacgaugggaugggaugguugacuauugguaucaguggcccagacaacggggccgucgcugugcucaaguauaauggaauaauuaccgauacaaucaaaucuuggcggaacaagauccugcgcacucaggaguccgaauguguaugcauuaauggcagcuguuuuaccaucaugacagacggucccucgaacgggcaggcaucuuacaagauuuucaaaauggagaagggaaaaauaaucaaguccguugaacuggaugccccuaauuaucauuacgaggagugcucauguuacccagacaccggcaaaguggucugcgugugcagagauaacuggcacgcuaguaauaggcccugggugagcuuugaccaaaaccucgauuaucagauuggcuacaucuguuccggggucuucggagacaauccucggucuaacgacgguaagggcaauugcgggccaguuuuaagcaacggagccaauggcgugaaggguuuuucauuccgcuaugggaacggcguauggaucggacgaacgaaaaguauuuccagcagaucuggcuuugaaaugauaugggauccgaauggguggacugagacagacucaaguuucagcaugaagcaggauaucauugcgcugaccgacugguccggauacucugguucguuugugcagcaccccgaacuuacuggcaugaacuguaucaggccuugcuucugggucgaguugauucgggggcaaccaaaagaaagcacaaucuggaccggaggcuccucaauaaguuucugugguguggauucugagacggcaagcugguccuggcccgacggggccgaucugccuuuuaccaucgacaaguga

SEQ ID NO: 151515 - RNA, 1410 nt, Artificial Sequence
  derived and/or modified CDS sequence (opt3) from neuraminidase__InfluenzaA__AGN69292
augaaccccaaucagaagaucauuaccauaggcagcaucugcaugacaauugggaucgccucccugauucuccaaaucggaaacauaaucucuauuuggaucucacacaguauucagacugagaaucagaaccagccugaaaucuguaaucaaaacgugauaacguacgagaauaacaccugggucaaucagacauauguuaacauuagcaauacuaacuucguggcugaacaggcaguagccuccgugaaacuugcggguaauucuucgcugugcccagucucaggcugggcuaucuacagcaaggacaacagugugagaauuggguccaaaggagauguuuuugugaucagggagccguucaucucuuguagccauuuggaaugccggaccuuuuucuuaacacagggcgcccugcuaaaugacaagcacuccaacgguaccauuaaagaucgcucacccuaucgaacucucaugaguuguccuauaggggaggucccaagccccuacaacucucguuuugaguccguggcauggucagccagcgcuugccaugacggaacaaguuggcugaccaucggcauuucuggcccugauaauggggcaguagccguucuuaaguauaacggaaucauaacggacacuauuaaguccuggaggaaaaauauccugagaacccaagaaagcgagugugcuugcgugaacgguucguguuucacagucaugacugauggcccaucuaaugggcaggccuccuacaagguguuuaaaaucgaaaagggaaaaguggucaagucaguugaguugaacgcgcccaauuaucacuacgaggaaugcaguuguuacccugagagcggcgaaauuaccugcgugugccgggacaacuggcaugguuccaaucgcccauggguaucuuucaaccagaaucucgaguaucagaugggguacaucuguagcggaauuuuuggcgauaacccgagacccaaugacaagacaggcucaugcgggccuguguucaguaacggagcaaauggugucaaaggcuuuuccuucaaguaugggaacggaguguggauaggcaggaccaaaagcaucucuucacggauggguuuugaaaugauuugggauccagacggguggacgaagacugaugacaaauucaguguuaagcaagacaucaucggcauuaacgauuggagcggauacuccggcucuuucgugcagcaccccgagcugacagggcuggacuguaugcgcccuugcuuuugggucgagcucauacgaggaagaccaaaagaaaauaccaucuggacuucggguagcuccauuucauucuguggcgugaacagugauacaguaggguggucuuggcccgacggagccgaguuaccguuuaccaucgauaaguga

SEQ ID NO: 151516 - RNA, 1410 nt, Artificial Sequence
  derived and/or modified CDS sequence (opt3) from neuraminidase__InfluenzaA__AGN69316
augaaccccaaucagaagaucauuaccauaggcagcaucugcaugacaauugggaucgccucccugauucuccaaaucggaaacauaaucucuauuuggaucucacacaguauucagacugagaaucagaaccagccugaaaucuguaaucaaaacgugauaacguacgagaauaacaccugggucaaucagacauauguuaacauuagcaauacuaacuucguggcugaacaggcaguagccuccgugaaacuugcggguaauucuucgcugugcccagucucaggcugggcuaucuacagcaaggacaacagugugagaauuggguccaaaggagauguuuuugugaucagggagccguucaucucuuguagccauuuggaaugccggaccuuuuucuuaacacagggcgcccugcuaaaugacaagcacuccaacgguaccauuaaagaucgcucacccuaucgaacucucaugaguuguccuauaggggaggucccaagccccuacaacucucguuuugaguccguggcauggucagccagcgcuugccaugacggaacaaguuggcugaccaucggcauuucuggcccugauaauggggcaguagccguucuuaaguauaacggaaucauaacggacacuauuaaguccuggaggaaaaauauccugagaacccaagaaagcgagugugcuugcgugaacgguucguguuucacagucaugacugauggcccaucuaaugggcaggccuccuacaagguguuuaaaaucgaaaagggaaaaguggucaagaccguugaguugaacgcgcccaauuaucacuacgaggaaugcucauguuacccugagaguggcgaaauuacaugcgugugccgggacaacuggcaugguagcaaucgcccauggguauccuucaaccagaaucucgaguaucagaugggguacaucuguucuggaauuuuuggcgauaacccgagacccaaugacaagaccggcagcugcgggccuguguucucaaacggagcaaauggugucaaaggcuuuaguuucaaguaugggaacggaguguggauaggcaggacgaaauccaucagcucucggauggguuuugaaaugauuugggauccagacggguggacuaagacagaugacaaauucucaguuaagcaagacaucaucggcauuaacgauuggaguggauacagcggcuccuucgugcagcaccccgagcugaccgggcuggacuguaugcgcccuugcuuuugggucgagcucauacgaggaagaccaaaagaaaauacuaucuggacaucugguucgagcauuuccuucuguggcgugaacucagauaccguaggguggaguuggcccgacggagccgaguuaccguuuacgaucgauaaguga

SEQ ID NO: 151517 - RNA, 1410 nt, Artificial Sequence; identical to SEQ ID NO: 151516
  derived and/or modified CDS sequence (opt3) from neuraminidase__InfluenzaA__AGN69328

SEQ ID NO: 151518 - RNA, 1410 nt, Artificial Sequence
  derived and/or modified CDS sequence (opt3) from neuraminidase__InfluenzaA__AGN69340
augaaccccaaucagaagaucauuaccauaggccugaucugcaugacaauugggaucgccagccucauucuucaaaucggaaacauaaucuccauuuggaucucucacucaauucagacugagaaucagaacaaaccugaaaucuguaaucagaacgugauaacguacgagaauaacaccugggucaaucaaacauauguuaacgugaguaauacuaacuucguagcugaacaggcaguggccagcgucaagcugguggguaauuccucuuugugcccaguuucgggcugggcgauuuacucaaaagacaacagcgugagaaucgggaguaagggagaugucuuugugauuagggagccguucaucuccuguucucauuuagaaugccggaccuuuuuccugacacagggcgcucuacucaaugacaaacacagcaacgguaccaucaaggaucgcucccccuaucgaacucugaugucauguccuauuggggagguaccaagucccuacaacagccguuuugagucuguugccugguccgcaucagccugccaugacggaacaagcuggcuuaccauaggcaucaguggcccugauaauggggcuguggcaguccugaaguauaacggaauuaucacggacacuauaaaaucuuggagaaagaauauuuugaggacccaggaauccgagugugccugcgugaacgguagcuguuucacagugaugacugauggcccaucgaaugggcaggcuucuuacaaagucuuuaagaucgaacggggaaaaguugugaaguccguagagcucaacgcccccaauuaucacuacgaggaaugcucauguuacccugagaguagcgaaauuaccugcgugugccgcgacaacuggcauggcuccaauagaccaugggucucuuucaaccaaaaucuggaguaucagauggguuacaucuguagcgggguguuuggagauaacccgaggcccaaugacaagacaggcucaugcggcccuguuuucaguaacggggcgaauggagugaaagguuuuuccuucaaguauggcaacggggucuggaucggacggaccaaaagcacgucuucacgcaugggcuuugaaaugauuugggauccagacgguuggacuaagacagaugacaaauucagugugaagcaggacauaaucgggauuaccgauuggagcggcuacuccggaucuuucguacaacaccccgagcugacuggccucgacuguaugcgaccuugcuuuuggguugaguuaaucagagggaggccaaaagaaaacacaaucuggaccucgggaagcuccauuucauucuguggugugaauagugauacggucggcuggucuuggcccgacggggcagagcugccguuuaccauagauaaguga

SEQ ID NO: 151519 - RNA, 1410 nt, Artificial Sequence
  derived and/or modified CDS sequence (opt3) from neuraminidase__InfluenzaA__AGO00268
augaaccccaaucagaagaucauuaccauaggcagcaucugcaugguggucgggauuaucucccugauucuccaaaucggaaacauaaucucuauuuggaucucacacaguauucagacagguagccagaaucauacuggcaucuguaaccaguccauaauuacguacaaaaauucuaccuggguuaaccaaacauaugugaauaucucgaacacuaauguaguggccgggaaggacaccacaucaaugauucuugcuggaaacagcagucugugcccuaucagaggcugggcaaucuacuccaaagauaaugguauuaggauagggucuaagggagacgucuucgugauccgggagccauuuauuagcuguucccacuuggaaugccgcaccuucuuuuuaacucagggcgcccugcuaaacgauaaacauucaaauggcacaguuaaggaccgaaguccguaucgugcgcucaugagcugucccgugggggaggcuccuucuccauacaacuccagauucgaaucagucgccuggagcgcaagugccugccacgauggaauggguuggcugaccaucggcauaucugggcccgacgauggagcuguggcaguacuuaaguauaauggcauuaucacggagacuaucaaauccuggaagaaaaagauucugaggacccaggaaagcgaguguguuugcgugaacgguucguguuuuacaaucaugacugacgggccuucugauggaccagccuccuacaaaauuuucaagauagagaagggcaaagucaccaagucaaucgaauuggacgcucccaacagucauuaugaggaaugcagcuguuacccugauacaggcaaagugaugugcgugugccgggacaauuggcacggguccaaccgcccaugggucucuuuugaucagaaucucgacuaccaaauuggauauaucuguagcgguguuuucggcgacaacccgagacccaaggaugggaaaggaucaugcggcccuguguacguagacggugccaauggggugaagggcuuuaguuauagguacggagauggcgucuggaucgggcggaccaaauccaacagcucucgccagggauucgagaugauuugggacccaaaugguuggacggagacugauucaaguuucuuugugaagcaggacguuguggcgaugacagauuggagcggcuauuccgggucuuuuguccagcaccccgaacugaccggacugaacuguaugcgaccuugcuucuggguggagcucauaagaggcaggccaaaggagaaaacuaucuggacaucggguagcuccauuucauucugugggguaaauagugacaccguugauuggucuuggcccgacggcgcagaauuaccguuuacgaucgauaaguga

SEQ ID NO: 151520 - RNA, 1410 nt, Artificial Sequence
  derived and/or modified CDS sequence (opt3) from neuraminidase__InfluenzaA__AGO00280
augaaccccaaucagaagaucauuaccauaggcagcaucugcaugguggucgggauuaucucccugauucuccaaaucggaaacauaguuucuaucuggauuucacacaguauccagacagguaaucagaaccauacuggcacguguaaucagagcauuaucaccuacaaaaacuccacaugggugaaucaaacuuauguaaacauaucuaauaccaacguggucgccgggaaggacacaaccucggugauucuugcuggaaauucaagccugugcccuaucagaggcugggcaauuuacaguaaagauaacgguguuaggaucggguccaagggagacguguucgucauccgggagccauuuauuucuuguagccacuuggaaugccgcacuuucuuuuuaacacagggcgcccugcuaaaugauaaacauuccaacggcaccgugaaggaccgaucaccguaucgugcgcucaugaguugucccguaggggaggcuccuagcccauacaauucuagauucgaauccguugccuggucagcaagcgccugccacgauggaauggguuggcugacgauaggcaucagugggcccgacgauggagcuguggcaguccuuaaguauaacggcauuaucacugagaccauaaaaucuuggaggaaggaaauucugcggacacaggaguccgagugugugugcgugaacgguagcuguuuuacuaucaugaccgacgggccuucgggaggcccagccucuuacaaaaucuucaagauugaaaaaggcaaggucacaaaguccaucgaguuggaugcucccaauucacauuaugaagagugcaguuguuacccugacaccagcaaaguuaugugcgugugccgcgauaacuggcacggguccaauagaccauggguaucuuuugaccagaaccucgauuaccaaaugggauauauuuguagcgguguguucggcgacaauccgaggcccaaggacgggaaaggaucaugcggcccugucuacguggauggugccaacgggguuaagggcuuuaguuaucgguacggaaauggcguguggauagggcgcacgaaauccaacagcucucgacagggauucgagaugaucugggacccaaaugguuggacugaaacagauucaaacuuuuucaugaagcaggacgucguggcgguaaccgauuggaguggcuauagcggguccuuuguucagcaccccgagcugacuggacuggacuguaugagaccuugcuucuggguggaacucauuaggggccggccaaaagagaauacaaucuggaccucugguucgagcaucuccuucuguggggucaacucagauacgguggacuggaguuggcccgauggcgcagaauuaccguuuaccauugacaaguga

SEQ ID NO: 151521 - RNA, 1413 nt, Artificial Sequence
  derived and/or modified CDS sequence (opt3) from neuraminidase__InfluenzaA__AGO00292
augaaccccaaucagaagaucauuaccauaggcagcaucugcaugacaauugggacuaucucccugauucuccaaaucggaaacauaaucucuauuuggaucucacacaguauucagacggguagccagaaucauaccggcaucuguaaccagagaauaauuacauacgagaauaacacuugggugaaucaaaccuaugucaacaucuccaauacaaacguuguggccgggaaagacaccacuucuaugauucuugcuggaaauucgucacugugcccuaucaggggcugggcaaucuacagcaaggauaacaguauucggauagguuccaaaggggacguauucgugauccgcgaaccauuuauuucuuguagccacuuggagugccgaacauucuuuuuaacccagggagcccugcuaaaugauaagcauuccaacggcacggucaaagaccguucaccguauagagcgcucaugaguugucccaucggcgaagcuccuagcccauacaauucuagguucgaguccguggccuggucagcaagcgccugccacgaugggaugggauggcugacuauagguauuaguggccccgacgauggggcuguugcagugcuuaaguauaacggaaucaucaccgaaauuaucaagucuuggcggaaacagauucugcgcacacaggaguccgagugugucugcgugaacggcagcuguuuuacuauaaugaccgacgguccuucggaugggccagccucuuacagaaucuucaagauugaaaaaggaaagaucacaaaauccaucgaguuggacgcucccaauucacauuaugaagagugcaguuguuacccugauaccggcaagguaaugugcguuugcagggacaacuggcacggcagcaaucggccauggguguccuuuaaccaaaaucucgauuaccagauuggguauauauguucuggagucuucggugacaacccgcgccccaaggacggcaaagggagcugcgauccugugaauguggacggagccgauggcgucaaggguuuuucauaccgauauggggacggcguuuggaucggaagaacgaaaaguaacuccagcaggaagggcuucgagaugauuugggauccaaauggguggacugacacagaugacaacuuucuggugaaacaggauguaguggcgaugaccgacuggucuggauacucagguaguuucguccagcaccccgaacugacuggccucgauuguauccggccuugcuuuuggguggaguuaauucgugggcgcccaagagaaaagacaaccaucuggacgagcggauccucuauaucguucuguggcguuaauagcgacaccgugaacugguccuggcccgacggugcagagcugccguucacaaucgauauguga

SEQ ID NO: 151522 - RNA, 1413 nt, Artificial Sequence
  derived and/or modified CDS sequence (opt3) from neuraminidase__InfluenzaA__AGO00304
augaaccccaaucagaagaucauuaccauaggcagcaucugcauggccauugggacaaucucccugauucuccaaaucggaaacauaaucucuauuuggaucucacacaguauucagacugguagccagaaucauacgggcaucuguaaccagagaauaauuaccuacgagaauaacacaugggugaaucaaacuuaugucaacaucuccaauaccaacguuguggcugggaaagacacaaccucuaugauucuugcaggaaauacuucgcugugcccuaucaggggcugggccaucuacucaaaggauaacagcauucggauagguaguaaaggggacguauucgugauccgcgaaccauuuauuuccuguucucacuuggagugccgaacauucuuuuuaacccagggagcgcugcuaaaugauaagcauagcaacggcacggucaaagaccguuccccguauagagcucucaugucaugucccaucggcgaagccccuaguccauacaauagcagguucgagucuguggcaugguccgccucagcuugccacgaugggaugggauggcugacuauagguauuagcggccccgacgauggggcaguugccgugcuuaaguauaacggaaucaucaccgaaauuaucaagaguuggcggaaacagauucugcgcacacaggagucugagugugucugcgugaacggcuccuguuuuacuauaaugaccgacgguccuagcaaugggccagcuucguacagaaucuucaagauugaaaaaggaaagaucacaaaaucuaucgaguuggaugcccccaacucccauuaugaagagugcucauguuacccugacaccggcaagguaaugugcguuugcagggauaauuggcacggcaguaaccggccaugggugagcuuuaaucaaaaccucgacuaccagauuggguauauauguuccggagucuucggugauaauccgcgccccaaggacggcaaagggucuugcgacccugugaacguggauggagcggacggcgucaaggguuuuagcuaccgauaugggaauggcguuuggaucggaagaacgaaaucaaacaguuccaggaagggcuucgagaugauuugggauccaaauggguggacuaacacagacggaaauuuuagcgugaaacaggauguaguggcaaugaccgacuggucugguuacucaggcaguuucguccagcaccccgaacugacugggcuggauuguaugcggccuugcuuuuggguggagcucauccguggacgcccaagagaaaagacaaccauuuggacgagcggcuccucuaucucguucugugguguuaacagcgacaccgugaauugguccuggcccgauggggccgaguuaccguucacaauagacaaauga

SEQ ID NO: 151523 - RNA, 1410 nt, Artificial Sequence; identical to SEQ ID NO: 150592
  derived and/or modified CDS sequence (opt3) from neuraminidase__InfluenzaA__AGO00316

SEQ ID NO: 151524 - RNA, 1410 nt, Artificial Sequence; identical to SEQ ID NO: 150036
  derived and/or modified CDS sequence (opt3) from neuraminidase__InfluenzaA__AGO00328

SEQ ID NO: 151525 - RNA, 1410 nt, Artificial Sequence; identical to SEQ ID NO: 142143
  derived and/or modified CDS sequence (opt3) from neuraminidase__InfluenzaA__AGO00340

SEQ ID NO: 151526 - RNA, 1365 nt, Artificial Sequence; identical to SEQ ID NO: 143767
  derived and/or modified CDS sequence (opt3) from neuraminidase__InfluenzaA__AGO00352

SEQ ID NO: 151527 - RNA, 1365 nt, Artificial Sequence; identical to SEQ ID NO: 143767
  derived and/or modified CDS sequence (opt3) from neuraminidase__InfluenzaA__AGO00376

SEQ ID NO: 151528 - RNA, 1365 nt, Artificial Sequence; identical to SEQ ID NO: 143767
  derived and/or modified CDS sequence (opt3) from neuraminidase__InfluenzaA__AGO00388

SEQ ID NO: 151529 - RNA, 1365 nt, Artificial Sequence; identical to SEQ ID NO: 143767
  derived and/or modified CDS sequence (opt3) from neuraminidase__InfluenzaA__AGO00400

SEQ ID NO: 151530 - RNA, 1365 nt, Artificial Sequence; identical to SEQ ID NO: 143767
  derived and/or modified CDS sequence (opt3) from neuraminidase__InfluenzaA__AGO00412

SEQ ID NO: 151531 - RNA, 1365 nt, Artificial Sequence; identical to SEQ ID NO: 143767
  derived and/or modified CDS sequence (opt3) from neuraminidase__InfluenzaA__AGO00424

SEQ ID NO: 151532 - RNA, 1365 nt, Artificial Sequence
  derived and/or modified CDS sequence (opt3) from neuraminidase__InfluenzaA__AGO00436
augaaccccaaucagaagaucauuaccauaggcagcaucugccugguggucgggcucauuucccuuauccugcaaauuggaaacaucauaucuaucuggauuucacacaguauccagacagguagccagaaucauacuggcauuuguaaccagaauaucauaacguacaaaaacuccaccuggguuaaggacacaacuucugugauuuugaccggaaauucgucauuaugcccuaucagagggugggccauuuauagcaaagauaacaguaucaggaucggcuccaagggugacguauucgugauucgggagccauuuauaucuuguagccaccuggaaugccgcacauucuuucuaacccaaggggcucuccugaaugauaaacauuccucaggaacugucaaggaccgaaguccguaccgugcacuuaugagcugucccgugggcgaggccccuucuccauauaacuccagauucgaaucaguugcguggagcgcuagugccugccacgauggcaugggguggcugacaaucggaauuucuggucccgacaauggcgcaguggccgucuugaaguacaacgggaucauaaccgagacgauuaaauccuggaggaagaaaauccuccggacucaggaaagcgagugugcuugcgugaauggaucguguuuuaccaucaugacagauggcccuucugacggucuggcauccuauaagauuuucaaaaucgagaaggggaagguaacuaaaucaauugaacugaacgccccaaauaguaacuacgaggaaugcagcuguuaucccgauaccggaaagguuaugugcgugugccgcgacaacuggcauggcuccaauagaccuugggucucuuuugaucagaaccucgacuaccagauaggcuacaucuguagcgggguguucggagauaauccaaggccggaggacgguacaggcucaugcgggcccguguaugucgacggagcuaacggcguuaaagguuuuaguuaccgguaugggaauggcguguggauuggacgcaccaagucccacagcucucgacacggcuucgagaugaucugggauccuaacggguggacggaaacugacucaaaauuuaguguaagacaagauguggucgccaugacagacuggagcggauacuccgguucuuucgugcagcauccagaguuaaccggccuggauuguaugaggcccugcuuuuggguugaacuuauccgggggcguccuaaggagaaaacuauuuggacaucggcgagcuccauaucauucuguggagugaauagugacaccgucgauuggucuuggccagacggcgcagaauugcccuucagcaucgauaaguga

SEQ ID NO: 151533 - RNA, 1365 nt, Artificial Sequence
  derived and/or modified CDS sequence (opt3) from neuraminidase__InfluenzaA__AGO00448
augaaccccaaucagaagaucauuaccauaggcagcaucugccugguggucgggcucauuucccuuauccugcaaauuggaaacaucauaucuaucuggauuucacacaguauccagacagguagccagaaucauacuggcauuuguaaccagaauaucauaacguacaaaaacuccaccuggguuaaggacacaacuucugugauuuugaccggaaauucgucauuaugcccuaucagagggugggccauuuauagcaaagauaacaguaucaggaucggcuccaagggugacguauucgugauucgggagccauuuauaucuuguagccaccuggaaugccgcacauucuuucuaacccaaggggcucuccugaaugauaaacauuccucaggaacugucaaggaccgaaguccguaccgugcacuuaugagcugucccgugggcgaggccccuucuccauauaacuccagauucgaaucaguugcguggagcgcuagugccugccacgauggcaugggguggcugacaaucggaauuucuggucccgacaauggcgcaguggccgucuugaaguacaacgggaucauaaccgagacgauuaaauccuggaggaagaaaauccuccggacucaggaaagcgagugugcuugcgugaauggaucguguuuuaccaucaugacagauggcccuucugacggucuggcauccuaucgcauuuucaagaucgagaaagggaagguaacuaagucaauugaacugaacgccccaaauagucauuacgaggaaugcagcuguuaucccgauaccggaaaaguuaugugcgugugcagagacaacuggcacggcuccaacaggccuugggucucuuuugaucagaaucucgacuaccagauaggcuacaucuguagcgggguguucggagauaacccacggccggaggacgguacaggcucaugcgggcccguguaugucgacggagcuaauggcguuaaggguuuuaguuaccgcuaugggaacggcguguggauuggacgaaccaaaucccacagcucuagacauggcuucgagaugaucugggauccuaauggguggacggaaacugacucaaaguuuaguguaaggcaagauguggucgccaugacagacuggagcggauacuccgguucuuucgugcagcacccagaguuaaccggccuggauuguaugcggcccugcuuuuggguugaacuuauccgugggcgcccuaaagagaagacuauuuggacaucggcgagcuccauaucauucuguggagugaacagugacaccgucgauuggucuuggccagacggcgcagaauugcccuucagcaucgauaaauga

SEQ ID NO: 151534 - RNA, 1410 nt, Artificial Sequence
  derived and/or modified CDS sequence (opt3) from neuraminidase__InfluenzaA__AGQ47722
augaacaccaaucagagaaucauuacaauaggcacuaucugccugauuguggggaucauuagccuccuucugcaaaucggaaacauaaucuccuuguggauuucucacucaauccagacgggugagaagagucaucccgaaauuuguaaucagagcgucaucaccuacgagaacaauacauggguuaaccagacuuaugugaauauauccaacaccaauauugccgcuggccaagggguaacaccuaucauuuuagcaggaaacucuucgcugugcccaaucucaggcugggccaucuacagcaaagacaauaguauuaggauagguuccaagggggauaucuucgugaugcgggaaccguuuauuucuuguagccaccuagagugccgcaccuucuuucucacucagggagcgcugcuuaacgaccgacauuccaauggcacagucaaagaucguucacccuauagaacccugaugaguuguccuaucggcgaagcuccaagccccuacaacucuagguucgaguccguggccuggucagcaagcgccugccacgacgggaugggaugguugacgauagguauuaguggcccugauaauggggcuguugcagugcucaaguauaacggaaucaucacugacaccauuaaaucuuggcggaacaagauccugcgcacacaggaguccgaaugugucugcauuaauggcagcuguuuuacuauaaugaccgaugguccaucgaacgggcaggccucuuacaagaucuucaaaauggagaagggaaaaauuaucaaguccaucgaacuggacgcucccaauuaucauuacgaggagugcucauguuacccugauacaggcaaagugaugugcguaugcagagacaacuggcacgccaguaauaggccauggguuagcuuugaucaaaaccucgacuaucagauuggcuacauauguuccgggguguucggagauaauccgcggucuaacgacgguaagggcaauugcgggcccgucuuaagcaacggagcgaauggcgugaaggguuuuucauuccgcuaugggaacggcguguggaucggacgaaccaaaaguauuuccagcagaucuggcuuugaaauggucugggacccuaauggguggacggagacugauucaaguuucagcaugaagcaggacaucauugcacugacagauugguccggauacucugguucguuuguucagcacccagaacuuaccggcaugaacuguaucaggcccugcuucuggguggaguugauacgggggcaaccuaaagaaagcacuaucuggacauccggaucaaguauuucuuucuguggcguaaauagcgguaccgccuccuggucauggccagacggggcugaucugcccuuuacgaucgacaaguga

SEQ ID NO: 151535 - RNA, 1413 nt, Artificial Sequence; identical to SEQ ID NO: 144501
  derived and/or modified CDS sequence (opt3) from neuraminidase__InfluenzaA__AGQ47731

SEQ ID NO: 151536 - RNA, 1377 nt, Artificial Sequence
  derived and/or modified CDS sequence (opt3) from neuraminidase__InfluenzaA__AGQ47743
augaaccccaaucagaagaucauuaccauaggcagcaucugcaugguggucgggauuaucucccugauucuccaaaucggaaacauaaucucuauuuggaucucacacaguauucagacagguaaucagaaccauaaaaauagcacuuggaugaaccagacguacaucaauauauccaacaccaauguuguggccggccaagacucuacaucgguaauucuuacugggaacucaagccuguguccuaucagaggaugggcuauuaauaguaaggauaacggcaucaggaucgguuccaaaggggacguguucgucauucgggagccauuuauaucuugcagccacuuggaaugucgcaccuucuuuuuaacacagggagcacugcuaaaugauaagcauuccaacggcaccgugaaagaccgaucaccguaucgugcccucaugaguugccccguuggcgaggcgccuagcccauacaauucuagauucgaauccguggcuuggucagccagcgcaugucacgaugggaugggauggcugacuaucgguauuaguggccccgacaacggggccgucgcugugcuuaaguauaacggaaucauaacagagaccauuaagucuuggaggaaaaagauccugcggacgcaggaauccgagugcacuuguguaaauggcagcugcuuuaccaucaugacagaugguccuucgaacggguuggcaucuuacaaaauuuucaagaucgagaaaggaaagguuacuaaguccauugaacucaaugccccaaacucacauuaugaggaauguaguugcuaccccgacaccggcaaagugaugugugucugccgcgauaauuggcacggcagcaacagaccuuggguguccuuugaccagaaucuggauuaucaaauaggguacaucugcucuggaguguucggugacaacccaaggccgaaggauggcacagggagcuguggacccgucucagcugacggcgccaaugguguuaaaggguuuaguuaccgguauggcaacggaguguggauuggccgcaccaaguccaauagcucucgacacggguucgagaugaucugggacccuaacggauggacggagacugauucaagauuuaguguaaggcaggacguggucgcgaugacagaucggagcgguuacuccggcucuuucgugcagcauccagaacugaccgggcucgacugcaugcgucccuguuuuuggguugaguuaauccgcggaagaccugaagaggaaacuauuuggacaucgggcagcauaaucuccuucugcggugucaauucagauaccguggacuggaguuggccagauggggcagagcugcccuucacgauugacaaauga

SEQ ID NO: 151537 - RNA, 1413 nt, Artificial Sequence
  derived and/or modified CDS sequence (opt3) from neuraminidase__InfluenzaA__AGQ47755
augaaccccaaucagaagaucauuaccauaggcagcaucugcauggccauugggacaaucucccugauucuccaaaucggaaacauaaucucuauuuggaucucacacaguauucagacugguagccagaaucauacgggcaucuguaacagaaggauagugaccuacgagaauaacacaugggucaaucagacuuauguuaacauuuccaauaccaacgugguagcugaaaaagacacaaccucuaugauccuugcaggaaauucgucacugugcccuauucgggggugggccaucuacagcaaggauaacaguauccgcauuggcuccaaaggugacguguucgucauacgagagccauuuaucucuuguagccacuuggaaugccguacuuucuuuuuaacacaaggggcgcugcuaaaugauaagcauuccaacggaaccgugaaagacagaucaccguauagggcucucaugaguugucccauuggcgaggccccuagcccauacaauucucgguucgaauccguugcauggucagccagcgcuugccacgauggcaugggguggcugacgaucggaauaaguggucccgacgauggcgcaguggccguccuuaaguauaacgggauuaucacugagaucauuaagucuuggcgcaaacagauccugagaacccaggaguccgaaugugugugcguaaacggaagcuguuuuacaauuaugacugacggcccuucgaaugguccagcuucuuacaggauauucaagaucaaaaaggggaaaauuaccaaguccaucgaguuggaugcccccaacucacauuaugaagagugcaguuguuacccugacacaggaaagguuaugugcgugugccgggauaauuggcacggcagcaaccgcccaugggucuccuuuaaucagaaccucgacuaccaaaucggcuauauuuguucugggguguucggagauaauccgcgacccaaagacgguaagggcagcugcgacccugugaacgucgauggggcggacggaguuaaaggcuuuucauacagauaugguaaugggguguggauaggcaggaccaagaguacguccagccggaaaggauucgagaugaucugggauccaaacggcuggacugacacagaugggaauuuucugguaaagcaggacguggucgcaaugaccgauuggucuggauacucagguaguuucgugcagcaccccgaacugacuggccucgacuguaugcguccuugcuuuuggguugaguuaauucgcgggagaccaagggagaaaacaaccaucuggacgagcggauccucuauuucguucuguggcgugaacagcgauaccgucaauugguccuggcccgacggugccgaacugccguucacaaucgauaaguga

SEQ ID NO: 151538 - RNA, 1410 nt, Artificial Sequence
  derived and/or modified CDS sequence (opt3) from neuraminidase__InfluenzaA__AGQ47767
augaaccccaaucagaagaucauuaccauaggcagcaucugcaugguggucgggauuaucucccugauucuccaaaucggaaacauaguuucuaucuggauuucacacaguauccagacagguaaucagaaccauacuggcacgugugaccagagcauuaucaccuacaaaaauuccacaugggugaaccaaacuuauguaaauauaucuaacaccaauguggucgccgggaaggauacaaccucggugauucuugcuggaaacucaagccugugcccuaucagaggcugggcaauuuacaguaaagacaaugguguuaggaucggguccaagggagauguguucgucauccgggagccauuuauuucuuguagccacuuggaaugccgcacuuucuuuuuaacacagggcgcccugcuaaacgacaaacauuccaauggcaccgugaaggaucgaucaccguaucgugcgcucaugaguugucccguaggggaggcuccuagcccauacaacucuagauucgaauccguugccuggucagcaagcgccugccacgacggaauggguuggcugacgauaggcaucagugggcccgaugacggagcuguggcaguccuuaaguauaauggcauuaucacugagaccauaaaaucuuggaggaaggaaauucugcggacacaggaguccgagugugugugcgugaacgguagcuguuuuacuaucaugaccgaugggccuucgggaggcccagccucuuacaaaaucuucaagauugaaaaaggcaaggucacaaaguccaucgaguuggacgcucccaacucacauuaugaagagugcaguuguuacccugauaccagcaaaguuaugugcgugugccgcgacaauuggcacggguccaacagaccauggguaucuuuugaucagaaucucgacuaccaaaugggauauauuuguagcgguguguucggcgacaacccgaggcccaaggaugggaaaggaucaugcggcccugucuacguggacggugccaaugggguuaagggcuuuaguuauaaauacggaaacggcguguggauagggcggacgaaguccaauagcucucgccagggauucgagaugaucugggauccaaacgguuggacugaaacagacucaaacuuuuucaccaaacaggaugucguggcgguaacugacuggaguggcuauagcggguccuuuguucagcaccccgagcugacaggacuggauuguaugcgaccuugcuucuggguggaacucauuagaggcaggccaaaggagaauaccaucuggacgucugguucgagcaucuccuucuguggggucaauucagacaccguggauuggaguuggcccgacggcgcagaauuaccguuuacaauugauaaguga

SEQ ID NO: 151539 - RNA, 1410 nt, Artificial Sequence; identical to SEQ ID NO: 151520
  derived and/or modified CDS sequence (opt3) from neuraminidase__InfluenzaA__AGQ47779

SEQ ID NO: 151540 - RNA, 1413 nt, Artificial Sequence
  derived and/or modified CDS sequence (opt3) from neuraminidase__InfluenzaA__AGQ47791
augaaccccaaucagaagaucauuaccauaggcagcaucugcauggccauugggaucauuucccugauccuccaaauaggaaacaucauuucuaucugggugucacacaguauucagacagguagccagaaucauacuggcaucuguaaccagagaauaauuacguacgagaauaacaccugggucaaucaaacacacguuaacaucuccaauacuaacgugguagcugggaaagacaccacaucuaugauucuugcaggaaauucgucacugugcccuaucaggggcugggccaucuauagcaaggauaacaguauucggauagguuccaaaggggacguguucgucauccgcgaaccauuuauuucuuguagccauuuggagugccgaaccuucuuuuuaacucagggagcgcugcuaaaugauaagcacuccaacggcacagugaaagaccguucaccguacagagcucucaugaguugucccaucggcgaagccccuagcccauauaauucuagguucgaguccguugcauggucagccagcgcuugccaugaugggaugggauggcugaccauagguauuaguggccccgacgauggggcaguggccguccuuaaguacaacggaaucaucacggaaacuauuaagucuuggaaaaagcagauccugcggacccaggaguccgagugugugugcguaaacggcagcuguuuuacaauuaugacugacgguccuucggaugggccagcuucuuaucgcauauucaaaaucgaaaagggaaaaauuaccaaguccaucgaguuggacgcccccaauucacacuacgaagagugcaguuguuauccugauacaggcaccguuaugugcgugugcagagacaacuggcacggcagcaauaggccaugggucuccuuuaaccaaaaucucgauuaccagaucggguacauuuguucuggaguguucggugacaacccgcggcccaaggacggcaaagggagcugcgauccugugaaugucgacggagcggauggcguuaaggguuuuucauaucgcuacgggaacggcguguggauaggacgaacgaaaaguaauuccagcagaaagggcuucgagaugaucugggacccaaacggguggacugauacagacggaaauuuucugguaaaacaggauguggucgcaaugaccgacuggucugguuauucaggcaguuucgugcagcaucccgaacugacugggcucgauuguaugaggccuugcuuuuggguugaguuaauucggggacguccacgcgaaaagacaaccaucuggacgagcggcuccucuauuucguucuguggugugaacagcgacaccgucaauugguccuggcccgauggggccgagcugccguucacaaucgacaaauga

SEQ ID NO: 151541 - RNA, 1410 nt, Artificial Sequence
  derived and/or modified CDS sequence (opt3) from neuraminidase__InfluenzaA__AGQ47803
augaaccccaaucagaagaucauuaccauaggcagcaucugcaugguggucgggauuaucucccugauucuccaaaucggaaacauaaucucuauuuggaucucacacaguauucagacagguagccagaaucauacuggcaucuguaaccaguccauaauuacguacaaaaauucuaccuggguuaaccaaacauaugugaauaucucgaacacuaauguaguggccgggaagggaaccacaucagucauucuugcuggcaacagcagucugugcccuaucagagguugggcaaucuacuccaaagacaaugggauuaggauaggaucuaagggcgauguguucguuauccgggagccauuuauuagcuguucccacuuggaaugccgcaccuucuuuuuaacucagggcgcccugcuaaacgacaaacauucaaaugggacagugaaggaucgaaguccguaucgugcgcucaugagcugucccgucggagaggcuccuucuccauacaacuccagauucgaaucaguggccuggagcgcaugcgccugucacgacgguaugggcuggcugaccaucgggauaaguggacccgaugacgaggcuguagcaguucuuaaguauaauggcauuaucacggaaacuaucaaaucuuggaggaagaaaauucugcggacccaggaguccgagugcgugugugucaacgguagcugcuuuacaaucaugacugaugggccuucggacggaccagccucuuacaagauuuucaaaauagaaaagggcaaggugaccaaauccaucgaguuggaugcucccaacucacauuaugaagaguguaguugcuacccugacacaggcaaggugaugugcgucugucgcgauaauuggcacgggagcaacagaccauggguuuccuuugaccagaaucucgauuaccaaauuggauauaucugcucugguguguucggcgacaacccgaggcccaaagacgggaagggaagcuguggcccuguauacguggauggugccaauggggucaaaggcuuuucauaucgguacggaaacggcguguggaucgggcgcaccaagagugacuccagccgacagggauucgagaugauuugggauccaaaugguuggacggaaacugacucuaacuuuuucguuaaacaggauauaguggcgaugacagacuggucaggcuauagugggagcuuuguccagcaccccgagcugaccggacuggauugcaugagaccuuguuucuggguggaacucaucaggggccggccaaaggagaagacuauuuggacauccgguucuucgaucagcuucugcgggguaaauuccgacaccguugauuggucauggcccgacggcgcagaauuaccguuuacgauugauaaauga

SEQ ID NO: 151542 - RNA, 1368 nt, Artificial Sequence
  derived and/or modified CDS sequence (opt3) from neuraminidase__InfluenzaA__AGQ47814
augaaccccaaucagaagaucauuaccauaggcagcaucugcauggccauugggaucauuucccugauccuccaaauaggaaacaucauuucuaucugggugucacacaguauucagacagguagccagaaucauacuggcaucuguaaccagagaauaauuacguacgagaauaacaccugggucaaagacacaacuuccaugacccuugcugggaauagcucgcugugcccuaucaggggaugggcaauuuauucaaaggauaacagcauccggaucggcaguaaaggugacguuuucgugauucgcgaaccauuuauauccuguucucacuuggagugccgaacauucuuuuuaacccaaggggcccugcuaaaugauaagcauagcaacggaacuguaaaagaccguuccccguacagagcgcucaugucaugucccaucggcgaagcuccuaguccauauaauagcagguucgagucuguggccugguccgcaucagccugccacgauggcaugggguggcugacaauuggaaucagcggucccgacgauggcgcugucgcagugcuuaaguacaacgggauaauuaccgaaacgaucaagaguuggaaaaagcagauccugcggacucaggagucugaguguguuugcgugaauggauccuguuuuaccauuaugacagacggcccuagcgaugguccagccucguaucgcaucuucaaaauugaaaaggggaaaauaacuaagucuaucgaguuggacgcucccaacucccauuacgaagagugcucauguuauccugauaccggaacagucaugugcgugugcagagacaauuggcacggcaguaacaggccauggguaucuuuuaaccagaaucucgauuaccaaauuggcuacaucuguuccgggguuuucggagacaacccgcggcccaaggacgguaaaggcucuugcgauccugugaaugucgacggggccgauggagugaagggcuuuagcuaucgcuacgguaacgggguguggaucggccgaaccaaaucaaauaguuccagaaagggauucgagaugauuugggacccaaacggcuggacggauacugacgggaauuuucuggucaaacaggauguuguggcgaugacagacuggagcggauauucugguucauucguacagcaccccgaacugaccggccucgauuguaugaggccuugcuuuuggguggaguuaauacgggggcguccacgcgaaaagacuacaaucuggaccaguggaagcuccauuucuuucuguggcgucaacucggacacggugaauuggagcuggcccgauggugcagagcugccguucaccaucgacaaauga

SEQ ID NO: 151543 - RNA, 1413 nt, Artificial Sequence; identical to SEQ ID NO: 144505
  derived and/or modified CDS sequence (opt3) from neuraminidase__InfluenzaA__AGQ47826

SEQ ID NO: 151544 - RNA, 1410 nt, Artificial Sequence
  derived and/or modified CDS sequence (opt3) from neuraminidase__InfluenzaA__AGQ47838
augaaccccaaucagaagaucauuaccauaggcagcgugucccugacaaucgccacuauuugcuuccucaugcaaaucgcuauucuugucacgaccguuacacugcacuuuaaacaguacgagugugacucuccugcaaacaaucaggugaugccaugcgaaccgaucauaaucgagagaaacauuacugaaaucguauauuugaccaauacaaccauugagaaggaaaucugucccaaauuagugggguacaggaacuggucaaagccucagugcaaaauaacuggauucgccccauuuaguaaggauaauagcauucggcuguccgcggguggcgacaucugggucacacgcgagcccuaugugucuugugauccugggaagugcuaccaauucgcucuaggacagggcaccacgcucgacaacaaacauucgaaugauacuauucacgaccgaaccccacaucguacacugcuuaugaacgagcuggguguucccuuucacuuggggacuaaacagguguguaucgccuggucaagcaguuccugccaugauggaaaggcauggcuccacgucugugugaccggcuaugacaagaaugccacagcuucuuucaucuacgauggcagacugguagacagcauuggguccuggucacagaacauacugaggacccaagaaagugagugcguuuguaucaauggaacgugcacuguggucaugacagaugguagcgcaucuggccgggccgacaccaaaauucucuuuaucgaagaggggaagauagugcacauuuccccuuuaucaggaagcgcucagcauguggaggaaugcaguuguuauccacgcuacccgggcgucagaugcaucuguagggauaacuggaaggguucuaaucggcccguuguggacaucaacguaaaagacuacuccauugauagcucguaugugugcucugggcuggucggagacacuccucgcaacaaugaucgauccucaaguagcuacuguagaaacccaaauaacgagaagggcaaucacggcgugaaagggugggccuucgacgauggaaacgacguuuggauggguaggacaaucuccgaagauucucggagcggcuaugagaccuuuaaggugauugggggauggucaacgcccaauaguaaacuucagauaaaccgucaggucaucguggacuccgauaaucgcagcggcuacucugguauuuucucaguagaagggaagaguugcaucaacagauguuuuuauguugaguugaucaggggccgggagcaagaaacccgagugugguggacaagcaauuccauugucguguucugcggaacuucuggcaccuacgggacaggaucguggccugacggugcggauauaaaccugaugccaaucuga

SEQ ID NO: 151545 - RNA, 1362 nt, Artificial Sequence
  derived and/or modified CDS sequence (opt3) from neuraminidase__InfluenzaA__AGQ47850
augaaccccaaucagaagaucauuaccauaggcagcaucugcaugguggucgggauuaucucccugauucuccaaaucggaaacauaaucucuauuuggaucucacacaguauucaggccgguagcuccacauggguuaaucagacuuacgugaacaucucuaauacgaacguaguggcuggcccugacgcaaccucggucauacuuacaggaaauucaagccuguguccaauuagagggugggccaucuauaguaaagauaacggcauuaggaucgguuccaagggggacaucuucgugauucgggagccguuuauaucuugcagccauuuggaaugucgcgcguucuuuuuaacucagggagcucugcuaaaugauaaacacuccaacggcaccguuaaggaccgaucacccuaccgugcccucaugaguugcccugugggcgaggcaccaagccccuauaauucuagauucgaauccgucgccuggucagcuagcgcaugucaugaugggaugggauggcugacaaucgguauuaguggcccugacaacggggccguggcuguacuuaaauacaauggaaucauaaccgagacuauuaagucuuggaggaagaaaauccugcggacacaagaauccgagugcgccuguguuaacggcagcugcuuuaccaucaugacggaugguccaucggacgggcccgcgucuuauaagauuuucaaaaucgagaagggaaaagugacuaaguccauugaauuggaugcaccuaauucacacuacgaggaauguaguugcuauccagacaccggcaaggucaugugugugugccgcgauaacuggcauggcagcaacagaccguggguguccuuugaccagaaucucgauuaccagauaggguacaucugcucuggagucuucggugacagccccaggccuaaagacggcacagggucauguggaccaguuaguguggauggcgccaacgguguaaagggguuuuccuaucgguacggcaauggaguguggauuggccgcacuaaaagcaagucuucacgacacggguucgagaugaucugggaccccaacggauggaccgagacagauaguagauuuagcgucaggcaggacgugguugcuaugaccgauugguccgguuauucuggcucguucgugcaacacccugaacugacggggcuggacugcaugcggccauguuuuugggucgagcucauccguggacagcccaaagaaaagacuauuuggacaagcggcuccucaauaaguuucugcgguguaaauucugauaccguggacuggagcuggccggauggggccgaguuaccuuucacuaucgacaaauga

SEQ ID NO: 151546 - RNA, 1410 nt, Artificial Sequence
  derived and/or modified CDS sequence (opt3) from neuraminidase__InfluenzaA__AGQ47873
augaacaccaaucagagaacaaucacuauuggcacgauaugccugaucguggggauuaucagccuccuucugcaaauuggaaacaucauauuguuauggaugucccacucuauccagaccggugagaagucacaucccaaaguguguaaucagaguguuauuacauacgaaaacaauacuugggugaaccagaccuauguaaauaucagcaacacaaauauugccgcuggccaaggggugaccccuaucauacuggcaggaaacuccucucuaugcccaauuucgggcugggccaucuacucaaaggacaauagcauuaggaucgguaguaaaggggauaucuucgucaugcgggagccguuuauuuccuguucucaccucgaaugccgcacuuucuuucugacacagggagcgcuucugaacgaccgacauagcaauggcaccgugaaggaucguucccccuauagaacguugaugucauguccuauaggcgaggcuccaagucccuacaacagcagguucgaaucuguugccugguccgcaucagccugccacgacgggaugggauggcucacuaucgguauuagcggcccugauaauggggcuguggcaguccugaaauauaacggaaucauaaccgacacaauuaagaguuggcggaacaagauccugcgcacucaggagucugagugugugugcaucaauggcuccuguuuuaccauuaugacagaugguccaagcaacgggcaggccucguacaaacucuucaagauggaaaaaggaaagaucauuaaaucuauagaguuagacgcucccaauuaucauuacgaagagugcuccuguuacccugauaccggcaagguaguuugcgugugcagagacaacuggcacgccucaaauaggccaugggucaguuuugaucaaaaccuggacuaucagaucggcuacauuuguagcgggguguucggagauaauccgcgguccaacgacgguaagggcaauugcgggcccgugcuuucuaacggagcgaauggcgucaaagguuuuagcuuccgcuaugggaacggcguuuggaucggacgaacgaagucaaucaguuccagaagcggcuuugagaugauuugggacccuaauggguggacugaaacagauucuucauucaguaugaaacaggacauaaucgcauugaccgauuggagcggauacuccgguucuuuugugcagcacccagagcugacuggcaugaacuguauuaggcccugcuucuggguagaacuaauccgggggcaaccuaaggagucgacaauuuggaccagcggauccucaaucaguuucuguggcgucaauucugguacggccagcugguccuggccagacggggcugaucuccccuuuaccauagacaaauga

SEQ ID NO: 151547 - RNA, 1410 nt, Artificial Sequence; identical to SEQ ID NO: 145262
  derived and/or modified CDS sequence (opt3) from neuraminidase__InfluenzaA__AGQ47885

SEQ ID NO: 151548 - RNA, 1410 nt, Artificial Sequence; identical to SEQ ID NO: 150028
  derived and/or modified CDS sequence (opt3) from neuraminidase__InfluenzaA__AGQ47897

SEQ ID NO: 151549 - RNA, 1410 nt, Artificial Sequence; identical to SEQ ID NO: 142143
  derived and/or modified CDS sequence (opt3) from neuraminidase__InfluenzaA__AGQ47909

SEQ ID NO: 151550 - RNA, 1410 nt, Artificial Sequence
  derived and/or modified CDS sequence (opt3) from neuraminidase__InfluenzaA__AGQ47921
augaaccccaaucagaagaucauuaccauaggcagcgugucccugacaaucgccacugucugcuuccucaugcaaacggcuauucuuguuaccacagugacucugcacuuuaaacaguacgagugugacucuccugcaucaaaccagguaaugccaugcgaaccgaucauuaucgagagaaauauaaccgaaaucguguauuugaacaauacaaccauugagaaggaaaucugucccaaagucguggaguacaggaacuggaguaagccucagugccaaauuacuggguucgccccauuuagcaaagauaauuccauccgguuaucugcgggaggugacauauggguuacacgcgagcccuaugugucgugugaucauggcaagugcuaccaguucgcucuggggcagggaaccacgcuagacaacaagcacucaaaugauacuauucaugaccgaaucccucaccguacccuccugaugaacgaacuuggcgucccauuucaucuggguacaagacagguguguauugccuggagcaguuccucuugccacgaugggaaagcaugguugcacguauguaucacuggagacgauaagaaugccaccgcuagcuucaucuaugacggcaggcucguugauuccauuggcucauggagucaaaacauacugcggacacaggagagcgaaugcguguguaucaaugggaccugcacggucgugaugacugacggaucugcauccggucgcgccgauacaaggauucuguuuaucgaggagggcaaaauagugcauauuucaccccucagcgggagugcucagcacgucgaagagugcucuuguuacccuagauauccaggaguucggugcaucugucgcgacaacuggaagggcuccaaucgaccggugguagacaucaacauggaagauuacagcauugacucgucuuacgugugcuccgguuuagucggggauacccccagaaacgacgauaggucaaguaauagcaacugucggaauccuaacaaugagcguggaaaccagggcgugaaaggcugggccuucgacaauggggaugacguuuggaugggacgcacuaucuccaaggaucugagaucugguuaugaaacauuuaaggugauuggcggguggagcaccccaaacucaaaaagucaaauaaauaggcaggucaucguggacuccgauaaccggagcggauacucuggcauuuucucaguagaggguaagaguugcaucaaucgauguuuuuauguugagcuuauccgcgggagaaaacaggaagcgagggugugguggacgagcaacuccauugucguguucugcggcaccucuggaacauacggcacugggucguggcccgacggagcaaauauaaacuuuaugccuaucuga

SEQ ID NO: 151551 - RNA, 1365 nt, Artificial Sequence
  derived and/or modified CDS sequence (opt3) from neuraminidase__InfluenzaA__AGQ47933
augaaccccaaucagaagaucauuaccauaggcagcaucugcaugguggucgggcugauuucccucauccuucaaauuggaaacaucauaucuaucuggauuucacacaguauccagacagguagccagaaucauacuggcauuuguaaccagaauaucauaacguacaaaaacuccaccuggguuaaggacacaacuucugugauucugaccggaaauucgucauugugcccuaucagagggugggccauuuauagcaaagauaacaguaucaggaucggcuccaagggugacguauucgugauucgggagccauuuauaucuuguagccacuuagaaugccgcacauucuuucugacccaaggggcucuacucaaugaucgacauuccaacggaacugucaaagaccguucaccguacagagcacugaugaguugucccgugggcgaggccccuagcccauauaauucuagguucgaauccguugcguggucagcuagcgccugccacgauggcaugggguggcuuacaaucggaauuaguggucccgacaacggcgcaguggccguccugaaguacaaugggaucauaaccgagacgauuaagucuuggcggaaaaagaucuugcgcacucaggaauccgagugugcuugcgugaacggaagcuguuuuaccaucaugacagauggcccuucggacggucucgcaucuuauaaaauuuucaagaucgagaaagggaagguaacuaaguccauugaacugaaugccccaaacucacauuacgaggaaugcaguuguuaucccgauaccggaaaaguuaugugcgugugcagagacaacuggcacggcagcaauaggccuugggucuccuuugaucagaaccuggacuaccagauaggcuacaucuguucugggguguucggagauaauccacggccgaaggacgguacaggcagcugcgggcccguguaugucgacggagcuaacggcguuaaagguuuuucauaccgcuaugggaauggcguguggauuggacgaaccaagagucacuccagcagacauggcuucgagaugaucugggauccuaacggguggacggagacugacucuaaauuuucaguaaggcaagauguggucgccaugacagacuggaguggauacagcgguuccuucgugcagcacccagaacucaccggcuuagauuguauccggcccugcuuuuggguugagcugauucgugggcgcccuaaggagaaaacuauauggacaucugcgucgagcaucuccuucuguggagucaauucagacaccgugaacuggaguuggccagauggcgcagaacuucccuucacgauugacaaguga

SEQ ID NO: 151552 - RNA, 1365 nt, Artificial Sequence; identical to SEQ ID NO: 143767
  derived and/or modified CDS sequence (opt3) from neuraminidase__InfluenzaA__AGQ47945

SEQ ID NO: 151553 - RNA, 1365 nt, Artificial Sequence; identical to SEQ ID NO: 143767
  derived and/or modified CDS sequence (opt3) from neuraminidase__InfluenzaA__AGQ47957

SEQ ID NO: 151554 - RNA, 1365 nt, Artificial Sequence; identical to SEQ ID NO: 143767
  derived and/or modified CDS sequence (opt3) from neuraminidase__InfluenzaA__AGQ47969

SEQ ID NO: 151555 - RNA, 1365 nt, Artificial Sequence; identical to SEQ ID NO: 143767
  derived and/or modified CDS sequence (opt3) from neuraminidase__InfluenzaA__AGQ47981

SEQ ID NO: 151556 - RNA, 1365 nt, Artificial Sequence
  derived and/or modified CDS sequence (opt3) from neuraminidase__InfluenzaA__AGQ48005
augaaccccaaucagaagaucauuaccauaggcagcaucugccugguggucgggcucauuucccuuauccugcaaauuggaaacaucauaucuaucuggauuucacacaguauccagacagguagccagaaucauacuggcauuuguaaccagaauaucauaacguacaaaaacuccaccuggguuaaggacacaacuucugugauuuugaccggaaauucgucauuaugcccuaucagagggugggccauuuauagcaaagauaacaguaucaggaucggcuccaagggugacguauucgugauucgggagccauuuauaucuuguagccaccuggaaugccgcacauucuuucuaacccaaggggcucuccugaaugauaaacauuccucaggaacugucaaggaccgaaguccguaccgugcacuuaugagcugucccgugggcgaggccccuucuccauauaacuccagauucgaaucaguugcguggagcgcuagugccugccacgauggcaugggguggcugacaaucggaauuucuggucccgacaauggcgcaguggccgucuugaaguacaacgggaucauaaccgagacgauuaaauccuggaggaagaaaauccuccggacucaggaaagcgagugugcuugcgugaauggaucguguuuuaccaucaugacagauggcccuucugacggucuggcauccuauaagauuuucaaaaucgagaaggggaagguaacuaaaucaauugaacugaacgccccaaauagucauuacgaggaaugcagcuguuaucccgauaccggaaagguuaugugcgugugccgcgacaacuggcacggcuccaacagaccuugggucucuuuugaucagaaucucgacuaccagauaggcuacaucuguagcgggguguucggagauaacccaaggccggaggacgguacaggcucaugcgggcccguguaugucgacggagcuaauggcguuaaagguuuuaguuaccgguauuccaacgggguguggauuggccgcaccaagagccacucuucacgacauggauucgagaugaucugggauccuaauggcuggacggaaacugacaguaaauuuagcguaagacaagauguggucgccaugacagacugguccggguacucuggaucguucgugcagcacccagaguuaaccggucuggauuguaugaggcccugcuuuuggguugaacuuauccggggccguccuaaggagaaaacuauuuggacaagcgcguccucaauaaguuucuguggggugaacucugacaccgucgauuggagcuggccagacggagcagaauugcccuucuccaucgauaaguga

SEQ ID NO: 151557 - RNA, 1365 nt, Artificial Sequence; identical to SEQ ID NO: 151556
  derived and/or modified CDS sequence (opt3) from neuraminidase__InfluenzaA__AGQ48017

SEQ ID NO: 151558 - RNA, 1365 nt, Artificial Sequence; identical to SEQ ID NO: 143767
  derived and/or modified CDS sequence (opt3) from neuraminidase__InfluenzaA__AGQ48029

SEQ ID NO: 151559 - RNA, 1365 nt, Artificial Sequence
  derived and/or modified CDS sequence (opt3) from neuraminidase__InfluenzaA__AGQ48041
augaaccccaaucagaagaucauuaccauaggcagcaucugccugguggucgggcucauuucccuuauccugcaaauuggaaacaucauaucuaucuggauuucacacaguauccagacagguagccagaaucauacuggcauuuguaaccagaauaucauaacguacaaaaacuccaccuggauuaaggacacaacuucuguuaucuugaccggaaauucgucauuaugcccuauuagagggugggccaucuauagcaaagauaacaguaucaggauuggcuccaagggugacguguucguaauacgggagccauuuaucucuuguagccaccuggaaugccgcacauucuuucuaacccaaggggcucuccugaaugauaaacauuccucaggaacugugaaggaccgaaguccguaccgugcacuuaugagcugucccgucggcgaggccccuucuccauauaacuccagauucgaaucaguggcguggagcgcuagugccugccacgauggcaugggguggcugacaauuggaaucucuggucccgacaauggcgcaguugccguguugaaguacaacgggauaauuaccgagacgaucaaauccuggaggaagaaaauccuccggacucaggaaagcgagugugcuugcgucaauggaucguguuuuaccauuaugacagauggcccuucugacggucuggcauccuauaagaucuucaaaauugagaaggggaaggugacuaaaucaauagaacugaacgccccaaauagucauuacgaggaaugcagcuguuaucccgauaccggaaagguaaugugcguuugccgcgacaacuggcacggcuccaacagaccuugggugucuuuugaucagaaucucgacuaccagaucggcuacauuuguagcggggucuucggagauaacccaaggccggaggacgguacaggcucaugcgggcccguguauguggacggagcuaauggcgucaaagguuuuaguuaccgguaugggaacggcguuuggaucggacgcaccaagucccacagcucucgacauggcuucgagaugaucugggauccuaauggguggacggaaacugacucaaaauuuagugugagacaagauguaguggccaugacagacuggagcggauacuccgguucuuucguccagcacccagaguuaaccggccuggauuguaugaggcccugcuuuuggguggaacuuauucgggggcguccuaaggagaaaacuauauggacaucggcgagcuccaucucauucuguggaguuaacagugacaccguggauuggucuuggccagacggcgcagaauugcccuucagcauugauaaguga

SEQ ID NO: 151560 - RNA, 1365 nt, Artificial Sequence
  derived and/or modified CDS sequence (opt3) from neuraminidase__InfluenzaA__AGQ48053
augaaccccaaucagaagaucauuaccauaggcagcaucugccugguggucgggcucauuucccuuauccugcaaauuggaaacaucauaucuaucuggauuucacacaguauccagacagguagccagaaucauacuggcauuuguaaccagaauaucauaacguacaaaaacuccaccuggauuaaggacacaacuucuguuaucuugaccggaaauucgucauuaugcccuauuagagggugggccaucuauagcaaagauaacaguaucaggauuggcuccaagggugacguguucguaauacgggagccauuuaucucuuguagccaccuggaaugccgcacauucuuucuaacccaaggggcucuccugaaugauaaacauuccucaggaacugugaaggaccgaaguccguaccgugcacuuaugagcugucccgucggcgaggccccuucuccauauaacuccagauucgaaucaguggcguggagcgcuagugccugccacgauggcaugggguggcugacaauuggaaucucuggucccgacaauggcgcaguugccguguugaaguacaacgggauaauuaccgagacgaucaaauccuggaggaagaaaauccuccggacucaggaaagcgagugugcuugcgucaauggaucguguuuuaccauuaugacagauggcccuucugacggucuggcauccuauaagaucuucaaaauugagaaggggaaggugacuaaaucaauagaacugaacgccccaaauagucauuacgaggaaugcagcuguuaucccgauaccggaaagguaaugugcguuugccgcgacaacuggcacggcuccaacagaccuugggugucuuuugaucagaaucucgacuaccagaucggcuacauuuguagcggggucuucggagauaacccaaggccggaggacgguacaggcucaugcgggcccguguauguggacggagcuaauggcgucaaagguuuuaguuaccgguaugggaacggcguuuggaucggacgcaccaagucccacagcucucgacauggcuucgagaugaucugggauccuaauggguggacggaaacugacucaaaauuuagugugagacaagauguaguggccauggcggacuggagcggauacuccgguucuuucguccagcacccagaguuaacaggccuggauuguaugaggcccugcuuuuggguggaacuuauucgggggcguccuaaggagaaaaccauauggacuucggcaagcuccaucucauucuguggaguuaacagugacacaguggauuggucuuggccagacggcgccgaauugcccuucagcauugauaaguga

SEQ ID NO: 151561 - RNA, 1410 nt, Artificial Sequence
  derived and/or modified CDS sequence (opt3) from neuraminidase__InfluenzaA__AGQ81707
augaaccccaaucagaagaucauuaccauaggcagcaucugcauggugauugggaucgccucccugaugcuccaaauuggaaacaugaucucuauaugggucucacacaguauccagacagguaaucaguaccagccugagccauguaaccaaagcauuaucacuuaugaaaauaacacguggguuaaucagaccuacgugaacauuuccaauacaaacuuccuuacugagcaggcuguaaccucuguggcacuggccggcaauucgucauugugcccgaucagcgggugggcgauauauaguaaagacaacggaauuagaaucggcuccaagggugaugucuuugugauuagggaacccuucaucucuuguagccauuuagagugccggacauuuuuccugacccagggggcucuacucaaugacaaacacuccaacggaacuguuaaggaucgcucaccuuaccgaacacugaugaguuguccagugggcgaagcccccagcccuuauaauucucguuuugaguccgucgcauggucagccagcgcuugccaugacggcaucaguuggcuuaccauugggauaucuggaccagauaacggugcaguggccguacugaaauacaacggcaucauuacggacacuaucaaguccuggagaaauaacauauugaggacccaagagagcgaaugugcuugcguuaaugggucguguuucacagugaugacugauggacccucuaacggccaggccuccuauaagauuuuuaaaaucgagaaggguaaagucgugaagucaguggaacucaaugcgccuaacuaccacuacgaggagugcaguuguuauccagacgcagggaaaaucaugugcgucugccgggauaauuggcauggaagcaaccgcccguggguuuccuucaaucagaaccuggaauaccagauuggcuauaucuguucuggcguguuuggggacaaucccagaccuaacgauggaaccgguagcugcggcccaguaucaaguaauggggccuacggagugaagggcuucuccuuuaaguaugguaacggggucuggauuggcaggacaaaaagcaccucuucacggaguggauucgagaugauaugggaccccaauggcuggacggaaacugauagcuccuuuucugugaagcaagacaucguugcuauuacagacuggucgggguacagcggauccuucgugcagcacccugagcugaccggucucgauuguaugcgcccaugcuucugggucgaauuaauccgaggcagacccaaagagaacacuaucuggacaucagggaguucuauuagcuuuuguggaguggacuccgauaccguaggcuggucauggccggacggugccgagcugccuuucacgauagauaaguga

SEQ ID NO: 151562 - RNA, 1410 nt, Artificial Sequence
  derived and/or modified CDS sequence (opt3) from neuraminidase__InfluenzaA__AGQ81715
augaaccccaaucagaagaucauugccauaggcagcgugucccugaccaucgcuacaauuugccuccuuaugcaaaucgcaauucuggucacuacgaugaccuugcacuucaaacauaacgaguguacaaauucuucaaacaaucaggccguuccuugcgggccaaucauaaucgaaagaaacgugacugagauuguacacuuaaauaguaccacacuggaaaaggagaucuguccgaaagcggcuggauacagggacuggagcaagccccagugccagauuaccgguuuugccccuuucuccaaagauaacucuauccggcuaucggcaucaggcgacauaugggugacucgcgaaccauaugucagcugugggcucggaaagugcuaccaauuugcccugggccaggguacaacccuugauaaucgacauaguaacgggacgucccacgaccguacucccuauagaacccuguugaugaaugagcucggagugccuuuccaucuggcuacaaagcagguuuguauugcauggucuagcuccucaugccacgauggcaaagccuggcugcacgugugugucacuggcgacgauaggaacgcuaccgccaguaucauuuacgacgggauccucguggauagcaucggaucuugguccaagaauauuuuacggacacaggagucagaaugcguauguauaaacgguaccugcacgguugugaugacugacggcagcgcgagugggaaagcagauacacgcauccuguuuauuagagagggaaagaucguccauauaucuccacuuuccggcagcgcccaacacguggaagagugcucguguuauccccaguacccugaggugaggugcgucugucgggacaauuggcgcgguucuaaccgaccaguuuuguauauuaacauggcugauuacuccaucgacucaggguacgugugcaguggacugguaggcgacaccccgagaaaugaugacaucagcuccucuagcaacuguaaagaucccaauaacgaaaggggcgccccuggggugaagggaugggcauucgacucagguaaugauauuuggaugggccggacuaucgagaaggacagucguuccggguaugaaacauuucgcgucauuggaggcuggaacaccgcuaauagcaaaucucagacgucaagacaggugauaguugauagugguaacagcuccggguacucuggcaucuucucgauugagggaaagagcugcaucaauagguguuuuuauguggaacuaauccggggccgaccaaaagagacccgcgucugguggacauccaacucaauuauaguguucugcgggaccaguggaacuuacgguacaggcucuuggcccgacggggccaauaucaacuuuauggcgauuuga

SEQ ID NO: 151563 - RNA, 1410 nt, Artificial Sequence
  derived and/or modified CDS sequence (opt3) from neuraminidase__InfluenzaA__AGQ81717
augaaccccaaucagaagaucauugccauaggcagcgugucccugaccaucgcuacaauuugccuccuuaugcaaaucgcaauucuggucacuacgaugaccccucacuucaaacaugacgaguguacaaacucuucaaauaaccaggccguuccaugcgggccgaucauaaucgaaagaaaugugacugagauuguacacaucaacaguaccauuuuggaaaaggagaucugucccaaagcggcuggauacaggaauuggagcaagccucagugccagauaauugguuuugccccauucuccaaagauaacucuauccgguuaucggcaucaggcgacauuugggugacacgcgaacccuaugucagcugugggcugggaaagugcuaccaauuugcccuaggccaggguaccacucucgauaaucgacauaguaacgggacaucccacgaccguaccccucauagaacgcugcuuaugaaugagcugggagugccauuccacuuggcuacuaagcagguuuguaucgcauggucuagcuccucaugccacgauggcaaagccuggcuccaugugugugucaccggcgacgauaggaacgcuacagccaguaucauuuaugacgggaugcugguggauagcauaggaucuugguccaagaauauccugcggacucaggagucagaaugcguauguauuaacgguaccugcacaguugugaugaccgacggcagcgcgagugggaaagcagauacgcgcauccucuuuauaagagagggaaagauuguccacaucucucccuuauccggcagcgcccaacauguggaagagugcucguguuacccucaguauccagaggugaggugcgucugucgggacaauuggcgcgguucuaaccgaccgguucuguacaucaacauggcugauuauuccauugacucaggguacgugugcaguggacuuguaggcgacacucccagaaaugaugacaucagcuccucuagcaacuguaaagauccuaauaacgaaaggggcgccccaggggugaagggaugggcauucgacucagguaaugauauuuggaugggccggacaauagagaaggacagucguuccggguacgaaaccuuucgcgucaucggaggcuggaacacugcuaauagcaaaucucagacaucaagacaggugauuguugauagugacaacagcuccgguuauucugggaucuucucgguggagggcaagagcugcaucaauagguguuuuuacgucgaauugauucggggacgacccaaagagacccgcgugugguggacguccaacucaauaaucguauucugcggcaccagugggacauauggaacugguucuuggccugauggcgccaauauuaacuuuauggcgaucuga

SEQ ID NO: 151564 - RNA, 1410 nt, Artificial Sequence
  derived and/or modified CDS sequence (opt3) from neuraminidase__InfluenzaA__AGQ81718
augaaccccaaucagaagaucauugccauaggcagcgugucccugaccaucgcuacaauuugccuccuuaugcaaaucgcaauucuggucacuacgaugaccuugcacuucaaacauaacgaguguacaaauucuucaaacaaucaggccguuccuugcgggccaaucauaaucgaaagaaacuuaacugagauugugcaccugaauaguaccauccuagaaaaggagauuuguccgaaagcggcuggauacaggaacuggagcaagccccagugccagaucacagguuuugccccuuucuccaaagacaauucuauacggcucucggcaucaggcgauauuuggguaacccgcgaaccauaugugagcugugggcugggaaagugcuaccaauuugcccuuggccaggguacuacacuggacaaccgacauaguaaugggaccucccacgaucguacgccccauagaacuuugcucaugaacgagcugggagucccuuuccaccugucuaccaaacagguguguaucgcuuggagcuccucaaguugccacgacggcaaggcauggcuccauguuugugugacaggcgaugacaggaaugccacugcuagcauuaucuaugaugggaucuuagucgacucuauuguguccuggucaaagaacauacugcggacccaggagagcgaaugcguauguaucaauggaacaugcaccguugugaugacggaugguagugccucuggcaaagcggacacucgcauucuuuuuaucagagaggggaagauaguccacauuuccccauugagcggaucggcacaacauguggaagagugcucuuguuaccccagguauccugaggugcggugcgucugucgcgauaacuggcgaggcuccaacagaccaguucuguacaucaauauggccgacuauucaaucgauagugguuacgugugcagcgggcuaguaggagacacaccgaggaacgacgauaccuccucuagcucaaauugucgggaccccaacaaugaacguggcgcuccuggcgugaaagggugggccuucgauaguggaaacgacauuuggaugggucgcacuaucgagaaggauuccagaagcggcuacgaaacauuuagggucauugggggauggaauaccgcaaacucuaagucacagacgagucgacaggugauaguugacagcgauaauuccucuggcuauucggguguguucagcgucgaggggaaauccugcaucaaccgguguuuuuacguggaacucauucgcggcagaccaaaggagaccaggguaugguggacaucaaauaguaucaucguuuucugcggaacuucuggcaccuaugggacaggaagcuggcccgacggugcuaacauuaauuuuauggccauauga

SEQ ID NO: 151565 - RNA, 1410 nt, Artificial Sequence
  derived and/or modified CDS sequence (opt3) from neuraminidase__InfluenzaA__AGQ81719
augaaccccaaucagaagaucauugccauaggcagcgugucccugaccaucgcuacaauuugccuccuuaugcaaaucgcaauucuggucacuacgaugaccuugcacuucaaacauaacgaguguacaaauucuucaaacaaucaggccguuccuugcgggccaaucauaaucgaaagaaacgugacugagauuguacacuuaaauaguaccacacuggaaaaggagaucuguaccaaagcggcuggauacagggacuggagcaagccgcagugccagauuacugguuuugcccccuucuccaaagauaacucuauccggcuaucggcaucaggcgacauaugggugacacgcgaaccuuaugucagcugugggcucggaaagugcuaccaauuugcccugggccaggguaccacgcuugauaaucgacauaguaacgggacuacccacgaccguacaccacauagaacucuguugaugaaugagcucggagugcccuuccaccuggcuaccaagcagguuuguauugcaugguccucuagcuccugccacgauggcaaagccuggcugcaugugugugucacaggcgacgauaggaacgcuaccgccucaaucauuuaugacgggauccucguggauaguaucggaagcuggucuaagaauauuuuacggacgcaggaguccgaaugcguauguauaaacgguacuugcacaguugugaugaccgacggcucagcgagcgggaaagcagauacucgcauccuguuuauuagagagggaaagaucguccacauaaguccucuuucuggcuccgcccaacauguggaagagugcagcuguuacccacaguaucccgaggugaggugcgucugucgggacaauuggcgcgguucgaaccgaccuguuuuguacauuaacauggcugauuauucuaucgacuccggguacgugugcucaggacugguaggcgacacaccaagaaaugaugacaucaguagcaacuccaauuguaaagauccgaacaaugaaucuggcgcccccggggugaagggaugggcauucgacagcgguaacgauauuuggaugggcaggaccaucgagaaggacucacggaguggguacgaaacguuucgugucauuggaggcuggaauaccgcuaacuccaaaagccagacaucucgccaggugauaguugauucagacaauaguagcgguuauuccgggaucuucucuauugagggcaagucgugcaucaacagauguuuuuacguggaacuaaucaggggacggccuaaagagacucgagucugguggaccagcaauuccauuauaguguucugcggcacaucagggacuuauggaaccgguaguuggccagauggcgccaacaucaauuuuauggcgauuuga

SEQ ID NO: 151566 - RNA, 1410 nt, Artificial Sequence
  derived and/or modified CDS sequence (opt3) from neuraminidase__InfluenzaA__AGQ81722
augaaccccaaucagaagaucauugccauaggcagcgugucccugaccaucgcuacaauuugccuccuuaugcaaaucgcaauucuggucacuacgaugaccccucacuucaaacaugacgaguguacaaacucuucaaauaaccaggccguuccaugcgggccgaucauaaucgaaagaaaugugacugagauuguacacaucaacaguaccauuuuggaaaagggaaucugucccaaagcggcugguuacaggaauuggagcaagccucagugccagauaauuggcuuugccccauucuccaaagauaacucuauccgguuaucggcaucaggggacauuugggugacacgcgagcccuaugucagcuguggacugggcaagugcuaccaauuugcccuaggucaggggaccacucucgauaaucgacauaguaacggaacaucccacgaccguaccccucauagaacgcugcuuaugaaugaacugggcgugccauuccacuuggcuacuaagcagguuuguaucgcauggucuagcuccucaugccacgauggcaaagccuggcuccaugugugugucaccggggacgauaggaacgcuacagccaguaucauuuaugacggaaugcugguggauagcauagguucuugguccaagaauauccugcggacucaggagucagagugcguauguauuaacgggaccugcacaguugugaugaccgacgggagcgcgaguggaaaagcagauacgcgcauccucuuuauaagagaaggcaagauuguccacaucucucccuuauccgguagcgcccaacauguggaggaaugcucguguuacccucaguauccagaggugaggugcgucugucgggacaauuggcgcgggucuaaccgaccgguucuguacaucaacauggcugauuauuccauugacucaggauacgugugcaguggccuuguaggcgacacucccagaaaugaugacacaagcuccucuagcaacuguaaagauccuaauaacgagaggggcgccccaggagugaaggguugggcauucgacucaggcaaugauaucuggauggggcggaccauugaaaaggacagucguuccggauacgagacuuuucgcgucauaggcgguuggaacacagcuaauagcaaaucucagaccucaagacaggugaucguugauagugacaacagcuccggguauucuggcauuuucucgguggaaggaaagagcugcaucaauagguguuuuuacgucgaguugauccggggccgacccaaagaaacgcgcgugugguggaccuccaacucaauuauaguauucugcgggacaaguggaacuuaugguaccggcucuuggccugauggggccaauaucaacuuuauggcgauuuga

SEQ ID NO: 151567 - RNA, 1410 nt, Artificial Sequence
  derived and/or modified CDS sequence (opt3) from neuraminidase__InfluenzaA__AGQ81724
augaaccccaaucagaagaucauugccauaggcagcgugucccugaccaucgcuacaauuugccuccuuaugcaaaucgcaauucuggucacuacgaugaccuugcacuucaaacauaacgaguguucuaauucaaguaacaaucaggccguuccuugcgggccaaucauaaucgaaagaaacgugacagagauuguacacuuaaauagcacuacccuggaaaaggagaucuguccgaaagcggcuggauacagggacugguccaagccccagugccagauuacagguuuugccccuuucucuaaagauaacucgauccggcuaucagcaagcggcgacauaugggugacccgcgaaccauaugucaguugugggcucggaaagugcuaccaauuugcccugggccaggguacuacacuugauaaucgacauuccaacgggaccucucacgaccguacgccccauagaacucuguugaugaaugagcucggagugccuuuccaccuggcuaccaagcagguuuguauugcauggagcuccucaaguugccacgauggcaaagccuggcugcaugugugugucacaggcgacgauaggaacgcuacugccagcaucauuuaugacgggauccucguggauucuaucggauccuggucaaagaauauuuuacggacccaggagagcgaaugcguauguauaaacgguacaugcaccguugugaugacggacggcagugcgucugggaaagcagauacucgcauccuguuuauuagagagggaaagaucguccacauauccccacuuagcggcucggcccaacauguggaagagugcucuuguuacccccaguauccugaggugaggugcgucugucgggacaauuggcgcgguuccaaccgaccaguuuuguacauuaacauggaagauuauucaaucgacaguggguacgugugcagcggacugguaggcgacacaccgagaaaugaugacaucuccucuagcucaaacuguaaagaucccaauaacgagaggggcgcuccuggggugaagggaugggccuucgacagugguaaugaucuauggaugggccggaccauugaaaaggacucccguagcggguacgagacuuuucgcgucaucggaggcuggaacacagcaaauucuaaaucacagaccaguagacaggugauuguugauagcgacaacuccucugguuauucggggauauucagcguggaaggcaaguccugcaucaauagguguuuuuacgucgagcucauucggggacgaccaaaagagacgcgcgugugguggaccucaaacaguaucaucguauucugcggcacaucugggacuuauggaaccgguagcuggcccgauggcgcuaauauuaacuuuauggccauauga

SEQ ID NO: 151568 - RNA, 1410 nt, Artificial Sequence
  derived and/or modified CDS sequence (opt3) from neuraminidase__InfluenzaA__AGQ81726
augaaccccaaucagaagaucauugccauaggcagcgugucccugaccaucgcuacaauuugccuccuuaugcaaaucgcaauucuggucacuacgaugaccuugcacuucaaacauaacgaguguucuaauucaaguaacaaucaggccguuccuugcgggccaaucauaaucgaaagaaacauuacagagaucgugcacuuaaauagcacuacccuggaaaaggagauuuguccgaaagcggcuggauacagggacugguccaagccccagugccagaucacagguuuugccccuuucucuaaagauaacucgauacggcuaucagcaagcggcgacauuuggguaacccgcgaaccauaugugaguugugggcucggaaagugcuaccaauuugcccugggccaggguacuacacuugauaaucgacauuccaacgggaccucucacgaccguacgccccauagaacucuguugaugaaugagcucggagucccuuuccaccuggcuaccaaacagguguguaucgcauggagcuccucaaguugccacgauggcaaggccuggcugcauguuugugugacaggcgacgauaggaacgcuacugccagcauuaucuaugacgggauccucgucgauucuauuggauccuggucaaagaauauauuacggacccaggagagcgaaugcguguguaucaaacgcacaugcaccguaguuaugacggacgguagugcgucuggcaaggcagauacuaggauucuguuuaucagagaggggaaaauagugcacauuuccccacuuagcggaucggcccaacaugucgaagagugcucuuguuacccccaguauccugaggugcggugcgugugucgcgacaacuggcgaggcuccaauagaccagucuuguacaucaacauggcugauuauucaaucgacagugguuacguuugcagcgggcuggugggagacacaccgaggaacgaugacauuuccucuagcucaaauuguaaggaucccaacaaugaacggggcgccccuggcguaaaggggugggcauucgacaguggaaacgaucuauggaugggucguaccaucgagaaagaaucccgcagcggcuacgagacuuuuagagugauugggggauggaauacagcuaacucuaagucacagaccaguaggcaggucauaguggacagcgauaauuccucuggcuauucggguaucuucagcguugaagggaaauccugcauuaaccgguguuuuuacguggagcucauccgaggccgcccaaaggagacgagagucugguggaccucaaauaguaucauuguguucugcggaacaucuggcacuuaugggaccggaagcuggcccgacggugccaacauaaauuuuauggcgaucuga

SEQ ID NO: 151569 - RNA, 1410 nt, Artificial Sequence
  derived and/or modified CDS sequence (opt3) from neuraminidase__InfluenzaA__AGQ81727
augaaccccaaucagaagaucauugccauaggcagcgugucccugaccaucgcuacaauuugccuccuuaugcaggucgcaauccugguuacuacgaugaccuugcacuucaaacauaacgaguguucuaauucaaguaacaaucaggccgugccuugcgggccaauuaucauagaaagaaacaucacagagauuguacacuuaaauagcacuacccuggaaaaggagaucuguccgaaagcggcuggauacagggacugguccaagccccagugccagauuacagguuuugccccuuucucuaaagauaacucgauccggcuaucagcaagcggcgacauaugggugacccgcgaaccauaugucaguugugggcucggaaagugcuaccaauuugcccugggccaggguacuacacuugauaaucgacauuccaacgggaccucucacgaccguacgccccauagaacucuguugaugaaugagcucggagugccuuuccaccuggcuaccaagcagguuuguauugcauggagcuccucaaguugccacgauggcagggccuggcugcaugugugugucacaggcgacgaucggaacgcuacugccagcaucauuuaugacgggauccucguggauucuaucggauccuggagcaaaaauauuuuacgcacccaggagucagaaugcguauguauaaacgguacaugcaccguugugaugacggacggcagugcgucugggaaggcagauacuagaauccuguuuauuagggagggaaaaaucguccacauauccccacuuagcggcucggcccaacauguggaagagugcucuuguuacccccaguauccugaggugcggugcgucugucgcgacaauuggcgagguuccaacagaccaguuuuguacauuaacauggcugauuauucaaucgacaguggguacgugugcagcggacugguaggcgacacaccgaggaaugaugacaucuccucuagcucaaacuguaaggaucccaauaacgaacggggcgccccuggggugaaaggaugggcauucgacagugguaaugaucuauggaugggccguaccauugagaaggaaucccgcagcggguacgagacuuuuagagucaucggaggcuggaacacagcuaauucuaagucacagaccaguaggcaagugauuguugacagcgauaacuccucugguuauucggggauauucagcguggaaggcaaauccugcaucaaucgguguuuuuacgucgagcucauucgaggacgcccaaaggagacgagagugugguggaccucaaacaguaucaucguauucugcggcacaucugggacuuauggaaccgguagcuggcccgacggcgccaauauuaacuuuaugccuauauga

SEQ ID NO: 151570 - RNA, 1410 nt, Artificial Sequence
  derived and/or modified CDS sequence (opt3) from neuraminidase__InfluenzaA__AGQ81728
augaaccccaaucagaagaucguggccauuggcagcgucucccugaccauagcuacaaugugccuccuuaugcaaaucgcacuguucgccacuacgaugaccuugcacuuuaaacagacagggucuacuaacucaagugacaaucaggcgguuccuuguggaccaauuaucauugagagaaacaucaccgaaauagugcauuuaaauagcacaacccuggagaaggaaacuugcccgaaauccgcugguuacaggaacuggucuaagccccagugucaaaucacaggcuucgccccuuuuucgaaagauaauucaauucggcuaagcgcagggggagacaucuggguaacccgcgagccauaugugaguugcggccucgguaaguguuaccaguucgcccuggggcagggaacgacucuugauaacaagcacuccaauggcaccacauaugaccgaacuccccaucguacccuguugaugaacgaacucggcgucccuuuucaccuggcuacaaaacaggugugcauugcauggucuagcuccucaugucaugaugggaaggccuggcugcacguuugcgugaccggagacgauaaaaaugcuacggccaguaucauauacgacgguauucucgucgauagcaucgcgucuugguccaagaacauuuuaagaacucaagagucagagugugugugcaucaauggcacauguaccguaguuaugacugacgggagcgcaaguggaagggccgauacacggauccuguucauucgcgaaggcaaaauagugcacaucucuccacuuuccgguagcgcucagcaugucgaggaaugcucgugcuaucccagauacccugaggugaggugugugugccgggacaacuggaaggggucuaaucgcccagucuuguauauuaacauggccgauuacuccaucgacucaaguuacguuuguagcggaauagugggcgacaccccgcgaaacgaugacagauccucuagcucaaauugcagggaucccaacaaugagauuggcgcaccugggguaaagggaugggcuuuugacagugguaacgauaucuggaugggccggacgaucgaaaaagacucccguagcggguaugagaccuuccgcgugauuggaggcuggucuacagccaauucaaagagucagaucaacagacaggucauuguggauagggacaauagcuccgguuacucugggauauuuucgguugaaggcaaaagcuguaucaaccggugcuucuauguggagcugauucgaggacgcccaaaggaaaauagagucugguggacuuccaacucaaucaucguguuuuguggcaccagugggacauacggaacugguucuuggcccgauggcgcgaauauuaaccuaaugccuauauga

SEQ ID NO: 151571 - RNA, 1410 nt, Artificial Sequence
  derived and/or modified CDS sequence (opt3) from neuraminidase__InfluenzaA__AGQ81729
augaaccccaaucagaagaucauugccauaggcagcgugucccugaccaucgcuacaauuugccuccuuaugcaaaucgcaauucuggucgccacuaugacguugcacucuaaacauggggaguguaccaacucaaguaauaaccaggcgguuccuugcggaccaaucauaaucgaaagaaaugugacagagauuguacacuuaaacagcacuacccuggaaaaggagaucuguccgaaagcugccgguuacagggacugguccaagccccagugccagauuacaggcuucgcaccuuuuucuaaagauaauucgauccggcuaucagccagcggggacauaugggugacccgcgaaccauaugucaguuguggacucggcaagugcuaccaauucgcucugggucaggggacuacacuugauaaccgacauuccaauggaaccucucacgaccguacgccccauagaacucuguugaugaacgagcucggcauuccuuuucaccuggcaaccaaacagguguguaucgccuggagcuccucaaguugccacgauggcaaggcuuggcugcauguuugugugacaggggacgauaggaaugccacugcgagcauuaucuaugacggaaugcucgucgauucuaucgguuccuggucaaagaacauuuuacggacccaggagagcgaaugcguguguauaaauggcacaugcaccguaguuaugacggacgggagugcaucuggaaaagccgauacucgcauccuguucauuagagagggcaagaucgugcacauauccccacuuuuggguagcgcucaacaugucgaagagugcucguguuacccccaguauccugaggugaggugcgugugucgggacaacuggcgcgggucuaaucgaccaguccuguacauuaacauggccgauuauuccguugacucaggauacgugugcaguggccuaguaggcgacacaccgagaaacgaugacaccagcuccucuagcaauuguaaagaucccaacaaugaaaggggagcaccuggggugaaggguugggcuuuugacucaggcaacgauaucuggauggggcggacuaucgagaaggacagucguuccggauacgaaacauuccgcgucauuggcgguuggaauaccgccaacagcaaaucucagacgucaagacaggugaucguugauagugacaauagcuccggguauucuggcauuuuuaguguggagggaaagagcugcauaaacagguguuucuacgucgaacucauccggggccgaccaaaagagacccgcgugugguggacauccaauucaauuaucguauuuugcgggacuucgggaaccuaugguacaggcucuuggcccgauggggcgaacaucaauuucaugccuauuuga

SEQ ID NO: 151572 - RNA, 1410 nt, Artificial Sequence
  derived and/or modified CDS sequence (opt3) from neuraminidase__InfluenzaA__AGQ81730
augaaccccaaucagaagaucauugccauaggcagcgugucccugaccaucgcuacaauuugccuccuuaugcaaaucgcaauucuggucacuacgaugaccuugcacuucaaacauaacgaguguaucaauucuucaaacaaucagaguguuccuugcgggccaauaaucauugaaagaaacgugacagagaucguacacuuaaauagcacuacccuggaaaaggagauuuguccgaaagccgcgggauacagggacugguccaagccccagugccagaucacagguuuugcuccuuucucuaaagauaacucgauacggcuaucagccagcggcgacauuugggugacccgcgaaccauaugucaguugugggcucggaaagugcuaccaauuugcacugggccaggguacuacacuugauaaucgacauuccaacgggaccucucacgaccguacgccccauagaacucuguugaugaaugagcucggagugccuuuccaccuggccagcaagcagguuuguaucgcuugguccucaaguagcugccacgauggcaaagcauggcugcaugugugugucaccggcgacgauaggaacgccacagcuucuauuaucuaugacgggaugcucguggauuccaucggaucauggagcaagaauauuuuacggacucaggagagugaaugcguauguauaaacgguaccugcacaguugugaugaccgacggcucugccuccggggaggcggauacgcgcauccuguuuauuagagaaggaaaaaucguccacauaagcccacuuucgggcucugcacaacauguggaggagugcuccuguuacccccaguauccugaagugaggugcgucugucgggacaauuggcgcgguucaaaccgaccaguuuuguacauuaacauggccgauuauaguaucgacagcggguacgugugcuccggacugguaggcgacacuccgagaaaugaugacaucucuagcucaaguaacuguaaggaucccaauaacgagaggggcgcuccuggggugaaaggaugggccuucgacuccgguaaugauauuuggaugggccggacaaucgaaaaggacagccguucuggguacgagaccuuucgcgucauuggaggcuggaacacugcaaauucaaagagucagacaagcagacaggugauaguugauuccgacaacucuucggguuauagcgggaucuucuccguggaaggcaaaucaugcauuaauagguguuuuuacgucgagcuaauccggggacgaccaaaggagacccgcgugugguggacgaguaacucuaucauuguauucugcggcaccagcgggacauauggaacugguuccuggcccgauggcgcuaauauaaacuuuauggccaucuga

SEQ ID NO: 151573 - RNA, 1410 nt, Artificial Sequence
  derived and/or modified CDS sequence (opt3) from neuraminidase__InfluenzaA__AGQ81731
augaaccccaaucagaagaucauugccauaggcagcgugucccugaccaucgcuacaauuugccuccuuaugcaaaucgcaauucuggucacuacgaugaccuugcacuucaaacauaacgaguguucuaauucaaguaacaaucaggccguuccuugcgggccaaucauaaucgaaagaaacauuacagagaucgugcacuuaaauagcacuacccuggaaaaggagauuuguccgaaaacagcgggauacagggacugguccaagccccagugccagaucaccgguuuugcuccuuucucuaaagauaacucgauacggcuaucagccagcggcgacauuuggguaacucgcgaaccauaugugaguuguggguuuggaaagugcuaccaauucgcacucggccaggguacaacccuggauaaucgacauuccaacgggacgucucacgaccguacuccccauagaacccuucugaugaaugaguugggagucccuuuucaccucgccacaaaacagguguguaucgcuuggagcuccucaaguugccacgauggcaaggcauggcugcauguuugugugacuggcgacgauaggaacgccaccgcuagcauuaucuaugacgggauccuggucgauucuauuggauccuggucaaagaauauacuccggacacaggagagcgaaugcguguguaucaacgguaccugcacgguaguuaugacugacggcagugccucugggaaagcggauacacgcauuuuauucaucagagagggaaagauagugcacauuuccccacugagcggcucggcacaacaugucgaagagugcucuuguuacccccaguauccugaggugaggugcgugugucgggacaauuggcgcgguuccaaccgaccaguccuuuacaucaacaugaccgauuauucaaucgacaguggguacguuugcagcggauuggugggcgacacuccgagaaaugaugacauuuccucuagcucaaacuguaaagaucccaauaacgaaaggggcgccccugggguaaagggaugggcuuuugacagugguaaugaucuguggaugggccggacaaucgagaaggaaucccguagcggguacgagaccuuccgcgugauuggaggcuggaacacggccaauucuaaaucacagaccaguagacaggucauaguggacagcgauaacuccucugguuauucggggaucuuuagcguugaaggcaaguccugcauuaauagguguuucuacguggagcuaauccggggacgaccaaaagagacacgcgucugguggacuucaaacaguaucauuguguuuugcggcaccucugggacauauggaacugguagcuggcccgacggcgcaaauauaaacuucauggcuaucuga

SEQ ID NO: 151574 - RNA, 1410 nt, Artificial Sequence
  derived and/or modified CDS sequence (opt3) from neuraminidase__InfluenzaA__AGQ81732
augaaccccaaucagaagaucauugccauaggcagcgugucccugaccaucgcuacaauuugccuccuuaugcaagucgcaauccugguuacuacgaugaccuugcacuucaaacauaacgaguguucuaauucaaguaacaaucaggccgugccuugcgggccaauuaucauagaaagaaacaucacagagauuguacacuuaaauagcacuacccuggaaaaggagaucuguccgaaagcggcuggauacagggacugguccaagccccagugccagauuacagguuuugccccuuucucuaaagauaacucgauccggcuaucagcaagcggcgacauaugggugacccgcgaaccauaugucaguugugggcucggaaagugcuaccaauuugcccugggccaggguacuacacuugauaaucgacauuccaacgggaccucucacgaccguacgccccauagaacucuguugaugaaugagcucggagugccuuuccaccuggcuaccaagcagguuuguauugcauggagcuccucaaguugccacgauggcaaagccuggcugcaugugugugucacaggcgacgauaggaacgcuacugccagcaucauuuaugacgggauccucguggauucuaucggauccuggucaaagaauauuuuacggacccaggagagcgaaugcguauguauaaacgguacaugcaccguugugaugacggacggcagugcgucugggaaagcagauacucgcauccuguuuauuagagagggaaagaucguccacauauccccacuuagcggcucggcccaacauguggaagagugcucuuguuacccccaguauccugaggugaggugcgucugucgggacaauuggcgcgguuccaaccgaccaguuuuguacauuaacauggcugauuauucaaucgacaguggguacgugugcagcggacugguaggcgacacaccgagaaaugaugacaucuccucuagcucaaacuguaaagaucccaauaacgaaaggggcgccccuggggugaagggaugggcauucgacagugguaaugaucuauggaugggccggaccauugagaaggaaucccguagcggguacgagacuuuucgcgucaucggaggcuggaacacagcuaauucuaaaucacagaccaguagacaggugauuguugacagcgauaacuccucugguuauucggggauauucagcguggaaggcaaguccugcaucaauagguguuuuuacgucgagcucauucggggacgaccaaaagagacgcgcgugugguggaccucaaacaguaucaucguauucugcggcacaucugggacuuauggaaccgguagcuggcccgacggcgccaauauuaacuuuaugccuauauga

SEQ ID NO: 151575 - RNA, 1410 nt, Artificial Sequence
  derived and/or modified CDS sequence (opt3) from neuraminidase__InfluenzaA__AGQ81733
augaaccccaaucagaagaucauugccauaggcagcgugucccugaccaucgcuacaauuugccuccuuaugcaaaucgcaauucuggucacuacgaugaccuugcacuucaaacauaacgaguguucuaauucaaguaacagccaggccguuccuugcgggccaaucauaaucgaaagaaaugugacagagauuguacacuuaaacuccacuacccuggaaaaggagaucuguccgaaagcggcugaauacagggacuggucuaagccccagugccagauuacaggauuugccccuuucucgaaagauaauucaauccggcuaagcgcaaguggugacauaugggugacccgcgagccauaugucuccuguggccucgggaagugcuaccaauuugcccugggacagggcacuacacuugauaaccgacauucuaaugguaccagccacgaccguacgccccauagaacucuguugaugaacgagcucggggugccuuuccaccuggcuaccaagcagguuuguauugcaugguccucaaguagcugccacgauggaaaagccuggcugcaugugugugucacaggcgacgauaggaaugcuacugccucuaucauuuaugacggcauccucguggauuccaucgggucauggagcaagaacauuuuacggacccaggaaagugagugcguauguauaaauggaacaugcaccguugugaugacggacgguucugcguccggcaaagcagauacucgcauccuguuuauuagagaagggaagaucguccacauaagcccacuuucgggaucugcccaacauguggaggagugcuccuguuacccccaguauccugaagugaggugcgucugucgggacaacuggcgcggcucaaaucgaccaguuuuguacauuaacauggcugauuauaguaucgacagcgguuacgugugcuccgggcugguaggagacacaccgagaaacgaugacaucucuagcucaaguaauuguaaagaucccaacaaugagaggggcgccccuggcgugaaggggugggcauucgacuccggaaacgaucuauggaugggucggaccauugaaaaggacagccguucuggcuacgagacuuuucgcgucaucgggggauggaauacagcuaacucaaaaagucagaccagcagacaggugauuguugauuccgacaauucuucgggcuauagcgguauauucuccguggaagggaagucaugcaucaacagguguuuuuacgucgagcucauucggggccgaccaaaagagacgcgcgugugguggaccaguaauucuaucaucguauucugcggaacaagcggcacuuaugggaccggauccuggcccgauggugccaacauuaauuuuaugccuauauga

SEQ ID NO: 151576 - RNA, 1410 nt, Artificial Sequence
  derived and/or modified CDS sequence (opt3) from neuraminidase__InfluenzaA__AGQ81734
augaaccccaaucagaagaucauugccauaggcagcgugucccugaccaucgcuacaauuugccuccuuaugcaaaucgcaauucuggucacuacgaugaccuugcacuucaaacauaacgaguacucuaauucaaguaacaaucaggccguuccuugugggccaaucauaaucgaaagaaacauuacagagaucgugcacuuaaauagcacuacccuggaaaaggagauuugcccgaaagcggcuggauauagggacugguccaagccccagugucagaucacagguuuugccccuuucucuaaagauaacucgauacggcuaucagcaagcggcgacauuuggguaacccgcgaaccauacgugaguugcgggcucggaaaguguuaucaauuugcccugggccaggguacuacacuugauaaucgacauuccaacgggaccucucacgaccguacgccccauagaacucuguugaugaaugagcucggagucccuuuccaccuggcuaccaaacaggugugcaucgcauggagcuccucaaguugucacgauggcaaggccuggcugcauguuugcgugacaggcgacgauaggaacgcuacugccagcauuaucuacgacgggauccucgucgauucuauuggauccuggucaaagaauauauuacggacccaggagagcaaaugugugugcaucaagcgcacauguaccguaguuaaaacggacgguagugcgucuggcaaggcagauacuaggauucuguuuaucagagaagggaagauagugcacauuuccccacuuagcggaucggcccaacaugucgaggaaugcucuugcuauccccaguacccugaggugcggugugugugccgcgacaacuggcgaggcuccaauagaccagucuuguauaucaacauggcugauuacucaaucgacagugguuacguuuguagcgggcuggugggagacacaccgaggaacgaugacauuuccucuagcucaaauugcaaagaucccaacaaugagcggggcgccccuggcguaaaggggugggcauucgacaguggaaacgaucuauggaugggucguaccaucgaaaaagagucccgcagcggcuaugaaacuuuuagagugauugggggauggaauacagcuaacucuaagucacagaccaguaggcaggucauaguggacagcgauaauuccucuggcuacucggguaucuucagcguugaggggaaauccuguauuaaccggugcuuuuauguggaacucauccgaggccgcccaaaggagacgagagucugguggaccucaaauaguaucauuguguucuguggaacaucuggcacuuacgggaccggaagcuggcccgacggugccaacauaaauuuuauggcgaucuga

SEQ ID NO: 151577 - RNA, 1410 nt, Artificial Sequence; identical to SEQ ID NO: 151575
  derived and/or modified CDS sequence (opt3) from neuraminidase__InfluenzaA__AGQ81735

SEQ ID NO: 151578 - RNA, 1410 nt, Artificial Sequence
  derived and/or modified CDS sequence (opt3) from neuraminidase__InfluenzaA__AGQ81736
augaaccccaaucagaagaucauugccauaggcagcgugucccugaccaucgcuacaauuugccuccuuaugcaaaucgcaauucuggucgccacuaugacguugcacucuaaacauggggaguguaccgacucaaguaacaaucaggcgguuccuugcggaccaaucauaaucgaaagaaacgugacagagauuguacacuuaaauagcacuacccuggaaaaggagaucuguccgaaagcugccgguuacaaggauugguccaaaccccagugccagauuacaggcuucgcaccuuuuucuaaggacaacucgaucaggcuaucagccagcggggauauaugggugacccgggaaccauaugucaguuguggacucggcaagugcuaccaauucgcucugggucaggggacuacacuugacaaucgccauuccaacggaaccucucacgaucgaacgccccaucguacucuguugaugaaugagcucggcgugccuuuucaccuggcaaccaaacagguuuguauugccuggagcuccucaaguugccacgacggcaaggcuuggcugcaugugugugucacaggggaugacagaaacgccacugcgagcaucauuuaugauggaaugcucguggacucuaucgguuccuggagcaaaaauaucuuaaggacccaggagucagaaugcguauguauuaacggcacaugcaccguugugaugacggaugggagugcaucuggaaaggccgacacucggauacuguucauccgcgagggcaaaauugcucacaucuccccacuuagcgguucggcccaacaugucgaagagugcucuuguuacccccaguauccugaggugagaugcguguguagggauaauuggcggggguccaaccgcccagucuuguacauaaauauggcagacuauucaguugacaguggauacgugugcagcggccugguaggcgauacaccgcgaaacgacgauaccuccucuagcucaaacuguaaggaccccaauaacgaaagaggggcuccuggagugaaggguugggccuuugauaguggcaaugacauuuggauggggaggacuaucgagaaagauucccggagcggauacgaaacauuccgugucaucggcgguuggaacaccgccaauucuaagucacagacgagucgccaggugauuguugacagcgauaacuccucuggguauucgggcaucuuuagcguggagggaaaauccugcauuaauagauguuucuacgucgaacuaauaaggggccggccaaaggagacccgagugugguggacaucaaacaguaucauuguauuuugcgggacuucuggaaccuaugguacaggcagcuggcccgacggggcgaauaucaacuucaugccuaucuga

SEQ ID NO: 151579 - RNA, 1410 nt, Artificial Sequence
  derived and/or modified CDS sequence (opt3) from neuraminidase__InfluenzaA__AGQ81737
augaaccccaaucagaagaucauugccauaggcagcgugucccugaccaucgcuacaauuugccuccuuaugcaaaucgcaauucuggucacuacgaugaccuugcacuucaaacauaacgaguguucuaauucaaguaacaaucaggccguuccuugcgggccaaucauaaucgaaagaaacauuacagagaucgugcacuuaaauagcacuacccuggaaaaggagauuuguccgaaagcggcuggauacagggacugguccaagccccagugccagaucacagguuuugccccuuucucuaaagauaacucgauacggcuaucagcaagcggcgacauuuggguaacccgcgaaccauaugugaguugugggcucggaaagugcuaccaauuugcccugggccaggguacuacacuugauaaucgacauuccaacgggaccucucacgaccguacgccccauagaacucuguugaugaaugagcucggagucccuuuccaccuggcuaccaaacagguguguaucgcauggagcuccucaaguugccacgauggcaaggccuggcugcauguuugugugacaggcgacgauaggaacgcuacugccagcauuaucuaugacgggauccucgucgauucuauuggauccuggucaaagaauauauuacggacccaggagagcgaaugcguguguaucaacgguacaugcaccguaguuaugacggacggcagugcgucugggaaagcagauacucgcauucuguuuaucagagagggaaagauagugcacauuuccccacuuagcggcucggcccaacaugucgaagagugcucuuguuacccccaguauccugaggugaggugcgugugucgggacaauuggcgcgguuccaaccgaccagucuuguacaucaacauggcugauuauucaaucgacaguggguacguuugcagcggacuggugggcgacacaccgagaaaugaugacauuuccucuagcucaaacuguaaagaucccaauaacgaaaggggcgccccugggguaaagggaugggcauucgacagugguaaugaucuauggaugggccggaccaucgagaaggaaucccguagcggguacgagacuuuucgcgugauuggaggcuggaacacagcuaauucuaaaucacagaccaguagacaggucauaguggacagcgauaacuccucugguuauucggggaucuucagcguugaaggcaaguccugcauuaauagguguuuuuacguggagcucauccggggacgaccaaaagagacgcgcgucugguggaccucaaacaguaucauuguguucugcggcacaucugggacuuauggaaccgguagcuggcccgacggcgccaauauaaacuuuauggcgaucuga

SEQ ID NO: 151580 - RNA, 1410 nt, Artificial Sequence
  derived and/or modified CDS sequence (opt3) from neuraminidase__InfluenzaA__AGQ81738
augaaccccaaucagaagaucauugccauaggcagcgugucccugaccaucgcuacaauuugccuccuuaugcaagucgcaauccugguuacuacgaugaccuugcacuucaaacauaacgaguguucuaauucaaguaacaaucaggccgugccuugcgggccaauuaucauagaaagaaacaucacagagauuguacacuuaaauagcacuacccuggaaaaggagaucuguccgaaagcggcuggauacagggacugguccaagccccagugccagauuacagguuuugccccuuucucuaaagauaacucgauccggcuaucagcaagcggcgacauaugggugacccgcgaaccauaugucaguugugggcucggaaagugcuaccaauuugcccugggccaggguacuacacuugauaaucgacauuccaacgggaccucucacgaccguacgccccauagaacucuguugaugaaugagcucggagugccuuuccaccuggcuaccaagcagguuuguauugcauggagcuccucaaguugccacgauggcaaagccuggcugcaugugugugucacaggcgacgauaggaacgcuacugccagcaucauuuaugacgggauccucguggauucuaucggauccuggucaaagaauauuuuacggacccaggagagcgaaugcguauguauaaacgguacaugcaccguugugaugacggacggcagugcgucugggaaagcagauacucgcauccuguuuauuagagagggaaagaucauacacauuuccccacuuagcggcucggcccaacaugucgaagagugcucuuguuacccccaguauccugaggugaggugcgugugucgggacaauuggcgcgguuccaaccgaccagucuuguacaucaacauggcugauuauucaaucgacaguggguacguuugcagcggacuggugggcgacacaccgagaaaugaugacauuuccucuagcucaaacuguaaagaucccaauaacgaaaggggcgccccugggguaaagggaugggcauucgacagugguaaugaucuauggaugggccggaccaucgagaaggaaucccguagcggguacgagacuuuucgcgugauuggaggcuggaacacagcuaauucuaaaucacagaccaguagacaggucauaguggacagcgauaacuccucugguuauucggggaucuucagcguugaaggcaaguccugcauuaauagguguuuuuacguggagcucauccggggacgaccaaaagagacgcgcgucugguggaccucaaacaguaucauuguguucugcggcacaucugggacuuauggaaccgguagcuggcccgacggcgccaauauaaacuuuaugccuaucuga

SEQ ID NO: 151581 - RNA, 1410 nt, Artificial Sequence
  derived and/or modified CDS sequence (opt3) from neuraminidase__InfluenzaA__AGQ81739
augaaccccaaucagaagaucauugccauaggcagcgugucccugaccaucgcuacaauuugccuccuuaugcaaaucgcaauucuggucacuacgaugaccuugcacuucaaacaugacgaguguacaaacucuucaaauaaccaggccguuccuugcgaaccaaucauaaucgagagaaaugugacugaaauuguacacaucaacaguaccauuuuagagaaggaaaucuguccgaaagcggcuggguacaggaauuggagcaagccccagugccagauaacaggauuugccccuuucuccaaagauaacucuauucggcugucggcaucaggugacaucugggugacccgcgagccauaugucagcuguggccuagggaagugcuaccaauuugcccucggacagggcacuacacuggauaaucgacauaguaacgguacccuuaaugaccguacgccccacagaacucuguugaugaacgagcucggggugccuuuccaucuggcuaccaagcagguuuguauugcaugguccucuagcuccugccacgauggaaaagccuggcugcacgugugugucacaggcgacgauaggaaugcuacugccucaaucaucuaugacgauaugcucguggacaguauuggcagcuggucuaagaacauauuacggacccaggaauccgagugcguauguaucaaugggacaugcaccguugugaugacggauggaucagcgagcgguaaagcagacacucgcauucuguuuaucagagaaggcaagauaguccauauuaguccacuuucuggguccgcccaacacguggaggagugcagcuguuacccccaguauccugaagugaggugcgucugucgggauaacuggcgcggaucgaaccgaccaguuuuguacaucaauauggcugacuauucuaucgacuccggcuacgugugcucaggucugguaggggauacaccgagaaacgacgauauuaguagcuccucuaauuguaaagaccccaacaaugagaggggagccccuggcgugaagggcugggcauucgauagcgggaacgacaucuggaugggacggaccauugaaaaggauucacguagugguuacgagacuuuucgcgucauaggcggguggaauacagcuaacuccaaaagccagaccucuagacaggugaucguugacucagauaauaguagcggauauuccggcauuuucucuguggaagguaagucgugcaucaacagguguuuuuacgucgagcuaauccgggggcgaccaaaagagacgcgcgugugguggaccagcaauuccauuauaguauucugcggcacaucaggaacuuauggcaccgggaguuggcccgacggagccaacaucaauuuuauggcgauuuga

SEQ ID NO: 151582 - RNA, 1410 nt, Artificial Sequence
  derived and/or modified CDS sequence (opt3) from neuraminidase__InfluenzaA__AGQ81740
augaaccccaaucagaagaucguggccauuggcagcgucucccugaccauagcuacaaucugccuccuuaugcaaauugcaauccugguuacuacgaugaccuugcacuucaaacauggggaguguacaaacucuucaaauaaccaggccgugccuugcggaccaauuaucauagaaagaaauaucacugagauuguacacuuaaacaguaccacacuggaaaaggagaucuguccgaaagcggcugguuacagggacuggagcaagccccagugccagauuaccggcuuugccccuuucuccaaagauaauucuauccggcuaucggcaucaggggacauaugggugacucgcgaaccauaugucagcuguggacucggcaagugcuaccaauuugcccugggucaggggacaacccuugauaaccgacauaguaauggaacgucccacgaccguacuccccauagaacccuguugaugaacgagcucggcgugccuuuccaccuggcuacaaagcagguuuguauugcauggucuagcuccucaugccacgauggcaaagccuggcugcaugugugugucacuggggacgauaggaaugcuaccgccaguaucauuuauaacggaauccucguggacagcaucgguucuugguccaagaauauuuuacggacacaggagucagaaugcguauguauaaacgggaccugcacgguugugaugacugaugggagcgcgaguggaaaagcagacacacgcauccuguuuauuagagagggcaagaucguccacauaucuccacuuuccgguagcgcccaacauguggaagagugcucguguuacccccaguauccugaggugaggugcgucugucgggauaauuggcgcgggucuaaccgaccaguuuuguacauuaacauggcugacuauuccguggauucaggauacguaugcaguggccuggugggcgacaccccgagaaaugacgauacuagcuccucuagcaacuguaaagaccccaauaacgaaaggggcgccccuggagucaaggguugggcauucgauucaggcaaugacaucuggauggggcggacaaucgagaaggaucuacguaguggauacgaaaccuuucgcgugauuggcgguuggaacacggcuaauuccaaaagccagaccucuagacagguuaucguggacucagauaacaguagcggguauuccggcauuuucucugucgagggaaagucgugcauaaauagguguuuuuacguggaacucauccggggccgaccaaaagagacacgcguaugguggacuagcaacuccauuaucguuuucugcgggaccucaggaacauaugguacuggcaguuggcccgacggggccaauaucaacuuuaugccuauuuga

SEQ ID NO: 151583 - RNA, 1410 nt, Artificial Sequence
  derived and/or modified CDS sequence (opt3) from neuraminidase__InfluenzaA__AGQ81741
augaaccccaaucagaagaucguggccauuggcagcgucucccugaccauagcuacaaucugccuccuuaugcaaauugcaauccugguuacuacgaugaccuugcacuucaaacauggggaguguacaaacucuucaaauaaccaggccgugccuugcggaccaauuaucauagaaagaaauaucacugagauuguacacuuaaacaguaccacacuggacaaggaaaucuguccgaaagcggcugguuacagggauuggagcaagccccagugccagauuaccggcuuugccccuuucuccaaagacaauucuauccggcuaucggcaucaggggauauaugggugacucgcgagccauaugucagcuguggacucggcaagugcuaccaauuugcccugggucaggggacaacccuugacaaccgacauaguaauggaacgucccacgaucguacuccccauagaacccuguugaugaacgaacucggcgugccuuuccaccuggcuacaaagcagguuuguauugcauggucuagcuccucaugccacgacggcaaagccuggcugcaugugugugucacuggggaugacaggaaugcuaccgccaguaucauuuaugauggaaugcucguggacagcaucgguucuugguccaagaacaucuuacggacacaggagucagagugcguauguauuaaugggaccugcacgguugugaugacugaugggagcgcgaguggaaaagcagacacacgcauacuguuuaucagagaaggcaagauuguccacaucucuccacuuuccgguagcgcccaacauguggaggaaugcucguguuacccccaguauccugaggugaggugcgucugucgggauaacuggcgcgggucuaaucgaccaguuuuguacauaaacauggcugacuauuccguggacucaggauacguaugcaguggccuggugggcgauaccccgagaaacgacgauacuagcuccucuagcaauuguaaagaccccaacaaugagaggggcgccccuggagucaaggguugggcauucgauucaggcaacgacauuuggauggggcggacaaucgaaaaggaucuacguaguggauacgagaccuuucgcgugaucggcgguuggaauacggcuaacuccaaaagccagaccucuagacagguuauuguggacucagauaauaguagcggguauuccggcaucuucucugucgaaggaaagucgugcauuaacagguguuuuuacguggagcucauacggggccgaccaaaagaaacacgcguaugguggacuagcaauuccaucauuguuuucugcgggaccucaggaacauaugguacuggcaguuggcccgacggggccaacaucaauuuuaugccuaucuga

SEQ ID NO: 151584 - RNA, 1410 nt, Artificial Sequence
  derived and/or modified CDS sequence (opt3) from neuraminidase__InfluenzaA__AGQ81742
augaaccccaaucagaagaucguggccauuggcagcgucucccugaccauagcuacaaucugccuccuuaugcaaauugcaauccugguuacuacgaugaccuugcacuucaaacauggggaguguacaaacucuucaaauaaccaggccgugccuugcggaccaauuaucauagaaagaaauaucacugagauuguacacuuaaacaguaccacacuggaaaaggagaucuguccgaaagcggcugaauacagggacuggagcaagccccagugccagauuaccgguuuugccccuuucuccaaagauaauucuauccggcuaucggcaucaggcgacauaugggugacucgcgagccauaugucagcugugggcucggaaagugcuaccaauuugcccugggccaggguacaacccuugauaaccgacauaguaaugggacgucccacgaccguacuccccauagaacccuguugaugaacgagcucggagugccuuuccaccuggcuacaaagcagguuuguauugcauggucuagcuccucaugccacgauggcaaagccuggcugcaugugugugucacuggcgacgauaggaaugcuaccgccaguaucauuuaugacgggaugcucguggauagcaucggaucuugguccaagaacaucuuacggacacaggaaucagagugcguauguauuaaugguaccugcacgguugugaugacugacggcagcgcgagugggaaagcagauacacgcauacuguuuaucagagaaggaaagauuguccacaucucuccacuuuccggcagcgcccaacauguggaggagugcucguguuacccccaguauccugaagugaggugcgucugucgggacaacuggcgcgguucuaaucgaccaguuuuguacauaaacauggcugauuauuccguggacucaggguacguaugcaguggacuggugggcgacaccccgagaaacgaugacacuagcuccucuagcaauuguaaagaucccaacaaugagaggggcgccccuggggucaagggaugggcauucgacucagguaacgauauuuggaugggccggacaaucgaaaaggaccuacguaguggguacgagaccuuucgcgugaucggaggcuggaauacggcuaacuccaaaagccagaccucuagacagguuauuguggauucagacaauaguagcgguuauuccgggaucuucucugucgaaggcaagucgugcauuaacagguguuuuuacguggagcucauacggggacgaccaaaagagacacgcguaugguggacuagcaauuccaucauuguuuucugcggcaccucagggacauauggaacugguaguuggcccgauggcgccaacaucaauuuuaugccuaucuga

SEQ ID NO: 151585 - RNA, 1410 nt, Artificial Sequence
  derived and/or modified CDS sequence (opt3) from neuraminidase__InfluenzaA__AGQ81744
augaaccccaaucagaagaucauugccauaggcagcgugucccugaccaucgcuacaauuugccuccuuaugcaaaucgcaauucuggucacuacgaugaccuugcacuucagacaugacgaguguacaaacucuucaaauaaccaggccguuccuugcgggccaaucauaaucgaaaggaaugugacugagauuguacacuuaaacaguaccacacuggaaaaagagaucuguccgaaggcggcugaauaccgggauuggagcaaaccccagugccagauuaccggauuugugccuuucuccaaggacaauucuauccgccuaucggccgguggcgauauaugggucacucgagagccauaugugucaugugggcucggaaaaugcuaccaauuugcacugggccaggguacaacccuugacaaccgucauagcaaugggacgagucacgauagaacuccccauaggacccuguugaugaacgagcucggaguuccuuuccaccuggccacaaaacagguguguauugcuugguccucuagcuccugccacgacggcaaggcauggcugcaugucugugugacuggcgaugaccggaaugccaccgcuucaaucauuuaugaugggaugcucguagacaguaucggaagcuggucuaagaacaucuuacgcacacaggaauccgagugcguuuguauuaaugguaccugcacgguggucaugacugauggcucagccagcgggaaggcggacacaagaauacuguuuaucagggaaggaaaaauugugcacaucaguccacuuucuggcuccgcacaacauguggaggagugcagcuguuacccccaguauccugaaguccggugcguuugucgcgauaacuggcgagguucgaauagaccaguguuguacauaaacguagccgacuauucuguggacuccggguacgucugcucaggacuggugggcgauaccccgaggaacgacgauauuaguagcuccucuaauuguaaggaccccaacaaugagcggggcgcuccugggguuaaaggaugggccuucgauagcgguaacgacaucuggaugggccguacuaucgaaaaggauucacgcaguggguacgagacauuuagagugauuggaggcuggaauaccgcaaacuccaagagccagacgucuaggcaggucaucguggacucagauaauccaagugguuauagcgggauuuucuccguagaaggcaaaucuugcauaaaccgguguuuuuacguugagcuaauccgaggacgccccaaggagaccagagugugguggacaucgaauagcauuaucgucuucugcggcacuuccgggaccuauggaacagguucauggccugacggcgcuaacaucaauuuuaugccaauuuga

SEQ ID NO: 151586 - RNA, 1410 nt, Artificial Sequence
  derived and/or modified CDS sequence (opt3) from neuraminidase__InfluenzaA__AGQ81746
augaaccccaaucagaagaucauugccauaggcagcgugucccugaccaucgcuacaauuugccuccuuaugcaaaucgcaauucuggucacuacgaugaccuugcacuucaaacauaacgaguguucuaauucaaguaacagccaggccguuccuugcgggccaaucauaaucgaaagaaaugugacagagauuguacacuuaaacuccacuacccuggaaaaggagaucuguccgaaagcggcugaauacaggggauggucuaagccccagugccagauuacagguuuugccccuuucucgaaagacaauucaauccggcuaagcgcaaguggcgauauaugggugacccgcgagccauaugucuccugugaccucgggaagugcuaccaauuugcccugggacagggcacuacacuugauaaccgacauucuaaugguaccagccacgaccguacgccccauagaacucuguugaugaacgagcucggggugccuuuccaccuggcuaccaagcagguuuguauugcaugguccucaaguagcugccacgauggaaaagccuggcugcaugugugugucacaggcgacgauaggaaugcuacugccucuaucauuuaugacggcauccucguggauuccaucgggucauggagcaagaacauuuuacggacccaggaaagugagugcguauguauaaauggaacaugcaccguugugaugacggacgguucugcguccggcaaagcagauacucgcauccuguuuauuagagaagggaagaucguccacauaagcccacuuucgggaucugcccaacauguggaggagugcuccuguuacccccaguauccugaagugaggugcgucugucgggacaacuggcgcggcucaaaucgaccaguuuuguacauuaacauggcugauuauaguaucgacagcgguuacgugugcuccgggcugguaggagacacaccgagaaacgaugacaucucuagcucaaguaauuguaaagaucccaacaaugagaggggcgccccuggcgugaaggggugggcauucgacuccggaaacgaucuauggaugggucggaccauugaaaaggacagccguucuggcuacgagacuuuucgcgucaucgggggauggaauacagcuaacucaaaaagucagaccagcagacaggugauuguugauuccgacaauucuucgggcuauagcgguauauucuccguggaagggaagucaugcaucaacagguguuuuuacgucgagcucauucggggccgaccaaaagagacgcgcgugugguggaccaguaauucuaucaucguauucugcggaacaagcggcacuuaugggaccggauccuggcccgauggugccaacauuaauuuuaugccuauauga

SEQ ID NO: 151587 - RNA, 1410 nt, Artificial Sequence
  derived and/or modified CDS sequence (opt3) from neuraminidase__InfluenzaA__AGQ81747
augaaccccaaucagaagaucguggccauuggcagcgucucccugaccauagcuacaaucugccuccuuaugcaaauugcaauccugguuacuacgaugaccuugcacuucaaacauggggaguguacaaacucuucaaauaaccaggccgugccuugcggaccaauuaucauagaaagaaauaucacugagauuguacacuuaaacaguaccacacuggaaaaggagaucuguccgaaagcggcugguuacagggacuggagcaagccccagugccagauuaccggcuuugccccuuucuccaaagauaauucuauccggcuaucggcaucaggggacauaugggugacucgcgaaccauaugucagcuguggacucggcaagugcuaccaauuugcccugggucaggggacaacccuugauaaccgacauaguaauggaacgucccacgaccguacuccccauagaacccuguugaugaacgagcucggcgugccuuuccaccuggcuacaaagcagguuuguauugcauggucuagcuccucaugccacgauggcaaagccuggcugcaugugugugucacuggggacgauaggaaugcuaccgccaguaucauuuaugacggaaugcucguggauagcaucgguucuugguccaagaacaucuuacggacacaggagucagaaugcguauguauuaaugggaccugcacgguugugaugacugacgggagcgcgaguggaaaagcagauacacgcauacuguuuaucagagagggcaagauuguccacaucucuccacuuuccgguagcgcccaacauguggaagagugcucguguuacccccaguauccugaggugaggugcgucugucgggacaacuggcgcgggucuaaucgaccaguuuuguacauaaacauggcugauuauuccguggacucaggauacguaugcaguggccuggugggcgacaccccgagaaacgaugacacuagcuccucuagcaauuguaaagaucccaacaaugaaaggggcgccccuggagucaaggguugggcauucgacucaggcaacgauauuuggauggggcggacaaucgagaaggaccuacguaguggauacgaaaccuuucgcgugaucggcgguuggaauacggcuaacuccaaaagccagaccucuagacagguuauuguggauucagacaauaguagcggguauuccggcaucuucucugucgagggaaagucgugcauuaacagguguuuuuacguggaacucauacggggccgaccaaaagagacacgcguaugguggacuagcaauuccaucauuguuuucugcgggaccucaggaacauaugguacuggcaguuggcccgauggggccaacaucaauuuuaugccuaucuga

SEQ ID NO: 151588 - RNA, 1401 nt, Artificial Sequence
  derived and/or modified CDS sequence (opt3) from neuraminidase__InfluenzaA__AGQ81749
augaaccccaaucagaagaucauugccauaggcagcgugucccugaccacagcuaucauuugcuuccucaugcaaaucgcaauucuuacuacgaccaugacacugcacuuuaaacagaacgaguguucuaauccuucaaacaaucaggucguuccaugcgaaccgaucauaaucgagagaaacacugugcauuugaauaguaccacaauugaaaaggagaucuguagcaaaguagccgaauacaagaacugguccaaaccccagugccaaauuaccggguucgcgccuuuuucuaaggacaauucgaucagguuaucagcuggaggugauauaugggugacucgggagccauaugucagcuguagucugggcaagugcuaccaguucgcccuagggcagggaacaacccucaaaaacaagcacuccaauggcacgacucaugaccgcauuccccaccgaacccugcuuaugaacgagcugggugugccuuuucauuuggggacaaaacagguuuguaucgcauggucuagcuccucaugcuaugauggaaaggccuggcuccacauuugugugacuggcgacgauaaaaaugcuaccgcaaguaucaucuacgacggcaugcuggccgauagcauugggucuugguccaagaacauacugcguacacaagaaucagagugcgucuguaucaauggaaccugcgcugugguaaugacggacgguagcgccaguggcaaggcggauacuaggauucucuucaucagagaagggcggauaauuaacaucucuccauuauccggaagcgcacagcacguugaggagugcucguguuauccccgcuacccugaagugagaugcgucuguagggacaacuggaaaggcucuaaucggccagugcuguauaucaacauggccgauuacuccguggagucaaguuacgucugcagcggucuuguuggggacacaccgcgcaaugaugacuccucuagcucaaguaacugucgagaccccaauaacgaaagaggagcuccuggcgugaagggcugggccuuugaugacgggaaugauguauggaugggaaggaccauuaaaaaggacucccggagcgguuaugagacuuuccgugugaucaacggcuggacaaccgcaaauucuaaaucacagauuaaccgccaggucauaguggauagugacaauuggagcggguacuccggaaucuuuucuguugaaggcaagaacugcauuaauagauguuucuauguggaguugaucaggggucggccacaagagcccaaagucugguggacgucgaacagcaucauugcuuuuugcgggaccuccggcacauacggaacuggcucauggccugauggggccaauauaaacuucaugccaaucuga

SEQ ID NO: 151589 - RNA, 1401 nt, Artificial Sequence; identical to SEQ ID NO: 151588
  derived and/or modified CDS sequence (opt3) from neuraminidase__InfluenzaA__AGQ81750

SEQ ID NO: 151590 - RNA, 1410 nt, Artificial Sequence
  derived and/or modified CDS sequence (opt3) from neuraminidase__InfluenzaA__AGQ81751
augaaccccaaucagaagaucauugccauaggcagcgugucccugaccaucgcuacaauuugccuccuuaugcaaaucgcaauucuggucacuacgaugaccuuguacuucaaacacaacgaguguucuaauucaaguaacaaucaggccguuccuugcgggccaaucauaaucgaaagaaacauuacagagaucgugcauuuaaauagcacuacccuggaaaaggagauuuguccgaaagcggcuggauauagggacugguccaagccccagugccagaucacagguuuugccccuuucucuaaagauaacucgauacggcuaucagcaagcggcgacauuuggguaacccgcgaaccauacgugaguugugggcucggaaagugcuaucaauuugcccugggccaggguacuacacuugauaaucgacacuccaacgggaccucucaugaccguacgccccacagaacucuguugaugaaugagcucggagucccuuuccaucuggcuaccaaacagguguguaucgcauggagcuccucaaguugccacgauggcaaggccuggcugcacguuugugugacaggcgacgauaggaacgcuacugccagcauuaucuacgacgggauccucgucgauucuauuggauccuggucaaagaauauauuacggacccaggagagcgaaugcguguguaucaacgguacaugcaccguaguuaugacggacggcagugcgucugggaaagcagauacucgcauucuguuuaucagagagggaaagauagugcauauuuccccacuuagcggcucggcccaacacgucgaagagugcucuuguuauccccaguacccugaggugaggugcgugugucgggacaauuggcgcgguuccaaccgaccagucuuguauaucaacauggcugauuacucaaucgacaguggguacguuugcagcggacuggugggcgacacaccgagaaaugaugacauuuccucuagcucaaacuguaaagaucccaauaacgaaaggggcgccccugggguaaagggaugggcauucgacagugguaaugaucuauggaugggccggaccaucgagaaggaaucccguagcggguaugagacuuuucgcgugauuggaggcuggaacacagcuaauucuaaaucacagaccaguagacaggucauaguggacagcgauaacuccucugguuacucggggaucuucagcguugaaggcaaguccugcauuaauagguguuuuuauguggagcucauccggggacgaccaaaagagacgcgcgucugguggaccucaaacaguaucauuguguucugcggcacaucugggacuuacggaaccgguagcuggcccgacggcgccaauauaaacuuuaugccuaucuga

SEQ ID NO: 151591 - RNA, 1410 nt, Artificial Sequence
  derived and/or modified CDS sequence (opt3) from neuraminidase__InfluenzaA__AGQ81753
augaaccccaaucagaagaucguggccauuggcagcgucucccugaccauagcuacaaucugccuccuuaugcaaauugcaauccugguuacuacgaugaccuugcacuucaaacauggggaguguacaaacucuucaaauaaccaggccgugccuugcggaccaauuaucauagaaagaaauaucacugguauuguacacuuaaacaguaccacacuggagaaggaaaucuguccgaaagcggcuggcuacagggacuggagcaagccccagugccagauuaccggguuugccccuuucuccaaagauaauucuauccggcuaucggcaucaggagacauaugggugacucgcgagccauaugucagcuguggccucgguaagugcuaccaauuugcccuggggcagggaacaacccuugauaaccgacauaguaauggcacgucccacgaccguacuccccauagaacccuguugaugaacgaacucggcgugccuuuccaccuggcuacaaagcagguuuguauugcauggucuagcuccucaugccacgaugggaaagccuggcugcauaucugugugacuggagacgauaggaaugcuaccgccaguauuaucuaugacgguaugcucgucgauagcaucggcucuugguccaagaacauuuuacggacacaggagucagagugcguguguauaaaugggaccugcacgguaguuaugacugacggaagcgcgaguggcaaagcagauacacgcauccuguuuauuagagaagguaagaucgugcacauaucuccacuuuccgggagcgcccaacaugucgaggaaugcucguguuacccccaguauccugaggugaggugcgugugucgggacaacuggcgcggaucuaaucgaccagucuuguacauuaacauggcugauuauuccguugacucaggcuacgugugcaguggccugguaggggacaccccgagaaacgaugacacuagcuccucuagcaauuguaaagaucccaacaaugagaggggagccccuggugugaagggcugggcauucgacucagggaacgauaucuggaugggacggacaaucgaaaaggaccuacguaguggcuacgagaccuuucgcgucauugguggguggaauacggcuaacuccaaaagccagaccaauagacaggugaucguugauucugacaacucaaguggcuauagcggaauuuucuccguggaaggcaagucuugcauaaauagguguuuuuacgucgagcucauccgggggcgaccaaaagaaacacgcgugugguggacuucgaacagcauuaucguauucugcggaaccuccgguacauauggcacugggucauggcccgauggagccaauaucaacuuuaugccuauuuga

SEQ ID NO: 151592 - RNA, 1410 nt, Artificial Sequence; identical to SEQ ID NO: 151591
  derived and/or modified CDS sequence (opt3) from neuraminidase__InfluenzaA__AGQ81754

SEQ ID NO: 151593 - RNA, 1410 nt, Artificial Sequence
  derived and/or modified CDS sequence (opt3) from neuraminidase__InfluenzaA__AGQ81756
augaaccccaaucagaagaucauugccauaggcagcaucucccugaccauugcuacaaucugccuccuuauucaaaucgcaauacuggugacuacgaugaccuugcacuucaaacauggggaguguacaaacucuucaaauaaccaggccgucccuugcggaccaaucauuaucgaaagaaauguuacugagauugugcacuuaaacaguaccacacuggaaaaggagaucuguccgaaagcggcugguuacagggacuggagcaagccccagugccagauaaccggcuuugccccuuucuccaaagauaauucuauucggcuaucggcaucaggggacaucuggguaacucgcgaaccauaugugagcuguggacucggcaagugcuaccaauuugcccugggucaggggacaacccuugauaaccgacauaguaauggaacgucccacgaccguacuccccauagaacccuguugaugaacgagcucggcgucccuuuccaccuggcuacaaaacagguguguauugcauggucuagcuccucaugccacgauggcaaggccuggcugcauguuugugugacuggggacgauaggaaugcuaccgccaguaucaucuaugacggacucuuagucgauagcauugguucuugguccaagaacauacugcggacacaggagucagaaugcguguguaucaaugggaccugcacgguaguuaugacugacgggagcgcgaguggaaaagcagauacacgcauucuuuuuaucagagagggcaagauaauucacaucucuccauuguccgguagcgcccaacauguggaagagugcucguguuacccccaguauccugaggucaggugcgugugucgggacaacuggcgcgggucuaaucgaccagugcuguacaucaacauggcugauuauuccgucgacucaggauacguuugcaguggccuagugggcgacaccccgagaaacgaugacacuagcuccucuagcaauuguaaagaucccaacaaugaaaggggcgccccuggaguaaaggguugggcauucgacucaggcaacgauauuuggauggggcggacaaucgagaaggacagucguuccggauacgaaaccuuucgcgugauuggcgguuggaauacggcuaacagcaaaucucagaccucaagacaggucauaguggauagugacaauagcuccggguauucuggcaucuucucgguugagggaaagagcugcauuaacagguguuuuuacguggaacucauccggggccgaccaaaagagacacgcgucugguggacuuccaauucaaucauuguguucugcgggaccaguggaacauaugguacuggcucuuggcccgauggggccaacauaaauuuuaugccuaucuga

SEQ ID NO: 151594 - RNA, 1410 nt, Artificial Sequence
  derived and/or modified CDS sequence (opt3) from neuraminidase__InfluenzaA__AGQ81757
augaaccccaaucagaagaucauugccauaggcagcgugucccugaccaucgcuacaauuugccuccuuauccaaauugcaauccuggucacuacgaugaccuugcacuucaaacauggggaguguacaaacucuucaaauaaccaggccguuccuugcggaccaauaaucauugaaagaaaugugacugagaucguacacuuaaacaguaccacacuggaaaaggagauuuguccgaaagcggcugguuacagggacuggagcaagccccagugccagaucaccggcuuugccccuuucuccaaagauaauucuauacggcuaucggcaucaggggacauuugggugacucgcgaaccauaugucagcuguggacucggcaagugcuaccaauuugcccugggucaggggacaacccuugauaaccgacauaguaauggaacgucccacgaccguacuccccauagaacccuguugaugaacgagcucggcgugccuuuccaccuggcuacaaagcagguuuguaucgcauggucuagcuccucaugccacgauggcaaagccuggcugcaugugugugucacuggggacgauaggaaugcuaccgccaguauuaucuaugacggacucuuaguggauagcaucgguucuugguccaagaacauucugcggacacaggagucagaaugcguauguauaaaugggaccugcacgguugugaugacugacgggagcgcgaguggaaaagcagauacacgcauccuuuuuauuagagagggcaagaucauacacauuucuccauuguccgguagcgcccaacaugucgaagagugcucguguuacccccaguauccugaggugaggugcgugugucgggacaacuggcgcgggucuaaucgaccaguccuguacaucaacauggcugauuauuccguugacucaggauacgugugcaguggccuaguaggcgacaccccgagaaacgaugacacuagcuccucuagcaauuguaaagaucccaacaaugaaaggggcgccccuggagugaaggguugggcauucgacucaggcaacgauaucuggauggggcggacaauugagaaggacagucguuccggauacgaaaccuuucgcgucaucggcgguuggaauacggcuaacagcaaaucucagaccucaagacaggugauuguugauagugacaauagcuccggguauucuggcauauucucgguggagggaaagagcugcaucaacagguguuuuuacgucgaacucauucggggccgaccaaaagagacacgcgugugguggacuuccaauucaaucaucguauucugcgggaccaguggaacauaugguacuggcucuuggcccgauggggccaacauuaauuuuaugccuauauga

SEQ ID NO: 151595 - RNA, 1401 nt, Artificial Sequence
  derived and/or modified CDS sequence (opt3) from neuraminidase__InfluenzaA__AGQ81758
augaaccccaaucagaagaucauugccauaggcagcgugucccugaucauugcuaucauuugccuccuuaugcaaaucgcaauacugaccacaacuaugacguugcacuucagacagaacgaguguucuaauccuucaaacaaucaggucguuccaugcgaaccgaccaucauugagaggaacacagugcauuuaaauaguacuaccaucgaacgggagauuugucccaaaguagccgaauacaagaacuggagcaaaccucagugccaaaucacaggguuugcgccauucuccaaggacaauucuauacgccugucggcuggaggugauauuugggugacccgagagcccuaugucucauguagccuaggcaaaugcuaccaguuugcccucgggcagggaacuacacugaagaacaagcacaguaauggcaccacgcaugaccguacuccucacagaacccuucugaugaacgaguugggugugccauuccaucucgggacaaaacagguuuguaucgcaugguccucuagcuccugcuaugauggaaaggccuggcugcacauuugugugacuggcgacgaugaaaaugcuaccgcaucaaucaucuacgacggcaugcuggucgauaguauugggagcuggucuaaaaacauacucaggacacaagaguccgaaugcguguguaucaauggaaccugcgccguaguuaugacggacgguucagcuagcggcaaggccgauacucggguguuauuuauucgcgaggggaaaaucauaaacauuaguccccugucuggauccgcgcagcacgucgaggaaugcagcuguuauccuagauacccagaggugaggugcgugugucgggacaacuggaagggcucgaaucgcccgguccuuuauaucaacauggcagauuacucuaucgaauccucauacguuugcagugguuuggugggggacacaccccgaaaugaugacagcuccucuagcucaaacuguagagacccuaauaacgagaggggagccccaggcguaaagggcugggcuuucgaugacgggaaugauguguggaugggacggaccauuaaaaacgacagucguuccgguuaugaaacuuuucgcgucgugaauggcuggacaauggccaacagcaagucucagaucaauagacagguuauuguggauucagacaacuggaguggguacagcggaauauucuccgucgagggcaaaaagugcaucaauagguguuuuuauguggagcugauucggggucgaccccaagaaccucgcguaugguggaccucuaacucgaucaucguuuucugcgggacgagcggcaccuacggaacaggcuccuggccagauggggcaaauauuaacuuuaugcccauauga

SEQ ID NO: 151596 - RNA, 1401 nt, Artificial Sequence
  derived and/or modified CDS sequence (opt3) from neuraminidase__InfluenzaA__AGQ81759
augaaccccaaucagaagaucauugccauaggcagcgugucccugaccaucgcuauuaucugcuuccucauucaaaucgcaauacuuacaacuacgaugacccugcacuuuagacagucugaguguucaaacccuaguaauaaccaggucguuccaugcgaaccgaucauuaucgagaggaauacagugcauuugaacagcacuauuaucgaaaaagagauaugucccaagguagccgaauacaaaaauugguccaagccucagugccaaauuaccggguucgcgccauuuucuaaagacaacucgauccgguuaucagcuggaggugauauuugggugacacgcgagcccuaugucagcuguagucugggcaagugcuaccaguucgcccuagggcagggaaccacucucaagaauaaacacuccaacggcacaacccaugaccgaaucccucaccguacgcugcuuaugaaugagcugggugugccauuucauuuggggacuaagcagguuuguaucgcauggucuagcuccucaugccacgauggaaaagccuggcuccacauuugugugaccggcgacgauaagaacgcuacagcaaguauaaucuaugacggcaugcuggucgauagcauugggucuugguccaaaaauauccugagaacucaagaaucagagugcguguguauaaacggaaccugcgccguaguuaugacagacgguagcgcuaguggcaaggccgauaccaggauucucuucauccgggaagggaagaucauuaauaucucucccuuauccggaagcgcgcagcauguggaggagugcucguguuacccucgcuauccagaagucagaugcguguguagggacaacuggaaaggcucuaaccggccggugcuguacauuaauauggcagauuauuccauagagucaaguuacgucugcagcggucuuguuggggacacgccccgcgaugacgacuccucuagcucaaguaacugucgagauccuaauaacgaaagaggagccccaggcgugaagggcugggcuuuugacgaugggaaugacaucuggaugggaaggacuauuaaauccgauagccggucugguuacgagacauuccguguaaucaacggcuggaccacugccaauucaaagagucagaucaaccgccaggugauugucgacagcgauuccuggucuggguauucgggaauauuuagcguggaaggcaaaaauugcaucaacagauguuucuacguugaguugauuaggggucggccccgagagacacgcgugugguggaccuccaauucaaucauugucuuuugcgggacgaguggcaccuauggaacaggcucuuggccugacggggcaaacaucaauuucaugccaauauga

SEQ ID NO: 151597 - RNA, 1401 nt, Artificial Sequence
  derived and/or modified CDS sequence (opt3) from neuraminidase__InfluenzaA__AGQ81760
augaaccccaaucagaagaucauugccauaggcagcgugucccugaccaucgcuauuaucugcuuccucaugcaaauugcaauccuuacaacuacgaugacccugcacuuuagacagaacgaguguucuaauccuucaaacaaucaggucguuccaugcgaaccgauaaucauugagaggaacacagugcauuugaauaguacuaccaucgaaaaagagauuugucccaagguagccgaauacaaaaacuggagcaagccucagugccaaaucacaggguucgcgccauuuuccaaagacaauucuauacgguuaucggcuggaggugauauuugggugacccgcgagcccuaugucucauguagccugggcaagugcuaccaguucgcccuagggcagggaacuacacucaagaacaaacacaguaauggcaccacgcaugaccgaaucccucaccguacucugcuuaugaacgagcugggugugccauuucauuuggggaccaagcagguuuguauugcaugguccucuagcuccugccacgauggaaaagccuggcuccacaucugugugacaggcgacgauaagaaugcuacugcaucaaucauuuaugacggcaugcuggucgauaguauagggagcuggucuaaaaacauccugagaacccaagaauccgagugcguguguauuaauggaacaugcgccguaguuaugaccgacgguucagcuagcggcaaggccgauacgaggguccucuucauccgggaagggaagauaauuaacaucagucccuuaucuggauccgcgcagcauguggaggagugcagcuguuacccucgcuauccagaagugagaugcguguguagggacaacuggaaaggcucgaaucggccgguccuguacaucaacauggcagauuauucuauugaguccucauacguuugcaguggucuugugggggacacuccccgcgaugacgacagcuccucuagcucaaauugucgagauccuaacaaugaaagaggagccccaggcguaaagggcugggcuuuugacgaugggaacgacaucuggaugggaaggacaauuaaaagugauucccggagcgguuacgagaccuuccguguggucaauggcuggauaacugccaacucuaagucacagaucaaucgccaggugauuguugacagugauagcugguccggguauucuggaaucuuuucgguggaaggcaaaaacugcaucaauagauguuucuacgucgaguugauuaggggucggccccaagagacacgagugugguggaccagcaacuccauaaucguauuuugcgggacgucaggcaccuauggaacaggcaguuggccugacggggcaaauauuaacuucaugccaaucuga

SEQ ID NO: 151598 - RNA, 1401 nt, Artificial Sequence
  derived and/or modified CDS sequence (opt3) from neuraminidase__InfluenzaA__AGQ81761
augaaccccaaucagaagaucauugccauaggcagcgugucccugaccaucgcuauuaucugcuuccucaugcaaauugcaauccuuacaacuacgaugacccugcacuuuagacagaacgaguguucuaauccuucaaacaaucaggucguuccaugcgaaccgauaaucauugagaggaacacagugcauuugaauaguacuaccaucgaaaaagagauuugucccaagguagccgaauacaaaaacuggagcaagccucagugccaaaucacaggguucgcgccauuuuccaaagacaauucuauacgguuaucggcuggaggugauauuugggugacccgcgagcccuaugucucauguagccugggcaagugcuaccaguucgcccuagggcagggaacuacacucaagaacaaacacaguaauggcaccacgcaugaccgaaucccucaccguacucugcuuaugaacgagcugggugugccauuucauuuggggaccaagcagguuuguauugcaugguccucuagcuccugccacgauggaaaagccuggcuccacaucugugugacaggcgacgauaagaaugcuacugcaucaaucauuuaugacggcaugcuggucgauaguauagggagcuggucuaaaaacauccugagaacccaagaauccgagugcguguguauuaauggaacaugcgccguaguuaugaccgacgguucagcuagcggcaaggccgauacgaggauccucuucauaaaggaagggaaaauuaucaacaucagucccuuaucuggauccgcgcagcauguggaggagugcagcuguuacccucgguauccagaaguccgcugcguguguagagacaacuggaagggcucgaauaggccggugcuguacauuaacauggcagauuauucuaucgaguccucauacgucugcaguggucuuguuggggacacuccccgggaugacgacagcuccucuagcucaaauugucgcgauccuaacaaugaacgaggagccccaggcgugaaaggcugggcuuuugacgaugggaacgacauuuggaugggaagaacaauaaagagugauuccaggagcgguuacgagaccuuccggguagugaauggcuggacuacagccaacucuaaaucacagaucaaucgucaggucauuguggacagugauagcugguccggguauucuggaaucuuuucgguugaaggcaagaacugcaucaaucgcuguuucuacguggaguugauuagagguaggccccaagagacccgggucugguggacgagcaacuccauaaucguguuuugcgggaccucaggcacauauggaacuggcaguuggccugacggggcaaauauuaacuucaugccaaucuga

SEQ ID NO: 151599 - RNA, 1401 nt, Artificial Sequence
  derived and/or modified CDS sequence (opt3) from neuraminidase__InfluenzaA__AGQ81763
augaaccccaaucagaagaucauugccauaggcagcgugucccugaucauugcuaucauuugccuccuuaugcaaaucgcaauacugaccacaacuaugacguugcacuucagacagaacgaguguucuaauccuucaaacaaucaggucguuccaugcgaaccgaucauuaucgagaggaacaccgugcauuuaaauaguacaacuauugaacgggagaucugucccaaaguagccgaauacaagaacuggagcaaaccucagugccaaauaaccggguuugcgccauucuccaaggacaauucuauucgccugucggcuggaggugauaucugggugacacgagagcccuaugucucauguagccuaggcaaaugcuaccaguuugcccucgggcagggaaccacucugaagaacaagcacaguaauggcacaacccaugaccguacgccucacagaacucuucugaugaacgaguugggugugccauuccaucucgggaccaaacagguuuguauugcaugguccucuagcuccugcuaugauggaaaggccuggcugcacaucugugugacaggcgacgauaaaaaugcuacugcaucaaucauuuacgacggcaugcuggucgauaguauagggagcuggucuaagaacauccucaggacccaagaauccgagugcguguguauuaauggaacaugcgccguaguuaugaccgacgguucagcuagcggcaaagccgauacgcggguguuauuuauccgcgaagggaagauaauuaacaucaguccccugucuggauccgcgcagcacgucgaggagugcagcuguuauccuagauacccagaagugaggugcgugugucgggacaacuggaagggcucgaaucgcccgguccuuuauaucaacauggcagauuacucuauugaguccucauacguuugcagugguuuggugggggacacuccccgaaaugaugacagcuccucuagcucaaacuguagagacccuaauaacgaaaggggagccccaggcguaaaaggcugggcuuucgaugacgggaaugauguguggaugggacggacaaucaagaacgguagucguuccggcuaugagaccuuucgcgucgugaauggguggacuauggccaacagcaaaucucagauuaauagacagguuauaguggacucagauaacuggaguggauacagcggcaucuucuccgucgaagguaagaaaugcauuaauagguguuuuuauguggagcugauccgggggcgaccccaagagccucgcguaugguggacaucuaacucgaucauuguuuucugcggcaccagcggaacguacggcaccggguccuggccagacggagcaaauauaaacuuuaugcccaucuga

SEQ ID NO: 151600 - RNA, 1401 nt, Artificial Sequence
  derived and/or modified CDS sequence (opt3) from neuraminidase__InfluenzaA__AGQ81766
augaaccccaaucagaagaucauugccauaggcagcgugucccugaccaucgcuauuaucugcuuccucaugcaaauugcaauccuuacaacuacgaugacccugcacuuuagacagaacgaguguucuaauccuucaaacaaucaggucguuccaugcgaaccgauaaucauugagaggaacacagugcauuugaauaguacuaccaucgaaaaagagauuugucccaagguagccgaauacaaaaacuggagcaagccucagugccaaaucacaggguucgcgccauuuuccaaagacaauucuauacgguuaucggcuggaggugauauuugggugacccgcgagcccuaugucucauguagccugggcaagugcuaccaguucgcccuagggcagggaacuacacucaagaacaaacacaguaauggcaccacgcaugaccgaaucccucaccguacucugcuuaugaacgagcugggugugccauuucauuuggggaccaagcagguuuguauugcaugguccucuagcuccugccacgauggaaaagccuggcuccacaucugugugacaggcgacgauaagaaugcuacugcaucaaucauuuaugacggcaugcuggucgauaguauagggagcuggucuaaaaacauccugagaacccaagaauccgagugcguguguauuaauggaacaugcgccguaguuaugaccgacgguucagcuagcggcaaggccgauacgaggauccucuucauacgggaagggaagauuaucaacaucagucccuuaucuggauccgcgcagcauguggaggagugcagcuguuacccucgcuauccagaagucagaugcguguguagggacaacuggaaaggcucgaaucggccggugcuguacauuaacauggcagauuauucuaucgaguccucauacgucugcaguggucuuguuggggacacuccccgcgaugacgacagcuuuuccucuagcaauugucgagauccuaacaaugaaagaggagccccaggcgugaagggcugggcuuucgacgaugggaacgacauuuggaugggaaggacaauaaaaucagauagucgguccgguuacgagaccuuucguguagugaauggcuggacuacagccaacagcaagucucagaucaaucgccaggucauuguggacucagauaguuggagcggguauuccggaaucuucucuguugaaggcaaaaacugcaucaauagauguuuuuacguggaguugauuaggggucggccccaagagaccauagucugguggacgucgaacagcaucauuguguucugcgggaccuccggcacauauggaacuggcucauggccugacggggcaaauaucaacuuuaugccaauuuga

SEQ ID NO: 151601 - RNA, 1401 nt, Artificial Sequence; identical to SEQ ID NO: 151600
  derived and/or modified CDS sequence (opt3) from neuraminidase__InfluenzaA__AGQ81767

SEQ ID NO: 151602 - RNA, 1410 nt, Artificial Sequence
  derived and/or modified CDS sequence (opt3) from neuraminidase__InfluenzaA__AGQ81768
augaaccccaaucagaagaucguggccauuggcagcgucucccugaccauagcuacaaucugccuccuuaugcaaauugcaauccugguuacuacgaugaccuugcacuucaaacauggggaguguacaaacucuucaaauaaccaggccgugccuugcggaccaauuaucauagaaagaaauaucacugagauuguacacuuaaacaguaccacacuggaaaaggagaucuguccgaaagcggcugguuacagggacuggagcaagccccagugccagauuaccggcuuugccccuuucuccaaagauaauucuauccggcuaucggcaucaggggacauaugggugacucgcgaaccauaugucagcuguggacucggcaagugcuaccaauuugcccugggucaggggacaacccuugauaaccgacauaguaauggaacgucccacgaccguacuccccauagaacccuguugaugucugagcucggcgugccuuuccaccuggcuacaaagcagguuuguauugcauggagcuccucaaguugccacgauggcgaggccuggcugcauaucugugugacuggggacgauaggaacgcuaccgccagcauuaucuaugacggaaugcucgucgauucuaucgguuccuggagcaaaaauauuuuacggacacaggaaucagagugcguguguauaaacgggaccugcacgguaguuaugacugacgggagugcgucuggaaaggcagauacacgcauccuguuuauuagagaaggcaaaaucgugcacauauccccacuuagcgguucggcccaacaugucgaggagugcucuuguuacccccaguauccugaagugaggugcgugugucgggacaauuggcgcggguccaaccgaccagucuuguacauuaauauggcugauuauucaguugacaguggauacgugugcagcggccugguaggcgacaccccgagaaacgaugacacuuccucuagcucaaacuguaaggaucccaauaacgagaggggcgccccuggagugaaagguugggcauucgacaguggcaaugauaucuggauggggcggacaaucgaaaaggaccuacguuccggauacgagaccuuucgcgucauuggcgguuggaacacggcuaauagcaagucucagaccaacagacaggugaucguugauucagacaauaguagcggguauuccggcauuuucucuguggaaggaaaaucgugcauaaacagguguuuuuacgucgagcucauccggggccgaccaaaggagacacgcgugugguggacuagcaauuccauuaucguauucugcgggaccucaggaacauaugguacuggcaguuggcccgauggggccaacaucaauuuuaugccuauuuga

SEQ ID NO: 151603 - RNA, 1410 nt, Artificial Sequence
  derived and/or modified CDS sequence (opt3) from neuraminidase__InfluenzaA__AGQ81769
augaaccccaaucagaagaucguggccauuggcagcgucucccugaccauagcuacaaucugccuccuuaugcaaauugcaauccugguuacuacgaugaccuugcacuucaaacauggggaguguacaaacucuucaaauaaccaggccgugccuugcggaccaauuaucauagaaagaaauaucacugagauuguacacuuaaacaguaccacacuggaaaaggagaucuguccgaaagcggcugguuacagggacuggagcaagccccagugccagauuaccggcuuugccccuuucuccaaagauaauucuauccggcuaucggcaucaggggacauaugggugacucgcgaaccauaugucagcuguggacucggcaagugcuaccaauuugcccugggucaggggacaacccuugauaaccgacauaguaauggaacgucccacgaccguacuccccauagaacccuguugaugucugagcucggcgugccuuuccaccuggcuacaaagcagguuuguauugcauggagcuccucaaguugccacgauggcgaggccuggcugcauaucugugugacuggggacgauaggaacgcuaccgccagcauuaucuauggagguaugcucgucgacucuaucggcuccuggagcaaaaauauuuuacggacacaggaaucagagugcguguguauaaacgggaccugcacgguaguuaugacugauggaagugcgucuggcaaggcagacacacgcauccuguuuauuagagaagguaaaaucgugcacauauccccacuuagcgggucggcccaacaugucgaggagugcucuuguuacccccaguauccugaagugaggugcgugugucgggauaauuggcgcggauccaaccgaccagucuuguacauuaauauggcugacuauucaguugauaguggcuacgugugcagcggccugguaggggacaccccgagaaacgacgauacuuccucuagcucaaacuguaaggaccccaauaacgagaggggagccccuggugugaaaggcugggcauucgauagugggaaugacaucuggaugggacggacaaucgaaaaggaucuacguuccggcuacgagaccuuucgcgucauugguggguggaacacggcuaauagcaagucucagaccaacagacaggugaucguugacucagauaauaguagcggcuauuccggaauuuucucuguggaaggcaaaucgugcauaaacagguguuuuuacgucgagcucauccgggggcgaccaaaggagacacgcgugugguggacuagcaauuccauuaucguauucugcggaaccucagguacauauggcacugggaguuggcccgacggagccaacaucaauuuuaugccuauuuga

SEQ ID NO: 151604 - RNA, 1401 nt, Artificial Sequence
  derived and/or modified CDS sequence (opt3) from neuraminidase__InfluenzaA__AGQ81770
augaaccccaaucagaagaucauugccauaggcagcguuuccaucaccauugcuaucauuugcuucaucaugcaaauagcaauccugacaacuacgaugacccuccacuuuagacagaacgaguguucuaauccuucaaacaaucaggucguuccaugcgaaccgauuaucauugagaggaacacagugcaucuuaauaguacuaccaucgaaaaagagacaugucccaagguagccgaauacaaaaacuggagcaagccucagugccaaauaaccggguucgcgccauuuuccaaagacaauucuauucggcugucggcuggaggugauaucugggugacucgcgagcccuaugucucauguagcuugggcaagugcuaccaguucgccuuagggcagggaacaacccugaagaacaaacacaguaauggcacgacucaugaccguauuccucaccgaacccuacucaugaacgagcugggugugccauuucaucuugggacaaagcagguuuguaucgcaugguccucuagcuccugccacgauggaaaagccuggcugcacaucugugugacuggcgacgauaagaaugcuaccgcaucaauuauauaugacggcauguuggucgauaguaucgggagcuggucuaaaaacauucucagaacacaagaauccgagugcguguguaucaauggaaccugcgccguaguuaugacggacgguucagcuagcggcaaggccgauacuagggugcuguucauacgggaagggaagauuaucaacaucaguccccugucuggauccgcgcagcaugucgaggagugcagcuguuacccucgcuauccagaagugagaugcguguguagggacaacuggaaaggcucgaaucggccgguccucuacauuaacauggcagauuauucuguugaguccucauacgugugcagugguuuaguaggggacacaccccgcgaugacgacagcuccucuagcucaaauugucgagauccuaacaaugaaagaggagccccaggcgugaagggcugggcuuuugacgaugggaacgacaucuggaugggaaggaccauuaaaagugauucccggagcgguuacgagacuuuccgugucgugaauggcuggacaaccgccaacucuaagucacagauaaaucgccagguuaucguggacagugauagcugguccggguauucuggaaucuuuucggucgaaggcaaaaacugcauuaauagauguuucuacguggagcugaucaggggucggccccaagagacgcgaguaugguggaccagcaacuccauuauaguguuuugcgggacaucaggcacuuauggaaccggcaguuggccugacggggcaaauaucaacuucaugccaauuuga

SEQ ID NO: 151605 - RNA, 1410 nt, Artificial Sequence
  derived and/or modified CDS sequence (opt3) from neuraminidase__InfluenzaA__AGQ81772
augaaccccaaucagaagaucguggccauuggcagcgcuucccugaccauagcaacaaugugccuccuucugcaaaucgccuuguucgcgacuacgaugaccuuacacuuuaaacagacaggguguacuaacucuucagacaaucaggcugucccuugcggaccaauuaucauugagagaaacaucaccgaaauaguucaucugaauaguacaacccuagagaaggaaacuuguccgaaaagcgccgguuacaggaacugguccaagccccagugccaaaucacaggcuucgcaccuuuuucuaaagauaauucgauucggcucgccgcugcaggggacaucugggugacccgcgagccauauguaucauguggacugggcaagugcuaccaguucgcccuuggucaggggacgacucuggauaacaagcacagcaauggaaccacacaugaccgaacuccccaccguaccuugcucaugagugaacugggcgugccuuuucaucuggcuacaaaacaggucuguauugccugguccucuagcuccugccacgauggcaaggcguggcuccacguguguguuaccggggacgauaaaaacgcaacggccucaaucauauaugacggaauuuuaguggauaguaucgcuagcuggucuaagaauauucugagaacucaagaguccgagugcgucuguaucaacgguacaugcaccgugguaaugacugacggcucagccagcgggagggcagauacacggauccuuuucauucgcgaaggaaaaauaguucauaucaguccauugucuggcuccgcucagcacguggaggaaugcagcuguuaccccagauauccugaggucaggugcgugugucgggacaauuggaaggguucgaaccgcccagugcuguuuauuaauauggccgauuacucuaucgacuccucauaugucugcccggggcuaguuggagacacccccaggaacgaugacagaaguagcuccucuaacuguagggauccuaauaacgagcggggcgcgccaggcgugaaggggugggccuucgacagcggaaaugauauauggaugggucguacgauugaaaaagacucacgcaguggcuacgagaccuuuagaguaaucuccggguggagcacagcaaacucuaagucacagaucaaucgacaggugauugucgaucgggacaacaguagcggauacuccggcaucuucucuguggaagguaaaucgugcauuaaucgauguuuuuauguugagcucauacgcgggagacccaaggaaaacagggugugguggacuagcaauuccaucauugucuucugcggcaccucaggaacauacggcacugggaguuggccugauggagcuaacaucaaucugaugccaaucuga

SEQ ID NO: 151606 - RNA, 1401 nt, Artificial Sequence
  derived and/or modified CDS sequence (opt3) from neuraminidase__InfluenzaA__AGQ81773
augaaccccaaucagaagaucauugccauaggcagcgugucccugaccaucgcuauuaucugcuuccucaugcaaauugcaauccuuacaacuacgaugacccugcacuuuagacagaacgaguguucuaauccuucaaacaaucaggucguuccaugcgaaccgauaaucauugagaggaaaacagugcauuugaacaguacuaccaucgaaaaggagauuugucccaaaguagccgaauacaagaauuggagcaaaccucagugccaaaucacaggguucgcgccauuuuccaaggacaacucuauacgguuaucggcuggaggugauauuugggugacccgcgagcccuaugucucauguagccugggcaagugcuaccaguucgcccuagggcagggaacuacacucaaaaauaagcacaguaacggcaccacgcaugaccgaaucccucaccguacucugcuuaugaaugagcugggugugccauugcauugggggaccaaacagguuuguauugcaugguccucuagcuccugccacgauggaaaggccuggcuccacaucugugugacaggcgacgauaaaaacgcuacugcaucaaucauuuaugacggcaugcuggucgauaguauagggagcuggucuaagaauauccugagaacccaagaauccgagugcguguguauuaacggaacaugcgccguaguuaugaccgacgguucagcuagcggcaaggccgauacgagggugcucuuuauccgggaagggaaaauaauuaauaucagucccuuaucuggauccgcgcagcaugucgaggagugcagcuguuacccucgcuauccagaagugagaugcguguguagggacaacuggaagggcucgaaccggccgguccuguacaucaauauggcagauuauucuauugaguccucauacguuugcaguggucuugugggggacacuccccgcgaugacgacagcuccucuagcucaaacugucgagauccuaauaacgaaagaggagccccaggcguaaaaggcuggggguucgacgauggaaaugacaucuggauggguaggacaauuaagagugauucccggagcggcuacgagaccuuucguguggucaacggguggacuacagcuaauucuaaaucacagauaaaccgccaggugaucguugacagugauagcugguccggauauucuggcauuuucucgguggaagguaagaauugcaucaacagauguuuuuacgucgaguugaucagggggcggccccaagagacccgagugugguggacgagcaauuccauuauaguauucugcggcaccucaggaacauauggcacugggaguuggccugacggagccaacaucaauuuuaugccaauuuga

SEQ ID NO: 151607 - RNA, 1401 nt, Artificial Sequence
  derived and/or modified CDS sequence (opt3) from neuraminidase__InfluenzaA__AGQ81774
augaaccccaaucagaagaucauugccauaggcagcgugucccugaucauugcuaucauuugccuccuuaugcaaaucgcaauacugaccacaacuaugacguugcacuucagacagaacgaguguucuaauccuucaaacaaucaggucaugccaugcgaaccgaucauuaucgagaggaacaccguucauuuaaauaguacaacuauugaacgggagaucugucccaaaguggccgaauacaagaacuggagcaaaccucagugccaaauaaccggguuugcgccauucuccaaggacaauucuauucgccugucggcuggaggugauaucuggguaacacgagagcccuaugugucauguagccuagacaaaugcuaccaguuugcccucggccaggggaccacucugaagaacaagcacaguaauggaacaacccaugaucguacgccucacagaacucuucugaugaacgaguugggcgucccauuccaucucgguaccaaacagguguguauugcaugguccucuagcuccugcuaugacgggaaggccuggcugcacaucuguguuacaggagaugacaaaaaugcuacugcaucaaucauuuacgauggcaugcugguggacaguauaggcagcuggucuaagaacauccucaggacccaagaauccgagugcgucuguauuaaugggacaugcgccgugguaaugaccgauggaucagcuagcgguaaagccgacacgcggguuuuauuuauccgcgaaggcaagauaauuaacaucaguccccugucuggguccgcgcagcacguggaggagugcagcuguuauccuagauacccagaagucaggugcgugugucgggauaacuggaagggaucgaaucgcccgauccuuuauauuaacauggcagacuacucuaucgaguccucauacgugugcaguggcuuggucggugauacuccccgaaaugacgacagcuccucuagcucaaacuguagagauccuaauaacgaaaggggagccccagggguuaaaggcugggcuuucgacgauggcaaugacguguggauggggcggacaauuaagaacggaagucguuccgguuaugagaccuuucgcguagugaauggcuggacuauagccaacagcaaaucucagaucaauagacaggucauuguggauucagacgauuggaguggguacagcggaaucuucuccguugaaggcaagaaaugcaucaacagguguuuuuauguggagcugauucggggucgaccccaagagccucgcgucugguggacaucuaauucgauaaucguguucugcgggaccagcggcacguacggaaccggcuccuggccagacggggcaaacauuaauuuuaugcccaucuga

SEQ ID NO: 151608 - RNA, 1401 nt, Artificial Sequence
  derived and/or modified CDS sequence (opt3) from neuraminidase__InfluenzaA__AGQ81776
augaaccccaaucagaagaucauugccauaggcagcgugucccugaccaucgcuauuaucugcuuccucaugcaaauugcaauccuuacaacuacgaugacccugcacuuuagacagaacgaguguucuaauccuucaaacaaucaggucguuccaugcgaaccgauaaucauugagaggaacacagugcauuugaauaguacuaccaucgaaaaagagauuugucccaagguagccgaauacaaaaacuggagcaagccucagugccaaaucacaggguucgcgccauuuuccaaagacaauucuauacgguuaucggcuggaggugauauuugggugacccgcgagcccuaugucucauguagccugggcaagugcuaccaguucgcccuagggcagggaacuacacucaagaacaaacacaguaauggcaccacgcaugaccgaaucccucaccguacucugcuuaugaacgagcugggugugccauuucauuuggggaccaagcagguuuguauugcaugguccucuagcuccugccacgauggaaaagccuggcuccacaucugugugacaggcgacgauaagaaugcuacugcaucaaucauuuaugacggcaugcuggucgauaguauagggagcuggucuaaaaacauccugagaacccaagaauccgagugcguguguauuaauggaacaugcgccguaguuaugaccgacgguucagcuagcggcaaggccgauacgaggguccucuucauccgggaagggaagauaauuaacaucagucccuuaucuggauccgcgcagcauguggaggagugcagcuguuacccucgcuauccagaagugagaugcguguguagggacaacuggaaaggcucgaaucggccgguccuguacaucaacauggcagauuauucuauugaguccucauacguuugcaguggucuugugggggacacuccccgcgaugacgacagcuccucuagcucaaauugucgagauccuaacaaugaaagaggagccccaggcguaaagggcugggcuuuugacgaugggaacgacaucuggaugggaaggacaauuaaaagugauucccggagcgguuacgagaccuuccgugugauagacggcuggacuacagccgauucuaagucacagaucaaucgccaggucauuguggacagugauagcugguccggguauucuggaaucuuuucgguugaaggcaaaaacugcaucaauagauguuucuacguggaguugauuaggggucggccccaagagacccgagucugguggacgagcaacuccauaaucguguuuugcgggaccucaggcacauauggaacuggcaguuggccugacggggcaaauauuaacuucaugccaaucuga

SEQ ID NO: 151609 - RNA, 1410 nt, Artificial Sequence
  derived and/or modified CDS sequence (opt3) from neuraminidase__InfluenzaA__AGQ81777
augaaccccaaucagaagaucgugaccauuggcagcgccucccugacaauagcuacuaugugccuccuucugcagaucgcauuguucgccacgaccaugacauuacacuuuaaacagacuggguguaccaacucuucagacaaucaggcggucccuugcggaccaauuaucauugagagaaacaucacagaaauaguucaucugaauaguaccacucuagagaaggaaacauguccgaaaagcgcugguuacaggaacugguccaagccccagugccaaaucaccggcuucgccccuuuuucuaaagauaauucgauucggcucgcagccgcuggggacaucugggugacgcgcgagccauauguaucauguggacugggcaagugcuaccaguucgcacuuggucaggggacuacccuggauaacaagcacagcaauggaacaacucaugaccgaacaccccaccguaccuugcucaugaacgaacugggcgugccuuuucaucuggccaccaaacaggucuguauugcuuggaguuccucuagcugccacgauggcaaggccuggcuccacguguguguuacgggggacgauaaaaaugcgacugcauccaucauauaugacggaauuuuaguggauucaaucgccaguuggagcaagaacauucugagaacacaagagucugagugcgucuguaucaaugguaccugcacugugguaaugacagacggcuccgcuucagggagggccgauacccggauccuuuucauucgcgaaggaaaaauaguucauaucagcccauugaguggcucugcacagcacguggaggaaugcuccuguuaccccagauauccugaggucaggugcgugugucgggacaacuggaaugguagcaaccgcccagugcuguuuauuaacauggcugauuacucgaucgacucuuccuaugucugcucagggcuaguuggagacacgccgcgaaaugaugacagaaguagcuccucuaacuguagggaucccaauaacgagcggggcgccccuggcgugaaggggugggcguucgacagcggaaaugauauauggaugggucguaccauugaaaaggacucacgcaguggcuacgagacauuuagaguaaucuccggguggagcacugccaacucuaaaucacagaucaauaggcaagugauugucgaucgggacaacaguagcggauacuccggcaucuucucuguggaagguaagucgugcauuaaucgauguuuuuauguugagcucauacgcgggagaccaaaagaaaacagggugugguggaccagcaauuccaucauugucuucugcggcacaucaggaacuuacggcaccgggaguuggcccgauggagcaaacaucaaucugaugccuaucuga

SEQ ID NO: 151610 - RNA, 1410 nt, Artificial Sequence
  derived and/or modified CDS sequence (opt3) from neuraminidase__InfluenzaA__AGQ81778
augaaccccaaucagaagaucgugaccauuggcagcgccucccugacaauagcuacuaugugccuccuucugcagaucgcauuguucgccacgaccaugacauuacacuuuaaacagacuggguguaccaacucuucagacaaucaggcggucccuugcggaccaauuaucauugagagaaacaucacagaaauaguucaucugaauaguaccacucuagagaaggaaacauguccgaaaagcgcugguuacaggaacugguccaagccccagugccaaaucaccggcuucgccccuuuuucuaaagauaauucgauucggcucgcagccgcuggggacaucugggugacgcgcgagccauauguaucauguggacugggcaagugcuaccaguucgcacuuggucaggggacuacccuggauaacaagcacagcaauggaacaacucaugaccgaacaccccaccguaccuugcucaugaacgaacugggcgugccuuuucaucuggccaccaaacaggucuguauugcuuggaguuccucuagcugccacgauggcaaggccuggcuccacguguguguuacgggggacgauaaaaaugcgacugcauccaucauauaugacggaauuuuaguggauucaaucgccaguuggagcaagaacauucugagaacacaagagucugagugcgucuguaucaaugguaccugcacugugguaaugacagacggcuccgcuucagggagggccgauacccggauccuuuucauucgcgaaggaaaaauaguucauaucagcccauugaguggcucugcacagcacguggaggaaugcuccuguuaccccagauauccugaggucaggugcgugugucgggacaacuggaaggguagcaaucgcccagugcuguuuauuaacauggcugauuacucgaucgacucuuccuaugucugcucagggcuaguuggagacacgccgcgaaacgaugacagaaguagcuccucuaauuguagggaucccaacaaugagcggggcgccccuggcgugaaggggugggcguucgacagcggaaacgauauauggaugggucguaccauugaaaaagacucacgcaguggcuacgagacauuuagaguaaucuccggguggagcacugccaauucuaagucacagaucaacaggcaagugauugucgaucgggacaauaguagcggauacuccggcaucuucucuguggaagguaaaucgugcauuaaccgauguuuuuauguugagcucauacgcgggagaccaaaggaaaauagggugugguggaccagcaacuccaucauugucuucugcggcacaucaggaacuuacggcaccgggaguuggcccgauggagcaaauaucaaccugaugccuaucuga

SEQ ID NO: 151611 - RNA, 1410 nt, Artificial Sequence
  derived and/or modified CDS sequence (opt3) from neuraminidase__InfluenzaA__AGQ81779
augaaccccaaucagaagaucguggccauuggcagcgcuucccugaccauagcaacaaugugccuccuucugcaaaucgccuuguucgcgacuacgaugaccuuacacuuuaaacagacaggguguacuaacucuucagacaaucaggcugucccuugcggaccaauuaucauugagagaaacaucaccgaaauaguucaucugaauaguacaacccuagagaaggaaacuuguccgaaaagcgccgguuacaggaacugguccaagccccagugccaaaucacaggcuucgcaccuuuuucuaaagauaauucgauucggcucgccgcugcaggggacaucugggugacccgcgagccauauguaucauguggacugggcaagugcuaccaguucgcccuuggucaggggacgacucuggauaacaagcacagcaauggaaccacacaugaccgaacuccccaccguaccuugcucaugaacgaacugggcgugccuuuucaucuggcuacaaaacaggucuguauugccuggaguuccucuagcugccacgauggcaaggcguggcuccacguguguguuaccggggacgauaaaaaugcaacggccuccaucauauaugacggaauuuuaguggauucaaucgcuaguuggagcaagaacauucugagaacucaagagucugagugcgucuguaucaaugguacaugcaccgugguaaugacugacggcuccgccucagggagggcagauacacggauccuuuucauucgcgaaggaaaaauaguucauaucagcccauugaguggcucugcucagcacguggaggaaugcuccuguuaccccagauauccugagauuaggugcgucugucgggacaacuggaaggguagcaaucgcccagugcuguuuaucaacauggccgauuacucgauagacucuuccuaugugugcucagggcuagucggagacaccccgcgaaacgaugacagaaguagcuccucuaauuguagggaucccaacaaugagcggggcgcgccuggcguuaaggggugggccuucgacagcggaaacgauauuuggaugggucguacgaucgaaaaagacucacgcaguggcuacgagaccuuuagagugaucuccggguggagcacagcaaauucuaagucacagauuaacaggcagguaaucguggaucgggacaauaguagcggauacuccggcauuuucucugucgaagguaaaucgugcauaaaccgauguuuuuauguggagcucauccgcgggagaccaaaggaaaauaggguuugguggacuagcaacuccauuaucguguucugcggcaccucaggaacauacggcacugggaguuggcccgauggagcuaauaucaaccugaugccuauuuga

SEQ ID NO: 151612 - RNA, 1410 nt, Artificial Sequence
  derived and/or modified CDS sequence (opt3) from neuraminidase__InfluenzaA__AGQ81780
augaaccccaaucagaagaucguggccauuggcagcgcuucccugaccauagcaacaaugugccuccuucugcagaucgccuuguucgcgacuacgaugaccuuacacuuuaaacagacaggguguacuaacucuucagacaaucaggcugucccuugcggaccaauuaucauugagagaaacaucaccgaaauaguucaucugaauaguacaacccuagagaaggaaacuuguccgaaaagcgccgguuacaggaacugguccaagccccagugccaaaucacaggcuucgcaccuuuuucuaaagauaauucgauucggcucgccgcugcaggggacaucugggugacccgcgagccauauguaucauguggacugggcaagugcuaccaguucgcccuuggucaggggacgacucuggauaacaagcacagcaauggaaccacacaugaccgaacuccccaccguaccuugcucaugaacgaacugggcgugccuuuucaucuggcuacaaaacaggucuguauugccuggaguuccucuagcugccacgauggcaaggcguggcuccacguguguguuaccggggacgauaaaaaugcaacggccuccaucauauaugacggaauuuuaguggauucaaucgcuaguuggagcaagaacauucugagaacucaagagucugagugcgucuguaucaaugguacaugcaccgugguaaugacugacggcuccgccucagggagggcagauacacggauccuuuucauucgcgaaggaaaaauaguucauaucagcccauugaguggcucugcucagcacguggaggaaugcuccuguuaccccagauauccugaggucaggugcgugugucgggacaacuggaaggguagcaaucgcccagugcuguuuauuaacauggccgauuacucgaucgacucuuccuaugucugcucagggcuaguuggagacaccccgcgaaacgaugacagaaguagcuccucuaauuguagggaucccaacaaugagcggggcgcgagcggcgugaaggggugggccuucgacucaggaaacgauauauggaugggucguacgauugaaaaagacagucgcuccggcuacgagaccuuuagaguaaucagcggguggucuacagcaaauucaaagagucagaucaacaggcaagugauugucgaucgggacaauagcuccggauacucuggcaucuucucgguggaagguaaaagcugcauuaaccgauguuuuuauguugagcucauacgcgggagaccuaaggaaaauagggugugguggacuuccaacucaaucauugucuucugcggcaccaguggaacauacggcacugggucuuggccagauggagcuaauaucaaccugaugcccaucuga

SEQ ID NO: 151613 - RNA, 1401 nt, Artificial Sequence
  derived and/or modified CDS sequence (opt3) from neuraminidase__InfluenzaA__AGQ81781
augaaccccaaucagaagaucauugccauaggcagcgugucccugaccaucgcuauuaucugcuuccucaugcaaauugcaauccuuacaacuacgaugaccccucacuuuagacagaacgaguguucuaauccaucaaacaaucaggucguuccgugcgaacccauaaucauugagaggaacacagugcaucugaauaguacuaccaucgaaaaagagauuuguccuaagguagccgaauacaaaaacuggagcaagccacagugccaaaucacaggguucgcgcccuuuuccaaagacaauucuauacgguugucggcuggaggugauauuugggugacccgcgagccuuaugucucauguagcuuaggcaagugcuaccaguucgcccuggggcagggaacuacacuaaagaacaaacacaguaauggcaccacgcaugaccgaaucccacaccguacucuccugaugaacgagcuuggugugcccuuucaucuggggaccaagcagguuuguauugcaugguccucuagcuccugccacgauggaaaagccugguugcacaucugugugacaggcgacgauaagaaugcuacugcaucaaucauuuaugacggcaugcucgucgauaguauagggagcuggucuaaaaacauccugagaacccaagaauccgagugcguguguauuaauggaacaugcgccguaguuaugaccgacgguucagcuagcggcaaggccgauacgaggauccuguucauacgggaagggaagauuaucaacaucaguccucucucuggauccgcgcagcauguggaggagugcagcuguuacccacgcuauccggaagucagaugcguguguagggacaacuggaaaggcucgaaucggcccguguuauacauuaacauggcagauuauucuaucgaguccucauacgucugcaguggucugguuggggacacuccucgcgaugacgacagcuccucuagcucaaauugucgagauccaaacaaugaaagaggagcccccggcgugaagggcugggcuuuugacgaugggaacgacauuuggaugggaaggacaauaaaaagugauucccggagcgguuacgagaccuuccguguagugaauggcuggacuacagccaacucuaagucacagaucaaucgccaggucauuguggacagugauagcugguccggguauucuggaaucuuuucgguugaaggcaaaaacugcaucaauagauguuucuacguggagcuuauuaggggucggccucaagagacccgagucugguggacgagcaacuccauaaucguguuuugcgggaccucaggcacauauggaacuggcaguuggccagacggggcagauauuaauuugaugcccaucuga

SEQ ID NO: 151614 - RNA, 1410 nt, Artificial Sequence
  derived and/or modified CDS sequence (opt3) from neuraminidase__InfluenzaA__AGQ81783
augaaccccaaucagaagaucgugaccauuggcagcgccucccugacaauagcuacuaugugccuccuucugcagaucgcauuguucgccacgaccaugacauuacacuuuaaacagacuggguguaccaacucuucagacaaucaggcggucccuugcggaccaauuaucauugagagaaacaucacagaaauaguucaucugaauaguaccacucuagagaaggaaacauguccgaaaagcgcugguuacaggaacugguccaagccccagugccaaaucaccggcuucgccccuuuuucuaaagauaauucgauucggcucgcagccgcuggggacaucugggugacgcgcgagccauauguaucauguggacugggcaagugcuaccaguucgcacuuggucaggggacuacccuggauaacaagcacagcaauggaacaacucaugaccgaacaccccaccguaccuugcucaugaacgaacugggcgugccuuuucaucuggccaccaaacaggucuguauugcuuggaguuccucuagcugccacgauggcaaggccuggcuccacguguguguuacgggggacgauaaaaaugcgacugcauccaucauauauaacggaauuuuaguggacucaaucgccaguuggagcaagaauauucugagaacacaagagucugagugcgucuguaucaacgguaccugcacugugguaaugacagauggcuccgcuucagggagggccgacacccggauccuuuucauucgcgaaggaaaaauaguucauaucagcccauugaguggcucugcacagcacguggaggaaugcuccuguuaccccagauauccugaggucaggugcgugugucgggauaauuggaaggguagcaaccgcccagugcuguuuauuaacauggcugacuacucgaucgauucuuccuaugucugcucagggcuaguuggagacacgccgcgaaaugacgauagaaguagcuccucuaacuguagggaccccaauaacgagcggggcgccccuggcgugaaggggugggcguucgauagcggaaaugacauauggaugggucguaccauugaaaaagauucacgcaguggcuacgagacauuuagaguaaucuccggguggagcacugccaacucuaagucacagaucaauaggcaagugauugucgaccgggauaacaguagcggauacuccggcaucuucucuguggaagguaaaucgugcauuaaucgauguuuuuauguugagcucauacgcgggagaccaaaggaaaacagggugugguggaccagcaauuccaucauugucuucugcggcacaucaggaacuuacggcaccgggaguuggcccgacggagcaaacaucaaucugaugccuaucuga

SEQ ID NO: 151615 - RNA, 1401 nt, Artificial Sequence
  derived and/or modified CDS sequence (opt3) from neuraminidase__InfluenzaA__AGQ81784
augaaccccaaucagaagaucauugccauaggcagcgugucccugaccaucgcuauuaucugcuuccucaugcaaauugcaauccuuacaacuacgaugacccugcacuuuagacagaacgaguguucuaauccuucaaacaaucaggucguuccaugcgaaccgauaaucauugagaggaacacagugcauuugaauaguacuaccaucgaaaaagagauuugucccaagguagccgaauacaaaaacuggagcaagccucagugccaaaucacaggguucgcgccauuuuccaaagacaauucuauacgguuaucggcuggaggugauauuugggugacccgcgagcccuaugucucauguagccugggcaagugcuaccaguucgcccuagggcagggaacuacacuccgaaacaagcacaguaauggcaccacgcaugaccguaucccucacagaacucugcuuaugaacgagcugggugugccauuucauuuggggaccaaacagguuuguauugcaugguccucuagcuccugccacgauggaaaggccuggcuccacaucugugugacaggcgacgauaaaaaugcuacugcaucaaucauuuaugacggcaugcuggucgauaguauagggagcuggucuaagaacauccugaggacccaagaauccgagugcguguguauuaauggaacaugcgccguaguuaugaccgacgguaacgcuucaggcaaagccgauacgcgggugcucuuuauccgcgaagggaagauaauuaacaucagccccuuaaguggaucugcgcagcaugucgaggagugcuccuguuacccuagauauccagaagugaggugcgugugucgggacaauuggaagggcagcaaccgcccgguccuguacaucaauauggcagauuauucgauugagucuuccuacguuugcucaggucuugugggggacacuccccgagaugacgacaguagcuccucuagcaacuguagagauccuaauaacgaaaggggagccccaggcguaaaaggcugggcuuuugacgaugggaaugacaucuggaugggacggacaauuaagucagauagucguuccgguuacgagaccuuccgcguggucaacggcuggacuacagccaauagcaaaucucagauaaacagacaggugaucguugacucagauaguuggagcggguauuccggaauuuucucuguggaaggcaagaauugcaucaacagguguuucuacgucgaguugauccggggucgaccccaagagacccgcgugugguggacgucgaauagcauuauaguauuuugcgggaccuccggcacauauggaacuggcucauggccugacggggcagauaucaacuucaugccaauuuga

SEQ ID NO: 151616 - RNA, 1401 nt, Artificial Sequence
  derived and/or modified CDS sequence (opt3) from neuraminidase__InfluenzaA__AGQ81785
augaaccccaaucagaagaucauugccauaggcagcgugucccugaccaucgcuauuaucugcuucauuaugcaaaucgcaauacucacaacuacgaugaccccucacuuuagacagaacgaguguucuaauccaucaaacaaucaggucguuccgugcgaacccaucauuaucgagaggaacacagugcaucuuaauaguacuaccauugaaaaagagaucuguccuaagguagccgaauacaaaaacuggagcaagccacagugccaaauaacaggguucgcgcccuuuuccaaagacaauucuauucggcugucggcuggaggugauaucugggugacccgcgagccuuaugucucauguagcuugggcaagugcuaccaguucgccuuagggcagggaacuacacugaagaacaaacacaguaauggcaccacgcaugaccguauuccacaccgaacucuacucaugaacgagcugggugugcccuuucaucuugggaccaagcagguuuguaucgcaugguccucuagcuccugccacgauggaaaagccuggcugcacaucugugugacaggcgacgauaagaaugcuacugcaucaauuauauaugacggcauguuggucgauaguaucgggagcuggucuaaaaacauucucagaacccaagaauccgagugcguguguaucaauggaacaugcgccguaguuaugaccgacgguucagcuagcggcaaggccgauacgaggauacuguucauucgggaagggaagaucaucaacauuaguccucugucuggauccgcgcagcauguggaggagugcagcuguuacccacgcuauccggaagucagaugcguguguagggacaacuggaaaggcucgaaucggcccgugcucuacaucaacauggcagauuauucuauugaguccucauacgucugcagugguuuaguuggggacacuccucgcgaugacgacagcuccucuagcucaaauugucgagauccaaacaaugaaagaggagcccccggcgugaagggcugggcuuuugacgaugggaacgacauauggaugggaaggacaaucaaaagugauucccggagcgguuacgagaccuuccguguagugaauggcuggacuacagccaacucuaagucacagauuaaucgccaggucaucguggacagugauagcugguccggguauucuggaaucuuuucgguugaaggcaaaaacugcauuaauagauguuucuacguggagcugauaaggggucggccucaagagacccgagucugguggacgagcaacuccaucauuguguuuugcgggaccucaggcacauauggaacuggcaguuggccagacggggcagauaucaaucuuaugcccauuuga

SEQ ID NO: 151617 - RNA, 1401 nt, Artificial Sequence
  derived and/or modified CDS sequence (opt3) from neuraminidase__InfluenzaA__AGQ81787
augaaccccaaucagaagaucauugccauaggcagcgugucccugaucauugcuaucauuugccuccuuaugcaaaucgcaauacugaccacaacuaugacguugcacuucagacagaacgaguguucuaauccuucaaacaaucaggucguuccaugcgaaccgaucauuaucgagaggaacaccgugcauuuaaauaguacaacuauugaacgggagaucugucccaaaguagccgaauacaagaacuggagcaaaccucagugccaaauaaccggguuugcgccauucuccaaggacaauucuauucgccugucggcuggaggugauaucugggugacacgagagcccuaugucucauguagccuagacaaaugcuaccaguuugcccucggccaggggaccacucugaagaacaagcacaguaauggaacaacccaugaucguacgccucacagaacucuucugaugaacgaguugggcgugccauuccaucucgguaccaaacagguuuguauugcaugguccucuagcuccugcuaugacgggaaggccuggcugcacaucugugugacaggagaugacaaaaaugcuacugcaucaaucauuuacgauggcaugcuggucgacaguauaggcagcuggucuaagaacauccucaggacccaagaauccgagugcguguguauuaaugggacaugcgccguaguuaugaccgauggaucagcuagcgguaaagccgacacgcggguguuauuuauccgcgaaggcaagauaauuaacaucaguccccugucuggguccgcgcagcacgucgaggagugcagcuguuauccuagauacccagaagugaggugcgugugucgggauaacuggaagggaucgaaucgcccgauccuuuauauuaacauggcagacuacucuaucgaguccucauacgucugcaguggcuugguuggugauacuccccgaaaugacgacagcuccucuagcucaaacuguagagauccuaauaacgaaaggggagccccaggggugaaaggcugggcuuucgacgauggcaaugacguauggauggggcggacaauuaagaacggaagucguuccgguuaugagaccuuucgcguggucaauggcuggacuauggccaacagcaaaucucagauaaauagacaggugaucguugauucagacgauuggaguggguacagcggaauuuucuccguggaaggcaagaaaugcaucaacagguguuuuuaugucgagcugauccggggucgaccccaagagccucgcgugugguggacaucuaauucgauuauaguauucugcgggaccagcggcacguacggaaccggcuccuggccagacggggcaaacaucaauuuuaugcccauuuga

SEQ ID NO: 151618 - RNA, 1401 nt, Artificial Sequence
  derived and/or modified CDS sequence (opt3) from neuraminidase__InfluenzaA__AGQ81789
augaaccccaaucagaagaucauugccauaggcagcgugucccugaccaucgcuauuaucugccuccuuaugcaaauugcaauccugacaacuacgaugaccccucacuucagacagaacgaguguucuaauccaucaaacaaucaggucguuccgugcgaacccauaaucauugagaggaacacagugcauuugaauaguacuaccaucgaaaaagagauuuguccuaagguagccgaauacaaaaacuggagcaagccacagugccaaaucacaggguuugcgcccuucuccaaagacaauucuauacgguuaucggcuggaggugauauuugggugacccgcgagccuuaugucucauguagccugggcaagugcuaccaguuugcccuagggcagggaacuacacucaagaacaaacacaguaauggcaccacgcaugaccgaaucccacaccguacucugcuuaugaacgagcugggugugcccuuccauuuggggaccaagcagguuuguauugcaugguccucuagcuccugccacgauggaaaagccuggcuccacaucugugugacaggcgacgauaagaaugcuacugcaucaaucauuuaugacggcaugcuggucgauaguauagggagcuggucuaaaaacauccugagaacccaagaauccgagugcguguguauuaauggaacaugcgccguaguuaugaccgacgguucagcuagcggcaaggccgauacgaggauccucuuuauacgggaagggaagauuaucaacaucaguccuuuaucuggauccgcgcagcauguggaggagugcagcuguuacccacgcuauccggaagucagaugcguguguagggacaacuggaaaggcucgaaucggcccgugcuguacauuaacauggcagauuauucuaucgaguccucauacgucugcaguggucuuguuggggacacuccucgcgaugacgacagcuccucuagcucaaauugucgagauccaaacaaugaaagaggagcccccggcgugaagggcugggcuuucgacgaugggaacgacauuuggaugggaaggacaauaaaaagugauucccggagcgguuacgagaccuuucguguagugaauggcuggacuacagccaacucuaagucacagaucaaucgccaggucauuguggacagugauagcugguccggguauucuggaaucuucucgguugaaggcaaaaacugcaucaauagauguuuuuacguggaguugauuaggggucggccucaagagacccgagucugguggacgagcaacuccauaaucguguucugcgggaccucaggcacauauggaacuggcaguuggccagacggggcagauauuaaucugaugcccaucuga

SEQ ID NO: 151619 - RNA, 1401 nt, Artificial Sequence
  derived and/or modified CDS sequence (opt3) from neuraminidase__InfluenzaA__AGQ81790
augaaccccaaucagaagaucauugccauaggcagcgugucccugaucauugcuaucauuugccuccuuaugcaaaucgcaauacugaccacaacuaugacguugcacuucagacagaacgaguguucuaauccuucaaacaaucaggccaugccaugcgaaccgaucauuaucgagaggaacaccguccauuuaaauaguacaacuauugaacgggagaucugucccaaaguuaccgaauacaagaacuggagcaaaccucagugccaaauaacaggguuugcgccauucuccaaggacaauucuauucgccugucggcuggaggugauaucugggugacccgagagcccuauguaucauguagccuagacaaaugcuaccaguuugcccucggccaggggacuacacugaagaacaagcacaguaauggaaccacgcaugaucguacuccucacagaacccuucugaugaacgaguugggcgugccauuccaucucgguacaaaacaggucuguauugcaugguccucuagcuccugcuaugacgggaaggccuggcugcacaucugugugacuggagaugacaaaaaugcuaccgcaucaaucauuuacgauggcaugcugguugacaguauaggcagcuggucuaagaacauccucaggacacaagaauccgagugcguguguauuaaugggaccugcgccgucgugaugacggauggaucagcuagcggucgggccgacacucgcguauuauuuaucagagaaggcaaaauaauuaacaucaguccccugucugggaacgcgcagcacguugaggagugcuccuguuauccuagguacccagaagugcggugcgucugucgcgauaauuggaagggaagcaaccgaccgauccuuuauauuaauauggcagacuacucgaucgagucuuccuacgugugcucaggcuuggugggugauacacccagaaacgacgacaguagcuccucuagcaauuguagggauccuaacaaugaacguggggccccaggagucaagggcugggcuuucgacgauggcaacgacguuuggauggggcggaccauuaaaaauggaucacgcagugguuaugagacuuuuagagugguaaacggcuggacaauggccaauuccaagagccagauaaacaggcaagugaucgucgauucugacgaauggucaggguacaguggaauuuucagcguggagggcaaaaagugcaucaaucgguguuuuuauguugagcugauccgaggucgcccccaggaaccuagagugugguggaccuccaacucuauuauagucuucugcgggacgucgggcaccuacggaacaggcagcuggccagauggggcaaauaucaacuuuaugcccauuuga

SEQ ID NO: 151620 - RNA, 1401 nt, Artificial Sequence
  derived and/or modified CDS sequence (opt3) from neuraminidase__InfluenzaA__AGQ81792
augaaccccaaucagaagaucauugccauaggcagcgugucccugaucauugcuaucauuugccuccuuaugcaaaucgcaauacugaccacaacuaugacguugcacuucagacagaacgaguguucuaauccuucaaacaaucaggucaugccaugcgaaccgaucauuaucgagaggaacaccguucauuuaaauaguacaacuauugaacgggagaucugucccaaaguggccgaauacaagaacuggagcaaaccucagugccaaauaaccggguuugcgccauucuccaaggacaauucuauucgccugucggcuggaggugauaucuggguaacacgagagcccuaugugucauguagccuaaacaaaugcuaccaguuugcccucggccaggggaccacucuggagaauaagcacaguaacggaacaacccaugaccguacgccucacagaacucuucugaugaaugaauugggcgucccauuccaucucgguaccaaacagguguguauggcaugguccucuagcuccugcuaugaugggaaggccuggcugcacauuuguguuacaggagacgauaagaacgcuacugcaucagugaucuacgacggcaugcuggucgauaguaucggcagcuggucucaaaauauucucaggacccaggaguccgaaugcguguguauaaacgggacaugcgccguaguuaugaccgacggaucagcuagcgguaaagccgauacgcggguguuauuuauccgcgagggcaagauuaucaacauaaguccccugucuggguccgcgcagcacgucgaggaaugcagcuguuauccuagauacccagaggugaggugcgugugucgggacaauuggaaaggaucgaaccgcccgauucuuuauaucaauauggcagauuacucuaucgaauccucauacgucugcaguggcuugguuggugacacuccccgaaacgaugacagcuccucuagcucaaauuguagagacccuaacaaugagaggggagccccaggggugaagggcugggcuuucgaugacggcaacgauguauggauggggcggacaauuaagaauggaagucguuccgguuaugaaaccuuucgcguggucaacggcuggacuauggccaauagcaaaucucagaucaacagacaagugauuguugacucagaugacuggaguggguacagcggaauauucuccguggagggcaagaaaugcaucaauagguguuuuuaugucgagcugauucggggucgaccccaggaaccucgcgugugguggacaucuaacucgaucaucguauucugcgggaccagcggcacguacggaaccggcuccuggccagauggggcaaauauuaacuuuaugcccauauga

SEQ ID NO: 151621 - RNA, 1401 nt, Artificial Sequence
  derived and/or modified CDS sequence (opt3) from neuraminidase__InfluenzaA__AGQ81793
augaaccccaaucagaagaucauugccauaggcagcgugucccugaucauugcuaucauuugccuccuuaugcaaaucgcaauacugaccacaacuaugacguugcacuucagacagaacgaguguucuaauccuucaaacaaucaggucaugccaugcgaaccgaucauuaucgagaggaacaccguucauuuaaauaguacaacuauugaacgggagaucugucccaaaguggccgaauacaagaacuggagcaaaccucagugccaaauaaccggguuugcgccauucuccaaggacaauucuauucgccugucggcuggaggugauaucuggguaacacgagagcccuaugugucauguagccuaaacaaaugcuaccaguuugcccucggccaggggaccacucuggagaauaagcacaguaacggaacaacccaugaccguacgccucacagaacucuucugaugaaugaauugggcgucccauuccaucucgguaccaaacagguguguauggcaugguccucuagcuccugcuaugaugggaaggccuggcugcacauuuguguuacaggagacgauaagaacgcuacugcaucagugaucuacgacggcaugcuggucgauaguaucggcagcuggucuaaaaauauucucaggacccaagaguccgaaugcguguguauaaacgggacaugcgccguaguuaugaccgacggaucagcuagcgguaaggccgauacgcggguguuauuuauccgcgagggcaaaauuaucaacauaaguccccugucuggguccgcgcagcacgucgaggaaugcagcuguuauccuagauacccagaggugaggugcgugugucgggacaauuggaagggaucgaaccgcccgauucuuuauaucaauauggcagauuacucuaucgaauccucauacgucugcaguggcuugguuggugacacuccccgaaacgaugacagcuccucuagcucaaauuguagagacccuaacaaugagaggggagccccaggggugaagggcugggcuuucgaugacggcaacgauguauggauggggcggacaauuaaaaauggaagucguuccgguuaugaaaccuuucgcguggucaacggcuggacuauggccaauagcaagucucagaucaacagacaggugauuguugacucagaugacuggaguggguacagcggaauauucuccguggagggcaaaaagugcaucaauagguguuuuuaugucgagcugauucggggucgaccccaagaaccucgcgugugguggacaucuaacucgaucaucguauucugcgggaccagcggcacguacggaaccggcuccuggccagauggggcaaauauuaacuuuaugcccauauga

SEQ ID NO: 151622 - RNA, 1401 nt, Artificial Sequence; identical to SEQ ID NO: 151621
  derived and/or modified CDS sequence (opt3) from neuraminidase__InfluenzaA__AGQ81794

SEQ ID NO: 151623 - RNA, 1401 nt, Artificial Sequence
  derived and/or modified CDS sequence (opt3) from neuraminidase__InfluenzaA__AGQ81795
augaaccccaaucagaagaucauugccauaggcagcgugucccugaucauugcuaucauuugccuccuuaugcaaaucgcaauacugaccacaacuaugacguugcacuucagacagaacgaguguaauaacccuucuaauaaccaggucaugccaugcgaaccgaucauuaucgagaggaauaccguucauuuaaacucaacaacuauugaacgggagaucugucccaaaguggccgaauacaagaauuggaguaaaccucagugccaaauaaccggguuugcgccauucagcaaggacaacuccauucgccugucugcuggaggugauaucuggguaacacgagagcccuaugugucguguucacuagacaaaugcuaccaguuugcccucggccaggggaccacucugaagaauaagcacagcaacggaacaacccaugaucguacgccucacagaacucuucugaugaaugaguugggcgucccauuccaucucgguaccaaacagguguguauugcauggaguuccucuagcugcuaugacgggaaggccuggcugcacaucuguguuacaggagaugacaaaaacgcuacugcauccaucauuuacgauggcaugcugguggacucaauaggcaguuggagcaagaauauccucaggacccaagaaucugagugcgucuguauuaacgggacaugcgccgugguaaugaccgauggauccgcuucagguaaagccgacacgcggguuuuauuuauccgcgaaggcaagauaauuaacaucagcccccugagugggucugcgcagcacguggaggagugcuccuguuauccuagauacccagaagucaggugcgugugucgggauaauuggaagggaagcaaccgcccgauccuuuauauuaauauggcagacuacucgaucgagucuuccuacgugugcucaggcuuggucggugauacuccccgaaacgacgacaguagcuccucuagcaauuguagagauccuaacaaugaaaggggagccccagggguuaaaggcugggcuuucgacgauggcaacgacguguggauggggcggacaauuaagaauggaucacguagugguuaugagaccuuucgcguagugaacggcuggacuauagccaauuccaaaagccagaucaacagacagauuaucgucgauucugacgauuggucaggguacaguggaaucuucagcguggaaggcaagaaaugcauuaauagguguuuuuauguugagcugauacggggucgaccccaagagccucgcgugugguggacauccaacucuaucauugucuucugcgggaccucgggcacguacggaaccggcagcuggccagacggggcaaauaucaacuuuaugcccauuuga

SEQ ID NO: 151624 - RNA, 1401 nt, Artificial Sequence
  derived and/or modified CDS sequence (opt3) from neuraminidase__InfluenzaA__AGQ81796
augaaccccaaucagaagaucauugccauaggcagcgugucccugaucauugcuaucauuugccuccuuaugcaaaucgcaauacugaccacaacuaugacguugcacuucagacagaacgaguguucuaauccuucaaacaaucaggucaugccaugcgaaccgaucauuaucgagaggaacaccguucauuuaaauaguacaacuauugaacgggagaucugucccaaaguggccgaauacaagaacuggagcaaaccucagugccaaauaaccggguuugcgccauucuccaaggacaauucuauucgccugucggcuggaggugauaucuggguaacacgagagcccuaugugucauguagccuagacaaaugcuaccaguuugcccucggccaggggaccacucugaagaacaagcacaguaauggaacaacccaugaucguacgccucacagaacucuucugaugaacgaguugggcgucccauuccaucucgguaccaaacagguguguauugcaugguccucuagcuccugcuaugacgggaaggccuggcugcacaucuguguuacaggagaugacaaaaaugcuacugcaucaaucauuuacgauggcaugcugguggacaguauaggcagcuggucuaagaacauccucaggacccaagaauccgagugcgucuguauuaaugggacaugcgccgugguaaugaccgauggaucagcuagcgguaaagccgacacgcggguuuuauuuauccgcgaaggcaagauaauuaacaucaguccccugucuggguccgcgcagcacguggaggagugcagcuguuauccuagauacccagaagucaggugcgugugucgggauaacuggaagggaucgaaucgcccgauccuuuauauuaacauggcagacuacucuaucgaguccucauacgugugcaguggcuuggucggugauacuccccgaaaugacgacagcuccucuagcucaaacuguagagauccuaauaacgaaaggggagccccagggguuaaaggcugggcuuucgacgauggcaaugacauuuggauggggcggacaauaaagaacggaagucguuccgguuaugagaccuuucgcgugguaaauggcuggacuauggccaacagcaaaucucagaucaauagacaggugauugucgauucagacgauuggaguggguacagcggaaucuucuccguggaaggcaagaaaugcaucaacagguguuuuuauguugagcugauucggggucgaccccaagagccucgcgugugguggacaucuaauucgauaaucgucuucugcgggaccagcggcacguacggaaccggcuccuggccagacggggcaaacauuaauuuuaugcccaucuga

SEQ ID NO: 151625 - RNA, 1401 nt, Artificial Sequence
  derived and/or modified CDS sequence (opt3) from neuraminidase__InfluenzaA__AGQ81798
augaaccccaaucagaagaucauuagcauaggcuccgugucucugaucauugccaucauuugccuccuuaugcaaaucgcuauacugaccacaacuaugacguugcacuucagacagaacgaguguucaaauccuaguaacaaucaggucaugccaugcgaaccgaucauuaucgagaggaacaccguucauuuaaauagcacaacuauugaacgggagaucugucccaaaguggcagaauacaagaacugguccaaaccucagugccaaauaaccggguuugccccauucucuaaggacaauucgauucgccugucagcgggaggugauaucuggguaacacgagagcccuaugugagcuguagucuagacaaaugcuaccaguuugcucucggccaggggaccacucugaagaacaagcacuccaauggaacaacccaugaucguacgccucacagaacucuucugaugaacgaguugggcgucccauuccaucucgguaccaaacagguguguauugccuggucuagcuccucaugcuaugacgggaaggcauggcugcacaucuguguuacaggagaugacaaaaaugccacugcuaguaucauuuacgauggcaugcugguggacagcauaggcucuugguccaagaacauccucaggacccaagaaucagagugcgucuguauuaaugggacaugcgcagugguaaugaccgauggaagcgccagugguaaagcugacacgcggguuuuauuuauccgcgaaggcaagauaauuaacaucucuccccuguccgggagcgcccagcacguggaggagugcucguguuauccuagauacccagaagucaggugcgugugucgggauaacuggaagggaucuaaucgcccgauccuuuauauuaacauggcggacuacuccaucgagucaaguuacgugugcagcggcuuggucggugauacuccccgaaaugacgacuccucuagcucaaguaacuguagagauccuaauaacgaaaggggagcaccagggguuaaaggcugggccuucgacgauggcaaugacguguggauggggcggacaauuaagaacggaucccguagcgguuaugagaccuuucgcguagugaauggcuggacuauggcuaacucuaaaucacagauaaauagacaggucaucguggauagugacgauuggagcggguacuccggaauuuucucuguugaaggcaagaaaugcaucaacagguguuuuuauguggagcugauccggggucgaccccaagagccucgcgucugguggacaucgaauagcauuauaguguucugcgggaccuccggcacguacggaaccggcucauggccagacggggccaacaucaauuuuaugcccauuuga

SEQ ID NO: 151626 - RNA, 1401 nt, Artificial Sequence
  derived and/or modified CDS sequence (opt3) from neuraminidase__InfluenzaA__AGQ81799
augaaccccaaucagaagaucauugccauaggcagcgugucccugaucauugcuaucauuugccuccuuaugcaaaucgcaauacugaccacaacuaugacguugcacuucagacagaacgaguguucuaauccuucaaacaaucaggucaugccaugcgaaccgaucauuaucgagaggaacaccguucauuuaaauaguacaacuauugaacgggagaucugucccaaaguggccgaauacaagaacuggagcaaaccucagugccaaauaaccggguuugcgccauucuccaaggacaauucuauucgccugucggcuggaggugauaucuggguaacacgagagcccuaugugucauguagccuagacaaaugcuaccaguuugcccucggccaggggaccacucugaagaacaagcacaguaauggaacaacccaugaucguacgccucacagaacucuucugaugaacgaguugggcgucccauuccaucucgguaccaaacagguguguauugcaugguccucuagcuccugcuaugacgggaaggccuggcugcacaucuguguuacaggagaugacaaaaaugcuacugcaucaaucauuuacgauggcaugcugguggacaguauaggcagcuggucuaagaacauccucaggacccaagaauccgagugcgucuguauuaaugggacaugcgccgugguaaugaccgauggaucagcuagcgguaaagccgacacgcggguuuuauuuauccgcgaaggcaagauaauuaacaucaguccccugucuggguccgcgcagcacguggaggagugcagcuguuauccuagauacccagaagucaggugcgugugucgggauaacuggaagggaucgaaucgcccgauccuuuauauuaacauggcagacuacucuaucgaguccucauacgugugcaguggcuuggucggugauacuccccgaaaugacgacagcuccucuagcucaaacuguagagauccuaauaacgaaaggggagccccagggguuaaaggcugggcuuucgacgauggcaaugacguguggauggggcggacaauuaagaacggaagucguuccgguuaugagaccuuucgcguagugaauggcuggacuauggccaacagcaaaucucagauaaauagacaggucaucguggauucagacgauuggaguggguacagcggaauuuucuccguugaaggcaagaaaugcaucaacagguguuuuuauguggagcugauccggggucgaccccaagagccucgcgucugguggacaucuaauucgauuauaguguucugcgggaccagcggcacguacggaaccggcuccuggccagacggggcaaacaucaauuuuaugcccauuuga

SEQ ID NO: 151627 - RNA, 1401 nt, Artificial Sequence; identical to SEQ ID NO: 151626
  derived and/or modified CDS sequence (opt3) from neuraminidase__InfluenzaA__AGQ81800

SEQ ID NO: 151628 - RNA, 1401 nt, Artificial Sequence
  derived and/or modified CDS sequence (opt3) from neuraminidase__InfluenzaA__AGQ81801
augaaccccaaucagaagaucauugccauaggcagcgugucccugaucauugcuaucauuugccuccuuaugcaaaucgcaauacugaccacaacuaugacguugcacuucagacagaacgaguguucuaauccuucaaacaaucaggucaugccaugcgaaccgaucauuaucgagaggaacaccguucauuuaaauaguacaacuauugaacgggagaucugucccaaaguggccgaauacaagaacuggagcaaaccucagugccaaauaaccggguuugcgccauucuccaaggacaauucuauucgccugucggcuucaggagauaucuggguaacacgagagcccuaugugagcuguagucuagacaaaugcuaccaguuugcccucggucagggcaccacucugaagaacaagcacuccaaugggacaacccaugaucguacgccucacagaacucuucugaugaacgaguugggagucccauuccaucucggcaccaaacagguguguauugcauggucuagcuccucaugcuaugacgguaaggccuggcugcacaucuguguuacaggggaugacaaaaaugcuacugcaaguaucauuuacgauggaaugcugguggacagcauaggcucuugguccaagaacauccucaggacccaagaaucagagugcgucuguauuaauggcacaugcgccgugguaaugaccgaugggagcgcuaguggaaaagccgacacgcggguuuuauuuauccgcgaagguaagauaauuaacaucucuccccuguccggcagcgcgcagcacguggaggagugcucguguuauccuagauacccagaagucaggugcgugugucgggauaacuggaaggggucuaaucgcccgauccuuuauauuaacauggcagacuacuccaucgagucaaguuacgugugcagcggauuggucggcgauacuccccgaaaugacgacuccucuagcucaaguaacuguagagauccuaauaacgaaaggggugccccagggguuaaaggaugggcuuucgacgauggcaaugacguguggaugggccggacaauuaagaacgggucccguagcggauaugagaccuuucgcguagugaaugguuggacuauggccaacucuaaaucacagauaaauagacaggucaucguggauagugacgauuggagcggcuacuccgggauuuucucuguugaaggaaagaaaugcaucaacagguguuuuuauguggagcugauccggggccgaccccaagagccucgcgucugguggacaucgaauagcauuauaguguucugcgguaccuccgggacguacggcaccggaucauggccagacggcgcaaacaucaauuuuaugcccauuuga

SEQ ID NO: 151629 - RNA, 1401 nt, Artificial Sequence
  derived and/or modified CDS sequence (opt3) from neuraminidase__InfluenzaA__AGQ81802
augaaccccaaucagaagaucauugccauaggcagcgugucccugaucauugcuaucauuugccuccuuaugcaaaucgcacuguugaccacaacuaugacguuacacuucagacagaacgaguguucuaauccuucaaacaaucaggucaugccaugcgaaccgauaaucauugagaggaacaccguucaucugaauaguacaacuaucgaacgggagauuugucccaaaguggccgaauacaagaacuggagcaaaccucagugccaaaucaccggguuugcgccauucuccaaggacaauucuauacgccuaucggcuggaggugauauuuggguaacacgagagcccuaugugucauguagccucgacaaaugcuaccaguuugcccugggccaggggaccacucuuaagaacaagcacaguaauggaacaacccaugaucguacgccucacagaacucuguugaugaacgagcucggcgucccauuccaucuggguaccaaacagguguguaucgcaugguccucuagcuccugcuaugacgggaaggccuggcugcacauuuguguuacaggagaugacaaaaaugcuacugcaucaaucaucuacaacggcaugcucguggauaguauuggcagcuggucuaagaauauauuaaggacccaagaauccgagugcgucuguaucaacgggacaugcgccgugguaaugaccgacggaucagcuagcgguaaagccgauacgcggguucuguuuauucgcgaaggcgagaucauaaacauuaguccccuuucuggguccgcgcagcacguggaggaaugcagcuguuauccuagauacccagaggucaggugcgugugucgggacaauuggaagggaucgaaccgcccgaucuuguauaucaauauggcagauuacucuauugaauccucauacgugugcaguggccuggucggugacacuccccgaaacgaugacagcuccucuagcucaaauuguagagacccuaacaaugagaggggagccccagggguuaagggcugggcuuucgaugacggcaacgauguguggauggggcggacaaucaaaaauggaagucguuccgguuaugaaaccuuucgcguagugaacggcuggacuauggccaauagcaagucucagauuaacagacaggucauaguggacucagaugacuggaguggguacagcggaaucuucuccguugagggcaaaaagugcauuaauagguguuuuuauguggagcuaauccggggucgaccccaagaaccucgcgucugguggacaucuaacucgaucauuguguucugcgggaccagcggcacguacggaaccggcuccuggccagauggggcaaauauaaacuuuaugcccaucuga

SEQ ID NO: 151630 - RNA, 1401 nt, Artificial Sequence
  derived and/or modified CDS sequence (opt3) from neuraminidase__InfluenzaA__AGQ81803
augaaccccaaucagaagaucauugccauaggcagcgugucccugaucauugcuaucauuugccuccuuaugcaaaucgcaauacugaccacaacuaugacguugcacuucagacagaacgaguguucuaauccuucaaacaaucaggucaugccaugcgaaccgaucauuaucgagaggaacaccguucauuuaaauaguacaacuauugaacgggagaucugucccaaaguggccgaauacaagaacuggagcaaaccucagugccaaauaaccggguuugcgccauucuccaaggacaauucuauucgccugucggcuucaggagauaucuggguaacacgagagcccuaugugagcuguagucuagacaaaugcuaccaguuugcccucggucagggcaccacucugaagaacgagcacuccaaugggacaacccaugaucguacgccucacagaacucuucugaugaacgaauugggagucccauuccaucucggcaccaaacagguguguauugcauggucuagcuccucaugcuaugacgguaaagccuggcugcacaucuguguuacaggggaugacaagaaugcuacugcaaguaucauuuacgauggaaugcugguggacagcauaggcucuugguccaaaaacauccucaggacccaagagucagaaugcgucuguauuaauggcacaugcgccgugguaaugaccgaugggagcgcuaguggaaaggccgacacgcggguuuuauuuauccgcgaggguaaaauaauuaacaucucuccccuguccggcagcgcgcagcacguggaggaaugcucguguuauccuagauacccagaggucaggugcgugugucgggauaacuggaaggggucuaaucgcccgauccuuuauauuaacauggcagacuacuccaucgaaucaaguuacgugugcagcggauuggucggcgauacuccccgaaaugacgacuccucuagcucaaguaacuguagagauccuaauaacgagaggggugccccagggguuaagggaugggcuuucgacgauggcaaugacguguggaugggccggacaauuaaaaacgggucccguagcggauaugaaaccuuucgcguagugaaugguuggauaauggccaacucuaagucacagaucaauagacaggucauuguggauagugacgauuggagcggcuacuccgggaucuucucuguugagggaaagaagugcaucaacagguguuuuuauguggagcugauucggggccgaccccaagaaccucgcgucugguggacuucgaauagcauaaucguguucugcgguacauccgggaccuacggcacgggaucauggccagacggcgcaaacauuaauuuuaugcccaucuga

SEQ ID NO: 151631 - RNA, 1410 nt, Artificial Sequence
  derived and/or modified CDS sequence (opt3) from neuraminidase__InfluenzaA__AGQ81804
augaaccccaaucagaagaugaucgccauuggcgcugugagccugaccauagcaaucauuugccuccuuaugcaaacagccauccuggucacuacgaugaccuugcacuucaaacauaacgaguguacaaauuccucuaacaaucaggcggcuccuugcgggccaauuaucauagaaagaaacguuacugaggugguacacuuaaauucaaccacacuggaaaaggagaucuguccgaaagccgcaggauacaggaacuggaguaagccccagugccagauuaccgguuuugccccuuucagcaaagacaauuccauccggcuaucugcuggcggggauauuugggugacucgcgaaccauaugucucguguggacucggcaagugcuaccaauuugcacugggucaggggacaacccuugacaacucacauagcaauggaacgagucacgaucgaacuccccaucguacccuguugaugaacgagcucggcgugccuuuccaccugaugacaaagcagguuuguaucgccugguccucuagcuccugccacgacggcaaggcuuggcugcaugugugugucacuggggaugacagaaaugccaccgcgucaauaauuuauggagguauccucguggauaguauuggcagcuggucuaaaaacaucuuaaggacacaggaguccgaaugcguauguaucaaugggaccugcgcaguugugaugacggacggaucagccagcggcaaagcugauacucggauucuguuuauacgcgaggguaagaucguccacauuaguccacuuucuggguccgcccaacauguggaagagugcagcuguuacccccaguauccugaggugagaugcgucuguagggacaacuggcggggaucgaaccgcccaguuuuguacaucaauauggcagauuauucuauagacuccggcuacgugugcucaggccugguaggggauacaccgcgaaacgacgacgugaguagcuccucuaauuguaaagaucccaacaaugaaagaggagcuccuggugucaagggcugggccuucgacaacgggaaugauauuuggaugggaaggaccaucgacaaggauagccggucaggcuacgagacuuuucgugugaucgacgguuggaacacagcgaauaguaaaucccagaccagccgccagguuauuguggggucugauaacucaaguggcuauagcggaaucuucuccgucgaaggcaagucuugcauuaauagauguuuuuacguggagcuaauaagggggcggccaaaagaaacgcgaguaugguggaccucgaacagcaucauuguuuucugcggaacauccgguacuuauggcaccgggucauggcccgacggagccaauaucaacuuuaugccuaucuga

SEQ ID NO: 151632 - RNA, 1401 nt, Artificial Sequence
  derived and/or modified CDS sequence (opt3) from neuraminidase__InfluenzaA__AGQ81805
augaaccccaaucagaagaucauugccauaggcagcgugucccugaucauugcuaucauuugccuccuuaugcaaaucgcacuguugaccacaacuaugacguuacacuucagacagaacgaguguucuaauccuucaaacaaucaggucaugccaugcgaaccgauaaucauugagaggaacaccguucaucugaauaguacaacuaucgaacgggagauuugucccaaaguggccgaauacaagaacuggagcaaaccucagugccaaaucaccggguuugcgccauucuccaaggacaauucuauacgccuaucggcuggaggugauauuuggguaacacgagagcccuaugugucauguagccucgacaaaugcuaccaguuugcccugggccaggggaccacuaugaagaacaagcacaguaauggaacaacccaugaucguacgccucacagaacucuucugaugaacgaguugggcgucccauuccaucucgguaccaaacagguguguaucgcaugguccucuagcuccugcuaugacgggaaggccuggcugcacauuuguguuacaggagaugacaaaaaugcuacugcaucaaucaucuacgauggcaugcugguggacaguauuggcagcuggucuaagaacauacucaggacccaagaauccgagugcgucuguaucaaugggacaugcgccgugguaaugaccgauggaucagcuagcgguaaagccgacacgcggguuuuauuuauucgcgaaggcaagaucauaaacauuaguccccugucuggguccgcgcagcacguggaggagugcagcuguuauccuagauacccagaagucaggugcgugugucgggauaacuggaagggaucgaaucgcccgauccuuuauaucaacauggcagacuacucuauugaguccucauacgugugcaguggcuuggucggugauacuccccgaaaugacgacagcuccucuagcucaaacuguagagggccuaauaacgaaaggggagccccaggcguuaaaggcugggcuuucgaugacgggaaugauguguggaugggacggacaaucaagaacgguagucguuccggcuaugagaccuuucgcguagugaauggguggacuauggccaacagcaaaucucagauuaauagacaggucauaguggacucagaugacuggaguggauacagcggcaucuucuccguugaagguaagaaaugcauuaacagguguuuuuauguggagcugauccgggggcgaccccaagagccucgcgucugguggacaucuaauucgaucauuguguucugcggcaccagcggaacguacggcaccggguccuggccagauggagcaaacauaaauuuuaugcccaucuga

SEQ ID NO: 151633 - RNA, 1401 nt, Artificial Sequence
  derived and/or modified CDS sequence (opt3) from neuraminidase__InfluenzaA__AGQ81807
augaaccccaaucagaagaucaccgccauuggcagcauaucccugaucauugcuaucauuugccuccuuaugcaaaucgcaauacugacaacuacgaugaccuugcacuucagacagaacgaguguaggaauccuucuaacaaucaggugaugccaugcgaaccggucaucauugagcggaacacaguucauuuaaauucaacuaccaucgaacgcgagauuugucccaaaguggccgaauacaagaacuggaguaaaccucagugccaaaucacaggguuugcgccauucagcaaggacaauuccauacgacugucugcuucgggagauauuuggguaacccgugagcccuaugugucauguagccuaaacaaaugcuaccaguuugcccucggucagggcacuacacugaagaauaagcacaguaacgggaccacgcaugacagaacuccucacaggacccuucugaugaaugaguugggagucccauuccaucucggcacaaaacagguguguaucgcaugguccucuagcuccugcuaugaugguaaggccuggcugcacauuuguguuacuggggacgauaaaaacgcuaccgcaucaaucaucuacgacggaaugcugguggauaguauuggcagcuggucuaagaauauacuccggacacaagaauccgagugcgucuguaucaacggaaccugcgccgugguaaugacggacgggucagcuagcggaaaagccgauacucgcguuuuauuuauuaaggaagguaagaucauaaacauuaguccccugucuggcuccgcgcagcacguggaggagugcagcuguuauccuagauacccagaagucaggugcgugugucgggacaauuggaaagggucgaaccgcccgauccuuuauaucaauauggcagauuacucuauugaguccucauacgugugcaguggauuggucggcgacacaccccgaaacgaugacagcuccucuagcucaaauuguagagacccuaacaaugaaaggggugccccagggguuaagggaugggcuuucgaugacggcaacgauguguggaugggccggaccaucaaaaaugggagucguuccggauaugagacuuuucgcguagugaacgguuggauuauggccaauagcaagucucagauaaacagacaggucaucguggacucagaugacuggaguggcuacagcgggauuuucuccguugaaggcaaaaagugcaucaauagguguuuuuauguggagcugauccggggccgaccccaagagccucgcgucugguggacaucuaacucgauuauaguguucugcgguaccagcgggacguacggcaccggauccuggccagauggcgcaaauaucaacuuuaugcccauuuga

SEQ ID NO: 151634 - RNA, 1401 nt, Artificial Sequence
  derived and/or modified CDS sequence (opt3) from neuraminidase__InfluenzaA__AGQ81808
augaaccccaaucagaagaucauugccauaggcagcgugucccugaccaucgcuauuaucugcuuccucaugcaaauugcaauccuuacaacuacgaugacccugcacuuuaaacagaacgaguguucuaauccuucaaacaaucaggucguuccaugcgaaccgauauugaucgagagaaacacagugcauuuaaauaguacuaccauugaaaaggagguaugucccaaaguggccgaauacaagaacuggagcaaaccucagugccaaaucacaggguucgcgccauuuuccaaggacaauucuauuaggcugucggcuggaggugauaucugggucacccgggagcccuaugugucauguagccuaggcaagugcuaccaguucgcccucgggcagggaacuacacugaaaaacaaucacaguaacggcaccacgcaugaccgcacuccucaccgaacccuucugaugaaugaguuggguguuccauuucaucucgggacaaagcagguuuguauagcaugguccucuagcuccugcuaugauggaaaagccuggcugcacauuugugucacuggcgacgauaagaacgcuaccgcaucaaucauuuacgacggcaugcugguggauaguaucgggagcuggucuaaaaauauccuccguacacaagaauccgagugcguauguauuaacggaaccugcgccguugugaugacggacgguucagcuagcggcaaggccgauacuagaauauuauucaucagggaagggaagauuaucaacauaaguccccugucuggauccgcgcagcacgucgaggagugcagcuguuauccucgguacccagaagugcgcugcguguguagagacaauuggaaaggcucgaacaggccgguccuuuauauuaauauggcagauuacucuguugaguccucauacgugugcagugguuugguaggggacacaccccggaacgaugacagcuccucuagcucaaauugucgcgacccuaacaaugaacgaggagccccaggcgugaagggcugggcuuuugaugacgggaacgaugucuggaugggaagaaccaucaggaauaacagucgguccgguuaugagacuuuccgugugguuaauggcuggacaaccgccaacagcaaaucucagaucaaucgccagauuaucguggacucagaaaacuggaguggguacagcggaauauuuuccgucgagggcaagaauugcauuaacagauguuucuauguggagcugaucaggggucggccccaagaaccucgaguaugguggacgucuaacucgauuaucguguuuugcgggaccagcggcacauacggaacuggcuccuggccagauggggcaaauaucaacuucaugcccauuuga

SEQ ID NO: 151635 - RNA, 1401 nt, Artificial Sequence
  derived and/or modified CDS sequence (opt3) from neuraminidase__InfluenzaA__AGQ81809
augaaccccaaucagaagaucaccgccauuggcagcgugucccugauaaucgcuauuaucugccuccuuaugcaaauugcaauccugacaacuacgaugaccuugcacuucagacagaacgaguguucuaauccuucaaacaaucaggucaugccaugcgaaccgauaaucauugagaggaacacaguucauuuaaauaguacuaccaucgaacgggagauuugucccaaaguggccgaauacaagaacuggagcaaaccucagugccaaaucacaggguuugcgccauucuccaaggacaauucuauacgccugucggcuggaggugauauuuggguaacccgagagcccuaugugucauguagcccugacaaaugcuaccaguuugcccuaggccaggggacuacacucaagaacaagcacaguaauggaaccacgcaugaucguacuccacacagaacccugcuuaugaacgagcugggcguccccuuccauuuggguacaaaacagguguguaucgcaugguccucuagcuccugcuaugacgggaaggccuggcuccacauuuguguuacuggagaugacaaaaaugcuaccgcaucaaucaucuacgauggcaugcugguggacaguauuggcagcuggucuaagaacauacugaggacacaagaauccgagugcgucuguaucaaugggaccugcgccgugguaaugacggauggaucagcuagcggugaagccgacacucggauucucuuuauccgcgagggcaaaauaauuaacaucaguccuuuaucuggguccgcgcagcacguugaggaaugcagcuguuauccaagauacccggaggugaggugcgucugucgggauaacuggaagggaucgaaucgccccaucauuuauaucaacaugguggacuacucuauuggcucccgauacgugugcucaggucuggucggggauacaccuagaaaugacgacaguaccagcuccucuaacuguagggauccaaauaacgaacggggagcacccggcguuaagggcugggccuucgacgaugggaaugacguguggaugggacguacuaucaaaaacgguagccgcucaggcuaugagacauuuagaguaauaaauggguggaccauggcuaacaguaagucccagauuaauaggcaagugaucgucgauagcgacaacuggucuggauacucaggcaucuucaguguggaagguaaaaagugcauuaaucgguguuuuuauguugagcuuauacgagggcgcccucaggagccaagagugugguggacgagcaacuccaucauugucuucugcggcaccucuggaacauacggcacugggucguggcccgauggagccgacaucaauuuuaugccgauuuga

SEQ ID NO: 151636 - RNA, 1401 nt, Artificial Sequence
  derived and/or modified CDS sequence (opt3) from neuraminidase__InfluenzaA__AGQ81810
augaaccccaaucagaagauccuggccauuggcagcgugucccucaccauagcuaucauuugcuuccuuaugcaaaucgcaauucugacaacuacgaugaccuugcacuuuaaacagaacgaguguucuaauccuucaaacaaucaggucguuccaugcgaaccgaucuuaauagagagaaacacagugcaucugaauaguacuaccaucgaaaaggagguaugucccaaaguggccgaauacaagaacuggagcaaaccucagugccaaauuacaggguucgcgccauuuuccaaggacaauucuaucaggcuaucggcuggaggugauauuugggucacccgggagcccuaugugucauguagccucggcaagugcuaccaguucgcccuggggcagggaacuacacuuaaaaacaaucacaguaacggcaccacgcaugaccgcacuccucaccgaacccuguugaugaaugagcucgguguuccauuucaucuggggacaaagcagguuuguaucgcaugguccucuagcuccugcuaugauggaaaagccuggcugcacauaugugucacuggcgacgauaagaacgcuaccgcaucaauuaucuacgacggcaugcucguggauaguauugggagcuggucuaaaaauaucuuacguacacaagaauccgagugcguauguaucaacggaaccugcgccguugugaugacggacgguucagcuagcggcaaggccgauacuaggauucuguucauaagagaagggaagaucauuaacaucaguccccuuucuggauccgcgcagcacgucgaggagugcagcuguuauccucgguacccagaagugcgcugcguguguagagacaauuggaaaggcucgaacaggccggucuuguauauaaauauggcagauuacucuauugaguccucauacguuugcaguggucuggugggggacacaccccggaacgaugacagcuccucuagcucaaauugucgcgacccuaacaaugaacgaggagccccaggcguaaagggcugggcuuuugaugacgggaacgauguguggaugggaagaaccaucaggaauaacagucgguccgguuaugagacuuuccgugucgugaauggcuggacaaccgccaacagcaaaucucagaucaaucgccagguuauuguggacucagaaaacuggaguggguacagcggaaucuuuuccgucgagggcaagaauugcauuaacagauguuucuauguggagcuaauaaggggucggccccaagaaccucgaguaugguggacgucuaacucgaucauuguguuuugcgggaccagcggcacauacggaacuggcuccuggccagauggggcaaauaucaacuucaugcccaucuga

SEQ ID NO: 151637 - RNA, 1401 nt, Artificial Sequence
  derived and/or modified CDS sequence (opt3) from neuraminidase__InfluenzaA__AGQ81811
augaaccccaaucagaagaucauugccauaggcagcgugucccugaccaucgcuauuaucugcuuccucaugcaaauugcaauccuuacaacuacgaugacccugcacuuuaaacagaacgaguguucuaauccuucaaacaaucaggucguuccaugcgaaccgauauugaucgagagaaacacagugcauuuaaauaguacuaccauugaaaaggagguaugucccaaaguggccgaauacaagaacuggagcaaaccucagugccaaaucacaggguucgcgccauuuuccaaggacaauucuauuaggcugucggcuggaggugauaucugggucacccgggagcccuaugugucauguagccuaggcaagugcuaccaguucgcccucgggcagggaacuacacugaaaaacaagcacaguaauggcaccacgcaugaccgcacuccucaccgaacccuucugaugaacgaguuggguguuccauuucaucucgggacaaaacagguguguauagcaugguccucuagcuccugcuaugauggaaaggccuggcugcacauuugugucacuggcgacgauaaaaaugcuaccgcaucaaucauuuacgacggcaugcugguggauaguaucgggagcuggucuaagaacauccuccguacacaagaauccgagugcguauguauuaauggaaccugcgccguugugaugacggacgguucagcuagcggcaaggccgauacuagaauauuauucaucagggaagggaaaauugucaacaucaguccccugucuggauccgcgcagcacguggaggagugcagcuguuauccucgguacccagaagugcgcugcgucuguagagacaacuggaagggcucgaauaggccgguucuuuauauaaacauggcagauuacucuguggaguccucauacguaugcagugguuuggugggggacacaccccggaaugaugacagcuuuuccucuagcaacugucgcgacccuaauaacgaacgaggagccccaggcgucaaaggcugggcuuucgaugacgggaaugauguguggaugggaagaaccauuaggaacgacucacggagugguuaugagacuuuucguguugugaauggcuggacaaccgccaacuccaagagccagaucaaucgccaggucaucguggauucugaaucauggaguggguacagcggaauuuucuccguagagggcaaaaacugcaucaauagauguuuuuauguugagcugauuaggggucggccccaagaaccucgagugugguggacgucuaacucgauaaucgucuucugcgggaccagcggcacauacggaacuggcuccuggccagacggggcaaauauuaacuuuaugcccaucuga

SEQ ID NO: 151638 - RNA, 1410 nt, Artificial Sequence
  derived and/or modified CDS sequence (opt3) from neuraminidase__InfluenzaA__AGQ81812
augaaccccaaucagaagaucauuaccauaggcagcgugucccugacaaucgccacuauuugcuuccucaugcaaaucgcuauucuugucacgaccaucacacugcacuuuaaacagaacgaguguucuauaccuucaaauaaccagguugugccaugcgaaccgaucauuguagagagaaauaucacugaaauuguguacuugaacaauaccacaaucgagaaggaauuaugucccaaacugaccgaguauagggacuggaguaagccucagugccaaauaacuggguucgcaccauuuagcaaagauaacuccauucggcuaucugccggaggugacaucugggucacacgcgagcccuacgugucguguucaccuaauaagugcuaucaguucgcgcucggccaggggaccacgcuggauaacaagcauagcaauggaacuauucacgaccgaaucccacaucguacccuucugaugaacgaauugggcguucccuuucaccucgguacaaaacagguguguaucgcuuggaguuccucuagcugccaugaugggaaggccuggcugcacgucugugugacuggagacgauagaaaugcaaccgccuccuucauuuacgacggcaugcugguagauucaauaggcaguuggagccaaaacauccucaggacacaggagucugaaugcguuuguauuaaugggaccugcacgguggucaugacugacggauccgcuucaggucgggcagauacacgcaucuuauuuauaaaagagggcaagauugugcacgugagcccucugagugggucugcccagcauaucgaggaaugcuccuguuauccaagauacccggacgucaggugcguuugucgggauaacuggaaaggaagcaaccgccccaucauugacaucaauguggcugacuauucgauugauucuuccuacguaugcucaggccuugugggugacaccccucgaaacgaugacaguagcuccaauucuaacuguaaggauccaaauaacgagagagggaaucccggagucaagggcugggccuucgacuacggcaacgauguguggauggggaggacuauaagcaaagacucacggaguggauaugaaacauuucguguuaucgguggcuggaccacggcaaauuccaagagccaggugaaccgccaagucauuguggauaauaacaauuggucuggguacucaggaaucuucaguguagagggcaaaagcugcaucaacagauguuuuuauguugaauugauuaggggucggccucaggagacccgagugugguggacauccaauucuauagucguguucugcgggacuucgggcaccuacggaacaggcagcuggccagacggggcgaacaucaacuuuaugcccauuuga

SEQ ID NO: 151639 - RNA, 1401 nt, Artificial Sequence
  derived and/or modified CDS sequence (opt3) from neuraminidase__InfluenzaA__AGQ81814
augaaccccaaucagaagaucauugccauaggcagcgugucccugaccaucgcuauuaugugcuuccucaugcaaaucgcaauucuuacaacuacgaugacccugcacuuuaaacagaacgaguguucuaauccuucaaacaaucaggucguuccaugcgaaccgaucuugauagagagaaacacagugcauuuaaauaguacuaccaucgaaaaggagguaugucccaaaguggccgaauacaagaacuggagcaaaccucagugccaaauuacaggguucgcgccauuuuccaaggacaauucuaucaggcugucggcuggaggugauauuugggucacccgggagcccuaugugucauguagccuaggcaagugcuaccaguucgcccucgggcagggaacuacacugaaaaacaaucacaguaacggcaccacgcaugaccgcacuccucaccgaacccuucugaugaaugaguuggguguuccauuucaucucgggacaaaacagguguguaucgcaugguccucuagcuccugcuaugauggaaaggccuggcugcacauaugugucacuggcgacgauaagaacgcuaccgcaucaauuaucuacgacggcaugcugguggauaguauugggagcuggucuaaaaauauccuccguacacaagaauccgagugcguauguaucaacggaaccugcgccguugugaugacggacgguucagcuagcggcaaggccgauacuagaauuuuauucauaagggaagggaagaucauuaacaucaguccccugucuggauccgcgcagcacgucgaggagugcagcuguuauccucgguacccagaagugcgcugcguguguagagacaauuggaaaggcucgaacaggccgguccuuuauauaaauauggcagauuacucuguugaguccucauacgugugcagugguuugguaggggacacaccccggaacgaugacagcuccucuagcucaaauugucgcgacccuaacaaugaacgaggagccccaggcgugaagggcugggcuuuugaugacgggaacgaugucuggaugggaagaaccauuaggaauaacagucgguccgguuaugagacuuuccgugugguuaauggcuggacaaccgccaacagcaaaucucagaucaaucgccaggugaucgucgacucagaaaacuggaguggguacagcggaaucuuuuccguggagggcaagaauugcauuaacagauguuucuauguagagcugauuaggggucggccccaagaaccucgaguuugguggacgucuaacucgauaaucguguuuugcgggaccagcggcacauacggaacuggcuccuggccagauggggcaaauauuaacuucaugcccaucuga

SEQ ID NO: 151640 - RNA, 1401 nt, Artificial Sequence
  derived and/or modified CDS sequence (opt3) from neuraminidase__InfluenzaA__AGQ81815
augaaccccaaucagaagaucauugccauaggcagcguuucccugaccaucgcuauuaucugcuuccucaugcaaauugcaauccuuacaacuacgaugacccugcacuuuaaacagaacgaguguucuaauccuucaaacaaucaggucguuccaugcgaaccgauauugaucgagagaaacacagugcauuuaaauaguacuaccauugaaaaggagguaugucccaaaguggccgaauacaagaacuggagcaaaccucagugccaaaucacaggguucgcgccauuuuccaaggacaauucuauuaggcugucggcuggaggugauaucugggucacccgggagcccuaugugucauguagccuaggcaagugcuaccaguucgcccucgggcagggaacuacacugaaaaacaagcacaguaauggcaccacgcaugaccgcacuccucaccgaacccuucugaugaacgaguuggguguuccauuucaucucgggacaaaacagguguguauagcaugguccucuagcuccugcuaugauggaaaggccuggcugcacauuugugucacuggcgacgauaaaaaugcuaccgcaucaaucauuuacgacggcaugcugguggauaguaucgggagcuggucuaagaacauccuccguacacaagaauccgagugcguauguauuaauggaaccugcgccguugugaugacggacgguucagcuagcggcaaggccgauacuagaauauuauucaucagggaagggaaaauuaucaacauaaguccccugucuggauccgcgcagcacgucgaggagugcagcuguuauccucgguacccagaagugcgcugcguguguagagacaacuggaagggcucgaauaggccgguccuuuauauuaacauggcagauuacucuguugaguccucauacgugugcagugguuugguaggggacacaccccggaaugaugacagcuccucuagcucaaacugucgcgacccuaauaacgaacgaggaaccccaggcgugaaaggcugggccuuugaugacgggaaugaugucuggaugggaagaacuaucaggaacgacagucgguccgguuaugagacauuccgugugaucaauggcuggaccacggcuaacagcaagucucagauuaaucgccagguuaucguggauucagaaaacuggaguggguacagcggaauauuuuccgucgagggcaaaaauugcauuaacagauguuucuauguggagcugaucaggggucggccccaagaaccucgaguaugguggaccucuaauucgauuaucguguuuugcgggacaagcggcacuuacggaaccggcuccuggccagacggggccaacaucaacuauaugcccauuuga

SEQ ID NO: 151641 - RNA, 1401 nt, Artificial Sequence
  derived and/or modified CDS sequence (opt3) from neuraminidase__InfluenzaA__AGQ81816
augaaccccaaucagaagaucauugccauaggcagcguuucccugaccaucgcuauuaucugcuuccucaugcaaauugcaauccuuacaacuacgaugacccugcacuuuaaacagaacggguguucuaauccuucaaacaaucaggucguuccaugcgagccgauauugaucgaaagaaacacagugcauuuaaauaguacuaccauugagaaggaaguaugucccaaaguggccgaguacaagaacuggagcaaaccucagugccaaaucacaggauucgcgccauuuuccaaggacaauucuauuaggcugucggcugguggcgauaucugggucacccgggaacccuaugugucauguagccuagggaagugcuaccaguucgcccucggacagggcacuacacugaaaaacaagcacaguaaugguaccacgcaugaccgcacuccucaccgaacccuucugaugaacgaguuggggguuccauuucaucucggaacaaaacagguguguauagcaugguccucuagcuccugcuaugauggcaaggccuggcugcacauuugugucacuggcgacgauaaaaaugcuaccgcaucaaucauuuacgacgggaugcugguggauaguaucggaagcuggucuaagaacauccuccguacacaagaguccgaaugcguauguauuaaugguaccugcgccguugugaugacggacggcucagcuagcgggaaggccgauacuagaauauuauucaucagggagggaaaaauuaucaacauaaguccccugucuggcuccgcgcagcacgucgaagagugcagcuguuauccucgguacccagaggugcgcugcguguguagagacaacuggaaggguucgaauaggccgguccuuuauauuaacauggcagauuacucuguugaauccucauacgugugcaguggguugguaggagacacaccccggaaugaugacagcuccucuagcucaaacugucgcgacccuaauaacgagcgaggcaccccaggcgugaaagggugggccuuugaugacggaaaugaugucuggauggguagaacuaucaggaacgacagucgguccggcuaugaaacauuccgugugaucaauggguggaccacggcuaacagcaagucucagauuaaucgccagguuaucguggauucagagaacuggaguggauacagcggcauauuuuccgucgaagguaaaaauugcauuaacagauguuucuauguggagcugaucagggggcggccccaagagccucgaguaugguggaccucuaauucgauuaucguguuuugcggcacaagcggaacuuacggcaccggguccuggccagacggagccaacaucaacuauaugcccauuuga

SEQ ID NO: 151642 - RNA, 1401 nt, Artificial Sequence; identical to SEQ ID NO: 151640
  derived and/or modified CDS sequence (opt3) from neuraminidase__InfluenzaA__AGQ81817

SEQ ID NO: 151643 - RNA, 1401 nt, Artificial Sequence; identical to SEQ ID NO: 151640
  derived and/or modified CDS sequence (opt3) from neuraminidase__InfluenzaA__AGQ81818

SEQ ID NO: 151644 - RNA, 1401 nt, Artificial Sequence; identical to SEQ ID NO: 151640
  derived and/or modified CDS sequence (opt3) from neuraminidase__InfluenzaA__AGQ81819

SEQ ID NO: 151645 - RNA, 1401 nt, Artificial Sequence
  derived and/or modified CDS sequence (opt3) from neuraminidase__InfluenzaA__AGQ81820
augaaccccaaucagaagaucauugccauaggcagcgugucccugaccaucgcuauuaucugcuuccucaugcaaauugcaauccuuacaacuacgaugacccugcacuuuaaacagaacgaguguucuaauccuucaaacaaucaggucguuccaugcgaaccgauauugaucgagagaaacacagugcauuuaaauaguacuaccauugaaaaggagguaugucccaaaguggccgaauacaagaacuggagcaaaccucagugccaaaucacaggguucgcgccauuuuccaaggacaauucuauuaggcugucggcuggaggugauaucugggucacccgggagcccuaugugucauguagccuaggcaagugcuaccaguucgcccucgggcagggaacuacacugaaaaacaagcacaguaauggcaccacgcaugaccgcacuccucaccgaacccuucugaugaacgaguuggguguuccauuucaucucgggacaaaacagguguguauagcaugguccucuagcuccugcuaugauggaaaggccuggcugcacauuugugucacuggcgacgauaaaaaugcuaccgcaucaaucauuuacgacggcaugcugguggauaguaucgggagcuggucuaagaacauccuccguacacaagaauccgagugcguauguauuaauggaaccugcgccguugugaugacggacgguucagcuagcggcaaggccgauacuagaauauuauucaucagggaagggaaaauuaucaacauaaguccccugucuggauccgcgcagcacgucgaggagugcagcuguuauccucgguacccagaagugcgcugcguguguagagacaacuggaagggcucgaauaggccgguccuuuauauuaacauggcagauuacucuaucgaguccucauacguuugcagugguuuggugggggacacaccccggaaugaugacagcuccucuagcucaaacugucgcgacccuaauaacgaacgaggaaccccaggcguaaaaggcugggccuuugaugacgggaaugauguguggaugggaagaacuaucaggaacgacagucgguccgguuaugagacauuccgugucauuaauggcuggaccacggcuaacagcaagucucagaucaaucgccaggugauuguugauucagaaaacuggaguggguacagcggaauauuuuccguggagggcaaaaauugcaucaacagauguuucuaugucgagcugauuaggggucggccccaagaaccuaaggugugguggaccucuaauucgaucaucguauuuugcgggacaagcggcacuuacggaaccggcuccuggccagacggggccaacauuaacuucaugcccauauga

SEQ ID NO: 151646 - RNA, 1401 nt, Artificial Sequence
  derived and/or modified CDS sequence (opt3) from neuraminidase__InfluenzaA__AGQ81822
augaaccccaaucagaagaucauugccauaggcagcgugucccugaccaucgcuauuaucugcuuccucaugcaaauugcaauccuuacaacuacgaugacccugcacuuuaaacagaacgaguguucuaauccuucaaacaaucaggucguuccaugcgaaccgauauugaucgagagaaacacagugcauuuaaauaguacuaccauugaaaagaaaguaugucccaagguggccgaguacaaaaacuggagcaagccucagugccaaaucacaggguucgcgccauuuuccaaggacaauucuauuaggcugucggcuggaggugauaucugggucacccgggaacccuaugugucauguagccuaggcaaaugcuaccaguucgcccucgggcagggaacuacacugaagaacaaacacaguaauggcaccacgcaugaccgcacuccucaccgaacccuucugaugaacgaguuggguguuccauuucaucucgggacaaagcagguuuguauagcaugguccucuagcuccugcuaugauggaaaagccuggcugcacauuugugucacuggcgacgauaagaaugcuaccgcaucaaucauuuacgacggcaugcugguggauaguaucgggagcuggucuaagaacauccuccguacacaagaguccgaaugcguauguauuaauggaaccugcgccguugugaugacggacgguucagcuagcggcaaagccgauacuagaauauuauucaucagggaggggaagauuaucaacauaaguccccugucuggauccgcgcagcacgucgaagagugcagcuguuauccucgguacccagaggugcgcugcguguguagagacaacuggaaaggcucgaauaggccgguccuuuauauuaacauggcagauuacucuguugaauccucauacgugugcagugguuugguaggggacacaccccggaaugaugacagcuccucuagcucaaacugucgcgacccuaauaacgagcgaggaaccccaggcgugaagggcugggccuuugaugacgggaaugaugucuggaugggaagaacuaucaggaacgacagucgguccgguuaugaaacauuccgugugaucaauggcuggaccacggcuaacagcaaaucucagauuaaucgccagguuaucguggauucagagaacuggaguggguacagcggaauauuuuccgucgaaggcaagaauugcauuaacagauguuucuauguggagcugaucaggggucggccccaagagccucgaguaugguggaccucuaauucgauuaucguguuuugcgggacaagcggcacuuacggaaccggcuccuggccagacggggccaacaucaacuauaugcccauuuga

SEQ ID NO: 151647 - RNA, 1401 nt, Artificial Sequence
  derived and/or modified CDS sequence (opt3) from neuraminidase__InfluenzaA__AGQ81823
augaaccccaaucagaagaucauugccauaggcagcgugucccugaccaucgcuauuaucugcuuccucaugcaaauugcaauccuuacaacuacgaugacccugcacuuuaaacagaacgaguguucuaauccuucaaacaaucaggucguuccaugcgaaccgauauugaucgagagaaacacagugcauuuaaauaguacuaccauugaaaaggagguaugucccaaaguggccgaauacaagaacuggagcaaaccucagugccaaaucacaggguucgcgccauuuuccaaggacaauucuauuaggcugucggcuggaggugauaucugggucacccgggagcccuaugugucauguagccuaggcaagugcuaccaguucgcccucgggcagggaacuacacugaaaaacaagcacaguaauggcaccacgcaugaccgcacuccucaccgaacccuucugaugaacgaguuggguguuccauuucaucucgggacaaaacagguguguauagcaugguccucuagcuccugcuaugauggaaaggccuggcugcacauuugugucacuggcgacgauaaaaaugcuaccgcaucaaucauuuacgacggcaugcugguggauaguaucgggagcuggucuaagaacauccuccguacacaagaauccgagugcguauguauuaauggaaccugcgccguugugaugacggacgguucagcuagcggcaaggccgauacuagaauauuauucaucagggaagggaaaauuaucaacauaaguccccugucuggauccgcgcagcacgucgaggagugcagcuguuauccucgguacccagaagugcgcugcguguguagagacaacuggaagggcucgaauaggccgguccuuuauauuaacauggcagauuacucuguugaguccucauacgugugcagugguuugguaggggacacaccccggaaugaugacagcuccucuagcucaaacugucgcgacccuaauaacgaacgaggagccccaggcgugaaaggcugggcuuuugaugacgggaaugaugucuggaugggaagaaccaucaggaacgacagucgguccgguuaugagacuuuccgugugguuaauggcuggacaaccgccaacagcaagucucagaucaaucgccaggugauugucgauucagaaaacuggaguggguacagcggaaucuuuuccguggagggcaaaaauugcauuaacagauguuucuauguagagcugauaaggggucggccccaagaaccucgaguuugguggacgucuaauucgaucauuguguuuugcgggaccagcggcacauacggaacuggcuccuggccagacggggcaaacaucaacuucaugcccaucuga

SEQ ID NO: 151648 - RNA, 1401 nt, Artificial Sequence; identical to SEQ ID NO: 151647
  derived and/or modified CDS sequence (opt3) from neuraminidase__InfluenzaA__AGQ81824

SEQ ID NO: 151649 - RNA, 1401 nt, Artificial Sequence; identical to SEQ ID NO: 151647
  derived and/or modified CDS sequence (opt3) from neuraminidase__InfluenzaA__AGQ81825

SEQ ID NO: 151650 - RNA, 1401 nt, Artificial Sequence
  derived and/or modified CDS sequence (opt3) from neuraminidase__InfluenzaA__AGQ81831
augaaccccaaucagaagauccuggccauuggcagcgugucccucaccauagcuaucauuugcuuccuuaugcaaaucgcaauucugacaacuacgaugaccuugcacuuuaaacagaacgaguguucuaauccuucaaacaaucaggucguuccaugcgaaccgaucuuaauagagagaaacacagugcaucugaauaguacuaccaucgaaaaggagguaugucccaaaguggccgaauacaagaacuggagcaaaccucagugccaaauuacaggguucgcgccauuuuccaaggacaauucuaucaggcuaucggcuggaggugauauuugggucacccgggagcccuaugugucauguagccucggcaagugcuaccaguucgcccuggggcagggaacuacacuuaaaaacaagcacaguaauggcaccacgcaugaccgcacuccucaccgaacccuguugaugaacgagcucgguguuccauuucaucuggggacaaaacagguguguaucgcaugguccucuagcuccugcuaugauggaaaggccuggcugcacauaugugucacuggcgacgauaaaaaugcuaccgcaucaauuaucuacgacggcaugcucguggauaguauugggagcuggucuaagaacaucuuacguacacaagaauccgagugcguauguaucaauggaaccugcgccguugugaugacggacgguucagcuagcggcaaggccgauacuaggauucuguucauaagagaagggaaaaucgucaacauuaguccccuuucuggauccgcgcagcacguggaggagugcagcuguuauccucgguacccagaagugcgcugcgucuguagagacaacuggaagggcucgaauaggccgguuuuguauaucaacauggcagauuacucuguggaguccucauacguaugcaguggucuggugggggacacaccccggaaugaugacagcuuuuccucuagcaacugucgcgacccuaauaacgaacgaggagccccaggcgucaaaggcugggcuuucgaugacgggaaugauguguggaugggaagaaccauaaggaacgacucacggagugguuaugagacuuuucguguugugaauggcuggacaaccgccaacuccaagagccagauuaaucgccaggucaucguggauucugaaucauggaguggguacagcggaaucuucuccguagagggcaaaaacugcauuaauagauguuuuuauguugagcuaaucaggggucggccccaagaaccucgagugugguggacgucuaacucgauuauagucuucugcgggaccagcggcacauacggaacuggcuccuggccagacggggcaaauaucaacuuuaugcccauuuga

SEQ ID NO: 151651 - RNA, 1401 nt, Artificial Sequence; identical to SEQ ID NO: 151640
  derived and/or modified CDS sequence (opt3) from neuraminidase__InfluenzaA__AGQ81837

SEQ ID NO: 151652 - RNA, 1401 nt, Artificial Sequence; identical to SEQ ID NO: 151640
  derived and/or modified CDS sequence (opt3) from neuraminidase__InfluenzaA__AGQ81838

SEQ ID NO: 151653 - RNA, 1401 nt, Artificial Sequence; identical to SEQ ID NO: 151647
  derived and/or modified CDS sequence (opt3) from neuraminidase__InfluenzaA__AGQ81839

SEQ ID NO: 151654 - RNA, 1401 nt, Artificial Sequence; identical to SEQ ID NO: 151647
  derived and/or modified CDS sequence (opt3) from neuraminidase__InfluenzaA__AGQ81840

SEQ ID NO: 151655 - RNA, 1401 nt, Artificial Sequence; identical to SEQ ID NO: 151640
  derived and/or modified CDS sequence (opt3) from neuraminidase__InfluenzaA__AGQ81841

SEQ ID NO: 151656 - RNA, 1410 nt, Artificial Sequence
  derived and/or modified CDS sequence (opt3) from neuraminidase__InfluenzaA__AGQ81843
augaaccccaaucagaagaucauuaccauaggcguggucaacacaacucugagcacgaucgcccuccuuauugggaucggaaaucugauuuucaacaccguuauccacgagaaaauaggugugcaucaaacaguaguguacccuacuaucaccccaccggucauucccaauugcuccgacacaaccaucacuuauaacaauacagugguuaacaauauuaccacgacuaucauaaacaaggcugaaaaacaguuuaagccuucuuugccauuaugucccuucagaggcuuuuucccuuuucacaaagauaaugcaauuaggcugggggagaacaaggacgugaucgucacccgggaaccauacgugucaugcgauaaugacgauuguuggaguuucgcccuagcgcagggagcucuccugggcacaaagcauagcaacgguacuauuaaagaccgcacccccuaucgaucccuuauccguuuuccuaucgggacagccccaguacugggaaauuacaaggagauuugcguugcauggucuucgucaagcuguuucgauggcaaagaauggaugcacgugugcaugaccggcaacgacaacgaugccagugggcagauaaucuaugcuggaaagaugacggacuccauuaaaucuuggagaagggauaucuugcggacucaagagagcgagugucagugcauagacgguacauguauugucgcagugaccgauggcccggccgcuuccucagccgaccaucgcaucuacuggaucagagaagggaagauuaucaaguaugaggacauucccaaaacuaagauacagcaccucgaagagugcaguuguuacguggauacagacgucuacugcaucugcagggauaauuggaaaggaagcaaccggccuuggaugcgcauuaauaacgagaccauccuggaaacgggcuauguuuguucuaaguuucacuccgacaccccacgacccgcggauccuucaacagugagcugcgacaguccaucuaauaucaacggugggcccggaguaaaaggcuucggcuuuagagcagggaaugauguguggcugggaaggacugucuccaccacaggucggagcggcuucgaggugauuaagguuacugaaggguggauaaacucgcucaaucaugccaaaucugugacccagacauuagucuccaacaaugacuggucaggauacaguggcagcuuuaucguggagaacaaugguuguuuccaaccgugcuucuauauugaacugauccgugggcgcccuaacagaaaugaugacguauccuggaccucuaacagcauuguuacuuuuuguggccuugauaacgagcccggaucaggcaauuggccagacgggaguaacaucggauucaugccuaaguga

SEQ ID NO: 151657 - RNA, 1410 nt, Artificial Sequence
  derived and/or modified CDS sequence (opt3) from neuraminidase__InfluenzaA__AGQ81845
augaaccccaaucagaagaucauuaccauaggcguggucaacacaacucugagcacgaucgcccuccuuauugggaucggaaaucugauuuucaacaccguuauccacgagaaaauaggugugcaucaaacaguaaucuacccuacuauuaccuccccaguggucccgaauugcucugacacaaccaucacuuauaacaauacagugguuaacaauauuaccacgacugugaucaacaaggcugaaaaacacuuuaagcccucauugccuuuauguccauucaaaggcuuuuuccccuuucauaaggauaaugcaauaagacugggggagaacaaggacgucauugugaccagggaaccuuacguaaguugcgauaaugacgauuguuggagcuucgcccuagcgcagggagcucuccugggcacaaaacacuccaacgguacuaucaaggaccggaccccauaucgcucucuuauucgauuucccaucgggacagccccuguucugggaaauuacaaagagaucugcguggcauggucgucaagcaguuguuucgauggcaaggaauggaugcaugucugcaugaccggcaacgacaacgaugccuccgggcagauuauauaugcuggaaaaaugacggacucuaucaagagcuggcguagagauauuuugaggacucaggaguccgagugucaaugcaucgacgguacauguauaguggcagugaccgauggcccagccgcuaauucagccgaccaccggauuuacuggauccgcgaagggaagaucauuaaauaugagaacaucccgaagacuaaaauucagcaccucgaagagugcaguuguuacgucgacacagauguuuacugcauaugcagagacaauuggaagggaagcaacaggcccuggaugcggaucaauaacgagaccauucuggaaacgggcuauguguguucuaaauuucauuccgauaccccucgcccagcggaccccucaacaguaagcugcgauaguccuucuaauaucaacggugggccaggagugaagggcuucggcuuucgaacugggaaugacgucuggcugggaagaaccguguccacaacugguaggagcggcuucgagguuaucaaagugaccgaaggguggauuaacucgcucaaucacgcaaagucugucacacagaccuuaguguccaacucagauuggaguggauacagcggcuccuuuauaguagagaauaacgguuguuuccagcccugcuucuauaucgaacugauucgggggcguccgaauaagaacgacgauguuucuuggacuagcaacucaaucgugacguuuuguggccuugacaaugagccuggaaguggcaacuggcccgauggguccaauauuggauucaugccaaaauga

SEQ ID NO: 151658 - RNA, 1410 nt, Artificial Sequence; identical to SEQ ID NO: 151657
  derived and/or modified CDS sequence (opt3) from neuraminidase__InfluenzaA__AGQ81846

SEQ ID NO: 151659 - RNA, 1410 nt, Artificial Sequence; identical to SEQ ID NO: 151657
  derived and/or modified CDS sequence (opt3) from neuraminidase__InfluenzaA__AGQ81847

SEQ ID NO: 151660 - RNA, 1410 nt, Artificial Sequence
  derived and/or modified CDS sequence (opt3) from neuraminidase__InfluenzaA__AGQ81848
augaaccccaaucagaagaucauuaccauaggcguggucaacacaacucugagcacgaucgcccuccuuauugggaucggaaaucugauuuucaacaccguuauccacgagaaaauaggugugcaucaaacaguaaucuacccuacuauuaccuccccaguggucccgaauugcucugacacaaccaucacuuauaacaauacagugguuaacaauauuaccacgacugugaucaacaaggcugaaaaacacuuuaagcccucauugccuuuauguccauucaaaggcuuuuuccccuuucauaaggauaaugcaauaagacugggggagaacaaggacgucauugugaccagggaaccuuacguaaguugcgauaaugacgauuguuggagcuucgcccuagcgcagggagcucuccugggcacaaaacacuccaacgguacuaucaaggaccggaccccauaucgcucucuuauucgauuucccaucgggacagccccuguucugggaaauuacaaagagaucugcguggcauggucgucaagcaguuguuucgauggcaaggaauggaugcaugucugcaugaccggcaacgacaacgaugccuccgggcagauuauauaugcuggaaaaaugacggacucuaucaagagcuggcguagagauauuuugaggacucaggaguccgagugucaaugcaucgacgguauauguauuguggcagugacagauggcccagccgcuaauucagccgaccaccggaucuacuggauccgcgaagggaagauuaucaaauaugagaacauuccgaagaccaaaauacagcaccucgaagagugcaguuguuacgucgacacugauguuuacugcaucugcagagacaauuggaagggaagcaacaggcccuggaugcggauuaauaacgagacaauccuggaaaccggcuauguguguucuaaauuucauuccgauacgccucgcccagcggaccccucaaccguaagcugcgauaguccuucuaauaucaacggugggccaggagugaagggcuucggcuuucgaacagggaaugacgucuggcugggaagaacuguguccaccacagguaggagcggcuucgagguuauuaaagugacugaaggguggauaaacucgcucaaucacgcaaagucugucacccagacauuaguguccaacucagauuggaguggauacagcggcuccuuuaucguagagaauaacgguuguuuccagcccugcuucuauauugaacugauccgggggcguccgaauaagaacgacgauguuucuuggaccagcaacucaauugugacuuuuuguggccuugacaaugagccuggaaguggcaacuggcccgauggguccaauaucggauucaugccaaaauga

SEQ ID NO: 151661 - RNA, 1410 nt, Artificial Sequence
  derived and/or modified CDS sequence (opt3) from neuraminidase__InfluenzaA__AGQ81850
augaaccccaaucagaagaucauuaccauaggcguggucaacacaacucugagcacgaucgcccuccuuauugggaucggaaaucugauuuucaacaccguuauccacgagaaaauaggugugcaucaaacaguaaucuacccuacuauuaccuccccaguggucccgaauugcucugacacaaccaucacuuauaacaauacagugguuaacaauauuaccacgacugugaucaacaaggcugaaaaacacuuuaagcccucauugccuuuauguccauucaaaggcuuuuuccccuuucauaaggauaaugcaauaagacugggggagaacaaggacgucauugugaccagggaaccuuacguaaguugcgauaaugacgauuguuggagcuucgcccuagcgcagggagcucuccugggcacaaaacacuccaacgguacuaucaaggaccggaccccauaucgcucucuuauucgauuucccaucgggacagccccuguucugggaaauuacaaagagaucugcguggcauggucgucaagcaguuguuucgauggcaaggaauggaugcaugucugcaugaccggcaacgacaacgaugccacggggcagauuauauaugcuggaaaaaugacugacuccaucaagucuuggcguagagauauuuugaggacacaggagagcgagugucaaugcaucgacgguaccuguauaguggcagugacugauggcccagccgcuaauuccgccgaccaccggauuuacuggauccgcgaagggaagaucauuaaauaugagaacaucccgaagacaaaaauucagcaccucgaagagugcucauguuacgucgacaccgauguuuacugcauaugcagagacaauuggaagggaaguaacaggcccuggaugcggaucaauaacgagacgauucuggaaaccggcuauguguguagcaaauuucauucugauacaccucgcccagcggaccccuccacuguaucaugcgauagcccuaguaauaucaacggugggccaggagugaagggcuucggcuuucgaaccgggaaugacgucuggcugggaagaacagugucuacuaccgguagguccggcuucgagguuaucaaagugacagaaggguggauuaacagccucaaucacgcaaagucggucacccagacuuuagugucuaacuccgauuggucaggauacaguggcagcuuuauaguagagaauaacgguuguuuccagcccugcuucuauaucgaacugauucgggggcguccgaauaagaacgacgauguuuccuggacgucuaacagcaucgugacauuuuguggccuugacaaugagccuggaucaggcaacuggcccgaugggaguaauauuggauucaugccaaaauga

SEQ ID NO: 151662 - RNA, 1410 nt, Artificial Sequence
  derived and/or modified CDS sequence (opt3) from neuraminidase__InfluenzaA__AGQ81852
augaaccccaaucagaagaucauuaccauaggcguggucaacacaacucugagcacgaucgcccuccuuauugggaucggaaaucugauuuucaacaccguuauccacgagaaaauaggugugcaucaaacaguaacuuacccuaccaucacauccccaguggucccgaauugcucugacaccacuauuacauauaacaauaccgugguuaacaauaucacgacuaccgugauuaacaaggcugaaaaacacuuuaagcccucauugccuuuauguccauucaaaggcuuuuuccccuuucauaaggauaaugcaaucagacugggggagaacaaggacgucauagugacaagggaaccuuacguaaguugcgauaaugacgauuguuggagcuucgcccuagcgcagggagcucuccugggcacuaaacacuccaacgguaccauuaaggaccggacaccauaucgcucucuuauccgauuucccauugggaccgccccuguucugggaaauuacaaagagaucugcguggcauggucgucaagcaguuguuucgauggcaaggaauggaugcaugucugcaugacgggcaacgacaacgaugccacugggcagaucauuuaugcuggaaaaaugacagacuccauaaagucuuggcguagagauaucuugaggacccaggagagcgagugucaaugcauugacgguacuuguaucguggcagugacagauggcccagccgcuaauuccgccgaccaccggauauacuggauucgcgaagggaagaucaucaaauaugagaacauuccgaagaccaaaauccagcaccucgaagagugcucauguuacgucgacacggauguuuacugcauuugcagagacaauuggaagggaaguaacaggcccuggaugcggauaaauaacgagaccauccuggaaacaggcuauguguguagcaaauuucauucugauacuccucgcccagcggaccccuccaccguaucaugcgauagcccuaguaauauuaacggugggccaggagugaagggcuucggcuuucgaacagggaaugacgucuggcugggaagaacugugucuaccacagguagguccggcuucgagguuaucaaagugaccgaaggguggaucaacagccucaaucacgcaaagucggucacucagacguuagugucuaacuccgauuggucaggauacaguggcagcuuuauuguagagaauaacgguuguuuccagcccugcuucuauauagaacugauccgggggcguccgaaucgcaacgacgauguuuccuggacaucuaacagcauugugaccuuuuguggccuugacaaugagccuggaucaggcaacuggcccgaugggaguaauaucggauucaugccaaaguga

SEQ ID NO: 151663 - RNA, 1410 nt, Artificial Sequence
  derived and/or modified CDS sequence (opt3) from neuraminidase__InfluenzaA__AGQ81853
augaaccccaaucagaagaucauuaccauaggcguggucaacacaacucugagcacgaucgcccuccuuauugggaucggaaaucugauuuucaacaccguuauccacgagaaaauaggugugcaucaaacaguaacuuacccuaccaucacauccccaguggucccgaauugcucugacaccacuauuacauauaacaauaccgugguuaacaauaucacgacuaccgugauuaacaaggcugaaaaacacuuuaagcccucauugccuuuauguccauucaaaggcuuuuuccccuuucauaaggauaaugcaaucagacugggggagaacaaggacgucauagugacaagggaaccuuacguaaguugcgauaaugacgauuguuggagcuucgcccuagcgcagggagcucuccugggcacuaaacacuccaacgguaccauuaaggaccggacaccauaucgcucucuuauccgauuucccauugggaccgccccuguucugggaaauuacaaagagaucugcguggcauggucgucaagcaguuguuucgauggcaaggaauggaugcaugucugcaugacgggcaacgacaacgaugccacugggcagaucauuuaugcuggaaaaaugacagacuccauaaagucuuggcguagagauaucuugaggacccaggagagcgagugucaaugcauugacgguacuuguaucguggcagugacagauggcccagccgcuaauuccgccgaccaccggauauacuggauucgcgaagggaagaucaucaaauaugagaacauuccgaagaccaaaauccagcaccucgaagagugcucauguuacgucgacacggauguuuacugcauuugcagagacaauuggaagggaaguaacaggcccuggaugcggauaaauaacgagaccauccuggaaacaggcuauguguguagcaaauuucauucugauacuccucgcccagcggaccccuccaccguaucaugcgauagcccuaguaauauuaacggugggccaggagugaagggcuucggcuuucgaacagggaaugacgucuggcugggaagaacugugucuaccacagguagguccggcuucgagguuaucaaagugaccgaaggguggaucaacagccucaaucacgcaaagucggucacucagacguuagugucuaacuccgauuggucaggauacaguggcagcuuuauuguagagaauaacgguuguuuccagcccugcuucuauauagaacugauccgggggcguccgaauaagaacgacgauguuuccuggacaucuaacagcauugugaccuuuuguggccuugacaaugagccuggaucaggcaacuggcccgaugggaguaauaucggauucaugccaaaauga

SEQ ID NO: 151664 - RNA, 1410 nt, Artificial Sequence; identical to SEQ ID NO: 151663
  derived and/or modified CDS sequence (opt3) from neuraminidase__InfluenzaA__AGQ81854

SEQ ID NO: 151665 - RNA, 1410 nt, Artificial Sequence; identical to SEQ ID NO: 151663
  derived and/or modified CDS sequence (opt3) from neuraminidase__InfluenzaA__AGQ81855

SEQ ID NO: 151666 - RNA, 1410 nt, Artificial Sequence; identical to SEQ ID NO: 151656
  derived and/or modified CDS sequence (opt3) from neuraminidase__InfluenzaA__AGQ81856

SEQ ID NO: 151667 - RNA, 1410 nt, Artificial Sequence
  derived and/or modified CDS sequence (opt3) from neuraminidase__InfluenzaA__AGQ81857
augaaccccaaucagaagaucauuaccauaggcguggucaacacaacucugagcacgaucgcccuccuuauugggaucggaaaucugauuuucaacaccguuauccacgagaaaauaggugugcaucaaacaguaguguacccuacuaucaccccaccggucauucccaauugcuccgacacaaccaucacuuauaacaauacagugguuaacaauauuaccacgacuaucauaaacaaggcugaaaaacaguuuaagccuucuuugccauuaugucccuucagaggcuuuuucccuuuucacaaagauaaugcaauuaggcugggggagaacaaggacgugaucgucacccgggaaccauacgugucaugcgauaaugacgauuguuggaguuucgcccuagcgcagggagcucuccugggcacaaagcauagcaacgguacuauuaaagaccgcacccccuaucgaucccuuauccguuuuccuaucgggacagccccaguacugggaaauuacaaggagauuugcguugcauggucuucgucaagcuguuucgauggcaaagaauggaugcacgugugcaugaccggcaacgacaacgaugccagugggcagauaaucuaugcuggaaagaugacggacuccauuaaaucuuggagaagggauaucuugcggacucaagagagcgagugucagugcauagacgguacauguauugucgcagugaccgauggcccggccgcuuccucagccgaccaucgcaucuacuggaucagagaagggaagauuaucaaguaugaggacauucccaaaacuaagauacagcaccucgaagagugcaguuguuacguggauacagacgucuacugcaucugcagggauaauuggaaaggaagcaaccggccuuggaugcgcauuaauaacgagaccauccuggaaacgggcuauguuuguucuaaguuucacuccgacaccccacgacccgcggauccuucaacagugagcugcgacaguccaucuaauaucaacggugggcccggaguaaaaggcuucggcuuuagagcagggaaugauguguggcugggaaggacugucuccaccacaggucggagcggcuucgaggugauuaagguuacugaaggguggauaaacucgcucaaucaugccaaaucugugacccagacauuagucuccaacaaugacuggucaggauacaguggcagcuuuaucguggaguccaacgguuguuuccaaccgugcuucuauauugaacugauccgugggcgcccuaauagaaacgaugacguaucuuggaccagcaauucaauuguuacuuuuuguggccuugauaacgagcccggaaguggcaacuggccagacggguccaauaucggauucaugccuaaguga

SEQ ID NO: 151668 - RNA, 1410 nt, Artificial Sequence
  derived and/or modified CDS sequence (opt3) from neuraminidase__InfluenzaA__AGQ81858
augaaccccaaucagaagaucauuaccauaggcguggucaacacaacucugagcacgaucgcccuccuuauugggguuggaaaucugaucuucaacaccgugauucacgagaaaaucggugaccaucaaauaguaguguacccuacaacuaccgcuuccgucgugccaaauugcucugauacaaucauuaccuauaacaauacuguugugaacaauaucacaaccacgauuaucacuaaggaagagacccacuuuaaaucaaguuugccguuaugucccuucagaggcuuuuucccuuuucauaaggacaacgcaauaaggcugggggaaaauaaagaugucauugugacacgggagccauacguaagcugcgacaacgaugacuguugguccuucgcccuagcgcagggagcucuccugggcacuaagcacucuaaugguaccaucaaggaucgcacacccuaucgaucgcuuauucguuuuccuaucgggaccgccccaguucugggaaacuacaaagaaaucugcguggcauggucaagcaguuccuguuucgacggcaaggaguggaugcaugucugcaugacgggcaaugauaacgacgccucugggcagauuauguaugcuggaaaaaugacugauagcauaaaguccuggagaaaagacaucuugaggacacaggagucagaaugucaaugcauugaugguaccuguaucguggcagugacugacggccccgccacaaacagugcugaccaccggauauacuggauucgcgaggggaagaucaucaaguaugaaaauauuccuaaaaccaagauccagcaccucgaggagugcagcuguuacgucgauauugacguuuacugcgugugcagagauaacuggaaaggaucuaauaggccauggaugcggauaaacaaugaaacgauccuggagaccggcuauguauguuccaaguuucauucagacacaccgcgccccgccgauccuagcacugugaguugcgacucuccauccaacgucaauggugggcccggagugaaaggcuucggcuuuaagaccgggaacgauguuuggcugggacgaacagugagcacuucggguagaucuggcuucgaaauuaucaaagucaccgagggguggaucaauuccccuaaccacgcgaagucagugacacagacccucguaaguaauaacgacuggagcggauacuccggcucuuuuauuguugaaaauaacgguuguuuccagccaugcuucuauauagaguuaaucagggggcggcccaauaagaacgaugacgugagcuggacuucaaacaguauugucacguuuuguggccuggauaaugagccgggauccggcaacuggccugacgggagcaauaucggauucaugcccaaauga

SEQ ID NO: 151669 - RNA, 1410 nt, Artificial Sequence
  derived and/or modified CDS sequence (opt3) from neuraminidase__InfluenzaA__AGQ81859
augaaccccaaucagaagaucauuaccauaggcguggucaacacaacucugagcacgaucgcccuccuuauugggaucggaaaucugauuuucaacaccguuauccacgagaaaauaggugugcaucaaacaguagugugcccuacuaucaccccaccggucgugcccaauuguuccgacacaaccauuacuuacaacaauacaguugugaacaauaucaccacgacuauuaucaacaaggcugaaaaacaguuuaagucuucauugccuuuaugcccauucagaggcuuuuuccccuuucacaaagauaaugcaauaaggcugggggagaacaaggacgucauugugacccgggaaccuuauguaaguugugauaaugacgauugcuggagcuucgcccuagcgcagggagcucuccugggcacaaagcauuccaacgguacuaucaaagaccgcaccccauaccgaucucuuauucguuuucccaucgggacagccccuguucugggaaauuauaaggagaucuguguggcauggucgucaagcaguugcuucgauggcaaagaauggaugcacauuuguaugaccggcaacgacaacgaugccuccgggcagauaaucuacgcuggaaagaugacggacucuauuaaaagcuggagaagggauaucuugcggacucaagaguccgagugccaguguauagacgguacaugcauugucgcaaucaccgauggcccagccgcuucaagugccgaccaucgcaucuauuggauuagagaagggaagaucauuaaguacgagaauauaccgaaaacuaagauccagcaccucgaagaguguagcugcuauguggacauugauguguacugcaucuguagggacaacuggaaaggaucuaaucggcccuggaugcgcaucaacaaugagacaauucuggaaaccggcuacgucugcuccaaguuucacucagauacgccucgaccagcggaccccagcaccguuaguugugauucuccuuccaacauaaauggugggccaggagugaaaggcuucggcuuuagagcagggaacgacguauggcugggaaggacagugagcacuaccggucggucgggcuucgaggucaucaaggugacagaaggguggauuaauucucucaaccaugccaaauccguuacucagaccuuagugucaaauagugauuggagcggauauuccggcucuuuuaucgucgagaacaaugguugcuuccaacccuguuucuacauugaacugauccgugggcgcccgaacagaaaugacgaugugagcuggacaucaaacaguauaguaaccuuuugcggccuugacaacgagccuggauccggcaauuggcccgaugggagcaacaucggauucaugccaaaguga

SEQ ID NO: 151670 - RNA, 1413 nt, Artificial Sequence
  derived and/or modified CDS sequence (opt3) from neuraminidase__InfluenzaA__AGQ81860
augaaccccaaucagaagaucauuugcauaagcgccaccggcaugacacuguccguggucucucuccuuaucgggauugcuaaccugggauugaauaucgguuuacacuacaaaguuggcgacacuccugaugugucaauuccaaacaugaaugagacgaacaguaccacaacuaucauaaauaacaauacccaaaacaauuucacaaacaucaccaauauuaucguaaacaagaaugaagagaaaacuuuucugaaccuaacaaagccgcucugugaagugaacagcuggcauauucuguccaaagacaaugcaaucagaauaggggaggaugcccacauucuugucaccagggaacccuaucugucuugcgacccucagggaugucggauguucgcguugucgcagggcacgacucuccgcggucgacaugcuaacgggaccauccacgaucguucaccauuuagagcccuggugagcugggagaugggacaggcacccaguccuuacaauguuaagguggagugcgucggcugguccucuacaagcugucaugacggcauuuccaggaugucaaucugcaugagugggccaaacaauaacgccagcgcugugguaugguauggaggucggcccguuacugaaaucccuucuugggcaggcaauauucugcgcacccaagaguccgaaugugugugccacaaggggauauguccagucgugaugacagauggaccggccaacaauagagcugccaccaaaaucauuuacuucaaggagggcaaaauccagaagauagaggaacucgcggguucagcacagcacauugaggaaugcagcuguuauggggccguggaggucaucaaaugcaucugcagggacaacuggaagggagcuaaucggcccguuauuacgaucaacccugaaaugaugacucauacaaguaaguacuuauguucuaaagugcugaccgauacuucccgcccaaaugaccccacaaacggcaauugcgaugccccuauuaccggcgggagcccagaccccggaguaaaggguuuugcauuccuugauggcgagaacucgugguuggggcgaacgauaucuaaagacuccagaucaggauaugagaugcugaaggugccgaacgcugaaaccgacacacagaguggcccuacuagccaccaagucaucgugaauaaccagaauugguccgguuacucuggggccuuuauugauuacugggcgaacaaagaguguuucaaucccugcuuuuauguugaacuaaucaggggccggccaaaggagagcucagugcucuggaccaguaacuccaucgucgcccuguguggaagcaaagaacgucuuggcucuuggucauggcaugacggggcagagauuauauacuucaaguga

SEQ ID NO: 151671 - RNA, 1413 nt, Artificial Sequence
  derived and/or modified CDS sequence (opt3) from neuraminidase__InfluenzaA__AGQ81861
augaaccccaaucagaagaucauuugcauaagcgccaccggcaugacacuguccguggucucucuccuuaucgggauugcuaaccugggauugaauaucgguuuacacuacaaaguuggcgacacuccugaugugucaauuccaaacaugaaugagacgaacaguaccacaacuaucauaaauaacaauacccaaaacaauuucacaaacaccacuaauaucauuguaaacaagaaugaagagaaaacauuucugaaccuaaccaagccgcucugugaagugaacagcuggcauauccuguccaaagacaaugcaauuagaaucggggaggaugcccacauacuugucacgagggaacccuaucugucuugcgacccucagggaugucggauguucgcguugucgcagggcacuacccuccgcggucgacaugcuaacgggacaauucacgaucguucaccauuuagagcccuggugagcugggagaugggacaggcacccaguccuuacaauguuaagguggagugcgucggcugguccucuacuagcugucaugacggcaucuccaggaugucaauuugcaugagugggccaaacaauaacgccagcgcugugguaugguauggaggucggcccguuaccgaaaucccuucuugggcaggcaauauccugcgcacacaagaguccgaaugugugugccacaaggggauuuguccagucgugaugaccgauggaccggccaacaauagagcugccacgaaaauaaucuacuucaaggagggcaaaauucagaagaucgaggaacucgcggguucagcacagcacauagaggaaugcagcuguuauggggccguggaggucauuaaaugcaucugcagggacaacuggaagggagcuaaucggcccguuaucacuauuaacccugaaaugaugacacauaccaguaaguacuuauguucuaaagugcugacugauacaucccgcccaaaugaccccaccaacggcaauugcgaugccccuaucacgggcgggagcccagaccccggaguaaaggguuuugcauuccuugauggcgagaacucgugguuggggcgaaccauuucuaaagacuccagaucaggauaugagaugcugaaggugccgaacgcugaaacagacacucagaguggcccuaccagccaccaagucauagugaauaaccagaauugguccgguuacucuggggccuuuaucgauuacugggcgaacaaagaguguuucaaucccugcuuuuauguugaacuaauuaggggccggccaaaggagagcucagugcucuggacaaguaacuccaucgucgcccuguguggaagcaaagaacgucuuggcucuuggucauggcaugacggggcagagaucauuuacuucaaguga

SEQ ID NO: 151672 - RNA, 1413 nt, Artificial Sequence
  derived and/or modified CDS sequence (opt3) from neuraminidase__InfluenzaA__AGQ81862
augaaccccaaucagaagaucauuugcauaagcgccacuggcaugacacuguccguggucucucuccuuaucgggauugcuaaccugggauugaauaucgguuuacacuacaaaguuggcgacacuccugaugugaacauuccaucaaugaaugagacgaacaguaccacaacuaucauaaauaacaauacccaaaacaauuucacaaacaucaccaauauuaucguaaacaaggaagaggggagaacuuuucugaaucuaacaaaaccgcucugugaagugaacagcuggcauauucuguccaaggacaacgcaaucaggauaggagaggaugcccacauucuugucacccgggaacccuaucugucuugcgacccucagggcugucgcauguucgcguugucgcaggguacgacucuccgagggcgucaugcuaauggaaccauccacgauagaucaccauuuagggcccuggugagcugggagaugggccaggcacccaguccuuacaacguucggguggagugcauuggcugguccucuacaagcugucaugacgggaucucccgcaugucaaucugcaugaguggaccaaauaacaaugccagcgcugucgugugguaugguggcagacccguaacugaaauuccuucuugggcagggaacauacugaggacccaagaguccgaauguguuugccacaaaggaaucuguccaguggucaugacagauggcccggccaauaaccgggcugccaccaagauuaucuacuucaaggaggguaaaauacagaagauugaggaacucgaggggaaugcgcagcacaucgaagagugcucauguuauggagcagccggcgugaucaaaugcauuugccgcgacaacuggaagggcgcuaaucgacccgugaucauuauagauccugaaaugaugacgcauacuagcaaauacuuauguaguagaguccugacagacaccucuaggccaaacgaucccacuuccgggaauugcgacgccccuaucacaggagguagcccagaucccggcguuaagggguuugcauuccuugacggagagaacucgugguugggccggaccauuucuaaggacucccguucagguuaugagaugcugaaagugccgaaugcugaaacggauacccagagugggccuacaagccaccaaguaaucgugaacaaccagaauugguccggcuacucuggagccuuuaucgacuacugggcgaacaaggaguguuucaaucccugcuuuuaugucgaacuaauucgcggcagaccaaaagagagcucagugcucuggaccaguaacuccauaguugcccugugugggagcaaggaaaggcuuggaucuuggucauggcaugauggugcagagaucauuuacuucaaauga

SEQ ID NO: 151673 - RNA, 1413 nt, Artificial Sequence
  derived and/or modified CDS sequence (opt3) from neuraminidase__InfluenzaA__AGQ81863
augaaccccaaucagaagaucauuugcauaagcgccaccggcaugacacuguccguggucucucuccuuaucgggauugcuaaccugggauugaauaucgguuuacacuacaaaguuggcgacacuccugaugugaacauuccaucaaugaaugagacgaacaguaccacaacuaucauaaauaacaauacccaaaacaauuucacaaacaucaccaauauuaucguaaacaaggaagaggaaagaacuuuucugaaucuaacaaaaccgcucugugaggugaacagcuggcauauucuguccaaggacaacgcaaucaggauaggggaagaugcccacauucuugucacccgggagcccuaucugucuugcgacccucagggaugucgcauguucgcguugucgcagggcacgacucuccgaggucgucaugcuaaugggaccauccacgauagaucaccauuuagggcccuggugagcugggagaugggacaggcacccaguccuuacaacguucggguggaaugcauuggcugguccucuacaagcugucaugacggcaucucccgcaugucaaucugcaugagugggccaaauaacaaugccagcgcugucgugugguauggagguagacccguaacugagauuccuucuugggcaggcaacauacugaggacccaagaauccgaguguguuugccacaaagggaucuguccaguggucaugacagauggaccggccaauaaccgggcugccaccaagauuaucuacuucaaggagggcaaaauacagaagauugaggaacucgaagguaaugcgcagcacaucgaggaaugcucauguuauggggcagccggagugaucaaaugcauuugccgcgacaacuggaagggcgcuaaucgacccgugaucauuauagauccugagaugaugacgcauacuagcaaauacuuauguaguagaguccugacagacaccucuaggccaaacgaucccaucuccggcaauugcgacgccccuauuacugggggaagcccagaucccgguguuaagggcuuugcauuccuugacggggagaacucgugguugggacggacaaucucuaaggacucccguucaggcuaugaaaugcugaaagugccgaaugcugagaccgauacgcagagugguccuaccagccaccaaguaaucgugaacaaccagaauugguccggguacucuggcgccuuuauugacuacugggcgaacaaggaauguuucaaucccugcuuuuaugucgagcuaauacgcggaagaccaaaagaaagcucagugcucuggacaaguaacuccaucguugcccuguguggcagcaaggagaggcuugggucuuggucauggcaugauggagcagagauuaucuacuucaaauga

SEQ ID NO: 151674 - RNA, 1416 nt, Artificial Sequence
  derived and/or modified CDS sequence (opt3) from neuraminidase__InfluenzaA__AGQ81864
augaaccccaaucagaagcuguucgcccucagcggcguggcuaucgcacuuuccguccugaacuuguuaauugggauaucuaauguuggacugaacgugucacuacaccucaaagagaaggguccuaaacaagaagagaauaguaccugcacaacuaucaaccagaauaacacgaccauuguagaaaauacauacgugaacaauacuaccaucauuagcaaggagacagaacugaaaccaccgaacuaucuucuguugaauaagucccucuguaacgucgagggcugggugguuaucgccaaggacaaugcggugagauuuggggagucugaacagauaaucgucaccagggagcccuacgugucgugcgauccuacuggauguaaaauguaugcucugcaucagggcacaaccauucggaacaagcacucaaacgguacgauccaugaccgcacugccuuccgagggcugauuagcaccccacucggaacacccccuacuguaaguaauuccgauuuuaucugcguuggcuggucuagcaccacaugucacgacggcauagggcguaugaccauuugcauccaaggaaacaaugauaacgcaacggccacuguguacuauaauagaagguuaacaaccacuauuaaaacaugggcucggaacauccugcgcacccaggaauccgagugugucugccauaaugguacgugugcaguggugaugaccgacggcucagccaguagccaggcuuacacaaaggucauguauuuccacaaagggcuuguuaucaaggaggaagccuugaagggaucugcgagacacauugaggaaugcuccuguuacggccauucacagaaagcaacuugcgugugcagggauaacuggcaaggugccaaucggccaauaaucgagauugacaugaacacccuggaacacacaagccgcuacguauguacugggauccuaaccgauacaagucgacccggagacaagucuuccggcgauugcagcaauccuauaaccggcucgccaggggcuccgggagugaaagguuuuggcuuccucaacggggacaauacuuggcugggaagaacgauuucucccaaguccaggucaggcuuugagaugcuuaaaaucccuaacgccgguacagauccaaauagucggaucgcagagcgucaggaaauugucgacaacaacaauuggagcggguauuccggcucuuucaucgacuacugggauaacgacagcgaguguuauaaucccugcuuuuacguggaacugauucgcggaagaccugaggaagcuaaguauguuugguggaccucaaacaguuugauagcccucuguggcuccccauuccccguggggagcggaucuuuuccggauggugcgcagauccaguacuucucauga

SEQ ID NO: 151675 - RNA, 1416 nt, Artificial Sequence
  derived and/or modified CDS sequence (opt3) from neuraminidase__InfluenzaA__AGQ81865
augaaccccaaucagaagcuguucgcccucagcggcguggcuaucgcacuuuccguccugaacuuguuaauugggcugucuaauguuggacuaaacgugucacuccaccugaaagagaccgguccuaagcaagaaggcaaucuuacaugcaugacuauaaaccagaauaacacgaccguaguggagaauacauacgucaacaauacuaccaucauuacaaaagaaaccgagagugaaacuccaaacuaucuguugcucaauaagagccuguguaacguggagggguggguugugaucgccaaagacaaugcggucagauuuggagaguccgaacagauuaucgugacaagggagccguacguaucuugcgaucccaacggcuguaagauguaugcucugcaucaggguaccacgauacggaacaagcacucgaaugggacuauccaugaccgcaccgccuuccgaggacucauuucaacaccuuuaggcacuccacccaccguuagcaacagugauuuuaucugcgugggcugguccucuacaaccugucacgacgggauuggacguaugacgaucugcauacaagguaauaacgauaaugcaacugccacagucuacuauaacagaaggcugaccacuacaauuaaaaccugggcucggaauauccuucgcacgcaggaaagcgagugugugugccauaacggcaccugugcaguggucaugacagacggguccgccucaagucaggcucacacuaagguuauguacuuccacaaaggauuggugguaaaggaggaagcccugaaaggcagcgcgagacauauugaggaaugcucuuguuauggucacaaucagaaggugaccugcgucugcagggauaacuggcaaggggcaaaucggccuaucaucgagauugacaugaacacacuagaacauacuucccgcuacguguguaccggaauacucacagauaccucacgaccaggcgacaagcccacuggcgauugcagcaauccuaucacggggaguccaggagccccggguguuaaaggcuuuggguuccugaacggaggcaauacauggcuugguagaaccauuucucccaggucccggagcggguuugagaugcugaagaucccuaacgcuggcacugacccaaacucgcguauagccgagcgccaggaaauuguggauaauucuaacugguccggauacucaggcaguuucaucgacuauuggaaugacaacagcgaguguuacaaucccugcuuuuaugucgaauugaucagagggaggccugaggaagcaaaauacgugugguggaccuccaacucucucauugcucuguguggaagcccauuccccguagguucaggcaguuuuccggauggggcccagauccaguauuucuccuga

SEQ ID NO: 151676 - RNA, 1416 nt, Artificial Sequence
  derived and/or modified CDS sequence (opt3) from neuraminidase__InfluenzaA__AGQ81868
augaaccccaaucagaagcuguucgcccucagcggcguggcuaucgcacuuuccguccugaacuuguuaauugggauaucuaauguuggacugaacgugucacuacaccucaaagagaaggguccuaaacaagaagagaauaguaccugcacaacuaucaaccagaauaacacgaccguaguggaaaauacauacgucaacaauacuaccauuaucacaaaggagaccgaacugaaaacuccaagcuaucuucuguugaacaagucccucuguaauguggagggcuggguugugauugccaaggacaacgcggucagauuuggggagucugaacagaucauagugacaagggagccguacguaucgugcgaucccaccggauguaaaauguaugcucugcaucagggcacgacuauccggaauaagcacucaaacgguaccauucaugaccgcacagccuuccgagggcugaucagcacuagccucggaaccccuccaacaauuuccaacucugauuuuaugugcguuggcuggagcuccaccacgugucacgacggcaucgggcguaugacuauaugcauucaaggaaauaacgauaaugcaacagccaccguguacuauaacagaagguuaacuacaaccaucaaaacgugggcucggaauauucugcgcacccaggaaucagagugugucugccauaacgguaucugugcaguggugaugacagacggcagugccagcucucaggcuuacacuaaggucauguauuuccacaaagggcuuguugugaaggaggaagccuugaagggauccgcgagacacaucgaggaaugcucauguuacggccauagccagaaaguaaccugcgugugcagggauaauuggcaaggugcaaaccggcccauuauagagaucgacaugaauacacuggaacacaccagucgcuacgucuguacugggauucuaacagauaccucucgaccuggagacaaguccagcggcgauugcucgaacccaaucgccggcucucccggggcuccuggagugaaagguuuuggcuuccucaauggggacaacacuuggcugggaagaacgauauccccaaggucacggaguggcuuugagaugcuuaagauuccgaaugccgguacagaucccaacagccguaucgcagggcgccaggagaucguugacaauaacaacugguccggcuauucuggaaguuucauugacuacuggaaugauaacucagaauguuauaauccuugcuuuuacguggagcugaucagaggcaggccagaagaggcuaaauaugucugguggaccaguaacuccuugauugcccucugugggagccccuucccugugggaucugguucauuuccagacggcgcgcagauacaguacuucaguuga

SEQ ID NO: 151677 - RNA, 1416 nt, Artificial Sequence
  derived and/or modified CDS sequence (opt3) from neuraminidase__InfluenzaA__AGQ81869
augaaccccaaucagaagcuguucgcccucagcggcguggcuaucgcacuuuccguccugaacuuguuaauugggauaucuaauguuggacugaacgugucacuacaccucaaagagaaggguccuaaacaagaagagaauaguacuugcacaacuaucaaccagaauaacacgaccauuguagaaaauacauacgugaacaauacuaccaucauuagcaaggagacagaacugaaaaccccauccuaucuucuguugaacaagucucucuguaaugucgagggcugggugguuaucgccaaggacaacgcggugagauuuggggagucggaacagauaaucgucacuagggagccguacgugucaugcgaucccacaggauguaaaauguaugcucugcaucagggcaccacgauucggaauaagcacagcaacgguacuauccaugaccgcaccgccuuccgagggcugauuaguacaccucucggaacuccacccaccguauccaacucugauuuuaucugcguuggcuggagcuccacaaccugucacgacggcauagggcguaugacgauuugcauccaaggaaauaacgauaaugcaacugccacaguguacuauaacagaagguuaaccacuacaauucggaccugggcucgcaauauccugagaacgcaggaaucagagugugucugccauaacgguaccugugcaguggugaugacagacggcagugccagcucucaggcuuacacuaaagucauguauuuccacaaggggcuuguuaucaaagaggaagccuugaagggauccgcgaggcacauugaggaaugcucauguuacggccauagccagaaggcaaccugcgugugccgggauaauuggcaaggugccaaccgcccuauaaucgagauugacaugaauacacuggaacacaccagucgauacguauguacugggauccuaacagauaccucuagaccaggagacaaauccagcggcgauugcucgaaccccauaacuggcucuccuggggcuccaggagugaaggguuuuggcuuccucaauggggacaacacguggcugggaaggacaauuuccccgcggucacguaguggcuuugagaugcuuaaaauccccaaugccgguaccgauccuaacagccgcaucgcagagagacaggaaauugucgacaauaacaacugguccggguauucuggcagcuucaucgacuacuggaauaacgauucagaguguuauaauccaugcuuuuacguggaacugauuaggggacggcccgaggaagcuaaguauguuugguggaccaguaacuccuugauagcccucuguggcagcccuuucccaguggggucuggaucauuucccgacggugcgcagauccaguacuucaguuga

SEQ ID NO: 151678 - RNA, 1416 nt, Artificial Sequence
  derived and/or modified CDS sequence (opt3) from neuraminidase__InfluenzaA__AGQ81870
augaaccccaaucagaagcuguucgcccucagcggcguggcuaucgcacuuuccguccugaacuuguuaauugggauaucuaauguuggacugaacgugucacuacaccucaaagagaaggguccuaaacaagaagagaauaguaccugcacaacuaucaaccagaauaacacgaccauuguagaaaauacauacgugaacaauacuaccaucauuagcaaggagacagaacugaaaccaccguccuaucuucuguugaacaagucucucuguaaugucgagggcugggugguuaucgccaaggacaacgcggugagauuuggggagucggaacagauaaucgucaccagggagcccuacgugucaugcgauccuacuggauguaaaauguaugcucugcaucagggcacaaccauucggaauaagcacagcaacgguacgauccaugaccgcacugccuuccgagggcugauuaguaccccacucggaacacccccuacuguauccaacucugauuuuaucugcguuggcuggagcuccaccacaugucacgacggcauagggcguaugaccauuugcauccaaggaaauaacgauaaugcaacggccacuguguacuauaacagaagguuaacaaccacuauucggacaugggcucgcaauauccugagaacccaggaaucagagugugucugccauaacgguacgugugcaguggugaugaccgacggcagugccagcucucaggcuuacacaaaagucauguauuuccacaaggggcuuguuaucaaagaggaagccuugaagggauccgcgaggcacauugaggaaugcucauguuacggccauagccagaaggcaacuugcgugugccgggauaauuggcaaggugccaaccgcccaauaaucgagauugacaugaauacccuggaacacacaagucgauacguauguacugggauccuaaccgauacaucuagacccggagacaaauccagcggcgauugcucgaacccuauaaccggcucuccaggggcuccgggagugaaggguuuuggcuuccucaauggggacaacacuuggcugggaaggacgauuucaccccggucccguaguggcuuugagaugcuuaaaaucccuaaugccgguacagauccaaacagccgcaucgcagagagacaggaaauugucgacaauaacaacugguccggguauucuggcagcuucaucgacuacuggaauaacgauucagaguguuauaaucccugcuuuuacguggaacugauuaggggacggccugaggaagcuaaguauguuugguggaccaguaacuccuugauagcccucuguggcagcccauuccccguggggucuggaucauuuccggacggugcgcagauccaguacuucaguuga

SEQ ID NO: 151679 - RNA, 1416 nt, Artificial Sequence
  derived and/or modified CDS sequence (opt3) from neuraminidase__InfluenzaA__AGQ81871
augaaccccaaucagaagcuguucgcccucagcggcguggcuaucgcacuuuccguccugaacuuguuaauugggauaucuaauguuggacugaacgugucacuacaccucaaagagaaggguccuaaacaagaagagaauaguacuugcacaacuaucaaccagaauaacacgaccauuguagaaaauacauacgugaacaauacuaccaucauuagcaaggagacagaacugaaaaccccauccuaucuucuguugaacaagucucucuguaaugucgagggcugggugguuaucgccaaggacaacgcggugagauuuggggagucggaacagauaaucgucacuagggagccguacgugucaugcgaucccacaggauguaaaauguaugcucugcaucagggcaccacgauucggaauaagcacagcaacgguacuauccaugaccgcaccgccuuccgagggcugauuaguacaccucucggaacuccacccaccguauccaacucugauuuuaucugcauaggcuggagcuccacaaccugucacgacggcauugggcguaugacgaucugcauucaaggaaauaacgauaaugcaacugccacaguuuacuauaacagaagguuaaccacuacaauccggaccugggcucgcaauauccugagaacgcaggaaucagagugugugugccauaacgguaccugugcagucgugaugacagacggcagugccagcucucaggcuuacacuaaagugauguauuuccacaaggggcuugucauuaaagaggaagccuugaagggauccgcgaggcacauagaggaaugcucauguuacggccauagccagaaggcaaccugcguuugccgggauaauuggcaaggugccaaccgcccuaucauugagaucgacaugaauacacuggaacacaccagucgauacguguguacugggauacuaacagauaccucuagaccaggagacaaauccagcggcgauugcucgaaccccauuacuggcucuccuggggcuccaggaguaaaggguuuuggcuuccucaauggggacaacacguggcugggaaggacaaucuccccgcggucacguaguggcuuugagaugcuuaaaauccccaaugccgguaccgauccuaacagccgcauugcagagagacaggaaaucguggacaauaacaacugguccggguauucuggcagcuucauugacuacuggaauaacgauucagaguguuauaauccaugcuuuuacgucgaacugauaaggggacggcccgaggaagcuaaguaugugugguggaccaguaacuccuugaucgcccucuguggcagcccuuucccaguugggucuggaucauuucccgacggugcgcagauucaguacuucaguuga

SEQ ID NO: 151680 - RNA, 1416 nt, Artificial Sequence
  derived and/or modified CDS sequence (opt3) from neuraminidase__InfluenzaA__AGQ81872
augaaccccaaucagaagcuguucgcccucagcggcguggcuaucgcacuuuccguccugaacuuguuaauugggauaucuaauguuggacugaacgugucacuacaccucaaagagaaggguccuaaacaagaagagaauaguaccugcacaacuaucaaccagaauaacacgaccauuguagaaaauacauacgugaacaauacuaccaucauuagcaaggagacagaacugaaaaccccauccuaucuucuguugaacaagucucucuguaaugucgagggcugggugguuaucgccaaggacaacgcggugagauuuggggagucggaacagauaaucgucacuagggagccguacgugucaugcgaucccacaggauguaaaauguaugcucugcaucagggcaccacgauucggaauaagcacagcaacgguacuauccaugaccgcaccgccuuccgagggcugauuaguacaccucucggaacuccacccuccguaucuaacagcgauuuuaucugcguuggcugguccucaaccacaugucacgacggcauagggcguaugaccauuugcauccaaggaaauaacgauaaugcaacggccacuguguacuauaacagaagguuaacaaccacuauucggacaugggcucgcaauauccugagaacccaggaaagugagugugucugccauaacgguacgugugcaguggugaugaccgacggcagcgccucuucccaggcuuacacaaaagucauguauuuccacaaggggcuuguuaucaaagaggaagccuugaagggaucagcgaggcacauugaggaaugcagcuguuacggccauagucagaaggcaacuugcgugugccgggauaauuggcaaggugccaaccgcccuauaaucgagauugacaugaauacccuggaacacacaucucgauacguauguacugggauccuaaccgauacauccagaccaggagacaaaagcucgggcgauugcucuaaccccauaaccggcuccccuggggcuccaggagugaaggguuuuggcuuccucaauggggacaacacuuggcugggaaggacgauuucaccgcggagucguagcggcuuugagaugcuuaaaauccccaaugccgguacagauccuaacucccgcaucgcagagagacaggaaauugucgacaauaacaacuggucuggguauagcggcucauucaucgacuacuggaauaacgauagugaguguuauaauccaugcuuuuacguggaacugauuaggggacggcccgaggaagcuaaguauguuugguggaccuccaacagcuugauagcccucuguggcucuccuuucccaguggggucaggaaguuuucccgacggugcgcagauccaguacuucagcuga

SEQ ID NO: 151681 - RNA, 1416 nt, Artificial Sequence
  derived and/or modified CDS sequence (opt3) from neuraminidase__InfluenzaA__AGQ81875
augaaccccaaucagaagcuguucgcccucagcggcguggcuaucgcacuuuccguccugaacuuguuaauugggauaucuaauguuggacugaacgugucacuacaccucaaagagaaggguccuaaacaagaagagaauaguaccugcaugacaaucaaccagaauaacacuacgguaguggaaaauaccuacgucaacaauacaacuauuaucaccaaggagacagaacuggagaccccaagcuaucuucuguugaacaaaggccucuguaauguggagggguggguugugauugccaaggacaacgcggucagauuuggagaaacugagcagaucauagugacaagggaaccguacguauccugcgaucccaauggcuguaagauguaugcucugcaucaggguaccacgauccggaacaaacacucuaacgggacuauucaugaccgcaccgccuuccgaggacugaucucgacaccucucggcacuccacccaccguuucaaauagcgauuuuauuugcgugggcuggaguuccacaaccugucacgacgggaucggacguaugacgauaugcauucaagguaacaaugauaacgcaacugccacagucuacuauaauagaagguuaaccacuacaaucaagaccugggcucggaacauucugcgcacgcaggagucugagugugugugccauaauggcaccugugcaguggucaugacagacgggagcgccuccucacaggcucacacuaaaguuaucuacuuccacaagggacuuaucgugaaagaagaggccuugaagggcagugcgagacauauugaagagugcagcuguuauggucacucucagaagguaaccugcgugugcagggauaacuggcaaggggcaaaucggccuauaaucgaaauugacaugaacacacuggagcauacuucccgcuacgucuguaccggaauccuaacagauaccucacgaccaggcgacaaaagcacuggcgauugcaguaaucccauaacggggucuccuggagccccaggugugaagggcuuuggguaccucaacggagacaauacauggcugggcagaaccauuuccccgaggagccggucggguuucgagaugcuuaaaauccccaacgcugggacugauccuaauucucguaucaccgaacgccaggagauuguugacaacaacaauugguccggcuauucaggaaguuuuguggacuacuggaacgauaauagcgaauguuauaacccaugcuucuacgucgagcugaucagaggcaggcccgaagaggccaaguaugugugguggacauccaauucuauuauagcauugugugggagcccuuuuccaguaggaucagguaguuuccccgacggcgcucagauccaguacuuuuccuga

SEQ ID NO: 151682 - RNA, 1416 nt, Artificial Sequence
  derived and/or modified CDS sequence (opt3) from neuraminidase__InfluenzaA__AGQ81876
augaaccccaaucagaagcuguucgcccucagcggcguggcuaucgcacuuuccguccugaacuuguuaauugggauaucuaauguuggacugaacgugucacuacaccucaaagagaaggguccuaaacaagaagagaauaguaccugcaugacaaucaaccagaauaacacuacgguaguggaaaauaccuacgucaacaauacaacuauuaucaccaaggagacagaacuggagaccccaagcuaucuucuguugaacaaaggccucuguaauguggagggguggguugugauugccaaggacaacgcggucagauuuggagaaacugagcagaucauagugacaagggaaccguacguauccugcgaucccaauggcuguaagauguaugcucugcaucaggguaccacgauccggaacaaacacucuaacgggacuauucaugaccgcaccgccuuccgaggacugaucucgacaccucucggcacuccacccaccguuucaaauagcgauuuuauuugcgugggcuggaguuccacaaccugucacgacgggaucggacguaugacgauaugcauucaaggugauaacgacaaugcaacugccacagucuacuauaacagaagguuaaccacuacaaucaagaccugggcucggaauauucugcgcacgcaggagucugagugugugugccauaacggcaccugugcaguggucaugacagaugggagcgccuccucacaggcucacacuaaaguuaucuacuuccacaagggacuuaucgugaaagaagaggccuugaagggcagugcgagacauauugaagagugcagcuguuauggucacucucagaagguaaccugcgugugcagggacaauuggcaaggggcaaaccggccuauaaucgaaauugauaugaauacacuggagcauacuucccgcuacgucuguaccggaauccuaacagacaccucacgaccaggcgauaaaagcacuggcgacugcaguaaccccauaacggggucuccuggagccccaggugugaagggcuuuggguaccucaauggagauaacacauggcugggcagaaccauuuccccgaggagccggucggguuucgagaugcuuaaaauccccaaugcugggacugacccuaacucucguaucaccgaacgccaggagauuguugacaauaacaacugguccggcuauucaggaaguuuuguggauuacuggaaugacaacagcgaauguuauaauccaugcuucuacgucgagcugaucagaggcaggcccgaagaggccaaguaugugugguggacauccaacucuauuauagcauugugugggagcccuuuuccaguaggaucagguaguuuccccgauggcgcucagauccaguacuuuuccuga

SEQ ID NO: 151683 - RNA, 1416 nt, Artificial Sequence
  derived and/or modified CDS sequence (opt3) from neuraminidase__InfluenzaA__AGQ81877
augaaccccaaucagaagcuguucgcccucagcggcguggcuaucgcacuuuccguccugaacuuguuaauugggauaucuaauguuggacugaacgugucacuacaccucaaagagaaggguccuaaacaagaagagaauaguacuugcacaacuaucaaccagaauaacacgaccguaguggaaaauacauacgucaacaauacuaccauuaucacaaaggagaccgaacugaaaacuccaagcuaucuucuguugaacaagucccucuguaauguggagggcuggguugugauugccaaggacaacgcggucagauuuggggagucugaacagaucauagugacaagggagccguacguaucgugcgaucccaccggauguaaaauguaugcucugcaucagggcacgacuauccggaauaagcacucaaacgguaccauucaugaccgcacagccuuccgagggcugaucagcacuagccucggaaccccuccaacaauuuccaacucugauuuuaugugcguuggcuggagcuccaccacgugucacgacggcaucgggcguaugacuauaugcauucaaggaaauaacgauaaugcaacagccaccguguacuauaacagaagguuaacuacaaccaucaaaacgugggcucggaauauucugcgcacccaggaaucagagugugucugccauaacgguaucugugcaguggugaugacagacggcagugccagcucucaggcuuacacuaaggucauguauuuccacaaagggcuuguugugaaggaggaagccuugaagggauccgcgagacacaucgaggaaugcucauguuacggccauagccagaaaguaaccugcgugugcagggauaauuggcaaggugcaaaccggcccauuauagagaucgacaugaauacacuggaacacaccagucgcuacgucuguacugggauucuaacagauaccucucgaccuggagacaaguccagcggcgauugcucgaacccaaucacuggcucucccggggccccuggagugaaagguuuuggcuuccucaauggggacaacacguggcugggaagaacaauauccccaaggucacggaguggcuuugagaugcuuaagauuccgaaugcugguaccgaucccaacagccguaucgccgggcgccaggagaucguugacaauaacaacugguccggcuauucuggaaguuucauugacuacuggaaugauaacucagaauguuauaauccuugcuuuuacguggagcugaucagaggcaggccagaagaggcaaaauaugucugguggaccaguaacuccuugauugcucucugugggagccccuucccugugggaucugguucauuuccagacggcgcccagauacaguacuucaguuga

SEQ ID NO: 151684 - RNA, 1416 nt, Artificial Sequence
  derived and/or modified CDS sequence (opt3) from neuraminidase__InfluenzaA__AGQ81878
augaaccccaaucagaagcuguucgcccucagcggcguggcuaucgcacuuuccguccugaacuuguuaauugggauaucuaauguuggacugaacgugucacuacaccucaaagagaaggguccuaaacaagaagagaaucugaccugcacaacuaucaaccagaauaacacgaccguaguggaaaauacauacgucaacaauacuaccauuaucacaaaggagaccgaccuuaaagccccaaguuaucuguugcucaacaagagccuguguaauguggaaggcuggguugugauugcgaaggauaacgcugucagauuuggggaguccgagcagaucauagugacuagggaaccguacguaucuugcgaccccacaggauguaaaauguaugcccugcaucagggcaccacgauccggaauaagcacucgaacgguacuauucaugaucgcaccgcauuccgagggcucaucucaacaccuuuaggaacuccacccaccguuagcaacagugacuuuaugugcgugggcugguccucuacaaccugucacgauggcauugggcguaugacgaucugcauacaaggaaauaacgacaaugccacugcuacagucuacuauaacagaaggcugaccacuacaauuaaaaccugggcacggaauauccuucgcacgcaggagagcgaaugugugugccauaacgguaccugugccguggucaugacagauggcuccgcuucaagucaggccuacacuaagguuauguauuuccacaaaggguuggugguaaaggaggaggcgcugaagggaagcgcaagacacauugaagagugcucuuguuacggccauucccagaaagugaccugcgucugcagggacaauuggcaaggugccaaccggccuaucaucgaaauugauaugaauacacuagagcacacuucacgcuacguguguaccgggauacucacagacaccagccgaccaggagauaagaguucuggcgacugcuccaaccccaucacuggcagcccuggggcuccaggaguuaaagguuuuggcuuccugaauggggauaacacguggcuuggaagaacaauuucgccgaggucucgguccggcuuugaaaugcugaagauccccaaugccgguaccgacccuaacucacguauagcagagcgccaggagauuguggacaauaacaacuggaguggguauagcggcuccuucaucgauuacuggaaugacaacucugaauguuauaauccaugcuuuuacgucgaguugaucagaggaaggcccgaagaggcuaaauaugugugguggacuagcaacucacucauugcccuguguggcaguccuuucccaaucggguccgguagcuuucccgauggagcgcagauucaguacuucucuuga

SEQ ID NO: 151685 - RNA, 1416 nt, Artificial Sequence
  derived and/or modified CDS sequence (opt3) from neuraminidase__InfluenzaA__AGQ81882
augaaccccaaucagaagcuguucgcccucagcggcguggcuaucgcacuuuccguccugaacuuguuaauugggauaucuaauguuggacugaacgugucacuacaccucaaagagaagggugccaaacaagaagagaaucugaccugcacaacuaucaaccagaauaacacgaccguaguggaaaauacauacgucaacaauacuaccgugauuacaaaggaggcggacuggaaaaccccuaguuaucuucuguugaacaagagccucuguaauguugaaggcuggguggucaucgcuaaggauaacgccauuagauuuggggaguccgagcagaucauagugacuagggaaccauacguaucuugcgacccgacaggauguaaaauguaugcacugcaucagggcaccacgauccggaauaagcacucgaacgguacuauucaugaucgcaccgccuuccgagggcugaucucaacaccccucggaacuccuccaaccguuagcaacagugacuuuaugugcgugggcugguccucuacaaccugucacgauggcauugggcguaugacgaucugcauacaaggaaauaacgacaaugcuacugcaacagucuacuauaacgguagauuaaccacuacaauuaaaaccugggccaggaauauccugcggacgcaggagagcgaaugugugugccauaacggcaccugugcuguggucaugacagauggguccgccucaagucaggcguacacuaagguuauguauuuccacaaaggacuugugauuaaggaggaggcauugaagggcagcgcccgccacaucgaagagugcucuuguuacggucauucccagaaaguaaccugcgugugcagagacaauuggcaaggggcuaacaggcccaucauugaaauagauaugaauacacuggagcacacuucacgguacgucuguaccggaauccuaacagacaccagccgcccuggcgauaagaguucuggcgacugcuccaacccaauuacugggagccccggagccccuggugugaaaggcuuuggguuccucaauggagauaacacguggcugggccgaacaaucucgccaagaucuagguccgguuuugaaaugcuuaagauaccgaaugcagggauugaccccaacucacggaucgcugagcgucaggagaucguugacaauaacaacuggaguggcuauagcggauccuucauugauuacuggaaugacaacucugaauguuauaauccuugcuuuuacguggagcugauccgcggcagaccagaagaggccaaauaugucugguggaccagcaacucauugauugcgcucugugggagucccuucccugugggauccgguagcuuuccagauggcgcccagauacaguacuucucuuga

SEQ ID NO: 151686 - RNA, 1416 nt, Artificial Sequence
  derived and/or modified CDS sequence (opt3) from neuraminidase__InfluenzaA__AGQ81883
augaaccccaaucagaagcuguucgcccucagcggcguggcuaucgcacuuuccguccugaacuuguuaauugggauaucuaauguuggacugaacgugucacuacaccucaaagagaaggguccuaaacaagaagagaaucugaccugcacaacuaucaaccagaauaacacgaccguaguggaaaauacauacgucaacaauacuaccgugauuacaaaggaggccgacuggaaaaccccaaguuaucuucuguugaacaagagccucuguaauguugaaggcuggguggucaucgcgaaggauaacgcuauuagauuuggggaguccgagcagaucauagugacuagggaaccguacguaucuugcgaccccacaggauguaaaauguaugcccugcaucagggcaccacgauccggaauaagcacucgaacgguacuauucaugaucgcaccgcauuccgagggcugaucucaacaccucucggaacuccacccaccguuagcaacagugacuuuaugugcgugggcugguccucuacaaccugucacgauggcauugggcguaugacgaucugcauacaaggaaauaacgacaaugccacugcuacagucuacuauaacgguagauuaaccacuacaauuaaaaccugggcaaggaauauccugcggacgcaggagagcgaaugugugugccauaacggcaccugugccguggucaugacagauggguccgcuucaagucaggccuacacuaagguuauguauuuccacaaaggacuugugauuaaggaggaggcguugaagggcagcgcacgccacaucgaagagugcucuuguuacggucauucccagaaaguaaccugcgugugcagagacaauuggcaaggggccaacaggccuaucauugaaauagauaugaauacacuggagcacacuucacgguacgucuguaccggaauccuaacagacaccagccgcccaggcgauaagaguucuggcgacugcuccaaccccauuacugggagcccuggagcuccaggugugaaaggcuuuggguuccucaauggagauaacacguggcugggccgaacaaucucgccgagaucuagguccgguuuugaaaugcuuaagauacccaaugccgggauugacccuaacucacggaucgcagagcgucaggagaucguugacaauaacaacuggaguggcuauagcggauccuucauugauuacuggaaugacaacucugaauguuauaauccaugcuuuuacguggagcugauccgcggcagacccgaagaggcuaaauaugucugguggaccagcaacucauugauugcccucugugggaguccuuucccagugggauccgguagcuuucccgauggcgcgcagauacaguacuucucuuga

SEQ ID NO: 151687 - RNA, 1416 nt, Artificial Sequence; identical to SEQ ID NO: 151686
  derived and/or modified CDS sequence (opt3) from neuraminidase__InfluenzaA__AGQ81884

SEQ ID NO: 151688 - RNA, 1416 nt, Artificial Sequence; identical to SEQ ID NO: 151686
  derived and/or modified CDS sequence (opt3) from neuraminidase__InfluenzaA__AGQ81885

SEQ ID NO: 151689 - RNA, 1416 nt, Artificial Sequence; identical to SEQ ID NO: 151686
  derived and/or modified CDS sequence (opt3) from neuraminidase__InfluenzaA__AGQ81886

SEQ ID NO: 151690 - RNA, 1356 nt, Artificial Sequence
  derived and/or modified CDS sequence (opt3) from neuraminidase__InfluenzaA__AGQ81888
augaaccccaaucagaagcuguucgcccucagcggcguggcuaucgcacuuuccguccugaacuuguuaauugggcugucuaauguuggacuaaacgugucacuccaccugaaagaggccgguccuaagcaagaagagaaucuuaccugcaugacaacuaaagaaacggagcugggcaccccaaguuacuugcuccugaacaagagccuguguaauguagaaggguggguggucauagcgaaagacaacgcugugagauuuggagaguccgagcagaucauuaucacaagggaaccguauguuucuugcgaucccaauggcuguaagauguacgcccuccaucaggguacuaccauucggaacaagcacucgaaugggacaauccaugaccgcaccgcauuccgaggauuaauaucaacuccucugggcacaccacccaccgugagcaacagugauuuuaucugcgucggcugguccucuacgacuugucacgacgggauuggacguaugaccaucugcauucaggguaauaacgauaaugccacagcuacuguguauuacaacagaaggcuuaccacaaccaucaaaacgugggcacggaacauauugcgcacucaagagagcgaauguguaugccauaauggcacaugugccguugugaugaccgacggguccgcuucaagucaggcccacacuaaggucauguauuuccacaaaggacugguggugaaggaggaggcgcuaaaaggcagcgcaaagcauauugaagagugcucuuguuacggucacaaccagaaggucacaugcguuugcagagauaauuggcagggggccaacaggccuaucauugaaaucgacaugaauacccucgagcauacgucccgguauguguguaccggaauccugacagauacuucacgcccaggcgacaaacccaccggcgauugcagcaacccuauuacagggaguccaggagcuccggguguaaagggcuuuggguuccuuaauggagacaacacuuggcugggccgaaccauaucucccagauccaggagcgguuuugaaauguugaaaaucccuaaugccgggauugauccaaacucgcggaucgcagagcgucaagagauaguggacaauucuaacugguccggcuacucaggaaguuucauugacuacuggaaugauaacagcgaauguuauaaucccugcuuuuacgucgagcucauccgcggcagaccugaagaggcuaaguaugugugguggacauccaacucucugaucgccuuaugugggagcccauuccccguuggaucagguaguuuuccggacggcgcgcagauucaguacuucuccuga

SEQ ID NO: 151691 - RNA, 1356 nt, Artificial Sequence
  derived and/or modified CDS sequence (opt3) from neuraminidase__InfluenzaA__AGQ81889
augaaccccaaucagaagcuguucgcccucagcggcguggcuaucgcacuuuccguccugaacuuguuaauugggcugucuaauguuggacuaaacgugucacuccaccugaaagagaccgguccuaagcaagaagagaaucuuacaugcaugacuacgaaagaaaccgagcugggcacaccaaguuacuugcuccugaacaagagccuguguaauguagaaggguggguggucauagccaaagacaacgcggugagauuuggagaguccgagcagaucauuaucacuagggaaccguauguuucuugcgaucccaauggcuguaagauguacgcucuccaucaggguaccacaauucggaacaagcacucgaaugggaccauccaugaccgcacugccuuccgaggauuaauaucaacaccucugggcaccccacccacggugagcaacagugauuuuaucugcgucggcugguccucuacuaccugucacgacgggauuggacguaugacaaucugcauucaggguaauaacgauaaugcaacugccaccguguauuacaacagaaggcuuacaaccacgaucaaaacuugggcucggaacauauugcgcacacaagagagcgaauguguaugccauaauggcaccugugcaguugugaugacugacggguccgccucaagucaggcucacacaaaggucauguauuuccacaaaggacugguggugaaggaggaggcccuaaaaggcagcgcgaagcauauugaagagugcucuuguuacggucacaaccagaagguuaccugcgucugcagagauaauuggcagggggcaaacaggccuaucauugaaaucgacaugaauacgcucgagcauaccucccgguauguguguacaggaauccugacugauaccucacgcccaggcgacaaacccacaggcgauugcagcaacccuauuacugggaguccaggagccccggguguaaagggcuuuggguuccuuaauggagacaacaccuggcugggccgaacaauaucucccagauccaggagcgguuuugaaauguugaaaaucccuaaugcugggauugauccaaacucgcggaucgccgagcgucaagagauaguggacaauucuaacugguccggcuacucaggaaguuucauugacuacuggaaugauaacagcgaauguuauaaucccugcuuuuacgucgagcucauccgcggcagaccugaagaggcaaaguaugugugguggaccuccaacucucugaucgcuuuaugugggagcccauuccccguuggaucagguaguuuuccggacggcgcccagauucaguacuucuccuga

SEQ ID NO: 151692 - RNA, 1356 nt, Artificial Sequence; identical to SEQ ID NO: 151691
  derived and/or modified CDS sequence (opt3) from neuraminidase__InfluenzaA__AGQ81890

SEQ ID NO: 151693 - RNA, 1356 nt, Artificial Sequence; identical to SEQ ID NO: 151691
  derived and/or modified CDS sequence (opt3) from neuraminidase__InfluenzaA__AGQ81891

SEQ ID NO: 151694 - RNA, 1356 nt, Artificial Sequence
  derived and/or modified CDS sequence (opt3) from neuraminidase__InfluenzaA__AGQ81893
augaaccccaaucagaagcuguucgcccucagcggcguggcuaucgcacuuuccguccugaacuuguuaauugggcugucuaauguuggacuaaacgugucacuccaccugaaagagaccgguccuaagcaagaagagaaucuuacaugcaugacuacgaaagaaaccgagcugggcacaccaaguuacuugcuccugaacaagagccuguguaauguagaaggguggguggucauagccaaagacaacgcggugagauuuggagaguccgagcagaucauuaucacuagggaaccguauguuucuugcgaucccaauggcuguaagauguacgcucuccaucaggguaccacaauucggaacaagcacucgaaugggaccauccaugaccgcacugccuuccgaggauuaauaucaacaccucugggcaccccacccacggugagcaacagugauuuuaucugcgucggcugguccucuacuaccugucacgacgggauuggacguaugacaaucugcauucaggguaauaacgauaaugcaacugccaccguguauuacaacagaaggcuuacaaccacgaucaaaacuugggcucggaacauauugcgcacacaagagagcgaauguguaugccauaauggcaccugugcaguugugaugacugacggguccgccucaagucaggcucacacaaaggucauguauuuccacaaaggacugguggugaaggaggaggcccuaaaaggcagcgcgaagcauauugaagagugcucuuguuacggucacaaccagaagguuaccugcgucugcagagauaauuggcagggggcaaacaggccuaucauugaaaucgacaugaauacgcucgagcauaccucccgguauguguguacaggaauccugacugauaccucacgcccaggcgacaaacccacaggcgauugcagcaacccuauuacugggaguccaggagccccggguguaaagggcuuuggguuccuuaauggagacaacaccuggcugggccgaacaauaucucccagauccaggagcgguuuugaaauguugaaaaucccuaaugcugggauugauccaaacucgcggaucgccgagcgucaagagauaguggacaauucuaacugguccggcuacucaggaaguuucauugacuacuggaaugauaacagcgaauguuauaaucccugcuuuuacgucgagcucauccgcggcagaccugaagaggcagaauaugugugguggaccuccaacucucugaucgcuuuaugugggagcccauuccccguuggaucagguaguuuuccggacggcgcccagauucaguacuucuccuga

SEQ ID NO: 151695 - RNA, 1356 nt, Artificial Sequence; identical to SEQ ID NO: 151691
  derived and/or modified CDS sequence (opt3) from neuraminidase__InfluenzaA__AGQ81894

SEQ ID NO: 151696 - RNA, 1356 nt, Artificial Sequence; identical to SEQ ID NO: 151691
  derived and/or modified CDS sequence (opt3) from neuraminidase__InfluenzaA__AGQ81895

SEQ ID NO: 151697 - RNA, 1356 nt, Artificial Sequence; identical to SEQ ID NO: 151691
  derived and/or modified CDS sequence (opt3) from neuraminidase__InfluenzaA__AGQ81896

SEQ ID NO: 151698 - RNA, 1356 nt, Artificial Sequence; identical to SEQ ID NO: 151691
  derived and/or modified CDS sequence (opt3) from neuraminidase__InfluenzaA__AGQ81897

SEQ ID NO: 151699 - RNA, 1356 nt, Artificial Sequence; identical to SEQ ID NO: 151691
  derived and/or modified CDS sequence (opt3) from neuraminidase__InfluenzaA__AGQ81898

SEQ ID NO: 151700 - RNA, 1356 nt, Artificial Sequence; identical to SEQ ID NO: 151691
  derived and/or modified CDS sequence (opt3) from neuraminidase__InfluenzaA__AGQ81899

SEQ ID NO: 151701 - RNA, 1356 nt, Artificial Sequence; identical to SEQ ID NO: 151691
  derived and/or modified CDS sequence (opt3) from neuraminidase__InfluenzaA__AGQ81900

SEQ ID NO: 151702 - RNA, 1356 nt, Artificial Sequence; identical to SEQ ID NO: 151691
  derived and/or modified CDS sequence (opt3) from neuraminidase__InfluenzaA__AGQ81901

SEQ ID NO: 151703 - RNA, 1356 nt, Artificial Sequence; identical to SEQ ID NO: 151691
  derived and/or modified CDS sequence (opt3) from neuraminidase__InfluenzaA__AGQ81902

SEQ ID NO: 151704 - RNA, 1356 nt, Artificial Sequence; identical to SEQ ID NO: 151691
  derived and/or modified CDS sequence (opt3) from neuraminidase__InfluenzaA__AGQ81903

SEQ ID NO: 151705 - RNA, 1356 nt, Artificial Sequence
  derived and/or modified CDS sequence (opt3) from neuraminidase__InfluenzaA__AGQ81904
augaaccccaaucagaagcuguucgcccucagcggcguggcuaucgcacuuuccguccugaacuuguuaauugggcugucuaauguuggacuaaacgugucacuccaccugaaagagaccgguccuaagcaagaagagaaucuuacaugcaugacuacgaaagaaaccgagcugggcacaccaaguuacuugcuccugaacaagagccuguguaauguagaaggguggguggucauagccaaagacaacgcggugagauuuggagaguccgagcagaucauuaucacuagggaaccguauguuucuugcgaucccaauggcuguaagauguacgcucuccaucaggguaccacaauucggaacaagcacucgaaugggaccauccaugaccgcacugccuuccgaggauuaauaucaacaccucugggcaccccacccacggugagcaacagugauuuuaucugcgucggcugguccucuacuaccugucacgacgggauuggacguaugacaaucugcauucaggguaauaacgauaaugcaacugccaccguguauuacaacagaaggcuuacaaccacgaucaaaacuugggcucggaacauauugcgcacacaagagagcgaauguguaugccauaauggcaccugugcaguugugaugacugacggguccgccucaagucaggcucacacaaaggucauguauuuccacaaaggacugguggugaaggaggaggcccuaaaaggcagcgcgaagcauauugaagagugcucuuguuacggucacaaccagaagguuaccugcgucugcagagauaauuggcagggggcaaacaggccuaucauugaaaucgacaugaauacgcucgagcauaccucccgguauguguguacaggaauccugacugauaccucacgcccaggcgacaaacccacaggcgauugcagcaacccuauuacugggaguccaggagccccggguguaaagggcuuuggguuccuuaauggagacaacaccuggcugggccgaacaauaucucccagauccaggagcgguuuugaaauguugaaaaucccuaaugcugggauugauccaaacucgcggaucaccgagcgucaagagauaguggacaauucuaacugguccggcuacucaggaaguuucauugacuacuggaaugauaacagcgaauguuauaaucccugcuuuuacgucgagcucauccgcggcagaccugaagaggccaaguaugugugguggacuuccaacucucugaucgcauuaugugggagcccauuccccguuggaucagguaguuuuccggacggcgcucagauucaguacuucuccuga

SEQ ID NO: 151706 - RNA, 1356 nt, Artificial Sequence; identical to SEQ ID NO: 151691
  derived and/or modified CDS sequence (opt3) from neuraminidase__InfluenzaA__AGQ81905

SEQ ID NO: 151707 - RNA, 1356 nt, Artificial Sequence
  derived and/or modified CDS sequence (opt3) from neuraminidase__InfluenzaA__AGQ81906
augaaccccaaucagaagcuguucgcccucagcggcguggcuaucgcacuuuccguccugaacuuguuaauugggcugucuaauguuggacuaaacgugucacuccaccugaaagagaccgguccuaagcaagaagagaaucuuacaugcaugacuacgaaagaaaccgagcugggcacaccaaguuacuugcuccugaacaagagccuguguaauguagaaggguggguggucauagccaaagacaacgcggugagauuuggagaguccgagcagaucauuaucacuagggaaccguauguuucuugcgaucccaauggcuguaagauguacgcucuccaucaggguaccacaauucggaacaagcacucgaaugggaccauccaugaccgcacugccuuccgaggauuaauaucaacaccucugggcaccccacccacggugagcaacagugauuuuaucugcgucggcugguccucuacuaccugucacgacgggauuggacguaugacaaucugcauucaggguaauaacgauaaugcaacugccaccguguauuacaacagaaggcuuacaaccacgaucaaaacuugggcucggaacauauugcgcacacaagagagcgaauguguaugccauaauggcaccugugcaguugugaugacugacggguccgccucaagucaggcucacacaaaggucauguauuuccacaaaggacugguggugaaggaggaggcccuaaaaggcagcgcgagacauauugaagagugcucuuguuacggucacaaccagaagguuaccugcgucugcagggauaauuggcagggggcaaaccggccuaucauugaaaucgacaugaauacgcucgagcauaccucccgcuauguguguacaggaauccugacugauaccucacgaccaggcgacaagcccacaggcgauugcagcaacccuauuacugggaguccaggagccccggguguaaaaggcuuuggguuccuuaauggagacaacaccuggcugggcagaacaauaucucccaggucccggagcgguuuugaaauguugaagaucccuaaugcugggauugauccaaacucgcguaucgccgagcgccaagagauaguggacaauucuaacugguccggcuacucaggaaguuucauugacuacuggaaugauaacagcgaauguuauaaucccugcuuuuacgucgagcucaucagaggcaggccugaagaggcaaaauaugugugguggaccuccaacucucugaucgcuuuaugugggagcccauuccccguuggaucagguaguuuuccggacggcgcccagauucaguacuucuccuga

SEQ ID NO: 151708 - RNA, 1356 nt, Artificial Sequence; identical to SEQ ID NO: 151691
  derived and/or modified CDS sequence (opt3) from neuraminidase__InfluenzaA__AGQ81907

SEQ ID NO: 151709 - RNA, 1356 nt, Artificial Sequence
  derived and/or modified CDS sequence (opt3) from neuraminidase__InfluenzaA__AGQ81908
augaaccccaaucagaagcuguucgcccucagcggcguggcuaucgcacuuuccguccugaacuuguuaauugggcugucuaauguuggacuaaacgugucacuccaccugaaagagaccgguccuaagcaagaagagaaucuuacaugcaugacuacgaaagaaaccgagcugggcacaccaaguuacuugcuccugaacaagagccuguguaauguagaaggguggguggucauagccaaagacaacgcggugagauuuggagaguccgagcagaucauuaucacuagggaaccguauguuucuugcgaucccaauggcuguaagauguacgcucuccaucaggguaccacaauucggaacaagcacucgaaugggaccauccaugaccgcacugccuuccgaggauuaauaucaacaccucugggcaccccacccacggugagcaacagugauuuuaucugcgucggcugguccucuacuaccugucacgacgggauuggacguaugacaaucugcauucaggguaauaacgauaaugcaacugccaccguguauuacaacagaaggcuuacaaccacgaucaaaacuugggcucggaacauauugcgcacacaagagagcgaauguguaugccauaauggcaccugugcaguugugaugacugacggguccgccucaaaccaggcucacacaaaggucauguauuuccacaaaggacugguggugaaggaggaggcccuaaaaggcagugcgaagcauauugaagagugcagcuguuacggucacaaucagaagguuaccugcgucugcagagauaacuggcagggggcaaauaggccuaucauugaaaucgacaugaacacgcucgagcauaccucucgguauguguguacaggaauccugacugauaccucccgcccaggcgacaaacccacaggcgauugcucaaauccuauuacugggagcccaggagccccggguguaaagggcuuuggguuccuuaacggagacaauaccuggcugggccgaacaauaagucccagaucuagguccgguuuugaaauguugaaaaucccuaacgcugggauugauccaaauagccggaucaccgagcgucaagagauaguggacaacucgaauuggucuggcuacuccggaucauucauugacuacuggaacgauaauagugaauguuauaaccccugcuuuuacgucgagcucauccgcggcagaccugaagaggccaaguaugugugguggacuagcaacucccugaucgcauuaugugggucuccauuccccguuggaagcgguucauuuccggacggcgcucagauucaguacuucaguuga

SEQ ID NO: 151710 - RNA, 1356 nt, Artificial Sequence; identical to SEQ ID NO: 151691
  derived and/or modified CDS sequence (opt3) from neuraminidase__InfluenzaA__AGQ81909

SEQ ID NO: 151711 - RNA, 1356 nt, Artificial Sequence
  derived and/or modified CDS sequence (opt3) from neuraminidase__InfluenzaA__AGQ81910
augaaccccaaucagaagcuguucgcccucagcggcguggcuaucgcacuuuccguccugaacuuguuaauugggcugucuaauguuggacuaaacgugucacuccaccugaaagagaccgguccuaagcaagaagagaaucuuacaugcaugacuacgaaagaaaccgagcugggcacaccaaguuacuugcuccugaacaagagccuguguaauguagaaggguggguggucauagccaaagacaacgcggugagauuuggagaguccgagcagaucauuaucacuagggaaccguauguuucuugcgaucccaauggcuguaagauguacgcucuccaucaggguaccacaauucggaacaagcacucgaaugggaccauccaugaccgcacugccuuccgaggauuaauaucaacaccucugggcaccccacccacggugagcaacagugauuuuaucugcgucggcugguccucuacuaccugucacgacgggauuggacguaugacaaucugcauucaggguaauaacgauaaugcaacugccaccguguauuacaacagaaggcuuacaaccacgaucaaaacuugggcucggaacauauugcgcacacaagagagcgaauguguaugccauaauggcaccugugcaguugugaugacugacggguccgccucaggacaggcucacacaaaggucauguauuuccacaaaggccugguggugaaggaggaggcccuaaaagguagugcgaagcauauugaagagugcagcuguuacgggcacaaccagaagguuaccugcgucugcagagauaauuggcagggagcaaacaggccuaucauugaaaucgacaugaauacgcucgagcauaccucuuccuauguguguacaggcauccugacugauaccucacggccaggcgacaaacccacaggggauugcagcaacccuauuacuggaaguccaggugccccgggcguaaagggguuuggauuccuuaauggcgacaacaccuggcugggucgcacaauaucuccccgauccagaagcggguuugaaauguugaaaaucccuaaugcuggcauugauccaaacucgaggaucgccgagcggcaagagauaguggacaauucuaacugguccggauacucaggcaguuucauugacuacuggaaugauaacagcgaauguuauaaucccugcuuuuacgucgagcucauccgugggcgcccugaagaggcaaaguaugugugguggaccuccaacucucugaucgcuuuauguggaagcccauuccccguugguucaggcaguuuuccggacggggcccagauucaguacuucuccuga

SEQ ID NO: 151712 - RNA, 1356 nt, Artificial Sequence
  derived and/or modified CDS sequence (opt3) from neuraminidase__InfluenzaA__AGQ81911
augaaccccaaucagaagcuguucgcccucagcggcguggcuaucgcacuuuccguccugaacuuguuaauugggcugucuaauguuggacuaaacgugucacuccaccugaaagagaccgguccuaagcaagaagagaaucuuacaugcaugacuacgaaagaaaccgagcugggcacaccaaguuacuugcuccugaacaagagccuguguaauguagaaggguggguggucauagccaaagacaacgcggugagauuuggagaguccgagcagaucauuaucacuagggaaccguauguuucuugcgaucccaauggcuguaagauguacgcucuccaucaggguaccacaauucggaacaagcacucgaaugggaccauccaugaccgcacugccuuccgaggauuaauaucaacaccucugggcaccccacccacggugagcaacagugauuuuaucugcgucggcugguccucuacuaccugucacgacgggauuggacguaugacaaucugcauucaggguaauaacgauaaugcaacugccaccguguauuacaacagaaggcuuacaaccacgaucaaaacuugggcucggaacauauugcgcacacaagagagcgaauguguaugccauaauggcaccugugcaguugugaugacugacggguccgccucaggacaggcucacacaaaggucauguauuuccacaaaggccugguggugaaggaggaggcccuaaaagguagugcgaagcauauugaagagugcagcuguuacgggcacaaccagaauguuaccugcgucugcagagauaacuggcagggagcaaauaggccuaucauugaaaucgacaugaacacgcucgagcauaccucucgguauguguguacaggcauccugacugauaccucccgcccaggcgacaagcccacaggggauugcucaaauccuauuacuggaagcccaggugccccgggcguaaaaggguuuggauuccuuaacggcgacaauaccuggcugggucgaacaauaagucccagaucuagguccggguuugaaauguugaagaucccuaacgcuggcauugauccaaauagccggaucgccgagcgucaagagauaguggacaacucgaauuggucuggauacuccggcucauucauugacuacuggaacgauaauagugaauguuauaaccccugcuuuuacgucgagcucauccgcgggagaccugaagaggcaaaauaugugugguggaccagcaacucccugaucgcuuuauguggaucuccauuccccguugguagcggcucauuuccggacggggcccagauucaguacuucaguuga

SEQ ID NO: 151713 - RNA, 1356 nt, Artificial Sequence; identical to SEQ ID NO: 151691
  derived and/or modified CDS sequence (opt3) from neuraminidase__InfluenzaA__AGQ81912

SEQ ID NO: 151714 - RNA, 1356 nt, Artificial Sequence
  derived and/or modified CDS sequence (opt3) from neuraminidase__InfluenzaA__AGQ81913
augaaccccaaucagaagcuguucgcccucagcggcguggcuaucacccuuuccguccugaacuuguuaauugggcugucuaauguuggacuaaacgugucacuccaccugaaagagacagguccuaagcaagaagagaaucuuacuugcaugacgaccaaagaaacagagcugggcacuccaaguuacuugcuccugaacaagagccuguguaauguagaaggguggguggucauagcaaaagacaacgccgugagauuuggagaguccgagcagaucauuaucaccagggaaccguauguuucuugcgaucccaauggcuguaagauguacgcgcuccaucaggguacaaccauucggaacaagcacucgaaugggacuauccaugaccgcacagcuuuccgaggauuaauaucaaccccucugggcacgccacccacugugagcaacagugauuuuaucugcgucggcugguccucuaccacaugucacgacgggauuggacguaugacuaucugcauucaggguaauaacgauaaugccaccgcaacaguguauuacaacagaaggcuuaccacgacuaucaaaacaugggcccggaacauauugcgcacccaagagagcgaauguguaugccauaauggcacuugugcuguugugaugacagacggguccgcaucaggacaggcccacaccaaggucauguauuuccacaaaggccugguggugaaggaggaggcucuaaaagguagugccaagcauauugaagagugcagcuguuacgggcacaaccagaaggucacgugcguuugcagagauaauuggcagggagcgaacaggccuaucauugaaaucgacaugaauacccucgagcauacaucucgguauguguguacuggcauccugaccgauacaucccgcccaggcgacaaacccacuggggauugcucaaacccuauuaccggaagcccaggugcaccgggcguaaagggguuuggauuccuuaauggcgacaacacauggcugggucgaaccauaagucccagaucuagguccggguuugaaauguugaaaaucccuaaugccggcauugauccaaacagccggaucgcugagcgucaagagauaguggacaauucgaacuggucuggauacuccggcucauucauugacuacuggaaugauaacagugaauguuauaaucccugcuuuuacgucgagcucauccgcgggagaccugaagaggccaaguaugugugguggacuagcaacucccugaucgcauuauguggaucuccauuccccguugguagcggcucauuuccggacggggcucagauucaguacuucaguuga

SEQ ID NO: 151715 - RNA, 1356 nt, Artificial Sequence; identical to SEQ ID NO: 151691
  derived and/or modified CDS sequence (opt3) from neuraminidase__InfluenzaA__AGQ81914

SEQ ID NO: 151716 - RNA, 1356 nt, Artificial Sequence; identical to SEQ ID NO: 151691
  derived and/or modified CDS sequence (opt3) from neuraminidase__InfluenzaA__AGQ81915

SEQ ID NO: 151717 - RNA, 1416 nt, Artificial Sequence
  derived and/or modified CDS sequence (opt3) from neuraminidase__InfluenzaA__AGQ81917
augaaccccaaucagaagcuguucgcccucagcggcguggcuaucgcacuuuccguccugaacuuguuaauugggcugucuaauguuggacuaaacgugucacuccaccugaaagagaccgguccuaagcaagaagagaaucuuacaugcaugacuauaaaccagaauaacacgaccguaguggaaaauacauacgucaacaauacuaccaucauuacaaaagagaccgaacuggagacuccaaacuauuugcuccugaauaagagucuguguaacguggagggcuggguuguggucgccaaagacaaugcggugagauuuggggaaagcgagcagaucauuguaacaagggaaccguacguuuccugcgaucccaacggauguaagauguaugcucuccaucagggcaccacgauccggaacaagcacucuaaugguacuauacaugaccgcaccgccuuccgaggguuaaucucgacaccucugggaacuccacccaccgugucaaacagcgauuuuauuugcgucggcuggaguuccacaaccugucacgacggcaucgggcguaugacgauuugcauccaaggaaauaacgauaaugcaacugccacaguguacuauaacagaaggcuuaccacuacaauaaaaaccugggcucggaauauuuugcgcacgcaggagucugagugugugugccauaacgguaccugugcagucguuaugacagacggcagcgccuccucacaggcucacacuaaggugauguacuuccacaaagggcugguaaucaaggaagaggcccuaaaaggaagugcgaagcauauugaagagugcagcuguuauggccacaaucagaaggugaccugcgucugcagagauaacuggcaaggugcaaauaggccuaucaucgaaauugacaugaacacacucgagcauacuucucgguacguguguaccgggauacugacagauaccucccgcccaggagacaaacccacuggcgauugcucaaauccuaucacgggcagcccaggggccccgggaguuaaggguuuuggcuuccuuaacggggacaauacauggcugggacgaaccauuagucccagaucuagguccggcuuugagauguugaaaaucccuaacgcugguauagauccaaacagccggauugccgaacgucaggagaucguggacaauucgaacuggucuggguacuccggcucauucaucgacuauuggaaugauaacagugaauguuacaaucccugcuuuuaugucgagcucauucgcggaagaccugaagaggcaaaguacgugugguggacuagcaacucccugaucgcuuuauguggcucuccauuccccguagggagcggaucauuuccggacggugcccagauucaguauuucaguuga

SEQ ID NO: 151718 - RNA, 1356 nt, Artificial Sequence
  derived and/or modified CDS sequence (opt3) from neuraminidase__InfluenzaA__AGQ81918
augaaccccaaucagaagcuguucgcccucagcggcguggcuaucgcacuuuccguccugaacuuguuaauugggcugucuaauguuggacuaaacgugucacuccaccugaaagagaccgguccuaagcaagaagagaaucuuacaugcaugacuacgaaagaaaccgagcugggcacaccaaguuacuugcuccugaacaaggggcuguguaauguagaaggauggguggucauagccaaagacaacgcggugagauuuggcgagagcgagcagaucauuaucacuagggaaccguauguuuccugcgaucccaaugguuguaagauguacgcucuccaucaggggaccacaauucggaacaagcacucuaauggaaccauccaugaccgcacugccuuccgaggcuuaauaucgacaccucugggcaccccacccacggugucaaacagcgauuuuaucugcgucggguggaguuccacuaccugucacgacggaauuggucguaugacaaucugcauucagggcaauaacgauaaugcaacugccaccguguauuacaacagaaggcuuacaaccacgaucaaaacuugggcucggaacauauugcgcacacaagagucugaauguguaugccauaaugggaccugugcaguugugaugacugacggaagcgccuccucacaggcucacacaaaggucauguauuuccacaaaggccugguggugaaggaggaggcccuaaaagguagugcgaagcauauugaagagugcagcuguuacgggcacaaccagaagguuaccugcgucugcagagauaauuggcagggagcaaacaggccuaucauugaaaucgacaugaauacgcucgagcauaccucucgguauguguguacaggcauccugacugauaccucccgcccaggcgacaaacccacaggggauugcucaaacccuauuacuggaagcccaggugccccgggcguaaagggguuuggauuccuuaauggcgacaacaccuggcugggucgaacaauaagucccagaucuagguccggguuugaaauguugaaaaucccuaaugcuggcauugauccaaacagccggaucgccgagcgucaagagauaguggacaauucgaacuggucuggauacuccggcucauucauugacuacuggaaugauaacagugaauguuauaaucccugcuuuuacgucgagcucauccgcgggagaccugaagaggcaaaguaugugugguggaccagcaacucccugaucgcuuuauguggaucuccauuccccguugguagcggcucauuuccggacggggcccagauucaguacuucaguuga

SEQ ID NO: 151719 - RNA, 1356 nt, Artificial Sequence; identical to SEQ ID NO: 151691
  derived and/or modified CDS sequence (opt3) from neuraminidase__InfluenzaA__AGQ81919

SEQ ID NO: 151720 - RNA, 1356 nt, Artificial Sequence; identical to SEQ ID NO: 151691
  derived and/or modified CDS sequence (opt3) from neuraminidase__InfluenzaA__AGQ81920

SEQ ID NO: 151721 - RNA, 1356 nt, Artificial Sequence
  derived and/or modified CDS sequence (opt3) from neuraminidase__InfluenzaA__AGQ81921
augaaccccaaucagaagcuguucgcccucagcggcguggcuaucgcacuuuccguccugaacuuguuaauugggcugucuaauguuggacuaaacgugucacuccaccugaaagagaccgguccuaagcaagaagagaaucuuacaugcaugacuacgaaagaaaccgagcugggcacaccaaguuacuugcuccugaacaagagccuguguaauguagaaggguggguggucauagccaaagacaacgcggugagauuuggagaguccgagcagaucauuaucacuagggaaccguauguuucuugcgaucccaauggcuguaagauguacgcucuccaucaggguaccacaauucggaacaagcacucgaaugggaccauccaugaccgcacugccuuccgaggauuaauaucaacaccucugggcaccccacccacggugagcaacagugauuuuaucugcgucggcugguccucuacuaccugucacgacgggauuggacguaugacaaucugcauucaggguaauaacgauaaugcaacugccaccguguauuacaacagaaggcuuacaaccacgaucaaaacuugggcucggaacauauugcgcacacaagagagcgaauguguaugccauaauggcaccugugcaguugugaugacugacggguccgccucaggacaggcucacacaaaggucauguauuuccacaaaggccugguggugaaggaggaggcccuaaaagguagugcgaagcauauugaagagugcagcuguuacgggcacaaccagaagguuaccugcgucugcagagauaauuggcagggagcaaacaggccuaucauugaaaucgacaugaauacgcucgagcauaccucucgguauguguguacaggcauccugacugauaccucccgcccaggcgacaaacccacaggggauugcucaaacccuauuacuggaagcccaggugccccgggcguaaagggguuuggauuccuuaauggcgacaacaccuggcugggucgaacaauaagucccagaucuagguccggguuugaaauguugaaaaucccuaaugcuggcauugauccaaacagccggaucgccgagcgucaagagauaguggacaauucgaacuggucuggauacuccggcucauucauugacuacuggaaugauaacagugaauguuauaaucccugcuuuuacgucgagcucauccgcgggagaccugaagaggcaaaguaugugugguggaccagcaacucccugaucgcuuuauguggaucuccauuccccguugguagcggcucauuuccggacggggcccagauucaguacuucaguuga

SEQ ID NO: 151722 - RNA, 1356 nt, Artificial Sequence; identical to SEQ ID NO: 151691
  derived and/or modified CDS sequence (opt3) from neuraminidase__InfluenzaA__AGQ81922

SEQ ID NO: 151723 - RNA, 1356 nt, Artificial Sequence; identical to SEQ ID NO: 151721
  derived and/or modified CDS sequence (opt3) from neuraminidase__InfluenzaA__AGQ81923

SEQ ID NO: 151724 - RNA, 1356 nt, Artificial Sequence
  derived and/or modified CDS sequence (opt3) from neuraminidase__InfluenzaA__AGQ81924
augaaccccaaucagaagcuguucgcccucagcggcguggcuaucgcacuuuccguccugaacuuguuaauugggcugucuaauguuggacuaaacgugucacuccaccugaaagagaccgguccuaagcaagaagagaaucuuacaugcaugacuacgaaagaaaccgagcugggcacaccaaguuacuugcuccugaacaagagccuguguaauguagaaggguggguggucauagccaaagacaacgcggugagauuuggagaguccgagcagaucauuaucacuagggaaccguauguuucuugcgaucccaauggcuguaagauguacgcucuccaucaggguaccacaauucggaacaagcacucgaaugggaccauccaugaccgcacugccuuccgaggauuaauaucaacaccucugggcaccccacccacggugagcaacagugauuuuaucugcgucggcugguccucuacuaccugucacgacgggauuggacguaugacaaucugcauucaggguaauaacgauaaugcaacugccaccguguauuacaacagaaggcuuacaaccacgaucaaaacuugggcucggaacauauugcgcacacaagagagcgaauguguaugccauaauggcaccugugcaguugugaugacugacggguccgccaacucacaggcucacacaaaggucauguauuuccacaaaggacugguggugaaggaggaggcccuaaaaggcagugcgaagcauauugaagagugcagcuguuacggucacaaucagaagguuaccugcgucugcagagauaacuggcagggggcaaauaggccuaucauugaaaucgacaugaacacgcucgagcauaccucucgguauguguguacaggaauccugacugauaccucccgcccaggcgacaaacccacaggcgauugcucaaauccuauuacugggagcccaggagccccggguguaaagggcuuuggguuccuuaacggagacaauaccuggcugggccgaacaauaagucccagaucuagguccgguuuugaaauguugaaaaucccuaacgcugggauugauccaaauagccggaucgccgagcgucaagagauaguggacaacucgaauuggucuggcuacuccggaucauucauugacuacuggaacgauaauagugaauguuauaaccccugcuuuuacgucgagcucauccgcggcagaccugaagaggcaaaguaugugugguggaccagcaacucccugaucgcuuuaugugggucuccauuccccguuggaagcgguucauuuccggacggcgcccagauucaguacuucaguuga

SEQ ID NO: 151725 - RNA, 1356 nt, Artificial Sequence; identical to SEQ ID NO: 151691
  derived and/or modified CDS sequence (opt3) from neuraminidase__InfluenzaA__AGQ81925

SEQ ID NO: 151726 - RNA, 1356 nt, Artificial Sequence; identical to SEQ ID NO: 151691
  derived and/or modified CDS sequence (opt3) from neuraminidase__InfluenzaA__AGQ81926

SEQ ID NO: 151727 - RNA, 1356 nt, Artificial Sequence; identical to SEQ ID NO: 151691
  derived and/or modified CDS sequence (opt3) from neuraminidase__InfluenzaA__AGQ81927

SEQ ID NO: 151728 - RNA, 1356 nt, Artificial Sequence; identical to SEQ ID NO: 151691
  derived and/or modified CDS sequence (opt3) from neuraminidase__InfluenzaA__AGQ81928

SEQ ID NO: 151729 - RNA, 1356 nt, Artificial Sequence; identical to SEQ ID NO: 151691
  derived and/or modified CDS sequence (opt3) from neuraminidase__InfluenzaA__AGQ81929

SEQ ID NO: 151730 - RNA, 1413 nt, Artificial Sequence
  derived and/or modified CDS sequence (opt3) from neuraminidase__InfluenzaA__AGQ81930
augaaccccaaucagaagaucauuaccauaggcagcaucucccuggggcucguggucuucaacguucuucugcacgugguaucuauuaucgugacagucuugguguuaggaagagguggcaauucagggauuugcaacgagacuguugugagggaauacaaugagacgguccggaucgagaaaauaacccaauggcauaacacaagugugguagaauauguuccuuacuggagcgaaggaaauuauaugaacaauacugaggccaucugugacgugaagggcuuugcuccauucuccaaagauaacgguauucgcaucgggucucgaggacacgucuuugugauucgugagccguucgugucgugcucacccaccgaauguagaacauuuuuccugacccagggcagccuacucaaugacaagcauaguaacggcacugucaaagauagguccccuuuucggacacugaugucuguugagguggggcagagcccaaauguauaccaggcacgcuucgaagccguggcgugguccgcuaccgccugccacgacggaaagaaguggaugacgaucggugucacuggccccgauucaaaagcaguggccguugugcauuaugggggagucccuaccgacgugguaaacaguugggcuggcgauauacuuagaacacaagagagcucuuguacuugcauucaggguaauuguuacuggguuaugaccgacgggccagcaaacaggcaggcccaguaucggaucuacaaggcuaaccaaggaaaaauugugggccagacagauaucuccuuuaauggcgggcacaucgaggaaugcucauguuaccccaacgacggaaaggucgagugcgugugucgcgauaauuggaccgguacgaaccgaccuguccuggugauuagcccagacuugaguuauagaguuggcuaccucugcgccgggcugccgucugauacucccaggggagaagacgcgcaguucacaggcuccugcaccagcccuauggguaaucagggguauggcgugaaaggauuuggcuuccggcaagggacugacguauggaugggacguacaauaucgcgcaccucuagauccgguuuugagauccugaggauuaagaacggcuggacgcagaccucaaaggaacagguccggaaacaagugguuguggauaaucucaacuggaguggguacagcggauccuucacauuaccagucgagcugucuggcaaggacugucuugugcccugcuucuggguagagaugauccgagguaaaccugaagagaagacuauauggaccagcucaaguuccauugugaugugugggguugauuaugaagucgcagacuggagcuggcacgauggcgccaucuugccauuugacaucgauaaaauguga

SEQ ID NO: 151731 - RNA, 1413 nt, Artificial Sequence
  derived and/or modified CDS sequence (opt3) from neuraminidase__InfluenzaA__AGQ81931
augaaccccaaucagaagaucauuaccauaggcagccugucccucgggcuugugguccugaacaucuuguuacacauuaucucuauuacaaucacuguucuggugauaccuagaaauggaaacacggguucaugcaaugagaccguaaucagggaauacaacgagacagugcggauugagaaaaucacucaauggcauaauaccaacauuaucgaauauauagaaaagccagagaaugaccuauucaugaacaauacaggcccgcucugugaugccaaaggguuugcucccuucaguaaggacaacggcauucgcaucggaagcaaaggucacgucuuugugauucgagagccuuucguuuccugcucuccaaccgaaugucguacauuuuuccugacucaggggucgcuucugaaugauaagcauucaaacggaaccgugaaggacagaagccccuacaggacguugaugagugucgagaucggccaguccccuaauguguaucaggcacgguuugaagccguagcguggucugcuacugccugccacgauggcaaaaaguggaugaccaucgggguuacaggaccagacgcaaaagccguggcugucgugcauuacgguggcauucccacugaugugauaaacagcugggcaggggacauccuccgcacccaagaguccucauguacaugcauucagggagaguguuauugggucaugaccgauggcccugccaacagacaggcucaguacagggccuucaaggcgaaacaagguaagaucauagggcagacggaaauuaguuuuaauggaggccacaucgaggaaugcagcuguuauccaaacgagggcaagguugaaugcgugugucgggacaauuggacugggacaaaccgcccgguacuggugaucucuuccgaucugucauaccgagucggauaccucugcgcagguuuacccagcgacaccccuagaggcgaggauagucaguucacugggucuugcacauccccaaugggaaaucagggcuauggugugaaaggguuuggcuucaggcaaggaaacgacguuuggaugggccggaccauuagccguacgucgcgcucuggguuugagauccugaagauuagaaauggauggauacagaacuccaaagaacagaucaagaggcaaguggucguggacaauucaaacuggagugguuacagcggcuccuucacccuucccguagaguugacacggcgaaauugucugguuccuugcuucuggguggaaaugauucgcgggaaaccagaggaaaagacuaucuggaccucuagcucaaguaucgucauguguggaguggaucacgagauugccaacugguccuggcaugacggcgcuauacuacccuuugauaucgacaaaauguga

SEQ ID NO: 151732 - RNA, 1413 nt, Artificial Sequence
  derived and/or modified CDS sequence (opt3) from neuraminidase__InfluenzaA__AGQ81932
augaaccccaaucagaagaucauuaccauaggcagcaucucccuggggcucguggucuucaacguucuucugcacgugguaucuauuaucgugacagucuugauuuuaggaagagguggcaauaacgggaucugcaaugagacugugguuagggaauacaacgagacggugcggauagagaaaaucacccaauggcauaauacaucagucguggaauauguaccuuacuggaacgaaggaacuuauaugaauaacaccgaggccauuugugacguuaagggcuuugcuccauucaguaaagauaaugguauccgcauugggagccgaggacacguguuugucauccgugagccguucguguccugcucucccacagaauguagaaccuuuuuccugacucagggcucgcuacucaacgacaagcauucaaauggcacagugaaagauaggagcccuuuucggacccugaugagugucgagguugggcaguccccaaacguguaccaggcacgcuucgaagccguagcguggucugcuacggccugccacgacggaaagaaguggaugacuauaggugugaccggcagcgauuccaaagcagucgccgugguucauuaugggggagugcccacagacgucgugaauagcugggcuggcgauauucuuagaacucaagagaguagcuguaccugcauccaggguaacuguuacuggguaaugacagacgggccugcaaacaggcaggcccaguaucggauuuacaaggcuaaucaaggaaaaguuaucggccagaccgauaucucuuuuaacggcgggcacauugaggaaugcuccuguuacccaaaugacggaaagguggagugcgucugucgcgauaacuggacggguacuaaucgacccgugcuggucauaucaccugacuugagcuauagagugggcuaccucugcgccgggcugccaagugauacaccgaggggagaagacgcgcaguucaccggcucuugcacuucccccauggguaaccagggguauggcguuaaaggauuuggcuuccggcaagggacagacguguggaugggacguaccaucagccagacgucgcgcucugguuuugagauucugagaguaaagaauggcuggacccagacauccaaggaacaagucaggaaacaggugguuguggauaaccucaauuggucaggguacaguggaucauucacuuuaccuaucgagcuguccggcaaggacugucuugucccaugcuucuggguggagaugauacgggguaaacccgaagagaagucuauuuggaccagcucaaguuccaucguaaugugugggguggauuaugaaguugcagacuggagcuggcacgauggcgccaucuugccuuuugacauugauaaaauguga

SEQ ID NO: 151733 - RNA, 1413 nt, Artificial Sequence
  derived and/or modified CDS sequence (opt3) from neuraminidase__InfluenzaA__AGQ81934
augaaccccaaucagaagauccugugcaccagcgccacagcuauugugauaggcacuaucgcaguccucauugggaucgccaaccuuggacugaauauugguuugcacuuaaaaccuuccuguaacugcucucauucacaaccagagacgaccaauacaagucagacuaucauaaacaauuacuauaacgaaaccaauaucacacagauuagcaacaccaauauccagauggaggaaagagcguccagggacuucaacaaucugacuaagggccuauguacaauuaacucuuggcacaucuacgggaaagauaaugcuguucggauaggagagaacucggacgugcucguaacccgcgaaccguaugugucaugcgaucccgacgagugucgauuuuacgcccugagccaaggcacgacuauucgugguaagcauaguaacgggaccauccacgauagaucccaguauagggcacuuauuucuuggccucugagcuccccacccacagucuacaauucacggguggagugcaucggauggaguagcacuucuugucaugacggcaaaucccgcaugucaaucugcauuagcggcccuaacaauaacgccagugcuguugugugguauaauagaaggccagucgcagaaauaaacaccugggcccggaauaucuugcgcacacaggagucugaaugugugugccacaacgggguaugucccguuguguucaccgauggauccgcuacggguccugccgacacucgaauuuacuacuuuaaggagggcagaauccucaagugggagagccugacagggaccgcgaaacacauagaagagugcucgugcuauggagaaaggacuggcauuacauguaccugccgggauaauuggcaggguucuaaccguccagucauccgcaucgacccgguggcaaugacgcauaccucccaauacauuuguucacccgugcugacagauaauccuagaccaaacgaccccaaugucgggaagugcaacgauccuuauccaggaaauaacaacaauggcguuaaaggcuucaguuaccucgacggggugaacacuugguuaggaaggaccaucagcacagccucccggucugguuaugagaugcugaagguacccaaugcucuuacugacgaucgaagcaaaccgauucagggccagaccauaguguugaacacagacuggucaggguacaguggauccuuuauggauuauugggccgaaggcgacuguuaccgcgcaugcuucuacgucgagcugaucagagguaggccuaaggaggauaaggugugguggaccagcaauucuauuguuucaauguguaguagcacugaauuucuagggcagugggacuggcccgauggcgcuaaaaucgaguauuuccucuga

SEQ ID NO: 151734 - RNA, 1413 nt, Artificial Sequence; identical to SEQ ID NO: 151733
  derived and/or modified CDS sequence (opt3) from neuraminidase__InfluenzaA__AGQ81935

SEQ ID NO: 151735 - RNA, 1413 nt, Artificial Sequence; identical to SEQ ID NO: 151733
  derived and/or modified CDS sequence (opt3) from neuraminidase__InfluenzaA__AGQ81936

SEQ ID NO: 151736 - RNA, 1413 nt, Artificial Sequence; identical to SEQ ID NO: 151733
  derived and/or modified CDS sequence (opt3) from neuraminidase__InfluenzaA__AGQ81937

SEQ ID NO: 151737 - RNA, 1413 nt, Artificial Sequence; identical to SEQ ID NO: 151733
  derived and/or modified CDS sequence (opt3) from neuraminidase__InfluenzaA__AGQ81938

SEQ ID NO: 151738 - RNA, 1413 nt, Artificial Sequence; identical to SEQ ID NO: 151733
  derived and/or modified CDS sequence (opt3) from neuraminidase__InfluenzaA__AGQ81939

SEQ ID NO: 151739 - RNA, 1413 nt, Artificial Sequence
  derived and/or modified CDS sequence (opt3) from neuraminidase__InfluenzaA__AGQ81940
augaaccccaaucagaagauccugugcaccagcgccacagcuauuauaaucggcgcaauugccgugcucaucgggauugcgaaccuuggacugaauaucgguuugcacuuaaaaccuuccuguaacugcucucauucacaaccagagacuacgaauaccagucagacaauaaucaacaauuacuauaacgaaacuaauauuacccagaucagcaacacaaauauucagauggaggaaagagcuuccaagggcuucaacaaucugaccaaagggcuauguacuaucaacucuuggcacauauacggaaaggacaaugccgucaggauuggcgagucgucagauguucucgugacacgggaaccguauguaagcugcgaccccgaugagugucgcuuuuacgcacugagucaagguaccacgauccgagggaaacauuccaacggaacuauucacgaccguucucaguauagagcccuuaucagcuggccucuguccucaccacccaccguguacaacaguagggucgagugcaucggcuggagcucuacauccugucaugauggcaagucacggaugagcauuugcauaagugggccuaauaacaaugcuucugcagugguuugguauaaccgcagaccaguggccgaaaucaauacuugggcuaggaacauuuugcggacccaggaguccgaaugugucugccacaauggagugugucccguaguuuucacagacgguagcgccaccggcccugcggauacgcgcaucuacuacuuuaaggaggggaaaauacucaagugggagucgcuggcaggaacugccaaacacauugaagagugcucuugcuauggcgaacgaacagguaucaccuguacuugcagagacaacuggcagggguccaauaggccagugauccaaauugauccggucgcuaugacacauaccucacaguacaucuguagucccgugcugacggacaacccucggccaaaugaucccaacauuggaaagugcaaugacccuuauccaggcaacaauaacaacggcgugaaaggguucagcuaccucgauggagccaauaccugguuaggucguacaauauccacugcaucucgcagcggcuaugagaugcugaagguccccaacgcucuuaccgacgacagaucaaagccgauccaggggcagacaauuguuuugaauacugauuggaguggauacuccggcagcuuuauggacuauugggccgaaggugauuguuacagggcgugcuucuacguggagcugauccgggggcgaccuaaagaggacaagguaugguggaccucuaacucaaucgugaguauguguagcuccacagaauuucuaggccaauggaauuggcccgauggagccaaaauugaguauuuccucuga

SEQ ID NO: 151740 - RNA, 1413 nt, Artificial Sequence
  derived and/or modified CDS sequence (opt3) from neuraminidase__InfluenzaA__AGQ81941
augaaccccaaucagaagauccugugcaccagcgccacagcuauuauaaucggcacuauugcagugcucaucggggucgccaaccuuggacugaauauugguuugcacuuaaaaccuggcuguaacugcucccauucucaaccagaggcgacgaauaccucacagacaaucauaaacaauuacuauaacgaaacuaauaucacccagauuaguaacacaaauauccagauggaggaaagaccgaacaggggguucaauaaccugaccaagggacuauguacuauuaauagcuggcacaucuacggcaaagacaacgcuguucggauaggugagaacuccgaugugcucguaacacgcgaacccuaugugucuugcgacccugaugagugucgauuuuacgcccugucgcaagggaccacgauucguggaaagcauucaaauggcacuauccacgacagaagccaguauagggcacuuauuaguuggccacuguccucucccccuaccgucuacaacagccggguggagugcaucggcugguccucaacaaguugucaugaugggaaaagccgcaugucuaucugcauuuccggaccaaauaacaaugccucagcuguugugugguauaacagaaggcccgucgcagaaauaaauacuugggcccggaacaucuugcgcacccaggagagcgaaugugugugccacaaugguguauguccuguuguguucacagacggcagugcuaccgggccagccgauacgcgagucuacuacuuuagagagggaaagauucucaagugggagucucugacuggcacagcgaggcacaucgaagagugcuccugcuauggugaacggaccgggauaacuuguacaugccgugacaacuggcagggaagcaaucgcccggugauucaaaucgaucccguggcaaugacccauacgucgcaguacaucuguucuccuguccugaccgacaacccaagacccaaugauccuaacguuggcaaaugcaaugacccauaucccggcaacaacaauaacggggugaagggauucuccuaccucgaugguguaaauacaugguuaggcaggacuauuucaaccgccagucggagcggguaugagaugcugaaagugccgaacgcucuuacagacgaccgauccaagccuauccagggacagacuauugucuugaauaccgauuggucuggcuacagcgguucauuuauggacuauugggccgaaggggauuguuaccgcgcaugcuucuacguggagcugauaagaggcaggcccaaagaggacaagguuugguggacaaguaacuccaucgugagcauguguucuucaaccgaauuucuaggacaaugggauuggccagacggcgcuaagauugaguauuuccucuga

SEQ ID NO: 151741 - RNA, 1413 nt, Artificial Sequence
  derived and/or modified CDS sequence (opt3) from neuraminidase__InfluenzaA__AGQ81942
augaaccccaaucagaagauccugugcaccagcgccacagcuauuauaaucggcacuauugcagugcucaucggggucgccaaccuuggacugaauauugguuugcacuuaaaaccuggcuguaacugcucccauucucaaccagaggcgacgaauaccucacagacaaucauaaacaauuacuauaacgaaacuaauaucacccagauuaguaacacaaauauccagauggaggaaagaccgagcaggggguucaacaaucugaccaagggacuauguacuauuaacuccuggcacaucuacggcaaagacaaugcuguucggauaggugagaacucugaugugcucguaacacgcgaacccuaugugucgugcgacccugaugagugucgauuuuacgcccugucacaagggaccacgauucguggaaagcauagcaacggcacuauccacgacagaagucaguauagggcacuuauuuccuggccacugucuagcccucccaccgucuacaauucccggguggagugcaucggcuggucaaguacaagcugucaugaugggaaaucucgcauguccaucugcauuucaggaccaaacaauaacgccagcgcuauaguuugguauaauagaaggcccguggcagaaaucaacacuugggcccggaauauuuugcgcacccaggagagugaaugugucugccacaacgguguguguccuguaguuuucacagacggcucugcuaccgggccagccgauacgcgaguguacuacuuuagagagggaaagauccucaagugggagucccugacuggcacagcgaggcacauagaagagugcagcugcuauggugaacggaccgggauuacuuguacaugccgugacaauuggcagggaucgaaccgcccggucauccaaaucgaucccguggcaaugacccauacgucucaguacauuuguuccccugugcugaccgacaauccaagacccaacgauccuaaugucggcaaaugcaacgacccauaucccggcaauaacaacaaugggguuaagggauucucauaccucgauggugugaacacaugguuaggcaggacuaucaguaccgccagccgguccggguaugagaugcugaaaguaccgaaugcucuuacagacgaccgaucuaagccuauucagggacagacuauaaucuugaacaccgauuggagcggcuacucagguaguuuuauggacuauugggccgaaggggauuguuaccgcgcaugcuucuacguggagcugauuagaggcaggcccaaagaggacaaggucugguggacauccaauagcaucgugucuauguguucaaguaccgaauuucuaggacaaugggauuggccagacggcgcuaagaucgaguauuuccucuga

SEQ ID NO: 151742 - RNA, 1413 nt, Artificial Sequence
  derived and/or modified CDS sequence (opt3) from neuraminidase__InfluenzaA__AGQ81943
augaaccccaaucagaagauccugugcaccagcgccacagcuauuauaaucggcgcaauugccgugcucaucgggauugcgaaccuuggacugaauaucgguuugcacuuaaaaccuuccuguaacugcucucauucacaaccagagacuacgaauaccagucagacaauaaucaacaauuacuauaacgaaacuaauauuacccagaucagcaacacaaauauucagauggaggaaagaaccuccaggggcuucaacaaucugacuaaggggcuauguacaaucaacucuuggcacauauacggaaaagacaaugcuauucggaucggcgagucgucagauguccucguuacccgcgaaccguaugugagcugcgaccccgaugagugucgauuuuacgcccugagucaagguacgacuauucgugggaagcauuccaacggaaccauccacgacagaucucaguauagggcacuuaucagcuggccucuguccucaccacccacaguauacaacagucggguggagugcauuggcuggagcucuacuuccugucaugauggcaaaucacgcaugagcauaugcaucagugggccuaauaacaaugccucugcugucgugugguauaacagaaggccaguugcagaaauuaauaccugggcccggaacaucuugcgcacacaggaguccgaaugugugugccacaauggagucugucccgugguauucaccgacgguagcgcuacgggcccugccgauacucgaauauacuacuuuaaggaggggaggauucucaagugggagucgcugacaggaaccgcgaaacacaucgaagagugcucuugcuauggcgaaagaacugguaucacauguaccugccgggacaacuggcagggguccaaucguccaguuauucaaaucgauccgguggcaaugacgcauaccucacaguacauuuguagucccguccugacagacaacccucgcccaaaugaucccaacauaggaaagugcaaugacccuuauccaggcaacaauaacaacggcgugaaaggguucagcuaccucgauggagccaauacuugguuagguagaaccaucuccacagcuucuaggagcggcuaugagaugcugaaggugcccaacgcccuuacugacgaccggucaaaaccgauucaggggcagaccaucgucuugaauacagauuggaguggauacuccggcagcuuuauggacuauugggcagaaggugauuguuaccgagcuugcuucuacguugagcugauccgcgggagaccuaaggaggacaaggugugguggaccucuaacucaauuguaaguauguguagcuccacugaauuucuaggccaauggaauuggcccgauggagccaaaauagaguauuuccucuga

SEQ ID NO: 151743 - RNA, 1413 nt, Artificial Sequence; identical to SEQ ID NO: 151733
  derived and/or modified CDS sequence (opt3) from neuraminidase__InfluenzaA__AGQ81944

SEQ ID NO: 151744 - RNA, 1413 nt, Artificial Sequence
  derived and/or modified CDS sequence (opt3) from neuraminidase__InfluenzaA__AGQ81947
augaaccccaaucagaagauccugugcaccagcgccacagcucucgugauuggcacuauagcaguccuuaucgggauugccaaccugggauugaauaucgguuuacaccugaaaccuuccuguaacugcucucauucacaaccagaggcgacgaauaccagucagacaauuaucaacaauuacuauaacgaaacuaauauaacccagaucagcaacacaaauauucagauggaggaaagagcuuccaggucuuucaacaaucuaaccaagggccucuguacuaucaacucguggcacauuuacgggaaagacaaugccauccggauaggagagaacucagauguucuggugacacgcgaaccguauguaagcugcgaccccgaugagugucgauuuuacgcacuuagucaaggcaccacgauucgugguaagcauuccaacgggacuauccacgacagaucucaguauagggcccugauuagcuggccuuuguccucaccacccaccguguacaauagucgggucgagugcaucggauggagcucuacauccugucaugauggcaaaucacgcaugagcaucugcauuaguggcccuaacaauaacgcuucugcagugguuugguauaauagaaggccaguggccgaaauaaacacuugggcucggaauauccuccgcacccaggaguccgaaugugucugccacaacggggugugucccguaguuuucacagacggaagcgccaccgguccugcggauacgcgaauuuacuacuuuaaggagggcaagauccugaaaugggagucgcugacugggacagcaaagcacauagaagagugcucuugcuauggagaaagaaccggcauuacuuguacaugcagggacaauuggcaggguuccaaccggccagugauccaaaucgauccggucgccaugacccauacgucacaguacauuuguagucccgugcucaccgacaauccucguccaaacgaucccaauguggggaaaugcaacgacccuuauccaggaaauaacaacaauggcgucaagggcuucagcuacuuagaugggguuaacacauggcugggacgcacuaucuccaccgcuucuagaagcgguuaugagaugcuuaaagugcccaaugccuugacagacgacaggucaaagccgauucagggccagacuauaguacugaacaccgauuggaguggguacuccggcagcuuuauggacuauugggcagaaggagauuguuaccgggcuugcuucuacguggagcuaauccgaggucgcccuaaggaggacaaagucugguggacaucuaauucaauugugaguauguguagcuccaccgaauuucucgggcaauggaacuggcccgauggcgccaagaucgaguauuuccuguga

SEQ ID NO: 151745 - RNA, 1413 nt, Artificial Sequence
  derived and/or modified CDS sequence (opt3) from neuraminidase__InfluenzaA__AGQ81948
augaaccccaaucagaagauccugugcaccagcgccacagcuauuauaaucggcgcaauugccgugcucaucgggauugcgaaccuuggacugaauaucgguuugcacuuaaaaccuuccuguaacugcucucauucacaaccagagacuacgaauaccagucagacaauaaucaacaauuacuauaacgaaacuaauauuacccagaucagcaacacaaauauucagauggaggaaagaaccuccaggggcuucaacaaucugacuaaggggcuauguacaaucaacucuuggcacauauacggaaaagacaaugcuauucggaucggcgagucgucagauguccucguuacccgcgaaccguaugugagcugcgaccccgaugagugucgauuuuacgcccugagucaagguacgacuauucgugggaagcauuccaacggaaccauccacgacagaucucaguauagggcacuuaucagcuggccucuguccucaccacccacaguauacaacagucggguggagugcauuggcuggagcucuacuuccugucaugauggcaaaucacgcaugagcauaugcaucagugggccuaauaacaaugccucugcugucgugugguauaacagaaggccaguugcagaaauuaauaccugggcccggaacaucuugcgcacacaggaguccgaaugugugugccacaauggagucugucccgugguauucaccgacgguagcgcuacgggcccugccgauacucgaauauacuacuuuaaggaggggaggauucucaagugggagucgcugacaggaaccgcgaaacacaucgaagagugcucuugcuauggcgaaagaacugguaucacauguaccugccgggacaacuggcagggguccaaucguccaguuauucaaaucgauccgguggcaaugacgcauaccucacaguacauuuguagucccguccugacagacaacccucgcccaaaugaucccaacauaggaaagugcaaugacccuuauccaggcaacaauaacaacggcgugaaaggguucagcuaccucgauggagccaauacuugguuagguagaaccaucuccacagcuucuaggagcggcuaugagaugcugaaggugcccaacgcccuuacugacgaccggucaaaaccgauucaggggcagaccaucgucuugaauacagauuggaguggauacuccggcagcuuuauggacuauugggcagaaggugaguguuaccgagcuugcuucuacguugagcugauccgcgggagaccuaaggaagauaaggugugguggaccucuaacucaauuguaaguauguguagcuccacugaguuucuaggccaauggaauuggcccgacggagccaaaauagaauauuuccucuga

SEQ ID NO: 151746 - RNA, 1413 nt, Artificial Sequence
  derived and/or modified CDS sequence (opt3) from neuraminidase__InfluenzaA__AGQ81951
augaaccccaaucagaagauccugugcaccagcgccacagcuauugugauaggcacuaucgcaguccucauugggguugccaaccuuggacugaauaucgguuugcacuuaaaaccuggcuguaacugcucccaaucucagccagaggcgacgaauaccucacagacaauuaucaacaauuacuauaacgaaacuaauauaacccagaucaguaacacaaauauucaaauggaggaaagagcuaacaggggguucaauaaccugaccaagggacuauguacuaucaauagcuggcauauuuacggcaaagacaacgccgugcggaucggugagaacuccgauguacucgugacacgcgaaccguaugucucuugcgaccccgaugagugucgauuuuacgcacugucgcaggggaccacgauacguggaaagcacucaaauggcacuauucaugacagaagccaguauagggcccuuaucaguuggccucuguccucuccacccaccguguacaacagccggguugagugcauuggcugguccucaacaaguugucacgaugggaaaagccgcaugucuaucugcaucuccggaccuaauaacaaugcuucagcaguggucugguauaacagaaggccaguggccgaaauuaauacuugggcucggaacauauugcgcacccaggagagcgaauguguaugccauaaugguguuugucccguggucuucacagacggcagugccaccgggccugcggauacgcgaguguacuacuuuagagagggaaagauccucaagugggagucucugacuggcacagcaaaacacauugaagagugcuccugcuauggugaaaggaccgggaucacuuguacaugccgggacaacuggcaaggaagcaaucguccagugauacagauugauccggucgccaugacccacacgucgcaguacaucuguucucccguucugaccgacaacccucgcccaaaugaucccaacgugggcaagugcaaugacccuuauccaggcaacaacaauaacgggguaaaaggauucuccuaccucgauggugugaauacaugguuaggcagaacuaucucaaccgcuaguaggagcggguaugagaugcugaagguccccaacgcccuuacagacgaccgguccaaaccgauucagggacaaacuaucguguugaauaccgauuggucuggcuacagcgguucauuuauggacuauugggcagaaggggauuguuaccgagcuugcuucuacguugagcugauucgcggcagaccuaaggaggacaaggugugguggacaaguaacuccauagucagcauguguucuucaaccgaauuucuaggacaguggaauuggcccgauggcgccaaaaucgaguauuuccucuga

SEQ ID NO: 151747 - RNA, 1413 nt, Artificial Sequence
  derived and/or modified CDS sequence (opt3) from neuraminidase__InfluenzaA__AGQ81952
augaaccccaaucagaagauccugugcaccagcgccacagcuauugugauaggcacuaucgcaguccucauugggguugccaaccuuggacugaauaucgguuugcacuuaaaaccuggcuguaacugcucccauucucaaccagaggcgacgaauaccucacagacaauuaucaacaauuacuauaacgaaacuaauauaacccagaucaguaacacaaauauucagauggaggaaagagcuaacaggggguucaauaaccugaccaagggacuauguacuaucaauagcuggcacauuuacggcaaagacaacgccgugcggaucggugagaacuccgauguacucgugacacgcgaaccguaugucucuugcgaccccgaugagugucgauuuuacgcacugucgcaagggaccacgauacguggaaagcauucaaauggcacuauucacgacagaagccaguauagggcccuuaucaguuggccucuguccucuccacccaccguguacaacagccggguugagugcauuggcugguccucaacaaguugucaugaugggaaaagccgcaugucuaucugcaucuccggaccuaauaacaaugcuucagcaguggucugguauaacagaaggccaguggccgaaauuaauacuugggcucggaacauauugcgcacccaggagagcgaauguguaugccacaaugguguuugucccguggucuucacagacggcagugccaccgggccugcggauacgcgaguguacuacuuuagagagggaaagauccucaagugggagucucugacuggcacagcaaaacacauugaagagugcuccugcuauggugaaaggaccgggaucacuuguacaugccgggacaacuggcagggaagcaaucguccagugauacaaauugauccggucgccaugacccauacgucgcaguacaucuguucucccguucugaccgacaacccucgcccaaaugaucccaacgugggcaagugcaaugacccuuauccaggcaacaacaauaacgggguaaaaggauucuccuaccucgauggugugaauacaugguuaggcagaacuaucucaaccgcuaguaggagcggguaugagaugcugaagguccccaacgcccuuacagacgaccgguccaaaccgauucagggacagacuaucguguugaauaccgauuggucuggcuacagcgguucauuuauggacuauugggcagaaggggauuguuaccgagcuugcuucuacguugagcugauucgcggcagaccuaaggaggacaaggugugguggacaaguaacuccauagucagcauguguucuucaaccgaauuucuaggacaauggaauuggcccgauggcgccaaaaucgaguauuuccucuga

SEQ ID NO: 151748 - RNA, 1413 nt, Artificial Sequence
  derived and/or modified CDS sequence (opt3) from neuraminidase__InfluenzaA__AGQ81954
augaaccccaaucagaagauccugugcaccagcgccacagcuauugugauaggcacuaucgcaguccucauugggguugccaaccuuggacugaauaucgguuugcacuuaaaaccuuccuguaacugcucucauucacaaccagaggcgacgaauaccagucagacaauuaucaacaauuacuauaacgaaacuaauauaacccagaucagcaacacaaauauucagauggaggaaagagcuuccaggggcuucaacaaucugaccaaggggcuauguacuaucaacucuuggcacauuuacggaaaagacaaugccgugcggaucggcgagaacucggauguacucgugacacgcgaaccguaugucucaugcgaccccgaugagugucgauuuuacgcacugagccaagguaccacgauacgugggaagcauaguaacggaacuauucacgacagaucccaguauagggcccuuaucucuuggccucugagcuccccacccaccguguacaauucacggguugagugcauuggcuggaguagcacaucuugucaugauggcaaaucccgcaugucaaucugcaucagcgggccuaacaauaacgcuagugcaguggucugguauaauagaaggccaguggccgaaauuaacacuugggcucggaauauauugcgcacccaggagucugaauguguaugccacaacggaguuugucccguggucuucacagacgguuccgccaccggcccugcggauacgcgaguguacuacuuuaaggaggggaagauccucaaaugggagagccugacuggaacagcaaagcacauugaagagugcucgugcuauggcgaaagaaccgguaucacuuguacaugcagggacaauuggcaggggucuaaccggccagugauacaaauugauccggucgccaugacccauacgucccaguacaucuguucacccguucugaccgacaauccucguccaaacgaucccaaugugggaaaaugcaacgacccuuauccaggcaauaacaacaauggcguaaagggguucaguuaccucgauggagugaacacaugguuaggucgcacuaucagcaccgcuuccagaucuggcuaugagaugcugaaaguccccaaugcccuuacagacgacaggagcaagccgauucaggggcagacuaucguguugaacaccgauuggucaggauacaguggcuccuuuauggacuauugggcagaaggugauuguuaccgggcuugcuucuacguugagcugauucgagggcgcccuaaggaggacaaagugugguggacaagcaauucuauagucucaauguguaguagcaccgaauuucuaggccaauggaacuggcccgauggagccaagaucgaguauuuccucuga

SEQ ID NO: 151749 - RNA, 1413 nt, Artificial Sequence
  derived and/or modified CDS sequence (opt3) from neuraminidase__InfluenzaA__AGQ81956
augaaccccaaucagaagauccugugcaccagcgccacagcuauugugauaggcacuaucgcaguccucauugggguugccaaccuuggacugaauaucgguuugcacuuaaaaccuuccuguaacugcucucauucacaaccagaggcgacgaauaccagucagacaauuaucaacaauuacuauaacgaaacuaauauaacccagaucagcaacacaaauauucagauggaggaaagagcuuccaggggcuucaacaaucugaccaaggggcuauguacuaucaacucuuggcacauuuacggaaaagacaaugccgugcggaucggcgagaacucggauguacucgugacacgcgaaccguaugucucaugcgaccccgaugagugucgauuuuacgcacugagccaagguaccacgauacgugggaagcauaguaacggaacuauucacgacagaucccaguauagggcccuuaucucuuggccucugagcuccccacccaccguguacaauucacggguugagugcauuggcuggaguagcacaucuugucaugauggcaaaucccgcaugucaaucugcaucagcgggccuaacaauaacgcuagugcaauugugugguauaauagaaggccagucgccgaaauaaacacuugggcucggaauaucuugcgcacccaggagucugaaugugugugccacaacggaguaugucccguuguguucacagacgguuccgccaccggcccugcggauacgcgagucuacuacuuuaaggaggggaagauucucaaaugggagagccugacuggaacagcaaagcacaucgaagagugcucgugcuauggcgaaagaaccgguauaacuuguacaugcagggacaauuggcaggggucuaaccggccagugauucaaaucgauccgguggccaugacccauacgucccaguacaucuguucacccguccugaccgacaauccucguccaaacgaucccaauguuggaaaaugcaacgacccuuauccaggcaauaacaacaauggcgugaagggguucaguuaccucgauggaguaaacacaugguuaggucgcacuauuagcaccgcuuccagaucuggcuaugagaugcugaaagugcccaaugcccuuacagacgacaggagcaagccgauccaggggcagacuauugucuugaacaccgauuggucaggauacaguggcuccuuuauggacuauugggcagaaggugauuguuaccgggcuugcuucuacguggagcugauacgagggcgcccuaaggaggacaaaguuugguggacaagcaauucuaucgugucaauguguaguagcaccgaauuucuaggccaauggaacuggcccgauggagccaagauugaguauuuccucuga

SEQ ID NO: 151750 - RNA, 1413 nt, Artificial Sequence
  derived and/or modified CDS sequence (opt3) from neuraminidase__InfluenzaA__AGQ81957
augaaccccaaucagaagauccugugcaccagcgccacagcuauugugauaggcacuaucgcaguccucauugggaucgccaaccuuggacugaauauugguuugcacuuaaaaccuuccuguaacugcucucauucacaaccagaggcgacgaauaccagucagaucauaaucaacaauuacuauaacgaaacaaauauuacucagguuagcaacaccaauauccagauggaggaaagagcuuccaggggcuucaacaaucugacaaaggggcuauguaccauuaacucuuggcacaucuacggaaaagacaaugccgugcggauaggcgagaacucggauguacucgugacucgcgaaccguaugucucaugcgaccccgaugagugucgauuuuacgcacugagccaagguacaaccauucgugggaagcauaguaacggaacgauccacgacagaucccaguauagggcccuuauuucuuggccucugagcuccccacccacuguguacaauucacggguugagugcaucggcuggaguagcaccucuugucaugauggcaaaucccgcaugucaaucugcauuagcgggccuaacaauaacgcuagugcaguggucugguauaauagaaggccaguggccgaaauaaacacaugggcucggaauaucuugcgcacucaggagucugaauguguaugccacaacggaguuugucccguggucuucaccgacgguuccgccacaggcccugcggauacccgaauuuacuacuuuaaggaggggaagauccucaaaugggagagccugacgggaacugcaaagcacauagaagagugcucgugcuauggcgaaagaacagguauuaccuguacuugcagggacaauuggcaggggucuaaccggccagugauccaaaucgauccgguggccaugacacauaccucccaguacauuuguucacccguccugacggacaauccucguccaaacgaucccaauguuggaaaaugcaacgacccuuauccaggcaauaacaacaauggcgugaagggguucaguuaccucgauggaguaaacaccugguuaggucgcacaaucagcacugcuuccagaucuggcuaugagaugcugaaagugcccaaugcccuuaccgacgacaggagcaagccgguccaggggcagacaauuguguugaacacugauuggucaggauacaguggcuccuuuauggacuauugggcagaaggugauuguuaccgggcuugcuucuacguugagcugauacgagggcgcccuaaggaggacaaagugugguggaccagcaauucuaucgucucaauguguaguagcacagaauuucuaggccaauggaacuggcccgauggagccaagauugaguauuuccucuga

SEQ ID NO: 151751 - RNA, 1413 nt, Artificial Sequence; identical to SEQ ID NO: 151733
  derived and/or modified CDS sequence (opt3) from neuraminidase__InfluenzaA__AGQ81958

SEQ ID NO: 151752 - RNA, 1413 nt, Artificial Sequence; identical to SEQ ID NO: 151733
  derived and/or modified CDS sequence (opt3) from neuraminidase__InfluenzaA__AGQ81959

SEQ ID NO: 151753 - RNA, 1413 nt, Artificial Sequence
  derived and/or modified CDS sequence (opt3) from neuraminidase__InfluenzaA__AGQ81960
augaaccccaaucagaagauccugugcaccagcgccacagcuauugugauaggcacuaucgcaguccucauugggaucgccaaccuuggacugaauauugguuugcacuuaaaaccuaacuguaauugcuccagaucucaaccagagacgaccaacacaucacagacuaucauaaauaacuacuauaaugaaaccaacaucacacagauuaguaauaccaacauccagauggaggaaagggcgagccgggacuucaauaaccugacuaagggccuauguacaauuaauuccuggcauaucuacgggaaagauaacgcuguucgcauaggagagaacucugacgugcucguaacccgagaaccguaugugucgugcgaucccaaugagugucguuuuuacgcccugucacaaggcacgacuauuagagguaagcacagcaacgggaccauccaugacaggagucaguaucgggcacuuauuuccuggccucugucuagcccacccacagucuacaauucccgcguggagugcaucggauggucaaguacuagcugucacgauggcaaaucuagaauguccaucugcauuucaggcccuaacaauaacgccagcgcuguugugugguauaauaggcggccagucgcagaaauaaacaccugggcccgcaauaucuugcgaacacaggagagugaaugugugugccauaacgggguaugucccguuguguucaccgacggaucugcuacggguccugccgauacuagaauuuacuacuuuaaggagggcaagauccucaaaugggagucccugacagggaccgcgaagcacauagaagagugcagcugcuauggagaaaggacugagauuacauguaccugccgggacaauuggcagggcucgaaccguccagucauccaaaucgauccgguggcaaugacgcacaccucucaguacauuuguucccccgugcugacagacaauccucgcccaaacgaucccaaugucgguaaaugcaacgacccuuauccagggaacaauaacaauggaguuaagggcuucucauaccucgauggcgugaacacuugguuagggagaaccaucaguacagccagcagguccggauaugaaaugcugaaaguacccaaugcucuuacugacgaccggucuaagccgauucagggucagaccauaguguugaacacagauuggagcggcuacucagggaguuuuauggacuauugggccgagggagauuguuaccgagcaugcuucuacgucgagcugauccgcggcagaccuaaggaagacaaagugugguggaccuccaauagcauuguuucuauguguucaaguacugaguuucuaggucaaugggauuggcccgacggggcuaagaucgaauauuuccucuga

SEQ ID NO: 151754 - RNA, 1413 nt, Artificial Sequence; identical to SEQ ID NO: 151746
  derived and/or modified CDS sequence (opt3) from neuraminidase__InfluenzaA__AGQ81961

SEQ ID NO: 151755 - RNA, 1413 nt, Artificial Sequence; identical to SEQ ID NO: 151746
  derived and/or modified CDS sequence (opt3) from neuraminidase__InfluenzaA__AGQ81962

SEQ ID NO: 151756 - RNA, 1413 nt, Artificial Sequence
  derived and/or modified CDS sequence (opt3) from neuraminidase__InfluenzaA__AGQ81963
augaaccccaaucagaagauccugugcaccagcgccacagcuauugugauaggcacuaucgcaguccucauugggaucgccaaccuuggacugaauauugguuugcacuuaaaaccuuccuguaacugcucucauucacaaccagaggaaacgaauaccagucagacaaucauaaacaauuacuauaacgagacuaauaucacccagauuagcaacacaaauauccagauggaagagagagcguccaggggcuucaacaaucugaccaaggggcuauguacuauuaacucuuggcacaucuacggaaaagacaaugcuguucggauaggcgaaaacucggaugugcucguaacacgcgagccguaugugucaugcgaccccaacgagugucgauuuuacgcccugagccaagguaccacgauucgugggaagcauaguaauggaacuauccacgauagaucccaguauagggcacuuauuucuuggccucugagcuccccacccaccgucuacaacucacggguggaaugcaucggcuggaguagcacaucuugucaugacggcaaaucccgcaugucaguuugcaucagcgggccuaaugauaacgccagugcuguggucugguauaauagaaggccaguggcagagauuaacacuugggcccggaauauauugcgcacccaggaaucugaguguguaugccacaacggaguuugucccguggucuucacagacgguuccgcuaccggcccugcccacacgcgaaucuacuacuuuaaggaggggaagauucucaaaugggaaagccugacuggaacagcgaagcauaucgaggaaugcucgugcuauggcgagagaaccgguauaacuuguacaugcagggauaauuggcaggggucuaaccggccagugauucaaaucgacccgguggcaaugacccacacgucccaguacaucuguucacccguccugaccgauaauccucguccaaacgaccccaauguuggaaaaugcaacgauccuuauccaggcaauaacaacaauggcgugaagggguucaguuaccucgacggaguaaacacaugguuaggucgcacuauuagcaccgccuccagaucuggcuaugaaaugcugaaagugcccaaugcucuuacagaugacaggagcaagccgauccaggggcagacuauugucuugaacaccgacuggucaggauacaguggcuccuuuauggauuauuggacagagggugacuguuaccgggccugcuucuacguggagcugauacgagggcgcccuaaggaagauaaaguuugguggaccagcaauucuaucgugucaauguguaguagcacugaguuucuaggccaaugggacuggcccgauggagcaaagauugaauauuuccucuga

SEQ ID NO: 151757 - RNA, 1413 nt, Artificial Sequence
  derived and/or modified CDS sequence (opt3) from neuraminidase__InfluenzaA__AGQ81964
augaaccccaaucagaagauccugugcaccagcgccacagcuauugugauaggcacuaucgcaguccucauugggaucgccaaccuuggacugaauauugguuugcacuuaaaaccuuccuguaacugcucucauucaaagccagaggaaacgaaugcgagucaaaccaucauaaacaauuacuauaacgagacaaauaucacucagauuagcaacaccaauauccagauggaagagagagcuuccaggggcuucaacaaucugacaaaagggcuauguaccauuaacucuuggcacaucuacggaaaggacaaugccguucggauaggcgaaucgucagaugugcucguaacucgcgagccguaugugagcugcgaccccgaugagugucgauuuuacgcacugagucaggguacaaccauucgugggaaacauuccaacggaacgauccacgacagaucucaauauagggcccuuauuagcuggccucuguccucaccacccacugucuacaacagucggguggaaugcaucggcuggagcucuaccuccugucaugauggcaagucacgcaugagcaucugcauuagugggccuaauaacaaugcuucugcaguugugugguauaacagaaggccagucgccgagauaaauacaugggcucggaacaucuugcgcacucaggaauccgagugugugugccacaauggaguaugucccguuguguucaccgacgguagcgccacaggcccugcggauacccgaauuuacuacuuuaaggaggggaaaauccucaagugggaaucgcugacgggaacugcaaaacacauagaggaaugcucuugcuauggcgagagaacagguauuaccuguacuugcagggacaacuggcagggguccaaucggccagucauccagaucgauccgguggccaugacacauaccucacaauacauuuguagucccgugcugacggacaacccucguccaaaugaucccaacgucggaaagugcaaugacccuuauccaggcaacaauaacaacggcguuaaaggguucagcuaccucgauggagugaauaccugguuaggucgcacaacuuccaccacaucuagaagcggcuaugaaaugcugaagguacccaacgcucuuacugacgacaggucaaagccgauccaggggcagaccauuguguugaauacagauuggaguggauacuccggcagcuuuauggacuauugggccgagggugauuguuaccgggcaugcuucuacgucgagcugauacgagggcgcccuaaagaagacaaggugugguggaccucuaacucaaucguuaguauguguagcuccacugaguuucuaggccaguggaauuggcccgauggagcuaaaauugaauauuuccucuga

SEQ ID NO: 151758 - RNA, 1413 nt, Artificial Sequence
  derived and/or modified CDS sequence (opt3) from neuraminidase__InfluenzaA__AGQ81966
augaaccccaaucagagaauccugugcaccagcgccacagcuauugugauaggcacuaucgcaguccucauugggguugccaaccuuggacugaauaucgguuugcacuuaaagccuggcuguaacugcucccauucucaaccagaggcgacgaauaccucacagacaauuaucaacaauuacuauaacgaaacuaauauaacccagaucaguaacacaaauauucagauggaggaaagggcuaaccggggguucaauaaccugaccaaaggacuauguacuaucaauagcuggcacauuuacggcaaggacaacgccgugcgcaucggugagaacuccgauguacucgugacacgagaaccguaugucucuugcgaccccgaugagugucguuuuuacgcacugucgcaagggaccacgauaagaggaaaacauucaaauggcacuauucacgacaggagccaguaucgggcccuuaucaguuggccucuguccucuccacccaccguguacaacagccgcguugagugcauuggcugguccucaacaaguugucaugauggaaagagcagaaugucuaucugcaucuccgggccuaauaacaaugcuucagcaguggucugguauaacaggcggccaguggccgaaauuaauacuugggcucgcaacauauugcgaacccaggagagcgaauguguaugccacaaugguguuugucccguggucuucacagacggcagugccaccgggccugcggauacgagaguguacuacuuuagggagggaaaaauccucaagugggagucucugacuggcacagcaaagcacauugaagagugcuccugcuauggugaacggaccgggaucacuuguacaugccgugacaacuggcagggaagcaaucgcccagugauacaaauugauccggucgccaugacccauacgucgcaguacaucuguucucccguucugaccgacaacccuagaccaaaugaucccaacgugggcaaaugcaaugacccuuauccaggcaacaacaauaacgggguaaagggauucuccuaccucgauggugugaauacaugguuaggcaggacuaucucaaccgcuagucggagcggguaugagaugcugaaaguccccaacgcccuuacagacgaccgauccaagccgauucagggacagacuaucguguugaauaccgauuggucuggcuacagcgguucauuuauggacuauugggcagaaggggauuguuaccgcgcuugcuucuacguugagcugauuagaggcaggccuaaagaggacaaggugugguggacaaguaacuccauagucagcauguguucuucaaccgaauuucuaggacaauggaauuggcccgauggcgccaagaucgaguauuuccucuga

SEQ ID NO: 151759 - RNA, 1413 nt, Artificial Sequence
  derived and/or modified CDS sequence (opt3) from neuraminidase__InfluenzaA__AGQ81967
augaaccccaaucagaagauccugugcaccagcgccacagcuauugugauaggcaucauugcaguccucaucgggauugccaaccuuggacugaauaucgguuugcacuuaaaaccuuccuguaacugcucucauucacaaccagaggcgacuaaugcuagucagacgauaaucaacaauuacuauaacgaaaccaauauuacacagaucagcaacacuaauauucagauggaggaaagagccuccaggggcuucaacaaucugaccaaggggcuauguacaaucaacucuuggcacauauacggaaaagacaaugcaguucggauuggcgagaacucggaugugcucguaacccgcgaaccguaugugucaugcgaccccgaugagugucgauuuuacgcccugagccaagguacuacaauccgugggaagcauaguaacggaaccauucacgacagaucccaguauagggcucuuaucucuuggccucugagcuccccacccacggucuacaauucacggguggagugcaucggcuggaguagcacuucuugucaugauggcaaaucccgcaugucaauuugcauaagcgggccuaacaauaacgcaagugccguugugugguauaauagaaggccagucgcugaaaucaacaccugggcccggaauauuuugcgcacacaggagucugaaugugugugccacaacggaguaugucccguuguguucacugacgguuccgcgaccggcccugcagagacacgaaucuacuacuuuaaggaggggaagauacucaaaugggaaagccugaccggaacggccaagcacauugaggaaugcucgugcuauggcgagagaacugguaucacauguaccugcagggauaauuggcaggggucuaaccggccagucauccaaauugacccgguggcuaugacucauacaucccaguacaucuguucacccgugcugaccgauaauccucguccaaacgaccccaaugucggaaaaugcaacgauccuuauccaggcaauaacaacaauggcguuaagggguucaguuaccucgacggagugaacacgugguuaggucgcaccauuagcacagccuccagaucuggcuaugaaaugcugaaaguacccaaugcacuuacugaugacaggagcaagccgauacaggggcagaucauuguguugaacaccgacuggucaggauacaguggcuccuuuauggauuauugggcugagggugacuguuaccgggccugcuucuacgucgagcugauccgagggcgcccuaaggaagauaaagugugguggacaagcaauucuaucguuucaauguguaguagcacugaguuucuaggccaauggaacuggcccgacggagcgaagauugaauauuuccucuga

SEQ ID NO: 151760 - RNA, 1413 nt, Artificial Sequence
  derived and/or modified CDS sequence (opt3) from neuraminidase__InfluenzaA__AGQ81968
augaaccccaaucagaagauccugugcaccagcgccacagcuauugugauaggcaucauugcaguccucaucgggauugccaaccuuggacugaauaucgguuugcacuuaaaaccuuccuguaacugcucucauucacaaccagaggcgacuaaugcuagucagacgauaaucaacaauuacuauaacgaaaccaauauuacacagaucagcaacacuaauauucagauggaggaaagagccuccaggggcuucaacaaucugaccaaggggcuauguacaaucaacucuuggcacauauacggaaaagacaaugcaguucggauuggcgagaacucggauauccucgugacccgcgaaccguauguaucaugcgaccccgaugagugucgauuuuacgcccugagccaagguacuacaauucgugggaagcauaguaacggaaccauccacgacagaucccaguauaggucucuuaucagcuggccucuguccucaccacccacgguguacaauagucgggucgagugcauuggcuggagcucuacuuccugucaugauggcaaaucacgcaugagcauaugcaucagugggccuaacaauaacgcuucugcagugguuugguauaauagaaggccaguggccgaaauuaacaccugggcucggaauaucuugcgcacacaggaguccgaaugugucugccacaacggagugugucccguaguuuucacugacgguagcgccaccggcccugcggagacacgaauauacuacuuuaaggaggggaagauucucaaaugggaaucgcugaccggaacggcaaagcacaucgaggaaugcucuugcuauggcgagagaacugguaucacauguaccugcagggauaauuggcagggguccaaccggccagugauucaaaucgacccggucgccaugacucauacaucacaguacauuuguagucccgugcugaccgauaauccucguccaaacgaccccaaugugggaaaaugcaacgauccuuauccaggcaauaacaacaauggcgucaagggguucagcuaccucgacggaguuaacacgugguuaggucgcaccauauccacagcuucuagaagcggcuaugaaaugcugaaagugcccaaugcccuuacugaugacaggucaaagccgauccaggggcagaccauuguauugaacacagacuggaguggauacuccggcagcuuuaucgauuauugggcagagggugacuguuaccgggcuugcuucuacguggagcugauccgagggcgcccuaaggaagauaaagucugguggacuucuaauucaauugugaguauguguagcuccaccgaguuucuaggccaauggaacuggcccgacggagccaagauagaauauuuccucuga

SEQ ID NO: 151761 - RNA, 1413 nt, Artificial Sequence
  derived and/or modified CDS sequence (opt3) from neuraminidase__InfluenzaA__AGQ81969
augaaccccaaucagaagauccugugcaccagcgccacagcuauugugauaggcaucauugcaguccucaucgggauugccaaccuuggacugaauaucgguuugcacuuaaaaccuuccuguaacugcucucauucacaaccagaggaaacuaaugcgagucagacgauaaucaacaauuacuauaacgagaccaauauuacacagaucagcaacacuaauauucagauggaagagagagcuuccaggggcuucaacaaucugaccaaggggcuauguacaaucaacucuuggcacauauacggaaaagacaaugccguucggauuggcgaaaacucggaugugcucguaacccgcgagccguaugugucaugcgaccccgaugagugucgauuuuacgcacugagccaagguacuacaauccgugggaagcauaguaacggaaccauucacgacagaucccaguauagggcccuuaucucuuggccucugagcuccccacccacggucuacaauucacggguggaaugcaucggcuggaguagcacuucuugucaugauggcaaaucccgcaugucaauuugcauaagcgggccuaacaauaacgcuagugcaguugugugguauaauagaaggccagucgccgagaucaacaccugggcucggaauauuuugcgcacacaggaaucugagugugugugccacaacggaguaugucccguuguguucacugacgguuccgccaccggcccugcggagacacgaaucuacuacuuuaaggaagggaagauacucaaaugggagagccugaccggaacggcaaagcacauugaagagugcucgugcuauggcgaaagaacugguaucacauguaccugcagggauaauuggcaggggucuaaccggccagucauccaaauugacccgguggccaugacucauacaucccaguacaucuguucacccgugcugaccgauaauccucguccaaacgaccccaaugucggaaaaugcaacgauccuuauccaggcaauaacaacaauggcguuaagggguucaguuaccucgacggagugaacacgugguuaggucgcaccauuagcacagcuuccagaucuggcuaugagaugcugaaaguacccaaugcccuuacugaugacaggagcaagccgauacaggggcagaucauuguguugaacaccgacuggucaggauacaguggcuccuuuauggauuauugggcagagggugacuguuaccgggcuugcuucuacgucgaacugauccgagggcgcccuaaggaggauaaagugugguggacaagcaauucuaucguuucaauguguaguagcacugaauuucuaggccaauggaacuggcccgacggagccaagauugaguauuuccucuga

SEQ ID NO: 151762 - RNA, 1413 nt, Artificial Sequence
  derived and/or modified CDS sequence (opt3) from neuraminidase__InfluenzaA__AGQ81970
augaaccccaaucagaagauccugugcaccagcgccacagcuauugugauaggcacuaucgcaguccucauugggaucgccaaccuuggacugaauauugguuugcacuuaaaaccuuccuguaacugcucucauucacaaccagaggaaacgaaugcgagucagaccaucauaaacaauuacuauaacgagacaaauaucacucagauuagcaacaccaauauccagauggaagagagagcuuccaggggcuucaacaaucugacaaaggggcuauguaccauuaacucuuggcacaucuacggaaaagacaaugccguucggauaggcgaaaacucggaugugcucguaacucgcgagccguaugugucaugcgaccccgaugagugucgauuuuacgcacugagccaagguacaaccauucgugggaagcauaguaacggaacgauccacgacagaucccaguauagggcccuuauuucuuggccucugagcuccccacccacugucuacaauucacggguggaaugcaucggcuggaguagcaccucuugucaugauggcaaaucccgcaugucaaucugcauuagcgggccuaacaauaacgcuagugcaguugugugguauaauaagagaccagucgccgagauaaacacaugggcuaggaauaucuugcggacucaggaaucugagugugugugccacaacggaguaugucccguuguguucaccgacgguuccgccacaggcccugcggauacccgcauuuacuacuuuaaggaggggaaaauccucaagugggaaccacugacgggaacugcaaaacacauagaggaaugcagcugcuauggcgagcgaacagguauuaccuguacuugcagagacaauuggcaggggucgaacaggccggucauccaaaucgaucccguggccaugacacauaccucucaguacauuuguuccccugugcugacggacaauccacggcccaacgauccuaaugucggaaagugcaacgacccauaucccggcaauucaaacaacggcguuaaaggguucaguuaccucgauggagugaauaccugguuaggucguacaaucagcacugcuucccgcucuggcuaugaaaugcugaagguaccgaacgcccuuaccgacgacagaagcaagccuauucaggggcagacaauaguguugaauacugauuggucaggauacaguggcuccuuuauggacuauugggcagagggugauuguuacagggcuugcuucuacgucgagcugauccgggggcgacccaaagaagacaaggugugguggaccagcaacucuauuguuucaauguguaguagcacagaguuucuaggccaauggaauuggccagauggagccaaaaucgaauauuuccucuga

SEQ ID NO: 151763 - RNA, 1413 nt, Artificial Sequence
  derived and/or modified CDS sequence (opt3) from neuraminidase__InfluenzaA__AGQ81971
augaaccccaaucagaagauccugugcaccagcgccacagcuauuauaaucggcgcaauugccgugcucaucgggauugcgaaccuuggacugaauaucgguuugcacuuaaaaccuuccuguaacugcucucauucacaaccagagacuacgaauaccagucagacaauaaucaacaauuacuauaacgaaacuaauauuacccagaucagcaacacaaauauucagauggaggaaagaaccuccaggggcuucaacaaucugacuaaggggcuauguacaaucaacucuuggcacauauacggaaaagacaaugcuguccggauuggcgagucgucagauguucucgugacccgcgaaccguauguaagcugcgaccccgaugagugucgauuuuacgcccugagucaagguacgacuauccgugggaagcauuccaacggaaccauucacgacagaucucaguauagggcacuuaucagcuggccucuguccucaccacccacaguguacaguagccgggucgagugcaucggcuggucuuccacuucaugucaugauggcaaaagccgcaugaguauuugcauaucugggccuaacaauaacgccuccgcugugguuugguauaauagaaggccaguggcagaaaucaacaccugggcccggaauauuuugcgcacacaggagagcgaaugugucugccacaacggagugugucccguaguuuucaccgacgguucggcuacgggcccugccgauacucgaaucuacuacuuuaaggaggggaagauacucaaaugggagucucugacaggaaccgcgaagcacauugaagagugcuccugcuauggcgaaagaacugguaucacauguaccugcagggacaauuggcaggggucaaaccggccagugauccaaauugauccggucgcaaugacgcauaccagucaguacaucuguagccccgugcugacagacaauccucguccaaacgaucccaauauuggaaaaugcaacgacccuuauccaggcaauaacaauaacggcgugaagggguucuccuaccucgauggagccaacacuugguuaggucgcaccauaucuacagcuagcagaucaggcuaugagaugcugaaaguccccaaugcccuuacugacgacaggaguaagccgauccaggggcagaccauuguuuugaacacagauugguccggauacagcggcucuuuuauggacuauugggcagaaggugauuguuaccgggcuugcuucuacguggagcugauccgagggcgcccuaaggaggacaaaguaugguggaccucaaauaguaucgugagcauguguuccucuacugaauuucuaggccaauggaacuggcccgauggagccaagauugaguauuuccucuga

SEQ ID NO: 151764 - RNA, 1413 nt, Artificial Sequence
  derived and/or modified CDS sequence (opt3) from neuraminidase__InfluenzaA__AGQ81972
augaaccccaaucagaagauccugugcaccagcgccacagcuauuauaaucggcgcaauugccgugcucaucgggauugcgaaccuuggacugaauaucgguuugcacuuaaaaccuuccuguaacugcucucauucacaaccagagacuacgaauaccagucagacaauaaucaacaauuacuauaacgaaacuaauauuacccagaucagcaacacaaauauucagauggaggaaagagcuuccaggggcuucaacaaucugaccaaggggcuauguacuaucaacucuuggcacauauacggaaaagacaaugccguccggauuggcgagucgucagauguucucgugacacgcgaaccguauguaagcugcgaccccgaugagugucgauuuuacgcacugagucaagguaccacgauccgugggaagcauuccaacggaacuauucacgacagaucucaguauagggcccuuaucagcuggccucuguccucaccacccaccguguacaacagucgggucgagugcaucggcuggagcucuacauccugucaugauggcaaaucacgcaugagcauuugcauaagugggccuaauaacaaugcuucugcagugguuugguauaacagaaggccaguggccgaaaucaauacuugggcucggaacauuuugcgcacccaggaguccgaaugugucugccacaauggagugugucccguaguuuucacagacgguagcgccaccggcccugcggauacgcgaaucuacuacuuuaaggaggggaagauacucaaaugggagucgcugacuggaacagcaaagcacauugaagagugcucuugcuauggcgaaagaaccgguaucacuuguacaugcagggacaacuggcagggguccaaucggccagugauccaaauugauccggucgccaugacccauacgucacaguacaucuguagucccgugcugaccgacaacccucguccaaaugaucccaacauuggaaaaugcaaugacccuuauccaggcaacaauaacaacggcgugaagggguucagcuaccucgauggagcuaauacaugguuaggucgcacuauauccaccgccucuagaagcggcuaugagaugcugaaaguccccaacgcacuuacagacgacaggucaaagccgauccaggggcagacuauuguuuugaauaccgauuggaguggauacuccggcagcuuuauggacuauugggcugaaggugauuguuaccgggccugcuucuacguggagcugauccgagggcgcccuaaggaggacaaaguaugguggacaucuaacucaaucgugaguauguguagcuccaccgaauuucuaggccaauggaauuggcccgauggagcgaagauugaguauuuccucuga

SEQ ID NO: 151765 - RNA, 1413 nt, Artificial Sequence
  derived and/or modified CDS sequence (opt3) from neuraminidase__InfluenzaA__AGQ81973
augaaccccaaucagaagauccugugcaccagcgccacagcuauuauaaucggcgcaauugccgugcucaucgggauugcgaaccuuggacugaauaucgguuugcacuuaaaaccuuccuguaacugcucucauucacaaccagagacuacgaauaccagucagacaauaaucaacaauuacuauaacgaaacuaauauuacccagaucagcaacacaaauauucagauggaggaaagaaccuccaggggcuucaacaaucugacuaaggggcuauguacaaucaacucuuggcacauauacggaaaagacaaugcuguccggauuggcgagucgucagauguucucgugacccgcgaaccguauguaagcugcgaccccgaugagugucgauuuuacgcccugagucaagguacgacuauccgugggaagcauuccaacggaaccauucacgacagaucucaguauagggcacuuaucagcuggccucuguccucaccacccacaguguacaacagucgggucgagugcaucggcuggagcucuacuuccugucaugauggcaaaucacgcaugagcauuugcauaagugggccuaauaacaaugccucugcugugguuugguauaacagaaggccaguggcagaaaucaauaccugggcccggaacauuuugcgcacacaggaguccgaaugugucugccacaauggagugugucccguaguuuucaccgacgguagcgcuacgggcccugccgauacucgaaucuacuacuuuaaggaggggaagauacucaaaugggagucgcugacaggaaccgcgaagcacauugaagagugcucuugcuauggcgaaagaacugguaucacauguaccugcagggacaacuggcagggguccaaucggccagugauccaaauugauccggucgcaaugacgcauaccucacaguacaucuguagucccgugcugacagacaacccucguccaaaugaucccaacauuggaaaaugcaaugacccuuauccaggcaacaauaacaacggcgugaagggguucagcuaccucgauggagccaauacuugguuaggucgcaccauauccacagcuucuagaagcggcuaugagaugcugaaaguccccaacgcccuuacugacgacaggucaaagccgauccaggggcagaccauuguuuugaauacagauuggaguggauacuccggcagcuuuauggacuauugggcagaaggugauuguuaccgggcuugcuucuacguggagcugauccgagggcgcccuaaggaggacaaaguaugguggaccucuaacucaaucgugaguauguguagcuccacugaauuucuaggccaauggaauuggcccgauggagccaagauugaguauuuccucuga

SEQ ID NO: 151766 - RNA, 1413 nt, Artificial Sequence; identical to SEQ ID NO: 151746
  derived and/or modified CDS sequence (opt3) from neuraminidase__InfluenzaA__AGQ81974

SEQ ID NO: 151767 - RNA, 1398 nt, Artificial Sequence
  derived and/or modified CDS sequence (opt3) from neuraminidase__InfluenzaA__AGQ81975
augaaccccaaucagaagauccugugcaccagcgccacagcuauuauaaucggcgcaauugccgugcucaucgggauugcgaaccuuggacugaauaucgguuugcacuuaaaaccuggcuguaacugcucccauucucaaccagagacuacgaauaccucacagacaauaaucaacaauuacuauaacgaaacuaauauuaccaacauccagauggaggaaagaacaaguaggaauuucaacaaucugaccaaguggcuauguacuauuaacagcuggcacaucuacgggaaagacaaugcuguccggauaggagagaacuccgauguucucgugacacgcgaaccguauguaucuugcgaccccgaugagugucgauuuuacgcccugucgcagggcaccacgauucgugguaagcauucaaacgggacuauccacgacagaagccaauauagggcacuuauuaguuggccucuguccucuccacccaccguguacaauagccgggucgagugcaucggaugguccucaacaaguugucaugauggcaaaagccgcaugucuaucugcauuuccggcccuaacaauaacgccucagcugugguuugguauaauagaaggccaguggcagaaauaaacacuugggcccggaauaucuugcgcacccaggagagcgaaugugucugccacaacggggugugucccguaguuuucacagacggaagugcuaccgguccugccgauacgcgaauuuacuacuuuaaggagggcaagauccucaaaugggagucucugacugggacagcgaagcacauagaagagugcuccugcuauggagaaagaaccggcauuacuuguacaugcagggacaauuggcaggguagcaaccggccagugauccagaucgauccggucgcaaugacccauacgucgcaauacauuuguucucccgugcugaccgacaauccucguccagaugaccccaacaucgggaaaugcaaugauccuuauccaggaaacaauaacaacggcgugaagggcuucuccuaccucgacggggccaauacaugguuaggacgcacuauuucaaccgcuaguagaagcgguuaugagaugcugaaaguccccaacgcccuuacagacgauagguccaagccgauacagggccagacuaucguuuugaaugcagacuggucuggguacagcggaucauuuauggauuauugggcugacggcgauuguuaccgggccugcuucuacguggaacugauucgaggucgcccuaaggaggacaaaguaugguggaccaguaacuccaucgugagcauguguucuucaacagaguuucuagggcaguggaauuggcccgauggcgcgaagaucgaauauuuccucuga

SEQ ID NO: 151768 - RNA, 1398 nt, Artificial Sequence
  derived and/or modified CDS sequence (opt3) from neuraminidase__InfluenzaA__AGQ81977
augaaccccaaucagaagauccugugcaccagcgccacagcuauuauaaucggcgcaauugccgugcucaucgggauugcgaaccuuggacugaauaucgguuugcacuuaaaaccuggcuguaacugcucccauucucaaccagagacuacgaauaccucacagacaauaaucaacaauuacuauaacgaaacuaauauuaccaacauccagauggaggaaagaacaaguaggaauuucaacaaucugaccaaggggcuauguacuauuaacagcuggcacaucuacggaaaagacaaugcuguccggauaggcgaguccucugauguucucgugacacgcgaaccguauguaucgugcgaccccgaugagugucgauuuuacgcccugucacaggguaccacgauucgugggaagcauagcaacggaacuauccacgacagaagucaauauagggcacuuauuuccuggccucugucuagcccacccaccguguacaacucccgggucgagugcaucggcuggucaaguacaagcugucaugauggcaaaucucgcauguccaucugcauuucagggccuaauaacaaugccagcgcugugguuugguauaacagaaggccaguggcagaaauaaauacuugggcccggaacaucuugcgcacccaggagagugaaugugucugccacaauggagugugucccguaguuuucacagacgguucugcuaccggcccugccgauacgcgaauuuacuacuuuaaggaggggaagauccucaaaugggagucccugacuggaacagcgaagcacauagaagagugcagcugcuauggcgaaagaaccgguauuacuuguacaugcagggacaacuggcaggggucgaaucggccagugauccagaucgauccggucgcaaugacccauacgucucaauacauuuguucccccgugcugaccgacaacccucguccagaugaccccaauaucggaaaaugcaacgauccuuauccaggcaauaacaauaacggcgugaagggguucucauaccucgacggagccaacacaugguuaggucgcacuauuaguaccgcuagcagauccggcuaugagaugcugaaaguccccaaugcccuuacagacgauaggucuaagccgauacaggggcagacuaucguuuugaacgcagacuggagcggauacucaggcaguuuuauggauuauugggcugacggugauuguuaccgggccugcuucuacguggaacugauucgagggcgcccuaaggaggacaaaguaugguggaccuccaauagcaucgugucuauguguucaaguacagaguuucuaggccaguggaacuggcccgauggagcgaagaucgaauauuuccucuga

SEQ ID NO: 151769 - RNA, 1398 nt, Artificial Sequence
  derived and/or modified CDS sequence (opt3) from neuraminidase__InfluenzaA__AGQ81979
augaaccccaaucagaagauccugugcaccagcgccacagcuauuauaaucggcgcaauugccgcgcucaucgggauugcuaaccuuggacugaauaucgguuugcacuuaaaaccuggcuguaacugcucccauucucaaccagagacuacgaauaccucacagacaauaaucaacaauuacuauaacgaaacuaauauuaccaacauccagauggaggaaagaacaaguaggaauuucaacaaucugaccaaggggcuauguacuauuaacagcuggcacaucuacggaaaagacaaugccgugcggauaggcgaguccucugauguccucguuacacgcgaaccguaugugucgugcgaccccgaugagugucgauuuuacgcacugucacaggguaccacgauucgugggaagcauagcaacggaacuauccacgacagaagucaauauagggcccuuauuuccuggccucugucuagcccacccaccguauacaacucccggguggagugcaucggcuggucaaguacaagcugucaugauggcaaaucucgcauguccaucugcauuucagggccuaauaacaaugcuagcgcagucgugugguauaacagaaggccaguugccgaaauaaauacuugggcucggaacaucuugcgcacccaggagagugaaugugugugccacaauggagucugucccgugguauucacagacgguucugccaccggcccugcggauacgcgaauuuacuacuuuaaggaggggaagauccucaaaugggagucccugacuggaacagcaaagcacauagaagagugcagcugcuauggcgaaagaaccgguauuacuuguacaugcagggacaacuggcaggggucgaaucggccaguuauccagaucgauccgguggccaugacccauacgucucaauacauuuguucccccguccugaccgacaacccucguccagaugaccccaauaucggaaaaugcaacgauccuuauccaggcaauaacaauaacggcgugaagggguucucauaccucgacggagcuaacacaugguuaggucgcacuauuaguaccgccagcagauccggcuaugagaugcugaaagugcccaaugcacuuacagacgauaggucuaagccgauacaggggcagacuaucgucuugaacgcugacuggagcggauacucaggcaguuuuauggauuauugggccgacggugauuguuaccgggcgugcuucuacguugaacugauucgagggcgcccuaaggaggacaaagugugguggaccuccaauagcaucguaucuauguguucaaguacagaguuucuaggccaguggaacuggcccgauggagccaagaucgaauauuuccucuga

SEQ ID NO: 151770 - RNA, 1398 nt, Artificial Sequence; identical to SEQ ID NO: 151768
  derived and/or modified CDS sequence (opt3) from neuraminidase__InfluenzaA__AGQ81980

SEQ ID NO: 151771 - RNA, 1350 nt, Artificial Sequence
  derived and/or modified CDS sequence (opt3) from neuraminidase__InfluenzaA__AGQ88501
augaaccccaaucagaagaucgugaccauuggcagcauaugcauggucaucgggauuguuucccugaugcuccaaaucggaaacaugauuucuaucugggugucacacaguauacagacagguaaucagcaucagacugagccuaucagaaacacgaauuuccuuaccgaaaacgccguagcuagcguggcacuguccggcaauucuucguuguguccaauuagggggugggccguccacucaaaagacaacagcauccggauuggaaguaagggcgauguguuuguuauccgcgagccguucauauccugcucuaauuuagaaugucgaacauuuuuccugacucaaggugcgcuacucaacgacaaacauagcaaugggaccgugaaggaucguucaccccacagaacacugauguccugcccuauuggagaggcuccaagucccuacaacagcagguuugaaucugucgccugguccgcaucagccugucaugacggcaucagcuggcuuaccauuggcaucagugggccugauaauggagcuguggcaguacugaaauauaacgguaucauuacugacacaauaaagucuuggcggaauaacaucuugcgcacccaggaguccgagugcacguguguuaacggcagcugcuucacugugaugaccgaugggccaucgaauggacaggccucuuacaagauuuuuaaaaucgaaaagggcaaagucgugaaguccguggagcucaacgcucccaauuaucacuacgaagaguguucaugcuauccugacgccggugagauaauuugugucugcagagauaacuggcacgggaguaauaggccauggguuagcuucaaccagaaucuggaauaccaaaucggauauaucugcuccggcguguuuggcgacaacccgcggcccaaugauggggagggaucuugugguccuguaagcccaaacggcgcguacggggugaaaggauucucauuuaaguacggcaauggugucuggauugggcgcacaaagaguacucauucccgaagcggcuucgaaaugaucugggaccccaacggauggaccggcacagauucugaguuuucaaugaaacaggacauuguggcaauaaccgacuggaguggguauagcggauccuucguucagcacccugaacugacgggucucgauugcaucagaccauguuucuggguggaguuaauuaggggccggcccaaggagucuacuaucuggacaucggggagcuccaucucauuuugcggagucaauagugacaccgugucuuggagcuggccggauggcgccgaacugccuuucacuauugacaaauga

SEQ ID NO: 151772 - RNA, 1401 nt, Artificial Sequence; identical to SEQ ID NO: 151650
  derived and/or modified CDS sequence (opt3) from neuraminidase__InfluenzaA__AGR33906

SEQ ID NO: 151773 - RNA, 1401 nt, Artificial Sequence
  derived and/or modified CDS sequence (opt3) from neuraminidase__InfluenzaA__AGR33908
augaaccccaaucagaagaucaccgccauuggcagcgugucccugauaaucgcuauuaucugccuccuuaugcaaauugcaauccugacaacuacgaugaccuugcacuucagacagaacgaguguucuaauccuucaaacaaucaggucaugccaugcgaaccgauaaucauugagaggaacacaguucauuuaaauaguacuaccaucgaacgggagauuugucccaaaguggccgaauacaagaacuggagcaaaccucagugccaaaucacaggguuugcgccauucuccaaggacaauucuauacgccugucggcuggaggugauauuuggguaacccgagagcccuaugugucauguagcccugacaaaugcuaccaguuugcccuaggccaggggacuacacucaagaacaagcacaguaauggaaccacgcaugaucguacuccacacagaacccugcuuaugaacgagcugggcguccccuuccauuuggguacaaaacagguguguaucgcaugguccucuagcuccugcuaugacgggaaggccuggcuccacauuuguguuacuggagaugacaaaaaugcuaccgcaucaaucaucuacgauggcaugcugguggacaguauuggcagcuggucuaagaacauacugaggacacaagaauccgagugcgucuguaucaaugggaccugcgccgugguaaugacggauggaucagcuagcggugaagccgacacucggauucucuuuauccgcgagggcaaaauaauuaacaucaguccuuuaucuggguccgcgcagcacguugaggaaugcagcuguuauccaagauacccggaggugaggugcgucugucgggauaacuggaagggaucgaaucgccccaucauuuauaucaacaugguggacuacucuauugaaucccgauacgugugcucaggccuggucggugauacaccuagaaaugacgacaguaccagcuccucuaacuguagggauccaaauaacgagcguggggcacccggaguuaagggcugggccuucgacgauggcaaugacguguggauggggcggacuaucaaaaacggaagccgcucagguuaugaaacauuuagaguaauaaauggcuggaccauggcuaacaguaagucccagauuaauaggcaagugaucgucgauagcgacaacuggucuggguacucaggaaucuucaguguggagggcaaaaagugcauuaaucgguguuuuuauguugagcuuauacgaggucgcccucaggaaccaagagugugguggacgagcaacuccaucauugucuucugcgggaccucuggcacauacggaacuggcucguggcccgauggggccgacaucaauuuuaugccgauuuga

SEQ ID NO: 151774 - RNA, 1401 nt, Artificial Sequence
  derived and/or modified CDS sequence (opt3) from neuraminidase__InfluenzaA__AGR33910
augaaccccaaucagaagaucauugccauaggcagcgugucccugaccaucgcuauuaucugcuuccucaugcaaauugcaauccuuacaacuacgaugacccugcacuuuaaacagaacgaguguucuaagccuucaaauaaccaggucguuccaugcgaaccgauauugaucgagagaaauacagugcauuuaaacaguacuaccauugaaaaagagguaugucccaagguggccgaauacaaaaauuggagcaagccucagugccaaaucacaggguucgcgccauuuuccaaggacaacucuauuaggcugucggcuggaggugauaucugggucacccgggagcccuaugugucauguagcuucggcaaaugcuaccaguuugcccuagggcagggaacuacacucaagaauaaacacaguaacggcaccacgcaugaccgcacuccucaccgaacccugcuuaugaaugagcuggguguuccauuccauuuggggacaaaacagguguguauagcaugguccucuagcuccugcuaugauggaaaggccuggcuccacauuugugucacuggcgacgauaagaacgcuaccgcaucaaucauuuacgacggcaugcugguggauaguaucgggagcuggucuaagaauauccugcguacacaagaauccgagugcguauguauuaacggaaccugcgccguugugaugacggacgguucagcuagcggcaaagccgauacuagaauacucuuuaucagggaagggaagauuaucaauauacggcccuuaaguggaucugcgcagcacgucgaggagugcuccuguuauccucgcuacccagaagugagaugcguguguagggacaacuggaaaggcagcaaccggccgguccuguauauuaauauggcagauuacucgguugagucuuccuacgugugcucaggucuuguaggggacacaccccgcaacgaugacaguagcuccucuagcaauugucgagacccuaacaaugaaagaggagccccaggcgugaagggcugggcuuucgaugacgggaacgaugucuggaugggaaggaccauccggaaugacucacguagugguuaugagacuuuucgcgugguuaacggcuggacaaccgccaauuccaaaagccagaucaacagacaggugauugucgauucugaaaauuggucaggguacaguggaaucuucagcguggagggcaagaacugcauuaauagguguuuuuauguagaguugauacggggucgaccccaagaaccucgcguuugguggacguccaacucuaucauuguguucugcgggaccucgggcacauacggaacuggcagcuggccagacggggcaaauaucaacuuuaugcccaucuga

SEQ ID NO: 151775 - RNA, 1401 nt, Artificial Sequence
  derived and/or modified CDS sequence (opt3) from neuraminidase__InfluenzaA__AGR33911
augaaccccaaucagaagaucauugccauaggcagcgugucccugaccaucgcuauuaucugcuuccucaugcaaauugcaauccuuacaacuacgaugacccugcacuuuaaacagaacgaguguucuaauccuucaaacaaucaggucguuccaugcgaaccgauauugaucgagagaaacacagugcauuuaaauaguacuaccauugaaaaggagguaugucccaaaguggccgaauacaagaacuggagcaaaccucagugccaaaucacaggguucgcgccauuuuccaaggacaauucuauuaggcugucggcuggaggugauaucugggucacccgggagcccuaugugucauguagccuaggcaagugcuaccaguucgcccucgggcagggaacuacacugaaaaacaaucacaguaacggcaccacgcaugaccgcacuccucaccgaacccuucugaugaaugaguuggguguuccauuucaucucgggacaaagcagguuuguauagcaugguccucuagcuccugcuaugauggaaaagccuggcugcacauuugugucacuggcgacgauaagaacgcuaccgcaucaaucauuuacgacggcaugcugguggauaguaucgggagcuggucuaaaaauauccuccguacacaagaauccgagugcguauguauuaacggaaccugcgccguugugaugacggacgguucagcuagcggcaaggccgauacuagaauauuauucaucagggaagggaagauuaucaacauaaguccccugucuggauccgcgcagcacgucgaggagugcagcuguuauccucgguacccagaagugcgcugcguguguagagacaauuggaaaggcucgaacaggccgguccuuuauauuaauauggcagauuacucuaucgaguccucauacguuugcagugguuuggugggggacacaccccggaacgaugacagcuccucuagcucaaauugucgcgacccuaacaaugaacgaggagccccaggcguaaagggcugggcuuuugaugacgggaacgauguguggaugggaagaaccaucaggaauaacagucgguccgguuaugagacuuuccgugucgugaauggcuggacaaccgccaacagcaaaucucagauuaaucgccagguuaucguggacucagaaaacuggaguggguacagcggaauauuuuccgucgagggcaagaauugcauuaacagauguuucuauguggagcugaucaggggucggccccaagaaccucgaguaugguggacgucuaacucgauuaucguguuuugcgggaccagcggcacauacggaacuggcuccuggccagauggggcaaauaucaacuucaugcccauuuga

SEQ ID NO: 151776 - RNA, 1356 nt, Artificial Sequence; identical to SEQ ID NO: 151691
  derived and/or modified CDS sequence (opt3) from neuraminidase__InfluenzaA__AGR33912

SEQ ID NO: 151777 - RNA, 1356 nt, Artificial Sequence; identical to SEQ ID NO: 151721
  derived and/or modified CDS sequence (opt3) from neuraminidase__InfluenzaA__AGR33913

SEQ ID NO: 151778 - RNA, 1356 nt, Artificial Sequence; identical to SEQ ID NO: 151691
  derived and/or modified CDS sequence (opt3) from neuraminidase__InfluenzaA__AGR33915

SEQ ID NO: 151779 - RNA, 1356 nt, Artificial Sequence
  derived and/or modified CDS sequence (opt3) from neuraminidase__InfluenzaA__AGR33916
augaaccccaaucagaagcuguucgccagcuccggcguggcuaucgcacucucuguccuuaaccuguugauuggguuaucaaauguuggacugaacgugagucuacaccucaaagagaccgguccuaagcaagaagagaaucugacaugcaugacuacgaaagaaaccgagcuuggcacaccaagcuaccuguugcucaacaagucccuguguaauguagaaggguggguggucauagccaaagacaacgcggugagauuuggagagucugagcagaucauuaucacuagggaaccguauguuucgugcgaucccaauggcuguaagauguacgcucugcaucaggguaccacaauucggaacaagcacucaaaugggaccauccaugaccgcacugccuuccgaggacucauaagcacaccuuuaggcaccccacccacggugaguaacuccgauuuuaucugcgucggcuggucuagcacuaccugucacgacgggauuggacguaugacaaucugcauucaggguaauaacgauaaugcaacugccaccguguauuacaacagaaggcugacaaccacgaucaaaacuugggcucggaacauacuucgcacacaagaguccgaauguguaugccauaauggcaccugugcaguugugaugacugacgggucagccaguagccaggcucacacaaaggucauguauuuccacaaaggauugguggugaaggaggaggcccugaaaggcucugcgaagcauauugaagagugcuccuguuacggucacaaccagaagguuaccugcgucugcagagauaauuggcagggggcaaacaggccuaucauugaaaucgacaugaauacgcuagagcauaccucacgguauguguguacaggaauccucacugauaccagccgcccaggcgacaaacccacaggcgauugcaguaacccuauuacugggucuccaggagccccggguguaaagggcuuuggguuccugaauggagacaacaccuggcuuggccgaacaauaucccccagaagcaggucggguuuugaaaugcugaaaaucccuaaugcugggauugauccaaacucucggaucgccgagcgucaagagauaguggacaauuccaacuggucaggcuacaguggcagcuucauugacuacuggaaugauaacuccgaauguuauaaucccugcuuuuacgucgaguugauccgcggaagaccugaagaggcaaaguaugugugguggaccucuaacagccucaucgcucugugugggucaccauuccccguuggaagugguuccuuuccggacggcgcccagauucaguacuucagcuga

SEQ ID NO: 151780 - RNA, 1356 nt, Artificial Sequence; identical to SEQ ID NO: 151721
  derived and/or modified CDS sequence (opt3) from neuraminidase__InfluenzaA__AGR33917

SEQ ID NO: 151781 - RNA, 1356 nt, Artificial Sequence; identical to SEQ ID NO: 151691
  derived and/or modified CDS sequence (opt3) from neuraminidase__InfluenzaA__AGR33918

SEQ ID NO: 151782 - RNA, 1398 nt, Artificial Sequence; identical to SEQ ID NO: 151768
  derived and/or modified CDS sequence (opt3) from neuraminidase__InfluenzaA__AGR33919

SEQ ID NO: 151783 - RNA, 1413 nt, Artificial Sequence
  derived and/or modified CDS sequence (opt3) from neuraminidase__InfluenzaA__AGR45094
augaaccccaaucagaagaucauuaccauaggcagcaucuccauggccauugggaucauuucucugauccuccaaauaggaaacaucauuucaaucugggcuagucacagcauucagacagguucccagaaucauacuggcaucugcaaccagagaauaauuacguacgaaaauucuaccugggugaaccaaacauaugucaauaucaacaauacuaacguuguggcagggaaagacaagaccucgguaacacuugccggaaauucaagccuguguccuauuaggggcugggcgaucuacaccaaagauaacaguauccggauugguuccaagggggacguguucgucauacgcgagccauuuaucucuugcagccacuuggagugucgaacuuucuuuuuaacacagggagcucugcuaaaugauaaacauuccaacggcaccgugaaggaccguucaccguauagagcccucaugaguugcccccugggcgaagcaccuagcccauacaauucuagguucgaguccguugccuggucagcuagcgcaugucacgaugggaugggauggcuuacgauugguaucaguggccccgacaacggggccguggcuguccugaaguauaacggaauaauuacugaaaccaucaaaucuuggaagaaacggaucuugcgcacacaggaguccgagugcguguguguaaauggcagcugcuuuacuauuaugaccgaugguccuucgaacgggccagccucuuacagaaucuucaagauugaaaaaggaaagauaacaaaguccaucgagcucgacgcgcccaauuaucauuacgaagaguguucaugcuacccugauaccggcacgguuaugugugugugcagggacaacuggcacggcaguaaucggccaugggucagcuuuaaccagaaucuggauuaucaaauuggguacaucugcuccggaguguucggugacaacccgcgccccaaagauggcgaggggucuuguaauccugugacugucgacggagcagacggcguuaaggguuuuagcuaucgauacgggaacggcguguggaucggaagaacaaaaucaaauaguuccaggaagggcuucgaaaugauuugggauccaaacggguggaccgacacugauagcgacuuuucuguaaaacaggaugugguccccaugacagacuggucaggauauagugguagcuucgugcagcacccugagcugaccggccucgauugcaugcggccauguuuuuggguugaauuaauacgugggcgccccagagagaauacgaccaucuggacauccggaucuucgauuagcuucugcggcgugaacuccgacacugccaauuggucauggccggaugacgcugaacugccucuuaccaucgauaaguga

SEQ ID NO: 151784 - RNA, 1413 nt, Artificial Sequence; identical to SEQ ID NO: 146978
  derived and/or modified CDS sequence (opt3) from neuraminidase__InfluenzaA__AGR49780

SEQ ID NO: 151785 - RNA, 1410 nt, Artificial Sequence
  derived and/or modified CDS sequence (opt3) from neuraminidase__InfluenzaA__AGR49804
augaaccccaaucagaagaucauuaccauaggcagcgugugcaugacaaucgggauggccaaccugauucuccaaaucggaaauauuaucuccauauggaucucucacucaauucagcuugguaaccagaaucagaucgagacuuguaaccaaagugucauuacguacgaaaauaacaccuggguuaaucagacauaugugaacaucagcaauacuaacuucgcugcaggccaguccguagugucugucaaacugaccggaaauucgucauugugcccugugagcggaugggccauauacaguaaggacaacuccguuagaauuggcucuaaaggugauguguuugucaucagggagccauucauuagcuguuccccguuagaaugccggacauuuuuccugacccagggggcgcuacucaaugacaagcauucaaacggaacuaucaaagaucgcagucccuaucgaacacugaugagcuguccuaucggcgaggugccaucucccuacaacucccguuuugaaucaguagcuuggagcgccagugcaugccacgacggcauuaauuggcuuaccauagggaucucuggaccugauaacggugccguugcugugcugaaguauaauggcauuaucacggacacuauaaaguccuggagaaacaauauuuugaggacccaagagagcgagugugcaugcgucaacgggucguguuucacagugaugacugauggaccaucuaauggccaggccuccuacaaaaucuuucggaucgaaaaggguaaaauugugaagucagucgagaugaacgcucccaauuaucauuacgaagagugcaguuguuacccugacagcuccgagauuaccugcguuugccgcgauaacuggcacgggucuaauagaccaugggugagcuucaaccagaaucucgaauaucagaucggauacauauguucaggcaucuuuggcgacaacccgaggcccaaugauaaaacagggaguugcggaccuguauccagcaacggugccaacggcgugaagggguucucuuuuaaguauggaaauggcgucuggauuggucggaccaaaucaaucaguagccgcaacggguucgagaugaucugggacccaaauggcuggacgggaacugauaacaauuuuuccauuaagcaagacauagugggcaucaacgaauggucuggguacucggggagcuucguucagcaucccgagcugacaggucuggacuguauucgaccuugcuucuggguggaacucaucagaggcaggccaaaagagaauaccauuuggacuuccgggucaaguaucucuuuuuguggagucaacagcgauacagugggcugguccuggcccgacggugcggaguuaccguucaccauagauaaguga

SEQ ID NO: 151786 - RNA, 1413 nt, Artificial Sequence; identical to SEQ ID NO: 146978
  derived and/or modified CDS sequence (opt3) from neuraminidase__InfluenzaA__AGR49820

SEQ ID NO: 151787 - RNA, 1410 nt, Artificial Sequence; identical to SEQ ID NO: 144138
  derived and/or modified CDS sequence (opt3) from neuraminidase__InfluenzaA__AGR49832

SEQ ID NO: 151788 - RNA, 1413 nt, Artificial Sequence; identical to SEQ ID NO: 146978
  derived and/or modified CDS sequence (opt3) from neuraminidase__InfluenzaA__AGR49844

SEQ ID NO: 151789 - RNA, 1413 nt, Artificial Sequence; identical to SEQ ID NO: 146978
  derived and/or modified CDS sequence (opt3) from neuraminidase__InfluenzaA__AGR49856

SEQ ID NO: 151790 - RNA, 1413 nt, Artificial Sequence; identical to SEQ ID NO: 146978
  derived and/or modified CDS sequence (opt3) from neuraminidase__InfluenzaA__AGR49868

SEQ ID NO: 151791 - RNA, 1410 nt, Artificial Sequence; identical to SEQ ID NO: 144776
  derived and/or modified CDS sequence (opt3) from neuraminidase__InfluenzaA__AGR49880

SEQ ID NO: 151792 - RNA, 1410 nt, Artificial Sequence; identical to SEQ ID NO: 146532
  derived and/or modified CDS sequence (opt3) from neuraminidase__InfluenzaA__AGR49891

SEQ ID NO: 151793 - RNA, 1410 nt, Artificial Sequence
  derived and/or modified CDS sequence (opt3) from neuraminidase__InfluenzaA__AGR49903
augaaccccaaucagaagaucauuaccauaggcagcgugucccugacaaucucuacuauuugcuucuuuaugcaaaucgccauucucaucacgaccgucacacuucacuucaaacaguacgaguuuaacucaccuccaaauaaccagguuaugcugugugaaccgacuauaaucgagagaaauauuaccgaaaucguguauuugacaaacaccacuauugagaaggaaaucugccccaaauuagcugaguacaggaauuggaguaagccucagugugacauaacaggguucgcaccauuuagcaaagauaacuccauucggcugucugccggaggugacaucuggguaacccgcgagcccuaugugucgugcgauccugacaaguguuaccaauucgcgcuaggccaggggacgacucucaauaacguccauucaaaugauaccgugcacgaccgaacaccauaucguacucugcuuaugaacgaacugggaguucccuuucauuugggcaccaaacaggugugcauugcuuggagcaguuccucuugucacgaugguaaggccuggcuccaugucugcaucacaggggacgauaagaaugcaaccgccagcuucaucuacaacggaagacugguggacuccauuguaucauggaguaaagagauacugaggacgcaggaaagcgaguguguuugcaucaauggcacuuguacaguggucaugaccgauggcucugcuuccgggaaggcagacacuaaaauucucuuuaucgaggaaggaaagauagugcacacaucaaccuuaagcgguagugcccaacacguggaggaaugcucuugcuauccucgguacccaggcguccgcuguguuugcagagauaacuggaagggguccaacaggccgauuguggacaucaauaucaaagaccauagcauuguaucgucuuacguguguuccggacuggucggcgauacgccccggaagaacgacucaaguagcuccggucacugccuugauccuaauaacgaggaagggggacauggcgugaaaggcugggcuuucgacgaugggaaugacguuuggaugggacgcaccaucucugaaaagagccgauuggguuaugagacauuuaaagugauugagggcuggucaaacccaaagaguaaacugcagauaaauagacaggucaucguggauagggggaaccgguccggauacagcggcauuuucucuguagaggguaagucauguaucaaucguugcuuuuauguugaacuaauccgcgggagaaaggaggaaacugaggugcucuggaccaguaacagcauugucguguucuguggcacauccggaacuuacggcaccgggucuuggcccgacggagccgauauaaaucugaugccuaucuga

SEQ ID NO: 151794 - RNA, 1410 nt, Artificial Sequence; identical to SEQ ID NO: 144138
  derived and/or modified CDS sequence (opt3) from neuraminidase__InfluenzaA__AGR49915

SEQ ID NO: 151795 - RNA, 1410 nt, Artificial Sequence; identical to SEQ ID NO: 144138
  derived and/or modified CDS sequence (opt3) from neuraminidase__InfluenzaA__AGR49927

SEQ ID NO: 151796 - RNA, 1410 nt, Artificial Sequence
  derived and/or modified CDS sequence (opt3) from neuraminidase__InfluenzaA__AGR49939
augaaccccaauaagaaaaucauuaccauaggcagcgugucccugacaaucucuacuauuugcuucuuuaugcagaucgccauucucaucacgaccgucacacuucacuucaagcaauacgaguuuaacucaccuccaaauaaccagguuaugcugugugaaccgacuauaaucgagagaaauauuaccgaaaucguguauuugacaaacaccacuauugagaaagaaaucugccccaaguuagcugaguacaggaauuggaguaaaccucagugugacauaacaggguucgcaccauuuagcaaggauaacuccauucggcugucugccggaggugacaucuggguaacccgcgagcccuaugugucgugcgauccugacaaguguuaccaguucgcgcuaggccaagggacgacucucaauaacguccauucaaaugauaccgugcgagaccguacaccauauagaacucugcuuaugaacgaacugggaguucccuuucacuugggcaccaaacaggugugcauugcuuggagcaguuccucuugucaugaugguaaggccuggcuccacgucugcaucacaggggacgauaaaaaugcaaccgccagcuucaucuacaacggaaggcugguggacuccauuguaucauggaguaaggagauacugcggacgcaggaaagcgaguguguuugcaucaauggcacuuguacaguggucaugaccgauggcucugcuuccgggaaagcagacacuaagauucucuuuaucgaggaaggaaagauagugcauacaucaaccuuaagcgguagugcccagcacguggaggaaugcucuugcuauccucgcuacccaggcgucagauguguuugcagggauaacuggaaaggguccaaccggccgauuguggacaucaauaucaaggaccacagcauuguaucgucuuacguguguuccggacuggucggcgauacgccccgcaaaaacgacucaaguagcuccggucauugccuugauccuaauaacgaggaagggggacacggcgugaagggcugggcuuucgacgaugggaaugacguuuggaugggacgaaccaucucugagaaaagcagauuggguuaugagacauuuaaggugauugaaggcuggucaaacccaaaaaguaagcugcaaauaaauaggcaggucaucguggaucgggggaaccguuccggauacagcggcauuuucucuguagaggguaagucauguaucaaucgcugcuuuuauguugaacuaaucagagggaggaaagaggaaacugaggugcucuggaccaguaacagcauugucguguucuguggcacauccggaacuuacggcaccgggucuuggcccgacggagccgauauaaaucugaugccuaucuga

SEQ ID NO: 151797 - RNA, 1410 nt, Artificial Sequence; identical to SEQ ID NO: 144733
  derived and/or modified CDS sequence (opt3) from neuraminidase__InfluenzaA__AGR49951

SEQ ID NO: 151798 - RNA, 1410 nt, Artificial Sequence
  derived and/or modified CDS sequence (opt3) from neuraminidase__InfluenzaA__AGR49963
augaaccccaauaagaaaaucauuaccauaggcagcgugucccugacaaucucuacuauuugcuucuuuaugcagaucgccauucucaucacgaccgucacacuucacuucaagcaauacgaguuuaacucaccuccaaauaaccagguuaugcugugugaaccgacuauaaucgagagaaauauuaccgaaaucguguauuugacaaacaccacuauugagaaagaaaucugccccaaguuagcugaguacaggaauuggaguaaaccucagugugacauaacaggguucgcaccauuuagcaaggauaacuccauucggcugucugccggaggugacaucuggguaacccgcgagcccuaugugucgugcgauccugacaaguguuaccaguucgcgcuaggccaagggacgacucucaauaacguccauucaaaugauaccgugcgagaccguacaccauauagaacucugcuuaugaacgaacugggaguucccuuucacuugggcaccaaacaggugugcauugcuuggagcaguuccucuugucaugaugguaaggccuggcuccacgucugcaucacaggggacgauaaaaaugcaaccgccagcuucaucuacaacggaaggcugguggacuccauuguaucauggaguaaggagauacugcggacgcaggaaagcgaguguguuugcaucaauggcacuuguacaguggucaugaccgauggcucugcuuccgggaaagcagacacuaagauucucuuuaucgaggaaggaaagauagugcauacaucaaccuuaagcgguagugcccagcacguggaggaaugcucuugcuauccucgcuacccaggcgucagauguguuugcagggauaacuggaaaggguccaaccggccgauuguggacaucaauaucaaggaccacagcauuguaucgucuuacguguguuccggacuggucggcgauacgccccgcaaaaacgacucaaguagcuccggucauugccuugauccuaauaacgaggaagggggacacggcgugaagggcugggcuuucgacgaugggaaugacguuuggaugggacgaaccaucucuaaaaagagcagauuggguuaugagacauuuaaagugauugagggcuggucaaacccaaagaguaagcugcaaauaaauaggcaggucaucguggaucgggggaaccguuccggauacagcggcauuuucucuguagaagguaaaucauguaucaaucgcugcuuuuauguugagcuaaucagagggaggaaggaagagacugaagugcucuggaccaguaacagcauugucguguucuguggcacauccggaacuuacggcaccgggucuuggcccgacggagccgauauaaaucugaugccuaucuga

SEQ ID NO: 151799 - RNA, 1410 nt, Artificial Sequence; identical to SEQ ID NO: 144776
  derived and/or modified CDS sequence (opt3) from neuraminidase__InfluenzaA__AGR49975

SEQ ID NO: 151800 - RNA, 1413 nt, Artificial Sequence; identical to SEQ ID NO: 146978
  derived and/or modified CDS sequence (opt3) from neuraminidase__InfluenzaA__AGR49986

SEQ ID NO: 151801 - RNA, 1413 nt, Artificial Sequence; identical to SEQ ID NO: 146978
  derived and/or modified CDS sequence (opt3) from neuraminidase__InfluenzaA__AGR49998

SEQ ID NO: 151802 - RNA, 1410 nt, Artificial Sequence; identical to SEQ ID NO: 144776
  derived and/or modified CDS sequence (opt3) from neuraminidase__InfluenzaA__AGR50010

SEQ ID NO: 151803 - RNA, 1410 nt, Artificial Sequence; identical to SEQ ID NO: 144776
  derived and/or modified CDS sequence (opt3) from neuraminidase__InfluenzaA__AGR50021

SEQ ID NO: 151804 - RNA, 1410 nt, Artificial Sequence; identical to SEQ ID NO: 144786
  derived and/or modified CDS sequence (opt3) from neuraminidase__InfluenzaA__AGR50032

SEQ ID NO: 151805 - RNA, 1410 nt, Artificial Sequence
  derived and/or modified CDS sequence (opt3) from neuraminidase__InfluenzaA__AGR50043
augaaccccaaucagaagaucauuaccauaggcagcgugucccugacaaucucuacuauuugcuucuuuaugcagaucgccauucucaucacgaccgucacacuucacuucaaacaguacgaguuuaacucaccuccaaauaaccagguuaugcugugugaaccgacuauaaucgagagaaauauuaccgaaaucguguauuugacaaacaccacuauugagaaggaaaucugccccaaauuagcugaguacaggaauuggaguaagccucagugugacauaacaggguucgcaccauuuagcaaagauaacuccauucggcugucugccggaggugacaucuggguaacccgcgagcccuaugugucgugcgauccugacaaguguuaccaauucgcgcuaggccaggggacgacucucaauaacguccauucaaauaacaccgugcgagaucguacaccauauagaacucugcuuaugaaugaacugggaguucccuuucacuugggcaccaaacaggugugcauugcuuggagcaguuccucuugucaugacgguaaggccuggcuccacgucugcaucacaggggaugacaagaacgcaaccgccagcuucaucuacaauggaaggcugguggauuccguaguuucauggaguaaagacauucugcggacgcaggagagcgaaugugugugcauaaacggcacuuguacagucgugaugaccgauggcucugcuuccgggaaggcagacacuaaaauccucuuuauugaggagggaaagaucgugcauacaucaaccuuaagcgguagugcccaacacgucgaagagugcucuugcuauccucgcuacccaggcguuagaugugugugcagggauaacuggaagggguccaaucggccgauaguagacauuaacaucaaagaccacagcaucgugucgucuuacgucuguuccggacuggugggcgauacgccccgcaagaaugacucaaguagcuccucucauugccuugauccuaacaaugaagagggugggcacggaguuaaaggcugggcuuucgacgauggcaacgacguguggauggggcgaaccauuagcgaaaagucaagauugggauaugagacauuuaaagucaucgaggguuggaguaauccaaaguccaaacugcagauuaacaggcaagugauaguagaucggggcaaucguagcggguacucuggaaucuucucaguugaaggcaagaguuguauuaaccgcugcuuuuauguggagcuaaucagagguaggaaggaagagacugaaguccucuggaccagcaauuccaucguggucuucugugggacaucuggcacuuacggaaccggcucguggcccgacggggccgaucugaaccuuaugccuauuuga

SEQ ID NO: 151806 - RNA, 1410 nt, Artificial Sequence; identical to SEQ ID NO: 144776
  derived and/or modified CDS sequence (opt3) from neuraminidase__InfluenzaA__AGR50055

SEQ ID NO: 151807 - RNA, 1410 nt, Artificial Sequence
  derived and/or modified CDS sequence (opt3) from neuraminidase__InfluenzaA__AGR50066
augaaccccaaucagaagaucauuaccauaggcagcgugugcaugacaaucgggauggccaaccugauucuccaaaucggaaauauuaucuccauauggaucucucacucaauucagcuugguaaccagaaucagaucgagacuuguaaccaaagugucauuacguacgaaaauaacaccuggguuaaucagacauaugugaacaucagcaauacuaacuucgcugcaggccaguccguagugucugucaaacuggccggaaauucgucauugugcccugugagcggaugggcgauauacaguaaggacaacuccguuagaauuggcucuaaaggugauguguuugucaucagggagccauucauuagcuguuccccguuagaaugccggaccuuuuuccugacacagggggcucuacucaaugacaagcauucaaacggaaccaucaaagaucgcagucccuaucgaacucugaugagcuguccuaucggcgaggugccaucucccuacaacucccguuuugaaucaguagccuggagcgcaagugccugccacgacggcauuaauuggcuuacaauagggaucucuggaccugauaacggugcuguugcagugcugaaguauaauggcauuaucaccgacacgauaaaguccuggagaaacaauauuuugaggacucaagagagcgagugugccugcgucaacgggucguguuucaccgugaugacagauggaccaucuaauggccaggcuuccuacaaaaucuuuaagaucgaaaaagguaagauugugaaaucagucgagaugaacgcccccaauuaucauuacgaagagugcaguuguuacccugacagcuccgagaucacuugcguuugccgggauaacuggcacgggucuaaucgcccaugggugagcuucaaccagaaucucgaauaucagauuggauacauauguucaggcaucuuuggcgacaacccgagacccaaugauaagaccgggaguugcggaccuguauccagcaacggugcgaacggcgugaagggguucucuuuuaaauauggaaauggcgucuggauugguaggacaaagucaaucaguagccggaacggguucgagaugaucugggacccaaauggcuggaccggaacggauaacaauuuuuccauuaaacaagacauagugggcaucaacgaauggucuggguacucggggagcuucguucagcaucccgagcugacuggucuggacuguauucgcccuugcuucuggguggaacucauccgaggcagaccaaaggagaauacaauuuggaccuccgggucaaguaucucuuuuuguggagucaacagcgauacugugggcugguccuggcccgacggugcagaguuaccguucacaauagauaaauga

SEQ ID NO: 151808 - RNA, 1410 nt, Artificial Sequence; identical to SEQ ID NO: 144776
  derived and/or modified CDS sequence (opt3) from neuraminidase__InfluenzaA__AGR50077

SEQ ID NO: 151809 - RNA, 1410 nt, Artificial Sequence; identical to SEQ ID NO: 144776
  derived and/or modified CDS sequence (opt3) from neuraminidase__InfluenzaA__AGR50088

SEQ ID NO: 151810 - RNA, 1410 nt, Artificial Sequence; identical to SEQ ID NO: 144776
  derived and/or modified CDS sequence (opt3) from neuraminidase__InfluenzaA__AGR50099

SEQ ID NO: 151811 - RNA, 1410 nt, Artificial Sequence; identical to SEQ ID NO: 144776
  derived and/or modified CDS sequence (opt3) from neuraminidase__InfluenzaA__AGR50110

SEQ ID NO: 151812 - RNA, 1410 nt, Artificial Sequence
  derived and/or modified CDS sequence (opt3) from neuraminidase__InfluenzaA__AGR50121
augaaccccaaucagaagaucauuaccauaggcagcgugugcaugacaaucgggauggccaaccugauucuccaaaucggaaauauuaucuccauauggaucucucacucaauucagcuugguaaccagaaucagaucgagacuuguaaccaaagugucauuacguacgaaaauaacaccuggguuaaucagacauaugugaacaucagcaauacuaacuucgcugcaggccaguccguagugucugucaaacuggccggaaauucgucauugugcccugugagcgggugggcgauauacaguaaggacaacuccguuagaauuggcucuaaaggugauguguuugucaucagggagccauucauuagcuguuccccguuagaaugccggaccuuuuuccugacacagggggcucuacucaaugacaagcauucaaacggaaccaucaaagaucgcagucccuaucgaacucugaugagcuguccuaucggcgaggugccaucucccuacaacucccguuuugaaucaguagccuggagcgcaagugccugccacgacggcauuaauuggcuuacaauagggaucucuggaccugauaacggugcuguugcagugcugaaguauaauggcauuaucaccgacacgauaaaguccuggagaaacaauauuuugaggacucaagagagcgagugugccugcgucaacgggucguguuucaccgugaugacagauggaccaucuaauggccaggcuuccuacaaaaucuuucggaucgaaaaggguaaaauugugaagucagucgagaugaacgcccccaauuaucauuacgaagagugcaguuguuacccugacagcuccgagaucacuugcguuugccgcgauaacuggcacgggucuaauagaccaugggugagcuucaaccagaaucucgaauaucagauuggauacauauguucaggcaucuuuggcgacaacccgaggcccaaugauaaaaccgggaguugcggaccuguaccauccaacggugcgaacggcgugaagggguucagcuuuaaguauggaaauggcgucuggauuggucggacaaaaucuaucucaagucgcaacggguucgagaugaucugggaccccaauggcuggaccggaacggauaacaauuuuagcauuaagcaagacauagugggcaucaacgaaugguccggguacucuggaucguucguucagcauccugagcugacuggucuggacuguauucgaccaugcuucuggguggaacucaucagaggcaggcccaaagagaauacaauuuggaccagcggguccucaaucaguuuuuguggagucaacucugauacugugggcuggagcuggccggacggugcagaguuaccuuucacaauagauaaguga

SEQ ID NO: 151813 - RNA, 1410 nt, Artificial Sequence
  derived and/or modified CDS sequence (opt3) from neuraminidase__InfluenzaA__AGR50132
augaaccccaaucagaagaucauuaccauaggcagcgugugcaugacaaucgggauggccaaccugauucuccaaaucggaaauauuaucuccauauggaucucucacucaauucagcuugguaaccagaaucagaucgagacuuguaaccaaagugucauuacguacgaaaauaacaccuggguuaaucagacauaugugaacaucagcaauacuaacuucgcugcaggccaguccguagugucugucaaacuggccggaaauucgucauugugcccugugagcggaugggcgauauacaguaaggacaacuccguuagaauuggcucuaaaggugauguguuugucaucagggagccauucauuagcuguuccccguuagaaugccggaccuuuuuccugacacagggggcucuacucaaugacaagcauucaaacggaaccaucaaagaucgcagucccuaucgaacucugaugagcuguccuaucggcgaggugccaucucccuacaacucccguuuugaaucaguagccuggagcgcaagugccugccacgacggcauuaauuggcuuacaauagggaucucuggaccugauaacggugcuguugcagugcugaaguauaauggcauuaucaccgacacgauaaaguccuggagaaacaauauuuugaggacucaagagagcgagugugccugcgcuaacgggucguguuucaccgucaugacagauggaccaucuaauggccaggccuccuacaaaaucuuucggaucgaaaaggguaaaauugugaagucaguggagaugaacgcgcccaauuaucauuacgaagagugcaguuguuacccugacagcuccgagaucacuugcgucugccgcgauaacuggcacgggucuaauagaccauggguuagcuucaaccagaaucucgaauaucagauuggauacauauguucaggcaucuuuggcgacaacccgaggcccaaugauaaaaccgggaguugcggaccuguguccagcaacggugcaaacggcguaaagggguucucuuuuaaguauggaaauggcguguggauuggucggacaaaaucaaucaguagccgcaacggguucgagaugaucugggacccaaauggcuggaccggaacggauaacaauuuuuccauuaagcaagacauagucggcaucaacgaauggucuggguacucggggagcuucgugcagcaucccgagcugacuggucuggacuguauucgaccuugcuucuggguugaacucaucagaggcaggccaaaagagaauacaauuuggaccuccgggucaaguaucucuuuuuguggagugaacagcgauacugucggcugguccuggcccgacggugccgaguuaccguucacaauagauaaguga

SEQ ID NO: 151814 - RNA, 1410 nt, Artificial Sequence; identical to SEQ ID NO: 144776
  derived and/or modified CDS sequence (opt3) from neuraminidase__InfluenzaA__AGR50143

SEQ ID NO: 151815 - RNA, 1410 nt, Artificial Sequence; identical to SEQ ID NO: 144776
  derived and/or modified CDS sequence (opt3) from neuraminidase__InfluenzaA__AGR50154

SEQ ID NO: 151816 - RNA, 1413 nt, Artificial Sequence; identical to SEQ ID NO: 146978
  derived and/or modified CDS sequence (opt3) from neuraminidase__InfluenzaA__AGR50165

SEQ ID NO: 151817 - RNA, 1410 nt, Artificial Sequence; identical to SEQ ID NO: 144776
  derived and/or modified CDS sequence (opt3) from neuraminidase__InfluenzaA__AGR50177

SEQ ID NO: 151818 - RNA, 1410 nt, Artificial Sequence; identical to SEQ ID NO: 144776
  derived and/or modified CDS sequence (opt3) from neuraminidase__InfluenzaA__AGR50188

SEQ ID NO: 151819 - RNA, 1410 nt, Artificial Sequence; identical to SEQ ID NO: 144776
  derived and/or modified CDS sequence (opt3) from neuraminidase__InfluenzaA__AGR50199

SEQ ID NO: 151820 - RNA, 1410 nt, Artificial Sequence; identical to SEQ ID NO: 144776
  derived and/or modified CDS sequence (opt3) from neuraminidase__InfluenzaA__AGR50210

SEQ ID NO: 151821 - RNA, 1410 nt, Artificial Sequence; identical to SEQ ID NO: 144776
  derived and/or modified CDS sequence (opt3) from neuraminidase__InfluenzaA__AGR50221

SEQ ID NO: 151822 - RNA, 1410 nt, Artificial Sequence
  derived and/or modified CDS sequence (opt3) from neuraminidase__InfluenzaA__AGR50232
augaaccccaaucagaagaucauuaccauaggcagcgugugcaugacaaucgggauggccaaccugauucuccaaaucggaaauauuaucuccauauggaucucucacucaauucagcuugguaaccagaaucagaucgagacuuguaaccaaagugucauuacguacgaaaauaacaccuggguuaaucagacauaugugaacaucagcaauacuaacuucgcugcaggccaguccguagugucugucaaacuggccggaaauucgucauugugcccugugagcgggugggcgauauacaguaaggacaacuccguuagaauuggcucuaaaggugauguguuugucaucagggagccauucauuagcuguuccccguuagaaugccggaccuuuuuccugacacagggggcucuacucaaugacaagcauucaaacggaaccaucaaagaucgcagucccuaucgaacucugaugagcuguccuaucggcgaggugccaucucccuacaacucccguuuugaaucaguagccuggagcgcaagugccugccacgacggcauuaauuggcuuacaauagggaucucuggaccugauaacggugcuguugcagugcugaaguauaauggcauuaucaccgacacgauaaaguccuggagaaacaauauuuugaggacucaagagagcgagugugccugcgucaacgggucguguuucaccgugaugacagauggaccaaauaacggccaggcuucuuacaaaaucuuucggaucgaaaaggguaaaauugugaaguccgucgagaugaaugcccccaacuaucauuacgaagagugcucauguuacccugacaguagcgagaucacuugcguuugccgcgauaauuggcacggguccaacagaccaugggugucuuucaaucagaaccucgaauaucagauuggauacauauguagcggcaucuuuggcgacaauccgaggcccaacgauaaaaccgggucaugcggaccuguaaguuccaacggugcgaauggcgugaagggguucagcuuuaaguauggaaacggcgucuggauuggucggacaaaaucuaucucaagucgcaauggguucgagaugaucugggacccaaacggcuggaccggaacggauaauaacuuuagcauuaagcaagacauagugggcaucaaugaaugguccggguacucuggaucguucguucagcaucccgagcugacuggucuggacuguauucgaccuugcuucuggguggaacucaucagaggcaggccaaaagagaacacaauuuggaccagcggguccucaaucaguuuuuguggagucaauucugauacugugggcuggagcuggcccgacggugcagaguuaccguucacaauagauaaguga

SEQ ID NO: 151823 - RNA, 1410 nt, Artificial Sequence; identical to SEQ ID NO: 144776
  derived and/or modified CDS sequence (opt3) from neuraminidase__InfluenzaA__AGR50243

SEQ ID NO: 151824 - RNA, 1410 nt, Artificial Sequence; identical to SEQ ID NO: 144776
  derived and/or modified CDS sequence (opt3) from neuraminidase__InfluenzaA__AGR50254

SEQ ID NO: 151825 - RNA, 1410 nt, Artificial Sequence; identical to SEQ ID NO: 144776
  derived and/or modified CDS sequence (opt3) from neuraminidase__InfluenzaA__AGR50265

SEQ ID NO: 151826 - RNA, 1410 nt, Artificial Sequence
  derived and/or modified CDS sequence (opt3) from neuraminidase__InfluenzaA__AGR50276
augaaccccaaucagaagaucauuaccauaggcagcgugugcaugacaaucgggauggccaaccugauucuccaaaucggaaauauuaucuccauauggaucucucacucaauucagcuugguaaccagaaucagaucgagacuuguaaccaaagugucauuacguacgaaaauaacaccuggguuaaucagacauaugugaacaucagcaauacuaacuucgcugcagagcaguccguagugucugucaaacuggccggcaauucgucauugugcccugugagcgggugggcgauauacaguaaggacaacuccguuagaauuggaucuaaaggcgauguguuugucaucagggaaccauucauuagcuguuccccguuagagugccggaccuuuuuccugacacagggugcucuacucaaugacaagcauucaaacgggaccaucaaagaucgcagucccuaucgaacucugaugagcuguccuaucggagaagugccaucucccuacaacucccguuuugagucaguagccuggagcgcaagugccugccacgacggcauuaauuggcuuacaauaggcaucucugggccugauaacggagcuguugcagugcugaaguauaaugguauuaucaccgacacgauaaaguccuggagaaacaauauuuugaggacucaagagagcgaaugugccugcgucaacggcucguguuucaccgugaugacagaugggccaucuaauggacaggcuuccuacaaaaucuuucggaucgagaagggcaaaauugugaagucagucgaaaugaacgcccccaauuaucauuacgaggagugcaguuguuacccugacagcuccgaaaucacuugcguuugccgcgauaacuggcacgguucuaauagaccaugggugagcuucaaccagaaucucgaguaucagauuggguacauauguucaggaaucuuuggcgacaacccgaggcccaaugauaaaaccggcaguugcgggccuguauccagcaacggagcgaacggugugaagggcuucucuuuuaaguaugggaauggagucuggauuggccggacaaaaucaaucaguagccgcaacgguuucgaaaugaucugggacccaaauggguggaccggcacggauaacaauuuuuccauuaagcaagacauagugggaaucaacgaguggucuggcuacucggggagcuucguucagcaucccgaacugacuggacuggacuguauucgaccuugcuucuggguggagcucaucagagguaggccaaaagagaauacaauuuggaccuccggcucaaguaucucuuuuuguggggucaacagcgauacugugggaugguccuggcccgacggcgcagaauuaccguucacaauagauaaguga

SEQ ID NO: 151827 - RNA, 1410 nt, Artificial Sequence; identical to SEQ ID NO: 144776
  derived and/or modified CDS sequence (opt3) from neuraminidase__InfluenzaA__AGR50287

SEQ ID NO: 151828 - RNA, 1410 nt, Artificial Sequence
  derived and/or modified CDS sequence (opt3) from neuraminidase__InfluenzaA__AGR50298
augaaccccaaucagaagaucauuaccauaggcagcgugugcaugacaaucgggauggccaaccugauucuccaaaucggaaauacuauuuccaucuggauaucucacucaauccagccugguaaccagaaucagauugagacguguaaccaaagugucaucaccuacgaaaauaacacauggguuaaucagacuuaugugaacauuagcaauaccaacuucgcugcaggccaguccguagugucugucaaacuugccggaaauucgucacugugcccagugagcggaugggcgaucuacaguaaggacaacuccauaagaauuggcucuaaaggugauguuuuugugaucagggagccguucauuagcuguucccccuuggaaugccggacauuuuucuuaacccagggggcucugcuaaaugacaagcauucaaacggaacuaucaaagaucgcaguccuuaucgaacacucaugagcuguccaaucggcgagguccccucuccuuacaacucccguuuugaaucaguggccuggagcgcaagugccugccacgacggcauuaauuggcugaccauagggaucucuggaccagauaacggugcuguagcaguucuuaaguauaauggcauuaucacggacacuauaaaguccuggagaaacaauauucugaggacccaagagagcgagugugccugcgugaacgggucguguuucacagucaugacugauggacccucugacggccaggcuuccuacaaaaucuuucggaucgaaaaggguaaaauugugaagucaguggagaugaaugccccuaacuaucauuacgaagagugcaguuguuacccagauagcuccgagauuaccugcgucugccgcgacaauuggcacgggucuaacagaccguggguuagcuucaaucagaacuuggaauaucagaucggauacauauguucaggcaucuuuggcgauaaucccaggccuaacgacaaaacagggaguugcggaccaguguccagcaauggugcgaacggcguaaagggguucucuuuuaaguauggaaacggcguguggauuggucggaccaaaucaaucaguagccgcaauggguucgagaugaucugggaucccaacggcuggacgggaacugacaauaacuuuuccauuaagcaagacauagucggcaucaaugaauggucuggguacucggggagcuucgugcagcauccugagcucacaggucuggauuguauucgaccaugcuucuggguugaacugaucagaggcaggcccaaagagaacaccauuuggacuuccgggucaaguaucucuuuuuguggagugaauagcgacacagucggcugguccuggccggauggugcagagcucccuuucaccauagacaaguga

SEQ ID NO: 151829 - RNA, 1410 nt, Artificial Sequence; identical to SEQ ID NO: 144776
  derived and/or modified CDS sequence (opt3) from neuraminidase__InfluenzaA__AGR50309

SEQ ID NO: 151830 - RNA, 1410 nt, Artificial Sequence; identical to SEQ ID NO: 144776
  derived and/or modified CDS sequence (opt3) from neuraminidase__InfluenzaA__AGR50320

SEQ ID NO: 151831 - RNA, 1410 nt, Artificial Sequence; identical to SEQ ID NO: 144776
  derived and/or modified CDS sequence (opt3) from neuraminidase__InfluenzaA__AGR50331

SEQ ID NO: 151832 - RNA, 1410 nt, Artificial Sequence
  derived and/or modified CDS sequence (opt3) from neuraminidase__InfluenzaA__AGR50342
augaaccccaaucagaagaucauuaccauaggcagcgugugcaugacaaucgggauggccaaccugauucuccaaaucggaaauauuaucuccauauggaucucucacucaauucagcuugguaaccagaaucagaucgagacuuguaaccaaagugucauuacguacgaaaauaacaccuggguuaaucagacauaugugaacaucagcaauacuaacuucgcugcaggccaguccguaauaucugugaaacuggccggaaauucgucauugugcccugucagcggaugggcgauuuacaguaaggacaacuccgugagaaucggcucuaaaggugauguuuuugugauuagggagccauucaucagcuguuccccguuagaaugccggaccuuuuuccugacacagggggcucuacucaaugacaagcauucaaacggaaccaucaaagaucgcagucccuaucgaacucugaugagcuguccuauuggcgaggucccaucucccuacaacucccguuuugaaucaguggccuggagcgcaagugccugccacgacggcauaaauuggcuuacaaucgggauuucuggaccugauaacggugcuguagcaguucugaaguauaauggcaucauaaccgacacgauuaaguccuggagaaacaauaucuugaggacucaagagagcgagugugccugcgugaacgggucguguuucaccgucaugacagauggaccaucuaauggccaggcuuccuacaaaaucuuucggauugaaaaggguaaaaucgugaagucaguggagaugaacgcccccaauuaucauuacgaagagugcaguuguuacccugacagcuccgagauuacuugcgucugccgcgauaacuggcacgggucuaauagaccauggguuagcuucaaccagaaucucgaauaucagauaggauacaucuguucaggcauuuuuggcgacaacccgaggcccaaugauaaaaccgggaguugcggaccuguguccagcaacggugcgaacggcguaaagggguucucuuuuaaguauggaaauggcguguggaucggucggacaaaaucaaucaguagccgcaacggguucgagaugauuugggacccaaauggcuggaccggaacggauaacaauuuuuccauaaagcaagacaucgucggcauuaacgaauggucuggguacucggggagcuucgugcagcaucccgagcugacuggucuggacuguauccgaccuugcuucuggguugaacucauuagaggcaggccaaaagagaauacaaucuggaccuccgggucaaguauaucuuuuuguggagugaacagcgauacugucggcugguccuggcccgacggugcagaguuaccguucacaaucgauaaguga

SEQ ID NO: 151833 - RNA, 1410 nt, Artificial Sequence; identical to SEQ ID NO: 144776
  derived and/or modified CDS sequence (opt3) from neuraminidase__InfluenzaA__AGR50353

SEQ ID NO: 151834 - RNA, 1413 nt, Artificial Sequence; identical to SEQ ID NO: 146978
  derived and/or modified CDS sequence (opt3) from neuraminidase__InfluenzaA__AGR50364

SEQ ID NO: 151835 - RNA, 1410 nt, Artificial Sequence
  derived and/or modified CDS sequence (opt3) from neuraminidase__InfluenzaA__AGR55170
augaaccccaaucagaagaucauuaccauaggcagcgugucccugacaaucucuacuauuugcuucuuuaugcaaaucgccauucucaucacgaccgucacacuucacuucaaacaguacgaguuuaacucaccuccaaauaaccagguuaugcugugugaaccgacuauaaucgagagaaauauuaccgaaaucguguauuugacaaacaccacuauugagaaggaaaucugccccaaauuagcugaguacaggaauuggaguaagccucagugugacauaacaggguucgcaccauuuagcaaagauaacuccauucggcugucugccggaggugacaucuggguaacccgcgagcccuaugugucgugcgauccugacaaguguuaccaauucgcgcuaggccaggggacgacucucaauaacguccauucaaaugauaccgugcgagaccguacaccauauagaacucugcuuaugaacgaacugggaguucccuuucacuugggcaccaaacaggugugcauugcuuggagcaguuccucuugucaugaugguaaggccuggcuccacgucugcaucacaggggacgauaagaaugcaaccgccagcuucaucuacaacggaaggcugguggacuccauuguaucauggaguaaagagauacugcggacgcaggaaagcgaguguguuugcaucaauggcacuuguacaguggucaugaccgauggcucugcuuccgggaaggcagacacuaaaauucucuuuaucgaggaaggaaagauagugcauacaucaaccuuaagcgguagugcccaacacguggaggaaugcucuugcuauccucgcuacccaggcgucagauguguuugcagggauaacuggaagggguccaaccggccgauuguggacaucaauaucaaagaccacagcauuguaucgucuuacguguguuccggacuggucggcgauacgccccgcaagaacgacucaaguagcuccucucauugccuugauccuaauaacgaggaaggugggcacggagugaaaggcugggcuuucgacgauggcaaugacguuuggauggggcgaaccaucagcgagaagucaagauugggauaugagacauuuaaagugauugaagguuggaguaacccaaauuccaagcugcagauaaacaggcagaucauugucgaucggggcaaucguagcggguacucuggaaucuucucaguggagggcaaaaguuguaucaaccgcugcuuuuauguagaacuaauuagagguaggaaggaggaaacugagguucucuggaccagcaauuccauaguggucuucugugggacaucuggcacuuacggaaccggcucguggcccgacggggccgauaucaaccugaugccuauuuga

SEQ ID NO: 151836 - RNA, 1410 nt, Artificial Sequence; identical to SEQ ID NO: 142193
  derived and/or modified CDS sequence (opt3) from neuraminidase__InfluenzaA__AGR55180

SEQ ID NO: 151837 - RNA, 1410 nt, Artificial Sequence; identical to SEQ ID NO: 142193
  derived and/or modified CDS sequence (opt3) from neuraminidase__InfluenzaA__AGR55181

SEQ ID NO: 151838 - RNA, 1410 nt, Artificial Sequence; identical to SEQ ID NO: 142193
  derived and/or modified CDS sequence (opt3) from neuraminidase__InfluenzaA__AGR55183

SEQ ID NO: 151839 - RNA, 1410 nt, Artificial Sequence
  derived and/or modified CDS sequence (opt3) from neuraminidase__InfluenzaA__AGR55184
augaaccccaaucagaagaucauuaccauaggcagcgugucccugacaaucgccacuauuugcuuccucaugcaaaucgcuauucuugucacgaccguuacacugcacuuuaaacagcaugaguguaacucuccuccaaagaaucaggugauguugugcgaaccgacuaucauagagagaaacaucaccgaaauuguauacuuaacaaauaccacuaucgagaaagaaauuugucccaagcuggcagaguauaggaacuggucaaaaccucagugcaauaucacaggguucgccccauuuaguaaggacaacagcauacggcuauccgcgggaggugauauuugggugacccgcgagcccuacgucucuugugacccugauaagugcuaucaauucgcucucggccaggggacgacucugaauaacggacacucgaaugacaccgugcaugaucgaacaccauaccguacucuucugaugaacgaauugggcguucccuuucaccucgguaccagacagguguguaucgccuggucaagcaguuccugccaugacgggaaagcauggcugcacgucugugugacaggagaugacaagaaugccaccgcuucuuucauuuauaacggcaggcugguagauagcaucggcuccuggaguaaaaagauccuccggacgcaggagucagaaugcguuuguauuaaugggacuugcacaguggucaugaccgacggaagcgcaucugguaaagccgauacuaagauauuauuuaucgaggagggcaagauugugcacaucuccacacugucagggagcgcucaacauguggaagagugcaguuguuacccucgcuauccaggagucagaugcguuuguagggacaacuggaaaggcucuaaccggccgauaguggauauuaauguaaaggacuacuccaucgugagcucguacgucugcucuggucuugugggggacacccccaggaaaaacgauuccuucucaaguagccacuguuuggacccuaauaacgaagagggaggccauggcguuaaggggugggccuuugaugacggaaaugauguguggaugggucgaacgaucuccgaaaaacugagaucuggcuaugagaccuucaaggucauugagggguggagcaaaccaaacucaaagcuacagaucaaucgccaggugauuguagaacggggaaaccguaguggcuacuccgguauauuuagcguugaggggaagucuugcaucaaucgcuguuucuauguggaacucauuagaggcaggaaagaggaaacagaggucugguggacuucaaacaguaucguggucuuuugcggaaccagcggcacauacgggacuggauccuggcccgacggugcggauaucaaucugaugccuauuuga

SEQ ID NO: 151840 - RNA, 1410 nt, Artificial Sequence
  derived and/or modified CDS sequence (opt3) from neuraminidase__InfluenzaA__AGR55185
augaaccccaaucagaagaucauuaccauaggcagcgugucccugacaaucgccacuauuugcuuccucaugcaaaucgcuauucuugucacgaccguuacacugcacuuuaaacagcaugaguguaacucuccuccaaagaaucaggugauguugugcgaaccgacuaucauagagagaaacaucaccgaaauuguauacuuaacaaauaccacuaucgagaaagaaauuugucccaagcuggcagaguauaggaacuggucaaaaccucagugcaauaucacaggguucgccccauuuaguaaggacaacagcauacggcuauccgcgggaggugauauuugggugacccgcgagcccuacgucucuugugacccugauaagugcuaucaauucgcucucggccaggggacgacucugaauaacggacacucgaaugacaccgugcaugaucgaacaccauaccguacucuucugaugaacgaauugggcguucccuuucaccucgguaccagacagguguguaucgccuggucaagcaguuccugccaugacgggaaagcauggcugcacgucugugugacaggagaugacaagaaugccaccgcuucuuucauuuauaacggcaggcugguagauagcaucggcuccuggaguaaaaagauccuccggacgcaggagucagaaugcguuuguauuaaugggacuugcacaguggucaugaccgacggaagcgcaucugguaaagccgauacuaagauauuauuuaucgaggagggcaagauugugcacaucuccacacugucagggagcgcucaacauguggaagagugcaguuguuacccucgcuauccaggagucagaugcguuuguagggacaacuggaaaggcucuaaccggccgauaguggauauuaauguaaaggacuacuccaucgugagcucguacgucugcucuggucuugugggggacacccccaggaaaaacgauuccuucucaaguagccacuguuuggacccuaauaacgaagagggaggccauggcguuaaggggugggccuuugaugacggaaaugauguguggaugggucgaacgaucuccgaaaaacugagaucuggcuaugagaccuucaaggucauugagggguggagcaaaccaaacucaaagcuacagaucaaucgccaggugauuguagaacggggaaaccguaguggcuacuccgguauauuuagcguugaggggaagucuugcaucaaucgcuguuucuauguggaacucauuagaggcaggaaagaggaaacagaggucugguggacuucaaacaguaucguggucuuuugcggaaccagccggacauacggcacuggguccuggcccgacggagcggauaucaaucugaugccuauuuga

SEQ ID NO: 151841 - RNA, 1410 nt, Artificial Sequence
  derived and/or modified CDS sequence (opt3) from neuraminidase__InfluenzaA__AGR55186
augaaccccaaucagaagaucauuaccauaggcagcgugucccugacaaucucuacuauuugcuucuuuaugcaaaucgccauucucaucacgaccgucacacuucacuucaaacaguacgaguuuaacucaccuccaaauaaccagguuaugcugugugaaccgacuauaaucgagagaaauauuaccgaaaucguguauuugacaaacaccacuauugagaaggaaaucugccccaaauuagcugaguacaggaauuggaguaagccucagugugacauaacaggguucgcaccauuuagcaaagauaacuccauucggcugucugccggaggugacaucuggguaacccgcgagcccuaugugucgugcgauccugacaaguguuaccaauucgcgcuaggccaggggacgacucucaauaacguccauucaaaugauaccgugcacgaccgaacaccauaucguacucugcuuaugaacgaacugggaguucccuuucauuugggcaccaaacaggugugcauugcuuggagcaguuccucuugucacgaugguaaggccuggcuccaugucugcgugacaggggacgauaagaaugcaaccgccagcuucaucuacaacggaagacugguagacuccaucguuucauggaguaaaaagauucugaggacgcaggagagcgaaugugugugcauaaauggcacuuguacagucgugaugaccgauggcucugcuuccgggaaagcagacacuaagauccucuuuauugaggagggaaagaucgugcacacaucaaccuuaagcgguagugcccaacacgucgaagagugcucuugcuauccucgguacccaggcguucgcugugugugcagagauaacuggaaaggguccaacaggccgauaguagacauuaauaucaaggacuacagcaucgugucgucuuaugucuguuccggacuggugggcgauacgccccggaaaaacgacucaaguagcuccucucauugccuugaaccuaauaacgaggaaggugggcacggaguuaagggcugggcuuucgaugacggcaaugauguguggauggggcgcaccauuagcgagaaauugcgaucaggauacgagacauuuaaggucaucgaagguuggaguaacccaaauuccaaacugcagauuaacagacaggugauaguagacaggggcaaucggagcggguauucuggaaucuucucaguugagggcaagaguuguauuaaccguugcuuuuacguggaacuaauccgcgguagaaagcaggagacugaaguccucuggaccagcaauuccaucguggucuucugugggacaucuggcacuuauggaaccggcucguggcccgauggggccgacauuaaccugaugccuauauga

SEQ ID NO: 151842 - RNA, 1410 nt, Artificial Sequence; identical to SEQ ID NO: 142193
  derived and/or modified CDS sequence (opt3) from neuraminidase__InfluenzaA__AGR55187

SEQ ID NO: 151843 - RNA, 1410 nt, Artificial Sequence; identical to SEQ ID NO: 142762
  derived and/or modified CDS sequence (opt3) from neuraminidase__InfluenzaA__AGR55192

SEQ ID NO: 151844 - RNA, 1410 nt, Artificial Sequence
  derived and/or modified CDS sequence (opt3) from neuraminidase__InfluenzaA__AGR55195
augaaccccaaucagaagaucauuaccauaggcagcgugucccugacaaucucuacuauuugcuucuuuaugcaaaucgccauucucaucacgaccgucacacuucacuucaaacaguacgaguuuaacucaccuccaaauaaccagguuaugcugugugaaccgacuauaaucgagagaaauauuaccgaaaucguguauuugacaaacaccacuauugagaaggaaaucugccccaaauuagcugaguacaggaauuggaguaagccucagugugacauaacaggguucgcaccauuuagcaaagauaacuccauucggcugucugccggaggugacaucuggguaacccgcgagcccuaugugucgugcgauccugacaaguguuaccaauucgcgcuaggccaggggacgacucucaauaacguccauucaaaugauaccgugcacgaccgaacaccauaucguacucugcuuaugaacgaacugggaguucccuuucauuugggcaccaaacaggugugcauugcuuggagcaguuccucuugucacgaugguaaggccuggcuccaugucugcgugacaggggacgauaagaaugcaaccgccagcuucaucuacaacggaagacugguagacuccaucguuucauggaguaaagagauucugaggacgcaggaaagcgagugugugugcauaaauggcacuuguacagucgugaugaccgauggcucugcuuccgggaaggcagacacuaaaauccucuuuauugaggaaggaaagaucgugcacacaucaaccuuaagcgguagugcccaacacgucgaggaaugcucuugcuauccucgguacccaggcguucgcugugugugcagagaucauuggaagggguccaacaggccgauaguagacauuaacaucaaagacuacagcaucgugucgucuuaugucuguuccggacuggugggcgauacgccccggaagaaugacucaaguagcuccucucacugccuugauccuaacaaugaggaaggugggcauggaguuaaaggcugggcuuucgacgauggcaacgacguguggauggggcgcaccauuagcgagaaguugcgacugggauacgagacauuuaaagucaucgaagguuggucaaauccaaacaguaagcuacagauuaauagacaggugauaguagauaggggcaaccgguccggguauagcggaaucuucucuguugagggcaaaucauguauuaaucguugcuuuuacguggaacucauccgcgguagaaaggaggaaacugagguccuguggaccaguaacagcaucguggucuucugugggacauccggcacuuauggaaccggcucuuggcccgacggggccgauauuaaucuuaugccuauauga

SEQ ID NO: 151845 - RNA, 1410 nt, Artificial Sequence
  derived and/or modified CDS sequence (opt3) from neuraminidase__InfluenzaA__AGR55204
augaaccccaaucagaagaucauuaccauaggcagcgugucccugacaaucucuacuauuugcuucuuuaugcaaaucgccauucucaucacgaccgucacacuucacuucaaacaguacgaguuuaacucaccuccaaauaaccagguuaugcugugugaaccgacuauaaucgagagaaauauuaccgaaaucguguauuugacaaacaccacuauugagaaggaaaucugccccaaauuagcugaguacaggaauuggaguaagccucagugugacauaacaggguucgcaccauuuagcaaagauaacuccauucggcugucugccggaggugacaucuggguaacccgcgagcccuaugugucgugcgauccugacaaguguuaccaauucgcgcuaggccaggggacgacucucaauaacguccauucaaaugauaccgugcgagaccguacaccauauagaacucugcuuaugaacgaacugggaguucccuuucacuugggcaccaaacaggugugcauugcuuggagcaguuccucuugucaugaugguaaggccuggcuccacgucugcaucacaggggacgauaagaaugcaaccgccagcuucaucuacaacggaaggcugguggacuccauuguaucauggaguaaagagauacugcggacgcaggaaagcgaguguguuugcaucaauggcacuuguacaguggucaugaccgauggcucugcuuccggggaggcagacacuaagauucucuuuaucgaagagggaaaaauagugcauacaucaaccuuaagcgguagugcccaacacguggaagagugcucuugcuauccucgcuacccaggcgucagauguguuugcagggauaacuggaagggguccaaccggccgauuguggacaucaauaucaaggaccacagcauuguaucgucuuacguguguuccggacuggucggcgauacgccccgcaaaaacgacucaaguagcuccucucauugccuugauccuaauaacgaagagggugggcacggagugaagggcugggcuuucgacgauggcaaugacguuuggauggggcgaaccaucagcgagaaaucaagauugggauaugaaacauuuaaggugauugaggguuggaguaacccaaaauccaagcugcagauaaauaggcaggucaucguggaucggggcaaccguagcggguacucuggaauuuucucaguagaaggcaaaaguuguaucaaucgcugcuuuuauguugagcuaaucagagguaggaaggaagagacugaggugcucuggaccagcaacuccauugucguguucugugggacaucucggacuuacggcaccggaucguggcccgacggcgccgauauaaaucugaugccuaucuga

SEQ ID NO: 151846 - RNA, 1410 nt, Artificial Sequence
  derived and/or modified CDS sequence (opt3) from neuraminidase__InfluenzaA__AGR55218
augaaccccaaucagaagaucauuaccauaggcagcgugucccugacaaucucuacuauuugcuucuuuaugcagaucgccauucucaucacgaccgucacacuucacuucaaacaguacgaguuuaacucaccuccaaauaaccagguugugcugugugaaccgacuauaaucgagagaaauauuaccgaaaucguauauuugacaaacaccacuauugagaaggaaaucugccccaaauuagcugaguacaggaauuggaguaagccucagugugacauaacaggguucgcaccauuuagcaaagauaacuccauucggcugucugccggaggugacaucugggugacccgcgagcccuaugucucgugcgauccugacaaguguuaccaauucgcgcuaggccaggggacgacucucaauaacgugcauucaaauaacaccguucgagaucguacaccauauagaacucugcuuaugaaugaacugggagugcccuuucacuugggcaccaagcaggucugcauugcuuggagcaguuccucuugucaugacgguaaagccuggcuccacgugugcaucacaggggaugacaagaacgcaaccgccagcuucaucuacaauggaaggcugguagauuccauuguuucauggaguaaagagauacugcggacgcaggaaagcgagugugugugcaucaacggcacuuguacagucgugaugaccgacggcucugcuuccgggaaggcagauacuaaaauucucuuuaucgaggaaggaaagauagugcauacaucaaccuuaagcgguagugcccaacacgucgaggaaugcucuugcuauccucgcuacccaggcguuagaugugugugcagggacaacuggaagggguccaaucggccgauuguagauaucaacaucaaagaccacagcauugugucgucuuacgucuguuccggacuggugggcgacacgccccgcaagaaugauucaaguagcuccucucauugccuugacccuaacaaugaggaaggugggcacggaguuaaaggcugggcuuucgaugacggcaacgauguguggauggggcgaaccaucagcgagaagucaagauugggauaugagacauuuaaagucauugaagguuggaguaauccaaaguccaaacugcagauaaacaggcaagugaucguagaccggggcaaucguagcggguacucuggaauuuucucaguugagggcaagaguuguaucaaccgcugcuuuuauguggaacuaaucagagguaggaaggaggaaacugagguccucuggaccagcaauuccauuguggucuucugugggacaucuggcacuuacggaaccggcucguggcccgauggggccgacauaaaccugaugccuaucuga

SEQ ID NO: 151847 - RNA, 1410 nt, Artificial Sequence; identical to SEQ ID NO: 151437
  derived and/or modified CDS sequence (opt3) from neuraminidase__InfluenzaA__AGT18726

SEQ ID NO: 151848 - RNA, 1410 nt, Artificial Sequence
  derived and/or modified CDS sequence (opt3) from neuraminidase__InfluenzaA__AGT18727
augaaccccaaucagaagaucauuaccauaggcagcgugugcaugacaaucgggauggccaaccugauucuccaaaucggaaauauuaucuccauauggaucucucacucaauucagcuugguagucagaaccagaucgagacuuguaaucaaagcgucauuacguacgaaaacaauaccuggguuaaccagacauaugugaauaucuccaacacuaauuucgcugcaggccagucuguagugucggucaaacuggccgggaacagcagcuugugcccugugaguggaugggcgauauacuccaaggacaauucuguuagaauuggcagcaaaggugauguguuugucaucagggagccauucauuuccuguucaccguuagaaugccggaccuuuuuccugacacagggggcucuacucaacgacaagcauaguaauggaaccaucaaagaucgcagccccuaucgaacucugaugucuuguccuaucggcgaggugccaucccccuacaacucacguuuugaaagcguagccuggagugcaucugccugccacgacggcauuaacuggcuuacaauagggaucuccggaccugauagcggugcuguugcagugcugaaguauaauggcauuaucaccgacacgauaaagucguggagaaacaauauuuugaggacucaagagucugagugugccugcgucaacggguccuguuucaccaucaugacagauggaccaucagacggccaggcuaguuacaaaaucuuucggauugaaaaggguaaaaucgugaagucaguggagaugaaugcccccaacuaucauuacgaagagugcuccuguuacccugauucuagcgagauuacuugcgucugccgcgacaauuggcacgggucaaacagaccauggguuaguuucaaucagaaccucgaauaucagauaggauacaucuguuccggcauuuuuggcgauaauccgaggcccaacgacaaaaccgggagcugcggaccugugucuucaaauggugcgaacggcguaaagggguucaguuuuaaguauggaaauggcguguggaucggucggacaaaaagcaucuccucucgcaagggguucgagaugauuugggauccaaacggcuggucgggaaccgacaacaauuuuagcauaaaacaagacaucgucggcauuaacgaaugguccggguacucaggaaguuucgugcagcaucccgagcugacgggucuggauuguauccgaccuugcuucuggguugaacucauuagaggcaggccaaaggagaauacuaucuggacaucugggagcuccauaucauuuuguggagugaacagcgacaccgucggcuggucuuggcccgauggugcagaguuaccguucacuaucgacaaauga

SEQ ID NO: 151849 - RNA, 1410 nt, Artificial Sequence; identical to SEQ ID NO: 151437
  derived and/or modified CDS sequence (opt3) from neuraminidase__InfluenzaA__AGT18728

SEQ ID NO: 151850 - RNA, 1410 nt, Artificial Sequence
  derived and/or modified CDS sequence (opt3) from neuraminidase__InfluenzaA__AGT18729
augaaccccaaucagaagaucauuaccauaggccaagugugcaugacaaucgggauggccaaccugauucuccagaucggaaauauuaucagcauauggaucucccacucuauucagcuugguucacagaaccaaaucgagacuuguaaucagagugucauuacguacgaaaacaauaccuggguuaaccagacauaugugaauaucagcaacacuaauuucgcugcaggccaguccguagugucugucaaacuggccgggaacucgucauugugcccugugagcggaugggcgauauacaguaaggacaauuccguuagaauuggcucuaaaggugauguguuugucaucagggagccauucauuagcuguuccccguuagaaugccggaccuuuuuccugacacaaggggcucuacucaacgacaagcauucaaauggaaccaucaaagaucgcagucccuaucgaacucugaugagcuguccuaucggcgaggugccaucucccuacaacucccguuuugaaucaguagccuggagcgcaagugccugccacgacggcauuaacuggcuuacaauagggaucucuggaccugauuccggugcuguugcagugcugaaguauaauggcauuaucaccgacacgauaaagagcuggagaaacaauauuuugaggacucaggagucggagugugccugcgucaacgggucuuguuucaccaucaugacagauggaccauccgacggccaggcuucauacaaaaucuuucggauugaaaaggguaaaaucgugaagaguguggagaugaaugcccccaacuaucauuacgaagagugcagcuguuacccugauuccucugagauuacuugcgucugccgcgacaauuggcacgggagcaacagaccauggguuucauucaaucagaaccucgaauaucaaauaggauacaucuguaguggcauuuuuggcgauaauccgaggcccaacgacaaaaccggguccugcggaccugugagcucuaauggugcgaacggcguaaagggguucucauuuaaguauggaaauggcguguggaucggucggacaaaaaguaucagcucccgcaagggguucgagaugauuugggauccaaacggcuggaccggaacggacaacaauuuuucuauaaaacaggacaucgucggcauuaacgaauggucgggguacagcggauccuucgugcagcaucccgagcugacuggucuggauuguauccgaccuugcuucuggguugaacucauuagaggcaggccaaaggagaauacaaucuggaccucagggaguucuaucagcuuuuguggagugaacuccgacacugucggcuggucauggcccgauggugcagaguuaccguucacaauagacaaauga

SEQ ID NO: 151851 - RNA, 1410 nt, Artificial Sequence
  derived and/or modified CDS sequence (opt3) from neuraminidase__InfluenzaA__AGT18730
augaaccccaaucagaagaucauuaccauaggcagcgugugcaugacaaucgggauggccaaccugauucuccaaaucggaaauauuaucuccauauggaucucucacucaauucagcuugguaaccagagucagaucgagacuuguaaucaaagcgucauuacguacgaaaacaauaccuggguuaaccagacauaugugaauaucuccaacacuaauuucgcugcaggccagucuguagugucggucaaacuggccgggaacagcagcuugugcccugugaguggaugggcgauauacuccaaggacaauucuguuagaauuggcagcaaaggugauguguuugucaucagggagccauucauuuccuguucaccguuagaaugccggaccuuuuuccugacacagggggcucuacucaacgacaagcauaguaauggaaccaucaaagaucgcagccccuaucgaacucugaugucuuguccuaucggcgaggugccaucccccuacaacucacguuuugaaagcguagccuggagugcaucugccugccacgacggcauuaacuggcuuacaauagggaucuccggaccugauagcggugcuguugcagugcugaaguauaauggcauuaucaccgacacgauaaagucguggagaaacaauauuuugaggacucaagagucugagugugccugcgucaacggguccuguuucaccaucaugacagauggaccaucagacggccaggcuaguuacaaaaucuuucggauugaaaaggguaaaaucgugaagucaguggagauuaaugcccccaacuaucauuacgaagagugcuccuguuacccugauucuagcgagauaacuugcgucugccgcgacaauuggcacgggucaaacagaccauggguuaguuucaaucagaaccucgaauaucagaucggauacauuuguuccggcaucuuuggcgauaauccgaggcccaacgacaaaaccgggagcugcggaccugugucuucaaauggugcgaacggcguaaagggguucaguuuuaaguauggaaauggcguguggaucggucggacaaaaagcauuuccucucgcaagggguucgagaugauaugggauccaaacggcuggaccggaacggacaacaauuuuucgaucaaacaagacauugucggcaucaacgaauggagcggguacuccggaucauucgugcagcaucccgagcugacuggucuggauuguauucgaccuugcuucuggguugaacucaucagaggcaggccaaaggagaauacaauauggaccagugggucuagcaucuccuuuuguggagugaacucagacacugucggcuggagcuggcccgauggugcagaguuaccguucacaauugacaaauga

SEQ ID NO: 151852 - RNA, 1410 nt, Artificial Sequence; identical to SEQ ID NO: 151437
  derived and/or modified CDS sequence (opt3) from neuraminidase__InfluenzaA__AGT18731

SEQ ID NO: 151853 - RNA, 1410 nt, Artificial Sequence
  derived and/or modified CDS sequence (opt3) from neuraminidase__InfluenzaA__AGT18732
augaaccccaaucagaagaucauuaccauaggcagcgugugcaugacaaucgggauggccaaccugauucuccaaaucggaaauauuaucuccauauggaucucucacucaauucagcuugguaaccagagucagaucgagacuuguaaucaaagcgucauuacguacgaaaacaauaccuggguuaaccagacauaugugaauaucuccaacacuaauuucgcugcaggccagucuguagugucggucaaacuggccgggaacagcagcuugugcccugugaguggaugggcgauauacuccaaggacaauucuguuagaauuggcagcaaaggugauguguuugucaucagggagccauucauuuccuguucaccguuagaaugccggaccuuuuuccugacacagggggcucuacucaacgacaagcauaguaauggaaccaucaaagaucgcagccccuaucgaacucugaugucuuguccuaucggcgaggugccaucccccuacaacucacguuuugaaagcguagccuggagugcaucugccugccacgacggcauuaacuggcuuacaauagggaucuccggaccugauagcggugcuguugcagugcugaaguauaauggcauuaucaccgacacgauaaagucguggagaaacaauauuuugaggacucaagagucugagugugccugcgucaacggguccuguuucaccaucaugacagauggaccaucagacggccaggcuaguuacaaaaucuuucggauugaaaaggguaaaaucgucaagagcguggagaugaaugcccccaacuaucauuacgaagagugcuccuguuacccugauucuagcgagauuacuugcgugugccgcgacaauuggcacgggucaaacagaccauggguuaguuucaaucagaaccucgaauaucagauaggauacaucuguuccggcauuuuuggcgauaauccgaggcccaacgacaaaaccgggagcugcggaccugugucuucaaauggugcgaacggcguaaagggguucaguuuuaaguauggaaauggcguguggaucggucggacaaaaagcaucuccucucgcaagggguucgagaugauuugggauccaaacggcuggaccggaacggacaacaauuuuucgauaaaacaagacaucgucggcauuaacgaauggagcggguacuccggaucauucgugcagcaucccgagcugacuggucuggauuguauccgaccuugcuucuggguugaacucauuagaggcaggccaaaggagaauacaaucuggacccgggggaguucuauaucauuuuguggagugaacuccgacacugucggcuggucauggcccgauggugcagaguuaccguucacaaucgacaaauga

SEQ ID NO: 151854 - RNA, 1410 nt, Artificial Sequence
  derived and/or modified CDS sequence (opt3) from neuraminidase__InfluenzaA__AGT18733
augaaccccaaucagaagaucauuaccauaggcagcgugugcaugacaaucgggauggccaaccugauucuccaaaucggaaauauuaucuccauauggaucucucacucaauucagcuugguaaccagagucagaucgagacuuguaaucaaagcgucauuacguacgaaaacaauaccuggguuaaccagacauaugugaauaucuccaacacuaauuucgcugcaggccagucuguagugucggucaaacuggccgggaacagcagcuugugcccugugaguggaugggcgauauacuccaaggacaauucuguuagaauuggcagcaaaggugauguguuugucaucagggagccauucauuuccuguucaccguuagaaugccggaccuuuuuccugacacagggggcucuacucaacgacaagcauaguaauggaaccaucaaagaucgcagccccuaucgaacucugaugucuuguccuaucggcgaggugccaucccccuacaacucacguuuugaaagcguagccuggagugcaucugccugccacgacggcauuaacuggcuuacaauagggaucuccggaccugauagcggugcuguugcagugcugaaguauaauggcauuaucaccgacacgauaaagucguggagaaacaauauuuugaggacucaagagucugagugugccugcgucaacggguccuguuucaccaucaugacagauggaccaucagacggccaggcuaguuacaaaaucuuucggauugaaaaggguaaaaucgugaagucaguggagaugaaugcccccaacuaucauuacgaagagugcuccuguuacccugauucuagcgagucaacuugcgucugccgcgacaauuggcacgggaguaacagaccauggguuuccuucaaucagaaccucgaauaucagauuggauacauauguagcggcaucuuuggcgauaauccgaggcccaacgacaaaaccgggucuugcggaccugugucaaguaauggugcgaacggcguaaagggguucagcuuuaaguauggaaauggcguguggauuggucggacaaaauccaucucuucgcgcaagggguucgagaugaucugggauccaaacggcuggaccggaacggacaacaauuuuagcauuaaacaagacauagucggcaucaacgaaugguccggguacucaggaaguuucgugcagcaucccgagcugacuggucuggauuguauucgaccuugcuucuggguugaacucaucagaggcaggccaaaggagaauacaauuuggaccucugggagcucccggucauuuuguggagugaacagcgacacugucggcuggucuuggcccgauggugcagaguuaccguucacaaucgacaaauga

SEQ ID NO: 151855 - RNA, 1410 nt, Artificial Sequence
  derived and/or modified CDS sequence (opt3) from neuraminidase__InfluenzaA__AGT18762
augaaccccaaucagaagaucauuaccauaggcagcgugucccugacaaucucuacuauuugcuucuuuaugcagaucgccauucucaucacgaccgucacacuucacuucaaacaguacgaguuuaacucaccuccaaauaaccagguuacucugugugaaccgauaaucauugagagaaauaucaccgaaauuguguauuugacaaacaccacuaucgagaaggaaauaugccccaaaccugcugaguacaggaauuggaguaagccacagugugggauuacaggauucgcacccuuuagcaaagacaacuccauccgguuaucugccgguggcgauauuuggguaacccgcgagccuuaugugucgugcgacccagauaaguguuaccaauucgcgcuggggcagggaacgacucuaaauaacguccauucaaauaacaccgugcgagaccguacacccuauagaacucuccugaugaaugaacuuggcguuccuuuucaccuggguaccaaacaggugugcaucgcuuggagcaguuccucuugucaugaugggaaggccugguugcacgucugcaucacaggagacgauaagaacgcaaccgccagcuucauuuacaauggcaggcucguggacuccguaguuucauggaguaaagagauacugcggacgcaggaaagcgagugugugugcaucaacggcacuuguacagucgugaugaccgaugggucugcuuccggaaaggcagacacuaaaauucuguuuaucgaggaagguaagauagugcauacaucaacccucagcggcagugcccaacacgucgaggaaugcucuugcuauccacgcuacccggggguuagaugugugugcagggauaacuggaagggauccaaucggcccauuguagacaucaacaucaaagaucacagcauugugucgucuuacgucuguuccggcuuagugggugacacgccucgcaagaaugacucaaguagcuccucucauugccuggauccaaacaaugaggaagggggacacggcguuaaaggcugggcuuucgacgaugggaacgacguguggaugggacgaaccaucaaugagacaagcagacuugguuaugagacuuuuaaggucauugaaggcuggucaaaccccaaaaguaaguugcagauaaauaggcaagugaucguagaucguggggaccgguccggauacagcggcauuuucucuguugaggguaaaucauguaucaaccgcugcuuuuauguggaacugaucagagggaggaaggaggaaaccgagguccuauggacaaguaauagcauuguggucuucuguggcacuuccggaaccuacggcacagggucuuggccugauggagccgaccucaaccugaugccaauauga

SEQ ID NO: 151856 - RNA, 1410 nt, Artificial Sequence
  derived and/or modified CDS sequence (opt3) from neuraminidase__InfluenzaA__AGT18764
augaaccccaaucagaugaucauuaccauaggcagcgugucccugacaucuucaacuaucugcuucuuuaugcagacggccaguuucauuaccacagucacucuccacaucaagcagcaugaguuucacagcccuccaaacaaucagguuaugcuuugugaaccgaccauuaucgagagaaacauaacagaaaucguguaccugaccaauacuacaauugagaaagaaaucugccccaaguuggcugaguauaggaacugguccaaaccucagugugacauuaccggguucgcaccauuuucuaaggauaauucgauccgguuaucagccggaggugacauauggguaacgcgcgagcccuacgugagcugcgauccugacaaauguuaucaauucgcgcugggccaggggacuacccuaaacaauguccauaguaacaauacagugcgagaucguacuccauacagaacccuccugaugaacgaacuuggaguucccuuucaccugggcacaaaacaggugugcauugcuugguccucuagcuccugucaugacgguaaggccugguugcacgucugcaucaccggggaugacaagaaugcaacggccucauucauuuauaacggaaagcucguggauaguguaguuagcuggucuaaagagauccugaggacucaggaauccgagugugugugcaucaauggcacauguaccgucgugaugacugacggcucagcuagcgggaaggcagauacaaaaauucuguuuauagaggaaggaaagaucgugcacaccaguacgcucucugguuccgcccaacaugucgaggaaugcagcugcuacccucgguauccaggcguucgcugugugugcagagacaacuggaaggggucgaacaggccgauuguagauaucaauaugaaagaccacucuauaguguccucauacgucuguaguggauuagugggcgacacuccccggaagaacgaucgcagcuccaauucucauugccuggacccuaacaaugaggaaggugggcacggaguuaaaggcugggcuuucgaugacggcaacgauguguggauggggcgaacaauuaaugagacuagcagacuuggauacgagaccuuuaaggucaucgaagguuggucaaacccaaaaaguaaguugcagaucaauaggcaagugauuguagaccggggcaaccguuccggguauagcggaaucuucucuguugagggcaaaucauguauuaaucgcugcuuuuacguggaacugauaagagguaggaaggaggaaacagagguccuauggaccaguaacagcaucguggucuucugugggaccuccggcacauauggaaccggcucuuggcccgauggggccgaccucaaucugaugccuauuuga

SEQ ID NO: 151857 - RNA, 1410 nt, Artificial Sequence
  derived and/or modified CDS sequence (opt3) from neuraminidase__InfluenzaA__AGT18765
augaaccccaaucagaagaucauuaccauaggcagcgugucccugacaaucucuacuauuugcuucuuuaugcaaaucgccauucucaucacgaccgucacacuucacuucaaacagcaugaguuucacucaccuccaaacaaucagguuaugcugugugaaccgacuauaaucgagagaaacauuaccgaaaucguguacuugacaaauaccacuauugagaaggaaaucugccccaaauuagcugaguauaggaacuggaguaagccucagugugacauaacaggguucgcaccauuuagcaaagauaauuccauucggcugucugccggaggugacaucuggguaacccgcgagcccuacgugucgugcgauccugacaaguguuaucaauucgcgcuaggccaggggacgacucucaacaauguccauucaaacaauaccgugcgagaucguacaccauacagaacucugcuuaugaacgaacugggaguucccuuucacuugggcaccaaacaggugugcauugcuuggagcaguuccucuugucaugacgguaaggccuggcuccacgucugcaucacaggggaugacaagaaugcaaccgccagcuucaucuauaacggaaggcugguggauuccguaguuucauggaguaaagagauucugcggacgcaggaaagcgagugugugugcauaaauggcacuuguacagucgugaugaccgacggcucugcuuccgggaaggcagauacuaaaauccucuuuauugaggaaggaaagaucgugcacacaucaaccuuaagcgguagugcccaacaugucgaggaaugcucuugcuacccucgcuauccaggcguuagaugugugugcagggacaacuggaagggguccaaccggccgauaguagauauuaauaugaaagaccacagcaucgugucgucuuacgucuguuccggacuggugggcgacacgccccgcaagaacgaucgaucaaguaauagccauugccuugacccuaacaaugaggaaggugggcacggaguuaaaggcugggcuuucgaugacggcaacgauguguggauggggagaaccaucaaugagacauccagguugggauacgagacuuuuaaggucauugaagguuggucuaacccaaaaagcaagcugcagaucaaucgucaggugauuguagaccggggcaaccgcucaggguauaguggaauauucuccguugagggcaaaagcuguaucaauagaugcuuuuacguggaacuaauuaggggucggaaggaggaaaccgagguccucuggacaucuaacucaaucguggucuucugugggaccaguggcacuuauggaacaggcagcuggcccgauggggccgaccugaaucuuaugccuaucuga

SEQ ID NO: 151858 - RNA, 1410 nt, Artificial Sequence
  derived and/or modified CDS sequence (opt3) from neuraminidase__InfluenzaA__AGT18766
augaaccccaaucagaagaucauuaccauaggcagcgugucccugacaaucucuacuauuugccucuucaugcaaaucgccauucuuaucacgaccgucacacugcacuuuaaacagcaugaguuccacucaccuccaaacaaucagguuauguugugugaaccgacuauaaucgagagaaacauuaccgaaaucguguacuuaacaaauaccacuauugagaaggaaaucugccccaaacuggcugaguauaggaacuggaguaagccucagugugacauaacaggguuugcaccauucagcaaagauaauuccauucggcuaucugccggaggugacaucuggguaacccgcgagcccuacgugucgugcgauccugacaaguguuaucaauuugcgcucggccaggggacgacucugaacaauguccauucaaacaauaccgugcgagaucguacaccauacagaacucuucugaugaacgaauugggaguucccuuccaccucggcaccaaacaggugugcauugcuuggagcaguuccucuugucaugacgguaaggccuggcugcacgucugcaucacaggggaugacaagaaugcaaccgccagcuuuaucuauaacggaaggcugguggauuccguaguuucauggaguaaagagauucuccggacgcaggaaagcgagugugugugcauaaauggcacuuguacagucgugaugaccgacggcucugcuuccgggaaggcagauacuaaaaucuuauucauugaggaaggaaagaucgugcacacaucaacccugagcgguagugcccaacaugucgaggaaugcucuugcuacccucgcuauccaggcguuagaugugugugcagggacaacuggaagggguccaaccggccgauaguagauauuaauaugaaagaccacagcaucgugucgucuuacgucuguuccggacuugugggcgacacgccccgcaagaacgaucgaucaaguaauagccauugcuuggacccuaacaaugaggaaggugggcacggaguuaaaggcugggcuuuugaugacggcaacgauguguggauggggagaaccaucaaugagacauccaggcugggauacgagacuuucaaggucauugaagguuggucuaacccaaaaagcaagcuacagaucaaucgucaggugauuguagaccggggcaaccgcucaggguauaguggaauauuuuccguugagggcaaaagcuguaucaauagaugcuucuacguggaacucauuaggggucggaaggaggaaaccgagguccuguggacaucuaacucaaucguggucuuuugugggaccaguggcacuuauggaacaggcagcuggcccgauggggccgaccuuaaucugaagccuaucuga

SEQ ID NO: 151859 - RNA, 1410 nt, Artificial Sequence
  derived and/or modified CDS sequence (opt3) from neuraminidase__InfluenzaA__AGT18767
augaaccccaaucagaagaucauuaccauaggcagcgugucccugacaaucucuacuauuugcuucuuuaugcaaacggccucacucaucaccacagucacucuucacuucaaacagcaugaguuucacaguccuccaaacaaucagguuaugcugugugaaccgaccauuaucgagagaaacauaacagaaaucguguacuugaccaauacuacaauugagaaggaaaucugccccaaauuagcugaguauaggaacuggagcaagccucagugugacauuaccggguucgcaccauuuuccaaagauaauucuauccggcugucggccggaggugacauauggguaacgcgcgagcccuacgugucaugcgauccugacaaguguuaucaauucgcgcuaggccaggggacuacccucaacaauguccauagcaacaauacagugcgagaucguacuccauacagaacccugcuuaugaacgaacugggaguucccuuucacuugggcacaaaacaggugugcauugcuuggaguuccucuagcugucaugacgguaaggccuggcuccacgucugcaucaccggggaugacaagaaugcaacggccuccuucauuuauaacggaaggcugguggauucaguaguuaguuggagcaaagagauccugcggacucaggaaucugagugugugugcaucaauggcacauguaccgucgugaugacugacggcuccgcuucagggaaggcagauacaaaaauucucuuuauagaggaaggaaagaucgugcacaccagcacguuaagugguucugcccaacaugucgaggaaugcuccugcuacccucgcuauccaggcguuagaugugugugcagggacaacuggaaggggagcaaccggccgauuguagauaucaauaugaaagaccacucgauagugucuuccuacgucuguucaggacuggugggcgacacaccccgcaagaacgaucgaaguagcaauucccauugccuugacccuaacaaugaggaaggugggcacggaguuaaaggcugggcuuucgaugacggcaacgauguguggauggggagaaccauuaaugagacuucuagguugggauacgagaccuuuaaggucaucgaagguuggagcaacccaaaaucaaagcugcagaucaaucgucaggugauuguagaccggggcaaccgcaguggguauuccggaaucuucagcguugagggcaaaucuuguauuaauagaugcuuuuacguggaacuaauaaggggucggaaggaggaaacagagguccucuggacuucaaacaguaucguggucuucugugggaccagcggcacauauggaaccggcuccuggcccgauggggccgaccugaaucuuaugccuauuuga

SEQ ID NO: 151860 - RNA, 1410 nt, Artificial Sequence
  derived and/or modified CDS sequence (opt3) from neuraminidase__InfluenzaA__AGT18768
augaaccccaaucagaagaucauuaccauaggcagcgugucccugacaaucucuacuauuugcuucuuuaugcaaacggccucauucaucaccacagucacucuccacuuuaaacaguacgaguucaacaguccuccaaauaaccagguuaugcuuugugaaccgaccauuaucgagagaaauauaacagaaaucguguaucugaccaacacuacaauugagaaggaaaucugccccaaauuggcugaguacaggaauuggagcaagccucagugugacauuaccggguuugcaccauucuccaaagauaacucuauccgguuaucggccggaggugacauauggguaacgcgcgagcccuaugugucaugcgauccugacaaguguuaccaauuugcgcugggccaggggacuacccuaaauaacguccauagcaauaacacagugcgagaucguacuccauauagaacccuccugaugaaugaacuuggaguucccuuccaccugggcacaaaacaggugugcauugcuuggaguuccucuagcugucaugacgguaaggccugguugcacgucugcaucaccggggaugacaagaacgcaacggccuccuuuauuuacaauggaaggcucguggauucaguaguuaguuggagcaaagagauccugcggacucaggaaucugagugugugugcaucaacggcacauguaccgucgugaugacugacggcuccgcuucagggaaggcagauacaaaaauucuguucauagaggaaggaaagaucgugcauaccagcacgcucagugguucugcccaacacgucgaggaaugcuccugcuauccucgcuacccaggcguuagaugugugugcagggacaacuggaaggggagcaaucggccgauuguagauaucaacaugaaagaccacucgauagugucuuccuacgucuguucaggauuagugggcgacacaccccgcaagaaugaucgaaguagcaacucccauugccuggacccuaauaacgaggaaggugggcacggaguuaaaggcugggcuuuugaugacggcaaugauguguggauggggagaaccauuaacgagacuucuaggcuuggauaugagaccuucaaggucaucgaagguuggagcaauccaaaaucaaaguugcagaucaaccgucaggugauuguagaccggggcaaucgcaguggguacuccggaaucuuuagcguugagggcaaaucuuguauuaacagaugcuucuauguggaacugauaaggggucggaaggaggaaacagagguccuauggacuucaaauaguaucguggucuucugugggaccagcggcacauacggaaccggcuccuggcccgauggggccgaccucaaccugaugccuauuuga

SEQ ID NO: 151861 - RNA, 1410 nt, Artificial Sequence; identical to SEQ ID NO: 150194
  derived and/or modified CDS sequence (opt3) from neuraminidase__InfluenzaA__AGT18769

SEQ ID NO: 151862 - RNA, 1410 nt, Artificial Sequence
  derived and/or modified CDS sequence (opt3) from neuraminidase__InfluenzaA__AGT18770
augaaccccaaucagaagaucauuaccauaggcagcgugucccugacaaucucuacuauuugcuucuuuaugcagaucgccauucucaucacgaccgucacacuucacuucaaacaguacgaguuuaacucaccuccaaauaacaagguuaugcugugugaaccgacuauaaucgagagaaauauuaccgaaaucguguauuugacaaacaccacuauugagaaagaaaucugccccaagccugcugaguacaggaauuggaguaaaccacagugugggauaacaggauucgcacccuuuagcaaggacaacuccauucgguuaucugccgguggcgauaucuggguaacccgcgagccuuaugugucgugcgacccagauaaguguuaccaguucgcgcuggggcaaggaacgacucuaaauaacguccauucaaauaacaccgugcgagaccguacacccuauagaacucuccugaugaaugaacuuggcguuccuuuucaccuggguaccaaacaggugugcauugcuuggagcaguuccucuugucaugaugggaaggccugguugcacgucugcaucacaggagacgauaaaaacgcaaccgccagcuucaucuacaauggcaggcucguggacuccguaguuucauggaguaaggagauucugcggacgcaggaaagcgagugugugugcauaaacggcacuuguacagucgugaugaccgaugggucugcuuccggaaaagcagacacuaagauccuguuuauugaggaagguaagaucgugcauacaucaacccucagcggcagugcccagcacgucgaggaaugcucuugcuauccacgcuacccggggguuagaugugugugcagggauaacuggaaaggauccaaucggcccauaguagacauuaacaucaaggaucacagcaucgugucgucuuacgucuguuccggcuuagugggugacacgccucgcaaaaaugacucaaguagcuccucucauugccuggauccaaacaaugaggaagggggacacggcguuaagggcugggcuuucgacgaugggaacgacguguggaugggacgaaccauuaaugagacaagcagacuugguuaugagacuuuuaaagucaucgaaggcuggucaaaccccaagaguaaauugcaaauuaauaggcaagugauaguagaucguggggaccgguccggauacagcggcaucuucucuguugaggguaagucauguauuaaccgcugcuuuuauguggaacugaucagagggaggaaggaggaaaccgagguccuauggacaaguaauagcaucguggucuucuguggcacuuccggaaccuacggcacagggucuuggccugauggagccgaccucaaccugaugccaauuuga

SEQ ID NO: 151863 - RNA, 1410 nt, Artificial Sequence
  derived and/or modified CDS sequence (opt3) from neuraminidase__InfluenzaA__AGT18771
augaaccccaaucagaagaucauuaccauaggcagcgugucccugacaaucucuacuauuugcuucuuuaugcagaucgccauucucaucacgaccgucacacuucacuucaaacaguacaaguuuaacucaccuccaaauaaccagguuaugcugugugagccgacuauaaucgaaagaaauauuaccgagaucguguauuugacaaacaccacuauugaaaaagagaucugccccaagccugcugaauacaggaauuggaguaaaccacagugugggauaacaggauucgcacccuuuagcaaggacaacuccauucgguuaucugccgguggcgauaucuggguaacccgcgagccuuaugugucgugcgacccagauaaguguuaccaauucgcgcuggggcagggaacgacucuaaauaacguccauucaaauaacaccgugcgagaccguacacccuauagaacucuccugaugaaugagcuuggcguuccuuuucaccuggguaccaaacaggugugcauugcuuggagcaguuccucuugucaugaugggaaggccugguugcacgucugcaucacaggagacgauaaaaacgcaaccgccagcuucaucuacaauggcaggcucguggacuccguaguuucauggaguaaggaaauucugcggacgcaggagagcgaaugugugugcauaaacggcacuuguacagucgugaugaccgaugggucugcuuccggaaaagcagacacuaagauccuguuuauugaggaggguaagaucgugcauacaucaacccucagcggcagugcccaacacgucgaagagugcucuugcuauccacgcuacccggggguuagaugugugugcagggauaacuggaaaggauccaaucggcccauaguagacauuaacaucaaggaucacagcaucgugucgucuuacgucuguuccggcuuagugggugacacgccucgcaaaaaugacucaaguagcuccucucauugccuggauccaaacaaugaagaagggggacacggcguuaagggcugggcuuucgacgaugggaacgacguguggaugggacgaaccauuaaugagacaagcagacuugguuaugagacuuuuaaagucaucgagggcuggucaaaccccaagaguaaauugcagauuaauaggcaagugauaguagaucguggggaccgguccggauacagcggcaucuucucuguugaagguaagucauguauuaaccgcugcuuuuauguggagcugaucagagggaggaaggaagagaccgaaguccuauggacaaguaauagcaucguggucuucuguggcacuuccggaaccuacggcacagggucuuggccugauggagccgaccucaaccugaugccaauuuga

SEQ ID NO: 151864 - RNA, 1410 nt, Artificial Sequence; identical to SEQ ID NO: 150194
  derived and/or modified CDS sequence (opt3) from neuraminidase__InfluenzaA__AGT18772

SEQ ID NO: 151865 - RNA, 1410 nt, Artificial Sequence
  derived and/or modified CDS sequence (opt3) from neuraminidase__InfluenzaA__AGT37104
augaaccccaaucagaagaucauuaccauaggcagcgugucccugacaaucgccacuauuugccuccuuaugcaaaucgcuauucuggucacgaccguuacauugcacuucaaacaguacgaguguucuucaccuccaaacaaucaggugaugccgugcgaacccacuaucauagagagaaacaucaccaagauuguauauuuaacaaauaccacuaucgaaagggaggcauguccugaacuggccgaguaccggcauuggaguaaaccacagugcaagauucgcggguuugcgcccuucagcaaagacaacuccauccgacuaucugcuggaggugauauaugggugacacgugagccuuaugucucgugugacccaggcaagugcuaccaauuugcccucgggcagggaaccacgcugaauaacagacacucaaaugauacugugcaugacaggacccccuaucggacacuucugaugaacgaauugggcguuccuuuccaccucgguacuaaacagguguguauugcauggagcaguuccucuugccaugaugggaaggccuggcugcacgucuguaucaccggacacgacaagaaugcuacagccagcuuuauuuacgauggccgccugguggacuccaucggcucauggagucagaacauccucagaacccaagagagcgaaugcguauguauuaaugggacgugcacuguugugaugacagauggaucugcauccgguagggcugacaccaaaauaauguucgucgaggagggcaagaucgugcauauuucaccauuagccgggagcgcgcagcacguggaagagugcaguuguuauccgaaauaccccggaguccggugcguuugucgcgauaacuggaagggcucuaaucgaccuaucguggacauaaacaugaaggauuacuccauuguaagcucguaugugugcucuggucuggucggggacacuccaagaaggaacgacuccucaaguacaagcuacugucuuaaucccaacaaugaagagggaggccauggcgugaaagggugggcauuugaugacggagaugacguuuggaugggucggaccaucuccgaaaaguugcgucugggcuaugagacguucaaagugaucgggggauggucuaagccuaacagcaaacuacagauuaaucgccaggucgugguagauaucucaaacagaaguggcuacuccgguauuuuuagcguugaggggaagucuugcauaaauagguguuucuauguggaacucauccggggccgaaaacaagagaacgaagucugguggaccucaaauaguauuguggucuuuugcggaacaagcggcacuuacgggaccggauccuggccagacggugccgauaucaaccugaugcccaucuga

SEQ ID NO: 151866 - RNA, 1410 nt, Artificial Sequence
  derived and/or modified CDS sequence (opt3) from neuraminidase__InfluenzaA__AGU69973
augaaccccaaucagaagaucauuaccauaggcagcgugucccugacaaucgccacuauuugcuuccucaugcagaucgcuauucuugucacgaccguuacacugcacuuuaaacaguacgaguguaacucuccuccaaauaaccaggugauguugugcgaaccgacuaucauagagagaaauaucaccgaaauuguauauuuaacaaacaccacuaucgagaaggaaauuugucccaaacuggcagaguacaggaauuggucaaagccucagugcaacaucacaggguucgccccauuuaguaaagacaauagcauacggcuauccgcgggaggugauauuugggugacccgcgagcccuaugucucuugugacccugauaagugcuaccaauucgcucucggccaggggacgacucugaacaauggacauucgaacgacaccgugcacgaucgaacaccauaucguacucuucugaugaaugaauugggcguucccuuucaucucgguaccaaacagguguguaucgccuggucaagcaguuccugccacgacgggaaggcauggcugcaugucugugugacaggagaugacgagaacgccaccgcuucuuucauuuacaauggcagacugguagauagcaucggcuccuggucaaagaaaauccucaggacgcaggaaagugagugcguuuguauuaacgggacuugcacaguggucaugaccgacggaagcgcaucugguaaggccgauacuaaaauauuauuuaucgaggaaggcaagauugugcacacauccccucugucagggagcgcucaacacguggaggaaugcaguuguuauccacgguacccgggaguccgcugcguuuguagagacaacuggaagggcucuaauaggcccaucguggauauaaacguaaaagacuacuccauugugagcucguauguccggucuggucuugugggggacaccccucgcaagaaugauuccucaaguagcucccauugcuuggacccaaacaaugaggaaggaggccacggcguuaaagggugggccuucgaugacggaaacgauguguggaugggucgaacgaucucugaaaagagcagaucaggcuacgagaccuuuaaagucaucgagggguggaguaagcccaauuccaaacugcagauuaacaggcaagugaucguagaccggggaaaucguagcggcuauucugguauuuucucaguugaggggaagaguuguauaaaccgcugcuuuuacguggaacuaaucagaggcggaaagcaggagacagaaguccucuggacuagcaauuccauuguggucuucuguggcaccucugggacauauggaacugguucguggccugauggcgcggaccugaaccuuaugccaaucuga

SEQ ID NO: 151867 - RNA, 1410 nt, Artificial Sequence
  derived and/or modified CDS sequence (opt3) from neuraminidase__InfluenzaA__AGU92648
augaaccccaaucagaagaucauuaccauaggcagcgugugcaugacaaucgggauggccaaccugauucuccaaaucggaaauauuaucuccauauggaucucucacucaauucagcuuagaaaccagagucagaucgagacuuguaaucaaagcgucauuacguacgaaaacaauaccuggguuaaccagacauaugugaauaucuccaacacuaauuucgcugcaggucagucuguagugucggucaaacuggccggcaacagcucauugugcccugugagugggugggcgauauacuccaaggacaauucuauuaggaucggaagcaaaggcgauguuuuugugauucgggagccauucaucuccuguucaccguuagaaugccgcaccuuuuuccugacacagggugcucuacucaacgacaagcauaguaaugggaccaucaaagaucgaagccccuaucguacucugaugucuuguccuauuggagaggucccaucccccuacaacucaagauuugaaagcguggccuggagugcaucugccugccacgacggcauaaacuggcuuacaaucggcauuuccgggccugauaauggagcuguagcaguucugaaguauaacgguaucauaaccgacacgauuaagagcuggaggaauaacaucuugcggacucaagagucggagugugccugcgugaauggcucuuguuucaccaucaugacagaugggccauccgacggacaggcuucauacaaaauuuuucgcaucgaaaagggcaaaauugucaagaguguggagaugaacgcccccaauuaucauuacgaagagugcagcuguuacccugauuccucugagauaaucugcgugugcagagacaacuggcacgguagcaauaggccaugggucucauucaaccagaaucucgaauaucagauuggguacaucuguaguggaaucuuuggcgauaacccgcggcccaaugacaaaacuggcuccugcgggccuguuagcucuaacggagcgaauggugugaagggcuucucauuuaaguaugggaacggaguauggauuggccgcaccaaaaguauaagcucccgaaaggguuucgagaugaucugggauccaaacggguggacaggcaccgacaauaacuuuucuauuaaacaagacaucgugggaauuaaugaauggucgggcuacagcggguccuucguccagcaucccgagcugacgggacuggauuguaucagaccuugcuucuggguggaacucauaaggggucggccaaaggagaacacuaucuggacaucaggcaguucuauuagcuuuugugggguuaauuccgacaccgugggauggucauggcccgauggcgcagaguuaccguucacuaucgacaaauga

SEQ ID NO: 151868 - RNA, 1410 nt, Artificial Sequence
  derived and/or modified CDS sequence (opt3) from neuraminidase__InfluenzaA__AGU92670
augaaccccaaucagaagaucauuaccauaggcagcgugugcaugacaaucgggauggccaaccugauucuccaaaucggaaauauuaucuccauauggaucucucacucaauucagcuuagaaaccagagucagaucgagacuuguaaucaaagcgucauuacguacgaaaacaauaccuggguuaaccagacauaugugaauaucuccaacacuaauuucgcugcaggucagucuguagugucggucaaacuggccggcaacagcucauugugcccugugagugggugggcgauauacuccaaggacaauucuauuaggaucggaagcaaaggcgauguuuuugugauucgggagccauucaucuccuguucaccguuagaaugccgcaccuuuuuccugacacagggugcucuacucaacgacaagcauaguaaugggaccaucaaagaucgaagccccuaucguacucugaugucuuguccuauuggagaggucccaucccccuacaacucaagauuugaaagcguggccuggagugcaucugccugccacgacggcauaaacuggcuuacaaucggcauuuccgggccugauaauggagcuguagcaguucugaaguauaacgguaucauaaccgacacgauuaagagcuggaggaauaacaucuugcggacucaagagucggagugugccugcgugaauggcucuuguuucaccaucaugacagaugggccauccgacggacaggcuucauacaaaauuuuucgcaucgaaaagggcaaaauugucaagaguguggagaugaacgcccccaauuaucauuacgaagagugcagcuguuacccugauuccucugagauaaucugcgugugcagagacaacuggcacgguagcaauaggccaugggucucauucaaccagaaucucgaauaucagauuggguacaucuguaguggaaucuuuggcgauaacccgcggcccgacgauaaaacuggcuccugcgggccuguuagcucuaauggagcgaacggugugaagggcuucucauuuaaguaugggaauggaguauggauuggccgcaccaaaaguauaagcucccgaaaggguuucgagaugaucugggacccaaacggguggacaggcaccgacaacaauuuuucuauuaaacaagauaucgugggaauuaacgaauggucgggcuacagcggguccuucguccagcaucccgagcugacgggacuggacuguaucagaccuugcuucuggguggaacucauaaggggucggccaaaggagaauacuaucuggacaucaggcaguucuauuagcuuuugugggguuaacuccgauaccgugggauggucauggcccgacggcgcagaguuaccguucacuaucgauaaauga

SEQ ID NO: 151869 - RNA, 1410 nt, Artificial Sequence
  derived and/or modified CDS sequence (opt3) from neuraminidase__InfluenzaA__AGU92681
augaaccccaaucagaagaucauuaccauaggcagcgugugcaugacaaucgggauggccaaccugauucuccaaaucggaaauauuaucuccauauggaucucucacucaauucagcuuagaaaccagagucagaucgagacuuguaaucaaagcgucauuacguacgaaaacaauaccuggguuaaccagacauaugugaauaucuccaacacuaauuucgcugcaggucagucuguagugucggucaaacuggccggcaacagcucauugugcccugugagugggugggcgaccuacuccaaggacaauucuauaaggauuggaagcaaaggcgauguuuuugugauccgggagccauucauuuccuguucaccguuagaaugccgcacauuuuuccugacccagggugcucuacucaacgacaagcauaguaaugggacuaucaaagaucgaagccccuaucguacacugaugucuuguccuaucggagaggucccaucccccuacaacucaagauuugaaagcguggccuggagugcaucugccugccacgacggcauuaacuggcuuaccauaggcaucuccgggccugauaauggagcuguagcaguucugaaguauaacgguauuaucacggacacuauaaagagcuggaggaauaacauuuugcggacccaagagucggagugugccugcgugaauggcucuuguuucacaaucaugacugaugggccauccgacggacaggcuucauacaaaaucuuucgcauugaaaagggcaaaaucgucaagaguguggagaugaacgcccccaauuaucauuacgaagagugcagcuguuacccugauuccucugagauuauaugcgugugcagagacaacuggcacgguagcaauaggccaugggucucauucaaccagaaucucgaauaucagaucggguacauuuguaguggaaucuuuggcgauaacccgcggcccaaugacaaaaccggcuccugcgggccuguuagcucuaacggagcgaauggugugaagggcuucucauuuaaguaugggaacggaguauggaucggccgcacaaaaaguauuagcucccgaaaggguuucgagaugauaugggauccaaacggguggaccggcacggacaauaacuuuucuaucaaacaagacauugugggaaucaaugaauggucgggcuacagcggguccuucguccagcaucccgagcugacuggacuggauuguauuagaccuugcuucuggguggaacucaucaggggucggccaaaggagaacacaauauggaccucaggcaguucuaucagcuuuugugggguuaauuccgacacugugggauggucauggcccgauggcgcagaguuaccguucacaauugacaaauga

SEQ ID NO: 151870 - RNA, 1410 nt, Artificial Sequence
  derived and/or modified CDS sequence (opt3) from neuraminidase__InfluenzaA__AGU92692
augaaccccaaucagaagaucauuaccauaggcagcgugugcaugacaaucgggauggccaaccugauucuccaaaucggaaauauuaucuccauauggaucucucacucaauucagcuugguaaccagaaucagaucgagacuuguaaccaaagugucauuacguacgaaaauaacaccuggguuaaucagacauaugugaacaucagcaauacuaacuucgcugcaggccaguccguagugucugucaaacuggccggaaauucgucauugugcccugugagcggaugggcgauauacaguaaggacaacuccguuagagugggcucuaaaggugaugucuuugugauuagggagccauucaucagcuguuccccguuagaaugccggaccuuuuuccugacacagggggcucuacucaaugacaagcauucaaacggaaccauuaaagaucgcagucccuaucgaacucugaugagcuguccuaucggcgagguaccaucucccuacaacucccguuuugaaucaguugccuggagcgcaagugccugccacgacggcaucaauuggcuuacaauugggauaucuggaccugauaacggugcuguggcaguccugaaguauaauggcaucauuaccgacacgaucaaguccuggagaaacaauauauugaggacucaagagagcgagugugccugcgugaacgggucguguuucaccgugaugacagauggaccaucuaauggccaggcuuccuacaaaauuuuucggaucgaaaaggguaaaaucgucaagucaguugagaugaacgcccccaauuaucauuacgaagagugcaguuguuacccugacagcuccgagauuacuugcgugugccgcgauaacuggcacgggucuaauagaccaugggugagcuucaaccagaaucucgaauaucagaucggauacauuuguucaggcauauuuggcgacaacccgaggcccaaugauaaaaccgggaguugcggaccuguauccagcaacggugcgaacggcgucaagggguucucuuuuaaguauggaaauggcguguggaucggucggacaaaaucaauuaguagccgcaacggguucgagaugaucugggacccaaauggcuggaccggaacggauaacaauuuuuccaucaagcaagacauuguuggcauaaacgaauggucuggguacucggggagcuucauccagcaucccgagcugacuggucuggacuguauucgaccuugcuucuggguggaacucaucagaggcaggccaaaagagaauacaauuuggaccuccgggucaaguaucucuuuuuguggagucaacagcgauacugugggcugguccuggcccgacggugcagaguuaccguucacaauagauaaguga

SEQ ID NO: 151871 - RNA, 1410 nt, Artificial Sequence; identical to SEQ ID NO: 151870
  derived and/or modified CDS sequence (opt3) from neuraminidase__InfluenzaA__AGU92703

SEQ ID NO: 151872 - RNA, 1410 nt, Artificial Sequence; identical to SEQ ID NO: 151870
  derived and/or modified CDS sequence (opt3) from neuraminidase__InfluenzaA__AGU92714

SEQ ID NO: 151873 - RNA, 1410 nt, Artificial Sequence; identical to SEQ ID NO: 151870
  derived and/or modified CDS sequence (opt3) from neuraminidase__InfluenzaA__AGU92725

SEQ ID NO: 151874 - RNA, 1410 nt, Artificial Sequence; identical to SEQ ID NO: 151870
  derived and/or modified CDS sequence (opt3) from neuraminidase__InfluenzaA__AGU92736

SEQ ID NO: 151875 - RNA, 1410 nt, Artificial Sequence; identical to SEQ ID NO: 151870
  derived and/or modified CDS sequence (opt3) from neuraminidase__InfluenzaA__AGU92747

SEQ ID NO: 151876 - RNA, 1410 nt, Artificial Sequence; identical to SEQ ID NO: 151870
  derived and/or modified CDS sequence (opt3) from neuraminidase__InfluenzaA__AGU92758

SEQ ID NO: 151877 - RNA, 1410 nt, Artificial Sequence; identical to SEQ ID NO: 151867
  derived and/or modified CDS sequence (opt3) from neuraminidase__InfluenzaA__AGU92769

SEQ ID NO: 151878 - RNA, 1410 nt, Artificial Sequence; identical to SEQ ID NO: 151867
  derived and/or modified CDS sequence (opt3) from neuraminidase__InfluenzaA__AGU92780

SEQ ID NO: 151879 - RNA, 1410 nt, Artificial Sequence
  derived and/or modified CDS sequence (opt3) from neuraminidase__InfluenzaA__AGU92791
augaaccccaaucagaagaucauuaccauaggcagcgugugcaugacaaucgggauggccaaccugauucuccaaaucggaaauauuaucuccauauggaucucucacucaauucagcuuagaaaccagagucagaucgagacuuguaaucaaagcgucauuacguacgaaaacaauaccuggguuaaccagacauaugugaauaucuccaacacuaauuucgcugcaggucagucuguagugucggucaaacuggccggcaacagcucauugugcccugugagugggugggcgauauacuccaaggacaauucuauuaggaucggaagcaaaggcgauguuuuugugauucgggagccauucaucuccuguucaccguuagaaugccgcaucuuuuuccugacccagggugcucuacucaacgacaagcauaguaaugggacaauuaaagaucgaagccccuaucguacccugaugucuuguccuauaggagaggucccaucccccuacaacucaagauuugaaagcguggccuggagugcaucugccugccacgacggcaucaacuggcuuacuauuggcaucuccgggccugauaauggagcuguagcaguucugaaguauaacgguauaauuacagacaccaucaagagcuggaggaauaacaucuugcggacgcaagagucggagugugccugcgugaauggcucuuguuucacuauuaugaccgaugggccauccgacggacaggcuucauacaaaaucuuucgcauugaaaagggcaaaauagucaagaguguggagaugaacgcccccaauuaucauuacgaagagugcagcuguuacccugauuccucugagaucauuugcgugugcagagacaacuggcacgguagcaauaggccaugggucucauucaaccagaaucucgaauaucagaucggguacaucuguaguggaauuuuuggcgauaacccgcggcccaaugacaaaacaggcuccugcgggccuguuagcucuaacggagcgaauggugugaagggcuucucauuuaaguaugggaacggaguauggauaggccgcacuaaaaguaucagcucccgaaaggguuucgagaugauuugggauccaaacggguggaccggcacagacaauaacuuuucuaucaaacaagacauugugggaaucaaugaauggucgggcuacagcggguccuucguccagcaucccgagcugaccggacuggauuguauaagaccuugcuucuggguggaacucaucaggggucggccaaaggagaacacgauuuggacuucaggcaguucuaucagcuuuugugggguuaauuccgacacagugggauggucauggcccgauggcgcagaguuaccguucaccauugacaaauga

SEQ ID NO: 151880 - RNA, 1410 nt, Artificial Sequence; identical to SEQ ID NO: 151867
  derived and/or modified CDS sequence (opt3) from neuraminidase__InfluenzaA__AGU92802

SEQ ID NO: 151881 - RNA, 1410 nt, Artificial Sequence; identical to SEQ ID NO: 151867
  derived and/or modified CDS sequence (opt3) from neuraminidase__InfluenzaA__AGU92813

SEQ ID NO: 151882 - RNA, 1410 nt, Artificial Sequence; identical to SEQ ID NO: 151867
  derived and/or modified CDS sequence (opt3) from neuraminidase__InfluenzaA__AGU92824

SEQ ID NO: 151883 - RNA, 1410 nt, Artificial Sequence
  derived and/or modified CDS sequence (opt3) from neuraminidase__InfluenzaA__AGU92846
augaaccccaaucagaagaucauuaccauaggcagcgugugcaugacaaucgggauggccaaccugauucuccaaaucggaaauauuaucuccauauggaucucucacucaauucagcuugguaaccagaaucagaucgagacuuguaaccaaagugucauuacguacgaaaauaacaccuggguuaaucagacauaugugaacaucagcaauacuaacuucgcugcaggccaguccguagugucugucaaacuggccgggaauagcucauugugcccugugagcggaugggcgauauacaguaaggacaacuccguuagagugggcucuaaaggugaugucuuugugauuagggagccauucaucagcuguuccccguuagaaugccggaccuuuuuccugacacagggggcucuacucaaugacaagcauucaaacggaaccauuaaagaucgcagucccuaucgaacucugaugagcuguccuaucggcgagguaccaucucccuacaacucccguuuugaaucaguugccuggagcgcaagugccugccacgacggcaucaauuggcuuacaauugggauaucuggaccugauaacggugcuguggcaguccugaaguauaauggcaucauuaccgacacgaucaaguccuggagaaacaauauauugaggacucaagagagcgagugugccugcgugaacgggucguguuucaccgugaugacagauggaccaucuaauggccaggcuuccuacaaaauuuuucggaucgaaaaggguaaaaucgucaagucaguugagaugaacgcccccaauuaucauuacgaagagugcaguuguuacccugacagcuccgagauuacuugcgugugccgcgauaacuggcacgggucuaauagaccauggguaucguucaaccagaaucucgaauaucagaucggauacauuuguucaggcauauuuggcgacaacccgaggcccaaugauaaaaccgggaguugcggaccuguguccagcaacggugcgaacggcgucaagggguucgcauuuaaguauggaaauggcguguggaucggucggacaaaaucuauuucaagucgcaacggguucgagaugaucugggacccaaauggcuggaccggaacggauaacaauuuuagcaucaagcaagacauuguuggcauaaacgaaugguccggguacucuggaucguucauccagcaucccgagcugacuggucuggacuguauucgaccuugcuucuggguggaacucaucagaggcaggccaaaagagaauacaauuuggaccagcggguccucaaucaguuuuuguggagucaacucugauacugugggcuggagcuggcccgacggugccgaguuaccguucacaauagauaaguga

SEQ ID NO: 151884 - RNA, 1410 nt, Artificial Sequence
  derived and/or modified CDS sequence (opt3) from neuraminidase__InfluenzaA__AGU92868
augaaccccaaucagaagaucauuaccauaggcagcgugugcaugacaaucgggauggccaaccugauucuccaaaucggaaauauuaucuccauauggaucucucacucaauucagcuugguaaccagaaucagaucgagacuuguaaccaaagugucauuacguacgaaaauaacaccuggguuaaucagacauaugugaacaucagcaauacuaacuucgcugcaggccaguccguagugucugucaaauuugccggaaauucgucacugugcccugugagcggaugggcgauauacaguaaggacaacuccguuagagugggcucuaaaggugaugucuucgugauuagggagccauuuaucagcuguuccccguuggaaugccggaccuucuuuuuaacacagggggcucugcuaaaugacaagcauucaaacggaaccauuaaagaucgcagucccuaucgaacucucaugagcuguccuaucggcgagguaccaucucccuacaacucccguuucgaaucaguugccuggagcgcaagugccugccacgacggcaucaauuggcugacaauugggauaucuggaccugauaacggugcuguggcaguccuuaaguauaauggcaucauuaccgacacgaucaaguccuggagaaacaauauacugaggacucaagagagcgagugugccugcgugaacgggucguguuuuaccgugaugacagauggaccaucuaauggccaggcuuccuacaaaauuuuccggaucgaaaaggguaaaaucgucaagucaguugagaugaacgcccccaauuaucauuacgaagagugcaguuguuacccugacagcuccgagauuacuugcgugugccgcgauaacuggcacgggucuaauagaccaugggugagcuuuaaccagaauuuggaauaucagaucggauacauuuguucaggcauauucggcgacaacccgaggcccaaugauaaaaccgggaguugcggaccuguauccagcaacggugcgaacggcgucaagggguuuucuuucaaguauggaaauggcguguggaucggucggacaaaaucaauuaguagccgcaacggguuugagaugaucugggacccaaauggcuggaccggaacggauaacaauuucuccaucaagcaagacauuguuggcauaaacgaauggucuggguacucggggagcuucauccagcaucccgagcucacuggucuggacuguauucgaccuugcuuuuggguggaacugaucagaggcaggccaaaagagaauacaauuuggaccuccgggucaaguaucucuuucuguggagucaacagcgauacugugggcugguccuggcccgacggugcagagcucccguuuacaauagauaaguga

SEQ ID NO: 151885 - RNA, 1410 nt, Artificial Sequence
  derived and/or modified CDS sequence (opt3) from neuraminidase__InfluenzaA__AGU92890
augaaccccaaucagaagaucauuaccauaggcagcgugugcaugacaaucgggauggccaaccugauucuccaaaucggaaauauuaucuccauauggaucucucacucaauucagcuugguaaccagaaucagaucgagacuuguaaccaaagugucauuacguacgaaaauaacaccuggguuaaucagacauaugugaacaucagcaauacuaacuucgcugcaggccaguccguagugucugucaaacuggccgggaauagcucauugugcccugugagcggaugggcgauauacaguaaggacaacuccguuagagugggcucuaaaggugaugucuuugugauuagggagccauucaucagcuguuccccguuagaaugccggaccuuuuuccugacacagggggcucuacucaaugacaagcauucaaacggaaccauuaaagaucgcagucccuaucgaacucugaugagcuguccuaucggcgagguaccaucucccuacaacucccguuuugaaucaguugccuggagcgcaagugccugccacgacggcaucaauuggcuuacaauugggauaucuggaccugauaacggugcuguggcaguccugaaguauaauggcaucauuaccgacacgaucaaguccuggagaaacaauauauugaggacucaagagagcgagugugccugcgugaacgggucguguuucaccgugaugacagauggaccaucuaauggccaggcuuccuacaaaauuuuucggaucgaaaaggguaaaaucgucaagucaguugagaugaacgcccccaauuaucauuacgaagagugcaguuguuacccugacagcuccgagauuacuugcgugugccgcgauaacuggcacgggucuaauagaccauggguaucguucaaccagaaucucgaauaucagaucggauacauuuguucaggcauauuuggcgacaacccgaggcccaaugauaaaaccgggaguugcggaccuguguccagcaacggugcgaacggcgucaagggguucucuuuuaaguauggaaauggcguguggaucggucggacaaaaucaauuaguagccgcaacggguucgagaugaucugggacccaaauggcuggaccgaaacggauaacaauuuuuccaucaagcaagacauuguuggaauaaacgaguggucuggcuacucggggagcuucauccagcaucccgaacugacuggacuggacuguauucgaccuugcuucuggguggagcucaucagagguaggccaaaagagaauacaauuuggaccuccggcucaaguaucucuuuuuguggggucaacagcgauacugugggaugguccuggcccgacggcgcagaauuaccguucacaauagauaaguga

SEQ ID NO: 151886 - RNA, 1410 nt, Artificial Sequence; identical to SEQ ID NO: 151867
  derived and/or modified CDS sequence (opt3) from neuraminidase__InfluenzaA__AGU92901

SEQ ID NO: 151887 - RNA, 1410 nt, Artificial Sequence; identical to SEQ ID NO: 151867
  derived and/or modified CDS sequence (opt3) from neuraminidase__InfluenzaA__AGU92912

SEQ ID NO: 151888 - RNA, 1410 nt, Artificial Sequence; identical to SEQ ID NO: 151867
  derived and/or modified CDS sequence (opt3) from neuraminidase__InfluenzaA__AGU92923

SEQ ID NO: 151889 - RNA, 1410 nt, Artificial Sequence; identical to SEQ ID NO: 151870
  derived and/or modified CDS sequence (opt3) from neuraminidase__InfluenzaA__AGU92934

SEQ ID NO: 151890 - RNA, 1410 nt, Artificial Sequence; identical to SEQ ID NO: 151870
  derived and/or modified CDS sequence (opt3) from neuraminidase__InfluenzaA__AGU92945

SEQ ID NO: 151891 - RNA, 1410 nt, Artificial Sequence; identical to SEQ ID NO: 151870
  derived and/or modified CDS sequence (opt3) from neuraminidase__InfluenzaA__AGU92956

SEQ ID NO: 151892 - RNA, 1410 nt, Artificial Sequence; identical to SEQ ID NO: 151867
  derived and/or modified CDS sequence (opt3) from neuraminidase__InfluenzaA__AGU92967

SEQ ID NO: 151893 - RNA, 1410 nt, Artificial Sequence; identical to SEQ ID NO: 151867
  derived and/or modified CDS sequence (opt3) from neuraminidase__InfluenzaA__AGU92978

SEQ ID NO: 151894 - RNA, 1410 nt, Artificial Sequence
  derived and/or modified CDS sequence (opt3) from neuraminidase__InfluenzaA__AGU92989
augaaccccaaucagaagaucauuaccauaggcagcgugugcaugacaaucgggauggccaaccugauucuccaaaucggaaauauuaucuccauauggaucucucacucaauucagcuugguaaccagaaucagaucgagacuuguaaccaaagugucauuacguacgaaaauaacaccuggguuaaucagacauaugugaacaucagcaauacuaacuucgcugcaggccaguccguagugucugucaaacuggccggaaauucgucauugugcccugugagcggaugggcgauauacaguaaggacaacuccguuagagugggcucuaaaggugaugucuuugugauuagggagccauucaucagcuguuccccguuagaaugccggaccuuuuuccugacacagggggcucuacucaaugacaagcauucaaacggaaccauuaaagaucgcagucccuaucgaacucugaugagcuguccuaucggcgagguaccaucucccuacaacucccguuuugaaucaguugccuggagcgcaagugccugccacgacggcaucaauuggcuuacaauugggauaucuggaccugauaacggugcuguggcaguccugaaguauaauggcaucauuaccgacacgaucaaguccuggagaaacaauauauugaggacucaagagagcgagugugccugcgugaacgggucguguuucaccgugaugacagauggaccaucuaauggccaggcuuccuacaaaauuuuucggaucgaaaaggguaaaaucgucaagucaguugagaugaacgcccccaauuaucauuacgaagagugcaguuguuacccugacagcuccgagauuacuugcgugugccgcgauaacuggcacgggucuaauagaccaugggugagcuucaaccagaaucucgaauaucagaucggauacauuuguucaggcauauuuggcgacaacccgaggcccaaugauaaaaccgggaguugcggaccuguauccagcaacggugcgaacggcgucaagggguucucuuuuaaguauggaaauggcguguggaucggucggacaaaaucaauuaguagccgcaacggguucgagaugaucugggacccaaauggcuggaccggaacggauaacaauuuuuccaucaagcaagacauuguuggcauaaacgaauggucuggguacucggggagcuucgugcagcaucccgagcugacuggucuggacuguauccgaccuugcuucugggucgaacucauuagaggcaggccaaaagagaauacaaucuggaccuccgggucaaguauuucuuuuuguggagugaacagcgauacuguaggcugguccuggcccgacggugcagaguuaccguucacaaucgauaaguga

SEQ ID NO: 151895 - RNA, 1410 nt, Artificial Sequence; identical to SEQ ID NO: 151884
  derived and/or modified CDS sequence (opt3) from neuraminidase__InfluenzaA__AGU93000

SEQ ID NO: 151896 - RNA, 1410 nt, Artificial Sequence; identical to SEQ ID NO: 151885
  derived and/or modified CDS sequence (opt3) from neuraminidase__InfluenzaA__AGU93011

SEQ ID NO: 151897 - RNA, 1365 nt, Artificial Sequence; identical to SEQ ID NO: 148438
  derived and/or modified CDS sequence (opt3) from neuraminidase__InfluenzaA__AGU93022

SEQ ID NO: 151898 - RNA, 1410 nt, Artificial Sequence
  derived and/or modified CDS sequence (opt3) from neuraminidase__InfluenzaA__AGU93034
augaaccccacccagaagaucauuacaauaggcagcgugugcaugacuaucgggauggccaaucugauucuccaaaucggaaacauuaucuccauauggaucucucacucaauucagcuugguaaucagaaccagaucgagacguguaaucaaagugucauuaccuacgaaaacaauacauggguuaaccagacuuaugugaauaucagcaacaccaauuucgcugcaggccaguccguagccucugugaaacuggcggggaacucgucauugugcccugucagcggaugggcuauauacaguaaggacaauuccauuagaaucggcucuaaaggugauguguuuguuauuagggagccauucaucagcuguuccccguuagaaugccggacauuuuuccugacccagggggcccuacucaacgacaagcauucaaauggaacuaucaaagaucgcagucccuaucgaacacugaugagcuguccuauuggcgaggugccaucucccuacaacucccguuuugaaucagucgcauggagcgccagugcuugccacgacggcauaaacuggcuuaccaucgggauuucuggaccugauaauggugcaguggccguacugaaguauaacggcaucauaacggacacuauuaaguccuggagaaauaacaucuugaggacccaagagagcgagugugcuugcguuaaugggucguguuucacaaucaugacugauggaccaucugacggccaggccuccuacaaaauuuuucggaucgaaaaggguaaaauugugaagucagucgagaugaacgcgcccaauuaucauuacgaagagugcaguuguuacccugauagcuccgagauaaccugcgugugccgcgacaacuggcacgggucuaauagaccaugggugagcuucaaccagaaucucgaauaucagaucggauacauuuguucaggcaucuuuggcgauaacccgaggcccaaugacaaaacagggaguugcggaccugucuccagcaacggugcaaauggcguuaagggguucucuuuuaaguauggaaacggcguguggaucggucggaccaaaucaauuaguagccgcaagggguucgagaugauaugggauccaaacggcuggacgggaacugacaauaacuuuuccaucaaacaagacauuguaggcaucaaugaauggucuggguacucggguagcuucgugcagcaucccgagcugacaggacuggauuguauucgaccuugcuucugggucgaacucaucagaggcaggccaaaggagaacaccauauggacuuccgggucaaguaucucuuuuuguggagugaauagcgacacaguuggcugguccuggcccgauggugccgaguuaccguucaccauugacaaauga

SEQ ID NO: 151899 - RNA, 1410 nt, Artificial Sequence; identical to SEQ ID NO: 151206
  derived and/or modified CDS sequence (opt3) from neuraminidase__InfluenzaA__AGU93045

SEQ ID NO: 151900 - RNA, 1410 nt, Artificial Sequence; identical to SEQ ID NO: 151867
  derived and/or modified CDS sequence (opt3) from neuraminidase__InfluenzaA__AGU93056

SEQ ID NO: 151901 - RNA, 1410 nt, Artificial Sequence; identical to SEQ ID NO: 150194
  derived and/or modified CDS sequence (opt3) from neuraminidase__InfluenzaA__AGV98980

SEQ ID NO: 151902 - RNA, 1410 nt, Artificial Sequence; identical to SEQ ID NO: 150194
  derived and/or modified CDS sequence (opt3) from neuraminidase__InfluenzaA__AGV98993

SEQ ID NO: 151903 - RNA, 1410 nt, Artificial Sequence; identical to SEQ ID NO: 150194
  derived and/or modified CDS sequence (opt3) from neuraminidase__InfluenzaA__AGV99005

SEQ ID NO: 151904 - RNA, 1410 nt, Artificial Sequence; identical to SEQ ID NO: 150194
  derived and/or modified CDS sequence (opt3) from neuraminidase__InfluenzaA__AGV99017

SEQ ID NO: 151905 - RNA, 1410 nt, Artificial Sequence; identical to SEQ ID NO: 150194
  derived and/or modified CDS sequence (opt3) from neuraminidase__InfluenzaA__AGV99040

SEQ ID NO: 151906 - RNA, 1410 nt, Artificial Sequence
  derived and/or modified CDS sequence (opt3) from neuraminidase__InfluenzaA__AGV99052
augaaccccaaucagaagaucauuaccauaggcagcgugucccugacaaucucuacuauuugcuucuuuaugcagaucgccauucucaucacgaccgucacacuucacuucaaacaguacgaguuuaacucaccuccaaauaaccagguuaugcugugugaaccgacuauaaucgagagaaauauuaccgaaaucguguauuugacaaacaccacuauugagaaggaaaucugccccaaaccugcugaguacaggaauuggaguaagccacagugugggauaacaggauucgcacccuuuagcaaagacaacuccauucgguuaucugccgguggcgauaucuggguaacccgcgagccuuaugugucgugcgacccagauaaguguuaccaauucgcgcuggggcagggaacgacucuaaauaacguccauucaaauaacaccgugcgagaccguacacccuauagaacucuccugaugaaugaacuuggcguuccuuuucaccuggguaccaaacaggugugcauugcuuggagcaguuccucuugucaugaugggaaggccugguugcacgucugcaucacaggagacgauaagaacgcaaccgccagcuucaucuacaauggcaggcucguggacuccguaguuucauggaguaaagagauucugcggacgcaggaaagcgagugugugugcauaaacggcacuuguacagucgugaugaccgaugggucugcuuccggaaaggcagacacuaaaauccuguuuauugaggaagguaagaucgugcauacaucaacccucagcggcagugcccaacacgucgaggaaugcucuugcuauccacgcuacccggggguuagaugugugugcagggauaacuggaagggauccaaucggcccauaguagacauuaacaucaaagaucacagcgugaucucgucuuacgucuguuccggcuuagugggugacacgccucgcaagaaugacucaaguagcuccucucauugccuggauccaaacaaugaggaagggggacacggcguuaaaggcugggcuuucgacgaugggaacgacguguggaugggacgaaccauuaaugagacaagcagacuugguuaugagacuuuuaaggucaucgaaggcuggucaaaccccaaaaguaaguugcagauuaauaggcaagugauaguagaucguggggaccgguccggauacagcggcaucuucucuguugaggguaaaucauguauuaaccgcugcuuuuauguggaacugaucagagggaggaaggaggaaaccgagguccuauggacaaguaauagcaucguggucuucuguggcacuuccggaaccuacggcacagggucuuggccugauggagccgaccucaaccugaugccaauuuga

SEQ ID NO: 151907 - RNA, 1410 nt, Artificial Sequence
  derived and/or modified CDS sequence (opt3) from neuraminidase__InfluenzaA__AGV99100
augaaccccaaucagaagaucauuaccauaggcagcgugucccugacaaucucuacuauuugcuucuuuaugcagaucgccauucucaucacgaccgucacacuucacuucaaacaguacgaguuuaacucaccuccaaauaaccagguuaugcugugugaaccgacuauaaucgagagaaauauuaccgaaaucguguauuugacaaacaccacuauugagaaggaaaucugccccaaaccugcugaguacaggaauuggaguaagccacagugugggauaacaggauucgcacccuuuagcaaagacaacuccauucgguuaucugccgguggcgauaucuggguaacccgcgagccuuaugugucgugcgacccagauaaguguuaccaauucgcgcuggggcagggaacgacucuaaauaacguccauucaaauaacaccgugcgagaccguacacccuauagaacucuccugaugaaugaacuuggcguuccuuuucaccuggguaccaaacaggugugcauugcuuggagcaguuccucuugucaugaugggaaggccugguugcacgucugcaucacaggagacgauaagaacgcaaccgccagcuucaucuacaauggcaggcucguggacuccguaguuucauggaguaaagagauucugcggacgcaggaaagcgagugugugugcauaaacggcacuuguacagucgugaugaccgaugggucugcuuccggaaaggcagacacuaaaauccuguuuauugaggaagguaagaucgugcauacaucaacccucagcggcagugcccaacacgucgaggaaugcucuugcuauccacgcuacccggggguuagaugugugugcagggauaacuggaagggauccaaucggcccauaguagacauuaacaucaaagaucacagcaucgugucgucuuacgucuguuccggcuuagugggugacacgccucgcaagaaugacucaaguagcuccucucauugccuggauccaaacaaugaggaagggggacacggcguuaaaggcugggcuuucgacgaugggaacgacguguggaugggacgaaccauuaaugagacaagcagacuugguuaugagacuuuuaaggucaucgaaggcuggucaaaccccaaaaguaaguugcagauuaauaggcaagugauaguagaucguggggaccgguccggauacagcggcaucuucucuguugaggguaaaucaugugugaaccgcugcuuuuaugucgaacugauuagagggaggaaggaggaaaccgaggugcuauggacaaguaauagcaucgucguguucuguggcacuuccggaaccuacggcacagggucuuggccugauggagccgaccucaaccugaugccaaucuga

SEQ ID NO: 151908 - RNA, 1410 nt, Artificial Sequence; identical to SEQ ID NO: 150194
  derived and/or modified CDS sequence (opt3) from neuraminidase__InfluenzaA__AGV99112

SEQ ID NO: 151909 - RNA, 1410 nt, Artificial Sequence; identical to SEQ ID NO: 150194
  derived and/or modified CDS sequence (opt3) from neuraminidase__InfluenzaA__AGV99124

SEQ ID NO: 151910 - RNA, 1410 nt, Artificial Sequence; identical to SEQ ID NO: 150194
  derived and/or modified CDS sequence (opt3) from neuraminidase__InfluenzaA__AGV99136

SEQ ID NO: 151911 - RNA, 1410 nt, Artificial Sequence; identical to SEQ ID NO: 150194
  derived and/or modified CDS sequence (opt3) from neuraminidase__InfluenzaA__AGV99148

SEQ ID NO: 151912 - RNA, 1410 nt, Artificial Sequence; identical to SEQ ID NO: 150194
  derived and/or modified CDS sequence (opt3) from neuraminidase__InfluenzaA__AGV99160

SEQ ID NO: 151913 - RNA, 1410 nt, Artificial Sequence; identical to SEQ ID NO: 150194
  derived and/or modified CDS sequence (opt3) from neuraminidase__InfluenzaA__AGV99172

SEQ ID NO: 151914 - RNA, 1410 nt, Artificial Sequence; identical to SEQ ID NO: 150194
  derived and/or modified CDS sequence (opt3) from neuraminidase__InfluenzaA__AGV99196

SEQ ID NO: 151915 - RNA, 1410 nt, Artificial Sequence; identical to SEQ ID NO: 150194
  derived and/or modified CDS sequence (opt3) from neuraminidase__InfluenzaA__AGV99208

SEQ ID NO: 151916 - RNA, 1410 nt, Artificial Sequence; identical to SEQ ID NO: 150194
  derived and/or modified CDS sequence (opt3) from neuraminidase__InfluenzaA__AGV99959

SEQ ID NO: 151917 - RNA, 1410 nt, Artificial Sequence; identical to SEQ ID NO: 151405
  derived and/or modified CDS sequence (opt3) from neuraminidase__InfluenzaA__AGW00005

SEQ ID NO: 151918 - RNA, 1410 nt, Artificial Sequence; identical to SEQ ID NO: 150194
  derived and/or modified CDS sequence (opt3) from neuraminidase__InfluenzaA__AGW00068

SEQ ID NO: 151919 - RNA, 1410 nt, Artificial Sequence
  derived and/or modified CDS sequence (opt3) from neuraminidase__InfluenzaA__AGW00080
augaaccccaaucagaagaucauuaccauaggcagcgugucccugacaaucucuacuauuugcuucuuuaugcagaucgccauucucaucacgaccgucacacuucacuucaaacaguacgaguuugacucaccuccaaacaaucagguuaugcugugugaaccgacuauaaucgagagaaacauuaccgaaaucguguauuugacaaauaccacuauugagaaggaaaucugccccaaaccugcugaguacaggaacuggaguaagccacagugugggauaacaggauucgcacccuuuagcaaagauaauuccauucgguuaucugccgguggcgacaucuggguaacccgcgagccuuaugugucgugcgauccagacaaguguuaccaauucgcgcuggggcagggaacgacucuaaacaauguccauucaaacaauaccgugcgagaucguacacccuauagaacucuccugaugaacgaacuuggcguuccuuuucaccuggguaccaaacaggugugcauugcuuggagcaguuccucuugucaugacgggaaggccugguugcacgucugcaucacaggagaugacaagaaugcaaccgccagcuucaucuacaacggcaggcucguggauuccguaguuucauggaguaaagagauucugcggacgcaggaaagcgagugugugugcauaaauggcacuuguacagucgugaugaccgacgggucugcuuccggaaaggcagauacuaaaauccuguuuauugaggaagguaagaucgugcauacaucaacccucagcggcagugcccaacacgucgaggaaugcucuugcuauccacgcuacccggggguuagaugugugugcagggacaacuggaagggauccaaccggcccauaguagauauuaauaucaaagaccacagcaucgugucgucuuacgucuguuccggcuuagugggugacacgccucgcaagaacgauucaaguagcuccucucauugccuggacccaaauaacgaggaagggggacacggcguuaaaggcugggcuuucgaugacgggaaugauguguggaugggacgaaccauuaacgagacaagcagacuugguuaugagacuuuuaaggucaucgaaggcuggucaaaucccaaaaguaaguugcagauuaacaggcaagugauaguagaccguggggaucgguccggauacagcggcaucuucucuguugaggguaaaucauguauuaaucgcugcuuuuauguggaacugaucagagggaggaaggaggaaaccgagguccuauggacaaguaacagcaucguggucuucuguggcacuuccggaaccuacggcacagggucuuggccugacggagccgaucucaaucugaugccaauuuga

SEQ ID NO: 151920 - RNA, 1410 nt, Artificial Sequence
  derived and/or modified CDS sequence (opt3) from neuraminidase__InfluenzaA__AGW00104
augaaccccaaucagaagaucauuaccauaggcagcgugucccugacaaucucuacuauuugcuucuuuaugcagaucgccauucucaucacgaccgucacacuucacuucaaacaguacgaguuuaacucaccuccaaauaaccagguuaugcugugugaaccgacuauaaucgagagaaauauuaccgaaaucguguauuugacaaacaccacuauugagaaggaaaucugccccaaaccugcugaguacaggaauuggaguaagccacagugugggauaacaggauucgcacccuuuagcaaagacaacuccauucgguuaucugccgguggcgauaucuggguaacccgcgagccuuaugugucgugcgacccagauaaguguuaccaauucgcgcuggggcagggaacgacucuaaauaacguccauucaaauaacaccgugcgagaccguacacccuauagaacucuccugaugaaugaacuuggcguuccuuuucaccuggguaccaaacaggugugcauugcuuggagcaguuccucuugucaugaugggaaggccugguugcacgucugcaucacaggagacgauaagaacgcaaccgccagcuucaucuacaauggcaggcucguggacuccguaguuucauggaguaaagagauucugcggacgcaggaaagcgagugugugugcauaaacggcacuuguacagucgugaugaccgaugggucugcuuccggagaggcagacacuaagauccuguuuauugaagaggguaaaaucgugcauacaucaacccucagcggcagugcccaacacgucgaagagugcucuugcuauccacgcuacccggggguuagaugugugugcagggauaacuggaagggauccaaucggcccauaguagacauuaacaucaaggaucacagcaucgugucgucuuacgucuguuccggcuuagugggugacacgccucgcaaaaaugacucaaguagcuccucucauugccuggauccaaacaaugaagaagggggacacggcguuaagggcugggcuuucgacgaugggaacgacguguggaugggacgaaccauuaaugagacaagcagacuugguuaugagacuuuuaaagucaucgagggcuggucaaaccccaagaguaaauugcagauuaauaggcaagugauaguagaucguggggaccgguccggauacagcggcaucuucucuguugaagguaagucauguauuaaccgcugcuuuuauguggagcugaucagagggaggaaagaagagaccgagguccuauggacaaguaauagcaucguggucuucuguggcacuuccggaaccuacggcacagggucuuggccugauggagccgaccucaaccugaugccaauuuga

SEQ ID NO: 151921 - RNA, 1410 nt, Artificial Sequence; identical to SEQ ID NO: 151919
  derived and/or modified CDS sequence (opt3) from neuraminidase__InfluenzaA__AGW00116

SEQ ID NO: 151922 - RNA, 1410 nt, Artificial Sequence; identical to SEQ ID NO: 151919
  derived and/or modified CDS sequence (opt3) from neuraminidase__InfluenzaA__AGW00128

SEQ ID NO: 151923 - RNA, 1410 nt, Artificial Sequence; identical to SEQ ID NO: 150194
  derived and/or modified CDS sequence (opt3) from neuraminidase__InfluenzaA__AGW00140

SEQ ID NO: 151924 - RNA, 1410 nt, Artificial Sequence; identical to SEQ ID NO: 150194
  derived and/or modified CDS sequence (opt3) from neuraminidase__InfluenzaA__AGW00152

SEQ ID NO: 151925 - RNA, 1410 nt, Artificial Sequence; identical to SEQ ID NO: 151919
  derived and/or modified CDS sequence (opt3) from neuraminidase__InfluenzaA__AGW00164

SEQ ID NO: 151926 - RNA, 1410 nt, Artificial Sequence; identical to SEQ ID NO: 150194
  derived and/or modified CDS sequence (opt3) from neuraminidase__InfluenzaA__AGW00176

SEQ ID NO: 151927 - RNA, 1410 nt, Artificial Sequence; identical to SEQ ID NO: 150194
  derived and/or modified CDS sequence (opt3) from neuraminidase__InfluenzaA__AGW00188

SEQ ID NO: 151928 - RNA, 1410 nt, Artificial Sequence; identical to SEQ ID NO: 150194
  derived and/or modified CDS sequence (opt3) from neuraminidase__InfluenzaA__AGW00712

SEQ ID NO: 151929 - RNA, 1410 nt, Artificial Sequence; identical to SEQ ID NO: 150194
  derived and/or modified CDS sequence (opt3) from neuraminidase__InfluenzaA__AGW00724

SEQ ID NO: 151930 - RNA, 1410 nt, Artificial Sequence
  derived and/or modified CDS sequence (opt3) from neuraminidase__InfluenzaA__AGW00736
augaaccccaaucagaagaucauuaccauaggcagcgugucccugacaaucucuacuauuugcuucuuuaugcaaaucgccauucucaucacgaccgucacacuucacuucaaacaguacgaguuuaacucaccuccaaauaaccagaugaugcugugugaaccgacuauaaucgagagaaauauuaccgaaaucguuuauuugacaaacaccacuauugagaaggaaaucugccccaaaccugcugaguacaggaauuggaguaagccacagugugggauaacaggauucgcacccuuuagcaaagacaacuccauucgguuaucugccgguggcgauaucugggugacccgcgagccuuauguaucgugcgacccagauaaguguuaccaauucgcgcuggggcagggaacgacucuaaauaacgugcauucaaauaacaccguccgagaccguacacccuauagaacucuccugaugaaugaacuuggcgugccuuuucaccuggguaccaagcagguuugcauugcuuggagcaguuccucuugucaugaugggaaagccugguugcacgugugcaucacaggagacgauaagaacgcaaccgccagcuucaucuacaauggcaggcucgucgacuccgugguaucauggaguaaagagauucugcggacgcaggaaagcgaguguguuugcauaaacggcacuuguacaguggucaugaccgaugggucugcuuccggaaaggcagacacuaaaauccuguuuauugaggaagguaagaucgugcauacaucaacccucagcggcagugcccaacacguggaggaaugcucuugcuauccacgcuacccgggggucagauguguuugcagggauaacuggaagggauccaaucggcccauaguggacauuaacaucaaagaucacagcaucguaucgucuuacguguguuccggcuuagucggugacacgccucgcaagaaugacucaaguagcuccucucauugccuggauccaaacaaugaggaagggggacacggcgugaaaggcugggcuuucgacgaugggaacgacguuuggaugggacgaaccauuaaugagacaagcagacuugguuaugagacuuuuaaggugaucgaaggcuggucagaucccaaaaguaaguugcagauuaacaggcaggucauaguggaccguggggaucgguccggauacagcggcaucuucucuguagaggguaaaucauguauuaaucgcugcuuuuauguugaacugaucagagggaggaaggaggaaaccgaggugcuauggacaaguaacagcaucgucguguucuguggcacuuccggaaccuacggcacagggucuuggccugacggagccgaucucaaucugaugccaauuuga

SEQ ID NO: 151931 - RNA, 1410 nt, Artificial Sequence
  derived and/or modified CDS sequence (opt3) from neuraminidase__InfluenzaA__AGW00748
augaaccccaaucagaagaucauuaccauaggcagcgugucccugacaaucucuacuauuugcuucuuuaugcaaaucgccauucucaucacgaccgucacacuucacuucaaacaguacgaguuuaacucaccuccaaauaaccagguuaugcugugugaaccgacuauaaucgagagaaauauuaccgaaaucguguauuugacaaacaccacuauugagaaggaaaucugccccaaaccugcugaguacaggaauuggaguaagccacagugugggauaacaggauucgcacccuuuagcaaagacaacuccauucgguuaucugccgguggcgauaucuggguaacccgcgagccuuaugugucgugcgacccagauaaguguuaccaauucgcgcuggggcagggaacgacucuaaauaacaugcauucaaauaacaccguccgagaccguacacccuauagaacucuccugaugaaugaacuuggcgugccuuuucaccuggguaccaagcagguuugcauugcuuggagcaguuccucuugucaugaugggaaagccugguugcacgugugcaucacaggagacgauaagaacgcaaccgccagcuucaucuacaauggcaggcucgucgacuccgugguaucauggaguaaagagauucugcggacgcaggaaagcgaguguguuugcauaaacggcacuuguacaguggucaugaccgaugggucugcuuccggaaaggcagacacuaaaauccuguuuauugaggaagguaagaucgugcauacaucaacccucagcggcagugcccaacacguggaggaaugcucuugcuauccacgcuacccgggggucagauguguuugcagggauaacuggaagggauccaaucggcccauaguggacauuaacaucaaagaucacagcaucguaucgucuuacguguguuccggcuuagucggugacacgccucgcaagaaugacucaaguagcuccucucauugccuggauccaaacaaugaggaagggggacacggcgugaaaggcugggcuuucgacgaugggaacgacguuuggaugggacgaaccauuaaugagacaagcagacuugguuaugagacuuuuaaggugaucgaaggcuggucaaaccccaaaaguaaguugcagauuaauaggcaggucauaguggaucguggggaccgguccggauacagcggcaucuucucuguagaggguaaaucauguauuaaccgcugcuuuuauguugaacugaucagagggaggaaggaggaaaccgaggugcuauggacaaguaauagcaucgucguguucuguggcacuuccggaaccuacggcacagggucuuggccugauggagccgaccucaaccugaugccaauuuga

SEQ ID NO: 151932 - RNA, 1410 nt, Artificial Sequence
  derived and/or modified CDS sequence (opt3) from neuraminidase__InfluenzaA__AGW00760
augaaccccaaucagaagaucauuaccauaggcagcgugucccugacaaucucuacuauuugcuucuuuaugcagaucgccauucucaucacgaccgucacacuucacuucaaacaguacgaguuuaacucaccuccaaauaaccagguuaugcugugugaaccgacuauaaucgagagaaauauuaccgaaaucguguauuugacaaacaccacuauugagaaggaaaucugccccaaaccugcugaguacaggaauuggaguaagccacagugugggauaacaggauucgcacccuuuagcaaagacaacuccauucgguuaucugccgguggcgauaucuggguaacccgcgagccuuaugugucgugcgacccagauaaguguuaccaauucgcgcuggggcagggaacgacucuaaauaacguccauucaaauaacaccgugcgagaccguacacccuauagaacucuccugaugaaugaacuuggcguuccuuuucaccuggguaccaaacaggugugcauugcuuggagcaguuccucuugucaugaugggaaggccugguugcacgucugcaucacaggagacgauaagaacgcaaccgccagcuucaucuacaauggcaggcucguggacuccguaguuucauggaguaaagagauucugcggacgcaggaaagcgagugugugugcauaaacggcacuuguacagucgugaugaccgaugggucugcuuccggaaaggcagacacuaaaauccuguuuauugaggaagguaagaucgugcauacaucaacccucagcggcagugcccaacacgucgaggaaugcucuugcuauccacgcuacccggggguuagaugugugugcagggauaacuggaagggauccaaucggcccauaguagacauuaacaucaaagaucacagcaucgugucgucuuacgucuguuccggcuuagugggugacacgccucgcaagaaugacucaaguagcuccucucauugccuggauccaaacaaugaggaagggggacacggcguuaaaggcugggcuuucgacgaugggaacgacguguggaugggacgaaccauuaaugagacaagcagacuugguuaugagacuuuuaaggucaucgaaggcuggucaaaccccaaaaguaaguugcaagugaauaggcagguaauuguugaucguggggaccgguccggauacagcggcauauucucuguggaggguaaaucauguaucaaccgcugcuuuuaugucgaacugauuagagggaggaaggaggaaaccgaggugcuauggacaaguaauagcaucgucguguucuguggcacuuccggaaccuacggcacagggucuuggccugauggagccgaccucaaccugaugccaaucuga

SEQ ID NO: 151933 - RNA, 1410 nt, Artificial Sequence; identical to SEQ ID NO: 150194
  derived and/or modified CDS sequence (opt3) from neuraminidase__InfluenzaA__AGW00784

SEQ ID NO: 151934 - RNA, 1410 nt, Artificial Sequence; identical to SEQ ID NO: 150194
  derived and/or modified CDS sequence (opt3) from neuraminidase__InfluenzaA__AGW00796

SEQ ID NO: 151935 - RNA, 1410 nt, Artificial Sequence; identical to SEQ ID NO: 151919
  derived and/or modified CDS sequence (opt3) from neuraminidase__InfluenzaA__AGW00808

SEQ ID NO: 151936 - RNA, 1410 nt, Artificial Sequence; identical to SEQ ID NO: 151423
  derived and/or modified CDS sequence (opt3) from neuraminidase__InfluenzaA__AGW00820

SEQ ID NO: 151937 - RNA, 1410 nt, Artificial Sequence; identical to SEQ ID NO: 150194
  derived and/or modified CDS sequence (opt3) from neuraminidase__InfluenzaA__AGW00832

SEQ ID NO: 151938 - RNA, 1410 nt, Artificial Sequence
  derived and/or modified CDS sequence (opt3) from neuraminidase__InfluenzaA__AGW00844
augaaccccaaucagaagaucauuaccauaggcagcgugucccugacaaucucuacuauuugcuucuuuaugcagaucgccauucucaucacgaccgucacacuucacuucaaacaguacgaguuuaacuucccuccaaauaaccagguuaugcugugugaaccgacuauaaucgagagaaauauuaccgaaaucguguauuugacaaacaccacuauugagaaggaaaucugccccaaaccugcugaguacaggaauuggucaaagccacagugugggauaacaggauuugcacccuucaguaaagacaacagcauucgguuauccgccgguggcgauaucuggguaacccgcgagccuuaugugucuugcgacccagauaaguguuaccaauuugcgcuggggcagggaacgacucuaaauaacguccauucgaauaacaccgugcgagaccguacacccuauagaacucuccugaugaaugaacuuggcguuccuuuccaccuggguaccaaacaggugugcauugcuuggucaagcaguuccugucaugaugggaaggccugguugcacgucugcaucacaggagacgauaagaacgcaaccgccucuuuuaucuacaauggcaggcucguggacagcguaguuuccuggucaaaagagauucugcggacgcaggaaagugagugugugugcauaaacggcacuuguacagucgugaugaccgaugggagcgcuucuggaaaggcagacacuaaaauccuguucauugaggaagguaagaucgugcauacauccacccucucaggcagcgcccaacacgucgaggaaugcaguugcuauccacgcuacccggggguuagaugugugugcagggauaacuggaagggaucuaaucggcccauaguagacauuaacaucaaagaucacuccaucgugagcucguacgucuguucuggcuuagugggugacacgccucgcaagaaugacuccucaaguagcucccauugccuggauccaaacaaugaggaagggggacacggcguuaaaggcugggcuuuugacgaugggaacgacguguggaugggacgaaccauuaaugagacaucuagacuugguuaugagacuuucaaggucaucgaaggcuggagcaaccccaaaucaaaguugcagauuaauaggcaagugauaguagaucguggggaccggaguggauacuccggcaucuuuagcguugaggguaaaucuuguauuaaccgcugcuucuauguggaacugaucagagggaggaaggaggaaaccgagguccuauggacaucaaauaguaucguggucuucuguggcacuagcggaaccuacggcacaggguccuggccugauggagccgaccucaaccugaugccaauuuga

SEQ ID NO: 151939 - RNA, 1410 nt, Artificial Sequence; identical to SEQ ID NO: 151931
  derived and/or modified CDS sequence (opt3) from neuraminidase__InfluenzaA__AGW00868

SEQ ID NO: 151940 - RNA, 1410 nt, Artificial Sequence
  derived and/or modified CDS sequence (opt3) from neuraminidase__InfluenzaA__AGW00880
augaaccccaaucagaagaucauuaccauaggcagcgugucccugacaaucucuacuauuugcuucuuuaugcaaaucgccauucucaucacgaccgucacacuucacuucaaacaguacgaguuuaacucaccuccaaauaaccagguuaugcugugugaaccgacuauaaucgagagaaauauuaccgaaaucguguauuugacaaacaccacuauugagaaggaaaucugccccaaaccugcugaguacaggaauuggaguaagccacagugugacauaacaggguucgcacccuuuagcaaagauaacuccauucgguuaucugccggaggugacguaugggugacccgcgagccuuaugucucgugcgauccagacaaguguuaccaauucgcgcugggccaggggacgacucuaaauaacgugcauucaaauaacaccguucgagaucguacacccuauagaacucuccugaugaaugaacuuggagugccuuuucaccugggcaccaagcaggucugcaucgcuuggagcaguuccucuugucaugacgguaaagccugguugcacgugugcauuacaggggaugacaagaacgcaaccgccagcuucaucuacaauggaaaacucguagauuccguugugucauggaguaaggagauccugaggacgcaggaaagcgagugugucugcauuaacggcacuuguacaguggugaugaccgacggcucugcuuccgggaaagcagauacuaagauacuguuuaucgaggaaggaaagauuguccauacaucaacccucagcgguagugcccaacacguugaggaaugcucuugcuauccacgguacccggacgugcgcuguguaugcagagauaacuggaaaggcuccaauaggcccaucguggacauaaacauuaaggaccacagcaucgucucgcgguacguguguucuggguuaguuggagauacgccucgcaaaaaugacuccucaaguagcucccauugccuggauccaaacaaugaggaaggcggucacggggugaagggaugggcuuucgacgauggcaacgacgucuggaugggccgaaccaucaaugagacaucuagacuuggguaugagacuuuuaaagugauugaaggauggagcaaccccaagucaaaauugcagaucaauaggcagguaauuguugaucggggugaccguaguggcuacuccgggauauucagcguggagggaaagucuuguaucaaccgcugcuuuuaugucgaacugauuagaggcaggaaggaggaaaccgaggugcuauggacaucaaauaguaucgucguguucugugguacuagcgggaccuacggcacaggauccuggccugauggcgccgaccucaaccugaugccaaucuga

SEQ ID NO: 151941 - RNA, 1410 nt, Artificial Sequence
  derived and/or modified CDS sequence (opt3) from neuraminidase__InfluenzaA__AGW00892
augaaccccaaucagaagaucauuaccauaggcagcgugucccugacaaucucuacuauuugcuucuuuaugcagaucgccauucucaucacgaccgucacacuucacuucaaacaguacgaguuuaacccuccaccgaauaaccagguuaugcugugugaacccacuauaaucgagagaaauauuaccgaaaucguguauuugacaaacaccacuauugagaaggaaaucugcccuaaaccagcugaguacaggaauuggucaaagccccagugugggauaacaggauucgcaccuuuuaguaaagacaacagcauucgguuauccgccgguggcgauaucuggguaacccgcgagccauaugugucuugcgaccccgauaaguguuaccaauucgcgcuggggcagggaacgacucuaaauaacguccauucgaauaacaccgugcgagaccguacaccuuauagaacucuccugaugaaugaacuuggcguuccauuucaccuggguaccaaacaggugugcauugcuuggucaagcaguuccugucaugaugggaaggccugguugcacgucugcaucacaggagacgauaagaacgcaaccgccucuuucaucuacaauggcaggcucguggacagcguaguuuccuggucaaaagagauucugcggacgcaggaaagugagugugugugcauaaacggcacuuguacagucgugaugaccgaugggagcgcuucuggaaaggcagacacuaaaauccuguuuauugaggaagguaagaucgugcauacauccacccucucaggcagcgcccaacacgucgaggaaugcaguugcuauccgcgcuaccccgggguuagaugugugugcagggauaacuggaagggaucuaaucggccuauaguagacauuaacaucaaagaucacuccaucgugagcucguacgucuguucuggcuuagugggugacacgccacgcaagaaugacuccucaaguagcucccauugccuggaucccaacaaugaggaagggggacacggcguuaaaggcugggcuuucgacgaugggaacgacguguggaugggacgaaccauuaaugagacaucuagacuugguuaugagacuuuuaaggucaucgaaggcuggagcaacccuaaaucaaaguugcagaugaauaggcaagugauuguagaucguggggaccggaguggauacuccggcauauucagcguugaggguaaaucuuguaucaaccgcugcuuuuauguggaacugauuagagggaggaaggaggaaaccgagguccuauggacaucaaauaguaucguggucuucuguggcacuagcggaaccuacggcacaggguccuggccagauggagccgaccucaaccugaugcccaucuga

SEQ ID NO: 151942 - RNA, 1410 nt, Artificial Sequence
  derived and/or modified CDS sequence (opt3) from neuraminidase__InfluenzaA__AGW00904
augaaccccaaucagaagaucauuaccauaggcagcgugucccugacaaucucuacuauuugcuucuuuaugcaaaucgccauucucaucacgaccgucacacuucacuucaaacaguacgaguuuaacucaccuccaaauaaccagguuaugcugugugaaccgacuauaaucgagagaaauauuaccgaaaucguguauuugacaaacaccacuauugagaaggaaaucugccccaaaccugcugaguacaggaauuggaguaagccacagugugggauaacaggauucgcacccuuuagcaaagacaacuccauucgguuaucugccgguggcgauaucuggguaacccgcgagccuuaugugucgugcgggccagacaaguguuaccaauucgcgcugggacagggcacgacucuaaauaacaugcauucaaauaacaccguccgagaucguacacccuauagaacucuccugaugaaugaacuuggugugccuuuucaccuggggaccaagcagguuugcauugcuuggagcaguuccucuugucaugacggaaaagccugguugcacgugugcaucacaggcgaugacaagaacgcaaccgccagcuucaucuacaauggcaggcucgucgauuccgugguaucauggaguaaagagauucugcggacgcaggaaagcgaguguguuugcauaaacgggacuuguacaguggucaugaccgacggaucugcuuccgguaaggcagauacuaaaauccuguuuauugaggaaggcaagaucgugcauacaucaacccucagcgggagugcccaacacguggaggaaugcucuugcuauccacgcuacccgggagucagauguguuugcagggacaacuggaagggcuccaaucggcccauaguggauauuaacaucaaagaccacagcaucguaucgucuuacguguguuccgguuuagucggggauacgccucgcaagaaugacucaaguagcuccucucauugccuggacccaaacaaugaggaaggaggccacggcgugaaagggugggcuuucgaugacggaaacgauguuuggaugggucgaaccauuaaugagacaagcagacuuggcuaugagacuuuuaaggugaucgaaggguggucaaaccccaaaaguaaguugcagauuaauaggcaggucauaguggaccggggagaucguuccggcuacagcgguaucuucucuguagaggggaaaucauguauuaaccgcugcuuuuauguugaacugaucagaggcaggaaggaggaaaccgaggugcuauggacaaguaauagcaucgucguguucuguggaacuuccggcaccuacgggacaggaucuuggccugacggugccgaucucaaccugaugccaauuuga

SEQ ID NO: 151943 - RNA, 1410 nt, Artificial Sequence
  derived and/or modified CDS sequence (opt3) from neuraminidase__InfluenzaA__AGW00916
augaaccccaaucagaagaucauuaccauaggcagcgugucccugacaaucucuacuauuugcuucuuuaugcaaaucgccauucucaucacgaccgucacacuucacuucaaacaguacgaguuuaacucaccuccaaauaaccagguuaugcugugugaaccgacuauaaucgagagaaauauuaccgaaaucguguauuugacaaacaccacuauugagaaggaaaucugccccaaaccugcugaguacaggaauuggaguaagccacagugugggauaacaggauucgcacccuuuagcaaagacaacuccauucgguuaucugccgguggcgauaucuggguaacccgcgagccuuaugugucgugcgacccagauaaguguuaccaauucgcgcuggggcagggaacgacucuaaauaacaugcauucaaauaacaccgucugcgaccgaacacccuaucguacucuccugaugaaugaacuuggcgugccuuuucaccuggguaccaagcagguuuguauugcuuggagcaguuccucuugccaugaugggaaagccugguugcacguguguaucacaggagacgauaagaacgcaaccgccagcuucaucuacaauggcagacucgucgacuccgugguaucauggaguaaagagauucugaggacgcaggaaagcgagugcguuuguauaaacggcacuugcacaguggucaugaccgaugggucugcuuccggaaaggcagacacuaaaauccuguuuauugaggaagguaagaucgugcauacaucaacccucagcggcagugcccaacacguggaggaaugcucuuguuauccacgguacccggggguccgcugcguuuguagagauaacuggaagggauccaauaggcccauaguggacauuaacaucaaagaucacagcaucguaucgucuuacgugugcuccggcuuagucggugacacgccucggaagaaugacucaaguagcuccucucauugucuggauccaaacaaugaggaagggggacacggcgugaaaggcugggcuuucgacgaugggaacgacguuuggaugggacgcaccauuaaugagacaagccgacuugguuaugagacuuuuaaggugaucgaaggcuggucaaaccccaaaaguaaguugcagauuaauagacaggucauaguggauaggggagaccgguccggguacagcggcaucuucucuguagaggguaaaucaugcauuaaccguuguuuuuauguugaacugauccgcgggagaaaggaggaaaccgaggugcuauggacaaguaauagcaucgucguguucugcggcacuuccggaaccuacggcacagggucuuggccugauggagccgaccucaaccugaugccaauuuga

SEQ ID NO: 151944 - RNA, 1410 nt, Artificial Sequence; identical to SEQ ID NO: 151919
  derived and/or modified CDS sequence (opt3) from neuraminidase__InfluenzaA__AGW00934

SEQ ID NO: 151945 - RNA, 1410 nt, Artificial Sequence
  derived and/or modified CDS sequence (opt3) from neuraminidase__InfluenzaA__AGW01247
augaaccccaaucagaagaucauuaccauaggcagcgugucccugacaaucucuacuauuugcuucuuuaugcagaucgccauucucaucacgaccgucacacuucacuucaaacaguacgaguuuaacucaccuccaaauaaccagguuaugcugugugaaccgacuauaaucgagagaaauauuaccgaaaucguguauuugacaaacaccacuauugagaaggaaaucugccccaaaccugcugaguacaggaauuggaguaagccacagugugggauaacaggauucgcacccuuuagcaaagacaacuccauucgguuaucugccgguggcgauaucuggguaacccgcgagccuuaugugucgugcgacccagauaaguguuaccaauucgcgcuggggcagggaacgacucuaaauaacguccauucaaauaacaccgugcgagaccguacacccuauagaacucuccugaugaaugaacuuggcguuccuuuucaccuggguaccaaacaggugugcauugcuuggagcaguuccucuugucaugaugggaaggccugguugcacgucugcaucacaggagacgauaagaacgcaaccgccagcuucaucuacaauggcaggcucguggacuccguaguuucauggaguaaagagauucugcggacgcaggaaagcgagugugugugcauaaacggcacuuguacagucgugaugaccgaugggucugcuuccggaaaggcagacacuaaaauccuguuuauugaggaagguaagaucgugcauacaucaacccucagcggcagugcccaacacgucgaggaaugcucuugcuauccacgcuacccggggguuagaugugugugcagggauaacuggaagggauccaaucggcccauaguagacauuaacaucaaagaucacagcaucgugucgucuuacgucuguuccggcuuagugggugacacgccucgcaagaaagacucaaguagcuccucucauugccuggauccaaauaacgaggaagggggacacggcguuaagggcugggcuuucgacgaugggaaugacguguggaugggacgaaccauuaacgagacaagcagacuugguuaugagacuuuuaaagucaucgaaggcuggucaaaucccaagaguaaauugcagauuaacaggcaagugauaguagaucguggggaccgguccggauacagcggcaucuucucuguugaggguaagucauguauuaaucgcugcuuuuauguggaacugaucagagggaggaaggaggaaaccgagguccuauggacaaguaacagcaucguggucuucuguggcacuuccggaaccuacggcacagggucuuggccugauggagccgaccucaaucugaugccaauuuga

SEQ ID NO: 151946 - RNA, 1410 nt, Artificial Sequence; identical to SEQ ID NO: 150194
  derived and/or modified CDS sequence (opt3) from neuraminidase__InfluenzaA__AGW01259

SEQ ID NO: 151947 - RNA, 1410 nt, Artificial Sequence; identical to SEQ ID NO: 151931
  derived and/or modified CDS sequence (opt3) from neuraminidase__InfluenzaA__AGW01298

SEQ ID NO: 151948 - RNA, 1410 nt, Artificial Sequence; identical to SEQ ID NO: 151423
  derived and/or modified CDS sequence (opt3) from neuraminidase__InfluenzaA__AGW01322

SEQ ID NO: 151949 - RNA, 1410 nt, Artificial Sequence
  derived and/or modified CDS sequence (opt3) from neuraminidase__InfluenzaA__AGW01334
augaaccccaaucagaagaucauuaccauaggcagcgugucccugacaaucucuacuauuugcuucuuuaugcagaucgccauucucaucacgaccgucacacuucacuucaaacaguacgaguuuaacucaccuccaaauaaccagguuaugcugugugaaccgacuauaaucgagagaaauauuaccgaaaucguguauuugacaaacaccacuauugagaaggaaaucugccccaaaccugcugaguacaggaauuggaguaagccacagugugggauaacaggauucgcacccuuuagcaaagacaacuccauucgguuaucugccgguggcgauaucuggguaacccgcgagccuuaugugucgugcgacccagauaaguguuaccaauucgcgcuggggcagggaacgacucuaaauaacguccauucaaauaacaccgugcgagaccguacacccuauagaacucuccugaugaaugaacuuggcguuccuuuucaccuggguaccaaacaggugugcauugcuuggagcaguuccucuugucaugaugggaaggccugguugcacgucugcaucacaggagacgauaagaacgcaaccgccagcuucaucuacaauggcaggcucguggacuccguaguuucauggaguaaagagauucugcggacgcaggaaagcgagugugugugcauaaacggcacuuguacagucgugaugaccgaugggucugcuuccggaaaggcagacacuaaaauccuguuuauugaggaagguaagaucgugcauacaucaacccucagcggcagugcccaacacgucgaggaaugcucuugcuauccacgcuacccggggguuagaugugugugcagggauaacuggaagggauccaaucggcccauaguagacauuaacaucaaagaucacagcaucgugucgucuuacgucuguuccggcuuagugggugacacgccucgcaagaaugacucaaguagcuccucucauugccuggauccaaacaaugaggaagggggacacggcguuaaaggcugggcuuucgacgaugggaacgacguguggaugggacgaaccauuaaugagacaagcagacuugguuaugagacuuuuaaggucaucgaaggcuggucaaaccccaaaaguaaguugcagauuaauaggcaagugauaguagaucguggggaccgguccggauacagcggcaucuucucuguugaggguaaaucauguauuaaccgcugcuuuuauguggaacugaucagagggaggaaggaggaagccgagguccuauggaccaguaauagcaucguggucuucuguggcacauccggaacuuacggcaccgggucuuggccugauggagcggaccucaaccugaugccaauuuga

SEQ ID NO: 151950 - RNA, 1410 nt, Artificial Sequence; identical to SEQ ID NO: 150194
  derived and/or modified CDS sequence (opt3) from neuraminidase__InfluenzaA__AGW01346

SEQ ID NO: 151951 - RNA, 1410 nt, Artificial Sequence
  derived and/or modified CDS sequence (opt3) from neuraminidase__InfluenzaA__AGW01358
augaaccccaaucagaagaucauuaccauaggcagcgugucccugacaaucucuacuauuugcuucuuuaugcagaucgccauucucaucacgaccgucacacuucacuucaaacaguacgaguuuaacucaccuccaaauaaccagguuaugcugugugaaccgacuauaaucgagagaaauauuaccgaaaucguguauuugacaaacaccacuauugagaaggaaaucugccccaaaccuacagaguacaggaauuggaguaagccacagugugggauaaccggauucgcucccuuuagcaaagacaacuccauucgguuaucugcagggggcgauaucuggguaacgcgcgagccuuaugugucgugcgacccagauaaguguuaccaauucgcccuggggcagggaacuacccuaaauaacguccauucaaauaacacagugcgagaccguacucccuauagaacccuccugaugaaugaacuuggcguuccuuuucaccuggguacaaaacaggugugcauugcguggagcaguuccucuugucaugaugggaaggcuugguugcacgucugcaucaccggagacgauaagaacgccacggcaaguuucaucuacaauggcaggcucguggacuccguaguuucauggaguaaagagauucugcggacucaggaaagcgagugugugugcauaaacggcacauguaccgucgugaugacugaugggucugccuccggaaaggcugacacaaaaauccuguuuauugaggaagguaagaucgugcauaccucaacgcucagcggcagugcacaacacgucgaggaaugcucuugcuauccacgcuacccggggguuagaugugugugcagggauaacuggaagggauccaaucggcccauaguagacauuaacaucaaagaucacagcaucgugucgucuuacgucuguuccggcuuagugggugacaccccucgcaagaaugacucaaguagcuccucucauugccuggauccaaacaaugaggaagggggacacggcguuaaaggcugggccuucgacgaugggaacgacguguggaugggacgaacaauuaaugagacuagcagacuugguuaugagaccuuuaaggucaucgaaggcuggucaaaccccaaaaguaaguugcagauuaauaggcaagugauaguagaucggggugaccguuccggauacagcggcaucuucucuguugaggguaaaucauguauuaaccgcugcuuuuauguggaacugaucagagggaggaaggaggaaacagagguccuauggacuagcaauagcaucguggucuucuguggcaccuccggaacauacggcaccgggucuuggccugauggagcugaccucaaccugaugccaauuuga

SEQ ID NO: 151952 - RNA, 1410 nt, Artificial Sequence; identical to SEQ ID NO: 150194
  derived and/or modified CDS sequence (opt3) from neuraminidase__InfluenzaA__AGW01370

SEQ ID NO: 151953 - RNA, 1410 nt, Artificial Sequence; identical to SEQ ID NO: 150194
  derived and/or modified CDS sequence (opt3) from neuraminidase__InfluenzaA__AGW01382

SEQ ID NO: 151954 - RNA, 1410 nt, Artificial Sequence
  derived and/or modified CDS sequence (opt3) from neuraminidase__InfluenzaA__AGW01394
augaaccccaaucagaagaucauuaccauaggcagcgugucccugacaaucucuacuauuugcuucuuuaugcaaaucgccauucucaucacgaccgucacacuucacuucaaacaguacgaguuugacucaccuccaaacaaucagguuaugcugugugaaccgacuauaaucgagagaaacauuaccgaaaucguguauuugacaaauaccacuauugagaaggaaaucugccccaaaccugcugaguacaggaacuggaguaagccacagugugggauaacaggauucgcacccuuuagcaaagauaauuccauucgguuaucugccgguggcgacaucuggguaacccgcgagccuuaugugucgugcgauccagacaaguguuaccaauucgcgcuggggcagggaacgacucuaaacaauguccauucaaacaauaccgugcgagaucguacacccuauagaacucuccugaugaacgaacuuggcguuccuuuucaccuggguaccaaacaggugugcauugcuuggagcaguuccucuugucaugacgggaaggccugguugcacgucugcaucacaggagaugacaagaaugcaaccgccagcuucaucuacaacggcaggcucguggauuccauuguaucauggaguaaagacauacugcggacgcaggagagcgaauguguuugcaucaauggcacuuguacaguggucaugaccgaugggucugcuuccggaaaggcagacacuaaaauucuguuuaucgaggaggguaagauagugcauacaucaacccucagcggcagugcccaacacguggaagagugcucuugcuauccacgcuacccgggggucagauguguuugcagggauaacuggaagggauccaaccggcccauuguggacaucaauaucaaagaccacagcauuguaucgucuuacguguguuccggcuuagucggugauacgccucgcaagaacgacucaaguagcuccucucauugccuggauccaaauaacgaagaagggggacacggcgugaaaggcugggcuuucgacgaugggaaugacguuuggaugggacgaaccaucaacgagacaagcagacuugguuaugagacuuuuaaggugauugagggcuggucaaaucccaaaaguaaguugcagauaaacaggcaggucaucguggaucguggggaccgguccggauacagcggcauuuucucuguagaagguaaaucauguaucaaucgcugcuuuuauguugagcugaucagagggaggaaggaagagaccgaagugcuauggacaaguaacagcauugucguguucuguggcacuuccggaaccuacggcacagggucuuggccugauggagccgaccucaaucugaugccaauauga

SEQ ID NO: 151955 - RNA, 1410 nt, Artificial Sequence
  derived and/or modified CDS sequence (opt3) from neuraminidase__InfluenzaA__AGW01406
augaaccccaaucagaagaucauuaccauaggcagcgugucccugacaaucucuacuauuugcuucuuuaugcaaaucgccauucucaucacgaccgucacacuucacuucaaacaguacgaguuuaacucaccuccaaauaaccagguuaugcugugugaaccgacuauaaucgagagaaauauuaccgaaaucguguauuugacaaacaccacuauugagaaggaaaucugccccaaaccugcugaguacaggaauuggaguaagccacagugugacauaacaggguucgcacccuuuagcaaagauaacuccauucgguuaucugccggaggugacaucuggguaacccgcgagccuuaugugucgugcgauccagacaaguguuaccaauucgcgcugggccaggggacgacucuaaauaacaugcauucaaauaacaccguccgagaucguacacccuauagaacucuccugaugaaugaacuuggagugccuuuucaccugggcaccaagcagguuugcauugcuuggagcaguuccucuugucaugacgguaaagccugguugcacgugugcaucacaggggaugacaagaacgcaaccgccagcuucaucuacaauggaaggcucgucgauuccgugguaucauggaguaaagagauucugcggacgcaggaaagcgaguguguuugcauaaacggcacuuguacaguggucaucaccgacggcucugcuuccgggaaggcagauacuaaaauucuguuuaucgaggaaggaaagauagugcauacaucaacccucagcgguagugcccaacacguggaggaaugcucuugcuauccacgcuacccgggcgucagauguguuugcagggacaacuggaagggguccaaucggcccauuguggauaucaacaucaaagaccacagcauuguaucgucuuacguguguuccggauuagucggcgacacgccucgcaagaaugauucaaguagcuccucucauugccuggacccaaacaaugaggaaggugggcacggagugaaaggcugggcuuucgaugacggcaacgauguuuggauggggcgaaccaucaaugagacaagcagacuuggauaugagacuuuuaaggugauugaagguuggucaaaccccaaaaguaaguugcagauaaauaggcaggucaucguggaccggggcgaucguuccggguacagcggaauuuucucuguagagggcaaaucauguaucaaccgcugcuuuuauguugaacugaucagagguaggaaggaggaaaccgaggugcuauggacaaguaauagcauugucguguucugugggacuuccggcaccuacggaacaggcucuuggccugacggggccgaucucaaccugaugccaauauga

SEQ ID NO: 151956 - RNA, 1410 nt, Artificial Sequence
  derived and/or modified CDS sequence (opt3) from neuraminidase__InfluenzaA__AGW01418
augaaccccaaucagaagaucauuaccauaggcagcgugucccugacaaucucuacuauuugcuucuuuaugcaaaucgccauucucaucacgaccgucacacuucacuucaaacaguacgaguuuaacucaccuccaaauaaccagguuaugcugugugaaccgacuauaaucgagagaaauauuaccgaaaucguguauuugacaaacaccacuauugagaaggaaaucugccccaaaccugcugaguacaggaauuggaguaagccacagugugggauaacaggauucgcacccuuuagcaaagacaacuccauucgguuaucugccgguggcgauaucuggguaacccgcgagccuuaugugucgugcgacccagauaaguguuaccaauucgcgcuggggcagggaacgacucuaaauaacaugcauucaaauaacaccguccgagaccguacacccuauagaacucuccugaugaaugaacuuggcgugccuuuucaccuggguaccaagcagguuugcauugcuuggagcaguuccucuugucaugaugggaaagccugguugcacgugugcaucacaggagacgauaagaacgcaaccgccagcuucaucuacaauggcaggcucgucgacuccgugguaucauggaguaaagagauucugcggacgcaggaaagcgaguguguuugcauaaacggcacuuguacaguggucaugaccgaugggucugcuuccggaaaggcagacacuaaaauccuguuuauugaggaagguaagaucgugcauacaucaacccucagcggcagugcccaacacguggaggaaugcucuugcuauccacgcuacccgggggucagauguguuugcagggauaacuggaagggauccaaucggcccauaguggacauuaacaucaaagaucacagcaucguaucgucuuacguguguuccggcuuagucggugacacgccucgcaagaaugacucaaguagcuccucucauugccuggauccaaacaaugaggaagggggacacggcgugaaaggcugggcuuucgacgaugggaacgacguuuggaugggacgaaccauuaaugagacaagcagacuugguuaugagacuuuuaaggugaucgaaggcuggucaaaccccaaaaguaaguugcagauuaauaggcaggucauaguggaucguggggaccgguccggauacagcggcaucuucucuguagaggguaaaucauguauuaaccgcugcuuuuauguugaacugaucagagggaggaaggaggaaaccggcgugcuauggacaaguaauagcaucgucguguucuguggaacuuccggcaccuacgggacaggaucuuggccugauggugccgaccucaaccugaugccaauuuga

SEQ ID NO: 151957 - RNA, 1410 nt, Artificial Sequence; identical to SEQ ID NO: 150194
  derived and/or modified CDS sequence (opt3) from neuraminidase__InfluenzaA__AGW01430

SEQ ID NO: 151958 - RNA, 1410 nt, Artificial Sequence; identical to SEQ ID NO: 150194
  derived and/or modified CDS sequence (opt3) from neuraminidase__InfluenzaA__AGW01442

SEQ ID NO: 151959 - RNA, 1410 nt, Artificial Sequence; identical to SEQ ID NO: 150194
  derived and/or modified CDS sequence (opt3) from neuraminidase__InfluenzaA__AGW01454

SEQ ID NO: 151960 - RNA, 1410 nt, Artificial Sequence; identical to SEQ ID NO: 151919
  derived and/or modified CDS sequence (opt3) from neuraminidase__InfluenzaA__AGW01466

SEQ ID NO: 151961 - RNA, 1410 nt, Artificial Sequence; identical to SEQ ID NO: 150194
  derived and/or modified CDS sequence (opt3) from neuraminidase__InfluenzaA__AGW01478

SEQ ID NO: 151962 - RNA, 1410 nt, Artificial Sequence
  derived and/or modified CDS sequence (opt3) from neuraminidase__InfluenzaA__AGW01490
augaaccccaaucagaagaucauuaccauaagcuccgugucucugacaaucucaacuauuugcuucuuuaugcagaucgccauucucaucacgaccgucacacuucacuucaaacaguacgaguuuaacaguccuccaaauaaccagguuaugcugugugaaccgacuauaaucgagagaaauauuaccgaaaucguguauuugacaaacaccacuauugagaaggaaaucugccccaaaccugcugaguacaggaauuggagcaagccacaguguggcauaacaggguucgcacccuuuuccaaagacaacucuauucgguuaucggccggaggugauaucuggguaacccgcgagccuuaugugucaugcgacccagauaaguguuaccaauucgcgcugggccaggggacgacucuaaauaacguccauagcaauaacaccgugcgagaccguacacccuauagaacucuccugaugaaugaacuuggaguuccuuuucaccugggcaccaaacaggugugcauugcuuggaguuccucuagcugucaugaugguaaggccugguugcacgucugcaucacaggggacgauaagaacgcaaccgccuccuucaucuacaauggaaggcucguggacucaguaguuaguuggagcaaagagauucugcggacgcaggaaucugagugugugugcauaaacggcacuuguacagucgugaugaccgauggcuccgcuucagggaaggcagacacuaaaauccuguuuauugaggaaggaaagaucgugcauacaagcacccucagugguucugcccaacacgucgaggaaugcuccugcuauccacgcuacccgggcguuagaugugugugcagggauaacuggaaggggagcaaucggcccauaguagacauuaacaucaaagaucacucgaucgugucuuccuacgucuguucaggauuagugggcgacacgccucgcaagaaugacaguagcuccucuagccauugccuggauccaaacaaugaggaaggugggcacggaguuaaaggcugggcuuucgacgauggcaacgacguguggauggggcgaaccauuaaugagacaucaagacuuggauaugagacuuuuaaggucaucgaagguuggaguaacuccaaaagcaaguugcagauuaauaggcaagugauaguagaucggggcgaccguucuggguacucaggaaucuucaguguugagggcaaaagcuguauuaaccgcugcuuuuauguggaacugaucagagguaggaaggaggaaaccgagguccuauggacauccaauucuaucguggucuucugugggacuucgggcaccuacggaacaggcagcuggcccgauggggccgaccucaaccugaugccuauuuga

SEQ ID NO: 151963 - RNA, 1410 nt, Artificial Sequence; identical to SEQ ID NO: 150194
  derived and/or modified CDS sequence (opt3) from neuraminidase__InfluenzaA__AGW01538

SEQ ID NO: 151964 - RNA, 1410 nt, Artificial Sequence; identical to SEQ ID NO: 151919
  derived and/or modified CDS sequence (opt3) from neuraminidase__InfluenzaA__AGW01562

SEQ ID NO: 151965 - RNA, 1410 nt, Artificial Sequence; identical to SEQ ID NO: 150194
  derived and/or modified CDS sequence (opt3) from neuraminidase__InfluenzaA__AGW01574

SEQ ID NO: 151966 - RNA, 1410 nt, Artificial Sequence; identical to SEQ ID NO: 150194
  derived and/or modified CDS sequence (opt3) from neuraminidase__InfluenzaA__AGW01586

SEQ ID NO: 151967 - RNA, 1410 nt, Artificial Sequence; identical to SEQ ID NO: 150194
  derived and/or modified CDS sequence (opt3) from neuraminidase__InfluenzaA__AGW01598

SEQ ID NO: 151968 - RNA, 1410 nt, Artificial Sequence; identical to SEQ ID NO: 151919
  derived and/or modified CDS sequence (opt3) from neuraminidase__InfluenzaA__AGW01610

SEQ ID NO: 151969 - RNA, 1410 nt, Artificial Sequence; identical to SEQ ID NO: 150194
  derived and/or modified CDS sequence (opt3) from neuraminidase__InfluenzaA__AGW01622

SEQ ID NO: 151970 - RNA, 1410 nt, Artificial Sequence; identical to SEQ ID NO: 150194
  derived and/or modified CDS sequence (opt3) from neuraminidase__InfluenzaA__AGW01634

SEQ ID NO: 151971 - RNA, 1410 nt, Artificial Sequence
  derived and/or modified CDS sequence (opt3) from neuraminidase__InfluenzaA__AGW01646
augaaccccaaucagaagaucauuaccauaggcagcgugucccugacaaucucuacuauuugcuucuuuaugcagaucgccauucucaucacgaccgucacacuucacuucaaacaguacgaguuuaacucaccuccaaauaaccagguuaugcugugugaaccgacuauaaucgagagaaauauuaccgaaaucguguauuugacaaacaccacuauugagaaggaaaucugccccaaaccugcugaguacaggaauuggaguaagccacagugugggauaacaggauucgcacccuuuagcaaagacaacuccauucgguuaucugccgguggcgauaucuggguaacccgcgagccuuaugugucgugcgacccagauaaguguuaccaauucgcgcuggggcagggaacgacucuaaauaacguccauucaaauaacaccgugcgagaccguacacccuauagaacucuccugaugaaugaacuuggcguuccuuuucaccuggguaccaaacaggugugcauugcuuggagcaguuccucuugucaugaugggaaggccugguugcacgucugcaucacaggagacgauaagaacgcaaccgccagcuucaucuacaauggcaggcucguggacuccguaguuucauggaguaaagagauucugcggacgcaggaaagcgagugugugugcauagauggcacuuguacagucgugaugaccgacgggucugcuuccggaaaggcagauacuaaaauccuguuuauugaggaagguaagaucgugcauacaucaacccucagcggcagugcccaacacgucgaggaaugcucuugcuauccacgcuacccggggguuagaugugugugcagggacaacuggaagggauccaaccggcccauaguagauauuaauaucaaagaccacagcaucgugucgucuuacgucuguuccggcuuagugggugacacgccucgcaagaacgauucaaguagcuccucucauugccuggacccaaauaacgaggaagggggacacggcguuaaaggcugggcuuucgaugacgggaaugauguguggaugggacgaaccauuaacgagacaagcagacuugguuaugagacuuuuaaggucaucgaaggcuggucaaaucccaaaaguaaguugcagauuaacaggcaagugauaguagaccguggggaucgguccggauacagcggcaucuucucuguugaggguaaaucauguauuaaucgcugcuuuuauguggaacugaucagagggaggaaggaggaaaccgagguccuauggacaaguaacagcaucguggucuucuguggcacuuccggaaccuacggcacagggucuuggccugacggagccgaucucaaucugaugccaauuuga

SEQ ID NO: 151972 - RNA, 1410 nt, Artificial Sequence; identical to SEQ ID NO: 150194
  derived and/or modified CDS sequence (opt3) from neuraminidase__InfluenzaA__AGW01670

SEQ ID NO: 151973 - RNA, 1410 nt, Artificial Sequence; identical to SEQ ID NO: 150194
  derived and/or modified CDS sequence (opt3) from neuraminidase__InfluenzaA__AGW01682

SEQ ID NO: 151974 - RNA, 1410 nt, Artificial Sequence; identical to SEQ ID NO: 151931
  derived and/or modified CDS sequence (opt3) from neuraminidase__InfluenzaA__AGW01704

SEQ ID NO: 151975 - RNA, 1410 nt, Artificial Sequence
  derived and/or modified CDS sequence (opt3) from neuraminidase__InfluenzaA__AGW01716
augaaccccaaucagaagaucauuaccauaggcagcgugucccugacaaucucuacuauuugcuucuuuaugcaaaucgccauucucaucacgaccgucacacuucacuucaaacaguacgaguuuaacucaccuccaaauaaccagguuaugcugugugaaccgacuauaaucgagagaaauauuaccgaaaucguguauuugacaaacaccacuauugagaaggaaaucugccccaaaccugcugaguacaggaauuggaguaagccacagugugggauaacaggauucgcacccuuuagcaaagacaacuccauucgguuaucugccgguggcgauaucuggguaacccgcgagccuuaugugucgugcgacccagauaaguguuaccaauucgcgcuggggcagggaacgacucuaaauaacaugcauucaaauaacaccguccgagaccguacacccuauagaacucuccugaugaaugaacuuggcgugccuuuucaccuggguaccaagcagguuugcauugcuuggagcaguuccucuugucaugaugggaaagccugguugcacgugugcaucacaggagacgauaagaacgcaaccgccagcuucaucuacaauggcaggcucgucgacuccgugguaucauggaguaaagagauucugcggacgcaggaaagcgaguguguuugcauaaacggcacuuguacaguggucaugaccgaugggucugcuuccggaaaggcagacacuaaaauccuguuuauugaggaagguaagaucgugcauacaucaacccucagcggcagugcccaacacguggaggaaugcucuugcuauccacgcuacccgggggucagauguguuugcagggauaacuggaagggauccaaucggcccauaguggacauuaacaucaaagaucacagcaucguaucgucuuacguguguuccggcuuagucggugacacgccucgcaagaaugacucaaguagcuccucucauugccuggauccaaacaaugaggaagggggacacggcgugaaaggcugggcuuucgacgaugggaacgacguuuggaugggacgaaccauuaaugagacaagcagacuugguuaugagacuuuuaaggugaucgaaggcuggucaaaccccaaaaguaaguugcagauuaauaggcaggucauaguggaucguggggaccgguccggauacagcggcaucuucucuguagagggucgcucauguauuaacagaugcuuuuauguugaacugaucagggggcggaaagaggaaaccgaggugcuauggacaaguaauagcaucgucguguucuguggcacuuccggaaccuacggcacagggucuuggccugauggagccgaccucaaccugaugccaauuuga

SEQ ID NO: 151976 - RNA, 1410 nt, Artificial Sequence
  derived and/or modified CDS sequence (opt3) from neuraminidase__InfluenzaA__AGW01728
augaaccccaaucagaagaucauuaccauaggcagcgugucccugacaaucucuacuauuugcuucuuuaugcaaaucgccauucucaucacgaccgucacacuucacuucaaacaguacgaguuuaacucaccuccaaauaaccagguuaugcugugugaaccgacuauaaucgagagaaauauuaccgaaaucguguauuugacaaacaccacuauugagaaggaaaucugccccaaaccugcugaguacaggaauuggaguaagccacagugugggauaacaggauucgcacccuuuagcaaagacaacuccauucgguuaucugccgguggcgauaucuggguaacccgcgagccuuaugugucgugcgacccagauaaguguuaccaauucgcgcuggggcagggaacgacucuaaauaacaugcauucaaauaacaccguccgagaccguacacccuauagaacucuccugaugaaugaacuuggcgugccuuuucaccuggguaccaagcagguuugcauugcuuggagcaguuccucuugucaugaugggaaagccugguugcacgugugcaucacaggagacgauaagaacgcaaccgccagcuucaucuacaauggcaggcucgucgacuccgugguaucauggaguaaagagauucugcggacgcaggaaagcgaguguguuugcauaaacggcacuuguacaguggucaugaccgaugggucugcuuccggaaaggcagacacuaaaauccuguuuauugaggaagguaagaucgugcauacaucaacccucagcggcagugcccaacacguggaggaaugcucuugcuauccacgcuacccgggggucagauguguuugcagggauaacuggaagggauccaaucggcccauaguggacauuaacaucaaagaucacagcaucguaucgucuuacguguguuccggcuuagucggugacacgccucgcaagaaugacucaaguagcuccucucauugccuggauccaaacaaugaggaagggggacacggcgugaaaggcugggcuuucgacgaugggaacgacguuuggaugggacgaaccauuaaugagacaagcagacuugguuaugagacuuuuaaggugaucgaaggcuggucaaaccccaaaaguaaguugcagauuaauaggcaggucauaguggaucguggggaccgguccggauacagcggcaucuucucuguagaggguaaaucauguauuaaccgcugcuuuuauguugaacugaucagagggaggaaggaggaaaccgaggugcuauggacaaguaauagcgucguggucuucuguggcacuuccggaaccuacggcacagggucuuggccugauggagccgaccucaaccugaugccaaucuga

SEQ ID NO: 151977 - RNA, 1410 nt, Artificial Sequence; identical to SEQ ID NO: 150194
  derived and/or modified CDS sequence (opt3) from neuraminidase__InfluenzaA__AGW01740

SEQ ID NO: 151978 - RNA, 1410 nt, Artificial Sequence
  derived and/or modified CDS sequence (opt3) from neuraminidase__InfluenzaA__AGW01752
augaaccccaaucagaagaucauuaccauaggcagcgugucccugacaaucucuacuauuugcuucuuuaugcagaucgccauucucaucacgaccgucacacuucacuucaaacaguacgaguuuaacucaccuccaaauaaccagguuaugcugugugaaccgacuauaaucgagagaaauauuaccgaaaucguguauuugacaaacaccacuauugagaaggaaaucugccccaaaccugcugaguacaggaauuggaguaagccacagugugggauaacaggauucgcacccuuuagcaaagacaacuccauucgguuaucugccgguggcgauaucuggguaacccgcgagccuuaugugucgugcgacccagauaaguguuaccaauucgcgcuggggcagggaacgacucuaaauaacguccauucaaauaacaccgugcgagaccguacacccuauagaacucuccugaugaaugaacuuggcguuccuuuucaccuggguaccaaacaggugugcauugcuuggagcaguuccucuugucaugaugggaaggccugguugcacgucugcaucacaggagacgauaagaacgcaaccgccagcuucaucuacaauggcaggcucguggacuccguaguuucauggaguaaagagauucugcggacgcaggaaagcgagugugugugcauaaacggcacuuguacagucgugaugaccgaugggucugcuuccggaaaggcagacacuaaaauccuguuuauugaggaagguaagaucgugcauacaucaacccucagcggcagugcccaacacgucgaggaaugcucuugcuauccacgcuacccggggguuagaugugugugcagggauaacuggaagggauccaaucggcccauaguagacauuaacaucaaagaucacagcaucgugucgucuuacgucuguuccggcuuagugggugacacgccucgcaagaaugacucaaguagcuccucucauugccuggauccaaacaaugaggaagggggacacggcguuaaaggcugggcuuucgacgaugggaacgacguguggaugggacgaaccauuaaugagacaagcagacuugguuaugagacuuuuaaggucaucggcggguggucaaaccccaaaaguaaguugcagauuaauaggcaagugauaguagaucggggagaccguuccggcuacagcgguaucuucucuguugaagggaaaucauguauuaaccgcugcuuuuauguggagcugaucagaggcaggaaggaagagaccgaaguccuauggacaaguaauagcaucguggucuucuguggaacuuccggcaccuacgggacaggaucuuggccugauggugccgaccucaaccugaugccaauuuga

SEQ ID NO: 151979 - RNA, 1410 nt, Artificial Sequence; identical to SEQ ID NO: 150194
  derived and/or modified CDS sequence (opt3) from neuraminidase__InfluenzaA__AGW01764

SEQ ID NO: 151980 - RNA, 1410 nt, Artificial Sequence; identical to SEQ ID NO: 151931
  derived and/or modified CDS sequence (opt3) from neuraminidase__InfluenzaA__AGW01776

SEQ ID NO: 151981 - RNA, 1410 nt, Artificial Sequence; identical to SEQ ID NO: 151919
  derived and/or modified CDS sequence (opt3) from neuraminidase__InfluenzaA__AGW01788

SEQ ID NO: 151982 - RNA, 1410 nt, Artificial Sequence; identical to SEQ ID NO: 151931
  derived and/or modified CDS sequence (opt3) from neuraminidase__InfluenzaA__AGW01800

SEQ ID NO: 151983 - RNA, 1410 nt, Artificial Sequence; identical to SEQ ID NO: 151919
  derived and/or modified CDS sequence (opt3) from neuraminidase__InfluenzaA__AGW01812

SEQ ID NO: 151984 - RNA, 1410 nt, Artificial Sequence; identical to SEQ ID NO: 151919
  derived and/or modified CDS sequence (opt3) from neuraminidase__InfluenzaA__AGW01824

SEQ ID NO: 151985 - RNA, 1410 nt, Artificial Sequence; identical to SEQ ID NO: 151942
  derived and/or modified CDS sequence (opt3) from neuraminidase__InfluenzaA__AGW01848

SEQ ID NO: 151986 - RNA, 1410 nt, Artificial Sequence
  derived and/or modified CDS sequence (opt3) from neuraminidase__InfluenzaA__AGW01860
augaaccccaaucagaagaucauuaccauaggcagcgugucccugacaaucucuacuauuugcuucuuuaugcagaucgccauucucaucacgaccgucacacuucacuucaaacaguacgaguuuaacucacugccuaauaaccagguuauguugugugaaccaacuauaaucgagagaaauauuaccgaaaucguguauuuaacaaacaccacuauugagaaggaaaucugcccgaaacccgcugaguacaggaauuggaguaagccucagugugggauaacaggauucgcaccauuuagcaaagacaacuccauucggcugucugccgguggcgauaucuggguaacccgcgagcccuaugugucgugcgacccugauaaguguuaccaauucgcgcuagggcagggaacgacucucaauaacguccauucaaauaacaccgugcgagaccguacaccauauagaacucugcuuaugaaugaacugggcguucccuuucacuuggguaccaaacaggugugcauugcuuggagcaguuccucuugucaugaugggaaggccuggcuccacgucugcaucacaggagacgauaagaacgcaaccgccagcuucaucuacaauggcaggcugguggacuccguaguuucauggaguaaagagauucugcggacgcaggaaagcgagugugugugcauaaacggcacuuguacagucgugaugaccgaugggucugcuuccggaaaggcagacacuaaaauccucuuuauugaggaagguaagaucgugcauacaucaaccuuaagcggcagugcccaacacgucgaggaaugcucuugcuauccucgcuacccagggguuagaugugugugcagggauaacuggaagggauccaaucggccgauaguagacauuaacaucaaagaucacagcaucgugucgucuuacgucuguuccggccuggugggugacacgccccgcaagaaugacucaaguagcuccucucauugcuucgauccuaacaaugaggaagggggacacggcguuaaaggcugggcuuuugacgaugggaacgacguguggaugggacgaaccauuaaugagacaagcagacuugguuaugagacuuucaaggucaucggcggguggucaaacccaaaaaguaaguugcagauuaauaggcaagugauaguagaucggggagaccguuccggcuacagcgguaucuuuucuguugaagggaaaucauguauuaaccgcugcuucuauguggagcugaucagaggcaggaaggaagagaccgaaguccuauggacaaguaauagcaucauuguguucuguggaacuuccggcaccuacgggacaggaucuuggcccgauggugccgaccucaaccugaugccuauauga

SEQ ID NO: 151987 - RNA, 1410 nt, Artificial Sequence
  derived and/or modified CDS sequence (opt3) from neuraminidase__InfluenzaA__AGW01884
augaaccccaaucagaagaucauuaccauaggcagcgugucccugacaaucucuacuauuugcuucuuuaugcagaucgccauucucaucacgaccgucacacuucacuucaaacaguacgaguuuaacucaccuccaaauaaccagguuaugcugugugaaccgacuauaaucgagagaaauauuaccaagaucguguauuugacaaacaccacuauugaaaaagagaucugccccaagccugcugaauacaggaauuggaguaaaccacagugugggauaacaggauucgcacccuuuagcaaggacaacuccauucgguuaucugccgguggcgauaucuggguaacccgcgagccuuaugugucgugcgacccagauaaguguuaccaauucgcgcuggggcagggaacgacucuaaauaacguccauucaaauaacaccgugcgagaccguacacccuauagaacucuccugaugaaugagcuuggcguuccuuuucaccuggguaccaaacaggugugcauugcuuggagcaguuccucuugucaugaugggaaggccugguugcacgucugcaucacaggagacgauaaaaacgcaaccgccagcuucaucuacaauggcaggcucguggacuccguaguuucauggaguaaggaaauucugcggacgcaggagagcgaaugugugugcauaaacggcacuuguacagucgugaugaccgaugggucugcuuccggaaaagcagacacuaagauccuguuuauugaggaggguaagaucgugcauacaucaacccucagcggcagugcccaacacgucgaagagugcucuugcuauccacgcuacccggggguuagaugugugugcagggauaacuggaaaggauccaaucggcccauaguagacauuaacaucaaggaucacagcaucgugucgucuuacgucuguuccggcuuagugggugacacgccucgcaaaaaugacucaaguagcuccucucauugccuggauccaaacaaugaagaagggggacacggcguuaagggcugggcuuucgacgaugggaacgacguguggaugggacgaaccauuaaugagacaagcagacuugguuaugagacuuuuaaagucaucgagggcuggucaaaccccaagaguaaauugcagauuaauaggcaagugauaguagaucguggggaccgguccggauacagcggcaucuucucuguugaagguaagucauguauuaaccgcugcuuuuauguggagcugaucagagggaggaaggaagagaccgaaguccuauggacaaguaauagcaucguggucuucuguggcacuuccggaaccuacggcacagggucuuggccugauggagccgaccucaaccugaugccaauuuga

SEQ ID NO: 151988 - RNA, 1410 nt, Artificial Sequence; identical to SEQ ID NO: 150194
  derived and/or modified CDS sequence (opt3) from neuraminidase__InfluenzaA__AGW01896

SEQ ID NO: 151989 - RNA, 1410 nt, Artificial Sequence; identical to SEQ ID NO: 150194
  derived and/or modified CDS sequence (opt3) from neuraminidase__InfluenzaA__AGW01908

SEQ ID NO: 151990 - RNA, 1410 nt, Artificial Sequence; identical to SEQ ID NO: 150194
  derived and/or modified CDS sequence (opt3) from neuraminidase__InfluenzaA__AGW01920

SEQ ID NO: 151991 - RNA, 1410 nt, Artificial Sequence; identical to SEQ ID NO: 150194
  derived and/or modified CDS sequence (opt3) from neuraminidase__InfluenzaA__AGW01932

SEQ ID NO: 151992 - RNA, 1410 nt, Artificial Sequence
  derived and/or modified CDS sequence (opt3) from neuraminidase__InfluenzaA__AGW01944
augaaccccaaucagaagaucauuaccauaggcagcgugucccugacaaucucuacuauuugcuucuuuaugcagaucgccauucucaucacgaccgucacacuucacuucaaacaguacgaguuuaacuucccuccaaauaaccagguuaugcugugugaaccgacuauaaucgagagaaauauuaccgaaaucguguauuugacaaacaccacuauugagaaggaaaucugccccaaaccugcugaguacaggaauuggucaaagccacagugugggauaacaggauuugcacccuucaguaaagacaacagcauucgguuauccgccgguggcgauaucuggguaacccgcgagccuuaugugucuugcgacccagauaaguguuaccaauuugcgcuggggcagggaacgacucuaaauaacguccauucgaauaacaccgugcgagaccguacacccuauagaacucuccugaugaaugaacuuggcguuccuuuccaccuggguaccaaacaggugugcauugcuuggucaagcaguuccugucaugaugggaaggccugguugcacgucugcaucacaggagacgauaagaacgcaaccgccucuuuuaucuacaauggcaggcucguggacagcguaguuuccuggucaaaagagauucugcggacgcaggaaagugagugugugugcauaaacggcacuuguacagucgugaugaccgaugggagcgcuucuggaaaggcagacacuaaaauccuguucauugaggaagguaagaucgugcauacauccacccucucaggcagcgcccaacacgucgaggaaugcaguugcuauccacgcuacccggggguuagaugugugugcagggauaacuggaagggaucuaaucggcccauaguagacauuaacaucaaagaucacuccaucgugagcucguacgucuguucuggcuuagugggugacacgccucgcaagaaugacuccucaaguagcucccauugccuggcuccaaacaaugaggaagggggacacggcguuaaaggcugggccuuugaugacgggaacgauguguggaugggacgaaccauuaaugagacaucuagacuugguuaugagacuuucaaggucaucgaaggcuggagcaaccccaaaucaaaguugcagauuaauaggcaagugauaguagaccguggggaucggaguggauacuccggcaucuuuagcguugaggguaaaucuuguauuaaccgcugcuucuauguggaacugaucagagggaggaaggaggaaaccgagguccuauggacaucaaauaguaucguggucuucuguggcacuagcggaaccuacggcacaggguccuggccugacggagcggaucucaaccugaugccaauuuga

SEQ ID NO: 151993 - RNA, 1410 nt, Artificial Sequence; identical to SEQ ID NO: 150194
  derived and/or modified CDS sequence (opt3) from neuraminidase__InfluenzaA__AGW01956

SEQ ID NO: 151994 - RNA, 1410 nt, Artificial Sequence
  derived and/or modified CDS sequence (opt3) from neuraminidase__InfluenzaA__AGW01968
augaaccccaaucagaagaucauuaccauaggcagcgugucccugacaaucucuacuauuugcuucuuuaugcaaaucgccauucucaucacgaccgucacacuucacuucaaacaguacgaguuuaacucaccuccaaauaaccagguuaugcugugugaaccgacuauaaucgagagaaauauuaccgaaaucguguauuugacaaacaccacuauugagaaggaaaucugccccaaaccugcugaguacaggaauuggaguaagccacagugugacauaacaggguucgcacccuuuagcaaagauaacuccauucgguuaucugccggaggugacaucuggguaacccgcgagccuuaugugucgugcgauccagacaaguguuaccaauucgcgcugggccaggggacgacucuaaauaacguccauucaaauaacaccauucgagaucguacacccuauagaacucuccugaugaaugaacuuggagugccuuuucaccugggcaccaagcagguuugcaucgcuuggagcaguuccucuugucaugacgguaaagccugguugcacgugugcaucacaggggaugacgagaacgcaaccgccagcuucauuuacaauggaaggcucgucgauuccgugguaucauggaguaaggaaauacugcggacgcaggagagcgaguguguuugcaucaacggcacuuguacaguggucaugaccgacggcucugcuuccgggaaagcagauacuaagauucuguuuaucgaagagggaaaaauagugcauacaucaacccucagcgguagugcccaacacguggaagagugcucuugcuauccacgcuacccgggcgucagauguguuugcagggacaacuggaagggguccaaucggcccauuguggauaucaacaucaaggaccacagcauuguaucgcgcuacguguguucuggauuagucggcgacacgccucgaaagaaugauuccucaaguagcucccauugccuggacccaaacaaugaagagggugggcacggagugaaaggcugggcuuucgaugacggcaacgauguuuggauggggagaaccaucaaugagacaucuaggcuuggauaugaaacuuuuaaagugauugaggguuggagcaaccccaagucaaaauugcagauaaaucggcaggucaucguggaccguggcgaucgcaguggguacuccggaauuuucagcguagaaggcaagucuuguaucaacagaugcuuuuauguugagcugaucaggggucggaaagaagagaccgaggugcuauggacaucaaauaguauugucguguucugugggacuagcggcaccuacggaacaggcuccuggccugacggggccgaucucaaccugaugccaauauga

SEQ ID NO: 151995 - RNA, 1410 nt, Artificial Sequence; identical to SEQ ID NO: 151919
  derived and/or modified CDS sequence (opt3) from neuraminidase__InfluenzaA__AGW01980

SEQ ID NO: 151996 - RNA, 1410 nt, Artificial Sequence; identical to SEQ ID NO: 150194
  derived and/or modified CDS sequence (opt3) from neuraminidase__InfluenzaA__AGW01992

SEQ ID NO: 151997 - RNA, 1410 nt, Artificial Sequence; identical to SEQ ID NO: 150194
  derived and/or modified CDS sequence (opt3) from neuraminidase__InfluenzaA__AGW02004

SEQ ID NO: 151998 - RNA, 1410 nt, Artificial Sequence; identical to SEQ ID NO: 150194
  derived and/or modified CDS sequence (opt3) from neuraminidase__InfluenzaA__AGW02016

SEQ ID NO: 151999 - RNA, 1410 nt, Artificial Sequence; identical to SEQ ID NO: 150194
  derived and/or modified CDS sequence (opt3) from neuraminidase__InfluenzaA__AGW02040

SEQ ID NO: 152000 - RNA, 1410 nt, Artificial Sequence
  derived and/or modified CDS sequence (opt3) from neuraminidase__InfluenzaA__AGW02064
augaaccccaaucagaagaucauuaccauaggcagcgugucccugacaaucucuacuauuugcuucuuuaugcagaucgccauucucaucacgaccgucacacuucacuucaaacaguacgaguuugacucaccuccaaacaaucagguuaugcugugugaaccgacuauaaucgagagaaacauuaccgaaaucguguauuugacaaauaccacuauugagaaggaaaucugccccaaaccugcugaguacaggaacuggaguaagccacagugugggauaacaggauucgcacccuuuagcaaagauaauuccauucgguuaucugccgguggcgacaucuggguaacccgcgagccuuaugugucgugcgauccagacaaguguuaccaauucgcgcuggggcagggaacgacucuaaacaauguccauucaaacaauaccgugcgagaucguacacccuauagaacucuccugaugaacgaacuuggcguuccuuuucaccuggguaccaaacaggugugcauugcuuggagcaguuccucuugucaugacgggaaggccugguugcacgucugcaucacaggagaugacaagaaugcaaccgccagcuucaucuacaacggcaggcucguggauuccguaguuucauggaguaaagagauucugcggacgcaggaaagcgagugugugugcauaaauggcacuuguacagucgugaugaccgacgggucugcuuccggaaaggcagauacuaaaauccuguuuauugaggaagguaagaucgugcauacaucaacccucagcggcagugcccaacacgucgaggaaugcucuugcuauccacgcuacccggggguuagaugugugugcagggacaacuggaagggauccaaccggcccauaguagauauuaauaucaaagaccacagcaucgugucgucuuacgucuguuccggcuuagugggugacacgccucgcaagaacgauucaaguagcuccgggcauugccuggacccaaauaacgaggaaggaggccacggcguuaaagggugggcuuucgaugacggaaaugauguguggaugggucgaaccauuaacgagacaucuagacuuggcuaugagacuuuuaaggucaucgaaggguggagcaaucccaaaucaaaguugcagauuaacaggcaagugauaguagaccggggagaucguaguggcuacuccgguaucuucagcguugaggggaaaucuuguauuaaucgcugcuuuuauguggaacugaucagaggcaggaaggaggaaaccgagguccuauggacaucaaacaguaucguggucuucuguggaacuagcggcaccuacgggacaggauccuggccugacggugccgaucucaaucugaugccaauuuga

SEQ ID NO: 152001 - RNA, 1410 nt, Artificial Sequence; identical to SEQ ID NO: 150194
  derived and/or modified CDS sequence (opt3) from neuraminidase__InfluenzaA__AGW02076

SEQ ID NO: 152002 - RNA, 1410 nt, Artificial Sequence; identical to SEQ ID NO: 150194
  derived and/or modified CDS sequence (opt3) from neuraminidase__InfluenzaA__AGW02088

SEQ ID NO: 152003 - RNA, 1410 nt, Artificial Sequence
  derived and/or modified CDS sequence (opt3) from neuraminidase__InfluenzaA__AGW02100
augaaccccaaucagaagaucauuaccauaggcagcgugucccugacaaucucuacuauuugcuucuuuaugcagaucgccauucucaucacgaccgucacacuucacuucaaacaguacgagucaaacaguccuccaaauaaccagguuaugcugugugaaccgacuauaaucgagagaaauauuaccgaaaucguguauuugacaaacaccacuauugagaaggaaaucugccccaaaccugcugaguacaggaauuggagcaagccacagugugggauaacaggauuugcacccuucuccaaagacaacucuauucgguuaucggccgguggcgauaucuggguaacccgcgagccuuaugugucaugcgacccagauaaguguuaccaauuugcgcuggggcagggaacgacucuaaauaacguccauagcaauaacaccgugcgagaccguacacccuauagaacucuccugaugaaugaacuuggcguuccuuuccaccuggguaccaaacaggugugcauugcuuggaguuccucuagcugucaugaugggaaggccugguugcacgucugcaucacaggagacgauaagaacgcaaccgccuccuuuaucuacaauggcaggcucguggacucaguaguuaguuggagcaaagagauucugcggacgcaggaaucugagugugugugcauaaacggcacuuguacagucgugaugaccgauggguccgcuucaggaaaggcagacacuaaaauccuguucauugaggaagguaagaucgugcauacaagcacccucaguggcucugcccaacacgucgaggaaugcuccugcuauccacgcuacccggggguuagaugugugugcagggauaacuggaagggaagcaaucggcccauaguagacauuaacaucaaagaucacucgaucgugucuuccuacgucuguucaggcuuagugggugacacgccucgcaagaaugacaguagcuccucuagccauugccuggauccaaacaaugaggaagggggacacggcguuaaaggcugggcuuuugacgaugggaacgacguguggaugggacgaaccauuaaugagacaucaagacuugguuaugagacuuucaaggucaucgaaggcuggaguaaccccaaauccaaguugcagauuaauaggcaagugauaguagaucguggggaccggagcggauacucuggcaucuuuucaguugaggguaaaaguuguauuaaccgcugcuucuauguggaacugaucagagggaggaaggaggaaaccgagguccuauggacaagcaauuccaucguggucuuuuguggcacuucuggaaccuacggcacagggucguggccugauggagccgaccucaaccugaugccaauuuga

SEQ ID NO: 152004 - RNA, 1410 nt, Artificial Sequence; identical to SEQ ID NO: 151931
  derived and/or modified CDS sequence (opt3) from neuraminidase__InfluenzaA__AGW02112

SEQ ID NO: 152005 - RNA, 1410 nt, Artificial Sequence
  derived and/or modified CDS sequence (opt3) from neuraminidase__InfluenzaA__AGW02124
augaaccccaaucagaagaucauuaccauaggcagcgugucccugacaaucucuacuauuugcuucuuuaugcaaaucgccauucucaucacgaccgucacacuucacuucaaacaguacgaguuuaacucaccuccaaauaaccagguuaugcugugugaaccgacuauaaucgagagaaauauuaccgaaaucguguauuugacaaacaccacuauugagaaggaaaucugccccaaaccugcugaguacaggaauuggaguaagccacagugugggauaacaggauucgcacccuuuagcaaagacaacuccauucgguuaucugccgguggcgauaucuggguaacccgcgagccuuaugugucgugcgacccagauaaguguuaccaauucgcgcuggggcagggaacgacucuaaauaacguccauucaaauaacaccgugagcgaccgaacacccuaucguacucuccugaugaaugaacuuggcguuccuuuucaccuggguaccaaacaggugugcauugcuuggaguuccucuagcugucaugaugggaaggccugguugcacgucugcaucacaggagacgauaagaacgcaaccgccuccuucaucuacaauggcagacucguggacucaguaguuaguuggagcaaagagauucugaggacgcaggaaucugagugugugugcauaaacggcacuuguacagucgugaugaccgauggguccgcuucaggaaaggcagacacuaaaauccuguuuauugaggaagguaagaucgugcauacaagcacccucaguggcucugcccaacacgucgaggaaugcuccugcuauccacgguacccggggguucgcugugugugcagagauaacuggaagggaagcaauaggcccauaguagacauuaacaucaaagaucacucgaucgugucuuccuacgucuguucaggcuuagugggugacacgccucggaagaaugacaguagcuccucuagccauugccuggauccaaacaaugaggaagggggacacggcguuaaaggcugggcuuucgacgaugggaacgacguguggaugggacgcaccauuaaugagacaucacgacuugguuaugagacuuuuaaggucaucgaaggcuggaguaaccccaaauccaaguugcagauuaauagacaggugauaguagauaggggagaccggagcggguacucuggcaucuucucaguugaggguaaaaguuguauuaaccguugcuuuuauguggaacugauccgcgggagaaaggaggaaaccgagguccuauggacaagcaauuccaucguggucuucuguggcacuucuggaaccuacggcacagggucguggccugauggagccgaccucaaccugaugccaauuuga

SEQ ID NO: 152006 - RNA, 1410 nt, Artificial Sequence; identical to SEQ ID NO: 151919
  derived and/or modified CDS sequence (opt3) from neuraminidase__InfluenzaA__AGW02136

SEQ ID NO: 152007 - RNA, 1410 nt, Artificial Sequence; identical to SEQ ID NO: 151931
  derived and/or modified CDS sequence (opt3) from neuraminidase__InfluenzaA__AGW02148

SEQ ID NO: 152008 - RNA, 1410 nt, Artificial Sequence
  derived and/or modified CDS sequence (opt3) from neuraminidase__InfluenzaA__AGW02160
augaaccccaaucagaagaucauuaccauaggcagcgugucccugacaaucucuacuauuugcuucuuuaugcagaucgccauucucaucacgaccgucacacuucacuucaaacaguacgaguuugacucaccuccaaacaaucagguuaugcugugugaaccgacuauaaucgagagaaacauuaccgaaaucguguauuugacaaauaccacuauugagaaggaaaucugccccaaaccugcugaguacaggaacuggaguaagccacagugugggauaacaggauucgcacccuuuagcaaagauaauuccauucgguuaucugccgguggcgacaucuggguaacccgcgagccuuaugugucgugcgauccagacaaguguuaccaauucgcgcuggggcagggaacgacucuaaacaauguccauucaaacaauaccgugcgagaucguacacccuauagaacucuccugaugaacgaacuuggcguuccuuuucaccuggguaccaaacaggugugcauugcuuggagcaguuccucuugucaugacgggaaggccugguugcacgucugcaucacaggagaugacaagaaugcaaccgccagcuucaucuacaacggcaggcucguggauuccguaguuucauggaguaaagagauucugcggacgcaggaaagcgagugugugugcauaaauggcacuuguacagucgugaugaccgacgggucugcuuccggaaaggcagauacuaaaauccuguuuauugaggaagguaagaucgugcauacaucaacccucagcggcagugcccaacacgucgaggaaugcucuugcuauccacgcuacccggggguuagaugugugugcagggacaacuggaagggauccaaccggcccauaguagauauuaauaucaaagaccacagcaucgugucgucuuacgucuguuccggcuuagugggugacacgccucgcaagaacgauucaaguagcuccucucauugccuggacccaaauaacgaggaagggggacacggcguuaaaggcugggcuuucgaugacgggaaugauguguggaugggacgaaccauuaacgagacaagcagacuugguuaugagacuuuuaaggucaucgaaggcuggucaaaucccaaaaguaaguugcagauuaacaggcaagugauaguagaccgguccgaucguagcggguacucuggaaucuucucaguugagggcaaaaguuguauuaaucgcugcuuuuauguggaacugaucagagguaggaaggaggaaaccgagguccuauggacaagcaacuccaucguggucuucugugggacuucuggcaccuacggaacaggcucguggccugacggggccgaucucaaucugaugccaauuuga

SEQ ID NO: 152009 - RNA, 1410 nt, Artificial Sequence; identical to SEQ ID NO: 150194
  derived and/or modified CDS sequence (opt3) from neuraminidase__InfluenzaA__AGW02172

SEQ ID NO: 152010 - RNA, 1410 nt, Artificial Sequence; identical to SEQ ID NO: 150194
  derived and/or modified CDS sequence (opt3) from neuraminidase__InfluenzaA__AGW02184

SEQ ID NO: 152011 - RNA, 1410 nt, Artificial Sequence
  derived and/or modified CDS sequence (opt3) from neuraminidase__InfluenzaA__AGW02196
augaaccccaaucagaagaucauuaccauaggcagcgugucccugacaaucucuacuauuugcuucuuuaugcagaucgccauucucaucacgaccgucacacuucacuucaaacaguacgaguuuaacucaccuccaaauaaccagguuaugcugugugaaccgacuauaaucgagagaaauauuaccgaaaucguguauuugauuaacacaaccaucgagaaggaaauaugccccaaaccugcugaguacaggaauuggaguaagccacagugugggauuacuggauucgcacccuuuagcaaagacaacuccauccgguuaucugccgguggcgauauuuggguaacacgcgagccuuaugugucgugcgacccauacaaguguuaucaauucgcgcuggggcagggaaccacgcuaaauaacguccauucaaauaacacugugcgagaucguacccccuacagaacacuccugaugaaugaacuuggcguuccuuuucaccuggguacuaaacaggugugcaucgcuuggagcaguuccucuugucaugacgggaaggccugguugcacgucugcaucaccggagaugacaagaacgcaacagccagcuucauuuauaauggcaggcucguggauuccguaguuucauggaguaaagagauacugcggacccaggaaagcgagugugugugcaucaacggcacguguacugucgugaugacagacgggucugcuuccggaaaggcagauaccaaaauucuguuuaucgaggaagguaagauagugcauacuucaacacucagcggcagugcccaacacgucgaggaaugcucuugcuacccacgcuacccggggguuagaugugugugcagggacaacuggaagggauccaaucggcccauuguagauaucaacaucaaagaccacagcauugugucgucuuaugucuguuccggcuuagugggugauaccccucgcaagaaugacucaaguagcuccucucauugccuggacccaaacaaugaggaagggggacacggcguuaaaggcugggcuuucgaugacgggaacgauguguggaugggacgaacgaucaaugagaccagcagacuugguuacgagacauuuaaggucauugaaggcuggucaaaccccaaaaguaaguugcagauaaauaggcaagugaucguagaccguggggaucgguccggauauagcggcauuuucucuguugaggguaaaucauguaucaaccgcugcuuuuacguggaacugaucagagggaggaaggaggaaacugagguccuauggaccaguaauagcauuguggucuucuguggcacauccggaacuuauggcaccgggucuuggccugacggagccgaucucaaccugaugccaauauga

SEQ ID NO: 152012 - RNA, 1410 nt, Artificial Sequence; identical to SEQ ID NO: 151423
  derived and/or modified CDS sequence (opt3) from neuraminidase__InfluenzaA__AGW04174

SEQ ID NO: 152013 - RNA, 1410 nt, Artificial Sequence
  derived and/or modified CDS sequence (opt3) from neuraminidase__InfluenzaA__AGW25784
augaaccccaaucagaagaucauuaccauaggcagcguuucccugaucauugccacaaucugcuuccucaugcaaauugcuauccuugucacuacgguuacccugcacuuuaaacaguacggguauaacucuuugccuaauaaccaggugauguuaugugagccaacaauaaucgaaagaaauauuacugagaucguauaccugaccaacacaaccauugaaaaggagaucugcccgaaacuagcagaauauaggaauuggucaaagccccaguguaaaauaacuggauucgccccuuuuaguaaggacaacagcauucggcucuccgcggguggcgauaucugggugacacgcgagccauacgucucuugcgaccccuauaaguguuaccaauucgcucuggggcagggaaccacgcuuaauaacaaacauucgaaugauacugugcacgaccgaaccccuuaucguacacuguugaugaacgagcucggcguuccauuucaucuggguacuaaacaggugugcauugccuggucaagcaguuccugucacgaugggaaagcauggcugcauaucugcgucaccggacacgacgaaaaugccacagcuucuuucaucuacgauggcaagcucguggacagcauuggcuccuggucaaagaagauauuaagaacccaggagagugaauguguaugcaucaacgggacguguacuguugugaugacagauggaagcgcaucugguagggccgacaccaagauucuguuuaucgaggagggcaaaauaauucacaucucccaacuuucagggagcgcucagcaugucgaagagugcaguugcuacccccgguauccuggaauccgcugugugugcagagauaauuggaagggcucuaacaggccaauuguggacaucaacgucaaagauuacuccauuacuagcucguauguuuguucugguuuggugggggacacaccgcggaagaccgacaauuccucaaguagccacugccugaaccccaauaacgaagagggaggccauggcguaaaagggugggccuucgaugacggaaaugauguguggaugggucgcacgauauccgaaaaguuucgaucuggcuacgagaccuucaaagucaucaagggguggagcaagccuaacucaaaacuacagauuaauagacaggugaucguugacagggauaaccggaguggauauuccggcaucuuuagcguggaggguaagucuuguauuaaucguugcuucuacgucgaacucauacgcgggagaaaaagggaggcggaagugugguggacaucaaacaguaucguaguguuuuguggcacuagcggaaccuauggcacaggguccuggccagacggagcagauauuaaucugaugcccaucuga

SEQ ID NO: 152014 - RNA, 1350 nt, Artificial Sequence
  derived and/or modified CDS sequence (opt3) from neuraminidase__InfluenzaA__AGW27062
augaaccccaaucagaagaucgugaccauuggcagcauaugcauggucaucgggacaauuucccugaugcuccaaaucggaaacauuaucucuauauggguuucacacaguauccagacugguaaucagcaucagacggagccuauuagaaacaccaauuuccuuacagaaaacgccguggcuagcguaacucuggcaggcaauuccucuuuguguccaaucagggggugggccgugcacucgaaagacaacucaauucggaucggaagcaagggcgaugucuuugugauacgcgagccguucauuaguugcucccauuuagaaugucgaaccuuuuuccugacacaaggugcgcuacucaaugacaaacacucuaacgggaccguuaaggaucguagcccccauagaacucugauguccugcccuaucggagaggcuccaucacccuacaauaguagguuugaaagcguggccuggucugcauccgccugucacgacggcacaucauggcuugucauuggcaucagcgggccugauaacggagcuguggcaguacugaaauauaaugguaucauuaccgacacgauacggaguuggcgcaacaauaucuugagaacucaggagucugagugcgccuguguuaacggcuccugcuucaccgugaugacagaugggccaagcaacggacaggcuucguacaagauuuuuaagaucgaaaaaggcaaggucgugaaaucuguggagcucaaugcccccaacuaucacuacgaagaguguuccugcuauccugacgcgggugagauaacuugugucugcagggauaauuggcaugggucaaaccggccauggguuaguuucaaucagaaccuggaauaccaaauuggauauaucugcagcggcguguuuggcgacaauccgcgccccaacgaugggaccggauccugugguccuguaucuagcaauggcgcauacggggugaagggauucucauuuaaauacggcaacggugucuggaucgggcgaacaaagaguacccacuccagaagcggcuucgagaugauuugggacccaaauggauggacgggcacugauucugaauuuucaaugaagcaggacaucguggccauuacagacuggaguggguauagcggauccuucguucagcaucccgagcugaccggucucgauugcauaaggccuuguuucuggguggaauuaauccggggccguccaaaagagucuacuauuuggacaucggggagcuccaucucauuuugcggagucaacagugacaccgugucuuggagcuggcccgauggcgcugagcugccguucacgaucgacaaguga

SEQ ID NO: 152015 - RNA, 1410 nt, Artificial Sequence
  derived and/or modified CDS sequence (opt3) from neuraminidase__InfluenzaA__AGY14472
augaaccccaaucagaagaucauuaccauaggcagcgugucccugacacucgccacuaucugcuuccuuaugcagauugcuauccuggucacgaccguuacauugcacuuuaaacaguacgaguguaacucuacuccuaauaaccaggugauguuaugcgaaccaaccguaauugagagaaauaucacaaagauaguguaucugaccaacacuacagucgaaaaagagaucuguccgaagcccgcagaauacaggaauuggucaaaaccucagugcaagauuaccggguucgccccauuuaguaaggacaacagcauccggcuauccgcgggaggugauauuugggugacgcgcgagcccuauguuucuugugacccuaauaaaugcuaccaauucgcucucggccaggggacuacccugaacaaucgacauucgaacgauacagugcacgaccguacuccauauagaacccuucugaugaaugaguugggaauccccuuucaucucggcacaaagcaggucuguauagccuggucaagcaguuccugccacgaugguaaagcauggcugcauguguguguaaccgggcacgacaagaacgccacggcuucuuucauuuacgauggaaaacugguugacagcaucggcuccuggucaaagaagauucucaggacucaggaaagugagugcguguguaucaauggcacaugcaccgucgugaugacugaugggagcgcaucuggacgggccgacacaaaaaucuuauuuauugaagaggguaagauaauccacauuucccaacugucaggcagcgcucagcauguggaggaaugcaguuguuauccucgcuacccagggaucagaugcgucuguagggauaacuggaaaggaucuaaccggccgauaguugacauuaaugugaaggauuacuccaucaccagcucguauguaugcucuggccuugugggugacacgccccgcaaaaccgacaacuccucaaguagccacuguuugaauccuaacaaugaggaagggggacauggcgucaagggcugggccuucgaugacgggaacgauguguggaugggacgaacaaucuccgagaaauuuagaucugguuacgaaacuuucaagguuauuaagggcuggagcaaaccaaauucaaagcugcagaucaacaggcaagugauugucgaccgggauaaucguaguggguauuccggaauauuuagcguggagggcaaaucuugcaucaaccgcuguuucuacguagagcuaauuagagguaggaagcgggaagcggagguuugguggaccucaaauaguaucguggucuuuugcgggacaagcggcacuuauggaaccggcuccuggcccgacggggcagauaucaaccucaugccuauuuga

SEQ ID NO: 152016 - RNA, 1398 nt, Artificial Sequence
  derived and/or modified CDS sequence (opt3) from neuraminidase__InfluenzaA__AHA11501
augaaccccaaucagaagauccugugcaccagcgccacagcuauuauaaucggcgcaauugccgugcucaucgggauugcgaaccuuggacugaauaucgguuugcacuuaaaaccuggcuguaacugcucccauucucaaccagagacuacgaauaccucacagacaauaaucaacaauuacuauaacgaaacuaauauuaccaacauccagauggaggaaagaacaaguaggaauuucaacaaucugaccaaggggcuauguacuauuaacagcuggcacaucuacggaaaagacaaugcuguccggauaggcgaguccucugauguucucgugacacgcgaaccguauguaucgugcgaccccgaugagugucgauuuuacgcccugucacaggguaccacgauucgugggaagcauagcaacggaacuauccacgacagaagucaauauagggcacuuauuuccuggccucugucuagcccacccaccguguacaacucccgggucgagugcaucggcuggucaaguacaagcugucaugauggcaaaucucgcauguccaucugcauuucagggccuaauaacaaugccagcgcugugguuugguauaacagaaggccaguggcagaaauaaauacuugggcccggaacaucuugcgcacccaggagagugaaugugucugccacaauggagugugucccauuguauucacagacgguucugcuaccggcccugccgauacgcgaaucuacuacuuuaaggaggggaagauacucgagugggaaucccugacuggaacagcgaaacacauugaggaaugcagcugcuauggcgagagaaccgguaucacuuguacaugcagggacaacuggcaggggucgaaucggccaguuauccagauugauccgguggcaaugacccauacgucucaauacaucuguucccccguccugaccgacacaccucguccaaacgaucccaauauuggaaagugcaacgacccuuauccaggcaaugauaacaauggcgugaaaggguucucauaccucgacggagccaacacuugguuaggucgcaccauaaguacagcuagcagauccggcuaugaaaugcugaaggugcccaacgcccuuacugacgauaggucuaaaccgauccaggggcagaccauugucuugaaugcagacuggagcggauacucaggcaguuuuauggauuauugggcugagggugacuguuaccgggccugcuucuacguugagcugauccgagggcgcccuaaggaagauaaggugugguggacauccaacagcaucguaucuauguguucaaguaccgaguuucuaggccaguggaauuggcccgacggagcgagaauugaauauuuccucuga

SEQ ID NO: 152017 - RNA, 1410 nt, Artificial Sequence
  derived and/or modified CDS sequence (opt3) from neuraminidase__InfluenzaA__AHC57462
augaaccccaaucagaagaucauuaccauaggcagcgugucccugacaaucucuacuauuugcuucuuuaugcagaucgccauucucaucacgaccgucacacuucacuucaaacaguacgaguuuaacucaccuccaaauaaccagguuaugcugugugaaccgacuauaaucgagagaaauauuaccgaaaucguguauuugacaaacaccacuauugagaaggaaaucugccccaaauuagcugaguacaggaauuggaguaagccucagugugacauaacaggguucgcaccauuuagcaaagauaacuccauucggcugucugccggaggugacaucuggguaacccgcgagcccuaugugucgugcgauccugacaaguguuaccaauucgcgcuaggccaggggacgacucucaauaacguccauucaaauaacaccgugcgagaucguacaccauauagaacucugcuuaugaaugaacugggaguucccuuucacuugggcaccaaacaggugugcauugcuuggagcaguuccucuugucaugacgguaaggccuggcuccacgucugcaucacaggggaugacaagaacgcaaccgccagcuucaucuacaauggaaggcugguggauuccguaguuucauggaguaaagagauucugcggacgcaggaaagcgagugugugugcauaaacggcacuuguacagucgugaugaccgacggcucugcuuccgggaaggcagauacuaaaauccucuuuauugaggaaggaaagaucgugcauacaucaaccuuaagcgguagugcccaacacgucgaggaaugcucuugcuauccucgcuacccaggcguuagaugugugugcagggacaacuggaagggguccaaucggccgauaguagauauuaacaucaaagaccacagcaucgugucgucuuacgucuguuccggacuggugggcgacacgccccgcaagaaugauucaaguagcuccucucauugcugggacccuaacaaugaggaaggugggcacggaguuaaaggcugggcuuucgaugacggcaacgauguguggauggggcgaaccauuaaugagacaagcagacuuggauaugagacuuuuaaggucaucgaagguuggucaaacccaaaaaguaaguugcaagugaauaggcagguaauuguugaccggggcgaucguuccggguacagcggaauauucucuguggagggcaaaucauguaucaaccgcugcuuuuaugucgaacugauuagagguaggaaggaggaaaccgaggugcuauggacaaguaauagcaucgucguguucugugggacuuccggcaccuacggaacaggcucuuggcccgacggggccgaucucaaccugaugccuaucuga

SEQ ID NO: 152018 - RNA, 1410 nt, Artificial Sequence; identical to SEQ ID NO: 147566
  derived and/or modified CDS sequence (opt3) from neuraminidase__InfluenzaA__AHC57490

SEQ ID NO: 152019 - RNA, 1410 nt, Artificial Sequence
  derived and/or modified CDS sequence (opt3) from neuraminidase__InfluenzaA__AHC57514
augaaccccaaucagaagaucauuaccauaggcagcgugucccugacaaucucuacuauuugcuucuuuaugcagaucgccauucucaucacgaccgucacacuucacuucaaacaguacgaguuuuauucaccuccaaacaaucagguuaugcugugugaaccgacuauaaucgagagaaacauuaccgaaaucguguacuugacaaauaccacuauugagaaggaaaucugccccaaauuagcugaguauaggaacuggaguaagccucagugugacauaacaggguucgcaccauuuagcaaagauaauuccauucggcugucugccggaggugacaucuggguaacccgcgagcccuacgugucgugcgauccugacaaguguuaucaauucgcgcuaggccaggggacgacucucaacaauguccauucaaacaauaccgugcgagaucguacaccauacagaacucugcuuaugaacgaacugggaguucccuuucacuugggcaccaaacaggugugcauugcuuggagcaguuccucuugucaugacgguaaggccuggcuccacgucugcaucacaggggaugacaagaaugcaaccgccagcuucaucuauaacggaaggcugguggauuccguaguuucauggaguaaagagauucugcggacgcaggaaagcgagugugugugcauaaauggcacuuguacagucgugaugaccgacggcucugcuuccgggaaggcagauacuaaaauccucuuuauugaggaaggaaagaucgugcauacaucaaccuuaagcgguagugcccaacacgucgaggaaugcucuugcuacccucgcuacccaggcguuagaugugugugcagggacaacuggaagggguccaaccggccgauaguagauauuaauaucaaagaccacagcaucgugucgucuuaugucuguuccggacuggugggcgacacgccccgcaagaacgauucaaguagcuccucucauugccuugacccuaauaacgaggaaggugggcacggaguuaaaggcugggcuuucgaugacggcaaugauguguggauggggcgaaccauuaacgagacaagcagauugggauacgagacuuuuaaggucaucgaagguuggucaaauccaaaaaguaagcugcagauuaacaggcaagugauaguagaccggggcaaucguuccggguauagcggaaucuucucuguugagggcaaaucauguauuaaccgcugcuuuuacguggaacuaaucagagguaggaaggaggaaaccgagguccucuggacaaguaauagcaucguggucuucugugggacuuccggcaccuauggaacaggcucuuggcccgauggggccgaccugaaccuuaugccuauuuga

SEQ ID NO: 152020 - RNA, 1410 nt, Artificial Sequence; identical to SEQ ID NO: 152019
  derived and/or modified CDS sequence (opt3) from neuraminidase__InfluenzaA__AHC57526

SEQ ID NO: 152021 - RNA, 1410 nt, Artificial Sequence; identical to SEQ ID NO: 152019
  derived and/or modified CDS sequence (opt3) from neuraminidase__InfluenzaA__AHC57806

SEQ ID NO: 152022 - RNA, 1410 nt, Artificial Sequence; identical to SEQ ID NO: 152019
  derived and/or modified CDS sequence (opt3) from neuraminidase__InfluenzaA__AHC57818

SEQ ID NO: 152023 - RNA, 1410 nt, Artificial Sequence
  derived and/or modified CDS sequence (opt3) from neuraminidase__InfluenzaA__AHC57830
augaaccccaaucagaagaucauuaccauaggcagcgugucccugacaaucucuacuauuugcuucuuuaugcaaaucgccauucucaucacgaccgucacacuucacuucaaacaguacgaguuuaacucaccuccaaauaaccagguuaugcugugugaaccgacuauaaucgagagaaauauuaccgaaaucguguauuugacaaacaccacuauugagaaggaaaucugccccaaauuagcugaguacaggaauuggaguaagccucagugugacauaacaggguucgcaccauuuagcaaagauaacuccauucggcugucugccggaggugacaucuggguaacccgcgagcccuaugugucgugcgauccuaauaaguguuaccaauucgcgcuaggccaggggacgacucucaacaauguccauucaaacaauaccgugcgagaccguacaccauauagaacucugcuuaugaacgaacugggaguucccuuucacuugggcaccaaacaggugugcauugcuuggagcaguuccucuugucaugaugguaaggccuggcuccacgucugcaucacaggggacgauaagaaugcaaccgccagcuucaucuacaacggaaaacugguggacuccguaguuucauggaguaaggagauucugaggacgcaggaaagcgagugugugugcauaaacggcacuuguacagucgugaugaccgauggcucugcuuccgggaaagcagacacuaagauccucuuuauugaggaaggaaagaucgugcauacaucaaccuuaagcgguagugcccaacacgucgaggaaugcucuugcuauccucgguacccaggcguucgcugugugugcagagauaauuggaaaggguccaacaggccgauaguagacauuaauaucaaggaucacagcaucgugucgucuuacgucuguuccggacuggugggcgacacgccccggaaaaacgacucaaguagcuccucucauugccuugauccuaauaacgaggaaggugggcacggaguuaagggcugggcuuucgacgauggcaaugacguguggauggggcgcaccauuaacgagacaagccgauugggauaugagacuuuuaaagucaucgaagguuggucaaauccaaagaguaaacugcagauuaacagacaggugauaguagauaggggcaaucgguccggguacagcggaaucuucucuguugagggcaagucauguauuaaccguugcuuuuauguggaacuaauccgcgguagaaaggaggaaaccgagguccucuggacaaguaauagcaucguggucuucugugggacuuccggcaccuacggaacaggcucuuggcccgacggggccgaucugaaccuuaugccuauuuga

SEQ ID NO: 152024 - RNA, 1410 nt, Artificial Sequence; identical to SEQ ID NO: 152023
  derived and/or modified CDS sequence (opt3) from neuraminidase__InfluenzaA__AHC57971

SEQ ID NO: 152025 - RNA, 1410 nt, Artificial Sequence; identical to SEQ ID NO: 152019
  derived and/or modified CDS sequence (opt3) from neuraminidase__InfluenzaA__AHC57984

SEQ ID NO: 152026 - RNA, 1410 nt, Artificial Sequence
  derived and/or modified CDS sequence (opt3) from neuraminidase__InfluenzaA__AHC57996
augaaccccaaucagaagaucauuaccauaggcagcgugucccugacaaucucuacuauuugcuucuuuaugcagaucgccauucucaucacgaccgucacacuucacuucaaacaguacgaguuuuauucaccuccaaacaaucagguuaugcugugugaaccgacuauaaucgagagaaacauuaccgaaaucguguacuugacaaauaccacuauugagaaggaaaucugccccaaauuagcugaguauaggaacuggaguaagccucagugugacauaacaggguucgcaccauuuagcaaagauaauuccauucggcugucugccggaggugacaucuggguaacccgcgagcccuacgugucgugcgauccugacaaguguuaucaauucgcgcuaggccaggggacgacucucaacaauguccauucaaacaauaccgugcgagaucguacaccacacagaacucugcuuaugaacgaacugggaguucccuuucauuugggcaccaaacaggugugcauugcuuggagcaguuccucuugucacgacgguaaggccuggcuccaugucugcaucacaggggaugacaagaaugcaaccgccagcuucaucuacaacggaaggcugguggauuccguaguuucauggaguaaagagauucugcggacgcaggaaagcgagugugugugcauaaauggcacuuguacagucgugaugaccgacggcucugcuuccgggaaggcagauacuaaaauccucuuuauugaggaaggaaagaucgugcacacaucaaccuuaagcgguagugcccaacacgucgaggaaugcucuugcuauccucgcuacccaggcguuagaugugugugcagggacaacuggaagggguccaaccggccgauaguagauauuaauaucaaagaccauagcaucgugucgucuuacgucuguuccggacuggugggcgacacgccccgcaagaacgauucaaguagcuccucucacugccuugacccuaauaacgaggaaggugggcauggaguuaaaggcugggcuuucgaugacggcaaugauguguggauggggcgaaccauuaacgagacaagcagauugggauaugagacuuuuaaggucaucgaagguuggucaaauccaaaaaguaagcugcagauuaacaggcaagugauaguagaccggggcaaucguuccggguacagcggaaucuucucuguugagggcaaaucauguauuaaccgcugcuuuuauguggaacuaaucagagguaggaaggaggaaaccgagguccucuggacaaguaauagcaucguggucuucugugggacuuccggcaccuacggaacaggcucuuggcccgauggggccgaccugaaccuuaugccuauuuga

SEQ ID NO: 152027 - RNA, 1410 nt, Artificial Sequence; identical to SEQ ID NO: 150970
  derived and/or modified CDS sequence (opt3) from neuraminidase__InfluenzaA__AHC58008

SEQ ID NO: 152028 - RNA, 1410 nt, Artificial Sequence; identical to SEQ ID NO: 147566
  derived and/or modified CDS sequence (opt3) from neuraminidase__InfluenzaA__AHC58020

SEQ ID NO: 152029 - RNA, 1410 nt, Artificial Sequence
  derived and/or modified CDS sequence (opt3) from neuraminidase__InfluenzaA__AHC58032
augaaccccaaucagaagaucauuaccauaggcagcgugucccugacaaucucuacuauuugcuucuuuaugcaaaucgccauucucaucacgaccgucacacuucacuucaaacaguacgaguuuaacucaccuccaaauaaccagguuaugcugugugaaccgacuauaaucgagagaaauauuaccgaaaucguguauuugacaaacaccacuauugagaaggaaaucugccccaaauuagcugaguacaggaauuggaguaagccucagugugacauaacaggguucgcaccauuuagcaaagauaacuccauucggcugucugccggaggugacaucuggguaacccgcgagcccuaugugucgugcgauccuaauaaguguuaccaauucgcgcuaggccaggggacgacucucaacaauguccauucaaacaauaccgugcgagaccguacaccauauagaacucugcuuaugaacgaacugggaguucccuuucacuugggcaccaaacaggugugcauugcuuggagcaguuccucuugucaugaugguaaggccuggcuccacgucugcaucacaggggacgauaagaaugcaaccgccagcuucaucuacaacggaaaacugguggacuccguaguuucauggaguaaggagauucugaggacgcaggaaagcgagugugugugcauaaacggcacuuguacagucgugaugaccgauggcucugcuuccgggaaagcagacacuaagauccucuuuauugaggaaggaaagaucgugcauacaucaaccuuaagcgguagugcccaacacgucgaggaaugcucuugcuauccucgguacccaggcguucgcugugugugcagagauaauuggaaaggguccaacaggccgauaguagacauuaauaucaaggaucacagcaucgugucgucuuacgucuguuccggacuggugggcgacacgccccggaaaaacgacucaaguagcuccucucauugccuuaauccuaacaaugaggaaggugggcacggaguuaagggcugggcuuucgaugacggcaacgauguguggauggggcgcaccauuaaugagacaagccgauugggauaugagacuuuuaaagucaucgaagguuggucaaacccaaagaguaaacugcagauuaauagacaggugauaguagacaggggcaaccgguccggguacagcggaaucuucucuguugagggcaagucauguauuaaucguugcuuuuauguggaacuaauccgcgguagaaaggaggaaaccgagguccucuggacaaguaacagcaucguggucuucugugggacuuccggcaccuacggaacaggcucuuggcccgauggggccgaccugaaucuuaugccuauuuga

SEQ ID NO: 152030 - RNA, 1410 nt, Artificial Sequence; identical to SEQ ID NO: 150970
  derived and/or modified CDS sequence (opt3) from neuraminidase__InfluenzaA__AHC58053

SEQ ID NO: 152031 - RNA, 1410 nt, Artificial Sequence
  derived and/or modified CDS sequence (opt3) from neuraminidase__InfluenzaA__AHC58077
augaaccccaaucagaagaucauuaccauaggcagcgugucccugacaaucucuacuauuugcuucuuuaugcaaaucgccauucucaucacgaccgucacacuucacuucaaacaguacgaguuuuauucaccuccaaacaaucagguuaugcugagagaaccgacuauaaucgagaggaacauuaccgaaaucguguacuugacaaauaccacuacagagaaggaaauuugucccaaauuagcugaguaucggaacuggaguaagccucagugcgacaucaccggguucgcaccauuuagcaaagauaauuccauacgccugucugccggaggugacauuuggguaacgcgagagcccuacgugucgugugauccugacaagugcuaucaauucgcgcuaggccaggggacuacccucaacaauguccauucaaacaauacagugcgugauagaacuccauacaggacccugcuuaugaacgaacugggaguucccuuucacuugggcacaaaacagguguguaucgcuuggagcaguuccucuugccaugacgguaaggccuggcuccacgucuguauuaccggggaugacaagaaugcaacggccagcuucaucuauaacggacggcugguggauuccguaguuucauggaguaaagagauccugcgcacucaggaaagcgagugcguguguauuaauggcacaugcaccgucgugaugacugacggcucugcuuccgggaaggcagauacaaaaauacucuuuaucgaggaaggaaagauugugcauaccucaacguuaagcgguagugcccaacacgucgaggaauguucuugcuacccuagauacccaggcguuaggugcgugugucgggacaacuggaagggguccaaccgcccgaucguagauauaaauauuaaagaccacagcaucgugucgucuuaugucugcuccggacuggugggcgacacuccccgaaagaacgauucaaguagcuccucucauugucuugacccuaauaacgaggaaggugggcacggaguuaaaggcugggcuuucgaugacggcaaugauguguggauggggagaacaaucaacgagacuagcagguugggauacgagaccuuuaaggucauugaagguuggucaaauccaaaaaguaagcugcagaucaaccgucaggugauuguagaccggggcaaucgcuccggguauagcggaauauucucuguugagggcaaaucaugcaucaacagauguuuuuacguggaacuaauuaggggucggaaggaggaaacagagguccucuggaccaguaauagcaucguggucuucugcgggaccuccggcacauauggaaccggcucuuggcccgauggggccgaccugaaccuuaugccuaucuga

SEQ ID NO: 152032 - RNA, 1410 nt, Artificial Sequence; identical to SEQ ID NO: 152023
  derived and/or modified CDS sequence (opt3) from neuraminidase__InfluenzaA__AHC58089

SEQ ID NO: 152033 - RNA, 1410 nt, Artificial Sequence; identical to SEQ ID NO: 152019
  derived and/or modified CDS sequence (opt3) from neuraminidase__InfluenzaA__AHC58101

SEQ ID NO: 152034 - RNA, 1410 nt, Artificial Sequence
  derived and/or modified CDS sequence (opt3) from neuraminidase__InfluenzaA__AHC58113
augaaccccaaucagaagaucauuaccauaggcagcgugucccugacaaucucuacuauuugcuucuuuaugcagaucgccauucucaucacgaccgucacacuucacuucaaacaguacgaguuuuauucaccuccaaacaaucagguuaugcugugugaaccgacuauaaucgagagaaacauuaccgaaaucguguacuugacaaauaccacuauugagaaggaaaucugccccaaauuagcugaguauaggaacuggaguaagccucagugugacauaacaggguucgcaccauuuagcaaagauaauuccauucggcugucugccggaggugacaucuggguaacccgcgagcccuacgugucgugcgauccugacaaguguuaucaauucgcgcuaggccaggggacgacucucaacaauguccauucaaacaauaccgugcgagaucguacaccauacagaacucugcuuaugaacgaacugggaguucccuuucacuugggcaccaaacaggugugcauugcuuggagcaguuccucuugucaugacgguaaggccuggcuccacgucugcaucacaggggaugacaagaaugcaaccgccagcuucaucuauaacggaaggcugguggauuccguaguuucauggaguaaaaagauucugcggacgcaggagagcgaaugugugugcauaaauggcacuuguacagucgugaugaccgacggcucugcuuccgggaaagcagauacuaagauccucuuuauugaggagggaaagaucgugcauacaucaaccuuaagcgguagugcccaacacgucgaagagugcucuugcuacccucgcuacccaggcguuagaugugugugcagggacaacuggaaaggguccaaccggccgauaguagauauuaauaucaaggaccacagcaucgugucgucuuaugucuguuccggacuggugggcgacacgccccgcaaaaacgauucaaguagcuccucucauugccuugacccuaauaacgaagagggugggcacggaguuaagggcugggcuuucgaugacggcaaugauguguggauggggcgaaccauuaacgaaacaagcagauugggauacgagacuuuuaaagucaucgaggguuggucaaauccaaagaguaaacugcagauuaacaggcaagugauaguagaccggggcaaucguuccggguauagcggaaucuucucuguugaaggcaagucauguauuaaccgcugcuuuuacguggagcuaaucagagguaggaaggaagagaccgaaguccucuggacaaguaauagcaucguggucuucugugggacuuccggcaccuauggaacaggcucuuggcccgauggggccgaccugaaccuuaugccuauuuga

SEQ ID NO: 152035 - RNA, 1410 nt, Artificial Sequence; identical to SEQ ID NO: 152019
  derived and/or modified CDS sequence (opt3) from neuraminidase__InfluenzaA__AHC58129

SEQ ID NO: 152036 - RNA, 1410 nt, Artificial Sequence; identical to SEQ ID NO: 152019
  derived and/or modified CDS sequence (opt3) from neuraminidase__InfluenzaA__AHC58153

SEQ ID NO: 152037 - RNA, 1410 nt, Artificial Sequence; identical to SEQ ID NO: 152019
  derived and/or modified CDS sequence (opt3) from neuraminidase__InfluenzaA__AHC58165

SEQ ID NO: 152038 - RNA, 1410 nt, Artificial Sequence; identical to SEQ ID NO: 152023
  derived and/or modified CDS sequence (opt3) from neuraminidase__InfluenzaA__AHC58177

SEQ ID NO: 152039 - RNA, 1410 nt, Artificial Sequence
  derived and/or modified CDS sequence (opt3) from neuraminidase__InfluenzaA__AHC58189
augaaccccaaucagaagaucauuaccauaggcagcgugucccugacaaucucuacuauuugcuucuuuaugcagaucgccauucucaucacgaccgucacacuucacuucaaacaguacgaguuuaacucaccuccaaauaaccagguuaugcugugugaaccgacuauaaucgagagaaauauuaccgaaaucguguauuugacaaacaccacuauugagaaggaaaucugccccaaaccugcugaguacaggaauuggaguaagccacagugugacauaacaggguucgcacccuuuagcaaagauaacuccauucgguuaucugccggaggugacaucuggguaacccgcgagccuuaugugucgugcgauccagacaaguguuaccaauucgcgcugggccaggggacgacucuaaauaacguccauucaaauaacaccgugcgagaucguacacccuauagaacucuccugaugaaugaacuuggaguuccuuuucaccugggcaccaaacaggugugcauugcuuggagcaguuccucuugucaugacgguaaggccugguugcacgucugcaucacaggggaugacaagaacgcaaccgccagcuucaucuacaauggaaggcucguggauuccguaguuucauggaguaaagagauucugcggacgcaggaaagcgagugugugugcauaaacggcacuuguacagucgugaugaccgacggcucugcuuccgggaaggcagauacuaaaauccuguuuauugaggaaggaaagaucgugcauacaucaacccucagcgguagugcccaacacgucgaggaaugcucuugcuauccacgcuacccgggcguuagaugugugugcagggacaacuggaagggguccaaucggcccauaguagauauuaacaucaaagaccacagcaucgugucgucuuacgucuguuccggauuagugggcgacacgccucgcaagaaugauucaaguagcuccucucauugccuggacccaaacaaugaggaaggugggcacggaguuaaaggcugggcuuucgaugacggcaacgauguguggauggggcgaaccauuaaugagaugagcagacuuggauaugagacauuuaaggucaucgaagguuggucaaaccccaaaaguaaguugcagauuaauaggcaagugauaguagaccggggcgaucguuccggguacagcggaaucuucucuguugagggcaaaucauguauuaaccgcugcuuuuauguggaacugaucagagguaggaaggaggaaacugagguccuauggaccaguaauagcaucguggucuucugugggacauccggcacuuacggaaccggcucuuggccugacggggccgaucucaaccugaugccaauuuga

SEQ ID NO: 152040 - RNA, 1410 nt, Artificial Sequence; identical to SEQ ID NO: 152019
  derived and/or modified CDS sequence (opt3) from neuraminidase__InfluenzaA__AHC58201

SEQ ID NO: 152041 - RNA, 1410 nt, Artificial Sequence
  derived and/or modified CDS sequence (opt3) from neuraminidase__InfluenzaA__AHC58225
augaaccccaaucagaagaucauuaccauaggcagcgugucccugacaaucucuacuauuugcuucuuuaugcagaucgccauucucaucacgaccgucacacuucacuucaaacaguacgaguuuaacucaccuccaaauaaccagguuaugcugugugaaccgacuauaaucgagagaaauauuaccgaaaucguguauuugacaaacaccacuauugagaaggaaaucugccccaaaccugcugaguacaggaauuggaguaagccacagugugacauaacaggguucgcacccuuuagcaaagauaacuccauucgguuaucugccggaggugacaucuggguaacccgcgagccuuaugugucgugcgauccagacaaguguuaccaauucgcgcugggccaggggacgacucuaaauaacguccauucaaauaacaccgugcgagaucguacacccuauagaacucuccugaugaaugaacuuggaguuccuuuucaccugggcaccaaacaggugugcauugcuuggagcaguuccucuugucaugacgguaaggccugguugcacgucugcaucacaggggaugacaagaacgcaaccgccagcuucaucuacaauggaaggcucguggauuccguaguuucauggaguaaagagauucugcggacgcaggaaagcgagugugugugcauaaacggcacuuguacagucgugaugaccgacggcucugcuuccgggaaggcagauacuaaaauccuguuuauugaggaaggaaagaucgugcauacaucaacccucagcgguagugcccaacacgucgaggaaugcucuugcuauccacgcuacccgggcguuagaugugugugcagggacaacuggaagggguccaaucggcccauaguagauauuaacaucaaagaccacagcaucgugucgucuuacgucuguuccggauuagugggcgacacgccucgcaagaaugauucaaguagcuccucucauugccuggacccaaacaaugaggaaggugggcacggaguuaaaggcugggcuuucgaugacggcaacgauguguggauggggcgaaccauuaaugagacaagcagacuuggauaugagacuuuuaaggucaucgaagguuggucaaaccccaaaaguaaguugcagauuaauaggcaagugauaguaaaccggggcgaccguuccggguacagcggaaucuucucuguugagggcaaaucauguauuaaucgcugcuuuuauguggaacugaucagagguaggaaggaggaaaccgagguccuauggacaaguaacagcaucguggucuucugugggacuuccggcaccuacggaacaggcucuuggccugauggggccgaccucaaucugaugccaauuuga

SEQ ID NO: 152042 - RNA, 1410 nt, Artificial Sequence; identical to SEQ ID NO: 152023
  derived and/or modified CDS sequence (opt3) from neuraminidase__InfluenzaA__AHC58237

SEQ ID NO: 152043 - RNA, 1410 nt, Artificial Sequence; identical to SEQ ID NO: 152019
  derived and/or modified CDS sequence (opt3) from neuraminidase__InfluenzaA__AHC58249

SEQ ID NO: 152044 - RNA, 1410 nt, Artificial Sequence; identical to SEQ ID NO: 147566
  derived and/or modified CDS sequence (opt3) from neuraminidase__InfluenzaA__AHC58273

SEQ ID NO: 152045 - RNA, 1410 nt, Artificial Sequence; identical to SEQ ID NO: 152023
  derived and/or modified CDS sequence (opt3) from neuraminidase__InfluenzaA__AHC58363

SEQ ID NO: 152046 - RNA, 1410 nt, Artificial Sequence; identical to SEQ ID NO: 150970
  derived and/or modified CDS sequence (opt3) from neuraminidase__InfluenzaA__AHC58375

SEQ ID NO: 152047 - RNA, 1410 nt, Artificial Sequence; identical to SEQ ID NO: 152023
  derived and/or modified CDS sequence (opt3) from neuraminidase__InfluenzaA__AHC58387

SEQ ID NO: 152048 - RNA, 1410 nt, Artificial Sequence; identical to SEQ ID NO: 152023
  derived and/or modified CDS sequence (opt3) from neuraminidase__InfluenzaA__AHC58399

SEQ ID NO: 152049 - RNA, 1410 nt, Artificial Sequence; identical to SEQ ID NO: 152019
  derived and/or modified CDS sequence (opt3) from neuraminidase__InfluenzaA__AHC58411

SEQ ID NO: 152050 - RNA, 1410 nt, Artificial Sequence; identical to SEQ ID NO: 150970
  derived and/or modified CDS sequence (opt3) from neuraminidase__InfluenzaA__AHC58423

SEQ ID NO: 152051 - RNA, 1410 nt, Artificial Sequence; identical to SEQ ID NO: 152023
  derived and/or modified CDS sequence (opt3) from neuraminidase__InfluenzaA__AHC58459

SEQ ID NO: 152052 - RNA, 1410 nt, Artificial Sequence
  derived and/or modified CDS sequence (opt3) from neuraminidase__InfluenzaA__AHC58471
augaaccccaaucagaagaucauuaccauaggcagcgugugcaugacaaucgggauggccaaccugauucuccaaaucggaaauauuaucuccauauggaucucucacucaauucagcuugguaaccagaaucagaucgagacuuguaaccaaagugucauuacguacgaaaauaacaccuggguuaaucagacauaugugaacaucagcaauacuaacuucgcugcaggccagccuguaguguccgucaaacuggccggaaauucuucguugugcccagugucagggugggcgauauacagcaaggacaacaguauuagaaucggcuccaaaggugauguuuuugugauuagggagccguucaucucuuguagccccuuagaaugccggaccuuuuuccugacacagggggcucuacucaaugacaagcauuccaacggaaccaucaaagaucgcucaccuuaucgaacucugaugaguuguccaauuggcgagguccccagcccuuacaacucucguuuugaauccguggccuggucagcaagcgccugccacgacggcauaaauuggcuuacaaucgggauuaguggaccagauaacggugcuguagcaguucugaaguauaauggcaucauaaccgacacgauuaagucuuggagaaacaauaucuugaggacucaagaguccgagugugccugcgugaacgggagcuguuucaccgucaugacagauggacccucggacggccaggcuucuuacaaaaucuuucggauugaaaaggguaaaaucgugaaguccguggagaugaaugccccuaacuaucauuacgaagagugcucauguuacccagauaguagcgagauuacuugcgucugccgcgacaauuggcacggggcgaacagaccguggguuuccuucaaucagaaccucgaauaucagauaggauacaucuguucuggcguguuuggcgauaaucccaggccuaacgacaaaaccgggagcugcggaccaguaucaaguaauggugcaaacggcgugaagggguucuccuuuaaguauggaaacggcgucuggauuggucggacaaaaagcaucucuucacgcaauggguucgagaugaucugggaucccaacggcuggaccggaacggacaauaacuuuaguauuaagcaagacauagugggcaucaaugaauggagcggguacuccggaucuuucguucagcauccugagcugacuggucuggauuguauucgaccaugcuucuggguggaacucaucagaggcaggcccaaagagaacacaauuuggaccucggggagcuccaucucauuuuguggagucaauagugacacugugggcuggucuuggccggauggugccgaguuaccuuucacaauagacaaguga

SEQ ID NO: 152053 - RNA, 1410 nt, Artificial Sequence; identical to SEQ ID NO: 152019
  derived and/or modified CDS sequence (opt3) from neuraminidase__InfluenzaA__AHC58482

SEQ ID NO: 152054 - RNA, 1410 nt, Artificial Sequence; identical to SEQ ID NO: 152023
  derived and/or modified CDS sequence (opt3) from neuraminidase__InfluenzaA__AHC58494

SEQ ID NO: 152055 - RNA, 1410 nt, Artificial Sequence
  derived and/or modified CDS sequence (opt3) from neuraminidase__InfluenzaA__AHC58518
augaaccccaaucagaagaucauuaccauaggcagcgugucccugacaaucucuacuauuugcuucuuuaugcaagucgccauccucauuacgaccguuacacuucacuucaaacaguacgaguuuaacucaccuccaaauaaccaggugaugcugugugaaccgacuaucauagagagaaauaucaccgaaauuguauauuugacaaacaccacuaucgagaaggaaauuugccccaaauuagcugaguacaggaauuggaguaagccucagugugacaucacaggguucgcaccauuuagcaaagauaacuccauacggcugucugccggaggugacauuugggugacccgcgagcccuaugucucgugcgauccugacaaguguuaccaauucgcgcuaggccaggggacgacucucaauaacgugcauucaaauaacaccguucgagaucguacaccauauagaacucugcuuaugaaugaacugggagugcccuuucacuugggcaccaagcaggucugcaucgcuuggagcaguuccucuugucaugacgguaaagccuggcuccacgugugcauuacaggggaugacaagaacgcaaccgccagcuucaucuacaauggaaaacugguagauuccguugugucauggaguaaggagauccugaggacgcaggaaagcgagugugucugcauuaacggcacuuguacaguggugaugaccgacggcucugcuuccgggaaagcagauacuaagauacucuuuaucgaggaaggaaagauuguccauacaucaaccuuaagcgguagugcccaacacguugaggaaugcucuugcuauccucgguacccaggcgugcgcuguguaugcagagacaacuggaaaggguccaauaggccgaucguggauauaaacauuaaggaccacagcaucgucucgucuuacguguguuccggacugguuggcgacacgccccggaaaaaugauucaaguagcuccucucauugccuugacccuaacaaugaggaaggugggcacggagugaagggcugggcuuucgaugacggcaacgaugucuggauggggcgcaccaucaaugagacaagccgauugggauaugagacuuuuaaagugauugaagguuggucaaacccaaagaguaaacugcagaucaauagacagguaauuguugacaggggcaaccgguccggguacagcggaauauucucuguggagggcaagucauguaucaaucguugcuuuuaugucgaacuaauucgcgguagaaaggaggaaaccgaggugcucuggacaaguaacagcaucgucguguucugugggacuuccggcaccuacggaacaggcucuuggcccgauggggccgaccugaaucuuaugccuaucuga

SEQ ID NO: 152056 - RNA, 1410 nt, Artificial Sequence; identical to SEQ ID NO: 152019
  derived and/or modified CDS sequence (opt3) from neuraminidase__InfluenzaA__AHC58530

SEQ ID NO: 152057 - RNA, 1410 nt, Artificial Sequence; identical to SEQ ID NO: 152019
  derived and/or modified CDS sequence (opt3) from neuraminidase__InfluenzaA__AHC58554

SEQ ID NO: 152058 - RNA, 1410 nt, Artificial Sequence; identical to SEQ ID NO: 152019
  derived and/or modified CDS sequence (opt3) from neuraminidase__InfluenzaA__AHC58566

SEQ ID NO: 152059 - RNA, 1410 nt, Artificial Sequence
  derived and/or modified CDS sequence (opt3) from neuraminidase__InfluenzaA__AHC58578
augaaccccaaucagaagaucauuaccauaggcagcgugucccugacagucucuacuaucugcuucuuuaugcaaauugccauccucauuacgaccguuacacuucacuucaaacaguacgaguuuuauucaccuccaaacaaucaggugaugcugugugaaccgacuaucauagagagaaacaucaccgaaauuguauacuugacaaauaccacuaucgagaaggaaauuugccccaaauuagcugaguauaggaacuggaguaagccucagugugacaucacaggguucgcaccauuuagcaaagauaauuccauacggcugucugccggaggugacauuugggugacccgcgagcccuacgucucgugcgauccugacaaguguuaucaauucgcgcuaggccaggggacgacucucaacaaugugcauucaaacaauaccguucgagaucguacaccauacagaacucugcuuaugaacgaacugggagugcccuuucacuugggcaccaagcaggucugcaucgcuuggagcaguuccucuugucaugacgguaaagccuggcuccacgugugcauuacaggggaugacaagaaugcaaccgccagcuucaucuauaacggaaggcugguagauuccguugugucauggaguaaagagauccugcggacgcaggaaagcgagugugucugcauuaauggcacuuguacaguggugaugaccgacggcucugcuuccgggaaggcagauacuaaaauacucuuuaucgaggaaggaaagauuguccauacaucaaccuuaagcgguagugcccaacacguugaggaaugcucuugcuacccucgcuacccaggcgugagauguguaugcagggacaacuggaagggguccaaccggccgaucguggauauaaauauuaaagaccacagcaucgucucgucuuauguguguuccggacugguuggcgacacgccccgcaagaacgauucaaguagcuccucucauugccuugacccuaauaacgaggaaggugggcacggagugaaaggcugggcuuucgaugacggcaaugaugucuggauggggcgaaccaucaacgagacaagcagauugggauacgagacuuuuaaggugauugaagguuggucaaauccaaaaaguaagcugcagaucaacaggcagguaauuguugaccggggcaaucguuccggguauagcggaauauucucuguggagggcaaaucauguaucaaccgcugcuuuuacgucgaacuaauuagagguaggaaggaggaaaccgaggugcucuggacaaguaauagcaucgucguguucugugggacuuccggcaccuauggaacaggcucuuggcccgauggggccgaccugaaccuuaugccuaucuga

SEQ ID NO: 152060 - RNA, 1410 nt, Artificial Sequence; identical to SEQ ID NO: 147566
  derived and/or modified CDS sequence (opt3) from neuraminidase__InfluenzaA__AHC58590

SEQ ID NO: 152061 - RNA, 1410 nt, Artificial Sequence; identical to SEQ ID NO: 152055
  derived and/or modified CDS sequence (opt3) from neuraminidase__InfluenzaA__AHC58602

SEQ ID NO: 152062 - RNA, 1410 nt, Artificial Sequence; identical to SEQ ID NO: 152019
  derived and/or modified CDS sequence (opt3) from neuraminidase__InfluenzaA__AHC58614

SEQ ID NO: 152063 - RNA, 1410 nt, Artificial Sequence; identical to SEQ ID NO: 152019
  derived and/or modified CDS sequence (opt3) from neuraminidase__InfluenzaA__AHC58626

SEQ ID NO: 152064 - RNA, 1410 nt, Artificial Sequence; identical to SEQ ID NO: 152019
  derived and/or modified CDS sequence (opt3) from neuraminidase__InfluenzaA__AHC58638

SEQ ID NO: 152065 - RNA, 1410 nt, Artificial Sequence; identical to SEQ ID NO: 152019
  derived and/or modified CDS sequence (opt3) from neuraminidase__InfluenzaA__AHC58650

SEQ ID NO: 152066 - RNA, 1410 nt, Artificial Sequence
  derived and/or modified CDS sequence (opt3) from neuraminidase__InfluenzaA__AHC58662
augaaccccaaucagaagaucauuaccauaggcagcgugucccugacaaucucuacuauuugcuucuuuaugcaaacggccauccucauuaccacagucacucuucacuucaaacaguacgaguuuaacucaccuccaaauaaccagguuaugcugugugaaccgaccaucauagagagaaauaucacagaaauuguguauuugaccaacacuacaaucgagaaggaaauuugccccaaauuagcugaguacaggaauuggaguaagccucagugugacaucaccggguucgcaccauuuagcaaagauaacuccauacggcugucugccggaggugacauuuggguaacgcgcgagcccuaugugucgugcgauccugacaaguguuaccaauucgcgcuaggccaggggacuacccucaauaacguccauucaaauaacacagugcgagaucguacuccauauagaacccugcuuaugaaugaacugggaguucccuuucacuugggcacaaaacaggugugcaucgcuuggagcaguuccucuugucaugacgguaaggccuggcuccacgucugcauuaccggggaugacaagaacgcaacggccagcuucaucuacaauggaaaacugguggauuccguaguuucauggaguaaggagauccugaggacucaggaaagcgagugugugugcauuaacggcacauguaccgucgugaugacugacggcucugcuuccgggaaagcagauacaaagauacucuuuaucgaggaaggaaagauugugcauaccucaacguuaagcgguagugcccaacacgucgaggaaugcucuugcuauccucgguacccaggcguucgcugugugugcagagacaacuggaaaggguccaauaggccgaucguagauauaaacauuaaggaccacagcaucgugucgucuuacgucuguuccggacuggugggcgacacuccccggaaaaaugauucaaguagcuccucucauugccuugacccuaacaaugaggaaggugggcacggaguuaagggcugggcuuucgaugacggcaacgauguguggauggggcgcacaaucaaugagacuagccgauugggauaugagaccuuuaaagucauugaagguuggucaaacccaaagaguaaacugcagaucaauagacaggugauuguagacaggggcaaccgguccggguacagcggaauauucucuguugagggcaagucauguaucaaucguugcuuuuauguggaacuaauucgcgguagaaaggaggaaacagagguccucuggaccaguaacagcaucguggucuucugugggaccuccggcacauacggaaccggcucuuggcccgauggggccgaccugaaucuuaugccuaucuga

SEQ ID NO: 152067 - RNA, 1410 nt, Artificial Sequence
  derived and/or modified CDS sequence (opt3) from neuraminidase__InfluenzaA__AHC58686
augaaccccaaucagaagaucauuaccauaggcagcgugucccugacaaucucuacuauuugcuucuuuaugcaaaucgccauucucaucacgaccgucacacuucacuucaaacaguacgaguuuaacucaccuccaaauaaccagguugugcugugugaaccgacuauaaucgagagaaauauuaccgaaaucguauauuugacaaacaccacuauugagaaggaaaucugccccaaaccugcugaguacaggaauuggaguaagccacagugugacauaacaggguucgcacccuuuagcaaagauaacuccauucgguuaucugccggaggugacaucugggugacccgcgagccuuaugucucgugcgauccagacaaguguuaccaauucgcgcugggccaggggacgacucuaaauaacgugcauucaaauaacaccguucgagaucguacacccuauagaacucuccugaugaaugaacuuggagugccuuuucaccugggcaccaagcaggucugcauugcuuggagcaguuccucuugucaugacgguaaagccugguugcacgugugcaucacaggggaugacaagaacgcaaccgccagcuucaucuacaauggaaggcucguagauuccguugugucauggaguaaagagauucugcggacgcaggaaagcgagugugucugcauaaacggcacuuguacaguggugaugaccgacggcucugcuuccgggaaggcagauacuaaaauccuguuuauugaggaaggaaagaucguccauacaucaacccucagcgguagugcccaacacguugaggaaugcucuugcuauccacgcuacccgggcgugagauguguaugcagggacaacuggaagggguccaaucggcccauaguggauauuaacaucaaagaccacagcaucgucucgucuuacguguguuccggauuaguuggcgacacgccucgcaagaaugauucaaguagcuccucucauugccuggacccaaacaaugaggaaggugggcacggagugaaaggcugggcuuucgaugacggcaacgaugucuggauggggcgaaccauuaaugagacaagcagacuuggauaugagacuuuuaaggugaucgaagguuggucaaaccccaaaaguaaguugcagauuaauaggcagguaauaguugaccggggcgaucguuccggguacagcggaaucuucucuguggagggcaaaucauguauuaaccgcugcuuuuaugucgaacugaucagagguaggaaggaggaaaccgaggugcuauggacaaguaauagcaucgucguguucugugggacuuccggcaccuacggaacaggcucuuggccugacggggccgaucucaaccugaugccaauuuga

SEQ ID NO: 152068 - RNA, 1410 nt, Artificial Sequence
  derived and/or modified CDS sequence (opt3) from neuraminidase__InfluenzaA__AHC58698
augaaccccaaucagaagaucauuaccauaggcagcgugucccugacaaucucuacuauuugcuucuuuaugcaaaucgccauucucaucacgaccgucacacuucacuucaaacaguacgaguuuaacucaccuccaaauaaccagguuaugcugugugaaccgacuauaaucgagagaaauauuaccgaaaucguguauuugacaaacaccacuauugagaaggaaaucugccccaaauuagcugaguacaggaauuggaguaagccucagugugacauaacaggguucgcaccauuuagcaaagauaacuccauucggcugucugccggaggugacaucuggguaacccgcgagcccuaugugucgugcgauccugacaaguguuaccaauucgcgcuaggccaggggacgacucucaauaacguccauucaaauaacaccgugcgagaucguacaccauauagaacucugcuuaugaaugaacugggaguucccuuucacuugggcaccaaacaggugugcauugcuuggagcaguuccucuugucaugacgguaaggccuggcuccacgucugcaucacaggggaugacaagaacgcaaccgccagcuucaucuacaauggaaggcugguggauuccguaguuucauggaguaaagagauucugcggacgcaggaaagcgagugugugugcauaaacggcacuugugcugucgugaugacagacggcucugcauccgggaaggccgauaccaaaauccucuuuauugaggaaggaaagaucgugcauacuucaacauuaagcgguagugcucaacacgucgaggaaugcucuugcuauccucgcuacccaggcguuagaugugugugcagggacaacuggaagggguccaaucggccgauaguagauauuaacaucaaagaccacagcaucgugucgucuuacgucuguuccggacuggugggcgacacccccaggaagaaugauucaaguagcuccucucauugccuugacccuaacaaugaggaaggugggcacggaguuaaaggcugggccuucgaugacggcaacgauguguggauggggcgaacgauuaaugagaccagcagauugggauaugagacauuuaaggucaucgaagguuggucaaacccaaaaaguaagcugcagauuaaucgccaggugauaguagaccggggcaaccguuccggguacagcggaaucuucucuguugagggcaaaucauguauuaaucgcugcuuuuauguggaacuaaucagagguaggaaggaggaaacugagguccucuggaccaguaacagcaucguggucuucugugggacauccggcacuuacggaaccggcucuuggcccgauggggcggaccugaaucuuaugccuauuuga

SEQ ID NO: 152069 - RNA, 1410 nt, Artificial Sequence; identical to SEQ ID NO: 150970
  derived and/or modified CDS sequence (opt3) from neuraminidase__InfluenzaA__AHC58710

SEQ ID NO: 152070 - RNA, 1410 nt, Artificial Sequence; identical to SEQ ID NO: 150970
  derived and/or modified CDS sequence (opt3) from neuraminidase__InfluenzaA__AHC58722

SEQ ID NO: 152071 - RNA, 1410 nt, Artificial Sequence
  derived and/or modified CDS sequence (opt3) from neuraminidase__InfluenzaA__AHC58734
augaaccccaaucagaagaucauuaccauaggcagcgugucccugacaaucucuacuauuugcuucuuuaugcaaaucgccauucucaucacgaccgucacacuucacuucaaacaguacgaguuuaacucaccuccaaauaaccagguuaugcugugugaaccgacuauaaucgagagaaauauuaccgaaaucguguauuugacaaacaccacuauugagaaggaaaucugccccaaauuagcugaguacaggaauuggaguaagccucagugugacauaacaggguucgcaccauuuagcaaagauaacuccauucggcugucugccggaggugacaucuggguaacccgcgagcccuaugugucgugcgauccuaauaaguguuaccaauucgcgcuaggccaggggacgacucucaacaauguccauucaaacaauaccgugcgagaccguacaccauauagaacucugcuuaugaacgaacugggaguucccuuucacuugggcaccaaacaggugugcauugcuuggagcaguuccucuugucaugaugguaaggccuggcuccacgucugcaucacaggggacgauaagaaugcaaccgccagcuucaucuacaacggaaaacugguggacuccguaguuucauggaguaaggagauucugaggacgcaggaaagcgagugugugugcauaaacggcacuuguacagucgugaugaccgauggcucugcuuccgggaaagcagacacuaagauccucuuuauugaggaaggaaagaucgugcauacaucaaccuuaagcgguagugcccaacacgucgaggaaugcucuugcuauccucgguacccaggcauacgcuguguuugcagagauaauuggaaaggguccaacaggccgauuguggacaucaauaucaaggaucacagcauuguaucgucuuacguguguuccggacuggucggcgacacgccccggaaaaacgacucaaguagcuccucucauugccuugauccuaauaacgaggaaggugggcacggagugaagggcugggcuuucgacgauggcaaugacguuuggauggggcgcaccaucaacgagacaagccgauugggauaugagacuuuuaaagugauugaagguuggucaaauccaaagaguaaacugcagauaaacagacaggucaucguggauaggggcaaucgguccggguacagcggaauuuucucuguagagggcaagucauguaucaaccguugcuuuuauguugaacuaauccgcgguagaaaggaggaaaccgaggugcucuggacaaguaauagcauugucguguucugugggacuuccggcaccuacggaacaggcucuuggcccgacggggccgaucugaaccuuaugccuauauga

SEQ ID NO: 152072 - RNA, 1410 nt, Artificial Sequence; identical to SEQ ID NO: 152019
  derived and/or modified CDS sequence (opt3) from neuraminidase__InfluenzaA__AHC58746

SEQ ID NO: 152073 - RNA, 1410 nt, Artificial Sequence; identical to SEQ ID NO: 152023
  derived and/or modified CDS sequence (opt3) from neuraminidase__InfluenzaA__AHC58758

SEQ ID NO: 152074 - RNA, 1410 nt, Artificial Sequence; identical to SEQ ID NO: 152019
  derived and/or modified CDS sequence (opt3) from neuraminidase__InfluenzaA__AHC58770

SEQ ID NO: 152075 - RNA, 1410 nt, Artificial Sequence; identical to SEQ ID NO: 147566
  derived and/or modified CDS sequence (opt3) from neuraminidase__InfluenzaA__AHC58782

SEQ ID NO: 152076 - RNA, 1410 nt, Artificial Sequence; identical to SEQ ID NO: 152019
  derived and/or modified CDS sequence (opt3) from neuraminidase__InfluenzaA__AHC58806

SEQ ID NO: 152077 - RNA, 1410 nt, Artificial Sequence
  derived and/or modified CDS sequence (opt3) from neuraminidase__InfluenzaA__AHC58818
augaaccccaaucagaagaucauuaccauaggcagcgugucccugacaaucucuacuauuugcuucuuuauccagauugccauccucauaacgaccgucacacuucacuucaaacaguacgaguuuaacucaccuccaaauaaccagguuaugcugugugaaccgacuaucauugagagaaauaucaccgaaauuguguauuugacaaacaccacuaucgagaaggaaauaugccccaaauuagcugaguacaggaauuggaguaagccucagugugacauuacaggguucgcaccauuuagcaaagauaacuccauccggcugucugccggaggugacauuuggguaacccgcgagcccuaugugucgugcgauccugacaaguguuaccaauucgcgcuaggccaggggacgacucucaauaacguccauucaaauaacaccgugcgagaucguacaccauauagaacucugcuuaugaaugaacugggaguucccuuucacuugggcaccaaacaggugugcaucgcuuggagcaguuccucuugucaugacgguaaggccuggcuccacgucugcaucacaggggaugacaagaacgcaaccgccagcuucauuuacaauggaaggcugguggauuccguaguuucauggaguaaagagauacugcggacgcaggaaagcgagugugugugcaucaacggcacuuguacagucgugaugaccgacggcucugcuuccgggaaggcagauacuaaaauucucuuuaucgaggaaggaaagauagugcauacaucaaccuuaagcgguagugcccaacacgucgaggaaugcucuugcuauccucgcuacccaggcguuagaugugugugcagggacaacuggaagggguccaaucggccgauuguagauaucaacaucaaagaccacagcauugugucgucuuacgucuguuccggacuggugggcgacacgccccgcaagaaugauucaaguagcuccucucauugccuugacccuaacaaugaggaaggugggcacggaguuaaaggcugggcuuucgaugacggcaacgauguguggauggggcgaaccaucaaugagacaagcagauugggauaugagacuuuuaaggucauugaagguuggucaaacccaaaaaguaagcugcagauaaauaggcaagugaucguagaccggggcaaccguuccggguacagcggaauuuucucuguugagggcaaaucauguaucaaucgcugcuuuuauguggaacuaaucagagguaggaaggaggaaaccgagguccucuggacaaguaacagcauuguggucuucugugggacuuccggcaccuacggaacaggcucuuggcccgauggggccgaccugaaucuuaugccuauauga

SEQ ID NO: 152078 - RNA, 1410 nt, Artificial Sequence; identical to SEQ ID NO: 152068
  derived and/or modified CDS sequence (opt3) from neuraminidase__InfluenzaA__AHC58830

SEQ ID NO: 152079 - RNA, 1410 nt, Artificial Sequence; identical to SEQ ID NO: 152019
  derived and/or modified CDS sequence (opt3) from neuraminidase__InfluenzaA__AHC58842

SEQ ID NO: 152080 - RNA, 1410 nt, Artificial Sequence
  derived and/or modified CDS sequence (opt3) from neuraminidase__InfluenzaA__AHC58866
augaaccccaaucagaagaucauuaccauaggcagcgugucccugacaaucucuacuauuugcuucuuuaugcagaucgccauucucaucacgaccgucacacuucacuucaaacagugugaguuuaacucaccuccaaauaacagaguuaugcugugcgaaccgacuauaaucgagaggaauauuaccgaaaucguguacuugacaaacaccacuauugagaaggaaaucugucccaaauuagcugaguaucggaauuggaguaagccucagugcgacauaacaggguucgcaccauuuagcaaagauaacuccauucgccugucugccggaggugacaucuggguaacccgagagcccuacgugucgugugauccuaauaagugcuaucaguucgcgcuaggccaagggacgacucucaacaauguccauucaaacaauaccgugcgugacagaacaccauacaggacucugcuuaugaacgaacugggaguucccuuucacuugggcaccaaacagguguguauugcuuggagcaguuccucuugccaugaugguaaggccuggcuccacgucuguaucacaggggacgauaagaaugcaaccgccagcuucaucuauaacggaaaacugguggacuccguaguuucauggaguaaggagauucugcggacgcaggaaagcgagugcguguguauaaacggcacuugcacagucgugaugaccgauggcucugcuuccgggaaagcagacacuaagauccucuuuauugaggaaggaaagaucgugcauacaucaaccuuaagcgguagugcccagcacgucgaggaaugcucuuguuacccucgcuauccaggcguuagaugcguguguagggauaauuggaaaggguccaaccggccgauaguagacauuaauaucaaggaucacagcaucgugucgucuuacgucugcuccggacuggugggcgacacgccccgcaaaaacgacucaaguagcuccucucauugucuugauccuaauaacgaggaaggugggcacggaguuaagggcugggcuuucgacgauggcaaugacguguggauggggcgaaccauuaacgagacaagcagauugggauacgagacuuuuaaagucaucgaagguuggucaaauccaaagaguaaacugcaaauuaacaggcaagugauaguagaucggggcaaucguuccggguauagcggaaucuucucuguugagggcaagucaugcauuaaccgcuguuuuuacguggaacuaaucagagguaggaaggaggaaaccgggguccucuggacaaguaauagcaucguggucuucugcggcacuuccggaaccuauggcacagggucuuggcccgacggagccgaucugaaccuuaugccuauuuga

SEQ ID NO: 152081 - RNA, 1410 nt, Artificial Sequence; identical to SEQ ID NO: 152068
  derived and/or modified CDS sequence (opt3) from neuraminidase__InfluenzaA__AHC58878

SEQ ID NO: 152082 - RNA, 1410 nt, Artificial Sequence; identical to SEQ ID NO: 152019
  derived and/or modified CDS sequence (opt3) from neuraminidase__InfluenzaA__AHC58890

SEQ ID NO: 152083 - RNA, 1410 nt, Artificial Sequence; identical to SEQ ID NO: 152023
  derived and/or modified CDS sequence (opt3) from neuraminidase__InfluenzaA__AHC58902

SEQ ID NO: 152084 - RNA, 1410 nt, Artificial Sequence; identical to SEQ ID NO: 152019
  derived and/or modified CDS sequence (opt3) from neuraminidase__InfluenzaA__AHC58996

SEQ ID NO: 152085 - RNA, 1410 nt, Artificial Sequence; identical to SEQ ID NO: 152019
  derived and/or modified CDS sequence (opt3) from neuraminidase__InfluenzaA__AHC59008

SEQ ID NO: 152086 - RNA, 1410 nt, Artificial Sequence; identical to SEQ ID NO: 152023
  derived and/or modified CDS sequence (opt3) from neuraminidase__InfluenzaA__AHC59020

SEQ ID NO: 152087 - RNA, 1410 nt, Artificial Sequence
  derived and/or modified CDS sequence (opt3) from neuraminidase__InfluenzaA__AHC59032
augaaccccaaucagaagaucauuaccauaggcagcgugucccugacaaucucuacuauuugcuucuuuaugcaaaucgccauucucaucacgaccgucacacuucacuucaaacaguacgaguuuaacucaccuccaaauaaccagguuaugcugugugaaccgacuauaaucgagagaaauauuaccgaaaucguguauuugacaaacaccacuauugagaaggaaaucugccccaaauuagcugaguacaggaauuggaguaagccucagugugacauaacaggguucgcaccauuuagcaaagauaacuccauucggcugucugccggaggugacaucuggguaacccgcgagcccuaugugucgugcgauccuaauaaguguuaccaauucgcgcuaggccaggggacgacucucaacaauguccauucaaacaauaccgugcgagaccguacaccauauagaacucugcuuaugaacgaacugggaguucccuuucacuugggcaccaaacaggugugcauugcuuggagcaguuccucuugucaugaugguaaggccuggcuccacgucugcaucacaggggacgauaagaaugcaaccgccagcuucaucuacaacggaaaacugguggacuccguaguuucauggaguaaggagauucugaggacgcaggaaagcgagugugugugcauaaacggcacuuguacagucgugaugaccgauggcucugcuuccgggaaagcagacacuaagauccucuuuauugaggaaggaaagaucgugcauacaucaaccuuaagcgguagugcccaacacgucgaggaaugcucuugcuauccucgguacccauccguucgcugugugugcagagauaauuggaaaggcagcaacaggccgauaguagacauuaauaucaaggaucacucgaucgugucuuccuacgucuguucagggcuggugggagacacgccccggaaaaacgacaguagcuccucuagccauugccuugauccuaauaacgaggaaggcggucacgggguuaagggaugggcuuucgacgauggcaaugacguguggaugggccgcaccauuaacgagacaucacgauugggguaugagacuuuuaaagucaucgaaggauggaguaauccaaaguccaaacugcagauuaacagacaggugauaguagauagggguaaucggagcggcuacucugggaucuucucaguugagggaaagaguuguauuaaccguugcuuuuauguggaacuaauccgcggcagaaaggaggaaaccgagguccucuggacaagcaauuccaucguggucuucugugguacuucugggaccuacggcacaggaucguggcccgacggcgccgaucugaaccuuaugccuauuuga

SEQ ID NO: 152088 - RNA, 1410 nt, Artificial Sequence; identical to SEQ ID NO: 152055
  derived and/or modified CDS sequence (opt3) from neuraminidase__InfluenzaA__AHC59044

SEQ ID NO: 152089 - RNA, 1410 nt, Artificial Sequence; identical to SEQ ID NO: 147566
  derived and/or modified CDS sequence (opt3) from neuraminidase__InfluenzaA__AHC59056

SEQ ID NO: 152090 - RNA, 1410 nt, Artificial Sequence; identical to SEQ ID NO: 152019
  derived and/or modified CDS sequence (opt3) from neuraminidase__InfluenzaA__AHC59068

SEQ ID NO: 152091 - RNA, 1410 nt, Artificial Sequence; identical to SEQ ID NO: 152019
  derived and/or modified CDS sequence (opt3) from neuraminidase__InfluenzaA__AHC59080

SEQ ID NO: 152092 - RNA, 1410 nt, Artificial Sequence
  derived and/or modified CDS sequence (opt3) from neuraminidase__InfluenzaA__AHC59092
augaaccccaaucagaagaucauuaccauaggcagcgugucccugacaaucucuacuauuugcuucuuuaugcaaaucgccauucucgucacgaccguuacacuucacuucaaacaguacgaguuuaacucaccuccaaauaaccaggugaugcugugugaaccgacuaucauagagagaaauaucaccgaaauuguauauuugacaaacaccacuaucgagaaggaaauuugccccaaaccugcugaguacaggaauuggaguaagccacagugugacaucacaggguucgcacccuuuagcaaagauaacuccauacgguuaucugccggaggugacauuugggugacccgcgagccuuaugucucgugcgauccagacaaguguuaccaauucgcgcugggccaggggacgacucuaaauaacgugcauucaaauaacaccguucgagaucguacacccuauagaacucuccugaugaaugaacuuggagugccuuuucaccugggcaccaagcaggucugcaucgcuuggagcaguuccucuugucaugacgguaaagccugguugcacgugugcauuacaggggaugacaagaacgcaaccgccagcuucaucuacaauggaaggcucguagauuccguugugucauggaguaaagagauccugcggacgcaggaaagcgagugugucugcauuaacggcacuuguacaguggugaugaccgacggcucugcuuccgggaaggcagauacuaaaauacuguuuaucgaggaaggaaagauuguccauacaucaacccucagcgguagugcccaacacguugaggaaugcucuugcuauccacgcuacccgggcgugagauguguaugcagggacaacuggaagggguccaaucggcccaucguggauauaaacauuaaagaccacagcaucgucucgucuuacguguguuccggauuaguuggcgacacgccucgcaagaaugauucaaguagcuccggucauugccuggacccaaacaaugaggaagggggacacggcgugaaaggcugggcuuucgaugacgggaacgaugucuggaugggacgaaccaucaaugagacaucuagacuugguuaugagacuuuuaaggugauugaaggcuggagcaaccccaaaucaaaguugcagaucaauaggcagguaauuguugaccguggggaucggaguggauacuccggcauauucagcguggaggguaaaucuuguaucaaccgcugcuuuuaugucgaacugauuagagggaggaaggaggaaaccgaggugcuauggacaucaaauaguaucgucguguucuguggcacuagcggaaccuacggcacaggguccuggccugacggagccgaucucaaccugaugccaaucuga

SEQ ID NO: 152093 - RNA, 1410 nt, Artificial Sequence
  derived and/or modified CDS sequence (opt3) from neuraminidase__InfluenzaA__AHC59104
augaaccccaaucagaagaucauuaccauaggcagcgugucccugacaaucucuacuauuugcuucuuuaugcagaucgccauucucaucacgaccgucacacuucacuucaaacaguacgaguuuuauucaccuccaaacaaucagguuaugcugugugaaccgacuauaaucaagagaaacauuaccgagaucguguacuugacaaauaccacuauugaaaaagagaucugccccaaguuagcugaauauaggaacuggaguaaaccucagugugacauaacaggguucgcaccauuuagcaaggauaauuccauucggcugucugccggaggugacaucuggguaacccgcgagcccuacgugucgugcgauccugacaaguguuaucaauucgcgcuaggccaggggacgacucucaacaauguccauucaaacaauaccgugcgagaucguacaccauacagaacucugcuuaugaacgagcugggaguucccuuucacuugggcaccaaacaggugugcauugcuuggagcaguuccucuugucaugacgguaaggccuggcuccacgucugcaucacaggggaugacaaaaaugcaaccgccagcuucaucuauaacggaaggcugguggauuccguaguuucauggaguaaggaaauucugcggacgcaggagagcgaaugugugugcauaaauggcacuuguacagucgugaugaccgacggcucugcuuccgggaaagcagauacuaagauccucuuuauugaggagggaaagaucgugcauacaucaaccuuaagcgguagugcccaacacgucgaagagugcucuugcuacccucgcuacccaggcguuagaugugugugcagggacaacuggaaaggguccaaccggccgauaguagauauuaauaucaaggaccacagcaucgugucgucuuaugucuguuccggacuggugggcgacacgccccgcaaaaacgauucaaguagcuccucucauugccuugacccuaauaacgaagagggugggcacggaguuaagggcugggcuuucgaugacggcaaugauguguggauggggcgaaccauuaacgaaacaagcagauugggauacgagacuuuuaaagucaucgaggguuggucaaauccaaagaguaaacugcagauuaacaggcaagugauaguagaccggggcaaucguuccggguauagcggaaucuucucuguugaaggcaagucauguauuaaccgcugcuuuuacguggagcuaaucagagguaggaaggaagagaccgaaguccucuggacaaguaauagcaucguggucuucugugggacuuccggcaccuauggaacaggcucuuggcccgauggggccgaccugaaccuuaugccuauuuga

SEQ ID NO: 152094 - RNA, 1410 nt, Artificial Sequence
  derived and/or modified CDS sequence (opt3) from neuraminidase__InfluenzaA__AHC59116
augaaccccaaucagaagaucauuaccauaggcagcgugucccugacaaucucuacuauuugcuucuuuaugcaaaucgccauucucaucacgaccgucacacuucacuucaaacaguacgaguuuaacucaccuccaaauaaccagguuaugcugugugaaccgacuauaaucgagagaaauauuaccgaaaucguguauuugacaaacaccacuauugagaaggaaaucugccccaaauuagcugaguacaggaauuggaguaagccucagugugacauaacaggguucgcaccauuuagcaaagauaacuccauucggcugucugccggaggugacaucuggguaacccgcgagcccuaugugucgugcgauccuaauaaguguuaccaauucgcgcuaggccaggggacgacucucaacaauguccauucaaacaauaccgugcgagaccguacaccauauagaacucugcuuaugaacgaacugggaguucccuuucacuugggcaccaaacaggugugcauugcuuggagcaguuccucuugucaugaugguaaggccuggcuccacgucugcaucacaggggacgauaagaaugcaaccgccagcuucaucuacaacggaaaacugguggacuccguaguuucauggaguaaggagauucugaggacgcaggaaagcgagugugugugcauaaacggcacuuguacagucgugaugaccgauggcucugcuuccgggaaagcagacacuaagauccucuuuauugaggaaggaaagaucgugcauacaucaaccuuaagcgguagugcccaacacgucgaggaaugcucuugcuauccucgguacccaggcguucgcugugugugcagagauaauuggaaaggguccaacaggccgauaguagacauuaauaucaaggaucacagcaucgugucgucuuacgucuguuccggacuggugggcgacacgccccggaaaaacgacucaaguagcuccucucauugccuugauccuaauaacgaggaaggugggcacggaguuaagggcugggcuuucgacgauggcaaugacguguggauggggcgcaccauuaacgagacaagccgauugggauaugagacuuuuaaagucaucgaagguuggucaaauccaaagaguaaacugcagauuaacagacaggugauaguagauaggggcaaucgguccggguacagcggaaucuucucuguugagggcaagucauguauuaaccguugcuuuuauguggaacuaauccgcgguagagaggaagagaccgagguccucuggacaaguaauagcaucguggucuucugugggacuuccggcaccuacggaacaggcucuuggcccgacggggccgaucugaaccuuaugccuauuuga

SEQ ID NO: 152095 - RNA, 1410 nt, Artificial Sequence
  derived and/or modified CDS sequence (opt3) from neuraminidase__InfluenzaA__AHC59128
augaaccccaaucagaagaucauuaccauaggcagcgugucccugacaaucucuacuauuugcuucuuuaugcaaaucgccauucucaucacgaccgucacacuucacuucaaacaguacgaguuuuauucaccuccaaacaaucagguuaugcugugugaaccgacuauaauggagagaaacaucaccgaaauuguguacuugacaaauaccacuaucgagaaggaaauuugccccaaauuagcugaguauaggaacuggaguaagccucagugugacaucacaggguucgcaccauuuagcaaagauaauuccauacggcugucugccggaggugacauuuggguaacccgcgagcccuacgugucgugcgauccugacaaguguuaucaauucgcgcuaggccaggggacgacucucaacaauguccauucaaacaauaccgugcgagaucguacaccauacagaacucugcuuaugaacgaacugggaguucccuuucacuugggcaccaaacaggugugcaucgcuuggagcaguuccucuugucaugacgguaaggccuggcuccacgucugcgugacaggggaugacaagaaugcaaccgccagcuucauuuauaacggaaggcugguagauuccguugugucauggaguaaagagauccugcggacgcaggaaagcgagugugucugcaucaauggcacuuguacaguggugaugaccgacggcucugcuuccgggaaggcagauacuaaaauucucuuuauagaggaaggaaagaucguccauacaucaaccuuaagcgguagugcccaacacguugaggaaugcucuugcuacccucgcuacccaggcgugagauguguaugcagggacaacuggaagggguccaaccggccgauuguggauaucaauauaaaagaccacagcauugucucgucuuauguguguuccggacugguuggcgacacgccccgcaagaacgauucaaguagcuccucucauugccuugacccuaauaacgaggaaggugggcacggagugaaaggcugggcuuucgaugacggcaaugaugucuggauggggcgaaccaucaacgagacaagcagauugggauacgagacuuuuaaggugaucgaagguuggucaaauccaaaaaguaagcugcagauuaacaggcagguaaucguugaccggggcaaucguuccggguauagcggaauuuucucuguggagggcaaaucauguauaaaccgcugcuuuuacgucgaacuaaucagagguaggaaggaggaaaccgaggugcucuggacaaguaauagcauugucguguucugugggacuuccggcaccuauggaacaggcucuuggcccgauggggccgaccugaaccuuaugccuaucuga

SEQ ID NO: 152096 - RNA, 1410 nt, Artificial Sequence
  derived and/or modified CDS sequence (opt3) from neuraminidase__InfluenzaA__AHC59152
augaaccccaaucagaagaucauuaccauaggcagcgugucccugacaaucucuacuauuugcuucuuuaugcaagucgccauccucauuacgaccguuacacuucacuucaaacaguacgaguuuaacucaccuccaaauaaccaggugaugcugugugaaccgacuaucauagagagaaauaucaccgaaauuuuguauuuaacaaacaccacuaucgagaaggaaauuugccccaaacuggcugaguacaggaauuggaguaagccucagugugacaucacaggguucgcaccauuuagcaaagauaacuccauacggcuaucugccggaggugacauuuggguaacccgcgagcccuaugugucgugcgauccugacaaguguuaccaauucgcgcucggccaggggacgacucugaauaacguccauucaaauaacaccgugcgagaucguacaccauauagaacucuucugaugaaugaauugggaguucccuuucaccucggcaccaaacaggugugcaucgcuuggagcaguuccucuugucaugacgguaaggccuggcugcacgucugcauuacaggggaugacaagaacgcaaccgccagcuucaucuacaauggaaaacugguggauuccguaguuucauggaguaaggagauccucaggacgcaggaaagcgagugugugugcauuaacggcacuuguacagucgugaugaccgacggcucugcuuccgggaaagcagauacuaagauauuauuuaucgaggaaggaaagauugugcauacaucaacccugagcgguagugcccaacacgucgaggaaugcucuugcuauccucgguacccaggcguucgcugugugugcagagacaacuggaaaggguccaauaggccgaucguagauauaaacauuaaggaccacagcaucgugucgucuuacgucuguuccggacuugugggcgacacgccccggaaaaaugauucaaguagcuccucucauugcuuggacccuaacaaugaggaaggugggcacggaguuaagggcugggcuuucgaugacggcaacgauguguggauggggcgcaccaucaaugagacaagccgacugggauaugagacuuuuaaagucauugaagguuggucaaacccaaagaguaaacuacagaucaauagacaggugauuguagacaggggcaaccgguccggguacagcggaauauucucuguugagggcaagucauguaucaaucguugcuuuuauguggaacucauucgcgguagaaaggaggaaaccgagguccuguggacaaguaacagcaucguggucuucugugggacuuccggcaccuacggaacaggcucuuggcccgauggggccgaccuuaaucugaugccuaucuga

SEQ ID NO: 152097 - RNA, 1410 nt, Artificial Sequence
  derived and/or modified CDS sequence (opt3) from neuraminidase__InfluenzaA__AHC59188
augaaccccaaucagaagaucauuaccauaggcagcgugucccugacaaucucuacuauuugcuucuuuaugcaaaucgccauucucaucacgaccgucacacuucacuucaaacaguacgaguuuaacccuccaccgaauaaccagguugugcugugugaacccacuauaaucgagagaaauauuaccgaaaucguauauuugacaaacaccacuauugagaaggaaaucugcccuaaauuagcugaguacaggaauuggucaaagccacagugugacauaacaggguucgcacccuuuaguaaagauaacagcauucggcuguccgccggaggugacaucugggugacccgcgagccuuaugucucuugcgauccagacaaguguuaccaauucgcgcuaggccaggggacgacucucaauaacgugcauucgaauaacaccguucgagaucguacacccuauagaacucugcuuaugaaugaacugggagugccuuuucacuugggcaccaagcaggucugcauugcuuggucaagcaguuccugucaugacgguaaagccuggcuccacgugugcaucacaggggaugacaagaacgcaaccgccucuuucaucuacaauggaaggcugguagauagcguuguguccuggucaaaagagauucugcggacgcaggaaagugagugugucugcauaaacggcacuuguacaguggugaugaccgacggcagcgcuucugggaaggcagauacuaaaauccucuuuauugaggaaggaaagaucguccauacauccaccuuaucagguagcgcccaacacguugaggaaugcaguugcuauccacgcuacccgggcgugagauguguaugcagggacaacuggaaggggucuaaucggcccauaguggauauuaacaucaaagaccacuccaucgucagcucguacguguguucuggacugguuggcgacacgccucgcaagaaugauuccucaaguagcucccauugccuugacccaaacaaugaggaaggugggcacggagugaaaggcugggcuuucgaugacggcaacgaugucuggauggggcgaaccauuaaugagacaucuagauugggauaugagacuuuuaaggugaucgaagguuggagcaaccccaaaucaaagcugcagauuaauaggcagguaauaguugaccggggcgaucguaguggguacuccggaaucuucagcguggagggcaaaucuuguauuaaccgcugcuuuuaugucgaacuaaucagagguaggaaggaggaaaccgaggugcucuggacaucaaauaguaucgucguguucugugggacuagcggcaccuacggaacaggcuccuggccugacggggccgaucugaaccuuaugccaauuuga

SEQ ID NO: 152098 - RNA, 1410 nt, Artificial Sequence; identical to SEQ ID NO: 147566
  derived and/or modified CDS sequence (opt3) from neuraminidase__InfluenzaA__AHC59200

SEQ ID NO: 152099 - RNA, 1410 nt, Artificial Sequence
  derived and/or modified CDS sequence (opt3) from neuraminidase__InfluenzaA__AHC59212
augaaccccaaucagaagaucauuaccauaggcagcgugucccugacaaucucuacuauuugcuucuuuaugcaaaucgccacgcucauuaccacagucacucuucacuucaaacaguacgaguuuaacucaccuccaaauaaccagguuaugcugugugaaccgaccaucauagagagaaauaucacagaaauuguguauuugaccaacacuacaaucgagaaggaaauuugccccaaauuagcugaguacaggaauuggaguaagccucagugugacaucaccggguucgcaccauuuagcaaagauaacuccauacggcugucugccggaggugacauuuggguaacgcgcgagcccuaugugucgugcgauccugacaaguguuaccaauucgcgcuaggccaggggacuacccucaauaacguccauucaaauaacacagugcgagaucguacuccauauagaacccugcuuaugaaugaacugggaguucccuuucacuugggcacaaaacaggugugcaucgcuuggagcaguuccucuugucaugacgguaaggccuggcuccacgucugcauuaccggggaugacaagaacgcaacggccagcuucaucuacaauggaaggcugguggauuccguaguuucauggaguaaagagauccugcggacucaggaaagcgagugugugugcauuaacggcacauguaccgucgugaugacugacggcucugcuuccgggaaggcagauacaaaaauacucuuuaucgaggaaggaaagauugugcauaccucaacguuaagcgguagugcccaacacgucgaggaaugcucuugcuauccucgcuacccaggcguuagaugugugugcagggacaacuggaagggguccaaucggccgaucguagauauaaacauuaaagaccacagcaucgugucgucuuacgucuguuccggacuggugggcgacacccccaggaagaaugauucaaguagcuccucucauugccuugacccuaacaaugaggaaggugggcacggaguuaaaggcugggcuuucgaugacggcaacgauguguggauggggcgaacaaucaaugagacuagcagauugggauaugagaccuuuaaggucauugaagguuggucaaacccaaaaaguaagcugcagaucaaucgccaggugauuguagaccggggcgaucguuccggguacagcggaauauucucuguugagggcaaaucauguaucaaccgcugcuuuuauguggaacuaauuagagguaggaaggaggaaacagagguccucuggaccaguaauagcaucguggucuucugugggacuuccggcacauacggaaccggcucuuggcccgacggggccgaucugaaccuuaugccuaucuga

SEQ ID NO: 152100 - RNA, 1410 nt, Artificial Sequence; identical to SEQ ID NO: 152023
  derived and/or modified CDS sequence (opt3) from neuraminidase__InfluenzaA__AHC59224

SEQ ID NO: 152101 - RNA, 1410 nt, Artificial Sequence
  derived and/or modified CDS sequence (opt3) from neuraminidase__InfluenzaA__AHC59236
augaaccccaaucagaagaucauuaccauaggcagcgugucccugacaaucucuacuauuugcuucuuuaugcaaaucgccauucucaucacgaccgucacacuucacuucaaacaguacgaguuuuauucaccuccaaacaaucagguuaugcugugugaaccgacuauaaucgagagaaacauuaccgaaaucguguacuugacaaauaccacuauugagaaggaaaucugccccaaauuagcugaguauaggaacuggaguaagccucagugugacauaacaggguucgcaccauuuagcaaagauaauuccauucggcugucugccggaggugacaucuggguaacccgcgagcccuacgugucgugcgauccugacaaguguuaucaauucgcgcuaggccaggggacgacucucaacaauguccauucaaacaauaccgugcacgaucgaacaccauaccguacucugcuuaugaacgaacugggaguucccuuucauuugggcaccaaacaggugugcauugcuuggagcaguuccucuugucacgacgguaaggccuggcuccaugucugcaucacaggggaugacaagaaugcaaccgccagcuucaucuauaacggaagacugguggauuccguaguuucauggaguaaagagauucugaggacgcaggaaagcgagugugugugcauaaauggcacuuguacagucgugaugaccgacggcucugcuuccgggaaggcagauacuaaaauccucuuuauugaggaaggaaagaucgugcacacaucaaccuuaagcgguagugcccaacacgucgaggaaugcucuugcuacccucgguacccaggcguucgcugugugugcagagacaacuggaagggguccaacaggccgauaguagauauuaauaucaaagaccauagcaucgugucgucuuaugucuguuccggacuggugggcgacacgccccggaagaacgauucaaguagcuccucucacugccuugacccuaauaacgaggaaggugggcauggaguuaaaggcugggcuuucgaugacggcaaugauguguggauggggcgcaccauuaacgagacaagccgauugggauacgagacuuuuaaggucaucgaagguuggucaaauccaaaaaguaagcugcagauuaacagacaggugauaguagacaggggcaaucgguccggguauagcggaaucuucucuguugagggcaaaucauguauuaaccguugcuuuuacguggaacuaauccgcgguagaaaggaggaaaccgagguccucuggacaaguaauagcaucguggucuucugugggacuuccggcaccuauggaacaggcucuuggcccgauggggccgaccugaaccuuaugccuauuuga

SEQ ID NO: 152102 - RNA, 1410 nt, Artificial Sequence; identical to SEQ ID NO: 152023
  derived and/or modified CDS sequence (opt3) from neuraminidase__InfluenzaA__AHC59260

SEQ ID NO: 152103 - RNA, 1410 nt, Artificial Sequence; identical to SEQ ID NO: 152019
  derived and/or modified CDS sequence (opt3) from neuraminidase__InfluenzaA__AHC59272

SEQ ID NO: 152104 - RNA, 1410 nt, Artificial Sequence; identical to SEQ ID NO: 152023
  derived and/or modified CDS sequence (opt3) from neuraminidase__InfluenzaA__AHC59284

SEQ ID NO: 152105 - RNA, 1410 nt, Artificial Sequence
  derived and/or modified CDS sequence (opt3) from neuraminidase__InfluenzaA__AHC59296
augaaccccaaucagaagaucauuaccauaggcagcgugucccugacaaucucuacuauuugcuucuuuaugcaaaucgccauucucaucacgaccgucacacuucacuucaaacaguacgaguuuaacucaccuccaaauaaccagguuaugcugugugaaccgacuauaaucgagagaaauauuaccgaaaucguguauuugacaaacaccacuauugagaaggaaaucugccccaaauuagcugaguacaggaauuggaguaagccucagugugacauaacaggguucgcaccauuuagcaaagauaacuccauucggcugucugccggaggugacaucuggguaacccgcgagcccuaugugucgugcgauccuaauaaguguuaccaauucgcgcuaggccaggggacgacucucaacaauguccauucaaacaauaccgugcgagaccguacaccauauagaacucugcuuaugaacgaacugggaguucccuuucacuugggcaccaaacaggugugcauugcuuggagcaguuccucuugucaugaugguaaggccuggcuccacgucugcaucacaggggacgauaagaaugcaaccgccagcuucaucuacaacggaaaacugguggacuccguaguuucauggaguaaggagauucugaggacgcaggaaagcgagugugugugcauaaacggcacuuguacagucgugaugaccgauggcucugcuuccgggaaagcagacacuaagauccucuuuauugaggaaggaaagaucgugcauacaucaaccuuaagcgguagugcccaacacgucgaggaaugcucuugcuauccucgguacccaggcguucgcugugugugcagagauaauuggaaaggguccaacaggccgauaguagacauuaagaucaaagaucacagcaucgugucgucuuacgucuguuccggacuggugggcgacacgccccggaagaaugacucaaguagcuccucucauugccuugauccuaacaaugaggaaggugggcacggaguuaaaggcugggcuuucgacgauggcaacgacguguggauggggcgcaccauuaaugagacaagccgauugggauaugagacuuuuaaggucaucgaagguuggucaaacccaaaaaguaagcugcagauuaauagacaggugauaguagauaggggcaaccgguccggguacagcggaaucuucucuguugagggcaagucauguauuaaucguugcuuuuauguggaacuaauccgcgguagaaaagaggaaaccgagguccucuggacaaguaacagcaucguggucuucugugggacuuccggcaccuacggaacaggcucuuggcccgacggggccgaucugaaucuuaugccuauuuga

SEQ ID NO: 152106 - RNA, 1410 nt, Artificial Sequence
  derived and/or modified CDS sequence (opt3) from neuraminidase__InfluenzaA__AHC59308
augaaccccaaucagaagaucauuaccauaggcagcgugucccugacaaucucuacuauuugcuucuuuaugcaaaucgccauucucaucacgaccgucacacuucacuucaaacaguacgaguuuaacccuccaccgaauaaccagguuaugcugugugaacccacuauaaucgagagaaauauuaccgaaaucguguauuugacaaacaccacuauugagaaggaaaucugcccuaaauuagcugaguacaggaauuggucaaagccacagugugacauaacaggguucgcacccuuuaguaaagauaacagcauucggcuguccgccggaggugacaucuggguaacccgcgagccuuaugugucuugcgauccaaauaaguguuaccaauucgcgcuaggccaggggacgacucucaacaauguccauucgaacaauaccgugcgagaccguacacccuauagaacucugcuuaugaacgaacugggaguuccuuuucacuugggcaccaaacaggugugcauugcuuggucaagcaguuccugucaugaugguaaggccuggcuccacgucugcaucacaggggacgauaagaaugcaaccgccucuuucaucuacaacggaaaacugguggacagcguaguuuccuggucaaaggagauucugaggacgcaggaaagugagugugugugcauaaacggcacuuguacagucgugaugaccgauggcagcgcuucugggaaagcagacacuaagauccucuuuauugaggaaggaaagaucgugcauacauccaccuuaucagguagcgcccaacacgucgaggaaugcaguugcuauccacgguacccgggcguucgcugugugugcagagauaauuggaaagggucuaacaggcccauaguagacauuaauaucaaggaucacuccaucgugagcucguacgucuguucuggacuggugggcgacacgccucggaaaaacgacuccucaaguagcucccauugccuugauccaaauaacgaggaaggugggcacggaguuaagggcugggcuuucgacgauggcaaugacguguggauggggcgcaccauuaacgagacaucucgauugggauaugagacuuuuaaagucaucgaagguuggagcaaucccaagucaaaacugcagauuaacagacaggugaugguagauaggggcaaucggaguggguacuccggaauauucagcguugagggcaagucuuguaucaaccguugcuuuuauguggaacuaauucgcgguagaaaggaggaaaccgagguccucuggacaucaaauaguaucguggucuucugugggacuagcggcaccuacggaacaggcuccuggccugacggggccgaucugaaccuuaugccaaucuga

SEQ ID NO: 152107 - RNA, 1410 nt, Artificial Sequence; identical to SEQ ID NO: 151931
  derived and/or modified CDS sequence (opt3) from neuraminidase__InfluenzaA__AHC59320

SEQ ID NO: 152108 - RNA, 1410 nt, Artificial Sequence; identical to SEQ ID NO: 150194
  derived and/or modified CDS sequence (opt3) from neuraminidase__InfluenzaA__AHC59332

SEQ ID NO: 152109 - RNA, 1410 nt, Artificial Sequence; identical to SEQ ID NO: 152067
  derived and/or modified CDS sequence (opt3) from neuraminidase__InfluenzaA__AHC59344

SEQ ID NO: 152110 - RNA, 1410 nt, Artificial Sequence
  derived and/or modified CDS sequence (opt3) from neuraminidase__InfluenzaA__AHC59368
augaaccccaaucagaagaucauuaccauaggcagcgugucccugacaaucucuacuauuugcuucuuuaugcaaaucgccauucucaucacgaccgucacacuucacuucaaacaguacgaguuuaacucaccuccaaauaaccagguuaugcugugugaaccgacuauaaucgagagaaauauuaccgaaaucguguauuugacaaacaccacuauugagaaggaaaucugccccaaauuagcugaguacaggaauuggaguaagccucagugugacauaacaggguucgcaccauuuagcaaagauaacuccauucggcugucugccggaggugacaucuggguaacccgcgagcccuaugugucgugcgauccuaauaaguguuaccaauucgcgcuaggccaggggacgacucucaacaauguccauucaaacaauaccgugcgagaccguacaccauauagaacucugcuuaugaacgaacugggaguucccuuucacuugggcaccaaacaggugugcauugcuuggagcaguuccucuugucaugaugguaaggccuggcuccacgucugcaucacaggggacgauaagaaugcaaccgccagcuucaucuacaacggaaaacugguggacuccguaguuucauggaguaaggagauucugaggacgcaggaaagcgagugugugugcauaaacggcacuuguacagucgugaugaccgauggcucugcuuccgggaaagcagacacuaagauccucuuuauugaggaaggaaagaucgugcauacaucaaccuuaagcgguagugcccaacacgucgaggaaugcucuugcuauccucgguacccaggcguucgcugugugugcagagauaauuggaaaggguccaacaggccgauaguagacauuaauaucaaggaucacagcaucgugucgucuuacgucuguuccggacuggugggcgacacgccccggaaaaacgacucaaguagcuccucucauugccuugauccuaauaacgaggaaggugggcacggaguuaagggcugggcuuucgacgauggcaaugacguguggauggggcgcaccauugaugagacaagccgauugggauaugagacuuuuaaagucaucgaagguuggucaaacccaaagaguaaacugcagauuaauagacaggugauaguagacaggggcaaccgguccggguacagcggaaucuucucuguugagggcaagucauguauuaaucguugcuuuuauguggaacuaauccgcgguagaaaggaggaaaccgagguccucuggacaaguaacagcaucguggucuucugugggacuuccggcaccuacggaacaggcucuuggcccgauggggccgaccugaaucuuaugccuauuuga

SEQ ID NO: 152111 - RNA, 1410 nt, Artificial Sequence; identical to SEQ ID NO: 152019
  derived and/or modified CDS sequence (opt3) from neuraminidase__InfluenzaA__AHC59380

SEQ ID NO: 152112 - RNA, 1410 nt, Artificial Sequence; identical to SEQ ID NO: 150970
  derived and/or modified CDS sequence (opt3) from neuraminidase__InfluenzaA__AHC59392

SEQ ID NO: 152113 - RNA, 1410 nt, Artificial Sequence; identical to SEQ ID NO: 152055
  derived and/or modified CDS sequence (opt3) from neuraminidase__InfluenzaA__AHC59404

SEQ ID NO: 152114 - RNA, 1410 nt, Artificial Sequence; identical to SEQ ID NO: 152023
  derived and/or modified CDS sequence (opt3) from neuraminidase__InfluenzaA__AHC59416

SEQ ID NO: 152115 - RNA, 1410 nt, Artificial Sequence
  derived and/or modified CDS sequence (opt3) from neuraminidase__InfluenzaA__AHC59428
augaaccccaaucagaagaucauuaccauaggcagcgugucccugacaaucucuacuauuugcuucuuuaugcaaaucgccauucucaucacgaccgucacacuucacuucaaacaguacgaguuuuauucaccuccaaacaaucagguuaugcugugugaaccgacuauaaucgagagaaacauuaccgaaaucguguacuugacaaauaccacuauugagaaggaaaucugccccaaauuagcugaguauaggaacuggaguaagccucagugugacauaacaggguucgcaccauuuagcaaagauaauuccauucggcugucugccggaggugacaucuggguaacccgcgagcccuacgugucgugcgauccugaccgauguuaucaauucgcgcuaggccaggggacgacucucaacaauguccauucaaacaauaccgugcgugauagaacaccauacaggacucugcuuaugaacgaacugggaguucccuuucacuugggcaccaaacaggugugcauugcuuggagcaguuccucuugucaugacgguaaggccuggcuccacgucugcaucacaggggaugacaagaaugcaaccgccagcuucaucuauaacggacggcugguggauuccguaguuucauggaguaaggagauucugcgcacgcaggaaagcgagugugugugcauaaauggcacuuguacagucgugaugaccgacggcucugcuuccgggaaagcagauacuaagauccucuuuauugaggaaggaaaaaucgugcauacaucaaccuuaagcgguagugcccaacacgucgaggaaugcucuugcuacccuagauacccaggcguuaggugugugugccgggacaacuggaagggguccaaccgcccgauaguagauauuaauaucaaggaccacagcaucgugucgucuuaugucuguuccggacuggugggcgacacgccccggaaaaacgauucaaguagcuccucucauugccuugacccuaauaacgaggaaggugggcacggaguuaagggcugggcuuucgaugacggcaaugauguguggauggggagaaccauuaacgagacaagcagguugggauacgagacuuuuaaagucaucgaagguuggucaaauccaaagaguaaacugcagauuaaccgacaggugauaguagaccguggcaaucgcuccggguauagcggaaucuucucuguugagggcaagucauguauuaacagaugcuuuuacguggaacuaaucaggggucggaaagaggaaaccgagguccucuggacaaguaauagcaucguggucuucugugggacuuccggcaccuauggaacaggcucuuggcccgauggggccgaccugaaccuuaugccuauuuga

SEQ ID NO: 152116 - RNA, 1410 nt, Artificial Sequence
  derived and/or modified CDS sequence (opt3) from neuraminidase__InfluenzaA__AHC59440
augaaccccaaucagaagaucauuaccauaggcagcgugucccugacaaucucuacuauuugcuucuuuaugcagaucgccauucucaucacgaccgucacacuucacuucaaacaguacgaguuuaacucaccuccaaauaaccagguuaugcugugugaaccgacuauaaucgagagaaauauuaccgaaaucguguauuugacaaacaccacuauugagaaggaaaucugccccaaaccugcugaguacaggaauuggaguaagccacagugugacauaacaggguucgcacccuuuagcaaagauaacuccauucgguuaucugccggaggugacaucuggguaacccgcgagccuuaugugucgugcgauccagacaaguguuaccaauucgcgcugggccaggggacgacucuaaauaacguccauucaaauaacaccgugcgagaucguacacccuauagaacucuccugaugaaugaacuuggaguuccuuuucaccugggcaccaaacaggugugcauugcuuggagcaguuccucuugucaugacgguaaggccugguugcacgucugcaucacaggggaugacaagaacgcaaccgccagcuucaucuacaauggaaggcucguggauuccguaguuucauggaguaaagagauucugcggacgcaggaaagcgagugugugugcauaaacggcacuuguacagucgugaugaccgacggcucugcuuccgggaaggcagauacuaaaauccuguuuauugaggaaggaaagaucgugcaaacaucaacccucagcgguagugcccagcaugucgaggaaugcucuugcuauccacgcuacccgggcguuagaugugugugcagggacaacuggaagggguccaaucggcccauaguagauauuaacaucaaagaccacagcaucgugucgucuuacgucuguuccggauuagugggcgacacgccucgcaagaaugauucaaguagcuccucucacugccuggacccaaacaaugaggaaggugggcauggaguuaaaggcugggcuuucgaugacggcaacgauguguggauggggcgaaccauuaaugagacaagcagacuuggauaugagacuuuuaaggucaucgaagguuggucaaaccccaaaaguaaguugcagauuaauaggcaagugauaguagaccggggcgaucguuccggguacagcggaaucuucucuguugagggcaaaucauguauuaaccgcugcuuuuauguggaacugaucagagguaggaaggaggaaaccgagguccuauggacaaguaauagcaucguggucuucugugggacuuccggcaccuacggaacaggcucuuggccugacggggccgaucucaaccugaugccaauuuga

SEQ ID NO: 152117 - RNA, 1410 nt, Artificial Sequence; identical to SEQ ID NO: 152023
  derived and/or modified CDS sequence (opt3) from neuraminidase__InfluenzaA__AHC59452

SEQ ID NO: 152118 - RNA, 1410 nt, Artificial Sequence; identical to SEQ ID NO: 147566
  derived and/or modified CDS sequence (opt3) from neuraminidase__InfluenzaA__AHC59464

SEQ ID NO: 152119 - RNA, 1410 nt, Artificial Sequence; identical to SEQ ID NO: 151931
  derived and/or modified CDS sequence (opt3) from neuraminidase__InfluenzaA__AHC59476

SEQ ID NO: 152120 - RNA, 1410 nt, Artificial Sequence; identical to SEQ ID NO: 152023
  derived and/or modified CDS sequence (opt3) from neuraminidase__InfluenzaA__AHC59488

SEQ ID NO: 152121 - RNA, 1410 nt, Artificial Sequence; identical to SEQ ID NO: 152023
  derived and/or modified CDS sequence (opt3) from neuraminidase__InfluenzaA__AHC59500

SEQ ID NO: 152122 - RNA, 1410 nt, Artificial Sequence; identical to SEQ ID NO: 152068
  derived and/or modified CDS sequence (opt3) from neuraminidase__InfluenzaA__AHC59512

SEQ ID NO: 152123 - RNA, 1410 nt, Artificial Sequence; identical to SEQ ID NO: 152068
  derived and/or modified CDS sequence (opt3) from neuraminidase__InfluenzaA__AHC59524

SEQ ID NO: 152124 - RNA, 1410 nt, Artificial Sequence; identical to SEQ ID NO: 152055
  derived and/or modified CDS sequence (opt3) from neuraminidase__InfluenzaA__AHC59536

SEQ ID NO: 152125 - RNA, 1410 nt, Artificial Sequence; identical to SEQ ID NO: 152023
  derived and/or modified CDS sequence (opt3) from neuraminidase__InfluenzaA__AHC59548

SEQ ID NO: 152126 - RNA, 1410 nt, Artificial Sequence; identical to SEQ ID NO: 152023
  derived and/or modified CDS sequence (opt3) from neuraminidase__InfluenzaA__AHC59560

SEQ ID NO: 152127 - RNA, 1410 nt, Artificial Sequence; identical to SEQ ID NO: 152101
  derived and/or modified CDS sequence (opt3) from neuraminidase__InfluenzaA__AHC59572

SEQ ID NO: 152128 - RNA, 1410 nt, Artificial Sequence; identical to SEQ ID NO: 152096
  derived and/or modified CDS sequence (opt3) from neuraminidase__InfluenzaA__AHC59584

SEQ ID NO: 152129 - RNA, 1410 nt, Artificial Sequence; identical to SEQ ID NO: 152068
  derived and/or modified CDS sequence (opt3) from neuraminidase__InfluenzaA__AHC59596

SEQ ID NO: 152130 - RNA, 1410 nt, Artificial Sequence; identical to SEQ ID NO: 150970
  derived and/or modified CDS sequence (opt3) from neuraminidase__InfluenzaA__AHC59608

SEQ ID NO: 152131 - RNA, 1410 nt, Artificial Sequence; identical to SEQ ID NO: 152055
  derived and/or modified CDS sequence (opt3) from neuraminidase__InfluenzaA__AHC59620

SEQ ID NO: 152132 - RNA, 1410 nt, Artificial Sequence; identical to SEQ ID NO: 152023
  derived and/or modified CDS sequence (opt3) from neuraminidase__InfluenzaA__AHC59632

SEQ ID NO: 152133 - RNA, 1410 nt, Artificial Sequence; identical to SEQ ID NO: 152023
  derived and/or modified CDS sequence (opt3) from neuraminidase__InfluenzaA__AHC59644

SEQ ID NO: 152134 - RNA, 1410 nt, Artificial Sequence
  derived and/or modified CDS sequence (opt3) from neuraminidase__InfluenzaA__AHC59656
augaaccccaaucagaagaucauuaccauaggcagcgugucccugacaaucucuacuauuugcuucuuuaugcaaaucgccauucucaucacgaccgucacaaugcacuucaaacaguacgaguuuaacucaccuccaaauaaccagguuaugcuuugugaaccgacuauaaucgagagaaauauuaccgaaaucguguaucugacaaacaccacuauugagaaggaaaucugccccaaauuggcugaguacaggaauuggaguaagccucagugugacauaacaggguucgcaccauuuagcaaagauaacuccauucgguuaucugccggaggugacaucuggguaacccgcgagcccuaugugucgugcgauccugucaaguguuaccaauucgcgcugggccaggggacgacucuaaauaacgugcauucaaauaacaccguucgagaccguacaccauauagaacucuccugaugaaugaacuuggagugcccuuucaccugggcaccaagcaggucugcauugcuuggagcaguuccucuugucaugaugguaaagccugguugcacgugugcaucacaggggacgauaagaacgcaaccgccagcuucaucuacaauggaaaacucguagacuccguugugucauggaguaaggagauucugaggacgcaggaaagcgagugugucugcauaaacggcacuuguacaguggugaugaccgauggcucugcuuccgggaaagcagacacuaagauccuguuuauugaggaaggaaagaucguccauacaucaacccucagcgguagugcccaacacguugaggaaugcucuugcuauccucgguacccaggcgugcgcuguguaugcagagauaacuggaaaggguccaauaggccgauaguggacauuaacaucaaggaucacagcaucgucucgucuuacguguguuccggauuaguuggcgacacgccccggaaaaaugacucaaguagcuccucucauugccuggauccuaacaaugaggaaggugggcacggagugaagggcugggcuuucgacgauggcaacgacgucuggauggggcgcaccauuaaugagacaagccgacuuggauaugagacuuuuaaagugaucgaagguuggucaaacccaaagaguaaauugcagauuaauagacagguaauaguugauaggggcaaccgguccggguacagcggaaucuucucuguggagggcaagucauguauuaaucguugcuuuuaugucgaacugauccgcgguagaaaggaggaaaccgaggugcuauggacaaguaacagcaucgucguguucugugggacuuccggcaccuacggaacaggcucuuggcccgacggggccgaucucaaucugaugccuauuuga

SEQ ID NO: 152135 - RNA, 1410 nt, Artificial Sequence; identical to SEQ ID NO: 152068
  derived and/or modified CDS sequence (opt3) from neuraminidase__InfluenzaA__AHC59668

SEQ ID NO: 152136 - RNA, 1410 nt, Artificial Sequence; identical to SEQ ID NO: 152096
  derived and/or modified CDS sequence (opt3) from neuraminidase__InfluenzaA__AHC59680

SEQ ID NO: 152137 - RNA, 1410 nt, Artificial Sequence; identical to SEQ ID NO: 152023
  derived and/or modified CDS sequence (opt3) from neuraminidase__InfluenzaA__AHC59704

SEQ ID NO: 152138 - RNA, 1410 nt, Artificial Sequence; identical to SEQ ID NO: 147566
  derived and/or modified CDS sequence (opt3) from neuraminidase__InfluenzaA__AHC59716

SEQ ID NO: 152139 - RNA, 1410 nt, Artificial Sequence; identical to SEQ ID NO: 147566
  derived and/or modified CDS sequence (opt3) from neuraminidase__InfluenzaA__AHC59728

SEQ ID NO: 152140 - RNA, 1410 nt, Artificial Sequence; identical to SEQ ID NO: 152068
  derived and/or modified CDS sequence (opt3) from neuraminidase__InfluenzaA__AHC59752

SEQ ID NO: 152141 - RNA, 1410 nt, Artificial Sequence; identical to SEQ ID NO: 152055
  derived and/or modified CDS sequence (opt3) from neuraminidase__InfluenzaA__AHC59764

SEQ ID NO: 152142 - RNA, 1410 nt, Artificial Sequence
  derived and/or modified CDS sequence (opt3) from neuraminidase__InfluenzaA__AHC59776
augaaccccaaucagaagaucauuaccauaggcagcgugucccugacaaucucuacuauuugcuucuuuaugcaaaucgccauucucaucacgaccgucacacuucacuucaaacaguacgaguuuuauucaccuccaaacaaucagguuaugcugugugaaccgacuauaaucgagagaaacauuaccgaaaucguguacuugacaaauaccacuauugagaaggaaaucugccccaaauuagcugaguauaggaacuggaguaagccucagugugacauaacaggguucgcaccauuuagcaaagauaauuccauucggcugucugccggaggugacaucuggguaacccgcgagcccuacgugucgugcgauccugacaaguguuaucaauucgcgcuaggccaggggacgacucucaacaauguccauucaaacaauaccgugcgagaucguacaccauacagaacucugcuuaugaacgaacugggaguucccuuucacuugggcaccaaacaggugugcauugcuuggagcaguuccucuugucaugacgguaaggccuggcuccacgucugcaucacaggggaugacaagaaugcaaccgccagcuucaucuauaacggaaaacugguggauuccguaguuucauggaguaaggagauucugaggacgcaggaaagcgagugugugugcauaaauggcacuuguacagucgugaugaccgacggcucugcuuccgggaaagcagauacuaagauccucuuuauugaggaaggaaagaucgugcauacaucaaccuuaagcgguagugcccaacacgucgaggaaugcucuugcuacccucgguacccaggcguucgcugugugugcagagacaacuggaaaggguccaacaggccgauaguagauauuaauaucaaggaccacagcaucgugucgucuuaugucuguuccggacuggugggcgacacgccccggaaaaacgauucaaguagcuccucucauugccuugacccuaauaacgaggaaggugggcacggaguuaagggcugggcuuucgaugacggcaaugauguguggauggggcgcaccauuaacgagacaagccgauugggauacgagacuuuuaaagucaucgaagguuggucaaauccaaagaguaaacugcagauuaacagacaggugauaguagacaggggcaaucgguccggguauagcggaaucuucucuguugagggcaagucauguauuaaccguugcuuuuacguggaacuaauccgcgguagaaaggaggaaaccgagguccucuggacaaguaauagcaucguggucuucugugggacuuccggcaccuauggaacaggcucuuggcccgauggggccgaccugaaccuuaugccuauuuga

SEQ ID NO: 152143 - RNA, 1410 nt, Artificial Sequence; identical to SEQ ID NO: 152019
  derived and/or modified CDS sequence (opt3) from neuraminidase__InfluenzaA__AHC59788

SEQ ID NO: 152144 - RNA, 1410 nt, Artificial Sequence; identical to SEQ ID NO: 152096
  derived and/or modified CDS sequence (opt3) from neuraminidase__InfluenzaA__AHC59800

SEQ ID NO: 152145 - RNA, 1410 nt, Artificial Sequence
  derived and/or modified CDS sequence (opt3) from neuraminidase__InfluenzaA__AHC59812
augaaccccaaucagaagaucauuaccauaggcagcgugucccugacaaucucuacuauuugcuucuuuaugcaaaucgccauucucaucacgaccgucacacuucacuucaaacaguacgaguuuaacucaccuccaaauaaccagguugugcugugugaaccgacuauaaucgagagaaauauuaccgaaaucguauauuugacaaacaccacuauugagaaggaaaucugccccaaaccugcugaguacaggaauuggaguaagccacagugugacauaacaggguucgcacccuuuagcaaagauaacuccauucgguuaucugccggaggugacaucugggugacccgcgagccuuaugucucgugcgauccagacaaguguuaccaauucgcgcugggccaggggacgacucuaaauaacgugcauucaaauaacaccguucgagaucguacacccuauagaacucuccugaugaaugaacuuggagugccuuuucaccugggcaccaagcaggucugcauugcuuggagcaguuccucuugucaugacgguaaagccugguugcacgugugcaucacaggggaugacaagaacgcaaccgccagcuucaucuacaauggaaggcucguagauuccguugugucauggaguaaagagauucugcggacgcaggaaagcgagugugucugcauaaacggcacuuguacaguggugaugaccgacggcucugcuuccgggaaggcagauacuaaaauccuguuuauugaggaaggaaagaucgucuauacaucaacccucagcgguagugcccaacauguugaggaaugcucuugcuacccacgcuacccgggcgugagauguguaugcagggacaacuggaagggguccaaucggcccauaguggauauuaacaucaaagaccacagcaucgucucgucuuauguguguuccggauuaguuggcgacacgccucgcaagaaugauucaaguagcuccucucacugccuggacccaaacaaugaggaaggugggcauggagugaaaggcugggcuuucgaugacggcaacgaugucuggauggggcgaaccauuaaugagacaagcagacuuggauacgagacuuuuaaggugaucgaagguuggucaaaccccaaaaguaaguugcagauuaauaggcagguaauaguugaccggggcgaucguuccggguauagcggaaucuucucuguggagggcaaaucauguauuaaccgcugcuuuuacgucgaacugaucagagguaggaaggaggaaaccgaggugcuauggacaaguaauagcaucgucguguucugugggacuuccggcaccuauggaacaggcucuuggccugacggggccgaucucaaccugaugccaauuuga

SEQ ID NO: 152146 - RNA, 1410 nt, Artificial Sequence
  derived and/or modified CDS sequence (opt3) from neuraminidase__InfluenzaA__AHC59824
augaaccccaaucagaagaucauuaccauaggcagcgugucccugacaaucucuacuauuugcuucuuuaugcagaucgccauucucaucacgaccgucacacuucacuucaaacaguacgaguuuuauucaccuccaaacaaucagguuaugcugugugaaccgacuauaaucgagagaaacauuaccgaaaucguguacuugacaaauaccacuauugagaaggaaaucugccccaaauuagcugaguauaggaaguggaguaaaccucagugugacauaacaggguucgcaccauuuagcaaggauaacuccauucggcugucugccggaggugacaucuggguaacccgcgagcccuacgugucgugcgauccugacaaguguuaucaauucgcgcuaggccaggggacgacucucaauaacguccauucaaauaacaccgugcgagaucguacaccauacagaacucugcuuaugaaugaacugggaguucccuuucacuugggcaccaaacaggugugcauugcuuggagcaguuccucuugucaugacgguaaggccuggcuccacgucugcaucacaggggaugacaaaaacgcaaccgccagcuucaucuauaauggaaggcugguggauuccguaguuucauggaguaaggagauucugcggacgcaggaaagcgagugugugugcauaaacggcacuuguacagucgugaugaccgacggcucugcuuccgggaaagcagauacuaagauccucuuuauugaggaaggaaagaucgugcauacaucaaccuuaagcgguagugcccaacacgucgaggaaugcucuugcuacccucgcuacccaggcguuagaugugugugcagggacaauuggaaaggguccaaccggccgauaguagauauuaacaucaaggaccacagcaucgugucgucuuaugucuguuccggacuggugggcgacacgccccgcaaaaaugauucaaguagcuccucucauugccuugacccuaacaaugaggaaggugggcacggaguuaagggcugggcuuucgaugacggcaacgauguguggauggggcgaaccauuaaugagacaagcagauugggauacgagacuuuuaaagucaucgaagguuggucaaacccaaagaguaaacugcagauuaauaggcaagugauaguagaccggggcaaccguuccggguauagcggaaucuucucuguugagggcaagucauguauuaaucgcugcuuuuacguggaacuaaucagagguaggaaggaggaaaccgagguccucuggacaaguaacagcaucguggucuucugugggacuuccggcaccuauggaacaggcucuuggcccgauggggccgaccugaaucuuaugccuauuuga

SEQ ID NO: 152147 - RNA, 1410 nt, Artificial Sequence; identical to SEQ ID NO: 152023
  derived and/or modified CDS sequence (opt3) from neuraminidase__InfluenzaA__AHC59836

SEQ ID NO: 152148 - RNA, 1410 nt, Artificial Sequence; identical to SEQ ID NO: 150970
  derived and/or modified CDS sequence (opt3) from neuraminidase__InfluenzaA__AHC59848

SEQ ID NO: 152149 - RNA, 1410 nt, Artificial Sequence; identical to SEQ ID NO: 152019
  derived and/or modified CDS sequence (opt3) from neuraminidase__InfluenzaA__AHC59860

SEQ ID NO: 152150 - RNA, 1410 nt, Artificial Sequence; identical to SEQ ID NO: 152066
  derived and/or modified CDS sequence (opt3) from neuraminidase__InfluenzaA__AHC59872

SEQ ID NO: 152151 - RNA, 1410 nt, Artificial Sequence; identical to SEQ ID NO: 152055
  derived and/or modified CDS sequence (opt3) from neuraminidase__InfluenzaA__AHC59884

SEQ ID NO: 152152 - RNA, 1410 nt, Artificial Sequence
  derived and/or modified CDS sequence (opt3) from neuraminidase__InfluenzaA__AHC59895
augaaccccaaucagaagaucauuaccauaggcagcgugucccugacaaucucuacuauuugcuucuuuaugcagaucgccauucucaucacgaccgucacacuucacuucaaacaguacgaguuuaacucaccuccaaauaaccagguuaugcugugugaaccgacuauaaucgagagaaauauuaccgaaaucguguauuugacaaacaccacuauugagaaggaaaucugccccaaauuagcugaguacaggaauuggaguaagccucagugugacauaacaggguucgcaccauuuagcaaagauaacuccauucggcugucugccggaggugacaucuggguaacccgcgagcccuaugugucgugcgauccugacaaguguuaccaauucgcgcuaggccaggggacgacucucaauaacguccauucaaauaacaccgugcgagaucguacaccauauagaacucugcuuaugaaugaacugggaguucccuuucacuugggcaccaaacaggugugcauugcuuggagcaguuccucuugucaugacgguaaggccuggcuccacgucugcaucacaggggaugacaagaacgcaaccgccagcuucaucuacaauggaaggcugguggauuccguaguuucauggaguaaagagauucugcggacgcaggaaagcgagugugugugcauaaacggcacuuguacagucgugaugaccgacggcucugcuuccgggaaggcagauacuaaaauccucuuuauuaaggagggaaagaucgugcauacaucaaccuuaagcgguagugcccaacacgucgaagagugcucuugcuauccucgcuacccaggcguuagaugugugugcagggacaacuggaaaggguccaaucggccgauaguagauauuaacaucaaggaccacagcaucgugucgucuuacgucuguuccggacuggugggcgacacgccccgcaaaaaugauucaaguagcuccucucauugccuugacccuaacaaugaagagggugggcacggaguuaagggcugggcuuucgaugacggcaacgauguguggauggggcgaaccauuaaugaaacaagcagauugggauaugagacuuuuaaagucaucgaggguuggucaaacccaaagaguaaacugcagauuaauaggcaagugauaguagaccggggcaaccguuccggguacagcggaaucuucucuguugaaggcaagucauguauuaaucgcugcuuuuauguggagcuaaucagagguaggaaggaagagaccgaaguccucuggacaaguaacagcaucguggucuucugugggacuuccggcaccuacggaacaggcucuuggcccgauggggccgaccugaaucuuaugccuauuuga

SEQ ID NO: 152153 - RNA, 1410 nt, Artificial Sequence; identical to SEQ ID NO: 152023
  derived and/or modified CDS sequence (opt3) from neuraminidase__InfluenzaA__AHC59907

SEQ ID NO: 152154 - RNA, 1410 nt, Artificial Sequence
  derived and/or modified CDS sequence (opt3) from neuraminidase__InfluenzaA__AHC59918
augaaccccaaucagaagaucauuaccauaggcagcgugucccugacaaucucuacuauuugcuucuuuauccagauugccauccucauaacgaccgucacacuucacuucaaacaguacgaguuuaacucaccuccaaauaaccagguuaugcugugugaaccgacuaucauugagagaaauaucaccgaaauuguguauuugacaaacaccacuaucgagaaggaaauaugccccaaauuagcugaguacaggaauuggaguaagccucagugugacauuacaggguucgcaccauuuagcaaagauaacuccauccggcugucugccggaggugacauuuggguaacccgcgagcccuaugugucgugcgauccugacaaguguuaccaauucgcgcuaggccaggggacgacucucaauaacguccauucaaauaacaccgugcgagaucguacaccauauagaacucugcuuaugaaugaacugggaguucccuuucacuugggcaccaaacaggugugcaucgcuuggagcaguuccucuugucaugacgguaaggccuggcuccacgucugcaucacaggggaugacaagaacgcaaccgccagcuucauuuacaauggaaggcugguggauuccguaguuucauggaguaaagagauacugcggacgcaggaaagcgagugugugugcaucaacggcacuuguacagucgugaugaccgacggcucugcuuccgggaaggcagauacuaaaauucucuuuaucgaggaaggaaagauagugcauacaucaaccuuaagcgguagugcccaacacgucgaggaaugcucuugcuauccucgcuacccaggcguuagaugugugugcagggacaacuggaagggguccaaucggccgauuguagauaucaacaucaaagaccacagcauugugucgucuuacgucuguuccggacuggugggcgacacgccccgcaagaaugauucaaguagcuccucucauugccuugacccuaacaaugaggaaggugggcacggaguuaaaggcugggcuuucgaugacggcaacgauguguggauggggcgaaccaucaaugagacaagcagauugggauaugagacuuuuaaggucauugaagguuggucaaacccaaaaaguaagcugcagaugaauaggcaagugauaguagaccggggcaaccguuccggguacagcggaaucuucucuguugagggcaaaucauguauuaaucgcugcuuuuauguggaacuaaucagagguaggaaggaggaaaccgagguccucuggacaaguaacagcaucguggucuucugugggacuuccggcaccuacggaacaggcucuuggcccgauggggccgaccugaaucuuaugccuauuuga

SEQ ID NO: 152155 - RNA, 1410 nt, Artificial Sequence; identical to SEQ ID NO: 152154
  derived and/or modified CDS sequence (opt3) from neuraminidase__InfluenzaA__AHC59930

SEQ ID NO: 152156 - RNA, 1410 nt, Artificial Sequence; identical to SEQ ID NO: 152023
  derived and/or modified CDS sequence (opt3) from neuraminidase__InfluenzaA__AHC59942

SEQ ID NO: 152157 - RNA, 1410 nt, Artificial Sequence; identical to SEQ ID NO: 152068
  derived and/or modified CDS sequence (opt3) from neuraminidase__InfluenzaA__AHC59954

SEQ ID NO: 152158 - RNA, 1410 nt, Artificial Sequence
  derived and/or modified CDS sequence (opt3) from neuraminidase__InfluenzaA__AHC59966
augaaccccaaucagaagaucauuaccauaggcagcgugucccugacaaucucuacuauuugcuucuuuaugcagaucgccauucucaucacgaccgucacacuucacuucaaacaguacgaguuuaacucaaguccuaauaaccagguuaugcugugugaaccaacuauaaucgagagaaauauuaccgaaaucguguauuugacaaacaccacuauugagaaggaaaucugcccgaaacccgcugaguacaggaauuggagcaagccucagugugacauaacaggguucgcaccauuuuccaaagauaacucuauucgguuaucggccggaggugacaucuggguaacccgcgagcccuaugugucaugcgauccugacaaguguuaccaauucgcgcugggccaggggacgacucuaaauaacguccauagcaauaacaccgugcgagaucguacaccauauagaacucuccugaugaaugaacuuggaguucccuuucaccugggcaccaaacaggugugcauugcuuggaguuccucuagcugucaugacgguaaggccugguugcacgucugcaucacaggggaugacaagaacgcaaccgccuccuucaucuacaauggaaggcucguggauucaguaguuaguuggagcaaagagauucugcggacgcaggaaucugagugugugugcauaaacggcacuuguacagucgugaugaccgacggcuccgcuucagggaaggcagauacuaaaauccuguuuauugaggaaggaaagaucgugcauacaagcacccucagugguucugcccaacacgucgaggaaugcuccugcuauccucgcuacccaggcguuagaugugugugcagggacaacuggaaggggagcaaucggccgauaguagauauuaacaucaaagaccacucgaucgugucuuccuacgucuguucaggauuagugggcgacacgccccgcaagaaugauaguagcuccucuagccauugccuggacccuaacaaugaggaaggugggcacggaguuaaaggcugggcuuucgaugacggcaacgauguguggauggggcgaaccauuaaugagacaucaagacuuggauaugagacuuuuaaggucaucgaagguuggaguaacccaaaauccaaguugcagauuaauaggcaagugauaguagaccggggcgaugggagcggauacucuggcaucuucucaguugaggguaaaaguuguauuaaccguugcuuuuauguggaacugauccgcgggagaaaggaggaaaccgagguccuauggacaagcaauuccaucguggucuucuguggcacuucuggaaccuacggcacagggucguggcccgacggagccgaucucaaccugaugccuauuuga

SEQ ID NO: 152159 - RNA, 1410 nt, Artificial Sequence; identical to SEQ ID NO: 150970
  derived and/or modified CDS sequence (opt3) from neuraminidase__InfluenzaA__AHC59978

SEQ ID NO: 152160 - RNA, 1410 nt, Artificial Sequence; identical to SEQ ID NO: 148932
  derived and/or modified CDS sequence (opt3) from neuraminidase__InfluenzaA__AHC59990

SEQ ID NO: 152161 - RNA, 1410 nt, Artificial Sequence; identical to SEQ ID NO: 152068
  derived and/or modified CDS sequence (opt3) from neuraminidase__InfluenzaA__AHC60002

SEQ ID NO: 152162 - RNA, 1410 nt, Artificial Sequence; identical to SEQ ID NO: 152023
  derived and/or modified CDS sequence (opt3) from neuraminidase__InfluenzaA__AHC60014

SEQ ID NO: 152163 - RNA, 1410 nt, Artificial Sequence; identical to SEQ ID NO: 147566
  derived and/or modified CDS sequence (opt3) from neuraminidase__InfluenzaA__AHC60026

SEQ ID NO: 152164 - RNA, 1410 nt, Artificial Sequence; identical to SEQ ID NO: 152019
  derived and/or modified CDS sequence (opt3) from neuraminidase__InfluenzaA__AHC60038

SEQ ID NO: 152165 - RNA, 1410 nt, Artificial Sequence; identical to SEQ ID NO: 152019
  derived and/or modified CDS sequence (opt3) from neuraminidase__InfluenzaA__AHC60050

SEQ ID NO: 152166 - RNA, 1410 nt, Artificial Sequence
  derived and/or modified CDS sequence (opt3) from neuraminidase__InfluenzaA__AHC60062
augaaccccaaucagaagaucauuaccauaggcagcgugucccugacaaucucuacuauuugcuucuuuaugcaaaucgccauucucaucacgaccgucacaaugcacuucaaacaguacgaguuuaacucaccuccaaauaaccagguuaugcuuugugaaccgacuauaaucgagagaaauauuaccgaaaucguguaucugacaaacaccacuauugagaaggaaaucugccccaaauuggcugaguacaggaauuggaguaagccucagugugacauaacaggguucgcaccauuuagcaaagauaacuccauucgguuaucugccggaggugacaucuggguaacccgcgagcccuaugugucgugcgauccugacaaguguuaccaauucgcgcugggccaggggacgacucuaaauaacguccauucaaauaacaccgugcgagaucguacaccauauagaacucuccugaugaaugaacuuggaguucccuuucaccugggcaccaaacaggugugcauugcuuggagcaguuccucuugucaugacgguaaggccugguugcacgucugcaucacaggggaugacaagaacgcaaccgccagcuucaucuacaauggaaaacucguggauuccguaguuucauggaguaaggagauucugaggacgcaggaaagcgagugugugugcauaaacggcacuuguacagucgugaugaccgacggcucugcuuccgggaaagcagauacuaagauccuguuuauugaggaaggaaagaucgugcauacaucaacccucagcgguagugcccaacacgucgaggaaugcucuugcuauccucgguacccaggcguucgcugugugugcagagacaacuggaaaggguccaauaggccgauaguagauauuaacaucaaggaccacagcaucgugucgucuuacgucuguuccggauuagugggcgacacgccccggaaaaaugauucaaguagcuccucucauugccuggacccuaacaaugaggaaggugggcacggaguuaagggcugggcuuucgaugacggcaacgauguguggauggggcgcaccauuaaugagacaagccgacuuggauaugagacuuuuaaagucaucgaagguuggucaaacccaaagaguaaauugcagauuaauagacaggugauaguagacaggggcaaccgguccggguacagcggaaucuucucuguugagggcaagucauguauuaaucguugcuuuuauguggaacugauccgcgguagaaaggaggaaaccgagguccuauggacaaguaacagcaucguggucuucugugggacuuccggcaccuacggaacaggcucuuggcccgauggggccgaccucaaucugaugccuauuuga

SEQ ID NO: 152167 - RNA, 1410 nt, Artificial Sequence; identical to SEQ ID NO: 150970
  derived and/or modified CDS sequence (opt3) from neuraminidase__InfluenzaA__AHC60074

SEQ ID NO: 152168 - RNA, 1410 nt, Artificial Sequence; identical to SEQ ID NO: 152023
  derived and/or modified CDS sequence (opt3) from neuraminidase__InfluenzaA__AHC60086

SEQ ID NO: 152169 - RNA, 1410 nt, Artificial Sequence
  derived and/or modified CDS sequence (opt3) from neuraminidase__InfluenzaA__AHC60098
augaaccccaaucagaagaucauuaccauaggcagcgugucccugacaaucucuacuauuugcuucuuuaugcagaucgccauucucaucacgaccgucacacuucacuucaaacaguacgaguuuuauucaccuccaaacaaucagguuaugcugugugaaccgacuauaaucgagagaaacauuaccgaaaucguguacuugacaaauaccacuauugagaaggaaaucugccccaaauuagcugaguauaggaacuggaguaagccucagugugacauaacaggguucgcaccauuuagcaaagauaauuccauucggcugucugccggaggugacaucuggguaacccgcgagcccuacgugucgugcgauccugacaaguguuaucaauucgcgcuaggccaggggacgacucucaacaauguccauucaaacaauaccgugcgagaucguacaccauacagaacucugcuuaugaacgaacugggaguucccuuucacuugggcaccaaacaggugugcauugcuuggagcaguuccucuugucaugacgguaaggccuggcuccacgucugcaucacaggggaugacaagaaugcaaccgccagcuucaucuauaacggaaggcugguggauuccguaguuucauggaguaaagagauucugcggacgcaggaaagcgagugugugugcauaaauggcacuuguacagucgugaugaccgacggcucugcuuccgggaaggcagauacuaaaauccucuuuauugaggaaggaaagaucgugcauacaucaaccuuaagcgguagugcccaacacgucgaggaaugcucuugcuacccucgcuacccaggcguuagaugugugugcagggacaacuggaagggguccaaccggccgauaguagauauuaauaucaaagaccacagcaucgugucgucuuaugucuguuccggacuggugggcgacacgccccgcaagaacgauucaaguagcuccucucauugccuugacccuaauaacgaggaaggugggcacggaguuaaaggcugggcuuucgaugacggcaaugauguguggauggggcgaaccauugacgagacaagcagauugggauacgagacuuuuaaggucaucgaagguuggucaaacccaaaaaguaagcugcagauuaauaggcaagugauaguagaucggggcaaccguuccggguauagcggaaucuucucuguugagggcaaaucauguauuaaucgcugcuuuuacguggaacuaaucagagguaggaaggaggaaaccgagguccucuggacaaguaacagcaucguggucuucugugggacuuccggcaccuauggaacaggcucuuggcccgacggggccgaucugaaucuuaugccuauuuga

SEQ ID NO: 152170 - RNA, 1410 nt, Artificial Sequence; identical to SEQ ID NO: 152019
  derived and/or modified CDS sequence (opt3) from neuraminidase__InfluenzaA__AHC60110

SEQ ID NO: 152171 - RNA, 1410 nt, Artificial Sequence; identical to SEQ ID NO: 152096
  derived and/or modified CDS sequence (opt3) from neuraminidase__InfluenzaA__AHC60122

SEQ ID NO: 152172 - RNA, 1410 nt, Artificial Sequence; identical to SEQ ID NO: 152023
  derived and/or modified CDS sequence (opt3) from neuraminidase__InfluenzaA__AHC60134

SEQ ID NO: 152173 - RNA, 1410 nt, Artificial Sequence; identical to SEQ ID NO: 152077
  derived and/or modified CDS sequence (opt3) from neuraminidase__InfluenzaA__AHC60146

SEQ ID NO: 152174 - RNA, 1410 nt, Artificial Sequence; identical to SEQ ID NO: 152154
  derived and/or modified CDS sequence (opt3) from neuraminidase__InfluenzaA__AHC60158

SEQ ID NO: 152175 - RNA, 1410 nt, Artificial Sequence; identical to SEQ ID NO: 152019
  derived and/or modified CDS sequence (opt3) from neuraminidase__InfluenzaA__AHC60182

SEQ ID NO: 152176 - RNA, 1410 nt, Artificial Sequence
  derived and/or modified CDS sequence (opt3) from neuraminidase__InfluenzaA__AHC60206
augaaccccaaucagaagaucauuaccauaggcagcgugucccugacaaucucuauuaucugcuucuuuaugcaagucgccauucucaucacuacgguuacccuucacuucaaacaguacgaguuuaacucaccuccaaauaaccaggugaugcugugugaaccgacaauaaucgagagaaauauuacugaaaucguauauuugaccaacacaaccauugagaaggaaaucugccccaaauuagcugaguacaggaauuggaguaagccucagugugacauaacuggguucgcaccauuuagcaaagauaacuccauucggcugucugccggaggugacaucugggugacacgcgagcccuaugucucgugcgauccugacaaguguuaccaauucgcgcuaggccaggggaccacgcucaauaacgugcauucaaauaacacuguucgagaucguaccccauauagaacacugcuuaugaaugaacugggagugcccuuucacuugggcacuaagcaggucugcauugcuuggagcaguuccucuugucaugacgguaaagccuggcuccacgugugcaucaccggggaugacaagaacgcaacagccagcuucaucuacaauggaaaacugguagauuccguugugucauggaguaaggagauucugaggacccaggaaagcgagugugucugcauaaacggcacguguacuguggugaugacagacggcucugcuuccgggaaagcagauaccaagauccucuuuauugaggaaggaaagaucguccauacuucaacauuaagcgguagugcccaacacguugaggaaugcucuugcuauccucgguacccaggcgugcgcuguguaugcagagacaacuggaaaggguccaauaggccgauaguggauauuaacaucaaggaccacagcaucgucucgucuuacguguguuccggacugguuggcgacacgccccggaaaaaugauucaaguagcuccucucauugccuugacccuaacaaugaggaaggugggcacggagugaagggcugggcuuucgaugacggcaacgaugucuggauggggcgcaccauuaaugagaccagccgauugggauaugagacauuuaaagugaucgaagguuggucaaacccaaagaguaaacugcagauuaauagacagguaauaguugacaggggcaaccgguccggguacagcggaaucuucucuguggagggcaagucauguauuaaucguugcuuuuaugucgaacuaauccgcgguagaaaggaggaaacugaggugcucuggaccaguaacagcaucgucguguucugugggacauccggcacuuacggaaccggcucuuggcccgauggggccgaccugaaucuuaugccuauuuga

SEQ ID NO: 152177 - RNA, 1410 nt, Artificial Sequence; identical to SEQ ID NO: 150970
  derived and/or modified CDS sequence (opt3) from neuraminidase__InfluenzaA__AHC60218

SEQ ID NO: 152178 - RNA, 1410 nt, Artificial Sequence; identical to SEQ ID NO: 147566
  derived and/or modified CDS sequence (opt3) from neuraminidase__InfluenzaA__AHC60230

SEQ ID NO: 152179 - RNA, 1410 nt, Artificial Sequence; identical to SEQ ID NO: 152019
  derived and/or modified CDS sequence (opt3) from neuraminidase__InfluenzaA__AHC60242

SEQ ID NO: 152180 - RNA, 1410 nt, Artificial Sequence; identical to SEQ ID NO: 152019
  derived and/or modified CDS sequence (opt3) from neuraminidase__InfluenzaA__AHC60254

SEQ ID NO: 152181 - RNA, 1410 nt, Artificial Sequence; identical to SEQ ID NO: 152019
  derived and/or modified CDS sequence (opt3) from neuraminidase__InfluenzaA__AHC60266

SEQ ID NO: 152182 - RNA, 1410 nt, Artificial Sequence; identical to SEQ ID NO: 152068
  derived and/or modified CDS sequence (opt3) from neuraminidase__InfluenzaA__AHC60278

SEQ ID NO: 152183 - RNA, 1410 nt, Artificial Sequence; identical to SEQ ID NO: 152019
  derived and/or modified CDS sequence (opt3) from neuraminidase__InfluenzaA__AHC60290

SEQ ID NO: 152184 - RNA, 1410 nt, Artificial Sequence
  derived and/or modified CDS sequence (opt3) from neuraminidase__InfluenzaA__AHC60302
augaaccccaaucagaagaucauuaccauaggcagcgugucccugacaaucucuacuauuugcuucuuuaugcaaaucgccauucucaucacgaccgucacacuucacuucaaacaguacgaguuuaacucaccuccaaauaaccagguuaugcugugugaaccgacuauaaucgagagaaauauuaccgaaaucguguauuugacaaacaccacuauugagaaggaaaucugccccaaauuagcugaguacaggaauuggaguaagccucagugugacauaacaggguucgcaccauuuagcaaagauaacuccauucggcugucugccggaggugacaucuggguaacccgcgagcccuaugugucgugcgauccuaauaaguguuaccaauucgcgcuaggccaggggacgacucucaacaauguccauucaaacaauaccgugcgagaccguacaccauauagaacucugcuuaugaacgaacugggaguucccuuucacuugggcaccaaacaggugugcauugcuuggagcaguuccucuugucaugaugguaaggccuggcuccacgucugcaucacaggggacgauaagaaugcaaccgccagcuucaucuacaacggaaaacugguggacuccguaguuucauggaguaaggagauucugaggacgcaggaaagcgagugugugugcauaaacggcacuuguacagucgugaugaccgauggcucugcuuccgggaaagcagacacuaagauccucuuuauugaggaaggaaagaucauacauacaucaaccuuaagcgguagugcccaacacguggaggaaugcucuugcuauccucgguacccaggcguccgcuguguuugcagagauaauuggaaaggguccaacaggccgauuguggacaucaauaucaaggaucacagcauuguaucgucuuacguguguuccggacuggucggcgacacgccccggaaaaacgacucaaguagcuccucucauugccuugauccuaauaacgaggaaggugggcacggagugaagggcugggcuuucgacgauggcaaugacguuuggauggggcgcaccaucaacgagacaagccgauugggauaugagacuuuuaaagugauugaagguuggucaaauccaaagaguaaacugcagauaaacagacaggucaucguggauaggggcaaucgguccggguacagcggaauuuucucuguagagggcaagucauguaucaaccguugcuuuuauguugaacuaauccgcgguagaaaggaggaaaccgaggugcucuggacaaguaauagcauugucguguucugugggacuuccggcaccuacggaacaggcucuuggcccgacggggccgaucugaaccuuaugccuauauga

SEQ ID NO: 152185 - RNA, 1410 nt, Artificial Sequence; identical to SEQ ID NO: 152019
  derived and/or modified CDS sequence (opt3) from neuraminidase__InfluenzaA__AHC60314

SEQ ID NO: 152186 - RNA, 1410 nt, Artificial Sequence; identical to SEQ ID NO: 152019
  derived and/or modified CDS sequence (opt3) from neuraminidase__InfluenzaA__AHC60326

SEQ ID NO: 152187 - RNA, 1410 nt, Artificial Sequence
  derived and/or modified CDS sequence (opt3) from neuraminidase__InfluenzaA__AHC60338
augaaccccaaucagaagaucauuaccauaggcagcgugucccugacaaucucuacuauuugcuucuuuaugcagaucgccauucucaucacgaccgucacacuucacuucaaacaguacgaguuuaacucaccuccaaauaaccagguuaugcugugugaaccgacuauaaucgagagaaauauuaccgaaaucguguauuugacaaacaccacuauugagaaggaaaucugccccaaaccugcugaguacaggaauuggaguaagccacagugugacauaacaggguucgcacccuuuagcaaagauaacuccauucgguuaucugccggaggugacaucuggguaacccgcgagccuuaugugucgugcgauccagacaaguguuaccaauucgcgcugggccaggggacgacucuaaauaacguccauucaaauaacaccgugcgagaucguacacccuauagaacucuccugaugaaugaacuuggaguuccuuuucaccugggcaccaaacaggugugcauugcuuggagcaguuccucuugucaugacgguaaggccugguugcacgucugcaucacaggggaugacaagaacgcaaccgccagcuucaucuacaauggaaggcucguggauuccguaguuucauggaguaaagagauucugcggacgcaggaaagcgagugugugugcauaaacggcacuuguacagucgugaugaccgacggcucugcuuccgggaaggcagauacuaaaauccuguuuauugaggaaggaaagaucgugcauacaucaacccucagcgguagugcccaacacgucgaggaaugcucuugcuauccacgcuacccgggcguuagaugugugugcagggacaacuggaagggguccaaucggcccauaguagauauuaacaucaaagaccacagcaucgugucgucuuacgucuguuccggauuagugggcgacacgccucgcaagaaugauucaaguagcuccucucauugccuggacccaaacaaugaggaaggugggcacggaguuaaaggcugggcuuucgaugacggcgaugacguguggauggggcgaaccauuaacgagacaagcagacuuggauaugagacuuuuaaggucaucgaagguuggucaaaucccaaaaguaaguugcagauuaacaggcaagugauaguagaucggggcgaccguuccggguacagcggaaucuucucuguugagggcaaaucauguauuaaucgcugcuuuuauguggaacugaucagagguaggaaggaggaaaccgagguccuauggacaaguaacagcaucguggucuucugugggacuuccggcaccuacggaacaggcucuuggccugauggggccgaccucaaucugaugccaauuuga

SEQ ID NO: 152188 - RNA, 1410 nt, Artificial Sequence; identical to SEQ ID NO: 148932
  derived and/or modified CDS sequence (opt3) from neuraminidase__InfluenzaA__AHC60350

SEQ ID NO: 152189 - RNA, 1410 nt, Artificial Sequence
  derived and/or modified CDS sequence (opt3) from neuraminidase__InfluenzaA__AHC60362
augaaccccaaucagaagaucauuaccauaggcagcgugucccugacaaucucuacuauuugcuucuuuaugcaagucgccauccucauuacgaccguuacacuucacuucaaacaguacgaguuuaacucaccuccaaauaaccaggugaugcuguguaagccgacuaucauagaaagaaauaucaccgagauuguauauuugacaaacaccacuaucgaaaaagagauuugccccaaguuagcugaauacaggaauuggaguaaaccucagugugacaucacaggguucgcaccauuuagcaaggauaacuccauacggcugucugccggaggugacauuugggugacccgcgagcccuaugucucgugcgauccugacaaguguuaccaauucgcgcuaggccaggggacgacucucaauaacgugcauucaaauaacaccguucgagaucguacaccauauagaacucugcuuaugaaugagcugggagugcccuuucacuugggcaccaaacaggucugcaucgcuuggagcaguuccucuugucaugacgguaaggccuggcuccacgugugcauuacaggggaugacaaaaacgcaaccgccagcuucaucuacaauggaaagcugguagauuccguugugucauggaguaaagaaauccugaggacgcaggagagcgaaugugucugcauuaacggcacuuguacaguggugaugaccgacggcucugcuuccgggaaggcagauacuaagauacucuuuaucgaggagggaaaaauuguccauacaucaaccuuaagcgguagugcccaacacguugaagagugcucuugcuauccucgguacccaggcgugcgcuguguaugcagagacaacuggaagggguccaauaggccgaucguggauauaaacauuaaagaccacagcaucgucucgucuuacguguguuccggacugguuggcgacacgccccggaagaaugauucaaguagcuccucucauugccuugacccuaacaaugaagagggugggcacggagugaaaggcugggcuuucgaugacggcaacgaugucuggauggggcgcaccaucaaugaaacaagccgauugggauaugagacuuuuaaggugauugaggguuggucaaacccaaaaaguaagcugcagaucaauagacagguaauuguugacaggggcaaccgguccggguacagcggaauauucucuguggaaggcaagucauguaucaaucguugcuuuuaugucgagcuaauucgcgguagaaaagaagagaccgaagugcucuggacaaguaacagcaucgucguguucugugggacuuccggcaccuacggaacaggcucuuggcccgauggggccgaccugaaucuuaugccuaucuga

SEQ ID NO: 152190 - RNA, 1410 nt, Artificial Sequence; identical to SEQ ID NO: 151931
  derived and/or modified CDS sequence (opt3) from neuraminidase__InfluenzaA__AHC60374

SEQ ID NO: 152191 - RNA, 1410 nt, Artificial Sequence; identical to SEQ ID NO: 147566
  derived and/or modified CDS sequence (opt3) from neuraminidase__InfluenzaA__AHC60386

SEQ ID NO: 152192 - RNA, 1410 nt, Artificial Sequence; identical to SEQ ID NO: 152023
  derived and/or modified CDS sequence (opt3) from neuraminidase__InfluenzaA__AHC60398

SEQ ID NO: 152193 - RNA, 1410 nt, Artificial Sequence; identical to SEQ ID NO: 152055
  derived and/or modified CDS sequence (opt3) from neuraminidase__InfluenzaA__AHC60410

SEQ ID NO: 152194 - RNA, 1410 nt, Artificial Sequence; identical to SEQ ID NO: 147566
  derived and/or modified CDS sequence (opt3) from neuraminidase__InfluenzaA__AHC60422

SEQ ID NO: 152195 - RNA, 1410 nt, Artificial Sequence; identical to SEQ ID NO: 152055
  derived and/or modified CDS sequence (opt3) from neuraminidase__InfluenzaA__AHC60434

SEQ ID NO: 152196 - RNA, 1410 nt, Artificial Sequence; identical to SEQ ID NO: 152023
  derived and/or modified CDS sequence (opt3) from neuraminidase__InfluenzaA__AHC60446

SEQ ID NO: 152197 - RNA, 1410 nt, Artificial Sequence
  derived and/or modified CDS sequence (opt3) from neuraminidase__InfluenzaA__AHC60458
augaaccccaaucagaagaucauuaccauaggcagcgugucccugacaaucucuacuauuugcuucuuuaugcaaaucgccauucucaucacgaccgucacacuucacuucaaacaguacgaguuuaacucaccuccaaauaaccagguuaugcugugugaaccgacuauaaucgagagaaauauuaccgaaaucguguauuugacaaacaccacuauugagaaggaaaucugccccaaauuagcugaguacaggaauuggaguaagccucagugugacauaacaggguucgcaccauuuagcaaagauaacuccauucggcugucugccggaggugacaucuggguaacccgcgagcccuaugugucgugcgauccugacaaguguuaccaauucgcgcuaggccaggggacgacucucaauaacguccauucaaauaacaccgugcgagaucguacaccauauagaacucugcuuaugaaugaacugggaguucccuuucacuugggcaccaaacaggugugcauugcuuggagcaguuccucuugucaugacgguaaggccuggcuccacgucugcaucacaggggaugacaagaacgcaaccgccagcuucaucuacaauggaaggcugguggauuccguaguuucauggaguaaagagauucugcggacgcaggaaagcgagugugugugcauaaacggcacuugugcugucgugaugacagacggcucugcauccgggaaggccgauaccaaaauccucuuuauugaggaaggaaagaucgugcauacuucaacauuaagcgguagugcucaacacgucgaggaaugcucuugcuauccucgcuacccaggcguuagaugugugugcagggacaacuggaagggguccaaucggccgauaguagauauuaacaucaaagaccacagcaucgugucgucuuacgucuguuccggacuggugggcgacacccccaggaagaaugaugguucaaguagcucccauugccuugacccuaacaaugaggaagggggacacggcguuaaaggcugggccuucgaugacgggaacgauguguggaugggacgaacgauuaaugagaccucuagauuggguuaugagacauuuaaggucaucgaaggcuggagcaacccaaaaucaaagcugcagauuaaucgccaggugauaguagaccgggggaaccguaguggauacuccggcaucuucagcguugaggguaaaucuuguauuaaucgcugcuuuuauguggaacuaaucagagggaggaaggaggaaacugagguccucuggaccucaaacaguaucguggucuucuguggcacaagcggaacuuacggcaccggguccuggcccgauggagcggaccugaaucuuaugccuauuuga

SEQ ID NO: 152198 - RNA, 1410 nt, Artificial Sequence; identical to SEQ ID NO: 152068
  derived and/or modified CDS sequence (opt3) from neuraminidase__InfluenzaA__AHC60470

SEQ ID NO: 152199 - RNA, 1410 nt, Artificial Sequence
  derived and/or modified CDS sequence (opt3) from neuraminidase__InfluenzaA__AHC60482
augaaccccaaucagaagaucauuaccauaggcagcgugucccugacaaucucuacuauuugcuucuuuaugcagaucgccauucucacgaccacagucacucuucacuucaaacaguacgaguuuaacucaccuccaaauaaccagguuaugcugugugaaccgaccaucauagagagaaauaucacagaaauuguguauuugaccaacacuacaaucgagaaggaaauuugccccaaaccugcugaguacaggaauuggaguaagccacagugugacaucaccggguucgcacccuuuagcaaagauaacuccauacgguuaucugccggaggugacauuuggguaacgcgcgagccuuaugugucgugcgauccagacaaguguuaccaauucgcgcugggccaggggacuacccuaaauaacguccauucaaauaacacagugcgagaucguacucccuauagaacccuccugaugaaugaacuuggaguuccuuuucaccugggcacaaaacaggugugcaucgcuuggagcaguuccucuugucaugacgguaaggccugguugcacgucugcauuaccggggaugacaagaacgcaacggccagcuucaucuacaauggaaggcucguggauuccguaguuucauggaguaaagagauccugcggacucaggaaagcgagugugugugcauuaacggcacauguaccgucgugaugacugacggcucugcuuccgggaaggcagauacaaaaauacuguuuaucgaggaaggaaagauugugcauaccucaacgcucagcgguagugcccaacacgucgaggaaugcucuugcuauccacgcuacccgggcguuagaugugugugcagggacaacuggaagggguccaaucggcccaucguagauauaaacauuaaagaccacagcaucgugucgucuuacgucuguuccggauuagugggcgacaccccucgcaagaaugauucaaguagcuccucucauugccuggacccaaacaaugaggaaggugggcacggaguuaaaggcugggcuuucgaugacggcaacgauguguggauggggcgaacaaucaaugagacuagcagacuuggauaugagaccuuuaaggucauugaagguuggucaaaccccaaaaguaaguugcagaucaauaggcaagugauuguagaccggggcgaucguuccggguacagcggaauauucucuguugagggcaaaucauguaucaaccgcugcuuuuauguggaacugauuagagguaggaaggaggaaacagagguccuauggaccaguaauagcaucguggucuucugugggacuuccggcacauacggaaccggcucuuggccugacggggccgaucucaaccugaugccaaucuga

SEQ ID NO: 152200 - RNA, 1410 nt, Artificial Sequence; identical to SEQ ID NO: 152019
  derived and/or modified CDS sequence (opt3) from neuraminidase__InfluenzaA__AHC60494

SEQ ID NO: 152201 - RNA, 1410 nt, Artificial Sequence; identical to SEQ ID NO: 152019
  derived and/or modified CDS sequence (opt3) from neuraminidase__InfluenzaA__AHC60506

SEQ ID NO: 152202 - RNA, 1410 nt, Artificial Sequence; identical to SEQ ID NO: 152023
  derived and/or modified CDS sequence (opt3) from neuraminidase__InfluenzaA__AHC60518

SEQ ID NO: 152203 - RNA, 1410 nt, Artificial Sequence; identical to SEQ ID NO: 152023
  derived and/or modified CDS sequence (opt3) from neuraminidase__InfluenzaA__AHC60542

SEQ ID NO: 152204 - RNA, 1410 nt, Artificial Sequence
  derived and/or modified CDS sequence (opt3) from neuraminidase__InfluenzaA__AHC60554
augaaccccaaucagaagaucauuaccauaggcagcgugucccugacaaucucuacuauuugcuucuuuaugcagaucgccauucucaucacgaccgucacacuucacuucaaacaguacgaguuuuauucaccuccaaacaaucagguuaugcugugugaaccgacuaugauagagagaaacaucaccgaaauuguguacuugacaaauaccacuaucgagaaggaaauuugccccaaauuagcugaguauaggaacuggaguaagccucagugugacaucacaggguucgcaccauuuagcaaagauaauuccauacggcugucugccggaggugacauuuggguaacccgcgagcccuacgugucgugcgauccugacaaguguuaucaauucgcgcuaggccaggggacgacucucaacaauguccauucaaacaauaccgugcgagaucguacaccauacagaacucugcuuaugaacgaacugggaguucccuuucacuugggcaccaaacaggugugcaucgcuuggagcaguuccucuugucaugacgguaaggccuggcuccacgucugcauuacaggggaugacaagaaugcaaccgccagcuucaucuauaacggaaggcugguggauuccguaguuucauggaguaaagagauccugcggacgcaggaaagcgagugugugugcauuaauggcacuuguacagucgugaugaccgacggcucugcuuccgggaaggcagauacuaaaauacucuuuaucgaggaaggaaagauugugcauacaucaaccuuaagcgguagugcccaacacgucgaggaaugcucuugcuacccucgcuacccaggcguuagaugugugugcagggacaacuggaagggguccaaccggccgaucguagauauaaauauuaaagaccacagcaucgugucgucuuaugucuguuccggacuggugggcgacacgccccgcaagaacgauucaaguagcuccucucauugccuugacccuaauaacgaggaaggugggcacggaguuaaaggcugggcuuucgaugacggcaaugauguguggauggggcgaaccaucaacgagacaagcagauugggauacgagacuuuuaaggucauugaagguuggucaaauccaaaaaguaagcugcagaucaacaggcaagugauuguagaccggggcaaucguuccggguauagcggaauauucucuguugagggcaaaucauguaucaaccgcugcuuuuacguggaacuaauuagagguaggaaggaggaaaccgagguccucuggacaaguaauagcaucguggucuucugugggacuuccggcaccuauggaacaggcaccuggcccgauggggccgaccugaaccuuaugccuaucuga

SEQ ID NO: 152205 - RNA, 1410 nt, Artificial Sequence
  derived and/or modified CDS sequence (opt3) from neuraminidase__InfluenzaA__AHC60566
augaaccccaaucagaagaucauuaccauaggcagcgugucccugacaaucucuacuauuugcuucuuuaugcagaucgccauucucaucacgaccgucacacuucacuucaaacaguacgaguuuaacucaccuccaaauaaccagguuaugcugugugaaccgacuauaaucgagagaaauauuaccgaaaucguguauuugacaaacaccacuauugagaaggaaaucugccccaaaccugcugaguacaggaauuggaguaagccacagugugacauaacaggguucgcacccuuuagcaaagauaacuccauucgguuaucugccggaggugacaucuggguaacccgcgagccuuaugugucgugcgauccagacaaguguuaccaauucgcgcugggccaggggacgacucuaaauaacguccauucaaauaacaccgugcgagaucguacacccuauagaacucuccugaugaaugaacuuggaguuccuuuucaccugggcaccaaacaggugugcauugcuuggagcaguuccucuugucaugacgguaaggccugguugcacgucugcaucacaggggaugacaagaacgcaaccgccagcuucaucuacaauggaaggcucguggauuccguaguuucauggaguaaagagauucugcggacgcaggaaagcgagugugugugcauaaacggcacuuguacagucgugaugaccgacggcucugcuuccgggaaggcagauacuaaaauccuguuuauugaggaaggaaagaucgugcauacaucaacccucagcgguagugcccaacacgucgaggaaugcucuugcuauccacgcuacccgggcguuagaugugugugcagggacaacuggaagggguccaaucggcccauaguagauauuaacaucaaagaccacagcaucgugucgucuuacgucuguuccggauuagugggcgacacgccucgcaagaaugauucaaguagcuccucucauugccuggacccaaacaaugaggaaggugggcacggaguuaaaggcugggcuuucgaugacggcaacgauguguggauggggcgaaccauuaaugagacaagcagacuuggauaugagacuuuuaaggucaucgaagguuggucaaaccccaaaaguaaguugcaagugaauaggcagguaauuguugaccggggcgaucguuccggguacagcggaauauucucuguggagggcaaaucauguaucaaccgcugcuuuuaugucgaacugauuagagguaggaaggaggaaaccgaggugcuauggacaaguaauagcaucgucguguucugugggacuuccggcaccuacggaacaggcucuuggccugacggggccgaucucaaccugaugccaaucuga

SEQ ID NO: 152206 - RNA, 1410 nt, Artificial Sequence; identical to SEQ ID NO: 150970
  derived and/or modified CDS sequence (opt3) from neuraminidase__InfluenzaA__AHC60578

SEQ ID NO: 152207 - RNA, 1410 nt, Artificial Sequence; identical to SEQ ID NO: 152019
  derived and/or modified CDS sequence (opt3) from neuraminidase__InfluenzaA__AHC60590

SEQ ID NO: 152208 - RNA, 1410 nt, Artificial Sequence
  derived and/or modified CDS sequence (opt3) from neuraminidase__InfluenzaA__AHC60602
augaaccccaaucagaagaucauuaccauaggcagcgugucccugacaaucucuacuauuugcuucuuuaugcaaaucgccauucucaucacgaccgucacacuucacuucaaacaguacgaguuuaacccuccaccgaauaaccagguugugcugugugaacccacuauaaucgagagaaauauuaccgaaaucguauauuugacaaacaccacuauugagaaggaaaucugcccuaaaccagcugaguacaggaauuggucaaagccccagugugacauaacaggguucgcaccuuuuaguaaagauaacagcauucgguuauccgccggaggugacaucugggugacccgcgagccauaugucucuugcgaucccgacaaguguuaccaauucgcgcugggccaggggacgacucuaaauaacgugcauucgaauaacaccguucgagaucguacaccuuauagaacucuccugaugaaugaacuuggagugccauuucaccugggcaccaagcaggucugcauugcuuggucaagcaguuccugucaugacgguaaagccugguugcacgugugcaucacaggggaugacaagaacgcaaccgccucuuucaucuacaauggaaggcucguagauagcguuguguccuggucaaaagagauucugcggacgcaggaaagugagugugucugcauaaacggcacuuguacaguggugaugaccgacggcagcgcuucugggaaggcagauacuaaaauccuguuuauugaggaaggaaagaucguccauacauccacccucucagguagcgcccaacacguugaggaaugcaguugcuauccgcgcuaccccggcgugagauguguaugcagggacaacuggaaggggucuaaucggccuauaguggauauuaacaucaaagaccacuccaucgucagcucguacguguguucuggauuaguuggcgacacgccacgcaagaaugauuccucaaguagcucccauugccuggaccccaacaaugaggaaggugggcacggagugaaaggcugggcuuucgaugacggcaacgaugucuggauggggcgaaccauuaaugagacaucuagacuuggauaugagacuuuuaaggugaucgaagguuggagcaacccuaaaucaaaguugcagauuaauaggcagguaauaguugaccggggcgaucguaguggguacuccggaaucuucagcguggagggcaaaucuuguauuaaccgcugcuuuuaugucgaacugaucagagguaggaaggaggaaaccgaggugcuauggacaucaaauaguaucgucguguucugugggacuagcggcaccuacggaacaggcuccuggccagacggggccgaucucaaccugaugcccauuuga

SEQ ID NO: 152209 - RNA, 1410 nt, Artificial Sequence; identical to SEQ ID NO: 147566
  derived and/or modified CDS sequence (opt3) from neuraminidase__InfluenzaA__AHC60614

SEQ ID NO: 152210 - RNA, 1410 nt, Artificial Sequence; identical to SEQ ID NO: 150970
  derived and/or modified CDS sequence (opt3) from neuraminidase__InfluenzaA__AHC60626

SEQ ID NO: 152211 - RNA, 1410 nt, Artificial Sequence
  derived and/or modified CDS sequence (opt3) from neuraminidase__InfluenzaA__AHC60650
augaaccccaaucagaagaucauuaccauaggcagcgugucccugacaaucucuacuauuugcuucuuuaugcagaucgccauucucaucacgaccgucacacuucacuucaaacaguacgaguuuuauucaccuccaaacaaucagguuaugcugugugaaccgacuauaaucgagagaaacauuaccgaaaucguguacuugacaaauaccacuauugagaaggaaaucugccccaaauuagcugaguauaggaacuggaguaagccucagugugacauaacaggguucgcaccauuuagcaaagauaauuccauucggcugucugccggaggugacaucuggguaacccgcgagcccuacgugucgugcgauccugacaaguguuaucaauucgcgcuaggccaggggacgacucucaacaauguccauucaaacaauaccgugcgagaucguacaccauacagaacucugcuuaugaacgaacugggaguucccuuucacuugggcaccaaacaggugugcauugcuuggagcaguuccucuugucaugacgguaaggccuggcuccacgucugcaucacaggggaugacgagaaugcaaccgccagcuucaucuauaacggaaggcugguggauuccguaguuucauggaguaaggaaauucugcggacgcaggagagcgagugugugugcauaaauggcacuuguacagucgugaugaccgacggcucugcuuccgggaaagcagauacuaagauccucuuuauugaagagggaaaaaucgugcauacaucaaccuuaagcgguagugcccaacacgucgaagagugcucuugcuacccucgcuacccaggcguuagaugugugugcagggacaacuggaagggguccaaccggccgauaguagauauuaauaucaaggaccacagcaucgugucgucuuaugucuguuccggacuggugggcgacacgccccgcaaaaacgauucaaguagcuccucucauugccuugacccuaauaacgaagagggugggcacggaguuaagggcugggcuuucgaugacggcaaugauguguggauggggcgaaccauuaacgagacaagcagauugggauacgaaacuuuuaaagucaucgaggguuggucaaauccaaagaguaaacugcagauuaacaggcaagugauaguagaccggggcaaucguuccggguauagcggaaucuucucuguugaaggcaagucauguauuaaccgcugcuuuuacguggagcuaaucagagguaggaaagaagagaccgagguccucuggacaaguaauagcaucguggucuucugugggacuuccggcaccuauggaacaggcucuuggcccgauggggccgaccugaaccuuaugccuauuuga

SEQ ID NO: 152212 - RNA, 1410 nt, Artificial Sequence; identical to SEQ ID NO: 152068
  derived and/or modified CDS sequence (opt3) from neuraminidase__InfluenzaA__AHC60662

SEQ ID NO: 152213 - RNA, 1410 nt, Artificial Sequence; identical to SEQ ID NO: 152023
  derived and/or modified CDS sequence (opt3) from neuraminidase__InfluenzaA__AHC60674

SEQ ID NO: 152214 - RNA, 1410 nt, Artificial Sequence; identical to SEQ ID NO: 147566
  derived and/or modified CDS sequence (opt3) from neuraminidase__InfluenzaA__AHC60686

SEQ ID NO: 152215 - RNA, 1410 nt, Artificial Sequence; identical to SEQ ID NO: 152023
  derived and/or modified CDS sequence (opt3) from neuraminidase__InfluenzaA__AHC60698

SEQ ID NO: 152216 - RNA, 1410 nt, Artificial Sequence; identical to SEQ ID NO: 152019
  derived and/or modified CDS sequence (opt3) from neuraminidase__InfluenzaA__AHC60710

SEQ ID NO: 152217 - RNA, 1410 nt, Artificial Sequence; identical to SEQ ID NO: 152068
  derived and/or modified CDS sequence (opt3) from neuraminidase__InfluenzaA__AHC60722

SEQ ID NO: 152218 - RNA, 1410 nt, Artificial Sequence
  derived and/or modified CDS sequence (opt3) from neuraminidase__InfluenzaA__AHC60734
augaaccccaaucagaagaucauuaccauaggcagcgugucccugacaaucucuacuauuugcuucuuuaugcaaaucgccauucucaucacgaccgucacacuucacuucaaacaguacgaguuuaacucaccuccaaauaaccagguuaugcugugugaaccgacuauaaucgagagaaauauuaccgaaaucguguauuugauuaacacaaccaucgagaaggaaauaugccccaaauuagcugaguacaggaauuggaguaagccucagugugacauuacuggguucgcaccauuuagcaaagauaacuccauccggcugucugccggaggugacauuuggguaacacgcgagcccuaugugucgugcgauccuaauaaguguuaccaauucgcgcuaggccaggggaccacgcucaacaauguccauucaaacaauacugugcgagaccguaccccauauagaacacugcuuaugaacgaacugggaguucccuuucacuugggcacuaaacaggugugcaucgcuuggagcaguuccucuugucaugaugguaaggccuggcuccacgucugcaucaccggggacgauaagaaugcaacagccagcuucauuuacaacggaaaacugguggacuccguaguuucauggaguaaggagauacugaggacccaggaaagcgagugugugugcaucaacggcacguguacugucgugaugacagauggcucugcuuccgggaaagcagacaccaagauucucuuuaucgaggaaggaaagauagugcauacuucaacauuaagcgguagugcccaacacgucgaggaaugcucuugcuauccucgguacccaggcguucgcugugugugcagagauaauuggaaaggguccaacaggccgauuguagacaucaauaucaaggaucacagcauugugucgucuuacgucuguuccggacuggugggcgacacgccccggaaaaacgacucaaguagcuccucucauugccuugauccuaauaacgaggaaggugggcacggaguuaagggcugggcuuucgacgauggcaaugacguguggauggggcgcaccaucaacgagaccagccgauugggauaugagacauuuaaagucauugaagguuggucaaauccaaagaguaaacugcagauaaacagacaggugaucguagauaggggcaaucgguccggguacagcggaauuuucucuguugagggcaagucauguaucaaccguugcuuuuauguggaacuaauccgcgguagaaaggaggaaacugagguccucuggaccaguaauagcauuguggucuucugugggacauccggcacuuacggaaccggcucuuggcccgacggggccgaucugaaccuuaugccuauauga

SEQ ID NO: 152219 - RNA, 1410 nt, Artificial Sequence; identical to SEQ ID NO: 152055
  derived and/or modified CDS sequence (opt3) from neuraminidase__InfluenzaA__AHC60746

SEQ ID NO: 152220 - RNA, 1410 nt, Artificial Sequence; identical to SEQ ID NO: 152154
  derived and/or modified CDS sequence (opt3) from neuraminidase__InfluenzaA__AHC60770

SEQ ID NO: 152221 - RNA, 1410 nt, Artificial Sequence
  derived and/or modified CDS sequence (opt3) from neuraminidase__InfluenzaA__AHC60782
augaaccccaaucagaagaucauuaccauaggcagcgugucccugacaaucucuacuauuugcuucuuuaugcagaucgccauucucaucacgaccgucacacuucacuucaaacaguacgaguuuaacucaccuccaaauaaccagguuaugcugugugaaccgacuauaaucgagagaaauauuaccgaaaucguguauuugacaaacaccacuauugagaaggaaaucugccccaaauuagcugaguacaggaauuggaguaagccucagugugacauaacaggguucgcaccauuuagcaaagauaacuccauucggcugucugccggaggugacaucuggguaacccgcgagcccuaugugucgugcgauccugacaaguguuaccaauucgcgcuaggccaggggacgacucucaauaacguccauucaaauaacaccgugcgagaucguacaccauauagaacucugcuuaugaaugaacugggaguucccuuucacuugggcaccaaacaggugugcauugcuuggagcaguuccucuugucaugacgguaaggccuggcuccacgucugcaucacaggggaugacaagaacgcaaccgccagcuucaucuacaauggaaggcugguggauuccguaguuucauggaguaaagagauucugcggacgcaggaaagcgagugugugugcauaaacggcacuuguacagucgugaugaccgacggcucugcuuccgggaaggcagauacuaaaauccucuuuauugaggaaggaaagaucgugcauacaucaaccuuaagcgguagugcccaacacgucgaggaaugcucuugcuauccucgcuacccaggcguuagaugugugugcagggacaacuggaagggguccaaucggccgauaguagauauuaacaucaaagaccacagcaucgugucgggauacgucuguucuggccuggugggugacacgccccgcaagaaugauuccucaaguagcucccauugccuugacccuaacaaugaggaagggggacacggcguuaaaggcugggcuuucgaugacgggaacgauguguggaugggacgaaccauuaaugagacaucuagauuggguuaugagacuuuuaaggucaucgaaggcuggagcaacccaaaaucaaagcugcagauuaauaggcaagugauaguagaccgggggaaccguaguggauacuccggcaucuucagcguugaggguaaaucuuguauuaaucgcugcuuuuauguggaacuaaucagagggaggaaggaggaaaccgagguccucuggacaucaaacaguaucguggucuucuguggcacuagcggaaccuacggcacaggguccuggcccgauggagccgaccugaaucuuaugccuauuuga

SEQ ID NO: 152222 - RNA, 1410 nt, Artificial Sequence; identical to SEQ ID NO: 152066
  derived and/or modified CDS sequence (opt3) from neuraminidase__InfluenzaA__AHC60794

SEQ ID NO: 152223 - RNA, 1410 nt, Artificial Sequence
  derived and/or modified CDS sequence (opt3) from neuraminidase__InfluenzaA__AHC60806
augaaccccaaucagaagaucauuaccauaggcagcgugucccugacaaucucuacuauuugcuucuuuaugcaaaucgccauucucaucacgaccgucacacuucacuucaaacagugugaguuuaacucaccuccaaauaaccagguuaugcugugcgaaccgacuauaaucgagagaaauauuaccgaaaucguguacuugacaaacaccacuauugagaaggaaaucugucccaaauuagcugaguauaggaauuggaguaagccucagugcgacauaacaggguucgcaccauuuagcaaagauaacuccauucggcugucugccggaggugacaucuggguaacccgcgagcccuacgugucgugugauccuaauaagugcuaucaauucgcgcuaggccaggggacgacucucaacaauguccauucaaacaauaccgugcgagaccguacaccauacagaacucugcuuaugaacgaacugggaguucccuuucacuugggcaccaaacagguguguauugcuuggagcaguuccucuugccaugaugguaaggccuggcuccacgucuguaucacaggggacgauaagaaugcaaccgccagcuucaucuauaacggaaaacugguggacuccguaguuucauggaguaaggagauucugaggacgcaggaaagcgagugcguguguauaaacggcacuugcacagucgugaugaccgauggcucugcuuccgggaaagcagacacuaagauccucuuuauugaggaaggaaagaucgugcauacaucaaccuuaagcgguagugcccaacacgucgaggaaugcucuuguuacccucgguauccaggcguucgcugcguguguagagauaauuggaaaggguccaacaggccgauaguagacauuaauaucaaggaucacagcaucgugucgucuuacgucugcuccggacuggugggcgacacgccccggaaaaacgacucaaguagcuccucucauugucuugauccuaauaacgaggaaggugggcacggaguuaagggcugggcuuucgacgauggcaaugacguguggauggggcgcaccauuaacgagacaagccgauugggauacgagacuuuuaaagucaucgaagguuggucaaauccaaagaguaaacugcagauuaacagacaggugauaguagauaggggcaaucgguccggguauagcggaaucuucucuguugagggcaagucaugcauuaaccguuguuuuuacguggaacuaauccgcgguagaaaggaggaaaccgggguccucuggacaaguaauagcaucguggucuucugcggcacuuccggaaccuauggcacagggucuuggcccgacggagccgaucugaaccuuaugccuauuuga

SEQ ID NO: 152224 - RNA, 1410 nt, Artificial Sequence; identical to SEQ ID NO: 148932
  derived and/or modified CDS sequence (opt3) from neuraminidase__InfluenzaA__AHC60818

SEQ ID NO: 152225 - RNA, 1410 nt, Artificial Sequence; identical to SEQ ID NO: 152023
  derived and/or modified CDS sequence (opt3) from neuraminidase__InfluenzaA__AHC60830

SEQ ID NO: 152226 - RNA, 1410 nt, Artificial Sequence; identical to SEQ ID NO: 152204
  derived and/or modified CDS sequence (opt3) from neuraminidase__InfluenzaA__AHC60842

SEQ ID NO: 152227 - RNA, 1410 nt, Artificial Sequence; identical to SEQ ID NO: 152023
  derived and/or modified CDS sequence (opt3) from neuraminidase__InfluenzaA__AHC60854

SEQ ID NO: 152228 - RNA, 1410 nt, Artificial Sequence; identical to SEQ ID NO: 152068
  derived and/or modified CDS sequence (opt3) from neuraminidase__InfluenzaA__AHC60866

SEQ ID NO: 152229 - RNA, 1410 nt, Artificial Sequence; identical to SEQ ID NO: 152055
  derived and/or modified CDS sequence (opt3) from neuraminidase__InfluenzaA__AHC60878

SEQ ID NO: 152230 - RNA, 1410 nt, Artificial Sequence; identical to SEQ ID NO: 152055
  derived and/or modified CDS sequence (opt3) from neuraminidase__InfluenzaA__AHC60890

SEQ ID NO: 152231 - RNA, 1410 nt, Artificial Sequence; identical to SEQ ID NO: 152154
  derived and/or modified CDS sequence (opt3) from neuraminidase__InfluenzaA__AHC60902

SEQ ID NO: 152232 - RNA, 1410 nt, Artificial Sequence; identical to SEQ ID NO: 152019
  derived and/or modified CDS sequence (opt3) from neuraminidase__InfluenzaA__AHC60914

SEQ ID NO: 152233 - RNA, 1410 nt, Artificial Sequence; identical to SEQ ID NO: 152023
  derived and/or modified CDS sequence (opt3) from neuraminidase__InfluenzaA__AHC60926

SEQ ID NO: 152234 - RNA, 1410 nt, Artificial Sequence; identical to SEQ ID NO: 152019
  derived and/or modified CDS sequence (opt3) from neuraminidase__InfluenzaA__AHC60938

SEQ ID NO: 152235 - RNA, 1410 nt, Artificial Sequence; identical to SEQ ID NO: 152023
  derived and/or modified CDS sequence (opt3) from neuraminidase__InfluenzaA__AHC60950

SEQ ID NO: 152236 - RNA, 1410 nt, Artificial Sequence
  derived and/or modified CDS sequence (opt3) from neuraminidase__InfluenzaA__AHC60962
augaaccccaaucagaagaucauuaccauaggcagcgugucccugacaaucucuacuauuugcuucuuuaugcaaaucgccauucucaucacgaccgucacacuucacuucaaacaguacgaguuuuauucaccuccaaacaaucagguuaugcugugugaaccgacuauaaucgagagaaacauuaccgaaaucguguacuugacaaauaccacuauugagaaggaaaucugccccaaauuagcugaguauaggaacuggaguaagccucagugugacauaacaggguucgcaccauuuagcaaagauaauuccauucggcugucugccggaggugacaucuggguaacccgcgagcccuacgugucgugcgauccugacaaguguuaucaauucgcgcuaggccaggggacgacucucaacaauguccauucaaacaauaccgugcgagaucguacaccauacagaacucugcuuaugaacgaacugggaguucccuuucacuugggcaccaaacaggugugcauugcuuggagcaguuccucuugucaugacgguaaggccuggcuccacgucugcgugacaggggaugacaagaaugcaaccgccagcuucaucuauaacggaaggcugguagauuccguugugucauggaguaaagagauccugcggacgcaggaaagcgagugugucugcauuaauggcacuuguacaguggugaugaccgacggcucugcuuccgggaaggcagauacuaaaauacucuuuaucgaggaaggaaagauuguccauacaucaaccuuaagcgguagugcccaacacguugaggaaugcucuugcuacccucgcuacccaggcgugagauguguaugcagggacaacuggaagggguccaaccggccgaucguggauauaaauauuaaagaccacagcaucgucucgucuuauguguguuccggacugguuggcgacacgccccgcaagaacgauucaaguagcuccucucauugccuugacccuaauaacgaggaaggugggcacggagugaaaggcugggcuuucgaugacggcaaugaugucuggauggggcgaaccaucaacgagacaagcagauugggauacgagacuuuuaaggugauugaagguuggucaaauccaaaaaguaagcugcagaucaacaggcagguaauuguugaccggggcaaucguuccggguauagcggaauauucucuguggagggcaaaucauguaucaaccgcugcuuuuacgucgaacuaauuagagguaggaaggaggaaaccgaggugcucuggacaaguaauagcaucgucguguucugugggacuuccggcaccuauggaacaggcucuuggcccgauggggccgaccugaaccuuaugccuaucuga

SEQ ID NO: 152237 - RNA, 1410 nt, Artificial Sequence; identical to SEQ ID NO: 152068
  derived and/or modified CDS sequence (opt3) from neuraminidase__InfluenzaA__AHC60974

SEQ ID NO: 152238 - RNA, 1410 nt, Artificial Sequence; identical to SEQ ID NO: 152019
  derived and/or modified CDS sequence (opt3) from neuraminidase__InfluenzaA__AHC60986

SEQ ID NO: 152239 - RNA, 1410 nt, Artificial Sequence; identical to SEQ ID NO: 152166
  derived and/or modified CDS sequence (opt3) from neuraminidase__InfluenzaA__AHC60998

SEQ ID NO: 152240 - RNA, 1410 nt, Artificial Sequence; identical to SEQ ID NO: 152066
  derived and/or modified CDS sequence (opt3) from neuraminidase__InfluenzaA__AHC61010

SEQ ID NO: 152241 - RNA, 1410 nt, Artificial Sequence
  derived and/or modified CDS sequence (opt3) from neuraminidase__InfluenzaA__AHC61022
augaaccccaaucagaagaucauuaccauaggcagcgugucccugacaaucucuacuauuugcuucuuuaugcagaucgccauucucaucacgaccgucacacuucacuucaaacaguacgaguuuaacucaccuccaaauaaccagguuaugcugugugaaccgacuauaaucgagagaaauauuaccgaaaucguguauuugacaaacaccacuauugagaaggaaaucugccccaaauuagcugaguacaggaauuggaguaagccucagugugacauaacaggguucgcaccauuuagcaaagauaacuccauucggcugucugccggaggugacaucuggguaacccgcgagcccuaugugucgugcgauccugacaaguguuaccaauucgcgcuaggccaggggacgacucucaauaacguccauucaaauaacaccgugcgagaucguacaccauauagaacucugcuuaugaaugaacugggaguucccuuucacuugggcaccaaacaggugugcauugcuuggagcaguuccucuugucaugacgguaaggccuggcuccacgucugcaucacaggggaugacaagaacgcaaccgccagcuucaucuacaauggaaggcugguggauuccguaguuucauggaguaaagagauucugcggacgcaggaaagcgagugugugugcauaaacggcacuuguacagucgugaugaccgacggcucugcuuccgggaaggcagauacuaaaauccucuuuauugaggaaggaaagaucgugcauacaucaaccuuaagcgguagugcccaacacgucgaggaaugcucuugcuauccucgcuacccaggcguuagaugugugugcagggacaacuggaagggguccaaucggccgauaguagauauuaacaucaaagaccacagcaucgugucgucuuacgucuguuccggacuggugggcgacacgccccgcaagaaugauucaaguagcauuucccauugccuugacccuaacaaugaggaaggugggcacggaguuaaaggcugggcuuucgaugacggcaacgauguguggauggggcgaaccaucaaugagacaucuagauugggauaugagacuuuuaaggucauugaagguuggagcaacccaaaaucaaagcugcagauaaauaggcaagugaucguagaccggggcaaccguaguggguacuccggaauuuucagcguugagggcaaaucuuguaucaaucgcugcuuuuauguggaacuaaucagagguaggaaggaggaaaccgagguccucuggacaucaaacaguauuguggucuucugugggacuagcggcaccuacggaacaggcuccuggcccgauggggccgaccugaaucuuaugccuauauga

SEQ ID NO: 152242 - RNA, 1410 nt, Artificial Sequence; identical to SEQ ID NO: 147566
  derived and/or modified CDS sequence (opt3) from neuraminidase__InfluenzaA__AHC61034

SEQ ID NO: 152243 - RNA, 1410 nt, Artificial Sequence; identical to SEQ ID NO: 152019
  derived and/or modified CDS sequence (opt3) from neuraminidase__InfluenzaA__AHC61046

SEQ ID NO: 152244 - RNA, 1410 nt, Artificial Sequence; identical to SEQ ID NO: 152068
  derived and/or modified CDS sequence (opt3) from neuraminidase__InfluenzaA__AHC61058

SEQ ID NO: 152245 - RNA, 1410 nt, Artificial Sequence; identical to SEQ ID NO: 151931
  derived and/or modified CDS sequence (opt3) from neuraminidase__InfluenzaA__AHC61070

SEQ ID NO: 152246 - RNA, 1410 nt, Artificial Sequence
  derived and/or modified CDS sequence (opt3) from neuraminidase__InfluenzaA__AHC61082
augaaccccaaucagaagaucauuaccauaggcagcgugucccugacaaucucuacuauuugcuucuuuaugcaaaucgccauucucaucacgaccgucacacuucacuucaaacaguacgaguuuaacucaccuccaaauaaccagguugugcugugugaaccgacuauaaucgagagaaauauuaccgaaaucguauauuugacaaacaccacuauugagaaggaaaucugccccaaaccugcugaguacaggaauuggaguaagccacagugugacauaacaggguucgcacccuuuagcaaagauaacuccauucgguuaucugccggaggugacaucugggugacccgcgagccuuaugucucgugcgauccagacaaguguuaccaauucgcgcugggccaggggacgacucuaaauaacgugcauucaaauaacaccguucgagaucguacacccuauagaacucuccugaugaaugaacuuggagugccuuuucaccugggcaccaagcaggucugcauugcuuggagcaguuccucuugucaugacgguaaagccugguugcacgugugcaucacaggggaugacaagaacgcaaccgccagcuucaucuacaauggaaggcucguagauuccguugugucauggaguaaagagauucugcggacgcaggaaagcgagugugucugcauaaacggcacuuguacaguggugaugaccgacggcucugcuuccgggaaggcagauacuaaaauccuguuuauugaggaaggaaagaucguccauacaucaacccucagcgguagugcccaacacguugaggaaugcucuugcuauccacgcuacccgggcgugagauguguaugcagggacaacuggaagggguccaaucggcccauaguggauauuaacaucaaagaccacagcaucgucucgucuuacguguguuccggauuaguuggcgacacgccucgcaagaaugauucaaguagcuccucucauugccuggacccaaacaaugaggaaggugggcacggagugaaaggcugggcuuucgaugacggcaacgaugucuggauggggcgaaccauuaaugagacaagcagacuuggauaugagacuuuuaaggugaucgaagguuggucaaaccccaaaaguaaguugcagauuaauaggcagguaauaguugaccggggcgaucguuccggguacagcggaaucuucucuguggagggcaaaucauguauuaaccgcugcuuuuaugucgaacugaucagagguaggaaggaggaaaccggggugcuauggacaaguaauagcaucgucguguucuguggcacuuccggaaccuacggcacagggucuuggccugacggagccgaucucaaccugaugccaauuuga

SEQ ID NO: 152247 - RNA, 1410 nt, Artificial Sequence; identical to SEQ ID NO: 147566
  derived and/or modified CDS sequence (opt3) from neuraminidase__InfluenzaA__AHC61094

SEQ ID NO: 152248 - RNA, 1410 nt, Artificial Sequence; identical to SEQ ID NO: 152055
  derived and/or modified CDS sequence (opt3) from neuraminidase__InfluenzaA__AHC61106

SEQ ID NO: 152249 - RNA, 1410 nt, Artificial Sequence; identical to SEQ ID NO: 152055
  derived and/or modified CDS sequence (opt3) from neuraminidase__InfluenzaA__AHC61118

SEQ ID NO: 152250 - RNA, 1410 nt, Artificial Sequence; identical to SEQ ID NO: 152019
  derived and/or modified CDS sequence (opt3) from neuraminidase__InfluenzaA__AHC61130

SEQ ID NO: 152251 - RNA, 1410 nt, Artificial Sequence; identical to SEQ ID NO: 152166
  derived and/or modified CDS sequence (opt3) from neuraminidase__InfluenzaA__AHC61142

SEQ ID NO: 152252 - RNA, 1410 nt, Artificial Sequence; identical to SEQ ID NO: 152055
  derived and/or modified CDS sequence (opt3) from neuraminidase__InfluenzaA__AHC61154

SEQ ID NO: 152253 - RNA, 1410 nt, Artificial Sequence
  derived and/or modified CDS sequence (opt3) from neuraminidase__InfluenzaA__AHC61166
augaaccccaaucagaagaucauuaccauaggcagcgugucccugacaaucucuacuauuugcuucuuuaugcaagucgccauccucauuacgaccguuacacuucacuucaaacaguacgaguuuaacucaccuccaaauaaccaggugaugcugugugaaccgacuaucauagagagaaauaucaccgaaauuguauauuugacaaacaccacuaucgagaaggaaauuugccccaaauuagcugaguacaggaauuggaguaagccucagugugacaucacaggguucgcaccauuuagcaaagauaacuccauacggcugucugccggaggugacauuugggugacccgcgagcccuaugucucgugcgauccugacaaguguuaccaauucgcgcuaggccaggggacgacucucaauaacgugcauucaaauaacaccguucgagaucguacaccauauagaacucugcuuaugaaugaacugggagugcccuuucacuugggcaccaagcaggucugcaucgcuuggagcaguuccucuugucaugacgguaaagccuggcuccacgugugcauuacaggggaugacaagaacgcaaccgccagcuucaucuacaauggaaaacugguagauuccguugugucauggaguaaggagauccugaggacgcaggaaagcgagugugucugcauuaacggcacuuguacaguggugaugaccgacggcucugcuuccgggaaagcagauacuaagauacucuuuaucgaggaaggaaagauuguccauacaucaaccuuaagcgguagugcccaacacguugaggaaugcucuugcuauccucgguacccaggcgugcgcuguguaugcagagacaacuggaaaggguccaauaggccgaucguggauauaaacauuaaggaccacagcaucgucucgucuuacguguguuccggacugguuggcgacacgccccggaaaaaugauucaaguagcuccucucauugccuugacccuaacaaugaggaaggugggcacggagugaagggcugggcuuucgaugacggcaacgaugucuggauggggcgcaccaucaaugagacaagccgauugggauaugagacuuuuaaagugauugaagguuggucaaacccaaagaguaaacugcagaccaauagacagguaaucguugacaggggcaaccgguccggguacagcggaauuuucucuguggagggcaagucauguauaaaucguugcuuuuaugucgaacuaauccgcgguagaaaggaggaaacagaggugcucuggaccaguaacagcauugucguguucugugggacuuccggcacauacggaaccggcucuuggcccgauggggccgaccugaaucuuaugccuaucuga

SEQ ID NO: 152254 - RNA, 1410 nt, Artificial Sequence; identical to SEQ ID NO: 152019
  derived and/or modified CDS sequence (opt3) from neuraminidase__InfluenzaA__AHC61178

SEQ ID NO: 152255 - RNA, 1410 nt, Artificial Sequence; identical to SEQ ID NO: 152055
  derived and/or modified CDS sequence (opt3) from neuraminidase__InfluenzaA__AHC61190

SEQ ID NO: 152256 - RNA, 1410 nt, Artificial Sequence; identical to SEQ ID NO: 152068
  derived and/or modified CDS sequence (opt3) from neuraminidase__InfluenzaA__AHC61202

SEQ ID NO: 152257 - RNA, 1410 nt, Artificial Sequence; identical to SEQ ID NO: 152023
  derived and/or modified CDS sequence (opt3) from neuraminidase__InfluenzaA__AHC61214

SEQ ID NO: 152258 - RNA, 1410 nt, Artificial Sequence; identical to SEQ ID NO: 152068
  derived and/or modified CDS sequence (opt3) from neuraminidase__InfluenzaA__AHC61226

SEQ ID NO: 152259 - RNA, 1410 nt, Artificial Sequence; identical to SEQ ID NO: 152055
  derived and/or modified CDS sequence (opt3) from neuraminidase__InfluenzaA__AHC61238

SEQ ID NO: 152260 - RNA, 1410 nt, Artificial Sequence; identical to SEQ ID NO: 152236
  derived and/or modified CDS sequence (opt3) from neuraminidase__InfluenzaA__AHC61250

SEQ ID NO: 152261 - RNA, 1410 nt, Artificial Sequence; identical to SEQ ID NO: 152019
  derived and/or modified CDS sequence (opt3) from neuraminidase__InfluenzaA__AHC61262

SEQ ID NO: 152262 - RNA, 1410 nt, Artificial Sequence; identical to SEQ ID NO: 152023
  derived and/or modified CDS sequence (opt3) from neuraminidase__InfluenzaA__AHC61274

SEQ ID NO: 152263 - RNA, 1410 nt, Artificial Sequence; identical to SEQ ID NO: 147566
  derived and/or modified CDS sequence (opt3) from neuraminidase__InfluenzaA__AHC61286

SEQ ID NO: 152264 - RNA, 1410 nt, Artificial Sequence; identical to SEQ ID NO: 152067
  derived and/or modified CDS sequence (opt3) from neuraminidase__InfluenzaA__AHC61298

SEQ ID NO: 152265 - RNA, 1410 nt, Artificial Sequence
  derived and/or modified CDS sequence (opt3) from neuraminidase__InfluenzaA__AHC61310
augaaccccaaucagaagaucauuaccauaggcagcgugucccugacaaucucuacuauuugcuucuuuaugcaaaucgccauucucaucacgaccgucacacuucacuucaaacaguacgaguuuaacucaccuccaaauaaccagguuaugcugugugaaccgacuauaaucgagagaaauauuaccgaaaucguguauuugacaaacaccacuauugagaaggaaaucugccccaaauuagcugaguacaggaauuggaguaagccucagugugacauaacaggguucgcaccauuuagcaaagauaacuccauucggcugucugccggaggugacaucuggguaacccgcgagcccuaugugucgugcgauccuaauaaguguuaccaauucgcgcuaggccaggggacgacucucaacaauguccauucaaacaauaccgugcgagaccguacaccauauagaacucugcuuaugaacgaacugggaguucccuuucacuugggcaccaaacaggugugcauugcuuggagcaguuccucuugucaugaugguaaggccuggcuccacgucugcaucacaggggacgauaagaaugcaaccgccagcuucaucuacaacggaaaacugguggacuccguaguuucauggaguaaggagauucugaggacgcaggaaagcgagugugugugcauaaacggcacuuguacagucgugaugaccgauggcucugcuuccgggaaagcagacacuaagauccucuuuauugaggaaggaaagaucgugcauacaucaaccuuaagcgguagugcccaacacgucgaggaaugcucuugcuauccucgguacccaggcguucgcugugugugcagagauaauuggaaaggguccaacaggccgauaguagacauuaauaucaaggaucacagcaucgugucgucuuacgucuguuccggacuggugggcgacacgccccggaaaaacgacucaaguagcuccucucauugccuugauccuaauaacgaggaaggugggcacggaguuaagggcugggcuuucgacgauggcaaugacguguggauggggcgcaccauuaacgagacaagccgauugggauaugagacuuuuaaagucaucgaagguuggucaaauccaaagaguaaacugcagauuaacagacaggugauaaucgauaggggcaaucgguccggguacagcggaauuuucucuguagagggcaagucauguaucaaccguugcuuuuauguugaacuaauccgcgguagaaaggaggaaaccgaggugcucuggacaaguagcuccauugucguguucugugggacuucuggcaccuacggaacaggcucguggcccgacggggccgaucugaaucuuaugccuauauga

SEQ ID NO: 152266 - RNA, 1410 nt, Artificial Sequence; identical to SEQ ID NO: 152096
  derived and/or modified CDS sequence (opt3) from neuraminidase__InfluenzaA__AHC61322

SEQ ID NO: 152267 - RNA, 1410 nt, Artificial Sequence; identical to SEQ ID NO: 152055
  derived and/or modified CDS sequence (opt3) from neuraminidase__InfluenzaA__AHC61334

SEQ ID NO: 152268 - RNA, 1410 nt, Artificial Sequence; identical to SEQ ID NO: 152023
  derived and/or modified CDS sequence (opt3) from neuraminidase__InfluenzaA__AHC61346

SEQ ID NO: 152269 - RNA, 1410 nt, Artificial Sequence
  derived and/or modified CDS sequence (opt3) from neuraminidase__InfluenzaA__AHC61358
augaaccccaaucagaagaucauuaccauaggcagcgugucccugacaaucucuacuauuugcuucuuuaugcagaucgccauucucaucacgaccgucacacuucacuucaaacaguacgaguuuaacucaccuccaaauaaccagguuaugcugugugaaccgacuauaaucgagagaaauauuaccgaaaucguguauuugacaaacaccacuauugagaaggaaaucugccccaaauuagcugaguacaggaauuggaguaagccucagugugacauaacaggguucgcaccauuuagcaaagauaacuccauucggcugucugccggaggugacaucuggguaacccgcgagcccuaugugucgugcgauccugacaaguguuaccaauucgcgcuaggccaggggacgacucucaauaacguccauucaaauaacaccgugcgagaucguacaccauauagaacucugcuuaugaaugaacugggaguucccuuucacuugggcaccaaacaggugugcauugcuuggagcaguuccucuugucaugacgguaaggccuggcuccacgucugcaucacaggggaugacaagaacgcaaccgccagcuucaucuacaauggaaggcugguggauuccguaguuucauggaguaaagagauucugcggacgcaggaaagcgagugugugugcauaaacggcacuuguacagucgugaugaccgacggcucugcuuccgggaaggcagauacuaaaauccucuuuauugaggaaggaaagaucgugcauacaucaaccuuaagcgguagugcccaacacgucgaggaaugcucuugcuauccucgcuacccaggcguuagaugugugugcagggacaacuggaagggguccaaucggccgauaguagauauuaacaucaaagaccacagcaucgugucgucuuacgucuguuccggacuggugggcgacacgccccgcaagaaugauauuucaaguagcucccauugccuugacccuaacaaugaggaaggugggcacggaguuaaaggcugggcuuucgaugacggcaacgauguguggauggggcgaaccaucaaugagacaucuagauugggauaugagacuuuuaaggucauuaaagguuggagcaacccaaagucaaaacugcagauaaauaggcaagugaucguagaccggggcaaccguaguggguacuccggaauuuucagcguugaaggcaagucuuguaucaaucgcugcuuuuauguggagcuaaucagagguaggaaggaagagaccgaaguccucuggacaucaaacaguauuguggucuucugugggacuagcggcaccuacggaacaggcuccuggcccgauggggccgaccugaaucuuaugccuauauga

SEQ ID NO: 152270 - RNA, 1410 nt, Artificial Sequence; identical to SEQ ID NO: 152068
  derived and/or modified CDS sequence (opt3) from neuraminidase__InfluenzaA__AHC61370

SEQ ID NO: 152271 - RNA, 1410 nt, Artificial Sequence; identical to SEQ ID NO: 152096
  derived and/or modified CDS sequence (opt3) from neuraminidase__InfluenzaA__AHC61382

SEQ ID NO: 152272 - RNA, 1410 nt, Artificial Sequence; identical to SEQ ID NO: 152068
  derived and/or modified CDS sequence (opt3) from neuraminidase__InfluenzaA__AHC61394

SEQ ID NO: 152273 - RNA, 1410 nt, Artificial Sequence; identical to SEQ ID NO: 152096
  derived and/or modified CDS sequence (opt3) from neuraminidase__InfluenzaA__AHC61406

SEQ ID NO: 152274 - RNA, 1410 nt, Artificial Sequence; identical to SEQ ID NO: 152055
  derived and/or modified CDS sequence (opt3) from neuraminidase__InfluenzaA__AHC61418

SEQ ID NO: 152275 - RNA, 1410 nt, Artificial Sequence; identical to SEQ ID NO: 147566
  derived and/or modified CDS sequence (opt3) from neuraminidase__InfluenzaA__AHC61430

SEQ ID NO: 152276 - RNA, 1410 nt, Artificial Sequence; identical to SEQ ID NO: 152068
  derived and/or modified CDS sequence (opt3) from neuraminidase__InfluenzaA__AHC61442

SEQ ID NO: 152277 - RNA, 1410 nt, Artificial Sequence; identical to SEQ ID NO: 152068
  derived and/or modified CDS sequence (opt3) from neuraminidase__InfluenzaA__AHC61454

SEQ ID NO: 152278 - RNA, 1410 nt, Artificial Sequence
  derived and/or modified CDS sequence (opt3) from neuraminidase__InfluenzaA__AHC61466
augaaccccaaucagaagaucauuaccauaggcagcgugucccugacaaucucuacuauuugcuucuuuaugcaaaucgccauucucaucacgaccgucacacuucacuucaaacaguacgaguuuaacucaccuccaaauaaccagguuaugcugugugaaccgacuauaaucgagagaaauaccacagaaauuguguauuugaccaacacuacaaucgagaaggaaauuugccccaaauuagcugaguacaggaauuggaguaagccucagugugacaucaccggguucgcaccauuuagcaaagauaacuccauacggcugucugccggaggugacauuuggguaacgcgcgagcccuaugugucgugcgauccugacaaguguuaccaauucgcgcuaggccaggggacuacccucaauaacguccauucaaauaacacagugcgagaucguacuccauauagaacccugcuuaugaaugaacugggaguucccuuucacuugggcacaaaacaggugugcaucgcuuggagcaguuccucuugucaugacgguaaggccuggcuccacgucugcauuaccggggaugacaagaacgcaacggccagcuucaucuacaauggaaggcugguggauuccguaguuucauggaguaaagagauccugcggacucaggaaagcgagugugugugcauuaacggcacauguaccgucgugaugacugacggcucugcuuccgggaaggcagauacaaaaauacucuuuaucgaggaaggaaagauugugcauaccucaacguuaagcgguagugcccaacacgucgaggaaugcucuugcuauccucgcuacccaggcguuagaugugugugcagggacaacuggaagggguccaaucggccgaucguagauauaaacauuaaagaccacagcaucgugucgucuuacgucuguuccggacuggugggcgacacccccaggaagaaugauucaaguagcuccucucauugccuugacccuaacaaugaggaaggugggcacggaguuaaaggcugggcuuucgaugacggcaacgauguguggauggggcgaacaaucaaugagacuagcagauugggauaugagaccuuuaaggucauugaagguuggucaaacccaaaaaguaagcugcagaucaaucgccaggugauuguagacaaaggcaaccgguccggguacagcggaauauucucuguugagggcaagucauguaucaaucguugcuuuuauguggaacuaauucgcgguagaaaggaggaaacagagguccucuggaccaguaacagcaucguggucuucugugggacuuccggcacauacggaaccggcucuuggcccgauggggccgaccugaaucuuaugccuaucuga

SEQ ID NO: 152279 - RNA, 1410 nt, Artificial Sequence; identical to SEQ ID NO: 152019
  derived and/or modified CDS sequence (opt3) from neuraminidase__InfluenzaA__AHC61478

SEQ ID NO: 152280 - RNA, 1410 nt, Artificial Sequence; identical to SEQ ID NO: 152055
  derived and/or modified CDS sequence (opt3) from neuraminidase__InfluenzaA__AHC61490

SEQ ID NO: 152281 - RNA, 1410 nt, Artificial Sequence; identical to SEQ ID NO: 152019
  derived and/or modified CDS sequence (opt3) from neuraminidase__InfluenzaA__AHC61502

SEQ ID NO: 152282 - RNA, 1410 nt, Artificial Sequence; identical to SEQ ID NO: 152068
  derived and/or modified CDS sequence (opt3) from neuraminidase__InfluenzaA__AHC61514

SEQ ID NO: 152283 - RNA, 1410 nt, Artificial Sequence; identical to SEQ ID NO: 150970
  derived and/or modified CDS sequence (opt3) from neuraminidase__InfluenzaA__AHC61526

SEQ ID NO: 152284 - RNA, 1410 nt, Artificial Sequence
  derived and/or modified CDS sequence (opt3) from neuraminidase__InfluenzaA__AHC61538
augaaccccaaucagaagaucauuaccauaggcagcgugucccugacaaucucuacuauuugcuucuuuaugcaaaucgccauucucaucacgaccgucacacuucacuucaaacaguacgaguuuaacucaccuccaaauaaccagguuaugcugugugaaccgacuauaaucgagagaaauauuaccgaaaucguguauuugacaaacaccacuauugagaaggaaaucugccccaaauuagcugaguacaggaauuggaguaagccucagugugacauaacaggguucgcaccauuuagcaaagauaacuccauucggcugucugccggaggugacaucuggguaacccgcgagcccuaugugucgugcgauccuaauaaguguuaccaauucgcgcuaggccaggggacgacucucaacaauguccauucaaacaauaccgugcgagaccguacaccauauagaacucugcuuaugaacgaacugggaguucccuuucacuugggcaccaaacaggugugcauugcuuggagcaguuccucuugucaugaugguaaggccuggcuccacgucugcaucacaggggacgauaagaaugcaaccgccagcuucaucuacaacggaaaacugguggacuccguaguuucauggaguaaggagauucugaggacgcaggaaagcgagugugugugcauaaacggcacuuguacagucgugaugaccgauggcucugcuuccgggaaagcagacacuaagauccucuuuauugaggaaggaaagaucgugcauacaucaaccuuaagcgguagugcccaacacgucgaggaaugcucuugcuauccucgguacccaggcguucgcugugugugcagagauaauuggaaaggguccaacaggccgauaguagacauuaauaucaaggaucacagcaucgugucgucuuacgucuguuccggacuggugggcgacacgccccggaaaaacgacucaaguagcuccucucauugccuugauccuaauaacgaggaagguagccacgggguuaagggaugggcuuucgacgauggcaaugacguguggaugggccgcaccauuaacgagacaucacgauugggguaugagacuuuuaaagucaucgaaggauggaguaauccaaaguccaaacugcagauuaacagacaggugauaguagauagggguaaucggagcggcuacucugggaucuucucaguugagggaaagaguuguauuaaccguugcuuuuauguggaacuaauccgcggcagaaaggaggaaaccgagguccucuggacaagcaauuccaucguggucuucugugguacuucugggaccuacggcacaggaucguggcccgacggcgccgaucugaaccuuaugccuauuuga

SEQ ID NO: 152285 - RNA, 1410 nt, Artificial Sequence; identical to SEQ ID NO: 152068
  derived and/or modified CDS sequence (opt3) from neuraminidase__InfluenzaA__AHC61550

SEQ ID NO: 152286 - RNA, 1410 nt, Artificial Sequence
  derived and/or modified CDS sequence (opt3) from neuraminidase__InfluenzaA__AHC61562
augaaccccaaucagaagaucauuaccauaggcagcgugucccugacaaucucuacuauuugcuucuuuaugcagaucgccauucucaucacgaccgucacacuucacuucaaacaguacgaguuuuauucaccuccaaacaaucagguuaugcugugugaaccgacuaugauagagagaaacaucaccgaaauuguguacuugacaaauaccacuaucgagaaggaaauuugccccaaauuagcugaguauaggaacuggaguaagccucagugugacaucacaggguucgcaccauuuagcaaagauaauuccauacggcugucugccggaggugacauuuggguaacccgcgagcccuacgugucgugcgauccugacaaguguuaucaauucgcgcuaggccaggggacgacucucaacaauguccauucaaacaauaccgugcgagaucguacaccauacagaacucugcuuaugaacgaacugggaguucccuuucacuugggcaccaaacaggugugcaucgcuuggagcaguuccucuugucaugacgguaaggccuggcuccacgucugcauuacaggggaugacaagaaugcaaccgccagcuucaucuauaacggaaggcugguggauuccguaguuucauggaguaaagagauccugcggacgcaggaaagcgagugugugugcauuaauggcacuuguacagucgugaugaccgacggcucugcuuccgggaaggcagauacuaaaauacucuuuaucgaggaaggaaagauugugcauacaucaaccuuaagcgguagugcccaacacgucgaggaaugcucuugcuacccucgcuacccaggcguuagaugugugugcagggacaacuggaagggguccaaccggccgaucguagauauaaauauuaaagaccacagcaucgugucgucuuaugucuguuccggacuggugggcgacacgccccgcaagaacgauucaaguagcuccucucauugccuugacccuaauaacgaggaaggugggcacggaguuaaaggcugggcuuucgaugacggcaaugauguguggauggggcgaaccaucaacgagacaagcagauugggauacgagacuuuuaaggucauugaagguuggucaaauccaaaaaguaagcugcagaucaacaggcaagugauuguagaccggggcaaucguuccggguauagcggaauauucucuguugagucaaaaaguuguaucaaccgcugcuuuuacguggaacuaauuagaggcaggaaggaggaaaccgagguccucuggacaagcaauuccaucguggucuucugugguacuucugggaccuauggcacaggaaccuggcccgauggcgccgaccugaaccuuaugccuaucuga

SEQ ID NO: 152287 - RNA, 1410 nt, Artificial Sequence; identical to SEQ ID NO: 152067
  derived and/or modified CDS sequence (opt3) from neuraminidase__InfluenzaA__AHC61574

SEQ ID NO: 152288 - RNA, 1410 nt, Artificial Sequence; identical to SEQ ID NO: 152068
  derived and/or modified CDS sequence (opt3) from neuraminidase__InfluenzaA__AHC61586

SEQ ID NO: 152289 - RNA, 1410 nt, Artificial Sequence; identical to SEQ ID NO: 150970
  derived and/or modified CDS sequence (opt3) from neuraminidase__InfluenzaA__AHC61598

SEQ ID NO: 152290 - RNA, 1410 nt, Artificial Sequence; identical to SEQ ID NO: 152019
  derived and/or modified CDS sequence (opt3) from neuraminidase__InfluenzaA__AHC61610

SEQ ID NO: 152291 - RNA, 1410 nt, Artificial Sequence; identical to SEQ ID NO: 152067
  derived and/or modified CDS sequence (opt3) from neuraminidase__InfluenzaA__AHC61622

SEQ ID NO: 152292 - RNA, 1410 nt, Artificial Sequence; identical to SEQ ID NO: 147566
  derived and/or modified CDS sequence (opt3) from neuraminidase__InfluenzaA__AHC61634

SEQ ID NO: 152293 - RNA, 1410 nt, Artificial Sequence; identical to SEQ ID NO: 147566
  derived and/or modified CDS sequence (opt3) from neuraminidase__InfluenzaA__AHC61646

SEQ ID NO: 152294 - RNA, 1410 nt, Artificial Sequence; identical to SEQ ID NO: 147566
  derived and/or modified CDS sequence (opt3) from neuraminidase__InfluenzaA__AHC61658

SEQ ID NO: 152295 - RNA, 1410 nt, Artificial Sequence; identical to SEQ ID NO: 150970
  derived and/or modified CDS sequence (opt3) from neuraminidase__InfluenzaA__AHC61670

SEQ ID NO: 152296 - RNA, 1410 nt, Artificial Sequence; identical to SEQ ID NO: 152023
  derived and/or modified CDS sequence (opt3) from neuraminidase__InfluenzaA__AHC61682

SEQ ID NO: 152297 - RNA, 1410 nt, Artificial Sequence; identical to SEQ ID NO: 150970
  derived and/or modified CDS sequence (opt3) from neuraminidase__InfluenzaA__AHC61694

SEQ ID NO: 152298 - RNA, 1410 nt, Artificial Sequence
  derived and/or modified CDS sequence (opt3) from neuraminidase__InfluenzaA__AHC61706
augaaccccaaucagaagaucauuaccauaggcagcgugucccugacaaucucuacuauuugcuucuuuaugcagaucgccauucucaucacgaccgucacacuucacuucaaacaguacgaguuuaacucaccuccaaauaaccagguuaugcugugugaaccgacuauaaucgagagaaauauuaccgaaaucguguauuugacaaacaccacuauugagaaggaaaucugccccaaauuagcugaguacaggaauuggaguaagccucagugugacauaacaggguucgcaccauuuagcaaagauaacuccauucggcugucugccggaggugacaucuggguaacccgcgagcccuaugugucgugcgauccugacaaguguuaccaauucgcgcuaggccaggggacgacucucaauaacguccauucaaauaacaccgugcgagaucguacaccauauagaacucugcuuaugaaugaacugggaguucccuuucacuugggcaccaaacaggugugcauugcuuggagcaguuccucuugucaugacgguaaggccuggcuccacgucugcaucacaggggaugacaagaacgcaaccgccagcuucaucuacaauggaaggcugguggauuccguaguuucauggaguaaagagauucugcggacgcaggaaagcgagugugugugcauaaacggcacuuguacagucgugaugaccgacggcucugcuuccgggaaggcagauacuaaaauccucuuuauugaggaaggaaagaucgugcauacaucaaccuuaagcgguagugcccaacacgucgaggaaugcucuugcuauccucgcuacccaggcguuagaugugugugcagggacaacuggaagggguccaaucggccgauaguagauauuaacaucaaagagcacagcaucgugucgucuuacgucuguuccggacuggugggcgacacgccccgcaagaaugacucaaguagcuccucucauugccuugauccuaacaaugaagagggugggcacggaguuaaaggcugggcuuucgacgauggcaacgacguguggauggggcgaaccauuaaugagacaagcagauugggauaugaaacuuuuaaggucaucgaggguuggucaaacccaaaaaguaagcugcagauuaauaggcaagugauaguagaucggggcaaccguuccggguacagcggaaucuucucuguugaaggcaaaucauguauuaaucgcugcuuuuauguggagcuaaucagagguaggaaggaagagaccgagguccucuggacaaguaacagcaucguggucuucugugggacuuccggcaccuacggaacaggcucuuggcccgacggggccgaucugaaucuuaugccuauuuga

SEQ ID NO: 152299 - RNA, 1410 nt, Artificial Sequence
  derived and/or modified CDS sequence (opt3) from neuraminidase__InfluenzaA__AHC61718
augaaccccaaucagaagaucauuaccauaggcagcgugucccugacaaucucuacuauuugcuucuuuaugcaaaucgccauucucaucacgaccgucacacuucacuucaaacagugugaguuuaacucaccuccaaauaaccagguuaugcugugcgaaccgacuauaaucgagagaaauauuaccgaaaucguguacuugacaaacaccacuauugagaaggaaaucugucccaaauuaacagaguauaggaauuggaguaagccucagugcgacauaaccggguucgcuccauuuagcaaagauaacuccauucggcugucugcaggaggugacaucuggguaacgcgcgagcccuacgugucgugugauccuaauaagugcuaucaauucgcccuaggccaggggacuacccucaacaauguccauucaaacaauacagugcgagaccguacuccauacagaacccugcuuaugaacgaacugggaguucccuuucacuugggcacaaaacagguguguauugcguggagcaguuccucuugccaugaugguaaggcuuggcuccacgucuguaucaccggggacgauaagaaugccacggccagcuucaucuauaacggaaaacugguggacuccguaguuucauggaguaaggagauucugaggacucaggaaagcgagugcguguguauaaacggcacaugcaccgucgugaugacugauggcucugcauccgggaaagcugacacaaagauccucuuuauugaggaaggaaagaucgugcauaccucaacguuaagcgguagugcacaacacgucgaggaaugcucuuguuacccucgguauccaggcguucgcugcguguguagagauaauuggaaaggguccaacaggccgauaguagacauuaauaucaaggaucacagcaucgugucgucuuacgucugcuccggacuggugggcgacacuccccggaaaaacgacucaaguagcuccucucauugucuugauccuaauaacgaggaaggugggcacggaguuaagggcugggccuucgacgauggcaaugacguguggauggggcgcacaauuaacgagacuagccgauugggauacgagaccuuuaaagucaucgaagguuggucaaauccaaagaguaaacugcagauuaacagacaggugauaguagauaggggcaaucgguccggguauagcggaaucuucucuguugagggcaagucaugcauuaaccguuguuuuuacguggaacuaauccgcgguagaaaggaggaaacagggguccucuggaccaguaauagcaucguggucuucugcggcaccuccggaacauauggcaccgggucuuggcccgacggagcugaucugaaccuuaugccuauuuga

SEQ ID NO: 152300 - RNA, 1410 nt, Artificial Sequence; identical to SEQ ID NO: 152019
  derived and/or modified CDS sequence (opt3) from neuraminidase__InfluenzaA__AHC61730

SEQ ID NO: 152301 - RNA, 1410 nt, Artificial Sequence; identical to SEQ ID NO: 152068
  derived and/or modified CDS sequence (opt3) from neuraminidase__InfluenzaA__AHC61742

SEQ ID NO: 152302 - RNA, 1410 nt, Artificial Sequence; identical to SEQ ID NO: 152019
  derived and/or modified CDS sequence (opt3) from neuraminidase__InfluenzaA__AHC61754

SEQ ID NO: 152303 - RNA, 1410 nt, Artificial Sequence; identical to SEQ ID NO: 147566
  derived and/or modified CDS sequence (opt3) from neuraminidase__InfluenzaA__AHC61766

SEQ ID NO: 152304 - RNA, 1410 nt, Artificial Sequence; identical to SEQ ID NO: 152055
  derived and/or modified CDS sequence (opt3) from neuraminidase__InfluenzaA__AHC61778

SEQ ID NO: 152305 - RNA, 1410 nt, Artificial Sequence; identical to SEQ ID NO: 152093
  derived and/or modified CDS sequence (opt3) from neuraminidase__InfluenzaA__AHC61790

SEQ ID NO: 152306 - RNA, 1410 nt, Artificial Sequence; identical to SEQ ID NO: 152023
  derived and/or modified CDS sequence (opt3) from neuraminidase__InfluenzaA__AHC61802

SEQ ID NO: 152307 - RNA, 1410 nt, Artificial Sequence; identical to SEQ ID NO: 152019
  derived and/or modified CDS sequence (opt3) from neuraminidase__InfluenzaA__AHC61814

SEQ ID NO: 152308 - RNA, 1410 nt, Artificial Sequence
  derived and/or modified CDS sequence (opt3) from neuraminidase__InfluenzaA__AHC61826
augaaccccaaucagaagaucauuaccauaggcagcgugucccugacaaucucuacuauuugcuucuuuaugcaaaucgccauucucaucacgaccgucacacuucacuucaaacaguacgaguuuaacucaccuccaaauaaccagguugugcugugugaaccgacuauaaucgagagaaauauuaccgaaaucguauauuugacaaacaccacuauugagaaggaaaucugccccaaaccugcugaguacaggaauuggaguaagccacagugugacauaacaggguucgcacccuuuagcaaagauaacuccauucgguuaucugccggaggugacaucugggugacccgcgagccuuaugucucgugcgauccagacaaguguuaccaauucgcgcugggccaggggacgacucuaaauaacgugcauucaaauaacaccguucgagaucguacacccuauagaacucuccugaugaaugaacuuggagugccuuuucaccugggcaccaagcaggucugcauugcuuggagcaguuccucuugucaugacgguaaagccugguugcacgugugcaucacaggggaugacaagaacgcaaccgccagcuucaucuacaauggaaggcucguagauuccguugugucauggaguaaagagauucugcggacgcaggaaagcgagugugucugcauaaacggcacuuguacaguggugaugaccgacggcucugcuuccgggaaggcagauacuaaaauccuguuuauugaggaaggaaagaucguccauacaucaacccucagcgguagugcccaacacguugaggaaugcucuugcuauccacgcuacccgggcgugagauguguaugcagggacaacuggaagggguccaaucggcccauaguggauauuaacaucaaagaccacagcaucgucucgucuuacguguguuccggauuaguuggcgacacgccucgcaagaaugauucaaguagcuccucucauugccuggacccaaacaaugaggaaggugggcacggagugaaaggcugggcuuucgaugacggcaacgaugucuggauggggcgaaccauuaaugagacaagcagacuuggauaugagacuuuuaaggugaucgaagguuggucaaaccccaaaaguaaguugcagauuaauaggcagguaauaguugaccgguccgaucguagcggcuacucugggaucuucucaguggagggaaaaaguuguauuaaccgcugcuuuuaugucgaacugaucagaggcaggaaggaggaaaccgaggugcuauggacaagcaauuccaucgucguguucugugguacuucugggaccuacggcacaggaucguggccugacggcgccgaucucaaccugaugccaauuuga

SEQ ID NO: 152309 - RNA, 1410 nt, Artificial Sequence; identical to SEQ ID NO: 152019
  derived and/or modified CDS sequence (opt3) from neuraminidase__InfluenzaA__AHC61838

SEQ ID NO: 152310 - RNA, 1410 nt, Artificial Sequence; identical to SEQ ID NO: 152055
  derived and/or modified CDS sequence (opt3) from neuraminidase__InfluenzaA__AHC61850

SEQ ID NO: 152311 - RNA, 1410 nt, Artificial Sequence; identical to SEQ ID NO: 152068
  derived and/or modified CDS sequence (opt3) from neuraminidase__InfluenzaA__AHC61862

SEQ ID NO: 152312 - RNA, 1410 nt, Artificial Sequence; identical to SEQ ID NO: 152019
  derived and/or modified CDS sequence (opt3) from neuraminidase__InfluenzaA__AHC61874

SEQ ID NO: 152313 - RNA, 1410 nt, Artificial Sequence
  derived and/or modified CDS sequence (opt3) from neuraminidase__InfluenzaA__AHC61886
augaaccccaaucagaagaucauuaccauaggcagcgugucccugacaaucucuacuauuugcuucuuuaugcaaaucgccauucucaucacgaccgucacacuucacuucaaacaguacgaguuuaacccuccaccgaauaaccagguugugcugugugaacccacuauaaucgagagaaauauuaccgaaaucguauauuugacaaacaccacuauugagaaggaaaucugcccuaaaccagcugaguacaggcauuggucaaagccccagugugacauaacaggguucgcaccuuuuaguaaagauaauagcauucgguuauccgccggaggugacaucugggugacccgcgagccauaugucucuugcgaucccgacaaguguuaccaauucgcgcugggccaggggacgacucuaaacaaugugcacucgaacaauaccguucgagaucguacaccuuauagaacucuccugaugaacgaacuuggagugccauuucaucugggcaccaagcaggucugcauugcuuggucaagcaguuccugucacgacgguaaagccugguugcaugugugcaucacaggggaugacaagaaugcaaccgccucuuucaucuacaacggaaggcucguagauagcguuguguccuggucaaaagagauucugcggacgcaggaaagugagugugucugcauaaauggcacuuguacaguggugaugaccgacggcagcgcuucugggaaggcagauacuaaaauccuguuuauugaggaaggaaagaucguccacacauccacccucucagguagcgcccaacacguugaggaaugcaguugcuauccgcgcuaccccggcgugagauguguaugcagggacaacuggaaggggucuaaccggccuauaguggauauuaauaucaaagaccauuccaucgucagcucguacguguguucuggauuaguuggcgacacgccacgcaagaacgauuccucaaguagcucccacugccuggaccccaauaacgaggaaggugggcauggagugaaaggcugggcuuucgaugacggcaaugaugucuggauggggcgaaccauuaacgagacaucuagacuuggauaugagacuuuuaaggugaucgaagguuggagcaauccuaaaucaaaguugcagauuaacaggcagguaauaguugaccggggcgaucguaguggguacuccggaaucuucagcguggagggcaaaucuuguauuaaucgcugcuuuuaugucgaacugaucagagguaggaaggaggaaaccgaggugcuauggacaucaaacaguaucgucguguucugugggacuagcggcaccuacggaacaggcuccuggccagacggggccgaucucaaucugaugcccauuuga

SEQ ID NO: 152314 - RNA, 1410 nt, Artificial Sequence; identical to SEQ ID NO: 152023
  derived and/or modified CDS sequence (opt3) from neuraminidase__InfluenzaA__AHC61898

SEQ ID NO: 152315 - RNA, 1410 nt, Artificial Sequence; identical to SEQ ID NO: 152055
  derived and/or modified CDS sequence (opt3) from neuraminidase__InfluenzaA__AHC61910

SEQ ID NO: 152316 - RNA, 1410 nt, Artificial Sequence; identical to SEQ ID NO: 147566
  derived and/or modified CDS sequence (opt3) from neuraminidase__InfluenzaA__AHC61934

SEQ ID NO: 152317 - RNA, 1410 nt, Artificial Sequence
  derived and/or modified CDS sequence (opt3) from neuraminidase__InfluenzaA__AHC61946
augaaccccaaucagaagaucauuaccauaggcagcgugucccugacaaucucuacuauuugcuucuuuaugcagaucgccauucucaucacgaccgucacacuucacuucaaacaguacgagucauauaguccuccaaacaaucagguuaugcugugugaaccgacuauaaucgagagaaacauuaccgaaaucguguacuugacaaauaccacuauugagaaggaaaucugccccaaauuagcugaguauaggaacuggagcaagccucagugugacauaacaggguuugcaccauucuccaaagauaauucuauucggcugucggccggaggugacaucuggguaacccgcgagcccuacgugucaugcgauccugacaaguguuaucaauuugcgcuaggccaggggacgacucucaacaauguccauagcaacaauaccgugcgagaucguacaccauacagaacucugcuuaugaacgaacugggaguucccuuccacuugggcaccaaacaggugugcauugcuuggaguuccucuagcugucaugacgguaaggccuggcuccacgucugcaucacaggggaugacaagaaugcaaccgccuccuuuaucuauaacggaaggcugguggauucaguaguuaguuggagcaaagagauucugcggacgcaggaaucugagugugugugcauaaauggcacuuguacagucgugaugaccgacggcuccgcuucagggaaggcagauacuaaaauccucuucauugaggaaggaaagaucgugcauacaagcaccuuaagugguucugcccaacacgucgaggaaugcuccugcuacccucgcaacccaggcguuagaugugugugcagggacaacuggaaggggagcaaucggccgauaguagauauuaacaucaaagaccacucgaucgugucuuccuacgucuguucaggacuggugggcgacacgccccgcaagaaugauaguagcuccucuagccauugccuugacccuaacaaugaggaaggugggcacggaguuaaaggcugggcuuuugaugacggcaacgauguguggauggggcgaaccauuaaugagacaucaagauugggauaugagacuuucaaggucaucgaagguuggaguaacccaaaauccaagcugcagauuaauaggcaagugauaguagaccggggcaaccguagcggguacucuggaaucuuuucaguugagggcaaaaguuguauuaaucgcugcuucuauguggaacuaaucagagguaggaaggaggaaaccgagguccucuggacaagcaacuccaucguggucuuuugugggacuucuggcaccuacggaacaggcucguggcccgauggggccgaccugaaucuuaugccuauuuga

SEQ ID NO: 152318 - RNA, 1410 nt, Artificial Sequence; identical to SEQ ID NO: 150970
  derived and/or modified CDS sequence (opt3) from neuraminidase__InfluenzaA__AHC61958

SEQ ID NO: 152319 - RNA, 1410 nt, Artificial Sequence; identical to SEQ ID NO: 152019
  derived and/or modified CDS sequence (opt3) from neuraminidase__InfluenzaA__AHC61970

SEQ ID NO: 152320 - RNA, 1410 nt, Artificial Sequence
  derived and/or modified CDS sequence (opt3) from neuraminidase__InfluenzaA__AHC61982
augaaccccaaucagaagaucauuaccauaggcagcgugucccugacaaucucuacuauuugcuucuuuaugcaaaucgccauucucaucacgaccgucacacuucacuucaaacaguacgaguuuaacucaccuccaaauaaccagguuaugcugugugaaccgacuauaaucgagagaaauauuaccgaaaucguguauuugacaaacaccacuauugagaaggaaaucugccccaaauuagcugaguacaggaauuggaguaagccucagugugacauaacaggguucgcaccauuuagcaaagauaacuccauucggcugucugccggaggugacaucuggguaacccgcgagcccuaugugucgugcgauccugacaaguguuaccaauucgcgcuaggccaggggacgacucucaauaacguccauucaaauaacaccgugcgagaucguacaccauauagaacucugcuuaugaaugaacugggaguucccuuucacuugggcaccaaacaggugugcauugcuuggagcaguuccucuugucaugacgguaaggccuggcuccacgucugcaucacaggggaugacaagaacgcaaccgccagcuucaucuacaauggaaggcugguggauuccguaguuucauggaguaaagagauucugcggacgcaggaaagcgagugugugugcauaaacggcacuugugcugucgugaugacagacggcucugcauccgggaaggccgauaccaaaauccucuuuauugaggaaggaaagaucgugcauacuucaacauuaagcgguagugcucaacacgucgaggaaugcucuugcuauccucgcuacccaggcguuagaugugugugcagggacaacuggaagggguccaaucggccgauaguagauauuaacaucaaagaccacggaaucgugagcucguacgucuguucuggccuggugggugacacccccaggaagaaugauuccucaaguagcucccauugccuugacccuaacaaugaggaagggggacacggcguuaaaggcugggccuucgaugacgggaacgauguguggaugggacgaacgauuaaugagaccucuagauuggguuaugagacauuuaaggucaucgaaggcuggagcaacccaaaaucaaagcugcagauuaaucgccaggugauaguagaccgggggaaccguaguggauacuccggcaucuucagcguugaggguaaaucuuguauuaaucgcugcuuuuauguggaacuaaucagagggaggaaggaggaaacugagguccucuggaccucaaacaguaucguggucuucuguggcacaagcggaacuuacggcaccggguccuggcccgauggagcggaccugaaucuuaugccuauuuga

SEQ ID NO: 152321 - RNA, 1410 nt, Artificial Sequence; identical to SEQ ID NO: 152023
  derived and/or modified CDS sequence (opt3) from neuraminidase__InfluenzaA__AHC61994

SEQ ID NO: 152322 - RNA, 1410 nt, Artificial Sequence; identical to SEQ ID NO: 152055
  derived and/or modified CDS sequence (opt3) from neuraminidase__InfluenzaA__AHC62006

SEQ ID NO: 152323 - RNA, 1410 nt, Artificial Sequence; identical to SEQ ID NO: 152019
  derived and/or modified CDS sequence (opt3) from neuraminidase__InfluenzaA__AHC62018

SEQ ID NO: 152324 - RNA, 1410 nt, Artificial Sequence; identical to SEQ ID NO: 150970
  derived and/or modified CDS sequence (opt3) from neuraminidase__InfluenzaA__AHC62030

SEQ ID NO: 152325 - RNA, 1410 nt, Artificial Sequence; identical to SEQ ID NO: 152023
  derived and/or modified CDS sequence (opt3) from neuraminidase__InfluenzaA__AHC62042

SEQ ID NO: 152326 - RNA, 1410 nt, Artificial Sequence; identical to SEQ ID NO: 152096
  derived and/or modified CDS sequence (opt3) from neuraminidase__InfluenzaA__AHC62053

SEQ ID NO: 152327 - RNA, 1410 nt, Artificial Sequence
  derived and/or modified CDS sequence (opt3) from neuraminidase__InfluenzaA__AHC62065
augaaccccaaucagaagaucauuaccauaggcagcgugucccugacaaucucuacuauuugcuucuuuaugcaaaucgccauucucgucacgaccguuacacuucacuucaaacaguacgaguuuaacucaccuccaaauaaccaggugaugcugugugaaccgacuaucauagagagaaauaucaccgaaauuguauauuugacaaacaccacuaucgagaaggaaauuugccccaaaccugcugaguacaggaauuggaguaagccacagugugacaucacaggguucgcacccuuuagcaaagauaacuccauacgguuaucugccggaggugacauuugggugacccgcgagccuuaugucucgugcgauccagacaaguguuaccaauucgcgcugggccaggggacgacucuaaauaacgugcauucaaauaacaccguucgagaucguacacccuauagaacucuccugaugaaugaacuuggagugccuuuucaccugggcaccaagcaggucugcaucgcuuggagcaguuccucuugucaugacgguaaagccugguugcacgugugcauuacaggggaugacaagaacgcaaccgccagcuucaucuacaauggaaggcucguagauuccguugugucauggaguaaagagauccugcggacgcaggaaagcgagugugucugcauuaacggcacuuguacaguggugaugaccgacggcucugcuuccgggaaggcagauacuaaaauacuguuuaucgaggaaggaaagauuguccauacaucaacccucagcgguagugcccaacacguugaggaaugcucuugcuauccacgcuacccgggcgugagauguguaugcagggacaacuggaagggguccaaucggcccaucguggauauaaacauuaaagaccacagcaucgucucgucuuacguguguuccggauuaguuggcgacacgccucgcaagaaugauucaaguagcuccucucauugccuggacccaaacaaugaggaaggugggcacggagugaaaggcugggcuuucgaugacggcaacgaugucuggauggggcgaaccaucaaugagacaagcagacuuggauaugagacuuuuaaggugauugaagguuggucaaaccccaaaaguaaguugcagaucaauaggcagguaauuguugaccggggcgaucguuccggguacagcggaauauucucuguggagggcaaaucauguaucaaccgcugcuuuuaugucgaacugauuagagguaggaaggaggaaaccgaggugcuauggacaaguaauagcaucgucguguucugugggacuuccggcaccuacggaacaggcucuuggccugacggggccgaucucaaccugaugccaaucuga

SEQ ID NO: 152328 - RNA, 1410 nt, Artificial Sequence; identical to SEQ ID NO: 152154
  derived and/or modified CDS sequence (opt3) from neuraminidase__InfluenzaA__AHC62077

SEQ ID NO: 152329 - RNA, 1410 nt, Artificial Sequence; identical to SEQ ID NO: 152068
  derived and/or modified CDS sequence (opt3) from neuraminidase__InfluenzaA__AHC62089

SEQ ID NO: 152330 - RNA, 1410 nt, Artificial Sequence; identical to SEQ ID NO: 152019
  derived and/or modified CDS sequence (opt3) from neuraminidase__InfluenzaA__AHC62101

SEQ ID NO: 152331 - RNA, 1410 nt, Artificial Sequence; identical to SEQ ID NO: 152068
  derived and/or modified CDS sequence (opt3) from neuraminidase__InfluenzaA__AHC62113

SEQ ID NO: 152332 - RNA, 1410 nt, Artificial Sequence
  derived and/or modified CDS sequence (opt3) from neuraminidase__InfluenzaA__AHC62125
augaaccccaaucagaagaucauuaccauaggcagcgugucccugacaaucucuacuauuugcuucuuuaugcaaaucgccauucucaucacgaccgucacacuucacuucaaacaguacgaguuuaacucaccuccaaauaaccagguuaugcugugugaaccgacuauaaucgagagaaauauuaccgaaaucguguauuugacaaacaccacuauugagaaggaaaucugccccaaauuagcugaguacaggaauuggaguaagccucagugugacauaacaggguucgcaccauuuagcaaagauaacuccauucggcugucugccggaggugacaucuggguaacccgcgagcccuaugugucgugcgauccuaauaaguguuaccaauucgcgcuaggccaggggacgacucucaacaauguccauucaaacaauaccgugcgagaccguacaccauauagaacucugcuuaugaacgaacugggaguucccuuucacuugggcaccaaacaggugugcauugcuuggagcaguuccucuugucaugaugguaaggccuggcuccacgucugcaucacaggggacgauaagaaugcaaccgccagcuucaucuacaacggaaaacugguggacuccguaguuucauggaguaaggagauucugaggacgcaggaaagcgagugugugugcauaaacggcacuuguacagucgugaugaccgauggcucugcuuccgggaaagcagacacuaagauccucuuuauugaggaaggaaagaucgugcauacaucaaccuuaagcgguagugcccaacacgucgaggaaugcucuugcuauccucgguacccaggcguucgcugugugugcagagauaauuggaaaggguccaacaggccgauaguagacauuaauaucaaggaucacagcaucgugucgucuuacgucuguuccggacuggugggcgacacgccccggaaaaacgacucaaguagcuccucucauugccuugauccuaauaacgaggaaggugggcacggaguuaagggcugggcuuucgacgauggcaaugacguguggauggggcgcaccauuaacgagacaagccgauugggauaugagacuuuuaaagucaucgaagguuggucaaauccaaagaguaaacugcagauuaacagacaggugauaguagauaggggcaauaaguccggguacagcggaaucuucucuguugagggcaagucauguauuaaccggugcuuuuauguggaacuaauccguggucgcaaagaggaaaccgagguccucuggacaaguaauagcaucguggucuucugugggacuuccggcaccuacggaacaggcucuuggcccgacggggccgaucugaaccuuaugccuauuuga

SEQ ID NO: 152333 - RNA, 1410 nt, Artificial Sequence
  derived and/or modified CDS sequence (opt3) from neuraminidase__InfluenzaA__AHC62137
augaaccccaaucagaagaucauuaccauaggcagcgugucccugacaaucucuacuauuugcuucuuuaugcagaucgccauucucaucacgaccgucacacuucacuucaaacaguacgaguuuaacucaccuccaaauaaccagguuaugcugugugaaccgacuauaaucgagagaaauauuaccgaaaucguguauuugacaaacaccacuauugagaaggaaaucugccccaaauuagcugaguacaggaauuggaguaagccucagugugacauaacaggguucgcaccauuuagcaaagauaacuccauucggcugucugccggaggugacaucuggguaacccgcgagcccuaugugucgugcgauccugacaaguguuaccaauucgcgcuaggccaggggacgacucucaauaacguccauucaaauaacaccgugcgagaucguacaccauauagaacucugcuuaugaaugaacugggaguucccuuucacuugggcaccaaacaggugugcauugcuuggagcaguuccucuugucaugacgguaaggccuggcuccacgucugcaucacaggggaugacaagaacgcaaccgccagcuucaucuacaauggaaggcugguggauuccguaguuucauggaguaaagagauucugcggacgcaggaaagcgagugugugugcauaaacggcacuuguacagucgugaugaccgacggcucugcuuccgggaaggcagauacuaaaauccucuuuauugaggaaggaaagaucgugcauacaucaaccuuaagcgguagugcccaacacgucgaggaaugcucuugcuauccucgcuacccaggcguuagaugugugugcagggacaacuggaagggguccaaucggccgauaguagauauuaacaucaaagaccacagcaucgugucgucuuacgucuguuccggacuggugggcgacacgccccgcaagaaugauucaaguagcuccucucauugccuugacccuaacaaugaggaaggugggcacggaguuaaaggcugggcuuucgaugacggcaacgauguguggauggggcgaaccauuaaugagacaagcagauugggauaugagacuuuuaaggucaucgaagguuggucaaacccaaaaaguaagcugcagauuaauaggcaagugauaguagaccggggcgaucguuccggguacagcggaaucuucucuguugagggcaaaucauguauuaaccgcugcuuuuauguggaacuaaucagagguaggaaggaggaaaccgagguccucuggacaaguaauagcaucguggucuucugugggacuuccggcaccuacggaacaggcucuuggcccgacggggccgaucugaaccuuaugccuauuuga

SEQ ID NO: 152334 - RNA, 1410 nt, Artificial Sequence
  derived and/or modified CDS sequence (opt3) from neuraminidase__InfluenzaA__AHC62149
augaaccccaaucagaagaucauuaccauaggcagcgugucccugacaaucucuacuauuugcuucuuuaugcaaaucgccauucucaucacgaccgucacacuucacuucaaacaguacgaguuuaacucaccuccaaauaaccagguuaugcugugugaaccgacuauaaucgagagaaauauuaccgaaaucguguauuugacaaacaccacuauugagaaggaaaucugccccaaaccugcugaguacaggaauuggaguaagccacagugugacauaacaggguucgcacccuuuagcaaagauaacuccauucgguuaucugccggaggugacaucuggguaacccgcgagccuuaugugucgugcgauccagacaaguguuaccaauucgcgcugggccaggggacgacucuaaauaacguccauucaaauaacaccgugcgagaucguacacccuauagaacucuccugaugaaugaacuuggaguuccuuuucaccugggcaccaaacaggugugcauugcuuggagcaguuccucuugucaugacgguaaggccugguugcacgucugcaucacaggggaugacaagaacgcaaccgccagcuucaucuacaauggaaggcucguggauuccguaguuucauggaguaaagagauucugcggacgcaggaaagcgagugugugugcauaaacggcacuuguacagucgugaugaccgacggcucugcuuccgggaaggcagauacuaaaauccuguuuauugaggaaggaaagaucgugcauacaucaacccucagcgguagugcccaacacgucgaggaaugcucuugcuauccacgcuacccgggcguuagaugugugugcagggacaacuggaagggguccaaucggcccauaguagauauuaacauccgcgaccacagcaucgugucgucuuacgucuguuccggauuagugggcgacacgccucggaaaaaugauucaaguagcuccucucauugccuggacccaaacaaugaggaaggugggcacggaguuaagggcugggcuuucgaugacggcaacgauguguggauggggagaaccauuaaugagacaagcaggcuuggauaugagacuuuuaaagucaucgaagguuggucaaaccccaagaguaaauugcagauuaaucgacaggugauaguagaccguggcgaucgcuccggguacagcggaaucuucucuguugagggcaagucauguauuaacagaugcuuuuauguggaacugaucaggggucggaaagaggaaaccgagguccuauggacaaguaauagcaucguggucuucugugggacuuccggcaccuacggaacaggcucuuggccugacggggccgaucucaaccugaugccaauuuga

SEQ ID NO: 152335 - RNA, 1410 nt, Artificial Sequence; identical to SEQ ID NO: 152055
  derived and/or modified CDS sequence (opt3) from neuraminidase__InfluenzaA__AHC62161

SEQ ID NO: 152336 - RNA, 1410 nt, Artificial Sequence
  derived and/or modified CDS sequence (opt3) from neuraminidase__InfluenzaA__AHC62173
augaaccccaaucagaagaucauuaccauaggcagcgugucccugacaaucucuacuauuugcuucuuuaugcaaaucgccauucucaucacgaccgucacacuucacuucaaacagugugaguuuaacucaccuccaaauaaccagguuaugcugugcgaaccgacuauaaucgagagaaauauuaccgaaaucguguacuugacaaacaccacuauugagaaggaaaucugucccaaauuagcugaguauaggaauuggaguaagccucagugcgacauaacaggguucgcaccauuuagcaaagauaacuccauucggcugucugccggaggugacaucuggguaacccgcgagcccuacgugucgugugauccuaauaagugcuaucaauucgcgcuaggccaggggacgacucucaacaauguccauucaaacaauaccgugcgagaccguacaccauacagaacucugcuuaugaacgaacugggaguucccuuucacuugggcaccaaacagguguguauugcuuggagcaguuccucuugccaugaugguaaggccuggcuccacgucuguaucacaggggacgauaagaaugcaaccgccagcuucaucuauaacggaaaacugguggacuccguaguuucauggaguaaggagauucugaggacgcaggaaagcgagugcguguguauaaacggcacuugcacagucgugaugaccgauggcucugcuuccgggaaagcagacacuaagauccucuuuauugaggaaggaaagaucgugcauacaucaaccuuaagcgguagugcccaacacgucgaggaaugcucuuguuacccucgguauccaggcguucgcugcguguguagagauaauuggaaaggguccaacaggccgauaguagacauuaauaucaaggaucacagcaucgugucgucuuacgucugcuccggacuggugggcgacacgccccggaaaaacgacucaaguagcuccucucauugucuugauccuaauaacgaggaaggugggcacggaguuaagggcugggcuuucgacgauggcaaugacguguggauggggcgcaccauuaacgagacaagccgauugggauacgagacuuuuaaagucaucgaagguuggucaaauccaaagaguaaacugcagauuaacagacaggugauaguagauaggggcaaucgguccggguauagcggaaucuucucuguugagggcaagucaugcauuaaccguuguuuuuacguggaacuaauccgcgguagaaaggaggaaaccgagguccucuggacaaguaauagcaucguggucuucugcgggacuuccggcaccuauggaacaggcucuuggcccgacggggccgaucugaaccuuaugccuauuuga

SEQ ID NO: 152337 - RNA, 1410 nt, Artificial Sequence; identical to SEQ ID NO: 152068
  derived and/or modified CDS sequence (opt3) from neuraminidase__InfluenzaA__AHC62185

SEQ ID NO: 152338 - RNA, 1410 nt, Artificial Sequence; identical to SEQ ID NO: 150970
  derived and/or modified CDS sequence (opt3) from neuraminidase__InfluenzaA__AHC62197

SEQ ID NO: 152339 - RNA, 1410 nt, Artificial Sequence
  derived and/or modified CDS sequence (opt3) from neuraminidase__InfluenzaA__AHC62209
augaaccccaaucagaagaucauuaccauaggcagcgugucccugacaaucucuacuauuugcuucuuuaugcagaucgccauucucaucacgaccgucacacuucacuucaaacaguacgaguuuaacucaccuccaaauaaccagguuaugcugugugaaccgacuauaaucgagagaaauauuaccgaaaucguguauuugacaaacaccacuauugagaaggaaaucugccccaaaccugcugaguacaggaauuggaguaagccacagugugacauaacaggguucgcacccuuuagcaaagauaacuccauucgguuaucugccggaggugacaucuggguaacccgcgagccuuaugugucgugcgauccagacaaguguuaccaauucgcgcugggccaggggacgacucuaaauaacguccauucaaauaacaccgugcgagaucguacacccuauagaacucuccugaugaaugaacuuggaguuccuuuucaccugggcaccaaacaggugugcauugcuuggagcaguuccucuugucaugacgguaaggccugguugcacgucugcaucacaggggaugacaagaacgcaaccgccagcuucaucuacaauggaaggcucguggauuccguaguuucauggaguaaagagauucugcggacgcaggaaagcgagugugugugcauaaacggcacuuguacagucgugaugaccgacggcucugcuuccgggaaggcagauacuaaaauccuguuuauugaggaaggaaagaucgugcauacaucaacccucagcgguagugcccaacacgucgaggaaugcucuugcuauccacgcuacccgggcguuagaugugugugcagggacaacuggaagggguccaaucggcccauaguagauauuaacaucaaaaaucacagcaucgugucgucuuacgucuguuccggauuagugggcgacacgccucgcaagaacgacucaaguagcuccucucauugccuggauccaaauaacgaggaaggugggcacggaguuaaaggcugggcuuucgacgauggcaaugacguguggauggggcgaaccauuaacgagacaagcagacuuggauaugagacuuuuaaggucaucgaagguuggucaaaucccaaaaguaaguugcagauuaacaggcaagugauaguagaucggggcgaccguuccggguacagcggaaucuucucuguugagggcaaaucauguauuaaucgcugcuuuuauguggaacugaucagagguaggaaggaggaaaccgagguccuauggacaaguaacagcaucguggucuucugugggacuuccggcaccuacggaacaggcucuuggccugauggggccgaccucaaucugaugccaauuuga

SEQ ID NO: 152340 - RNA, 1410 nt, Artificial Sequence; identical to SEQ ID NO: 152023
  derived and/or modified CDS sequence (opt3) from neuraminidase__InfluenzaA__AHC62221

SEQ ID NO: 152341 - RNA, 1410 nt, Artificial Sequence; identical to SEQ ID NO: 147566
  derived and/or modified CDS sequence (opt3) from neuraminidase__InfluenzaA__AHC62233

SEQ ID NO: 152342 - RNA, 1410 nt, Artificial Sequence; identical to SEQ ID NO: 152019
  derived and/or modified CDS sequence (opt3) from neuraminidase__InfluenzaA__AHC62245

SEQ ID NO: 152343 - RNA, 1410 nt, Artificial Sequence
  derived and/or modified CDS sequence (opt3) from neuraminidase__InfluenzaA__AHC62257
augaaccccaaucagaagaucauuaccauaggcagcgugucccugacaaucucuacuauuugcuucuuuaugcagaucgccauucucaucacgaccgucacacuucacuucaaacaguacgaguuuaacucaccuccaaauaaccagguuaugcugugugaaccgacuauaaucgagagaaauauuaccgaaaucguguauuugacaaacaccacuauugagaaggaaaucugccccaaaccugcugaguacaggaauuggaguaagccacagugugacauaacaggguucgcacccuuuagcaaagauaacuccauucgguuaucugccggaggugacaucuggguaacccgcgagccuuaugugucgugcgauccagacaaguguuaccaauucgcgcugggccaggggacgacucuaaauaacguccauucaaauaacaccgugcgagaucguacacccuauagaacucuccugaugaaugaacuuggaguuccuuuucaccugggcaccaaacaggugugcauugcuuggagcaguuccucuugucaugacgguaaggccugguugcacgucugcaucacaggggaugacaagaacgcaaccgccagcuucaucuacaauggaaggcucguggauuccguaguuucauggaguaaagagauucugcggacgcaggaaagcgagugugugugcauaaacggcacuuguacagucgugaugaccgacggcucugcuuccgggaaggcagauacuaaaauccuguuuauugaggaaggaaagaucgugcauacaucaacccucagcgguagugcccaacacgucgaggaaugcucuugcuauccacgcuacccgggcguuagaugugugugcagggacaacuggaagggguccaaucggcccauaguagauauuaacaucaaagaccacagcaucgugucgucuuacgucuguuccggauuagugggcgacacgccucgcaagaaugauucaaguagcuccucucauugccuggacccaaacaaugaggaaggugggcacggaguuaaaggcugggcuuucgaugacggcaacgauguguggauggggcgaaccauuaaugagacaagcagacuuggauaugagacuuuuaaggucaucgaagguuggucaaaccccaaaaguaaguugcagauuaauaggcaagugauaguaggccguggggaccgguccggauacagcggcaucuucucuguugaggguaaaucauguauuaaccgcugcuuuuauguggaacugaucagagggaggaaggaggaaaccgagguccuauggacaaguaauagcaucguggucuucuguggcacuuccggaaccuacggcacagggucuuggccugauggagccgaccucaaccugaugccaauuuga

SEQ ID NO: 152344 - RNA, 1410 nt, Artificial Sequence; identical to SEQ ID NO: 152096
  derived and/or modified CDS sequence (opt3) from neuraminidase__InfluenzaA__AHC62269

SEQ ID NO: 152345 - RNA, 1410 nt, Artificial Sequence; identical to SEQ ID NO: 152068
  derived and/or modified CDS sequence (opt3) from neuraminidase__InfluenzaA__AHC62281

SEQ ID NO: 152346 - RNA, 1410 nt, Artificial Sequence; identical to SEQ ID NO: 152023
  derived and/or modified CDS sequence (opt3) from neuraminidase__InfluenzaA__AHC62293

SEQ ID NO: 152347 - RNA, 1410 nt, Artificial Sequence; identical to SEQ ID NO: 147566
  derived and/or modified CDS sequence (opt3) from neuraminidase__InfluenzaA__AHC62305

SEQ ID NO: 152348 - RNA, 1410 nt, Artificial Sequence; identical to SEQ ID NO: 152019
  derived and/or modified CDS sequence (opt3) from neuraminidase__InfluenzaA__AHC62317

SEQ ID NO: 152349 - RNA, 1410 nt, Artificial Sequence
  derived and/or modified CDS sequence (opt3) from neuraminidase__InfluenzaA__AHC62329
augaaccccaaucagaagaucauuaccauaggcagcgugucccugacaaucucuacuauuugcuucuuuaugcagaucgccauucucaucacgaccgucacacuucacuucaaacaguacgaguuuaacucaccuccaaauaaccagguuaugcugugugaaccgacuauaaucgagagaaauauuaccgaaaucguguauuugacaaacaccacuauugagaaggaaaucugccccaaaccugcugaguacaggaauuggaguaagccacagugugacauaacaggguucgcacccuuuagcaaagauaacuccauucgguuaucugccggaggugacaucuggguaacccgcgagccuuaugugucgugcgauccagacaaguguuaccaauucgcgcugggccaggggacgacucuaaauaacguccauucaaauaacaccgugcgagaucguacacccuauagaacucuccugaugaaugaacuuggaguuccuuuucaccugggcaccaaacaggugugcauugcuuggagcaguuccucuugucaugacgguaaggccugguugcacgucugcaucacaggggaugacaagaacgcaaccgccagcuucaucuacaauggaaggcucguggauuccguaguuucauggaguaaagagauucugcggacgcaggaaagcgagugugugugcauaaacggcacuuguacagucgugaugaccgacggcucugcuuccgggaaggcagauacuaaaauccuguuuauugaggaaggaaagaucgugcauacaucaacccucagcgguagugcccaacacgucgaggaaugcucuugcuauccacgcuacccgggcguuagaugugugugcagggacaacuggaagggguccaaucggcccauaguagauauuaacaucaaagaccacagcaucgugucgucuuacgucuguuccggauuagugggcgacacgccucgcaagaaugauucaaguagcuccucucauugccuggacccaaacaaugaggaaggugggcacggaguuaaaggcugggcuuucgaugacggcaacgauguguggauggggcgaaccauuaaugagacaagcagacuuggauaugagacuuuuaaggucaucgaagguuggucaaaccccaaaaguaaguugcagauuaauaggcaagugauagccgaccggggcgaucguuccggguacagcggaaucuucucuguagagggcaaaucauguauuaaccgcugcuuuuauguugaacugaucagagguaggaaggaggaaaccgaggugcuauggacaaguaauagcaucgucguguucugugggacuuccggcaccuacggaacaggcucuuggccugacggggcggaucucaaccugaugccaauuuga

SEQ ID NO: 152350 - RNA, 1410 nt, Artificial Sequence; identical to SEQ ID NO: 152019
  derived and/or modified CDS sequence (opt3) from neuraminidase__InfluenzaA__AHC62341

SEQ ID NO: 152351 - RNA, 1410 nt, Artificial Sequence
  derived and/or modified CDS sequence (opt3) from neuraminidase__InfluenzaA__AHC62353
augaaccccaaucagaagaucauuaccauaggcagcgugucccugacaaucucuacuauuugcuucuuuaugcagaucgccauucucaucacgaccgucacacuucacuucaaacaguacgaguuuaacucaccuccaaauaaccagguuaugcugugugaaccgacuauaaucgagagaaauauuaccgaaaucguguauuugacaaacaccacuauugagaaggaaaucugccccaaauuagcugaguacaggaauuggaguaagccucagugugacauaacaggguucgcaccauuuagcaaagauaacuccauucggcugucugccggaggugacaucuggguaacccgcgagcccuaugugucgugcgauccugacaaguguuaccaauucgcgcuaggccaggggacgacucucaauaacguccauucaaauaacaccgugcgagaucguacaccauauagaacucugcuuaugaaugaacugggaguucccuuucacuugggcaccaaacaggugugcauugcuuggagcaguuccucuugucaugacgguaaggccuggcuccacgucugcaucacaggggaugacaagaacgcaaccgccagcuucaucuacaauggaaggcugguggauuccguaguuucauggaguaaagagauucugcggacgcaggaaagcgagugugugugcauaaacggcacuuguacagucgugaugaccgacggcucugcuuccgggaaggcagauacuaaaauccucuuuauugaggaaggaaagaucgugcauacaucaaccuuaagcgguagugcccaacacgucgaggaaugcucuugcuauccucgcuacccaggcguuagaugugugugcagggacaacuggaagggguccaaucggccgauaguagauauuaacaucaaagaccacagcaucgugucgucuuacgucuguuccggacuggugggcgacacgccccgcaagaccgauucaaguagcuccucucauugccuugacccuaauaacgaggaaggugggcacggaguuaaaggcugggcuuucgaugacggcaaugauguguggauggggcgaacaauuaacgagacuagcagauugggauaugagaccuuuaaggucaucgaagguuggucaaauccaaaaaguaagcugcagauuaacaggcaagugauaguagaccggggcaaucguuccggguacagcggaaucuucucuguugagggcaaaucauguauuaaccgcugcuuuuauguggaacuaaucagagguaggaaggaggaaacagagguccucuggaccaguaauagcaucguggucuucugugggacuuccggcacauacggaaccggcucuuggcccgauggggccgaccugaaccuuaugccuauuuga

SEQ ID NO: 152352 - RNA, 1410 nt, Artificial Sequence; identical to SEQ ID NO: 152019
  derived and/or modified CDS sequence (opt3) from neuraminidase__InfluenzaA__AHC62365

SEQ ID NO: 152353 - RNA, 1410 nt, Artificial Sequence; identical to SEQ ID NO: 152236
  derived and/or modified CDS sequence (opt3) from neuraminidase__InfluenzaA__AHC62377

SEQ ID NO: 152354 - RNA, 1410 nt, Artificial Sequence; identical to SEQ ID NO: 152068
  derived and/or modified CDS sequence (opt3) from neuraminidase__InfluenzaA__AHC62389

SEQ ID NO: 152355 - RNA, 1410 nt, Artificial Sequence; identical to SEQ ID NO: 152068
  derived and/or modified CDS sequence (opt3) from neuraminidase__InfluenzaA__AHC62401

SEQ ID NO: 152356 - RNA, 1410 nt, Artificial Sequence; identical to SEQ ID NO: 152096
  derived and/or modified CDS sequence (opt3) from neuraminidase__InfluenzaA__AHC62413

SEQ ID NO: 152357 - RNA, 1410 nt, Artificial Sequence; identical to SEQ ID NO: 152154
  derived and/or modified CDS sequence (opt3) from neuraminidase__InfluenzaA__AHC62425

SEQ ID NO: 152358 - RNA, 1410 nt, Artificial Sequence; identical to SEQ ID NO: 147566
  derived and/or modified CDS sequence (opt3) from neuraminidase__InfluenzaA__AHC62437

SEQ ID NO: 152359 - RNA, 1410 nt, Artificial Sequence; identical to SEQ ID NO: 152068
  derived and/or modified CDS sequence (opt3) from neuraminidase__InfluenzaA__AHC62449

SEQ ID NO: 152360 - RNA, 1410 nt, Artificial Sequence; identical to SEQ ID NO: 152023
  derived and/or modified CDS sequence (opt3) from neuraminidase__InfluenzaA__AHC62461

SEQ ID NO: 152361 - RNA, 1410 nt, Artificial Sequence; identical to SEQ ID NO: 152019
  derived and/or modified CDS sequence (opt3) from neuraminidase__InfluenzaA__AHC62473

SEQ ID NO: 152362 - RNA, 1410 nt, Artificial Sequence; identical to SEQ ID NO: 150194
  derived and/or modified CDS sequence (opt3) from neuraminidase__InfluenzaA__AHC62485

SEQ ID NO: 152363 - RNA, 1410 nt, Artificial Sequence; identical to SEQ ID NO: 152068
  derived and/or modified CDS sequence (opt3) from neuraminidase__InfluenzaA__AHC62509

SEQ ID NO: 152364 - RNA, 1410 nt, Artificial Sequence
  derived and/or modified CDS sequence (opt3) from neuraminidase__InfluenzaA__AHC62521
augaaccccaaucagaagaucauuaccauaggcagcgugucccugacaaucucuacuauuugcuucuuuaugcaaaucgccauucucaucacgaccgucacacuucacuucaaacaguacgaguuuaacucaccuccaaauaaccagguuaugcugugugaaccgacuauaaucgagagaaauauuaccgaaaucguguauuugacaaacaccacuauugagaaggaaaucugccccaaauuagcugaguacaggaauuggaguaagccucagugugacauaacaggguucgcaccauuuagcaaagauaacuccauucggcugucugccggaggugacaucuggguaacccgcgagcccuaugugucgugcgauccuaauaaguguuaccaauucgcgcuaggccaggggacgacucucaacaauguccauucaaacaauaccgugcgagaccguacaccauauagaacucugcuuaugaacgaacugggaguucccuuucacuugggcaccaaacaggugugcauugcuuggagcaguuccucuugucaugaugguaaggccuggcuccacgucugcaucacaggggacgauaagaaugcaaccgccagcuucaucuacaacggaaaacugguggacuccguaguuucauggaguaaggagauucugaggacgcaggaaagcgagugugugugcauaaacggcacuuguacagucgugaugaccgauggcucugcuuccgggaaagcagacacuaagauccucuuuauugaggaaggaaagaucgugcauacaucaaccuuaagcgguagugcccaacacgucgaggaaugcucuugcuauccucgguacccaggcguucgcugugugugcagagauaauuggaaaggguccaacaggccgauaguagacauuaauaucaaggaucacagcaucgugucgucuuacgucuguuccggacuggugggcgacacgccccggaaaaacgacucaaguagcuccucucauugccuugauccuaauaacgaggaaggugggcacggaguuaagggcugggcuuucgacgauggcaaugacguguggauggggcgcaccauuaacgagacaagccgauugggauaugagacuuuuaaagucaucgaagguuggucaaauccaaagaguaaacugcagauuaacagacaggugauaguagauaggggcaaucgguccggguacagcggaaucuucucuguugagggcaagucauguauuaaccguugcuuuuauguggaacuaauccgcgguagaaaggaggaaaccgagguccucuggacaaguaauagcaucauuguguucugugggacuuccggcaccuacggaacaggcucuuggcccgacggggccgaucugaaccuuaugccuauauga

SEQ ID NO: 152365 - RNA, 1410 nt, Artificial Sequence
  derived and/or modified CDS sequence (opt3) from neuraminidase__InfluenzaA__AHC62533
augaaccccaaucagaagaucauuaccauaggcagcgugucccugacaaucucuacuauuugcuucuuuaugcaagucgccauccucauuacgaccguuacacuucacuucaaacaguacgaguuuaacucaccuccaaauaaccaggugaugcugugugaaccgacuaucauagagagaaauaucaccgaaauuuuguauuuaacaaacaccacuaucgagaaggaaauuugccccaaacuggcugaguacaggaauuggaguaagccucagugugacaucacaggguucgcaccauuuagcaaagauaacuccauacggcuaucugccggaggugacauuuggguaacccgcgagcccuaugugucgugcgauccugacaaguguuaccaauucgcgcucggccaggggacgacucugaauaacguccauucaaauaacaccgugcgagaucguacaccauauagaacucuucugaugaaugaauugggaguucccuuucaccucggcaccaaacaggugugcaucgcuuggagcaguuccucuugucaugacgguaaggccuggcugcacgucugcauuacaggggaugacaagaacgcaaccgccagcuucaucuacaauggaaaacugguggauuccguaguuucauggaguaaggagauccucaggacgcaggaaagcgagugugugugcauuaacggcacuuguacagucgugaugaccgacggcucugcuuccgggaaagcagauacuaagauauuauuuaucgaggaaggaaagauugugcauacaucaacccugagcgguagugcccaacacgucgaggaaugcucuugcuauccucgguacccaggcguucgcugugugugcagagacaacuggaaaggguccaauaggccgaucguagauauaaacauuaaggaccacagcaucgugucgucuuacgucuguuccggacuugugggcgacacgccccggaaaaaugauucaaguagcuccucucauugcuuggacccuaacaaugaggaaggugggaacggaguuaagggcugggcuuucgaugacggcaaugauguguggauggggcgcaccaucaacgagacaagccgacugggauaugagacuuuuaaagucauugaagguuggucaaauccaaagaguaaacuacagaucaacagacaggugauuguagacaggggcaaucgguccggguacagcggaauauucucuguugagggcaagucauguaucaaccguugcuuuuauguggaacucauucgcgguagaaaggaggaaaccgagguccuguggacaaguaauagcaucguggucuucugugggacuuccggcaccuacggaacaggcucuuggcccgauggggccgaccuuaaccugaugccuaucuga

SEQ ID NO: 152366 - RNA, 1410 nt, Artificial Sequence; identical to SEQ ID NO: 152223
  derived and/or modified CDS sequence (opt3) from neuraminidase__InfluenzaA__AHC62545

SEQ ID NO: 152367 - RNA, 1410 nt, Artificial Sequence; identical to SEQ ID NO: 152068
  derived and/or modified CDS sequence (opt3) from neuraminidase__InfluenzaA__AHC62557

SEQ ID NO: 152368 - RNA, 1410 nt, Artificial Sequence; identical to SEQ ID NO: 152019
  derived and/or modified CDS sequence (opt3) from neuraminidase__InfluenzaA__AHC62569

SEQ ID NO: 152369 - RNA, 1410 nt, Artificial Sequence; identical to SEQ ID NO: 152068
  derived and/or modified CDS sequence (opt3) from neuraminidase__InfluenzaA__AHC62581

SEQ ID NO: 152370 - RNA, 1410 nt, Artificial Sequence
  derived and/or modified CDS sequence (opt3) from neuraminidase__InfluenzaA__AHC62593
augaaccccaaucagaagaucauuaccauaggcagcgugucccugacaaucucuacuauuugcuucuuuaugcagaucgccauucucaucacgaccgucacacuucacuucaaacaguacgaguuuaacucaccuccaaauaaccagguuaugcugugugaaccgacuauaaucgagagaaauauuaccgaaaucguguauuugacaaacaccacuauugagaaggaaaucugccccaaauuagcugaguacaggaauuggaguaagccucagugugacauaacaggguucgcaccauuuagcaaagauaacuccauucggcugucugccggagguaauaucuggguaacccgcgagcccuaugugucgugcgacccugauaaguguuaccaauucgcgcuaggccaggggacgacucucaacaauguccauucaaacaauaccgugcgagaccguacaccauauagaacucugcuuaugaacgaacugggaguucccuuucacuugggcaccaaacaggugugcauugcuuggagcaguuccucuugucaugaugguaaggccuggcuccacgucugcaucacaggggacgauaagaaugcaaccgccagcuucaucuacaacggaaggcugguggacuccguaguuucauggaguaaagagauucugcggacgcaggaaagcgagugugugugcauaaacggcacuuguacagucgugaugaccgauggcucugcuuccgggaaggcagacacuaaaauccucuuuauugaggaaggaaagaucgugcauacaucaaccuuaagcgguagugcccaacacgucgaggaaugcucuugcuauccucgcuacccaggcguuagaugugugugcagggauaauuggaagggguccaaccggccgauaguagacauuaauaucaaagaucacagcaucgugucgucuuacgucuguuccggacuggugggcgacacgccccgcaagaacgacucaaguagcuccucucauugccuugauccuaauaacgaggaaggugggcacggaguuaaaggcugggcuuucgacgauggcaaugacguguggauggggcgaaccauuaacgagacaagcagauugggauaugagacuuuuaaggucaucgaagguuggucaaauccaaaaaguaagcugcagauuaacaggcaagugauaguagaucggggcaaucguuccggguacagcggaaucuucucuguugagggcaaaucauguauuaaccgcugcuuuuauguggaacuaaucagagguaggaaggaggaaaccgagguccucuggacaaguaauagcaucguggucuucugugggacuuccggcaccuacggaacaggcucuuggcccgacggggccgaucugaaccuuaugccuauuuga

SEQ ID NO: 152371 - RNA, 1410 nt, Artificial Sequence; identical to SEQ ID NO: 152055
  derived and/or modified CDS sequence (opt3) from neuraminidase__InfluenzaA__AHC62605

SEQ ID NO: 152372 - RNA, 1410 nt, Artificial Sequence
  derived and/or modified CDS sequence (opt3) from neuraminidase__InfluenzaA__AHC62617
augaaccccaaucagaagaucauuaccauaggcagcgugucccugacaaucucuacuauuugcuucuuuaugcagaucgccauucucaucacgaccgucacacuucacuucaaacaguacgaguuuaacucaccuccaaauaaccagguuaugagaugugaaccgacuauaaucgagaggaauauuaccgaaaucguguaucugacaaacaccacuauugagaaggaaaucugccccaaauuggcugaguaccggaauuggaguaagccucagugugacauaacaggguucgcaccauuuagcaaagauaacuccauucgcuuaucugccggaggugacaucuggguaacccgagagcccuaugugucgugcgauccuaauaaguguuaccaauucgcgcugggccaggggacgacucuaaacaauguccauucaaacaauaccgugcgugacagaacaccauauaggacucuccugaugaacgaacuuggaguucccuuucaccugggcaccaaacaggugugcauugcuuggagcaguuccucuugucaugaugguaaggccugguugcacgucugcaucacaggggacgauaagaaugcaaccgccagcuucaucuacaacggaaaacucguggacuccguaguuucauggaguaaggagauucugcggacgcaggaaagcgagugugugugcauaaacggcacuuguacagucgugaugaccgauggcucugcuuccgggaaagcagacacuaagauccuguuuauugaggaaggaaagaucgugcauacaucaacccucagcgguagugcccaacacgucgaggaaugcucuugcuauccucgcuacccaggcguuagaugugugugcagggauaauuggaaaggguccaaccggccgauaguagacauuaauaucaaggaucacagcaucgugucgucuuacgucuguuccggauuagugggcgacacgccccgcaaaaacgacucaaguagcuccucucauugccuggauccuaauaacgaggaaggugggcacggaguuaagggcugggcuuucgacgauggcaaugacguguggauggggcgaaccauuaacgagacaagcagacuuggauaugagacuuuuaaagucaucgaagguuggucaaauccaaagaguaaauugcagauuaacaggcaagugauaguagaucggggcaaucguuccggguacagcggaaucuucucuguugagggcaagucauguauuaaccgcugcuuuuauguggaacugaucagagguaggaaggaggaaaccgagguccuauggacaaguaauagcaucguggucuucugugggacuuccggcaccuacggaacaggcucuuggcccgacggggccgaucucaaccugaugccuauuuga

SEQ ID NO: 152373 - RNA, 1410 nt, Artificial Sequence; identical to SEQ ID NO: 152023
  derived and/or modified CDS sequence (opt3) from neuraminidase__InfluenzaA__AHC62629

SEQ ID NO: 152374 - RNA, 1410 nt, Artificial Sequence
  derived and/or modified CDS sequence (opt3) from neuraminidase__InfluenzaA__AHC62641
augaaccccaaucagaagaucauuaccauaggcagcgugucccugacaaucucuacugucugcuucuuuaugcaaguugccauucucaucacgaccgugacacuucacuucaaacaguacgaguuuaacucaccuccaaauaaccagguaaugcugugugaaccgacuauuaucgagagaaauauaaccgaaaucuuguauuuaacaaacaccacuauugagaaggaaaucugccccaaacuggcugaguacaggaauuggaguaagccucagugugacauuacaggguucgcaccauuuagcaaagauaacuccauccggcuaucugccggaggugacauaugggugacccgcgagcccuaugucucgugcgauccugacaaguguuaccaauucgcgcucggccaggggacgacucugaauaacgugcauucaaauaacaccguucgagaucguacaccauauagaacucuucugaugaaugaauugggagugcccuuucaccucggcaccaagcaggucugcauugcuuggagcaguuccucuugucaugacgguaaagccuggcugcacgugugcaucacaggggaugacaagaacgcaaccgccagcuucauuuacaauggaaaacugguagauuccguugugucauggaguaaggagauccucaggacgcaggaaagcgagugugucugcaucaacggcacuuguacaguggugaugaccgacggcucugcuuccgggaaagcagauacuaagauuuuauuuauagaggaaggaaagaucguccauacaucaacccugagcgguagugcccaacacguugaggaaugcucuugcuauccucgguacccaggcgugcgcuguguaugcagagacaacuggaaaggguccaauaggccgauuguggauaucaacauaaaggaccacagcauugucucgucuuacguguguuccggacuuguuggcgacacgccccggaaaaaugauucaaguagcuccucucauugcuuggacccuaacaaugaggaaggugggcacggagugaagggcugggcuuucgaugacggcaacgaugucuggauggggcgcaccaucaaugagacaagccgacugggauaugagacuuuuaaagugaucgaagguuggucaaacccaaagaguaaacuacagauuaauagacagguaaucguugacaggggcaaccgguccggguacagcggaauuuucucuguggagggcaagucauguauaaaucguugcuuuuaugucgaacucauccgcgguagaaaggaggaaaccgaggugcuguggacaaguaacagcauugucguguucugugggacuuccggcaccuacggaacaggcucuuggcccgauggggccgaccuuaaucugaugccuaucuga

SEQ ID NO: 152375 - RNA, 1410 nt, Artificial Sequence; identical to SEQ ID NO: 152023
  derived and/or modified CDS sequence (opt3) from neuraminidase__InfluenzaA__AHC62653

SEQ ID NO: 152376 - RNA, 1410 nt, Artificial Sequence; identical to SEQ ID NO: 152023
  derived and/or modified CDS sequence (opt3) from neuraminidase__InfluenzaA__AHC62665

SEQ ID NO: 152377 - RNA, 1410 nt, Artificial Sequence
  derived and/or modified CDS sequence (opt3) from neuraminidase__InfluenzaA__AHC62677
augaaccccaaucagaagaucauuaccauaggcagcgugucccugacaaucucuacuauuugcuucuuuaugcaaaucgccauucucaucacgaccgucacacuucacuucaaacaguacgaguuuaacucaccuccaaauaaccagguuaugcugugugaaccgacuauaaucgagagaaauauuaccgaaaucguguauuugacaaacaccacuauugagaaggaaaucugccccaaauuagcugaguacaggaauuggaguaagccucagugugacauaacaggguucgcaccauuuagcaaagauaacuccauucggcugucugccggaggugacaucuggguaacccgcgagcccuaugugucgugcgauccuaauaaguguuaccaauucgcgcuaggccaggggacgacucucaacaauguccauucaaacaauaccgugcgagaccguacaccauauagaacucugcuuaugaacgaacugggaguucccuuucacuugggcaccaaacaggugugcauugcuuggagcaguuccucuugucaugaugguaaggccuggcuccacgucugcaucacaggggacgauaagaaugcaaccgccagcuucaucuacaacggaaaacugguggacuccguaguuucauggaguaaggagauucugaggacgcaggaaagcgagugugugugcauaaacggcacuuguacagucgugaugaccgauggcucugcuuccgggaaagcagacacuaagauccucuuuauugaggaaggaaagaucgugcauacaucaaccuuaagcgguagugcccaacacgucgaggaaugcucuugcuauccucgguacccaggcguucgcugugugugcagagauaauuggaaaggguccaacaggccgauaguagacauuaauaucaaggaucacagcaucgugucgucuuacgucuguuccggacuggugggcgacacgccccggaaaaacgacauuucaaguagcucccauugccuugauccuaauaacgaggaaggugggcacggaguuaagggcugggcuuucgacgauggcaaugacguguggauggggcgcaccaucaacgagacaucucgauugggauaugagacuuuuaaagucauugaagguuggagcaauccaaagucaaaacugcagauaaacagacaggugaucguagauaggggcaaucggaguggguacuccggaauuuucagcguugagggcaagucuuguaucaaccguugcuuuuauguggaacuaauccgcgguagaaaggaggaaaccgagguccucuggacaucaaauaguauuguggucuucugugggacuagcggcaccuacggaacaggcuccuggcccgacggggccgaucugaaccuuaugccuauauga

SEQ ID NO: 152378 - RNA, 1398 nt, Artificial Sequence
  derived and/or modified CDS sequence (opt3) from neuraminidase__InfluenzaA__AHF20560
augaaccccaaucagaagauccugugcaccagcgccacagcuauuauaaucggcgcaauuacugugcucaucgggauugccaaccuuggacugaauaucgguuugcacuuaaaaccuggcuguaacugcucccauucucaaccagagacgaccaauacaucacagacuauaaucaacaauuacuauaacgaaaccaauacaaccaacauucagauggaggaaagaacaaguaggaauuucaacaaucugacuaaggggcuauguaccaucaacagcuggcacauuuacggaaaagacaaugcgguccggaucggcgaguccucugauguucucgugacgcgcgaaccguauguaucgugcgaccccgaugagugucgauuuuacgcucugucacaggguacuaccauacgugggaagcauagcaacggaacaauucacgacagaagucaauauagggcccuuaucuccuggccucugucuagcccacccacuguguacaacucccgggucgagugcauuggcuggucaaguaccagcugucaugauggcaaaucucgcauguccaucugcaucucagggccuaauaacaaugcaagcgccgugguuugguauaacagaaggccaguggcugaaauuaauacaugggcacggaacauauugcgcacccaggagagugaaugugucugccacaauggagugugucccguaguuuucacggacgguucugccacuggcccugcugauacacgaaucuacuacuuuaaggaggggaagauucucaaaugggagucccugaccggaacugccaagcacaucgaagagugcagcugcuauggcgaaagaacagguauaaccuguacgugcagggacaacuggcaggggucgaaucggccagugauucagaucgauccggucgcgaugacccauacaucucaauacaucuguucccccgugcugacugacaacccucguccaaaugaucccaacauuggaaaaugcaaugacccuuauccaggcaacaauaacaacggcgugaagggguucucauaccucgauggagcaaauaccugguuaggucgcacaaucaguacugccagcagauccggcuaugagaugcugaaaguccccaacgcucuuaccgacgacaggucuaagccgauucaggggcagacaauaguuuugaaugccgauuggagcggauacucaggcaguuuuauggacuauugggcagaaggugauuguuaccgggcuugcuucuacguggagcugauccgagggcgcccuaaggaggacaaaguaugguggaccuccaacagcauugugucuauguguucaaguacugaauuucuagagcaguggaauuggcccgauggcgccaagaucgaauauuuccucuga

SEQ ID NO: 152379 - RNA, 1398 nt, Artificial Sequence; identical to SEQ ID NO: 151502
  derived and/or modified CDS sequence (opt3) from neuraminidase__InfluenzaA__AHF20570

SEQ ID NO: 152380 - RNA, 1413 nt, Artificial Sequence; identical to SEQ ID NO: 144680
  derived and/or modified CDS sequence (opt3) from neuraminidase__InfluenzaA__AHG96111

SEQ ID NO: 152381 - RNA, 1413 nt, Artificial Sequence; identical to SEQ ID NO: 144680
  derived and/or modified CDS sequence (opt3) from neuraminidase__InfluenzaA__AHG96123

SEQ ID NO: 152382 - RNA, 1413 nt, Artificial Sequence; identical to SEQ ID NO: 144680
  derived and/or modified CDS sequence (opt3) from neuraminidase__InfluenzaA__AHG96135

SEQ ID NO: 152383 - RNA, 1413 nt, Artificial Sequence; identical to SEQ ID NO: 144680
  derived and/or modified CDS sequence (opt3) from neuraminidase__InfluenzaA__AHG96147

SEQ ID NO: 152384 - RNA, 1413 nt, Artificial Sequence; identical to SEQ ID NO: 144680
  derived and/or modified CDS sequence (opt3) from neuraminidase__InfluenzaA__AHG96159

SEQ ID NO: 152385 - RNA, 1413 nt, Artificial Sequence; identical to SEQ ID NO: 144680
  derived and/or modified CDS sequence (opt3) from neuraminidase__InfluenzaA__AHG96171

SEQ ID NO: 152386 - RNA, 1413 nt, Artificial Sequence; identical to SEQ ID NO: 144680
  derived and/or modified CDS sequence (opt3) from neuraminidase__InfluenzaA__AHG96183

SEQ ID NO: 152387 - RNA, 1413 nt, Artificial Sequence; identical to SEQ ID NO: 144680
  derived and/or modified CDS sequence (opt3) from neuraminidase__InfluenzaA__AHG96195

SEQ ID NO: 152388 - RNA, 1413 nt, Artificial Sequence; identical to SEQ ID NO: 144680
  derived and/or modified CDS sequence (opt3) from neuraminidase__InfluenzaA__AHG96207

SEQ ID NO: 152389 - RNA, 1413 nt, Artificial Sequence; identical to SEQ ID NO: 144680
  derived and/or modified CDS sequence (opt3) from neuraminidase__InfluenzaA__AHG96219

SEQ ID NO: 152390 - RNA, 1413 nt, Artificial Sequence; identical to SEQ ID NO: 144680
  derived and/or modified CDS sequence (opt3) from neuraminidase__InfluenzaA__AHG96231

SEQ ID NO: 152391 - RNA, 1413 nt, Artificial Sequence; identical to SEQ ID NO: 144680
  derived and/or modified CDS sequence (opt3) from neuraminidase__InfluenzaA__AHG96243

SEQ ID NO: 152392 - RNA, 1413 nt, Artificial Sequence; identical to SEQ ID NO: 144680
  derived and/or modified CDS sequence (opt3) from neuraminidase__InfluenzaA__AHG96255

SEQ ID NO: 152393 - RNA, 1413 nt, Artificial Sequence; identical to SEQ ID NO: 144680
  derived and/or modified CDS sequence (opt3) from neuraminidase__InfluenzaA__AHG96267

SEQ ID NO: 152394 - RNA, 1413 nt, Artificial Sequence; identical to SEQ ID NO: 144680
  derived and/or modified CDS sequence (opt3) from neuraminidase__InfluenzaA__AHG96279

SEQ ID NO: 152395 - RNA, 1413 nt, Artificial Sequence; identical to SEQ ID NO: 144680
  derived and/or modified CDS sequence (opt3) from neuraminidase__InfluenzaA__AHG96291

SEQ ID NO: 152396 - RNA, 1413 nt, Artificial Sequence; identical to SEQ ID NO: 144680
  derived and/or modified CDS sequence (opt3) from neuraminidase__InfluenzaA__AHG96303

SEQ ID NO: 152397 - RNA, 1410 nt, Artificial Sequence; identical to SEQ ID NO: 144504
  derived and/or modified CDS sequence (opt3) from neuraminidase__InfluenzaA__AHG96362

SEQ ID NO: 152398 - RNA, 1410 nt, Artificial Sequence; identical to SEQ ID NO: 144504
  derived and/or modified CDS sequence (opt3) from neuraminidase__InfluenzaA__AHG96374

SEQ ID NO: 152399 - RNA, 1410 nt, Artificial Sequence; identical to SEQ ID NO: 144504
  derived and/or modified CDS sequence (opt3) from neuraminidase__InfluenzaA__AHG96386

SEQ ID NO: 152400 - RNA, 1413 nt, Artificial Sequence; identical to SEQ ID NO: 144680
  derived and/or modified CDS sequence (opt3) from neuraminidase__InfluenzaA__AHG96398

SEQ ID NO: 152401 - RNA, 1410 nt, Artificial Sequence; identical to SEQ ID NO: 144504
  derived and/or modified CDS sequence (opt3) from neuraminidase__InfluenzaA__AHG96410

SEQ ID NO: 152402 - RNA, 1410 nt, Artificial Sequence; identical to SEQ ID NO: 144504
  derived and/or modified CDS sequence (opt3) from neuraminidase__InfluenzaA__AHG96422

SEQ ID NO: 152403 - RNA, 1410 nt, Artificial Sequence; identical to SEQ ID NO: 144504
  derived and/or modified CDS sequence (opt3) from neuraminidase__InfluenzaA__AHG96434

SEQ ID NO: 152404 - RNA, 1410 nt, Artificial Sequence; identical to SEQ ID NO: 144504
  derived and/or modified CDS sequence (opt3) from neuraminidase__InfluenzaA__AHG96446

SEQ ID NO: 152405 - RNA, 1410 nt, Artificial Sequence; identical to SEQ ID NO: 144504
  derived and/or modified CDS sequence (opt3) from neuraminidase__InfluenzaA__AHG96458

SEQ ID NO: 152406 - RNA, 1410 nt, Artificial Sequence; identical to SEQ ID NO: 144504
  derived and/or modified CDS sequence (opt3) from neuraminidase__InfluenzaA__AHG96470

SEQ ID NO: 152407 - RNA, 1410 nt, Artificial Sequence; identical to SEQ ID NO: 144504
  derived and/or modified CDS sequence (opt3) from neuraminidase__InfluenzaA__AHG96482

SEQ ID NO: 152408 - RNA, 1410 nt, Artificial Sequence; identical to SEQ ID NO: 144504
  derived and/or modified CDS sequence (opt3) from neuraminidase__InfluenzaA__AHG96494

SEQ ID NO: 152409 - RNA, 1410 nt, Artificial Sequence; identical to SEQ ID NO: 144504
  derived and/or modified CDS sequence (opt3) from neuraminidase__InfluenzaA__AHG96506

SEQ ID NO: 152410 - RNA, 1413 nt, Artificial Sequence; identical to SEQ ID NO: 144680
  derived and/or modified CDS sequence (opt3) from neuraminidase__InfluenzaA__AHG96518

SEQ ID NO: 152411 - RNA, 1413 nt, Artificial Sequence; identical to SEQ ID NO: 144680
  derived and/or modified CDS sequence (opt3) from neuraminidase__InfluenzaA__AHG96530

SEQ ID NO: 152412 - RNA, 1413 nt, Artificial Sequence; identical to SEQ ID NO: 144680
  derived and/or modified CDS sequence (opt3) from neuraminidase__InfluenzaA__AHG96542

SEQ ID NO: 152413 - RNA, 1413 nt, Artificial Sequence; identical to SEQ ID NO: 144680
  derived and/or modified CDS sequence (opt3) from neuraminidase__InfluenzaA__AHG96554

SEQ ID NO: 152414 - RNA, 1413 nt, Artificial Sequence; identical to SEQ ID NO: 144680
  derived and/or modified CDS sequence (opt3) from neuraminidase__InfluenzaA__AHG96566

SEQ ID NO: 152415 - RNA, 1413 nt, Artificial Sequence; identical to SEQ ID NO: 144680
  derived and/or modified CDS sequence (opt3) from neuraminidase__InfluenzaA__AHG96578

SEQ ID NO: 152416 - RNA, 1413 nt, Artificial Sequence; identical to SEQ ID NO: 144680
  derived and/or modified CDS sequence (opt3) from neuraminidase__InfluenzaA__AHG96590

SEQ ID NO: 152417 - RNA, 1413 nt, Artificial Sequence; identical to SEQ ID NO: 144680
  derived and/or modified CDS sequence (opt3) from neuraminidase__InfluenzaA__AHG96602

SEQ ID NO: 152418 - RNA, 1413 nt, Artificial Sequence; identical to SEQ ID NO: 144680
  derived and/or modified CDS sequence (opt3) from neuraminidase__InfluenzaA__AHG96614

SEQ ID NO: 152419 - RNA, 1413 nt, Artificial Sequence; identical to SEQ ID NO: 144680
  derived and/or modified CDS sequence (opt3) from neuraminidase__InfluenzaA__AHG96626

SEQ ID NO: 152420 - RNA, 1413 nt, Artificial Sequence; identical to SEQ ID NO: 144680
  derived and/or modified CDS sequence (opt3) from neuraminidase__InfluenzaA__AHG96638

SEQ ID NO: 152421 - RNA, 1413 nt, Artificial Sequence; identical to SEQ ID NO: 144680
  derived and/or modified CDS sequence (opt3) from neuraminidase__InfluenzaA__AHG96650

SEQ ID NO: 152422 - RNA, 1413 nt, Artificial Sequence; identical to SEQ ID NO: 144680
  derived and/or modified CDS sequence (opt3) from neuraminidase__InfluenzaA__AHG96662

SEQ ID NO: 152423 - RNA, 1413 nt, Artificial Sequence; identical to SEQ ID NO: 144680
  derived and/or modified CDS sequence (opt3) from neuraminidase__InfluenzaA__AHG96674

SEQ ID NO: 152424 - RNA, 1413 nt, Artificial Sequence; identical to SEQ ID NO: 144680
  derived and/or modified CDS sequence (opt3) from neuraminidase__InfluenzaA__AHG96686

SEQ ID NO: 152425 - RNA, 1410 nt, Artificial Sequence; identical to SEQ ID NO: 144504
  derived and/or modified CDS sequence (opt3) from neuraminidase__InfluenzaA__AHG96698

SEQ ID NO: 152426 - RNA, 1410 nt, Artificial Sequence; identical to SEQ ID NO: 144504
  derived and/or modified CDS sequence (opt3) from neuraminidase__InfluenzaA__AHG96710

SEQ ID NO: 152427 - RNA, 1410 nt, Artificial Sequence; identical to SEQ ID NO: 144504
  derived and/or modified CDS sequence (opt3) from neuraminidase__InfluenzaA__AHG96722

SEQ ID NO: 152428 - RNA, 1410 nt, Artificial Sequence; identical to SEQ ID NO: 144504
  derived and/or modified CDS sequence (opt3) from neuraminidase__InfluenzaA__AHG96734

SEQ ID NO: 152429 - RNA, 1410 nt, Artificial Sequence; identical to SEQ ID NO: 144504
  derived and/or modified CDS sequence (opt3) from neuraminidase__InfluenzaA__AHG96746

SEQ ID NO: 152430 - RNA, 1410 nt, Artificial Sequence; identical to SEQ ID NO: 144504
  derived and/or modified CDS sequence (opt3) from neuraminidase__InfluenzaA__AHG96758

SEQ ID NO: 152431 - RNA, 1410 nt, Artificial Sequence; identical to SEQ ID NO: 144504
  derived and/or modified CDS sequence (opt3) from neuraminidase__InfluenzaA__AHG96770

SEQ ID NO: 152432 - RNA, 1410 nt, Artificial Sequence; identical to SEQ ID NO: 144504
  derived and/or modified CDS sequence (opt3) from neuraminidase__InfluenzaA__AHG96782

SEQ ID NO: 152433 - RNA, 1410 nt, Artificial Sequence; identical to SEQ ID NO: 144504
  derived and/or modified CDS sequence (opt3) from neuraminidase__InfluenzaA__AHG96794

SEQ ID NO: 152434 - RNA, 1410 nt, Artificial Sequence; identical to SEQ ID NO: 144504
  derived and/or modified CDS sequence (opt3) from neuraminidase__InfluenzaA__AHG96806

SEQ ID NO: 152435 - RNA, 1410 nt, Artificial Sequence; identical to SEQ ID NO: 144504
  derived and/or modified CDS sequence (opt3) from neuraminidase__InfluenzaA__AHG96818

SEQ ID NO: 152436 - RNA, 1410 nt, Artificial Sequence; identical to SEQ ID NO: 144504
  derived and/or modified CDS sequence (opt3) from neuraminidase__InfluenzaA__AHG96830

SEQ ID NO: 152437 - RNA, 1410 nt, Artificial Sequence; identical to SEQ ID NO: 144504
  derived and/or modified CDS sequence (opt3) from neuraminidase__InfluenzaA__AHG96842

SEQ ID NO: 152438 - RNA, 1410 nt, Artificial Sequence; identical to SEQ ID NO: 144504
  derived and/or modified CDS sequence (opt3) from neuraminidase__InfluenzaA__AHG96854

SEQ ID NO: 152439 - RNA, 1410 nt, Artificial Sequence; identical to SEQ ID NO: 144504
  derived and/or modified CDS sequence (opt3) from neuraminidase__InfluenzaA__AHG96866

SEQ ID NO: 152440 - RNA, 1410 nt, Artificial Sequence; identical to SEQ ID NO: 144504
  derived and/or modified CDS sequence (opt3) from neuraminidase__InfluenzaA__AHG96878

SEQ ID NO: 152441 - RNA, 1410 nt, Artificial Sequence; identical to SEQ ID NO: 144504
  derived and/or modified CDS sequence (opt3) from neuraminidase__InfluenzaA__AHG96890

SEQ ID NO: 152442 - RNA, 1410 nt, Artificial Sequence; identical to SEQ ID NO: 144504
  derived and/or modified CDS sequence (opt3) from neuraminidase__InfluenzaA__AHG96902

SEQ ID NO: 152443 - RNA, 1410 nt, Artificial Sequence; identical to SEQ ID NO: 144504
  derived and/or modified CDS sequence (opt3) from neuraminidase__InfluenzaA__AHG96914

SEQ ID NO: 152444 - RNA, 1410 nt, Artificial Sequence; identical to SEQ ID NO: 144504
  derived and/or modified CDS sequence (opt3) from neuraminidase__InfluenzaA__AHG96926

SEQ ID NO: 152445 - RNA, 1410 nt, Artificial Sequence; identical to SEQ ID NO: 144504
  derived and/or modified CDS sequence (opt3) from neuraminidase__InfluenzaA__AHG96938

SEQ ID NO: 152446 - RNA, 1410 nt, Artificial Sequence; identical to SEQ ID NO: 144504
  derived and/or modified CDS sequence (opt3) from neuraminidase__InfluenzaA__AHG96950

SEQ ID NO: 152447 - RNA, 1410 nt, Artificial Sequence; identical to SEQ ID NO: 144504
  derived and/or modified CDS sequence (opt3) from neuraminidase__InfluenzaA__AHG96962

SEQ ID NO: 152448 - RNA, 1410 nt, Artificial Sequence; identical to SEQ ID NO: 144504
  derived and/or modified CDS sequence (opt3) from neuraminidase__InfluenzaA__AHG96974

SEQ ID NO: 152449 - RNA, 1410 nt, Artificial Sequence; identical to SEQ ID NO: 144504
  derived and/or modified CDS sequence (opt3) from neuraminidase__InfluenzaA__AHG96986

SEQ ID NO: 152450 - RNA, 1410 nt, Artificial Sequence; identical to SEQ ID NO: 144504
  derived and/or modified CDS sequence (opt3) from neuraminidase__InfluenzaA__AHG96998

SEQ ID NO: 152451 - RNA, 1410 nt, Artificial Sequence; identical to SEQ ID NO: 144504
  derived and/or modified CDS sequence (opt3) from neuraminidase__InfluenzaA__AHG97010

SEQ ID NO: 152452 - RNA, 1410 nt, Artificial Sequence; identical to SEQ ID NO: 144504
  derived and/or modified CDS sequence (opt3) from neuraminidase__InfluenzaA__AHG97022

SEQ ID NO: 152453 - RNA, 1410 nt, Artificial Sequence; identical to SEQ ID NO: 144504
  derived and/or modified CDS sequence (opt3) from neuraminidase__InfluenzaA__AHG97034

SEQ ID NO: 152454 - RNA, 1410 nt, Artificial Sequence; identical to SEQ ID NO: 144504
  derived and/or modified CDS sequence (opt3) from neuraminidase__InfluenzaA__AHG97046

SEQ ID NO: 152455 - RNA, 1410 nt, Artificial Sequence
  derived and/or modified CDS sequence (opt3) from neuraminidase__InfluenzaA__AHH00872
augaaccccaaucagaagaucauuaccauaggcagcgugucccugacaaucgccacuauuugcuuccucaugcaaaucgcuauucuugucacgaccguuacacugcacuuuaaacaguacgaguguaacccuccaccgaauaaccaggugauguugugcgaacccacuaucauagagagaaauaucaccgaaauuguauauuuaacaaacaccacuaucgagaaggaaauuuguccuaaacuggcagaguacaggaauuggucuaagccacagugcaacaucacaggguucgcccccuuuucaaaagacaauaguauacggcuaagcgcgggaggugauauuugggugacccgcgagccuuaugucuccugugacccagauaagugcuaccaauucgcucucggccaggggacgacucugaacaauggacauucuaacgacaccgugcacgaucgaacacccuaucguacucuucugaugaaugaauugggcguuccuuuucaucucgguaccaaacagguguguaucgccuggucgucaagcaguugccacgacgggaaggcauggcugcaugucugugugacaggagaugacgagaacgccaccgcuuccuucauuuacaauggcagacugguagauucuaucggcagcugguccaagaaaauccucaggacgcaggaaucagagugcguuuguauuaacgggacuugcacagugauaaugaccgacggaagugcaagcgguaaggccgauacuaaaaucuuauuuauugaggaaggcaagaucguccacacaucuccacuguccgggucagcucaacacguggaggaaugcagcuguuauccgcgguaccccggagugcgcugcgucuguagagacaacuggaagggcaguaauaggccuauaguugauauuaacgugaaagacuacucuaucguauccagcuaugugugcucgggucuugucggggacaccccacggaagaaugauucuuccucaaguagccauuguuuggaccccaacaaugaggaaggaggccacggcgugaaagggugggccuucgaugacggaaacgauguuuggaugggucgcacgaucuccgagaagucucgaagcggcuacgagaccuuuaaagugauugaaggguggucaaagccuaauaguaaacugcagaucaacagacaggucauuauagacaggggaaaucgguccggcuauagcgguaucuucucuguggaggggaagucaugcauuaaccguuguuuuuacguagaacuaauccgcggcagaaagcaggagacagaaguucucuggaccaguaauagcaucguggucuucugcggaacuuccggcacauaugggacuggaucuuggccagauggugcggaccugaaccuuaugcccauuuga

SEQ ID NO: 152456 - RNA, 1416 nt, Artificial Sequence
  derived and/or modified CDS sequence (opt3) from neuraminidase__InfluenzaA__AHI43497
augaaccccaaucagaagcuguucgcccucagcggcguggcuaucgcacuuuccauucugaacuuguuaauagggaucucuaaugucggacugaacauuucacuacaccucaaagguaagggcccuaaacaagaggaaaaucugaccugcacaacuaucaaccagaauaacacgaccguuguggagaauacauacguaaacaauacuaccauuaucacaaaggaaaccgacuggaacacuccaaguuaucuucuguugaauaaaagccucuguaacguggaggggugggucgugauagccaaggauaaugcgaucagauuuggagaauccgagcagauuaucguuacaagggagccguacgugucuugcgaccccaccggcuguaagauguaugcucugcaucaggguacgacuauucggaacaaacacucgaacgggaccauccaugaucgcacagccuuccgaggacugauaucaacuccucucggcaccccacccacagucagcaauaguggcuuuaugugcguggggugguccucuaccacgugucacgacggaauuggucguaugacuaucugcauucaaggcaacaaugauaacgcaacagccaccguauacuauaaugggagauuaacuacaaccaucaagacgugggcuaggaacauccugcggacccaggaaagcgaguguguuugccauaauggaacaugugcaguggucaugacugacggcuccgccucaagucaggcuuacaccaaagugauguauuuccacaagggucuugugauuaaagaagaggccuugcgcgggagcgcgagacacauagaggaaugcucuuguuacggacauucccagagggucacaugcguuugccgggauaacuggcaaggcgcaaaucgcccuaucauugagaucgacaugaacacucuggaacacaccucacgauacguguguacaggcauacuaaccgauacuagcagaccaggggacaagaguucuggagauugcuccaaucccauuacggguagcccuggcgcccaggggguaaagggauuuggcuuccucaacggugacaauacauggcuggggaggaccaucucgccacggucucguuccggcuuugagaugcuuaaaaucccgaacgcuggaacugaucccaauucacgcauugccgaaagacaggagaucguggacaacaacaauuggaguggcuauagcggguccuucauugacuacuggaacaauaacucugaguguuauaauccuugcuuuuacgucgaacugauaaggggacggccagaggaagcaaaguaugugugguggaccagcaacucauugaucgcucucugugguagucccuucccuguuggcuccgggagcuuuccagauggagcccagauucaauacuucucuuga

SEQ ID NO: 152457 - RNA, 1410 nt, Artificial Sequence
  derived and/or modified CDS sequence (opt3) from neuraminidase__InfluenzaA__AHJ57439
augaaccccaaucagaagaucauuaccauaggcagcgugucccugaucauuucuacaaucugcuucuuuaugcaagucgccauucuccuuacuacgguuacccugcacuucaaacaguacgaguuuaacucaccuccaaauaaccaggugauguugugugaaccgacaaucauagagagaaauaucacugaaauuguauauuuaaccaacacaaccaucgagaaggaaauuugccccaaaccugcugaguacaggaauuggaguaagccacagugugacaucacuggguucgcacccuuuagcaaagauaacuccauacggcugucugccggaggugacauuugggugacacgcgagccuuaugucucgugcgauccagacaaguguuaccaauucgcgcuaggccaggggaccacgcucaauaacgugcauucaaauaacacuguucgagaucguacccccuauagaacacugcuuaugaaugaacugggagugccuuuucacuugggcacuaagcaggucugcaucgcuuggagcaguuccucuugucaugacgguaaagccuggcuccacgugugcauuaccggggaugacaagaacgcaacagccagcuucaucuacaauggaaggcugguagauuccguugugucauggaguaaagacauccugcggacccaggagagcgaaugugucugcauuaacggcacguguacuguggugaugacagauggcucugcuuccgggaaggcagacaccaaaauacucuuuaucgaggagggaaagauuguccauacuucaacauuaagcgguagugcccaacacguugaagagugcucuugcuauccacgcuacccgggcgugagauguguaugcagggauaacuggaagggguccaaucggcccaucguggacauaaacauuaaagaccacagcaucgucucgucuuacguguguuccggacugguuggcgauaccccucgcaagaaugacucaaguagcuccucucauugccuugauccaaacaaugaagagggugggcacggagugaaaggcugggcuuucgacgauggcaacgacgucuggauggggcgaacgaucaaugaaaccagcagauugggauaugagacauuuaaggugauugaggguuggucaaaccccaaaaguaagcugcagaucaauaggcagguaauuguugaucggggcaaccguuccggguacagcggaauauucucuguggaaggcaaaucauguaucaaucgcugcuuuuaugucgagcuaauuagagguaggaaggaagagacugaagugcucuggaccaguaacagcaucgucguguucugugggacauccggcacuuacggaaccggcucuuggccugacggggccgauaucaaucugaugccaauuuga

SEQ ID NO: 152458 - RNA, 1410 nt, Artificial Sequence
  derived and/or modified CDS sequence (opt3) from neuraminidase__InfluenzaA__AHJ57440
augaaccccaaucagaagaucauuaccauaggcagcgugucccugaucauuucuacaaucugcuucuuuaugcagauugccauccucauaacuacggucacccuucacuucaaacaguacgaguuuaacucaccuccaaauaaccagaugaugcugugugaaccgacaaucauugagagaaauaucacugaaauuguuuauuugaccaacacaaccaucgagaaggaaauaugccccaaaccugcugaguacaggaauuggaguaagccacagugugacauuacuggguucgcacccuuuagcaaagauaacuccauccgguuaucugccggaggugacauuugggugacacgcgagccuuauguaucgugcgauccagacaaguguuaccaauucgcgcugggccaggggaccacgcuaaauaacggacauucaaauaacacugugcgagaucguacccccuauagaacacuccugaugaaugaacuuggcgucccuuuucaccuggguacuaaacaggugugcaucgcuuggagcaguuccucuugucaugacgggaaggccugguugcacguuugcaucaccggagaugacaagaacgcaacagccagcuucauuuacaauggcaggcucguggauuccgucgugucauggaguaaagagauacugcggacccaggaaagcgaguguguaugcaucaacggcacguguacuguugugaugacagacgggucugcuuccggaaaggcagauaccaaaauucuguuuaucgaggaagguaagauaguccauacuucaacacucagcggcagugcccaacacguggaggaaugcucuugcuauccacgcuacccgggggugagaugugucugcagggacaacuggaagggauccaaucggcccauuguugauaucaacaucaaagaccacagcauugugucgucuuacguauguuccggcuuagugggugacaccccucgcaagaaugauucaaguagcuccucucauugccuggacccaaacaaugaggaagggggacacggcgucaaaggcugggcuuucgaugacgggaacgauguguggaugggacgaacgaucaaugagaccagcagacuugguuaugagacauuuaagguuauugaaggcuggucaaaccccaaaaguaaguugcagauaaauaggcaagugaucgucgaccguggggaucgguccggauacagcggcauuuucucuguggaggguaaaucauguaucaaccgcugcuuuuauguagaacugaucagagggaggaaggaggaaacugagguucuauggaccaguaauagcauuguggucuucuguggcacauccggaacuuacggcaccgggucuuggccugacggagccgauauaaaccucaugccaaucuga

SEQ ID NO: 152459 - RNA, 1410 nt, Artificial Sequence
  derived and/or modified CDS sequence (opt3) from neuraminidase__InfluenzaA__AHJ57441
augaaccccaaucagaagaucauuaccauaggcagcgugucccugaucauuucuacaaucugcuucuuuaugcaaauugccauccucauaacuacggucacccuucacuucaaacaguacgaguuuaacucaccuccaaauaaccagguuaugcugugugaaccgacaaucauugagagaaauaagacugaaaucguguauuugaccaacacaaccauugagaaagaaaucugccccaagccugcugaguacaggaauuggaguaaaccacagugugacauaacuggguucgcacccuuuagcaaggauaacuccauucgguuaucugccggaggugacaucuggguaacacgcgagccuuaugugucgugcgauccagacaaguguuaccaauucgcgcugggccaggggaccacgcuaaauaacguccauucaaauaacacugugcacgaucgaacccccuaucguacacuccugaugaaugaacuuggaguuccuuuucaucugggcacuaaacaggugugcauugcuuggagcaguuccucuugucacgacgguaaggccugguugcaugucugcaucaccggggaugacaaaaacgcaacagccagcuucaucuacaauggaagacucguggauuccguaguuucauggaguaaggagauucugaggacccaggaaagcgagugugugugcauaaacggcacguguacugucgugaugacagacggcucugcuuccgggaaagcagauaccaagauccuguuuauugaggaaggaaagaucgugcacacuucaacacucagcgguagugcccaacacgucgaggaaugcucuugcuauccacgguacccgggcguucgcugugugugcagagacaacuggaaaggguccaauaggcccauaguagauauuaacaucaaggaccauagcaucgugucgucuuacgucuguuccggauuagugggcgacaccccucggaaaaaugauucaaguagcuccucucacugccuggacccaaacaaugaggaaggugggcauggaguuaagggcugggcuuucgaugacggcaacgauguguggauggggcgcacgauuaaugagaccagccgacuuggauaugagacauuuaaagucaucgaagguuggucaaaccccaagaguaaauugcagauuaauagacaggugauaguagacaggggcaaccgguccggguacagcggaaucuucucuguugagggcaagucauguauuaaucguugcuuuuauguggaacugauccgcgguagaaaggaggaaacugagguccuauggaccaguaacagcaucguggucuucugugggacauccggcacuuacggaaccggcucuuggccugauggggccgacauuaaucucaugccaauauga

SEQ ID NO: 152460 - RNA, 1413 nt, Artificial Sequence
  derived and/or modified CDS sequence (opt3) from neuraminidase__InfluenzaA__AHJ57654
augaaccccaaucagaagauuaccugcaucagcgccacaggcaugacucuguccguggucucucuccuuauagggaucgcuaaccugggauugaauauugguuuacacuacaaaguuucagacaguacgaacaucaauauuccuaacaugaaugagaccagcccaacaacuaccaucauaaacaaucauccgcaaaacaauuucacaaacaucaccaauauuaucaugaacaagaaugaagagggcaacuuucugaaccuaacuaaaccccucugugaaguaaauuccuggcacauucugucuaaggauaacgcaaucagaauaggggagaaugcccauauucuugugacaagggaaccuuaucugucgugcgacccacagggaugucggauguucgcguugucacagggcaccacgcuccgcggucgacacgcuaacgggacuauccaugaucguagccccuuuagagcccugauuaguugggagaugggacaggcaccuuccccauacaaugccaggguggagugcaucggcuggucuagcaccuccugucacgacggcaucucacggaugaguauuugcauaagcgggcccaacaauaacgcuucugcagucgugugguauggaggucgcccuguuacagaaaucccauccugggccggcaauauucugagaacucaagagucagaaugugugugccacgggggaaucuguccggucgugaugaccgauggccccgcuaacaauagggccgagacaaaaauaauuuacuucaaggaggguaagguacagaaaaucgaggagcucaaggggaacgcgcagcauaucgaagagugcagcuguuauggagcaaguggcaugauuaaaugcaucugccgggacaauuggaagggcgccaaccgcccuguuauuaccauagauccagaaaugaugacgcacacuucuaaauacuuauguuccaagauccugacagacaccagccgacccaaugauccuacuaacgggaacugcgacgcuccaauuacaggagguucgcccgauccgggcgugaagggguuugccuuccuugacggagaaaauucuugguugggcagaaccaucuccaaagauucaaggagugguuaugagaugcugaagaucccuaacgcagaaacggacacccagagcggggcuauuucccaucaaauaaucgucaauaaccagaauuggucuggcuacagcggagccuuuauugacuacugggcgaacaaagaguguuucaaucccugcuuuuauguggaacuaauccggggccguccaaaggagucaagugugcucuggacauccaacagcauugucgcccugugugggucucgcgaaagacuuggaucauggaguuggcacgauggugcagagaucauauacuucaaauga

SEQ ID NO: 152461 - RNA, 1410 nt, Artificial Sequence
  derived and/or modified CDS sequence (opt3) from neuraminidase__InfluenzaA__AHJ57666
augaaccccaaucagaagaucauuaccauaggcagcgugucccugacaaucgccacugucucuuuccucaugcaaauugcuauccuuacgaccacaguuacucugcacuuuaaacauaacgagugcaauaugccuccaaagaaccaggugaugucaugugaaccgauuaucauagagagaaauaucaccgaaauuguauacuugaacaauacaaccguggagaaagaaaucugccccaaggucguggaguauaggaacuggaguaaaccucaguguaagauuacuggguucgcaccauuuagcaaggacaauuccauccgguuaucugccggaggugauauauggguuacacgcgagcccuacgugucgugcggccuggggaaauguuaucaguucgcgcuaggacaaggcaccacgcucgacaacucacacagcaaugguacuauucaugaucgaaucccucaccguacccugcuuaugaacgaacugggggucccauuucauuugggaacaaaacaggugugcauugcuuggaguuccucuagcugucacgacggcagagccuggcuccacaucugcaucacuggcgaugacaggaaugcaaccgccuccuucauuuacgaugggaugcugguagacucaauaggaaguuggagcaagaacauccugcggacacaggagucugaauguguuugcauuaaugguaccugugcuguggucaugacggauggcuccgcaucagggguggccgacacucgcauccucuuuauaagagagggaaagauugugcauaucagccccuuaaguggcucugcucagcacaucgaggaaugcuccugcuauccuagguacccagauguccgguguguuugccgcgacaacuggaaagguagcaaccgaccggugauugauaucaauauggccgacuauucgauugacucuaacuacguauguuccgggcuggugggagauacacccagaaaugacgauaacucaaguagcuccaauugcagggacccuaacaaugagcggggcaacccaggcgucaaggggugggcguucgaugacggaaaugauguguggaugggucguaccauaaaccgcgacucuagaagcggcuacgaaacuuuuaggguuaucgggggauggacaaccgcaaauucaaagagucaaauuaaccgacaggugaucgucgauaauaacaauugguccggcuauagcgguguguucucuguagaggggaaaucauguaucaaccggugcuuuuacguugaacuuauuaagggccgcccccaggagccuagagugugguggacgaguaacagcauagucguguucuguggaaccuccggcacauaugggacuggaucuuggccagacggugccaauaucaacuuuaugcccauuuga

SEQ ID NO: 152462 - RNA, 1413 nt, Artificial Sequence
  derived and/or modified CDS sequence (opt3) from neuraminidase__InfluenzaA__AHJ57677
augaaccccaaucagaagauuaccugcaucagcgccacaggcaugacucuguccguggucucuaugcucauagggaucgcuaaccuuggacugaauauugguuugcacuacaaaguuucagacaguacgaacaucaauauuccuaacaugaaugagaccagcccaacaacuaccgugaucaacaaucauccgcaaaacaauuucacaaacauaaccaauaucauuguaaacaagaaugaagaggaaaacuuuuuaaaccugacuaaaccccuaugugaggucaauuccuggcacauccucucuaaggauaacgcaauuagaaucggcgaaaaugcccauauacuggugacaagggagccuuaucuuucgugcgacccacaggggugucggauguucgcgcugucacagggaaccacguugcgcggccagcacgcuaacgguacuauucaugaucgaagccccuuucgugcccucaucaguugggagauggggcaagcaccuuccccauacaaugccagaguggaaugcauuggauggucuagcaccuccugucacgacggcaucucaaggaugaguaucugcauuagcggccccaacaauaacgcuucugcaguugugugguaugggggacggccugucacagagauaccauccugggccgguaauauccugcgcacucaggaaucagagugugugugccacggcgggauuuguccgguaguuaugaccgauggacccgcuaacaauagagccgagacaaaaaucauauacuucaaggaaggcaagauucagaaaguggaggaacugaaggguaacgcgcagcauaucgaggaaugcagcuguuauggggcaaguggaaugaucaaaugcauuugcagggacaauuggaagggcgccaaccggccugucaucaccauugauccagagaugaugacgcacacuucuaaauaccucuguuccaagauauuaacagacaccagccgccccaaugauccuacuaacggcaacugcgacgcuccaaucacagggggaucgcccgauccgggugugaagggcuuugccuuccuggacggggaaaauucuuggcuuggacgaaccauuuccaaagauucaagaaguggcuaugagauguugaaggugccuaacgcagagacggacacccaaagcggugcuaucucccaucagaugaucgucaauaaccagaauuggucuggguacagcggcgccuuuauugacuacugggcgaaaaaggaauguuucaaccccugcuuuuauguugagcugauaaggggacggccaaaagaaucaagugugcuauggacauccaauagcaucguagcccucuguggcucucgugagcgccuggggucauggaguuggcacgauggagcagagauuaucuacuucaaguga

SEQ ID NO: 152463 - RNA, 1413 nt, Artificial Sequence
  derived and/or modified CDS sequence (opt3) from neuraminidase__InfluenzaA__AHJ57689
augaaccccaaucagaagauuaccugcaucagcgccacaggcaugacucuguccguggucucuaugcucauagggaucgcuaaccuuggacugaauauugguuugcacuacaaaguuucagacaguacgaacaucaauauuccuaagaugaacgagaccagcccaacaacuaccaucauaaauaaccauccgcaaaauaacuucacaaauaucaccaacauuaucgugaauaaaaacgaagaggaaaacuuuuuaaaucugacuaagccccuaugugagguaaacuccuggcacauucucucuaaagauaaugcaaucagaauaggcgaaaacgcccauauucuggugacaagggagccuuaucuuucgugcgacccacaggggugucggauguucgcgcugucacagggaaccacguugcgcggccagcacgcuaaugguacuauccaugaucgaagccccuuucgugcccucauuaguugggagauggggcaagcaccuuccccauacaacgccagagucgaaugcaucggauggucuagcaccuccugucacgacggcaucucaaggaugaguauuugcauaagcggccccaauaacaaugcuucugcagugguuugguaugggggacggccugugacagagaucccauccugggccgguaacauucugcgcacucaggaaucagagugugucugccacggcgggaucuguccggugguaaugaccgauggacccgcuaauaacagagccgagacaaagauaauuuacuucaaggaaggcaaaauccagaagaucgaggaacugaaagguaaugcgcagcauauugaggaaugcagcuguuauggggcaaguggaaugaucaagugcauuugcagggacaacuggaaaggcgccaaucggccuguuauaaccaucgauccagagaugaugacgcacacuucuaaguaccucuguuccaagauuuuaacagacaccagccgccccaacgauccuacuaauggcaacugcgacgcuccaaucacagggggaucgcccgauccgggugugaaaggcuuugccuuccuggacggggagaacucuuggcuuggacgaaccaucuccaaggauucaagaaguggcuaugaaauguugaaagucccuaaugcagagacggacacccaaagcggugcuauuucccaucagauaaucgugaacaaucagaacuggucuggguacagcggcgccuuuauugacuacugggcgaauaaggaauguuucaaccccugcuuuuauguggagcugaucaggggacggccaaaagaaucaaguguccuauggacauccaauagcauuguugcccucuguggcucucgugagcgccuggggucauggaguuggcacgauggagcagagaucauauacuucaaguga

SEQ ID NO: 152464 - RNA, 1413 nt, Artificial Sequence
  derived and/or modified CDS sequence (opt3) from neuraminidase__InfluenzaA__AHJ57700
augaaccccaaucagaagauuaccugcaucagcgccacaggcaugacucuguccguggucucucuccuuauagggaucgcuaaccugggauugaauauugguuuacacuacaaaguuucagacaguacgaacaucaauauuccuaacaugaaugagaccagcccaacaacuaccaucauaaacaaucauccgcaaaacaauuucacaaacaucaccaauauuaucaugaacaagaaugaagagggcaacuuucugaaccuaacuaaaccccucugugaaguaaauuccuggcacauucugucuaaggauaacgcaaucagaauaggggagaaugcccauauucuugugacaagggaaccuuaucugucgugcgacccacagggaugucggauguucgcguugucacagggcaccacgcuccgcggucgacacgcuaacgggacuauccaugaucguagccccuuuagagcccugauuaguugggagaugggacaggcaccuuccccauacaaugccaggguggagugcaucggcuggucuagcaccuccugucacgacggcaucucacggaugaguauuugcauaagcgggcccaacaauaacgcuucugcagucgugugguauggaggucgcccuguuacagaaaucccauccugggccggcaauauucugagaacucaagagucagaaugugugugccacgggggaaucuguccggucgugaugaccgauggccccgcuaacaauagggccgagacaaaaauaauuuacuucaaggaggguaagguacagaaaaucgaggagcucaaggggaacgcgcagcauaucgaagagugcagcuguuauggagcaaguggcaugauuaaaugcaucugccgggacaauuggaagggcgccaaccgcccuguuauuaccauagauccagaaaugaugacgcacacuucuaaauacuuauguuccaagauccugacagacaccagccgacccaaugauccuacuaacgggaacugcgacgcuccaauuacaggagguucgcccgauccgggcgugaagggguuugccuuccuugacggagaaaauucuugguugggcagaaccaucuccaaagauucaaggagugguuaugagaugcugaaggucccuaacgcagaaacggacacccagagcggggcuaucucccaucaaauuauagugaauaaccagaauuggucuggcuacagcggagccuuuaucgacuacugggcgaacaaagaguguuucaaucccugcuuuuauguggaacuaauucggggccguccaaaggagucaaguguccucuggacauccaacagcaucguugcccugugugggucucgcgaaagacuuggaucauggaguuggcacgauggugcagagauuaucuacuucaaauga

SEQ ID NO: 152465 - RNA, 1410 nt, Artificial Sequence
  derived and/or modified CDS sequence (opt3) from neuraminidase__InfluenzaA__AHJ57710
augaaccccaaucagaagaucauuaccauaggcagcgugucccugacaaucgccacugucucuuuccucaugcaaauugcuauccuuacgaccacaguuacucugcacuuuaaacauaacgagugcaauaugccuccaaagaaccaggugaugucaugugaaccgauuaucauagagagaaauaucaccgaaauuguauacuugaacaauacaaccguggagaaagaaaucugccccaaggucguggaguauaggaacuggaguaaaccucaguguaagauuacuggguucgcaccauuuagcaaggacaauuccauccgguuaucugccggaggugauauauggguuacacgcgagcccuacgugucgugcggccuggggaaauguuaucaguucgcgcuaggacaaggcaccacgcucgacaacucacacagcaaugguacuauucaugaucgaaucccucaccguacccugcuuaugaacgaacugggggucccauuucauuugggaacaaaacaggugugcauugcuuggaguuccucuagcugucacgacggcagagccuggcuccacaucugcaucacuggcgaugacaggaaugcaaccgccuccuucauuuacgaugggaugcugguagacucaauaaguagcuggucuaagaacauccugcggacacaggaguccgaauguguuugcauuaauggaaccugugcuguggucaugacggaugguucagcaagcggcguggccgacacucgcauccucuuuauaagagaggggaagauugugcauaucagucccuuaucuggauccgcucagcacaucgaggaaugcagcugcuauccuagguacccagauguccgguguguuugccgcgacaacuggaaaggcucgaaccgaccggugauuaauaucaacauggccgauuauucuauugacuccaauuacguauguucaggucuggugggggacacacccagaaacgaugacaauaguagcuccucuaacugcagggauccuaauaacgagcggggaaauccaggcgucaagggcugggcguucgacgaugggaacgacguguggaugggacguaccauaaaucgcgauagcagaucagguuacgaaacuuuuaggguuaucggcggguggacaaccgcaaacaguaagucccaaauuaaucgacaggugaucgucgacaacaauaacuggagcggauauucuggcguguucucaguagaggguaaaaguuguaucaaccggugcuuuuacguugaacuuauucgcgggagaccccaggagccuagggugugguggacgagcaauuccauagucguguucuguggcaccucuggaacauauggcacugggucguggccagauggagccaacaucaauuuuaugcccauuuga

SEQ ID NO: 152466 - RNA, 1410 nt, Artificial Sequence
  derived and/or modified CDS sequence (opt3) from neuraminidase__InfluenzaA__AHJ57734
augaaccccaaucagaagaucauuaccauaggcagcgugucccugacaaucgccacugucucuuuccucaugcaaauugcuauccuuacgaccacaguuacucugcacuuuaaacauaacgagugcaauaugccuccaaagaaccaggugaugucaugugaaccgauuaucauagagagaaauaucaccgaaauuguauacuugaacaauacaaccguggagaaagaaaucugccccaaggucgcagaguauaggaacuggaguaaaccucaguguaagauuacuggguucgccccauuuagcaaggacaauuccauccgguuaucugcgggaggugauauaugggugacacgcgagcccuacguuucgugcggccuggggaaauguuaucaguucgcucuaggacaaggcaccacgcucgacaacucacacagcaaugguacuauucaugaucgaaucccucaccguacccugcuuaugaacgaacugggggugccauuucauuugggaacaaagcaggucugcauugccuggaguuccucuagcugucacgacggcagagcauggcuccacaucugcaucacuggcgaugacaggaaugccaccgcuuccuucauuuacgaugggaugcugguggacucaauaggaaguuggagcaaaaacauccugcggacacaggagucugaauguguaugcauuaaugguaccugugcaguugugaugacggauggcuccgccucaggggucgcugacacucgcauccucuuuauaagagagggaaagauugugcauaucagccccuuaaguggcucugcccagcacaucgaggaaugcuccugcuauccuagguacccagaugugcggugugucugccgcgacaacuggaaagguagcaaccgaccgguuauuaauaucaacauggcggauuauucgauugacucuaauuacguguguuccgggcugguaggagacacacccagaaacgaugacaauucaaguagcuccaacugcagggauccuaauaacgagcggggcaauccaggcgugaaggggugggcauucgacgauggaaacgacgucuggaugggucguaccauaaaucgcgauucuagaagcggcuacgaaacuuuuagggugaucgggggauggacaaccgccaacucaaagagucaaauuaaucggcagguuaucguggacaacaauaacugguccggcuauagcggugucuucucuguggaggggaaaucauguaucaaccgaugcuuuuacguagaacuuauucgcggcagaccccaggagccuaggguuugguggacgaguaauagcauaguggucuucuguggaaccuccggcacauaugggacuggaucuuggccagauggugcuaacaucaauuuuaugcccauuuga

SEQ ID NO: 152467 - RNA, 1380 nt, Artificial Sequence
  derived and/or modified CDS sequence (opt3) from neuraminidase__InfluenzaA__AHJ57746
augaaccccaaucagaagaucauuaccauaggcagcguguccaucacaauugccgcugucugcuuccugaugcaaaucgcaauucucgccacuacgguuacccuucacuuuaaacagaacgaguguaauaucccuucuaagaaccaugugauaccaugcgaaccgaucauuaucgagagaaauauuacagaaguagagaucaggcccaaaguggcggaauaccgggacuggucaaagccucagugucagauaacuggguucgcuccauuuaguaaagauaacagcauucgccuguccgccggagguaauaucugggucacccgagagcccuaugugucuugcggcccugacaaguguuaccaauucgcauuggggcagggaacaaccuuaggcaacggucacucgaaugggacuauucaugauaagaucccacaccguacacugcuaaugaacgagcucggaguucccuuucaucugggcaccaaacaggugugcaucgccuggucaagcaguuccugucacgacggcagagcuuggcuucacgucugcgugacgggggaugacaggaaugcaacugccucuuucauuuaugauggaaugcugguagacagcauagcuuccuggucacagaacaucuugcggacccaagaaagugaguguguuugcauuaaugguacauguacuguggucaugaccgauggcagcgccucugggguggcggacacacgcauccucuuuauaagagaaggaaagauugugcauaucuccccucugucaggcagcgcacagcacaucgaggagugcaguugcuacccaaggcauucugauguccgguguguuugccgcgacaacuggaaagguuccaaucgaccggugguagauauuaacaugaccgacuauagcaucgacucgucuuacguguguuccgggcuggucggagauacgcccagaaacgacgauucaaguagcuccucuaauugcagggacccuaacaaugaacggggcaacccaggcgugaaggggugggccuucgaugacggagaugacguuuggaugggucguacuauuagccgcgauucaagaaguggcuaugagacauuuagggugauagggggauggaccacugcuaauuccaaaagccagaucaaccggcaggucauuguggacaauaacaauuggucuggcuacucagguguauucaguguugaaggcaagagcuguaucaaccgaugcuuuuacguggagcucauccgcgggagaccccaagaaacaagggucugguggaccuccaauucuauuguggucuucuguggaacgucgggcaccuaugggacaggaagcuggccugauggugccaacauaaauuuuaugccaaucuga

SEQ ID NO: 152468 - RNA, 1410 nt, Artificial Sequence
  derived and/or modified CDS sequence (opt3) from neuraminidase__InfluenzaA__AHJ57758
augaaccccaaucagaagaucauuaccgugggcagcgucucccuggccauagcuacaaucugccuccuuaugcaaauugcaauccuggccacuacgguuaccuugcacuucaaacagaacgaguguaauauuccuucuaagaaccaggugaugccaugcgaaccgaucauaaucgagagaaauauuacagaaguaguguacuuaaacaauacuaucauugagaaagaaaucugucccaaggucguggaguauaggaacuggucaaaaccucagugccaaauaaccggguuugcgccauucaguaaggacaauagcauucggcuguccgcuggaggugauaucuggguuacacgcgagcccuacgugucuuguucgccuucaaagugcuaucaguuugcccuaggccaggggaccacucucgacaacagccauaguaauggaacaauucacgaucgaaucccacaucguacccugcuuaugaacgaacugggcguccccuuccacuuggguacgaaacagguguguaucgcaugguccucuagcuccugccaugacgggagagccuggcuccacguauguauuacuggagaugacaggaaugcuaccgcaucauuuauauacaacggcaugcugguugauaguaucagcucuuggucccggaauauucugcgcacacaagagucagaaugcguguguaucaacggcacuugcaccgucauaaugacagacgggagcgccaguggaguggcugauacccggauucucuucaucagggaggguaacaucgugcacgucucuccuuuauccggcagcgcccagcauauugaggaaugcucguguuauccacgguacccggacguucgcugcgugugucgagauaauuggaaggggucuaacagacccguaguggacaucaauauggcggauuauuccauugacucacacuacgucugcaguggacuggugggcgacacgccuaggaacgaugacagcuccucuagcucaaauuguaaagauccaaacaaugagcgggguaaccccgggguuaagggaugggcauuugacgauggcaaugacguguggaugggccguacuauaagucgcgauuccagaagcggguacgaaacauucagggucaucggagguuggaccacugccaacucuaaaucacagauuaauagacaggugaucguagacaacaauaacuggaguggcuauagcgggguguuuuccguugagggaaagucuugcaucaaucgauguuucuacgucgaacuuauucgcggcagaccucaagagacaagggugugguggaccucgaacagcauagucguguuuugcgguacguccgggaccuauggcacaggaucauggccagauggcgcuaacaucaauuucaugcccauuuga

SEQ ID NO: 152469 - RNA, 1401 nt, Artificial Sequence
  derived and/or modified CDS sequence (opt3) from neuraminidase__InfluenzaA__AHJ57770
augaaccccaaucagaagaucauugccauaggcagcgugucccugaccaucgcuauuaucugcuuccucaugcaaauugcaauccuuacaacuacgaugacccugcacuuuaaacagaacgaguguucuaauccuucaaacaaucaggucguuccaugcgaaccgauaaucauugagagaaacacagugcauuugaauaguacuaccaucgaaaaggagauuugucccaaaguaguggaauacaagaacuggagcaaaccucagugccaaaucacaggguucgccccauuuuccaaggacaauucuauaagguuaucggcgggaggugauauuugggucacccgggagcccuaugugucauguagccugggcaagugcuaccaguucgcucuagggcagggaacuacacucaaaaacaagcacaguaauggcaccacgcaugaccgcaucccucaccgaacucugcuuaugaacgagcuggguguuccauuucauuuggggaccaaacagguguguauugccugguccucuagcuccugcuaugauggaaaggcauggcuccacaucugugucacaggcgacgauaaaaaugccacugcuucaaucauuuacgacggcaugcugguggauaguauagggagcuggucuaagaacauccugcguacccaagaauccgagugcguauguauuaauggaacaugcgcaguugugaugaccgacgguucagccagcggcaaggcugauacgagaauccucuucauaagggaagggaaaauuaucaacaucagucccuuaucuggauccgcccagcacgucgaggagugcagcuguuauccucgguacccagaagugcgcugcguguguagagacaacuggaagggcucgaauaggccgguccuguauauuaacauggcggauuacucuguugaguccucauacgugugcaguggucuuguaggggacacuccccggaaugaugacagcuccucuagcucaaacugucgcgacccuaauaacgaacgaggagcaccaggcgugaaaggcugggccuuugaugacgggaaugaugucuggaugggaagaacaaucaagaacgacaguagguccgguuaugagaccuuccgggugguuaauggcuggacuacagcuaacagcaaaucucagauuaaucgucaggugauagucgauucagaaaacuggaguggguacagcggaaucuuuuccguggagggcaagaauugcauuaaccgcuguuucuauguagaguugaucagagguaggccccaagaaccucggguuugguggaccucuaauucgaucauuguguuuugcgggacgagcggcaccuacggaacaggcuccuggccagacggggccaacauaaacuuccugcccaucuga

SEQ ID NO: 152470 - RNA, 1410 nt, Artificial Sequence
  derived and/or modified CDS sequence (opt3) from neuraminidase__InfluenzaA__AHJ57782
augaaccccaaucagaagaucauuauaaucggcagcguuucccugaccauugccacagucugcuuccucaugcaaaucgcuauucuugcaacuacgguuacccugcacuuuaaacagaacgaguguaauaucccuucuaagaaccaggugguaccaugcgaaccgauaaucauugagagaaauaucacagaaguggucuacuugaacaauacuaccauugagaaagaaaucugucccgccgugguugaguauaggaacuggucaaagccucagugccaaauaaaaggguucgcgccauuuaguaaggacaauagcauucgguuauccgcuggaggugauaugugggugacacgcgagcccuacgucucuuguucgccuucaaagugcuaucaguucgcccugggccaggggaccacucuagacaacaaucauagcaacggaacaauccacgaucguauuccacaucgaacccuccugaugaaugaacuuggcgugcccuuucaccuggguacgaaacagguauguaucgcauggaguuccucuagcugccaugacgggaaggccugguugcacguuugugugacuggagaugacagaaacgcuaccgcauccuucaucuacgauggcaugcucgucgacucaauuggcaguuggagccaaaauauacugaggacacaggagucugaaugcguguguaucaacgggacuugcaccguggucaugacagauggauccgccucagguauugcugacacccggauccuguuuguucgcgagggcaaaauagugcacauuagcccucucagugggucugcccagcauaucgaggaaugcuccuguuauccaagauacccggauguaaggugcgugugucgggacaacuggaagggaagcaaucgccccaucgucgauauuaacauggcggacuauucgaucgguucuuccuacgugugcucaggcuuaguuggggacacgccucgaaaugaugacagauucaguagcuccaacuguagggauccaaauucugagcggggaaaccccggcgugaaaggcugggcauuugacgauggggacgaugucuggaugggacguacuauuagccgcgacucaagaagugguuacgaaacauucagggugauaggcggguggaccacugccaauuccaagagccagaucaaccggcaaguaauuguugauaauaacaauuggucuggauauucaggcguguuuagugucgaggguaagagcugcaucaaccgauguuucuacguggaacugauccgcgggagaccucaggagacaagggucugguggaccuccaauucuauugugguguuuugcggcacgucgggaaccuauggcacagggagcuggccagacggagcuaacauaaauuucaugcccaucuga

SEQ ID NO: 152471 - RNA, 1410 nt, Artificial Sequence
  derived and/or modified CDS sequence (opt3) from neuraminidase__InfluenzaA__AHJ57794
augaaccccaaucagaagaucauuaccgugggcagcgucucccuggccauagcuacaaucugcuuccucaugcaaauugcaauccuugccacuacgguuacccugcacuuuaaacagaacgaguguaauauuccuucuaagaaccaggugaugccaugcgaaccgaucauaaucgagagaaauauuacagaaguaguguacuugaacaauacuaucauugagaaagaaaucugucccaaggucguggaguauaggaacuggucaaaaccucagugccaaauaaccggguucgcgccauuuaguaaggacaauagcauucgguuauccgcuggaggugauaucuggguuacacgcgagcccuacgugucuuguucgccuucaaagugcuaucaguucgcccugggccaggggaccacucuagacaacagccauaguaauggaacaauucacgaucgaaucccacaucguacccuccugaugaacgaacuuggcguccccuuucaccuggguacgaaacagguguguaucgcaugguccucuagcuccugccaugacgggagagccugguugcacguauguauuacuggagaugacaggaaugcuaccgcaucauucauauacaacggcaugcucguugauaguaucagcucuuggucccggaauauucugcgcacacaagagucagaaugcguguguaucaacggcacuugcaccgucauaaugacagacgggagcgccaguggaguggcugauacccggauucuguuuaucagggaggguaacaucgugcacgucucuccucucuccggcagcgcccagcauauugaggaaugcucguguuauccacgguacccggacguucgcugcgugugucgagauaauuggaaggggucuaacagacccguaguggacaucaauauggcggauuauuccauugacucacacuacgucugcaguggauuagugggcgacacgccuaggaacgaugacagcuccucuagcucaaauuguaaagauccaaacaaugagcgggguaaccccgggguuaagggaugggcaagugacgauggccaugacguguggaugggccguacuauagggcgcgauuccagaagcggauacgaaacauucagggucaucgguggcuggaccacugccaauucuaaaucacagauuaacagacaggugaucguagacaauaacaauuggaguggguauagcggaguguuuuccguugagggcaagucuugcaucaaccgauguuucuacgucgaacugauucgcgguagaccucaagagacaagggugugguggaccucgaauagcauagucguguuuugcgggacguccggcaccuauggaacaggcucauggccagauggggcuaacaucaacuucaugcccauuuga

SEQ ID NO: 152472 - RNA, 1413 nt, Artificial Sequence
  derived and/or modified CDS sequence (opt3) from neuraminidase__InfluenzaA__AHJ57806
augaaccccaaucagaagauuaccugcaucagcgccacaggcaugacucuguccguggucucucuccuuacggggauagcuaaccugggauugaauaucgguuuacacuacaaaguuucagacaguaccaacauuagcaucccuaauaugaacgaggcauccccaacaacuaccauuaucaauaaccauccgcaaaauaacuucacaaauauaaccaacaucauuaugaauaagaacgaagagggcaauuuucugaaccuaacuaaaccccucugugaagugaacucuuggcacauccugucgaaggauaaugccauuagaaucggggagaacgcgcauauacuuguaacaagggaaccuuaucugucaugcgacccacagggaugucggauguucgcuuugagccagggcaccacgcuccgcggucgacacgccaaugggacuauucaugaucguagucccuuuagagcacugaucuccugggagaugggacaggccccuucuccauacaacgcuaggguggagugcauuggcuggagcuccaccucaugucacgacggcaucagucggaugagcaucugcauuucugggcccaauaacaaugcauccgccgucgugugguauggaggucgcccuguuacagaaauaccaucaugggcuggcaacauccugagaacucaagagagcgaaugugugugccacgggggaauuuguccggucgugaugaccgauggccccgccaauaacagggcggagacaaaaaucauauacuucaaggaggguaagauucagaaaaucgaggaacucaaggggaaugcacagcauaucgaagagugcaguuguuauggagccucuggcaugauuaaaugcaucugccgggacaacuggaagggcgcuaaucgcccuguaauuaccauagauccagaaaugaugacgcacacuuccaaauacuuauguagcaagauccugacagacaccucgcgacccaacgauccuacuaaugggaacugcgacgccccaauuacaggagguucucccgauccgggcguuaagggguuugcauuccuugacggcaaaaacuccugguugggaagaaccaucucaaaggauaguaggagcgguuaugagaugcugaaagugccuaaugcugagacggacacccaguccggggccaucucucaucaaauuauagucaacaaucagaacuggagcggcuacucaggagcguuuaucgacuacugggccaauaaggaauguuucaaccccugcuuuuauguggagcuaauucggggccguccaaaagaaaguuccgugcucuggacaagcaauucuaucgucgcacugugugggucacgcgagagacuuggaaguuggagcuggcacgauggugcugaaauuaucuacuucaaguga

SEQ ID NO: 152473 - RNA, 1380 nt, Artificial Sequence
  derived and/or modified CDS sequence (opt3) from neuraminidase__InfluenzaA__AHJ57818
augaaccccaaucagaagauuaccugcaucagcgccacaggcgugacucuguccgucguuucucuccuuauagggaucgcuaaccugggauugaauauugguuuacacuacaaagugucagacaguccuacgaucaacauuccaaauaugaacgagaccaauccgaucacaacuaacauaaccaauaucauuguaaacaagaaugaagagggcacauuccugaaccuaaccaaaccccucugugaagugaauagcuggcauauccuguccaaggauaacgcaauuagaaucggggaggacgcccacauacuugucacuagggaaccuuaucugucuugcgauccacaaggaugucggauguuugcguugucgcagggcacaacccuccgcggucgacaugcuaaugggacgauucacgaccguucacccuucagagcccugaucagcugggagaugggacaggcaccuaguccauacaacacuaggguggagugcauuggcugguccucuaccagcugucaugauggcaucucccggaugucaaucugcauuagugggcccaacaauaacgccagcgcuguugugugguaucgcggaagaccugucacagaaauaccaucuugggcagguaauauccugaggacucaggaguccgaaugugugugccacaaaggcauuuguccgguaguuaugaccgacgggcccgccaacaauaaggcugccacaaagaucauauacuuuaaagagggaaagauucagaaaaucgaggaacuccaaggcaacgcgcagcacaucgaggaaugcucauguuauggugcagccgggaugauuaagugcgugugccgggauaauuggaaaggagcuaaccgcccuaucauuaccauagacccagagaugaugacgcauacuagcaaguacuuauguaguaagauccugacagauaccucucgacccaaugacccuacugauggcaacugcgacgccccaauuacaggcgggucccccgauccgggagucaaagguuucgcauuucuugaaggcgagaauagcugguuggggagaaccaucucgaaggacucuagguccggauaugagaugcugaaagugccuaacgcugaaacggacacccagucaggcgccaucagucaccaaaugauugugaauaaccagaauuggagcgguuacuccggggcguucauagauuacugggccaacaaggaguguuuuaaccccugcuucuaugucgaacuaauccggggccguccaaaagagucuagcguucucuggacaucaaauaguauuguggcacuguguggaucccgcgaaagacuuggcagcuggucuuggcaugacggggcugagaucauuuacuuuaaguga

SEQ ID NO: 152474 - RNA, 1410 nt, Artificial Sequence
  derived and/or modified CDS sequence (opt3) from neuraminidase__InfluenzaA__AHJ57830
augaaccccaaucagaagaucauuaccauaggcagcgugucccugacaaucgccacugucucuuuccucaugcaaauugcuauccuuacgaccacaguuacucugcacuuuaaacauaacgagugcaauaugccuccaaagaaccaggugaugucaugugaaccgauuaucauagagagaaauaucaccgaaauuguauacuugaacaauacaaccaucgagaaagaaauuugccccaagguggucgaguauaggaacuggaguaaaccucaguguaagaucacuggguucgcaccauuuagcaaggacaauuccauacgguuaucugccggaggugauauuugggugacacgcgagcccuacguuucgugcggccuggggaaauguuaucaguucgcgcuaggacaaggcaccacgcucgacaacucacacagcaaugguacuauccaugaucguauuccucaccgaacccugcuuaugaacgaacugggggugccauuucauuugggaacaaagcaggucugcaucgcuuggaguuccucuagcugucacgacggcagagccuggcuccacaucugcauuacuggcgaugacaggaaugcaaccgccuccuucauauacgaugggaugcugguggacucaaucggaaguuggagcaaaaacauucugcggacacaggagucugaauguguaugcaucaaugguaccugugcuguugugaugacggauggcuccgcaucaggggucgccgacacucgcauacucuuuauuagagagggaaagaucgugcauaucagccccuuaaguggcucugcucagcacauugaggaaugcuccugcuauccuagguacccagaugugcggugugucugccgcgacaacuggaaagguagcaaccgaccgguuaucgauauuaauauggccgacuauucgauagacucuaacuacguguguuccgggcugguaggagauacacccagaaaugacgauaacucaaguagcuccaauugcagggacccuaacaaugagcggggcaacccaggcgugaaggggugggcguucgaugacggaaaugaugucuggaugggucguaccaucaaccgcgacucuagaagcggcuacgaaacuuuuagggugauugggggauggacaaccgcaaauucaaagagucaaaucaaccggcagguuaucguggauaauaacaauugguccggcuauagcggugucuucucuguggaggggaaaucauguauuaaccgaugcuuuuacguagaacuuauacgcggcagaccccaggagccuaggguuugguggacgaguaacagcaucguggucuucuguggaaccuccggcacauaugggacuggaucuuggccagacggugccaauauuaacuuuaugcccaucuga

SEQ ID NO: 152475 - RNA, 1413 nt, Artificial Sequence
  derived and/or modified CDS sequence (opt3) from neuraminidase__InfluenzaA__AHJ57842
augaaccccaaucagaagauuaccugcaucagcgccacaggcaugacucuguccguggucucuaugcucauagggaucgcuaaccuuggacugaauauugguuugcacuacaaaguuucagacaguacgaacaucaauauuccuaagaugaacgagaccaauccaacaacuaccaucauaaacaaucauccgcaaaacaauuucacaaacaucaccaauauuaucgugaacaaaaaugaagaggaaaacuuuuuaaaccugacuaagccccuaugugagguaaauagcuggcacauucucuccaaagauaacgcaaucagaauaggcgaaaaugcccauauucuggugacaagggagccuuaucuuucuugcgacccacaggggugucggauguucgcgcugucgcagggaaccacgauccgcggccagcacgcuaacgguacuauucaugaucgaucacccuuucgugccuugaucagcugggagauggggcaagcaccuaguccauacaaugccagagucgaaugcaucggaugguccucuaccagcugucacgacggcauuuccaggaugucaauaugcaucaguggccccaacaauaacgcuagcgcagugguuugguaugggggacggccugugacagagauuccaucuugggccgguaauauccuccgcacucaggaauccgagugugucugccacggcgggauauguccggugguaaugaccgauggacccgcuaacaauagagccgagacaaagauuaucuacuucaaggaaggcaaaauccagaagauugaggaacugaaagguaacgcgcagcauaucgaggaaugcucauguuauggggcaagcggaaugauuaagugcauaugcagggacaauuggaaaggcgccaaccggccuguuaucaccauugauccagagaugaugacgcacacuucuaaguaccuguguucuaagauccucacagacaccucccgccccaaugauccuacuaacggcaacugcgacgcuccaaucacagggggaagcucggaucccggugugaaaggcuuugccuucuuagacggggagaauaguuggcugggacgaaccauuuccaaggauucaagaaguggcuaugaaaugcuuaaagucccgaacgcagagacggacacccaaagcggugcuauaucccaucagaucauugugaauaaccagaauuggucuggguacagcggcgccuuuaucgacuacugggcgaacaaggaauguuucaauccuugcuuuuauguggaguugauuaggggacggcccaaagaaucaaguguccuguggacauccaacagcaucguugcccuauguggcucucgugagcgccucgggucauggaguuggcacgauggagcagagauaaucuacuucaaguga

SEQ ID NO: 152476 - RNA, 1413 nt, Artificial Sequence
  derived and/or modified CDS sequence (opt3) from neuraminidase__InfluenzaA__AHJ57853
augaaccccaaucagaagauuaccugcaucagcgccacaggcaugacucuguccguggucucucuccuuauagggaucgcuaaccugggauugaauguugguuuacacuacaaagugaacgacccuacgaauauuaacaucccaaauaugaacgagaccucaccgacaacuaccauuaucaauaaccauccccaaaauaacuucacaaauauaaccaacaucauuguaaauaagaacgaagaggaaaacuuucugaaucuaacuaaaccucucugugaggugaacaguuggcacauccugagcaaggauaaugcaauuagaaucggcgaaaacgcccauauacuugucacaagggagccauaucuguccugcgacccccaggggugucggauguucgcguugucucagggaaccacgcuccgcggccagcacgcuaaugguacuauucaugaucgaucgccuuuucgugcccugaucucaugggagauggggcaagcaccaagccccuacaacgccagaguggaaugcauuggauggaguuccaccucuugucacgacggcaucagcaggauguccaucugcauuucaggcccuaauaacaaugcuagugcaguugugugguaugggggacggccagucacagagauaccgagcugggccgguaacauccugcgcacucaggaaucugagugugugugccacggcgggauuugucccguaguuaugaccgauggaccugcuaauaacagagccgagacaaaaaucauauacuucaaggaaggcaagauucagaaaaucgaggaacucaaggguaaugcgcagcauaucgaggaaugcuccuguuauggggcaucaggaaugauuaaaugcaucugcagggacaacuggaagggcgccaaucggccagugauuaccauagaucccgagaugaugacgcacacuagcaaauacuuauguaguaagauccugacagacaccucucgcccuaacgauccaacuaacggcaauugcgacgcucccauuacagggggauccccggauccuggugucaagggcuuugccuuccuugacggggagaacagcugguugggacgaaccaucucgaaagauucuagauccggcuaugaaaugcugaaggugcccaaugcagagacggacacccaaucaggugcuaucagucaucagaugauugugaacaaucagaacuggagcggguacuccggcgccuuuauagacuacugggcgaauaaagaauguuucaacccaugcuuuuaugucgagcuaaucaggggacggccuaaggaaucuagcguucucuggacaucaaauaguauuguggcccuguguggcucccgugagcgccuugggagcuggucuuggcacgauggagcagagaucauuuacuucaaauga

SEQ ID NO: 152477 - RNA, 1413 nt, Artificial Sequence
  derived and/or modified CDS sequence (opt3) from neuraminidase__InfluenzaA__AHJ57865
augaaccccaaucagaagauuaccugcaucagcgccacaggcaugacucuguccguggucucuaugcucauagggaucgcuaaccuuggacugaauauugguuugcacuacaaaguuucagacaguacgaacaucaauauuccuaagaugaacgagaccaauccaacaacuaccaucauaaacaaucauccgcaaaacaauuucacaaacaucaccaauauuaucgugaacaaaaaugaagaggaaaacuuuuuaaaccugacuaagccccuaugugagguaaauagcuggcacauucucuccaaagauaacgcaaucagaauaggcgaaaaugcccauauucuggugacaagggagccuuaucuuucuugcgacccacaggggugucggauguucgcgcugucgcagggaaccacguugcgcggccgacacgcuaacgguacuauccaugaucguucacccuuuagagcccucauuagcugggagauggggcaggcaccuaguccauacaaugccagggucgaaugcaucggaugguccucuaccagcugucacgacggcaucucccggaugucaauuugcauaaguggccccaacaauaacgcuagcgcagugguuugguaugggggacgcccugugacagagaucccaucuugggccgguaauauucugagaacucaagaauccgagugugucugccacggcgggaucuguccggugguaaugaccgauggacccgcuaacaauagggccgagacaaagauaauuuacuucaaggaaggcaaaauccagaagaucgaggaacugaaagguaacgcgcagcauauugaggaaugcucauguuauggggcaagcggaaugaucaagugcauuugccgggacaauuggaaaggcgccaaccgcccuguuauaaccaucgauccagagaugaugacgcacacuucgaaguaccucuguucuaagauuuuaacagacaccucccgacccaaugauccuacuaacggcaacugcgacgcuccaaucacagggggaagccccgauccgggugugaaaggcuuugccuuccuggacggggagaauaguuggcuuggaagaaccaucucuaaggauuccaggucaggcuaugaaauguugaaagucccuaacgcagagacggacacccagaguggugcuauuagccaucaaaugauagugaauaaccagaauugguccggguacucuggcgccuuuaucgacuacugggcgaacaaggaauguuucaaucccugcuuuuauguggagcugauucggggacguccaaaagaaagcucaguccuauggacaaguaacuccaucguugcccucuguggcagccgcgagagacuggggucuuggucauggcacgauggagcagagauuaucuacuucaaguga

SEQ ID NO: 152478 - RNA, 1413 nt, Artificial Sequence
  derived and/or modified CDS sequence (opt3) from neuraminidase__InfluenzaA__AHJ57876
augaaccccaaucagaagauuaccugcaucagcgccacaggcaugacucuguccguggucucucuccuuauagggaucgcuaaccugggauugaauauugguuuacacuacaaaguuucagacaguacgaacaucaauauuccuaacaugaaugagaccagcccaacaacuaccaucauaaacaaucauccgcaaaacaauuucacaaacaucaccaauauuaucaugaacaagaaugaagagggcaacuuucugaaccuaacuaaaccccucugugaaguaaauuccuggcacauucugucuaaggauaacgcaaucagaauaggggagaaugcccauauucuugugacaagggaaccuuaucugucgugcgacccacagggaugucggauguucgcguugucacagggcaccacgcuccgcggucgacacgcuaacgggacuauccaugaucguagccccuuuagagcccugauuaguugggagaugggacaggcaccuuccccauacaaugccaggguggagugcaucggcuggucuagcaccuccugucacgacggcaaaucacggaugaguaucugcauuagcgggcccaacaauaacgcuucugcagucgugugguauggaggucgcccuauaacagaaaucccauccugggccggcaauauucugagaacucaagagucagaauguguuugccacgggggaaucuguccgguggucaugaccgauggccccgcuaacaauagggccgagacaaagauaauuuacuucaaggaggguaaagugcagaagaucgaggagcucaaagggaacgcgcagcauaucgaagagugcagcuguuauggagcaaguggcaugauuaagugcaucugccgggacaauuggaaaggcgccaaccgcccuguaauuaccauagauccagaaaugaugacgcacacuucuaaguacuuauguuccaagauccugacagacaccagccgacccaaugauccuacuaacgggaacugcgacgcuccaauuacaggagguucgcccgauccgggcguuaaaggguuugccuuccuugacggagaaaauucuugguugggcagaaccaucuccaaggauucaaggagugguuaugagaugcugaaagugccuaacgcagaaacggacacccagagcggggcuaucucccaucaaauuauagucaauaaccagaauuggucuggcuacagcggagccuuuaucgacuacugggcgaacaaggaguguuucaaucccugcuuuuauguggaacuaauucggggccguccaaaagagucaagugugcucuggacauccaacagcaucgucgcccugugugggucucgcgaaagacuuggaucauggaguuggcacgauggugcagagauuaucuacuucaaguga

SEQ ID NO: 152479 - RNA, 1413 nt, Artificial Sequence
  derived and/or modified CDS sequence (opt3) from neuraminidase__InfluenzaA__AHJ57888
augaaccccaaucagaagauuaccugcaucagcgccacaggcaugacucuguccguggucucuaugcucauagggaucgcuaaccuuggacugaauauugguuugcacuacaaaguuucagacaguacgaacaucaauauuccuaacaugaaugagaccagcccaacaacuaccaucacaaacaaucauccgcaaaacaauuucaccaacauaacuaauaucauuguguccaagaacgaagaggaaaacuuuuuaaaucugacaaaaccccuaugugagguaaacucuuggcacauccucucgaaggauaaugcaauuagaaucggcgaaaacgcccauauacuggugaccagggagccuuaucuuucaugcgacccacaggggugucggauguucgcgcugagccagggaacgacuuugcgcggccagcacgcuaaugguaccauucaugaucgaagucccuuucgugcccucaucuccugggagauggggcaagcaccuucuccauacaacgccagagucgaaugcauuggauggagcuccacaucaugucacgacggcaucaguaggaugagcaucugcauuucuggccccaauaacaaugcuuccgcagugguuugguaugggggacggccugugacugagauaccaucaugggccgguaacauccugcgcacccaggaaagcgagugugucugccacggcgggauuuguccggugguaaugacagauggacccgcuaauaacagagccgagaccaaaaucauauacuucaaggaaggcaagauucagaaaaucgaggaacugaaggguaaugcgcagcauaucgaggaaugcaguuguuauggggcaucuggaaugauuaaaugcaucugcagggacaacuggaagggcgccaaucggccuguuauuacgauagauccagagaugaugacucacacauccaaauaccucuguagcaagaucuuaaccgacacuucgcgccccaacgauccuacaaauggcaacugcgacgcuccaauuaccgggggaucucccgauccgggugugaagggcuuugccuuccuggacggggagaacuccuggcuuggacgaacgaucucaaaagauaguagaagcggcuaugaaauguugaaggucccuaaugcagagaccgacacacaauccggugcuaucucucaucagaugauugugaacaaucagaacuggagcggguacucaggcgccuuuauagacuacugggcgaauaaagaauguuucaaccccugcuuuuauguggagcugaucaggggacggccaaaggaaaguuccguccuauggacuagcaauucuauuguugcccucuguggcucacgugagcgccuggggaguuggagcuggcacgauggagcagagaucauuuacuucaaauga

SEQ ID NO: 152480 - RNA, 1413 nt, Artificial Sequence
  derived and/or modified CDS sequence (opt3) from neuraminidase__InfluenzaA__AHJ57900
augaaccccaaucagaagauuaccugcaucagcgccacaggcaugacucuguccguggucucucuccuuauagggaucgcuaaccugggauugaauauugguuuacacuacaaaguuucagacaguacgaacaucaauauuccuaacaugaaugagaccagcccaacagcaacuaucauaaacaaucauccgcaaaacaauuucaccaacaucacaaauauuaucgugaacaagaaugaagaggaaaacuuuuucaaccuggccaaaccccuaugugagguaaauuccuggcacauucucucuaaggauaacgcgaucagaauaggcgaaaaugcucauauucuggugaccagggagccuuaucuuucgugcgacccacaggggugucggauguuugcccugucacagggaacuacauugcgcggccagcacgcaaacgguaccauccaugaucgaagccccuuccgugcccucauuaguugggagauggggcaagcuccuuccccauacaaugcaagagucgaaugcaucggauggucuagcacguccugucacgacggcaucucaaggaugaguauuugcauaagcggccccaacaauaacgccucugcugugguuugguaugggggacggccugugacugagaucccauccugggccgguaauauucugcgcacccaggaaucagagugugucugccacggcgggaucuguccggugguaaugacagauggacccgcgaacaauagagcagagacuaaaauaauuuacuuuaaggaaggcaagauccagaaaaucgaggaccugaaggguaacgcccagcauauugaagagugcagcuguuauggggcuaguggaaugaucaaaugcauuugcagggauaauuggaagggcgccaaccggccuguuauaaccaucgacccagaaaugaugacacacaccucuaaauaccucuguuccaagauuuuaacggauacuagccgccccaaugacccuacaaacggcaacugcgaugcaccaaucaccgggggaucgcccgacccgggugugaagggcuucgcuuuucuggauggggaaaauucuuggcuuggacgaacuaucuccaaagacucaagaaguggcuaugagauguugaaggucccuaacgccgagacagacacccaaagcggugcgauuucccaucagaugauagugaauaaccagaauuggucuggguacagcggcgccuucaucgauuacugggcaaacaaagaguguuuuaaucccugcuucuauguggaacugauuaggggacggccaaaggagucaaguguccuauggacguccaacagcaucguugcucucuguggcucucgugaacgccuggggucauggaguuggcacgacggagccgagauuaucuacuuuaaauga

SEQ ID NO: 152481 - RNA, 1413 nt, Artificial Sequence
  derived and/or modified CDS sequence (opt3) from neuraminidase__InfluenzaA__AHJ57911
augaaccccaaucagaagauuaccugcaucagcgccacaggcgugacucuguccgucguuucucuccuuauagggaucgcuaaccugggauugaauauugguuuacacuacaaagugucagacaguagcaacaucaauauuccuaacaugaaugagacgaacccaaccacaacuaucauaaauaaccauacccaaaauaacuucaagaauaucacaaacauuaucguaaauaaaaacgaagagggcauuuuucugaaccuaaccaagccgcucugugaagucaauuccuggcacauccugucuaaagauaacgcaauaagaauuggggaggacgcccauauccuugugacuagggaacccuaucugucgugcgauccucagggaugucggauguucgcguugucacagggcacaacccuccgcggucgacacgcuaaugggacgauucaugaccguagcccauuuagagcccugaucaguugggagaugggacaggcacccuccccuuacaacgccaggguggagugcaucggcuggucuagcacuuccugucacgauggcauuucacggaugaguauaugcaucagcgggccaaauaacaaugcuucugcaguugugugguaucgcggaagacccgucaccgaaauuccuuccugggccgguaacauccugaggacacaagagucagaaugugugugccacaagggcauauguccaguaguuaugacugacgggccggcuaauaaccgggccgcgaccaagauuaucuacuucaaagagggaaagauccagaaaauugaggaacucaagggcaaugcacagcauaucgaggaaugcagcuguuauggugccgcugggaugauuaaaugcauaugccgcgauaacuggcgaggagccaauagacccgugaucacaauugacccugagaugaugacccacacgaguaaguacuuauguucuaagauccugacugauacauccaggccaaacgaccccaccaauggcaacugcgaugcaccuaucacuggcgggagcccagaccccggagucaaagguuuugcuuuccuugauggcgaaaacucgugguuggggcggacaauuucuaaggacucccguucaggauaugagaugcugaaagugccgaaugccgagaccgacacgcagaguggcagcaccuccuaccaaauaaucgugaacaaucagaacuggucugguuacagcggggcguuuauugauuauugggccaauaaggaauguuucaacccuugcuuuuacgucgagcuaauccgcggcagacccaaagaaucaaguguucucuggacauccaauagcauuguggcacuguguggaucuagggagcggcuuggcucauggaguuggcaugacggggcugaaaucauauauuucaaguga

SEQ ID NO: 152482 - RNA, 1410 nt, Artificial Sequence
  derived and/or modified CDS sequence (opt3) from neuraminidase__InfluenzaA__AHJ57923
augaaccccaaucagaagaucauuaccgugggcagcgucucccuggccauagcuacaaucugcuuccucaugcaaauugcaauccuugccacuacgguuacccugcacuuuaaacagaacgaguguaauauuccuucuaagaaccaggugaugccaugcgaaccgaucauaaucgagagaaauauuacagaaguaguguacuugaacaauacuaucauugagaaagaaaucugucccaaggucguggaguauaggaacuggucaaaaccucagugccaaauaaccggguucgcgccauuuaguaaggacaauagcauucgguuauccgcuggaggugauaucuggguuacacgcgagcccuacgugucuuguucgccuucaaagugcuaucaguucgcccugggccaggggaccacucuagacaacagccauaguaauggaacaauucacgaucgaaucccacaucguacccuccugaugaacgaacuuggcguccccuuucaccuggguacgaaacagguguguaucgcaugguccucuagcuccugccaugacgggagagccugguugcacguauguauuacuggagaugacaggaaugcuaccgcaucauucauauacaacggcaugcucguugauaguaucagcucuuggucccggaauauucugcgcacacaagagucagaaugcguguguaucaacggcacuugcaccgucauaaugacagacgggagcgccaguggaguggcugauacccggauucuguuuaucagggaggguaagaucgugcacgucucuccucucuccggcagcgcccagcauauugaggaaugcucguguuauccacgguacccggacguucgcugcgugugucgagauaacuggaaagggucuaauagacccguaguggacaucaacauggcggauuauuccauugacucacacuacgucugcaguggauuagugggcgacacgccuaggaaugaugacagcuccucuagcucaaacuguaaggauccaaauaacgagcgggguaaucccgggguuaaaggaugggcauucgacgauggcaacgacguguggaugggccguacuauaagucgcgauuccagaagcggguacgaaacauuuagggucaucggagguuggaccacugccaauucuaagucacagauuaacagacaggugaucguagacaauaacaauuggaguggcuauagcgggguuuucuccguggagggaaagucuugcaucaaccgauguuuuuacgucgaacugauucgcggcagaccucaagagacaagggugugguggaccucgaauagcauagucguguucugcgguacguccgggaccuauggcacaggaucauggccagauggcgcuaacaucaacuuuaugcccauuuga

SEQ ID NO: 152483 - RNA, 1380 nt, Artificial Sequence
  derived and/or modified CDS sequence (opt3) from neuraminidase__InfluenzaA__AHJ57935
augaaccccaaucagaagaucacuugcauuagcgccacaggcgugacucuguccgucguuucucuccuuauagggaucgcuaaccugggauugaauauugguuuacacuacaaagugucagacaguccuacgaucaacauuccaaauaugaacgagaccaauccgacaacuaccaacaucacaaauauaaucguaaacaagaaugaagagggcaccuuccugaaccuaacuaaaccccucugugaagugaauagcuggcauauucuguccaaggauaacgcaaucagaauuggggaggacgcccacauccuugucacaagggaaccuuaucugucuugcgauccacaaggaugucggauguuugcguugucgcagggcaccacgcuccgcggucgacaugcuaaugggacuauacacgaccguucacccuucagagcccugauuagcugggagaugggacaggcaccuaguccauacaacaccaggguggagugcaucggcugguccucuacaagcugucaugauggcauuucccggaugucaaucugcaucagugggcccaacaauaacgccagcgcuguugugugguaucgcggaagaccugucacugaaauuccaucuugggcagguaauauacugaggacccaggaguccgaaugugugugccacaaaggcaucuguccgguaguuaugacagacgggcccgccaacaauaaggcugccaccaagauuaucuacuuuaaagagggaaagauacagaaaauugaggaacuccaaggcaacgcgcagcacaucgaggaaugcucauguuauggugcagccgggaugaucaagugcgugugccgggauaauuggaaaggagcuaaccgcccuauuaucacgauugacccagagaugaugacucauacaagcaaguacuuauguaguaagauacugaccgauacuucucgacccaaugacccuacaaacggcaauugcgaugccccaaucaccggcgggucccccgacccgggagucaaagguuucgcauuucuugauggcgaaaacagcugguuggggagaacgauuucgaaggacucuagguccggauaugagaugcugaaagugccuaaugcucagaccgacacacaaucaggccccaccaguuaccagcuaaucgugaacaaucagaacuggagcgguuacuccggggccuucaucgauuauugggcgaacaaggaguguuuuaauccaugcuucuacgucgaacucauucggggccguccuaaagagucuaacguucuguggaccagcaauucaaugguggcccuuuguggaagucgcgaaagacugggcuccuggagcuggcacgacgaugcagagauaaucuauuuuaaguga

SEQ ID NO: 152484 - RNA, 1410 nt, Artificial Sequence
  derived and/or modified CDS sequence (opt3) from neuraminidase__InfluenzaA__AHJ57946
augaaccccaaucagaagaucauuaccauaggcagcgugucccugacaaucgccacugucucuuuccucaugcaaauugcuauccuuacgaccacaguuacucugcacuuuaaacauaacgagugcaauaugccuccaaagaaccaggugaugucaugugaaccgauuaucauagagagaaauaucaccgaaauuguauacuugaacaauacaaccguggagaaagaaaucugccccaaggucguggaguauaggaacuggaguaaaccucaguguaagauuacuggguucgcaccauuuagcaaggacaauuccauccgguuaucugccggaggugauauauggguuacacgcgagcccuacgugucgugcggccuggggaaauguuaucaguucgcgcuaggacaaggcaccacgcucgacaacucacacagcaaugguacuauucaugaucgaaucccucaccguacccugcuuaugaacgaacugggggucccauuucauuugggaacaaaacaggugugcauugcuuggaguuccucuagcugucacgacggcagagccuggcuccacaucugcaucacuggcgaugacaggaaugcaaccgccuccuucauuuacgaugggaugcugguagacucaauaggaaguuggagcaagaacauccugcggacacaggagucugaauguguuugcauuaaugguaccugugcuguggucaugacggauggcuccgcaucagggguggccgacacucgcauccucuuuauaagagagggaaagauugugcauaucagccccuuaaguggcucugcucagcacaucgaggaaugcuccugcuauccuagguacccagauguccgguguguuugccgcgacaacuggaaagguagcaaccgaccggugauugauaucaauauggccgacuauucgauugacucucauuacguauguuccgggcuggugggagauacacccagaaacgacgauaauucaaguagcuccaacugcagggacccuaauaacgagcggggcaauccaggcgucaaggggugggcguucgaugacggaaacgauguguggaugggucguaccauaaaucgcgacucuagaagcggcuacgaaacuuuuaggguuaucgggggauggacaaccgcaaacucaaagagucaaauuaaucgacaggugaucgucgauaacaauaacugguccggcuauagcgguguguucucuguagaggggaaaucauguaucaaucggugcuuuuacguugaacuuauucgcggcagaccccaggagccuagggugugguggacgaguaacagcauagucguguucuguggaaccuccggcacauaugggacuggaucuuggccagacggugccaacaucaauuuuaugcccauuuga

SEQ ID NO: 152485 - RNA, 1410 nt, Artificial Sequence
  derived and/or modified CDS sequence (opt3) from neuraminidase__InfluenzaA__AHJ57957
augaaccccaaucagaagaucauuaccauaggcagcgugucccugacaaucgccacugucucuuuccucaugcaaauugcuauccuuacgaccacaguuacucugcacuuuaaacagaacgagugcaauaugccuccaaagaaccaggugaugucaugugaaccgauuaucauagagagaaauaucaccgaaauuguauacuugaacaauacaaccguggagaaagaaaucugccccaaggucguggaguauaggaacuggaguaaaccucaguguaagauuacuggguucgcaccauuuagcaaggacaauuccauccgguuaucugccggaggugauauauggguuacacgcgagcccuacgugucgugcggccuggggaaauguuaucaauucgcgcuaggacagggcaccacgcucgacaacucacauagcaaugguacuauucacgaucgaaucccucaucguacccugcuuaugaacgaacugggggucccauuucacuugggaacaaaacaggugugcauugcuuggaguuccucuagcugucaugacggcagagccuggcuccacaucugcaucacuggcgaugacaggaaugcaaccgccuccuucauuuacgaugggaugcugguagacucaauaggaaguuggagcaagaacauccugcggacacaggagucugaauguguuugcauuaaugguaccugugcuguggucaugacggauggcuccgcaucagggguggccgacacucgcauccucuuuauaagagagggaaagauugugcacaucagccccuuaaguggcucugcucaacauaucgaggaaugcuccugcuauccuagguacccagauguccgguguguuugccgcgacaacuggaaagguagcaaccgaccggugauugauaucaauauggccgacuauucgauugacucuaacuacguauguuccgggcuggugggagauacacccagaaaugacgauaacucaaguagcuccaauugcagggacccuaacaaugagcggggcaacccaggcgucaaggggugggcguucgauuacggaaaugacguguggaugggucguaccauaaaccgcgauucuagaagcggcuaugaaacuuuuaggguuaucgggggauggacaaccgcaaauucaaagagucagauuaaccgacaggugaucgucgacaauaacaauugguccggcuacagcgguguguucucuguagaggggaaaucauguaucaaccggugcuuuuauguugaacuuauucgcggcagaccccaggagccuagggugugguggacgaguaacagcauagucguguucuguggaaccuccggcacauacgggacuggaucuuggccagauggugccaauaucaacuuuaugcccauuuga

SEQ ID NO: 152486 - RNA, 1410 nt, Artificial Sequence
  derived and/or modified CDS sequence (opt3) from neuraminidase__InfluenzaA__AHJ57968
augaaccccaaucagaagaucauuaccgugggcagcgucucccuggccauagcuacaaucugccuccuuaugcaaauugcaauccuggccacuacgguuaccuugcacuucaaacagaacgaguguaauauuccuucuaagaaccaggugaugccaugcgaaccgaucauaaucgagagaaauauuacagaaguaguguacuuaaacaauacuaucauugagaaagaaaucugucccaaggucguggaguauaggaacuggucaaaaccucagugccaaauaaccggguuugcgccauucaguaaggacaauagcauucggcuguccgcuggaggugauaucuggguuacacgcgagcccuacgugucuuguucgccuucaaagugcuaucaguuugcccuaggccaggggaccacucucgacaacagccauaguaauggaacaauucacgaucgaaucccacaucguacccugcuuaugaacgaacugggcguccccuuccacuuggguacgaaacagguguguaucgcaugguccucuagcuccugccaugacgggagagccuggcuccacguauguauuacuggagaugacaggaaugcuaccgcaucauuuauauacaacggcaugcugguugauaguaucagcucuuggucccggaauauucugcgcacacaagagucagaaugcguguguaucaacggcacuugcaccgucauaaugacagacgggagcgccaguggaguggcugauaccaggauucucuucaucagagaggguaagaucgugcacauuucuccuuuauccggcagcgcccagcauaucgaggaaugcucguguuauccacgguacccggacguccgcugcguuugucgagauaacuggaaagggucuaauagacccgugauugacauaaacauggcggauuauuccaucgacucaaauuacguaugcaguggacuggugggcgacacgccuaggaacgaugacaauagcuccucuagcaacugucgggauccaaauaacgagcgugguaaucccggggucaagggaugggcauuugacgauggcaacgacguguggaugggccgcacuauuaauagagauucaaggaguggguacgaaacauuccggguuaucggagguuggaccacugccaacuccaaaagccagaucaaucgacaggugauugucgacaacaauaacuggucuggcuauucagggguguuuaguguagagggaaagagcugcauaaaccgcuguuucuacguugaacuuaucagaggcaggccucaagagacacgggugugguggaccuccaauucuauugucguguuuugcgguacgucguguaccuaugggacaggcagcuggccagauggagcuaacaucaauuucaugcccauuuga

SEQ ID NO: 152487 - RNA, 1413 nt, Artificial Sequence
  derived and/or modified CDS sequence (opt3) from neuraminidase__InfluenzaA__AHJ57980
augaaccccaaucagaagaauaccugcaucagcgccauuggcaugacacuguccguggucucucuccuuauagggguugcugaccugggauugaacaucgguuuacacuacaaagugucagauaguagcaacauuaauaucccuaacaugaaugagacuaacccaacgaccacaauuaucaauaacaauccgcaaaacaauuucacuaacauaaccaauaucauuguaaacaagaacgaagaggaaaaauuucugaaucuaacaaagccccucugugaggugaacuccuggcauauccugucuaaagacaaugcaauuagaaucggcgaagaugcccacauacuugucaccagggagccuuaucugucgugcgacccacaggggugucggauguucgcguugucacagggaacuacacuccgcggccgacaugcuaacgguaccauucacgaucguagccccuuuagagcccugaucaguugggagauggggcaggcaccuuccccauacaaugccaggguggaaugcauuggauggucuagcacguccugucaugacggcaucucacggaugaguaucugcauuagcggccccaacaauaacgcuucugcaguugugugguaugggggacgcccugucacugagauaccauccugggccgguaauauccugagaacccaagaaucagagugugugugccacaagggcauuuguccgguaguuaugacagaugggcccgcuaacaauagggccgcgacuaagaucauauacuucaaagagggaaagauucagaaaaucgaggaacucaagggcaacgcacagcacaucgaagagugcagcuguuauggugccgcugggaugauuaaaugcaucugccgggacaauuggaagggagccaaccgcccugugauuaccauagauccagaaaugaugacacauaccaguaaguacuuauguucuaaaauccugacggacacuucccgacccaaugauccuacaagcggcaacugcgacgcaccaauuaccggcgggucgcccgauccgggagucaaggguuuugcuuuccuugacggcgagaacucuugguuggggagaacuaucuccaaagacucaaggaguggauaugagaugcugaaggugccuaaugccgaaacagauacccagagcggccccaucuccuaccaaacgauugugaacaaucagaacuggucugguuacagcggggcguuuauagacuauugggccaauaaagaguguuucaacccaugcuuuuacgucgaacuaauccggggccguccuaaggagucaaguguucucuggaccuccaauagcauuguggcacuguguggaucucgcgaaagacuuggcucauggaguuggcacgauggggcugagaucauuuauuucaaauga

SEQ ID NO: 152488 - RNA, 1410 nt, Artificial Sequence
  derived and/or modified CDS sequence (opt3) from neuraminidase__InfluenzaA__AHJ57992
augaaccccaaucagaagaucauuaccauaggcagcgugucccugacaaucgccacugucucuuuccucaugcaaauugcuauccuuacgaccacaguuacucugcacuuuaaacauaacgagugcaauaugccuccaaagaaccaggugaugucaugugaaccgauuaucauagagagaaauaucaccgaaauuguauacuugaacaauacaaccguggagaaagaaaucugccccaaggucguggaguauaggaacuggaguaaaccucaguguaagauuacuggguucgcaccauuuagcaaggacaauuccauccgguuaucugccggaggugauauauggguuacacgcgagcccuacgugucgugcggccuggggaaauguuaucaguucgcgcuaggacaaggcaccacgcucgacaacucacacagcaaugguacuauucaugaucgaaucccucaccguacccugcuuaugaacgaacugggggucccauuucauuugggaacaaaacaggugugcauugcuuggaguuccucuagcugucacgacggcagagccuggcuccacaucugcaucacuggcgaugacaggaaugcaaccgccuccuucauuuacgaugggaugcugguagacucaauaggaaguuggagcaagaacauccugcggacacaggagucugaauguguuugcauuaaugguaccugugcuguggucaugacggauggcuccgcaucagggguggccgacacucgcauccucuuuauaagagagggaaagauugugcauaucagccccuuaaguggcucugcucagcacaucgaggaaugcuccugcuauccuagguacccagauguccgguguguuugccgcgacaacuggaaagguagcaaccgaccggugauuaauaucaacauggccgauuauucgauugacucuaauuacguauguuccgggcuggugggagacacacccagaaacgaugacaauucaaguagcuccaacugcagggauccuaauaacgagcggggcaauccaggcgucaaggggugggcguucgacgauggaaacgacguguggaugggucguaccauaaaucgcgauucuagaagcggcuacgaaacuuuuaggguuaucgggggauggacaaccgcaaacucaaagagucaaauuaaucgacaggugaucgucgacaacaauaacugguccggcuauagcgguguguucucuguagaggggaaaucauguaucaaccggugcuuuuacguugaacuuauucgcggcagaccccaggagccuagggugugguggacgaguaauagcauagucguguucuguggaaccuccggcacauaugggacuggaucuuggccagauggugccaacaucaauuuuaugcccauuuga

SEQ ID NO: 152489 - RNA, 1413 nt, Artificial Sequence
  derived and/or modified CDS sequence (opt3) from neuraminidase__InfluenzaA__AHJ58004
augaaccccaaucagaagaucacuugcauuagcgccacaggcgugacucuguccgucguuucucuccuuauagggaucgcuaaccugggauugaauauugguuuacacuacaaagugucagacaguagcaacaucaauauuccuaacaugaaugagacgaacccaaccacaacuaucauaaauaaccauacccaaaauaacuucaagaauaucacaaacauuaucguaaauaaaaacgaagagggcaccuuucugaaccuaacuaagccgcucugugaagugaauaguuggcacauucugucuaaagauaacgcaaucagaauaggggaggacgcccauauucuugucacaagggaacccuaucugucgugcgauccucagggaugucggauguucgcguugucacagggcaccacgcuccgcggucgacacgcuaaugggacuauccaugaccguagcccauuuagagcccugauuaguugggagaugggacaggcacccuccccuuacaacgccaggguggagugcaucggcuggucuagcaccuccugucacgauggcaucucacggaugaguauuugcauaagcgggccaaauaacaaugcuucugcaguugugugguaucgcggaagacccgucacagaaaucccuuccugggccgguaacauucugaggacucaagagucagaaugugugugccacaagggcaucuguccaguaguuaugaccgacgggccggcuaauaaccgggccgcgacaaagauaauuuacuucaaagagggaaagauccagaaaaucgaggaacucaagggcaaugcacagcauauugaggaaugcagcuguuauggugccgcugggaugaucaaaugcauuugccgcgauaacuggcgaggagccaauagacccgugauaaccaucgacccugagaugaugacgcacacuuccaaguacuuauguucuaagauucugacagauaccuccaggccaaacgaccccacuaauggcaacugcgaugaaccuaucacaggcgggagcccagaccccggagucaaagguuuugcauuccuugauggcgagaacucgugguuggggcggaccaucucuaaggacucccguucaggauaugagaugcugaaagugccgaaugcugaaacggacacccagaguggcccuacaagcuaccaaauuauagugaacaaucagaacugguccgguuacucuggggccuuuaucgauuauugggcgaauaaggaguguuucaaccccugcuuuuacgucgaacuaauucgcggcagaccaaaagagagcucaguucucuggaccaguaauuccaucguggcccuguguggaagcagggaacggcuuggcucuuggucauggcaugacggggcagagauuaucuauuucaaguga

SEQ ID NO: 152490 - RNA, 1413 nt, Artificial Sequence
  derived and/or modified CDS sequence (opt3) from neuraminidase__InfluenzaA__AHJ58016
augaaccccaaucagaagauuaccugcaucagcgccacaggcaugacucuguccguggucucuaugcucauagggaucgcuaaccuuggacugaauauugguuugcacuacaaaguuucagacaguacgaacaucaauauuccuaagaugaacgagaccaauccaacaacuaccaucauaaacaaucauccgcaaaacaauuucacaaacaucaccaauauuaucgugaacaaaaaugaagaggaaaacuuuuuaaaccugacuaagccccuaugugagguaaauagcuggcacauucucuccaaagauaacgcaaucagaauaggcgaaaaugcccauauucuggugacaagggagccuuaucuuucuugcgacccacaggggugucggauguucgcgcugucgcagggaaccacguugcgcggccgacacgcuaacgguacuauccaugaucguucacccuuuagagcccucauuagcugggagauggggcaggcaccuaguccauacaaugccagggucgaaugcaucggaugguccucuaccagcugucacgacggcaucucccggaugucaauuugcauaaguggccccaacaauaacgcuagcgcagugguuugguaugggggacgcccugugacagagaucccaucuugggccgguaauauucugagaacucaagaauccgagugugucugccacggcgggaucuguccggugguaaugaccgauggacccgcuaacaauagggccgagacaaagauaauuuacuucaaggaaggcaaaauccagaagaucgaggaacugaaagguaacgcgcagcauauugaggaaugcucauguuauggggcaagcggaaugaucaagugcauuugccgggacaauuggaaaggcgccaaccgcccuguuauaaccaucgauccagagaugaugacgcacacuucgaaguaccucuguucuaagauuuuaacagacaccucccgacccaaugauccuacuaacggcaacugcgacgcuccaaucacagggggaagccccgauccgggugugaaaggcuuugccuuccuggacgggaagaauaguuggcuuggaagaaccaucucuaaagauuccaggucaggcuaugagauguugaaggucccuaacgcagaaacggacacccagaguggugcuauuagccaucaaauaaucgugaauaaccagaauugguccggguacucuggcgccuuuauugacuacugggcgaacaaagaguguuucaaucccugcuuuuauguggaacugauccggggacguccaaaggagagcucaguccuauggacaaguaacuccauuguugcccucuguggcagccgcgaaagacuggggucuuggucauggcacgauggagcagagaucauauaccuuaaauga

SEQ ID NO: 152491 - RNA, 1413 nt, Artificial Sequence
  derived and/or modified CDS sequence (opt3) from neuraminidase__InfluenzaA__AHJ58028
augaaccccaaucagaagaucacuugcauuagcgccacaggcaugacucuguccguggucucuaugcucauagggaucgcuaaccuuggacugaauauugguuugcacuacaaaguuucagacaguacgaacaucaauauuccuaagaugaacgagaccaauccaacaacuaccaucauaaacaaucauccgcaaaacaauuucacaaacaucaccaauauuaucgugaacaaaaaugaagaggaaaacuuuuuaaaccugacuaagccccuaugugagguaaauagcuggcacauucucuccaaagauaacgcagugagaaucggcgaagacgcccauauacuggucacaagggagccuuaucuuucuugcgauccacaggggugucggauguucgcgcugucgcagggaaccacguugcgcggccgacacgcuaaugguacuauucaugaccguucacccuuuagagcccucaucagcugggagauggggcaggcaccuaguccauacaacaccaggguggaaugcauuggaugguccucuacaagcugucacgauggcaucucccggaugucaaucugcauuaguggccccaauaacaaugccagcgcuguugugugguaucgcgggagaccugucacugagauaccaucuugggcaggaaacauccugaggacccaagaauccgagugugugugccacaaggguauuuguccgguaguuaugacagacggccccgccaauaaccgggcugagaccaagaucauauacuucaaagaagggaagauucagaaaaucgaggaacuggagggaaaugcccagcauaucgaagagugcucauguuauggcacggcggguaugauuaagugcaucugccgcgauaacuggcgaggggcaaauagaccugugauuacuauagacccagagaugaugacacacaccagcagguaccucuguaguaaaaucuuaacugauacaucucggcccaacgacccuaccaauggaaacugcgaugccccaauuacgggcggcucccccgacccgggggucaagggauuugcuuuccuggaugguaagaacagcuggcuuggccguaccaucucgaaagacucucgcuccggguaugaaauguugaaggugccuaaugccgagacagacauccagucaggacccaccaguaaccaaauuauagugaauaaccagaauuggagcggcuacuccggugcauuuaucgauuacugggcuaacaaagaauguuucaauccaugcuuuuaugucgagcugauuagagggaggccuaaggaaucuaacguucuauggaccagcaauucaaucguggcccucuguggcagucgggagcgacugggauccuggagcuggcaugacggcgcggagauuaucuacuucaaauga

SEQ ID NO: 152492 - RNA, 1410 nt, Artificial Sequence
  derived and/or modified CDS sequence (opt3) from neuraminidase__InfluenzaA__AHJ58040
augaaccccaaucagaagaucauuaccgugggcagcgucucccuggccauagcuacaaucugccuccuuaugcaaauugcaauccuggccacuacgguuaccuugcacuucaaacagaacgaguguaauauuccuucuaagaaccaggugaugccaugcgaaccgaucauaaucgagagaaauauuacagaaguaguguacuuaaacaauacuaucauugagaaagaaaucugucccaaggucguggaguauaggaacuggucaaaaccucagugccaaauaaccggguuugcgccauucaguaaggacaauagcauucggcuguccgcuggaggugauaucuggguuacacgcgagcccuacgugucuuguucgccuucaaagugcuaucaguuugcccuaggccaggggaccacucucgacaacagccauaguaauggaacaauucacgaucgaaucccacaucguacccugcuuaugaacgaacugggcguccccuuccacuuggguacgaaacagguguguaucgcaugguccucuagcuccugccaugacgggagagccuggcuccacguauguauuacuggagaugacaggaaugcuaccgcaucauuuauauacaacggcaugcugguugauaguaucagcucuuggucccggaauauucugcgcacacaagagucagaaugcguguguaucaacggcacuugcaccgucauaaugacagacgggagcgccaguggaguggcugauacccggauucucuucaucagggaggguaagaucgugcacgucucuccuuuauccggcagcgcccagcauauugaggaaugcucguguuauccacgguacccggacguucgcugcgugugucgagauaacuggaaagggucuaauagacccguaguggacaucaacauggcggauuauuccauugacucacacuacgucugcaguggacuggugggcgacacgccuaggaaugaugacagcuccucuagcucaaacuguaaggauccaaauaacgagcgggguaaucccgggguuaaaggaugggcauuugacgauggcaacgacguguggaugggccguacuauaagucgcgauuccagaagcggguacgaaacauucagggucaucggagguuggaccacugccaauucuaagucacagauuaacagacaggugaucguagacaauaacaauuggaguggcuauagcgggguguuuuccguugagggaaagucuugcaucaaccgauguuucuacgucgaacuuauucgcggcagaccucaagagacaagggugugguggaccucgaauagcauagucguguuuugcgguacguccgggaccuauggcacaggaucauggccagauggcgcuaacaucaacuucaugcccauuuga

SEQ ID NO: 152493 - RNA, 1410 nt, Artificial Sequence
  derived and/or modified CDS sequence (opt3) from neuraminidase__InfluenzaA__AHJ58052
augaaccccaaucagaagaucauuaccauaggcagcgugucccugacaaucgccacugucucuuuccucaugcaaauugcuauccuuacgaccacaguuacucugcacuuuaaacauaacgagugcaauaugccuccaaagaaccaggugaugucaugugaaccgauuaucauagagagaaauaucaccgaaauuguauacuugaacaauacaaccguggagaaagaaaucugccccaaggucguggaguauaggaacuggaguaaaccucaguguaagauuacuggguucgcaccauuuagcaaggacaauuccauccgguuaucugccggaggugauauauggguuacacgcgagcccuacgugucgugcggccuggggaaauguuaucaguucgcgcuaggacaaggcaccacgcucgacaacucacacagcaaugguacuauucaugaucgaaucccucaccguacccugcuuaugaacgaacugggggucccauuucauuugggaacaaaacaggugugcauugcuuggaguuccucuagcugucacgacggcagagccuggcuccacaucugcaucacuggcgaugacaggaaugcaaccgccuccuucauuuacgaugggaugcugguagacucaauaggaaguuggagcaagaacauccugcggacacaggagucugaauguguuugcauuaaugguaccugugcuguggucaugacggauggcuccgcaucagggguggccgacacucgcauccucuuuauaagagagggaaagauugugcauaucagccccuuaaguggcucugcucagcacaucgaggaaugcuccugcuauccuagguacccagauguccgguguguuugccgcgacaacuggaaagguagcaaccgaccggugauugauaucaauauggccgacuauucgauugacucuaacuacguauguuccgggcuggugggagauacacccagaaaugacgauaacucaaguagcuccaauugcagggacccuaacaaugagcggggcaacccaggcgucaaggggugggcguucgaugacggaaaugauguguggaugggucguaccauaaaccgcgacucuagaagcggcuacgaaacuuuuaggguuaucgggggauggacaaccgcaaauucaaagagucaaauuaaccgacaggugaucgucgauaauaacaauugguccggcuauagcgguguguucucuguagaggggaaaucauguaucaaccggugcuuuuacguugaacuuauucgcggcagaccccaggagccuagggugugguggacgaguaacagcauagucguguucuguggaaccuccggcacauaugggacuggaucuuggccagacggugccaauaucaacuuuaugcccauuuga

SEQ ID NO: 152494 - RNA, 1413 nt, Artificial Sequence
  derived and/or modified CDS sequence (opt3) from neuraminidase__InfluenzaA__AHJ58064
augaaccccaaucagaagauuaccugcaucagcgccacaggcaugacucuguccguggucucucuccuuauagggaucgcuaaccugggauugaauauugguuuacacuacaaaguuucagacaguacgaacaucaauauuccuaacaugaaugagaccagcccaacaacuaccaucauaaacaaucauccgcaaaacaauuucacaaacaucaccaauauuaucgugaacaagaaugaagaggaaaacuuucugaaccuaacuaaaccccucugugagguaaauuccuggcacauucugucuaaggauaacgcaaucagaauaggcgaaaaugcccauauucuugugacaagggagccuuaucugucgugcgacccacaggggugucggauguucgcguugucacagggaaccacgcuccgcggccagcacgcuaacgguacuauccaugaucgaagccccuuucgugcccugauuaguugggagauggggcaagcaccuuccccauacaaugccagagucgaaugcaucggauggucuagcaccuccugucacgacggcaucucaaggaugaguauuugcauaagcggccccaacaauaacgcuucugcagugguuugguaugggggacggccugugacagagaucccauccugggccgguaauauucugcgcacucaggaaucagagugugucugccacggcgggaucuguccggugguaaugaccgauggacccgcuaacaauagagccgagacaaaaauaauuuacuucaaggaaggcaagauccagaaaaucgaggaacucaaggguaacgcgcagcauauugaggaaugcagcuguuauggggcaaguggaaugaucaaaugcauuugcagggacaauuggaagggcgccaaccggccuguuauaaccaucgauccagagaugaugacgcacacuucuaaauacuuauguuccaagauucugacagacaccagccgccccaaugauccuaucaacggcaacugcgacgcuccaaucacugggggaucgcccgauccgggugugaagggcuuugccuuccuugacggggaaaauucuugguugggacgaacaauuuccaaagauucaagaaguggcuaugagaugcugaaggucccuaacgcagagaccgacacgcaaagcggugcuauaucccaucagaugaucgugaauaaccagaauuggucuggguacagcggcgccuuuauugacuacugggcgaacaaagaauguuucaaucccugcuuuuauguggagcuaaucaggggacggccaaaggaaucaaguguccucuggaccuccaacagcauuguugcccuguguggcucucgugagcgccuugggucauggaguuggcacgauggagcagagaucauauacuucaaauga

SEQ ID NO: 152495 - RNA, 1401 nt, Artificial Sequence
  derived and/or modified CDS sequence (opt3) from neuraminidase__InfluenzaA__AHJ58075
augaaccccaaucagaagaucauugccauaggcagcgugucccugaccaucgcuauuaucugcuuccuccuucaaauugcaauccugacaacuacgaugaccuugcacuuuagacagaacgaguguucuaauccuucaaacaaucaggucguuccaugcgaaccgauaaucauugagaggaacacagugcauuuaaauaguacuaccaucgaaaaagagauuugucccaagguagccgaauacaaaaacuggagcaagccucagugccaaaucacaggguucgcgccauuuuccaaagacaauucuauacggcugucggcuggaggugauauuugggugacccgcgagcccuaugucucauguagccuaggcaagugcuaccaguucgcccucgggcagggaacuacacugaagaacaaacacaguaauggcaccacgcaugaccgaaucccucaccguacucuucugaugaacgaguugggugugccauuucaucucgggaccaagcagguuuguauugcaugguccucuagcuccugccacgauggaaaagccuggcugcacaucugugugacaggcgacgauaagaaugcuacugcaucaaucauuuaugacggcaugcuggucgauaguauagggagcuggucuaaaaacauccucagaacccaagaauccgagugcguguguauuaauggaacaugcgccguaguuaugaccgacgguucagcuagcggcaaggccgauacgaggaucuuauucauacgggaagggaagauuaucaacaucaguccccugucuggauccgcgcagcauguggaggagugcagcuguuacccucgcuauccagaagucagaugcguguguagggacaacuggaaaggcucgaaucggccggugcuuuacauuaacauggcagauuauucuaucgaguccucauacgucugcagugguuugguuggggacacuccccgcgaugacgacagcuccucuagcucaaauugucgagauccuaacaaugaaagaggagccccaggcgugaagggcugggcuuuugacgaugggaacgacauuuggaugggaaggacaauaaaaagugauucccggagcgguuacgagaccuuccguguagugaauggcuggacuacagccaacucuaagucacagaucaaucgccaggucauuguggacagugauagcugguccggguauucuggaaucuuuucgguugaaggcaaaaacugcaucaauagauguuucuacguggagcugauuaggggucggccccaagagacccgagucugguggacgagcaacuccauaaucguguuuugcgggaccucaggcacauauggaacuggcaguuggccugacggggcaaauauuaacuucaugccaaucuga

SEQ ID NO: 152496 - RNA, 1413 nt, Artificial Sequence
  derived and/or modified CDS sequence (opt3) from neuraminidase__InfluenzaA__AHJ58087
augaaccccaaucagaagauuaccugcaucagcgccacaggcaugacucuguccguggucucucuccuuauagggaucgcuaaccugggauugaauauugguuuacacuacaaaguuucagacaguacgaacaucaauauuccuaacaugaaugagaccagcccaacaacuaccaucauaaacaaucauccgcaaaacaauuucacaaacaucaccaauauuaucgugaacaagaaugaagaggaaaacuuucugaaccuaacuaaaccccucugugagguaaauuccuggcacauucugucuaaggauaacgcaaucagaauaggcgaaaaugcccauauucuugugacaagggagccuuaucugucgugcgacccacaggggugucggauguucgcguugucacagggaaccacgcuccgcggccagcacgcuaacgguacuauccaugaucgaagccccuuucgugcccugauuaguugggagauggggcaagcaccuuccccauacaaugccagagucgaaugcaucggauggucuagcaccuccugucacgacggcaucucaaggaugaguauuugcauaagcggccccaacaauaacgcuucugcagugguuugguaugggggacggccugugacagagaucccauccugggccgguaauauucugcgcacucaggaaucagagugugucugccacggcgggaucuguccggugguaaugaccgauggacccgcuaacaauagagccgagacaaaaauaauuuacuucaaggaaggcaagauccagaaaaucgaggaacucaaggguaacgcgcagcauauugaggaaugcagcuguuauggggcaaguggaaugaucaaaugcauuugcagggacaauuggaagggcgccaaccggccuguuauaaccaucgauccagagaugaugacgcacacuucuaaauacuuauguuccaagauucugacagacaccagccgccccaaugauccuaucaacggcaacugcgacgcuccaaucacugggggaucgcccgauccgggugugaagggcuuugccuuccuugacggggauaauucuugguugggacgaacaauuuccaaagacucaagaaguggcuaugagaugcugaaggucccuaacgcagaaaccgacacgcaaagcggugcuauaucccaucagaugaucgugaauaaccagaauuggucuggguacagcggcgccuuuauugauuacugggcgaacaaagaguguuucaaucccugcuuuuauguggaacuaaucaggggacggccaaaggagucaaguguccucuggaccuccaacagcauuguugcccuguguggcucucgugaacgccuugggucauggaguuggcacgacggagcagagaucauauacuucaaauga

SEQ ID NO: 152497 - RNA, 1410 nt, Artificial Sequence
  derived and/or modified CDS sequence (opt3) from neuraminidase__InfluenzaA__AHL80721
augaaccccaaucagaagaucauuaccauaggcagcgugugcaugacaaucgggauggccaaccugauucuccaaaucggaaauauuaucuccauauggaucucucacucaauucagcuugguaaccagaaucagaucgagacuuguaaccaaagugucauuacguacgaaaauaacaccuggguuaaucagacauaugugaacaucagcaauacuaacuucgcugcaggccaguccguagugucugucaaacuggccggaaauucgucauugugcccugugagcggaugggcgauauacaguaaggacaacuccauuagaaucggcucuaaaggugauguuuuugugauuagggagccauucaucagcuguuccccguuagaaugccggaccuuuuuccugacacagggggcucuacucaaugacaagcauucaaacggaaccaucaaagaucgcagucccuaucgaacucugaugagcuguccuauuggcgaggucccaucucccuacaacucccguuuugaaucaguggccuggagcgcaagugccugccacgacggcauaaauuggcuuacaaucgggauuucuggaccugauaacggugcuguagcaguucugaaguauaauggcaucauaaccgacacgauuaaguccuggagaaacaauaucuugaggacucaagagagcgagugugccugcgugaacgggucguguuucaccgucaugacagauggaccaucugacggccaggcuuccuacaaaaucuuucggauugaaaaggguaaaaucgugaagucaguggagaugaaugcccccaacuaucauuacgaagagugcaguuguuacccugauagcuccgagauuacuugcgucugccgcgacaauuggcacgggucuaacagaccauggguuagcuucaaucagaaccucgaauaucagauaggauacaucuguucaggcauuuuuggcgauaauccgaggcccaacgacaaaaccgggaguugcggaccuguguccagcaauggugcgaacggcguaaagggguucucuuuuaaguauggaaacggcguguggaucggucggacaaaaucaaucaguagccgcaagggguucgagaugauuugggauccaaauggcuggaccggaacggacaacaauuuuuccauaaaacaagacgucgugggcaucaacgaauggucuggguacucggggagcuucguucagcaucccgagcugacuggucuggauuguauucgaccuugcuucuggguggaacucaucagaggcaggccaaaggagaauacaauuuggaccuccgggucaaguaucucuuuuuguggagucaacagcgacacugugggcugguccuggcccgauggugcagaguuaccguucacaauagacaaauga

SEQ ID NO: 152498 - RNA, 1410 nt, Artificial Sequence
  derived and/or modified CDS sequence (opt3) from neuraminidase__InfluenzaA__AHL80732
augaaccccaaucagaagaucauuaccauaggcagcgugugcaugacaaucgggauggccaaccugauucuccaaaucggaaauauuaucuccauauggaucucucacucaauucagcuugguaaccagaaucagaucgagacuuguaaccaaagugucauuacguacgaaaauaacaccuggguuaaucagacauaugugaacaucagcaauacuaacuucgcugcaggccaguccguagugucugucaaacuggccggaaauucgucauugugcccugugagcggaugggcgauauacaguaaggacaacuccauuagaaucggcucuaaaggugauguuuuugugauuagggagccauucaucagcuguuccccguuagaaugccggaccuuuuuccugacacagggggcucuacucaaugacaagcauucaaacggaaccaucaaagaucgcagucccuaucgaacucugaugagcuguccuauuggcgaggucccaucucccuacaacucccguuuugaaucaguggccuggagcgcaagugccugccacgacggcauaaauuggcuuacaaucgggauuucuggaccugauaacggugcuguagcaguucugaaguauaauggcaucauaaccgacacgauuaaguccuggagaaacaauaucuugaggacucaagagagcgagugugccugcgugaacgggucguguuucaccgucaugacagauggaccaucugacggccaggcuuccuacaaaaucuuucggauugaaaaggguaaaaucgugaagucaguggagaugaaugcccccaacuauuacuacgaagagugcaguuguuauccugauagcuccgagauuacuugcgucugccgcgacaauuggcaugggucuaacagaccauggguuagcuucaaucagaaccucgaauaccagauaggauauaucuguucaggcauuuuuggcgauaauccgaggcccaacgacaaaaccgggaguugcggaccuguguccagcaauggugcgaacggcguaaagggguucucuuuuaaguacggaaacggcguguggaucggucggacaaaaucaaucaguagccgcaauggguucgagaugauuugggauccaaacggcuggaccggaacggacaauaacuuuuccauaaagcaagacaucgucggcauuaaugaauggucuggguauucggggagcuucgugcagcaccccgagcugacuggucuggauuguauccgaccuugcuucuggguugaacucauuagaggcaggccaaaagagaacacaaucuggaccuccgggucaaguauaucuuuuuguggagugaauagcgacacugucggcugguccuggcccgauggugcagaguuaccguucaucauugacaaguga

SEQ ID NO: 152499 - RNA, 1410 nt, Artificial Sequence; identical to SEQ ID NO: 144786
  derived and/or modified CDS sequence (opt3) from neuraminidase__InfluenzaA__AHL80743

SEQ ID NO: 152500 - RNA, 1410 nt, Artificial Sequence
  derived and/or modified CDS sequence (opt3) from neuraminidase__InfluenzaA__AHL80754
augaaccccaaucagaagaucauuaccauaggcagcgugugcaugacaaucgggauggccaaccugauucuccaaaucggaaauauuaucuccauauggaucucucacucaauucagcuugguaaccagaaucagaucgagacuuguaaccaaagugucauuacguacgaaaauaacaccuggguuaaucagacauaugugaacaucagcaauacuaacuucgcugcaggccaguccguagugucugucaaacuggccggaaauucgucauugugcccugugagcggaugggcgauauacaguaaggacaacuccauuagaaucggcucuaaaggugauguuuuugugauuagggagccauucaucagcuguuccccguuagaaugccggaccuuuuuccugacacagggggcucuacucaaugacaagcauucaaacggaaccaucaaagaucgcagucccuaucgaacucugaugagcuguccuauuggcgaggucccaucucccuacaacucccguuuugaaucaguggccuggagcgcaagugccugccacgacggcauaaauuggcuuacaaucgggauuucuggaccugauaacggugcuguagcaguucugaaguauaauggcaucauaaccgacacgauuaaguccuggagaaacaauaucuugaggacucaagagagcgagugugugugcgucaacgggucguguuucaccgugaugacagauggaccaucugacggccaggccuccuacaaaaucuuucggauugaaaaggguaaaaucgugaagucagucgagaugaaugcucccaacuaucauuacgaagagugcaguuguuacccugauagcuccgagauuacuugcguuugccgcgacaauuggcacgggucuaacagaccaugggugagcuucaaucagaaccucgaauaucagauaggauacaucuguucaggcauuuuuggcgauaauccgaggcccaacgacaaaaccgggaguugcggaccuguauccagcaauggugccaacggcgugaagggguucucuuuuaaguauggaaacggcgucuggaucggucggacaaaaucaaucaguagccgcaauggguucgagaugauuugggauccaaacggcuggaccggaacggacaauaacuuuuccauaaagcaagacaucgugggcauuaaugaauggucuggguacucggggagcuucguucagcaucccgagcugacuggucuggauuguauccgaccuugcuucuggguggaacucauuagaggcaggccaaaagagaacacaaucuggaccuccgggucaaguauaucuuuuuguggagucaauagcgacacugugggcugguccuggcccgauggugcggaguuaccguucacaaucgacaaguga

SEQ ID NO: 152501 - RNA, 1410 nt, Artificial Sequence; identical to SEQ ID NO: 144786
  derived and/or modified CDS sequence (opt3) from neuraminidase__InfluenzaA__AHL80765

SEQ ID NO: 152502 - RNA, 1410 nt, Artificial Sequence; identical to SEQ ID NO: 144786
  derived and/or modified CDS sequence (opt3) from neuraminidase__InfluenzaA__AHL80776

SEQ ID NO: 152503 - RNA, 1410 nt, Artificial Sequence; identical to SEQ ID NO: 144786
  derived and/or modified CDS sequence (opt3) from neuraminidase__InfluenzaA__AHL80787

SEQ ID NO: 152504 - RNA, 1410 nt, Artificial Sequence
  derived and/or modified CDS sequence (opt3) from neuraminidase__InfluenzaA__AHL80798
augaaccccaaucagaagaucauuaccauaggcagcgugugcaugacaaucgggauggccaaccugauucuccaaaucggaaauauuaucuccauauggaucucucacucaauucagcuugguaaccagaaucagaucgagacuuguaaccaaagugucauuacguacgaaaauaacaccuggguuaaucagacauaugugaacaucagcaauacuaacuucgcugcaggccaguccguagugucugucaaacuggccggaaauucgucauugugcccugugagcggaugggcgauauacaguaaggacaacuccauuagaaucggcucuaaaggugauguuuuugugauuagggagccauucaucagcuguuccccguuagaaugccggaccuuuuuccugacacagggggcucuacucaaugacaagcauucaaacggaaccaucaaagaucgcagucccuaucgaacucugaugagcuguccuauuggcgaggucccaucucccuacaacucccguuuugaaucaguggccuggagcgcaagugccugccacgacggcauaaauuggcuuacaaucgggauuucuggaccugauaacggugcuguagcaguucugaaguauaauggcaucauaaccgacacgauuaaguccuggagaaacaauaucuugaggacucaagagagcgagugugccugcgugaacgggucguguuucaccgucaugacagauggaccaucugacggccaggcuuccuacaaaaucuuucggauugaaaaggguaaaaucgugaagucaguggagaugaaugcccccaacuaucauuacgaagagugcaguuguuacccugauagcuccgagauuacuugcgucugccgcgacaauuggcacgggucuaacagaccauggguuagcuucaaucagaaccucgaauaucagauaggauacaucuguucaggcauuuuuggcgauaauccgaggcccaacgacaaaaaggggaguugcggaccuguguccagcaauggugcgaacggcguaaagggguucucuuuuaaauauggaaacggcguguggaucggucggaccaagucaaucaguagccgcaauggguucgagaugauuugggauccaaacggcuggacaggaaccgacaauaacuuuuccgucaaacaagacauagugggcaucaaugaauggucuggguacucggggagcuucguucagcaucccgagcugacgggucuggauuguauucgaccuugcuucuggguggaacucaucagaggcaggccaaaggagaacacuauuuggacauccgggucaaguaucucuuuuuguggagucaauagcgacaccgugggcugguccuggcccgauggugcagaguuaccguucacuauagacaaauga

SEQ ID NO: 152505 - RNA, 1410 nt, Artificial Sequence; identical to SEQ ID NO: 144786
  derived and/or modified CDS sequence (opt3) from neuraminidase__InfluenzaA__AHL80809

SEQ ID NO: 152506 - RNA, 1410 nt, Artificial Sequence; identical to SEQ ID NO: 144786
  derived and/or modified CDS sequence (opt3) from neuraminidase__InfluenzaA__AHL80820

SEQ ID NO: 152507 - RNA, 1410 nt, Artificial Sequence; identical to SEQ ID NO: 144786
  derived and/or modified CDS sequence (opt3) from neuraminidase__InfluenzaA__AHL80831

SEQ ID NO: 152508 - RNA, 1410 nt, Artificial Sequence; identical to SEQ ID NO: 144786
  derived and/or modified CDS sequence (opt3) from neuraminidase__InfluenzaA__AHL80842

SEQ ID NO: 152509 - RNA, 1410 nt, Artificial Sequence; identical to SEQ ID NO: 146074
  derived and/or modified CDS sequence (opt3) from neuraminidase__InfluenzaA__AHL80853

SEQ ID NO: 152510 - RNA, 1410 nt, Artificial Sequence
  derived and/or modified CDS sequence (opt3) from neuraminidase__InfluenzaA__AHL80864
augaaccccaaucagaagaucauuaccauaggcagcgugugcaugacaaucgggauggccaaccugauucuccaaaucggaaauauuaucuccauauggaucucucacucaauucagcuugguaaccagaaucagaucgagacuuguaaccaaagugucauuacguacgaaaauaacaccuggguuaaucagacauaugugaacaucagcaauacuaacuucgcugcaggccaguccguagugucugucaaacuggccggaaauucgucauugugcccugugagcggaugggcgauauacaguaaggacaacuccauuagaaucggcucuaaaggugauguuuuugugauuagggagccauucaucagcuguuccccguuagaaugccggaccuuuuuccugacacagggggcucuacucaaugacaagcauucaaacggaaccaucaaagaucgcagucccuaucgaacucugaugagcuguccuauuggcgaggucccaucucccuacaacucccguuuugaaucaguggccuggagcgcaagugccugccacgacggcauaaauuggcuuacaaucgggauuucuggaccugauaacggugcuguagcaguucugaaguauaauggcaucauaaccgacacgauuaaguccuggagaaacaauaucuugaggacucaagagagcgagugugccugcgugaacgggucguguuucaccgucaugacagauggaccaucugacggccaggcuuccuacaaaaucuuucggauugaaaaggguaaaaucgugaagucaguggagaugaaugcccccaacuauuacuacgaagagugcaguuguuauccugauagcuccgagauuacuugcgucugccgcgacaauuggcaugggucuaacagaccauggguuagcuucaaucagaaccucgaauaccagauaggauauaucuguucaggcauuuuuggcgauaauccgaggcccaacgacaaaaaggggaguugcggaccuguguccagcaauggugcgaacggcguaaagggguucucuuuuaaauacggaaacggcguguggaucggucggaccaagucaaucaguagccgcaauggguucgagaugauuugggauccaaacggcuggacaggaaccgacaauaacuuuuccauaaaacaagacaucgucggcauuaaugaauggucuggguauucggggagcuucgugcagcaccccgagcugacgggucuggauuguauccgaccuugcuucuggguugaacucauuagaggcaggccaaaggagaacacuaucuggacauccgggucaaguauaucuuuuuguggagugaauagcgacaccgucggcugguccuggcccgauggugcagaguuaccguucacuaucgacaaauga

SEQ ID NO: 152511 - RNA, 1410 nt, Artificial Sequence; identical to SEQ ID NO: 146074
  derived and/or modified CDS sequence (opt3) from neuraminidase__InfluenzaA__AHL80875

SEQ ID NO: 152512 - RNA, 1410 nt, Artificial Sequence; identical to SEQ ID NO: 146074
  derived and/or modified CDS sequence (opt3) from neuraminidase__InfluenzaA__AHL80886

SEQ ID NO: 152513 - RNA, 1410 nt, Artificial Sequence
  derived and/or modified CDS sequence (opt3) from neuraminidase__InfluenzaA__AHL80897
augaaccccaaucagaagaucauuaccauaggcagcgugugcaugacaaucgggauggccaaccugauucuccaaaucggaaauauuaucuccauauggaucucucacucaauucagcuugguaaccagaaucagaucgagacuuguaaccaaagugucauuacguacgaaaauaacaccuggguuaaucagacauaugugaacaucagcaauacuaacuucgcugcaggccaguccguagugucugucaaacuggccggaaauucgucauugugcccugugagcggaugggcgauauacaguaaggacaacuccauuagaaucggcucuaaaggugauguuuuugugauuagggagccauucaucagcuguuccccguuagaaugccggaccuuuuuccugacacagggggcucuacucaaugacaagcauucaaacggaaccaucaaagaucgcagucccuaucgaacucugaugagcuguccuauuggcgaggucccaucucccuacaacucccguuuugaaucaguggccuggagcgcaagugccugccacgacggcauaaauuggcuuacaaucgggauuucuggaccugauaacggugcuguagcaguucugaaguauaauggcaucauaaccgacacgauuaaguccuggagaaacaauaucuugaggacucaagagagcgagugugccugcaucaacgggucguguuucaccgugaugacagauggaccaucugacggccaggcuuccuacaaaauuuuucggaucgaaaaggguaaaauugucaagucaguggagaugaaugcccccaacuaucauuacgaagagugcaguuguuacccugauagcuccgagauaacuugcgugugccgcgacaauuggcacgggucuaacagaccaugggucagcuucaaucagaaccucgaauaucagaucggauacauuuguucaggcaucuuuggcgauaauccgaggcccaacgacaaaaaggggaguugcggaccuguuuccagcaauggugcgaacggcgugaagggguucucuuuuaaauauggaaacggcguauggaucggucggaccaagucaauuaguagccgcaauggguucgagaugauaugggauccaaacggcuggacaggaaccgacaauaacuuuuccaucaaacaagacauugugggcaucaaugaauggucuggguacucggggagcuucguccagcaucccgagcugacgggucuggauuguauucgaccuugcuucuggguggaacucaucagaggcaggccaaaggagaacacuauauggacauccgggucaaguaucucuuuuuguggaguuaauagcgacaccgugggcugguccuggcccgauggugcagaguuaccguucacuauugacaaauga

SEQ ID NO: 152514 - RNA, 1410 nt, Artificial Sequence
  derived and/or modified CDS sequence (opt3) from neuraminidase__InfluenzaA__AHL80908
augaaccccaaucagaagaucauuaccauaggcagcgugugcaugacaaucgggauggccaaccugauucuccaaaucggaaauauuaucuccauauggaucucucacucaauucagcuugguaaccagaaucagaucgagacuuguaaccaaagugucacgauucaugaaaauaacaccuggguuaaucagacauacgugaacaucagcaauacuaacuucgcugcaggccaguccguagugucugucaaacuggccggaaauucgucauugugcccugugagcggaugggcgauauauaguaaggacaacuccauuagaaucggcucuaaaggugauguuuuugugauuagggagccauucaucagcuguuccccguuagaaugccggaccuuuuuccugacacagggggcucuacucaaugacaagcacucaaacggaaccaucaaagaucgcagucccuaccgaacucugaugagcuguccuauuggcgaggucccaucucccuauaacucccguuuugaaucaguggccuggagcgcaagugccugccaugacggcauaaauuggcuuacaaucgggauuucuggaccugauaacggugcuguagcaguucugaaguacaauggcaucauaaccgacacgauuaaguccuggagaaacaauaucuugaggacucaagagagcgagugugccugcgugaacgggucguguuucaccgucaugacagauggaccaucugacggccaggcuuccuauaaaaucuuucggauugaaaaggguaaaaucgugaagucaguggagaugaaugcccccaacuacuauuacgaagagugcaguuguuacccugauagcuccgagauuacuugcgucugccgcgacaauuggcacgggucuaacagaccauggguuagcuucaaucagaaccucgaauaucagauaggauacaucuguucaggcauuuuuggcgauaauccgaggcccaacgacaaaaaggggaguugcggaccuguguccagcaauggugcgaacggcguaaagggguucucuuuuaaauauggaaacggcguguggaucggucggaccaagucaaucaguagccgcaauggguucgagaugauuugggauccaaacggcuggacaggaaccgacaauaacuuuuccauaaaacaagacaucgucggcauuaaugaauggucuggguacucggggagcuucgugcagcaucccgagcugacgggucuggauuguauccgaccuugcuucuggguugaacucauuagaggcaggccaaaggagaacacuaucuggacauccgggucaaguauaucuuuuuguggagugaauagcgacaccgucggcugguccuggcccgauggugcagaguuaccguucacuaucgacaaauga

SEQ ID NO: 152515 - RNA, 1410 nt, Artificial Sequence
  derived and/or modified CDS sequence (opt3) from neuraminidase__InfluenzaA__AHL80919
augaaccccaaucagaagaucauuaccauaggcagcgugugcaugacaaucgggauggccaaccugauucuccaaaucggaaauauuaucuccauauggaucucucacucaauucagcuugguaaccagagucagaucgagacuuguaaucaaagcgucauuacguacgaaaacaauaccuggguuaaccagacauaugugaauaucuccaacacuaauuucgcugcaggccagucuguagugucggucaaacuggccgggaacagcagcuugugcccugugaguggaugggcgauauacuccaaggacaauucuauuagaaucggcagcaaaggugauguuuuugugauuagggagccauucaucuccuguucaccguuagaaugccggaccuuuuuccugacacagggggcucuacucaacgacaagcauaguaauggaaccaucaaagaucgcagccccuaucgaacucugaugucuuguccuacaggcgaggucccaucccccuacaacucacguuuugaaagcguggccuggagugcaucugccugccacgacggcauuaacuggcuuaccauagggaucuccggaccugauaauggugcuguagcaguucugaaguauaacggcauuaucacggacacuauaaagagcuggagaaauaacauuuugaggacccaagagucggagugugccugcgugaaugggucuuguuucacaaucaugacugauggaccauccgacggccaggcuucauacaaaaucuuucggauugaaaaggguaaaaucgucaagaguguggagaugaacgcccccaauuaucauuacgaagagugcagcuguuacccugauuccucugagauuaccugcgugugccgcgacaacuggcacgggagcaauagaccaugggucucauucaaccagaaucucgaauaucagauaggauacaucuguaguggcauuuuuggcgauaacccgaggcccaaugacaaaacaggguccugcggaccuguuagcucuaacggugcgaauggcgugaagggguucucauuuaaguauggaaacggcguauggaucggucggaccaaaaguaucagcucccgcaagggguucgagaugauuugggauccaaacggcuggacgggaacugacaauaacuuuucuauaaaacaagacaucgugggcauuaaugaauggucgggguacagcggauccuucguccagcaucccgagcugacaggucuggauuguauccgaccuugcuucuggguggaacucauuagaggcaggccaaaggagaacaccaucuggacuucagggaguucuauaucauuuuguggaguuaauuccgacacagugggcuggucauggcccgauggugcagaguuaccguucaccaucgacaaauga

SEQ ID NO: 152516 - RNA, 1410 nt, Artificial Sequence; identical to SEQ ID NO: 147566
  derived and/or modified CDS sequence (opt3) from neuraminidase__InfluenzaA__AHL80930

SEQ ID NO: 152517 - RNA, 1410 nt, Artificial Sequence; identical to SEQ ID NO: 147566
  derived and/or modified CDS sequence (opt3) from neuraminidase__InfluenzaA__AHL80949

SEQ ID NO: 152518 - RNA, 1410 nt, Artificial Sequence
  derived and/or modified CDS sequence (opt3) from neuraminidase__InfluenzaA__AHL80961
augaaccccaaucagaagaucauuaccauaggcagcgugugcaugacaaucgggauggccaaccugauucuccaaaucggaaauauuaucuccauauggaucucucacucaauucagcuugguaaccagaaucagaucgagacuuguaaccaaagugucauuacguacgaaaauaacaccuggguuaaucagacauaugugaacaucagcaauacuaacuucgcugcaggccaguccguagugucugucaaacuggccggaaauucgucauugugcccugugagcggaugggcgauauacaguaaggacaacuccauuagaaucggcucuaaaggugauguuuuugugauuagggagccauucaucagcuguuccccguuagaaugccggaccuuuuuccugacacagggggcucuacucaaugacaagcauucaaacggaaccaucaaagaucgcagucccuaucgaacucugaugagcuguccuauuggcgaggucccaucucccuacaacucccguuuugaaucaguggccuggagcgcaagugccugccacgacggcauaaauuggcuuacaaucgggauuucuggaccugauaacggugcuguagcaguucugaaguauaauggcaucauaaccgacacgauuaaguccuggagaaacaauaucuugaggacucaagagagcgagugugccugcgugaacgggucguguuucaccaucaugacagauggaccaucugacggccaggcuuccuacaaaauuuuucggaucgaaaaggguaaaauugucaagucaguggagaugaaugcccccaacuaucauuacgaagagugcaguuguuacccugauagcuccgagauaacuugcgugugccgcgacaauuggcacgggucuaacagaccaugggucagcuucaaucagaaccucgaauaucagaucggauacauuuguucaggcaucuuuggcgauaauccgaggcccaacgacaaaaccgggaguugcggaccuguuuccagcaauggugcgaacggcgugaagggguucucuuuuaaguauggaaacggcguauggaucggucggacaaaaucaauuaguagccgcaagggguucgagaugauaugggauccaaauggcuggaccggaacggacaacaauuuuuccaucaaacaagacguggucggcauuaacgaauggucuggguacucggggagcuucgugcagcaucccgagcugacuggucuggauuguauccgaccuugcuucuggguugaacucauuagaggcaggccaaaggagaauacaaucuggaccuccgggucaaguauaucuuuuuguggagugaacagcgacacugucggcugguccuggcccgauggugcagaguuaccguucacaaucgacaaauga

SEQ ID NO: 152519 - RNA, 1410 nt, Artificial Sequence; identical to SEQ ID NO: 152518
  derived and/or modified CDS sequence (opt3) from neuraminidase__InfluenzaA__AHL80972

SEQ ID NO: 152520 - RNA, 1410 nt, Artificial Sequence; identical to SEQ ID NO: 147566
  derived and/or modified CDS sequence (opt3) from neuraminidase__InfluenzaA__AHL80983

SEQ ID NO: 152521 - RNA, 1410 nt, Artificial Sequence; identical to SEQ ID NO: 147566
  derived and/or modified CDS sequence (opt3) from neuraminidase__InfluenzaA__AHL80992

SEQ ID NO: 152522 - RNA, 1410 nt, Artificial Sequence; identical to SEQ ID NO: 147566
  derived and/or modified CDS sequence (opt3) from neuraminidase__InfluenzaA__AHL81004

SEQ ID NO: 152523 - RNA, 1410 nt, Artificial Sequence
  derived and/or modified CDS sequence (opt3) from neuraminidase__InfluenzaA__AHL81016
augaaccccaaucagaagaucauuaccauaggcagcgugucccugacaaucucuacuauuugcuucuuuaugcagaucgccauucucaucacgaccgucacacuucacuucaaacaguacgaguuuaacucaccuccaaauaaccagguuaugcugugugaaccgacuauaaucgagagaaauauuaccgaaaucguguauuugacaaacaccacuauugagaaggaaaucugccccaaauuagcugaguacaggaauuggaguaagccucagugugacauaacaggguucgcaccauuuagcaaagauaacuccauucggcugucugccggaggugacaucuggguaacccgcgagcccuaugugucgugcgauucagacaaguguuaccaauucgcgcuaggccaggggacgacucucaauaacguccauagcaauaacaccgugcgagaucguacaccuuauagaacucugcuuaugaaugaacugggaguuccauuucacuugggcaccaaacaggugugcauugcuuggaguuccucuagcugucaugacgguaaggccuggcuccacgucugcaucacaggggaugacaagaacgcaaccgccuccuucaucuacaauggaaggcugguggauucaguaguuaguuggagcaaagagauucugcggacgcaggaaucugagugugugugcauaaacggcacuuguacagucgugaugaccgacggcuccgcuucagggaaggcagauacuaaaauccucuuuauugaggaaggaaagaucgugcauacaagcaccuuaagugguucugcccaacacgucgaggaaugcuccugcuauccccgcuacccuggcguuagaugugugugcagggacaacuggaaggggagcaaucggccaauaguagauauuaacaucaaagaccacucgaucgugucuuccuacgucuguucaggacuggugggcgacacgccgcgcaagaaugauaguagcuccucuagccauugccuugaccccaacaaugaggaaggugggcacggaguuaaaggcugggcuuucgaugacggcaacgauguguggauggggcgaaccauuaaugagacaucaagauugggauaugagacuuuuaaggucaucgaagguuggaguaacccuaaauccaagcugcagauuaauaggcaagugauaguagaccggggcaaccguagcggguacucuggaaucuucucaguugagggcaaaaguuguauuaaucgcugcuuuuauguggaacuaaucagagguaggaaggaggaaaccgagguccucuggacaagcaacuccaucguggucuucugugggacuucuggcaccuacggaacaggcucguggccagauggggccgaccugaaucuuaugcccauuuga

SEQ ID NO: 152524 - RNA, 1410 nt, Artificial Sequence; identical to SEQ ID NO: 147566
  derived and/or modified CDS sequence (opt3) from neuraminidase__InfluenzaA__AHL81028

SEQ ID NO: 152525 - RNA, 1410 nt, Artificial Sequence; identical to SEQ ID NO: 147566
  derived and/or modified CDS sequence (opt3) from neuraminidase__InfluenzaA__AHL81040

SEQ ID NO: 152526 - RNA, 1410 nt, Artificial Sequence; identical to SEQ ID NO: 147566
  derived and/or modified CDS sequence (opt3) from neuraminidase__InfluenzaA__AHL81052

SEQ ID NO: 152527 - RNA, 1410 nt, Artificial Sequence; identical to SEQ ID NO: 152518
  derived and/or modified CDS sequence (opt3) from neuraminidase__InfluenzaA__AHL81064

SEQ ID NO: 152528 - RNA, 1410 nt, Artificial Sequence; identical to SEQ ID NO: 152518
  derived and/or modified CDS sequence (opt3) from neuraminidase__InfluenzaA__AHL81075

SEQ ID NO: 152529 - RNA, 1410 nt, Artificial Sequence
  derived and/or modified CDS sequence (opt3) from neuraminidase__InfluenzaA__AHL81086
augaaccccaaucagaagaucauuaccauaggcagcgugucccugacaaucucuacuauuugcuucuuuaugcagaucgccauucucaucacgaccgucacacuucacuucaaacaguacgaguuuaacucaccuccaaauaaccagguuaugcuguguaagccgacuauaaucgaaagaaauauuaccgagaucguguauuugacaaacaccacuauugaaaaagagaucugccccaaguuagcugaauacaggaauuggaguaaaccucagugugacauaacaggguucgcaccauuuagcaaggauaacuccauucggcugucugccggaggugacaucuggguaacccgcgagcccuaugugucgugcgauccugacaaguguuaccaauucgcgcuaggccaggggacgacucucaauaacguccauucaaauaacaccgugcgagaucguacaccauauagaacucugcuuaugaaugagcugggaguucccuuucacuugggcaccaaacaggugugcauugcuuggagcaguuccucuugucaugacgguaaggccuggcuccacgucugcaucacaggggaugacaaaaacgcaaccgccagcuucaucuacaauggaaggcugguggauuccguaguuucauggaguaaggaaauucugcggacgcaggagagcgaaugugugugcauaaacggcacuuguacagucgugaugaccgacggcucugcuuccgggaaagcagauacuaagauccucuuuauugaggagggaaagaucgugcauacaucaaccuuaagcgguagugcccaacacgucgaagagugcucuugcuauccucgcuacccaggcguuagaugugugugcagggacaacuggaaaggguccaaucggccgauaguagauauuaacaucaaggaccacagcaucgugucgucuuacgucuguuccggacuggugggcgacacgccccgcaaaaaugauucaaguagcuccucucauugccuugacccuaacaaugaagagggugggcacggaguuaagggcugggcuuucgaugacggcaacgauguguggauggggcgaaccauuaaugaaacaagcagauugggauaugagacuuuuaaagucaucgaggguuggucaaacccaaagaguaaacugcagauuaauaggcaagugauaguagaccggggcaaccguuccggguacagcggaaucuucucuguugaaggcaagucauguauuaaucgcugcuuuuauguggagcuaaucagagguaggaaggaagagaccgaaguccucuggacaaguaacagcaucguggucuucugugggacuuccggcaccuacggaacaggcucuuggcccgauggggccgaccugaaucuuaugccuauuuga

SEQ ID NO: 152530 - RNA, 1410 nt, Artificial Sequence
  derived and/or modified CDS sequence (opt3) from neuraminidase__InfluenzaA__AHL81098
augaaccccaaucagaagaucauuaccauaggcagcgugucccugacaaucucuacuauuugcuucuuuguccaaaucgccauucucaucacgaccguuacacuucacuucaaacaguacgaguuuaacucaccuccaaauaaccaggugaugcugugugaaccgacuauaaucgagagaaauauuaccgaaaucguauauuugacaaacaccacuauugagaaggaaaucugccccaaauuagcugaguacaggaauuggaguaagccucagugugacauaacaggguucgcaccauuuagcaaagauaacuccauucggcugucugccggaggugacaucugggugacccgcgagcccuaugucucgugcgauccugacaaguguuaccaauucgcgcuaggccaggggacgacucucaauaacgugcauucaaauaacaccguucgagaucguacaccauauagaacucugcuuaugaaugaacugggagugcccuuucacuugggcaccaagcaggucugcauugcuuggagcaguuccucuugucaugacgguaaagccuggcuccacgugugcaucacaggggaugacaagaacgcaaccgccagcuucaucuacaauggaaggcugguagauuccguugugucauggaguaaagagauucugcggacgcaggaaagcgagugugucugcauaaacggcacuuguacaguggugaugaccgacggcucugcuuccgggaaggcagauacuaaaauccucuuuauugaggaaggaaagaucguccauacaucaaccuuaagcgguagugcccaacacguugaggaaugcucuugcuauccucgcuacccaggcgugagauguguaugcagggacaacuggaagggguccaaucggccgauaguggauauuaacaucaaagaccacagcaucgucucgucuuacguguguuccggacugguuggcgacacgccccgcaagaaugauucaaguagcuccucucauugccuugacccuaacaaugaggaaggugggcacggagugaaaggcugggcuuucgaugacggcaacgaugucuggauggggcgaaccauuaaugagacaagcagauugggauaugagacuuuuaaggugaucgaagguuggucaaacccaaaaaguaagcugcagauuaauaggcagguaauaguugaccggggcaaccguuccggguacagcggaaucuucucuguggagggcaaaucauguauuaaucgcugcuuuuaugucgaacuaaucagagguaggaaggaggaaaccgaggugcucuggacaaguaacagcaucgucguguucugugggacuuccggcaccuacggaacaggcucuuggcccgauggggccgaccugaaucuuaugccuauuuga

SEQ ID NO: 152531 - RNA, 1410 nt, Artificial Sequence; identical to SEQ ID NO: 148757
  derived and/or modified CDS sequence (opt3) from neuraminidase__InfluenzaA__AHL81110

SEQ ID NO: 152532 - RNA, 1410 nt, Artificial Sequence; identical to SEQ ID NO: 148757
  derived and/or modified CDS sequence (opt3) from neuraminidase__InfluenzaA__AHL81121

SEQ ID NO: 152533 - RNA, 1410 nt, Artificial Sequence; identical to SEQ ID NO: 147566
  derived and/or modified CDS sequence (opt3) from neuraminidase__InfluenzaA__AHL81132

SEQ ID NO: 152534 - RNA, 1410 nt, Artificial Sequence; identical to SEQ ID NO: 147566
  derived and/or modified CDS sequence (opt3) from neuraminidase__InfluenzaA__AHL81144

SEQ ID NO: 152535 - RNA, 1410 nt, Artificial Sequence; identical to SEQ ID NO: 147566
  derived and/or modified CDS sequence (opt3) from neuraminidase__InfluenzaA__AHL81156

SEQ ID NO: 152536 - RNA, 1410 nt, Artificial Sequence; identical to SEQ ID NO: 149835
  derived and/or modified CDS sequence (opt3) from neuraminidase__InfluenzaA__AHL81168

SEQ ID NO: 152537 - RNA, 1410 nt, Artificial Sequence; identical to SEQ ID NO: 149835
  derived and/or modified CDS sequence (opt3) from neuraminidase__InfluenzaA__AHL81180

SEQ ID NO: 152538 - RNA, 1410 nt, Artificial Sequence; identical to SEQ ID NO: 147566
  derived and/or modified CDS sequence (opt3) from neuraminidase__InfluenzaA__AHL81192

SEQ ID NO: 152539 - RNA, 1410 nt, Artificial Sequence
  derived and/or modified CDS sequence (opt3) from neuraminidase__InfluenzaA__AHL81215
augaaccccaaucagaagaucauuaccauaggcagcgugucccugacaaucucuacuauuugcuucuuuaugcaaaucgccauucucaucacgaccgucacacuucacuucaaacaguacgaguuuaacucaccuccaaauaaccagguuaugcugugugaaccgacuauaaucgagagaaauauuaccgaaaucauguauuugacaaacaccacuauugagaaggaaaucugccccaaauuagcugaguacaggaauuggaguaagccucagugugacauaacaggguucgcaccauuuagcaaagauaacuccauucggcugucugccggaggugacaucugggugacccgcgagcccuauguaucgugcgauccugacaaguguuaccaauucgcgcuaggccaggggacgacucucaauaacgugcauucaaauaacaccguccgagaucguacaccauauagaacucugcuuaugaaugaacugggagugcccuuucacuugggcaccaagcagguuugcauugcuuggagcaguuccucuugucaugacgguaaagccuggcuccacgugugcaucacaggggaugacaagaacgcaaccgccagcuucaucuacaauggaaggcuggucgauuccgugguaucauggaguaaagagauucugcggacgcaggaaagcgaguguguuugcauaaacggcacuuguacaguggucaugaccgacggcucugcuuccgggaaggcagauacuaaaauccucuuuauugaggaaggaaagaucgugcauacaucaaccuuaagcgguagugcccaacacguggaggaaugcucuugcuauccucgcuacccaggcgucagauguguuugcagggacaacuggaagggguccaaucggccgauaguggauauuaacaucaaagaccacagcaucguaucgucuuacguguguuccggacuggucggcgacacgccccgcaagaaugauucaaguagcuccucucauugccuugacccuaacaaugaggaaggugggcacggagugaaaggcugggcuuucgaugacggcaacgauguuuggauggggcgaaccauuaaugagacaagcagauugggauaugagacuuuuaaggugaucgaagguuggucaaacccaaaaaguaagcugcagauuaauaggcaggucauaguggaccggggcaaccguuccggguacagcggaaucuucucuguagagggcaaaucauguauuaaucgcugcuuuuauguugaacuaaucagagguaggaaggaggaaaccgaggugcucuggacaaguaacagcaucgucguguucugugggacuuccggcaccuacggaacaggcucuuggcccgauggggccgaccugaauuucaugccuauuuga

SEQ ID NO: 152540 - RNA, 1410 nt, Artificial Sequence
  derived and/or modified CDS sequence (opt3) from neuraminidase__InfluenzaA__AHL81227
augaaccccaaucagaagaucauuaccauaggcagcgugugcaugacaaucgggauggccaaccugauucuccaaaucggaaauauuaucuccauauggaucucucacucaauucagcuugguaaccagagucagaucgagacuuguaaucaaagcgucauuacguacgaaaacaauaccuggguuaaccagacauaugugaauaucuccaacacuaauuucgcugcaggccagucuguagugucggucaaacuggccgggaacucauccuugugcccugugaguggaugggcgauauacuccaaggacaauucuauuagaaucggcagcaaaggugauguuuuugugauuagggagccauucaucuccuguucaccguuagaaugccggaccuuuuuccugacacagggggcucuacucaacgacaagcauaguaauggaaccaucaaagaucgcagccccuaucgaacucugaugucuuguccuacaggcgaggucccaucccccuacaacucacguuuugaaagcguggccuggagugcaucugccugccacgacggcauuaacuggcuuaccauagggaucuccggaccugauaauggugcuguagcaguucugaaguauaacggcauuaucacggacacuauaaagagcuggagaaauaacauuuugaggacccaagagucggagugugccugcgugaaugggucuuguuucacaaucaugacugauggaccauccgacggccaggcuucauacaaaaucuuucggauugaaaaggguaaaaucgucaagaguguggagaugaacgcccccaauuaucauuacgaagagugcagcuguuacccugauuccucugagauuaccugcgugugccgcgacaacuggcacgggagcaauagaccaugggucucauucaaccagaaucucgaauaucagauaggauacaucuguaguggcauuuuuggcgauaacccgaggcccaaugacaaaacaggguccugcggaccuguuagcucuaacggugcgaauggcgugaagggguucucauuuaaguauggaaacggcguauggaucggucggaccaaaaguaucagcucccgcaagggguucgagaugauuugggauccaaacggcuggacgggaacugacaauaacuuuucuauaaaacaagacaucauuggcaucaaugaauggucgggguacagcggauccuucgugcagcaucccgagcugacaggucuggauuguauucgaccuugcuucugggucgaacucaucagaggcaggccaaaggagaacaccauauggacuucagggaguucuaucagcuuuuguggagugaauagcgacacaguuggcuggucauggcccgauggugcagaguuaccguucaccauugacaaauga

SEQ ID NO: 152541 - RNA, 1410 nt, Artificial Sequence; identical to SEQ ID NO: 147566
  derived and/or modified CDS sequence (opt3) from neuraminidase__InfluenzaA__AHL81238

SEQ ID NO: 152542 - RNA, 1410 nt, Artificial Sequence; identical to SEQ ID NO: 147566
  derived and/or modified CDS sequence (opt3) from neuraminidase__InfluenzaA__AHL81250

SEQ ID NO: 152543 - RNA, 1410 nt, Artificial Sequence; identical to SEQ ID NO: 147566
  derived and/or modified CDS sequence (opt3) from neuraminidase__InfluenzaA__AHL81262

SEQ ID NO: 152544 - RNA, 1410 nt, Artificial Sequence; identical to SEQ ID NO: 147566
  derived and/or modified CDS sequence (opt3) from neuraminidase__InfluenzaA__AHL81274

SEQ ID NO: 152545 - RNA, 1410 nt, Artificial Sequence; identical to SEQ ID NO: 147566
  derived and/or modified CDS sequence (opt3) from neuraminidase__InfluenzaA__AHL81286

SEQ ID NO: 152546 - RNA, 1410 nt, Artificial Sequence; identical to SEQ ID NO: 147566
  derived and/or modified CDS sequence (opt3) from neuraminidase__InfluenzaA__AHL81298

SEQ ID NO: 152547 - RNA, 1410 nt, Artificial Sequence; identical to SEQ ID NO: 152518
  derived and/or modified CDS sequence (opt3) from neuraminidase__InfluenzaA__AHL81310

SEQ ID NO: 152548 - RNA, 1410 nt, Artificial Sequence; identical to SEQ ID NO: 148757
  derived and/or modified CDS sequence (opt3) from neuraminidase__InfluenzaA__AHL81332

SEQ ID NO: 152549 - RNA, 1410 nt, Artificial Sequence
  derived and/or modified CDS sequence (opt3) from neuraminidase__InfluenzaA__AHL81343
augaaccccaaucagaagaucauuaccauaggcagcgugucccugacaaucucuacuauuugcuuccucaugcagaucgccauucuuaucacgaccgucacacugcacuuuaaacaguacgaguucaacucaccuccaaauaaccagguuauguugugugaaccgacuauaaucgagagaaauauuaccgaaaucguguauuuaacaaacaccacuauugagaaggaaaucugccccaaacuggcugaguacaggaauuggaguaagccucagugugacauaacaggguuugcaccauucagcaaagauaacuccauucggcuaucugccggaggugacaucuggguaacccgcgagcccuaugugucgugcgauccugacaaguguuaccaauuugcgcucggccaggggacgacucugaauaacguccauucaaauaacaccgugcgagaucguacaccauauagaacucuucugaugaaugaauugggaguucccuuccaccucggcaccaaacaggugugcauugcuuggagcaguuccucuugucaugacgguaaggccuggcugcacgucugcaucacaggggaugacaagaacgcaaccgccagcuuuaucuacaauggaaggcugguggauuccguaguuucauggaguaaagagauucuccggacgcaggaaagcgagugugugugcauaaacggcacuuguacagucgugaucaccgacggcucugcuuccgggaaggcagauacuaaaauuuuauucaucgaggaaggaaagauagugcauacaucaacccugagcgguagugcccaacacgucgaggaaugcucuugcuauccucgcuacccaggcguuagaugugugugcagggacaacuggaagggguccaaucggccgauuguagauaucaacaucaaagaccacagcauugugucgucuuacgucuguuccggacuugugggcgacacgccccgcaagaaugauucaaguagcuccucucauugcagcgacccuaacaaugaggaaggugggcacggaguuaaaggcugggcuuuugaugacggcaacgauguguggauggggcgaaccaucucagagaagaguagauugggauaugagacauucaaagucauugaagguugguccaauccaaagagcaaacugcagauaaacaggcaagugaucguagaccggggcaaucguucuggguacucaggaauuuuuaguguugagggcaagagcuguaucaaccgcugcuucuauguggaacuaaucagagguaggaaggaggaaacugagguccucuggaccuccaauucuauuguggucuuuugugggacaucgggcacuuacggaaccggcagcuggcccgauggggccgacauaaaccugaugccuaucuga

SEQ ID NO: 152550 - RNA, 1410 nt, Artificial Sequence; identical to SEQ ID NO: 147566
  derived and/or modified CDS sequence (opt3) from neuraminidase__InfluenzaA__AHL81355

SEQ ID NO: 152551 - RNA, 1410 nt, Artificial Sequence; identical to SEQ ID NO: 148757
  derived and/or modified CDS sequence (opt3) from neuraminidase__InfluenzaA__AHL81367

SEQ ID NO: 152552 - RNA, 1410 nt, Artificial Sequence; identical to SEQ ID NO: 148757
  derived and/or modified CDS sequence (opt3) from neuraminidase__InfluenzaA__AHL81378

SEQ ID NO: 152553 - RNA, 1410 nt, Artificial Sequence; identical to SEQ ID NO: 148757
  derived and/or modified CDS sequence (opt3) from neuraminidase__InfluenzaA__AHL81389

SEQ ID NO: 152554 - RNA, 1410 nt, Artificial Sequence; identical to SEQ ID NO: 147566
  derived and/or modified CDS sequence (opt3) from neuraminidase__InfluenzaA__AHL81400

SEQ ID NO: 152555 - RNA, 1410 nt, Artificial Sequence; identical to SEQ ID NO: 152539
  derived and/or modified CDS sequence (opt3) from neuraminidase__InfluenzaA__AHL81412

SEQ ID NO: 152556 - RNA, 1410 nt, Artificial Sequence; identical to SEQ ID NO: 144786
  derived and/or modified CDS sequence (opt3) from neuraminidase__InfluenzaA__AHL81422

SEQ ID NO: 152557 - RNA, 1410 nt, Artificial Sequence; identical to SEQ ID NO: 146074
  derived and/or modified CDS sequence (opt3) from neuraminidase__InfluenzaA__AHL81433

SEQ ID NO: 152558 - RNA, 1410 nt, Artificial Sequence
  derived and/or modified CDS sequence (opt3) from neuraminidase__InfluenzaA__AHL88954
augaaccccaaucagaagaucauuaccauaggcagcgugucccugacaaucucuacuauuugcuucuuuaugcaaaucgccauucucaucacgaccgucacacuucacuucaaacaguacgaguuuaacucaccuccaaauaaccagguuaugcugugugaaccgacuauaaucgagagaaauauuaccgaaaucguguauuugacaaacaccacuauugagaaggaaaucugccccaaauuagcugaguacaggaauuggaguaagccucaguguaacauaacaggguucgcaccauuuagcaaagacaauuccauucggcugucugccggaggugauaucuggguaacccgcgagcccuaugugucgugcgacccugauaaguguuaccaauucgcgcuaggccaggggacgacucucaacaauguccauucaaacgacaccgugcacgaucgaacaccauaucguacucugcuuaugaaugaacugggaguucccuuucauuugggcaccaaacaggugugcauugcuuggagcaguuccucuugucacgacgguaaggccuggcuccaugucugcgugacaggggaugacaagaacgcaaccgccagcuucaucuacaauggaagacugguagauuccaucguuucauggaguaaagagauucugaggacgcaggaaagcgagugugugugcauaaacggcacuuguacagucgugaugaccgacggcucugcuuccgggaaggcagauacuaaaauccucuuuauuaaggagggaaagaucgugcacacaucaaccuuaagcgguagugcccaacacgucgaagagugcucuugcuauccucgguacccaggcguucgcugugugugcagagacaacuggaaaggguccaauaggccgauaguagauauuaacaucaaggacuacagcaucgugucgucuuaugucuguuccggacuggugggcgacacgccccggaaaaaugauucaaguagcuccucucauugccuugacccuaacaaugaagagggugggcacggaguuaagggcugggcuuucgaugacggcaacgauguguggauggggcgcaccauuagcgaaaaauugcgaucaggauacgagacauuuaaggucaucgaggguuggaguaauccaaacuccaaacugcagauuaauagacaggugauaguagacagggauaaccggagcggcuauucugggaucuucucaguugaaggaaagaguuguauuaaucguugcuuuuacguggagcuaauccgcggcagaaaggaagagacugaaguccucuggaccagcaacuccaucguggucuucugugguacaucugggacuuauggcaccggaucguggcccgacggcgccgauauuaaucugaugccuauauga

SEQ ID NO: 152559 - RNA, 1410 nt, Artificial Sequence
  derived and/or modified CDS sequence (opt3) from neuraminidase__InfluenzaA__AHL89033
augaaccccaaucagaagaucauuaccauaggcagcgugucccugacaaucucuacuauuugcuucuuuaugcaaaucgccauucucaucacgaccgucacacuucacuucaaacaguacgaguuuaacucaccuccaaauaaccagguuaugcugugugaaccgacuauaaucgagagaaauauuaccgaaaucguguauuugacaaacaccacuauugagaaggaaaucugccccaaauuagcugaguacaggaauuggaguaagccucaguguaacauaacaggguucgcaccauuuagcaaagacaauuccauucggcugucugccggaggugauaucuggguaacccgcgagcccuaugugucgugcgacccugauaaguguuaccaauucgcgcuaggccaggggacgacucucaacaauguccauucaaacgacaccgugcacgaucgaacaccauaucguacucugcuuaugaaugaacugggaguucccuuucauuugggcaccaaacaggugugcauugcuuggagcaguuccucuugucacgacgguaaggccuggcuccaugucugcgugacaggggaugacaagaacgcaaccgccagcuucaucuacaauggaagacugguagauuccaucguuucauggaguaaagagauucugaggacgcaggaaagcgagugugugugcauaaacggcacuuguacagucgugaugaccgacggcucugcuuccgggaaggcagauacuaaaauccucuuuauugaggaaggaaagaucgugcacacaucaaccuuaagcgguagugcccaacacgucgaggaaugcucuugcuauccucgguacccaggcguucgcugugugugcagagacaacuggaagggguccaauaggccgauaguagauauuaacaucaaagacuacagcaucgugucgucuuaugucuguuccggacuggugggcgacacgccccggaagaaugauucaaguagcuccucucauugccuugacccuaacaaugaggaaggugggcacggaguuaaaggcugggcuuucgaugacggcaacgauguguggauggggcgcaccauuagcgagaaguugcgaucaggauacgagacauuuaaagucaucgaagguuggaguaauccaaacuccaagcugcagauuaauagacaggugauaguagacaggggcaaccggagcggguauucuggaaucuucucaguugaggauaaaaguuguauuaaucguugcuuuuacguggaacuaauccgcggcagaaaggaggaaacugagguccucuggaccagcaacuccaucguggucuucugugguacaucugggacuuauggcaccggaucguggcccgacggcgccgauauuaaucugaugccuauauga

SEQ ID NO: 152560 - RNA, 1410 nt, Artificial Sequence
  derived and/or modified CDS sequence (opt3) from neuraminidase__InfluenzaA__AHL89045
augaaccccaaucagaagaucauuaccauaggcagcgugucccugacaaucucuacuauuugcuucuuuaugcaaaucgccauucucaucacgaccgucacacuucacuucaaacaguacgaguuuaacucaccuccaaauaaccagguuaugcugugugaaccgacuauaaucgagagaaauauuaccgaaaucguguauuugacaaacaccacuauugagaaggaaaucugccccaaauuagcugaguacaggaauuggaguaagccucaguguaacauaacaggguucgcaccauuuagcaaagacaauuccauucggcugucugccggaggugauaucuggguaacccgcgagcccuaugugucgugcgacccugauaaguguuaccaauucgcgcuaggccaggggacgacucucaacaauguccauucaaacgacaccgugcacgaucgaacaccauaucguacucugcuuaugaaugaacugggaguucccuuucauuugggcaccaaacaggugugcauugcuuggagcaguuccucuugucacgacgguaaggccuggcuccaugucugcgugacaggggaugacaagaacgcaaccgccagcuucaucuacaauggaagacugguagauuccaucguuucauggaguaaagagauucugaggacgcaggaaagcgagugugugugcauaaacggcacuuguacagucgugaugaccgacggcucugcuuccgggaaggcagauacuaaaauccucuuuauugaggaaggaaagaucgugcacacaucaaccuuaagcgguagugcccaacacgucgaggaaugcucuugcuauccucggcauccaggcguucgcugugugugcagagacaacuggaagggguccaauaggccgauaguagauauuaacaucaaagacuacagcaucgugucgucuuacgucuguuccggacuggugggcgacacgccccggaagaaugauucaaguagcuccucucacugccuugacccuaacaaugaggaaggugggcauggaguuaaaggcugggcuuucgaugacggcaacgauguguggauggggcgcaccauuagcgagaaguugcgaucaggauaugagacauuuaaagucaucgaagguuggaguaauccaaacuccaagcugcagacuaauagacaggugauuguagacaggggcaaccggagcggguacucuggaauauucucaguugagggcaaaaguuguaucaaucguugcuuuuauguggaacuaauucgcgguagaaaggaggaaaccgagguccucuggacaagcaacuccaucguggucuucugugggacuucuggcaccuacggaacaggcucguggcccgauggggccgacaucaaucugaugccuauuuga

SEQ ID NO: 152561 - RNA, 1410 nt, Artificial Sequence
  derived and/or modified CDS sequence (opt3) from neuraminidase__InfluenzaA__AHL89057
augaaccccaaucagaagaucauuaccauaggcagcgugucccugacaaucucuacuauuugcuucuuuaugcaaaucgccauucucaucacgaccgucacacuucacuucaaacaguacgaguuuaacucaccuccaaauaaccagguuaugcugugugaaccgacuauaaucgagagaaauauuaccgaaaucguguauuugacaaacaccacuauugagaaggaaaucugccccaaauuagcugaguacaggaauuggaguaagccucaguguaacauaacaggguucgcaccauuuagcaaagacaauuccauucggcugucugccggaggugauaucuggguaacccgcgagcccuaugugucgugcgacccugauaaguguuaccaauucgcgcuaggccaggggacgacucucaacaauguccauucaaacgacaccgugcacgaucgaacaccauaucguacucugcuuaugaaugaacugggaguucccuuucauuugggcaccaaacaggugugcauugcuuggagcaguuccucuugucacgacgguaaggccuggcuccaugucugcgugacaggggaugacaagaacgcaaccgccagcuucaucuacaauggaagacugguagauuccaucguuucauggaguaaagagauucugaggacgcaggaaagcgagugugugugcauaaacggcacuuguacagucgugaugaccgacggcucugcuuccgggaaggcagauacuaaaauccucuuuauugaggaaggaaagaucgugcacacaucaaccuuaagcgguagugcccaacacgucgaggaaugcucuugcuauccucgguacccaggcguucgcugugugugcagagacaacuggaagggguccaauaggccgauaguagauauuaacaucaaagacuacagcaucgugucgucuuaugucuguuccggacuggugggcgacacgccccggaagaaugauucaaguagcuccucucauugccuugacccuaacaaugaggaaggugggcacggaguuaaaggcugggcuuucgaugacggcaacgauguguggauggggcgcaccauuagcgagaaguugcgaucaggauacgagacauuuaaagucaucgaagguuggaguaagccaaauuccaaacugcagauuaacagacaggugauaguagacaggggcaaucggagcggguauucuggaaucuucucaguugagggcaagaguuguauuaaccguugcuuuuacguggaacuaauccgcgguagaaaggaggaaacugagguccucuggaccagcaauuccaucguggucuucugugggacaucuggcacuuauggaaccggcucguggcccgauggggccgacauuaaccugaugccuauauga

SEQ ID NO: 152562 - RNA, 1410 nt, Artificial Sequence; identical to SEQ ID NO: 143755
  derived and/or modified CDS sequence (opt3) from neuraminidase__InfluenzaA__AHL89069

SEQ ID NO: 152563 - RNA, 1410 nt, Artificial Sequence; identical to SEQ ID NO: 142760
  derived and/or modified CDS sequence (opt3) from neuraminidase__InfluenzaA__AHL89081

SEQ ID NO: 152564 - RNA, 1410 nt, Artificial Sequence; identical to SEQ ID NO: 142760
  derived and/or modified CDS sequence (opt3) from neuraminidase__InfluenzaA__AHL89093

SEQ ID NO: 152565 - RNA, 1410 nt, Artificial Sequence; identical to SEQ ID NO: 142760
  derived and/or modified CDS sequence (opt3) from neuraminidase__InfluenzaA__AHL89117

SEQ ID NO: 152566 - RNA, 1410 nt, Artificial Sequence; identical to SEQ ID NO: 142760
  derived and/or modified CDS sequence (opt3) from neuraminidase__InfluenzaA__AHL89129

SEQ ID NO: 152567 - RNA, 1410 nt, Artificial Sequence
  derived and/or modified CDS sequence (opt3) from neuraminidase__InfluenzaA__AHL89141
augaaccccaaucagaagaucauuaccauaggcagcgugucccugacaaucucuacuauuugcuucuuuaugcaaaucgccauucucaucacgaccgucacacuucacuucaaacaguacgaguuuaacucaccuccaaauaaccagguuaugcugugugaaccgacuauaaucgagagaaauauuaccgaaaucguguauuugacaaacaccacuauugagaaggaaaucugccccaaauuagcugaguacaggaauuggaguaagccucaguguaacauaacaggguucgcaccauuuagcaaagacaauuccauucggcugucugccggaggugauaucuggguaacccgcgagcccuaugugucgugcgacccugauaaguguuaccaauucgcgcuaggccaggggacgacucucaacaauguccauucaaacgacaccgugcacgaucgaacaccauaucguacucugcuuaugaaugaacugggaguucccuuucauuugggcaccaaacaggugugcauugcuuggagcaguuccucuugucacgacgguaaggccuggcuccaugucugcgugacaggggaugacaagaacgcaaccgccagcuucaucuacaauggaagacugguagauuccaucguuucauggaguaaagagauucugaggacgcaggaaagcgagugugugugcauaaacggcacuuguacagucgugaugaccgacggcucugcuuccgggaaggcagauacuaaaauccucuuuauugaggaaggaaagaucgugcacacaucaaccuuaagcgguagugcccaacacgucgaggaaugcucuugcuauccucgguacccaggcguucgcugugugugcagagacaacuggaagggguccaauaggccgauaguagauauuaacaucaaagacuacagcaucgugucgucuuaugucuguuccggacuggugggcgacacgccccggaagaaugauucaaguagcuccucucauugccuugacccuaacaaugaggaaggugggcacggaguuaaaggcugggcuuucgaugacggcaacgauguguggauggggcgcaccauuagcgagaaguugcgacugggauacgagacauuuaaagucaucgaagguuggucaaauccaaacaguaagcuacagacuaauagacaggugauuguagacaggggcaaccgguccggguauagcggaauauucucuguugagggcaaaucauguaucaaucguugcuuuuacguggaacucauucgcgguagaaaggaggaaaccgagguccuguggacaaguaacagcaucguggucuucugugggacuuccggcaccuauggaacaggcucuuggcccgauggggccgacaucaaucuuaugccuauuuga

SEQ ID NO: 152568 - RNA, 1410 nt, Artificial Sequence
  derived and/or modified CDS sequence (opt3) from neuraminidase__InfluenzaA__AHL89153
augaaccccaaucagaagaucauuaccauaggcagcgugucccugacaaucucuacuauuugcuucuuuaugcaaaucgccauucucaucacgaccgucacacuucacuucaaacaguacgaguuuaacucaccuccaaauaaccagguuaugcugugugaaccgacuauaaucgagagaaauauuaccgaaaucguguauuugacaaacaccacuauugagaaggaaaucugccccaaauuagcugaguacaggaauuggaguaagccucaguguaacauaacaggguucgcaccauuuagcaaagacaauuccauucggcugucugccggaggugauaucuggguaacccgcgagcccuaugugucgugcgacccugauaaguguuaccaauucucacuaggccaggggacgacucucaacaauguccauagcaacgacaccgugcacgaucgaacaccauaucguacucugcuuaugaaugaacugggaguucccuuucauuugggcaccaaacaggugugcauugcguggaguuccucuagcugucacgacgguaaggcuuggcuccaugucugcgugacaggggaugacaagaacgccaccgcauccuucaucuacaauggaagacugguagauucaaucguuaguuggagcaaagagauucugaggacgcaggaaucugagugugugugcauaaacggcacuuguacagucgugaugaccgacggcuccgccucagggaaggcugauacuaaaauccucuuuauugaggaaggaaagaucgugcacacaagcaccuuaagugguucugcacaacacgucgaggaaugcuccugcuauccucgguacccaggcguucgcugugugugcagagacaacuggaaggggagcaauaggccgauaguagauauuaacaucaaagacuacucgaucgugucuuccuaugucuguucaggacuggugggcgacacgccccggaagaaugauaguagcuccucuagccauugccuugacccuaacaaugaggaaggugggcacggaguuaaaggcugggccuucgaugacggcaacgauguguggauggggcgcaccauuucagagaaguugcgaaguggauacgagacauuuaaagucaucgaagguugguccaauccaaacagcaagcugcagauuaauagacaggugauaguagacaggggcaaccggucuggguauucaggaaucuucaguguugagggcaaaagcuguauuaaucguugcuuuuacguggaacuaauccgcgguagaaaggaggaaacugagguccucuggaccuccaacucuaucguggucuucugugggacaucgggcacuuauggaaccggcagcuggcccgauggggcugacauuaaucugaugccuauauga

SEQ ID NO: 152569 - RNA, 1410 nt, Artificial Sequence; identical to SEQ ID NO: 142760
  derived and/or modified CDS sequence (opt3) from neuraminidase__InfluenzaA__AHL89165

SEQ ID NO: 152570 - RNA, 1410 nt, Artificial Sequence
  derived and/or modified CDS sequence (opt3) from neuraminidase__InfluenzaA__AHL89177
augaaccccaaucagaagaucauuaccauaggcagcgugucccugacaaucucuacuauuugcuucuuuaugcaaaucgccauucucaucacgaccgucacacuucacuucaaacaguacgaguuuaacucaccuccaaauaaccagguuaugcugugugaaccgacuauaaucgagagaaauauuaccgaaaucguguauuugacaaacaccacuauugagaaggaaaucugccccaaauuagcugaguacaggaauuggaguaagccucaguguaacauaacaggguucgcaccauuuagcaaagacaauuccauucggcugucugccggaggugauaucuggguaacccgcgagcccuaugugucgugcgacccugauaaguguuaccaauucgcgcuaggccaggggacgacucucaacaauguccauucaaacgacaccgugcacgaucgaacaccauaucguacucugcuuaugaaugaacugggaguucccuuucauuugggcaccaaacaggugugcauugcuuggagcaguuccucuugucacgacgguaaggccuggcuccaugucugcgugacaggggaugacaagaacgcaaccgccagcuucaucuacaauggaagacugguagauuccaucguuucauggaguaacgagauucugaggacgcaggaaagcgagugugugugcauaaacggcacuuguacagucgugaugaccgacggcucugcuuccgggaaagcagauacuaagauccucuuuauugaggaaggaaaaaucgugcacacaucaaccuuaagcgguagugcccaacacgucgaggaaugcucuugcuauccucgguacccaggcguucgcugugugugcagagacaauuggaagggguccaacaggccgauaguagauauuaauaucaaggacuacagcaucgugucgucuuaugucuguuccggacuggugggcgacacgccccggaaaaacgauucaaguagcuccucucauugccuugacccuaauaacgaggaaggugggcacggaguuaagggcugggcuuucgaugacggcaaugauguguggauggggcgcaccauuagcgagaaauugcgaucaggauacgagacauuuaaggucaucgaagguuggaguaacccaaauuccaaacugcagauuaacagacaggugauaguagacaggggcaaucggagcggguauucuggaaucuucucaguugagggcaagaguuguauuaaccguugcuuuuacguggaacuaauccgcgguagaaaagaggaaaaugagguccucuggacuagcaacuccaucguggucuucugugggaccucuggcacauauggaacuggcucguggcccgauggggccgacauuaaucugaugccuauauga

SEQ ID NO: 152571 - RNA, 1410 nt, Artificial Sequence; identical to SEQ ID NO: 144612
  derived and/or modified CDS sequence (opt3) from neuraminidase__InfluenzaA__AHL89189

SEQ ID NO: 152572 - RNA, 1410 nt, Artificial Sequence; identical to SEQ ID NO: 143755
  derived and/or modified CDS sequence (opt3) from neuraminidase__InfluenzaA__AHL89201

SEQ ID NO: 152573 - RNA, 1410 nt, Artificial Sequence; identical to SEQ ID NO: 144612
  derived and/or modified CDS sequence (opt3) from neuraminidase__InfluenzaA__AHL89213

SEQ ID NO: 152574 - RNA, 1410 nt, Artificial Sequence
  derived and/or modified CDS sequence (opt3) from neuraminidase__InfluenzaA__AHL89225
augaaccccaaucagaagaucauuaccauaggcagcgugucccugacaaucucuacuauuugcuucuuuaugcaaaucgccauucucaucacgaccgucacacuucacuucaaacaguacgaguuuaacccuccaccgaauaaccagguuaugcugugugaacccacuauaaucgagagaaauauuaccgaaaucguguauuugacaaacaccacuauugagaaggaaaucugcccuaaauuagcugaguacaggaauuggucaaagccacaguguaacauaacaggguucgcacccuuuaguaaagacaauagcauucggcuguccgccggaggugauaucuggguaacccgcgagccuuaugugucuugcgacccagauaaguguuaccaauucgcgcuaggccaggggacgacucucaacaauguccauucgaacgacaccgugcacgaucgaacacccuaucguacucugcuuaugaaugaacugggaguuccuuuucauuugggcaccaaacaggugugcauugcuuggucaagcaguuccugucacgacgguaaggccuggcuccaugucugcgugacaggggaugacaagaacgcaaccgccucuuucaucuacaauggaagacugguagauagcaucguuuccuggucaaaagagauucugaggacgcaggaaagugagugugugugcauaaacggcacuuguacagucgugaugaccgacggcagcgcuucugggaaggcagauacuaaaauccucuuuauugaggaaggaaagaucgugcacacauccaccuuaucagguagcgcccaacacgucgaggaaugcaguugcuauccacgguacccgggcguucgcugugugugcagagacaacuggaaggggucuaauaggcccauaguagauauuaacaucaaagacuacuccaucgugagcucguaugucuguucuggacuggugggcgacacgccucggaagaaugauuccucaaguagcucccauugccuugacccaaacaaugaggaaggugggcacggaguuaaaggcugggcuuucgaugacggcaacgauguguggauggggcgcaccauuucugagaaguugcgacugggauacgagacauuuaaagucaucgaagguuggagcaaucccaacucaaagcuacagacuaauagacaggugauuguagacaggggcaaccggaguggguauuccggaauauucagcguugagggcaaaucuuguaucaaucguugcuuuuacguggaacucauucgcgguagaaaggaggaaaccgagguccuguggacaucaaacaguaucguggucuucugugggacuagcggcaccuauggaacaggcuccuggccugauggggccgacaucaaucuuaugccaauuuga

SEQ ID NO: 152575 - RNA, 1410 nt, Artificial Sequence; identical to SEQ ID NO: 144612
  derived and/or modified CDS sequence (opt3) from neuraminidase__InfluenzaA__AHL89237

SEQ ID NO: 152576 - RNA, 1410 nt, Artificial Sequence; identical to SEQ ID NO: 143755
  derived and/or modified CDS sequence (opt3) from neuraminidase__InfluenzaA__AHL89261

SEQ ID NO: 152577 - RNA, 1410 nt, Artificial Sequence
  derived and/or modified CDS sequence (opt3) from neuraminidase__InfluenzaA__AHL89273
augaaccccaaucagaagaucauuaccauaggcagcgugucccugacaaucucuacuauuugcuucuuuaugcaaaucgccauucucaucacgaccgucacacuucacuucaaacaguacgaguuuaacucaccuccaaauaaccagguuaugcugugugaaccgacuauaaucgagagaaauauuaccgaaaucguguauuugacaaacaccacuauugagaaggaaaucugccccaaauuagcugaguacaggaauuggaguaagccucaguguaacauaacaggguucgcaccauuuagcaaagacaauuccauucggcugucugccggaggugauaucuggguaacccgcgagcccuaugugucgugcgacccugauaaguguuaccaauucgcgcuaggccaggggacgacucucaacaauguccauucaaacgacaccgugcacgaucgaacaccauaucguacucugcuuaugaaugaacugggaguucccuuucauuugggcaccaaacaggugugcauugcuuggagcaguuccucuugucacgacgguaaggccuggcuccaugucugcgugacaggggaugacaagaacgcaaccgccagcuucaucuacaauggaagacugguagauuccaucguuucauggaguaaagagauucugaggacgcaggaaagcgagugugugugcauaaacggcacuuguacagucgugaugaccgacggcucugcuuccgggaaggcagauacuaaaauccucuuuauugaggaaggaaagaucgugcacacaucaaccuuaagcgguagugcccaacacgucgaggaaugcucuugcuauccucgguacccaggcguucgcugugugugcagagacaacuggaagggguccaauaggccgauaguagauauuaacaucaaagacuacagcaucgugucgucuuaugucuguuccggacuggugggcgacacgccccggaagaaugauucaaguagcuccucucauugccuugacccuaacaaugaggaaggugggcacggaguuaaaggcugggcuuucgaugacggcaacgauguguggauggggcgcaccauuagcgagaaguugcgacugggauacgagacauuuaaagucaucgaagguuggucaaauccaaacaguaagcuacagacuaauagacaggugauuguagacaggggcaaccgguccggguauagcggaauauucucuguugagggcaaaucauguaucaaucguugcuuuuacguggaacucauucgcgguagaaaggaggaaaccgauguccuguggacaaguaacagcaucguggucuucugugggacuuccggcaccuauggaacaggcucuuggcccgacggggccgauaucaaucuuaugccuauuuga

SEQ ID NO: 152578 - RNA, 1410 nt, Artificial Sequence
  derived and/or modified CDS sequence (opt3) from neuraminidase__InfluenzaA__AHL89285
augaaccccaaucagaagaucauuaccauaggcagcgugucccugacaaucucuacuauuugcuucuuuaugcaaaucgccauucucaucacgaccgucacacuucacuucaaacaguacgaguuuaacucaccuccaaauaaccagguuaugcugugugaaccgacuauaaucgagagaaauauuaccgaaaucguguauuugacaaacaccacuauugagaaggaaaucugccccaaauuagcugaguacaggaauuggaguaagccucaguguaacauaacaggguucgcaccauuuagcaaagacaauuccauucggcugucugccggaggugauaucuggguaacccgcgagcccuaugugucgugcgacccugauaaguguuaccaauucgcgcuaggccaggggacgacucucaacaauguccauucaaacgacaccgugcacgaucgaacaccauaucguacucugcuuaugaaugaacugggaguucccuuucauuugggcaccaaacaggugugcauugcuuggagcaguuccucuugucacgacgguaaggccuggcuccaugucugcgugacaggggaugacaagaacgcaaccgccagcuucaucuacaauggaagacugguagauuccaucguuucauggaguaaagagauucugaggacgcaggaaagcgagugugugugcauaaacggcacuuguacagucgugaugaccgacggcucugcuuccgggaaggcagauacuaaaauccucuuuauugaggaaggaaagaucgugcacacaucaaccuuaagcgguagugcccaacacgucgaggaaugcucuugcuauccucgguacccaggcguucgcugugugugcagagacaacuggaagggguccaauaggccgauaguagauauuaacaucaaagacuacagcaucgugucgucuuaugucuguuccggacuggugggcgacacgccccggaagaaugauucaaguagcuccucucauugccuugacccuaacaaugaggaaggugggcacggaguuaaaggcugggcuuucgaugacggcaacgauguguggauggggcgcaccauuagcgagaaguugcgacugggauacgagacauuuaaagucaucgaagguuggucaaauccaaacaguaagcuacagacuaauagacaggugauuguagacaggggcaaccgguccggguauagcggaauauucucuguugagggcaaaucauguaucaaucguugcuuuuacguggaacucauucgcgguagaaaggaggaaaccgauguccuguggacaaguaacagcaucguggucuucuguuccacuucugggaccuauggcacaggaucguggcccgacggcgccgauaucaaucuuaugccuauuuga

SEQ ID NO: 152579 - RNA, 1410 nt, Artificial Sequence; identical to SEQ ID NO: 152577
  derived and/or modified CDS sequence (opt3) from neuraminidase__InfluenzaA__AHL89297

SEQ ID NO: 152580 - RNA, 1410 nt, Artificial Sequence; identical to SEQ ID NO: 152577
  derived and/or modified CDS sequence (opt3) from neuraminidase__InfluenzaA__AHL89309

SEQ ID NO: 152581 - RNA, 1410 nt, Artificial Sequence
  derived and/or modified CDS sequence (opt3) from neuraminidase__InfluenzaA__AHL89321
augaaccccaaucagaagaucauuaccauaggcagcgugucccugacaaucucuacuauuugcuucuuuaugcaaaucgccauucucaucacgaccgucacacuucacuucaaacaguacgaguuuaacucaccuccaaauaaccagguuaugcugugugaaccgacuauaaucgagagaaauauuaccgaaaucguguauuugacaaacaccacuauugagaaggaaaucugccccaaauuagcugaguacaggaauuggaguaagccucagugugacauaacaggguucgcaccauuuagcaaagauaacuccauucggcugucugccggaggugacaucuggguaacccgcgagcccuaugugucgugcgauccugacaaguguuaccaauucgcgcuaggccaggggacgacucucaauaacguccauucaaaugauaccgugcacgaccgaacaccauaucguacucugcuuaugaacgaacugggaguucccuuucauuugggcaccaaacaggugugcauugcuuggagcaguuccucuugucacgaugguaaggccuggcuccaugucugcgugacaggggacgauaagaaugcaaccgccagcuucaucuacaacggaagacugguagacuccguugugucauggaguaaagauauccugaggacgcaggagagcgaaugugucugcauuaauggcacuuguacaguggugaugaccgacggcucugcuuccgggaaggcagauacuaaaauacucuuuaucgaggagggaaagauuguccacaucucaacauuaagcgguagugcccaacacguugaagagugcucuugcuauccucgguacccaggcgugcgcuguguaugcagagacaacuggaagggguccaacaggccgauaguggacauuaauaucaaaaacuacagcaucgucucgucuuauguguguuccggacugguuggcgauacgccccggaagaccgacucaaguagcuccucucauugccuugauccuaauaacgaagagggugggcacggagugaaaggcugggcuuucgacgauggcaaugacgucuggauggggcgcaccauuagcgaaaaguugcgacugggauacgagacauuuaaagugaucgaggguuggucaaacccaaauaguaagcuacagauuaacagacagguaauaguugauaggggcaaucgguccggguauagcggaaucuucucuguggaaggcaaaucauguauuaaccguugcuuuuacgucgagcucauccgcgguagaaaggaagagacugaagugcuguggaccaguaauagcaucgucguguucugugggacauccggcacuuauggaaccggcucuuggcccgacggggccgauauuaaccuuaugccuauauga

SEQ ID NO: 152582 - RNA, 1410 nt, Artificial Sequence
  derived and/or modified CDS sequence (opt3) from neuraminidase__InfluenzaA__AHL89333
augaaccccaaucagaagaucauuaccauaggcagcgugucccugacaaucucuacuauuugcuucuuuaugcaaaucgccauucucaucgcuacggucacccuucacuucaaacaguacgaguuuaacucaccuccaaauaaccagguuaugcugugugaaccgacaauaaucgagagaaauauuacugaaaucguguauuugaccaacacaaccauugagaaggaaaucugccccaaauuagcagaguacaggaauuggaguaagccucaguguaacauaacuggguucgccccauuuagcaaagacaauuccauucggcugucugcgggaggugauaucuggguaacacgcgagcccuaugugucgugcgacccugauaaguguuaccaauucgcucuaggccaggggaccacgcucaacaauguccauucaaacgacacugugcacgaucgaaccccauaucguacacugcuuaugaaugaacugggaguucccuuucauuugggcacuaaacaggugugcauugccuggagcaguuccucuugucacgacgguaaggcauggcuccaugucugcgugaccggggaugacaagaacgccacagcuagcuucaucuacaauggaagacugguagauuccaucguuucauggaguaaagagauucugaggacccaggaaagcgagugugugugcauaaacggcacgugugcagucgugaugacugacggcucugccuccgggaaggcugauacaaaaauccucuuuauugaggaaggaaagaucgugcacaccucaacuuuaagcgguagugcccaacacgucgaggaaugcucuugcuauccucgguacccaggcguucgcugugugugcagagacaacuggaagggguccaauaggccgauaguagauauuaacaucaaagacuacagcaucgugucgucuuaugucuguuccggacuggugggcgacacaccccggaagaaugauucaaguagcuccucucauugccuugacccuaacaaugaggaaggugggcacggaguuaaaggcugggcguucgaugacggcaacgauguguggauggggcgcaccauuagcgagaaguugcgacugggauacgagacguuuaaagucaucgaagguuggucaaauccaaacaguaagcuacagaccaauagacaggugauuguagacaggggcaaccgguccggguauagcggaauauucucuguugagggcaaaucauguaucaaucguugcuuuuacguggaacucauucgcgguagaaaggaggaaacagagguccuguggaccaguaacagcaucguggucuucugugggacuuccggcacauauggaacuggcucuuggcccgauggggcagacaucaaucuuaugccuauuuga

SEQ ID NO: 152583 - RNA, 1410 nt, Artificial Sequence; identical to SEQ ID NO: 142760
  derived and/or modified CDS sequence (opt3) from neuraminidase__InfluenzaA__AHL89345

SEQ ID NO: 152584 - RNA, 1410 nt, Artificial Sequence; identical to SEQ ID NO: 143754
  derived and/or modified CDS sequence (opt3) from neuraminidase__InfluenzaA__AHL89357

SEQ ID NO: 152585 - RNA, 1410 nt, Artificial Sequence; identical to SEQ ID NO: 143755
  derived and/or modified CDS sequence (opt3) from neuraminidase__InfluenzaA__AHL89369

SEQ ID NO: 152586 - RNA, 1410 nt, Artificial Sequence
  derived and/or modified CDS sequence (opt3) from neuraminidase__InfluenzaA__AHL89381
augaaccccaaucagaagaucauuaccauaggcagcgugucccugacaaucucuacuauuugcuucuuuaugcaaaucgccauucucaucacgaccgucacacuucacuucaaacaguacgaguauaacucaccuccaaauaaccagguuaugcugugugaaccgacuauaaucgagagaaauauuaccgaaaucguguacuugacaaacaccacuauugagaaggaaaucugccccaaauuagcugaguauaggaauuggaguaagccucaguguaacauaacaggguuugcaccauucagcaaagacaauuccauucggcugucugccggaggugauaucuggguaacccgcgagcccuacgugucgugcgacccugauaaguguuaucaauuugcgcuaggccaggggacgacucucaacaauguccauucaaacgacaccgugcacgaucgaacaccauaccguacucugcuuaugaaugaacugggaguucccuuccauuugggcaccaaacaggugugcauugcuuggagcaguuccucuugucacgacgguaaggccuggcuccaugucugcgugacaggggaugacaagaacgcaaccgccagcuuuaucuauaauggaagacugguagauuccaucguuucauggaguaaagagauucugaggacgcaggaaagcgagugugugugcauaaacggcacuuguacagucgugaugaccgacggcucugcuuccgggaaggcagauacuaaaauccucuucauugaggaaggaaagaucgugcacacaucaaccuuaagcgguagugcccaacacgucgaggaaugcucuugcuacccucgguacccaggcguucgcugugugugcagagacaacuggaagggguccaauaggccgauaguagauauuaacaucaaagacuauagcaucgugucgucuuacgucuguuccggacuggugggcgacacgccccggaagaaugauucaaguagcuccucucauugccuugacccuaacaaugaggaaggugggcacggaguuaaaggcugggcuuuugaugacggcaacgauguguggauggggcgcaccauuagcgagaaguugcgacugggauaugagacauucaaagucaucgaagguuggucaaauccaaacaguaagcuacagacuaauagacaggugauuguagacaggggcaaccgguccggguacagcggaauauuuucuguugagggcaaaucauguaucaaucguugcuucuauguggaacucauucgcgguagaaaggaggaaaccgagguccuguggacaaguaacagcaucguggucuuuugugggacuuccggcaccuacggaacaggcucuuggcccgauggggccgacaucaaucuuaugccuauuuga

SEQ ID NO: 152587 - RNA, 1410 nt, Artificial Sequence; identical to SEQ ID NO: 152577
  derived and/or modified CDS sequence (opt3) from neuraminidase__InfluenzaA__AHL89405

SEQ ID NO: 152588 - RNA, 1410 nt, Artificial Sequence
  derived and/or modified CDS sequence (opt3) from neuraminidase__InfluenzaA__AHL89417
augaaccccaaucagaagaucauuaccauaggcagcgugucccugacaaucucuacuauuugcuucuuuaugcaaaucgccauucucaucacgaccgucacacuucacuucaaacaguacgaguuuaacucaccuccaaauaaccagguuaugcugugugaaccgacuauaaucgagagaaauauuaccgaaaucguguauuugacaaacaccacuauugagaaggaaaucugccccaaauuagcugaguacaggaauuggaguaagccucagugugacauaacaggguucgcaccauuuagcaaagauaacuccauucggcugucugccggaggugacaucuggguaacccgcgagcccuaugugucgugcgauccugacaaguguuaccaauucgcgcuaggccaggggacgacucucaauaacguccauucaaaugauaccgugcacgaccgaacaccauaucguacucugcuuaugaacgaacugggaguucccuuucauuugggcaccaaacaggugugcauugcuuggagcaguuccucuugucacgaugguaaggccuggcuccaugucugcgugacaggggacgauaagaaugcaaccgccagcuucaucuacaacggaagacugguagacuccguugugucauggaguaaagauauccugaggacgcaggagagcgaaugugucugcauuaauggcacuuguacaguggugaugaccgacggcucugcuuccgggaaggcagauacuaaaauacucuuuaucgaggagggaaagauuguccacacaucaaccuuaagcgguagugcccaacacguugaagagugcucuugcuauccucgguacccaggcgugcgcuguguaugcagagacaacuggaagggguccaacaggccgaucguggacauagauauuaaaaauuacagcaucgucucgucuuauguguguuccggacugguuggcgacacgccccggaagaccgauucaaguagcuccucucauugccuugacccuaacaaugaagagggugggcacggagugaaaggcugggcuuucgaugacggcaacgaugucuggauggggcgcacaaucagcgaaaaguugcgacugggauacgagacuuuuaaagugauugaggguuggucaaauccaaacaguaagcuacagaucaauagacagguaauuguugacaggggcaaccgguccggguauagcggaauauucucuguggaaggcaaaucauguaucaaucguugcuuuuacgucgagcucauucgcgguagaaaggaagagaccgaagugcuguggacaaguaacagcaucgucguguucugugggacuuccggcaccuauggaacaggcucuuggcccgauggggccgacaucaaucuuaugccuauuuga

SEQ ID NO: 152589 - RNA, 1410 nt, Artificial Sequence; identical to SEQ ID NO: 143755
  derived and/or modified CDS sequence (opt3) from neuraminidase__InfluenzaA__AHL89429

SEQ ID NO: 152590 - RNA, 1410 nt, Artificial Sequence; identical to SEQ ID NO: 142760
  derived and/or modified CDS sequence (opt3) from neuraminidase__InfluenzaA__AHL89441

SEQ ID NO: 152591 - RNA, 1410 nt, Artificial Sequence; identical to SEQ ID NO: 142760
  derived and/or modified CDS sequence (opt3) from neuraminidase__InfluenzaA__AHL89453

SEQ ID NO: 152592 - RNA, 1410 nt, Artificial Sequence
  derived and/or modified CDS sequence (opt3) from neuraminidase__InfluenzaA__AHL89465
augaaccccaaucagaagaucauuaccauaggcagcgugucccugacaaucucuacuauuugcuucuuuaugcaaaucgccauucucaucacgaccgucacacuucacuucaaacaguacgaguuuaacucaccuccaaauaaccagguuaugcugugugaaccgacuauaaucgagagaaauauuaccgaaaucguguauuugacaaacauuaccaucgagaaggaaaaaugccccaaguuagcugaguacaggaauuggaguaaaccucaguguaacauaacuggguucgcaccauuuagcaaggacaauuccauucggcugucugccggaggugauaucuggguaacacgcgagcccuaugugucgugcgacccugaucgauguuaccaauucgcgcuaggccaggggaccacgcucaacaauguccauucaaacgacacugugcacgaucguaccccauauagaacacugcuuaugaaugaacugggaguucccuuucauuugggcacuaaacaggugugcauugcuuggagcaguuccucuugucacgacgguaaggccuggcuccaugucugcgugaccggggaugacaagaacgcaacagccagcuucaucuacaauggaaggcugguagauuccaucguuucauggaguaaagagauucugcggacccaggaaagcgagugugugugcauaaacggcacguguacugucgugaugacagacggcucugcuuccgggaaggcagauaccaaaauccucuuuauugaggaaggaaagaucgugcacacuucaacauuaagcgguagugcccaacacgucgaggaaugcucuugcuauccucgcuacccaggcguuagaugugugugcagggacaacuggaagggguccaaucggccgauaguagauauuaacaucaaagacuacagcaucgugucgucuuaugucuguuccggacuggugggcgacacccccaggaagaaugauucaaguagcuccucucauugccuugacccuaacaaugaggaaggugggcacggaguuaaaggcugggcuuucgaugacggcaacgauguguggauggggcgaacgauuagcgagaaguugagacugggauacgagaccuuuaaagucaucgaagguuggucaaauccaaacaguaagcuacagacaaaucgccaggugauuguagaccggggcaaccguuccggguauagcggaauauucucuguugagggcaaaucauguaucaaucgcugcuuuuacguggaacucauuagagguaggaaggaggaaacugagguccuguggaccaguaacagcaucguggucuucugugggacauccggcacuuauggaaccggcucuuggcccgauggggccgacaucaaucuuaugccuauuuga

SEQ ID NO: 152593 - RNA, 1410 nt, Artificial Sequence; identical to SEQ ID NO: 152567
  derived and/or modified CDS sequence (opt3) from neuraminidase__InfluenzaA__AHL89477

SEQ ID NO: 152594 - RNA, 1410 nt, Artificial Sequence
  derived and/or modified CDS sequence (opt3) from neuraminidase__InfluenzaA__AHL89489
augaaccccaaucagaagaucauuaccauaggcagcgugucccugacaaucucuacuauuugcuucuuuaugcagaucgccauucucaucacgaccgucacacuucacuucaaacaguacgaguuuaacucaccuccaaauaaccagguuaugcugugugaaccgacuauaaucgagagaaauauuaccgaaaucguguauuugacaaacaccacuauugagaaggaaaucugccccaaauuagcugaguacaggaauuggaguaagccucaguguagcauaacaggguucgcaccauuuuccaaagacaacucuauucggcugucggccggaggugauaucuggguaacccgcgagcccuaugugucaugcgacccugauaaguguuaccaauucgcgcuaggccaggggacgacucucaauaacguccauagcaaugacaccgugcacgaucgaacaccauaucguacucugcuuaugaacgaacugggaguucccuuucauuugggcaccaaacaggugugcauugcuuggaguuccucuagcugucacgacgguaaggccuggcuccaugucugcgugacaggggaugacaagaaugcaaccgccuccuucaucuacaacggaagacugguagauucaaucguuaguuggagcaaagagauucugaggacgcaggaaucugagugugugugcauaaauggcacuuguacagucgugaugaccgacggcuccgcuucagggaaggcagauacuaaaauccucuuuauugaggaaggaaagaucgugcacacaagcaccuuaagugguucugcccaacacgucgaggaaugcuccugcuauccucgguacccaggcguucgcugugugugcagagacaacuggaaggggagcaacaggccgauaguagauauuaauaucaaagacuacucgaucgugucuuccuaugucuguucaggacuggugggcgacacgccccggaagaacgaucgcaguagcuccucucauugccuugacccuaauaacgaggaaggugggcacggaguuaaaggcugggcuuucgaugacggcaaugauguguggauggggcgaaccauuagcgagaagucaagaaguggauacgagacauuuaaagucaucgaagguugguccaacccacauagcaaguugcagauuaauaggcaagugauaguagaccggggcaaccguucuggguauucaggaaucuucaguguugagggcaaaagcuguauuaaucgcugcuuuuacguggaacugaucagagguaggaaggaggaaacugagguccuauggaccuccaacucuaucguggucuucugugggacaucgggcacuuauggaaccggcagcuggcccgauggggccgacauuaaucucaugccuauauga

SEQ ID NO: 152595 - RNA, 1410 nt, Artificial Sequence; identical to SEQ ID NO: 143755
  derived and/or modified CDS sequence (opt3) from neuraminidase__InfluenzaA__AHL89501

SEQ ID NO: 152596 - RNA, 1410 nt, Artificial Sequence; identical to SEQ ID NO: 143755
  derived and/or modified CDS sequence (opt3) from neuraminidase__InfluenzaA__AHL89513

SEQ ID NO: 152597 - RNA, 1410 nt, Artificial Sequence; identical to SEQ ID NO: 143755
  derived and/or modified CDS sequence (opt3) from neuraminidase__InfluenzaA__AHL89525

SEQ ID NO: 152598 - RNA, 1410 nt, Artificial Sequence; identical to SEQ ID NO: 143755
  derived and/or modified CDS sequence (opt3) from neuraminidase__InfluenzaA__AHL89537

SEQ ID NO: 152599 - RNA, 1413 nt, Artificial Sequence
  derived and/or modified CDS sequence (opt3) from neuraminidase__InfluenzaA__AHL89549
augaaccccaaucagaagaucauuaccauaggcagcaucuccauugccaucgggauuaucucucugaugcuccaaauaggaaacaucauuucaaucugggcuagucacagcauucagacagguucccagaaucauacuggcaucugcaaccagagaauaauuacguacgaaaauucuaccugggugaaccacacauaugucaauaucaacaauacuaacguuguggcagggaaagacaagaccucgguaacacuugccggaaauucaagccuguguaguauuuccggcugggcgaucuacaccaaagauaacucuaucaggauugguagcaagggggacguguucgucauacgggagccuuuuaucuccugcucacauuuggagugucgcacuuucuuuuuaacacaaggagcucugcuaaaugauaaacacaguaacggcaccgugaaggaccgaagcccauaucgugcccucaugucuugcccgcugggcgaagcacccuccccuuacaauucaaaguucgagagcguugccuggagugcuucugcaugucaugaugggaugggauggcuuacgauugguaucuccggcccagacaacggggccguggcuguccugaaauauaacggaauaauuacugaaaccaucaagagcuggaaaaagagaaucuugaggacacaggagucggagugcguguguguaaauggcucuugcuuuacuauuaugaccgauggucccuccaacggggccgcgucauacaaaaucuucaagauugaaaagggaaaaguuacaaagaguauagagcucaaugcaccuaacuuucacuaugaagaguguagcugcuacccagacaccggcacggugaugugugucugccgggauaauuggcacggcuccaaccgccccugggugucuuucaaucagcaucuggacuaccagaucggguauauuugcagcggaguguuuggugauaacccuagaccaaaagacggcaaggggucauguaauccggucacuguugauggagccgacggcgugaaagguuucaguuacaaguaugggaacggcguauggaucggaaggacaaaauccaaucggcugcgcaagggcuuugagaugaucugggaccccaacggguggaccgauacugacagcgauuucucugugaagcaagacgucguggcuauuacagauuggucaggauacagugguagcuuuguucagcacccugaacucaccggcuuagacugcauacgaccauguuucuggguggagcuggucagagggcuucccagggaaaauacgaccaucuggacauccggaucuucgauuagcuucugcggcguggauuccgacacugccaacuggucauggccugauggugcagaguugccauuuaccaucgacaaauga

SEQ ID NO: 152600 - RNA, 1413 nt, Artificial Sequence; identical to SEQ ID NO: 144078
  derived and/or modified CDS sequence (opt3) from neuraminidase__InfluenzaA__AHL89561

SEQ ID NO: 152601 - RNA, 1413 nt, Artificial Sequence; identical to SEQ ID NO: 144078
  derived and/or modified CDS sequence (opt3) from neuraminidase__InfluenzaA__AHL89573

SEQ ID NO: 152602 - RNA, 1413 nt, Artificial Sequence; identical to SEQ ID NO: 144113
  derived and/or modified CDS sequence (opt3) from neuraminidase__InfluenzaA__AHL89585

SEQ ID NO: 152603 - RNA, 1413 nt, Artificial Sequence
  derived and/or modified CDS sequence (opt3) from neuraminidase__InfluenzaA__AHL89597
augaaccccaaucagaagaucauuaccauaggcagcaucuccauugccaucgggauuaucucucugaugcuccaaauaggaaacaucauuucaaucugggcuagucacagcauucagacagguucccagaaucauacuggcaucugcaaccagagaauaauuacguacgaaaauucuaccugggugaaccacacauaugucaauaucaacaauacuaacguuguggcagggaaagacaagaccucgguaacacuugccggaaauucaagccuguguaguauuuccggcugggcgaucuacaccaaagauaacucuaucaggauugguagcaagggggacguguucgucauacgggagccuuuuaucuccugcucacauuuggagugucgcacuuucuuuuuaacacaaggagcucugcuaaaugauaaacacaguaacggcaccgugcgagaccguagcccauauagagcccucaugucuugcccgcugggcgaagcacccuccccuuacaauucaaaguucgagagcguugccuggagugcuucugcaugucaugaugggaugggauggcuuacgauugguaucuccggcccagacaacggggccguggcuguccugaaguauaacggaauaauuacugaaaccaucaaaagcuggaagaaaaggaucuugcggacacaggagucggagugcguguguguaaauggcucuugcuuuacuauuaugaccgauggucccuccaacggggccgcgucauacaagaucuucaaaauugaaaagggaaagguuacaaaaaguauagagcucaaugcaccuaacuuucacuaugaagaguguagcugcuacccagacaccggcacggugaugugugucugccgcgauaauuggcacggcuccaacagacccugggugucuuucaaucagaaccuggacuaccaggugggguauaucugcagcggagucuuuggugauaauccuaggccaaaggacggcaaagggucauguaacccgaugacuguugauggagccgacggcgugaaggguuucaguuacaaauaugggaauggcguauggauuggacggacaaaguccaacaaacugcgcaagggcuuugagaugaucugggaccccaauggguggaccgauacugacagcgauuucucugugaagcaagacgucguggcuaucacagauuggucaggauacagugguagcuuuguucagcauccugaacucaccggcuuagacugcauucgaccauguuucuggguggagcuggucagagggcuucccagggaaaacacgaccauauggacauccggaucuucgaucagcuucugcggcguggauuccgacacugccaauuggucauggccugauggugcagaguugccauuuaccauugacaaauga

SEQ ID NO: 152604 - RNA, 1413 nt, Artificial Sequence; identical to SEQ ID NO: 144113
  derived and/or modified CDS sequence (opt3) from neuraminidase__InfluenzaA__AHL89609

SEQ ID NO: 152605 - RNA, 1413 nt, Artificial Sequence
  derived and/or modified CDS sequence (opt3) from neuraminidase__InfluenzaA__AHL89621
augaaccccaaucagaagaucauuaccauaggcagcaucuccauugccaucgggauuaucucucugaugcuccaaauaggaaacaucauuucaaucugggcuagucacagcauucagacagguucccagaaucauacuggcaucugcaaccagagaauaauuacguacgaaaauucuaccugggugaaccacacauaugucucgaucaauaacacuaauguuguggcagggaaagacaagaccucaguaacacuugccggaaacagcagucuguguuccauuucuggcugggcgaucuacaccaaagauaauagcaucaggauugguuccaagggggacguguucgucauacgggagccuuuuaucucaugcagucauuuggagugucgcacuuucuuuuuaacacaaggagcucugcuaaacgauaaacacagcaauggcaccgugaaggaccgaucuccauaucgugcccucauguccugcccgcugggcgaagcacccucaccuuacaacagcaaguucgagaguguugccuggucugcuuccgcaugucaugaugggaugggauggcuuacgauugguaucagcggcccagacaauggggccguggcuguccugaaauauaacggaauaauuacugaaaccaucaagucguggaaaaagagaaucuugaggacacaggagucugagugcguguguguaaacggcuccugcuuuacuauuaugaccgauggucccucaaauggggccgcgaguuacaaaaucuucaagauugaaaagggaaaaguuacaaagagcauagagcucaacgcaccuaauuuucacuaugaagaguguuccugcuacccagacaccggcacggugaugugugucugccgggauaacuggcacggcucuaaucgccccugggugagcuucaaccagaaucuggacuaccagaucggguauauuugcucaggaguguuuggugauaacccuagaccaaaagacggcaaggggaguuguaauccggucacuguugauggagccgacggcgugaaagguuucuccuacaaguaugggaacggcguauggaucggaaggacaaaaagcaaucggcaucgcaagggcuuugagaugaucugggaccccaacggguggaccgauacugacucugauuucucagugaagcaagacgucguggcuauuacagauuggaguggauacagcgguuccuuuguucagcacccugaacugaccggccucgacugcauacgaccauguuucuggguggaguuagucagagggcugcccagggaaaauacgaccaucuggacaucuggaucgagcauuuccuucugcggcguggauucagacacugccaacuggaguuggccugauggugcagagcuuccauuuaccaucgacaaauga

SEQ ID NO: 152606 - RNA, 1413 nt, Artificial Sequence; identical to SEQ ID NO: 144104
  derived and/or modified CDS sequence (opt3) from neuraminidase__InfluenzaA__AHL89633

SEQ ID NO: 152607 - RNA, 1413 nt, Artificial Sequence; identical to SEQ ID NO: 144113
  derived and/or modified CDS sequence (opt3) from neuraminidase__InfluenzaA__AHL89645

SEQ ID NO: 152608 - RNA, 1413 nt, Artificial Sequence; identical to SEQ ID NO: 144078
  derived and/or modified CDS sequence (opt3) from neuraminidase__InfluenzaA__AHL89657

SEQ ID NO: 152609 - RNA, 1413 nt, Artificial Sequence
  derived and/or modified CDS sequence (opt3) from neuraminidase__InfluenzaA__AHL89669
augaaccccaaucagaagaucauuaccauaggcagcaucuccauugccaucgggauuaucucucugaugcuccaaauaggaaacaucauuucaaucugggcuagucacagcauucagacagguucccagaaucauacuggcaucugcaaccagagaauaauuacguacgaaaauucuaccugggugaaccacacauaugucaauaucaacaauacuaacguuguggcagggaaagacaagaccucgguaacacuugccggaaauucaagccuguguaguauuuccggcugggcgaucuacaccaaagauaacucuaucaggauugguagcaagggggacguguucgucauacgggagccuuuuaucuccugcucacauuuggagugucgcacuuucuuuuuaacacaaggagcucugcuaaaugauaaacacaguaacggcaccgugaaggaccgaagcccauaucgugcccucaugucuugcccgcugggcgaagcacccuccccuuacaauucaaaguucgagagcguugccuggagugcuucugcaugucaugaugggaugggauggcuuacgauugguaucuccggcccagacaacggggccguggcuguccugaaauauaacggaauaauuacugaaaccaucaagagcuggaaaaagagaaucuugaggacacaggagucggagugcguguguguaaauggcucuugcuuuacuauuaugaccgauggucccuccaacggggccgcgucauacaaaaucuucaagauugaaaagggaaaaguuacaaagaguauagagcucaaugcaccuaacuuucacuaugaagaguguagcugcuacccagacaccggcacggugaugugugucugccgggauaauuggcacggcuccaaccgccccugggugucuuucaaucagaaccuggacuaccaggugggguauaucugcagcggagucuuuggugauaauccuagaccaaaagacggcaaggggucauguaacccgaugacuguugauggagccgacggcgugaaagguuucaguuacaaguaugggaauggcguauggauuggaaggacaaaauccaacgagcugcggaagggcuuugaaaugaucugggaccccaauggguggaccgauacugacagcgauuucucugugaagcaagacgucguggcuaucacagauuggucaggauacagugguagcuuuguucagcauccugagcucaccggcuuagacugcauucgcccauguuucuggguggaacugguccgagggcuucccagagagaacacgaccauauggacauccggaucuucgaucagcuucugcggcguggauuccgacacugccaauuggucauggccugauggugcagaauugccauuuaccauugacaaauga

SEQ ID NO: 152610 - RNA, 1413 nt, Artificial Sequence
  derived and/or modified CDS sequence (opt3) from neuraminidase__InfluenzaA__AHL89681
augaaccccaaucagaagaucauuaccauaggcagcaucuccauugccaucgggauuaucucucugaugcuccaaauaggaaacaucauuucaaucugggcuagucacagcauucagacagguucccagaaucauacuggcaucugcaaccagagaauaauuacguacgaaaauucuaccugggugaaccacacauaugucaauaucaacaauacuaacguuguggcagggaaagacaagaccucgguaacacuugccggaaauucaagccuguguaguauuuccggcugggcgaucuacaccaaagauaacucuaucaggauugguagcaagggggacguguucgucauacgggagccuuuuaucuccugcucacauuuggagugucgcacuuucuuuuuaacacaaggagcucugcuaaaugauaaacacaguaacggcaccgugaaggaccgaagcccauaucgugcccucaugucuugcccgcugggcgaagcacccuccccuuacaauucaaaguucgagagcguugccuggagugcuucugcaugucaugaugggaugggauggcuuacgauugguaucuccggcccagacaacggggccguggcuguccugaaauauaacggaauaauuacugaaaccaucaagagcuggaaaaagagaaucuugaggacacaggagucggagugcguguguguaaauggcucuugcuuuacuauuaugaccgauggucccuccaacggggccgcgucauacaaaaucuucaagauugaaaagggaaaaauaacaaagaguaucgagcucaaugcaccuaacuuucacuaugaagaguguagcugcuacccagacaccggcacgguuaugugugugugccgggauaauuggcacggcuccaaccgccccugggucucuuucaaucagaaccuggacuaccaggugggguauauuugcagcggaguguuuggugauaauccuagaccaaaagacggcaaggggucauguaacccgaugacugucgauggagccgacggcguuaaagguuucaguuacaaguaugggaauggcguguggaucggaaggacaaaauccaacaagcugcggaagggcuuugagaugaucugggaccccaauggguggaccgauacugacagcgauuucucuguaaaacaagacguggucgcuauuacagauuggucaggauacagugguagcuuugugcagcauccugaacucaccggcuuagacugcauacgcccauguuucuggguugagcuggugcgagggcuucccagagaaaacgccacgaucuggaccuccggaucuucgauuagcuucugcggcgucgauuccgacacagcaaauuggucauggccugauggugcugaguugccauuuacuaucgacaaguga

SEQ ID NO: 152611 - RNA, 1413 nt, Artificial Sequence
  derived and/or modified CDS sequence (opt3) from neuraminidase__InfluenzaA__AHL89693
augaaccccaaucagaagaucauuaccauaggcagcaucuccauugccaucgggauuaucucucugaugcuccaaauaggaaacaucauuucaaucugggcuagucacagcauucagacagguucccagaaucauacuggcaucugcaaccagagaauaauuacguacgaaaauucuaccugggugaaccacacauaugucaauaucaacaauacuaacguuguggcagggaaagacaagaccucgguaacacuugccggaaauucaagccuguguaguauuuccggcugggcgaucuacaccaaagauaacucuaucaggauugguagcaagggggacguguucgucauacgggagccuuuuaucuccugcucacauuuggagugucgcacuuucuuuuuaacacaaggagcucugcuaaaugauaaacacaguaacggcaccgugaaggaccgaagcccauaucgugcccucaugucuugcccgcugggcgaagcacccuccccuuacaauucaaaguucgagagcguugccuggagugcuucugcaugucaugaugggaugggauggcuuacgauugguaucuccggcccagacaacggggccguggcuguccugaaauauaagggaauaauuacuggcaccaucaaaagcuggagaaagcagaucuugaggacacaggaaucggagugcguguguaugaacgguucuugcuuuacuauuaugaccgaugggcccuccaauggagccgcgucauacaaaaucuucaagauugagaagggcaaaguaacaaagaguauagaacucaacgcaccuaauuuucacuaugaggaauguagcugcuacccagacaccggcaucguuaugugugugugccgggauaacuggcacggguccaaucgccccugggucucuuucaaccagaaucuggacuaccaaauuggauauaucugcagcgguguguuuggcgauaacccuagaccaaaagacggggagggaucauguaauccggugacggucgauggcgccgacgguguuaagggguucaguuacaaauaugacgauggcguguggaucggaaggacuaaguccaaccggcugcgcaaaggcuuugagaugauuugggaccccaauggguggacaaacaccgauagcgacuucucuguaaagcaggauguggucgcuauaacugacuggucaggauacagugguagcuuugugcagcauccugaacucacaggcuuagauugcauccgaccauguuucuggguugagcuggugagagggcuucccagggaaaauaccacgauuuggaccuccggaucuucgaucagcuucugcggcgucaacuccgacacagccaauuggucauggccugauggugcagaguugccauuuacuauugacaaguga

SEQ ID NO: 152612 - RNA, 1413 nt, Artificial Sequence
  derived and/or modified CDS sequence (opt3) from neuraminidase__InfluenzaA__AHL89705
augaaccccaaucagaagaucauuaccauaggcagcaucuccauugccaucgggauuaucucucugaugcuccaaauaggaaacaucauuucaaucugggcuagucacagcauucagaaugguucccagaaccauacaggcaucugcaaucagagaauaauuacuuacgagaacucuacgugggugaaucacaccuaugucucgaucaacaauacaaacguuguggcagggaaagacaagacuucaguaacccuugccggaaauagcagucuguguuccauuucuggcugggcgaucuacacaaaagauaacagcaucaggauugguuccaagggggacguguucgucauacgggaaccuuuuaucucaugcagucauuuggagugucgcaccuucuuuuuaacucaaggagcucugcuaaaugauaaacacagcaacggcacagugaaggaccgaucuccauaucgugcccucauguccugcccgcugggcgaagcacccucaccuuacaauagcaaguucgagaguguugccuggucugcuuccgcaugucaugaugggaugggauggcuuaccauugguaucagcggcccagacaacggggccguggcuguccugaaauauaacggaauaauuacggaaacuaucaagucguggaaaaagagaaucuugaggacccaggagucugagugcguguguguaaauggcuccugcuuuacaauuaugacugauggucccucaaacggggccgcgaguuacaaaaucuucaagauugaaaagggaaaaguuaccaagagcauagagcucaaugcaccuaacuuucacuaugaagaguguuccugcuacccagacacaggcaccgugaugugugucugccgggauaauuggcacggcucuaaccgccccugggugagcuucaaucagaaccuggacuaccagaucggguauauuugcucaggaguguuuggugauaauccuagaccaaaagacggcaaggggaguuguaacccggucacgguugauggagccgacggcgugaaagguuucuccuacaaguaugggaauggcguauggaucggaaggacuaaaagcaaccggcugcgcaagggcuuugagaugaucugggaccccaauggguggacagauaccgacucugauuucucagugaagcaagacgucguggcuauuacugauuggaguggauacagcgguuccuuuguucagcauccugaacucacaggcuuagacugcauacgaccauguuucuggguggagcuggucagagggcuucccagggaaaacaccacgaucuggaccucuggaucgagcauuuccuucugcggcguggauucagacacagccaauuggaguuggccugauggugcagaguugccauuuacuaucgacaaauga

SEQ ID NO: 152613 - RNA, 1413 nt, Artificial Sequence; identical to SEQ ID NO: 144078
  derived and/or modified CDS sequence (opt3) from neuraminidase__InfluenzaA__AHL89717

SEQ ID NO: 152614 - RNA, 1413 nt, Artificial Sequence; identical to SEQ ID NO: 144078
  derived and/or modified CDS sequence (opt3) from neuraminidase__InfluenzaA__AHL89729

SEQ ID NO: 152615 - RNA, 1413 nt, Artificial Sequence
  derived and/or modified CDS sequence (opt3) from neuraminidase__InfluenzaA__AHL89753
augaaccccaaucagaagaucauuaccauaggcagcaucuccauugccaucgggauuaucucucugaugcuccaaauaggaaacaucauuucaaucugggcuagucacagcauucagacagguucccagaaucauacuggcaucugcaaccagagaauaauuacguacgaaaauucuaccugggugaaccacacauaugucucgaucaauaacacuaauguuguggcagggaacgacaaaaccucaguaacacuugccggaaauagcagucuguguuccauuucuggcugggcgaucuacaccaaggauaacagcaucaggauugguuccaaaggggacguguucgucauacgggagccuuuuaucucaugcagucauuuggagugucgcacuuucuuuuuaacacaaggagcucugcuaaaugauaagcacagcaacggcaccgugaaagaccgaucuccauaucgugcccucauguccugcccgcugggcgaagcacccucaccuuacaauagcaaguucgagaguguugccuggucugcuuccgcaugucaugaugggaugggauggcuuacgauugguaucagcggcccagacaacggggccguggcuguccugaaguauaacggaauaauuacugaaaccaucaaaucguggaagaaaagaaucuugaggacacaggagucugagugcguguguguaaauggcuccugcuuuacuauuaugaccgauggucccucaaacggggccgcgaguuacaagaucuucaaaauugaaaagggaaagguuacaaaaagcauagagcucaaugcaccuaacuuucacuaugaagaguguuccugcuacccagacaccggcacggugaugugugucugccgggauaauuggcacggcucuaaccgccccugggugagcuucaaucagaaccuggacuaccagaucggguauauuugcucaggaguguuuggugauaauccuagaccaaaggacggcaaagggaguuguaacccggucacuguugauggagccgacggcgugaaggguuucuccuacaaauaugggaauggcguauggaucggaaggacaaagagcaaccggcugcgcaaaggcuuugagaugaucugggaccccaauggguggaccgauacugacucugauuucucagugaagcaagacgucguggcuauuacagauuggaguggauacagcgguuccuuuguucagcauccugaacucaccggcuuagacugcauacgaccauguuucuggguggagcuggucagagggcuucccagggaaaacacgaccaucuggacaucuggaucgagcauuuccuucugcggcguggauucagacacugccaauuggaguuggccugauggugcagaguugccauuuaccaucgacaaguga

SEQ ID NO: 152616 - RNA, 1413 nt, Artificial Sequence; identical to SEQ ID NO: 144078
  derived and/or modified CDS sequence (opt3) from neuraminidase__InfluenzaA__AHL89765

SEQ ID NO: 152617 - RNA, 1413 nt, Artificial Sequence; identical to SEQ ID NO: 144119
  derived and/or modified CDS sequence (opt3) from neuraminidase__InfluenzaA__AHL89777

SEQ ID NO: 152618 - RNA, 1413 nt, Artificial Sequence; identical to SEQ ID NO: 144078
  derived and/or modified CDS sequence (opt3) from neuraminidase__InfluenzaA__AHL89789

SEQ ID NO: 152619 - RNA, 1413 nt, Artificial Sequence
  derived and/or modified CDS sequence (opt3) from neuraminidase__InfluenzaA__AHL89801
augaaccccaaucagaagaucauuaccauaggcagcaucuccauugccaucgggauuaucucucugaugcuccaaauaggaaacaucauuucaaucugggcuagucacagcauucagacagguucccagaaucauacuggcaucugcaaccagagaauaauuacguacgaaaauucuaccugggugaaccacacauaugucaauaucaacaauacuaacguuguggcagggaaagacaagaccucgguagcccuugcgggaaauucaagccuguguaguauuuccggcugggcuaucuacacaaaagauaacucuaucaggauugguagcaagggggacguguucgucauacgggagccuuuuaucuccugcucacauuuggagugucgcaccuucuuuuuaacucaaggagcccugcuaaaugauaaacacaguaacggcacagugaaggaccgaagcccauaucgugcacucaugucuugcccgcugggcgaagcccccuccccuuacaauucaaaguucgagagcguugcuuggagugcaucugccugucaugaugggaugggauggcuuaccauugguaucuccggcccagacaacggggcuguggccguccugaaauauaacggaauaauuacggaaacuaucaagagcuggaaaaagagaaucuugaggacccaggagucggagugcguguguguaaauggcucuugcuuuacaauuaugacugauggucccuccaacggggcggcaucauacaaaaucuucaagauugaaaagggaaaaguuaccaagaguauagagcucaaugccccuaacuuucacuaugaagaguguagcugcuacccagacacaggcaccgugaugugugucugccgggauaauuggcacggcuccaaccgccccugggugucuuucaaucagaaccuggacuaccagaucggguauauuugcagcggaguguuuggugauaauccuagaccaaaagacggcaaggggucauguaacccggucacgguugauggagcugacggcgugaaagguuucaguuacaaguaugggaauggcguauggaucggaaggacuaaauccaaccggcugcgcaagggcuuugagaugaucugggaccccaauggguggacaaacaccgauagcgacuucucugugaagcaagaugucguggccauuacugacuggucaggauacagugguagcuuuguucagcauccugaacucacaggcuuagauugcauacgaccauguuucuggguggagcuggucagagggcuucccagggaaaauaccacgaucuggaccuccggaucuucgauuagcuucugcggcguggacuccgauacagcaaacuggucauggccugacggugcugaguugccauuuacuaucgauaaauga

SEQ ID NO: 152620 - RNA, 1413 nt, Artificial Sequence
  derived and/or modified CDS sequence (opt3) from neuraminidase__InfluenzaA__AHL89813
augaaccccaaucagaagaucauuaccauaggcagcaucuccauugccaucgggauuaucucucugaugcuccaaauaggaaacaucauuucaaucugggcuagucacagcauucagacagguucccagaaucauacuggcaucugcaaccagagaauaauuacguacgaaaauucuaccugggugaaccacacauaugucaauaucaacaauacuaacguuguggcagggaaagacaagaccucgguaacacuugccggaaauucaagccuguguaguauuuccggcugggcgaucuacaccaaagauaacucuaucaggauugguagcaagggggacguguucgucauacgggagccuuuuaucuccugcucacauuuggagugucgcacuuucuuuuuaacacaaggagcucugcuaaaugauaaacacaguaacggcaccgugaaggaccgaagcccauaucgugcccucaugucuugcccgcugggcgaagcacccuccccuuacaauucaaaguucgagagcguugccuggagugcuucugcaugucaugaugggaugggauggcuuacgauugguaucuccggcccagacaacggggccguggcuguccugaaauauaacggaauaauuacugaaaccaucaagagcuggaaaaagagaaucuugaggacacaggagucggagugcguguguguaaauggcucuugcuuuacuauuaugaccgauggucccuccaacggggccgcgucauacaaaaucuucaagauugaaaagggaaaaguuacaaagaguauagagcucaaugcaccuaacuuucacuaugaagaguguagcugcuacccagacaccggcacggugaugugugucugccgggauaauuggcacggcuccaaccgccccugggugucuuucaaucagaaccuggacuaccaggugggguauaucugcagcggagucuuuggugauaauccuagaccaaaagacggcaaggggucauguaacccgaugacugccgauggagcugacggcguuaaagguuucaguuacaaguaugggaauggcguguggauuggaaggacaaaauccaacaagcugcggaagggcuuugagaugaucugggaccccaauggguggaccgauacugacagcgauuucucuguaaaacaagacguggucgccaucacagauuggucaggauacagugguagcuuugugcagcauccugaacucaccggcuuagacugcauucgcccauguuucuggguugagcuggugcgagggcuucccagagaaaacgcaacgauauggaccuccggaucuucgaucagcuucugcggcgucgauuccgacacagcuaauuggucauggccugauggugccgaguugccauuuacuauugacaaguga

SEQ ID NO: 152621 - RNA, 1413 nt, Artificial Sequence; identical to SEQ ID NO: 144119
  derived and/or modified CDS sequence (opt3) from neuraminidase__InfluenzaA__AHL89825

SEQ ID NO: 152622 - RNA, 1413 nt, Artificial Sequence; identical to SEQ ID NO: 144078
  derived and/or modified CDS sequence (opt3) from neuraminidase__InfluenzaA__AHL89837

SEQ ID NO: 152623 - RNA, 1413 nt, Artificial Sequence
  derived and/or modified CDS sequence (opt3) from neuraminidase__InfluenzaA__AHL89849
augaaccccaaucagaagaucauuaccauaggcagcaucuccauugccaucgggauuaucucucugaugcuccaaauaggaaacaucauuucaaucugggcuagucacagcauucagacagguucccagaaucauacuggcaucugcaaccagagaauaauuacguacgaaaauucuaccugggugaaccacacauaugucuacaucaauaacacuaauguuguggcagggaaagacaagaccucgguaacacuugccggaaacucaagccuguguaguauuuccggcugggcgaucuauaccaaagauaauucuaucaggauugguagcaagggggacguguucgucauacgggagccuuuuaucuccugcucacauuuggagugucgcacuuucuuuuuaacacaaggagcucugcuaaacgauaaacacaguaauggcaccgugaaggaccgaagcccauaccgugcccucaugucuugcccgcugggcgaagcacccuccccuuauaacucaaaguucgagagcguugccuggagugcuucugcaugucaugaugggaugggauggcuuacgauugguaucuccggcccagacaauggggccguggcuguccugaaauacaacggaauaauuacugaaaccaucaagagcuggaaaaagagaaucuugaggacacaggagucggagugcguguguguaaacggcucuugcuuuacuauuaugaccgauggucccuccaauggggccgcgucauauaaaaucuucaagauugaaaagggaaugguuacaaaaaguauagagcucaacgcaccuaauuuucacuacgaagaguguagcugcuacccagacaccggcacggugaugugugucugccgggauaacuggcacggcuccaaucgccccugggugucuuucaaccagaaucuggacuaucagaucggguacauuugcagcggaguguuuggugauaacccuagaccaaaggacggcaaagggucauguaauccggucacuguugauggagccgacggcgugaaggguuucaguuauaaauacgggaacggcguauggaucggaaggacaaaguccaaucggcugcgcaaaggcuuugagaugaucugggaccccaacggguggaccaauacugauagcgacuucucugugaagcaagaugucguggcuauuacagacuggucaggauauagugguagcuuuguucagcauccugaacucaccggcuuagauugcauacgaccauguuucuggguggagcuggucagagggcuucccagggaaaacacgaccaucuggacauccggaucuucgauuagcuucugcggcguggacuccgauacugccaauuggucauggccugacggugcagaguugccauuuaccaucgauaaguga

SEQ ID NO: 152624 - RNA, 1410 nt, Artificial Sequence; identical to SEQ ID NO: 144114
  derived and/or modified CDS sequence (opt3) from neuraminidase__InfluenzaA__AHL89861

SEQ ID NO: 152625 - RNA, 1410 nt, Artificial Sequence
  derived and/or modified CDS sequence (opt3) from neuraminidase__InfluenzaA__AHL89873
augaaccccaaucagaagaucauuaccauaggcagcgugucccugacaaucucuacuauuugcuucuuuaugcaaacggccauccucauuaccacagucacucuucacuucaaacaguacgaguuuaacucaccuccaaauaaccagguuaugcugugugaaccgaccaucauagagagaaauaucacagaaauuguguauuugaccaacacuacaaucgagaaggaaauuugccccaaauuagcugaguacaggaauuggaguaagccucagugugacaucaccggguucgcaccauuuagcaaagauaacuccauacggcugucugccggaggugacauuuggguaacgcgcgagcccuaugugucgugcgauccugacaaguguuaccaauucgcgcuaggccaggggacuacccucaauaacguccauucaaaugauacagugcgagaccguacuccauauagaacccugcuuaugaacgaacugggaguucccuuucacuugggcacaaaacaggugugcaucgcuuggagcaguuccucuugucaugaugguaaggccuggcuccacgucugcauuaccggggacgauaagaaugcaacggccagcuucaucuacaacggaaggcugguggacuccaucguaucauggaguaaagagauucugcggacucaggaaagcgaguguguuugcauaaauggcacauguaccguggucaugacugauggcucugcuuccgggaaggcagacacaaaaauccucuuuauugaggaaggaaagaucgugcauaccucaacguuaagcgguagugcccaacacguggaggaaugcucuugcuauccucgcuacccaggcgucagauguguuugcagggauaacuggaagggguccaaccggccgauaguggacauuaauaucaaagaccacagcaucguaucgucuuacguguguuccggacuggucggcgauacaccccgcaagaacgacucaaguagcuccucucauugccuugauccuaauaacgaggaaggugggcacggagugaaaggcugggcuuucgacgauggcaaugacguuuggauggggcgaaccauuagcgagaagucaagauugggauaugagacuuuuaaagugaucgaagguuggaguaacccaaaguccaaacugcagauuaauaggcaggucauaguggauggcgggaaccggagcggauacucuggcaucuucucaguagaggguaagaguuguauuaaucguugcuuuuauguugaacuaauccgcgggagaaaggaggaaaccgaggugcucuggacaagcaacuccaucgucguguucuguggcacuucuggaaccuacggcacagggucguggcccgacggagccgauauuaaucugaugccuauauga

SEQ ID NO: 152626 - RNA, 1410 nt, Artificial Sequence; identical to SEQ ID NO: 144791
  derived and/or modified CDS sequence (opt3) from neuraminidase__InfluenzaA__AHL89885

SEQ ID NO: 152627 - RNA, 1410 nt, Artificial Sequence
  derived and/or modified CDS sequence (opt3) from neuraminidase__InfluenzaA__AHL89897
augaaccccaaucagaagaucauuaccauaggcagcgugucccugacaaucucuacuauuugcuucuuuaugcaaaucgccauucucaucacgaccgucacacuucacuucaaacaguacgaguuuaacucaccuccaaauaaccagguuaugcugugugaaccgacuauaaucgagagaaauauuaccgaaaucguguauuugacaaacaccacuauugagaaggaaaucugccccaaauuagcugaguacaggaauuggaguaagccucagugugacauaacaggguucgcaccauuuagcaaagauaacuccauucggcugucugccggaggugacaucuggguaacccgcgagcccuaugugucgugcgauccugacaaguguuaccaauucgcgcuaggccaggggacgacucucaauaacguccauucaaaugauaccgugcgagaccguacaccauauagaacucugcuuaugaacgaacugggaguucccuuucacuugggcaccaaacaggugugcauugcuuggagcaguuccucuugucaugaugguaaggccuggcuccacgucugcaucacaggggacgauaagaaugcaaccgccagcuucaucuacaacggaaggcugguggacuccauuguaucauggaguaaagagauacugcggacgcaggaaagcgaguguguuugcaucaauggcacuuguacaguggucaugaccgauggcucugcuuccgggaaggcagacacuaaaauucucuuuaucgaggaaggaaagauagugcauacaucaaccuuaagcgguagugcccaacacguggaggaaugcucuugcuauccucgcuacccaggcgucagauguguuugcagggauaacuggaagggguccaaccggccgauuguggacaucaauaucaaagaccacagcauuguaucgucuuacguguguuccggacuggucggcgauacgccccgcaagaacgacucaaguagcuccucucauugccuugauccuaauaacgaggaaggugggcacggagugaaaggcugggcuuucgacgauggcaaugacguuuggauggggcgaaccaucagcgagaagucaagauugggauaugagacauuuaaagugauugaagguuggaguaacccaaaguccaaacugcagacuaauaggcaggucauaguggaucggggcaaccguagcggguacucuggaaucuucucaguagagggcaagaguuguauuaaucgcugcuuuuauguugaacuaaucagagguaggaaggaggaaaccgaggugcucuggacaagcaacuccaucgucguguucugugggacuucuggcaccuacggaacaggcucguggcccgacggggccgauauuaaucugaugccuauauga

SEQ ID NO: 152628 - RNA, 1410 nt, Artificial Sequence; identical to SEQ ID NO: 144450
  derived and/or modified CDS sequence (opt3) from neuraminidase__InfluenzaA__AHL89909

SEQ ID NO: 152629 - RNA, 1410 nt, Artificial Sequence; identical to SEQ ID NO: 144089
  derived and/or modified CDS sequence (opt3) from neuraminidase__InfluenzaA__AHL89921

SEQ ID NO: 152630 - RNA, 1410 nt, Artificial Sequence; identical to SEQ ID NO: 144450
  derived and/or modified CDS sequence (opt3) from neuraminidase__InfluenzaA__AHL89933

SEQ ID NO: 152631 - RNA, 1410 nt, Artificial Sequence; identical to SEQ ID NO: 144089
  derived and/or modified CDS sequence (opt3) from neuraminidase__InfluenzaA__AHL89945

SEQ ID NO: 152632 - RNA, 1410 nt, Artificial Sequence
  derived and/or modified CDS sequence (opt3) from neuraminidase__InfluenzaA__AHL89957
augaaccccaaucagaagaucauuaccauaggcagcgugucccugacaaucucuacuauuugcuucuuuaugcaaaucgccauucucaucacgaccgucacacuucacuucaaacaguacgaguuuaacucaccuccaaauaaccagguuaugcugugugaaccgacuauaaucgagagaaauauuaccgaaaucguguauuugacaaacaccacuauugagaaggaaaucugccccaaauuagcugaguacaggaauuggaguaagccucagugugacauaacaggguucgcaccauuuagcaaagauaacuccauucggcugucugccggaggugacaucuggguaacccgcgagcccuaugugucgugcgauccugacaaguguuaccaauucgcgcuaggccaggggacgacucucaauaacguccauucaaaugauaccgugcgagaccguacaccauauagaacucugcuuaugaacgaacugggaguucccuuucacuugggcaccaaacaggugugcauugcuuggagcaguuccucuugucaugaugguaaggccuggcuccacgucugcaucacaggggacgauaagaaugcaaccgccagcuucaucuacaacggaaggcugguggacuccauuguaucauggaguaaagagauacugcggacgcaggaaagcgaguguguuugcaucaauggcacuuguacaguggucaugaccgauggcucugcuuccgggaaggcagacacuaaaauucucuuuaucaaggagggaaagauagugcauacaucaaccuuaagcgguagugcccaacacguggaagagugcucuugcuauccucgcuacccaggcgucagauguguuugcagggauaacuggaaaggguccaaccggccgauuguggacaucaauaucaaggaccacagcauuguaucgucuuacguguguuccggacuggucggcgauacgccccgcaaaaacgacucaaguagcuccucucauugccuugauccuaauaacgaagagggugggcacggagugaagggcugggcuuucgacgauggcaaugacguuuggauggggcgaaccaucagcgaaaaaucaagauugggauaugagacauuuaaggugauugaggguuggaguaacccaaaauccaagcugcagauaaauaggcaggucaucguggaucggggcaaccguagcggguacucuggaauuuucucaguagaaggcaagaguuguaucaaucgcugcuuuuauguugagcuaaucagagguaggaaagaagagacugaagugcucuggaccagcaacuccauugucguguucugugggacaucuggcacuuacggaaccggcucguggcccgacggggccgauauaaaucugaugccuaucuga

SEQ ID NO: 152633 - RNA, 1410 nt, Artificial Sequence; identical to SEQ ID NO: 143932
  derived and/or modified CDS sequence (opt3) from neuraminidase__InfluenzaA__AHL89969

SEQ ID NO: 152634 - RNA, 1410 nt, Artificial Sequence; identical to SEQ ID NO: 143932
  derived and/or modified CDS sequence (opt3) from neuraminidase__InfluenzaA__AHL89981

SEQ ID NO: 152635 - RNA, 1410 nt, Artificial Sequence
  derived and/or modified CDS sequence (opt3) from neuraminidase__InfluenzaA__AHL89993
augaaccccaaucagaagaucauuaccauaggcagcgugucccugucuaucucaacaauuugcuucuuuaugcaaaucgccauucucaucacuacggucacccuucacuucaaacaguacgaguuuaacaguccuccaaauaaccagguuaugcugugugaaccgacaauaaucgagagaaauauuacugaaaucguguauuugaccaacacaaccauugagaaggaaaucugccccaaauuagcugaguacaggaauuggagcaagccucagugugacauaacuggguucgcaccauuuuccaaagauaacucuauucggcugucggccggaggugacaucuggguaacacgcgagcccuaugugucaugcgauccugacaaguguuaccaauucgcgcuaggccaggggaccacgcucaauaacguccauagcaaugauacugugcgagaccguaccccauauagaacacugcuuaugaacgaacugggaguucccuuucacuugggcacuaaacaggugugcauugcuuggaguuccucuagcugucaugaugguaaggccuggcuccacgucugcaucaccggggacgauaagaaugcaacagccuccuucaucuacaacggaaggcugguggacucaauuguaaguuggagcaaagagauacugcggacccaggaaucugaguguguuugcaucaauggcacguguacucucgugaugacagauggcuccgcuucagggaaggcagacaccaaaauuuuauuuaucgaggaaggaaagauaguccauacuagcacacugagugguucugcccaacacguggaggaaugcuccugcuauccucgcuacccaggcgugagaugugucugcagggauaacuggaaggggagcaaccggccgauuguugacaucaauaucaaagaccacucgauugugucuuccuacguauguucaggacuugugggcgauacccccaggaagaacgacaguagcuccucuagccauugcuuggauccuaauaacgaggaaggugggcacggagucaaaggcugggcuuucgacgauggcaaugacguguggauggggcgaacgaucucagagaagaguagacugggauaugagaccuuuaaaguuauugaagguugguccaacccaaagagcaaacuacagauaaaucgccaggugaucgucgaucggggcaaccguucuggguacucaggaauuuucaguguggagggcaagagcuguaucaaucgcugcuuuuauguagaacucaucagagguaggaaggaggaaacagagguucuguggacuuccaacucuauuguggucuucugugggaccucgggcacauacggaacuggcagcuggcccgacggggccgauauaaaucuuaugccuaucuga

SEQ ID NO: 152636 - RNA, 1410 nt, Artificial Sequence
  derived and/or modified CDS sequence (opt3) from neuraminidase__InfluenzaA__AHL90005
augaaccccaaucagaagaucauuaccauaggcagcgugucccugacaaucucuacuauuugcuucuuuaugcagaucgccauucucaucacgaccgucacacuucacuucaaacaguacgaguuuucaaguccuccaaacaaucagguuaugcugugugaaccgacuauaaucaagagaaacauuaccgagaucguguauuugacaaauaccacuauugaaaaagagaucugccccaaguuagcugaauacaggaacuggagcaaaccucagugugacauaacaggguucgcaccauuuuccaaggauaauucuauucggcugucggccggaggugacaucuggguaacccgcgagcccuaugugucaugcgauccugacaaguguuaccaauucgcgcuaggccaggggacgacucucaacaauguccauagcaacgauaccgugcacgaccgaacaccauaucguacucugcuuaugaaugagcugggaguucccuuucauuugggcaccaaacaggugugcauugcuuggaguuccucuagcugucacgaugguaaggccuggcuccaugucugcgugacaggggacgauaaaaacgcaaccgccuccuucaucuacaauggaagacugguagacucaaucguuaguuggagcaaggaaauucugaggacgcaggagucugaaugugugugcauaaacggcacuuguacagucgugaugaccgauggcuccgcuucagggaaagcagacacuaagauccucuuuauugaggagggaaagaucgugcacacaagcaccuuaagugguucugcccaacacgucgaagagugcuccugcuauccucgguacccaggcguucgcugugugugcagagauaauuggaaagggagcaacaggccgauaguagacauuaacaucaaggacuacucgaucgugucucgguaugucuguuccggacuggugggcgauacgccccgcaaaaaugacucauacaguagcucccauugccuugauccuaacaaugaagagggugggcacggaguuaagggcugggcuuucgacgauggcaacgacguguggauggggcgaaccauuucugagaaaagcagaucaggauaugaaacauuuaaggucaucgaggguuggaguaauccaaacuccaaauugcagauuaauaggcaagugauaguagaucggggcaaccguagcggguacucuggaaucuucucaguugaaggcaagaguuguauuaaucgcugcuuuuauguggagcugaucagagguaggaaggaagagacugaaguccuauggaccagcaacuccaucguggucuucugugggacaucuggcacuuacggaaccggcucguggcccgacggggccgauauuaaucucaugccuauauga

SEQ ID NO: 152637 - RNA, 1410 nt, Artificial Sequence; identical to SEQ ID NO: 144138
  derived and/or modified CDS sequence (opt3) from neuraminidase__InfluenzaA__AHL90017

SEQ ID NO: 152638 - RNA, 1410 nt, Artificial Sequence; identical to SEQ ID NO: 144089
  derived and/or modified CDS sequence (opt3) from neuraminidase__InfluenzaA__AHL90029

SEQ ID NO: 152639 - RNA, 1410 nt, Artificial Sequence; identical to SEQ ID NO: 144105
  derived and/or modified CDS sequence (opt3) from neuraminidase__InfluenzaA__AHL90041

SEQ ID NO: 152640 - RNA, 1410 nt, Artificial Sequence; identical to SEQ ID NO: 144105
  derived and/or modified CDS sequence (opt3) from neuraminidase__InfluenzaA__AHL90053

SEQ ID NO: 152641 - RNA, 1410 nt, Artificial Sequence; identical to SEQ ID NO: 150370
  derived and/or modified CDS sequence (opt3) from neuraminidase__InfluenzaA__AHL90065

SEQ ID NO: 152642 - RNA, 1410 nt, Artificial Sequence; identical to SEQ ID NO: 152632
  derived and/or modified CDS sequence (opt3) from neuraminidase__InfluenzaA__AHL90077

SEQ ID NO: 152643 - RNA, 1410 nt, Artificial Sequence; identical to SEQ ID NO: 144114
  derived and/or modified CDS sequence (opt3) from neuraminidase__InfluenzaA__AHL90089

SEQ ID NO: 152644 - RNA, 1410 nt, Artificial Sequence; identical to SEQ ID NO: 144791
  derived and/or modified CDS sequence (opt3) from neuraminidase__InfluenzaA__AHL90101

SEQ ID NO: 152645 - RNA, 1410 nt, Artificial Sequence; identical to SEQ ID NO: 144089
  derived and/or modified CDS sequence (opt3) from neuraminidase__InfluenzaA__AHL90113

SEQ ID NO: 152646 - RNA, 1413 nt, Artificial Sequence; identical to SEQ ID NO: 144680
  derived and/or modified CDS sequence (opt3) from neuraminidase__InfluenzaA__AHL90125

SEQ ID NO: 152647 - RNA, 1413 nt, Artificial Sequence
  derived and/or modified CDS sequence (opt3) from neuraminidase__InfluenzaA__AHL90136
augaaccccaaucagaagaucauuaccauaggcagcaucuccauugccaucgggauuaucucucugaugcuccaaauaggaaacaucauuucaaucugggcuagucacagcauucagacagguucccagaauaacacuggcaucugcaaucagagaauaauuacguacgagaacucuaccugggugaaucauacauaugucaacaucaauaacacuaauguuguggcaggggaagacaaaaccucgguaacacuugccggaaacucaagccuguguaguauuuccggcugggcgaucuacaccaaggauaauucuaucaggauugguagcaaaggggacguguucgucauacgggagccuuuuaucuccugcucacacuuggaaugucgcacuuucuuuuuaacacaaggagcucugcuaaacgauaagcauaguaauggcaccgugaaagaccgaagcccauaucgugcccucaugucuugcccgcugggcgaggcacccuccccuuacaacucaaaguucgaaagcguugccuggagugcuucugcaugucacgaugggaugggauggcuuacgauugguaucuccggcccagacaacggggccguggcuguccugaaguauaauggaauaauuacuggcaccaucaaaagcuggaagaaacagaucuugagaacacaggagucggagugcguguguaugaacgguucuugcuuuacuauuaugaccgaugggcccuccaauaaggccgcgucauacaaaaucuucaagauugaaaagggaaaaguaacaaagaguauagagcucaacgcaccuaauuuuuauuacgaagaguguagcugcuacccagacuccggcaugguuaugugugugugcagggauaacuggcauggcucuaaucggcccugggucagcuucaaccagaaucuggacuaucaaaucggguacauuugcucaggaguguuuggugauaacccucgcccagaggacggcgaagggaguuguaauccggugaccgucgauggagccaacggcguuaaagguuucuccuauaaguacgggaauggcguguggaucggaagaacgaaaagcaacaggcugcggaagggcuuugagaugaucugggaccccaauggguggacuaacacagacucugauuucucaguaaaacaggacguggucgcuauuaccgauuggaguggauauagcgguuccuuugugcagcacccugaacucacuggcuuagacugcauacgcccauguuucuggguugagcuggugcgagggcuucccagagaaaacacaaccaucuggacgucuggaucgagcauuuccuucugcggcgucaauucagauaccgccaacuggaguuggccugacggugcagaguugccauuuacaaucgauaaguga

SEQ ID NO: 152648 - RNA, 1413 nt, Artificial Sequence; identical to SEQ ID NO: 144680
  derived and/or modified CDS sequence (opt3) from neuraminidase__InfluenzaA__AHL90160

SEQ ID NO: 152649 - RNA, 1413 nt, Artificial Sequence
  derived and/or modified CDS sequence (opt3) from neuraminidase__InfluenzaA__AHL90172
augaaccccaaucagaagaucauuaccauaggcagcaucuccauugccaucgggauuaucucucugaugcuccaaauaggaaacaucauuucaaucugggcuagucacagcauucagacagguucccagaauaacacuggcaucugcaaucagagaauaauuacguacgagaacucuaccugggugaaucauacauaugucaacaucaauaacacuaauguuguggcaggggaagacaaaaccucgguaacacuugccggaaacucaagccuguguaguauuuccggcugggcgaucuacaccaaggauaauucuaucaggauugguagcaaaggggacguguucgucauacgggagccuuuuaucuccugcucacacuuggaaugucgcacuuucuuuuuaacacaaggagcucugcuaaacgauaagcauaguaauggcaccgugaaagaccgaagcccauaucgugcccucaugucuugcccgcugggcgaggcacccuccccuuacaacucaaaguucgaaagcguugccuggagugcuucugcaugucacgaugggaugggauggcuuacgauugguaucuccggcccagacaacggggccguggcuguccugaaguauaauggaauaauuacuggcaccaucaaaagcuggaagaaacagaucuugagaacacaggagucggagugcguguguaugaacgguucuugcuuuacuauuaugaccgaugggcccuccaauaaggccgcgucauacaaaaucuucaagauugaaaagggaaaaguaacaaagaguauagagcucaacgcaccuaauuuucauuaugaagaguguagcugcuacccagacaccggcaucguuaugugugugugcagggauaacuggcacggcuccaaucggcccugggucucuuucaaccagaaucuggacuaccaaauuggguauaucugcagcggaguguuuggugauaacccucgcccagaggacggcgaagggaauuguaacccggugacggucgauggagccaauggcguuaaagguuucucauacaaguaugggaacggcguguggaucggaagaacuaaaaguaauaggcugcggaagggcuuugagaugauuugggaccccaacggguggacaaacaccgacuccgauuucagcguaaaacaggacguggucgcuauaacugauuggucuggauacucagguaguuuugugcagcacccugaacucacaggcuuagacugcauccgcccauguuucuggguugagcuggugcgagggcuucccagagaaaauaccacgauuuggaccagcggauccucuaucucguucugcggcgucaacagcgauacagccaauugguccuggccugacggugcagaguugccauuuacuauugauaaguga

SEQ ID NO: 152650 - RNA, 1413 nt, Artificial Sequence; identical to SEQ ID NO: 144680
  derived and/or modified CDS sequence (opt3) from neuraminidase__InfluenzaA__AHL90184

SEQ ID NO: 152651 - RNA, 1413 nt, Artificial Sequence; identical to SEQ ID NO: 147978
  derived and/or modified CDS sequence (opt3) from neuraminidase__InfluenzaA__AHL90196

SEQ ID NO: 152652 - RNA, 1413 nt, Artificial Sequence; identical to SEQ ID NO: 144680
  derived and/or modified CDS sequence (opt3) from neuraminidase__InfluenzaA__AHL90220

SEQ ID NO: 152653 - RNA, 1413 nt, Artificial Sequence
  derived and/or modified CDS sequence (opt3) from neuraminidase__InfluenzaA__AHL90232
augaaccccaaucagaagaucauuaccauaggcagcaucuccauugccaucgggauuaucucucugaugcuccaaauaggaaacaucauuucaaucugggcuagucacagcauucagacagguucccagaauaacacuggcaucugcaaucagagaauaauuacguacgagaacucuaccugggugaaucauacauaugucaacaucaauaacacuaauguuguggcaggggaagacaaaaccucgguaacacuugccggaaacucaagccuguguaguauuuccggcugggcgaucuacaccaaggauaauucuaucaggauugguagcaaaggggacguguucgucauacgggagccuuuuaucuccugcucacacuuggaaugucgcacuuucuuuuuaacacaaggagcucugcuaaacgauaagcauaguaauggcaccgugaaagaccgaagcccauaucgugcccucaugucuugcccgcugggcgaggcacccuccccuuacaacucaaaguucgaaagcguugccuggagugcuucugcaugucacgaugggaugggauggcuuacgauugguaucuccggcccagacaacggggccguggcuguccugaaguauaauggaauaauuacuggcaccaucaaaagcuggaagaaacagaucuugagaacacaggagucggagugcguguguaugaacgguucuugcuuuacuauuaugaccgaugggcccuccaauaaggccgcgucauacaaaaucuucaagauugaaaagggaaaaguaacaaagaguauagagcucaacgcaccuaauuuucauuaugaagaguguagcugcuacccagacaccggcaucguuaugugugugugcagggauaacuggcacggcuccaaucggcccugggucucuuucaaccagaaucuggacuaccaaauuggguauaucugcagcggaguguuuggugauaacccucgcccagaggacggcgaagggucauguaauccggugacggucaacggagccaauggcguuaaagguuucaguuacaaguaugauaacgggguguggaucggcagaacuaaauccaauaggcugcggaagggauuugagaugauuugggaccccaacggcuggacaaacaccgacagcgauuucucuguaaaacaggacguggucgcuauaacugauuggucaggguacagugguagcuuugugcagcacccugaacucacaggauuagacugcauccgcccauguuucuggguugagcuggugcgaggccuucccagagaaaauaccacgauuuggaccuccgggucuucgaucagcuucugcggagucaacuccgauacagccaauuggucauggccugacggcgcagaguugccauuuacuauugauaaguga

SEQ ID NO: 152654 - RNA, 1413 nt, Artificial Sequence
  derived and/or modified CDS sequence (opt3) from neuraminidase__InfluenzaA__AHL90244
augaaccccaaucagaagaucauuaccauaggcagcaucuccauugccaucgggauuaucucucugaugcuccaaauaggaaacaucauuucaaucugggcuagucacagcauucagacagguucccagaauaacacuggcaucugcaaucagagaauaauuacguacgagaacucuaccugggugaaucauacauaugucaacaucaauaacacuaauguuguggcaggggaagacaaaaccucgguaacacuugccggaaacucaagccuguguaguauuuccggcugggcgaucuacaccaaggauaauucuaucaggauugguagcaaaggggacguguucgucauacgggagccuuuuaucuccugcucacacuuggaaugucgcacuuucuuuuuaacacaaggagcucugcuaaacgauaagcauaguaauggcaccgugaaagaccgaagcccauaucgugcccucaugucuugcccgcugggcgaggcacccuccccuuacaacucaaaguucgaaagcguugccuggagugcuucugcaugucacgaugggaugggauggcuuacgauugguaucuccggcccagacaacggggccguggcuguccugaaguauaauggaauaauuacuggcaccaucaaaagcuggaagaaacagaucuugagaacacaggagucggagugcguguguaugaacgguucuugcuuuacuauuaugaccgaugggcccuccaauaaggccgcgucauacaaaaucuucaagauugaaaagggaaaaguaacaaagaguauagagcucaacgcaccuaauuuucauuaugaagaguguagcugcuacccagacaccggcaucguuaugugugugugcagggauaacuggcacggcuccaaucggcccugggucucuuucaaccagaaucuggacuaccaaauuggguauaucugcagcggaguguuuggugauaacccucgcccagaggacggcgaagggucauguaauccgaugacgguggauggagccaacggcgucaaagguuucaguuacaaguaugacaaugggguuuggaucggcagaacuaaauccaacaggcugcggaagggauuugagaugauuugggaccccaauggcuggacaaacaccgauagcgacuucucugugaaacaggauguaguggcuauaacugacuggucaggguacaguggauccuuuguccagcacccugaacucacagguuuagauugcauccgcccauguuucuggguggagcugguucgaggccuucccagagaaaacaccacgauuuggaccuccgggucuucgaucagcuucugcggagugaauagcgacacagccucauggaguuggccugauggcgcagaguugccauuuacuauugacaaguga

SEQ ID NO: 152655 - RNA, 1413 nt, Artificial Sequence; identical to SEQ ID NO: 145509
  derived and/or modified CDS sequence (opt3) from neuraminidase__InfluenzaA__AHL90256

SEQ ID NO: 152656 - RNA, 1413 nt, Artificial Sequence
  derived and/or modified CDS sequence (opt3) from neuraminidase__InfluenzaA__AHL90268
augaaccccaaucagaagaucauuaccauaggcagcaucuccauugccaucgggauuaucucucugaugcuccaaauaggaaacaucauuucaaucugggcuagucacagcauucagacagguucccagaauaacacuggcaucugcaaucagagaauaauuacguacgagaacucuaccugggugaaucauacauaugucaacaucaauaacacuaauguuguggcaggggaagacaaaaccucgguaacacuugccggaaacucaagccuguguaguauuuccggcugggcgaucuacaccaaggauaauucuaucaggauugguagcaaaggggacguguucgucauacgggagccuuuuaucuccugcucacacuuggaaugucgcacuuucuuuuuaacacaaggagcucugcuaaacgauaagcauaguaauggcaccgugaaagaccgaagcccauaucgugcccucaugucuugcccgcugggcgaggcacccuccccuuacaacucaaaguucgaaagcguugccuggagugcuucugcaugucacgaugggaugggauggcuuacgauugguaucuccggcccagacaacggggccguggcuguccugaaguauaauggaauaauuacuggcaccaucaaaagcuggaagaaacagaucuugagaacacaggagucggagugcguguguaugaacgguucuugcuuuacuauuaugaccgaugggcccuccaauaaggccgcgucauacaaaaucuucaagauugaaaagggaaaaguaacaaagaguauagagcucaacgcaccuaauuuucauuaugaagaguguagcugcuacccagacaccuccaucguuaugugugugugcagggauaacuggcacggcucuaaucggcccugggucagcuucaaccagaaucuggacuaccaaauuggcuauaucugcucagggguguuuggagauaacccucgcccagaggacggugaaggcaguuguaauccggugacggucgauggggccaacggaguuaaaggcuucuccuacaaguaugacaaugguguguggaucgggagaacuaaaagcaacaggcugcggaagggcuuugagaugauuugggaccccaauggauggacaaacaccgaucgcgacuucucuguaaaacaggauguggucgcuauaacugacuggucaggcuacagugggagcuuugugcagcacccugaacucacaggauuagauugcauccgaccauguuucuggguugagcuggugagaggucuucccagggaaaacaccacgauuuggaccuccgggucuucgaucagcuucugcggcgucaauuccgacacagccaacuggucauggccugauggagcagaguugccauuuacuauugacaaguga

SEQ ID NO: 152657 - RNA, 1413 nt, Artificial Sequence; identical to SEQ ID NO: 145509
  derived and/or modified CDS sequence (opt3) from neuraminidase__InfluenzaA__AHL90280

SEQ ID NO: 152658 - RNA, 1413 nt, Artificial Sequence
  derived and/or modified CDS sequence (opt3) from neuraminidase__InfluenzaA__AHL90304
augaaccccaaucagaagaucauuaccauaggcagcaucuccauugccaucgggauuaucucucugaugcuccaaauaggaaacaucauuucaaucugggcuagucacagcauucagacagguucccagaauaacacugagaucugcaaucagagaauaauuacguacgaaaacucuaccugggugaaucauacauaugucaacaucaauaacacuaauguuguggcaggcgaggacaaaaccucgguaacacuugccgggaacucaagccuguguaguauuuccggaugggcgaucuacaccaaggauaauucuaucaggauuggcagcaaaggugacguguucgucauacgggaaccuuuuaucuccugcucacacuuggagugucgcacuuucuuuuuaacacaaggggcucugcuaaacgauaagcauaguaauggaaccgugaaagaccgaagcccauaucgugcccucaugucuugcccgcugggcgaagcacccuccccuuacaacucaaaguucgagagcguugccuggagugcuucugcaugucacgauggcaugggguggcuuacgauuggaaucuccgguccagacaacggcgccguggcuguccugaaguauaaugggauaauuacuggaaccaucaaaagcuggaagaaacagaucuugagaacacaggagucggaaugcguguguaugaacggcucuugcuuuacuauuaugaccgauggucccuccaauaaggccgcgucauacaaaaucuucaagauugagaaggggaaaguaacaaagaguauagaacucaacgcaccuaauuuucauuaugaggaguguagcugcuacccagacaccggaaucguuaugugugugugcagggauaacuggcacggcuccaaucggcccugggucucuuucaaccagaaucuggacuaccaaauuggcuauaucugcagcgggguguuuggagauaacccucgcccagaagacggugagggcucauguaauccggugacggucgauggggccaacggaguuaaaggcuucaguuacaaguaugacaaugguguguggaucgggagaacuaaauccaacaggcugcggaagggcuuugaaaugauuugggaccccaauggauggacaaacaccgauagcgacuucucuguaaaacaggauguggucgcuauaacugacuggucaggcuacagugggagcuuugugcagcacccugagcucacaggauuagauugcauccgcccauguuucuggguugaacuggugcgaggucuucccagagagaacaccacgauuuggaccuccgggucuucgaucagcuucugcggcgucaauuccgacacagccaacuggucauggccugauggagcagaguugccauuuacuauugacaaguga

SEQ ID NO: 152659 - RNA, 1413 nt, Artificial Sequence; identical to SEQ ID NO: 144680
  derived and/or modified CDS sequence (opt3) from neuraminidase__InfluenzaA__AHL90316

SEQ ID NO: 152660 - RNA, 1413 nt, Artificial Sequence
  derived and/or modified CDS sequence (opt3) from neuraminidase__InfluenzaA__AHL90328
augaaccccaauaagaaaaucauuaccauaggcagcaucuccauugccaucgggauuaucucucugaugcuccagauaggaaacaucauuucaaucugggcuagucacagcauucaaacagguucccagaauaacacuggcaucugcaaucagagaauaauuacguacgagaacucuaccugggugaaucauacauaugucaacaucaauaacacuaauguuguggcaggggaagacaagaccucgguaacacuugccggaaacucaagccuguguaguauuuccggcugggcgaucuacaccaaagauaauucuaucaggauugguagcaagggggacguguucgucauacgggagccuuuuaucuccugcucacacuuggaaugucgcacuuucuuuuuaacacagggagcucugcuaaacgauaaacauaguaauggcaccgugaaggaccgaagcccauaucgugcccucaugucuugcccgcugggcgaggcacccuccccuuacaacucaaaguucgaaagcguugccuggagugcuucugcaugucacgaugggaugggauggcuuacgauugguaucuccggcccagacaacggggccguggcuguccugaaauauaauggaauaauuacuggcaccaucaagagcuggaaaaagcaaaucuugagaacacaggagucggagugcguguguaugaacgguucuugcuuuacuauuaugaccgaugggcccuccaauaaagccgcgucauacaagaucuucaagauugaaaaaggaaagguaacaaaaaguauagagcucaacgcaccuaauuuucauuaugaagaguguagcugcuacccagacaccggcaucguuaugugugugugcagggauaacuggcacggcuccaaucggcccugggucucuuucaaccagaaucuggacuaccagauuggguauaucugcagcggaguguuuggugauaacccucgcccagaggacggcgaagggucauguaauccggugacggucgauggagccaacggcguuaaggguuucaguuacaaauaugacaaugggguguggaucggcagaacuaaguccaacaggcugcggaaaggauuugagaugauuugggaccccaauggcuggacaaacaccgauagcgacuucucuguaaagcaagauguggucgcugugacugacuggucaggguacaguggauccuuuguucagcacccugaacucacagguuuagauugcauacgcccauguuucuggguggagcugguccgaggccuucccagagaaaacaccacgaucuggaccuccgggucuucgauuagcuucugcggagugaauagcgacacagccaacuggucauggccugauggcgcagaguugccauuuacuaucgacaaguga

SEQ ID NO: 152661 - RNA, 1413 nt, Artificial Sequence; identical to SEQ ID NO: 144680
  derived and/or modified CDS sequence (opt3) from neuraminidase__InfluenzaA__AHL90340

SEQ ID NO: 152662 - RNA, 1413 nt, Artificial Sequence
  derived and/or modified CDS sequence (opt3) from neuraminidase__InfluenzaA__AHL90352
augaaccccaaucagaagaucaugaccauuggcagcauauccaucgccauugggaucauuucucugaugcuccaaaucggaaacauaaucucaauuugggcuagucacagcauccagacagguucccagaauaacacuggcauuugcaaucagagaaucauaacguacgagaacucuaccugggugaaucauacauaugucaacauuaauaacacuaauguuguggcaggggaagacaaaaccucgguaacacuugccggaaacucaagccuguguaguaucuccggcugggcgauuuacaccaaggauaauucuaucaggaucgguagcaaaggggacguguucgucauucgggagccuuuuauauccugcucacacuuggaaugucgcacuuucuuuuuaacacaaggagcucugcuaaacgauaagcauaguaauggcaccgugaaagaccgaagcccauaucgugcccucaugucuugcccgcugggcgaggcacccuccccuuacaacucaaaguucgaaagcguugccuggagugcuucugcaugucacgaugggaugggauggcuuacgaucgguauuuccggcccagacaacggggccguggcuguccugaaguauaauggaaucauaacuggcaccauuaaaagcuggaagaaacagaucuugagaacacaggagucggagugcguguguaugaacgguucuugcuuuacuaucaugaccgaugggcccuccaauaaggccgcgucauacaaaauuuucaagaucgaaaagggaaaaguaacaaagaguauugagcucaacgcaccuaauuuucauuaugaagaguguagcugcuacccagacaccggcauaguuaugugugugugcagggauaacuggcacggcuccaaucggcccugggucucuuucaaccagaaucuggacuaccaaaucggguauauuugcagcggaguguuuggugauaacccucgcccagaggacggcgaagggucauguaguccggugacggucgauggagccaauggcguuaaagguuucuccuacaaguaugacaacgggguguggaucggcagaacuaaaagcaauaggcugcggaagggauuugagaugaucugggaccccaacggcuggacaaauaccgauucugacuucucaguaaaacaggauguggucgcuauuacugacuggaguggguacagcggauccuuugugcagcacccugaacucacagguuuagauugcauacgcccauguuucuggguugagcuggugcgaggcaugcccagagaaaacaccacgaucuggaccucugggucgagcauuuccuucugcggagucaacucagacacagccaauuggaguuggccugauggcgcagagcuuccauuuacuaucgacaaguga

SEQ ID NO: 152663 - RNA, 1413 nt, Artificial Sequence; identical to SEQ ID NO: 151509
  derived and/or modified CDS sequence (opt3) from neuraminidase__InfluenzaA__AHL90364

SEQ ID NO: 152664 - RNA, 1413 nt, Artificial Sequence; identical to SEQ ID NO: 145509
  derived and/or modified CDS sequence (opt3) from neuraminidase__InfluenzaA__AHL90376

SEQ ID NO: 152665 - RNA, 1410 nt, Artificial Sequence
  derived and/or modified CDS sequence (opt3) from neuraminidase__InfluenzaA__AHL90388
augaaccccaaucagaagaucauuaccauaggcagcgugucccugaucauuucuacaaucugcuucuuuaugcaaauugccauccucauaacuacggucacccuucacuucaaacaguacgaguuuaacucaaguccuaauaaccagguuaugcugugugaaccaacaaucauugagagaaauaucacugaaauuguguauuugaccaacacaaucauagagaaggaaauuugcccgaaauuagcugaguacaggaauuggagcaagccccagugugacaucaccggguucgcaccuuuuuccaaagauaacucuauucggcugucggccggaggugacaucuggguaacucgcgagccauaugugucaugcgaucccgacaaguguuaccaauucgcgcuaggccaggggacaacccucaauaacguccauagcaauaacacggugcgagaucguacuccuuauagaacccugcuuaugaaugaacugggaguuccauuucacuugggcacaaaacaggugugcaucgcuuggaguuccucuagcugucaugacgguaaggccuggcuccacgucugcauuacuggggaugacaagaacgcaaccgccuccuucauauacaauggaaggcugguggauucaaucguaaguuggagcaaagagauucugcggacacaggaaucugaguguguuugcaucaacggcaccuguacgguggucaugacugacggcuccgcuucagggaaggcagauacaaaaauacucuuuauugaggaaggaaagaucgugcauaccagcacuuuaagugguucugcccaacacguggaggaaugcuccugcuauccccgcuacccuggcgucagauguguuugcagggacaacuggaaggggagcaaucggccaaucguggauauuaacaucaaagaccacucgauuguaucuuccuacguguguucaggacuggucggcgacacaccgcgcaagaaugauaguagcuccucuagccauugccuugaccccaacaaugaggaaggugggcacggagugaaaggcugggcuuucgaugacggcaacgauguuuggauggggcgaaccauaucagagaagaguagauugggauaugagacguuuaaagugaucgaagguugguccaauccuaagagcaaacugcagauuaacaggcaggucaucguggaccggggcaaucguucuggguacucaggaaucuucaguguagagggcaagagcuguauuaaccgcugcuuuuauguugaacuaauaagagguaggaaggaggaaaccgaggugcucuggacauccaauucuaucgucguguucugugggacuucgggcaccuacggaacaggcagcuggccagauggggccgacauuaaccugaugcccaucuga

SEQ ID NO: 152666 - RNA, 1410 nt, Artificial Sequence; identical to SEQ ID NO: 144560
  derived and/or modified CDS sequence (opt3) from neuraminidase__InfluenzaA__AHL90400

SEQ ID NO: 152667 - RNA, 1410 nt, Artificial Sequence; identical to SEQ ID NO: 144560
  derived and/or modified CDS sequence (opt3) from neuraminidase__InfluenzaA__AHL90413

SEQ ID NO: 152668 - RNA, 1410 nt, Artificial Sequence
  derived and/or modified CDS sequence (opt3) from neuraminidase__InfluenzaA__AHL90425
augaaccccaaucagaagaucauuaccauaggcagcgugucccugacaaucucuacuauuugcuucuuuaugcaaacggccauccucauuaccacagucacucuucacuucaaacaguacgaguuuaacucaccuccaaauaaccagguuaugcugugugaaccgaccaucauagagagaaauaucacagaaauuguguauuugaccaacacuacaaucgagaaggaaauuugccccaaauuagcugaguacaggaauuggaguaagccucagugugacaucaccggguucgcaccauuuagcaaagauaacuccauacggcugucugccggaggugacauuuggguaacgcgcgagcccuaugugucgugcgauccugacaaguguuaccaauucgcgcuaggccaggggacuacccucaauaacguccauucaaaugauacagugcacgaccgaacuccauaucguacccugcuuaugaacgaacugggaguucccuuucauuugggcacaaaacaggugugcaucgcuuggagcaguuccucuugucacgaugguaaggccuggcuccaugucugcauuaccggggacgauaagaaugcaacggccagcuucaucuacaacggaagacugguggacuccaucguaucauggaguaaagagauucugaggacucaggaaagcgaguguguuugcauaaauggcacauguaccguggucaugacugauggcucugcuuccgggaaggcagacacaaaaauccucuuuauugaggaaggaaagaucgugcacaccucaacguuaagcgguagugcccaacacguggaggaaugcucuugcuauccucgguacccaggcguccgcuguguuugcagagauaacuggaagggguccaacaggccgauaguggacauuaauaucaaagaccauagcaucguaucgucuuacguguguuccggacuggucggcgauacaccccggaagaacgacucaaguagcuccucucacugccuugauccuaauaacgaggaaggugggcauggagugaaaggcugggcuuucgacgauggcaaugacguuuggauggggcgcaccauuagcgagaagucacgauugggauaugagacuuuuaaagugaucgaagguuggaguaacccaaaguccaaacugcagauuaauagacaggucauaguggauaggggcgaccggagcggguacucuggaaucuucucaguagagggcaagaguuguauuaaccguugcuuuuauguugaacuaauccgcgguagaaaggaggaaaccgaggugcucuggacaagcaauuccaucgucguguucugugggacuucuggcaccuacggaacaggcucguggcccgauggggccgacauuaaccugaugccuauauga

SEQ ID NO: 152669 - RNA, 1410 nt, Artificial Sequence; identical to SEQ ID NO: 144647
  derived and/or modified CDS sequence (opt3) from neuraminidase__InfluenzaA__AHL90437

SEQ ID NO: 152670 - RNA, 1410 nt, Artificial Sequence; identical to SEQ ID NO: 144560
  derived and/or modified CDS sequence (opt3) from neuraminidase__InfluenzaA__AHL90449

SEQ ID NO: 152671 - RNA, 1410 nt, Artificial Sequence; identical to SEQ ID NO: 144560
  derived and/or modified CDS sequence (opt3) from neuraminidase__InfluenzaA__AHL90461

SEQ ID NO: 152672 - RNA, 1410 nt, Artificial Sequence; identical to SEQ ID NO: 144560
  derived and/or modified CDS sequence (opt3) from neuraminidase__InfluenzaA__AHL90473

SEQ ID NO: 152673 - RNA, 1410 nt, Artificial Sequence; identical to SEQ ID NO: 144560
  derived and/or modified CDS sequence (opt3) from neuraminidase__InfluenzaA__AHL90485

SEQ ID NO: 152674 - RNA, 1410 nt, Artificial Sequence; identical to SEQ ID NO: 144651
  derived and/or modified CDS sequence (opt3) from neuraminidase__InfluenzaA__AHL90497

SEQ ID NO: 152675 - RNA, 1410 nt, Artificial Sequence; identical to SEQ ID NO: 144651
  derived and/or modified CDS sequence (opt3) from neuraminidase__InfluenzaA__AHL90509

SEQ ID NO: 152676 - RNA, 1410 nt, Artificial Sequence
  derived and/or modified CDS sequence (opt3) from neuraminidase__InfluenzaA__AHL90521
augaaccccaaucagaagaucauuaccauaggcagcgugucccugacaaucucuacuauuugcuucuuucuccaaaucgccauucuuaucacgaccgucacacugcacuucaaacaguacgaguuuaacucaccuccaaauaaccagguuauguugugugaaccgacuauaaucgagagaaauauuaccgaaaucguguauuuaacaaacaccacuauugagaaggaaaucugccccaaacuggcugaguacaggaauuggaguaagccucagugugacauaacaggguucgcaccauuuagcaaagauaacuccauucggcuaucugccggaggugacaucuggguaacccgcgagcccuaugugucgugcgauccugacaaguguuaccaauucgcgcucggccaggggacgacucugaauaacguccauucaaauaacaccgugcgagaucguacaccauauagaacucuucugaugaaugaauugggaguucccuuucaccucggcaccaaacaggugugcauugcuuggagcaguuccucuugucaugacgguaaggccuggcugcacgucugcaucacaggggaugacaagaacgcaaccgccagcuucaucuacaauggaaggcugguggauuccauuguaucauggaguaaagagauacuccggacgcaggaaagcgaguguguuugcaucaacggcacuuguacaguggucaugaccgacggcucugcuuccgggaaggcagauacuaaaauuuuauuuaucgaggaaggaaagauagugcauacaucaacccugagcgguagugcccaacacguggaggaaugcucuugcuauccucgcuacccaggcgucagauguguuugcagggacaacuggaagggguccaaucggccgauuguggauaucaacaucaaagaccacagcauuguaucgucuuacguguguuccggacuugucggcgacacgccccgcaagaaugauucaaguagcuccucucauugcuuggacccuaacaaugaggaaggugggcacggagugaaaggcugggcuuucgaugacggcaacgauguuuggauggggcgaaccaucagcgagaagucaagacugggauaugagacauuuaaagugauugaagguuggaguaauccaaaguccaaacuacagauaaacaggcaggucaucguggaccggggcaaucguagcggguacucuggaauuuucucaguagagggcaagaguuguaucaaccgcugcuuuuauguugaacucaucagagguaggaaggaggaaacugaggugcuguggaccagcaauuccauugucguguucugugggacaucuggcacuuacggaaccggcucguggcccgauggggccgacauaaaccuuaugccuaucuga

SEQ ID NO: 152677 - RNA, 1410 nt, Artificial Sequence
  derived and/or modified CDS sequence (opt3) from neuraminidase__InfluenzaA__AHL90533
augaaccccaaucagaagaucauuaccauaggcagcgugucccugacaaucucuacuauuugcuucuuuaugcaaacggccauccucauuaccacagucacucuucacuucaaacaguacgaguuuaacucaccuccaaauaaccagguuaugcugugugaaccgaccaucauagagagaaauaucacagaaauuguguauuugaccaacacuacaaucgagaaggaaauuugccccaaauuagcugaguacaggaauuggaguaagccucagugugacaucaccggguucgcaccauuuagcaaagauaacuccauacggcugucugccggaggugacauuuggguaacgcgcgagcccuaugugucgugcgauccugacaaguguuaccaauucgcgcuaggccaggggacuacccucaauaacguccauucaaaugauacagugcgagaccguacuccauauagaacccugcuuaugaacgaacugggaguucccuuucacuugggcacaaaacaggugugcaucgcuuggagcaguuccucuugucaugaugguaaggccuggcuccacgucugcauuaccggggacgauaagaaugcaacggccagcuucaucuacaacggaaggcugguggacuccaucguaucauggaguaaagagauucugcggacucaggaaagcgaguguguuugcauaaauggcacauguaccguggucaugacugauggcucugcuuccgggaaggcagacacaaaaauccucuuuauugaggaaggaaagaucgugcauaccucaacguuaagcgguagugcccaacacguggaggaaugcucuugcuauccucgcuacccaggcgucagauguguuugcagggauaacuggaagggguccaaccggccgauaguggacauuaauaucaaagaccacagcaucguaucgucuuacguguguuccggacuggucggcgauacaccccgcaagaacgacucaaguagcuccucucauugccuugauccuaauaacgaggaaggugggcacggagugaaaggcugggcuuucgacgauggcaaugacguuuggauggggcgaaccauuagcgagaagucaagauugggauaugagacuuuuaaagugaucgaagguuggaguaacccaaaguccaaacugcagauuaauaggcaggucauaguggagcggggcgaucguagcggguacucuggaaucuucucaguagaaggcaagaguuguauuaaccgcugcuuuuauguugagcuaaucagagguaggaaggaagagaccgaggugcucuggacaagcaauuccaucgucguguucugugggacuucuggcaccuacggaacaggcucguggcccgacggggccgauauuaaccugaugccuauauga

SEQ ID NO: 152678 - RNA, 1410 nt, Artificial Sequence; identical to SEQ ID NO: 144560
  derived and/or modified CDS sequence (opt3) from neuraminidase__InfluenzaA__AHL90545

SEQ ID NO: 152679 - RNA, 1410 nt, Artificial Sequence; identical to SEQ ID NO: 144647
  derived and/or modified CDS sequence (opt3) from neuraminidase__InfluenzaA__AHL90557

SEQ ID NO: 152680 - RNA, 1410 nt, Artificial Sequence
  derived and/or modified CDS sequence (opt3) from neuraminidase__InfluenzaA__AHL90569
augaaccccaaucagaagaucauuaccauaggcagcgugucccugacaaucucuacuauuugcuucuuuaugcaaaucgccauucucaucacgaccgucacacuucacuucaaacaguacgaguuuaacucaccuccaaauaaccagguuaugcugugugaaccgacuauaaucgagagaaauauuaccgaaaucguguauuugacaaacaccacuauugagaaggaaaucugccccaaauuagcugaguacaggaauuggaguaagccucagugugacauaaaaggguucgcaccauuuagcaaggauaacuccauucggcugucugccggaggugacaucuggguaacacgcgagcccuaugugucgugcgauccugacaaguguuaccaauucgcgcuaggccaggggaccacgcucaauaacguccauucaaauaacacugugcgagaucguaccccauauagaacacugcuuaugaaugaacugggaguucccuuucacuugggcacuaaacaggugugcauugcuuggagcaguuccucuugucaugacgguaaggccuggcuccacgucugcaucaccggggaugacaaaaacgcaacagccagcuucaucuacaauggaaggcugguggauuccguaguuucauggaguaaggagauucugcggacccaggaaagcgagugugugugcauaaacggcacguguacugucgugaugacagacggcucugcuuccgggaaagcagauaccaagauccucuuuauugaggaaggaaagaucgugcauacuucaacauuaagcgguagugcccaacacgucgaggaaugcucuugcuauccucgcuacccaggcguuagaugugugugcagggacaacuggaaaggguccaaucggccgauaguagauauuaacaucaaggaccacagcaucgugucgucuuacgucuguuccggacuggugggcgacacccccaggaaaaaugauucaaguagcuccucucauugccuugacccuaacaaugaggaaggugggcacggaguuaagggcugggcuuucgaugacggcaacgauguguggauggggcgaacgauuagcgagaaaucaagauugggauaugagaccuuuaaggucaucgaagguuggaguaauccaaaauccaagcugcagauuaaccgccaggugauaguagaccggggcaaucguagcggguacucuggaaucuucucaguugagggcaagaguuguauuaaccgcugcuuuuauguggaacuaaucagagguaggaaagaggaaacagagguccucuggacuagcaauuccaucguggucuucugugggaccucuggcacauacggaacuggcucguggcccgauggggccgacauuaaccugaugccuauauga

SEQ ID NO: 152681 - RNA, 1410 nt, Artificial Sequence; identical to SEQ ID NO: 144647
  derived and/or modified CDS sequence (opt3) from neuraminidase__InfluenzaA__AHL90581

SEQ ID NO: 152682 - RNA, 1410 nt, Artificial Sequence; identical to SEQ ID NO: 144651
  derived and/or modified CDS sequence (opt3) from neuraminidase__InfluenzaA__AHL90593

SEQ ID NO: 152683 - RNA, 1410 nt, Artificial Sequence
  derived and/or modified CDS sequence (opt3) from neuraminidase__InfluenzaA__AHL90605
augaaccccaaucagaagaucauuaccauaggcagcgugucccugacaaucucuacuauuugcuucuuuaugcagaucgccauucucaucacgaccgucacacuucacuucaaacaguacgaguuuaacucaccuccaaauaaccagguuaugcugugugaaccgacuauaaucgagagaaauauuaccgaaaucguguauuugacaaacaccacuauugagaaggaaaucugccccaaauuagcugaguacaggaauuggaguaagccucagugugacauaacaggguucgcaccauuuagcaaagauaacuccauucggcugucugccggaggugacaucuggguaacccgcgagcccuaugugucgugcgauccugacaaguguuaccaauucgcgcuaggccaggggacgacucucaauaacguccauucaaauaacaccgugcgagaucguacaccauauagaacucugcuuaugaaugaacugggaguucccuuucacuugggcaccaaacaggugugcauugcuuggagcaguuccucuugucaugacgguaaggccuggcuccacgucugcaucacaggggaugacaagaacgcaaccgccagcuucaucuacaauggaaggcugguggauuccguaguuucauggaguaaagagauucugcggacgcaggaaagcgagugugugugcauaaacggcacuuguacagucgugaugaccgacggcucugcuuccgggaaggcagauacuaaaauccucuuuauugaggaaggaaagaucgugcauacaucaaccuuaagcgguagugcccaacacgucgaggaaugcucuugcuauccucgcuacccaggcguuagaugugugugcagggacaacuggaagggguccaaucggccgauaguagauauuaacaucaaagaccacagcaucgugucgucuuacgucuguuccggacuggugggcgacacgccccgcaagaaugauucaaguagcuccucucauugccuugacccuaacaaugaggaaggugggcacggaguuaaaggcugggcuuucgaugacggcaacgauguguggauggggcgaaccauuagcgagaagucaagauugggauaugagacauuuaaagucaucgaagguuggaguaauccaaaguccaaacugcagauuaacaggcaagugauaguagaccggggcaaucguagcggguacucuggaaucuucucaguugagggcaagaguuguauuaaccgcugcuuuuauguggaacuaaucagagguaggaaggaggaaacugagguccucuggaccagcaauuccaucguggucuucugugggacaucuggcacuuacggaaccggcucguggcccgauggggccaacauuaaucugaugccuauauga

SEQ ID NO: 152684 - RNA, 1410 nt, Artificial Sequence; identical to SEQ ID NO: 144647
  derived and/or modified CDS sequence (opt3) from neuraminidase__InfluenzaA__AHL90629

SEQ ID NO: 152685 - RNA, 1410 nt, Artificial Sequence; identical to SEQ ID NO: 144647
  derived and/or modified CDS sequence (opt3) from neuraminidase__InfluenzaA__AHL90641

SEQ ID NO: 152686 - RNA, 1410 nt, Artificial Sequence; identical to SEQ ID NO: 144560
  derived and/or modified CDS sequence (opt3) from neuraminidase__InfluenzaA__AHL90653

SEQ ID NO: 152687 - RNA, 1410 nt, Artificial Sequence; identical to SEQ ID NO: 144647
  derived and/or modified CDS sequence (opt3) from neuraminidase__InfluenzaA__AHL90665

SEQ ID NO: 152688 - RNA, 1410 nt, Artificial Sequence
  derived and/or modified CDS sequence (opt3) from neuraminidase__InfluenzaA__AHL90677
augaaccccaaucagaagaucauuaccauaggcagcgugucccugacaaucucuacuauuugcuucuuuaugcaaacggccauccucauuaccacagucacucuucacuucaaacaguacgaguuuaacucaccuccaaauaaccagguuaugcugugugaaccgaccaucauagagagaaauaucacagaaauuguguauuugaccaacacuacaaucgagaaggaaauuugccccaaauuagcugaguacaggaauuggaguaagccucagugugacaucaccggguucgcaccauuuagcaaagauaacuccauacggcugucugccggaggugacauuuggguaacgcgcgagcccuaugugucgugcgauccugacaaguguuaccaauucgcgcuaggccaggggacuacccucaauaacguccauucaaauaacacagugcgagaucguacuccauauagaacccugcuuaugaaugaacugggaguucccuuucacuugggcacaaaacaggugugcaucgcuuggagcaguuccucuugucaugacgguaaggccuggcuccacgucugcauuaccggggaugacaagaacgcaacggccagcuucaucuacaauggaaaacugguggauuccaucguaucauggaguaaggagauucugaggacucaggaaagcgaguguguuugcauaaacggcacauguaccguggucaugacugacggcucugcuuccgggaaagcagauacaaagauccucuuuauugaggaaggaaagaucgugcauaccucaacguuaagcgguagugcccaacacguggaggaaugcucuugcuauccucgguacccaggcguccgcuguguuugcagagacaacuggaaaggguccaauaggccgauaguggauauuaacaucaaggaccacagcaucguaucgucuuacguguguuccggacuggucggcgacacaccccggaaaaaugauucaaguagcuccucucauugccuugacccuaacaaugaggaaggugggcacggagugaagggcugggcuuucgaugacggcaacgauguuuggauggggcgcaccauuagcgagaaaucacgauugggauaugagacuuuuaaggugaucgaagguuggaguaauccaaaauccaagcugcagauuaacagacaggucauaguggacaggggcaaucggagcggguacucuggaaucuucucaguagagggcaagaguuguauuaaccguugcuuuuauguugaacuaauccgcgguagaaaagaggaaaccgaggugcucuggacaagcaauuccaucgucguguucugugggacuucuggcaccuacggaacaggcucguggcccgauggggccgacauuaaccugaugccuauauga

SEQ ID NO: 152689 - RNA, 1410 nt, Artificial Sequence; identical to SEQ ID NO: 144647
  derived and/or modified CDS sequence (opt3) from neuraminidase__InfluenzaA__AHL90689

SEQ ID NO: 152690 - RNA, 1410 nt, Artificial Sequence
  derived and/or modified CDS sequence (opt3) from neuraminidase__InfluenzaA__AHL90701
augaaccccaaucagaagaucauuaccauaggcagcgugucccugacaaucucuacuauuugcuucuuuaugcagaucgccauucucaucacgaccgucacacuucacuucaaacaguacgaguuuaacucaccuccaaauaaccagguuaugcugugugaaccgacuauaaucgagagaaauauuaccgaaaucguguauuugacaaacaccacuauugagaaggaaaucugccccaaauuagcugaguacaggaauuggaguaagccucagugugacauaacaggguucgcaccauuuagcaaagauaacuccauucggcugucugccggagguggcaucuggguaacccgcgagcccuaugugucgugcgacccugauaaguguuaccaauucgcgcuagggcagggaacgacucucaauaacguccauucaaauaacaccgugcgagaccguacaccauauagaacucugcuuaugaaugaacugggcguucccuuucacuuggguaccaaacaggugugcauugcuuggagcaguuccucuugucaugaugggaaggccuggcuccacgucugcaucacaggagacgauaagaacgcaaccgccagcuucaucuacaauggcaggcugguggacuccguaguuucauggaguaaagauauucugcggacgcaggagagcgaaugugugugcauaaacggcacuuguacagucgugaugaccgacgggucugcuuccggaaaggcagauacuaaaauccucuuuauugaggaggguaagaucgugcauacaucaaccuuaagcggcagugcccaacacgucgaagagugcucuugcuauccucgcuacccagggguuagaugugugugcagggacaacuggaagggauccaaucggccgauaguagauauuaacaucaaagaccacagcaucgugucgucuuacgucuguuccggccuggugggugacacgccccgcaagaaugauucaaguagcuccucucauugccuugacccuaacaaugaagaagggggacacggcguuaaaggcugggcuuucgaugacgggaacgauguguggaugggacgaaccauuagcgagaagucaagauuggguuaugagacauuuaaagucaucgagggcuggaguaauccaaaguccaaacugcagauuaacaggcaagugauaguagaccgggggaaucguagcggauacucuggcaucuucucaguugaagguaagaguuguauuaaccgcugcuuuuauguggagcuaaucagagggaggaaggaagagacugaaguccucuggaccagcaauuccaucguggucuucuguggcacaucuggaacuuacggcaccgggucguggcccgauggagccgacauuaaccugaugccuauauga

SEQ ID NO: 152691 - RNA, 1410 nt, Artificial Sequence; identical to SEQ ID NO: 147352
  derived and/or modified CDS sequence (opt3) from neuraminidase__InfluenzaA__AHL90713

SEQ ID NO: 152692 - RNA, 1413 nt, Artificial Sequence; identical to SEQ ID NO: 147985
  derived and/or modified CDS sequence (opt3) from neuraminidase__InfluenzaA__AHL90725

SEQ ID NO: 152693 - RNA, 1413 nt, Artificial Sequence; identical to SEQ ID NO: 146978
  derived and/or modified CDS sequence (opt3) from neuraminidase__InfluenzaA__AHL90749

SEQ ID NO: 152694 - RNA, 1413 nt, Artificial Sequence; identical to SEQ ID NO: 145509
  derived and/or modified CDS sequence (opt3) from neuraminidase__InfluenzaA__AHL90761

SEQ ID NO: 152695 - RNA, 1413 nt, Artificial Sequence
  derived and/or modified CDS sequence (opt3) from neuraminidase__InfluenzaA__AHL90773
augaaccccaaucagaagaucauuaccauaggcagcaucuccauugccaucgggauuaucucucugaugcuccaaauaggaaacaucauuucaaucugggcuagucacagcauucagacagguucccagaauaacacuggcaucugcaaucagagaauaauuacguacgagaacucuaccugggugaaucauacauaugucaacaucaauaacacuaauguuguggcaggggaagacaaaaccucgaugacacuugccggaaacucaagccuguguaguauuuccggcugggcgaucuacaccaaggauaauucuaucaggauugguagcaaaggggacguauucgugauacgggagccuuuuaucuccugcucacacuuggaaugucgcacuuucuuuuuaacacaaggagcucugcuaaacgauaagcauaguaauggcaccgucaaagaccgaagcccauaucgugcccucaugucuugcccgcugggcgaggcacccuccccuuacaacucaaaguucgaaagcguggccuggagugcuucugcaugucacgaugggaugggauggcuuacgauugguaucuccggcccagacaacggggccguugcugugcugaaguauaauggaauaauuacuggcaccaucaaaagcuggaagaaacagaucuugagaacacaggagucggagugcgucuguaugaacgguucuugcuuuacuauuaugaccgaugggcccuccaauaaggccgcgucauacaaaaucuucaagauugaaaagggaaaagugacaaagaguauagagcucaacgcaccuaauuuuuauuacgaagaguguagcugcuacccagacaccggcaucguaauguguguuugcagggauaacuggcauggcuccaaucggcccugggugucuuucaaccagaaucuggacuaucaaauuggguacaucugcagcggagucuuuggugauaacccucgcccagaggacagagaaggcucauguaauccggugacgguggauggggccaacggagucaaaggcuucaguuauaaguacgguaaugggguuuggaucggcaggacuaaauccaaccggcugcgcaagggauuugagaugauuugggaccccaauggcuggacaaacaccgacagcgauuucucugugaaacaggacguaguggcuauaacugauuggucaggguauaguggauccuuuguccagcacccugaacucacagguuuagacugcauccgaccauguuucuggguggagcugguuagaggccuucccagggaaaacaccacgauuuggaccuccgggucuucgaucagcuucugcggagugaauagcgauacagccaacuggucauggccugacggcgcagaguugccauuuacuauugauaaguga

SEQ ID NO: 152696 - RNA, 1413 nt, Artificial Sequence
  derived and/or modified CDS sequence (opt3) from neuraminidase__InfluenzaA__AHL90785
augaaccccaaucagaagaucauuaccauaggcagcaucuccauugccaucgggauuaucucucugaugcuccaaauaggaaacaucauuucaaucugggcuagucacagcauucagacagguucccagaauaacacuggcaucugcaaucagagaauaauuacguacgagaacucuaccugggugaaucauacauaugucaacaucaauaacacuaauguuguggcaggggaagacaaaaccucgguaacacuugccggaaacucaagccuguguaguauuuccggcugggcgaucuacaccaaggauaauucuaucaggauugguagcaaaggggacguguucgucauacgggagccuuuuaucuccugcucacacuuggaaugucgcacuuucuuuuuaacacaaggagcucugcuaaacgauaagcauaguaauggcaccgugaaagaccgaagcccauaucgugcccucaugucuugcccgcugggcgaggcacccuccccuuacaacucaaaguucgaaagcguugccuggagugcuucugcaugucacgaugggaugggauggcuuacgauugguaucuccggcccagacaacggggccguggcuguccugaaguauaauggaauaauuacuggcaccaucaaaagcuggaagaaacagaucuugagaacacaggagucggagugcguguguaugaacgguucuugcuuuacuauuaugaccgaugggcccuccaauaaggccgcgucauacaaaaucuucaagauugaaaagggaaaaguaacaaagaguauagagcucaacgcaccuaauuuuuauuacgaagaguguagcugcuacccagacaccggcaucguuaugugugugugcagggauaacuggcauggcuccaaucggcccugggucucuuucaaccagaaucuggacuaucaaauuggguacaucugcagcggaguguuuggugauaacccucgcccagaggacggcgaagggucauguaauccggugacggucaacggagccgauggcguuaaagguuucaguuauaaguacgggaauggcguguggaucggaagaacuaaauccaacaggcugcggaagggcuuugagaugauuugggaccccaauggguggacaaacaccgacagcgauuucucuguaaaacaggacguggucgcuauaacugauuggucaggauauagugguagcuuugugcagcacccugaacucacaggcuuagacugcauccgcccauguuucuggguugagcuggugcgagggcuucccagagaaaacauuaccaucuggacguccggaucuucgauuagcuucugcggcgucaauuccgauaccgccaacuggucauggccugacggugcagaguugccauuuacaaucgauaaguga

SEQ ID NO: 152697 - RNA, 1413 nt, Artificial Sequence
  derived and/or modified CDS sequence (opt3) from neuraminidase__InfluenzaA__AHL90797
augaaccccaaucagaagaucauuaccauaggcagcaucuccauugccaucgggauuaucucucugaugcuccaaauaggaaacaucauuucaaucugggcuagucacagcauucagacagguucccagaauaacacuggcaucugcaauaaaagaauaauuacguacgagaacucuaccugggugaaucauacauaugucaacaucaauaacacuaauguuguggcaggggaagacaagaccucgguaacacuugccggaaacucaagccuguguaguauuuccggcugggcgaucuacaccaaagauaauucuaucaggauugguagcaagggggacguguucgucauacgggagccuuuuaucgcuugcucccacuuggaaugucgcacuuucuuuuuaacacagggagcccugcuaaacgauaaacauucaaauggcaccgugaaggaccgaaguccauaucgugcacucaugagcugcccgcugggcgaggcccccucuccuuacaacuccaaguucgaaucaguugcuuggagcgcaagugccugucacgaugggaugggauggcuuacgauugguaucucuggcccagacaacggggcuguggccguccugaaauauaauggaauaauuacuggcaccaucaaguccuggaaaaagcaaaucuugagaacacaggagagcgagugcguguguaugaacgguucgugcuuuacuauuaugaccgaugggcccucugacaaagcggcauccuacaagaucuucaagauugaaaaaggaaagguaacaaaaucaauagagcucaaugccccuaacuuucauuaugaagaguguaguugcuacccagauaccggcaucguuaugugugugugcagggacaauuggcacggcagcaaccggcccugggucuccuucaaucagaaccuggauuaccagauuggguauaucugcucuggaguguuuggugacaauccucgcccagaggauggcgaagggagcuguucaccggugacggucgacggagcuaacggcguuaaggguuucaguuacaaauaugacaaugggguguggaucggcagaacuaaguccaacaggcugcggaaaggauuugagguaauuugggaucccaauggcuggacaaacaccgacagcgauuucucugugaagcaagacgucguggccauaacugauuggucaggguacagugguagcuuuguucagcacccugaacucacaggauuagacugcauccgcccauguuucuggguggagcugguccgaggccuucccagagaaaauaccacgauuuggaccuccgggucuucgaucagcuucugcggagugaacuccgauacagcaaacuggucauggccugacggcgcugaguugccauuuacuauugauaaguga

SEQ ID NO: 152698 - RNA, 1413 nt, Artificial Sequence; identical to SEQ ID NO: 145509
  derived and/or modified CDS sequence (opt3) from neuraminidase__InfluenzaA__AHL90809

SEQ ID NO: 152699 - RNA, 1413 nt, Artificial Sequence; identical to SEQ ID NO: 147985
  derived and/or modified CDS sequence (opt3) from neuraminidase__InfluenzaA__AHL90821

SEQ ID NO: 152700 - RNA, 1413 nt, Artificial Sequence
  derived and/or modified CDS sequence (opt3) from neuraminidase__InfluenzaA__AHL90833
augaaccccaaucagagaaucauuaccauaggcagcaucuccauugccaucgggauuaucucucugaugcuccaaauaggaaacaucauuucaaucugggcuagucacagcauucagacagguucccagaauaacacuggcaucugcaaucagaggauaauuacguacgagaacucuaccugggugaaucauacauaugugaacaucaauaacacuaauguuguggcaggggaagacaagaccucgguaacacuugccggaaacucaagccuguguaguauuuccggcugggcgaucuacaccaaagauaauucuauccggauugguagcaagggggacguguucgucauacgcgagccuuuuaucuccugcucacacuuggaaugucgaacuuucuuuuuaacacaaggagcucugcuaaacgauaaacauaguaauggcaccgccaaggaccguagcccauauagagcacucaugucuugcccgcugggcgaggcccccuccccuuacaacucaaaauucgaaagcguggcuuggagugcaucugccugucacgaugggaugggauggcuuacgauugguaucuccggcccagacaacggggcuguugccgugcugaaguauaauggaauaauuacuggcaccaucaagagcuggaaaaagcagaucuugaggacacaggagucggagugcgucuguaugaacgguucuugcuuuacuauuaugaccgaugggcccuccaauaaagcggcaucauacaagaucuucaaaauugaaaagggaaaggugacaaaaaguauagagcucaacgccccuaauuuuuauuacgaagaguguagcugcuacccagacaccggcaucguaauguguguuugccgggauaacuggcauggcuccaaucgccccugggugucuuucaaccagaaucuggacuaucaaaugggguacauuugcagcggagucuuuggugauaacccuagaccagaggacggcgaagggucauguaauccggugacgguggauggagcuaacggcgucaaggguuucaguuauaaauacgggaauggcguuuggaucggaaggacuaaguccaaccggcugcgcaaaggcuuugagaugaucugggaccccaauggguggacaaacaccgacagcgauuucucugugaagcaggacguaguggccauuacugauuggucaggauauagugguagcuuuguccagcacccugaacucacaggcuuagacugcauacgaccauguuucuggguggagcugguuagagggcuucccagggaaaacaccacgaucuggaccuccggaucuucgauuagcuucugcggcgucaauuccgauacagcaaacuggucauggccugacggugcugaguugccauuuacuaucgauaaauga

SEQ ID NO: 152701 - RNA, 1413 nt, Artificial Sequence; identical to SEQ ID NO: 145509
  derived and/or modified CDS sequence (opt3) from neuraminidase__InfluenzaA__AHL90845

SEQ ID NO: 152702 - RNA, 1413 nt, Artificial Sequence; identical to SEQ ID NO: 146978
  derived and/or modified CDS sequence (opt3) from neuraminidase__InfluenzaA__AHL90857

SEQ ID NO: 152703 - RNA, 1413 nt, Artificial Sequence; identical to SEQ ID NO: 145509
  derived and/or modified CDS sequence (opt3) from neuraminidase__InfluenzaA__AHL90869

SEQ ID NO: 152704 - RNA, 1413 nt, Artificial Sequence
  derived and/or modified CDS sequence (opt3) from neuraminidase__InfluenzaA__AHL90881
augaaccccaaucagaagaucauuaccauaggcagcaucuccauugccaucgggauuaucucuacaaugcugcaaauaggaucaaucauuaguaucugggcuagccacuccauucagacugguucucagaacaauacgggcaucugcaaccagagaauaauuaccuacgaaaauucgacaugggugaaccauacuuaugucaauaucaacaauaccaacguuguggcaggggaggacaaaacaucaguaacccucgccggaaauagcagucuuuguuccauuucuggcugggcgaucuacacuaaggauaacagcaucaggauugguuccaaaggggacguguucgucauacgggagccuuuuaucucaugcagucaccuggaaugucgcacauucuuuuugacccaaggagcuuuacugaaugauaagcauagcaacggcacggugaaagaccgaucuccauaucgugcccuaauguccugcccgcucggcgaggcacccucaccuuacaauagcaaguucgaaaguguugccuggucugcuuccgcaugucacgaugggaugggauggcugacuauugguaucagcggcccagacaacggggccguggcuguccuuaaguauaacggaauaauuaccggcacaaucaaaucguggaagaaacagauccugagaacucaggagucugagugcguguguaugaaugguuccugcuuuaccauuaugacagaugggcccucaaacaaggccgcgaguuacaaaaucuucaagauugaaaagggaaaaguaaccaagagcauagaguugaaugcaccuaacuuuuauuacgaagaguguuccugcuacccagacacgggcaucguuaugugugugugcagggauaauuggcauggcucuaaccggcccugggucagcuucaaucagaaccucgacuaucaaauuggguacaucugcucaggaguguuuggugauaauccucgcccagaggacggcgaagggaguuguaacccggugacugucgauggagccaauggcguuaaagguuucuccuauaaguacgggaacggcguguggaucggaagaacaaaaagcaauaggcugauuaagggcuuugagaugauaugggaccccaacggguggaccaauacugacucugauuucucaguaaaacaggacguggucgcuaucacagauuggaguggauauagcgguuccuuugugcagcacccugaacugaccggccucgacugcauucggccauguuucuggguugaguuagugcgcgggcugccccgagaaaacacgaccaucuggacaucuggaucgagcauuuccuucugcggcgucaacucagauacugccaauuggaguuggccugacggugcagagcuuccauuuaccaucgauaaguga

SEQ ID NO: 152705 - RNA, 1413 nt, Artificial Sequence; identical to SEQ ID NO: 147985
  derived and/or modified CDS sequence (opt3) from neuraminidase__InfluenzaA__AHL90893

SEQ ID NO: 152706 - RNA, 1413 nt, Artificial Sequence; identical to SEQ ID NO: 146978
  derived and/or modified CDS sequence (opt3) from neuraminidase__InfluenzaA__AHL90905

SEQ ID NO: 152707 - RNA, 1413 nt, Artificial Sequence
  derived and/or modified CDS sequence (opt3) from neuraminidase__InfluenzaA__AHL90917
augaaccccaaucagaagaucauuaccauaggcagcaucuccauugccaucgggauuaucucucugacacuccaaauaggaaacaucauuucaaucugggcuagucacagcauucagacugguucccagaauaacacgggcaucugcaaucagagaauaauuaccuacgagaacucuacaugggugaaucauacuuaugucaacaucaauaacaccaauguuguggcaggggaagacaaaacaucgguaacccuugccggaaacucaagccuguguaguauuuccggcugggcgaucuacacuaaggauaauucuaucaggauugguagcaaaggggacguguucgucauacgggagccuuuuaucuccugcucacacuuggaaugucgcacauucuuuuuaacccaaggagcucugcuaaacgauaagcauaguaauggcacggugaaagaccgaagcccauaucgugcccucaugucuugcccgcugggcgaggcacccuccccuuacaacucaaaguucgaaagcguugccuggagugcuucugcaugucacgaugggaugggauggcuuacuauugguaucuccggcccagacaacggggccguggcuguccugaaguauaauggaauaauuaccggcacaaucaaaagcuggaagaaacagaucuugagaacucaggagucggagugcguguguaugaacgguucuugcuuuaccauuaugacagaugggcccuccaauaaggccgcgucauacaaaaucuucaagauugaaaagggaaaaguaaccaagaguauagagcucaacgcaccuaauuuuuauuacgaagaguguagcugcuacccagacacgggcaucguuaugugugugugcagggauaacuggcauggcuccaaucggcccugggucucuuucaaccagaaucuggacuaucaaauuggguacaucugcagcggaguguuuggugauaacccucgcccagaggacggcgaagggucauguaauccggugacugucgauggagccaacggcguuaaagguuucaguuauaaguacgggaauggcguguggaucggaagaacaaaauccaacaggcugcggaagggcuuugagaugauuugggaccccaauggguggaccaacacugacagcgauuucucuguaaaacaggacguggucgcuauaacagauuggucaggauauagugguagcuuugugcagcacccugaacucaccggcuuagacugcauccgcccauguuucuggguugagcuggugcgagggcuucccagagaaaacacgaccauuuggacauccggaucuucgaucagcuucugcggcgucaauuccgauacugccaacuggucauggccugacggugcagaguugccauuuaccauugauaaguga

SEQ ID NO: 152708 - RNA, 1413 nt, Artificial Sequence
  derived and/or modified CDS sequence (opt3) from neuraminidase__InfluenzaA__AHL90929
augaaccccaaucagaagaucauuaccauaggcagcaucuccauugccaucgggauuaucucucugaugcuccaaauaggaaacaucauuucaaucugggcuagucacagcauucagacagguucccagaauaacacuggcaucugcaaucagagaauaauuacguacgagaacucuaccugggugaaucauacauaugugaacaucaauaacacuaauguuguggcaggggaagacaaaaccucgaugacacuugccggaaacucaagccuguguaguauuuccggcugggcgaucuacaccaaggauaauucuaucaggauugguagcaaaggggacguauucgugauacgggagccuuuuaucuccugcucacacuuggaaugucgcacuuucuuuuuaacacaaggagcucugcuaaacgauaagcauaguaauggcaccgucaaagaccgaagcccauaucgugcccucaugucuugcccgcugggcgaggcacccuccccuuacaacucaaaguucgaaagcguggccuggagugcuucugcaugucacgaugggaugggauggcuuacgauugguaucuccggcccagacaacggggccguugcugugcugaaguauaauggaauaauuacuggcaccaucaaaagcuggaagaaacagaucuugagaacacaggagucggagugcgucuguaugaacgguucuugcuuuacuauuaugaccgaugggcccuccaauaaggccgcgucauacaaaaucuucaagauugaaaagggaaaagugacaaagaguauagagcucaacgcaccuaauuuuuauuacgaagaguguagcugcuacccagacaccggcaucguaauguguguuugcagggauaacuggcauggcuccaaucggcccugggugucuuucaaccagaaucuggacuaucaaauuggguacaucugcagcggagucuuuggugauaacccucgcccagaggacggcgaagggucauguaauccggugacgguggauggagccaacggcgucaaagguuucaguuauaaguacgggaauggcguuuggaucggaagaacuaaauccaacaggcugcggaagggcuuugagaugauuugggaccccaauggguggacaaacaccgacagcgauuucucugugaaacaggacguaguggcuauaacugauuggucaggauauagugguagcuuuguccagcacccugaacucacaggcuuagacugcauccgcccauguuucuggguggagcugguucgagggcuucccagagaaaacaccacgauuuggaccuccggaucuucgaucagcuucugcggcgucaauuccgauacagccaacuggucauggccugacggugcagaguugccauuuacuauugauaaguga

SEQ ID NO: 152709 - RNA, 1413 nt, Artificial Sequence; identical to SEQ ID NO: 146978
  derived and/or modified CDS sequence (opt3) from neuraminidase__InfluenzaA__AHL90941

SEQ ID NO: 152710 - RNA, 1413 nt, Artificial Sequence; identical to SEQ ID NO: 146978
  derived and/or modified CDS sequence (opt3) from neuraminidase__InfluenzaA__AHL90953

SEQ ID NO: 152711 - RNA, 1413 nt, Artificial Sequence; identical to SEQ ID NO: 146978
  derived and/or modified CDS sequence (opt3) from neuraminidase__InfluenzaA__AHL90965

SEQ ID NO: 152712 - RNA, 1413 nt, Artificial Sequence
  derived and/or modified CDS sequence (opt3) from neuraminidase__InfluenzaA__AHL90977
augaaccccaaucagaagaucauuaccauaggcagcaucuccauugccaucgggauuaucucucugaugcuccaaauaggaaacaucauuucaaucugggcuagucacagcauucagacagguucccagaauaacacuggcaucugcaaucagagaauaauuacguacgagaacucuaccugggugaaucauacauaugucaacaucaauaacacuaauguuguggcaggggaagacaaaaccucgguaacacuugccggaaacucaagccuguguaguauuuccggcugggcgaucuacaccaaggauaauucuaucaggauugguagcaaaggggacguguucgucauacgggagccuuuuaucuccugcucacacuuggaaugucgcacuuucuuuuuaacacaaggagcucugcuaaacgauaagcauaguaauggcaccgugaaagaccgaagcccauaucgugcccucaugucuugcccgcugggcgaggcacccuccccuuacaacucaaaguucgaaagcguugccuggagugcuucugcaugucacgaugggaugggauggcuuacgauugguaucuccggcccagacaacggggccguggcuguccugaaguauaauggaauaauuacuggcaccaucaaaagcuggaagaaacagaucuugagaacacaggagucggagugcguguguaugaacgguucuugcuuuacuauuaugaccgaugggcccuccaauaaggccgcgucauacaaaaucuucaagauugaaaagggaaaaguaacaaagaguauagagcucaacgcaccuaauuuuuauuacgaagaguguagcugcuacccagacaccggcaucguuaugugugugugcagggauaacuggcauggcuccaaucggcccugggucucuuucaaccagaaucuggacuaucaaauuggguacaucugcagcggaguguuuggugauaacccucgcccagaggacggcgaagggucauguaauccggugacggucgauggagccaacggcguuaaagguuucaguuauaaguacgggaauggcguguggaucggaagaacuaaauccaacaggcugcggaagggcuuugagaugauuugggaccccaauggguggacaaacaccgacagcgauuucucuguaaaacaggacguggucgcuauagccgauuggucaggauauagugguagcuuugugcagcacccugaacucacuggcuuagacugcauccgcccauguuucuggguugagcuggugcgagggcuucccagagaaaacacaaccauuuggacguccggaucuucgaucagcuucugcggcgucaauuccgauaccgcaaacuggucauggccugacggugcugaguugccauuuacaauugauaaguga

SEQ ID NO: 152713 - RNA, 1413 nt, Artificial Sequence; identical to SEQ ID NO: 148252
  derived and/or modified CDS sequence (opt3) from neuraminidase__InfluenzaA__AHL90989

SEQ ID NO: 152714 - RNA, 1413 nt, Artificial Sequence; identical to SEQ ID NO: 152708
  derived and/or modified CDS sequence (opt3) from neuraminidase__InfluenzaA__AHL91001

SEQ ID NO: 152715 - RNA, 1413 nt, Artificial Sequence
  derived and/or modified CDS sequence (opt3) from neuraminidase__InfluenzaA__AHL91013
augaaccccaaucagaagaucauuaccauaggcagcaucuccauugccaucgggauuaucucucugaugcuccaaauaggaaacaucauuucaaucugggcuagucacagcauucagacagguucccagaauaacacuggcaucugcucucagagaauaauuacguacgaaaauucgaccugggugaaccauacauaugucaauaucaacaauacuaacguuguggcaggggaggacaaaaccucaaugacacuugccggaaauagcagucuguguuccauuucuggcugggcgaucuacaccaaggauaacagcaucaggauugguuccaaaggggacguauucgugauacgggagccuuuuaucucaugcagucacuuggaaugucgcacuuucuuuuuaacacaaggagcucugcuaaaugauaagcauagcaacggcaccgucaaagaccgaucuccauaucgugcccucauguccugcccgcugggcgaggcacccucaccuuacaauagcaaguucgaaaguguggccuggucugcuuccgcaugucacgaugggaugggauggcuuacgauugguaucagcggcccagacaacggggccguugcugugcugaaguauaacggaauaauuacuggcaccaucagaucguggaaaaagcagaucuugaggacacaggagucugagugcgucuguaugaaugguuccugcuuuacuauuaugaccgaugggcccucaaacaaagccgcgaguuacaagaucuucaaaauugaaaagggaaaggugacaaaaagcauagagcucaaugcaccuaacuuuuauuacgaagaguguuccugcuacccagacaccggcaucguaauguguguuugccgggauaauuggcauggcucuaaccgccccugggugagcuucaaucagaaccuggacuaucaaauuggguacaucugcucaggagucuuuggugauaauccuagaccagaggacggcgaagggaguuguaacccggugacgguggauggagccaauggcgucaaggguuucuccuauaaauacgggaacggcguuuggaucggaaggacuaagagcaaucggcugcgcaaaggcuuugagaugauuugggaccccaacggguggacaaauaccgacucugauuucucagugaagcaggacguaguggcuauaacugauuggaguggauauagcgguuccuuuguccagcacccugaacucacaggcuuagacugcauccgaccauguuucuggguggagcugguuagagggcuucccagggaaaacaccacgauuuggaccucuggaucgagcaucuccuucugcggcgugaacucagauacagccaauuggaguuggccugacggugcagaguugccauuuacuauugauaaauga

SEQ ID NO: 152716 - RNA, 1413 nt, Artificial Sequence; identical to SEQ ID NO: 152708
  derived and/or modified CDS sequence (opt3) from neuraminidase__InfluenzaA__AHL91025

SEQ ID NO: 152717 - RNA, 1410 nt, Artificial Sequence; identical to SEQ ID NO: 145953
  derived and/or modified CDS sequence (opt3) from neuraminidase__InfluenzaA__AHL91037

SEQ ID NO: 152718 - RNA, 1410 nt, Artificial Sequence; identical to SEQ ID NO: 147566
  derived and/or modified CDS sequence (opt3) from neuraminidase__InfluenzaA__AHL91049

SEQ ID NO: 152719 - RNA, 1410 nt, Artificial Sequence
  derived and/or modified CDS sequence (opt3) from neuraminidase__InfluenzaA__AHL91061
augaaccccaaucagaagaucauuaccauaggcagcgugucccugacaaucucuacuauuugcuucuuuaugcagaucgccauucucaucacgaccgucacacuucacuucaaacaguacgaguuuaacucaccuccaaauaaccagguuaugcugugugaaccgacuauaaucgagagaaauauuaccgaaaucguguauuugacaaacaccacuauugagaaggaaaucugccccaaauuagcugaguacaggaauuggaguaagccucagugugacauaacaggguucgcaccauuuagcaaagauaacuccauucggcugucugccggaggugacaucuggguaacccgcgagcccuaugugucgugcgauccugacaaguguuaccaauucgcgcuaggccaggggacgacucucaauaacguccauucaaauaacaccgugcgagaucguacaccauauagaacucugcuuaugaaugaacugggaguucccuuucacuugggcaccaaacaggugugcauugcuuggagcaguuccucuugucaugacgguaaggccuggcuccacgucugcaucacaggggaugacaagaacgcaaccgccagcuucaucuacaauggaaggcugguggauuccguaguuucauggaguaaagagauucugcggacgcaggaaagcgagugugugugcauaaacggcacuuguacagucgugaugaccgacggcucugcuuccgggaaggcagauacuaaaauccucuuuauugaggaaggaaagaucgugcauacaucaaccuuaagcgguagugcccaacacgucgaggaaugcucuugcuauccucgcuacccaggcguuagaugugugugcagggacaacuggaagggguccaaucggccgauaguagauauuaacaucaaagaccacagcaucgugucgucuuacgucuguuccggacuggugggcgacacgccccgcaagaaugauucaaguagcuccucucauugccuuaacccuaauaacgaggaaggugggcacggaguuaaaggcugggcuuucgacgauggcaaugacguguggauggggcgaaccauuagcgagaagucaagauugggauaugagacauuuaaagucaucgaagguuggaguaaccauaaguccaaacugcagauuaauaggcaagugauaguagaucggggcaaccguagcggguacucuggaaucuucucaguugagggcaagaguuguauuaaucgcugcuuuuauguggaacuaaucagagguaggaaggaggaaacugagguccucuggaccagcaacuccaucguggucuucugugggacaucuggcacuuacggaaccggcucguggccagacggggccgaucugaaucuuaugcccauuuga

SEQ ID NO: 152720 - RNA, 1410 nt, Artificial Sequence
  derived and/or modified CDS sequence (opt3) from neuraminidase__InfluenzaA__AHL91073
augaaccccaaucagaagaucauuaccauaggcagcgugucccugacaaucucuacuauuugcuucuuuaugcaaaucgccauucucaucacgaccgucacacuucacuucaaacaguacgaguuuaacucaccuccaaauaaccagguuaugcugugugaaccgacuauaaucgagagaaauauuaccgaaaucguguauuugacaaacaccacuauugagaaggaaaucugccccaaauuagcugaguacaggacauggaguaagccucagugugacauaaccggguucgcaccauuuagcaaagauaauuccauucggcugucugccggaggugacaucuggguaacgcgcgagcccuaugugucgugcgauccugacaaguguuaccaauucgcgcuaggccaggggacuacccucaacaauguccauucaaacaauacagugcgagaucguacuccauauagaacccugcuuaugaacgaacugggaguucccuuucacuugggcacaaaacaggugugcauugcuuggagcaguuccucuugucaugacgguaaggccuggcuccacgucugcaucaccggggaugacaagaaugcaacggccagcuucaucuacaacggaaggcugguggauuccguaguuucauggaguaaagagauucugcggacucaggaaagcgagugugugugcauaaauggcacauguaccgucgugaugacugacggcucugcuuccgggaaggcagauacaaaaauccucuuuauugaggaaggaaagaucgugcauaccucaacguuaagcgguagugcccaacacgucgaggaaugcucuugcuauccucgcuacccaggcguuagaugugugugcagggacaacuggaagggguccaaccggccgauaguagauauuaauaucaaagaccacagcaucgugucgucuuacgucuguuccggacuggugggcgacacccccaggaagaacgauucaaguagcgguucccauugccuugacccuaauaacgaggaagggggacacggcguuaaaggcugggcuuucgaugacgggaaugauguguggaugggacgaacaauuucugaaaagagcagauuggguuaugagacuuuuaaagucaucgagggcuggucaaaccauaagaguaaacugcagauuaaucgccaggugauaguagaccgggggaaccguuccggauacagcggcaucuucucuguugaggguaagucauguauuaaucgcugcuuuuauguggaacuaaucagagggaggaaggaggaaaccgagguccucuggacaaguaacagcaucguggucuucuguggcacuuccggaaccuacggcacagggucuuggccagauggagccgaccugaaucuuaugcccauuuga

SEQ ID NO: 152721 - RNA, 1410 nt, Artificial Sequence
  derived and/or modified CDS sequence (opt3) from neuraminidase__InfluenzaA__AHL91085
augaaccccaaucagaagaucauuaccauaggcagcgugucccugacaaucucuacuauuugcuucuuuaugcagaucgccauucucaucacgaccgucacacuucacuucaaacaguacgaguuuaacucaccuccaaauaaccagguuaugcugugugaaccgaagauaaucgagagaaauauuacugaaaucguguauuugaccaacacaaccauugagaaagaaaucugccccaaguuagcugaguacaggaauuggaguaaaccucagugugacauaacuggguucgcaccauuuagcaaggauaacuccauucggcugucugccggaggugacaucuggguaacacgcgagcccuaugugucgugcgauccugacaaguguuaccaauucgcgcuaggccaggggaccacgcucaauaacguccauucaaauaacacugugcgagaucguaccccauauagaacacugcuuaugaaugaacugggaguucccuuucacuugggcacuaaacaggugugcauugcuuggagcaguuccucuugucaugacgguaaggccuggcuccacgucugcaucaccggggaugacaaaaacgcaacagccagcuucaucuacaauggaaggcugguggauuccguaguuucauggaguaaggagauucugcggacccaggaaagcgagugugugugcauaaacggcaucuguacggucgugaugacugacggcucugcuuccgggaaagcagauacaaagauucucuuuaucgaggaaggaaagauagugcauaccucaacuuuaagcgguagugcccaacacgucgaggaaugcucuugcuauccucgcuacccaggcguuagaugugugugcagggacaacuggaaaggguccaaucggccgauuguagauaucaacaucaaggaccacagcauugugucgucuuacgucuguuccggacuggugggcgacacaccccgcaaaaaugauucaaguagcuccucucauugccuugacccuaacaaugaggaaggugggcacggaguuaagggcugggcuuucgaugacggcaacgauguguggauggggcgaaccaucagcgagaaaucaagauugggauaugagacguuuaaggucauugaagguuggaguaauccaaaauccaagcugcagauaaacaggcaagugaucguagaccggggcaaucguagcggguacucuggaauuuucucaguugagggcaagaguuguaucaaccgcugcuuuuauguggaacuaaucagagguaggaaagaggaaaccgagguccucuggacaagcaauuccauuguggucuucugugggacuucuggcaccuacggaacaggcucguggcccgauggggccgacauaaaccugaugccuaucuga

SEQ ID NO: 152722 - RNA, 1410 nt, Artificial Sequence; identical to SEQ ID NO: 144647
  derived and/or modified CDS sequence (opt3) from neuraminidase__InfluenzaA__AHL91097

SEQ ID NO: 152723 - RNA, 1410 nt, Artificial Sequence
  derived and/or modified CDS sequence (opt3) from neuraminidase__InfluenzaA__AHL91109
augaaccccaaucagaagaucauuaccauaggcagcgugucccugacaaucucuacuauuugcuucuuuaugcagaucgccauucucaucacgaccgucacacuucacuucaaacaguacgaguuuaacucaccuccaaauaaccagguuaugcugugugaaccgacuauaaucgagagaaauauuaccgaaaucguguauuugacaaacaccacuauugagaaggaaaucugccccaaauuagcugaguacaggaauuggaguaagccucagugugacauaacaggguucgcaccauuuagcaaagauaacuccauucggcugucugccggaggugacaucuggguaacccgcgagcccuaugugucgugcgauccugacaaguguuaccaauucgcgcuaggccaggggacgacucucaauaacguccauucaaauaacaccgugcgagaucguacaccauauagaacucugcuuaugaaugaacugggaguucccuuucacuugggcaccaaacaggugugcauugcuuggagcaguuccucuugucaugacgguaaggccuggcuccacgucugcaucacaggggaugacaagaacgcaaccgccagcuucaucuacaauggaaggcugguggauuccguaguuucauggaguaaagagauucugcggacgcaggaaagcgagugugugugcauaaacggcacuuguacagucgugaugaccgacggcucugcuuccgggaaggcagauacuaaaauccucuuuauugaggaaggaaagaucgugcauacaucaaccuuaagcgguagugcccaacacgucgaggaaugcucuugcuauccucgcuacccaggcguuagaugugugugcagggacaacuggaagggguccaaucggccgauaguagauauuaacaucaaagaccacagcaucgugucgucuuacgucuguuccggacuggugggcgacacgccccgcaagaaugauucaaguagcuccucucauugccuugacccuaacaaugaggaaggugggcacggaguuaaaggcugggcuuucgaugacggcaacgauguguggauggggcgaaccauuagcgagaagucaagauugggauaugagacauuuaaagucaucgaagguuggaguaaucauaaguccaaacugcagauuaacaggcaagugauaguagaccggggcaaucguagcggguacucuggaaucuucucaguugagggcaagaguuguauuaaccgcugcuuuuauguggaacuaaucagagguaggaaggaggaaacugagguccucuggaccagcaauuccaucguggucuucugugggacaucuggcacuuacggaaccggcucguggccagauggggccgaccugaacauuaugcccauauga

SEQ ID NO: 152724 - RNA, 1410 nt, Artificial Sequence; identical to SEQ ID NO: 145953
  derived and/or modified CDS sequence (opt3) from neuraminidase__InfluenzaA__AHL91121

SEQ ID NO: 152725 - RNA, 1410 nt, Artificial Sequence
  derived and/or modified CDS sequence (opt3) from neuraminidase__InfluenzaA__AHL91133
augaaccccaaucagaagaucauuaccauaggcagcgugucccugacaaucucuacuauuugcuucuuuaugcagaucgccauucucaucacgaccgucacacuucacuucaaacaguuugaguucaacucaccuccaaauaaccagguuaugcugugugaaccgacuauaaucgagagaaauauuaccgaaaucguguacuugacaaacaccacuauugagaaggaaaucugccccaaauuagcugaguauaggaauuggaguaagccucagugugacauaacaggguuugcaccauucagcaaagauaacuccauucggcugucugccggaggugacaucuggguaacccgcgagcccuacgugucgugcgauccugacaaguguuaucaauuugcgcuaggccaggggacgacucucaauaacguccauucaaauaacaccgugcgagaucguacaccauacagaacucugcuuaugaaugaacugggaguucccuuccacuugggcaccaaacaggugugcauugcuuggagcaguuccucuugucaugacgguaaggccuggcuccacgucugcaucacaggggaugacaagaacgcaaccgccagcuuuaucuauaauggaaggcugguggauuccguaguuucauggaguaaagagauucugcggacgcaggaaagcgagugugugugcauaaacggcacuuguacagucgugaugaccgacggcucugcuuccgggaaggcagauacuaaaauccucuucauugaggaaggaaagaucgugcauacaucaaccuuaagcgguagugcccaacacgucgaggaaugcucuugcuacccucgcuauccaggcguuagaugugugugcagggacaacuggaagggguccaaucggccgauaguagauauuaacaucaaagaccacagcaucgugucgucuuacgucuguuccggacuggugggcgacacgccccgcaagaaugauucaaguagcuccucucauugccuugacccuaacaaugaggaaggugggcacggaguuaaaggcugggcuuuugaugacggcaacgauguguggauggggcgaaccauuagcgagaagucaagauugggauacgagacauucaaagucaucgaagguuggaguaaucauaaguccaaacugcagauuaacaggcaagugauaguagaccggggcaaucguagcggguauucuggaaucuuuucaguugagggcaagaguuguauuaaccgcugcuucuacguggaacuaaucagagguaggaaggaggaaacugagguccucuggaccagcaauuccaucguggucuucugugggacaucuggcacuuauggaaccggcucguggccagauggggccgaccugaaccuuaugcccauuuga

SEQ ID NO: 152726 - RNA, 1410 nt, Artificial Sequence; identical to SEQ ID NO: 147352
  derived and/or modified CDS sequence (opt3) from neuraminidase__InfluenzaA__AHL91145

SEQ ID NO: 152727 - RNA, 1410 nt, Artificial Sequence; identical to SEQ ID NO: 147352
  derived and/or modified CDS sequence (opt3) from neuraminidase__InfluenzaA__AHL91157

SEQ ID NO: 152728 - RNA, 1410 nt, Artificial Sequence; identical to SEQ ID NO: 142760
  derived and/or modified CDS sequence (opt3) from neuraminidase__InfluenzaA__AHL91169

SEQ ID NO: 152729 - RNA, 1410 nt, Artificial Sequence; identical to SEQ ID NO: 150194
  derived and/or modified CDS sequence (opt3) from neuraminidase__InfluenzaA__AHL94987

SEQ ID NO: 152730 - RNA, 1410 nt, Artificial Sequence; identical to SEQ ID NO: 150194
  derived and/or modified CDS sequence (opt3) from neuraminidase__InfluenzaA__AHL94999

SEQ ID NO: 152731 - RNA, 1410 nt, Artificial Sequence
  derived and/or modified CDS sequence (opt3) from neuraminidase__InfluenzaA__AHL95011
augaaccccaaucagaagaucauuaccauaggcagcgugucccugacaaucucuacuauuugcuucuuuaugcaaaucgccauucucaucacgaccgucacacuucacuucaaacaguacgaguuuaacucaccuccaaauaaccagguuaugcugugugaaccgacuauaaucgagagaaauauuaccgaaaucguguauuugacaaacaccacuauugagaaggaaaucugccccaaaccugcugaguacaggaauuggaguaagccacagugugacauaacaggguucgcacccuuuagcaaagauaacuccauucgguuaucugccggaggugacaucuggguaacccgcgagccuuaugugucgugcgauccagacaaguguuaccaauucgcgcugggccaggggacgacucuaaauaacguccauucaaauaacaccgugcgagaucguacacccuauagaacucuccugaugaaugaacuuggaguuccuuuucaccugggcaccaaacaggugugcauugcuuggagcaguuccucuugucaugacgguaaggccugguugcacgucugcaucacaggggaugacaagaacgcaaccgccagcuucaucuacaauggaaggcucguggauuccguaguuucauggaguaaagagauucugcggacgcaggaaagcgagugugugugcauaaacggcacuuguacagucgugaugaccgacggcucugcuuccgggaaggcagauacuaaaauccuguuuauugaggaaggaaagaucgugcauacaucaacccucagcgguagugcccaacacgucgaggaaugcucuugcuauccacgcuacccgggcguuagaugugugugcagggacaacuggaagggguccaaucggcccauaguagauauuaacaucaaagaccacagcaucgugucgcgcuacgucuguucuggauuagugggcgacacgccucgaaagaaugauuccucaaguagcucccauugccuggacccaaacaaugaggaaggugggcacggaguuaaaggcugggcuuucgaugacggcaacgauguguggauggggagaaccauuaaugagacaucuaggcuuggauaugagacuuuuaaggucaucgaagguugguucaaccccaaaagcaaguugcagauuaaucgucaggugauaguagaccggggcgaucgcucaggguacaguggaaucuuuuccguugagggcaaaagcuguauuaacagaugcuucuauguggaacugaucaggggucggaaggaggaaaccgagguccuauggacaucuaauucaaucguggucuucugugggaccaguggcacuuacggaacaggcagcuggccugacggggccgaucucaaccugaugccaauuuga

SEQ ID NO: 152732 - RNA, 1410 nt, Artificial Sequence; identical to SEQ ID NO: 151951
  derived and/or modified CDS sequence (opt3) from neuraminidase__InfluenzaA__AHL95023

SEQ ID NO: 152733 - RNA, 1410 nt, Artificial Sequence; identical to SEQ ID NO: 150194
  derived and/or modified CDS sequence (opt3) from neuraminidase__InfluenzaA__AHL95035

SEQ ID NO: 152734 - RNA, 1410 nt, Artificial Sequence; identical to SEQ ID NO: 150194
  derived and/or modified CDS sequence (opt3) from neuraminidase__InfluenzaA__AHL95047

SEQ ID NO: 152735 - RNA, 1410 nt, Artificial Sequence; identical to SEQ ID NO: 151942
  derived and/or modified CDS sequence (opt3) from neuraminidase__InfluenzaA__AHL95059

SEQ ID NO: 152736 - RNA, 1410 nt, Artificial Sequence; identical to SEQ ID NO: 150194
  derived and/or modified CDS sequence (opt3) from neuraminidase__InfluenzaA__AHL95071

SEQ ID NO: 152737 - RNA, 1410 nt, Artificial Sequence; identical to SEQ ID NO: 150194
  derived and/or modified CDS sequence (opt3) from neuraminidase__InfluenzaA__AHL95083

SEQ ID NO: 152738 - RNA, 1410 nt, Artificial Sequence; identical to SEQ ID NO: 150194
  derived and/or modified CDS sequence (opt3) from neuraminidase__InfluenzaA__AHL95095

SEQ ID NO: 152739 - RNA, 1410 nt, Artificial Sequence; identical to SEQ ID NO: 150194
  derived and/or modified CDS sequence (opt3) from neuraminidase__InfluenzaA__AHL95107

SEQ ID NO: 152740 - RNA, 1410 nt, Artificial Sequence
  derived and/or modified CDS sequence (opt3) from neuraminidase__InfluenzaA__AHL95119
augaaccccaaucagaagaucauuaccauaggcagcgugucccugacaaucucuacuauuugcuucuuuaugcaaaucgccauucucaucacgaccgucacacuucacuucaaacaguacgaguuuaacucaccuccaaauaaccagguuaugcugugugaaccgacuauaaucgagagaaauauuaccgaaaucguguauuugacaaacaccacuauugagaaggaaaucugccccaaaccugcugaguacaggaauuggaguaagccacagugugacauaacaggguucgcacccuuuagcaaagauaacuccauucgguuaucugccggaggugacaucuggguaacccgcgagccuuaugugucgugcgauccagacaaguguuaccaauucgcgcugggccaggggacgacucuaaauaacguccauucaaauaacaccgugcgagaucguacacccuauagaacucuccugaugaaugaacuuggaguuccuuuucaccugggcaccaaacaggugugcauugcuuggagcaguuccucuugucaugacgguaaggccugguugcacgucugcaucacaggggaugacaagaacgcaaccgccagcuucaucuacaauggaaggcucguggauuccguaguuucauggaguaaagagauucugcggacgcaggaaagcgagugugugugcauaaacggcacuuguacagucgugaugaccgacggcucugcuuccgggaaggcagauacuaaaauccuguuuauugaggaaggaaagaucgugcauacaucaacccucagcgguagugcccaacacgucgaggaaugcucuugcuauccacgcuacccgggcguuagaugugugugcagggacaacuggaagggguccaaucggcccauaguagauauuaacaucaaagaccacagcaucgugucgcgcuacgucuguucuggauuagugggcgacacgccucgaaagaaugauucccugucaaguagccauugccuugacccaaacaaugaggaaggugggcacggaguuaaaggcugggcuuucgaugacggcaacgauguguggauggggagaaccauuaaugagacauccagguugggauaugagacuuuuaaggucaucgaagguuggucuaaccccaaaagcaagcugcagauuaaucgucaggugauaguagaccggggcgaucgcucaggguacaguggaaucuucuccguugagggcaaaagcuguauuaacagaugcuuuuauguggaacuaaucaggggucggaaggaggaaaccgagguccucuggacaucuaauucaaucguggucuucugugggaccaguggcacuuacggaacaggcagcuggccugacggggccgaucugaaccuuaugccaauuuga

SEQ ID NO: 152741 - RNA, 1410 nt, Artificial Sequence; identical to SEQ ID NO: 151423
  derived and/or modified CDS sequence (opt3) from neuraminidase__InfluenzaA__AHL95131

SEQ ID NO: 152742 - RNA, 1410 nt, Artificial Sequence; identical to SEQ ID NO: 151931
  derived and/or modified CDS sequence (opt3) from neuraminidase__InfluenzaA__AHL95143

SEQ ID NO: 152743 - RNA, 1410 nt, Artificial Sequence
  derived and/or modified CDS sequence (opt3) from neuraminidase__InfluenzaA__AHL95155
augaaccccaaucagaagaucauuaccauaggcagcgugucccugacaaucucuacuauuugcuucuuuaugcagaucgccauucucaucacgaccgucacacuucacuucaaacaguacgaguuuaacucaccuccaaauaaccagguuaugcugugugaaccgacuauaaucgagagaaauauuaccgaaaucguguauuugacaaacaccacuauugagaaggaaaucugccccaaaccugcugaguacaggaauuggaguaagccacagugugggauaacaggauucgcacccuuuagcaaagacaacuccauucgguuaucugccgguggcgauaucuggguaacccgcgagccuuaugugucgugcgacccagauaaguguuaccaauucgcgcuggggcagggaacgacucuaaauaacguccauucaaauaacaccgugcgagaccguacacccuauagaacucuccugaugaaugaacuuggcguuccuuuucaccuggguaccaaacaggugugcauugcuuggagcaguuccucuugucaugaugggaaggccugguugcacgucugcaucacaggagacgauaagaacgcaaccgccagcuucaucuacaauggcaggcucguggacuccguaguuucauggaguaaagagauucugcggacgcaggaaagcgagugugugugcauaaacggcacuuguacagucgugaugaccgaugggucugcuuccggaaaggcagacacuaaaauccuguuuauugaggaagguaagaucgugcauacaucaacccucagcggcagugcccaacacgucgaggaaugcucuugcuauccacgcuacccggggguuagaugugugugcagggauaacuggaagggauccaaucggcccauaguagacauuaacaucaaagaucacagcaucgugucgucuuacgucuguuccggcuuagugggugacacgccucgcaagaaugacucaaguagcuccucucauugccuggauccaaacaaugaggaagggagccacggaguuaaaggcugggcuuucgacgauggcaacgacguguggauggggcgaaccauuaaugagacaucaagacuuggauaugagacuuuuaaggucaucgaagguuggaguaaccccaaauccaaguugcagauuaauaggcaagugauaguagaucggggcgaccguagcggguacucuggaaucuucucaguugagggcaaaaguuguauuaaccgcugcuuuuauguggaacugaucagagguaggaaggaggaaaccgagguccuauggacaagcaauuccaucguggucuucugugggacuucuggcaccuacggaacaggcucguggccugauggggccgaccucaaccugaugccaauuuga

SEQ ID NO: 152744 - RNA, 1410 nt, Artificial Sequence
  derived and/or modified CDS sequence (opt3) from neuraminidase__InfluenzaA__AHL95167
augaaccccaaucagaagaucauuaccauaggcagcgugucccugacaaucucuacuauuugcuucuuuaugcaaaucgccauucucaucacgaccgucacacuucacuucaaacaguacgaguuuaacucaccuccaaauaaccagguuaugcugugugaaccgacuauaaucgagagaaauauuaccgaaaucguguauuugacaaacaccacuauugagaaggaaaucugccccaaaccugcugaguacaggaauuggaguaagccacagugugacauaacaggguucgcacccuuuagcaaagauaacuccauucgguuaucugccggaggugacaucuggguaacccgcgagccuuaugugucgugcgauccagacaaguguuaccaauucgcgcugggccaggggacgacucuaaauaacguccauucaaauaacaccgugcgagaucguacacccuauagaacucuccugaugaaugaacuuggaguuccuuuucaccugggcaccaaacaggugugcauugcuuggagcaguuccucuugucaugacgguaaggccugguugcacgucugcaucacaggggaugacaagaacgcaaccgccagcuucaucuacaauggaaggcucguggauuccguaguuucauggaguaaagagauucugcggacgcaggaaagcgagugugugugcauaaacggcacuuguacagucgugaugaccgacggcucugcuuccgggaaggcagauacuaaaauccuguuuauugaggaaggaaagaucgugcauacaucaacccucagcgguagugcccaacacgucgaggaaugcucuugcuauccacgcuacccgggcguuagaugugugugcagggacaacuggaagggguccaaucggcccauaguagauauuaacaucaaagaccacagcaucgugucgcgcuacuuauguucuggacuggucggcgacacgccucgaaagaaugauuccucaaguagcucccauugccuugacccaaacaaugaggaaggugggcacggagugaaaggcugggcuuucgaugacggcaacgauguuuggauggggagaaccauuaaugagacaucuagguugggauaugagacuuuuaaggugaucgaagguuggagcaaccccaaaucaaagcugcagauuaaucggcaggucauaguggaccguggcgaucgcaguggguacuccggaaucuucagcguagagggcaaaucuuguauuaacagaugcuuuuauguugaacuaaucaggggucggaaggaggaaaccgaggugcucuggacaucaaauaguaucgucguguucugugggacuagcggcaccuacggaacaggcuccuggccugacggggccgaucugaaccuuaugccaauuuga

SEQ ID NO: 152745 - RNA, 1410 nt, Artificial Sequence; identical to SEQ ID NO: 150194
  derived and/or modified CDS sequence (opt3) from neuraminidase__InfluenzaA__AHL95179

SEQ ID NO: 152746 - RNA, 1410 nt, Artificial Sequence; identical to SEQ ID NO: 150194
  derived and/or modified CDS sequence (opt3) from neuraminidase__InfluenzaA__AHL95191

SEQ ID NO: 152747 - RNA, 1410 nt, Artificial Sequence; identical to SEQ ID NO: 150194
  derived and/or modified CDS sequence (opt3) from neuraminidase__InfluenzaA__AHL95203

SEQ ID NO: 152748 - RNA, 1410 nt, Artificial Sequence; identical to SEQ ID NO: 150194
  derived and/or modified CDS sequence (opt3) from neuraminidase__InfluenzaA__AHL95215

SEQ ID NO: 152749 - RNA, 1410 nt, Artificial Sequence
  derived and/or modified CDS sequence (opt3) from neuraminidase__InfluenzaA__AHL95227
augaaccccaaucagaagaucauuaccauaggcagcgugucccugacaaucucuacuauuugcuucuuuaugcaaaucgccauucucaucacgaccgucacacuucacuucaaacaguacgaguuuaacucaccuccaaauaaccagguuaugcugugugaaccgacuauaaucgagagaaauauuaccgaaaucguguauuugacaaacaccacuauugagaaggaaaucugccccaaaccugcugaguacaggaauuggaguaagccacagugugggauaacaggauucgcacccuuuagcaaagacaacuccauucgguuaucugccgguggcgauaucuggguaacccgcgagccuuaugugucgugcgacccagauaaguguuaccaauucgcgcuggggcagggaacgacucuaaauaacaugcauucaaauaacaccguccgagaccguacacccuauagaacucuccugaugaaugaacuuggcgugccuuuucaccuggguaccaagcagguuugcauugcuuggagcaguuccucuugucaugaugggaaagccugguugcacgugugcaucacaggagacgauaagaacgcaaccgccagcuucaucuacaauggcaggcucgucgacuccgugguaucauggaguaaagagauucugcggacgcaggaaagcgaguguguuugcauaaacggcacuuguacaguggucaugaccgaugggucugcuuccggaaaggcagacacuaaaauccuguuuauugaggaagguaagaucgugcauacaucaacccucagcggcagugcccaacacguggaggaaugcucuugcuauccacgcuacccgggggucagauguguuugcagggauaacuggaagggauccaaucggcccauaguggacauuaacaucaaagaucacagcaucguaucgucuuacguguguuccggcuuagucggugacacgccucgcgagaaugacucaaguagcuccucucauugccuggauccaaacaaugaagaagggggacacggcgugaagggcugggcuuucgacgaugggaacgacguuuggaugggacgaaccauuaaugagacaagcagacuugguuaugagacuuuuaaagugaucgagggcuggucaaaccccaagaguaaauugcagauuaauaggcaggucauaguggaucguggggaccgguccggauacagcggcaucuucucuguagaagguaagucauguauuaaccgcugcuuuuauguugagcugaucagagggaggaaagaagagaccgaggugcuauggacaaguaauagcaucgucguguucuguggcacuuccggaaccuacggcacagggucuuggccugauggagccgaccucaaccugaugccaauuuga

SEQ ID NO: 152750 - RNA, 1410 nt, Artificial Sequence; identical to SEQ ID NO: 151931
  derived and/or modified CDS sequence (opt3) from neuraminidase__InfluenzaA__AHL95239

SEQ ID NO: 152751 - RNA, 1410 nt, Artificial Sequence
  derived and/or modified CDS sequence (opt3) from neuraminidase__InfluenzaA__AHL95251
augaaccccaaucagaagaucauuaccauaggcagcgugucccugacaaucucuacuauuugcuucuuuaugcagaucgccauucucaucacgaccgucacacuucacuucaaacaguacgaguuuaacucaccuccaaauaaccagguuaugcugugugaaccgacuauaaucgagagaaauauuaccgaaaucguguauuugacaaacaccacuauugagaaggaaaucugccccaaaccugcugaguacaggaauuggaguaagccacagugugggauaacaggauucgcacccuuuagcaaagacaacuccauucgguuaucugccgguggcgauaucuggguaacccgcgagccuuaugugucgugcgacccagauaaguguuaccaauucgcgcuggggcagggaacgacucuaaauaacguccauucaaauaacaccgugcgagaccguacacccuauagaacucuccugaugaaugaacuuggcguuccuuuucaccuggguaccaaacaggugugcauugcuuggagcaguuccucuugucaugaugggaaggccugguugcacgucugcaucacaggagacgauaagaacgcaaccgccagcuucaucuacaauggcaggcucguggacuccguaguuucauggaguaaagagauucugcggacgcaggaaagcgagugugugugcauaaacggcacuuguacagucgugaugaccgaugggucugcuuccggaaaggcagacacuaaaauccuguuuauuaaggaggguaagaucgugcauacaucaacccucagcggcagugcccaacacgucgaagagugcucuugcuauccacgcuacccggggguuagaugugugugcagggauaacuggaaaggauccaaucggcccauaguagacauuaacaucaaggaucacagcaucgugucgucuuacgucuguuccggcuuagugggugacacgccucgcaaaaaugacucaaguagcuccucucauugccuggauccaaacaaugaagaagggggacacggcguuaagggcugggcuuucgacgaugggaacgacguguggaugggacgaaccauuaaugagacaagcagacuugguuaugagacuuuuaaagucaucgagggcuggucaaaccccaagaguaaauugcagauuaauaggcaagugauaguagaucguggggaccgguccggauacagcggcaucuucucuguugaagguaagucauguauuaaccgcugcuuuuauguggagcugaucagagggaggaaggaagagaccgaaguccuauggacaaguaauagcaucguggucuucuguggcacuuccggaaccuacggcacagggucuuggccugauggagccgaccucaaccugaugccaauuuga

SEQ ID NO: 152752 - RNA, 1410 nt, Artificial Sequence; identical to SEQ ID NO: 150194
  derived and/or modified CDS sequence (opt3) from neuraminidase__InfluenzaA__AHL95263

SEQ ID NO: 152753 - RNA, 1410 nt, Artificial Sequence
  derived and/or modified CDS sequence (opt3) from neuraminidase__InfluenzaA__AHL95275
augaaccccaaucagaagaucauuaccauaggcagcgugucccugacaaucucuacuauuugcuucuuuaugcagaucgccauucucaucacgaccgucacacuucacuucaaacaguacgaguuuaacucaccuccaaauaaccagguuaugcugugugaaccgacuauaaucgagagaaauauuaccgaaaucguguauuugacaaacauuaccaucgagaaggaaauaugccccaaaccugcugaguacaggaauuggaguaagccacagugugggauuacuggauucgcacccuuuagcaaagacaacuccauccgguuaucugccgguggcgauauuuggguaacacgcgagccuuaugugucgugcgacccagauaaguguuaccaauucgcgcuggggcagggaaccacgcuaaauaacguccauucaaauaacacugugcgagaccguacccccuauagaacacuccugaugaaugaacuuggcguuccuuuucaccuggguacuaaacaggugugcaucgcuuggagcaguuccucuugucaugaugggaaggccugguugcacgucugcaucaccggagacgauaagaacgcaacagccagcuucauuuacaauggcaggcucguggacuccguaguuucauggaguaaagagauacugcggacccaggaaagcgagugugugugcaucaacggcacguguacugucgugaugacagaugggucugcuuccggaaaggcagacaccaaaauucuguuuaucgaggaagguaagauagugcauacuucaacacucagcggcagugcccaacacgucgaggaaugcucuugcuauccacgcuacccggggguuagaugugugugcagggauaacuggaagggauccaaucggcccauuguagacaucaacaucaaagaucacagcauugugucgucuuacgucuguuccggcuuagugggugacaccccucgcaagaaugacucaaguagcuccucucauugccuggauccaaacaaugaggaagggggacacggcguuaaaggcugggcuuucgacgaugggaacgacguguggaugggacgaacgaucaaugagaccagcagacuugguuaugagacauuuaaggucauugaaggcuggucaaaccccaaaaguaaguugcagauaaauaggcaagugaucguagaucguggggaccgguccggauacagcggcauuuucucuguugaggguaaaucauguaucaaccgcugcuuuuauguggaacugaucagagggaggaaggaggaaacugagguccuauggaccaguaauagcauuguggucuucuguggcacauccggaacuuacggcaccgggucuuggccugauggagccgaccucaaccugaugccaauauga

SEQ ID NO: 152754 - RNA, 1410 nt, Artificial Sequence; identical to SEQ ID NO: 151437
  derived and/or modified CDS sequence (opt3) from neuraminidase__InfluenzaA__AHL95299

SEQ ID NO: 152755 - RNA, 1410 nt, Artificial Sequence
  derived and/or modified CDS sequence (opt3) from neuraminidase__InfluenzaA__AHL95310
augaaccccaaucagaagaucauuaccauaggcagcgugucccugacaaucucuacuauuugcuucuuuaugcaaaucgccauucucaucacgaccgucacacuucacuucaaacaguacgaguuuaacucaccuccaaauaaccagguuaugcugugugaaccgacuauaaucgagagaaauauuaccgaaaucguguauuugacaaacaccacuauugagaaggaaaucugccccaaaccugcugaguacaggaauuggaguaagccacagugugacauaacaggguucgcacccuuuagcaaagauaacuccauucgguuaucugccggaggugacaucuggguaacccgcgagccuuaugugucgugcgauccagacaaguguuaccaauucgcgcugggccaggggacgacucuaaauaacguccauucaaauaacaccgugcgagaucguacacccuauagaacucuccugaugaaugaacuuggaguuccuuuucaccugggcaccaaacaggugugcauugcuuggagcaguuccucuugucaugacgguaaggccugguugcacgucugcaucacaggggaugacaagaacgcaaccgccagcuucaucuacaauggaaggcucguggauuccguaguuucauggaguaaagagauucugcggacgcaggaaagcgagugugugugcauaaacggcacuuguacagucgugaugaccgacggcucugcuuccgggaaggcagauacuaaaauccuguuuauugaggaaggaaagaucgugcauacaucaacccucagcgguagugcccaacacgucgaggaaugcucuugcuauccacgcuacccgggcguuagaugugugugcagggacaacuggaagggguccaaucggcccauaguagauauuaacaucaaagaccacagcaucgugucgcgcuacgucuguucuggauuagugggcgacacgccucgaaagaaugauuccucaaguagcucccauugccuggacccaaacaaugaggaaggugggcacggaguuaaaggcugggcuuucgaugacggcaacgauguguggauggggagaaccauuaaugagacaucuaggcuuggauaugagacuuuuaaggucaucgaagguuggagcaaccccaaaucaaaguugcagauuaaucgucaggugauaguagaccggggcgaucgcaguggguacuccggaaucuucagcguugagggcaaaucuuguauuaacagaugcuuuuauguggaacugaucaggggucggaaggaggaaaccgagguccuauggacaucaaauaguaucguggucuucugugggacuagcggcaccuacggaacaggcuccuggccugacggggccaaccucaaucugaugccaauuuga

SEQ ID NO: 152756 - RNA, 1410 nt, Artificial Sequence; identical to SEQ ID NO: 151942
  derived and/or modified CDS sequence (opt3) from neuraminidase__InfluenzaA__AHL95322

SEQ ID NO: 152757 - RNA, 1410 nt, Artificial Sequence; identical to SEQ ID NO: 151919
  derived and/or modified CDS sequence (opt3) from neuraminidase__InfluenzaA__AHL95334

SEQ ID NO: 152758 - RNA, 1410 nt, Artificial Sequence; identical to SEQ ID NO: 150194
  derived and/or modified CDS sequence (opt3) from neuraminidase__InfluenzaA__AHL95423

SEQ ID NO: 152759 - RNA, 1410 nt, Artificial Sequence; identical to SEQ ID NO: 151942
  derived and/or modified CDS sequence (opt3) from neuraminidase__InfluenzaA__AHL95435

SEQ ID NO: 152760 - RNA, 1410 nt, Artificial Sequence; identical to SEQ ID NO: 151919
  derived and/or modified CDS sequence (opt3) from neuraminidase__InfluenzaA__AHL95447

SEQ ID NO: 152761 - RNA, 1410 nt, Artificial Sequence
  derived and/or modified CDS sequence (opt3) from neuraminidase__InfluenzaA__AHL95461
augaaccccaaucagaagaucauuaccauaggcagcgugucccugacaaucucuacuauuugcuucuuuaugcaaaucgccauucucaucacgaccgucacacuucacuucaaacaguacgaguuuaacccuccaccgaauaaccagguuaugcugugugaacccacuauaaucgagagaaauauuaccgaaaucguguauuugacaaacaccacuauugagaaggaaaucugcccuaaaccagcugaguacaggaauuggucaaagccccagugugggauaacaggauucgcaccuuuuaguaaagacaacagcauucgguuauccgccgguggcgauaucuggguaacccgcgagccauaugugucuugcgggcccgacaaguguuaccaauucgcgcugggacagggcacgacucuaaauaacaugcauucgaauaacaccguccgagaucguacaccuuauagaacucuccugaugaaugaacuuggugugccauuucaccuggggaccaagcagguuugcauugcuuggucaagcaguuccugucaugacggaaaagccugguugcacgugugcaucacaggcgaugacaagaacgcaaccgccucuuucaucuacaauggcaggcucgucgauagcgugguauccuggucaaaagagauucugcggacgcaggaaagugaguguguuugcauaaacgggacuuguacaguggucaugaccgacggaagcgcuucugguaaggcagauacuaaaauccuguuuauugaggaaggcaagaucgugcauacauccacccucucagggagcgcccaacacguggaggaaugcaguugcuauccgcgcuaccccggagucagauguguuugcagggacaacuggaagggcucuaaucggccuauaguggauauuaacaucaaagaccacuccaucguaagcucguacguguguucugguuuagucggggauacgccacgcaagaaugacuccucaaguagcucccauugccuggaccccaacaaugaggaaggaggccacggcgugaaagggugggcuuucgaugacggaaacgauguuuggaugggucgaaccauuaaugagacaucuagacuuggcuaugagacuuuuaaggugaucgaaggguggagcaacccuaaaucaaaguugcagauuaauaggcaggucauaguggaccggggagaucguaguggcuacuccgguaucuucagcguagaggggaaaucuuguauuaaccgcugcuuuuauguugaacugaucagaggcaggaaggaggaaaccgaggugcuauggacaucaaauaguaucgucguguucuguggaacuagcggcaccuacgggacaggauccuggccagacggugccgaucucaaccugaugcccauuuga

SEQ ID NO: 152762 - RNA, 1410 nt, Artificial Sequence; identical to SEQ ID NO: 150970
  derived and/or modified CDS sequence (opt3) from neuraminidase__InfluenzaA__AHL95473

SEQ ID NO: 152763 - RNA, 1410 nt, Artificial Sequence; identical to SEQ ID NO: 150194
  derived and/or modified CDS sequence (opt3) from neuraminidase__InfluenzaA__AHL95485

SEQ ID NO: 152764 - RNA, 1410 nt, Artificial Sequence; identical to SEQ ID NO: 150194
  derived and/or modified CDS sequence (opt3) from neuraminidase__InfluenzaA__AHL95497

SEQ ID NO: 152765 - RNA, 1410 nt, Artificial Sequence
  derived and/or modified CDS sequence (opt3) from neuraminidase__InfluenzaA__AHL95509
augaaccccaaucagaagaucauuaccauaggcagcgugucccugacaaucucuacuauuugcuucuuuaugcagaucgccauucucaucacgaccgucacacuucacuucaaacaguacgaguuuaacucaccuccaaauaaccagguuaugcugugugaaccgacuauaaucgagagaaauauuaccgaaaucguguauuugacaaacaccacuauugagaaggaaaucugccccaaaccugcugaguacaggaauuggaguaagccacagugugggauaacaggauucgcacccuuuagcaaagacaacuccauucgguuaucugccgguggcgauaucuggguaacccgcgagccuuaugugucgugcgacccagauaaguguuaccaauucgcgcuggggcagggaacgacucuaaauaacguccauucaaauaacaccgugcgagaccguacacccuauagaacucuccugaugaaugaacuuggcguuccuuuucaccuggguaccaaacaggugugcauugcuuggagcaguuccucuugucaugaugggaaggccugguugcacgucugcaucacaggagacgauaagaacgcaaccgccagcuucaucuacaauggcaggcucguggacuccguaguuucauggaguaaagagauucugcggacgcaggaaagcgagugugugugcauaaacggcacuuguacagucgugaugaccgaugggucugcuuccggaaaggcagacacuaaaauccuguuuauugaggaagguaagaucgugcauacaucaacccucagcggcagugcccaacacgucgaggaaugcucuugcuauccacgcuacccggggguuagaugugugugcagggauaacuggaagggauccaaucggcccauaguagacauuaacaucaaaaaucacagcaucgugucgucuuacgucuguuccggcuuagugggugauacgccucgcaagaacgacucaaguagcuccucucauugccuggacccaaauaacgaggaagggggacacggcguuaaaggcugggcuuucgaugacgggaaugauguguggaugggacgaaccauuaacgagacaagcagacuugguuaugagacuuuuaaggucaucgaaggcuggucaaaucccaaaaguaaguugcagauuaacaggcaagugauaguagaccguggggaucgguccggauacagcggcaucuucucuguugaggguaaaucauguauuaaucgcugcuuuuauguggaacugaucagagggaggaaggaggaaaccgagguccuauggacaaguaacagcaucguggucuucuguggcacuuccggaaccuacggcacagggucuuggccugacggagccgaucucaaucugaugccaauuuga

SEQ ID NO: 152766 - RNA, 1410 nt, Artificial Sequence; identical to SEQ ID NO: 150194
  derived and/or modified CDS sequence (opt3) from neuraminidase__InfluenzaA__AHL95521

SEQ ID NO: 152767 - RNA, 1410 nt, Artificial Sequence; identical to SEQ ID NO: 150194
  derived and/or modified CDS sequence (opt3) from neuraminidase__InfluenzaA__AHL95533

SEQ ID NO: 152768 - RNA, 1410 nt, Artificial Sequence; identical to SEQ ID NO: 150194
  derived and/or modified CDS sequence (opt3) from neuraminidase__InfluenzaA__AHL95545

SEQ ID NO: 152769 - RNA, 1410 nt, Artificial Sequence
  derived and/or modified CDS sequence (opt3) from neuraminidase__InfluenzaA__AHL95557
augaaccccaaucagaagaucauuaccauaggcagcgugucccugacaaucucuacuauuugcuucuuuauccaaauugccauccucauaacgaccgucacacuucacuucaaacaguacgaguuuaacucaccuccaaauaaccagguuaugcugugugaaccgacuaucauugagagaaauaucaccgaaauuguguauuugacaaacaccacuaucgagaaggaaauaugccccaaaccugcugaguacaggaauuggaguaagccacagugugggauuacaggauucgcacccuuuagcaaagacaacuccauccgguuaucugccgguggcgauauuuggguaacccgcgagccuuaugugucgugcgacccagauaaguguuaccaauucgcgcuggggcagggaacgacucuaaauaacguccauucaaauaacaccgcucgagaccguacacccuauagaacucuccugaugaaugaacuuggcgugccuuuucaccuggguaccaagcagguuugcaucgccuggagcaguuccucuugucaugaugggaaagcaugguugcacgugugcaucacaggagacgauaagaacgccaccgcuagcuucauuuacaauggcaggcucgucgacuccgugguaucauggaguaaagagauacugcggacgcaggaaagcgaguguguuugcaucaacggcacuuguacaguggucaugaccgaugggucugcauccggaaaggccgacacuaaaauucuguuuaucgaggaagguaagauagugcauacaucaacccucagcggcagugcucaacacguggaggaaugcucuugcuauccacgcuacccgggggucagauguguuugcagggauaacuggaagggauccaaucggcccauuguggacaucaacaucaaagaucacagcauuguaucgucuuacguguguuccggcuuagucggugacacgccucgcaagaaugacucaaguagcuccucucauugccuggauccaaacaaugaggaagggggacacggcgugaaaggcugggccuucgacgaugggaacgacguuuggaugggacgaaccaucaaugagacaagcagacuugguuaugagacuuuuaaggugauugaaggcuggucaaaccccgagaguaaauugcagauaaauaggcaggucaucguggaucguggggaccgguccggauacagcggcauuuucucuguagaagguaagucauguaucaaccgcugcuuuuauguugagcugaucagagggaggaaagaagagaccgaggugcuauggacaaguaauagcauugucguguucuguggcacuuccggaaccuacggcacagggucuuggccugauggagcggaccucaaccugaugccaauauga

SEQ ID NO: 152770 - RNA, 1410 nt, Artificial Sequence; identical to SEQ ID NO: 151919
  derived and/or modified CDS sequence (opt3) from neuraminidase__InfluenzaA__AHL95569

SEQ ID NO: 152771 - RNA, 1410 nt, Artificial Sequence; identical to SEQ ID NO: 150194
  derived and/or modified CDS sequence (opt3) from neuraminidase__InfluenzaA__AHL95581

SEQ ID NO: 152772 - RNA, 1410 nt, Artificial Sequence
  derived and/or modified CDS sequence (opt3) from neuraminidase__InfluenzaA__AHL95605
augaaccccaaucagaagaucauuaccauaggcagcgugucccugacaaucucuacuauuugcuucuuuaugcagaucgccauucucaucacgaccgucacacuucacuucaaacaguacgaguuuaacucaccuccaaauaaccagguuaugcugugugaaccgacuauaaucgagagaaauauuaccgaaaucguguauuugacaaacaccacuauugagaaggaaaucugccccaaaccugcugaguacaggaauuggaguaagccacagugugggauaacaggauucgcacccuuuagcaaagacaacuccauucgguuaucugccgguggcgauaucuggguaacccgcgagccuuaugugucgugcgacccagauaaguguuaccaauucgcgcuggggcagggaacgacucuaaauaacguccauucaaauaacaccgugcgagaccguacacccuauagaacucuccugaugaaugaacuuggcguuccuuuucaccuggguaccaaacaggugugcauugcuuggagcaguuccucuugucaugaugggaaggccugguugcacgucugcaucacaggagacgauaagaacgcaaccgccagcuucaucuacaauggcaggcucguggacuccguaguuucauggaguaaagagauucugcggacgcaggaaagcgagugugugugcauaaacggcacuuguacagucgugaugaccgaugggucugcuuccggaaaggcagacacuaaaauccuguuuauugaggaagguaagaucgugcauacaucaacccucagcggcagugcccaacacgucgaggaaugcucuugcuauccacgcuacccggggguuagaugugugugcagggauaacuggaagggauccaaucggcccauaguagacauuaacaucaaagaucacagcaucgugucgucuuacgucuguuccggcuuagugggugacacgccucgcaagaaugacauuucaaguagcucccauugccuggauccaaacaaugaggaagggggacacggcguuaaaggcugggcuuucgacgaugggaacgacguguggaugggacgaaccaucaaugagacaucuagacuugguuaugagacuuuuaaggucauugaaggcuggagcaaccccaaaucaaaguugcagauaaauaggcaagugaucguagaucguggggaccggaguggauacuccggcauuuucagcguugaggguaaaucuuguaucaaccgcugcuuuuauguggaacugaucagagggaggaaggaggaaaccgagguccuauggacaucaaauaguauuguggucuucuguggcacuagcggaaccuacggcacaggguccuggccugauggagccgaccucaaccugaugccaauauga

SEQ ID NO: 152773 - RNA, 1410 nt, Artificial Sequence; identical to SEQ ID NO: 150194
  derived and/or modified CDS sequence (opt3) from neuraminidase__InfluenzaA__AHL95617

SEQ ID NO: 152774 - RNA, 1410 nt, Artificial Sequence; identical to SEQ ID NO: 150194
  derived and/or modified CDS sequence (opt3) from neuraminidase__InfluenzaA__AHL95629

SEQ ID NO: 152775 - RNA, 1410 nt, Artificial Sequence; identical to SEQ ID NO: 150194
  derived and/or modified CDS sequence (opt3) from neuraminidase__InfluenzaA__AHL95641

SEQ ID NO: 152776 - RNA, 1410 nt, Artificial Sequence; identical to SEQ ID NO: 150194
  derived and/or modified CDS sequence (opt3) from neuraminidase__InfluenzaA__AHL95653

SEQ ID NO: 152777 - RNA, 1410 nt, Artificial Sequence; identical to SEQ ID NO: 152772
  derived and/or modified CDS sequence (opt3) from neuraminidase__InfluenzaA__AHL95665

SEQ ID NO: 152778 - RNA, 1410 nt, Artificial Sequence; identical to SEQ ID NO: 150194
  derived and/or modified CDS sequence (opt3) from neuraminidase__InfluenzaA__AHL95677

SEQ ID NO: 152779 - RNA, 1410 nt, Artificial Sequence
  derived and/or modified CDS sequence (opt3) from neuraminidase__InfluenzaA__AHL95689
augaaccccaaucagaagaucauuaccauaggcagcgugucccugacaaucucuacuauuugcuucuuuaugcagaucgccauucucaucacgaccgucacacuucacuucaaacaguacgaguuugacucaccuccaaacaaucagguuaugcugugugaaccgacuauaaucgagagaaacauuaccgaaaucguguauuugacaaauaccacuauugagaaggaaaucugccccaaaccugcugaguacaggaacuggaguaagccacagugugggauaacaggauucgcacccuuuagcaaagauaauuccauucgguuaucugccgguggcgacaucuggguaacccgcgagccuuaugugucgugcgauccagacaaguguuaccaauucgcgcuggggcagggaacgacucuaaacaauguccauucaaacaauaccgugcgagaucguacacccuauagaacucuccugaugaacgaacuuggcguuccuuuucaccuggguaccaaacaggugugcauugcuuggagcaguuccucuugucaugacgggaaggccugguugcacgucugcaucacaggagaugacaagaaugcaaccgccagcuucaucuacaacggcaggcucguggauuccguaguuucauggaguaaagagauucugcggacgcaggaaagcgagugugugugcauaaauggcacuuguacagucgugaugaccgacgggucugcuuccggaaaggcagauacuaaaauccuguuuauugaggaagguaagaucgugcauacaucaacccucagcggcagugcccaacacgucgaggaaugcucuugcuauccacgcuacccggggguuagaugugugugcagggacaacuggaagggauccaaccggcccauaguagauauuaauaucaaagaccacagcaucgugucgucuuacgucuguuccggcuuagugggugacacgccucgcaagaacgauucaaguagcuccucucauugccuggacccaaauaacgaggaagggggacacggcguuaaaggcugggcuuucgaugacgggaaugauguguggaugggacgaaccauuaacgagacaagcagacuugguuaugagacuuuuaaggucaucgaaggcuggucaaaucccaaaaguaaguugcagauuaacaggcaagugauaguagaccguggggaucgguccggauacagcggcaucuucucuguugaggguaaaucauguauuaaucgcugcuuuuauguggaacugaucagagggaggaaggaggaaaccgagguccuauggacaaguaacagcaucguggucuucuguggcacuuccggaaccuacggcacagggucuuggccugacggagccaaucucaaccugaugccaauuuga

SEQ ID NO: 152780 - RNA, 1410 nt, Artificial Sequence; identical to SEQ ID NO: 150194
  derived and/or modified CDS sequence (opt3) from neuraminidase__InfluenzaA__AHL95701

SEQ ID NO: 152781 - RNA, 1410 nt, Artificial Sequence; identical to SEQ ID NO: 150194
  derived and/or modified CDS sequence (opt3) from neuraminidase__InfluenzaA__AHL95713

SEQ ID NO: 152782 - RNA, 1410 nt, Artificial Sequence
  derived and/or modified CDS sequence (opt3) from neuraminidase__InfluenzaA__AHL95725
augaaccccaaucagaagaucauuaccauaggcagcgugucccugacaaucucuacuauuugcuucuuuaugcagaucgccauucucaucacgaccgucacacuucacuucaaacaguacgaguuugacccuccaccgaacaaucagguuaugcugugugaacccacuauaaucgagagaaacauuaccgaaaucguguauuugacaaauaccacuauugagaaggaaaucugcccuaaaccagcugaguacaggaacuggucaaagccccagugugggauaacaggauucgcaccuuuuaguaaagauaauagcauucgguuauccgccgguggcgacaucuggguaacccgcgagccauaugugucuugcgaucccgacaaguguuaccaauucgcgcuggggcagggaacgacucuaaacaauguccauucgaacaauaccgugcgagaucguacaccuuauagaacucuccugaugaacgaacuuggcguuccauuucaccuggguaccaaacaggugugcauugcuuggucaagcaguuccugucaugacgggaaggccugguugcacgucugcaucacaggagaugacaagaaugcaaccgccucuuucaucuacaacggcaggcucguggauagcguaguuuccuggucaaaagagauucugcggacgcaggaaagugagugugugugcauaaauggcacuuguacagucgugaugaccgacgggagcgcuucuggaaaggcagauacuaaaauccuguuuauugaggaagguaagaucgugcauacauccacccucucaggcagcgcccaacacgucgaggaaugcaguugcuauccgcgcuaccccgggguuagaugugugugcagggacaacuggaagggaucuaaccggccuauaguagauauuaauaucaaagaccacuccaucgugagcucguacgucuguucuggcuuagugggugacacgccacgcaagaacgauuccucaaguagcucccauugccuggaccccaauaacgaggaagggggacacggcguuaaaggcugggcuuucgaugacgggaaugauguguggaugggacgaaccauuaacgagacaucuagacuugguuaugagacuuuuaaggucaucgaaggcuggagcaauccuaaaucaaaguugcagauuaacaggcaagugauaguagaccguggggaucggaguggauacuccggcaucuucagcguugaggguaaaucuuguauuaaucgcugcuuuuauguggaacugaucagagggaggaaggaggaaaucgagguccuauggaccucaaacaguauuguggucuucuguggcacaagcggaacuuacggcaccggguccuggccagacggagccgaucucaaucugaugcccauauga

SEQ ID NO: 152783 - RNA, 1410 nt, Artificial Sequence; identical to SEQ ID NO: 151931
  derived and/or modified CDS sequence (opt3) from neuraminidase__InfluenzaA__AHL95737

SEQ ID NO: 152784 - RNA, 1410 nt, Artificial Sequence
  derived and/or modified CDS sequence (opt3) from neuraminidase__InfluenzaA__AHL95749
augaaccccaaucagaagaucauuaccauaggcagcgugucccugacaaucucuacuauuugcuucuuuaugcaaaucgccauucucaucacgaccgucacacuucacuucaaacaguacgaguuuaacucaccuccaaauaaccagguuaugcugugugaaccgacuauaaucgagagaaauauuaccgaaaucguguauuugacaaacaccacuauugagaaggaaaucugccccaaaccugcugaguacaggaauuggaguaagccacagugugggauaacaggauucgcacccuuuagcaaagacaacuccauucgguuaucugccgguggcgauaucuggguaacccgcgagccuuaugugucgugcgacccagauaaguguuaccaauucgcgcuggggcagggaacgacucuaaauaacguccauucaaauaacaccgcucgagaccguacacccuauagaacucuccugaugaaugaacuuggcgugccuuuucaccuggguaccaagcagguuugcauugccuggagcaguuccucuugucaugaugggaaagcaugguugcacgugugcaucacaggagacgauaagaacgccaccgcuagcuucaucuacaauggcaggcucgucgacuccgugguaucauggaguaaagagauucugcggacgcaggaaagcgaguguguuugcauaaacggcacuuguacaguggucaugaccgaugggucugcauccggaaaggccgacacuaaaauccuguuuauugaggaagguaagaucgugcauacaucaacccucagcggcagugcucaacacguggaggaaugcucuugcuauccacgcuacccgggggucagauguguuugcagggauaacuggaagggauccaaucggcccauaguggacauuaacaucaaagaucacagcaucguaucgucuuacguguguuccggcuuagucggugacacgccucgcaagaaugacucaaguagcuccucucauugccuggauccaaacaaugaggaagggggacacggcgugaaaggcugggccuucgacgaugggaacgacguuuggaugggacgaaccauuaaugagacaagcagacuugguuaugagacuuuuaaggugaucgaaggcuggucaaaccccaaaaguaaguugcagauuaauaggcaggucauaguggaucguggggaccgguccggauacagcggcaucuucucuguagaggguaaaucauguauuaaccgcugcuuuuauguugaacugaucagagggaggaaggaggaaaccgaggugcuauggacaaguaauagcaucgucguguucuguggcacuuccggaaccuacggcacagggucuuggccugauggagcggaccucaaccugaugccaauuuga

SEQ ID NO: 152785 - RNA, 1410 nt, Artificial Sequence; identical to SEQ ID NO: 150194
  derived and/or modified CDS sequence (opt3) from neuraminidase__InfluenzaA__AHL95761

SEQ ID NO: 152786 - RNA, 1410 nt, Artificial Sequence; identical to SEQ ID NO: 150194
  derived and/or modified CDS sequence (opt3) from neuraminidase__InfluenzaA__AHL95773

SEQ ID NO: 152787 - RNA, 1410 nt, Artificial Sequence
  derived and/or modified CDS sequence (opt3) from neuraminidase__InfluenzaA__AHL95785
augaaccccaaucagaagaucauuaccauaggcagcgugucccugacaaucucuacuauuugcuucuuuaugcaaaucgccauucucaucacgaccgucacacuucacuucaaacaguacgaguuuaacucaccuccaaauaaccagguuaugcugugugaaccgacuauaaucgagagaaauauuaccgaaaucguguauuugacaaacaccacuauugagaaggaaaucugccccaaaccugcugaguacaggaauuggaguaagccacagugugacauaacaggguucgcacccuuuagcaaagauaacuccguacgguuaucugccggaggugacauuugggugacccgcgagccuuaugucucgugcgauccagacaaguguuaccaauucgcgcugggccaggggacgacucuaaauaacgugcauucaaauaacaccguucgagaucguacacccuauagaacucuccugaugaaugaacuuggagugccuuuucaccugggcaccaagcaggucugcaucgcuuggagcaguuccucuugucaugacgguaaagccugguugcacgugugcauuacaggggaugacaagaacgcaaccgccagcuucaucuacaauggaaggcucguagauuccguugugucauggaguaaagagauccugcggacgcaggaaagcgagugugucugcauuaacggcacuuguacaguggugaugaccgacggcucugcuuccgggaaggcagauacuaaaauacuguuuaucgaggaaggaaagauuguccauacaucaacccucagcgguagugcccaacacguugaggaaugcucuugcuauccacgcuacccgggcgugagauguguaugcagggacaacuggaagggguccaaucggcccaucguggauauaaacauuaaagaccacagcaucgucucgucuuacguguguuccggauuaguuggcgacacgccucgcaagaaugauucaaguagcuccucucauugccuggacccaaacaaugaggaaggugggcacggagugaaaggcugggcuuucgaugacggcaacgaugucuggauggggcgaaccaucaaugagacaagcagacuuggauaugagacuuuuaaggugauugaagguuggucaaaccccaaaaguaaguugcagaucaauaggcagguaauuguugaccggggcgaucguuccggguacagcggaauauucucuguggagggcaaaucauguaucaaccgcugcuuuuaugucgaacugauuagagguaggaaggaggaaaccgaggugcuauggacaaguaauagcaucgucguguucugugggacuuccggcaccuacggaacaggcucuuggccugacggggccgaucucaaccugaugccaaucuga

SEQ ID NO: 152788 - RNA, 1410 nt, Artificial Sequence; identical to SEQ ID NO: 151919
  derived and/or modified CDS sequence (opt3) from neuraminidase__InfluenzaA__AHL95797

SEQ ID NO: 152789 - RNA, 1410 nt, Artificial Sequence; identical to SEQ ID NO: 150194
  derived and/or modified CDS sequence (opt3) from neuraminidase__InfluenzaA__AHL95833

SEQ ID NO: 152790 - RNA, 1410 nt, Artificial Sequence; identical to SEQ ID NO: 151919
  derived and/or modified CDS sequence (opt3) from neuraminidase__InfluenzaA__AHL95845

SEQ ID NO: 152791 - RNA, 1410 nt, Artificial Sequence
  derived and/or modified CDS sequence (opt3) from neuraminidase__InfluenzaA__AHL95857
augaaccccaaucagaagaucauuagcauaggcuccgugucucugaccaucucaacaauuugcuucuuuaugcagaucgccauucucaucacuacggucacccuucacuucaaacaguacgaguuuaacaguccuccaaauaaccagguuaugcugugugaaccgacaauaaucgagagaaauauuacugaaaucguguauuugaccaacacaaccauugagaaggaaaucugccccaaaccugcugaguacaggaauuggagcaagccacagugugggauaacuggauucgcacccuuuuccaaagacaacucuauucgguuaucggccgguggcgauaucuggguaacacgcgagccuuaugugucaugcgacccagauaaguguuaccaauucgcgcuggggcagggaaccacgcuaaauaacguccauagcaauaacacugugcgagaccguacccccuauagaacacuccugaugaaugaacuuggcguuccuuuucaccuggguacuaaacaggugugcauugcuuggaguuccucuagcugucaugaugggaaggccugguugcacgucugcaucaccggagacgauaagaacgcaacagccuccuucaucuacaauggcaggcucguggacucaguaguuaguuggagcaaagagauucugcggacccaggaaucugagugugugugcauaaacggcacguguacugucgugaugacagauggguccgcuucaggaaaggcagacaccaaaauccuguuuauugaggaagguaagaucgugcauacuagcacacucaguggcucugcccaacacgucgaggaaugcuccugcuauccacgcuacccggggguuagaugugugugcagggauaacuggaagggaagcaaucggcccauaguagacauuaacaucaaagaucacucgaucgugucuuccuacgucuguucaggcuuagugggugacaccccucgcaagaaugacaguagcuccucuagccauugccuggauccaaacaaugaggaagggggacacggcguuaaaggcugggcuuucgacgaugggaacgacguguggaugggacgaacgauuaaugagaccucaagacuugguuaugagacauuuaaggucaucgaaggcuggaguaaccccaaauccaaguugcagauuaauaggcaagugauaguagaucguggggaccggagcggauacucuggcaucuucucaguugaggguaaaaguuguauuaaccgcugcuuuuauguggaacugaucagagggaggaaggaggaaacugagguccuauggaccagcaauuccaucguggucuucuguggcacaucuggaacuuacggcaccgggucguggccugauggagccgaccucaaccugaugccaauuuga

SEQ ID NO: 152792 - RNA, 1410 nt, Artificial Sequence; identical to SEQ ID NO: 150194
  derived and/or modified CDS sequence (opt3) from neuraminidase__InfluenzaA__AHL95869

SEQ ID NO: 152793 - RNA, 1410 nt, Artificial Sequence
  derived and/or modified CDS sequence (opt3) from neuraminidase__InfluenzaA__AHL95881
augaaccccaaucagaagaucauuaccauaggcagcgugugcaugacaaucgggauggccaaccugauucuccaaaucggaaauauuaucuccauauggaucucucacucaauucaggucgguaaccagagucagaucgagacuuguaaucaaagcguuauuacguacgaaaacaauaccugggugaaccagacauauguaaauaucuccaacacuaaucuugcugcaggccagucuguggucucggugaaacuggccgggaacagcagcuugugcccuguuaguggaugggcgauauacuccaaggacaauucugugagaauuggcagcaaaggugaugucuucgugaucagggagccauuuauuuccuguucaccguuagaaugccggaccuucuuucugacacagggggcucuacucaacgacaagcauaguaauggaaccaucaaagaucgcagccccuaucgaacucugaugucuuguccuaucggcgagguaccaucccccuacaacucacguuucgaaagcguugccuggagugcaucugccugccacgacggcauuaacuggcuuacaauagggaucuccggaccugauagcggugcuguggcaguccugaaguauaauggcauuaucaccgacacgauaaagucguggagaaacaauauuuugaggacucaagagucugagugugccugcgugaacggguccuguuuuaccaucaugacagauggaccaucagacggccaggcuaguuacaaaaucuuccggauugaaaaggguaaaaucgugaagucagucgagaugaaugcccccaacuaucauuacgaagagugcuccuguuacccugauucuagcgagauuacuugcguuugccgcgacaauuggcacgggucaaacagaccaugggugaguuuuaaucagaaccucgaauaucagauaggauacaucuguuccggcauuuucggcgauaauccgaggcccaacgacaaaaccgggagcugcggaccuguaucuucaaauggugcgaacggcgugaagggguuuaguuucaaguauggaaauggcgucuggaucggucggacaaaaagcaucuccucucgcaagggguuugagaugauuugggauccaaacggcuggaccggaacggacaacaauuucucgauaaaacaagacaucgugggcauuaacgaauggagcggguacuccggaucauuuguucagcaucccgagcugacuggucuggauuguauccgaccuugcuucuggguggaacucauuagaggcaggccaaaggagaauacaaucuggaccagugggucuagcauauccuucuguggagucaacucagacacugugggcuggagcuggcccgauggugcagaguuaccguuuacaaucgacaaauga

SEQ ID NO: 152794 - RNA, 1410 nt, Artificial Sequence
  derived and/or modified CDS sequence (opt3) from neuraminidase__InfluenzaA__AHL95892
augaaccccaaucagaagaucauuaccauaggcagcgugucccugacaaucucuacuauuugcuucuuuaugcagaucgccauucucaucacgaccgucacacuucacuucaaacaguacgaguuuaacucaccuccaaauaaccagguuaugcugugugaaccgacuauaaucgagagaaauauuaccgaaaucguguauuugacaaacaccacuauugagaaggaaaucugccccaaaccugcugaguacaggaauuggaguaagccacagugugggauaacaggauucgcacccuuuagcaaagacaacuccauucgguuaucugccgguggcgauaucuggguaacccgcgagccuuaugugucgugcgacccagauaaguguuaccaauucgcgcuggggcagggaacgacucuaaauaacguccauucaaauaacaccgugcgagaccguacacccuauagaacucuccugaugaaugaacuuggcguuccuuuucaccuggguaccaaacaggugugcauugcuuggagcaguuccucuugucaugaugggaaggccugguugcacgucugcaucacaggagacgauaagaacgcaaccgccagcuucaucuacaauggcaggcucguggacuccguaguuucauggaguaaagagauucugcggacgcaggaaagcgagugugugugcauaaacggcacuuguacagucgugaugaccgaugggucugcuuccggaaaggcagacacuaaaauccuguuuauugaggaagguaagaucgugcauacaucaacccucagcggcagugcccaacacgucgaggaaugcucuugcuauccacgcuacccggggguuagaugugugugcagggauaacuggaagggauccaaucggcccauaguagacauuaacaucaaagaucacagcaucgugucgcgcuacgucuguucuggcuuagugggugacacgccucgaaagaaugacuccucaaguagcucccauugccuggauccaaacaaugaggaagggggacacggcguuaaaggcugggcuuucgacgaugggaacgacguguggaugggaagaaccauuaaugagacaucuaggcuugguuaugagacuuuuaaggucaucgaaggcuggagcaaccccaaaucaaaguugcagauuaaucggcaagugauaguagaucguggggaccgcaguggauacuccggcaucuucagcguugaggguaaaucuuguauuaacagaugcuuuuauguggaacugaucagggggcggaaggaggaaaccgagguccuauggacaucaaauaguaucguggucuucuguggcacuagcggaaccuacggcacaggguccuggccugauggagccgaccucaaccugaugccaauuuga

SEQ ID NO: 152795 - RNA, 1410 nt, Artificial Sequence; identical to SEQ ID NO: 150194
  derived and/or modified CDS sequence (opt3) from neuraminidase__InfluenzaA__AHL95904

SEQ ID NO: 152796 - RNA, 1410 nt, Artificial Sequence
  derived and/or modified CDS sequence (opt3) from neuraminidase__InfluenzaA__AHL95916
augaaccccaaucagaagaucauuaccauaggcagcgugucccugacaaucucuacuauuugcuucuuuaugcagaucgccauucucaucacgaccgucacacuucacuucaaacaguacgagcugaacucaccuccaaauaaccagguuauguugugugaaccgacuauaaucgagagaaauauuaccgaaaucguguauuuaacaaacaccacuauugagaaggaaaucugccccaaaccugcugaguacaggaauuggaguaagccacagugugggauaacaggauuugcacccuucagcaaagacaacuccauucggcugucugccgguggcgauaucuggguaacccgcgagccuuaugugucgugcgacccagauaaguguuaccaauuugcgcuagggcagggaacgacucucaauaacguccauucaaauaacaccgugcgagaccguacacccuauagaacucugcuuaugaaugaacugggcguuccuuuccacuuggguaccaaacaggugugcauugcuuggagcaguuccucuugucaugaugggaaggccuggcuccacgucugcaucacaggagacgauaagaacgcaaccgccagcuuuaucuacaauggcaggcugguggacuccguaguuucauggaguaaagagauucugcggacgcaggaaagcgagugugugugcauaaacggcacuuguacagucgugaugaccgaugggucugcuuccggaaaggcagacacuaaaauccucuucauugaggaagguaagaucgugcauacaucaaccuuaagcggcagugcccaacacgucgaggaaugcucuugcuauccacgcuacccggggguuagaugugugugcagggauaacuggaagggauccaaucggcccauaguagacauuaacaucaaagaucacagcaucgugucgucuuacgucuguuccggccuggugggugacacgccucgcaagaaugacucaaguagcuccucucauugccuugauccaaacaaugaggaagggggacacggcguuaaaggcugggcuuuugacgaugggaacgacguguggaugggacgaaccauuaaugagacaagcagauuggguuaugagacuuucaaggucaucgaaggcuggucaaaccccaaaaguaagcugcagauuaauaggcaagugauaguagaucguggggaccgguccggauacagcggcaucuuuucuguugaggguaaaucauguauuaaccgcugcuucuauguggaacuaaucagagggaggaaggaggaaaccgagguccucuggacaaguaauagcaucguggucuuuuguggcacuuccggaaccuacggcacagggucuuggccugauggagccgaccugaaccuuaugccaauuuga

SEQ ID NO: 152797 - RNA, 1410 nt, Artificial Sequence; identical to SEQ ID NO: 151931
  derived and/or modified CDS sequence (opt3) from neuraminidase__InfluenzaA__AHL95928

SEQ ID NO: 152798 - RNA, 1410 nt, Artificial Sequence; identical to SEQ ID NO: 151919
  derived and/or modified CDS sequence (opt3) from neuraminidase__InfluenzaA__AHL95940

SEQ ID NO: 152799 - RNA, 1410 nt, Artificial Sequence; identical to SEQ ID NO: 150194
  derived and/or modified CDS sequence (opt3) from neuraminidase__InfluenzaA__AHL95952

SEQ ID NO: 152800 - RNA, 1410 nt, Artificial Sequence; identical to SEQ ID NO: 150194
  derived and/or modified CDS sequence (opt3) from neuraminidase__InfluenzaA__AHL95964

SEQ ID NO: 152801 - RNA, 1410 nt, Artificial Sequence; identical to SEQ ID NO: 150194
  derived and/or modified CDS sequence (opt3) from neuraminidase__InfluenzaA__AHL95976

SEQ ID NO: 152802 - RNA, 1410 nt, Artificial Sequence; identical to SEQ ID NO: 150194
  derived and/or modified CDS sequence (opt3) from neuraminidase__InfluenzaA__AHL95988

SEQ ID NO: 152803 - RNA, 1410 nt, Artificial Sequence; identical to SEQ ID NO: 150194
  derived and/or modified CDS sequence (opt3) from neuraminidase__InfluenzaA__AHL96000

SEQ ID NO: 152804 - RNA, 1410 nt, Artificial Sequence
  derived and/or modified CDS sequence (opt3) from neuraminidase__InfluenzaA__AHL96012
augaaccccaaucagaagaucauuaccauaggcagcgugucccugacaaucucuacuauuugcuucuuuaugcaaaucgccauucucaucacgaccgucacacuucacuucaaacaguacgaguuuaacucaccuccaaauaaccagguuaugcugugugaaccgacuauaaucgagagaaauauuaccgaaaucguguauuugacaaacaccacuauugagaaggaaaucugccccaaaccugcugaguacaggaauuggaguaagccacagugugggauaacaggauucgcacccuuuagcaaagacaacuccauucgguuaucugccgguggcgauaucuggguaacccgcgugccuuaugucucgugcgacccagauaaguguuaccaauucgcgcuggggcagggaacgacucuaaauaacgugcauucaaauaacaccguucgagaccguacacccuauagaacucuccugaugaaugagcuuggcgugccuuuucaccuggguaccaagcaggucugcauugcuuggagcaguuccucuugucaugaugggaaagccugguugcacgugugcaucacaggagacgauaagaacgcaaccgccagcuucaucuacaauggcaggcucguagacuccguugugucauggaguaaagaaauucugcggacgcaggagagcgaaugugucugcauaaacggcacuuguacaguggugaugaccgaugggucugcuuccggaaaggcagacacuaaaauccuguuuauugaggaggguaagaucguccauacaucaacccucagcggcagugcccaacacguugaagagugcucuugcuauccacgcuacccgggggugagauguguaugcagggauaacuggaagggauccaaucggcccauaguggacauuaacaucaaagaucacagcaucgucucgucuuacguguguuccggcuuaguuggugacacgccucgcaagaaugacucaaguagcuccucucauugccuggauccaaacaaugaagaagggggacacggcgugaaaggcugggcuuucgacgaugggaacgacgucuggaugggacgaaccauuaaugagacaagcagacuugguuaugagacuuuuaaggugaucgagggcuggucaaaccccaaaaguaaguugcagauuaauaggcagguaauaguugaucguggggaccgguccggauacagcggcaucuucucuguggaagguaaaucauguauuaaccgcugcuuuuaugucgagcugaucagagggaggaaggaagagaccgaagugcuauggacaaguaauagcaucgucguguucuguggcacuuccggaaccuacggcacagggucuuggccugauggagccgaccucaaccugaugccaauuuga

SEQ ID NO: 152805 - RNA, 1410 nt, Artificial Sequence
  derived and/or modified CDS sequence (opt3) from neuraminidase__InfluenzaA__AHL96024
augaaccccaaucagaagaucauuaccauaggcagcgugucccugacaaucucuacuauuugcuucuuuaugcagaucgccauucucaucacgaccgucacacuucacuucaaacaguacgaguuuaacucaccuccaaauaaccagguuaugcugugugaaccgacuauaaucgagagaaauauuaccgaaaucguguauuugacaaacaccacuauugagaaggaaaucugccccaaaccugcugaguacaggaauuggaguaagccacagugugggauaacaggauucgcacccuuuagcaaagacaacuccauucgguuaucugccgguggcgauaucuggguaacccgcgagccuuaugugucgugcgacccagauaaguguuaccaauucgcgcuggggcagggaacgacucuaaauaacguccauucaaauaacaccgugcgagaccguacacccuauagaacucuccugaugaaugaacuuggcguuccuuuucaccuggguaccaaacaggugugcauugcuuggagcaguuccucuugucaugaugggaaggccugguugcacgucugcaucacaggagacgauaagaacgcaaccgccagcuucaucuacaauggcaggcucguggacuccguaguuucauggaguaaagagaaccugcggacgcaggaaagcgagugugugugcauuaacggcacuuguacagucgugaugaccgaugggucugcuuccggaaaggcagacacuaaaauacuguuuaucgaggaagguaagauugugcauacaucaacccucagcggcagugcccaacacgucgaggaaugcucuugcuauccacgcuacccggggguuagaugugugugcagggauaauuggaagggauccaaccggcccaucguagacauaaauauuaaagaucacagcaucgugucgucuuacgucuguuccggcuuagugggugacacgccucgcaagaacgacucaaguagcuccucucauugccuggauccaaauaacgaggaagggggacacggcguuaaaggcugggcuuucgacgaugggaaugacguguggaugggacgaaccaucaacgagacaagcagacuugguuaugagacuuuuaaggucauugaaggcuggucaaaucccaaaaguaaguugcagaucaacaggcaagugauuguagaucguggggaccgguccggauacagcggcauauucucuguugaggguaaaucauguaucaaucgcugcuuuuauguggaacugauuagagggaggaaggaggaaaccgagguccuauggacaaguaacagcaucguggucuucuguggcacuuccggaaccuacggcacagggucuuggccugauggagccgaccucaaucugaugccaaucuga

SEQ ID NO: 152806 - RNA, 1410 nt, Artificial Sequence; identical to SEQ ID NO: 150194
  derived and/or modified CDS sequence (opt3) from neuraminidase__InfluenzaA__AHL96036

SEQ ID NO: 152807 - RNA, 1410 nt, Artificial Sequence; identical to SEQ ID NO: 151437
  derived and/or modified CDS sequence (opt3) from neuraminidase__InfluenzaA__AHL96048

SEQ ID NO: 152808 - RNA, 1410 nt, Artificial Sequence; identical to SEQ ID NO: 150194
  derived and/or modified CDS sequence (opt3) from neuraminidase__InfluenzaA__AHL96059

SEQ ID NO: 152809 - RNA, 1410 nt, Artificial Sequence; identical to SEQ ID NO: 151931
  derived and/or modified CDS sequence (opt3) from neuraminidase__InfluenzaA__AHL96071

SEQ ID NO: 152810 - RNA, 1410 nt, Artificial Sequence; identical to SEQ ID NO: 152772
  derived and/or modified CDS sequence (opt3) from neuraminidase__InfluenzaA__AHL96083

SEQ ID NO: 152811 - RNA, 1410 nt, Artificial Sequence; identical to SEQ ID NO: 150194
  derived and/or modified CDS sequence (opt3) from neuraminidase__InfluenzaA__AHL96095

SEQ ID NO: 152812 - RNA, 1410 nt, Artificial Sequence
  derived and/or modified CDS sequence (opt3) from neuraminidase__InfluenzaA__AHL96107
augaaccccaaucagaagaucauuaccauaggcagcgugucccugacaaucucuacuauuugcuucuuuaugcaaaucgccauucucaucacgaccgucacacuucacuucaaacaguacgaguuuaacucaccuccaaauaaccagguuaugcugugugaaccgacuauaaucgagagaaauauuaccgaaaucguguauuugacaaacaccacuauugagaaggaaaucugccccaaaccugcugaguacaggaauuggaguaagccacagugugggauaacaggauucgcacccuuuagcaaagacaacuccauucgguuaucugccgguggcgauaucuggguaacccgcgagccuuaugugucgugcgacccagauaaguguuaccaauucgcgcuggggcagggaacgacucuaaauaacaugcauucaaauaacaccguccgagaccguacacccuauagaacucuccugaugaaugaacuuggcgugccuuuucaccuggguaccaagcagguuugcauugcuuggagcaguuccucuugucaugaugggaaagccugguugcacgugugcaucacaggagacgauaagaacgcaaccgccagcuucaucuacaauggcaggcucgucgacuccgugguaucauggaguaaagagauucugcggacgcaggaaagcgaguguguuugcauaaacggcacuuguacaguggucaugaccgaugggucugcuuccggaaaggcagacacuaaaauccuguuuauugaggaagguaagaucgugcauacaucaacccucagcggcagugcccaacacguggaggaaugcucuugcuauccacgcuacccgggggucagauguguuugcagggauaacuggaagggauccaaucggcccauaguggacauuaacaucaaagaucacagcaucguaucgucuuacguguguuccggcuuagucggugacacgccucgcaagaaugacaacucaaguagcucccauugccuggauccaaauaacgaggaagggggacacggcgugaaaggcugggcuuucgacgaugggaaugacguuuggaugggacgaaccauuaacgagacaucuagacuugguuaugagacuuuuaaggugaucgaaggcuggagcaaucccaaaucaaaguugcagauuaacaggcaggucauaguggaucguggggaccggaguggauacuccggcaucuucagcguagaggguaaaucuuguauuaaucgcugcuuuuauguugaacugaucagagggaggaaggaggaaaccgaggugcuauggacaucaaacaguaucgucguguucuguggcacuagcggaaccuacggcacaggguccuggccugauggagccgaccucaaucugaugccaauuuga

SEQ ID NO: 152813 - RNA, 1410 nt, Artificial Sequence; identical to SEQ ID NO: 150194
  derived and/or modified CDS sequence (opt3) from neuraminidase__InfluenzaA__AHL96119

SEQ ID NO: 152814 - RNA, 1410 nt, Artificial Sequence; identical to SEQ ID NO: 151931
  derived and/or modified CDS sequence (opt3) from neuraminidase__InfluenzaA__AHL96131

SEQ ID NO: 152815 - RNA, 1410 nt, Artificial Sequence; identical to SEQ ID NO: 150194
  derived and/or modified CDS sequence (opt3) from neuraminidase__InfluenzaA__AHL96143

SEQ ID NO: 152816 - RNA, 1410 nt, Artificial Sequence; identical to SEQ ID NO: 150194
  derived and/or modified CDS sequence (opt3) from neuraminidase__InfluenzaA__AHL96167

SEQ ID NO: 152817 - RNA, 1410 nt, Artificial Sequence; identical to SEQ ID NO: 150194
  derived and/or modified CDS sequence (opt3) from neuraminidase__InfluenzaA__AHL96179

SEQ ID NO: 152818 - RNA, 1410 nt, Artificial Sequence
  derived and/or modified CDS sequence (opt3) from neuraminidase__InfluenzaA__AHL96191
augaaccccaaucagaagaucauuaccauaggcagcgugucccugacaaucucuacuauuugcuucuuuaugcaaaucgccauucucaucacgaccgucacacuucacuucaaacaguacgaguuugacucaccuccaaacaaucagguuaugcugugugaaccgacuauaaucgagagaaacauuaccgaaaucguguauuugacaaauaccacuauugagaaggaaaucugccccaaaccugcugaguacaggaacuggaguaagccacagugugggauaacaggauucgcacccuuuagcaaagauaauuccauucgguuaucugccgguggcgacaucuggguaacccgcgagccuuaugugucgugcgauccagacaaguguuaccaauucgcgcuggggcagggaacgacucuaaacaauaugcauucaaacaauaccguccgagaucguacacccuauagaacucuccugaugaacgaacuuggcgugccuuuucaccuggguaccaagcagguuugcauugcuuggagcaguuccucuugucaugacgggaaagccugguugcacgugugcaucacaggagaugacaagaaugcaaccgccagcuucaucuacaacggcaggcucgucgauuccgugguaucauggaguaaagagauucugcggacgcaggaaagcgaguguguuugcauaaauggcacuuguacaguggucaugaccgacgggucugcuuccggaaaggcagauacuaaaauccuguuuauugaggaagguaagaucgugcauacaucaacccucagcggcagugcccaacacguggaggaaugcucuugcuauccacgcuacccgggggucagauguguuugcagggacaacuggaagggauccaaccggcccauaguggauauuaauaucaaagaccacagcaucguaucgucuuacguguguuccggcuuagucggugacacgccucgcaagaacgauucaaguagcuccucucauugccuggacccaaauaacgaggaagggggacacggcgugaaaggcugggcuuucgaugacgggaaugauguuuggaugggacgaaccauuaacgagacaagcagacuugguuaugagacuuuuaaggugaucgaaggcuggucaaaucccaaaaguaaguugcagauuaacaggcaggucauaguggaccguggggaucgguccggauacagcggcaucuucucuguagaggguaaaucauguauuaaucgcugcuuuuauguugaacugaucagagggaggaaggaggaaaccgaggugcuauggacaaguaacagcaucgucguguucuguggcacuuccggaaccuacggcacagggucuuggccugacggagccgaucucaaucugaugccaauuuga

SEQ ID NO: 152819 - RNA, 1410 nt, Artificial Sequence; identical to SEQ ID NO: 151919
  derived and/or modified CDS sequence (opt3) from neuraminidase__InfluenzaA__AHL96203

SEQ ID NO: 152820 - RNA, 1410 nt, Artificial Sequence; identical to SEQ ID NO: 151931
  derived and/or modified CDS sequence (opt3) from neuraminidase__InfluenzaA__AHL96215

SEQ ID NO: 152821 - RNA, 1410 nt, Artificial Sequence; identical to SEQ ID NO: 150194
  derived and/or modified CDS sequence (opt3) from neuraminidase__InfluenzaA__AHL96227

SEQ ID NO: 152822 - RNA, 1410 nt, Artificial Sequence; identical to SEQ ID NO: 150194
  derived and/or modified CDS sequence (opt3) from neuraminidase__InfluenzaA__AHL96239

SEQ ID NO: 152823 - RNA, 1410 nt, Artificial Sequence; identical to SEQ ID NO: 150194
  derived and/or modified CDS sequence (opt3) from neuraminidase__InfluenzaA__AHL96251

SEQ ID NO: 152824 - RNA, 1410 nt, Artificial Sequence; identical to SEQ ID NO: 150194
  derived and/or modified CDS sequence (opt3) from neuraminidase__InfluenzaA__AHL96263

SEQ ID NO: 152825 - RNA, 1410 nt, Artificial Sequence; identical to SEQ ID NO: 151975
  derived and/or modified CDS sequence (opt3) from neuraminidase__InfluenzaA__AHL96277

SEQ ID NO: 152826 - RNA, 1410 nt, Artificial Sequence
  derived and/or modified CDS sequence (opt3) from neuraminidase__InfluenzaA__AHL96308
augaaccccaaucagaagaucauuaccauaggcagcgugucccugacaaucucuacuauuugcuucuuuaugcagaucgccauucucaucacgaccgucacacuucacuucaaacaguacgaguuuaacuucccuccaaauaaccagguuaugcugugugaaccgacuauaaucgagagaaauauuaccgaaaucguguauuugacaaacaccacuauugagaaggaaaucugccccaaaccugcugaguacaggaauuggucaaagccacagugugggauaacaggauuugcacccuucaguaaagacaacagcauucgguuauccgccgguggcgauaucuggguaacccgcgagccuuaugugucuugcgacccagauaaguguuaccaauuugcgcuggggcagggaacgacucuaaauaacguccauucgaauaacaccgugcgagaccguacacccuauagaacucuccugaugucagaacuuggcguuccuuuccaccuggguaccaaacaggugugcauugcuuggagcaguuccucuugucaugaugggaaggccugguugcacgucugcaucacaggagacgauaagaaugcaaccgccagcuuuaucuacaacggcaggcucguggacuccguaguuucauggaguaaagagauucugcggacgcaggaaagcgagugugugugcauaaauggcacuuguacagucgugaugaccgaugggucugcuuccggaaaggcagacacuaaaauccuguucauugaggaagguaagaucgugcauacaucaacccucagcggcagugcccaacacgucgaggaaugcucuugcuauccacgcuacccggggguuagaugugugugcagggauaacuggaagggauccaaccggcccauaguagacauuaauaucaaagaucacagcaucgugucgucuuacgucuguuccggcuuagugggugacacgccucgcaagaacgacucaaguagcuccucucauugccuggauccaaauaacgaggaagggggacacggcguuaaaggcugggcuuuugacgaugggaaugacguguggaugggacgaaccauuaacgagacaagcagacuugguuaugagacuuucaaggucaucgaaggcuggucaaaucccaaaaguaaguugcagauuaacaggcaagugauaguagaucguggggaccgguccggauacagcggcaucuuuucuguugaggguaaaucauguauuaaucgcugcuucuauguggaacugaucagagggaggaaggaggaaaccgagguccuauggacaaguaacagcaucguggucuucuguggcacuuccggaaccuacggcacagggucuuggccugauggagccgaccucaaucugaugccaauuuga

SEQ ID NO: 152827 - RNA, 1410 nt, Artificial Sequence; identical to SEQ ID NO: 151423
  derived and/or modified CDS sequence (opt3) from neuraminidase__InfluenzaA__AHL96321

SEQ ID NO: 152828 - RNA, 1410 nt, Artificial Sequence; identical to SEQ ID NO: 150194
  derived and/or modified CDS sequence (opt3) from neuraminidase__InfluenzaA__AHL96333

SEQ ID NO: 152829 - RNA, 1410 nt, Artificial Sequence
  derived and/or modified CDS sequence (opt3) from neuraminidase__InfluenzaA__AHL96345
augaaccccaaucagaagaucauuaccauaggcagcgugucccugacaaucucuacuauuugcuucuuuaugcagaucgccauucucaucacgaccgucacacuucacuucaaacaguacgaguuuaacucaccuccaaauaaccagguuaugcugugugaaccgacuauaaucgagagaaauauuaccgaaaucguguauuugacaaacaccacuauugagaaggaaaucugccccaaaccugcugaguacaggaauuggaguaagccacagugugggauaacaggauucgcacccuuuagcaaagacaacuccauucgguuaucugccgguggcgauaucuggguaacccgcgagccuuaugugucgugcgacccagauaaguguuaccaauucgcgcuggggcagggaacgacucuaaauaacguccauucaaauaacaccgugcgagaccguacacccuauagaacucuccugaugaaugaacuuggcguuccuuuucaccuggguaccaaacaggugugcauugcuuggagcaguuccucuugucaugaugggaaggccugguugcacgucugcaucacaggagacgauaagaacgcaaccgccagcuucaucuacaauggcaggcucguggacuccguaguuucauggaguaaagagauucugcggacgcaggaaagcgagugugugugcauaaacggcacuuguacagucgugaugaccgaugggucugcuuccggaaaggcagacacuaaaauccuguuuauugaggaagguaagaucgugcauacaucaacccucagcggcagugcccaacacgucgaggaaugcucuugcuauccacgcuacccggggguuagaugugugugcagggauaacuggaagggauccaaucggcccauaguagacauuaacaucaaagaucacagcaucgugucgucuuacgucuguuccggcuuagugggugacacgccucgcaagaaugacaacucaaguagcucccauugccuggauccaaauaacgaggaagggggacacggcguuaaaggcugggcuuucgacgaugggaaugacguguggaugggacgaaccauuaacgagacaucuagacuugguuaugagacuuuuaaggucaucgaaggcuggagcaaucccaaaucaaaguugcagauuaacaggcaagugauaguagaucguggggaccggaguggauacuccggcaucuucagcguugaggguaaaucuuguauuaaucgcugcuuuuauguggaacugaucagagggaggaaggaggaaaccgagguccuauggacaucaaacaguaucguggucuucuguggcacuagcggaaccuacggcacaggguccuggccugauggagccgaccucaaucugaugccaauuuga

SEQ ID NO: 152830 - RNA, 1410 nt, Artificial Sequence; identical to SEQ ID NO: 151919
  derived and/or modified CDS sequence (opt3) from neuraminidase__InfluenzaA__AHL96357

SEQ ID NO: 152831 - RNA, 1410 nt, Artificial Sequence; identical to SEQ ID NO: 150194
  derived and/or modified CDS sequence (opt3) from neuraminidase__InfluenzaA__AHL96369

SEQ ID NO: 152832 - RNA, 1410 nt, Artificial Sequence; identical to SEQ ID NO: 150194
  derived and/or modified CDS sequence (opt3) from neuraminidase__InfluenzaA__AHL96381

SEQ ID NO: 152833 - RNA, 1410 nt, Artificial Sequence; identical to SEQ ID NO: 151931
  derived and/or modified CDS sequence (opt3) from neuraminidase__InfluenzaA__AHL96393

SEQ ID NO: 152834 - RNA, 1410 nt, Artificial Sequence
  derived and/or modified CDS sequence (opt3) from neuraminidase__InfluenzaA__AHL96405
augaaccccaaucagaagaucauuaccauaggcagcgugucccugacaaucucuacuauuugcuucuuuaugcagaucgccauucucaucacgaccgucacacuucacuucaaacaguacgaguuuaacucaccuccaaauaaccagguuaugcugugugaaccgacuauaaucgagagaaauauuaccgaaaucguguauuugacaaacaccacuauugagaaggaaaucugccccaaaccugcugaguacaggaauuggaguaagccacagugugggauaacaggauucgcacccuuuagcaaagacaacuccauucgguuaucugccgguggcgauaucuggguaacccgcgagccuuaugugucgugcgacccagauaaguguuaccaauucgcgcuggggcagggaacgacucuaaauaacguccauucaaauaacaccgugcgagaccguacacccuauagaacucuccugaugaaugaacuuggcguuccuuuucaccuggguaccaaacaggugugcauugcuuggagcaguuccucuugucaugaugggaaggccugguugcacgucugcaucacaggagacgauaagaacgcaaccgccagcuucaucuacaauggcaggcucguggacuccguaguuucauggaguaaagagauucugcggacgcaggaaagcgagugugugugcauaaacggcacuuguacagucgugaugaccgaugggucugcuuccggaaaggcagacacuaaaauccuguuuauugaggaagguaagaucgugcauacaucaacccucagcggcagugcccaacacgucgaggaaugcucuugcuauccacgcuacccggggguuagaugugugugcagggauaacuggaagggauccaaucggcccauaguagacauuaacaucaaagaucacagcaucgugucgucuuacgucuguuccggcuuagugggugacacgccucgcaagaaugacucaaguagcuccucucauugccuggggccaaacaaugaggaaggaggccacggcguuaaagggugggcuuucgaugacggaaacgauguguggaugggucgaaccauuaaugagacaagcagacuuggcuaugagacuuuuaaggucaucgaaggguggucaaaccccaaaaguaaguugcagauuaauaggcaagugauaguagaccggggagaucguuccggcuacagcgguaucuucucuguugaggggaaaucauguauuaaccgcugcuuuuauguggaacugaucagaggcaggaaggaggaaaccgagguccuauggacaaguaauagcaucguggucuucuguggaacuuccggcaccuacgggacaggaucuuggccugacggugccgaucucaaccugaugccaauuuga

SEQ ID NO: 152835 - RNA, 1410 nt, Artificial Sequence; identical to SEQ ID NO: 150194
  derived and/or modified CDS sequence (opt3) from neuraminidase__InfluenzaA__AHL96417

SEQ ID NO: 152836 - RNA, 1410 nt, Artificial Sequence; identical to SEQ ID NO: 150194
  derived and/or modified CDS sequence (opt3) from neuraminidase__InfluenzaA__AHL96429

SEQ ID NO: 152837 - RNA, 1410 nt, Artificial Sequence
  derived and/or modified CDS sequence (opt3) from neuraminidase__InfluenzaA__AHL96441
augaaccccaaucagaagaucauuaccauaggcagcgugucccugacaaucucuacuauuugcuucuuuaugcaaaucgccauucucaucacgaccgucacacuucacuucaaacauuacgaguuuaacucaccuccaaauaaccagguuaugcugugugaaccgacuauaaucgagagaaauauuaccgaaaucguguauuugacaaacaccacuauugagaaggaaaucugccccaaaccugcugaguacaggaauuggaguaagccacagugugacauaacaggguucgcacccuuuagcaaagauaacuccauucgguuaucugccggaggugacaucuggguaacccgcgagccuuaugugucgugcgauccagacaaguguuaccaguucgcgcugggccaagggacgacucuaaauaacguccacucaaauaacaccgugcgagaucguacacccuauagaacucuccugaugaaugaacuuggaguuccuuuucaucugggcaccaaacaggugugcauugcuuggagcaguuccucuugucacgacgguaaggccugguugcaugucugcaucacaggggaugacaagaacgcaaccgccagcuucaucuacaauggaaggcucguggauuccguaguuucauggaguaaagagauucugcggacgcaggaaagcgagugugugugcauaaacggcacuuguacagucgugaugaccgacggcucugcuuccgggaaggcagauacuaaaauccuguuuauugaggaaggaaagaucgugcacacaucaacccucagcgguagugcccagcacgucgaggaaugcucuugcuauccacgcuacccgggcguuagaugugugugcagggacaacuggaagggguccaaucggcccauaguagauauuaacaucaaagaccauagcaucgugucgcgcuacgucuguucuggauuagugggcgacacgccucgaaagaaugauuccucaaguagcucccacugccugaacccaaauaacgaggaaggugggcauggaguuaaaggcugggcuuucgacgauggcaaugacguguggauggggagaaccauuaacgagacaucuaggcuuggauaugagacuuuuaaggucaucgaagguuggagcaaucccaaaucaaaguugcaaauuaaccggcagauaaucguggaucguggcgaccgcaguggguacuccggaauuuucagcguagagggcaaaucuuguaucaauagaugcuuuuauguugaacugaucaggggucggaaggaggaaaccgaggugcuauggacaucaaacaguauugucguguucugugggacuagcggcaccuacggaacaggcuccuggccugauggggccgaccucaaucugaugccaauauga

SEQ ID NO: 152838 - RNA, 1410 nt, Artificial Sequence; identical to SEQ ID NO: 150194
  derived and/or modified CDS sequence (opt3) from neuraminidase__InfluenzaA__AHL96453

SEQ ID NO: 152839 - RNA, 1410 nt, Artificial Sequence; identical to SEQ ID NO: 150194
  derived and/or modified CDS sequence (opt3) from neuraminidase__InfluenzaA__AHL96465

SEQ ID NO: 152840 - RNA, 1410 nt, Artificial Sequence
  derived and/or modified CDS sequence (opt3) from neuraminidase__InfluenzaA__AHL96477
augaaccccaaucagaagaucauuaccauaggcagcgugugcaugacaaucgggauggccaaccugauucuccaaaucggaaauauuaucuccauauggaucucucacucaauucaggucgguaaccagagucagaucgagacuuguaaucaaagcguuauuacguacgaaaacaauaccugggugaaccagacauauguaaauaucuccaacacuaauuucgcugcaggccagucuguggucucggugaaacuugccgggaacucaagccugugcccuguuaguggaugggcgauauacuccaaggacaauucugugagaauuggcagcaaaggugaugucuuugugaucagggagccauucauuuccuguucaccguuggaaugccggaccuuuuucuuaacacagggggcucugcuaaacgacaagcauaguaauggaaccaucaaagaucgcagccccuaucgaacucucaugucuuguccuaucggcgagguaccaucccccuacaacucacguuuugaaagcguugccuggagugcaucugccugccacgacggcauuaacuggcugacaauagggaucuccggaccugauagcggugcuguggcaguccuuaaguauaauggcauuaucaccgacacgauaaagucguggagaaacaauauucugaggacucaagagucugagugugccugcgugaacggguccuguuucaccaucaugacagauggaccaucagacggccaggcuaguuacaaaaucuuucggauugaaaaggguaaaaucgucaagagcguggagaugaaugcccccaacuaucauuacgaagagugcuccuguuacccugauucuagcgagauuacuugcguuugccgcgacaauuggcacgggucaaacagaccaugggugaguuucaaucagaacuuggaauaucagauaggauacaucuguuccggcauuuuuggcgauaauccgaggcccaacgacaaaaccgggagcugcggaccuguaucuucaaauggugcgaacggcgugaagggguucaguuuuaaguauggaaauggcgucuggaucggucggacaaaaagcaucuccucucgcaagggguucgagaugauuugggauccaaacggcuggaccggaacggacaacaauuuuucgauaaaacaagacaucgugggcauuaacgaauggagcggguacuccggaucauucguucagcaucccgagcucacuggucuggauuguauccgaccuugcuucuggguggaacugauuagaggcaggccaaaggagaauacaaucuggaccagugggucuagcauauccuuuuguggagucaacucagacacugugggcuggagcuggcccgauggugcagagcucccguucacaaucgacaaauga

SEQ ID NO: 152841 - RNA, 1410 nt, Artificial Sequence; identical to SEQ ID NO: 151931
  derived and/or modified CDS sequence (opt3) from neuraminidase__InfluenzaA__AHL96488

SEQ ID NO: 152842 - RNA, 1410 nt, Artificial Sequence; identical to SEQ ID NO: 150194
  derived and/or modified CDS sequence (opt3) from neuraminidase__InfluenzaA__AHL96500

SEQ ID NO: 152843 - RNA, 1410 nt, Artificial Sequence; identical to SEQ ID NO: 150194
  derived and/or modified CDS sequence (opt3) from neuraminidase__InfluenzaA__AHL96512

SEQ ID NO: 152844 - RNA, 1410 nt, Artificial Sequence; identical to SEQ ID NO: 151423
  derived and/or modified CDS sequence (opt3) from neuraminidase__InfluenzaA__AHL96524

SEQ ID NO: 152845 - RNA, 1410 nt, Artificial Sequence
  derived and/or modified CDS sequence (opt3) from neuraminidase__InfluenzaA__AHL96536
augaaccccaaucagaagaucauuaccauaggcagcgugucccugacaaucucuacuauuugcuucuuuacgcagaucgccauucucaucaccacagucacucuucacuucaaacaguacgaguuuaacucaccuccaaauaaccagguuaugcugugugaaccgaccauaaucgagagaaauauuacagaaaucguguauuugaccaacacuacaauugagaaggaaaucugccccaaaccugcugaguacaggaauuggaguaagccacagugugggauaaccggauucgcacccuuuagcaaagacaacuccauucgguuaucugccgguggcgauaucuggguaacgcgcgagccuuaugugucgugcgacccagauaaguguuaccaauucgcgcuggggcagggaacuaccauuaauaacguccauucaaauaacacagugcgagaccguacucccuauagaacccuacucaugaaugaacugggcguuccuuuucaccuugguacaaaacaggugugcaucgcuuggagcaguuccucuugucaugaugggaaggccuggcugcacgucugcaucaccggagacgauaagaacgcaacggccagcuucauuuacaauggcagguugguggacuccguaguuucauggaguaaagagauacuccggacucaggaaagcgagugugugugcaucaacggcacauguaccgucgugaugacugaugggucugcuuccggaaaggcagacacaaaaauucuguuuaucgaggaagguaagauagugcauaccucaacgcugagcggcagugcccaacacgucgaggaaugcucuugcuauccacgcuacccggggguuagaugugugugcagggauaacuggaagggauccaaucggcccauuguagacaucaacaucaaagaucacagcauugugucgucuuacgucuguuccggccucgugggugacaccccucgcaagaaugacucaaguagcuccucucauugcuuagauccaaacaaugaggaagggggacacggcguuaaaggcugggcuuucgacgaugggaacgacguguggaugggacgaacaaucaaugagacuagcagacuggguuaugagaccuuuaaggucauugaaggcuggucaaaccccaaaaguaaacuucagauaaauaggcaagugaucguagaucguggggaccgguccggauacagcggcauuuucucuguugaggguaagucauguaucaaccgcugcuuuuauguggaauugaucagagggaggaaggaggaaacagagguccuguggaccaguaauagcauuguggucuucuguggcacuuccggaacauacggcaccgggucuuggccugauggagccgaccuaaaccucaugccaauauga

SEQ ID NO: 152846 - RNA, 1410 nt, Artificial Sequence; identical to SEQ ID NO: 151931
  derived and/or modified CDS sequence (opt3) from neuraminidase__InfluenzaA__AHL96548

SEQ ID NO: 152847 - RNA, 1410 nt, Artificial Sequence
  derived and/or modified CDS sequence (opt3) from neuraminidase__InfluenzaA__AHL96560
augaaccccaaucagaagaucauuaccauaggcagcgugucccugacaaucucuacuauuugcuucuuuaugcagaucgccauucucaucacgaccgucacacuucacuucaaacaguacgaguuuaacucaccuccaaauaaccagguuaugcugugugaaccgacuauaaucgagagaaauauuaccgaaaucguguauuugacaaacaccacuauugagaaggaaaucugccccaaaccugcugaguacaggaauuggaguaagccacagugugggauaacaggauucgcacccuuuagcaaagacaacuccauucgguuaucugccgguggcgauaucuggguaacccgcgagccuuaugugucgugcgacccagauaaguguuaccaauucgcgcuggggcagggaacgacucuaaauaacguccauucaaauaacaccgugcgagaccguacacccuauagaacucuccugaugaaugaacuuggcguuccuuuucaccuggguaccaaacaggugugcauugcuuggagcaguuccucuugucaugaugggaaggccugguugcacgucugcaucacaggagacgauaagaacgcaaccgccagcuucaucuacaauggcaggcucguggacuccguaguuucauggaguaaagagauucugcggacgcaggaaagcgagugugugugcauaaacggcacuuguacagucgugaugaccgaugggaacgcuucuggaaaggcagacacuaaaauccuguuuauugaggaagguaagaucgugcauacauccacccucucaggcagcgcccaacacgucgaggaaugcaguugcuauccacgcuacccggggguuagaugugugugcagggauaauuggaagggaucuaaccggcccauaguagacauuaauaucaaagaucacuccaucgugagcucguacgucuguucuggcuuagugggugacacgccucgcaagaacgacuccucaaguagcucccauugccuggauccaaauaacgaggaagggggacacggcguuaaaggcugggcuuucgacgaugggaaugacguguggaugggacgaaccauuaacgagacaucuagacuugguuaugagacuuuuaaggucaucgaaggcuggagcaaucccaaaucaaaguugcagauuaacaggcaagugauaguagaucguggggaccggaguggauacuccggcaucuucagcguugaggguaaaucuuguauuaaucgcugcuuuuauguggaacugaucagagggaggaaggaggaaaccgagguccuauggacaucaaacaguaucguggucuucuguggcacuagcggaaccuacggcacaggguccuggccugauggagccgaccucaaucugaugccaauuuga

SEQ ID NO: 152848 - RNA, 1410 nt, Artificial Sequence; identical to SEQ ID NO: 151405
  derived and/or modified CDS sequence (opt3) from neuraminidase__InfluenzaA__AHL96572

SEQ ID NO: 152849 - RNA, 1410 nt, Artificial Sequence; identical to SEQ ID NO: 152840
  derived and/or modified CDS sequence (opt3) from neuraminidase__InfluenzaA__AHL96584

SEQ ID NO: 152850 - RNA, 1410 nt, Artificial Sequence
  derived and/or modified CDS sequence (opt3) from neuraminidase__InfluenzaA__AHL96595
augaaccccaaucagaagaucauuaccauaggcagcgugucccugacaaucucuacuauuugcuucuuuaugcagaucgccauucucaucacgaccgucacacuucacuucaaacaguacgaguuuaacucaccuccaaauaaccagguuaugcugugugaaccgacuauaaucgagagaaauauuaccgaaaucguguauuugacaaacaccacuauugagaaggaaaucugccccaaaccugcugaguacaggaauuggaguaagccacagugugggauaacaggauucgcacccuuuagcaaagacaacuccauucgguuaucugccgguggcgauaucuggguaacccgcgagccuuaugugucgugcgacccagauaaguguuaccaauucgcgcuggggcagggaacgacucuaaauaacguccauucaaauaacaccgugcgagaccguacacccuauagaacucuccugaugaaugaacuuggcguuccuuuucaccuggguaccaaacaggugugcauugcuuggagcaguuccucuugucaugaugggaaggccugguugcacgucugcaucacaggagacgauaagaacgcaaccgccagcuucaucuacaauggcaggcucguggacuccguaguuucauggaguaaagagauucugcggacgcaggaaagcgagugugugugcauaaacggcacuuguacagucgugaugaccgaugggucugcuuccggaaaggcagacacuaaaauccuguuuauugaggaagguaagaucgugcauacaucaacccucagcggcagugcccaacacgucgaggaaugcucuugcuauccacgcuacccggggguuagaugugugugcagggauaacuggaagggauccaaucggcccauaguagacauuaacaucaaagaucacagcaucgugucgucuuacgucuguuccggcuuagugggugacacgccucgcaagaaugacucaaguagcuccucucauugccuggauccaaacaaugaggaagggggacacggcguuaaaggcugggcuuucgacgaugggaacgacguguggaugggacgaaccauuaaugagacaagcagacuugguuaugagacuuuuaaggucaucgaaggcuggucaaaccccaaaaguaaguugcagauuaauaggcaagugauaguagaucguggggaccgguccggauacagcggcaucuucucuguugagucaaaaaguuguauuaaccgcugcuuuuauguggaacugaucagagguaggaaggaggaaaccgagguccuauggacaagcaauuccaucguggucuucugugggacuucuggcaccuacggaacaggcucguggccugauggggccgaccucaaccugaugccaauuuga

SEQ ID NO: 152851 - RNA, 1410 nt, Artificial Sequence; identical to SEQ ID NO: 150194
  derived and/or modified CDS sequence (opt3) from neuraminidase__InfluenzaA__AHL96607

SEQ ID NO: 152852 - RNA, 1410 nt, Artificial Sequence
  derived and/or modified CDS sequence (opt3) from neuraminidase__InfluenzaA__AHL96631
augaaccccaaucagaagaucauuaccauaggcagcgugucccugacaaucucuacuauuugcuucuuuaugcaaaucgccauucucaucacgaccgucacacuucacuucaaacaguacgaguuuaacucacugccuaauaaccagguuauguugugugaaccaacuauaaucgagagaaauauuaccgaaaucguguauuuaacaaacaccacuauugagaaggaaaucugcccgaaacccgcugaguacaggaauuggaguaagccucagugugggauaacaggauucgcaccauuuagcaaagacaacuccauucggcugucugccgguggcgauaucuggguaacccgcgagcccuaugugucgugcgacccugauaaguguuaccaauucgcgcuagggcagggaacgacucucaauaacaugcauucaaauaacaccguccgagaccguacaccauauagaacucugcuuaugaaugaacugggcgugcccuuucacuuggguaccaagcagguuugcauugcuuggagcaguuccucuugucaugaugggaaagccuggcuccacgugugcaucacaggagacgauaagaacgcaaccgccagcuucaucuacaauggcaggcuggucgacuccgugguaucauggaguaaagagauucugcggacgcaggaaagcgaguguguuugcauaaacggcacuuguacaguggucaugaccgaugggucugcuuccggaaaggcagacacuaaaauccucuuuauugaggaagguaagaucgugcauacaucaaccuuaagcggcagugcccaacacguggaggaaugcucuugcuauccucgcuacccaggggucagauguguuugcagggauaacuggaagggauccaaucggccgauaguggacauuaacaucaaagaucacagcaucguaucgucuuacguguguuccggccuggucggugacacgccccgcaagaaugacucaaguagcuccucucauugccuugauccuaacaaugaggaagggggacacggcgugaaaggcugggcuuucgacgaugggaacgacguuuggaugggacgaaccauuaaugagacaagcagauuggguuaugagacuuuuaaggugaucgaaggcuggucaaacccaaaaaguaagcugcagauuaauaggcaggucauaguggaucguggggaccgguccggauacagcggcaucuucucuguagaggguaaaucauguauuaaccgcugcuuuuauguugaacuaaucagagggaggaaggaggaaaccgaggugcucuggacaaguaauagcaucgucguguucuguggcacuuccggaaccuacggcacagggucuuggcccgauggagccgaccugaaccuuaugccuauuuga

SEQ ID NO: 152853 - RNA, 1410 nt, Artificial Sequence; identical to SEQ ID NO: 151931
  derived and/or modified CDS sequence (opt3) from neuraminidase__InfluenzaA__AHL96643

SEQ ID NO: 152854 - RNA, 1410 nt, Artificial Sequence; identical to SEQ ID NO: 150194
  derived and/or modified CDS sequence (opt3) from neuraminidase__InfluenzaA__AHL96655

SEQ ID NO: 152855 - RNA, 1410 nt, Artificial Sequence; identical to SEQ ID NO: 150194
  derived and/or modified CDS sequence (opt3) from neuraminidase__InfluenzaA__AHL96667

SEQ ID NO: 152856 - RNA, 1410 nt, Artificial Sequence; identical to SEQ ID NO: 150194
  derived and/or modified CDS sequence (opt3) from neuraminidase__InfluenzaA__AHL96679

SEQ ID NO: 152857 - RNA, 1410 nt, Artificial Sequence; identical to SEQ ID NO: 150194
  derived and/or modified CDS sequence (opt3) from neuraminidase__InfluenzaA__AHL96691

SEQ ID NO: 152858 - RNA, 1410 nt, Artificial Sequence; identical to SEQ ID NO: 150194
  derived and/or modified CDS sequence (opt3) from neuraminidase__InfluenzaA__AHL96703

SEQ ID NO: 152859 - RNA, 1410 nt, Artificial Sequence; identical to SEQ ID NO: 151919
  derived and/or modified CDS sequence (opt3) from neuraminidase__InfluenzaA__AHL96763

SEQ ID NO: 152860 - RNA, 1410 nt, Artificial Sequence; identical to SEQ ID NO: 152772
  derived and/or modified CDS sequence (opt3) from neuraminidase__InfluenzaA__AHL96787

SEQ ID NO: 152861 - RNA, 1410 nt, Artificial Sequence
  derived and/or modified CDS sequence (opt3) from neuraminidase__InfluenzaA__AHL96799
augaaccccaaucagaagaucauuaccauaggcagcgugucccugacaaucucuacuauuugcuucuuuaugcagaucgccauucucaucacgaccgucacacuucacuucaaacaguacgaguuuaacucaccuccaaauaaccagguuaugcugugugaaccgacuauaaucgagagaaauauuaccgaaaucguguauuugacaaacaccacuauugagaaggaaaucugccccaaaccugcugaguacaggaauuggaguaagccacagugugggauaacaggauucgcacccuuuagcaaagacaacuccauucgguuaucugccgguggcgauaucuggguaacccgcgagccuuaugugucgugcgacccagauaaguguuaccaauucgcgcuggggcagggaacgacucuaaauaacguccauucaaauaacaccgugcgagaccguacacccuauagaacucuccugaugaaugaacuuggcguuccuuuucaccuggguaccaaacaggugugcauugcuuggagcaguuccucuugucaugaugggaaggccugguugcacgucugcaucacaggagacgauaagaacgcaaccgccagcuucaucuacaauggcaggcucguggacuccguaguuucauggaguaaagagauucugcggacgcaggaaagcgagugugugugcauaaacggcacuuguacagucgugaugaccgaugggucugcuuccggaaaggcagacacuaaaauccuguuuauugaggaagguaagaucgugcauacaucaacccucagcggcagugcccaacacgucgaggaaugcucuugcuauccacgcuacccggggguuagaugugugugcagggauaacuggaagggauccaaucggcccauaguagacauuaacaucaaagaucacagcaucgugucgucuuacgucuguuccggcuuagugggugacacgccucgcaagaaugacucaaguagcuccucucauugccuggauccaaacaaugaggaagggggacacggcguuaaaggcugggcuuucgacgaugggaacgacguguggaugggacgaaccauuaaugagacaagcagacuugguuaugagacuuuuaaggucaucgaaggcuggucaaaccccaaaaguaaguugcagauuaauaggcaagugauaguagaucguggggaccgguccggauacagcggcaucuucucuguugaggguaaaucauguauuaaccgcugcuuuuauguggaacugaucagagggaggaaggaugagaccgaaguccuauggacaaguaauagcaucguggucuucuguggcacuuccggaaccuacggcacagggucuuggccugacggagccgaucucaaccugaugccaauuuga

SEQ ID NO: 152862 - RNA, 1410 nt, Artificial Sequence; identical to SEQ ID NO: 151931
  derived and/or modified CDS sequence (opt3) from neuraminidase__InfluenzaA__AHL96811

SEQ ID NO: 152863 - RNA, 1410 nt, Artificial Sequence; identical to SEQ ID NO: 151931
  derived and/or modified CDS sequence (opt3) from neuraminidase__InfluenzaA__AHL96823

SEQ ID NO: 152864 - RNA, 1410 nt, Artificial Sequence; identical to SEQ ID NO: 150194
  derived and/or modified CDS sequence (opt3) from neuraminidase__InfluenzaA__AHL96847

SEQ ID NO: 152865 - RNA, 1410 nt, Artificial Sequence
  derived and/or modified CDS sequence (opt3) from neuraminidase__InfluenzaA__AHL96859
augaaccccaaucagaagaucauuaccauaggcagcgugucccugacaaucucuacuauuugcuucuuuaugcaaaucgccauucucaucacgaccgucacacuucacuucaaacaguacgaguuuaacucaccuccaaauaaccagaugaugcugugugaaccgacuauaaucgagagaaauauuaccgaaaucguuuauuugacaaacaccacuauugagaaggaaaucugccccaaaccugcugaguacaggaauuggaguaagccacagugugggauaacaggauucgcacccuuuagcaaagacaacuccauucgguuaucugccgguggcgauaucugggugacccgcgagccuuauguaucgugcgacccagauaaguguuaccaauucgcgcuggggcagggaacgacucuaaauaacgugcauucaaauaacaccguccgagaccguacacccuauagaacucuccugaugaaugaacuuggcgugccuuuucaccuggguaccaagcagguuugcauugcuuggagcaguuccucuugucaugaugggaaagccugguugcacgugugcaucacaggagacgauaagaacgcaaccgccagcuucaucuacaauggcaggcucgucgacuccgugguaucauggaguaaagagauucugcggacgcaggaaagcgaguguguuugcauaaacggcacuuguacaguggucaugaccgaugggucugcuuccggaaaggcagacacuaaaauccuguuuauugaggaagguaagaucgugcauacaucaacccucagcggcagugcccaacacguggaggaaugcucuugcuauccacgcuacccgggggucagauguguuugcagggauaacuggaagggauccaaucggcccauaguggacauuaacaucaaagaucacagcaucguaucgucuuacguguguuccggcuuagucggugacacgccucgcaagaaugacucaaguagcuccucucauugccuggauccaaacaaugaggaagggggacacggcgugaaaggcugggcuuucgacgaugggaacgacguuuggaugggacgaaccauuaaugagacaagcagacuugguuaugagacuuuuaaggugaucgaaggcuggucaaaccccaaaaguaaguugcagauuaauaggcaggucauaguggaucguggggaccgguccggauacagcggcaucuucucuguagaggguaaaucauguauuaaccgcugcuuuuauguugaacugaucagagggaggaaggaggaaaccgaggugcuauggacaaguaauagcaucgucguguucuguggcacuuccggaaccuacggcacagggucuuggccugauggagccgaccucaaccugaugccaauuuga

SEQ ID NO: 152866 - RNA, 1410 nt, Artificial Sequence
  derived and/or modified CDS sequence (opt3) from neuraminidase__InfluenzaA__AHL96871
augaaccccaaucagaagaucauuaccauaggcagcgugucccugacaaucucuacuauuugcuucuuuaugcaaaucgccauucucaucacgaccgucacacuucacuucaaacaguacgaguuuaacucaccuccaaauaaccagguuaugcugugugaaccgacuauaguggagagaaauaucaccgaaauuguauauuugacaaacaccacuaucgagaaggaaauuugccccaaaccugcugaguacaggaauuggaguaagccacagugugggaucacaggauucgcacccuuuagcaaagacaacuccauacgguuaucugccgguggcgauauuugggugacccgcgagccuuaugucucgugcgacccagauaaguguuaccaauucgcgcuggggcagggaacgacucuaaauaacgugcauucaaauaacaccguucgagaccguacacccuauagaacucuccugaugaaugaacuuggcgugccuuuucaccuggguaccaagcaggucugcaucgcuuggagcaguuccucuugucaugaugggaaagccugguugcacgugugcauuacaggagacgauaagaacgcaaccgccagcuucaucuacaauggcaggcucguagacuccguugugucauggaguaaagagguccugcggacgcaggaaagcgagugugugugcaucaacggcacuugugcuguggucaugacagaugggucugcauccggaaaggccgacaccaaaauucuguuuauagaggaagguaagaucguucauacuucaacacucagcggcagugcucaacacguggaggaaugcucuugcuauccacgcuacccggggguaagaugugugugcagggauaacuggaagggauccaaucggcccauugucgacaucaacauaaaagaucacagcauugugucgucuuacguuuguuccggcuuagugggugacaccccucgcaagaaugaccgaucaaguagcucccauugccuggauccaaacaaugaggaagggggacacggcgucaaaggcugggccuucgacgaugggaacgacguguggaugggaagaacgaucaaugagaccucuaggcuugguuaugagacauuuaagguaaucgaaggcuggagcaaccccaaaucaaaguugcagauuaaucggcagguuaucguggaucguggggaccgcaguggauacuccggcauuuucagcgucgaggguaaaucuuguauaaacagaugcuuuuauguggaacugaucagggggcggaaggaggaaacugagguccuauggaccucaaauaguauugugguuuucuguggcacaagcggaacuuacggcaccggguccuggccugauggagcggaccucaaccugaugccaaucuga

SEQ ID NO: 152867 - RNA, 1410 nt, Artificial Sequence
  derived and/or modified CDS sequence (opt3) from neuraminidase__InfluenzaA__AHL96883
augaaccccaaucagaagaucauuaccauaggcagcgugucccugacaaucucuacuauuugcuucuuuaugcaaaucgccauucucaucacgaccgucacacuucacuucaaacaguacgaguuuaacucaccuccaaauaaccagguuaugcugugugaaccgacuauaaucgagagaaauauuaccgaaaucguguauuugacaaacaccacuauugagaaggaaaucugccccaaaagugcugaguacaggaauuggagcaagccucagugugggauaacaggauucgcaccauuuuccaaagacaacucuauucgguuaucggccgguggcgauaucuggguaacccgcgagcccuaugugucaugcgacccugauaaguguuaccaauucgcgcuggggcagggaacgacucuaaauaacaugcauagcaauaacaccguccgagaccguacaccauauagaacucuccugaugaaugaacuuggcgugcccuuucaccuggguaccaagcagguuugcauugcuuggaguuccucuagcugucaugaugggaaagccugguugcacgugugcaucacaggagacgauaagaacgcaaccgccuccuucaucuacaauggcaggcucgucgacucagugguaaguuggagcaaagagauucugcggacgcaggaaucugaguguguuugcauaaacggcacuuguacaguggucaugaccgauggguccgcuucaggaaaggcagacacuaaaauccuguuuauugaggaagguaagaucgugcauacaagcacccucaguggcucugcccaacacguggaggaaugcuccugcuauccucgcuacccaggggucagauguguuugcagggauaacuggaagggaagcaaucggccgauaguggacauuaacaucaaagaucacucgaucguaucuuccuacguguguucaggcuuagucggugacacgccccgcaagaaugacaguagcuccucuagccauugccuggauccuaacaaugaggaagggggacacggcgugaaaggcugggcuuucgacgaugggaacgacguuuggaugggacgaaccauuaaugagacaucaagacuugguuaugagacuuuuaaggugaucgaaggcuggaguaacccaaaauccaaguugcagauuaauaggcaggucauaguggaucguggggaccggagcggauacucuggcaucuucucaguagaggguaaaaguuguauuaaccgcugcuuuuauguugaacugaucagagggaggaaggaggaaaccgaggugcuauggacaagcaauuccaucgucguguucuguggcacuucuggaaccuacggcacagggucguggcccgauggagccgaccucaaccugaugccuauuuga

SEQ ID NO: 152868 - RNA, 1410 nt, Artificial Sequence; identical to SEQ ID NO: 151919
  derived and/or modified CDS sequence (opt3) from neuraminidase__InfluenzaA__AHL96895

SEQ ID NO: 152869 - RNA, 1410 nt, Artificial Sequence
  derived and/or modified CDS sequence (opt3) from neuraminidase__InfluenzaA__AHL96907
augaaccccaaucagaagaucauuaccauaggcagcgugucccugacaaucucuacuauuugcuucuuuaugcaaaucgccauucucaucacgaccgucacacuucacuucaaacaguacgaguuuaacucaccuccaaauaaccagguuaugcugugugaaccgacuauaguggagagaaauaucaccgaaauuguauauuugacaaacaccacuaucgagaaggaaauuugccccaaaccugcugaguacaggaauuggaguaagccacagugugggaucacaggauucgcacccuuuagcaaagacaacuccauacgguuaucugccgguggcgauauuugggugacccgcgagccuuaugucucgugcgacccagauaaguguuaccaauucgcgcuggggcagggaacgacucuaaauaacgugcauucaaauaacaccguucgagaccguacacccuauagaacucuccugaugaaugaacuuggcgugccuuuucaccuggguaccaagcaggucugcaucgcuuggagcaguuccucuugucaugaugggaaagccugguugcacgugugcauuacaggagacgauaagaacgcaaccgccagcuucaucuacaauggcaggcucguagacuccguugugucauggaguaaagagguccugcggacgcaggaaagcgagugugugugcaucaacggcacuugugcuguggucaugacagaugggucugcauccggaaaggccgacaccaaaauucuguuuauagaggaagguaagaucguucauacuucaacacucagcggcagugcucaacacguggaggaaugcucuugcuauccacgcuacccggggguaagaugugugugcagggauaacuggaagggauccaaucggcccauugucgacaucaacauaaaagaucacagcauugugucgucuuacguuuguuccggcuuagugggugacaccccucgcaagaaugacucaaguagcuccucucauugccuggauccaaacaaugaggaagggggacacggcgucaaaggcugggccuucgacgaugggaacgacguguggaugggacgaacgaucaaugagaccagcagacuugguuaugagacauuuaagguaaucgaaggcuggucaaaccccaaaaguaaguugcagauuaauaggcagguuaucguggaucguggggaccgguccggauacagcggcauuuucucugucgaggguaaaucauguauaaaccgcugcuuuuauguggaacugaucagagggaggaaggaggaaacugagguccuauggaccaguaauagcauugugguuuucuguggcacauccggaacuuacggcaccgggucuuggccugauggagcggaccucaaccugaugccaaucuga

SEQ ID NO: 152870 - RNA, 1410 nt, Artificial Sequence; identical to SEQ ID NO: 151931
  derived and/or modified CDS sequence (opt3) from neuraminidase__InfluenzaA__AHL96919

SEQ ID NO: 152871 - RNA, 1410 nt, Artificial Sequence; identical to SEQ ID NO: 151931
  derived and/or modified CDS sequence (opt3) from neuraminidase__InfluenzaA__AHL96931

SEQ ID NO: 152872 - RNA, 1410 nt, Artificial Sequence; identical to SEQ ID NO: 151931
  derived and/or modified CDS sequence (opt3) from neuraminidase__InfluenzaA__AHL96943

SEQ ID NO: 152873 - RNA, 1410 nt, Artificial Sequence
  derived and/or modified CDS sequence (opt3) from neuraminidase__InfluenzaA__AHL96955
augaaccccaaucagaagaucauuaccauaggcagcgugucccugacaaucucuacuauuugcuucuuuaugcagaucgccauucucaucacgaccgucacacuucacuucaaacaguacgaguuuaacucaccuaguaauaaccagguuaugcugugugaaccaacuauaaucgagagaaauauuaccgaaaucguguauuugacaaacaccacuauugagaaggaaaucugcccgaaacccgcugaguacaggaauuggagcaagccucagugugggauaacaggauucgcaccauuuuccaaagacaacucuauucgguuaucggccgguggcaauaucuggguaacccgcgagcccuaugugucaugcgauccugacaaguguuaccaauucgcgcuggggcagggaacgacucuaaacaauguccauagcaacaauaccgugcgagaucguacaccauauagaacucuccugaugaacgaacuuggcguucccuuucaccuggguaccaaacaggugugcauugcuuggaguuccucuagcugucaugacgggaaggccugguugcacgucugcaucacaggagaugacaagaaugcaaccgccuccuucaucuacaacggcaggcucguggauucaguaguuaguuggagcaaagagauucugcggacgcaggaaucugagugugugugcauaaacggcacuuguacagucgugaugaccgacggguccgcuucaggaaaggcagauacuaaaauccuguuuauugaggaagguaagaucgugcauacaagcacccucaguggcucugcccaacacgucgaggaaugcuccugcuauccucgcuacccagggguuagaugugugugcagggacaauuggaagggaagcaaccggccgauaguagauauuaauaucaaagaccacucgaucgugucuuccuacgucuguucaggcuuagugggugauacgccccgcaagaacgacaguagcuccucuagccauugccuggacccuaauaacgaggaagggggacacggcguuaaaggcugggcuuucgaugacgggaaugauguguggaugggacgaaccauuaacgagacaucaagacuugguuaugagacuuuuaaggucaucgaaggcuggaguaauccaaaauccaaguugcagauuaacaggcaagugauaguagaccguggggaucggagcggauacucuggcaucuucucaguugaggguaaaaguuguauuaaucgcugcuuuuauguggaacugaucagagggaggaaggaggaaaccgagguccuauggacaagcaacuccaucguggucuucuguggcacuucuggaaccuacggcacagggucguggcccgacggagccgaucucaaucugaugccuauuuga

SEQ ID NO: 152874 - RNA, 1410 nt, Artificial Sequence; identical to SEQ ID NO: 152772
  derived and/or modified CDS sequence (opt3) from neuraminidase__InfluenzaA__AHL96967

SEQ ID NO: 152875 - RNA, 1410 nt, Artificial Sequence
  derived and/or modified CDS sequence (opt3) from neuraminidase__InfluenzaA__AHL96979
augaaccccaaucagaagaucauuaccauaggcagcgugucccugacaaucucuacuauuugcuucuuuaugcaaaucgccauucucaucacgaccgucacacuucacuucaaacaguacgaguuuaacucaccuccaaauaaccagguuaugcugugugaaccgacuauaaucgagagaaauauuaccgaaaucguguauuugacaaacaccacuauugagaaggaaaucugccccaaaccugcugaguacaggaauuggaguaagccacagugugacauaacaggguucgcacccuuuagcaaagauaacuccauucgguuaucugccggaggugacaucuggguaacccgcgagccuuaugugucgugcgauccagacaaguguuaccaauucgcgcugggccaggggacgacucuaaauaacaugcauucaaauaacaccguccgagaucguacacccuauagaacucuccugaugaaugaacuuggagugccuuuucaccugggcaccaagcagguuugcauugcuuggagcaguuccucuugucaugacgguaaagccugguugcacgugugcaucacaggggaugacaagaacgcaaccgccagcuucaucuacaauggaaggcucgucgauuccgugguaucauggaguaaagagauucugcggacgcaggaaagcgaguguguuugcauaaacggcacuuguacaguggucaugaccgacggcucugcuuccgggaaggcagauacuaaaauccuguuuauugaggaaggaaagaucgugcauacaucaacccucagcgguagugcccaacacguggaggaaugcucuugcuauccacgcuacccgggcgucagauguguuugcagggacaacuggaagggguccaaucggcccauaguggauauuaacaucaaagaccacagcaucguaucgucuuacguguguuccggauuagucggcgacacgccucgcaagaaugauucaaguagcuccucucauugccuggacccaaacaaugaggaaggugggcacggagugaaaggcugggcuuucgaugacggcaacgauguuuggauggggcgaaccauuaaugagacaagcagacuuggauaugagacuuuuaaggugaucgaagguuggucaaaccccaaaaguaaguugcagauuaauaggcaggucauaguggaccggggcgaucguuccggguacagcggaaucuucucuguagagggcaaaucauguauuaaccgcugcuuuuauguugaacugaucagagguaggaaggaggaaaccgaggugcuauggacaaguaauagcaucgucguguucugugggacuuccggcaccuacggaacaggcucuuggccugacggggccgaucucaacauuaugccaauauga

SEQ ID NO: 152876 - RNA, 1410 nt, Artificial Sequence; identical to SEQ ID NO: 151931
  derived and/or modified CDS sequence (opt3) from neuraminidase__InfluenzaA__AHL96991

SEQ ID NO: 152877 - RNA, 1410 nt, Artificial Sequence; identical to SEQ ID NO: 150194
  derived and/or modified CDS sequence (opt3) from neuraminidase__InfluenzaA__AHL97003

SEQ ID NO: 152878 - RNA, 1410 nt, Artificial Sequence
  derived and/or modified CDS sequence (opt3) from neuraminidase__InfluenzaA__AHL97015
augaaccccaaucagaagaucauuaccauaggcagcgugucccugacaaucucuacuauuugcuucuuuaugcaaaucgccauucucaucacgaccgucacacuucacuucaaacaguacgaguuuaacucaccuccaaauaaccagguuaugcugugugaaccgacuauaaucgagagaaauauuaccgaaaucguguauuugacaaacaccacuauugagaaggaaaucugccccaaaccugcugaguacaggaauuggaguaagccacagugugggauaacaggauucgcacccuuuagcaaagacaacuccauucgguuaucugccgguggcgauaucuggguaacccgcgagccuuaugugucgugcgacccagauaaguguuaccaauucgcgcuggggcagggaacgacucuaaauaacguccauucaaauaacaccgugcgagaccguacacccuauagaacucuccugaugaaugaacuuggcguuccuuuucaccuggguaccaaacaggugugcauugcuuggagcaguuccucuugucaugaugggaaggccugguugcacgucugcaucacaggagacgauaagaacgcaaccgccagcuucaucuacaauggcaggcucguggacuccguaguuucauggaguaaagagauucugcggacgcaggaaagcgagugugugugcauaaacggcacuuguacagucgugaugaccgaugggucugcuuccggaaaggcagacacuaaaauccuguuuauugaggaagguaagaucgugcauacaucaacccucagcggcagugcccaacacgucgaggaaugcucuugcuauccacgcuacccggggguuagaugugugugcagggauaacuggaagggauccaaucggcccauaguagacauuaacaucaaagaucacagcaucgugucgucuuacgucuguuccggcuuagugggugacacgccucgcaagaaugacucaaguagcuccucucauugccuggauccaaacaaugaggaagggggacacggcguuaaaggcugggcuuucgacgaugggaacgacguguggaugggacgaaccauuaaugagacaagcagacuugguuaugagacuuuuaaggucaucgaaggcuggucaaaccccaaaaguaaguugcagauuaauaggcagauaaucguggaucguggggaccgguccggauacagcggcauuuucucuguagaggguaaaucauguaucaaccgcugcuuuuauguugaacugaucagagggaggaaggaggaaaccgaggugcuauggacaaguaauagcauugucguguucuguggcacuuccggaaccuacggcacagggucuuggccugauggagccgaccucaaccugaugccaauauga

SEQ ID NO: 152879 - RNA, 1410 nt, Artificial Sequence; identical to SEQ ID NO: 150194
  derived and/or modified CDS sequence (opt3) from neuraminidase__InfluenzaA__AHL97027

SEQ ID NO: 152880 - RNA, 1410 nt, Artificial Sequence
  derived and/or modified CDS sequence (opt3) from neuraminidase__InfluenzaA__AHL97039
augaaccccaaucagaagaucauuaccauaggcagcgugucccugacaaucucuacuauuugcuucuuuaugcagaucgccauucucaucacgaccgucacacuucacuucaaacaguacgaguuuaacucaccuccaaauaaccagguuaugcugugugaaccgacuauaaucgagagaaauauuaccgaaaucguguauuugacaaacaccacuauugagaaggaaaucugccccaaaccugcugaguacaggaauuggaguaagccacagugugggauaacaggauucgcacccuuuagcaaagacaacuccauucgguuaucugccgguggcgauaucuggguaacccgcgagccuuaugugucgugcgacccagauaaguguuaccaauucgcgcuggggcagggaacgacucuaaauaacguccauucaaauaacaccgugcgagaccguacacccuauagaacucuccugaugaaugaacuuggcguuccuuuucaccuggguaccaaacaggugugcauugcuuggagcaguuccucuugucaugaugggaaggccugguugcacgucugcaucacaggagacgauaagaacgcaaccgccagcuucaucuacaauggcaggcucguggacuccguaguuucauggaguaaagagauucugcggacgcaggaaagcgagugugugugcauaaacggcacuuguacagucgugaugaccgaugggaacgcuucuggaaaggcagacacuaaaauccuguuuauugaggaagguaagaucgugcauacauccacccucucaggcagcgcccaacacgucgaggaaugcaguugcuauccacgcuacccggggguuagaugugugugcagggauaauuggaagggaucuaaccggcccauaguagacauuaauaucaaagauuacuccaucgugagcucguaugucuguucuggcuuagugggugacacgccucgcaagaacgacuccucaaguagcucccacugccuggauccaaauaacgaggaagggggacauggcguuaaaggcugggcuuucgacgaugggaaugacguguggaugggacgaaccauuaacgagacaucuagacuugguuacgagacuuuuaaggucaucgaaggcuggagcaaucccaaaucaaaguugcagauuaacaggcaagugauaguagaucguggggaccggaguggauauuccggcaucuucagcguugaggguaaaucuuguauuaaucgcugcuuuuacguggaacugaucagagggaggaaggaggaaaccgagguccuauggacaucaaacaguaucguggucuucuguggcacuagcggaaccuauggcacaggguccuggccugauggagccgaccucaaucugaugccaauuuga

SEQ ID NO: 152881 - RNA, 1410 nt, Artificial Sequence; identical to SEQ ID NO: 150194
  derived and/or modified CDS sequence (opt3) from neuraminidase__InfluenzaA__AHL97051

SEQ ID NO: 152882 - RNA, 1410 nt, Artificial Sequence
  derived and/or modified CDS sequence (opt3) from neuraminidase__InfluenzaA__AHL97063
augaaccccaaucagaagaucauuaccauaggcagcgugucccugacaaucucuacuauuugcuucuuuaugcagaucgccauucucaucacgaccgucacacuucacuucaaacaguacgaguuuaacucaccuccaaauaaccagguuaugcugugugaaccgacuauaaucgagagaaauauuaccgaaaucguguauuugacaaacaccacuauugagaaggaaaucugccccaaaccugcugaguacaggaauuggaguaagccacagugugggauaacaggauucgcacccuuuagcaaagacaacuccauucgguuaucugccgguggcgauaucuggguaacccgcgagccuuaugugucgugcgacccagauaaguguuaccaauucgcgcuggggcagggaacgacucuaaauaacguccauucaaauaacaccgugcgagaccguacacccuauagaacucuccugaugaaugaacuuggcguuccuuuucaccuggguaccaaacaggugugcauugcuuggagcaguuccucuugucaugaugggaaggccugguugcacgucugcaucacaggagacgauaagaacgcaaccgccagcuucaucuacaauggcaggcucguggacuccguaguuucauggaguaaagagauucugcggacgcaggaaagcgagugugugugcauaaacggcacuuguacagucgugaugaccgaugggucugcuuccggaaaggcagacacuaaaauccuguuuauugaggaagguaagaucgugcauacaucaacccucagcggcagugcccaacacgucgaggaaugcucuugcuauccacgcuacccggggguuagaugugugugcagggauaacuggaagggauccaaucggcccauaguagacauuaacaucaaagaucacagcaucgugucgucuuacgucuguuccggcuuagugggugacacgccucgcaagaaugacucaaguagcuccucucauugccuggggccaaacaaugaggaaggaggccacggcguuaaagggugggcuuucgaugacggaaacgauguguggaugggucgaaccauuaaugagacaagcagacuuggcuaugagacuuuuaaggucaucgacggguggucaaaccccaaaaguaaguugcagauuaauaggcaagugauaguagaucggggagaccguuccggcuacagcgguaucuucucuguugaagggaaaucauguauuaaccgcugcuuuuauguggagcugaucagaggcaggaaggaagagaccgaaguccuauggacaaguaauagcaucguggucuucuguggaacuuccggcaccuacgggacaggaucuuggccugauggugccgaccucaaccugaugccaauuuga

SEQ ID NO: 152883 - RNA, 1410 nt, Artificial Sequence; identical to SEQ ID NO: 150194
  derived and/or modified CDS sequence (opt3) from neuraminidase__InfluenzaA__AHL97075

SEQ ID NO: 152884 - RNA, 1410 nt, Artificial Sequence; identical to SEQ ID NO: 151919
  derived and/or modified CDS sequence (opt3) from neuraminidase__InfluenzaA__AHL97087

SEQ ID NO: 152885 - RNA, 1410 nt, Artificial Sequence; identical to SEQ ID NO: 151423
  derived and/or modified CDS sequence (opt3) from neuraminidase__InfluenzaA__AHL97099

SEQ ID NO: 152886 - RNA, 1410 nt, Artificial Sequence; identical to SEQ ID NO: 150194
  derived and/or modified CDS sequence (opt3) from neuraminidase__InfluenzaA__AHL97111

SEQ ID NO: 152887 - RNA, 1410 nt, Artificial Sequence
  derived and/or modified CDS sequence (opt3) from neuraminidase__InfluenzaA__AHL97123
augaaccccaaucagaagaucauuaccauaggcagcgugucccugacaaucucuacuauuugcuucuuuaugcagaucgccauucucaucacgaccgucacacuucacuucaaacaguacgaguuugacucaccuccaaacaaucagguuaugcugugugaaccgacuauaaucgagagaaacauuaccgaaaucguguauuugacaaauaccacuauugagaaggaaaucugccccaaaccugcugaguacaggaacuggaguaagccacagugugggauaacaggauucgcacccuuuagcaaagauaauuccauucgguuaucugccgguggcgacaucuggguaacccgcgagccuuaugugucgugcgauccagacaaguguuaccaauucgcgcuggggcagggaacgacucuaaacaauguccauucaaacaauaccgugcgagaucguacacccuauagaacucuccugaugaacgaacuuggcguuccuuuucaccuggguaccaaacaggugugcauugcuuggagcaguuccucuugucaugacgggaaggccugguugcacgucugcaucacaggagaugacaagaaugcaaccgccagcuucaucuacaacggcaggcucguggauuccguaguuucauggaguaaagagauucugcggacgcaggaaagcgagugugugugcauaaauggcacuuguacagucgugaugaccgacgggucugcuuccggaaaggcagauacuaaaauccuguuuauugaggaagguaagaucgugcauacaucaacccucagcggcagugcccaacacgucgaggaaugcucuugcuauccacgcuacccggggguuagaugugugugcagggacaacuggaagggauccaaccggcccauaguagauauuaauaucaaagaccacagcaucgugucgucuuacgucuguuccggcuuagugggugacacgccucgccgaaacgauucaaguagcuccucucauugccuggacccaaauaacgaggaagggggacacggcguuaagggcugggcuuucgaugacgggaaugauguguggaugggaagaaccauuaacgagacaagcaggcuugguuaugagacuuuuaaagucaucgaaggcuggucaaaucccaagaguaaauugcagauuaaccggcaagugauaguagaccguggggaucgcuccggauacagcggcaucuucucuguugaggguaagucauguauuaauagaugcuuuuauguggaacugaucagggggcggaaagaggaaaccgagguccuauggacaaguaacagcaucguggucuucuguggcacuuccggaaccuacggcacagggucuuggccugacggagccgaucucaaucugaugccaauuuga

SEQ ID NO: 152888 - RNA, 1410 nt, Artificial Sequence; identical to SEQ ID NO: 151951
  derived and/or modified CDS sequence (opt3) from neuraminidase__InfluenzaA__AHL97135

SEQ ID NO: 152889 - RNA, 1410 nt, Artificial Sequence
  derived and/or modified CDS sequence (opt3) from neuraminidase__InfluenzaA__AHL97147
augaaccccaaucagaagaucauuaccauaggcagcgugucccugacaaucucuacuauuugcuucuuuaugcaaaucgccauucucaucacgaccgucacacuucacuucaaacaguacgaguuuaacucaccuccaaauaaccagguuaugcugugugaaccgacuauaaucgagagaaauauuaccgaaaucguguauuugacaaacaccacuauugagaaggaaaucugccccaaaccugcugaguacaggaauuggaguaagccacagugugggauaacaggauucgcacccuuuagcaaagacaacuccauucgguuaucugccgguggcgauaucuggguaacccgcgagccuuaugugucgugcgacccagauaaguguuaccaauucgcgcuggggcagggaacgacucuaaauaacguccauucaaauaacaccgugcgagaccguacacccuauagaacucuccugaugaaugaacuuggcguuccuuuucaccuggguaccaaacaggugugcauugcuuggagcaguuccucuugucaugaugggaaggccugguugcacgucugcaucacaggagacgauaagaacgcaaccgccagcuucaucuacaauggcaggcucguggacuccguaguuucauggaguaaagagauucugcggacgcaggaaagcgagugugugugcauaaacggcacuuguacagucgugaugaccgaugggucugcuuccggaaaggcagacacuaaaauccuguuuauugaggaagguaagaucgugcauacaucaacccucagcggcagugcccaacacgucgaggaaugcucuugcuauccacgcuacccggggguuagaugugugugcagggauaacuggcggggauccaaucgccccauaguagacauuaacaucaaggaucacagcaucgugucgucuuacgucuguuccggcuuagugggugacacgccucggaaaaaugacucaaguagcuccucucauugccuggauccaaacaaugaggaagggggacacggcguuaagggcugggcuuucgacgaugggaacgacguguggaugggaagaaccauuaaugagacaagcaggcuugguuaugagacuuuuaaagucaucgaaggcuggucaaaccccaagaguaaauugcagauuaaucgacaggugauaguagaucguggggaccgcuccggauacagcggcaucuucucuguugaggguaagucauguauuaacagaugcuuuuauguggaacugaucagggggcggaaagaggaaaccgagguccuauggacaaguaauagcaucguggucuucuguggcacuuccggaaccuacggcacagggucuuggccugauggagccgaccucaaccugaugccaauuuga

SEQ ID NO: 152890 - RNA, 1410 nt, Artificial Sequence; identical to SEQ ID NO: 150194
  derived and/or modified CDS sequence (opt3) from neuraminidase__InfluenzaA__AHL97159

SEQ ID NO: 152891 - RNA, 1410 nt, Artificial Sequence; identical to SEQ ID NO: 150194
  derived and/or modified CDS sequence (opt3) from neuraminidase__InfluenzaA__AHL97171

SEQ ID NO: 152892 - RNA, 1410 nt, Artificial Sequence; identical to SEQ ID NO: 150194
  derived and/or modified CDS sequence (opt3) from neuraminidase__InfluenzaA__AHL97183

SEQ ID NO: 152893 - RNA, 1410 nt, Artificial Sequence; identical to SEQ ID NO: 150194
  derived and/or modified CDS sequence (opt3) from neuraminidase__InfluenzaA__AHL97195

SEQ ID NO: 152894 - RNA, 1410 nt, Artificial Sequence; identical to SEQ ID NO: 150194
  derived and/or modified CDS sequence (opt3) from neuraminidase__InfluenzaA__AHL97207

SEQ ID NO: 152895 - RNA, 1410 nt, Artificial Sequence; identical to SEQ ID NO: 150194
  derived and/or modified CDS sequence (opt3) from neuraminidase__InfluenzaA__AHL97219

SEQ ID NO: 152896 - RNA, 1410 nt, Artificial Sequence
  derived and/or modified CDS sequence (opt3) from neuraminidase__InfluenzaA__AHL97231
augaaccccaaucagaagaucauuaccauaggcagcgugucccugacaaucucuacuauuugcuucuuuaugcagaucgccauucucaucacgaccgucacacuucacuucaaacaguacgacuuuaacucaccuccaaauaaccagguuaugcugugugagccgacuauaaucgaaagaaauauuaccgagaucguguauuugacaaacaccacuauugaaaaggagaucugccccaaaccugcugaauacaggaauuggaguaagccacagugugggauaacaggauucgcacccuuuagcaaagauaacuccauucgguuaucugccgguggcgacaucuggguaacccgcgagccuuaugugucgugcgauccagacaaguguuaccaauucgcgcuggggcagggaacgacucuaaauaacguccauucaaauaacaccgugcgagaucguacacccuauagaacucuccugaugaaugagcuuggcguuccuuuucaccuggguaccaaacaggugugcauugcuuggagcaguuccucuugucaugacgggaaggccugguugcacgucugcaucacaggagaugacaagaacgcaaccgccagcuucaucuacaauggcaggcucguggauuccguaguuucauggaguaaagaaauucugcggacgcaggagagcgaaugugugugcauaaacggcacuuguacagucgugaugaccgacgggucugcuuccggaaaggcagauacuaaaauccuguuuauugaggaggguaagaucgugcauacaucaacccucagcggcagugcccaacacgucgaagagugcucuugcuauccacgcuacccggggguuagaugugugugcagggacaacuggaagggauccaaucggcccauaguagauauuaacaucaaagaccacagcgugaucucgucuuacgucuguuccggcuuagugggugacacgccucgcaagaaugauucaaguagcuccucucauugccuggacccaaacaaugaagaagggggacacggcguuaaaggcugggcuuucgaugacgggaacgauguguggaugggacgaaccauuaaugagacaagcagacuugguuaugagacuuuuaaggucaucggcggguggucaaaccccaaaaguaaguugcagauuaauaggcaagugauaguagaccggggagaucguuccggcuacagcgguaucuucucuguugaggggaaaucauguauuaaccgcugcuuuuauguggaacugaucagaggcaggaaggaggaaaccgagguccuauggacaaguaauagcaucguggucuucuguggaacuuccggcaccuacgggacaggaucuuggccugacggugccgaucucaaccugaugccaauuuga

SEQ ID NO: 152897 - RNA, 1410 nt, Artificial Sequence
  derived and/or modified CDS sequence (opt3) from neuraminidase__InfluenzaA__AHL97243
augaaccccaaucagaagaucauuaccauaggcagcgugucccugacaaucucuacuauuugcuucuuuaugcagaucgccauucucaucacgaccgucacacuuaacuucaaacaguacgaguuuaauucaccuccaaacaaucagguuaugcugugugaaccgacuauaaucgagagaaacauuaccgaaaucguguauuugacaaauaccacuauugagaaggaaaucugccccaaaccugcugaguacaggaacuggaguaagccacagugugggauaacaggauucgcacccuuuagcaaagacaauuccauucgguuaucugccgguggcgauaucuggguaacccgcgagccuuaugugucgugcgacccagauaaguguuaccaauucgcgcuggggcagggaacgacucuaaacaauguccacucaaacaauaccgugcgagaccguacacccuauagaacucuccugaugaacgaacuuggcguuccuuuucaucuggguaccaaacaggugugcauugcuuggagcaguuccucuugucacgaugggaaggccugguugcaugucugcaucacaggagacgauaagaaugcaaccgccagcuucaucuacaacggcaggcucguggacuccguaguuucauggaguaaagagauucugcggacgcaggaaagcgagugugugugcauaaacggcacuuguacagucgugaugaccgaugggucugcuuccggaaaggcagacacuaaaauccuguuuauugaggaagguaagaucgugcacacaucaacccucagcggcagugcccaacaugucgaggaaugcucuugcuauccacgcuacccggggguuagaugugugugcagggauaauuggaagggauccaaccggcccauaguagacauuaauaucaaagaucacagcaucgugucgucuuacgucuguuccggcuuagugggugacacgccucgcaagaacgacucaaguagcuccucucacugccuggauccaaauaacgaggaagggggacauggcguuaaaggcugggcuuucgacgaugggaaugacguguggaugggacgaaccauuaacgagacaagcagacuugguuaugagacuuuuaaggucaucgaaggcuggucaaaucccaaaaguaaguugcagauuaacaggcaagugauaguagaucguggggaccgguccggauacagcggcaucuucucuguugaggguaaaucauguauuaaucgcugcuuuuauguggaacugaucagagggaggaaggaggaaaccgagguccuauggacaaguaacagcaucguggucuucuguggcacuuccggaaccuacggcacagggucuuggccugauggagccgaccucaaucugaugccaauuuga

SEQ ID NO: 152898 - RNA, 1410 nt, Artificial Sequence; identical to SEQ ID NO: 151423
  derived and/or modified CDS sequence (opt3) from neuraminidase__InfluenzaA__AHL97255

SEQ ID NO: 152899 - RNA, 1410 nt, Artificial Sequence
  derived and/or modified CDS sequence (opt3) from neuraminidase__InfluenzaA__AHL97267
augaaccccaaucagaagaucauuaccauaggcagcgugucccugacaaucucuacuauuugcuucuuuaugcaaaucgccauucucaucacgaccgucacacuucacuucaaacaguacgaguuuaacucaccuccaaauaaccagguuaugcugugugaaccgacuauaaucgagagaaauauuaccgaaaucguguauuugacaaacaccacuauugagaaggaaaucugccccaaaccugcugaguacaggaauuggaguaagccacagugugggauaacaggauucgcacccuuuagcaaagacaacuccauucgguuaucugccgguggcgauaucuggguaacccgcgagccuuaugugucgugcgacccagauaaguguuaccaauucgcgcuggggcagggaacgacucuaaauaacguccauucaaauaacaccgcucgagaccguacacccuauagaacucuccugaugaaugaacuuggcgugccuuuucaccuggguaccaagcagguuugcauugccuggagcaguuccucuugucaugaugggaaagcaugguugcacgugugcaucacaggagacgauaagaacgccaccgcuagcuucaucuacaauggcaggcucgucgacuccgugguaucauggaguaaagagauucugcggacgcaggaaagcgaguguguuugcauaaacggcacuuguacaguggucaugaccgaugggucugcauccggaaaggccgacacuaaaauccuguuuauugaggaagguaagaucgugcauacaucaacccucagcggcagugcucaacacguggaggaaugcucuugcuauccacgcuacccgggggucagauguguuugcagggauaacuggaagggauccaaucggcccauaguggacauuaacaucaaagaucacagcaucguaucgucuuacguguguuccggcuuagucggugacacgccucgcaagaaugacucauucaguagcucccauugccuggauccaaacaaugaggaagggggacacggcgugaaaggcugggccuuugacgaugggaacgacguuuggaugggacgaaccauuaaugagacaucuagacuugguuaugagacuuucaaggugaucgaaggcuggagcaaccccaaaucaaaguugcagauuaauaggcaggucauaguggaucguggggaccggaguggauacuccggcaucuuuagcguagaggguaaaucuuguauuaaccgcugcuucuauguugaacugaucagagggaggaaggaggaaaccgaggugcuauggacaucaaauaguaucgucguguucuguggcacuagcggaaccuacggcacaggguccuggccugauggagcggaccucaaccugaugccaauuuga

SEQ ID NO: 152900 - RNA, 1410 nt, Artificial Sequence; identical to SEQ ID NO: 150194
  derived and/or modified CDS sequence (opt3) from neuraminidase__InfluenzaA__AHL97279

SEQ ID NO: 152901 - RNA, 1410 nt, Artificial Sequence; identical to SEQ ID NO: 152784
  derived and/or modified CDS sequence (opt3) from neuraminidase__InfluenzaA__AHL97291

SEQ ID NO: 152902 - RNA, 1410 nt, Artificial Sequence; identical to SEQ ID NO: 152772
  derived and/or modified CDS sequence (opt3) from neuraminidase__InfluenzaA__AHL97303

SEQ ID NO: 152903 - RNA, 1410 nt, Artificial Sequence
  derived and/or modified CDS sequence (opt3) from neuraminidase__InfluenzaA__AHL97339
augaaccccaaucagaagaucauuaccauaggcagcgugucccugacaaucucuacuauuugcuucuuuaugcaaaucgccauucucaucacgaccgucacacuucacuucaaacaguacgaguuugacucaccuccaaacaaucagguuaugcugugugaaccgacuauaaucgagagaaacauuaccgaaaucguguauuugacaaauaccacuauugagaaggaaaucugccccaaaccugcugaguacaggaacuggaguaagccacagugugggauaacaggauucgcacccuuuagcaaagauaauuccauucgguuaucugccgguggcgacaucuggguaacccgcgagccuuaugugucgugcgauccagacaaguguuaccaauucgcgcuggggcagggaacgacucuaaacaauguccauucaaacaauaccgugcgagaucguacaagcuauagaacucuccugaugaacgaacuuggcguucccuuucaccuggguaccaaacaggugugcauugcuuggaguuccucuagcugucaugacgggaaggccugguugcacgucugcaucacaggagaugacaagaaugcaaccgccuccuucaucuacaacggcaggcucguggauucaguaguuaguuggagcaaagagauucugcggacgcaggaaucugagugugugugcauaaauggcacuuguacagucgugaugaccgacggguccgcuucaggacgcgcagauacuaagauccuguuuauugaggaagguaaaaucgugcauacaagcacccucaguggcucugcccaacacgucgaggaaugcuccugcuauccuagauacccagggguuaggugugugugccgggacaacuggaagggaagcaaccgcccgauaguagauauuaauaucaaggaccacucgaucgugucuuccuacgucuguucaggcuuagugggugacacgccccggaaaaacgauaguagcuccucuagccauugccuggacccuaauaacgaggaagggggacacggcguuaagggcugggcuuucgaugacgggaaugauguguggaugggaagaaccauuaacgagacaucaaggcuugguuaugagacuuuuaaagucaucgaaggcuggaguaauccaaaguccaaauugcagauuaaccgacaggugauaguagaccguggggaucgcagcggauacucuggcaucuucucaguugaggguaagaguuguauuaauagaugcuuuuauguggaacugaucagggggcggaaagaggaaaccgagguccuauggacaagcaacuccaucguggucuucuguggcacuucuggaaccuacggcacagggucguggcccgacggagccgaucucaaucugaugccuauuuga

SEQ ID NO: 152904 - RNA, 1410 nt, Artificial Sequence; identical to SEQ ID NO: 151919
  derived and/or modified CDS sequence (opt3) from neuraminidase__InfluenzaA__AHL97351

SEQ ID NO: 152905 - RNA, 1410 nt, Artificial Sequence; identical to SEQ ID NO: 152784
  derived and/or modified CDS sequence (opt3) from neuraminidase__InfluenzaA__AHL97363

SEQ ID NO: 152906 - RNA, 1410 nt, Artificial Sequence; identical to SEQ ID NO: 150194
  derived and/or modified CDS sequence (opt3) from neuraminidase__InfluenzaA__AHL97387

SEQ ID NO: 152907 - RNA, 1410 nt, Artificial Sequence
  derived and/or modified CDS sequence (opt3) from neuraminidase__InfluenzaA__AHL97399
augaaccccaaucagaagaucauuaccauaggcagcgugucccugacaaucucuacuauuugcuucuuuaugcagaucgccauucucaucacgaccgucacacuucacuucaaacaguacgaguuuaacucaccuccaaauaaccagguuaugcugugugaaccgacuauaaucgagagaaauauuaccgaaaucauguauuugacaaacaccacuauugagaaggaaaucugccccaaaccugcugaguacaggaauuggaguaagccacagugugggauaacaggauucgcacccuuuagcaaagacaacuccauucgguuaucugccgguggcgauaucugggugacccgcgagccuuauguaucgugcgacccagauaaguguuaccaauucgcgcuggggcagggaacgacucuaaauaacaugcauucaaauaacaccgugcgagaccguacacccuauagaacucuccugaugaaugaacuuggcgucccuuuucaccuggguaccaaacaggugugcauugcuuggagcaguuccucuugucaugaugggaaggccugguugcacguuugcaucacaggagacgauaagaacgcaaccgccagcuucaucuacaauggcaggcucguggacuccgucgugucauggaguaaagagauucugcggacgcaggaaagcgaguguguaugcauaaacggcacuuguacaguugugaugaccgaugggucugcuuccggaaaggcagacacuaaaauccuguuuauugaggaagguaagaucguccauacaucaacccucagcggcagugcccaacacguggaggaaugcucuugcuauccacgcuacccgggggugagaugugucugcagggauaacuggaagggauccaaucggcccauaguugacauuaacaucaaagaucacagcaucgugucgucuuacguauguuccggcuuagugggugacacgccucgcaagaaugacucaaguagcuccucucauugccuggauccaaacaaugaggaagggggacacggcgucaaaggcugggcuuucgacgaugggaacgacguguggaugggacgaaccauuaaugagacaagcagacuugguuaugagacuuuuaagguuaucgaaggcuggucaaaccccaaaaguaaguugcagauuaauaggcaagugauagucgaucguggggaccgguccggauacagcggcaucuucucuguggagggucgcucauguauuaacagaugcuuuuauguagaacugaucagggggcggaaagaggaaaccgagguucuauggacaaguaauagcaucguggucuucuguggcacuuccggaaccuacggcacagggucuuggccugauggagccgaccucaaccugaugccaauuuga

SEQ ID NO: 152908 - RNA, 1410 nt, Artificial Sequence; identical to SEQ ID NO: 151423
  derived and/or modified CDS sequence (opt3) from neuraminidase__InfluenzaA__AHL97411

SEQ ID NO: 152909 - RNA, 1410 nt, Artificial Sequence
  derived and/or modified CDS sequence (opt3) from neuraminidase__InfluenzaA__AHL97423
augaaccccaaucagaagaucauuaccauaggcagcgugucccugacaaucucuacuauuugcuucuuuaugcaaaucgccauucucaucacgaccgucacacuucacuucaaacaguacgaguuuaacucaccuccaaauaaccagguuaugcugugugaaccgacuauaaucgagagaaauauuaccgaaaucguguauuugacaaacaccacuauugagaaggaaaucugccccaaaccugcugaguacaggaauuggaguaagccacagugugggauaacaggauucgcacccuuuagcaaagacaacuccauucgguuaucugccgguggcgauaucuggguaacccgcgagccuuaugugucgugcgacccagauaaguguuaccaauucgcgcuggggcagggaacgacucuaaauaacguccauucaaauaacaccgugcgagaccguacacccuauagaacucuccugaugaaugaacuuggcguuccuuuucaccuggguaccaaacaggugugcauugcuuggagcaguuccucuugucaugaugggaaggccugguugcacgucugcaucacaggagacgauaagaacgcaaccgccagcuucaucuacaauggcaggcucguggacuccguaguuucauggaguaaagagauucugcggacgcaggaaagcgagugugugugcauaaacggcacuuguacagucgugaugaccgaugggucugcuuccggaaaggcagacacuaaaauccuguuuauugaggaagguaagaucgugcauacaucaacccucagcggcagugcccaacacgucgaggaaugcucuugcuauccacgcuacccggggguuagaugugugugcagggauaacuggaagggauccaaucggcccauaguagacauuaacaucaaagaucacagcaucgugucgucuuacgucuguuccggcuuagugggugacacgccucgcaagaaugacucaaguagcuccucucauugccuggauccaaacaaugaggaagggggacacggcguuaaaggcugggcuuucgacgaugggaacgacauguggaugggacgaaccauuaaugagacaagcagacuugguuaugagacuuuuaaggugaucgaaggcuggucaaaccccaaaaguaaguugcagauuaauaggcaggucauaguggaucguggggaccgguccggauacagcggcaucuucucuguagaggguaaaucauguauuaaccgcugcuuuuauguugaacugaucagagggaggaaggaggaaaccgaggugcuauggacaaguaauagcaucgucguguucuguggcacuuccggaaccuacggcacagggucuuggccugauggagccgaccucaaccugaugccaauuuga

SEQ ID NO: 152910 - RNA, 1410 nt, Artificial Sequence
  derived and/or modified CDS sequence (opt3) from neuraminidase__InfluenzaA__AHL97447
augaaccccaaucagaagaucauuaccauaggcagcgugucccugacaaucucuacuauuugcuucuuuaugcagaucgccauucucaucacgaccgucacacuucacuucaaacaguacgaguuuaacucaccuccaaauaaccagguuaugcugugugaaccgacuauaaucgagagaaauauuaccgaaaucguguauuugacaaacaccacuauugagaaggaaaucugccccaaaccugcugaguacaggaauuggaguaagccacagugugggauaacaggauucgcacccuuuagcaaagacaacuccauucgguuaucugccgguggcgauaucuggguaacccgcgagccuuaugugucgugcgacccagauaaguguuaccaauucgcgcuggggcagggaacgacucuaaauaacguccauucaaauaacaccgugcgagaccguacacccuauagaacucuccugaugaaugaacuuggcguuccuuuucaccuggguaccaaacaggugugcauugcuuggagcaguuccucuugucaugaugggaaggccugguugcacgucugcaucacaggagacgauaagaacgcaaccgccagcuucaucuacaauggcaggcucguggacuccguaguuucauggaguaaagagauucugcggacgcaggaaagcgagugugugugcauaaacggcacuuguacagucgugaugaccgaugggucugcuuccggaaaggcagacacuaaaauccuguuuauugaggaagguaagaucgugcauacaucaacccucagcggcagugcccaacacgucgaggaaugcucuugcuauccacgcuacccggggguuagaugugugugcagggauaacuggaagggauccaaucggcccauaguagacauuaacaucaaagaucacagcaucgugucgucuuacgucuguuccggcuuagugggugacacgccucgcaagaaugacucauucaguagcucccauugccuggauccaaacaaugaggaagggggacacggcguuaaaggcugggcuuuugacgaugggaacgacguguggaugggacgaaccauuaaugagacaucuagacuugguuaugagacuuucaaggucaucgaaggcuggagcaaccccaaaucaaaguugcagauuaauaggcaagugauaguagaucguggggaccggaguggauacuccggcaucuuuagcguugaggguaaaucuuguauuaaccgcugcuucuauguggaacugaucagagggaggaaggaggaaaccgagguccuauggacaucaaauaguaucguggucuucuguggcacuagcggaaccuacggcacaggguccuggccugauggagccgaccucaaccugaugccaauuuga

SEQ ID NO: 152911 - RNA, 1410 nt, Artificial Sequence; identical to SEQ ID NO: 150194
  derived and/or modified CDS sequence (opt3) from neuraminidase__InfluenzaA__AHL97459

SEQ ID NO: 152912 - RNA, 1410 nt, Artificial Sequence; identical to SEQ ID NO: 152784
  derived and/or modified CDS sequence (opt3) from neuraminidase__InfluenzaA__AHL97471

SEQ ID NO: 152913 - RNA, 1410 nt, Artificial Sequence; identical to SEQ ID NO: 151919
  derived and/or modified CDS sequence (opt3) from neuraminidase__InfluenzaA__AHL97483

SEQ ID NO: 152914 - RNA, 1410 nt, Artificial Sequence; identical to SEQ ID NO: 150194
  derived and/or modified CDS sequence (opt3) from neuraminidase__InfluenzaA__AHL97496

SEQ ID NO: 152915 - RNA, 1410 nt, Artificial Sequence; identical to SEQ ID NO: 150194
  derived and/or modified CDS sequence (opt3) from neuraminidase__InfluenzaA__AHL97508

SEQ ID NO: 152916 - RNA, 1410 nt, Artificial Sequence
  derived and/or modified CDS sequence (opt3) from neuraminidase__InfluenzaA__AHL97520
augaaccccaaucagaagaucauuaccauaggcagcgugucccugacaaucucuacuauuugcuucuuuaugcaaaucgccauucucaucacgaccgucacacuucacuucaaacaguacgaguuuaacucaccuccaaauaaccagguuaugcugugugaaccgacuauaaucgagagaaauauuaccgaaaucguguauuugacaaacaccacuauugagaaggaaacaugccccaaaccugcugaguacaggaauuggaguaagccacagugugggaucaccggauucgcacccuuuagcaaagacaacuccauacgguuaucugccgguggcgauauuuggguaacgcgcgagccuuaugugucgugcgggccagacaaguguuaccaauucgcgcugggacagggcacuacccuaaauaacaugcauucaaauaacacaguccgagaucguacucccuauagaacccuccugaugaaugaacuuggugugccuuuucaccuggggacaaagcagguuugcaucgcuuggagcaguuccucuugucaugacggaaaagccugguugcacgugugcauuaccggcgaugacaagaacgcaacggccagcuucaucuacaauggcaggcucgucgauuccgugguaucauggaguaaagagauccugcggacucaggaaagcgaguguguuugcauuaacgggacauguaccguggucaugacugacggaucugcuuccgguaaggcagauacaaaaauacuguuuaucgaggaaggcaagauugugcauaccucaacgcucagcgggagugcccaacacguggaggaaugcucuugcuauccacgcuacccgggagucagauguguuugcagggacaacuggaagggcuccaaucggcccaucguggauauaaacauuaaagaccacagcaucguaucgucuuacguguguuccgguuuagucggggauaccccucgcaagaaugacucaaguagcuccucucauugccuggacccaaacaaugaggaaggaggccacggcgugaaagggugggcuuucgaugacggaaacgauguuuggaugggucgaacaaucaaugagacuagcagacuuggcuaugagaccuuuaaggugauugaaggguggucaaaccccaaaaguaaguugcagaucaauaggcaggucauuguggaccggggagaucguuccggcuacagcgguauauucucuguagaggggaaaucauguaucaaccgcugcuuuuauguugaacugauuagaggcaggaaggaggaaacagaggugcuauggaccaguaauagcaucgucguguucuguggaacuuccggcacauacgggaccggaucuuggccugacggugccgaucucaaccugaugccaaucuga

SEQ ID NO: 152917 - RNA, 1410 nt, Artificial Sequence; identical to SEQ ID NO: 150194
  derived and/or modified CDS sequence (opt3) from neuraminidase__InfluenzaA__AHL97532

SEQ ID NO: 152918 - RNA, 1410 nt, Artificial Sequence; identical to SEQ ID NO: 150194
  derived and/or modified CDS sequence (opt3) from neuraminidase__InfluenzaA__AHL97544

SEQ ID NO: 152919 - RNA, 1410 nt, Artificial Sequence; identical to SEQ ID NO: 151919
  derived and/or modified CDS sequence (opt3) from neuraminidase__InfluenzaA__AHL97556

SEQ ID NO: 152920 - RNA, 1410 nt, Artificial Sequence
  derived and/or modified CDS sequence (opt3) from neuraminidase__InfluenzaA__AHL97568
augaaccccaaucagaagaucauuaccauaggcagcgugucccugacaaucucugccauuugcuucuuuaugcaaaucgcuauucucaucacuacggucacccuuagauucaaacaguacgaguuuaacucaccuccaaauaaccagguuaugcugugugaaccgacaauaaucgagaggaauauuacugaaaucguguauuugaccaacacaaccauugagaaggaaaucugccccaaaccugcagaguaccggaauuggaguaagccacagugugacauaacuggguucgcccccuuuagcaaagauaacuccauucgcuuaucugcgggaggugacaucuggguaacacgagagccuuaugugucgugcgauccagacaaguguuaccaauucgcucugggccaggggaccacgcuaacuaauguccacucaaacaauaccgugcgugauagaacacccuauaggacucuccugaugaacgaacuuggaguuccuuuucaucugggcaccaaacaggugugcauugccuggagcaguuccucuugucacgacgguaaggcaugguugcaugucugcaucacaggggaugacaagaaugccaccgcuagcuucaucuacaacggacggcucguggauuccguaguuucauggaguaaagagauucugcgcacgcaggaaagcgagugugugugcauaaauggcacuuguacagucgugaugaccgacggcucugcauccgggaaggccgauacuaaaauccuguuuauugaggaaggaaagaucgugcacacaucaacccucagcgguagugcucaacaugucgaggaaugcucuugcuauccaagauacccgggcguuaggugugugugccgggacaacuggaagggguccaaccgccccauaguagauauuaauaucaaagaccacagcaucgugucgcgauacgucuguucuggauuagugggcgacacgccuagaaagaacgauuccucaaguagcucccacugccuggacccaaauaacgaggaaggugggcauggaguuaaaggcugggccuucgaugacggcaaugauguguggauggggaggaccauuaacgagacaucucggcuuggauaugagacuuuuaaggucaucgaagguuggagcaaucccaaaucaaaguugcagauuaaccgucaggugauaguagaccgcggcgauagaaguggguacuccggaaucuucagcguugagggcaaaucuuguauuaauaggugcuuuuauguggaacugauccggggucgaaaggaggaaaccgagguccuauggacaucaaacaguaucguggucuucugugggacuagcggcaccuacggaacaggcuccuggccugacggggcggaucucaaucugaugccaauuuga

SEQ ID NO: 152921 - RNA, 1410 nt, Artificial Sequence; identical to SEQ ID NO: 152834
  derived and/or modified CDS sequence (opt3) from neuraminidase__InfluenzaA__AHL97580

SEQ ID NO: 152922 - RNA, 1410 nt, Artificial Sequence
  derived and/or modified CDS sequence (opt3) from neuraminidase__InfluenzaA__AHL97592
augaaccccaaucagaagaucauuaccauaggcagcgugucccugacaaucucuacuauuugcuucuuuaugcaaaucgccauucucaucacgaccgucacacuucacuucaaacaguacgaguuuaacucaccuccaaauaaccagguuaugcugugugaaccgacuauaaucgagagaaauauuaccgaaaucguguauuugacaaacaccacuauugagaaggaaaucugccccaaaccugcugaguacaggaauuggaguaagccacagugugggauaacaggauucgcacccuuuagcaaagacaacuccguacgguuaucugccgguggcgauauuugggugacccgcgagccuuaugucucgugcgacccagauaaguguuaccaauucgcgcuggggcagggaacgacucuaaauaacgugcauucaaauaacaccguucgagaccguacacccuauagaacucuccugaugaaugaacuuggcgugccuuuucaccuggguaccaagcaggucugcaucgcuuggagcaguuccucuugucaugaugggaaagccugguugcacgugugcauuacaggagacgauaagaacgcaaccgccagcuucaucuacaauggcaggcucguagacuccguugugucauggaguaaagagauccugcggacgcaggaaagcgagugugucugcauuaacggcacuuguacaguggugaugaccgaugggucugcuuccggaaaggcagacacuaaaauacuguuuaucgaggaagguaagauuguccauacaucaacccucagcggcagugcccaacacguugaggaaugcucuugcuauccacgcuacccgggggugagauguguaugcagggauaacuggaagggauccaaucggcccaucguggacauaaacauuaaagaucacagcaucgucucgucuuacguguguuccggcuuaguuggugacacgccucgcaagaaugacucaaguagcuccucucauugccuggggccaaacaaugaggaaggaggccacggcgugaaagggugggcuuucgaugacggaaacgaugucuggaugggucgaaccaucaaugagacaagcagaucaggcuaugagacuuuuaaggugauugaaggguggaguaaccccaaauccaaacuucagaucaauaggcagguaauuguugaccggggagaucguagcggcuacucugguauauucucaguggaggggaagaguuguaucaaccgcugcuuuuaugucgaauugauuagaggcaggaaggaggaaaccgaggugcuguggacaagcaauuccaucgucguguucuguggaacuucuggcaccuacgggacaggaucguggccugacggugccgaucuaaaccucaugccaaucuga

SEQ ID NO: 152923 - RNA, 1410 nt, Artificial Sequence; identical to SEQ ID NO: 150194
  derived and/or modified CDS sequence (opt3) from neuraminidase__InfluenzaA__AHL97604

SEQ ID NO: 152924 - RNA, 1410 nt, Artificial Sequence
  derived and/or modified CDS sequence (opt3) from neuraminidase__InfluenzaA__AHL97616
augaaccccaaucagaagaucauuaccauaggcagcgugucccugacaaucucuacuauuugcuucuuuaugcagaucgccauucucaucacgaccgucacacuucacuucaaacaguacgaguuuaacucaccuccaaauaaccagguuaugcugugugaaccgacuauaaucgagagaaauauuaccgaaaucguguauuugacaaacaccacuauugagaaggaaaucugccccaaaccugcugaguacaggaauuggaguaagccacagugugggauaacaggauucgcacccuuuagcaaagacaacuccauucgguuaucugccgguggcgauaucuggguaacccgcgagccuuaugugucgugcgacccagauaaguguuaccaauucgcgcuggggcagggaacgacucuaaauaacaugcauucaaauaacaccguccgagaccguacacccuauagaacucuccugaugaaugaacuuggcgugccuuuucaccuggguaccaagcagguuugcauugcuuggagcaguuccucuugucaugaugggaaagccugguugcacgugugcaucacaggagacgauaagaacgcaaccgccagcuucaucuacaauggcaggcucgucgacuccgugguaucauggaguaaagagguucugcggacgcaggaaagcgagugugugugcauuaacggcacuuguacagucgugaugaccgaugggucugcuuccggaaaggcagacacuaaaauacuguuuaucgaggaagguaagauugugcauacaucaacccucagcggcagugcccaacacgucgaggaaugcucuugcuauccacgcuacccggggguuagaugugugugcagggauaacuggaagggauccaaucggcccaucguagacauaaacauuaaagaucacagcaucgugucgucuuacgucuguuccggcuuagugggugacacgccucgcaagaaugacucaaguagcuccucucauugccuggauccaaacaaugaggaagggggacacggcguuaaaggcugggcuuucgacgaugggaacgacguguggaugggacgaaccaucaaugagacaagcagacuugguuaugagacuuuuaaggucauugaaggcuggucaaaccccaaaaguaaguugcagaucaauaggcaagugauuguagaucguggggaccgguccggauacagcggcauauucucuguugaggguaaaucauguaucaaccgcugcuuuuauguggaacugauuagagggaggaaggaggaaaccgagguccuauggacaaguaauagcaucguggucuucuguggcacuuccggaaccuacggcacagggucuuggccugauggagccgaccucaaccugaugccaaucuga

SEQ ID NO: 152925 - RNA, 1410 nt, Artificial Sequence; identical to SEQ ID NO: 152784
  derived and/or modified CDS sequence (opt3) from neuraminidase__InfluenzaA__AHL97628

SEQ ID NO: 152926 - RNA, 1410 nt, Artificial Sequence; identical to SEQ ID NO: 150194
  derived and/or modified CDS sequence (opt3) from neuraminidase__InfluenzaA__AHL97640

SEQ ID NO: 152927 - RNA, 1410 nt, Artificial Sequence; identical to SEQ ID NO: 151942
  derived and/or modified CDS sequence (opt3) from neuraminidase__InfluenzaA__AHL97652

SEQ ID NO: 152928 - RNA, 1410 nt, Artificial Sequence; identical to SEQ ID NO: 151942
  derived and/or modified CDS sequence (opt3) from neuraminidase__InfluenzaA__AHL97664

SEQ ID NO: 152929 - RNA, 1410 nt, Artificial Sequence; identical to SEQ ID NO: 151423
  derived and/or modified CDS sequence (opt3) from neuraminidase__InfluenzaA__AHL97676

SEQ ID NO: 152930 - RNA, 1410 nt, Artificial Sequence; identical to SEQ ID NO: 150194
  derived and/or modified CDS sequence (opt3) from neuraminidase__InfluenzaA__AHL97688

SEQ ID NO: 152931 - RNA, 1410 nt, Artificial Sequence; identical to SEQ ID NO: 151919
  derived and/or modified CDS sequence (opt3) from neuraminidase__InfluenzaA__AHL97700

SEQ ID NO: 152932 - RNA, 1410 nt, Artificial Sequence
  derived and/or modified CDS sequence (opt3) from neuraminidase__InfluenzaA__AHL97712
augaaccccaaucagaagaucauuaccauaggcagcgugucccugacaaucucuacuauuugcuucuuuaugcagaucgccauucucaucacgaccgucacacuucacuucaaacaguacgaguuuaacucaccuccaaauaaccagguuaugcugugugaaccgacuauaaucgagagaaauauuaccgaaaucguguauuugacaaacaccacuauugagaaggaaaucugccccaaaccugcugaguacaggaauuggaguaagccacagugugggauaacaggauucgcacccuuuagcaaagacaacuccauucgguuaucugccgguggcgauaucuggguaacccgcgagccuuaugugucgugcgacccagauaaguguuaccaauucgcgcuggggcagggaacgacucuaaauaacguccauucaaauaacaccgugcgagaccguacacccuauagaacucuccugaugaaugaacuuggcguuccuuuucaccuggguaccaaacaggugugcauugcuuggagcaguuccucuugucaugaugggaaggccugguugcacgucugcaucacaggagacgauaagaacgcaaccgccagcuucaucuacaauggcaggcucguggacuccguaguuucauggaguaaagagauucugcggacgcaggaaagcgagugugugugcauaaacggcacuuguacagucgugaugaccgaugggucugcuuccggaaaggcagacacuaaaauccuguuuauugaggaagguaagaucgugcauacaucaacccucagcggcagugcccaacacgucgaggaaugcucuugcuauccacgcuacccggggguuagaugugugugcagggauaacuggaagggauccaaucggcccauaguagacauuaacaucaaagaucacagcaucgugucgucuuacgucuguuccggcuuagugggugacacgccucgcaagaaugacucaaccaguagcucccauugccuggauccaaacaaugaggaagggggacacggcguuaaaggcugggcuuucgacgaugggaacgacguguggaugggacgaacaauuaaugagacuucuagacuugguuaugagaccuuuaaggucaucgaaggcuggagcaaccccaaaucaaaguugcagauuaauaggcaagugauaguagaucguggggaccggaguggauacuccggcaucuucagcguugaggguaaaucuuguauuaaccgcugcuuuuauguggaacugaucagagggaggaaggaggaaacagagguccuauggacuucaaauaguaucguggucuucuguggcaccagcggaacauacggcaccggguccuggccugauggagccgaccucaaccugaugccaauuuga

SEQ ID NO: 152933 - RNA, 1410 nt, Artificial Sequence; identical to SEQ ID NO: 151919
  derived and/or modified CDS sequence (opt3) from neuraminidase__InfluenzaA__AHL97724

SEQ ID NO: 152934 - RNA, 1410 nt, Artificial Sequence; identical to SEQ ID NO: 150194
  derived and/or modified CDS sequence (opt3) from neuraminidase__InfluenzaA__AHL97736

SEQ ID NO: 152935 - RNA, 1410 nt, Artificial Sequence
  derived and/or modified CDS sequence (opt3) from neuraminidase__InfluenzaA__AHL97760
augaaccccaaucagaagaucauuaccauaggcagcgugucccugacaaucucuacuauuugcuucuuuaugcagaucgccauucucaucacgaccgucacacuucacuucaaacaguacgaguuuaacucaccuccaaauaaccagguuaugcugugugaaccgacuauaaucgagagaaauauuaccgaaaucguguauuugacaaacaccacuauugagaaggaaaucugccccaaaccugcugaguacaggaauuggaguaagccacagugugggauaacaggauucgcacccuuuagcaaagacaacuccauucgguuaucugccgguggcgauaucuggguaacccgcgagccuuaugugucgugcgacccagauaaguguuaccaauucgcgcuggggcagggaacgacucuaaauaacguccauucaaauaacaccgugcgagaccguacacccuauagaacucuccugaugaaugaacuuggcguuccuuuucaccuggguaccaaacaggugugcauugcuuggagcaguuccucuugucaugaugggaaggccugguugcacgucugcaucacaggagacgaugagaacgcaaccgccagcuucaucuacaauggcaggcucguggacuccguaguuucauggaguaaggaaauucugcggacgcaggagagcgagugugugugcauaaacggcacuuguacagucgugaugaccgaugggucugcuuccggaaaagcagacacuaagauccuguuuauugaagaggguaaaaucgugcauacaucaacccucagcggcagugcccaacacgucgaagagugcucuugcuauccacgcuacccggggguuagaugugugugcagggauaacuggaagggauccaaucggcccauaguagacauuaacaucaaggaucacagcaucgugucgucuuacgucuguuccggcuuagugggugacacgccucgcaaaaaugacucaaguagcuccucucauugccuggauccaaacaaugaagaagggggacacggcguuaagggcugggcuuucgacgaugggaacgacguguggaugggacgaaccauuaaugagacaagcagacuugguuaugagacuuuuaaagucaucgagggcuggucaaaccccaagaguaaauugcagauuaauaggcaagugauaguagaucguggggaccgguccggauacagcggcaucuucucuguugaagguaagucauguauuaaccgcugcuuuuauguggagcugaucagagggaggaaagaagagaccgagguccuauggacaaguaauagcaucguggucuucuguggcacuuccggaaccuacggcacagggucuuggccugauggagccgaccucaaccugaugccaauuuga

SEQ ID NO: 152936 - RNA, 1410 nt, Artificial Sequence
  derived and/or modified CDS sequence (opt3) from neuraminidase__InfluenzaA__AHL97772
augaaccccaaucagaagaucauuaccauaggcagcgugucccugacaaucucuacuauuugcuucuuuaugcagaucgccauucucaucacgaccgucacacuucacuucaaacaguacgaguuuaacucaccuccaaauaaccagguuaugcugugugaaccgacuauaaucgagagaaauauuaccgaaaucguguauuugacaaacaccacuauugagaaggaaaucugccccaaaccugcugaguacaggaauuggaguaagccacagugugggauaacaggauucgcacccuuuagcaaagacaacuccauucgguuaucugccgguggcgauaucuggguaacccgcgagccuuaugugucgugcgacccagauaaguguuaccaauucgcgcuggggcagggaacgacucuaaauaacguccauucaaauaacaccgugcgagaccguacacccuauagaacucuccugaugaaugaacuuggcguuccuuuucaccuggguaccaaacaggugugcauugcuuggagcaguuccucuugucaugaugggaaggccugguugcacgucugcaucacaggagacgauaagaacgcaaccgccagcuucaucuacaauggcaggcucguggacuccguaguuucauggaguaaagagauucugcggacgcaggaaagcgagugugugugcauaaacggcacuuguacagucgugaugaccgaugggucugcuuccggaaaggcagacacuaaaauccuguuuauugaggaagguaagaucgugcauacaucaacccucagcggcagugcccaacacgucgaggaaugcucuugcuauccacgcuacccggggguuagaugugugugcagggauaacuggaagggauccaaucggcccauaguagacauuaacaucaaagaucacagcaucgugucgucuuacgucuguuccggcuuagugggugacacgccucgcaagaaugacucaaguagcuccucucauugccuggauccaaacaaugaggaagggggacacggcguuaaaggcugggcuuucgacgaugggaacgacguguggaugggacgaaccauuaaugagacaagcagacuugguuaugagacuuuuaaggucaucgaaggcuggucaaaccccaaaaguaaguugcagauuaauaggcaagugauaguagaucguggggaccgguccggauacagcggcaucuucucuguugaggguaaaucauguauuaaccgcugcuuuuauguggaacugaucagagggaggaaggaggaaaccgagguccuauggacaaguaauagcguggucguguucuguggcacuuccggaaccuacggcacagggucuuggccugauggagccgaccucaaccugaugccaaucuga

SEQ ID NO: 152937 - RNA, 1410 nt, Artificial Sequence; identical to SEQ ID NO: 151423
  derived and/or modified CDS sequence (opt3) from neuraminidase__InfluenzaA__AHL97784

SEQ ID NO: 152938 - RNA, 1410 nt, Artificial Sequence; identical to SEQ ID NO: 150194
  derived and/or modified CDS sequence (opt3) from neuraminidase__InfluenzaA__AHL97796

SEQ ID NO: 152939 - RNA, 1410 nt, Artificial Sequence; identical to SEQ ID NO: 150194
  derived and/or modified CDS sequence (opt3) from neuraminidase__InfluenzaA__AHL97808

SEQ ID NO: 152940 - RNA, 1410 nt, Artificial Sequence; identical to SEQ ID NO: 150194
  derived and/or modified CDS sequence (opt3) from neuraminidase__InfluenzaA__AHL97820

SEQ ID NO: 152941 - RNA, 1410 nt, Artificial Sequence
  derived and/or modified CDS sequence (opt3) from neuraminidase__InfluenzaA__AHL97832
augaaccccaaucagaagaucauuaccauaggcagcgugucccugacaaucucuacuauuugcuucuuuaugcagaucgccauucucaucacgaccgucacacuucacuucaaacaguacgaguuugacucaccuccaaacaaucagguuaugcugugugaaccgacuauaaucgagagaaacauuaccgaaaucguguauuugacaaauaccacuauugagaaggaaaucugccccaaaccugcugaguacaggaguuggagcaagccacagugugggauaacaggauucgcacccuuuuccaaagauaacucuauucgguuaucggccgguggcgacaucuggguaacccgcgagccuuaugugucaugcgauccagacaaguguuaccaauucgcgcuggggcagggaacgacucuaaauaacguccauagcaauaacaccgugcgagaucguacacccuauagaacucuccugaugaaugaacuuggcguuccuuuucaccuggguaccaaacaggugugcauugcuuggaguuccucuagcugucaugacgggaaggccugguugcacgucugcaucacaggagaugacaagaacgcaaccgccuccuucaucuacaauggcaggcucguggauucaguaguuaguuggagcaaagagauucugcggacgcaggaaucugagugugugugcauaaacggcacuuguacagucgugaugaccgacggguccgcuucaggaaaggcagauacuaaaauccuguuuauugaggaagguaagaucgugcauacaagcacccucaguggcucugcccaacacgucgaggaaugcuccugcuauccacgcuacccggggguuagaugugugugcagggacaauuggaagggaagcaaccggcccauaguagauauuaacaucaaagaccacucgaucgugucuuccuacgucuguucaggcuuagugggugacacgccucgcaagaaugauaguagcuccucuagccauugccuggacccaaacaaugaggaagggggacacggcguuaaaggcugggcuuucgaugacgggaacgauguguggaugggacgaaccauuaaugagacaucaagacuugguuaugagacuuuuaaggucaucgaaggcuggaguaaccccaaauccaaguugcagauuaauaggcaagugauaguagaccguggggaucggagcggauacucuggcaucuucucaguugaggguaaaaguuguauuaaccgcugcuuuuauguggaacugaucagagggaggaaggaggaaaccgagguccuauggacaagcaauuccaucguggucuucuguggcacuucuggaaccuacggcacagggucguggccugacggagccgaucucaaccugaugccaauuuga

SEQ ID NO: 152942 - RNA, 1410 nt, Artificial Sequence; identical to SEQ ID NO: 150194
  derived and/or modified CDS sequence (opt3) from neuraminidase__InfluenzaA__AHL97844

SEQ ID NO: 152943 - RNA, 1410 nt, Artificial Sequence; identical to SEQ ID NO: 152935
  derived and/or modified CDS sequence (opt3) from neuraminidase__InfluenzaA__AHL97856

SEQ ID NO: 152944 - RNA, 1410 nt, Artificial Sequence; identical to SEQ ID NO: 150194
  derived and/or modified CDS sequence (opt3) from neuraminidase__InfluenzaA__AHL97868

SEQ ID NO: 152945 - RNA, 1410 nt, Artificial Sequence; identical to SEQ ID NO: 151919
  derived and/or modified CDS sequence (opt3) from neuraminidase__InfluenzaA__AHL97880

SEQ ID NO: 152946 - RNA, 1410 nt, Artificial Sequence; identical to SEQ ID NO: 150194
  derived and/or modified CDS sequence (opt3) from neuraminidase__InfluenzaA__AHL97892

SEQ ID NO: 152947 - RNA, 1410 nt, Artificial Sequence; identical to SEQ ID NO: 150194
  derived and/or modified CDS sequence (opt3) from neuraminidase__InfluenzaA__AHL97904

SEQ ID NO: 152948 - RNA, 1410 nt, Artificial Sequence; identical to SEQ ID NO: 151931
  derived and/or modified CDS sequence (opt3) from neuraminidase__InfluenzaA__AHL97916

SEQ ID NO: 152949 - RNA, 1410 nt, Artificial Sequence; identical to SEQ ID NO: 150194
  derived and/or modified CDS sequence (opt3) from neuraminidase__InfluenzaA__AHL97928

SEQ ID NO: 152950 - RNA, 1410 nt, Artificial Sequence; identical to SEQ ID NO: 152910
  derived and/or modified CDS sequence (opt3) from neuraminidase__InfluenzaA__AHL97952

SEQ ID NO: 152951 - RNA, 1410 nt, Artificial Sequence; identical to SEQ ID NO: 150194
  derived and/or modified CDS sequence (opt3) from neuraminidase__InfluenzaA__AHL97964

SEQ ID NO: 152952 - RNA, 1410 nt, Artificial Sequence; identical to SEQ ID NO: 150194
  derived and/or modified CDS sequence (opt3) from neuraminidase__InfluenzaA__AHL97976

SEQ ID NO: 152953 - RNA, 1410 nt, Artificial Sequence; identical to SEQ ID NO: 150194
  derived and/or modified CDS sequence (opt3) from neuraminidase__InfluenzaA__AHL97988

SEQ ID NO: 152954 - RNA, 1410 nt, Artificial Sequence
  derived and/or modified CDS sequence (opt3) from neuraminidase__InfluenzaA__AHL98000
augaaccccaaucagaagaucauuaccauaggcagcgugucccugacaaucucuacuauuugcuucuuuaugcagaucgccauucucaucacgaccgucacacuucacuucaaacaguacgaguuuaacucaccuccaaauaaccagguuaugcugugugaaccgacuauaaucgagagaaauauuaccgaaaucguguauuugacaaacaccacuauugagaaggaaaucugccccaaaccugcugaguacaggaauuggaguaagccacagugugggauaacaggauucgcacccuuuagcaaagacaacuccauucgguuaucugccgguggcgauaucuggguaacccgcgagccuuaugugucgugcgacccagauaaguguuaccaauucgcgcuggggcagggaacgacucuaaauaacguccauucaaauaacaccgugcgagaccguacacccuauagaacucuccugaugaaugaacuuggcguuccuuuucaccuggguaccaaacaggugugcauugcuuggagcaguuccucuugucaugaugggaaggccugguugcacgucugcaucacaggagacgauaagaacgcaaccgccagcuucaucuacaauggcaggcucguggacuccguaguuucauggaguaaagagauucugcggacgcaugaaagcgagugugugugcauaaacggcacuuguacagucgugaugaccgaugggucugcuuccggaaaggcagacacuaaaauccuguuuauugaggaagguaagaucgugcacacaucaacccucagcggcagugcccagcacgucgaggaaugcucuugcuauccacgcuacccggggguuagaugugugugcagggauaacuggaagggauccaaucggcccauaguagacauuaacaucaaagaucauagcaucgugucgucuuacgucuguuccggcuuagugggugacacgccucgcaagaaagacucaaguagcuccucucacugccuggauccaaauaacgaggaagggggacauggcguuaagggcugggcuuucgacgaugggaaugacguguggaugggacgaaccauuaacgagacaagcagacuugguuaugagacuuuuaaagucaucgaaggcuggucaaaucccaagaguaaauugcaaauuaacaggcaagugauaguagaucguggggaccgguccggauacagcggcaucuucucuguugaggguaagucauguauuaaucgcugcuuuuauguggaacugaucagagggaggaaggaggaaaccgagguccuauggacaaguaacagcaucguggucuucuguggcacuuccggaaccuacggcacagggucuuggccugauggagccgaccucaaucugaugccaauuuga

SEQ ID NO: 152955 - RNA, 1410 nt, Artificial Sequence
  derived and/or modified CDS sequence (opt3) from neuraminidase__InfluenzaA__AHL98012
augaaccccaaucagaagaucauuaccauaggcagcgugucccugacaaucucuacuauuugcuucuuuaugcaaaucgccauucucaucacgaccgucacacuucacuucaaacaguacgaguuuaacucaccuccaaauaaccagguuaugcugugugaaccgacuauaaucgagagaaauauuaccgaaaucguguauuugacaaacaccacuauugagaaggaaaucugccccaaaccugcugaguacaggaauuggaguaagccacagugugggauaacaggauucgcacccuuuagcaaagacaacuccauucgguuaucugccgguggcgauaucuggguaacccgcgagccuuaugugucgugcgacccagauaaguguuaccaauucgcgcuggggcagggaacgacucuaaauaacguccauucaaauaacaccgugcgagaccguacacccuauagaacucuccugaugaaugaacuuggcguuccuuuucaccuggguaccaaacaggugugcauugcuuggagcaguuccucuugucaugaugggaaggccugguugcacgucugcaucacaggagacgauaagaacgcaaccgccagcuucaucuacaauggcaggcucguggacuccguaguuucauggaguaaagaggugcugcggacgcaggaaagcgagugugucugcauuaacggcacuuguacaguggugaugaccgaugggucugcuuccggaaaggcagacacuaaaauacuguuuaucgaggaagguaagauuguccauacaucaacccucagcggcagugcccaacacguugaggaaugcucuugcuauccacgcuacccgggggugagauguguaugcagggauaacuggaagggauccaaucggcccaucguggacauaaacauuaaagaucacagcaucgucucgucuuacguguguuccggcuuaguuggugacacgccucgcaagaaugacucaaguagcuccucucauugccuggauccaaacaaugaggaaggggaccacggagugaaaggcugggcuuucgaugacggcaacgaugucuggauggggcgaaccaucaaugagacaagcagacuuggauaugagacuuuuaaggugauugaagguuggucaaaccccaaaaguaaguugcagaucaauaggcagguaauuguugaccggggcgaucguuccggguacagcggaauauucucuguggagggcaaaucauguaucaaccgcugcuuuuaugucgaacugauuagagguaggaaggaggaaaccgaggugcuauggacaaguaauagcaucgucguguucugugggacuuccggcaccuacggaacaggcucuuggccugacggggccgaucucaaccugaugccaaucuga

SEQ ID NO: 152956 - RNA, 1410 nt, Artificial Sequence; identical to SEQ ID NO: 151931
  derived and/or modified CDS sequence (opt3) from neuraminidase__InfluenzaA__AHL98048

SEQ ID NO: 152957 - RNA, 1410 nt, Artificial Sequence; identical to SEQ ID NO: 151931
  derived and/or modified CDS sequence (opt3) from neuraminidase__InfluenzaA__AHL98060

SEQ ID NO: 152958 - RNA, 1410 nt, Artificial Sequence; identical to SEQ ID NO: 151931
  derived and/or modified CDS sequence (opt3) from neuraminidase__InfluenzaA__AHL98072

SEQ ID NO: 152959 - RNA, 1410 nt, Artificial Sequence; identical to SEQ ID NO: 150194
  derived and/or modified CDS sequence (opt3) from neuraminidase__InfluenzaA__AHL98084

SEQ ID NO: 152960 - RNA, 1410 nt, Artificial Sequence; identical to SEQ ID NO: 151931
  derived and/or modified CDS sequence (opt3) from neuraminidase__InfluenzaA__AHL98096

SEQ ID NO: 152961 - RNA, 1410 nt, Artificial Sequence; identical to SEQ ID NO: 150194
  derived and/or modified CDS sequence (opt3) from neuraminidase__InfluenzaA__AHL98119

SEQ ID NO: 152962 - RNA, 1410 nt, Artificial Sequence; identical to SEQ ID NO: 150194
  derived and/or modified CDS sequence (opt3) from neuraminidase__InfluenzaA__AHL98131

SEQ ID NO: 152963 - RNA, 1410 nt, Artificial Sequence; identical to SEQ ID NO: 150194
  derived and/or modified CDS sequence (opt3) from neuraminidase__InfluenzaA__AHL98143

SEQ ID NO: 152964 - RNA, 1410 nt, Artificial Sequence
  derived and/or modified CDS sequence (opt3) from neuraminidase__InfluenzaA__AHL98155
augaaccccaaucagaagaucauuaccauaggcagcgugucccugacaaucucuacuauuugcuucuuuaugcagaucgccauucucaucacgaccgucacacuucacuucaaacaguacgaguuuaacucaccuccaaauaaccagguuaugcugugugaaccgacuauaaucgagagaaauauuaccgaaaucguguauuugacaaacaccacuauugagaaggaaaucugccccaaaccugcugaguacaggaauuggaguaagccacagugugggauaacaggauucgcacccuuuagcaaagacaacuccauucgguuaucugccgguggcgauaucuggguaacccgcgagccuuaugugucgugcgacccagauaaguguuaccaauucgcgcuggggcagggaacgacucuaaauaacguccauucaaauaacaccgugcgagaccguacacccuauagaacucuccugaugaaugaacuuggcguuccuuuucaccuggguaccaaacaggugugcauugcuuggagcaguuccucuugucaugaugggaaggccugguugcacgucugcaucacaggagacgauaagaacgcaaccgccagcuucaucuacaauggcaggcucguggacuccguaguuucauggaguaaagagauucugcggacgcaggaaagcgagugugugugcauaaacggcacuuguacagucgugaugaccgaugggucugcuuccggaaaggcagacacuaaaauccuguuuauugaggaagguaagaucgugcauacaucaacccucagcggcagugcccaacacgucgaggaaugcucuugcuauccacgcuacccggggguuagaugugugugcagggauaacuggaagggauccaaucggcccauaguagacauuaacaucaaagaucacagcaucgugucgucuuacgucuguuccggcuuagugggugacacgccucgcaagaaugacucaaguagcuccucucauugccuggauccaaacaaugaggaagggggacacggcguuaaaggcugggcuuucgacgaugggaacgacguguggaugggacgaaccauuaaugagacaagcagacuugguuaugagacuuuuaaggucaucgaaggcuggucaaacaguaaauccaaguugcagauuaauaggcaagugauaguagaucguggggaccggagcggauacucuggcaucuucucaguugaggguaaaaguuguauuaaccgcugcuuuuauguggaacugaucagagggaggaaggaggaaaccgagguccuauggacaagcaauuccaucguggucuucuguggcacuucuggaaccuacggcacagggucguggcccgauggagccgaccucaaccugaugccuauuuga

SEQ ID NO: 152965 - RNA, 1410 nt, Artificial Sequence; identical to SEQ ID NO: 150194
  derived and/or modified CDS sequence (opt3) from neuraminidase__InfluenzaA__AHL98167

SEQ ID NO: 152966 - RNA, 1410 nt, Artificial Sequence; identical to SEQ ID NO: 150194
  derived and/or modified CDS sequence (opt3) from neuraminidase__InfluenzaA__AHL98179

SEQ ID NO: 152967 - RNA, 1410 nt, Artificial Sequence; identical to SEQ ID NO: 150194
  derived and/or modified CDS sequence (opt3) from neuraminidase__InfluenzaA__AHL98191

SEQ ID NO: 152968 - RNA, 1410 nt, Artificial Sequence; identical to SEQ ID NO: 151931
  derived and/or modified CDS sequence (opt3) from neuraminidase__InfluenzaA__AHL98215

SEQ ID NO: 152969 - RNA, 1410 nt, Artificial Sequence
  derived and/or modified CDS sequence (opt3) from neuraminidase__InfluenzaA__AHL98227
augaaccccaaucagaagaucauuaccauaggcagcgugucccugacaaucucuacuauuugcuucuuuaugcaaaucgccauucucaucacgaccgucacacuucacuucaaacaguacgaguuuaacucaccuccaaauaaccagguuaugcugugugaaccgacuauaaucgagagaaauauuaccgacaucguguauuugacaaacaccacuauugaaaaggagaucugccccaaaccugcugaauacaggaauuggaguaagccacagugugggauaacaggauucgcacccuuuagcaaagauaacuccauucgguuaucugccgguggcgacaucuggguaacccgcgagccuuaugugucgugcgauccagacaaguguuaccaauucgcgcuggggcagggaacgacucuaaauaacaugcauucaaauaacaccguccgagaucguacacccuauagaacucuccugaugaaugagcuuggcgugccuuuucaccuggguaccaagcagguuugcauugcuuggagcaguuccucuugucaugacgggaaagccugguugcacgugugcaucacaggagaugacaagaacgcaaccgccagcuucaucuacaauggcaggcucgucgauuccgugguaucauggaguaaagaaauucugcggacgcaggagagcgaauguguuugcauaaacggcacuuguacaguggucaugaccgacgggucugcuuccggaaaggcagauacuaaaauccuguuuauugaggaggguaagaucgugcauacaucaacccucagcggcagugcccaacacguggaagagugcucuugcuauccacgcuacccgggggucagauguguuugcagggacaacuggaagggauccaaucggcccauaguggauauuaacaucaaagaccacagcaucguaucgucuuacguguguuccggcuuagucggugacacgccucgcaagaaugauucaaguagcuccucucauugccuggacccaaacaaugaagaagggggacacggcgugaaaggcugggcuuucgaugacgggaacgauguuuggaugggacgaaccauuaaugagacaagcagacuugguuaugagacuuuuaaggugaucgagggcuggucaaaccccaaaaguaaguugcagauuaauaggcaggucauaguggaccguggggaucgguccggauacagcggcaucuucucuguagaagguaaaucauguauuaaccgcugcuuuuauguugagcugaucagagggaggaaggaagagaccgaagugcuauggacaaguaauagcaucgucguguucuguggcacuuccggaaccuacggcacagggucuuggccugacggagccgaucucaaccugaugccaauuuga

SEQ ID NO: 152970 - RNA, 1410 nt, Artificial Sequence; identical to SEQ ID NO: 150194
  derived and/or modified CDS sequence (opt3) from neuraminidase__InfluenzaA__AHL98239

SEQ ID NO: 152971 - RNA, 1410 nt, Artificial Sequence; identical to SEQ ID NO: 150194
  derived and/or modified CDS sequence (opt3) from neuraminidase__InfluenzaA__AHL98251

SEQ ID NO: 152972 - RNA, 1410 nt, Artificial Sequence; identical to SEQ ID NO: 151942
  derived and/or modified CDS sequence (opt3) from neuraminidase__InfluenzaA__AHL98263

SEQ ID NO: 152973 - RNA, 1410 nt, Artificial Sequence; identical to SEQ ID NO: 150194
  derived and/or modified CDS sequence (opt3) from neuraminidase__InfluenzaA__AHL98275

SEQ ID NO: 152974 - RNA, 1410 nt, Artificial Sequence; identical to SEQ ID NO: 152840
  derived and/or modified CDS sequence (opt3) from neuraminidase__InfluenzaA__AHL98287

SEQ ID NO: 152975 - RNA, 1410 nt, Artificial Sequence
  derived and/or modified CDS sequence (opt3) from neuraminidase__InfluenzaA__AHL98298
augaaccccaaucagaagaucauuaccauaggcagcgugucccugacaaucucuacuauuugcuucuuuaugcagaucgccauucucaucacgaccgucacacuucacuucaaacaguacgaguuuaacucaccuccaaauaaccagguuaugcugugugaaccgacuauaaucgggagaaauauuaccgagaucguguauuugacaaacaccacuauugaaaaggagaucugccccaaaccugcugaauacaggaauuggaguaagccacaguguggaauaacagguuucgcacccuuuagcaaagacaacuccauucgguuaucugccggcggggauaucuggguaacccgcgagccuuaugugucgugcgacccagauaaguguuaccaauucgcgcugggacagggcacgacucuaaauaacguccauucaaauaacaccgugcgagaccguacacccuauagaacucuccugaugaaugagcuugguguuccuuuucaccuggggaccaaacaggugugcauugcuuggagcaguuccucuugucaugauggaaaggccugguugcacgucugcaucacaggcgacgauaagaacgcaaccgccagcuucaucuacaauggcaggcucguggacuccguaguuucauggaguaaagaaauucugcggacgcaggagagcgaaugugugugcauaaacgggacuuguacagucgugaugaccgauggaucugcuuccgguaaggcagacacuaaaauccuguuuauugaggagggcaagaucgugcauacaucaacccucagcgggagugcccaacacgucgaagagugcucuugcuauccacgcuacccgggaguuagaugugugugcagggauaacuggaagggcuccaaucggcccauaguagacauuaacaucaaagaucacagcaucgugucgucuuacgucuguuccgguuuagugggggacacgccucgcaagaaugacucaaguagcuccucucauugccuggauccaaacaaugaagagggaggccacggcguuaaagggugggcuuucgacgauggaaacgacguguggaugggucgaaccauuaaugaaacaagcagacuuggcuaugagacuuuuaaggucaucgagggguggucaaaccccaaaaguaaguugcagauuaauaggcaagugauaguagaucggggagaccguuccggcuacagcgguaucuucucuguugaagggaaaucauguauuaaccgcugcuuuuauguggagcugaucagaggcaggaaggaagagaccgaaguccuauggacaaguaauagcaucguggucuucuguggaacuuccggcaccuacgggacaggaucuuggccugauggugccgaccucaaccugaugccaauuuga

SEQ ID NO: 152976 - RNA, 1410 nt, Artificial Sequence; identical to SEQ ID NO: 150194
  derived and/or modified CDS sequence (opt3) from neuraminidase__InfluenzaA__AHL98310

SEQ ID NO: 152977 - RNA, 1410 nt, Artificial Sequence; identical to SEQ ID NO: 150194
  derived and/or modified CDS sequence (opt3) from neuraminidase__InfluenzaA__AHL98322

SEQ ID NO: 152978 - RNA, 1410 nt, Artificial Sequence
  derived and/or modified CDS sequence (opt3) from neuraminidase__InfluenzaA__AHL98334
augaaccccaaucagaagaucauuaccauaggcagcgugucccugacaaucucuacuauuugcuucuuuaugcaaaucgccauucucaucacgaccgucacacuucacuucaaacaguacgaguuuaacucaccuccaaauaaccagguuaugcugugugaaccgacuauaaucgagagaaauauuaccgaagugguauauuugacaaacaccacuaucgagaaggaaauuugccccaaaccugcugaguacaggaauuggaguaagccacagugugggaucacaggauucgcacccuuuagcaaagacaacuccauacgguuaucugccgguggcgauauuugggugacccgcgagccuuaugucucgugcgacccagauaaguguuaccaauucgcgcuggggcagggaacgacucuaaauaacgugcauucaaauaacaccguucgagaccguacacccuauagaacucuccugaugaaugaacuuggcgugccuuuucaccuggguaccaagcaggucugcaucgcuuggagcaguuccucuugucaugaugggaaagccugguugcacgugugcauuacaggagacgauaagaacgcaaccgccagcuucaucuacaauggcaggcucguagacuccguugugucauggaguaaagagauccugcggacgcaggaaagcgagugugucugcauuaacggcacuuguacaguggugaugaccgaugggucugcuuccggaaaggcagacacuaaaauacuguuuaucgaggaagguaagauuguccauacaucaacccucagcggcagugcccaacacguugaggaaugcucuugcuauccacgcuacccgggggugagauguguaugcagggauaacuggaagggauccaaucggcccaucguggacauaaacauuaaagaucacagcaucgucucgucuuacguguguuccggcuuaguuggugacacgccucgcaagaaugacucaaguagcuccucucauugccuggauccaaacaaugaggaagggggacacggcgugaaaggcugggcuuucgacgaugggaacgacgucuggaugggacgaaccaucaaugagacaagcagacuugguuaugagacuuuuaaggugauugaaggcuggucaaaccccaaaaguaaguugcagaucaauaggcagguaauuguugaucguggggaccgguccggauacagcggcauauucucuguggaggguaaaucauguaucaaccgcugcuuuuaugucgaacugauuagagggaggaaggaggaaaccgaggugcuauggacaaguaauagcaucgucguguucuguggcacuuccggaaccuacggcacagggucuuggccugauggagccgaccucaaccugaugccaaucuga

SEQ ID NO: 152979 - RNA, 1410 nt, Artificial Sequence
  derived and/or modified CDS sequence (opt3) from neuraminidase__InfluenzaA__AHL98346
augaaccccaaucagaagaucauuaccauaggcagcgugucccugacaaucucuacuauuugcuucuuuaugcagaucgccauucucaucacgaccgucacacuucacuucaaacaguacgaguuugacucaccuccaaacaaucagguuaugcugugugaaccgacuauaaucgagagaaacauuaccgaaaucguguauuugacaaauaccacuauugagaaggaaaucugccccaaaccugcugaguacaggaacuggaguaagccacagugugggauaacaggauucgcacccuuuagcaaagauaauuccauucgguuaucugccgguggcgacaucuggguaacccgcgagccuuaugugucgugcgauccagacaaguguuaccaauucgcgcuggggcagggaacgacucuaaacaauguccauucaaacaauaccgugcgagaucguacacccuauagaacucuccugaugaacgaacuuggcguuccuuuucaccuggguaccaaacaggugugcauugcuuggagcaguuccucuugucaugacgggaaggccugguugcacgucugcaucacaggagaugacaagaaugcaaccgccagcuucaucuacaacggcaggcucguggauuccguaguuucauggaguaaagagauucugcggacgcaggaaagcgagugugugugcauaaauggcacuuguacagucgugaugaccgacgggucugcuuccggaaaggcagauacuaaaauccuguuuauugaggaagguaagaucgugcauacaucaacccucagcggcagugcccaacacgucgaggaaugcucuugcuauccacgcuacccggggguuagaugugugugcagggacaacuggaagggauccaaccggcccauaguagauauuaauaucaaagaccacagcaucgugucgucuuacgucuguuccggcuuagugggugacacgccucgcaagaacgauucaaguagcuccucucauugccuggacccaaauaacgaggaagggggacacggcguuaaaggcugggcuuucgaugacgggaaugauguguggaugggacgaaccauuaacgagacaagcagacuugguuaugagacuuuuaaggucaucgaaggcuggucaaaucccaaaaguaaguugcagauuaacaggcaagugauaguagaccguggggaucgguccggauacagcggcaucuucucuguugaggguaaaucauguauuaaucgcugcuuuuauguggaacugaucagagggaggaaggaggaaaacgagguccuauggaccaguaauagcaucguggucuucuguggcacauccggaacuuacggcaccgggucuuggccugacggagccgaucucaaccugaugccaauuuga

SEQ ID NO: 152980 - RNA, 1410 nt, Artificial Sequence; identical to SEQ ID NO: 150194
  derived and/or modified CDS sequence (opt3) from neuraminidase__InfluenzaA__AHL98357

SEQ ID NO: 152981 - RNA, 1410 nt, Artificial Sequence; identical to SEQ ID NO: 151942
  derived and/or modified CDS sequence (opt3) from neuraminidase__InfluenzaA__AHL98369

SEQ ID NO: 152982 - RNA, 1410 nt, Artificial Sequence
  derived and/or modified CDS sequence (opt3) from neuraminidase__InfluenzaA__AHL98381
augaaccccaaucagaagaucauuaccauaggcagcgugucccugacaaucucuacuauuugcuucuuuaugcaaaucgccauucucaucacgaccgucacacuucacuucaaacaguacgaguuuaacucaccuccaaauaaccagguuaugcugugugaaccgacuauaaucgagagaaauauuaccgaaaucguguauuugacaaacaccacuauugagaaggaaaucugccccaaaccugcugaguacaggaauuggaguaagccacagugugggauaacaggauucgcacccuuuagcaaagacaacuccauucgguuaucugccgguggcgauaucuggguaacccgcgagccuuaugugucgugcgggccagacaaguguuaccaauucgcgcugggacagggcacgacucuaaauaacaugcauucaaauaacaccguccgagaucguacacccuauagaacucuccugaugagcgaacuuggugugccuuuucaccuggggaccaagcagguuugcauugcuuggaguuccucuagcugucaugacggaaaagccugguugcacgugugcaucacaggcgaugacaagaaugcaaccgccuccuucaucuacaacggcaggcucgucgauucagugguaaguuggagcaaagagauucugcggacgcaggaaucugaguguguuugcauaaaugggacuuguacaguggucaugaccgacggauccgcuucagguaaggcagauacuaaaauccuguuuauugaggaaggcaagaucgugcauacaagcacccucagugggucugcccaacacguggaggaaugcuccugcuauccacgcuacccgggagucagauguguuugcagggacaacuggaagggcagcaaccggcccauaguggauauuaauaucaaagaccacucgacgguaucuuccuacguguguucagguuuagucggggauaccccucgcaagaacgacaguagcuccucuagccauugccuggacccaaauaacgaggaaggaggccacggcgugaaagggugggcuuucgaugacggaaaugauguuuggaugggucgaacaaucaacgagacuucaagacuuggcuaugagaccuuuaaggugauugaaggguggaguaaucccaaauccaaguugcagaucaacaggcaggucauuguggaccggggagaucguagcggcuacucugguauauucucaguagaggggaaaaguuguaucaaucgcugcuuuuauguugaacugauuagaggcaggaaggaggaaacagaggugcuauggacuagcaacuccaucgucguguucuguggaaccucuggcacauacgggaccggaucguggccugacggugccgaucucaaucugaugccaaucuga

SEQ ID NO: 152983 - RNA, 1410 nt, Artificial Sequence
  derived and/or modified CDS sequence (opt3) from neuraminidase__InfluenzaA__AHL98393
augaaccccaaucagaagaucauuaccauaggcagcgugucccugacaaucucuacuauuugcuucuuuaugcaaaucgccauucucaucacgaccgucacacuucacuucaaacaguacgaguuuaacucaccuccaaauaaccagaugaugcugugugaaccgacuauaaucgagagaaauauuaccgaaaucguuuauuugacaaacaccacuauugagaaggaaaucugccccaaaccugcugaguacaggaauuggaguaagccacagugugggauaacaggauucgcacccuuuagcaaagacaacuccauucgguuaucugccgguggcgauaucugggugacccgcgagccuuauguaucgugcgggccagacaaguguuaccaauucgcgcugggacagggcacgacucuaaauaacaugcauucaaauaacaccgugcgagaucguacacccuauagaacucuccugaugaaugaacuuggugucccuuuucaccuggggaccaaacaggugugcauugcuuggagcaguuccucuugucaugacggaaaggccugguugcacguuugcaucacaggcgaugacaagaacgcaaccgccagcuucaucuacaauggcaggcucguggauuccgucgugucauggaguaaagagauucugcggacgcaggaaagcgaguguguaugcauaaacgggacuuguacaguugugaugaccgacggaucugcuuccgguaaggcagauacuaaaauccuguuuauugaggaaggcaagaucguccauacaucaacccucagcgggagugaccaacacauagaggaaugcucuugcuauccacgcuacccgggagugagaugugugugcagggauaacuggaagggcuccaaucggcccauugucgacaucaacaucaaagaucacagcauuguuucgucuuacguguguuccgguuuaguaggggacacgccucgcaagaaugacucaaguagcuccucucauugccuggauccaaacaaugaggaaggaggccacggcgugaaagggugggccuucgacgauggaaacgacgucuggaugggucgaaccaucaaugagacaagcagacuuggcuaugagacuuuuaaggugauugaaggguggucaaaccccaaaaguaaguugcagauaaauaggcagguuaucguggaucggggagaccguuccggcuacagcgguauuuucucugucgaggggaaaucauguaucaaccgcugcuuuuauguggaacugaucagaggcaggaaggaggaaaccgagguacuauggacaaguaauagcauuguuguguucuguggaacuuccggcaccuacgggacaggaucuuggccugauggugcugaccucaaccugaugccaauauga

SEQ ID NO: 152984 - RNA, 1410 nt, Artificial Sequence; identical to SEQ ID NO: 150194
  derived and/or modified CDS sequence (opt3) from neuraminidase__InfluenzaA__AHL98405

SEQ ID NO: 152985 - RNA, 1410 nt, Artificial Sequence; identical to SEQ ID NO: 150194
  derived and/or modified CDS sequence (opt3) from neuraminidase__InfluenzaA__AHL98417

SEQ ID NO: 152986 - RNA, 1410 nt, Artificial Sequence; identical to SEQ ID NO: 150194
  derived and/or modified CDS sequence (opt3) from neuraminidase__InfluenzaA__AHL98429

SEQ ID NO: 152987 - RNA, 1410 nt, Artificial Sequence
  derived and/or modified CDS sequence (opt3) from neuraminidase__InfluenzaA__AHL98452
augaaccccacccagaagaucauuacaauaggcagcgugugcaugacuaucgggauggccaaucugauucuccaaaucggaaacauuaucuccauauggaucucucacucaauucagcuugguaaucagagucagaucgagacguguaaccaaagcgucauuaccuacgaaaauaacacauggguuaaucagacuuaugugaacaucuccaauaccaacuucgcugcaggccagucuguagugucggucaaacuggccgggaauaguagcuugugcccugugaguggaugggcgauauacuccaaggacaacucuguuagaauuggcagcaaaggugauguguuugucaucagggagccauucauuuccuguucaccguuagaaugccggacauuuuuccugacccagggggcucuacucaaugacaagcauaguaacggaacuaucaaagaucgcagccccuaucgaacacugaugucuuguccuaucggcgaggugccaucccccuacaauucacguuuugaaagcguagccuggagugcaucugccugccacgacggcauuaacuggcuuaccauagggaucuccggaccugauagcggugcuguugcagugcugaaguauaacggcauuaucacggacacuauaaagucguggaaaaauaacauuuugagaacccaagagucugagugugccugcgucaauggguccuguuucacaaucaugacugauggaccaucagacggccaggcuaguuacaagaucuuuaggauugaaaaagguaagaucgugaaaagcguggagaugaacgcccccaauuaucauuacgaagagugcuccuguuacccugauucuagcgagauuaccugcgucugccgggacaacuggcacgggucaaaucgcccauggguuaguuucaaccagaaucucgaauaucagauaggauacaucuguuccggcguguuuggcgauaacccgagacccaaugacaagacagggagcugcggaccuguaucuucaaacggugcgaauggcgugaagggguucaguuuuaaauauggaaacggcgucuggauugguaggaccaagagcaucuccucucggaaaggguucgagaugaucugggauccaaauggcuggacgggaacugacaacaacuuuucgauuaagcaagacauagugggcaucaaugaauggagcggguacuccggaucauucguucagcaucccgagcugacaggucuggauuguauucgcccuugcuucuggguggaacucauccgaggcagaccaaaagagaacaccauuuggacuucagggucuagcaucuccuuuuguggagucaauucagacacagugggcuggagcuggcccgauggugcagaguuaccguucaccauagacaaguga

SEQ ID NO: 152988 - RNA, 1410 nt, Artificial Sequence
  derived and/or modified CDS sequence (opt3) from neuraminidase__InfluenzaA__AHL98474
augaaccccaaucagaagaucauuaccauaggcagcgugugcaugacaaucgggauggccaaccugauucuccaaaucggaaauauuaucuccauauggaucucucacucaauucagcuugguaaccagagucagaucgagacuuguaaucaaagcgucauuacguacgaaaacaauaccuggguuaaccagacauaugugaauaucuccaacacuaauuucgcugcaggccagucuguagugucggucaaacuggccgggaacagcagcuugugcccugugaguggaugggcgauauacuccaaggacaauucuguuagaauuggcagcaaaggugauguguuugucaucagggagccauucauuuccuguucaccguuagaaugccggaccuuuuuccugacacagggggcucuacucaacgacaagcauaguaauggaaccaucaaagaucgcagccccuaucgaacucugaugucuuguccuaucggcgaggugccaucccccuacaacucacguuuugaaagcguagccuggagugcaucugccugccacgacggcauuaacuggcuuacaauagggaucuccggaccuaauagcggugcuguugcagugcugaaguauaacggcauuaucaccgauacgauaaagucguggagaaauaacauuuugaggacucaagagucugagugugccugcgucaauggguccuguuucaccaucaugacagacggaccaucagauggccaggcuaguuacaaaaucuuucggauugaaaaggguaaaaucgugaagucaguggagaugaacgcccccaauuaucauuacgaagagugcuccuguuacccugacucuagcgagauuacuugcgucugccgcgauaacuggcacgggucaaauagaccauggguuaguuucaaccagaaucucgaauaucagauaggauacaucuguuccggcguguuuggcgacaacccgaggcccaaugauaaaaccgggagcugcggaccuguaucuucaaacggugcgaauggcgugaagggguucaguuuuaaguauggaaacggcgucuggauuggucggacaaaaagcaucuccucucgcaagggguucgagaugaucugggacccaaacggcuggaccggaacggauaauaacuuuucgauuaaacaagacauagugggcaucaaugaauggagcggguacuccggaucauucguucagcaucccgagcugacuggucuggacuguauucgaccuugcuucuggguggaacucaucagaggcaggccaaaggagaacacaauuuggaccagugggucuagcaucuccuuuuguggagucaauucagauacugugggcuggagcuggcccgacggugcagaguuaccguucacaauagauaaauga

SEQ ID NO: 152989 - RNA, 1410 nt, Artificial Sequence
  derived and/or modified CDS sequence (opt3) from neuraminidase__InfluenzaA__AHL98485
augaaccccaaucagaagaucauuaccauaggcagcgugucccugacaaucucuacuauuugcuucuuuaugcagaucgccauucucaucacgaccgucacacuucacuucaaacaguacgaguuuaacucaccuccaaauaaccagguuaugcugugugaaccgacuauaaucgagagaaauauuaccgaaaucguguauuugacaaacaccacuauugagaaggaaaucugccccaaaccugcugaguacaggaauuggaguaagccacagugugggauaacaggauucgcacccuuuagcaaagacaacuccauucgguuaucugccgguggcgauaucuggguaacccgcgagccuuaugugucgugcgacccagauaaguguuaccaauucgcgcuggggcagggaacgacucuaaauaacguccauucaaauaacaccgugcgagaccguacacccuauagaacucuccugaugaaugaacuuggcguuccuuuucaccuggguaccaaacaggugugcauugcuuggagcaguuccucuugucaugaugggaaggccugguugcacgucugcaucacaggagacgauaagaacgcaaccgccagcuucaucuacaauggcaggcucguggacuccguaguuucauggaguaaagagauucugcggacgcaggaaagcgagugugugugcauaaacggcacuuguacagucgugaugaccgaugggucugcuuccggaaaggcagacacuaaaauccuguuuauugaggaagguaagaucgugcauacaucaauacucagcggcagugcccaacacgucgaggaaugcucuugcuauccacgcuacccggggguuagaugugugugcagggauaacuggaagggauccaaucggcccauuguagacaucaacaucaaagaucacagcauugugucgucuuacgucuguuccggcuuagugggugacaccccucgcaagaaugacucaaguagcuccucucauugccuggauccaaacaaugaggaagggggacacggcguuaaaggcugggcuuucgacgaugggaacgacguguggaugggacgaacgaucaaugagaccagcagacuugguuaugagacauuuaaggucauugaaggcuggucaaaccccaaaaguaaguugcagauaaauaggcaagugaucguagaucguggggaccgguccggauacagcggcauuuucucuguugaggguaaaucauguaucaaccgcugcuuuuauguggaacugaucagagggaggaaggaggaaacugagguccuauggaccaguaauagcauuguggucuucuguggcacauccggaacuuacggcaccgggucuuggccugauggagccgaccucaaccugaugccaauauga

SEQ ID NO: 152990 - RNA, 1410 nt, Artificial Sequence; identical to SEQ ID NO: 151423
  derived and/or modified CDS sequence (opt3) from neuraminidase__InfluenzaA__AHL98497

SEQ ID NO: 152991 - RNA, 1410 nt, Artificial Sequence; identical to SEQ ID NO: 150194
  derived and/or modified CDS sequence (opt3) from neuraminidase__InfluenzaA__AHL98509

SEQ ID NO: 152992 - RNA, 1410 nt, Artificial Sequence; identical to SEQ ID NO: 150194
  derived and/or modified CDS sequence (opt3) from neuraminidase__InfluenzaA__AHL98521

SEQ ID NO: 152993 - RNA, 1410 nt, Artificial Sequence; identical to SEQ ID NO: 151423
  derived and/or modified CDS sequence (opt3) from neuraminidase__InfluenzaA__AHL98533

SEQ ID NO: 152994 - RNA, 1410 nt, Artificial Sequence; identical to SEQ ID NO: 150194
  derived and/or modified CDS sequence (opt3) from neuraminidase__InfluenzaA__AHL98545

SEQ ID NO: 152995 - RNA, 1410 nt, Artificial Sequence; identical to SEQ ID NO: 150194
  derived and/or modified CDS sequence (opt3) from neuraminidase__InfluenzaA__AHL98557

SEQ ID NO: 152996 - RNA, 1410 nt, Artificial Sequence; identical to SEQ ID NO: 150194
  derived and/or modified CDS sequence (opt3) from neuraminidase__InfluenzaA__AHL98569

SEQ ID NO: 152997 - RNA, 1410 nt, Artificial Sequence
  derived and/or modified CDS sequence (opt3) from neuraminidase__InfluenzaA__AHL98581
augaaccccaaucagaagaucauuaccauaggcagcgugucccugacaaucucuacuauuugcuucuuuaugcagaucgccauucucaucacgaccgucacacuucacuucaaacaguacgaguuuaacucaccuccaaauaaccagguuaugcugugugaaccgacuauaaucgagagaaauauuaccgaaaucguguauuugacaaacaccacuauugagaaggaaaucugccccaaaccugcugaguacaggaauuggaguaagccacagugugggauaacaggauucgcacccuuuagcaaagacaacuccauucgguuaucugccgguggcaauaucuggguaacccgcgagccuuaugugucgugcgauccagacaaguguuaccaauucgcgcuggggcagggaacgacucuaaacaauguccauucaaacaauaccgugcgagaucguacacccuauagaacucuccugaugaacgaacuuggcguuccuuuucaccuggguaccaaacaggugugcauugcuuggagcaguuccucuugucaugacgggaaggccugguugcacgucugcaucacaggagaugacaagaaugcaaccgccagcuucaucuacaacggcaggcucguggauuccguaguuucauggaguaaagagauucugcggacgcaggaaagcgagugugugugcauaaacggcacuuguacagucgugaugaccgacgggucugcuuccggaaaggcagauacuaaaauccuguuuauugaggaagguaagaucgugcauacaucaacccucagcggcagugcccaacacgucgaggaaugcucuugcuauccacgcuacccggggguuagaugugugugcagggacaauuggaagggauccaaccggcccauaguagauauuaauaucaaagaccacagcaucgugucgucuuacgucuguuccggcuuagugggugauacgccucgcaagaacgacucaaguagcuccucucauugccuggacccaaauaacgaggaagggggacacggcguuaaaggcugggcuuucgaugacgggaaugauguguggaugggacgaaccauuaacgagacaagcagacuugguuaugagacuuuuaaggucaucgaaggcuggucaaaucccaaaaguaaguugcagauuaacaggcaagugauaguagaccguggggaucgguccggauacagcggcaucuucucuguugaggguaaaucauguauuaaucgcugcuuuuauguggaacugaucagagggaggaaggaggaaaccgagguccuauggacaaguaacagcaucguggucuucuguggcacuuccggaaccuacggcacagggucuuggccugacggagccgaucucaaucugaugccaauuuga

SEQ ID NO: 152998 - RNA, 1410 nt, Artificial Sequence; identical to SEQ ID NO: 150194
  derived and/or modified CDS sequence (opt3) from neuraminidase__InfluenzaA__AHL98593

SEQ ID NO: 152999 - RNA, 1410 nt, Artificial Sequence; identical to SEQ ID NO: 151931
  derived and/or modified CDS sequence (opt3) from neuraminidase__InfluenzaA__AHL98605

SEQ ID NO: 153000 - RNA, 1410 nt, Artificial Sequence; identical to SEQ ID NO: 151423
  derived and/or modified CDS sequence (opt3) from neuraminidase__InfluenzaA__AHL98617

SEQ ID NO: 153001 - RNA, 1410 nt, Artificial Sequence; identical to SEQ ID NO: 151423
  derived and/or modified CDS sequence (opt3) from neuraminidase__InfluenzaA__AHL98629

SEQ ID NO: 153002 - RNA, 1410 nt, Artificial Sequence; identical to SEQ ID NO: 150194
  derived and/or modified CDS sequence (opt3) from neuraminidase__InfluenzaA__AHL98641

SEQ ID NO: 153003 - RNA, 1410 nt, Artificial Sequence; identical to SEQ ID NO: 152772
  derived and/or modified CDS sequence (opt3) from neuraminidase__InfluenzaA__AHL98653

SEQ ID NO: 153004 - RNA, 1410 nt, Artificial Sequence; identical to SEQ ID NO: 150194
  derived and/or modified CDS sequence (opt3) from neuraminidase__InfluenzaA__AHL98665

SEQ ID NO: 153005 - RNA, 1410 nt, Artificial Sequence
  derived and/or modified CDS sequence (opt3) from neuraminidase__InfluenzaA__AHL98677
augaaccccaaucagaagaucauuaccauaggcagcgugucccugacaaucucuacuauuugcuucuuuaugcagaucgccauucucaucacgaccgucacacuucacuucaaacaguacgaguuuaacucaccuccaaauaaccagguuaugcugugugaaccgacuauaaucgagagaaauauuaccgaaaucguguauuugacaaacaccacuauugagaaggaaaucugccccaaaccugcugaguacaggaauuggaguaagccacagugugggauaacaggauucgcacccuuuagcaaagacaacuccauucgguuaucugccgguggcgauaucuggguaacccgcgagccuuaugugucgugcgacccagauaaguguuaccaauucgcgcuggggcagggaacgacucuaaauaacguccauucaaauaacaccgugcgagaccguacaccccacagaacucuccugaugaaugaacuuggcguuccuuuucaucuggguaccaaacaggugugcauugcuuggagcaguuccucuugucacgaugggaaggccugguugcaugucugcaucacaggagacgauaagaacgcaaccgccagcuucaucuauaauggcaggcucguggacuccguaguuucauggaguaaagagauucugcggacgcaggaaagcgagugugugugcauaaacggcacuuguacagucgugaugaccgaugggucugcuuccggaaaggcagacacuaaaauccuguuuauugaggaagguaagaucgugcacacaucaacccucagcggcaacgcccaacacgucgaggaaugcaguugcuacccacgcuauccggggguuagaugugugugcagggauaauuggaagggaucuaaccggcccauaguagacauuaauaucaaagaucauuccaucgugagcucguacgucuguucuggcuuagugggugacacgccucgcaagaacgacuccucaaguagcucccacugccuggauccaaauaacgaggaagggggacauggcguuaaaggcugggcuuucgacgaugggaaugacguguggaugggacgaaccauuaacgagacaucuagacuugguuacgagacuuuuaaggucaucgaaggcuggagcaaucccaaaucaaaguugcagauuaacaggcaagugauaguagaucguggggaccggaguggauauuccggcaucuucagcguugaggguaaaucuuguauuaaucgcugcuuuuacguggaacugaucagagggaggaaggaggaaaccgagguccuauggacaucaaacaguaucguggucuucuguggcacuagcggaaccuauggcacaggguccuggccugauggagccgaccucaaucugaugccaauuuga

SEQ ID NO: 153006 - RNA, 1410 nt, Artificial Sequence; identical to SEQ ID NO: 151942
  derived and/or modified CDS sequence (opt3) from neuraminidase__InfluenzaA__AHL98689

SEQ ID NO: 153007 - RNA, 1410 nt, Artificial Sequence
  derived and/or modified CDS sequence (opt3) from neuraminidase__InfluenzaA__AHL98702
augaaccccaaucagaagaucauuaccauaggcagcgugucccugacaaucucuacuauuugcuucuuuaugcaaaucgccauucucaucacgaccgucacacuucacuucaaacaguacgaguuugacucaccuccaaacaaucagguuaugcugugugaaccgacuauaaucgagagaaacauuaccgaaaucguguauuugacaaauaccacuauugagaaggaaaucugccccaaaccugcugaguacaggaacuggaguaagccacagugugggauaacaggauucgcacccuuuagcaaagauaauuccauucgguuaucugccgguggcgacaucuggguaacccgcgagccuuaugugucgugcgauccagacaaguguuaccaauucgcgcuggggcagggaacgacucuaaacaauggccauucaaacaauaccguccgagaucguacacccuauagaacucuccugaugaacgaacuuggugugccuuuucaccuggggaccaagcagguuugcauugcuuggagcaguuccucuugucaugacggaaaagccugguugcacgugugcaucacaggcgaugacaagaaugcaaccgccagcuucaucuacaacggcaggcucgucgauuccgugguaucauggaguaaagagauucugcggacgcaggaaagcgaguguguuugcauaaaugggacuuguacaguggucaugaccgacggaucugcuuccgguaaggcagauacuaaaauccuguuuauugaggaaggcaagaucgugcauacaucaacccucagcgggagugcccaacacguggaggaaugcucuugcuauccacgcuacccgggagucagauguguuugcagggacaacuggaagggcuccaaccggcccauaguggauauuaauaucaaagaccacagcaucguaucgucuuacguguguuccgguuuagucggggacacgccucgcaagaacgauucaaguagcuccucucauugccuggacccaaauaacgaggaaggaggccacggcgugaaagggugggcuuucgaugacggaaaugauguuuggaugggucgaaccauuaacgagacaagcagacuuggcuaugagacuuuuaaggugaucgaaggguggucaaaucccaaaaguaaguugcagauuaacaggcaggucauaguggaccggggagaucguuccggcuacagcgguaucuucucuguagaggggaaaucauguauuaaucgcugcuuuuauguugaacugaucagaggcaggaaggaggaaaccgaggugcuauggacaaguaacagcaucgucguguucuguggaacuuccggcaccuacgggacaggaucuuggccugacggugccgaucucaaucugaugccaauuuga

SEQ ID NO: 153008 - RNA, 1410 nt, Artificial Sequence; identical to SEQ ID NO: 151437
  derived and/or modified CDS sequence (opt3) from neuraminidase__InfluenzaA__AHL98714

SEQ ID NO: 153009 - RNA, 1410 nt, Artificial Sequence
  derived and/or modified CDS sequence (opt3) from neuraminidase__InfluenzaA__AHL98725
augaaccccaaucagaagaucauuaccauaggcagcgugucccugacaaucucuacuauuugcuucuuuaugcagaucgccauucucaucacgaccgucacacuucacuucaaacaguacgaguuuaacucaccuccaaauaaccagguuaugcugugugaaccgacuauaaucgagagaaauauuaccgaaaucguguauuugacaaacaccacuauugagaaggaaaucugccccaaaccugcugaguacaggaauuggaguaagccacagugugggauaacaggauucgcacccuuuagcaaagacaacuccauucgguuaucugccgguggcgggaucuggguaacccgcgagccuuaugugucgugcgauccagacaaguguuaccaauucgcgcugggacagggcacgacucuaaauaacguccauucaaauaacaccgugcgagaucguacacccuauagaacucuccugaugaaugaacuugguguuccuuuucaccuggggaccaaacaggugugcauugcuuggagcaguuccucuugucaugacggaaaggccugguugcacgucugcaucacaggcgaugacaagaacgcaaccgccagcuucaucuacaauggcaggcucguggauuccguaguuucauggaguaaagagauucugcggacgcaggaaagcgagugugugugcauaaacgggacuuguacagucgugaugaccgacggaaacgcuucugguaaggcagauacuaaaauccuguuuauugaggaaggcaagaucgugcauacauccacccucucagggagcgcccaacacgucgaggaaugcaguugcuauccacgcuacccgggaguuagaugugugugcagggacaauuggaagggcucuaaccggcccauaguagauauuaauaucaaagaccacuccaucgugagcucguacgucuguucugguuuagugggggauacgccucgcaagaacgacuccucaaguagcucccauugccuggacccaaauaacgaggaaggaggccacggcguuaaagggugggcuuucgaugacgagaaugauguguggaugggacgaaccauuaacgagacaucuagacuugguuaugaaacuuuuaaggucaucgagggcuggagcaaucccaaaucaaaguugcagauuaacaggcaagugauaguagaccgggggaaucguaguggauacuccggcaucuucagcguugaagguaaaucuuguauuaaccgcugcuuuuauguggagcugaucagagggaggaaggaagagaccgagguccuauggacaucaaauaguaucguggucuucuguggcacuagcggaaccuacggcacaggguccuggccugauggagccgaccucaaccugaugccaauuuga

SEQ ID NO: 153010 - RNA, 1410 nt, Artificial Sequence; identical to SEQ ID NO: 151931
  derived and/or modified CDS sequence (opt3) from neuraminidase__InfluenzaA__AHL98737

SEQ ID NO: 153011 - RNA, 1410 nt, Artificial Sequence; identical to SEQ ID NO: 151919
  derived and/or modified CDS sequence (opt3) from neuraminidase__InfluenzaA__AHL98749

SEQ ID NO: 153012 - RNA, 1410 nt, Artificial Sequence; identical to SEQ ID NO: 151931
  derived and/or modified CDS sequence (opt3) from neuraminidase__InfluenzaA__AHL98761

SEQ ID NO: 153013 - RNA, 1410 nt, Artificial Sequence
  derived and/or modified CDS sequence (opt3) from neuraminidase__InfluenzaA__AHL98773
augaaccccaaucagaagaucauuaccauaggcagcgugucccugacaaucucuacuauuugcuucuuuaugcaaaucgccauucucaucacgaccgucacacuucacuucaaacaguacgaguuuaacucaccuccaaauaaccagguuaugcugugugaaccgacuauaaucgagagaaauauuaccgaaaucguguauuugacaaacaccacuauugagaaggaaaucugccccaaaccugcugaguacaggaauuggaguaagccacagugugggauaacaggauucgcacccuuuagcaaagacaacuccauucgguuaucugccgguggcaauaucuggguaacccgcgagccuuaugugucgugcgauccagacaaguguuaccaauucgcgcuggggcagggaacgacucuaaacaauguccauucaaacaauaccgcucgagaucguacacccuauagaacucuccugaugaacgaacuuggcgugccuuuucaccuggguaccaagcagguuugcauugccuggagcaguuccucuugucaugacgggaaagcaugguugcacgugugcaucacaggagaugacaagaaugccaccgcuagcuucaucuacaacggcaggcucgucgauuccgugguaucauggaguaaagagauucugcggacgcaggaaagcgaguguguuugcauaaacggcacuuguacaguggucaugaccgacgggucugcauccggaaaggccgauacuaaaauccuguuuauugaggaagguaagaucgugcauacaucaacccucagcggcagugcucaacacguggaggaaugcucuugcuauccacgcuacccgggggucagauguguuugcagggacaauuggaagggauccaaccggcccauaguggauauuaauaucaaagaccacagcaucguaucgucuuacguguguuccggcuuagucggugauacgccucgcaagaacgacucaaguagcuccucucauugccuggacccaaauaacgaggaagggggacacggcgugaaaggcugggccuucgaugacgggaaugauguuuggaugggacgaaccauuaacgagacaagcagacuugguuaugagacuuuuaaggugaucgaaggcuggucaaaucccaaaaguaaguugcagauuaacaggcaggucauaguggaccguggggaucgguccggauacagcggcaucuucucuguagaggguaaaucauguauuaaucgcugcuuuuauguugaacugaucagagggaggaaggaggaaaccgaggugcuauggacaaguaacagcaucgucguguucuguggcacuuccggaaccuacggcacagggucuuggccugacggagcggaucucaaucugaugccaauuuga

SEQ ID NO: 153014 - RNA, 1410 nt, Artificial Sequence; identical to SEQ ID NO: 151951
  derived and/or modified CDS sequence (opt3) from neuraminidase__InfluenzaA__AHL98785

SEQ ID NO: 153015 - RNA, 1410 nt, Artificial Sequence
  derived and/or modified CDS sequence (opt3) from neuraminidase__InfluenzaA__AHL98797
augaaccccaaucagaagaucauuaccauaggcagcgugucccugacaaucucuacuauuugcuucuuuacgcagaucgccauucucaucaccacagucacucuucacuucaaacaguacgaguuuaacucaccuccaaauaaccagguuaugcugugugaaccgaccauaaucgagagaaauauuacagaaaucguguauuugaccaacacuacaauugagaaggaaaucugccccaaaccugcugaguacaggaauuggaguaagccacagugugggauaaccggauucgcacccuuuagcaaagacaacuccauucgguuaucugccgguggcgauaucuggguaacgcgcgagccuuaugugucgugcgacccagauaaguguuaccaauucgcgcuggggcagggaacuacccuaaauaacguccauucaaauaacacagugcgagaccguacucccuauagaacccuccugaugaaugaacuuggcguuccuuuucaccuggguacaaaacaggugugcauugcuuggagcaguuccucuugucaugaugggaaggccugguugcacgucugcaucaccggagacgauaagaacgcaacggccagcuucaucuacaauggcaggcucguggacuccguaguuucauggaguaaagagauucugcggacucaggaaagcgagugugugugcauaaacggcacauguaccgucgugaugacugaugggucugcuuccggaaaggcagacacaaaaauccuguuuauugaggaagguaagaucgugcauaccucaacgcucagcggcagugcccaacacgucgaggaaugcucuugcuauccacgcuacccggggguuagaugugugugcagggauaacuggaagggauccaaucggcccauaguagacauuaacaucaaagaucacagcaucgugucgucuuacgucuguuccggcuuagugggugacaccccucgcaagaaugacucaaguagcuccucucauugccuggauccaaacaaugaggaagggggacacggcguuaaaggcugggcuuucgacgaugggaacgacguguggaugggacgaacaauuaaugagacuagcagaucagguuaugagaccuuuaaggucaucgaaggcuggaguaaccccaaauccaaacuucagauuaauaggcaagugauaguagaucguggggaccggagcggauacucuggcaucuucucaguugaggguaagaguuguauuaaccgcugcuuuuauguggaauugaucagagggaggaaggaggaaacagagguccuguggacuagcaauuccaucguggucuucuguggcaccucuggaacauacggcaccgggucguggccugauggagccgaccuaaaccucaugccaauuuga

SEQ ID NO: 153016 - RNA, 1410 nt, Artificial Sequence; identical to SEQ ID NO: 150194
  derived and/or modified CDS sequence (opt3) from neuraminidase__InfluenzaA__AHL98809

SEQ ID NO: 153017 - RNA, 1410 nt, Artificial Sequence
  derived and/or modified CDS sequence (opt3) from neuraminidase__InfluenzaA__AHL98821
augaaccccaaucagaagaucauuaccauaggcagcgugucccugacaaucucuacuauuugcuucuuuaugcaaaucgccauucucaucacgaccgucacacuucacuucaaacaguacgaguuuaacucaccuccaaauaaccagguuaugcugugugaaccgacuauaaucgagagaaauauuaccgaaaucguguauuugacaaacaccacuauugagaaggaaaucugccccaaaccugcugaguacaggaauuggaguaagccacagugugggauaacaggauucgcacccuuuagcaaagacaacuccauucgguuaucugccgguggcgauaucuggguaacccgcgagccuuaugugucgugcgacccagaucgauguuaccaauucgcgcuggggcagggaacgacucuaaauaacaugcauucaaauaacaccguccgugacagaacacccuauaggacucuccugaugaaugaacuuggcgugccuuuucaccuggguaccaagcagguuugcauugcuuggagcaguuccucuugucaugaugggaaggccugguugcacgugugcaucacaggagacgauaaaaacgcaaccgccagcuucaucuacaauggccggcucgucgacuccgugguaucauggaguaaggagauucugcgcacgcaggaaagcgaguguguuugcauaaacggcacuuguacaguggucaugaccgaugggucugcuuccggaaaagcagacacuaagauccuguuuauugaggaagguaaaaucgugcauacaucaacccucagcggcagugcccaacacguggaggaaugcucuugcuauccaagauacccgggggucagguguguuugccgggauaacuggaagggauccaaucgccccauaguggacauuaacaucaaggaucacagcaucguaucgucuuacguguguuccggcuuagucggugacacgccucgaaagaaugacucaaguagcuccucucauugccuggauccaaacaaugaggaagggggacacggcgugaaaggcugggcuuucgacgaugggaacgacguuuggaugggaagaaccauuaaugagacaagcaggcuugguuaugagacuuuuaaagugaucgaaggcuggucaaaccccaagaguaaauugcagauuaaucggcaggucauaguggaucguggggaccgcuccggauacagcggcaucuucucuguagaggguaagucauguauuaacagaugcuuuuauguugaacugaucagggggcggaaagaggaaaccgaggugcuauggacaaguaauagcaucgucguguucuguggcacuuccggaaccuacggcacagggucuuggccugauggagccgaccucaaccugaugccaauuuga

SEQ ID NO: 153018 - RNA, 1410 nt, Artificial Sequence; identical to SEQ ID NO: 150194
  derived and/or modified CDS sequence (opt3) from neuraminidase__InfluenzaA__AHL98833

SEQ ID NO: 153019 - RNA, 1410 nt, Artificial Sequence
  derived and/or modified CDS sequence (opt3) from neuraminidase__InfluenzaA__AHL98845
augaaccccaaucagaagaucauuaccauaggcagcgugucccugacaaucucuacuauuugcuucuuuaugcaaaucgccauucucaucacgaccgucacacuucacuucaaacaguacgaguuuaacucaccuccaaauaaccagguuaugcugugugaaccgacuauaaucgagagaaauauuaccgaaaucguguauuugauuaacacaaccaucgagaaggaaauaugccccaaaccugcugaguacaggaauuggaguaagccacagugugggauuacuggauucgcacccuuuagcaaagacaacuccauccgguuaucugccgguggcgauauuuggguaacacgcgagccuuaugugucgugcgggccagacaaguguuaccaauucgcgcugggacagggcaccacgcuaaauaacaugcauucaaauaacacuguccgagaucguacccccuauagaacacuccugaugaaugaacuuggugugccuuuucaccuggggacuaagcagguuugcaucgcuuggagcaguuccucuugucaugacggaaaagccugguugcacgugugcaucaccggcgaugacaagaacgcaacagccagcuucauuuacaauggcaggcucgucgauuccgugguaucauggaguaaagagauacugcggacccaggaaagcgaguguguuugcaucaacgggacguguacuguggucaugacagacggaucugcuuccgguaaggcagauaccaaaauucuguuuaucgaggaaggcaagauagugcauacuucaacacucagcgggagugcccaacacguggaggaaugcucuugcuauccacgcuacccgggagucagauguguuugcagggacaacuggaagggcuccaaucggcccauuguggauaucaacaucaaagaccacagcauuguaucgucuuacguguguuccgguuuagucggggauaccccucgcaagaaugacucaaguagcuccucucauugccuggacccaaacaaugaggaaggaggccacggcgugaaagggugggcuuucgaugacggaaacgauguuuggaugggucgaacgaucaaugagaccagcagacuuggcuaugagacauuuaaggugauugaaggguggucaaaccccaaaaguaaguugcagauaaauaggcaggucaucguggaccggggagaucguuccggcuacagcgguauuuucucuguagaggggaaaucauguaucaaccgcugcuuuuauguugaacugaucagaggcaggaaggaggaaacugaggugcuauggaccaguaauagcauugucguguucuguggaacauccggcacuuacgggaccggaucuuggccugacggugccgaucucaaccugaugccaauauga

SEQ ID NO: 153020 - RNA, 1410 nt, Artificial Sequence; identical to SEQ ID NO: 151931
  derived and/or modified CDS sequence (opt3) from neuraminidase__InfluenzaA__AHL98857

SEQ ID NO: 153021 - RNA, 1410 nt, Artificial Sequence; identical to SEQ ID NO: 151931
  derived and/or modified CDS sequence (opt3) from neuraminidase__InfluenzaA__AHL98869

SEQ ID NO: 153022 - RNA, 1410 nt, Artificial Sequence; identical to SEQ ID NO: 150194
  derived and/or modified CDS sequence (opt3) from neuraminidase__InfluenzaA__AHL98881

SEQ ID NO: 153023 - RNA, 1410 nt, Artificial Sequence
  derived and/or modified CDS sequence (opt3) from neuraminidase__InfluenzaA__AHL98893
augaaccccaaucagaagaucauuaccauaggcagcgugucccugacaaucucuacuauuugcuucuuuaugcagaucgccauucucaucacgaccgucacacuucacuucaaacaguacgaguuugacucaccuccaaacaaucagguuaugcugugugaaccgacuauaaucgagagaaacauuaccgaaaucguguauuugacaaauaccacuauugagaaggaaaucugccccaaaccugcugaguacaggaacuggaguaagccacagugugggauaacaggauucgcacccuuuagcaaagauaauuccauucgguuaucugccgguggcgacaucuggguaacccgcgagccuuaugugucgugcgauccagacaaguguuaccaauucgcgcuggggcagggaacgacucuaaacaauguccauucaaacaauaccgugcgagaucguacacccuauagaacucuccugaugaacgaacuuggcguuccuuuucaccuggguaccaaacaggugugcauugcuuggagcaguuccucuugucaugacgggaaggccugguugcacgucugcaucacaggagaugacaagaaugcaaccgccagcuucaucuacaacggcaggcucguggauuccguaguuucauggaguaaagagauucugcggacgcaggaaagcgagugugugugcauaaauggcacuuguacagucgugaugaccgacgggucugcuuccggaaaggcagauacuaaaauccuguuuauugaggaagguaagaucgugcauacaucaacccucagcggcagugcccaacacgucgaggaaugcucuugcuauccacgcuacccggggguuagaugugugugcagggacaacuggaagggauccaaccggcccauaguagauauuaauaucaaagaccacagcaucgugucgucuuacgucuguuccggcuuagugggugacacgccucgcaagaacgauucaaguagcuccucucauugccuggacccaaauaacgaggaagggggacacggcguuaaaggcugggcuuucgaugacgggaaugauguguggaugggacgaaccauuaacgagacaagcagacuugguuaugagacuuuuaaggucuucgaaggcuggucaaaucccaaaaguaaguugcagaucaacaggcaagugauuguagaccguggggaucgguccggauacagcggcauauuuucuguugaggguaaaucauguaucaaucgcugcuucuauguggaacugauuagagggaggaaggaggaaaccgagguccuauggacaaguaacagcaucguggucuucuguggcacuuccggaaccuacggcacagggucuuggccugacggagccgaucucaaucugaugccaaucuga

SEQ ID NO: 153024 - RNA, 1410 nt, Artificial Sequence; identical to SEQ ID NO: 151919
  derived and/or modified CDS sequence (opt3) from neuraminidase__InfluenzaA__AHL98905

SEQ ID NO: 153025 - RNA, 1410 nt, Artificial Sequence; identical to SEQ ID NO: 150194
  derived and/or modified CDS sequence (opt3) from neuraminidase__InfluenzaA__AHL98916

SEQ ID NO: 153026 - RNA, 1410 nt, Artificial Sequence; identical to SEQ ID NO: 151942
  derived and/or modified CDS sequence (opt3) from neuraminidase__InfluenzaA__AHL98928

SEQ ID NO: 153027 - RNA, 1410 nt, Artificial Sequence; identical to SEQ ID NO: 150194
  derived and/or modified CDS sequence (opt3) from neuraminidase__InfluenzaA__AHL98940

SEQ ID NO: 153028 - RNA, 1410 nt, Artificial Sequence; identical to SEQ ID NO: 150194
  derived and/or modified CDS sequence (opt3) from neuraminidase__InfluenzaA__AHL98952

SEQ ID NO: 153029 - RNA, 1410 nt, Artificial Sequence; identical to SEQ ID NO: 151919
  derived and/or modified CDS sequence (opt3) from neuraminidase__InfluenzaA__AHL98964

SEQ ID NO: 153030 - RNA, 1410 nt, Artificial Sequence
  derived and/or modified CDS sequence (opt3) from neuraminidase__InfluenzaA__AHL98976
augaaccccaaucagaagaucauuaccauaggcagcgugucccugacaaucucuacuauuugcuucuuuaugcaaaucgccauucucaucacgaccgucacacuucacuucaaacaguacgaguuuaacucaccuccaaauaaccagguuaugcugugugaaccgacuauaguggagagaaauaucaccgaaauuguauauuugacaaacaccacuaucgagaaggaaauuugccccaaaccugcugaguacaggaauuggaguaagccacagugugggaucacaggauucgcacccuuuagcaaagacaacuccauacgguuaucugccgguggcgauauuugggugacccgcgagccuuaugucucgugcgacccagauaaguguuaccaauucgcgcuggggcagggaacgacucuaaauaacgugcauucaaauaacaccguucgagaccguacacccuauagaacucuccugaugaaugaacuuggcgugccuuuucaccuggguaccaagcaggucugcaucgcuuggagcaguuccucuugucaugaugggaaagccugguugcacgugugcauuacaggagacgauaagaacgcaaccgccagcuucaucuacaauggcaggcucguagacuccguugcuucauggaguaaagaggugcugcggacgcaggaaagcgagugugucugcaucaacggcacuugugcaguggugaugacagaugggucugccuccggaaaggcugacaccaaaauucuguuuauagaggaagguaagaucguccauacuucaacacucagcggcagugcccaacacguugaggaaugcucuugcuauccacgcuacccgggggugagauguguaugcagggauaacuggaagggauccaaucggcccauuguggacaucaacauaaaagaucacagcauugucucgucuuacguguguuccggcuuaguuggugacaccccucgcaagaaugacucaaguagcuccucucauugccuggauccaaacaaugaggaagggggacacggcgugaaaggcugggcguucgacgaugggaacgacgucuggaugggacgaacgaucaaugagaccagcagacuugguuaugagacauuuaaggugaucgaaggcuggucaaaccccaaaaguaaguugcagauuaauaggcagguaaucguugaucguggggaccgguccggauacagcggcauuuucucuguggaggguaaaucauguauaaaccgcugcuuuuaugucgaacugaucagagggaggaaggaggaaacugaggugcuauggaccaguaauagcauugucguguucuguggcacauccggaacuuacggcaccgggucuuggccugauggagcagaccucaaccugaugccaaucuga

SEQ ID NO: 153031 - RNA, 1410 nt, Artificial Sequence; identical to SEQ ID NO: 151919
  derived and/or modified CDS sequence (opt3) from neuraminidase__InfluenzaA__AHL98988

SEQ ID NO: 153032 - RNA, 1410 nt, Artificial Sequence; identical to SEQ ID NO: 150194
  derived and/or modified CDS sequence (opt3) from neuraminidase__InfluenzaA__AHL99000

SEQ ID NO: 153033 - RNA, 1410 nt, Artificial Sequence; identical to SEQ ID NO: 150194
  derived and/or modified CDS sequence (opt3) from neuraminidase__InfluenzaA__AHL99012

SEQ ID NO: 153034 - RNA, 1410 nt, Artificial Sequence
  derived and/or modified CDS sequence (opt3) from neuraminidase__InfluenzaA__AHL99024
augaaccccaaucagaagaucauuaccauaggcagcgugucccugacaaucucuacuauuugcuucuuuaugcaaaucgccauucucaucacgaccgucacacuucacuucaaacaguacgaguuuaacucaccuccaaauaaccagguuaugcugugugaaccgacuauaaucgagagaaauauuaccgaaaucguguauuugacaaacaccacuauugagaaggaaaucugccccaaaccugcugaguacaggaauuggaguaagccacagugugggauaacaggauucgcacccuuuagcaaagacaacuccauucgguuaucugccgguggcgauaucuggguaacccgcgagccuuaugugucgugcgacccagauaaguguuaccaauucgcgcuggggcagggaacgacucuaaauaacguccauucaaauaacaccgugcgagaccguacacccuauagaacucuccugaugaaugaacuuggcguuccuuuucaccuggguaccaaacaggugugcauugcuuggagcaguuccucuugucaugaugggaaggccugguugcacgucugcaucacaggagacgauaagaacgcaaccgccagcuucaucuacaauggcaggcucguggacuccguaguuucauggaguaaagagauucugcggacgcaggaaagcgagugugugugcauaaacggcacuuguacagucgugaugaccgaugggucugcuuccggaaaggcagacacuaaaauccuguuuauugaggaagguaagaucgugcauacaucaacccucagcggcagugcccaacacgucgaggaaugcucuugcuauccacgcuacccggggguuagauguauaugcagggauaacuggaagggauccaaucggcccauuguggacaucaacaucaaagaucacagcauuguaucgucuuacguguguuccggcuuagucggugacacgccucgcaagaaugacucaaguagcuccucucauugccuggauccaaacaaugaggaagggggacacggcgugaaaggcugggcuuucgacgaugggaacgacguuuggaugggacgaaccaucaaugagacaagcagacuugguuaugagacuuuuaaggugauugaaggcuggucaaaccccaaaaguaaguugcagauaaauaggcaggucaucguggaucguggggaccgguccggauacagcggcauuuucucuguagaggguaaaucauguaucaaccgcugcuuuuauguugaacugaucagagggaggaaggaggaaaccgaggugcuauggacaaguaauagcauugucguguucuguggcacuuccggaaccuacggcacagggucuuggccugauggagccgaccucaaccugaugccaauauga

SEQ ID NO: 153035 - RNA, 1410 nt, Artificial Sequence; identical to SEQ ID NO: 151412
  derived and/or modified CDS sequence (opt3) from neuraminidase__InfluenzaA__AHL99036

SEQ ID NO: 153036 - RNA, 1410 nt, Artificial Sequence; identical to SEQ ID NO: 152834
  derived and/or modified CDS sequence (opt3) from neuraminidase__InfluenzaA__AHL99048

SEQ ID NO: 153037 - RNA, 1410 nt, Artificial Sequence; identical to SEQ ID NO: 150194
  derived and/or modified CDS sequence (opt3) from neuraminidase__InfluenzaA__AHL99060

SEQ ID NO: 153038 - RNA, 1410 nt, Artificial Sequence
  derived and/or modified CDS sequence (opt3) from neuraminidase__InfluenzaA__AHL99072
augaaccccaaucagaagaucauuaccauaggcagcgugucccugacaaucucuacuauuugcuucuuuaugcagaucgccauucucaucacgaccgucacacuucacuucaaacaguacgaguuuaacucaccuccaaauaaccagguuaugcugugugaaccgacuauaaucgagagaaauauuaccgaaaucguguauuugacaaacaccacuauugagaaggaaaucugccccaaaccugcugaguacaggaauuggaguaagccacagugugggauaacaggauucgcacccuuuagcaaagacaacuccauucgguuaucugccgguggcgauaucuggguaacccgcgagccuuaugugucgugcgacccagauaaguguuaccaauucgcgcuggggcagggaacgacucuaaauaacguccauucaaauaacaccgugcgagaccguacacccuauagaacucuccugaugaaugaacuuggcguuccuuuucaccuggguaccaaacaggugugcauugcuuggagcaguuccucuugucaugaugggaaggccugguugcacgucugcaucacaggagacgauaagaacgcaaccgccagcuucaucuacaauggcaggcucguggacuccguaguuucauggaguaaagagauucugcggacgcaggaaagcgagugugugugcauaaacggcacuuguacagucgugaugaccgaugggucugcuuccggaaaggcagacacuaaaauccuguuuauugaggaagguaagaucgugcauacaucaacccucagcggcagugcccaacacgucgaggaaugcucuugcuauccacgcuacccggggguuagaugugugugcagggauaacuggaagggauccaaucggcccauaguagacauuaacaugaaagaucacagcaucgugucgucuuacgucuguuccggcuuagugggugacacgccucgcaagaaugacucaaguagcuccucucauugccuggauccaaacaaugaggaagggggacacggcguuaaaggcugggcuuucgacgaugggaacgacguguggaugggacgaaccaucaaugagacaagcagacuugguuaugagacuuuuaaggucauugaaggcuggucaaaccccaaaaguaaguugcagaucaauaggcaagugauuguagaucguggggaccgguccggauacagcggcauauucucuguugaggguaaaucauguaucaaccgcugcuuuuauguggaacugauuagagggaggaaggaggaaaccgagguccuauggacaaguaauagcaucguggucuucuguggcacuuccggaaccuacggcacagggucuuggccugauggagccgaccucaaccugaugccaaucuga

SEQ ID NO: 153039 - RNA, 1410 nt, Artificial Sequence
  derived and/or modified CDS sequence (opt3) from neuraminidase__InfluenzaA__AHL99084
augaaccccaaucagaagaucauuaccauaggcagcgugucccugacaaucucuacuauuugcuucuuuaugcaaaucgccauucucaucacgaccgucacacuucacuucaaacaguacgaguuuaacucaccuccaaauaaccagguuaugcugugugaaccgacuauaaucgagagaaauauuaccgaaaucguguauuugacaaacaccacuauugagaaggaaaucugccccaaaccugcugaguacaggaauuggaguaagccacagugugggauaacaggauucgcacccuuuagcaaagacaacuccauucgguuaucugccgguggcgauaucuggguaacccgcgagccuuaugugucgugcgacccagaucgauguuaccaauucgcgcuggggcagggaacgacucuaaauaacaugcauucaaauaacaccguccgugacagaacacccuauaggacucuccugaugaaugaacuuggcgugccuuuucaccuggguaccaagcagguuugcauugcuuggagcaguuccucuugucaugaugggaaggccugguugcacgugugcaucacaggagacgauaaaaacgcaaccgccagcuucaucuacaauggccggcucgucgacuccgugguaucauggaguaaggagauucugcgcacgcaggaaagcgaguguguuugcauaaacggcacuuguacaguggucaugaccgaugggucugcuuccggaaaagcagacacuaagauccuguuuauugaggaagguaaaaucgugcauacaucaacccucagcggcagugcccaacacguggaggaaugcucuugcuauccaagauacccgggggucagguguguuugccgggauaacuggaagggauccaaucgccccauaguggacauuaacaucaaggaucacaauaucguaagcucguacguguguucuggcuuagucggugacacgccucgaaagaacgacuccucaaguagcucccauugccuggauccaaauaacgaggaagggggacacggcgugaaaggcugggcuuucgacgaugggaaugacguuuggaugggaagaaccauuaacgagacaucuaggcuugguuaugagacuuuuaaagugaucgaaggcuggagcaaucccaagucaaaauugcagauuaaccggcaggucauaguggaucguggggaccgcaguggauacuccggcaucuucagcguagaggguaagucuuguauuaauagaugcuuuuauguugaacugaucagggggcggaaagaggaaaccgaggugcuauggacaucaaacaguaucgucguguucuguggcacuagcggaaccuacggcacaggguccuggccugauggagccgaccucaaucugaugccaauuuga

SEQ ID NO: 153040 - RNA, 1410 nt, Artificial Sequence; identical to SEQ ID NO: 150194
  derived and/or modified CDS sequence (opt3) from neuraminidase__InfluenzaA__AHL99096

SEQ ID NO: 153041 - RNA, 1410 nt, Artificial Sequence; identical to SEQ ID NO: 150194
  derived and/or modified CDS sequence (opt3) from neuraminidase__InfluenzaA__AHL99108

SEQ ID NO: 153042 - RNA, 1410 nt, Artificial Sequence; identical to SEQ ID NO: 150194
  derived and/or modified CDS sequence (opt3) from neuraminidase__InfluenzaA__AHL99120

SEQ ID NO: 153043 - RNA, 1410 nt, Artificial Sequence; identical to SEQ ID NO: 150194
  derived and/or modified CDS sequence (opt3) from neuraminidase__InfluenzaA__AHL99132

SEQ ID NO: 153044 - RNA, 1410 nt, Artificial Sequence
  derived and/or modified CDS sequence (opt3) from neuraminidase__InfluenzaA__AHL99144
augaaccccaaucagaagaucauuaccauaggcagcgugucccugacaaucucuacuauuugcuucuuuaugcaaaucgccauucucaucacgaccgucacacuucacuucaaacaguacgaguuuaacucaccuccaaauaaccagguuaugcugugugaaccgacuauaaucgagagaaauauuaccgaaaucguguauuugacaaacaccacuauugagaaggaaaucugccccaaaccugcugaguacaggaauuggaguaagccacagugugggauaacaggauucgcacccuuuagcaaagacaacuccauucgguuaucugccgguggcgauaucuggguaacccgcgagccuuaugugucgugcgacccagauaaguguuaccaauucgcgcuggggcagggaacgacucuaaauaacguccauucaaauaacaccgugcgagaccguacacccuauagaacucuccugaugaaugaacuuggcguuccuuuucaccuggguaccaaacaggugugcauugcuuggagcaguuccucuugucaugaugggaaggccugguugcacgucugcaucacaggagacgauaagaacgcaaccgccagcuucaucuacaauggcaggcucguggacuccguaguuucauggaguaaagagauucugcggacgcaggaaagcgagugugugugcauaaacggcacuuguacagucgugaugaccgaugggucugcuuccggaaaggcagacacuaaaauccuguuuauugaggaaggucgcaucgugcauacaucaacccucagcggcagugcccaacacgucgaggaaugcucuugcuauccaagauacccggggguuaggugugugugccgggauaacuggaagggauccaaucgccccauaguagacauuaacaucaaggaucacagcaucgugucgucuuacgucuguuccggcuuagugggugacacgccucggaaaaaugacucaaguagcuccucucauugccuggauccaaacaaugaggaagggggacacggcguuaagggcugggcuuucgacgaugggaacgacguguggaugggaagaaccauuaaugagacaagcaggcuugguuaugagacuuuuaaagucaucgaaggcuggucaaaccccaagaguaaauugcagauuaaucgacaggugauaguagaucguggggaccgcuccggauacagcggcaucuucucuguugaggguaagucauguauuaacagaugcuuuuauguggaacugaucagggggcggaaagaggaaaccgagguccuauggacaaguaauagcaucguggucuucuguggcacuuccggaaccuacggcacagggucuuggccugauggagccgaccucaaccugaugccaauuuga

SEQ ID NO: 153045 - RNA, 1410 nt, Artificial Sequence; identical to SEQ ID NO: 150194
  derived and/or modified CDS sequence (opt3) from neuraminidase__InfluenzaA__AHL99156

SEQ ID NO: 153046 - RNA, 1410 nt, Artificial Sequence
  derived and/or modified CDS sequence (opt3) from neuraminidase__InfluenzaA__AHL99168
augaaccccaaucagaagaucauuaccauaggcagcgugucccugacaaucucuacuauuugcuucuuuaugcagaucgccauucucaucacgaccgucacacuucacuucaaacaguacgaguuuaacucaccuccaaauaaccagguuaugcugugugaaccgacuauaaucgagagaaauaccacagaaauuguguauuugaccaacacuacaaucgagaaggaaauuugccccaaaccugcugaguacaggaauuggaguaagccacagugugggaucaccggauucgcacccuuuagcaaagacaacuccauacgguuaucugccgguggcgauauuuggguaacgcgcgagccuuaugugucgugcgacccagauaaguguuaccaauucgcgcuggggcagggaacuacccuaaauaacguccauucaaauaacacagugcgagaccguacucccuauagaacccuccugaugaaugaacuuggcguuccuuuucaccuggguacaaaacaggugugcaucgcuuggagcaguuccucuugucaugaugggaaggccugguugcacgucugcauuaccggagacgauaagaacgcaacggccagcuucaucuacaauggcaggcucguggacuccguaguuucauggaguaaagagauccugcggacucaggaaagcgagugugugugcauuaacggcacauguaccgucgugaugacugaugggucugcuuccggaaaggcagacacaaaaauacuguuuaucgaggaagguaagauugugcauaccucaacgcucagcggcagugcccaacacgucgaggaaugcucuugcuauccacgcuacccggggguuagaugugugugcagggauaacuggaagggauccaaucggcccaucguagacauaaacauuaaagaucacagcaucgugucgucuuacgucuguuccggcuuagugggugacaccccucgcaagaaugacucaaguagcuccucucauugccuggauccaaacaaugaggaagggggacacggcguuaaaggcugggcuuucgacgaugggaacgacguguggaugggacgaacaaucaaugagacuagcagacuugguuaugagaccuuuaaggucauugaaggcuggucaaaccccaaaaguaaguugcagaucaauaggcaagugauuguagaucguggggaccgguccggauacagcggcauauucucuguugaggguaaaucauguaucaaccgcugcuuuuauguggaacugauuagagggaggaaggaggaaacagagguccuauggaccaguaauagcaucguggucuucuguggcacuuccggaacauacggcaccgggucuuggccugauggagccgaccucaaccugaugccaaucuga

SEQ ID NO: 153047 - RNA, 1410 nt, Artificial Sequence; identical to SEQ ID NO: 150194
  derived and/or modified CDS sequence (opt3) from neuraminidase__InfluenzaA__AHL99180

SEQ ID NO: 153048 - RNA, 1410 nt, Artificial Sequence; identical to SEQ ID NO: 151058
  derived and/or modified CDS sequence (opt3) from neuraminidase__InfluenzaA__AHL99204

SEQ ID NO: 153049 - RNA, 1410 nt, Artificial Sequence
  derived and/or modified CDS sequence (opt3) from neuraminidase__InfluenzaA__AHL99216
augaaccccaaucagaagaucauuaccauaggcagcgugucccugacaaucucuacuauuugcuucuuuaugcagaucgccauucucaucacgaccgucacacuucacuucaaacaguacgaguuuaacucaccuccaaauaaccagguuaugcugugugaaccgacuauaaucgagagaaauauuaccgaaaucguguauuugacaaacaccacuguagagaaggaaauuugccccaaaccugcugaguacaggaauuggaguaagccacagugugggaucacaggauucgcacccuuuagcaaagacaacuccauacgguuaucugccgguggcgauauuugggugacccgcgagccuuaugucucgugcgacccagauaaguguuaccaauucgcgcuggggcagggaacgacucuaaauaacgugcauucaaauaacaccguucgagaccguacacccuauagaacucuccugaugaaugaacuuggcgugccuuuucaccuggguaccaagcaggucugcaucgcuuggagcaguuccucuugucaugaugggaaagccugguugcacgugugcauuacaggagacgauaagaacgcaaccgccagcuucaucuacaauggcaggcucguagacuccguugugucauggaguaaagagauccugcggacgcaggaaagcgagugugucugcauuaacggcacuuguacaguggugaugaccgaugggucugcuuccggaaaggcagacacuaaaauacuguuuaucgaggaagguaagauuguccauacaucaacccucagcggcagugcccaacacguugaggaaugcucuugcuauccacgcuacccgggggugagauguguaugcagggauaacuggaagggauccaaucggcccaucauagacauuaacaucaaagaucacagcaucgugucgucuuacgucuguuccggcuuagugggugacacgccucgcaagaaugacucaaguagcuccucucauugccuggauccaaacaaugaggaagggggacacggcguuaaaggcugggcuuucgacgaugggaacgacguguggaugggacgaaccauuaaugagacaagcagacuugguuaugagacuuuuaaggucaucgaaggcuggucaaaccccaaaaguaaguugcagauuaauaggcaagugauaguagaucguggggaccgguccggauacagcggcaucuucucuguugaggguaaaucauguauuaaccgcugcuuuuauguggaacugaucagagggaggaagaaggagaccgaaguccuauggacaaguaauagcaucguggucuucuguggcacuuccggaaccuacggcacagggucuuggccugauggagccgaccucaaccugaugccaauuuga

SEQ ID NO: 153050 - RNA, 1410 nt, Artificial Sequence; identical to SEQ ID NO: 150194
  derived and/or modified CDS sequence (opt3) from neuraminidase__InfluenzaA__AHL99228

SEQ ID NO: 153051 - RNA, 1410 nt, Artificial Sequence; identical to SEQ ID NO: 150194
  derived and/or modified CDS sequence (opt3) from neuraminidase__InfluenzaA__AHL99240

SEQ ID NO: 153052 - RNA, 1410 nt, Artificial Sequence; identical to SEQ ID NO: 150194
  derived and/or modified CDS sequence (opt3) from neuraminidase__InfluenzaA__AHL99252

SEQ ID NO: 153053 - RNA, 1410 nt, Artificial Sequence; identical to SEQ ID NO: 150194
  derived and/or modified CDS sequence (opt3) from neuraminidase__InfluenzaA__AHL99264

SEQ ID NO: 153054 - RNA, 1410 nt, Artificial Sequence; identical to SEQ ID NO: 150194
  derived and/or modified CDS sequence (opt3) from neuraminidase__InfluenzaA__AHL99276

SEQ ID NO: 153055 - RNA, 1410 nt, Artificial Sequence; identical to SEQ ID NO: 151931
  derived and/or modified CDS sequence (opt3) from neuraminidase__InfluenzaA__AHL99288

SEQ ID NO: 153056 - RNA, 1410 nt, Artificial Sequence; identical to SEQ ID NO: 152834
  derived and/or modified CDS sequence (opt3) from neuraminidase__InfluenzaA__AHL99300

SEQ ID NO: 153057 - RNA, 1410 nt, Artificial Sequence; identical to SEQ ID NO: 150194
  derived and/or modified CDS sequence (opt3) from neuraminidase__InfluenzaA__AHL99312

SEQ ID NO: 153058 - RNA, 1410 nt, Artificial Sequence
  derived and/or modified CDS sequence (opt3) from neuraminidase__InfluenzaA__AHL99324
augaaccccaaucagaagaucauuaccauaggcagcgugucccugacaaucucuacuauuugcuucuuuaugcaaaucgccauucucaucacgaccgucacacuucacuucaaacaguacgaguuuaacucaccuccaaauaaccagguuauacugugugaaccgacuaucauugagagaaauaucaccgaaauuguguauuugacaaacaccacuaucgagaaggaaauaugccccaaaccugcugaguacaggaauuggaguaagccacagugugggauuacaggauucgcacccuuuagcaaagacaacuccauccgguuaucugccgguggcgauauuuggguaacccgcgagccuuaugugucgugcgacccagauaaguguuaccaauucgcgcuggggcagggaacgacucuaaauaacguccauucaaauaacaccgugcgagaccguacacccuauagaacucuccugaugaaugaacuuggcguuccuuuucaccuggguaccaaacaggugugcaucgcuuggagcaguuccucuugucaugaugggaaggccugguugcacgucugcaucacaggagacgauaagaacgcaaccgccagcuucauuuacaauggcaaacucguggacuccguaguuucauggaguaaggagauacugaggacgcaggaaagcgagugugugugcaucaacggcacuuguacagucgugaugaccgaugggucugcuuccggaaaagcagacacuaagauucuguuuaucgaggaagguaagauagugcauacaucaacccucagcggcagugcccaacacgucgaggaaugcucuugcuauccacgguacccggggguucgcugugugugcagagauaacuggaaaggauccaauaggcccauuguagacaucaacaucaaggaucacagcauugugucgucuuacgucuguuccggcuuagugggugacacgccucggaaaaaugacucaaguagcuccucucauugccuggauccaaacaaugaggaagggggacacggcguuaagggcugggcuuucgacgaugggaacgacguguggaugggacgcaccaucaaugagacaagccgacuugguuaugagacuuuuaaagucauugaaggcuggucaaaccccaagaguaaauugcagauaaauagacaggugaucguagauaggggagaccgguccggguacagcggcauuuucucuguugaggguaagucauguaucaaccguugcuuuuauguggaacugauccgcgggagaaaggaggaaaccgagguccuauggacaaguaauagcauuguggucuucuguggcacuuccggaaccuacggcacagggucuuggccugauggagccgaccucaaccugaugccaauauga

SEQ ID NO: 153059 - RNA, 1410 nt, Artificial Sequence; identical to SEQ ID NO: 151437
  derived and/or modified CDS sequence (opt3) from neuraminidase__InfluenzaA__AHL99348

SEQ ID NO: 153060 - RNA, 1410 nt, Artificial Sequence; identical to SEQ ID NO: 151437
  derived and/or modified CDS sequence (opt3) from neuraminidase__InfluenzaA__AHL99359

SEQ ID NO: 153061 - RNA, 1410 nt, Artificial Sequence
  derived and/or modified CDS sequence (opt3) from neuraminidase__InfluenzaA__AHL99370
augaaccccaaucagaagaucauuaccauaggcagcgugucccugacaaucacuacgauuugcuucuuuaugcaaaucgccauucucaucaccacagucacucuucacuucaaacaguacgaguuuaacucuccuccaaauaaccagaugaugcugugugaaccgaccauaaucgagagaaauauuacagaaaucguuuauuugaccaacacuacaauugagaaggaaaucugccccaaaccugcugaguacaggaauuggucaaagccacagugugggauaaccggauucgcacccuuuaguaaagacaacagcauucgguuauccgccgguggcgauaucugggugacgcgcgagccuuauguaucuugcgacccagauaaguguuaccaauucgcgcuggggcagggaacuacccuaaauaacgugcauucgaauaacacaguccgagaccguacucccuauagaacccuccugaugaaugaacuuggcgugccuuuucaccuggguacaaagcagguuugcauugcuuggucaagcaguuccugucaugaugggaaagccugguugcacgugugcaucaccggagacgauaagaacgcaacggccucuuucaucuacaauggcaggcucgucgacagcgugguauccuggucaaaagagauucugcggacucaggaaagugaguguguuugcauaaacggcacauguaccguggucaugacugaugggagcgcuucuggaaaggcagacacaaaaauccuguuuauugaggaagguaagaucgugcauaccuccacgcucucaggcagcgcccaacacguggaggaaugcaguugcuauccacgcuacccgggggucagauguguuugcagggauaacuggaagggaucuaaucggcccauaguggacauuaacaucaaagaucacuccaucguaagcucguacguguguucuggcuuagucggugacaccccucgcaagaaugacuccucaaguagcucccauugccuggauccaaacaaugaggaagggggacacggcgugaaaggcugggcuuucgacgaugggaacgacguuuggaugggacgaacaauuaaugagacuucuagacuugguuaugagaccuuuaaggugaucgaaggcuggagcaaccccaaaucaaaguugcagauuaauaggcaggucauaguggaucguggggaccggaguggauacuccggcaucuucagcguagaggguaaaucuuguauuaaccgcugcuuuuauguugaacugaucagagggaggaaggaggaaacagaggugcuauggacuucaaauaguaucgucguguucuguggcaccagcggaacauacggcaccggguccuggccugauggagccgaccucaaccugaugccaauuuga

SEQ ID NO: 153062 - RNA, 1410 nt, Artificial Sequence; identical to SEQ ID NO: 150194
  derived and/or modified CDS sequence (opt3) from neuraminidase__InfluenzaA__AHL99393

SEQ ID NO: 153063 - RNA, 1410 nt, Artificial Sequence; identical to SEQ ID NO: 150194
  derived and/or modified CDS sequence (opt3) from neuraminidase__InfluenzaA__AHL99417

SEQ ID NO: 153064 - RNA, 1410 nt, Artificial Sequence; identical to SEQ ID NO: 150194
  derived and/or modified CDS sequence (opt3) from neuraminidase__InfluenzaA__AHL99429

SEQ ID NO: 153065 - RNA, 1410 nt, Artificial Sequence; identical to SEQ ID NO: 150194
  derived and/or modified CDS sequence (opt3) from neuraminidase__InfluenzaA__AHL99441

SEQ ID NO: 153066 - RNA, 1410 nt, Artificial Sequence; identical to SEQ ID NO: 150194
  derived and/or modified CDS sequence (opt3) from neuraminidase__InfluenzaA__AHL99453

SEQ ID NO: 153067 - RNA, 1410 nt, Artificial Sequence; identical to SEQ ID NO: 150194
  derived and/or modified CDS sequence (opt3) from neuraminidase__InfluenzaA__AHL99477

SEQ ID NO: 153068 - RNA, 1410 nt, Artificial Sequence; identical to SEQ ID NO: 152834
  derived and/or modified CDS sequence (opt3) from neuraminidase__InfluenzaA__AHL99489

SEQ ID NO: 153069 - RNA, 1410 nt, Artificial Sequence
  derived and/or modified CDS sequence (opt3) from neuraminidase__InfluenzaA__AHL99501
augaaccccaaucagaagaucauuaccauaggcagcgugucccugacaaucucuacuauuugcuucuuuaugcagaucgccauucucaucacgaccgucacacuucacuucaaacaguacgaguuuaacucaccuccaaauaaccagguuaugcugugugaaccgacuauaaucgagagaaauauuaccgaaaucguguauuugacaaacaccacuauugagaaggaaaucugccccaaaccugcugaguacaggaauuggaguaagccacagugugggauaacaggauucgcacccuuuagcaaagacaacuccauucgguuaucugccgguggcgauaucuggguaacccgcgagccuuaugugucgugcgacccagauaaguguuaccaauucgcgcuggggcagggaacgacucuaaauaacguccauucaaauaacaccgugcgagaccguacacccuauagaacucuccugaugaaugaacuuggcguuccuuuucaccuggguaccaaacaggugugcauugcuuggagcaguuccucuugucaugaugggaaggccugguugcacgucugcaucacaggagacgauaagaacgcaaccgccagcuucaucuacaauggcaggcucguggacuccguaguuucauggaguaaagagauucugcggacgcaggaaagcgagugugugugcauaaacggcacuuguacagucgugaugaccgaugggucugcuuccggaaaggcagacacuaaaauccuguuuauugaggaagguaagaucgugcauacaucaacccucagcggcagugcccaacacgucgaggaaugcucuugcuauccacgcuacccggggguuagaugugugugcagggauaacuggaagggauccaaucggcccauaguagacauuaacaucaaagaucacagcacggugucgucuuacgucuguuccggcuuagugggugacaccccucgcaagaaugacucaaguagcuccucucauugccuggauccaaacaaugaggaagggggacacggcguuaaaggcugggcuuucgacgaugggaacgacguguggaugggacgaacaaucaaugagacuagcagacuugguuaugagaccuuuaaggucauugaaggcuggucaaaccccaaaaguaaguugcagaucaauaggcaagugauuguagaucguggggaccgguccggauacagcggcauauucucuguugaggguaaaucauguaucaaccgcugcuuuuauguggaacugauuagagggaggaaggaggaaacagagguccuauggaccaguaauagcaucguggucuucuguggcacuuccggaacauacggcaccgggucuuggccugauggagccgaccucaaccugaugccaaucuga

SEQ ID NO: 153070 - RNA, 1410 nt, Artificial Sequence; identical to SEQ ID NO: 150194
  derived and/or modified CDS sequence (opt3) from neuraminidase__InfluenzaA__AHL99525

SEQ ID NO: 153071 - RNA, 1410 nt, Artificial Sequence
  derived and/or modified CDS sequence (opt3) from neuraminidase__InfluenzaA__AHL99537
augaaccccaaucagaagaucauuaccauaggcagcgugucccugacaaucucuacuauuugcuucuuuaugcagaucgccauucucaucacgaccgucacacuucacuucaaacaguacgaguuuaacucaccuccaaauaaccagguuaugcugugugaaccgacuauaaucgagagaaauauuaccgaaaucguguauuugacaaacaccacuauugagaaggaaaucugccccaaaccugcugaguacaggaauuggaguaagccacagugugggauaacaggauucgcacccuuuagcaaagacaacuccauucgguuaucugccgguggcgauaucuggguaacccgcgagccuuaugugucgugcgacccagauaaguguuaccaauucgcgcuggggcagggaacgacucuaaauaacguccauucaaauaacaccgugcgagaccguacaagcuauagaacucuccugaugaaugaacuuggcguucccuuucaccuggguaccaaacaggugugcauugcuuggaguuccucuagcugucaugaugggaaggccugguugcacgucugcaucacaggagacgauaagaacgcaaccgccuccuucaucuacaauggcaggcucguggacucaguaguuaguuggagcaaagagauucugcggacgcaggaaucugagugugugugcauaaacggcacuuguacagucgugaugaccgauggguccgcuucaggaaaggcagacacuaaaauccuguuuauugaggaagguaagaucgugcauacaagcacccucaguggcucugcccaacacgucgaggaaugcuccugcuauccucgcuacccagggguuagaugugugugcagggauaacuggaagggaagcaaucggccgauaguagacauuaacaucaaagaucacucgaucgugucuuccuacgucuguucaggcuuagugggugacacgccccgcaagaaugacaguagcuccucuagccauugccuggauccuaacaaugaggaagggggacacggcguuaaaggcugggcuuucgacgaugggaacgacguguggaugggacgaaccauuaaugagacaucaagacuugguuaugagacuuuuaaggucaucgaaggcuggaguaacccaaaauccaaguugcagauuaauaggcaagugauaguagaucguggggaccggagcggauacucuggcaucuucucaguugaggguaaaaguuguauuaaccgcugcuuuuauguggaacugaucagagggaggaaggaggaaaccgagguccuauggacaagcaauuccaucguggucuucuguggcacuucuggaaccuacggcacagggucguggcccgauggagccgaccucaaccugaugccuauuuga

SEQ ID NO: 153072 - RNA, 1410 nt, Artificial Sequence; identical to SEQ ID NO: 151931
  derived and/or modified CDS sequence (opt3) from neuraminidase__InfluenzaA__AHL99549

SEQ ID NO: 153073 - RNA, 1410 nt, Artificial Sequence; identical to SEQ ID NO: 150194
  derived and/or modified CDS sequence (opt3) from neuraminidase__InfluenzaA__AHL99561

SEQ ID NO: 153074 - RNA, 1410 nt, Artificial Sequence
  derived and/or modified CDS sequence (opt3) from neuraminidase__InfluenzaA__AHL99573
augaaccccaaucagaagaucauuaccauaggcagcgugucccugacaaucucuacuauuugcuucuuuaugcaaaucgccauucucaucacgaccgucacacuucacuucaaacaguacgaguuuaacucaccuccaaauaaccagguuaugcugugugaaccgacuauaaucgagagaaauauuaccgaaaucguguauuugacaaacaccacuggggagaaggaaauuugccccaaaccugcugaguacaggaauuggaguaagccacaguguggaaucacagguuucgcacccuuuagcaaagacaacuccauacgguuaucugccggcggggauauuuggguaacccgcgagccuuaugugucgugcgacccagauaaguguuaccaauucgcgcugggacagggcacgacucuaaauaacguccauucaaauaacaccgugcgagaccguacacccuauagaacucuccugaugaaugaacuugguguuccuuuucaccuggggaccaaacaggugugcaucgcuuggagcaguuccucuugucaugauggaaaggccugguugcacgucugcauuacaggcgacgauaagaacgcaaccgccagcuucaucuacaauggcaggcucguggacuccguaguuucauggaguaaagagauccugcggacgcaggaaagcgagugugugugcauuaacgggacuuguacagucgugaugaccgauggaucugcuuccgguaaggcagacacuaaaauacuguuuaucgaggaaggcaagauugugcauacaucaacccucagcgggagugcccaacacgucgaggaaugcucuugcuauccacgcuacccgggaguuagaugugugugcagggauaacuggaagggcuccaaucggcccaucauagacauuaacaucaaagaucacagcaucguaucgucuuacguguguuccgguuuagucggggacacgccucgcaagaaugacucaaguagcuccucucauugccuggauccaaacaaugaggaaggaggccacggcgugaaagggugggcuuucgacgauggaaacgacguuuggaugggucgaaccauuaaugagacaagcagacuuggcuaugagacuuuuaaggugaucgaaggguggucaaaccccaaaaguaaguugcagauuaauaggcaggucauaguggauaaaggagaccgguccggcuacagcgguaucuucucuguagaggggaagucauguauuaaccguugcuuuuauguugaacugauccgcggcagaaaggaggaaaccgaggugcuauggacaaguaauagcaucgucguguucuguggaacuuccggcaccuacgggacaggaucuuggccugauggugccgaccucaaccugaugccaauuuga

SEQ ID NO: 153075 - RNA, 1410 nt, Artificial Sequence
  derived and/or modified CDS sequence (opt3) from neuraminidase__InfluenzaA__AHL99585
augaaccccaaucagaagaucauuaccauaggcagcgugucccugacaaucucuacuauuugcuucuuuaugcaaaucgccauucucaucacgaccgucacacuucacuucaaacaguacgaguuuaacucaccuccaaauaaccagguuaugcugugugaaccgacuauaaucgagagaaauauuaccgaaaucguguauuugacaaacaccacuauugagaaggaaaucugccccaaaccugcugaguacaggaauuggaguaagccacagugugggauaacaggauucgcacccuuuagcaaagacaacuccauucgguuaucugccgguggcgauaucuggguaacccgcgagccuuaugugucgugcgacccagauaaguguuaccaauucgcgcuggggcagggaacgacucuaaauaacguccauucaaauaacaccgcucgagaccguacacccuauagaacucuccugaugaaugaacuuggcgugccuuuucaccuggguaccaagcagguuugcauugccuggagcaguuccucuugucaugaugggaaagcaugguugcacgugugcaucacaggagacgauaagaacgccaccgcuagcuucaucuacaauggcaggcucgucgacuccgugguaucauggaguaaagagauucugcggacgcaggaaagcgaguguguuugcauaaacggcacuuguacaguggucaugaccgaugggucugcauccggaaaggccgacacuaaaauccuguuuauugaggaagguaagaucgugcauacaucaacccucagcggcagugcucaacacguggaggaaugcucuugcuauccacgcuacccgggggucagauguguuugcagggauaacuggaagggauccaaucggcccauaguggacauuaacaucaaagaucacagcaucguaucgucuuacguguguuccggcuuagucggugacacgccucgcaagaaugacucaaguagcuccucucauugccugaacccaaauaacgaggaagggggacacggcgugaaaggcugggccuucgaugacgggaaugauguuuggaugggacgaaccauuaacgagacaagcagacuugguuaugagacuuuuaaggugaucgaaggcuggucaaaucccaaaaguaaguugcagauuaacaggcaggucauaguggaccguggggaucgguccggauacagcggcaucuucucuguagaggguaaaucauguauuaaucgcugcuuuuauguugaacugaucagagggaggaaggaggaaaccgaggugcuauggacaaguaacagcaucgucguguucuguggcacuuccggaaccuacggcacagggucuuggccugacggagcggaucucaaucugaugccaauuuga

SEQ ID NO: 153076 - RNA, 1410 nt, Artificial Sequence
  derived and/or modified CDS sequence (opt3) from neuraminidase__InfluenzaA__AHL99597
augaaccccaaucagaagaucauuaccauaggcagcgugugcaugacaaucgggauggccaaccugauucuccaaaucggaaauauuaucuccauauggaucucucacucaauucaggucgguaaccagagucagaucgagacuuguaaucaaagcguuauuacguacgaaaacaauaccugggugaaccagacauauguaaauaucuccaacacuaauuucgcugugggccagucugucgugucgguuaaacuugcagggaacucaagccugugcccugugaguggaugggccauauacuccaaggacaauucugucagaauuggcagcaaaggugauguguuuguaaucagggagccauucauuuccuguucaccguuggaaugccggaccuuuuucuuaacacagggggcgcugcuaaacgacaagcauaguaauggaaccaucaaagaucgcagccccuaucgaacucucaugucuuguccuaucggcgagguuccaucccccuacaacucacguuuugaaagcguggcuuggagugccucugcaugccacgacggcauuaacuggcugacaauagggaucuccggaccugauagcggugccgucgcugugcuuaaguauaauggcauuaucaccgacacgauaaagucguggagaaacgauauucugaggacucaagagucugagugugcaugcgugaauggguccuguuucaccaucaugacagacggaccaucagauggccaggccaguuacaaaaucuuucggauugaaaaggguaaaaucgucaagagcguugagaugaacgcucccaauuaucauuacgaagagugcuccuguuacccugacucuagcgagauuacuugcgugugccgcgauaacuggcacgggucaaauagaccauggguaaguuucaaccagaauuuggaauaucagauaggauacaucuguuccggcauuuuuggcgacaacccgaggcccaaugauaaaaccgggagcugcggaccugugucuucaaacggugccaauggcgucaagggguucaguuuuaaguauggaaacggcguguggaucggucggacaaaaagcaucuccucucgcaagggguucgagaugauuugggacccaaauggcuggaccggaacggacaacaacuuuucgauaaaacaagauaucguuggcauuaaugaauggagcggguacuccggaucauucgugcagcaucccgagcucacuggucuggacuguauccgaccuugcuucugggucgaacugauuagaggcaggccaaaggagaacacaaucuggaccagugggucuagcauauccuuuuguggaguaaauucagauacugugggcuggagcuggcccgacggugcggagcucccguucacaaucgauaaauga

SEQ ID NO: 153077 - RNA, 1410 nt, Artificial Sequence
  derived and/or modified CDS sequence (opt3) from neuraminidase__InfluenzaA__AHL99608
augaaccccaaucagaagaucauuaccauaggcagcgugucccugacaaucucuacuauuugcgucuucaugcaaaucgccauucucaucacgaccguuacacuucacuuuaaacaguacgaguucaacucaccuccaaauaaccaggugaugcugugugaaccgacuauaaucgagagaaauauuaccgaaaucguauauuugacaaacaccacuauugagaaggaaaucugccccaaaccugcugaguacaggaauuggaguaagccacagugugggauaacaggauuugcacccuucagcaaagacaacuccauucgguuaucugccgguggcgauaucugggugacccgcgagccuuaugucucgugcgacccagauaaguguuaccaauuugcgcuggggcagggaacgacucuaaauaacgugcauucaaauaacaccguucgagaccguacacccuauagaacucuccugaugaaugaacuuggcgugccuuuccaccuggguaccaagcaggucugcauugcuuggagcaguuccucuugucaugaugggaaagccugguugcacgugugcaucacaggagacgauaagaacgcaaccgccagcuuuaucuacaauggcaggcucguagacuccguugugucauggaguaaagagauucugcggacgcaggaaagcgagugugucugcauaaacggcacuuguacaguggugaugaccgaugggucugcuuccggaaaggcagacacuaaaauccuguucauugaggaagguaagaucguccauacaucaacccucagcggcagugcccaacacguugaggaaugcucuugcuauccacgcuacccgggggugagauguguaugcagggauaacuggaagggauccaaucggcccauaguggacauuaacaucaaagaucacagcaucgucucgucuuacguguguuccggcuuaguuggugacacgccucgcaagaaugacucaaguagcuccucucauugccuggauccaaacaaugaggaagggggacacggcgugaaaggcugggcuuuugacgaugggaacgacgucuggaugggacgaaccauuaaugagacaagcagacuugguuaugagacuuucaaggugaucgaaggcuggucaaaccccaaaaguaaguugcagauuaauaggcagguaauaguugaucguggggaccgguccggauacagcggcaucuuuucuguggaggguaaaucauguauuaaccgcugcuucuaugucgaacugaucagagggaggaaggaggaaaccgaggugcuauggacaaguaauagcaucgucguguuuuguggcacuuccggaaccuacggcacagggucuuggccugauggagccgaccucaaccugaugccaauuuga

SEQ ID NO: 153078 - RNA, 1410 nt, Artificial Sequence
  derived and/or modified CDS sequence (opt3) from neuraminidase__InfluenzaA__AHL99620
augaaccccaaucagaagaucauuaccauaggcagcgugucccugacaaucucuacuauuugcuucuuuaugcaaaucgccauucucaucacgaccgucacacuucacuucaaacaguacgaguuuaacucaccuccaaauaaccagguuaugcugugugaaccgacuauaaucgagagaaauauuaccgaaaucguguauuugacaaacaccacuauugagaaggaaaucugccccaaaccugcugaguacaggaauuggaguaagccacagugugggauaacaggauucgcacccuuuagcaaagacaacuccauucgguuaucugccgguggcgauaucuggguaacccgcgagccuuaugugucgugcgacccagauaaguguuaccaauucgcgcuggggcagggaacgacucuaaauaacguccauucaaauaacaccgugcgagaccguacacccuauagaacucuccugaugaaugaacuuggcguuccuuuucaccuggguaccaaacaggugugcauugcuuggagcaguuccucuugucaugaugggaaggccugguugcacgucugcaucacaggagacgauaagaacgcaaccgccagcuucaucuacaauggcaaacucguggacuccguaguuucauggaguaaggagauucugaggacgcaggaaagcgagugugugugcauaaacggcacuuguacagucgugaugaccgaugggucugcuuccggaaaagcagacacuaagauccuguuuauugaggaagguaagaucgugcauacaucaacccucagcggcagugcccaacacgucgaggaaugcucuugcuauccacgguacccggggguucgcugugugugcagagauaacuggaaaggauccaauaggcccauaguagacauuaacaucaaggaucacagcaucgugucgucuuacgucuguuccggcuuagugggugacacgccucggaaaaaugacucaaguagcuccucucauugccuggauccaaacaaugaggaagggggacacggcguuaagggcugggcuuucgacgaugggaacgacguguggaugggacgcaccauuaaugagacaagccgacuugguuaugagacuuuuaaagucaucgaaggcuggucaaaccccaagaguaaauugcagauuaauagacaggugauaguagauaggggagaccgguccggguacagcggcaucuucucuguugaggguaagucauguauuaaccguugcuuuuauguggaacugauccgcgggagaaaggaggaaaccgagguccuauggacaaguaauagcaucguggucuucuguggcacuuccggaaccuacggcacagggucuuggccugauggagccgaccucaaccugaugccaauuuga

SEQ ID NO: 153079 - RNA, 1410 nt, Artificial Sequence
  derived and/or modified CDS sequence (opt3) from neuraminidase__InfluenzaA__AHL99632
augaaccccaaucagaagaucauuaccauaggcagcgugucccugacaaucucuacuauuugcuucuuuaugcagaucgccauucucaucacgaccgucacacuucacuucaaacaguacgaguuuaacucaccuccaaauaaccagguuaugcugugugaaccgacuaccauagagagaaauaucacagaaauuguguauuugaccaacacuacaaucgagaaggaaauuugccccaaaccugcugaguacaggaauuggaguaagccacagugugggaucaccggauucgcacccuuuagcaaagacaacuccauacgguuaucugccgguggcgauauuuggguaacgcgcgagccuuaugugucgugcgacccagauaaguguuaccaauucgcgcuggggcagggaacuacccuaaauaacguccauucaaauaacacagugcgagaccguacucccuauagaacccuccugaugaaugaacuuggcguuccuuuucaccuggguacaaaacaggugugcaucgcuuggagcaguuccucuugucaugaugggaaggccugguugcacgucugcauuaccggagacgauaagaacgcaacggccagcuucaucuacaauggcaggcucguggacuccguaguuucauggaguaaagagauccugcggacucaggaaagcgagugugugugcauuaacggcacauguaccgucgugaugacugaugggucugcuuccggaaaggcagacacaaaaauacuguuuaucgaggaagguaagauugugcauaccucaacgcucagcggcagugcccaacacgucgaggaaugcucuugcuauccacgcuacccggggguuagaugugugugcagggauaacuggaagggauccaaucggcccaucguagacauaaacauuaaagaucacagcaucgugucgucuuacgucuguuccggcuuagugggugacaccccucgcaagaaugacucaaguagcuccucucauugccuggauccaaacaaugaggaagggggacacggcguuaaaggcugggcuuucgacgaugggaacgacguguggaugggacgaacaaucaaugagacuagcagacuugguuaugagaccuuuaaggucauugaaggcuggucaaaccccaaaaguaaguugcagaucaauaggcaagugauuguagaucguggggaccgguccggauacagcggcauauucucuguugaggguaaaucauguaucaaccgcugcuuuuauguggaacugauuagagggaggaaggaggaaacagagguccuauggaccaguaauagcaucguggucuucuguggcacuuccggaacauacggcaccgggucuuggccugauggagccgaccucaaccugaugccaaucuga

SEQ ID NO: 153080 - RNA, 1410 nt, Artificial Sequence; identical to SEQ ID NO: 152869
  derived and/or modified CDS sequence (opt3) from neuraminidase__InfluenzaA__AHL99644

SEQ ID NO: 153081 - RNA, 1410 nt, Artificial Sequence
  derived and/or modified CDS sequence (opt3) from neuraminidase__InfluenzaA__AHL99668
augaaccccaaucagaagaucauuaccauaggcagcgugucccugacaaucucuacuauuugcuucuuuaugcagaucgccauucucaucacgaccgucacacuucacuucaaacaguacgaguuuaacucaccuccaaauaaccagguuaugcugugugaaccgacuauaaucgagagaaauauuaccgaaaucguguauuugacaaacaccacuguagagaaggaaauuugccccaaaccugcugaguacaggaauuggaguaagccacagugugggaucacaggauucgcacccuuuagcaaagacaacuccauacgguuaucugccgguggcgauauuugggugacccgcgagccuuaugucucgugcgacccagauaaguguuaccaauucgcgcuggggcagggaacgacucuaaauaacgugcauucaaauaacaccguucgagaccguacacccuauagaacucuccugaugaaugaacuuggcgugccuuuucaccuggguaccaagcaggucugcaucgcuuggagcaguuccucuugucaugaugggaaagccugguugcacgugugcauuacaggagacgauaagaacgcaaccgccagcuucaucuacaauggcaggcucguagacuccguugugucauggaguaaagagauccugcggacgcaggaaagcgagugugucugcauuaacggcacuuguacaguggugaugaccgaugggucugcuuccggaaaggcagacacuaaaauacuguuuaucgaggaagguaagauuguccauacaucaacccucagcggcagugcccaacacguugaggaaugcucuugcuauccacgcuacccgggggugagauguguaugcagggauaacuggaagggauccaaucggcccaucauagacauuaacaucaaagaucacagcaucgugucgucuuacgucuguuccggcuuagugggugacacgccucgcaagaaugacucaaguagcuccucucauugccuggauccaaacaaugaggaagggggacacggcguuaaaggcugggcuuucgacgaugggaacgacguguggaugggacgaaccauuaaugagacaagcagacuugguuaugagacuuuuaaggucaucgaaggcuggucaaaccccaaaaguaaguugcagauuaauaggcaagugauaguagaucguggggaccgguccggauacagcggcaucuucucuguugaggguaaaucauguauuaaccgcugcuuuuauguggaacugaucagagggaggaaggaggaaaccgagguccuauggacaaguaauagcaucguggucuucuguggcacuuccggaaccuacggcacagggucuuggccugauggagccgaccucaaccugaugccaauuuga

SEQ ID NO: 153082 - RNA, 1410 nt, Artificial Sequence; identical to SEQ ID NO: 150194
  derived and/or modified CDS sequence (opt3) from neuraminidase__InfluenzaA__AHL99680

SEQ ID NO: 153083 - RNA, 1410 nt, Artificial Sequence
  derived and/or modified CDS sequence (opt3) from neuraminidase__InfluenzaA__AHL99692
augaaccccaaucagaagaucauuaccauaggcagcgugucccugacaaucucuacuacgugcuucuuuaugcagauugccauccucauuaccacagucacucuucacuucaaacaguacgaguuuaacucaccuccaaauaaccagguuaugcugugugaaccgaccaucauagagagaaauaucacagaaauuguguauuugaccaacacuacaaucgagaaggaaauuugccccaaaccugcugaguacaggaauuggaguaagccacagugugggaucaccggauucgcacccuuuagcaaagacaacuccauacgguuaucugccgguggcgauauuuggguaacgcgcgagccuuaugugucgugcgacccagauaaguguuaccaauucgcgcuggggcagggaacuacccuaaauaacguccauucaaauaacacagugcgagaccguacucccuauagaacccuccugaugaaugaacuuggcguuccuuuucaccuggguacaaaacaggugugcaucgcuuggagcaguuccucuugucaugaugggaaggccugguugcacgucugcauuaccggagacgauaagaacgcaacggccagcuucaucuacaauggcaggcucguggacuccguaguuucauggaguaaagagauccugcggacucaggaaagcgagugugugugcauuaacggcacauguaccgucgugaugacugaugggucugcuuccggaaaggcagacacaaaaauacuguuuaucgaggaagguaagauugugcauaccucaacgcucagcggcagugcccaacacgucgaggaaugcucuugcuauccacgcuacccggggguuagaugugugugcagggauaacuggaagggauccaaucggcccaucguagacauaaacauuaaagaucacagcaucgugucgucuuacgucuguuccggcuuagugggugacaccccucgcaagaaugacucaaguagcuccucucauugccuggauccaaacaaugaggaagggggacacggcguuaaaggcugggcuuucgacgaugggaacgacguguggaugggacgaacaaucaaugagacuagcagacuugguuaugagaccuuuaaggucauugaaggcuggucaaaccccaaaaguaaguugcagaucaauaggcaagugauuguagaucguggggaccgguccggauacagcggcauauucucuguugaggguaaaucauguaucaaccgcugcuuuuauguggaacugauuagagggaggaaggaggaaacagagguccuauggaccaguaauagcaucguggucuucuguggcacuuccggaacauacggcaccgggucuuggccugauggagccgaccucaaccugaugccaaucuga

SEQ ID NO: 153084 - RNA, 1410 nt, Artificial Sequence; identical to SEQ ID NO: 150194
  derived and/or modified CDS sequence (opt3) from neuraminidase__InfluenzaA__AHL99704

SEQ ID NO: 153085 - RNA, 1410 nt, Artificial Sequence; identical to SEQ ID NO: 150194
  derived and/or modified CDS sequence (opt3) from neuraminidase__InfluenzaA__AHL99716

SEQ ID NO: 153086 - RNA, 1410 nt, Artificial Sequence; identical to SEQ ID NO: 153076
  derived and/or modified CDS sequence (opt3) from neuraminidase__InfluenzaA__AHL99740

SEQ ID NO: 153087 - RNA, 1410 nt, Artificial Sequence
  derived and/or modified CDS sequence (opt3) from neuraminidase__InfluenzaA__AHL99751
augaaccccaaucagaagaucauuaccauaggcagcgugucccugacaaucucuacuauuugcuucuuuaugcagaucgccauucucaucacgaccgucacacuucacuucaaacaguacgaguuuaacucaccuccaaauaaccagguuaugcugugugaaccgacuauaaucgagagaaauauuaccgaaaucguguauuugacaaacaccacuguagagaaggaaauuugccccaaaccugcugaguacaggaauuggaguaagccacagugugggaucacaggauucgcacccuuuagcaaagacaacuccauacgguuaucugccgguggcgauauuugggugacccgcgagccuuaugucucgugcgacccagauaaguguuaccaauucgcgcuggggcagggaacgacucuaaauaacgugcauucaaauaacaccgcucgagaccguacacccuauagaacucuccugaugaaugaacuuggcguuccuuuucaccuggguaccaaacaggugugcaucgccuggagcaguuccucuugucaugaugggaaggcaugguugcacgucugcauuacaggagacgauaagaacgccaccgcuagcuucaucuacaauggcaggcucguggacuccguaguuucauggaguaaagagauccugcggacgcaggaaagcgagugugugugcauuaacggcacuuguacagucgugaugaccgaugggucugcauccggaaaggccgacacuaaaauacuguuuaucgaggaagguaagauugugcauacaucaacccucagcggcagugcucaacacgucgaggaaugcucuugcuauccacgcuacccggggguuagaugugugugcagggauaacuggaagggauccaaucggcccaucguagacauaaacauuaaagaucacagcaucgugucgucuuacgucuguuccggcuuagugggugacacgccucgcaagaaugacucaaguagcuccucucauugccugaacccaaauaacgaggaagggggacacggcguuaaaggcugggccuucgaugacgggaaugauguguggaugggacgaaccaucaacgagacaagcagacuugguuaugagacuuuuaaggucauugaaggcuggucaaaucccaaaaguaaguugcagaucaacaggcaagugauuguagaccguggggaucgguccggauacagcggcauauucucuguugaggguaaaucauguaucaaucgcugcuuuuauguggaacugauuagagggaggaaggaggaaaccgagguccuauggacaaguaacagcaucguggucuucuguggcacuuccggaaccuacggcacagggucuuggccugacggagcggaucucaaucugaugccaaucuga

SEQ ID NO: 153088 - RNA, 1410 nt, Artificial Sequence
  derived and/or modified CDS sequence (opt3) from neuraminidase__InfluenzaA__AHL99763
augaaccccaaucagaagaucauuaccauaggcagcgugucccugacaaucucuacuauuugcuucuuuaugcagaucgccauucucaucacgaccgucacacuucacuucaaacaguacgaguuuaacucaccuccaaauaaccagguuaugcugugugaaccgacuauaaucgagagaaauauuaccgaaaucguguauuugacaaacaccacuauugagaaggaaaucugccccaaaccugcugaguacaggaauuggaguaagccacagugugggauaacaggauucgcacccuuuagcaaagacaacuccauucgguuaucugccgguggcgauaucuggguaacccgcgagccuuaugugucgugcgacccagauaaguguuaccaauucgcgcuggggcagggaacgacucuaaauaacguccauucaaauaacaccgugcgagaccguacacccuauagaacucuccugaugaaugaacuuggcguuccuuuucaccuggguaccaaacaggugugcauugcuuggagcaguuccucuugucaugaugggaaggccugguugcacgucugcaucacaggagacgauaagaacgcaaccgccagcuucaucuacaauggcaggcucguggacuccguaguuucauggaguaaagagauucugcggacgcaggaaagcgagugugugugcauaaacggcacuuguacagucgugaugaccgaugggucugcuuccggaaaggcagacacuaaaauccuguuuauugaggaagguaagaucgugcauacaucaacccucagcggcagugcccaacacgucgaggaaugcucuugcuauccacgcuacccggggguuagaugugugugcagggauaacuggaagggauccaaucggcccauaguagacauuaacaucaaagaucacagcaucgugucgucuuacgucuguuccggcuuagugggugacacgccucgcaagaaugacucaaguagcuccucucauugccuggauccaaacaaugaggaagggggacacggcguuaaaggcugggcuuucgacgaugggaacgacguguggaugggacgaaccauuaaugagacaagcagacuugguuaugagacuuuuaaggucaucgaaggcuggucaaaccccaaaaguaaguugcagaugaauaggcaagugauuguagaucguggggaccgguccggauacagcggcauauucucuguugaggguaaaucauguaucaaccgcugcuuuuauguggaacugauuagagggaggaaggaggaaaccgagguccuauggacaaguaauagcaucguggucuucuguggcacuuccggaaccuacggcacagggucuuggccugauggagccgaccucaaccugaugccaaucuga

SEQ ID NO: 153089 - RNA, 1410 nt, Artificial Sequence; identical to SEQ ID NO: 150194
  derived and/or modified CDS sequence (opt3) from neuraminidase__InfluenzaA__AHL99775

SEQ ID NO: 153090 - RNA, 1410 nt, Artificial Sequence
  derived and/or modified CDS sequence (opt3) from neuraminidase__InfluenzaA__AHL99787
augaaccccaaucagaagaucauuaccauaggcagcgugucccugacaaucucuacuauuugcuucuuuaugcagaucgccauucucaucacgaccgucacacuucacuucaaacaguacgaguuuaacucaccuccaaauaaccagguuaugcugugugaaccgacuauaaucgagagaaauauuaccgaaaucguguauuugacaaacaccacuauugagaaggaaaucugccccaaaccugcugaguacaggaauuggaguaagccacagugugggauaacaggauucgcacccuuuagcaaagacaacuccauucgguuaucugccgguggcgauaucuggguaacccgcgagccuuaugugucgugcgacccagauaaguguuaccaauucgcgcuggggcagggaacgacucuaaauaacguccauucaaauaacaccgugcgagaccguacacccuauagaacucuccugaugaaugaacuuggcguuccuuuucaccuggguaccaaacaggugugcauugcuuggagcaguuccucuugucaugaugggaaggccugguugcacgucugcaucacaggagacgauaagaacgcaaccgccagcuucaucuacaauggcaggcucguggacuccguaguuucauggaguaaagagauucugcggacgcaggaaagcgagugugugugcauaaacggcacuuguacagucgugaugaccgaugggucugcuuccggaaaggcagacacuaaaauccuguuuauugaggaagguaagaucgugcauacaucaacccucagcggcagugcccaacacgucgaggaaugcucuugcuauccacgcuacccggggguuagaugugugugcagggauaacuggaagggauccaaucggcccauaguagacauuaacaucaaagaucacagcaucgugucgucuuacgucuguuccggcuuagugggugacacgccucgcaagaaugacucaaguagcuccucucauugccuggauccaaacaaugaggaagggggacacggcguuaaaggcugggcuuucgacgaugggaacgacguguggaugggacgaaccauuaaugagacaagcagacuugguuaugagacuuuuaaggucaucgaaggcuggucaaaccccgagaguaaauugcagauuaauaggcaagugauaguagaucguggggaccgguccggauacagcggcaucuucucuguugaagguaagucauguauuaaccgcugcuuuuauguggagcugaucagagggaggaaagaagagaccgagguccuauggacaaguaauagcaucguggucuucuguggcacuuccggaaccuacggcacagggucuuggccugauggagccgaccucaaccugaugccaauuuga

SEQ ID NO: 153091 - RNA, 1410 nt, Artificial Sequence
  derived and/or modified CDS sequence (opt3) from neuraminidase__InfluenzaA__AHL99799
augaaccccaaucagaagaucauuaccauaggcagcgugucccugacaaucucuacuauuugcuucuuuaugcaaaucgccauucucaucacgaccgucacacuucacuucaaacaguacgaguuuaacucaccuccaaauaaccagguuaugcugugugaaccgacuauaaucgagagaaauauuaccgaaaucguguauuugacaaacaccacuauugagaaggaaaucugccccaaaccugcugaguacaggaauuggaguaagccacagugugggauaacaggauucgcacccuuuagcaaagacaacuccauucgguuaucugccgguggcgauaucuggguaacccgcgagccuuaugugucgugcgacccagauaaguguuaccaauucgcgcuggggcagggaacgacucuaaauaacguccauucaaauaacaccgugcgagaccguacacccuauagaacucuccugaugaaugaacuuggcguuccuuuucaccuggguaccaaacaggugugcauugcuuggagcaguuccucuugucaugaugggaaggccugguugcacgucugcaucacaggagacgauaagaacgcaaccgccagcuucaucuacaauggcaggcucguggacuccguaguuucauggaguaaagagauucugcggacgcaggaaagcgagugugugugcauaaacggcacuuguacagucgugaugaccgaugggucugcuuccggaaaggcagacacuaaaauccuguuuauugaggaagguaagaucgugcauacaucaacccucagcggcagugcccaacacgucgaggaaugcucuugcuauccacgcuacccggggguuagauguauaugcagggauaacuggaagggauccaaucggcccauuguggacaucaacaucaaagaucacagcauuguaucgucuuacguguguuccggcuuagucggugacacgccucgcaagaaugacucaaguagcuccucucauugccuggggccaaacaaugaggaaggaggccacggcgugaaagggugggcuuucgaugacggaaacgauguuuggaugggucgaaccaucaaugagacaagcagacuuggcuaugagacuuuuaaggugauugaaggguggucaaaccccaaaaguaaguugcagauaaauaggcaggucaucguggaccggggagaucguuccggcuacagcgguauuuucucuguagaggggaaaucauguaucaaccgcugcuuuuauguugaacugaucagaggcaggaaggaggaaaccgaggugcuauggacaaguaauagcauugucguguucuguggaacuuccggcaccuacgggacaggaucuuggccugacggugccgaucucaaccugaugccaauauga

SEQ ID NO: 153092 - RNA, 1410 nt, Artificial Sequence; identical to SEQ ID NO: 150194
  derived and/or modified CDS sequence (opt3) from neuraminidase__InfluenzaA__AHL99811

SEQ ID NO: 153093 - RNA, 1410 nt, Artificial Sequence
  derived and/or modified CDS sequence (opt3) from neuraminidase__InfluenzaA__AHL99823
augaaccccaaucagaagaucauuaccauaggcagcgugucccugacaaucucuacuauuugcuucuuuaugcagaucgccauucucaucacgaccgucacacuucacuucaaacaguacgaguuuaacucaccuccaaauaaccagguuaugcugugugaaccgacuauaaucgagagaaauauuaccgaaaucguguauuugacaaacaccacuauugagaaggaaaucugccccaaaccugcugaguacaggaauuggaguaagccacagugugggauaacaggauucgcacccuuuagcaaagacaacuccauucgguuaucugccgguggcgauaucuggguaacccgcgagccuuaugugucgugcgacccagauaaguguuaccaauucgcgcuggggcagggaacgacucuaaauaacguccauucaaauaacaccgugcgagaccguacacccuauagaacucuccugaugaaugaacuuggcguuccuuuucaccuggguaccaaacaggugugcauugcuuggagcaguuccucuugucaugaugggaaggccugguugcacgucugcaucacaggagacgauaagaacgcaaccgccagcuucaucuacaauggcaggcucguggacuccguaguuucauggaguaaagagauucugcggacgcaggaaagcgagugugugugcauaaacggcacuugugcugucgugaugacagaugggucugcauccggaaaggccgacaccaaaauccuguuuauugaggaagguaagaucgugcauacuucaacacucagcggcagugcucaacacgucgaggaaugcucuugcuauccacgcuacccggggguuagaugugugugcagggauaacuggaagggauccaaucggcccauaguagacauuaacaucaaagaucacagcaucgugucgucuuacgucuguuccggcuuagugggugacaccccucgcaagaaugacucaaguagcuccucucauugccuggauccaaacaaugaggaagggggacacggcguuaaaggcugggccuucgacgaugggaacgacguguggaugggacgaacgauuaaugagaccagcagacuugguuaugagacauuuaaggucaucgaaggcuggucaaaccccaaaaguaaguugcagauuaauaggcaagugauaguagaucguggggaccgguccggauacagcggcaucuucucuguugaggguaaaucauguauuaaccgcugcuuuuauguggaacugaucagagggaggaaggaggaaacugagguccuauggaccaguaauagcaucguggucuucuguggcacauccggaacuuacggcaccgggucuuggccugauggagcggaccucaaccugaugccaauuuga

SEQ ID NO: 153094 - RNA, 1410 nt, Artificial Sequence
  derived and/or modified CDS sequence (opt3) from neuraminidase__InfluenzaA__AHL99835
augaaccccaaucagaagaucauuaccauaggcagcgugucccugacaaucucuacuauuugcuucuuuaugcagaucgccauucucaucacgaccgucacacuucacuucaaacaguacgaguuuaacucaccuccaaauaaccagguuaugcugugugaaccgacuauaaucgagagaaauauuaccgaaaucguguauuugacaaacaccacuauugagaaggaaaucugccccaaaccugcugaguacaggaauuggaguaagccacagugugggauaacaggauucgcacccuuuagcaaagacaacuccauucgguuaucugccgguggcgauaucuggguaacccgcgagccuuaugugucgugcgcgccagacaaguguuaccaauucgcucuggggcagggaacgacucuaaauaacguccauucaaauaacaccgugcgagaucguacacccuauagaacucuccugaugaaugaacuuggcguuccuuuucaccuggguaccaaacaggugugcauugccuggagcaguuccucuugucaugacgggaaggcaugguugcacgucugcaucacaggagaugacaagaacgccaccgcuagcuucaucuacaauggcaggcucguggauuccguaguuucauggaguaaagagauucugcggacgcaggaaagcgagugugugugcauaaacggcacuuguacagucgugaugaccgacgggucugcauccggaaaggccgauacuaaaauccuguuuauugaggaagguaagaucgugcauacaucaacccucagcggcagugcucaacacgucgaggaaugcucuugcuauccacgcuacccggggguuagaugugugugcagggacaacuggaagggauccaaucggcccauaguagauauuaacaucaaagaccacagcaucgugucgucuuacgucuguuccggcuuagugggugauacgccucgcaagaaugacucaaguagcuccucucauugccuggacccaaacaaugaggaagggggacacggcguuaaaggcugggccuucgaugacgggaacgauguguggaugggacgaaccauuaaugagacaagcagacuugguuaugagacuuuuaaggucaucgaaggcuggucaaaccccaaaaguaaguugcugauuaauaggcaagugauaguagaccguggggaucgguccggauacagcggcaucuucucuguugaggguaaaucauguauuaaccgcugcuuuuauguggaacuaaucagagggaggaaggaggaaaccgagguccucuggacaaguaauagcaucguggucuucuguggcacuuccggaaccuacggcacagggucuuggccugacggagcggaucugaaccuuaugccaauuuga

SEQ ID NO: 153095 - RNA, 1410 nt, Artificial Sequence; identical to SEQ ID NO: 150194
  derived and/or modified CDS sequence (opt3) from neuraminidase__InfluenzaA__AHL99847

SEQ ID NO: 153096 - RNA, 1410 nt, Artificial Sequence; identical to SEQ ID NO: 151423
  derived and/or modified CDS sequence (opt3) from neuraminidase__InfluenzaA__AHL99859

SEQ ID NO: 153097 - RNA, 1410 nt, Artificial Sequence
  derived and/or modified CDS sequence (opt3) from neuraminidase__InfluenzaA__AHL99871
augaaccccaaucagaagaucauuaccauaggcagcgugucccugacaaucucuacuauuugcuucuuuaugcaaaucgccauucucacgaccacagucacucuucacuucaaacaguacgaguuuaacucaccuccaaauaaccagguuaugcugugugaaccgaccaucauagagagaaauaucacagaaauuguguauuugaccaacacuacaaucgagaaggaaauuugccccaaaccugcugaguacaggaauuggaguaagccacagugugacaucaccggguucgcacccuuuagcaaagauaacuccauacgguuaucugccggaggugacauuuggguaacgcgcgagccuuaugugucgugcgauccagacaaguguuaccaauucgcgcugggccaggggacuacccuaaauaacguccauucaaauaacacagugcgagaucguacucccuauagaacccuccugaugaaugaacuuggaguuccuuuucaccugggcacaaaacaggugugcaucgcuuggagcaguuccucuugucaugacgguaaagccugguugcacgucugcauuaccggggaugacaagaacgcaacggccagcuucaucuacaauggaaggcucguggauuccguaguuucauggaguaaagagauccugcggacucaggaaagcgagugugugugcauuaacggcacauguaccgucgugaugacugacggcucugcuuccgggaaggcagauacaaaaauacuguuuaucgaggaaggacgcauugugcauaccucaacgcucagcgguagugcccaacacgucgaggaaugcucuugcuauccaagauacccgggcguuaggugugugugccgggacaacuggaagggguccaaucgccccaucguagauauaaacauuaaggaccacagcaucgugucgcgauacgucuguucuggauuagugggcgacaccccuagaaagaaugauuccucaaguagcucccauugccuggacccaaacaaugaggaaggugggcacggaguuaagggcugggcuuucgaugacggcaacgauguguggauggggaggacaaucaaugagacuucucggcuuggauaugagaccuuuaaagucauugaagguuggagcaaccccaagucaaaauugcagaucaaucgucaggugauuguagaccgcggcgauagaaguggguacuccggaauauucagcguugagggcaagucuuguaucaacaggugcuuuuauguggaacugauucggggucgaaaagaggaaacagagguccuauggacuucaaauaguaucguggucuucugugggaccagcggcacauacggaaccggcuccuggccugacggggccgaucucaaccugaugccaaucuga

SEQ ID NO: 153098 - RNA, 1410 nt, Artificial Sequence; identical to SEQ ID NO: 150194
  derived and/or modified CDS sequence (opt3) from neuraminidase__InfluenzaA__AHL99883

SEQ ID NO: 153099 - RNA, 1410 nt, Artificial Sequence; identical to SEQ ID NO: 153075
  derived and/or modified CDS sequence (opt3) from neuraminidase__InfluenzaA__AHL99895

SEQ ID NO: 153100 - RNA, 1410 nt, Artificial Sequence; identical to SEQ ID NO: 150194
  derived and/or modified CDS sequence (opt3) from neuraminidase__InfluenzaA__AHL99907

SEQ ID NO: 153101 - RNA, 1410 nt, Artificial Sequence; identical to SEQ ID NO: 150194
  derived and/or modified CDS sequence (opt3) from neuraminidase__InfluenzaA__AHL99919

SEQ ID NO: 153102 - RNA, 1410 nt, Artificial Sequence
  derived and/or modified CDS sequence (opt3) from neuraminidase__InfluenzaA__AHL99943
augaaccccaaucagaagaucauuaccauaggcagcgugucccugacaaucucuacuauuugcuucuuuaugcagaucgccauucucaucacgaccgucacacuucacuucaaacagcaugaguuuaacucaccuccaaauaaccagguuaugcugugugaaccgacuauaaucgagagaaauauuaccgaaaucguguacuugacaaacaccacuauugagaaggaaaucugccccaaaccugcugaguauaggaauuggaguaagccacagugugggauaacaggauucgcacccuuuagcaaagacaacuccauucgguuaucugccgguggcgauaucuggguaacccgcgagccuuacgugucgugcgacccagauaaguguuaucaauucgcgcuggggcagggaacgacucuaaauaacguccacucaaauaacaccgugcgagaccguacacccuacagaacucuccugaugaaugaacuuggcguuccuuuucaucuggguaccaaacaggugugcauugcuuggagcaguuccucuugucacgaugggaaggccugguugcaugucugcaucacaggagacgauaagaacgcaaccgccagcuucaucuauaauggcaggcucguggacuccguaguuucauggaguaaagagauucugcggacgcaggaaagcgagugugugugcauaaacggcacuuguacagucgugaugaccgaugggucugcuuccggaaaggcagacacuaaaauccuguuuauugaggaagguaagaucgugcacacaucaacccucagcggcagugcccaacacgucgaggaaugcucuugcuacccacgcuauccggggguuagaugugugugcagggauaacuggaagggauccaaucggcccauaguagacauuaacaucaaagaucauagcaucgugucgucuuacgucuguuccggcuuagugggugacacgccucgcaagaaugacucaaguagcuccucucacugccuggauccaaacaaugaggaagggggacauggcguuaaaggcugggcuuucgacgaugggaacgacguguggaugggacgaaccauuaaugagacaagcagacuugguuacgagacuuuuaaggucaucgaaggcuggucaaaccccaaaaguaaguugcagauuaauaggcaagugauaguagaucguggggaccgguccggauauagcggcaucuucucuguugaggguaaaucauguauuaaccgcugcuuuuacguggaacugaucagagggaggaaggaggaaaccgagguccuauggacaaguaauagcaucguggucuucuguggcacuuccggaaccuauggcacagggucuuggccugauggagccgaccucaaccugaugccaauuuga

SEQ ID NO: 153103 - RNA, 1410 nt, Artificial Sequence; identical to SEQ ID NO: 150194
  derived and/or modified CDS sequence (opt3) from neuraminidase__InfluenzaA__AHL99955

SEQ ID NO: 153104 - RNA, 1410 nt, Artificial Sequence
  derived and/or modified CDS sequence (opt3) from neuraminidase__InfluenzaA__AHL99967
augaaccccaaucagaagaucauuaccauaggcagcgugucccugacaaucucuacuauuugcuucuuuaugcaaaucgccauucucaucacgaccgucacacuucacuucaaacaguacgaguuuaacucaccuccaaauaaccagguuaugcugugugaaccgacuauaaucgagagaaauauuaccgaaaucguguauuugacaaacaccacuauugagaaggaaaucugccccaaaccugcugaguacaggaauuggaguaagccacagugugggauaacaggauucgcacccuuuagcaaagacaacuccauucgguuaucugccgguggcgauaucuggguaacccgcgagccuuaugugucgugcgacccagauaaguguuaccaauucgcgcuggggcagggaacgacucuaaauaacguccauucaaauaacaccgugcacgaccgaacacccuaucguacucuccugaugaaugaacuuggcguuccuuuucaucuggguaccaaacaggugugcauugcuuggagcaguuccucuugucacgaugggaaggccugguugcaugucugcaucacaggagacgauaagaacgcaaccgccagcuucaucuacaauggcagacucguggacuccguaguuucauggaguaaagagauucugaggacgcaggaaagcgagugugugugcauaaacggcacuuguacagucgugaugaccgaugggucugcuuccggaaaggcagacacuaaaauccuguuuauugaggaagguaagaucgugcacacaucaacccucagcggcagugcccaacacgucgaggaaugcucuugcuauccacgguacccggggguucgcugugugugcagagauaacuggaagggauccaauaggcccauaguagacauuaacaugaaagaucauagcaucgugucgucuuacgucuguuccggcuuagugggugacacgccucggaagaaugacucaaguagcuccucucacugccuggauccaaacaaugaggaagggggacauggcguuaaaggcugggcuuucgacgaugggaacgacguguggaugggacgcaccaucaaugagacaagccgacuugguuaugagacuuuuaaggucauugaaggcuggucaaaccccaaaaguaaguugcagaucaauagacaggugauuguagauaggggagaccgguccggguacagcggcauauucucuguugaggguaaaucauguaucaaccguugcuuuuauguggaacugauucgcgggagaaaggaggaaaccgagguccuauggacaaguaauagcaucguggucuucuguggcacuuccggaaccuacggcacagggucuuggccugauggagccgaccucaaccugaugccaaucuga

SEQ ID NO: 153105 - RNA, 1410 nt, Artificial Sequence
  derived and/or modified CDS sequence (opt3) from neuraminidase__InfluenzaA__AHL99979
augaaccccaaucagaagaucauuaccauaggcagcgugucccugacaaucucuacuauuugcuucuuuaugcagaucgccauucucaucacgaccgucgcacuucacuucaaacagcaugaguuuaacucaccuccaaauaaccagguuaugcugugugaaccgacaauaaucgagagaaauauuacugaaaucguguacuugaccaacacaaccauugagaaggaaaucugccccaaaccugcugaguauaggaauuggaguaagccacagugugggauaacuggauucgcccccuuuagcaaagacaacuccauucgguuaucugcggguggcgauaucuggguaacacgcgagccuuacgugucgugcgacccagauaaguguuaucaauucgcucuggggcagggaaccacgcuaaauaacguccacucaaauaacacugugcgagaccguacccccuacagaacacuccugaugaaugaacuuggcguuccuuuucaucuggguacuaaacaggugugcauugccuggagcaguuccucuugucacgaugggaaggcaugguugcaugucugcaucaccggagacgauaagaacgccacagcuagcuucaucuauaauggcaggcucguggacuccguaguuucauggaguaaagagauucugcggacccaggaaagcgagugugugugcauaaacggcacguguacugucgugaugacagaugggucugcauccggaaaggccgacaccaaaauccuguuuauugaggaagguaagaucgugcacacuucaacacucagcggcagugcucaacacgucgaggaaugcucuugcuacccacgcuauccggggguuagaugugugugcagggauaacuggaagggauccaaucggcccauaguagacauuaacaucaaagaucauagcaucgugucgucuuacgucuguuccggcuuagugggugacaccccucgcaagaaugacucaaguagcuccucucacugccuggauccaaacaaugaggaagggggacauggcguuaaaggcugggccuucgacgaugggaacgacguguggaugggacgaacgauuaaugagaccagcagacuugguuacgagacauuuaaggucaucgaaggcuggucaaaccccaaaaguaaguugcagauuaauaggcaagugauaguagaucguggggaccgguccggauauagcggcaucuucucuguugaggguaaaucauguauuaaccgcugcuuuuacguggaacugaucagagggaggaaggaggaaacugagguccuauggaccaguaauagcaucguggucuucuguggcacauccggaacuuauggcaccgggucuuggccugauggagcggaccucaaccugaugccaauuuga

SEQ ID NO: 153106 - RNA, 1410 nt, Artificial Sequence; identical to SEQ ID NO: 153102
  derived and/or modified CDS sequence (opt3) from neuraminidase__InfluenzaA__AHL99991

SEQ ID NO: 153107 - RNA, 1410 nt, Artificial Sequence; identical to SEQ ID NO: 150194
  derived and/or modified CDS sequence (opt3) from neuraminidase__InfluenzaA__AHM00004

SEQ ID NO: 153108 - RNA, 1410 nt, Artificial Sequence; identical to SEQ ID NO: 150194
  derived and/or modified CDS sequence (opt3) from neuraminidase__InfluenzaA__AHM00016

SEQ ID NO: 153109 - RNA, 1410 nt, Artificial Sequence; identical to SEQ ID NO: 150194
  derived and/or modified CDS sequence (opt3) from neuraminidase__InfluenzaA__AHM00028

SEQ ID NO: 153110 - RNA, 1410 nt, Artificial Sequence; identical to SEQ ID NO: 153102
  derived and/or modified CDS sequence (opt3) from neuraminidase__InfluenzaA__AHM00040

SEQ ID NO: 153111 - RNA, 1410 nt, Artificial Sequence; identical to SEQ ID NO: 150194
  derived and/or modified CDS sequence (opt3) from neuraminidase__InfluenzaA__AHM00052

SEQ ID NO: 153112 - RNA, 1410 nt, Artificial Sequence; identical to SEQ ID NO: 151058
  derived and/or modified CDS sequence (opt3) from neuraminidase__InfluenzaA__AHM00064

SEQ ID NO: 153113 - RNA, 1410 nt, Artificial Sequence; identical to SEQ ID NO: 150194
  derived and/or modified CDS sequence (opt3) from neuraminidase__InfluenzaA__AHM00076

SEQ ID NO: 153114 - RNA, 1410 nt, Artificial Sequence; identical to SEQ ID NO: 150194
  derived and/or modified CDS sequence (opt3) from neuraminidase__InfluenzaA__AHM00088

SEQ ID NO: 153115 - RNA, 1410 nt, Artificial Sequence
  derived and/or modified CDS sequence (opt3) from neuraminidase__InfluenzaA__AHM00100
augaaccccaaucagaagaucauuaccauaggcagcaucugcaugacaauugggauggccaaccugauccuccaaauuggaaauaucauauccaucuggauuucucacucaauccagcuugguaaccagagucagauugagacuuguaaucaaagcgugaucacguacgaaaacaauaccugggucaaccagacauauguuaauauauccaacacuaauuucgcugcaggccagucugugguaucggugaaacuggccgggaacagcagcuugugcccugucaguggaugggcgauuuacuccaaggacaauucuaucagaauuggcagcaaaggugauguguuuguuaucagggagccauucaucuccuguucaccguuagaaugccggaccuuuuuccugacacagggggcucuacucaacgacaagcauaguaauggaaccauuaaagaucgcagccccuaucgaacucugaugucuuguccuauaggcgaggugccaucccccuacaacucacguuuugaaagcgucgccuggagugcaucugccugccacgacggcaucaacuggcuuacaauugggaucuccggaccugauaauggugcuguggcaguacugaaguauaacggcguuauaaccgacacgauuaagagcuggagaaauaacaucuugaggacucaagagucggagugugccugcgugaaugggucuuguuucaccaucaugacagauggaccauccgacggccaggcuucauacaaaauuuuucggaucgaaaaggguaaaauugucaagaguguggagaugaacgcccccaauuaucauuacgaagagugcagcuguuacccugauuccucugagauaacuugcgugugccgcgacaacuggcacgggagcaauagaccaugggucucauucaaccagaaucucgaauaucagaucggauacauuuguaguggcaucuuuggcgauaacccgaggcccaaugacaaaaccggguccugcggaccuguuagcucuaacggugcgaauggcgugaagggguucucauuuaaguauggaaacggcguauggaucggucggacaaaaaguauuagcucccgcaagggguucgagaugauaugggauccaaacggcuggaccggaacggacaauaacuuuucuacuaaacaagacaucgugggcauuaaugaauggucgggguacagcggauccuucguccagcaucccgagcugacaggucuggauuguauccgaccuugcuucuggguggaacucauuagaggcaggccaaaggagaacaccaucuggacuucagggaguucuauaucauuuuguggaguuaauuccgacacagugggcuggucauggcccgauggugcagaguuaccguucaccaucgacaacuga

SEQ ID NO: 153116 - RNA, 1410 nt, Artificial Sequence; identical to SEQ ID NO: 153038
  derived and/or modified CDS sequence (opt3) from neuraminidase__InfluenzaA__AHM00111

SEQ ID NO: 153117 - RNA, 1410 nt, Artificial Sequence; identical to SEQ ID NO: 153102
  derived and/or modified CDS sequence (opt3) from neuraminidase__InfluenzaA__AHM00123

SEQ ID NO: 153118 - RNA, 1410 nt, Artificial Sequence; identical to SEQ ID NO: 151423
  derived and/or modified CDS sequence (opt3) from neuraminidase__InfluenzaA__AHM00135

SEQ ID NO: 153119 - RNA, 1410 nt, Artificial Sequence; identical to SEQ ID NO: 151931
  derived and/or modified CDS sequence (opt3) from neuraminidase__InfluenzaA__AHM00147

SEQ ID NO: 153120 - RNA, 1410 nt, Artificial Sequence; identical to SEQ ID NO: 153102
  derived and/or modified CDS sequence (opt3) from neuraminidase__InfluenzaA__AHM00159

SEQ ID NO: 153121 - RNA, 1410 nt, Artificial Sequence; identical to SEQ ID NO: 150194
  derived and/or modified CDS sequence (opt3) from neuraminidase__InfluenzaA__AHM00171

SEQ ID NO: 153122 - RNA, 1410 nt, Artificial Sequence; identical to SEQ ID NO: 150194
  derived and/or modified CDS sequence (opt3) from neuraminidase__InfluenzaA__AHM00183

SEQ ID NO: 153123 - RNA, 1410 nt, Artificial Sequence
  derived and/or modified CDS sequence (opt3) from neuraminidase__InfluenzaA__AHM00195
augaaccccaaucagaagaucauuaccauaggcagcgugucccugacaaucucuacuauuugcuucuuuaugcaaaucgccauucucaucacgaccgucacacuucacuucaaacaguacgaguuuaacucaccuccaaauaaccagguuaugcugugugaaccgacuauaaucgagagaaauauuaccgaaaucguguauuugacaaacaccacuauugagaaggaaaucugccccaaaccugcugaguacaggaauuggaguaagccacagugugacauaacaggguucgcacccuuuagcaaagauaacuccauucgguuaucugccggaggugacaucuggguaacccgcgagccuuaugugucgugcgauccagacaaguguuaccaauucgcgcugggccaggggacgacucuaaauaacguccauucaaauaacaccgugcgagaucguacacccuauagaacucuccugaugaaugaacuuggaguuccuuuucaccugggcaccaaacaggugugcauugcuuggagcaguuccucuugucaugacgguaaggccugguugcacgucugcaucacaggggaugacaagaacgcaaccgccagcuucaucuacaauggaaggcucguggauuccguaguuucauggaguaaagagauucugcggacgcaggaaagcgagugugugugcauaaacggcacuuguacagucgugaugaccgacggcucugcuuccgggaaggcagauacuaaagugcuguuuaucgaggaaggaaagauuguccauacaucaacccucagcgguagugcccaacacguugaggaaugcucuugcuauccacgcuacccgggcgugagauguguaugcagggacaacuggaagggguccaaucggcccaucguggauauaaacauuaaagaccacagcaucgucucgcgcuacguguguucuggauuaguuggcgacacgccucgaaagaaugauuccucaaguagcucccauugccuggacccaaacaaugaggaaggugggcacggagugaaaggcugggcuuucgaugacggcaacgaugucuggauggggagaaccaucaaugagacaucuaggcuuggauaugagacuuuuaaggugauugaagguuggagcaaccccaaaucaaaguugcagaucaaucggcagguaauuguugaccguggcgaucgcaguggguacuccggaauauucagcguggagggcaaaucuuguaucaacagaugcuuuuaugucgaacugauuaggggucggaaggaggaaaccgaggugcuauggacaucaaauaguaucgucguguucugugggacuagcggcaccuacggaacaggcuccuggccugacggggccgaucucaaccugaugccaaucuga

SEQ ID NO: 153124 - RNA, 1410 nt, Artificial Sequence
  derived and/or modified CDS sequence (opt3) from neuraminidase__InfluenzaA__AHM00207
augaaccccaaucagaagaucauuaccauaggcagcgugucccugacaaucucuacuauuugcuucuuuaugcagaucgccauucucaucacgaccgucacacuucacuucaaacagcaugaguuuaacucaccuccaaauaaccagguuaugcugugugaaccgacuauaaucgagagaaauauuaccgaaaucguguacuugacaaacaccacuauugagaaggaaaucugccccaaaccugcugaguauaggaauuggaguaagccacagugugggauaacaggauucgcacccuuuagcaaagacaacuccauucgguuaucugccgguggcaauaucuggguaacccgcgagccuuacgugucgugcgauccagacaaguguuaucaauucgcgcuggggcagggaacgacucuaaacaauguccacucaaacaauaccgugcgagaucguacacccuacagaacucuccugaugaacgaacuuggcguuccuuuucaucuggguaccaaacaggugugcauugcuuggagcaguuccucuugucacgacgggaaggccugguugcaugucugcaucacaggagaugacaagaaugcaaccgccagcuucaucuauaacggcaggcucguggauuccguaguuucauggaguaaagagauucugcggacgcaggaaagcgagugugugugcauaaacggcacuuguacagucgugaugaccgacgggucugcuuccggaaaggcagauacuaaaauccuguuuauugaggaagguaagaucgugcacacaucaacccucagcggcagugcccaacacgucgaggaaugcucuugcuacccacgcuauccggggguuagaugugugugcagggacaauuggaagggauccaaccggcccauaguagauauuaauaucaaagaccauagcaucgugucgucuuacgucuguuccggcuuagugggugauacgccucgcaagaacgacucaaguagcuccucucacugccuggacccaaauaacgaggaagggggacauggcguuaaaggcugggcuuucgaugacgggaaugauguguggaugggacgaaccauuaacgagacaagcagacuugguuacgagacuuuuaaggucaucgaaggcuggucaaaucccaaaaguaaguugcagauuaacaggcaagugauaguagaccguggggaucgguccggauauagcggcaucuucucuguugaggguaaaucauguauuaaucgcugcuuuuacguggaacugaucagagggaggaaggaggaaaccgagguccuauggacaaguaacagcaucguggucuucuguggcacuuccggaaccuauggcacagggucuuggccugacggagccgaucucaaucugaugccaauuuga

SEQ ID NO: 153125 - RNA, 1410 nt, Artificial Sequence; identical to SEQ ID NO: 153102
  derived and/or modified CDS sequence (opt3) from neuraminidase__InfluenzaA__AHM00219

SEQ ID NO: 153126 - RNA, 1410 nt, Artificial Sequence; identical to SEQ ID NO: 150194
  derived and/or modified CDS sequence (opt3) from neuraminidase__InfluenzaA__AHM00231

SEQ ID NO: 153127 - RNA, 1410 nt, Artificial Sequence; identical to SEQ ID NO: 150194
  derived and/or modified CDS sequence (opt3) from neuraminidase__InfluenzaA__AHM00243

SEQ ID NO: 153128 - RNA, 1410 nt, Artificial Sequence; identical to SEQ ID NO: 150194
  derived and/or modified CDS sequence (opt3) from neuraminidase__InfluenzaA__AHM00255

SEQ ID NO: 153129 - RNA, 1410 nt, Artificial Sequence
  derived and/or modified CDS sequence (opt3) from neuraminidase__InfluenzaA__AHM00267
augaaccccaaucagaagaucauuaccauaggcagcgugucccugacaaucucuacuauuugcuucuuuaugcaaaucgccauucucaucacgaccgucacacuucacuucaaacaguacgaguuuaacucaccuccaaauaaccagguuaugcugugugaaccgacuauaaucgagagaaauauuaccgaaaucguguauuugacaaacaccacuauugagaaggaaaucugccccaaaccugcugaguacaggaauuggaguaagccacagugugggauaacaggauucgcacccuuuagcaaagacaacuccauucgguuaucugccgguggcgauaucuggguaacccgcgagccuuaugugucgugcgacccagauaaguguuaccaauucgcgcuggggcagggaacgacucuaaauaacguccauucaaauaacaccgugcgagaccguacacccuauagaacucuccugaugaaugaacuuggcguuccuuuucaccuggguaccaaacaggugugcauugcuuggagcaguuccucuugucaugaugggaaggccugguugcacgucugcaucacaggagacgauaagaacgcaaccgccagcuucaucuacaauggcaggcucguggacuccguagcuucauggaguaaagagauucugcggacgcaggaaagcgaguguguuugcauaaacggcacuuguacaguggucaugaccgaugggucugcauccggaaaggccgacacuaaaauccuguuuauugaggaagguaagaucgugcauacaucaacccucagcggcagugcucaacacguggaggaaugcucuugcuauccacgcuacccgggggucagauguguuugcagggauaacuggaagggauccaaucggcccauaguggacauuaacaucaaagaucacagcaucguaucgucuuacguguguuccggcuuagucggugacacgccucgcaagaaugacucaaguagcuccucucauugccuggauccaaacaaugaggaagggggacacggcgugaaaggcugggccuucgacgaugggaacgacguuuggaugggacgaaccauuaaugagacaagcagacuugguuaugagacuuuuaaggugaucgaaggcuggucaaaccccaaaaguaaguugcagauuaauaggcaggucauaguggaucguggggaccgguccggauacagcggcaucuucucuguagaggguaaaucauguauuaaccgcugcuuuuauguugaacugaucagagggaggaaggaggaaaccgaggugcuauggacaaguaauagcaucgucguguucuguggcacuuccggaaccuacggcacagggucuuggccugauggagcggaccucaaccugaugccaauuuga

SEQ ID NO: 153130 - RNA, 1410 nt, Artificial Sequence; identical to SEQ ID NO: 151423
  derived and/or modified CDS sequence (opt3) from neuraminidase__InfluenzaA__AHM00279

SEQ ID NO: 153131 - RNA, 1410 nt, Artificial Sequence; identical to SEQ ID NO: 150194
  derived and/or modified CDS sequence (opt3) from neuraminidase__InfluenzaA__AHM00291

SEQ ID NO: 153132 - RNA, 1410 nt, Artificial Sequence; identical to SEQ ID NO: 150194
  derived and/or modified CDS sequence (opt3) from neuraminidase__InfluenzaA__AHM00303

SEQ ID NO: 153133 - RNA, 1410 nt, Artificial Sequence; identical to SEQ ID NO: 150194
  derived and/or modified CDS sequence (opt3) from neuraminidase__InfluenzaA__AHM00315

SEQ ID NO: 153134 - RNA, 1410 nt, Artificial Sequence; identical to SEQ ID NO: 151423
  derived and/or modified CDS sequence (opt3) from neuraminidase__InfluenzaA__AHM00327

SEQ ID NO: 153135 - RNA, 1410 nt, Artificial Sequence; identical to SEQ ID NO: 151423
  derived and/or modified CDS sequence (opt3) from neuraminidase__InfluenzaA__AHM00339

SEQ ID NO: 153136 - RNA, 1410 nt, Artificial Sequence; identical to SEQ ID NO: 153102
  derived and/or modified CDS sequence (opt3) from neuraminidase__InfluenzaA__AHM00351

SEQ ID NO: 153137 - RNA, 1410 nt, Artificial Sequence; identical to SEQ ID NO: 153038
  derived and/or modified CDS sequence (opt3) from neuraminidase__InfluenzaA__AHM00363

SEQ ID NO: 153138 - RNA, 1410 nt, Artificial Sequence
  derived and/or modified CDS sequence (opt3) from neuraminidase__InfluenzaA__AHM00375
augaaccccaaucagaagaucauuaccauaggcagcgugucccugacaaucucuacuauuugcuucuuuaugcaaaucgccauucucaucacgaccgucacacuucacuucaaacagcaugaguuuaacucaccuccaaauaaccagguuaugcugugugaaccgacuauaaucgagagaaauauuaccgaaaucguguacuugacaaacaccacuauugagaaggaaguaugccccaaaccugcugaguauaggaauuggaguaagccacagugugggaucacaggauucgcacccuuuagcaaagacaacuccauacgguuaucugccgguggcgauauuugggugacccgcgagccuuacgucucgugcgacccagauaaguguuaucaauucgcgcuggggcagggaacgacucuaaauaacgugcacucaaauaacaccguucgagaccguacacccuacagaacucuccugaugaaugaacuuggcgugccuuuucaucuggguaccaagcaggucugcaucgcuuggagcaguuccucuugucacgaugggaaagccugguugcaugugugcauuacaggagacgauaagaacgcaaccgccagcuucaucuauaauggcaggcucguagacuccguugugucauggaguaaagagauccugcggacgcaggaaagcgagugugucugcauuaacggcacuuguacaguggugaugaccgaugggucugcuuccggaaaggcagacacuaaaauacuguuuaucgaggaagguaagauuguccacacaucaacccucagcggcagugcccaacacguugaggaaugcucuugcuacccacgcuauccgggggugagauguguaugcagggauaacuggaagggauccaaucggcccaucguggacauaaacauuaaagaucauagcaucgucucgucuuacguguguuccggcuuaguuggugacacgccucgcaagaaugacucaaguagcuccucucacugccuggauccaaacaaugaggaagggggacauggcgugaaaggcugggcuuucgacgaugggaacgacgucuggaugggacgaaccaucaaugagacaagcagacuugguuacgagacuuuuaaggugauugaaggcuggucaaaccccaaaaguaaguugcagaucaauaggcagguaauuguugaucguggggaccgguccggauauagcggcauauucucuguggaggguaaaucauguaucaaccgcugcuuuuacgucgaacugauuagagggaggaaggaggaaaccgaggugcuauggacaaguaauagcaucgucguguucuguggcacuuccggaaccuauggcacagggucuuggccugauggagccgaccucaaccugaugccaaucuga

SEQ ID NO: 153139 - RNA, 1410 nt, Artificial Sequence
  derived and/or modified CDS sequence (opt3) from neuraminidase__InfluenzaA__AHM00398
augaaccccaaucagaagaucauuaccauaggcagcgugucccugacaaucucuacuauuugcuucuuuaugcagaucgccauucucaucacgaccgucacacuucacuucaaacagcaugaguuuaacucaccuccaaauaaccagguuaugcugugugaaccgacuauaaucgagagaaauauuaccgaaaucguguacuugacaaacaccacuauugagaaggaaaucugccccaaaccugcugaguauaggaauuggaguaagccacagugugggauaacaggauucgcacccuuuagcaaagagaacuccauucgguuaucugccgguggcgacaucuggguaacccgcgaaccuuacgugucgugcgauccagacaaguguuaucaauucgcgcuggggcagggaacgacucuaaauaacguccacucaaauaacaccgugcgagaucguacacccuacagaacucuccugaugaaugagcuuggcguuccuuuucaucuggguaccaaacaggugugcauugcuuggagcaguuccucuugucacgacgggaaggccugguugcaugucugcaucacaggagaugacaagaacgcaaccgccagcuucaucuauaauggcaggcucguggauuccguaguuucauggaguaaagaaauucugcggacgcaggagagcgagugugugugcauaaacggcacuuguacagucgugaugaccgacgggucugcuuccggaaaggcagauacuaaaauccuguuuauugaagaggguaagaucgugcacacaucaacccucagcggcagugcccaacacgucgaagagugcucuugcuacccacgcuauccggggguuagaugugugugcagggacaacuggaagggauccaaucggcccauaguagauauuaacaucaaagaccauagcaucgugucgucuuacgucuguuccggcuuagugggugauacgccucgcaagaaugacucaaguagcuccucucacugccuggacccaaacaaugaagaagggggacauggcguuaaaggcugggcuuucgaugacgggaacgauguguggaugggacgaaccauuaaugagacaagcagacuugguuacgagacuuuuaaggucaucgagggcuggucaaaccccaaaaguaaguugcagauuaauaggcaagugauaguagaccguggggaucgguccggauauagcggcaucuucucuguugaagguaaaucauguauuaaccgcugcuuuuacguggagcugaucagagggaggaaggaagagaccgagguccuauggacaaguagcuccaucguggucuucuguggcacuucuggaaccuauggcacagggucguggccugacggagccgaucucaaucugaugccaauuuga

SEQ ID NO: 153140 - RNA, 1410 nt, Artificial Sequence; identical to SEQ ID NO: 150194
  derived and/or modified CDS sequence (opt3) from neuraminidase__InfluenzaA__AHM00410

SEQ ID NO: 153141 - RNA, 1410 nt, Artificial Sequence
  derived and/or modified CDS sequence (opt3) from neuraminidase__InfluenzaA__AHM00422
augaaccccaaucagaagaucauuaccauaggcagcgugucccugacaaucucuacuauuugcuucuuuaugcaaaucgccauucucgucacgaccguuacacuucacuucaaacaguacgaguuuaacucaccuccaaauaaccaggugaugcugugugaaccgacuaucauagagagaaauaucaccgaaauuguauauuugacaaacaccacuaucgagaaggaaauuugccccaaaccugcugaguacaggaauuggaguaagccacagugugggaucacaggauucgcacccuuuagcaaagacaacuccauacgguuaucugccgguggcgauauuugggugacccgcgagccuuaugucucgugcgacccagauaaguguuaccaauucgcgcuggggcagggaacgacucuaaauaacgugcauucaaauaacaccguucgagaccguacacccuauagaacucuccugaugaaugaacuuggcgugccuuuucaccuggguaccaagcaggucugcaucgcuuggagcaguuccucuugucaugaugggaaagccugguugcacgugugcauuacaggagacgauaagaacgcaaccgccagcuucaucuacaauggcaggcucguagacuccguugugucauggaguaaagagauccugcggacgcaggaaagcgagugugucugcauuaacggcacuuguacaguggugaugaccgaugggucugcuuccggaaaggcagacacuaaaauacuguuuaucgaggaagguaagauuguccauacaucaacccucagcggcagugcccaacacguugaggaaugcucuugcuauccacgcuacccgggggugagauguguaugcagggauaacuggaagggauccaaucggcccaucguggacauaaacauuaaagaucacagcaucgucucgucuuacguguguuccggcuuaguuggugacacgccucgcaagaaugacucaaguagcuccucucauugccuggauccaaacaaugaggaagggggacacggcgugaaaggcugggcuuucgacgaugggaacgacgucuggaugggacgaaccaucaaugagacaagcagacuugguuaugagacuuuuaaggugauugaaggcuggucaaaccccaaaaguaaguugcagaucaauaggcagguaauuguugaucguggggaccgguccggauacagcggcauauucucuguggaggguaaaucauguaucaaccgcugcuuuuaugucgaacugauuagagggaggaaggaggaaaccgaggugcuauggacaaguaauagcaucgucguguucuguggcacuuccggaaccuacggcacagggucuuggccugauggagccgaccucaaccugaugccaaucuga

SEQ ID NO: 153142 - RNA, 1410 nt, Artificial Sequence
  derived and/or modified CDS sequence (opt3) from neuraminidase__InfluenzaA__AHM00434
augaaccccaaucagaagaucauuaccauaggcagcgugucccugacaaucucuacuauuugcuucuuuaugcagaucgccauucucaucacgaccgucacacuucacuucaaacaguacgaguuuaacccuccaccgaauaaccagguuaugcugugugaacccacuauaaucgagagaaauauuaccgaaaucguguauuugacaaacaccacuauugagaaggaaaucugcccuaaaccagcugaguacaggaauuggucaaagccccagugugggauaacaggauucgcaccuuuuaguaaagacaacagcauucgguuauccgccgguggcgauaucuggguaacccgcgagccauaugugucuugcgaccccgauaaguguuaccaauucgcgcuggggcagggaacgacucuaaauaacguccauucgaauaacaccgugcgagaccguacaccuuauagaacucuccugaugaaugaacuuggcguuccauuucaccuggguaccaaacaggugugcauugcuuggucaagcaguuccugucaugaugggaaggccugguugcacgucugcaucacaggagacgauaagaacgcaaccgccucuuucaucuacaauggcaggcucguggacagcguaguuuccuggucaaaagagauucugcggacgcaggaaagugagugugugugcauaaacggcacuuguacagucgugaugaccgaugggagcgcuucuggaaaggcagacacuaaaauccuguuuauugaggaagguaagaucgugcauacauccacccucucaggcagcgcccaacacgucgaggaaugcaguugcuauccgcgcuaccccgggguuagaugugugugcagggauaacuggaagggaucuaaucggccuauaguagacauuaacaucaaagaucacuccaucgugagcucguacgucuguucuggcuuagugggugacacgccacgcaagaaugacuccucaaguagcucccauugccuggaucccaacaaugaggaagggggacacggcguuaaaggcugggcuuucgacgaugggaacgacguguggaugggacgaaccauuaaugagacaucuagacuugguuaugagacuuuuaaggucaucgaaggcuggagcaacccuaaaucaaaguugcagauuaauaggcaagugauaguagaucguggggaccggaguggauacuccggcaucuucagcguugaggguaaaucuuguauuaaccgcugcuuuuauguggaacugaucagagggaggaaggaggaaaccgagguccuauggacaucaaauaguaucguggucuucuguggcacuagcggaaccuacggcacaggguccuggccagauggagccgaccucaaccugaugcccauuuga

SEQ ID NO: 153143 - RNA, 1410 nt, Artificial Sequence; identical to SEQ ID NO: 150194
  derived and/or modified CDS sequence (opt3) from neuraminidase__InfluenzaA__AHM00446

SEQ ID NO: 153144 - RNA, 1410 nt, Artificial Sequence; identical to SEQ ID NO: 153102
  derived and/or modified CDS sequence (opt3) from neuraminidase__InfluenzaA__AHM00458

SEQ ID NO: 153145 - RNA, 1410 nt, Artificial Sequence; identical to SEQ ID NO: 153102
  derived and/or modified CDS sequence (opt3) from neuraminidase__InfluenzaA__AHM00470

SEQ ID NO: 153146 - RNA, 1410 nt, Artificial Sequence; identical to SEQ ID NO: 153102
  derived and/or modified CDS sequence (opt3) from neuraminidase__InfluenzaA__AHM00482

SEQ ID NO: 153147 - RNA, 1410 nt, Artificial Sequence; identical to SEQ ID NO: 153102
  derived and/or modified CDS sequence (opt3) from neuraminidase__InfluenzaA__AHM00494

SEQ ID NO: 153148 - RNA, 1410 nt, Artificial Sequence
  derived and/or modified CDS sequence (opt3) from neuraminidase__InfluenzaA__AHM00506
augaaccccaaucagaagaucauuaccauaggcagcgugucccugacaaucucuacuauuugcuucuuuaugcagaucgccauucucaucacgaccgucacacuucacuucaaacaguacgaguuuaacucaccuccaaauaaccagguuaugcugugugaaccgacuauaaucgagagaaauauuaccgaaaucguguauuugacaaacaccacuauugagaaggaaaucugccccaaaccugcugaguacaggaauuggaguaagccacagugugggauaacaggauucgcacccuuuagcaaagacaacuccauucgguuaucugccgguggcgauaucuggguaacccgcgagccuuaugugucgugcgacccagauaaguguuaccaauucgcgcuggggcagggaacgacucuaaauaacguccauucaaauaacaccgugcgagaccguacacccuauagaacucuccugaugaaugaacuuggcguuccuuuucaccuggguaccaaacaggugugcauugcuuggagcaguuccucuugucaugaugggaaggccugguugcacgucugcaucacaggagacgauaagaacgcaaccgccagcuucaucuacaauggcaggcucguggacuccguaguuucauggaguaaagagauucugcggacgcaggaaagcgagugugugugcauaaacggcacuuguacagucgugaugaccgaugggucugcuuccggaaaggcagacacuaaaauccuguuuauugaggaagguaagaucgugcauacaucaacccucagcggcagugcccaacacgucgaggaaugcucuugcuauccacgcuacccggggguuagaugugugugcagggauaacuggaagggauccaaucggcccauaguagacauuaacaucaaagaucacagcaucgugucgucuuacgucuguuccggcuuagugggugacacgccucgcaagaaugacucaaguagcuccucucauugccuggauccaaacaaugaggaagggggacacggcguuaaaggcugggcuuucgacgaugggaacgacguguggaugggacgaaccauuaaugagacaagcagacuugguuaugagacuuuuaaggucaucgaaggcuggucaaaccccaaaaguaaguugcagauuaauaggcaagugauaguaaaccguggggaucgguccggauacagcggcaucuucucuguugaggguaaaucauguauuaaucgcugcuuuuauguggaacugaucagagggaggaaggaggaaaccgagguccuauggacaaguaacagcaucguggucuucuguggcacuuccggaaccuacggcacagggucuuggccugacggagccgaucucaaucugaugccaauuuga

SEQ ID NO: 153149 - RNA, 1410 nt, Artificial Sequence; identical to SEQ ID NO: 150194
  derived and/or modified CDS sequence (opt3) from neuraminidase__InfluenzaA__AHM00518

SEQ ID NO: 153150 - RNA, 1410 nt, Artificial Sequence
  derived and/or modified CDS sequence (opt3) from neuraminidase__InfluenzaA__AHM00530
augaaccccaaucagaagaucauuaccauaggcagcgugucccugacaaucucuacuauuugcuucucaaugcagaucgccauucucaucacgaccgucacacuucacuuuaaacaguacgaguucaacccuccaccgaauaaccagguuaugcugugugaacccacuauaaucgagagaaauauuaccgaaaucguguauuugacaaacaccacuauugagaaggaaaucugcccuaaaccagcugaguacaggaauuggaguaagccccagugugggauaacaggauuugcaccuuucagcaaagacaacuccauucgguuaucugccgguggcgauaucuggguaacccgcgagccauaugugucgugcgaccccgauaaguguuaccaauuugcgcuggggcagggaacgacucuaaauaacguccauucaaauaacaccgugcgagaccguacaccuuauagaacucuccugaugaaugaacuuggcguuccauuccaccuggguaccaaacaggugugcauugcuuggagcaguuccucuugucaugaugggaaggccugguugcacgucugcaucacaggagacgauaagaacgcaaccgccagcuuuaucuacaauggcaggcucguggacuccguaguuucauggaguaaagagauucugcggacgcaggaaagcgagugugugugcauaaacggcacuuguacagucgugaugaccgaugggucugcuuccggaaaggcagacacuaaaauccuguucauugaggaagguaagaucgugcauacaucaacccucagcggcagugcccaacacgucgaggaaugcucuugcuauccgcgcuaccccgggguuagaugugugugcagggauaacuggaagggauccaaucggccuauaguagacauuaacaucaaagaucacagcaucgugucgucuuacgucuguuccggcuuagugggugacacgccacgcaagaaugacucaaguagcuccucucauugccuggaucccaacaaugaggaagggggacacggcguuaaaggcugggcuuuugacgaugggaacgacguguggaugggacgaaccauuaaugagacaagcagacuugguuaugagacuuucaaggucaucgaaggcuggucaaacccuaaaaguaaguugcagauuaauaggcaagugauaguagaucguggggaccgguccggauacagcggcaucuuuucuguugaggguaaaucauguauuaaccgcugcuucuauguggaacugaucagagggaggaaggaggaaaccgagguccuauggacaaguaauagcaucguggucuuuuguggcacuuccggaaccuacggcacagggucuuggccagauggagccgaccucaaccugaugcccauuuga

SEQ ID NO: 153151 - RNA, 1410 nt, Artificial Sequence; identical to SEQ ID NO: 151423
  derived and/or modified CDS sequence (opt3) from neuraminidase__InfluenzaA__AHM00542

SEQ ID NO: 153152 - RNA, 1410 nt, Artificial Sequence
  derived and/or modified CDS sequence (opt3) from neuraminidase__InfluenzaA__AHM00546
augaaccccaaucagaagaucauuaccauaggcagcgugucccugacaaucucuacuauuugcuucuuuaugcagaucgccauucucaucacgaccgucacacuucacuucaaacaguacgaguuuaacucaccuccaaauaaccagguuaugcugugugaaccgacuauaaucgagagaaauauuaccgaaaucguguauuugacaaacaccacuauugagaaggaaaucugccccaaaccugcugaguacaggaauuggaguaagccacagugugacauaacaggguucgcacccuuuagcaaagauaacuccauucgguuaucugccggaggugacaucuggguaacccgcgagccuuaugugucgugcgauccagacaaguguuaccaauucgcgcugggccaggggacgacucuaaauaacguccauucaaauaacaccgugcgagaucguacacccuauagaacucuccugaugaaugaacuuggaguuccuuuucaccugggcaccaaacaggugugcauugcuuggagcaguuccucuugucaugacgguaaggccugguugcacgucugcaucacaggggaugacaagaacgcaaccgccagcuucaucuacaauggaaggcucguggauuccguaguuucauggaguaaagagauucugcggacgcaggaaagcgagugugugugcauaaacggcacuuguacagucgugaugaccgacggcucugcuuccgggaaggcagauacuaaaauccuguuuauugaggaaggaaagaucgugcauacaucaacccucagcgguagugcccaacacgucgaggaaugcucuugcuauccacgcuacccgggcguuagaugugugugcagggacaacuggaagggguccaaucggcccauaguagauauuaacaucaaagaccacagcaucgugucgaaguacgucuguucuggauuagugggcgacacgccucgcaaaaaugauuccucaaguagcucccauugccuggacccaaacaaugaggaaggugggcacggaguuaagggcugggcuuucgaugacggcaacgauguguggauggggcgaaccauuaaugagacaucuagacuuggauaugagacuuuuaaagucaucgaagguuggagcaaccccaagucaaaauugcagauuaauaggcaagugauaguagaccggggcgaucguaguggguacuccggaaucuucagcguugagggcaagucuuguauuaaccgcugcuuuuauguggaacugaucagagguaggaaggaggaaaccgagguccuauggacaucaaauaguaucguggucuucugugggacuagcggcaccuacggaacaggcuccuggccugacggggccgaucucaaccugaugccaauuuga

SEQ ID NO: 153153 - RNA, 1410 nt, Artificial Sequence
  derived and/or modified CDS sequence (opt3) from neuraminidase__InfluenzaA__AHM00558
augaaccccaaucagaagaucauuaccauaggcagcgugucccugacaaucucuacuauuugcuucuuuaugcaaaucgccauucucaucacgaccgucacacuucacuucaaacaguacgaguuuaacucaccuccaaauaaccagguuaugcugugugaaccgacuauaaucgagagaaauauuaccgaaaucguguauuugacaaacaccacuauugagaaggaaguaugccccaaaccugcugaguacaggaauuggaguaagccacagugugggaucacaggauucgcacccuuuagcaaagacaacuccauacgguuaucugccgguggcgauauuugggugacccgcgagccuuaugucucgugcgacccagauaaguguuaccaauucgcgcuggggcagggaacgacucuaaauaacgugcauucaaauaacaccguucgagaccguacacccuauagaacucuccugaugaaugaacuuggcgugccuuuucaccuggguaccaagcaggucugcaucgcuuggagcaguuccucuugucaugaugggaaagccugguugcacgugugcauuacaggagacgauaagaacgcaaccgccagcuucaucuacaauggcaggcucguagacuccguugugucauggaguaaagagauccugcggacgcaggaaagcgagugugucugcauuaacggcacuuguacaguggugaugaccgaugggucugcuuccggaaaggcagacacuaaaauacuguuuaucgaggaagguaagauuguccauacaucaacccucagcggcagugcccaacacguugaggaaugcucuugcuauccacgcuacccgggggugagauguguaugcagggauaacuggaagggauccaaucggcccaucguggacauaaacauuaaagaucacagcaucgucucgucuuacguguguuccggcuuaguuggugacacgccucgcaagaaugacucaaguagcuccucucauugccuggauccaaacaaugaggaagggggacacggcgugaaaggcugggcuuucgacgaugggaacgacgucuggaugggacgaaccaucaaugagacaagcagacuugguuaugagacuuuuaaggugauugaaggcuggucaaaccccaaaaguaaguugcagaucaauaggcagguaauuguugaucguggggaccgguccggauacagcggcauauucucuguggaggguaaaucauguaucaaccgcugcuuuuaugucgaacugauuagagggaggaaggaggaaaccgaggugcuauggacaaguaauagcaucgucguguucuguggcacuuccggaaccuacggcacagggucuuggccugauggagccgaccucaaccugaugccaaucuga

SEQ ID NO: 153154 - RNA, 1410 nt, Artificial Sequence; identical to SEQ ID NO: 150194
  derived and/or modified CDS sequence (opt3) from neuraminidase__InfluenzaA__AHM00570

SEQ ID NO: 153155 - RNA, 1410 nt, Artificial Sequence; identical to SEQ ID NO: 150194
  derived and/or modified CDS sequence (opt3) from neuraminidase__InfluenzaA__AHM00582

SEQ ID NO: 153156 - RNA, 1410 nt, Artificial Sequence
  derived and/or modified CDS sequence (opt3) from neuraminidase__InfluenzaA__AHM00594
augaaccccaaucagaagaucauuaccauaggcagcgugucccugacaaucucuacuauuugcuucuuuaugcagaucgccauucucaucacgaccgucacacuucacuucaaacagcaugaguuuaacucaccuccaaauaaccagguuaugcugugugaaccgacuauaaucgagagaaauauuaccgaaaucgugcacuugacaaacaccacuauugagaaggaaaucugccccaaaccugcugaguacaggaauuggaguaagccacagugugggauaacaggauucgcacccuuuagcaaagacaacuccauucgguuaucugccgguggcgauaucuggguaacccgcgagccuuaugugucgugcgacccagauaaguguuaccaauucgcgcuggggcagggaacgacucuaaauaacguccauucaaauaacaccgugcgagaccguacacccuauagaacucuccugaugaaugaacuuggcguuccuuuucaccuggguaccaaacaggugugcauugcuuggagcaguuccucuugucaugaugggaaggccugguugcacgucugcaucacaggagacgauaagaacgcaaccgccagcuucaucuacaauggcaggcucguggacuccguaguuucauggaguaaagagauucugcggacgcaggaaagcgagugugugugcauaaacggcacuuguacagucgugaugaccgaugggucugcuuccggaaaggcagacacuaaaauccuguuuauugaggaagguaagaucgugcacacaucaacccucagcggcagugcccaacaugucgaggaaugcucuugcuauccacgcuacccggggguuagaugugugugcagggauaacuggaagggauccaaucggcccauaguagacauuaacaucaaagaucacagcaucgugucgucuuaugucuguuccggcuuagugggugacacgccucgcaagaaugacucaaguagcuccucucauugccuggauccaaacaaugaggaagggggacacggcguuaaaggcugggcuuucgacgaugggaacgacguguggaugggacgaaccauuaaugagacaagcagacuugguuacgagacuuuuaaggucaucgaaggcuggucaaaccccaaaaguaaguugcagauuaauaggcaagugauaguagaucguggggaccgguccggauacagcggcaucuucucuguugaggguaaaucauguauuaaccgcugcuuuuauguggaacugaucagagggaggaaggaggaaaccgagguccuauggacaaguaauagcaucguggucuucuguggcacuuccggaaccuacggcacagggucuuggccugauggagccgaccucaaccugaugccaauuuga

SEQ ID NO: 153157 - RNA, 1410 nt, Artificial Sequence; identical to SEQ ID NO: 150194
  derived and/or modified CDS sequence (opt3) from neuraminidase__InfluenzaA__AHM00606

SEQ ID NO: 153158 - RNA, 1410 nt, Artificial Sequence; identical to SEQ ID NO: 150194
  derived and/or modified CDS sequence (opt3) from neuraminidase__InfluenzaA__AHM00618

SEQ ID NO: 153159 - RNA, 1410 nt, Artificial Sequence; identical to SEQ ID NO: 150194
  derived and/or modified CDS sequence (opt3) from neuraminidase__InfluenzaA__AHM00630

SEQ ID NO: 153160 - RNA, 1410 nt, Artificial Sequence; identical to SEQ ID NO: 150194
  derived and/or modified CDS sequence (opt3) from neuraminidase__InfluenzaA__AHM00642

SEQ ID NO: 153161 - RNA, 1410 nt, Artificial Sequence; identical to SEQ ID NO: 151423
  derived and/or modified CDS sequence (opt3) from neuraminidase__InfluenzaA__AHM00654

SEQ ID NO: 153162 - RNA, 1410 nt, Artificial Sequence; identical to SEQ ID NO: 150194
  derived and/or modified CDS sequence (opt3) from neuraminidase__InfluenzaA__AHM00666

SEQ ID NO: 153163 - RNA, 1410 nt, Artificial Sequence; identical to SEQ ID NO: 153102
  derived and/or modified CDS sequence (opt3) from neuraminidase__InfluenzaA__AHM00678

SEQ ID NO: 153164 - RNA, 1410 nt, Artificial Sequence; identical to SEQ ID NO: 151437
  derived and/or modified CDS sequence (opt3) from neuraminidase__InfluenzaA__AHM00690

SEQ ID NO: 153165 - RNA, 1410 nt, Artificial Sequence; identical to SEQ ID NO: 151423
  derived and/or modified CDS sequence (opt3) from neuraminidase__InfluenzaA__AHM00701

SEQ ID NO: 153166 - RNA, 1410 nt, Artificial Sequence
  derived and/or modified CDS sequence (opt3) from neuraminidase__InfluenzaA__AHM00713
augaaccccaaucagaagaucauuaccauaggcagcgugucccugacaaucucuacuauuugcuucuuuaugcagaucgccauucucaucacgaccgucacacuucacuucaaacaguacgaguuuaacucaccuccaaauaaccagguuaugcugugugaaccgacuauaaucgagagaaauauuaccgaaaucguguauuugacaaacaccacuauugagaaggaaaucugccccaaaagugcugaguacaggaauuggagcaagccucagugugggauaacaggauucgcaccauuuuccaaagacaacucuauucgguuaucggccgguggcgauaucuggguaacccgcgagcccuaugugucaugcgacccugauaaguguuaccaauucgcgcuggggcagggaacgacucuaaauaacguccauagcaauaacaccgugcgagaccguacaccauauagaacucuccugaugaaugaacuuggcguucccuuucaccuggguaccaaacaggugugcauugcuuggaguuccucuagcugucaugaugggaaggccugguugcacgucugcaucacaggagacgauaagaacgcaaccgccuccuucaucuacaauggcaggcucguggacucaguaguuaguuggagcaaagagauucugcggacgcaggaaucugagugugugugcauaaacggcacuuguacagucgugaugaccgauggguccgcuucaggaaaggcagacacuaaaauccuguuuauugaggaagguaagaucgugcauacaagcacccucaguggcucugcccaacacgucgaggaaugcuccugcuauccucgcuacccagggguuagaugugugugcagggauaacuggaagggaagcaaucggccgauaguagacauuaacaucaaagaucacucgaucgugucuuccuacgucuguucaggcuuagugggugacacgccccgcaagaaugacaguagcuccucuagccauugccuggauccuaacaaugaggaagggggacacggcguuaaaggcugggcuuucgacgaugggaacgacguguggaugggacgaaccauuaaugagacaucaagacuugguuaugagacuuuuaaggucaucgaaggcuggaguaacccaaaauccaaguugcagauuaauaggcaagugauaguagaucguggggaccggagcggauacucuggcaucuucucaguugaggguaaaaguuguauuaaccgcugcuuuuauguggaacugaucagagggaggaaggaggaaaccgagguccuauggacaagcaauuccaucguggucuucuguggcacuucuggaaccuacggcacagggucguggcccgauggagccgaccucaaccugaugccuauuuga

SEQ ID NO: 153167 - RNA, 1410 nt, Artificial Sequence; identical to SEQ ID NO: 150194
  derived and/or modified CDS sequence (opt3) from neuraminidase__InfluenzaA__AHM00725

SEQ ID NO: 153168 - RNA, 1410 nt, Artificial Sequence; identical to SEQ ID NO: 150194
  derived and/or modified CDS sequence (opt3) from neuraminidase__InfluenzaA__AHM00737

SEQ ID NO: 153169 - RNA, 1410 nt, Artificial Sequence; identical to SEQ ID NO: 153102
  derived and/or modified CDS sequence (opt3) from neuraminidase__InfluenzaA__AHM00749

SEQ ID NO: 153170 - RNA, 1410 nt, Artificial Sequence; identical to SEQ ID NO: 150194
  derived and/or modified CDS sequence (opt3) from neuraminidase__InfluenzaA__AHM00761

SEQ ID NO: 153171 - RNA, 1410 nt, Artificial Sequence; identical to SEQ ID NO: 151423
  derived and/or modified CDS sequence (opt3) from neuraminidase__InfluenzaA__AHM00785

SEQ ID NO: 153172 - RNA, 1410 nt, Artificial Sequence; identical to SEQ ID NO: 151058
  derived and/or modified CDS sequence (opt3) from neuraminidase__InfluenzaA__AHM00797

SEQ ID NO: 153173 - RNA, 1410 nt, Artificial Sequence
  derived and/or modified CDS sequence (opt3) from neuraminidase__InfluenzaA__AHM00809
augaaccccaaucagaagaucauuaccauaggcagcgugucccugacaaucucuacuauuugcuucuuuauccaaauugccauccucauaacgaccgucacacuucacuucaaacaguacgaguuuaacucaccuccaaauaaccagguuaugcugugugaaccgacuaucauugagagaaauaucaccgaaauuguguauuugacaaacaccacuaucgagaaggaaauaugccccaaaccugcugaguacaggaauuggaguaagccacagugugacauuacaggguucgcacccuuuagcaaagauaacuccauccgguuaucugccggaggugacauuuggguaacccgcgagccuuaugugucgugcgauccagacaaguguuaccaauucgcgcugggccaggggacgacucuaaauaacaugcauucaaauaacaccguccgagaucguacacccuauagaacucuccugaugaaugaacuuggagugccuuuucaccugggcaccaagcagguuugcaucgcuuggagcaguuccucuugucaugacgguaaagccugguugcacgugugcaucacaggggaugacaagaacgcaaccgccagcuucauuuacaauggaaggcucgucgauuccgugguaucauggaguaaagagauacugcggacgcaggaaagcgaguguguuugcaucaacggcacuuguacaguggucaugaccgacggcucugcuuccgggaaggcagauacuaaaauucuguuuaucgaggaaggaaagauagugcauacaucaacccucagcgguagugcccaacacguggaggaaugcucuugcuauccacgcuacccgggcgucagauguguuugcagggacaacuggaagggguccaaucggcccauuguggauaucaacaucaaagaccacagcauuguaucgucuuacguguguuccggauuagucggcgacacgccucgcaagaaugauucaaguagcuccucucauugccuggacccaaacaaugaggaaggugggcacggagugaaaggcugggcuuucgaugacggcaacgauguuuggauggggcgaaccaucaaugagacaagcagacuuggauaugagacuuuuaaggugauugaagguuggucaaaccccaaaaguaaguugcagauaaauaggcaggucaucguggaccggggcgaucguuccggguacagcggaauuuucucuguagagggcaaaucauguaucaaccgcugcuuuuauguugaacugaucagagguaggaaggaggaaaccgaggugcuauggacaaguaauagcauugucguguucugugggacuuccggcaccuacggaacaggcucuuggccugacggggccgaucucaaccugaugccaauauga

SEQ ID NO: 153174 - RNA, 1410 nt, Artificial Sequence; identical to SEQ ID NO: 153102
  derived and/or modified CDS sequence (opt3) from neuraminidase__InfluenzaA__AHM00821

SEQ ID NO: 153175 - RNA, 1410 nt, Artificial Sequence; identical to SEQ ID NO: 153102
  derived and/or modified CDS sequence (opt3) from neuraminidase__InfluenzaA__AHM00833

SEQ ID NO: 153176 - RNA, 1410 nt, Artificial Sequence; identical to SEQ ID NO: 151058
  derived and/or modified CDS sequence (opt3) from neuraminidase__InfluenzaA__AHM00845

SEQ ID NO: 153177 - RNA, 1410 nt, Artificial Sequence; identical to SEQ ID NO: 150194
  derived and/or modified CDS sequence (opt3) from neuraminidase__InfluenzaA__AHM00857

SEQ ID NO: 153178 - RNA, 1410 nt, Artificial Sequence; identical to SEQ ID NO: 150194
  derived and/or modified CDS sequence (opt3) from neuraminidase__InfluenzaA__AHM00869

SEQ ID NO: 153179 - RNA, 1410 nt, Artificial Sequence; identical to SEQ ID NO: 150194
  derived and/or modified CDS sequence (opt3) from neuraminidase__InfluenzaA__AHM00881

SEQ ID NO: 153180 - RNA, 1410 nt, Artificial Sequence; identical to SEQ ID NO: 151423
  derived and/or modified CDS sequence (opt3) from neuraminidase__InfluenzaA__AHM00893

SEQ ID NO: 153181 - RNA, 1410 nt, Artificial Sequence
  derived and/or modified CDS sequence (opt3) from neuraminidase__InfluenzaA__AHM00905
augaaccccaaucagaagaucauuaccauaggcagcgugucccugacaaucucuacuauuugcuucuuuaugcagaucgccauucucaucacgaccgucacacuucacuucaaacaguacgaguuuaacucaccuccaaauaaccagguuaugcugugugaaccgacuauaaucgagagaaauauuaccgaaaucguguauuugacaaacaccacuauugagaaggaaaucugccccaaaccugcugaguacaggaauuggaguaagccacagugugggauaacaggauucgcacccuuuagcaaagacaacuccauucgguuaucugccgguggcgauaucuggguaacccgcgagccuuaugugucgugcgacccagauaaguguuaccaauucgcgcuggggcagggaacgacucuaaauaacguccauucaaauaacaccgugcgagaccguacacccuauagaacucuccugaugaaugaacuuggcguuccuuuucaccuggguaccaaacaggugugcauugcuuggagcaguuccucuugucaugaugggaaggccugguugcacgucugcaucacaggagacgauaagaacgcaaccgccagcuucaucuacaauggcaggcucguggacuccguaguuucauggaguaaagagauucugcggacgcaggaaagcgagugugugugcauaaacggcacuuguacagucgugaugaccgaugggucugcuuccggaaaggcagacacuaaaauccuguuuauugaggaagguaagaucgugcauacaucaacccucagcggcagugcccaacacgucgaggaaugcucuugcuauccacgcuacccggggguuagaugugugugcagggauaacuggaagggauccaaucggcccauaguagacauuaacaucaaagaucacagcaucgugucgucuuacgucuguuccggcuuagugggugacacgccucgcaagaccgacucaaguagcuccgggcauugccuggauccaaauaacgaggaaggaggccacggcguuaaagggugggcuuucgacgauggaaaugacguguggaugggucgaacaauuaacgagacuucuagacuuggcuaugagaccuuuaaggucaucgaaggguggagcaaucccaaaucaaaguugcagauuaacaggcaagugauaguagaucggggagaccguaguggcuacuccgguaucuucagcguugaggggaaaucuuguauuaaucgcugcuuuuauguggaacugaucagaggcaggaaggaggaaacagagguccuauggacuucaaacaguaucguggucuucuguggaaccagcggcacauacgggaccggauccuggccugauggugccgaccucaaucugaugccaauuuga

SEQ ID NO: 153182 - RNA, 1410 nt, Artificial Sequence
  derived and/or modified CDS sequence (opt3) from neuraminidase__InfluenzaA__AHM00917
augaaccccaaucagaagaucauuaccauaggcagcgugucccugacaaucucuacuauuugcuucuuuaugcaaaucgccauucucaucacgaccgucacacuucacuucaaacaguacgaguuuaacucaccuccaaauaaccagguuaugcugugugaaccgacuauaaucgagagaaauauuaccgaaaucguguauuugacaaacaccacuauugagaaggaaaucugccccaaaccugcugaguacaggaauuggaguaagccacagugugggauaacaggauucgcacccuuuagcaaagacaacuccauucgguuaucugccgguggcgauaucuggguaacccgcgagccuuaugugucgugcgacccagauaaguguuaccaauucgcgcuggggcagggaacgacucuaaauaacguccauucaaauaacaccgugcgagaccguacacccuauagaacucuccugaugaaugaacuuggcguuccuuuucaccuggguaccaaacaggugugcauugcuuggagcaguuccucuugucaugaugggaaggccugguugcacgucugcaucacaggagacgauaagaacgcaaccgccagcuucaucuacaauggcaggcucguggacuccguaguuucauggaguaaagagauucugcggacgcaggaaagcgagugugugugcauaaacggcacuuguacagucgugaugaccgaugggucugcuuccggaaaggcagacacuaaaauccuguuuauugaggaagguaagaucgugcauacaucaacccucagcggcagugcccaacacgucgaggaaugcucuugcuauccacgcuacccggggguuagaugugugugcagggauaacuggaagggauccaaucggcccauaguagacauuaacaucaaagaucacagcaucgugucgucuuacgucuguuccggcuuagugggugacacgccucgcaagaaugacucaaguagcuccucucauugccuggauccaaacaaugaggaagggggacacggcguuaaaggcugggcuuucgacgaugggaacgacauuuggaugggacgaaccaucaaugagacaagcagacuugguuaugagacuuuuaaggugauugaaggcuggucaaaccccaaaaguaaguugcagauaaauaggcaggucaucguggaucguggggaccgguccggauacagcggcauuuucucuguagaggguaaaucauguaucaaccgcugcuuuuauguugaacugaucagagggaggaaggaggaaaccgaggugcuauggacaaguaauagcauugucguguucuguggcacuuccggaaccuacggcacagggucuuggccugauggagccgaccucaaccugaugccaauauga

SEQ ID NO: 153183 - RNA, 1410 nt, Artificial Sequence; identical to SEQ ID NO: 150194
  derived and/or modified CDS sequence (opt3) from neuraminidase__InfluenzaA__AHM00929

SEQ ID NO: 153184 - RNA, 1410 nt, Artificial Sequence
  derived and/or modified CDS sequence (opt3) from neuraminidase__InfluenzaA__AHM00941
augaaccccaaucagaagaucauuaccauaggcagcgugucccugacaaucucuacuauuugcuucuuuaugcaaaucgccauucucaucacgaccgucacacuucacuucaaacaguacgaguuuaacucaccuccaaauaaccagguuaugcugugugaaccgacuauaaucgagagaaauauuaccgaaaucguguauuugacaaacaccacuauugagaaggaaaucugccccaaaccugcugaguacaggaauuggaguaagccacagugugacauaacaggguucgcacccuuuagcaaagauaacuccauucgguuaucugccggaggugacaucuggguaacccgcgagccuuaugugucgugcgauccagacaaguguuaccaauucgcgcugggccaggggacgacucuaaauaacguccauucaaauaacaccauucgagaucguacacccuauagaacucuccugaugaaugaacuuggagugccuuuucaccugggcaccaagcagguuugcaucgcuuggagcaguuccucuugucaugacgguaaagccugguugcacgugugcaucacaggggaugacaagaacgcaaccgccagcuucauuuacaauggaaggcucgucgauuccgugguaucauggaguaaagagauacugcggacgcaggaaagcgaguguguuugcaucaacggcacuuguacaguggucaugaccgacggcucugcuuccgggaaggcagauacuaaaauucuguuuaucgaggaaggaaagauagugcauacaucaacccucagcgguagugcccaacacguggaggaaugcucuugcuauccacgcuacccgggcgucagauguguuugcagggacaacuggaagggguccaaucggcccauuguggauaucaacaucaaagaccacagcauuguaucgcgcuacguguguucuggauuagucggcgacacgccucgaaagaaugauuccucaaguagcucccauugccuggacccaaacaaugaggaaggugggcacggagugaaaggcugggcuuucgaugacggcaacgauguuuggauggggagaaccaucaaugagacaucuaggcuuggauaugagacuuuuaaggugauugaagguuggagcaaccccaaaucaaaguugcagauaaaucggcaggucaucguggaccguggcgaucgcaguggguacuccggaauuuucagcguagagggcaaaucuuguaucaacagaugcuuuuauguugaacugaucaggggucggaaggaggaaaccgaggugcuauggacaucaaauaguauugucguguucugugggacuagcggcaccuacggaacaggcuccuggccugacggggccgaucucaaccugaugccaauauga

SEQ ID NO: 153185 - RNA, 1410 nt, Artificial Sequence
  derived and/or modified CDS sequence (opt3) from neuraminidase__InfluenzaA__AHM00953
augaaccccaaucagaagaucauuaccauaggcagcgugucccugacaaucucuacuauuugcuucuuuaugcagaucgccauucucaucacgaccgucacacuucacuucaaacaguacgcuuuuaacucaccuccaaauaaccagguuaugcugugugagccgacuauaaucgaaagaaauauuaccgagaucguguauuugacaaacaccacuauugaaaaggagaucugccccaaaccugcagaauacaggaauuggaguaagccacagugugggauaacaggauucgcccccuuuagcaaagacaacuccauucgguuaucugcggguggcgauaucuggguaacccgcgagccuuaugugucgugcgacccagauaaguguuaccaauucgcucuggggcagggaacgacucuaaauaacguccauucaaauaacaccgugcgagaccguacacccuauagaacucuccugaugaaugagcuuggcguuccuuuucaccuggguaccaaacaggugugcauugccuggagcaguuccucuugucaugaugggaaggcaugguugcacgucugcaucacaggagacgauaagaacgccaccgcuagcuucaucuacaauggcaggcucguggacuccguaguuucauggaguaaagaaauucugcggacgcaggagagcgaaugugugugcauaaacggcacuuguacagucgugaugaccgaugggucugcauccggaaaggccgacacuaaaauccuguuuauugaggaggguaagaucgugcauacaucaacccucagcggcagugcucaacacgucgaagagugcucuugcuauccacgcuacccggggguuagaugugugugcagggauaacuggaagggauccaaucggcccauaguagacauuaacaucaaagaucacagcaucgugucgucuuacgucuguuccggcuuagugggugacacgccucgcaagaaugacucaaguagcuccucucauugccuggauccaaacaaugaagaagggggacacggcguuaaaggcugggccuucgacgaugggaacgacguguggaugggacgaaccauuaaugagacaagcagacuugguuaugagacuuuuaaggucaucgagggcuggucaaaccccaaaaguaaguugcagauuaauaggcaagugauaguagaucguggggaccgguccggauacagcggcaucuucucuguugaagguaaaucauguauuaaccgcugcuuuuauguggagcugaucagagggaggaaggaagagaccgaaguccuauggacaaguaauagcaucguggucuucuguggcacuuccggaaccuacggcacagggucuuggccugauggagcggaccucaaccugaugccaauuuga

SEQ ID NO: 153186 - RNA, 1410 nt, Artificial Sequence; identical to SEQ ID NO: 151423
  derived and/or modified CDS sequence (opt3) from neuraminidase__InfluenzaA__AHM00965

SEQ ID NO: 153187 - RNA, 1410 nt, Artificial Sequence; identical to SEQ ID NO: 151423
  derived and/or modified CDS sequence (opt3) from neuraminidase__InfluenzaA__AHM00977

SEQ ID NO: 153188 - RNA, 1398 nt, Artificial Sequence
  derived and/or modified CDS sequence (opt3) from neuraminidase__InfluenzaA__AHM24226
augaaccccaaucagaagauccugugcaccagcgccacagcuauuauaaucggcgcaauugccgugcucaucgggauugcgaaccuuggacugaauaucgguuugcacuuaaaaccuggcuguaacugcucccauucucaaccagagacuacgaauaccucacagacaauaaucaacaauuacuauaacgaaacuaauauuaccaacauccagauggaggaaagaacaaguaggaauuucaacaaucugaccaaggggcuauguacuauuaacagcuggcacaucuacggaaaagacaaugcuguccggauaggcgaguccucugauguucucgugacacgcgaaccguauguaucgugcgaccccgaugagugucgauuuuacgcccugucacaggguaccacgauucgugggaagcauagcaacggaacuauccacgacagaagucaauauagggcacuuauuuccuggccucugucuagcccacccaccguguacaacucccgggucgagugcaucggcuggucaaguacaagcugucaugauggcaaaucucgcauguccaucugcauuucagggccuaauaacaaugccagcgcugugguuugguauaacagaaggccaguggcagaaauaaauacuugggcccggaacaucuugcgcacccaggagagugaaugugucugccacaauggagugugucccguaguuuucacagacgguucugcuaccggcccugccgauacgcgaauuuacuacuuuaaggaggggaagaugcucaaaugggagucccugacuggaacagcgaagcacaacgaagagugcagcugcuauggcgaaagaaccgguaucacuuguacaugcagggacaauuggcaggggucgaaccggccagugauacagauugauccggucgcaaugacccauacgucucaauacaucuguucccccgugcugaccgacaauccucguccaaacgaucccaauaucggaaaaugcaacgacccuuauccaggcaauaacaacaauggcgugaagggguucucauaccucgauggagccaacacaugguuaggucgcacuauuaguaccgcuagcagauccggcuaugagaugcugaaaguccccaaugcccuuacagacgacaggucuaagccgauccaggggcagacuauuguuuugaacgcagauuggagcggauacucaggcaguuuuauggacuauugggcugaaggugauuguuaccgggccugcuucuacguggagcugauacgagggcgcccuaaggaggacaaaguaugguggaccuccaauagcaucgugucuauguguucaaguacagaauuucuaggccaguggaacuggcccgauggagcgaagauugaguauuuccucuga

SEQ ID NO: 153189 - RNA, 1398 nt, Artificial Sequence; identical to SEQ ID NO: 151502
  derived and/or modified CDS sequence (opt3) from neuraminidase__InfluenzaA__AHM24238

SEQ ID NO: 153190 - RNA, 1398 nt, Artificial Sequence
  derived and/or modified CDS sequence (opt3) from neuraminidase__InfluenzaA__AHM24250
augaaccccaaucagaagauccugugcaccagcgccacagcuauuauaaucggcgcaauugccgugcucaucgggauugcgaaccuuggacugaauaucgguuugcacuuaaaaccuuccuguaacugcucucauucacaaccagagacuacgaauaccagucagacaauaaucaacaauuacuauaacgaaacuaauauuaccaacauccagauggaggaaagaacaagcaggaauuucaacaaucugaccaagggccuauguacuauuaacuccuggcacaucuacgggaaagacaaugcuguccggauaggagagaacucugauguucucgugacacgcgaaccguauguaucgugcgaccccgaugagugucgauuuuacgcccugucacagggcaccacgauucgugguaagcauagcaacgggacuauccacgacagaagucaauauagggcacuuauuuccuggccucugucuagcccacccaccguguacaauucccgggucgagugcaucggauggucaaguacaagcugucaugauggcaaaucucgcauguccaucugcauuucaggcccuaacaauaacgccagcgcugugguuugguauaauagaaggccaguggcagaaauaaacacuugggcccggaauaucuugcgcacccaggagagugaaugugucugccacaacggggugugucccguaguuuucacagacggaucugcuaccgguccugccgauacgcgaauuuacuacuuuaaggagggcaagauccucaaaugggagucccugacugggacagcgaagcacauagaagagugcagcugcuauggagaaagaaccggcauuacuuguacaugcagggacaauuggcaggguucgaaccggccagugauccagaucgauccggucgcaaugacccauacgucucaauacauuuguucccccgugcugaccgacaauccucguccaaacgaucccaauaucgggaaaugcaacgacccuuauccaggaaauaacaacaauggcgugaagggcuucucauaccucgauggggccaacacaugguuaggacgcacuauuaguaccgcuagcagauccgguuaugagaugcugaaaguccccaaugcccuuacagacgacaggucuaagccgauacagggccagacuaucguuuugaacgcagauuggagcggguacucaggaaguuuuauggacuauugggcugaaggcgauuguuaccgggccugcuucuacguggagcugauucgaggucgcccuaaggaggacaaaguaugguggaccuccaauagcaucgugucuauguguucaaguacagaauuucuagggcaguggaacuggcccgauggcgcgaagaucgaguauuuccucuga

SEQ ID NO: 153191 - RNA, 1410 nt, Artificial Sequence; identical to SEQ ID NO: 148757
  derived and/or modified CDS sequence (opt3) from neuraminidase__InfluenzaA__AHM98312

SEQ ID NO: 153192 - RNA, 1410 nt, Artificial Sequence
  derived and/or modified CDS sequence (opt3) from neuraminidase__InfluenzaA__AHM98331
augaaccccaaucagaagaucauuaccauaggcagcgugugcaugacaaucgggauggccaaccugauucuccaaaucggaaauauuaucuccauauggaucucucacucaauucagcuugguaaccagagucagaucgagacuuguaaucaaagcgucauuacguacgaaaacaauaccuggguuaaccagacauaugugaauaucuccaacacuaauuucgcugcaggccagucuguagugucggucaaacuggccgggaacagcucauugugcccugugaguggaugggcgauauacuccaaggacaauucuauuagaaucggcagcaaaggugauguuuuugugauuagggagccauucaucuccuguucaccguuagaaugccggaccuuuuuccugacacagggggcucuacucaacgacaagcauaguaauggaaccaucaaagaucgcagccccuaucgaacucugaugucuuguccuauuggcgaggucccaucccccuacaacucacguuuugaaagcguggccuggagugcaucugccugccacgacggcauaaacuggcuuacaaucgggauuuccggaccugauaauggugcuguagcaguucugaaguauaacggcaucauaaccgacacgauuaagagcuggagaaauaacaucuugaggacucaagagucggagugugccugcgugaaugggucuuguuucaccaucaugacagauggaccauccgacggccaggcuucauacaaaauuuuucggaucgaaaaggguaaaauugucaagaguguggagaugaacgcccccaauuaucauuacgaagagugcagcuguuacccugauuccucugagauaacuugcgugugccgcgacaacuggcacgggagcaauagaccaugggucucauucaaccagaaucucgaauaucagaucggauacauuuguaguggcaucuuuggcgauaacccgaggcccaaugacaaaaccggguccugcggaccuguuagcucuaacggugcgaauggcgugaagggguucucauuuaaguauggaaacggcguauggaucggucggacaaaaaguauuagcucccgcaagggguucgagaugauaugggauccaaacggcuggaccggaacggacaauaacuuuucuaucaaacaagacauugugggcaucaaugaauggucgggguacagcggauccuucguccagcaucccgagcugacuggucuggauuguauucgaccuugcuucuggguggaacucaucagaggcaggccaaaggagaacacaauauggaccucagggaguucuaucagcuuuuguggaguucacuccgacacugugggcuggucauggcccgauggugcagaguuaccguucacaauugacaaauga

SEQ ID NO: 153193 - RNA, 1410 nt, Artificial Sequence; identical to SEQ ID NO: 148773
  derived and/or modified CDS sequence (opt3) from neuraminidase__InfluenzaA__AHM98342

SEQ ID NO: 153194 - RNA, 1410 nt, Artificial Sequence
  derived and/or modified CDS sequence (opt3) from neuraminidase__InfluenzaA__AHM98353
augaaccccaaucagaagaucauuaccauaggcagcgugugcaugacaaucgggauggccaaccugauucuccaaaucggaaauauuaucuccauauggaucucucacucaauucagcuugguaaccagagucagaucgagacuuguaaucaaagcgucauuacguacgaaaacaauaccuggguuaaccagacauaugugaauaucuccaacacuaauuucgcugcaggccagucuguagugucggucaaacuggccgggaacagcucauugugcccugugaguggaugggcgauauacuccaaggacaauucuauuagaaucggcagcaaaggugauguuuuugugauuagggagccauucaucuccuguucaccguuagaaugccggaccuuuuuccugacacagggggcucuacucaacgacaagcauaguaauggaaccaucaaagaucgcagccccuaucgaacucugaugucuuguccuauuggcgaggucccaucccccuacaacucacguuuugaaagcguggccuggagugcaucugccugccacgacggcauaaacuggcuuacaaucgggauuuccggaccugauaauggugcuguagcaguucugaaguauaacggcaucauaaccgacacgauuaagagcuggagaaauaacaucuugaggacucaagagucggagugugccugcguggaugggucuuguuucaccaucaugacagacggaccauccgauggccaggcuucauacaaaauuuuucggaucgaaaaggguaaaauugucaagaguguggagaugaaugcccccaacuaucauuacgaagagugcagcuguuacccugacuccucugagauaacuugcgugugccgcgauaauuggcacgggagcaacagaccaugggucucauucaaucagaaccucgaauaucagaucggauacauuuguaguggcaucuuuggcgacaauccgaggcccaacgauaaaaccggguccugcggaccuguuagcucuaauggugcgaacggcgugaagggguucucauuuaaguauggaaauggcguauggaucggucggacaaaaaguauuagcucccgcaagggguucgagaugauaugggacccaaacggcuggaccggaacggacaacaauuuuucuaucaaacaagauauugugggcaucaacgaauggucgggguacagcggauccuucguccagcaucccgagcugacuggucuggacuguauucgaccuugcuucuggguggaacucaucagaggcaggccaaaggagaauacaauauggaccucagggaguucuaucagcuuuuguggaguuaacuccgauacugugggcuggucauggcccgacggugcagaguuaccguucacaauugauaaauga

SEQ ID NO: 153195 - RNA, 1410 nt, Artificial Sequence
  derived and/or modified CDS sequence (opt3) from neuraminidase__InfluenzaA__AHM98364
augaaccccaaucagaagaucauuaccauaggcagcgugugcaugacaaucgggauggccaaccugauucuccaaaucggaaauauuaucuccauauggaucucucacucaauucagcuugguaaccagagucagaucgagacuuguaaucaaagcgucauuacguacgaaaacaauaccuggguuaaccagacauaugugaauaucuccaacacuaauuucgcugcaggccagucuguagugucggucaaccuggccgggaauagcucauugugcccugugaguggaugggcgauauacuccaaagacaacucuauuagaaucggcagcaagggugauguuuuugugauuagggagccauucaucuccuguucaccguuagaaugccggaccuuuuuccugacacagggggcucuacucaaugacaaacauaguaacggaaccaucaaggaucgcagccccuaucgaacucugaugucuuguccuauuggcgaggucccaucccccuacaacucacguuuugaaagcguggccuggagugcaucugccugccacgacggcauaaauuggcuuacaaucgggauuuccggaccugauaacggugcuguagcaguucugaaauauaauggcaucauaaccgacacgauuaagagcuggagaaacaauaucuugaggacucaagagucggagugugccugcgugaacgggucuuguuucaccaucaugacagauggaccauccgacggccaggcuucauacaagauuuuucggaucgaaaaagguaagauugucaaaaguguggagaugaaugcccccaacuaucauuacgaagagugcagcuguuacccugauuccucugagauaacuugcgugugccgcgacaauuggcacgggagcaacagaccaugggucucauucaaucagaaccucgaauaucagaucggauacauuuguaguggcaucuuuggcgauaauccgaggcccaacgacaagaccggguccugcggaccuguuagcucuaauggugcgaacggcgugaaaggguucucauuuaaguauggaaacggcguauggaucggucggacaaagaguauuagcucccgcaaaggguucgagaugauaugggauccaaauggcuggaccggaacggacaacaauuuuucuaucaagcaagacauugugggcaucaacgaauggucgggguacagcggauccuucguccagcaucccgagcugacuggucuggauuguauucgaccuugcuucuggguggaacucaucagaggcaggccaaaagagaauacaauauggaccucagggaguucuaucagcuuuuguggaguuaacuccgacacugugggcuggucauggcccgauggugcagaguuaccguucacaauugacaaguga

SEQ ID NO: 153196 - RNA, 1410 nt, Artificial Sequence
  derived and/or modified CDS sequence (opt3) from neuraminidase__InfluenzaA__AHM98375
augaaccccaaucagaagaucauuaccauaggcagcgugugcaugacaaucgggauggccaaccugauucuccaaaucggaaauauuaucuccauauggaucucucacucaauucagcuugguaaccagaaucagaucgagacuuguaaccaaagugucauuacguacgaaaauaacaccuggguuaaucagacauaugugaacaucagcaauacuaacuucgcugcaggccaguccguagugucugucaaacuggccggaaauucgucauugugcccugugagcggaugggcgauauacaguaaggacaacuccauuagaaucggcucuaaaggugauguuuuugugauuagggagccauucaucagcuguuccccguuagaaugccggaccuuuuuccugacacagggggcucuacucaaugacaagcauucaaacggaaccaucaaagaucgcagucccuuucgaacucugaugagcuguccuauuggcgaggucccaucucccuauaacucccguuucgaaucaguggccuggagcgcaagugccugccacgacggcauaaauuggcuuacaaucgggauuucuggaccugauaacggugcuguagcaguucugaaguacaauggcaucauaaccgacacgauuaaguccuggagaaacaauaucuugaggacucaagagagcgagugugccugcgugaacgggucguguuuuaccaucaugacagauggaccaucugacggccaggcuuccuauaaaauuuuccggaucgaaaaggguaaaauugucaagucaguggagaugaaugcccccaacuaccauuaugaagagugcaguuguuacccugauagcuccgagauaacuugcgugugccgcgacaauuggcacgggucuaacagaccaugggucagcuuuaaucagaaccucgaauaccagaucggauauauuuguucaggcaucuucggcgauaauccgaggcccaacgacaaaaccgggaguugcggaccuguuuccagcaauggugcgaacggcgugaagggguuuucuuucaaguacggaaacggcguauggaucggucggacaaaaucaauuaguagccgcaagggguuugagaugauaugggauccaaauggcuggaccggaacggacaacaauuucuccaucaaacaagacauugugggcaucaacgaauggucuggguauucggggagcuucguccagcaucccgagcugacuggucuggauuguauucgaccuugcuuuuggguggaacucaucagaggcaggccaaaggagaauacaauauggaccuccgggucaaguaucucuuucuguggaguuaacagcgacacugugggcugguccuggcccgauggugcagaguuaccguuuacaauugacaaauga

SEQ ID NO: 153197 - RNA, 1410 nt, Artificial Sequence; identical to SEQ ID NO: 148757
  derived and/or modified CDS sequence (opt3) from neuraminidase__InfluenzaA__AHM98386

SEQ ID NO: 153198 - RNA, 1410 nt, Artificial Sequence
  derived and/or modified CDS sequence (opt3) from neuraminidase__InfluenzaA__AHM98408
augaaccccaaucagaagaucauuaccauaggcagcgugugcaugacaaucgggauggccaaccugauucuccaaaucggaaauauuaucuccauauggaucucucacucaauucagcuugguaaccagagucagaucgagacuuguaaucaaagcgucauuacguacgaaaacaauaccuggaucaaccagacauauguuaauauauccaacacuaauuucgcugcaggccagucugugguaucggugaaacuggccgggaacagcucauugugcccugucaguggaugggcgauuuacuccaaggacaauucuaucagaauuggcagcaaaggugauguguuuguuaucagggagccauucaucuccuguucaccguuagaaugccggaccuuuuuccugacacagggggcucuacucaacgacaagcauaguaauggaaccauuaaagaucgcagccccuaucgaacucugaugucuuguccuauaggcgaggugccaucccccuacaacucacguuuugaaagcgucgccuggagugcaucugccugccacgacggcaucaacuggcuuacaauugggaucuccggaccugauaauggugcuguggcaguacugaaguauaacggcauaauuaccgacacgaucaagagcuggagaaauaacaucuugaggacucaagagucggagugugccugcguuaaugggucuuguuucaccauuaugacagauggaccauccgacggccaggcuucauacaaaaucuuucggauugaaaaggguaaaauagugaagagugucgagaugaacgcccccaauuaucauuacgaagagugcagcuguuacccugauuccucugagaucacuugcgugugccgcgacaacuggcacgggagcaauagaccaugggugucauucaaccagaaucucgaauaucagauuggauacaucuguaguggcaucuuuggcgauaacccgaggcccaaugacaaaaccggguccugcggaccugucagcucuaacggugcgaauggcguuaagggguucucauuuaaguauggaaacggcguguggauuggucggacaaaaaguauaagcucccgcaagggguucgagaugaucugggauccaaacggcuggaccggaacggacaauucuuuuucgauuaaacaagacaucguaggcauuaacgaauggagcggguacuccggaucauucgugcagcaucccgagcugacuggucuggauuguauccgaccuugcuucugggucgaacucauaagaggcaggccaaaggagaauacaaucuggaccagugggucuagcauuuccuuuuguggagugaacucagacacuguuggcuggagcuggcccgauggugcagaguuaccguucacaaucgacaaauga

SEQ ID NO: 153199 - RNA, 1410 nt, Artificial Sequence; identical to SEQ ID NO: 153198
  derived and/or modified CDS sequence (opt3) from neuraminidase__InfluenzaA__AHM98419

SEQ ID NO: 153200 - RNA, 1410 nt, Artificial Sequence
  derived and/or modified CDS sequence (opt3) from neuraminidase__InfluenzaA__AHM98430
augaaccccaaucagaagaucauuaccauaggcagcgugugcaugacaaucgggauggccaaccugauucuccaaaucggaaauauuaucuccauauggaucucucacucaauucagcuugguaaccagagucagaucgagacuuguaaucaaaacgucauuacguacgaaaauaacaccuggguuaaucagacauaugugaacaucagcaauacuaacuucgcugcaggccaguccguagugccugucaaacuggccggaaauucuucguugugcccagugucagggugggcgauauacagcaaggacaacaguauuagaaucggcuccaaaggugauguuuuugugauuagggagccguucaucucuuguagccccuuagaaugccggaccuuuuuccugacacagggggcucuacucaaugacaagcauuccaacggaaccaucaaagaucgcucaccuuaucgaacucugaugaguuguccaauuggcgagguccccagcccuuacaacucucguuuugaauccguggccuggucagcaagcgccugccacgacggcauaaauuggcuuacaaucgggauuaguggaccagauaacggugcuguagcaguucugaaguauaauggcaucauaaccgacacgauuaagucuuggagaaacaauaucuugaggacucaagaguccgagugugccugcgugaacgggagcuguuucaccaucaugacagauggacccucggacggccaggcuucuuacaaaauuuuucggaucgaaaaggguaaaauugucaaguccguggagaugaaugccccuaacuaucauuacgaagagugcucauguuacccagauaguagcgagauaacuugcgugugccgcgacaauuggcacggguccaacagaccgugggucucuuucaaucagaaccucgaauaucagaucggauacauuuguagcggcaucuuuggcgauaaucccaggccuaacgacaaaaccgggucaugcggaccaguuaguuccaauggugcgaacggcgugaagggguucagcuuuaaguauggaaacggcguauggaucggucggacaaaaucuauuucaagucgcaagggguucgagaugauaugggaucccaauggcuggaccggaacggacaacaauuuuagcaucaaacaagacauugugggcaucaacgaaugguccggguacucuggaucguucguccagcauccugagcugacuggucuggauuguauucgaccaugcuucuggguggaacucaucagaggcaggcccaaggagaauacaauauggaccagcggguccucaaucaguuuuuguggaguuaacucugacacugugggcuggagcuggccggauggugcagaguuaccuuucacaauugacaaauga

SEQ ID NO: 153201 - RNA, 1410 nt, Artificial Sequence; identical to SEQ ID NO: 149005
  derived and/or modified CDS sequence (opt3) from neuraminidase__InfluenzaA__AHM98441

SEQ ID NO: 153202 - RNA, 1410 nt, Artificial Sequence
  derived and/or modified CDS sequence (opt3) from neuraminidase__InfluenzaA__AHM98452
augaaccccaaucagaagaucauuaccauaggcagcgugugcaugacaaucgggauggccaaccugauucuccaaaucggaaauauuaucuccauauggaucucucacucaauucagcuuagaaaccagagucagaucgagacuuguaaucaaagcgucauuacguacgaaaacaauaccuggguuaaccagacauaugugaauaucuccaacacuaauuucgcugcaggucagucuguagugucggucaaacuggccggcaacagcagcuugugcccugugagugggugggcgauauacuccaaggacaauucuauuaggaucggaagcaaaggcgauguuuuugugauucgggagccauucaucuccuguucaccguuagaaugccgcaccuuuuuccugacacagggugcucuacucaacgacaagcauaguaaugggaccaucaaagaucgaagccccuaucguacucugaugucuuguccuauuggagaggucccaucccccuacaacucaagauuugaaagcguggccuggagugcaucugccugccacgacggcauaaacuggcuuacaaucggcauuuccgggccugauaauggagcuguagcaguucugaaguauaacgguaucauaaccgacacgauuaagagcuggaggaauaacaucuugcggacucaagagucggagugugccugcgugaauggcucuuguuucaccaucaugacagaugggccauccgacggacaggcuucauacaaaauuuuucgcaucgaaaagggcaaaauugucaagaguguggagaugaacgcccccaauuaucauuacgaagagugcagcuguuacccugauuccucugagauaacuugcgugugcagagacaacuggcacgguagcaauaggccaugggucucauucaaccagaaucucgaauaucagaucggguacauuuguaguggaaucuuuggcgauaacccgcggcccaaugacaaaaccggcuccugcgggccuguuagcucuaacggagcgaauggugugaagggcuucucauuuaaguaugggaacggaguauggaucggccgcacaaaaaguauuagcucccgaaaggguuucgagaugauaugggauccaaacggguggaccggcacggacaauaacuuuucuaucaaacaagacauugugggagucaaugaauggucgggcuacagcggguccuucgugcagcaucccgagcugacuggacuggauuguaucagaccuugcuucuggguugaacucauuaggggucggccaaaggagaacacaaucuggaccucaggcaguucuauaucauuuuguggggucaauuccgacacugugggauggucauggcccgauggcgcagaguuaccguucacaaucgacaaauga

SEQ ID NO: 153203 - RNA, 1410 nt, Artificial Sequence; identical to SEQ ID NO: 148757
  derived and/or modified CDS sequence (opt3) from neuraminidase__InfluenzaA__AHM98474

SEQ ID NO: 153204 - RNA, 1410 nt, Artificial Sequence
  derived and/or modified CDS sequence (opt3) from neuraminidase__InfluenzaA__AHM98485
augaaccccaaucagaagaucauuaccauaggcagcgugugcaugacaaucgggauggccaaccugauucuccaaaucggaaauauuaucuccauauggaucucucacucaauucagcuugguaaccagagucagaucgagacuuguaaucaaagcgucauuacguacgaaaacaauaccuggguuaaccagacauaugugaauaucuccaacacuaauuucgcugcaggccagucuguagugucggucaaacugguggggaacucauccuugugcccuguuaguggaugggccauauacuccaaggacaauucuauuagaaucggcagcaaaggugauguguuugucauuagggagccauucaucuccuguucaccguuagaaugccggaccuuuuuccugacacagggggcgcuacucaacgacaagcauaguaauggaaccaucaaagaucgcagccccuaucgaacucugaugucuuguccuauuggcgaggugccaucccccuacaacucacguuuugaaagcguagcuuggagugccucugcaugccacgacggcauaaacuggcuuacaaucgggauuuccggaccugauaauggugccguugcugugcugaaguauaacggcaucauaaccgacacgauuaagagcuggagaaauaacaucuugaggacucaagagucggagugugcaugcgucaaugggucuuguuucaccaucaugacagauggaccauccgacggccaggccucauacaaaauuuuucggaucgaaaaggguaaaauugugaagaguguggagaugaacgcucccaauuaucauuacgaagagugcagcuguuacccugauuccucugagauaacuugcgucugccgcgacaacuggcacgggagcaauagaccauggguuucauucaaccagaaucucgaauaucagaucggauacauuuguaguggcaucuuuggcgauaacccgaggcccaaugacaaaaccggguccugcggaccugugagcucuaacggugccaauggcguaaagggguucucauuuaaguauggaaacggcguguggaucggucggacaaaaaguauuagcucccgcaagggguucgagaugauaugggauccaaacggcuggaccggaacggacaauaacuuuucuaucaaacaagacauugucggcaucaaugaauggucgggguacagcggauccuucgugcagcaucccgagcugacuggucuggauuguauucgaccuugcuucuggguugaacucaucagaggcaggccaaaggagaacacaauauggaccucagggaguucuaucagcuuuuguggagugaauagcgacacugucggcuggucauggcccgauggugcggaguuaccguucacaauugacaaauga

SEQ ID NO: 153205 - RNA, 1410 nt, Artificial Sequence
  derived and/or modified CDS sequence (opt3) from neuraminidase__InfluenzaA__AHM98496
augaaccccaaucagaagaucauuaccauaggcagcgugugcaugacaaucgggauggccaaccugauucuccaaaucggaaauauuaucuccauauggaucucucacucaauucagcuugguaaccagaaucagaucgagacuuguaaccaaagugucauuacguacgaaaauaacaccuggguuaaucagacauaugugaacaucagcaauacuaacuucgcugcaggccaguccguagugucugucaaacuggccggaaauucgucauugugcccugugagcggaugggcgauauacaguaaggacaacuccauuagaaucggcucuaaaggugauguuuuugugauuagggagccauucaucagcuguuccccguuagaaugccggaccuuuuuccugacacagggggcucuacucaaugacaagcauucaaacggaaccaucaaaaaccgcagucccuaucgaacucugaugagcuguccuauuggcgaggucccaucucccuacaauucccguuuugaaucaguggccuggagcgcaagugccugccacgauggcauaaacuggcuuacaaucgggauuucuggaccugacaauggugcuguagcaguucugaaguauaacggcaucauaaccgauacgauuaaguccuggagaaauaacaucuugaggacucaagagagcgagugugccugcgugaaugggucguguuucaccaucaugacagacggaccaucugauggccaggcuuccuacaaaauuuuucggaucgaaaaggguaaaauugucaagucaguggagaugaacgcccccaauuaucauuacgaagagugcaguuguuacccugacagcuccgagauaaaaugcgugugccgcgauaacuggcacgggucuaauagaccaugggucagcuucaaccagaaucucgaauaucagaucggauacauuuguucaggcaucuuuggcgacaacccgaggcccaaugauaagacugggaguugcggaccuguuuccagcaacggugcgaacggcgugaagggguucucuuuuaaauauggaaauggcguauggaucggucggaccaagucaauuaguagccgcaaaggguucgagaugauaugggacccaaacggcuggacaggaaccgauaauaacuuuuccaucaagcaagacauugugggcaucaaugaauggucuggguacucggggagcuucguccagcaucccgagcugacgggucuggacuguauucgaccuugcuucuggguggaacucaucagaggcaggccaaaagagaacacuauauggacauccgggucaaguaucucuuuuuguggaguuaauagcgauaccgugggcugguccuggcccgacggugcagaguuaccguucacuauugauaaguga

SEQ ID NO: 153206 - RNA, 1410 nt, Artificial Sequence; identical to SEQ ID NO: 148757
  derived and/or modified CDS sequence (opt3) from neuraminidase__InfluenzaA__AHM98507

SEQ ID NO: 153207 - RNA, 1410 nt, Artificial Sequence
  derived and/or modified CDS sequence (opt3) from neuraminidase__InfluenzaA__AHM98518
augaaccccaaucagaagaucauuaccauaggcagcgugugcaugacaaucgggauggccaaccugauucuccaaaucggaaauauuaucuccauauggaucucucacucaauucagcuugguaaccagagucagaucgagacuuguaaucaaagcgucauuacguacgaaaacaauaccuggaucaaccagacauauguuaauauauccaacacuaauuucgcugcaggccagucugugguaucggugaaacuggccgggaacucauccuugugcccugucaguggaugggcgauuuacuccaaggacaauucuaucagaauuggcagcaaaggugauguguuuguuaucagggagccauucaucuccuguucaccguuagaaugccggaccuuuuuccugacacagggggcucuacucaacgacaagcauaguaauggaaccauuaaagaucgcagccccuaucgaacucugaugucuuguccuauaggcgaggugccaucccccuacaacucacguuuugaaagcgucgccuggagugcaucugccugccacgacggcaucaacuggcuuacaauugggaucuccggaccugauaauggugcuguggcaguacugaaguauaacggcauaauuaccgacacgaucaagagcuggagaaauaacaucuugaggacucaagagucggagugugccugcguuaaugggucuuguuucaccauuaugacagauggaccauccgacggccaggcuucauacaaaaucuuucggauugaaaaggguaaaauagugaagagugucgagaugaacgcccccaauuaucauuacgaagagugcagcuguuacccugauuccucugagaucacuugcgugugccgcgacaacuggcacgggagcaauagaccaugggugucauucaaccagaaucucgaauaucagauuggauacaucuguaguggcaucuuuggcgauaacccgaggcccaaugacaaaaccggguccugcggaccugucagcucuaacggugcgaauggcguuaagggguucucauuuaaguauggaaacggcguguggauuggucggacaaaaaguauaagcucccgcaagggguucgagaugaucugggauccaaacggcuggaccggaacggacaauaacuuuucuauuaaacaagacaucguaggcauuaaugaauggucgggguacagcggauccuucgugcagcaucccgagcugacuggucuggauuguauccgaccuugcuucugggucgaacucauaagaggcaggccaaaggagaacacaaucuggaccucagggaguucuaugagcuuuuguggagugaauagcgacacuguuggcuggucauggcccgauggugcagaguuaccguucacaauugacaaauga

SEQ ID NO: 153208 - RNA, 1410 nt, Artificial Sequence; identical to SEQ ID NO: 148305
  derived and/or modified CDS sequence (opt3) from neuraminidase__InfluenzaA__AHM98529

SEQ ID NO: 153209 - RNA, 1410 nt, Artificial Sequence; identical to SEQ ID NO: 149049
  derived and/or modified CDS sequence (opt3) from neuraminidase__InfluenzaA__AHM98540

SEQ ID NO: 153210 - RNA, 1410 nt, Artificial Sequence
  derived and/or modified CDS sequence (opt3) from neuraminidase__InfluenzaA__AHM98562
augaaccccaaucagaagaucauuaccauaggcagcgugugcaugacaaucgggauggccaaccugauucuccaaaucggaaauauuaucuccauauggaucucucacucaauucagcuugguaaccagaaucagaucgagacuuguaaccaaagugucauuacguacgaaaauaacaccuggguuaaucagacauaugugaacaucagcaauacuaacuucgcugcaggccaguccguagugucugucaaacuggccggaaauucgucauugugcccugugagcggaugggcgauauacaguaaggacaacuccauuagaaucggcucuaaaggugauguuuuugugauuagggagccauucaucagcuguuccccguuagaaugccggaccuuuuuccugacacagggggcucuacucaaugacaagcauucaaacggaaccaucaaagaucgcagucccuaucgaacucugaugagcuguccuauuggcgaggucccaucucccuacaacucccguuuugaaucaguggccuggagcgcaagugccugccacgacggcauaaauuggcuuacaaucgggauuucuggaccugauaacggugcuguagcaguucugaaguauaauggcaucauaaccgacacgauuaaguccuggagaaacaauaucuugaggacucaagagagcgagugugccugcgugaacgggucguguuucaccaucaugacagauggaccaucugacggccaggcuuccuacaaaauuuuucggaucgaaaaggguaaaauugucaagucaguggagaugaaugcccccaacuaucauuacgaagagugcaguuguuacccugauagcuccgagauaacuugcgugugccgcgacaauuggcacgggucuaacagaccaugggucagcuucaaucagaaccucgaauaucagaucggauacauuuguucaggcaucuuuggcgauaauccgaggcccaacgacaaagcggggaguugcggaccuguuuccagcaauggugcaaacggcgugaagggguucucuuuuaaguauggaaacggcguauggaucggucggaccaaaucaauuaguagccgcaagggguucgagaugauaugggauccaaauggcuggacaggaaccgacaacaauuuuuccaucaaacaagacauugugggcaucaacgaauggucuggguacucggggagcuucguccagcaucccgagcugacgggucuggauuguauucgaccuugcuucuggguggaacucaucagaggcaggccaaaggagaauacuauauggacauccgggucaaguaucucuuuuuguggaguuaacagcuauaccgugggcugguccuggcccgacggugccgaguuaccguucacuauugauaaauga

SEQ ID NO: 153211 - RNA, 1410 nt, Artificial Sequence; identical to SEQ ID NO: 153200
  derived and/or modified CDS sequence (opt3) from neuraminidase__InfluenzaA__AHM98573

SEQ ID NO: 153212 - RNA, 1410 nt, Artificial Sequence
  derived and/or modified CDS sequence (opt3) from neuraminidase__InfluenzaA__AHM98584
augaaccccaaucagaagaucauuaccauaggcagcgugugcaugacaaucgggauggccaaccugauucuccaaaucggaaauauuaucuccauauggaucucucacucaauucagcuugguaaccagagucagaucgagacuuguaaucaaagcgucauuacguacgaaaacaauaccuggaucaaccagacauauguuaauauauccaacacuaauuucgcugcaggccagucugugguaucggugaaacuggccgggaacagcucauugugcccugucaguggaugggcgauuuacuccaaggacaauucuaucagaauuggcagcaaaggugauguguuuguuaucagggagccauucaucuccuguucaccguuagaaugccggaccuuuuuccugacacagggggcucuacucaacgacaagcauaguaauggaaccauuaaagaucgcagccccuaucgaacucugaugucuuguccuauaggcgaggugccaucccccuacaacucacguuuugaaagcgucgccuggagugcaucugccugccacgacggcaucaacuggcuuacaauugggaucuccggaccugauaauggugcuguggcaguacugagauauaacggcauaauuaccgacacgaucaagagcuggaggaauaacaucuugcggacucaagagucggagugugccugcguuaaugggucuuguuucaccauuaugacagauggaccauccgacggccaggcuucauacaagaucuuucgcauugaaaaagguaagauagugaaaagugucgagaugaacgcccccaauuaucauuacgaagagugcagcuguuacccugauuccucugagaucacuugcgugugcagagacaacuggcacgggagcaauaggccaugggugucauucaaccagaaucucgaauaucagauuggauacaucuguaguggcaucuuuggcgauaacccgcggcccaaugacaagaccggguccugcggaccugucagcucuaacggugcgaauggcguuaaaggguucucauuuaaguauggaaacggcguguggauuggucgcacaaagaguauaagcucccgaaaaggguucgagaugaucugggauccaaacggcuggaccggaacggacaauucuuuuucgauuaagcaagacaucguaggcauuaacgaauggagcggguacuccggaucauucgugcagcaucccgagcugacuggucuggauuguaucagaccuugcuucugggucgaacucauaaggggccggccaaaagagaauacaaucuggaccagugggucuagcauuuccuuuuguggagugaacucagacacuguuggcuggagcuggcccgauggugcagaguuaccguucacaaucgacaaguga

SEQ ID NO: 153213 - RNA, 1410 nt, Artificial Sequence; identical to SEQ ID NO: 153200
  derived and/or modified CDS sequence (opt3) from neuraminidase__InfluenzaA__AHM98595

SEQ ID NO: 153214 - RNA, 1410 nt, Artificial Sequence; identical to SEQ ID NO: 148757
  derived and/or modified CDS sequence (opt3) from neuraminidase__InfluenzaA__AHM98606

SEQ ID NO: 153215 - RNA, 1410 nt, Artificial Sequence
  derived and/or modified CDS sequence (opt3) from neuraminidase__InfluenzaA__AHM98617
augaaccccaaucagaagaucauuaccauaggcagcgugugcaugacaaucgggauggccaaccugauucuccaaaucggaaauauuaucuccauauggaucucucacucaauucagcuugguaaccagagucagaucgagacuuguaaucaaagcgucauuacguacgaaaacaauaccuggaucaaccagacauauguuaauauauccaacacuaauuucgcugcaggccagucugugguaucggugaaacuggccgggaacagcucauugugcccugucaguggaugggcgauuuacuccaaggacaauucuaucagaauuggcagcaaaggugauguguuuguuaucagggagccauucaucuccuguucaccguuagggugccggaccuuuuuccugacacagggagcucuacucaacgacaagcauaguaauggcaccauuaaagaucgcagccccuaucgaacucugaugucuuguccuauaggcgaagugccaucccccuacaacucacguuuugagagcgucgccuggagugcaucugccugccacgacgggaucaacuggcuuacaauuggaaucuccgguccugauaauggcgcuguggcaguacugaaguauaacgggauaauuaccgacacgaucaagagcuggagaaauaacaucuugaggacucaagaaucggagugugccugcguuaauggaucuuguuucaccauuaugacagauggcccauccgacggucaggcuucauacaaaaucuuucggauugagaaggggaaaauagugaagagugucgaaaugaacgcccccaauuaucauuacgaggaaugcagcuguuacccugauuccucugagaucacuugcgugugccgcgacaacuggcacggaagcaauagaccaugggugucauucaaccagaaucucgaguaucagauuggcuacaucuguaguggcaucuuuggggauaacccgaggcccaaugacaaaaccggauccugcgguccugucagcucuaacggcgcgaaugggguuaagggauucucauuuaaguauggcaacgguguguggauugggcggacaaaaaguauaagcucccgcaagggcuucgaaaugaucugggauccaaacggauggaccggcacggacaauucuuuuucgauuaaacaagacaucguagggauuaacgaguggagcggauacuccgguucauucgugcagcaucccgaacugacuggccuggauuguauccgaccuugcuucugggucgagcucauaagagggaggccaaaggaaaauacaaucuggaccaguggaucuagcauuuccuuuuguggcgugaacucagacacuguugguuggagcuggcccgauggggcagaguuaccguucacaaucgacaaauga

SEQ ID NO: 153216 - RNA, 1410 nt, Artificial Sequence; identical to SEQ ID NO: 153198
  derived and/or modified CDS sequence (opt3) from neuraminidase__InfluenzaA__AHM98628

SEQ ID NO: 153217 - RNA, 1410 nt, Artificial Sequence
  derived and/or modified CDS sequence (opt3) from neuraminidase__InfluenzaA__AHM98639
augaaccccaaucagaagaucauuaccauaggcagcgugugcaugacaaucgggauggccaaccugauucuccaaaucggaaauauuaucuccauauggaucucucacucaauucagcuugguaaccagagucagaucgagacuuguaaucaaagcgucauuaucuacgaaaacaauacguggauaaaccagaccuauguuaauauuuccaacacaaauuucgcugcagagcagucugugguaucggugaaacuggccggcaacagcucauugugcccugucagugggugggcgaucuacuccaaggacaauucuauuagaaucggaagcaaaggcgauguguuuguuaucagggaaccauucauuuccuguucaccguuagagugccggaccuuuuuccugacucagggugcucuacucaacgacaagcauaguaaugggacaauaaaagaucgcagccccuaucgaacccugaugucuuguccuaucggagaagugccaucccccuacaacucacguuuugagagcgucgccuggagugcaucugccugccacgacggcauuaacuggcuuacuaucggcauauccgggccugauaauggagcuguggcaguacugaaguauaacgguauuaucacagacaccaucaagagcuggagaaauaacauuuugaggacgcaagagucggaaugugccugcguuaauggcucuuguuucacuaucaugaccgaugggccauccgacggacaggcuucauacaaaauuuuucggauagagaagggcaaaaucgugaagagugucgaaaugaacgcccccaauuaucauuacgaggagugcagcuguuacccugauuccucugaaauuacaugcgugugccgcgacaacuggcacgguagcaauagaccaugggugucauucaaccagaaucucgaguaucagaucggguacaucuguaguggaauuuuuggcgauaacccgaggcccaaugacaaaacuggcuccugcgggccugucagcucuaacggagcgaaugguguuaagggcuucucauuuaaguaugggaacggaguguggauaggccggaccaaaaguaucagcucccgcaaggguuucgaaaugauuugggauccaaacggguggacaggcaccgacaauucuuuuucgaucaaacaagacauuguaggaaucaacgaguggagcggcuacuccgggucauucgugcagcaucccgaacugacgggacuggauuguauacgaccuugcuucugggucgagcucaucagagguaggccaaaggagaauacuauuuggacaaguggcucuagcaucuccuuuuguggggugaacucagacaccguuggauggagcuggcccgauggcgcagaauuaccguucacuauugacaaauga

SEQ ID NO: 153218 - RNA, 1410 nt, Artificial Sequence; identical to SEQ ID NO: 148757
  derived and/or modified CDS sequence (opt3) from neuraminidase__InfluenzaA__AHM98650

SEQ ID NO: 153219 - RNA, 1410 nt, Artificial Sequence; identical to SEQ ID NO: 148757
  derived and/or modified CDS sequence (opt3) from neuraminidase__InfluenzaA__AHM98661

SEQ ID NO: 153220 - RNA, 1410 nt, Artificial Sequence
  derived and/or modified CDS sequence (opt3) from neuraminidase__InfluenzaA__AHM98672
augaaccccaaucagaagaucauuaccauaggcagcgugugcaugacaaucgggauggccaaccugauucuccaaaucggaaauauuaucuccauauggaucucucacucaauucagcuugguaaccagagucagaucgagacuuguaaucaaaacgucauuacguacgaaaauaacaccuggguuaaucagacauaugugaacaucagcaauacuaacuucgcugcagagcaguccguagugccugucaaacuggccggcaauucuucguugugcccagugucagggugggcgauauacagcaaggacaacaguauuagaaucggauccaaaggcgauguuuuugugauuagggaaccguucaucucuuguagccccuuagagugccggaccuuuuuccugacacagggugcucuacucaaugacaagcauuccaacgggaccaucaaagaucgcucaccuuaucgaacucugaugaguuguccaauuggagaaguccccagcccuuacaacucucguuuugaguccguggccuggucagcaagcgccugccacgacggcauaaauuggcuuacaaucggcauuagugggccagauaacggagcuguagcaguucugaaguauaaugguaucauaaccgacacgauuaagucuuggagaaacaauaucuugaggacucaagaguccgaaugugccugcgugaacggcagcuguuucaccaucaugacagaugggcccucggacggacaggcuucuuacaaaauuuuucggaucgagaagggcaaaauugucaaguccguggaaaugaaugccccuaacuaucauuacgaggagugcucauguuacccagauaguagcgaaauaacuugcgugugccgcgacaauuggcacgguuccaacagaccgugggucucuuucaaucagaaccucgaguaucagaucggguacauuuguagcggaaucuuuggcgauaaucccaggccuaacgacaaaaccggcucaugcgggccaguuaguuccaauggagcgaacggugugaagggcuucagcuuuaaguaugggaacggaguauggaucggccggacaaaaucuauuucaagucgcaaggguuucgaaaugauaugggaucccaauggguggaccggcacggacaacaauuuuagcaucaaacaagacauugugggaaucaacgagugguccggcuacucugggucguucguccagcauccugaacugacuggacuggauuguauucgaccaugcuucuggguggagcucaucagagguaggcccaaggagaauacaauauggaccagcggcuccucaaucaguuuuugugggguuaacucugacacugugggauggagcuggccggauggcgcagaauuaccuuucacaauugacaaauga

SEQ ID NO: 153221 - RNA, 1410 nt, Artificial Sequence
  derived and/or modified CDS sequence (opt3) from neuraminidase__InfluenzaA__AHM98683
augaaccccaaucagaagaucauuaccauaggcagcgugugcaugacaaucgggauggccaaccugauucuccaaaucggaaauauuaucuccauauggaucucucacucaauucagcuugguaaccagaaucagaucgagacuuguaaccaaagugucauuacguacgaaaauaacaccuggguuaaucagacauaugugaacaucagcaauacuaacuucgacgcuggccaguccguagugucugucagacuggcaggaaauucgucauugugcccugugagcggaugggccauauacaguaaagauaacuccauuaggaucggcucuaagggugacguuuuugugauucgggagccauucaucagcuguuccccguuagaaugccgcaccuuuuuccugacacagggggcgcuacucaaugauaaacauucaaacggaaccaucaaggaccgaagucccuaucguacucugaugagcuguccuauuggcgaggucccaucucccuacaacuccagauuugaaucaguggcuuggagcgccagugcaugccacgauggcuucaauuggcuuacaauagggaucucuggaccugacaacggugccguagcuguucugaaauauaauggcauuaucaccgauacgauaagguccuggcggaacaauauuuugcgcacucaagagagcgagugugcaugcgugaacgggucguguuuuaccaucaugacagacggaccaucugauggccaggccuccuacaagaucuucagaauugaaaaggguaaaaucgucaagucaguggagaugaaugcucccaacuaucauuacgaagagugcaguuguuacccugacagcuccgagauuacuugcgugugcagggauaauuggcacgggucuaaccggccaugggucagcuuuaaucagaaccucgaauaucagauaggauacaucuguucaggcauuuucggcgacaauccgcgccccaacgauaaaaccgggaguugcggaccuguuuccagcaauggugccaacggcgugaagggguuuucuuucaaauauggaaacggcguauggaucggucgaacaaagucaaucaguagcagaaagggguuugagaugauuugggacccaaauggcuggaccggaacggacaacaauuucuccauaaaacaagauaucgugggcauuaacgaauggucuggguacucggggagcuucguccagcaucccgagcugacuggucuggacuguaucaggccuugcuuuuggguggaacucauucggggccguccaaaggagaauacaaucuggaccuccgggucaaguauaucuuucuguggaguuaacagcgauacugugggcugguccuggcccgacggugcggaguuaccguuuacaaucgauaaauga

SEQ ID NO: 153222 - RNA, 1410 nt, Artificial Sequence; identical to SEQ ID NO: 148757
  derived and/or modified CDS sequence (opt3) from neuraminidase__InfluenzaA__AHM98693

SEQ ID NO: 153223 - RNA, 1410 nt, Artificial Sequence; identical to SEQ ID NO: 151206
  derived and/or modified CDS sequence (opt3) from neuraminidase__InfluenzaA__AHM98704

SEQ ID NO: 153224 - RNA, 1410 nt, Artificial Sequence; identical to SEQ ID NO: 151206
  derived and/or modified CDS sequence (opt3) from neuraminidase__InfluenzaA__AHM98715

SEQ ID NO: 153225 - RNA, 1410 nt, Artificial Sequence; identical to SEQ ID NO: 148757
  derived and/or modified CDS sequence (opt3) from neuraminidase__InfluenzaA__AHM98726

SEQ ID NO: 153226 - RNA, 1410 nt, Artificial Sequence
  derived and/or modified CDS sequence (opt3) from neuraminidase__InfluenzaA__AHM98737
augaaccccaaucagaagaucauuaccauaggcagcgugugcaugacaaucgggauggccaaccugauucuccaaaucggaaauauuaucuccauauggaucucucacucaauucagcuuagaaaccagagucagaucgagacuuguaaucaaagcgucauuaacuacgaaaauaacacguggguuaaucagaccuaugugaacaucuccaauacaaacuucgcugcaggucagucuguagugucggucaaacuggccggcaauagcagcuugugcccugugagugggugggcgauauacuccaaggacaacucuauuaggaucggaagcaaaggcgauguuuuugugauucgggagccauucgucuccuguucaccguuagaaugccgcaccuuuuuccugacucagggugcucuacucaaugacaagcauaguaacgggacaaucaaagaucgaagccccuaucguacccugaugucuuguccuaucggagaggugccaucccccuacaacucaagauuugaaagcguagccuggagugcaucugccugccacgacggcauuaauuggcuuacuauaggcaucuccgggccugauaacggagcuguugcagugcugaaguauaaugguauuaucacagacaccauaaagagcuggaggaacgauauuuugcggacgcaagagucggagugugccugcgucaauggcucuuguuucacuaucaugaccgacgggccauccgauggacaggcuucauacaaaaucuuucgcauugaaaagggcaaaaucgugaagaguguggagaugaacgcccccaauuaucauuacgaagagugcagcuguuacccugacuccucugagauuacaugcgucugcagagauaacuggcacgguagcaauaggccauggguuucauucaaccagaaucucgaauaucagauaggguacaucuguaguggaauuuuuggcgacaacccgcggcccaaugauaaaacuggcuccugcgggccugugagcucuaacggagcgaaugguguaaagggcuucucauuuaaguaugggaacggaguguggaucggccgcaccaaaaguaucagcucccgaaaggguuucgagaugauuugggacccaaacggguggacaggcaccgacaauaacuuuucuauaaaacaagauaucgucggaauuaaugaauggucgggcuacagcggguccuucgugcagcaucccgagcugacgggacuggacuguaucagaccuugcuucuggguugaacucauuaggggucggccaaaggagaacacuaucuggacaucaggcaguucuauaucauuuuguggggucaauuccgauaccgugggauggucauggcccgacggcgcagaguuaccguucacuaucgauaaauga

SEQ ID NO: 153227 - RNA, 1410 nt, Artificial Sequence; identical to SEQ ID NO: 151206
  derived and/or modified CDS sequence (opt3) from neuraminidase__InfluenzaA__AHM98748

SEQ ID NO: 153228 - RNA, 1410 nt, Artificial Sequence; identical to SEQ ID NO: 151206
  derived and/or modified CDS sequence (opt3) from neuraminidase__InfluenzaA__AHM98759

SEQ ID NO: 153229 - RNA, 1410 nt, Artificial Sequence
  derived and/or modified CDS sequence (opt3) from neuraminidase__InfluenzaA__AHM98770
augaaccccaaucagaagaucauuaccauaggcagcgugugcaugacaaucgggauggccaaccugauucuccaaaucggaaauauuaucuccauauggaucucucacucaauucagcuuagaaaccagagucagaucgagacuuguaaucaaagcgcuauuacguacgaaaacaauaccugggucaaccagacauauguuaauaucuccaacacuaauuucgcagccggucagucugugguaucggugaaacuggcgggcaacucauccuugugcccugucagugggugggcuauauacuccaaggacaauucuauuaggaucggaagcaaaggcgauguguuuguuauucgggagccauucaucuccuguucaccguuagaaugccgcaccuuuuuccugacacagggugcccuacucaacgacaagcauaguaaugggaccaucaaagaucgaagccccuaucguacucugaugucuuguccuauuggagaggugccaucccccuacaacucaagauuugaaagcgucgcauggagugccucugcuugccacgacggcauaaacuggcuuacaaucggcauuuccgggccugauaauggagcaguggccguacugaaguauaacgguaucauaaccgacacgauuaagagcuggaggaauaacaucuugcggacucaagagucggagugugcuugcguuaauggcucuuguuucaccaucaugacagaugggccauccgacggacaggccucauacaaaauuuuucgcaucgaaaagggcaaaauugugaagagugucgagaugaacgcgcccaauuaucauuacgaagagugcagcuguuacccugauuccucugagauaacuugcgugugcagagacaacuggcacgguagcaauaggccaugggugucauucaaccagaaucucgaauaucagaucggguacauuuguaguggaaucuuuggcgauaacccgcggcccaaugacaaaaccggcuccugcgggccugucagcucuaacggagcaaaugguguuaagggcuucucauuuaaguaugggaacggaguguggaucggccgcacaaaaaguauuagcucccgaaaggguuucgagaugauaugggauccaaacggguggaccggcacggacaauaacuuuucuaucaaacaagacauuguaggaaucaaugaauggucgggcuacagcggguccuucgugcagcaucccgagcugacuggacuggauuguauuagaccuugcuucugggucgaacucaucaggggucggccaaaggagaacacaauauggaccucaggcaguucuaucagcuuuuguggggugaauagcgacacuguuggauggucauggcccgauggcgccgaguuaccguucacaauugacaaauga

SEQ ID NO: 153230 - RNA, 1410 nt, Artificial Sequence
  derived and/or modified CDS sequence (opt3) from neuraminidase__InfluenzaA__AHM98781
augaaccccaaucagaagaucauuaccauaggcagcgugugcaugacaaucgggauggccaaccugauucuccaaaucggaaauauuaucuccauauggaucucucacucaauucagcuugguaaccagaaucagaucgagacuuguaaccaaagugucauuacguacgaaaauaacaccuggguuaaucagacauaugugaacaucagcaauacuaacuucgcugcaggccaguccguagugucugucaaacuggccggaaauucgucauugugcccugugagcgggugggcgauauacaguaaggacaacuccauuagaaucggcucuaaaggugauguuuuugugauuagggagccauucaucagcuguuccccguuagaaugccggaccuuuuuccugacacagggggcucuacucaaugacaagcauucaaacggaaccaucaaagaucgcagucccuaucgaacucugaugagcuguccuauuggcgaggucccaucucccuacaacucccguuuugaaucaguggccuggagcgcaagugccugccacgacggcauaaauuggcuuacaaucgggauuucuggaccugauaacggugcuguagcaguucugaaguauaauggcaucauaaccgacacgauuaaguccuggagaaacaauaucuugaggacucaagagagcgagugugccugcgugaacgggucguguuucaccaucaugacagauggaccaucugacggccaggcuuccuacaaaauuuuucggaucgaaaaggguaaaauugucaagucaguggagaugaaugcccccaacuaucauuacgaagagugcaguuguuacccugauagcuccgagauaacuugcgugugccgcgacaauuggcacgggucuaacagaccaugggucagcuucaaucagaaccucgaauaucagaucggauacauuuguucaggcaucuuuggcgauaauccgaggcccagugacaaaaccggguccugcggaccuguuagcucuaacggugcgaauggcgugaagggguucucauuuaaguauggaaacggcguauggaucggucggacaaaaaguauuagcucccgcaagggguucgagaugauaugggauccaaacggcuggaccggaacggacaauucuuuuucgaucaaacaagacauugugggcaucaacgaauggagcggguacuccggaucauucguccagcaucccgagcugacuggucuggauuguauucgaccuugcuucuggguggaacucaucagaggcaggccaaaggagaauacaauauggaccagugggucuagcaucuccuuuuguggaguuaacucaggcacuguggguuggagcuggcccgacggggcagaguuaccguucacaauugauaaauga

SEQ ID NO: 153231 - RNA, 1410 nt, Artificial Sequence; identical to SEQ ID NO: 148757
  derived and/or modified CDS sequence (opt3) from neuraminidase__InfluenzaA__AHM98801

SEQ ID NO: 153232 - RNA, 1410 nt, Artificial Sequence; identical to SEQ ID NO: 148305
  derived and/or modified CDS sequence (opt3) from neuraminidase__InfluenzaA__AHM98812

SEQ ID NO: 153233 - RNA, 1410 nt, Artificial Sequence
  derived and/or modified CDS sequence (opt3) from neuraminidase__InfluenzaA__AHM98823
augaaccccaaucagaagaucauuaccauaggcagcgugugcaugacaaucgggauggccaaccugauucuccaaaucggaaauauuaucuccauauggaucucucacucaauucagcuugguaaccagagucagaucgagacuuguaaucaaagcgucauuacguacgaaaacaauaccuggguuaaccagacauauaucaauauauccaacacuaauuucgcugcaggccagucugugguaucggugaaacuggccgggaacucaucauugugcccugucaguggaugggcgauuuacuccaaggacaauucuaucagaauuggcagcaaaggugauguguuuguuaucagggagccauucaucuccuguucaccgagugaaugccggaccuuuuucuuaacacagggggcucugcuaaacgacaagcauagcaauggaaccauuaaagaucgcucucccuaucgaacucucauguccuguccuauaggcgaggugccaucacccuacaacagccguuuugaaagugucgccuggucugcauccgccugccacgacggcaucaacuggcugacaauugggaucagcggaccugauaauggugcuguggcaguacuuaaguauaacggcauaauuaccgacacgaucaagucguggagaaauaacauccugaggacucaagagucugagugugccugcguuaauggguccuguuucaccauuaugacagauggaccaucagacggccaggcuaguuacaaaaucuuucggauugaaaaggguaaaauagucaagagcguggagaugaacgcccccaauuaucauuacgaagagugcuccuguuacccugauucuagcgagaucacuugcgugugccgcgacaacuggcacgggucaaauagaccaugggugaguuucaaccagaauuuggaauaucagauuggauacaucuguuccggcaucuuuggcgauaacccgaggcccaaugacaaaaccgggagcugcggaccugucucuucaaacggugcgaauggcguuaagggguucaguuuuaaguauggaaacggcguguggauuggucggacaaaaagcauauccucucgcaagggguucgagaugaucugggauccaaacggcuggaccggaacggacaauaacuuuucgauuaaacaagacaucguaggcauuaaugaauggagcggguacuccggaucauucgugcagcaucccgagcucacuggucuggauuguauccgaccuugcuucugggucgaacugauaagaggcaggccaaaggagaacacaaucuggaccagugggucuagcauuuccuuuuguggagugaauagcgacacuguuggcuggagcuggcccgauggugcagagcucccguucacaaucgacaaauga

SEQ ID NO: 153234 - RNA, 1410 nt, Artificial Sequence
  derived and/or modified CDS sequence (opt3) from neuraminidase__InfluenzaA__AHM98839
augaaccccaaucagaagaucauuaccauaggcagcgugugcaugacagucgggauggccaaccugauccuccaaauuggaaauaucauuuccaucuggauaucucacucaauccagcuugguaaccagagucagauugagacuuguaaucaaagcguuaucacguacgaaaacaauaccugggugaaccagacauauguaaauauuuccaacacuaauuucgcugcaggccagucuguggucucggugaaacuggccgggaacagcagcuugugcccuguuaguggaugggcgaucuacuccaaggacaauucuauaagaauuggcagcaaaggugauguguuugucaucagggagccauucauuuccuguucaccguuagaaugccggaccuuuuuccugacacagggggcucuacucaacgacaagcauaguaauggaaccaucaaagaucgcagccccuaucgaacucugaugucuuguccuaucggcgaggugccaucccccuacaacucacguuuugaaagcguagccuggagugcaucugccugccacgacggcauuaacuggcuuacaauagggaucuccggaccugauaauggugcuguugcagugcugaaguauaacggcauuaucaccgacacgauaaagagcuggagaaauaacauuuugaggacucaagagucggagugugccugcgucaaugggucuuguuucaccaucaugacagauggaccauccgacggccaggcuucauacaaaaucuuucggauugaaaaggguaaaaucgugaagaguguggagaugaacgcccccaauuaucauuacgaagagugcagcuguuacccugauuccucugagauuacuugcgucugccgcgacaacuggcacgggagcaauagaccauggguuucauucaaccagaaucucgaauaucagauaggauacaucuguaguggcauuuuuggcgauaacccgaggcccaaugacaaaaccggguccugcggaccugugagcucuaacggugcgaauggcguaaagggguucucauuuaaguauggaaacggcguguggaucggucggacaaaaaguaucagcucccgcaagggguucgagaugauuugggauccaaacggcuggaccggaacggacaauaacuuuucuauaaaacaagacaucgucggcauuaaugaauggucgggguacagcggauccuucgugcagcaucccgagcugacuggucuggauuguauccgaccuugcuucuggguugaacucauuagaggcaggccaaaggagaacacaaucuggaccucagggaguucuauaucauuuuguggagucaauuccgacacugugggcuggucauggcccgauggugcagaguuaccguucacaaucgacaaauga

SEQ ID NO: 153235 - RNA, 1410 nt, Artificial Sequence; identical to SEQ ID NO: 148305
  derived and/or modified CDS sequence (opt3) from neuraminidase__InfluenzaA__AHM98850

SEQ ID NO: 153236 - RNA, 1410 nt, Artificial Sequence; identical to SEQ ID NO: 148305
  derived and/or modified CDS sequence (opt3) from neuraminidase__InfluenzaA__AHM98861

SEQ ID NO: 153237 - RNA, 1410 nt, Artificial Sequence
  derived and/or modified CDS sequence (opt3) from neuraminidase__InfluenzaA__AHM98901
augaaccccaaucagaagaucauuaccauaggcagcgugugcaugacaaucgggauggccaaccugauucuccaaaucggaaauauuaucuccauauggaucucucacucaauucagcuugguaaccagaaucagaucgagacuuguaaccaaagugucauuacguacgaaaauaacaccuggguuaaucagacauaugugaacaucagcaauacuaacuucgcugcaggccaguccguagugucugucaaacuggccggaaauucgucauugugcccugugagcggaugggcgauauacaguaaggacaacuccauuagaaucggcucuaaaggugauguuuuugugauuagggagccauucaucagcuguuccccguuagaaugccggaccuuuuuccugacacagggggcucuacucaaugacaagcauucaaacggaaccaucaaagaucgcaguccccaccgaacucugaugagcuguccuauuggcgaggucccaucucccuauaacucccguuuugaaucaguggccuggagcgcaagugccugccaugacggcauaaauuggcuuacaaucgggauuucuggaccugauaacggugcuguagcaguucugaaguacaauggcaucauaaccgacacgauuaaguccuggagaaacaauaucuugaggacucaagagagcgagugugccugcgugaacgggucguguuucaccaucaugacagauggaccaucugacggccaggcuuccuauaaaauuuuucggaucgaaaaggguaaaauugucaagucaguggagaugaaugcccccaacuaccacuaugaagagugcaguuguuacccugauagcuccgagauaacuugcgugugccgcgacaauuggcaugggucuaacagaccaugggucagcuucaaucagaaccucgaauaccagaucggauauauuuguucaggcaucuuuggcgauaauccgaggcccaacgacaaaaccgggaguugcggaccuguuuccagcaauggugcgaacggcgugaagggguucucuuuuaaguacggaaacggcguauggaucggucggacaaaaucaauuaguagccgcaagggguucgagaugauaugggauccaaauggcuggaccggaacggacaacaauuuuuccaucaaacaagacauugugggcaucaacgaauggucuggguauucggggagcuucguccagcaccccgagcugacuggucuggauuguauucgaccuugcuucuggguggaacucaucagaggcaggccaaaggagaauacaauauggaccuccgggucaaguaucucuuuuuguggaguuaacagcgacacugugggcugguccuggcccgauggugcagaguuaccguucacaauugacaaauga

SEQ ID NO: 153238 - RNA, 1410 nt, Artificial Sequence; identical to SEQ ID NO: 151894
  derived and/or modified CDS sequence (opt3) from neuraminidase__InfluenzaA__AHM98912

SEQ ID NO: 153239 - RNA, 1410 nt, Artificial Sequence; identical to SEQ ID NO: 151894
  derived and/or modified CDS sequence (opt3) from neuraminidase__InfluenzaA__AHM98923

SEQ ID NO: 153240 - RNA, 1410 nt, Artificial Sequence; identical to SEQ ID NO: 151894
  derived and/or modified CDS sequence (opt3) from neuraminidase__InfluenzaA__AHM98935

SEQ ID NO: 153241 - RNA, 1410 nt, Artificial Sequence; identical to SEQ ID NO: 151894
  derived and/or modified CDS sequence (opt3) from neuraminidase__InfluenzaA__AHM98943

SEQ ID NO: 153242 - RNA, 1410 nt, Artificial Sequence; identical to SEQ ID NO: 151894
  derived and/or modified CDS sequence (opt3) from neuraminidase__InfluenzaA__AHM98954

SEQ ID NO: 153243 - RNA, 1410 nt, Artificial Sequence; identical to SEQ ID NO: 151894
  derived and/or modified CDS sequence (opt3) from neuraminidase__InfluenzaA__AHM98972

SEQ ID NO: 153244 - RNA, 1410 nt, Artificial Sequence; identical to SEQ ID NO: 151894
  derived and/or modified CDS sequence (opt3) from neuraminidase__InfluenzaA__AHM98978

SEQ ID NO: 153245 - RNA, 1410 nt, Artificial Sequence; identical to SEQ ID NO: 151894
  derived and/or modified CDS sequence (opt3) from neuraminidase__InfluenzaA__AHM98990

SEQ ID NO: 153246 - RNA, 1410 nt, Artificial Sequence; identical to SEQ ID NO: 151894
  derived and/or modified CDS sequence (opt3) from neuraminidase__InfluenzaA__AHM99000

SEQ ID NO: 153247 - RNA, 1410 nt, Artificial Sequence; identical to SEQ ID NO: 151894
  derived and/or modified CDS sequence (opt3) from neuraminidase__InfluenzaA__AHM99011

SEQ ID NO: 153248 - RNA, 1410 nt, Artificial Sequence; identical to SEQ ID NO: 151870
  derived and/or modified CDS sequence (opt3) from neuraminidase__InfluenzaA__AHM99022

SEQ ID NO: 153249 - RNA, 1410 nt, Artificial Sequence; identical to SEQ ID NO: 151870
  derived and/or modified CDS sequence (opt3) from neuraminidase__InfluenzaA__AHM99034

SEQ ID NO: 153250 - RNA, 1410 nt, Artificial Sequence; identical to SEQ ID NO: 151870
  derived and/or modified CDS sequence (opt3) from neuraminidase__InfluenzaA__AHM99046

SEQ ID NO: 153251 - RNA, 1410 nt, Artificial Sequence; identical to SEQ ID NO: 151870
  derived and/or modified CDS sequence (opt3) from neuraminidase__InfluenzaA__AHM99057

SEQ ID NO: 153252 - RNA, 1410 nt, Artificial Sequence; identical to SEQ ID NO: 151870
  derived and/or modified CDS sequence (opt3) from neuraminidase__InfluenzaA__AHM99068

SEQ ID NO: 153253 - RNA, 1410 nt, Artificial Sequence; identical to SEQ ID NO: 151894
  derived and/or modified CDS sequence (opt3) from neuraminidase__InfluenzaA__AHM99078

SEQ ID NO: 153254 - RNA, 1410 nt, Artificial Sequence
  derived and/or modified CDS sequence (opt3) from neuraminidase__InfluenzaA__AHN00720
augaacaccaaucagagaaucauuacaauaggcacuaucugccugauuguggggaucauuagccuccuucugcaaaucggaaacauagucuccuuguggaucucucacucaauucagacggaggaaaagagucaucccgagguuuguaaucagagcgugaucaccuacgaaaacaauacauggguaaaccagacuuauauuaauaucuccaacaccaauauagccgcuggucaaggcgugacaccuauuaucuuagcagggaacucuucgcugugcccaauuucaggaugggccaucuacagcaaagacaauaguaucaggauuggcuccaagggugauauauucgucaugcgggagccguuuaucucuuguagccaccuagaaugccgcaccuucuuucucacucagggggcgcugcuuaacgaccgacauuccaauggaacagugaaagaucguucacccuauagaacccugaugaguuguccuauuggcgaggcuccaagccccuacaacucuagguucgaguccguugccuggucagcaagcgccugccacgacggcauggggugguugacgaucggaauaagugguccugauaauggcgcuguggcaguccucaaguauaacgggauuaucacugacaccaugaaaucuuggcggaacaagauccugcgcacacaggaauccgagugugugugcauuaauggaagcuguuuuacuaucaugaccgauggcccaucgaacggucaggccucuuacaagauuuucaaaauggaaaaggggaaaauaaucaaguccauugagcuggacgcucccaauuaucauuacgaggaaugcucauguuacccugauacaggaaaaguaguuugcgugugcagagacaacuggcacgccaguaauaggccaugggucagcuuugaucaaaaccucgacuaucagaucggcuacaucuguuccggcguguucggggauaauccgcggucuaacgacggaaaggguaauugcggccccguguuaagcaacggggcgaauggagucaagggcuuuucauuccgcuaugguaacgggguuuggauuggccgaaccaaaaguauauccagcagaucuggauuugagaugaucugggacccuaauggcuggacggaaacugauucaaguuucagcaugaagcaggacauuaucgcacugacagauugguccggguacucuggaucguuugugcagcacccagagcuuaccgguaugaacuguauuaggcccugcuucuggguagaauugauccggggccaaccuaaagagagcacuauauggacauccgggucaaguaucucuuucuguggagugaauagcgagaccgccuccuggucauggccagacggcgcugaucugcccuuuacgauugacaaguga

SEQ ID NO: 153255 - RNA, 1410 nt, Artificial Sequence
  derived and/or modified CDS sequence (opt3) from neuraminidase__InfluenzaA__AHN00767
augaacaccaaucagagaaucauuacaauaggcacuaucugccugauuguggggaucauuagccuccuucugcaaaucggaaacauagucuccuuguggaucucucacucaauucagacgggugagaagagucaucccgaaguuuguaaucagagcgugaucaccuacgagaacaauacauggguaaaccagacuuaugugaauauuuccaacaccaauaucgccgcuggccaaggggucacaccuauaauuuuagcaggaaacucuucgcugugcccaaucucaggcugggccauuuacagcaaagacaauaguaucaggaucgguuccaagggggauauuuucgugaugcgggaaccguuuauaucuuguagccaccuagagugccgcaccuucuuucucacucagggagcgcugcuuaacgaccgacauuccaauggcacaguuaaagaucguucacccuauagaacccugaugaguuguccuaucggcgaagcuccaagccccuacaacucuagguucgaguccguggccuggucagcaagcgccugccacgacgggaugggaugguugacgauugguaucaguggcccugauaauggggcugucgcagugcucaaguauaacggaauaauuacugacaccaucaaaucuuggcggaacaagauccugcgcacacaggaguccgaauguguaugcauuaauggcagcuguuuuacuaucaugaccgaugguccaucgaacgggcaggccucuuacaagauuuucaaaauggagaagggaaaaauaaucaaguccauugaacuggacgcucccaauuaucauuacgaggagugcucauguuacccugauacaggcaaaguugugugcgucugcagagacaacuggcacgccaguaauaggccaugggugagcuuugaucaaaaccucgacuaucagaucggcuacaucuguuccgggguguucggagauaauccgcggucuaacgacgguaagggcaauugcgggcccgucuuaagcaacggagcgaauggcguuaaggguuuuucauuccgcuaugggaacggcguguggauuggacgaaccaaaaguauauccagcagaucuggcuuugaaaugaucugggacccuaauggguggacggagacugauucaaguuucagcaugaagcaggacauuaucgcacugacagauugguccggauacucugguucguuuguacagcacccagaacuuaccggcaugaacuguauuaggcccugcuucuggguggaguugauccgggggcaaccuaaagaaagcacuauauggacauccggaucaaguaucucuuucuguggcgucaauagcgagaccgccuccuggucauggccagacggugcugaucugcccuuuacgauugacaaguga

SEQ ID NO: 153256 - RNA, 1398 nt, Artificial Sequence
  derived and/or modified CDS sequence (opt3) from neuraminidase__InfluenzaA__AHN96324
augaaccccaaucagaagauccugugcaccagcgccacagcuauuauaaucggcgcaauugccgugcucaucgggauugcgaaccuuggacugaauaucgguuugcacuuaaaaccuuccuguaacugcucucauucacaaccagagacuacgaauaccagucagacaauaaucaacaauuacuauaacgaaacuaauauuaccaacauccagauggaggaaagaacaagcaggaauuucaacaaucugaccaagggccuauguacuauuaacuccuggcacaucuacgggaaagacaaugcuguccggauaggagagucuucggauguucucgugacacgcgaaccguauguaucaugcgaccccgaugagugucgauuuuacgcccugagccagggcaccacgauucgugguaagcauaguaacgggacuauccacgacagaucccaauauagggcacuuauuucuuggccucugagcuccccacccaccguguacaacucacgggucgagugcaucggauggaguagcacaucuugucaugauggcaaaucccgcaugucaaucugcauuagcggcccuaauaacaaugccagugcugugguuugguauaacagaaggccaguggcagaaauaaauacuugggcccggaacaucuugcgcacccaggagucugaaugugucugccacaauggggugugucccguaguuuucacagacggauccgcuaccgguccugccgauacgcgaauuuacuacuuuaaggagggcaagauccucaaaugggagagccugacugggacagcgaagcacauagaagagugcucgugcuauggagaaagaaccggcauuacuuguacaugcagggacaacuggcaggguucuaaucggccagugguccagaucgauccgguggcaaugacccauacgucccaauacaucuguucacccgugcugaccgacaacccucguccaaaugaucccaacauugggaaaugcaaugacccuuauccaggaaacaauaacaacggcgucaagggcuucaguuaccucgauggggccaauacaugguuaggacgcacuaucagcaccgcuuccagaucugguuaugagaugcugaaaguucccaacgcccuuacagacgacaggagcaagccgauucagggccagacuauaguguugaaugcagauuggucaggguacaguggauccuuuauggacuauugggcugaaggcgauuguuaccgggccugcuucuacguagagcugauccgaggucgcccuaaggaggacaaagugugguggaccagcaacucuauugucucaauguguaguagcacagaauuucuagggcaguggaauuggcccgauggcgcgaagaucgaguauuuccucuga

SEQ ID NO: 153257 - RNA, 1410 nt, Artificial Sequence; identical to SEQ ID NO: 149191
  derived and/or modified CDS sequence (opt3) from neuraminidase__InfluenzaA__AHN96448

SEQ ID NO: 153258 - RNA, 1410 nt, Artificial Sequence; identical to SEQ ID NO: 150194
  derived and/or modified CDS sequence (opt3) from neuraminidase__InfluenzaA__AHN96450

SEQ ID NO: 153259 - RNA, 1410 nt, Artificial Sequence
  derived and/or modified CDS sequence (opt3) from neuraminidase__InfluenzaA__AHN96451
augaaccccaaucagaagaucauuaccauaggcagcgugucccugacaaucucuacuauuugcuucuuuaugcaaaucgccauucucaucacgaccgucacacuucacuucaaacaguacgaguuuaacucaccuccaaauaaccagguuaugcugugugaaccgacuauaaucgagagaaauauuaccgaaaucauguauuugacaaacaccacuauugagaaggaaaucugccccaaaccugcugaguacaggaauuggaguaagccacagugugggauaacaggauucgcacccuuuagcaaagacaacuccauucgguuaucugccgguggcgauaucugggugacccgcgagccuuauguaucgugcgacccagauaaguguuaccaauucgcgcuggggcagggaacgacucuaaauaacgugcauucaaauaacaccguccgagaccguacacccuauagaacucuccugaugaaugaacuuggcgugccuuuucaccuggguaccaagcagguuugcauugcuuggagcaguuccucuugucaugaugggaaagccugguugcacgugugcaucacaggagacgauaagaacgcaaccgccagcuucaucuacaauggcaggcucgucgacuccgugguaucauggaguaaagagauucugcggacgcaggaaagcgaguguguuugcauaaacggcacuuguacaguggucaugaccgaugggucugcuuccggaaaggcagacacuaaaauccuguuuauugaggaagguaagaucgugcauacaucaacccucagcggcagugcccaacacguggaggaaugcucuugcuauccacgcuacccgggggucagauguguuugcagggauaacuggaagggauccaaucggcccauaguggacauuaacaucaaagaucacagcaucguaucgucuuacguguguuccggcuuagucggugacacgccucgcaagaaugacucaaguagcuccucucauugccuggauccaaacaaugaggaagggggacacggcgugaaaggcugggcuuucgacgaugggaacgacguuuggaugggacgaaccauuaaugagacaagcagacuugguuaugagacuuuuaaggugaucgaaggcuggucaaaccccaaaaguaaguugcagauuaauaggcaggucauaguggaucguggggaccgguccggauacagcggcaucuucucuguagaggguaaaucauguauuaaccgcugcuuuuauguugaacugaucagagggaggaaggaggaaaccgaggugcuauggacaaguaauagcaucgucguguucuguggcacuuccggaaccuacggcacagggucuuggccugauggagccgaccucaaccugaugccaauuuga

SEQ ID NO: 153260 - RNA, 1410 nt, Artificial Sequence
  derived and/or modified CDS sequence (opt3) from neuraminidase__InfluenzaA__AHN96453
augaaccccaaucagaagaucauuaccauaggcagcgugucccugacaaucucuacuauuugcuucuuuaugcagaucgccauucucaucacgaccgucacacuucacuucaaacaguacgaguuuaacucaccuccaaauaaccagguuaugcugugugaaccgacuauaaucgagagaaauauuaccgaaaucguguauuugacaaacaccacuauugagaaggaaaucugccccaaaccugcugaguacaggaauuggaguaagccacagugugggauaacaggauucgcacccuuuagcaaagacaacuccauucgguuaucugccgguggcgauaucuggguaacccgcgagccuuaugugucgugcgacccagauaaguguuaccaauucgcgcuggggcagggaacgacucuagacaauguccauucaaacaauaccgugcgaaaccguacacccuauagaacucuccugaugaaugaacuuggcguuccuuuucaccuggguaccaaacaggugugcauugcuuggagcaguuccucuugucaugaugggaaggccugguugcacgucugcaucacaggagacgauaagaacgcaaccgccagcuucaucuacaauggcaggcucguggacuccguaguuucauggaguaaagauauucugcggacgcaggagagcgaaugugugugcauaaacggcacuuguacagucgugaugaccgacgggucugcuuccggaaaggcagauacuaaaauccuguuuauugaggaggguaagaucgugcauacaucaacccucagcggcagugcccaacacgucgaagagugcucuugcuauccacgcuacccggggguuagaugugugugcagggacaacuggaagggauccaaucggcccauaguagauauuaacaucaaagaccacagcaucgugucgucuuacgucuguuccggcuuagugggugacacgccucgcaagaaugauucaaguagcuccucucauugccuggacccaaacaaugaagaagggggacacggcguuaaaggcugggcuuucgaugacgggaacgauguguggaugggacgaaccauuaaugagacaagcagacuugguuaugagacuuuuaaggucaucgagggcuggucaaaccccaaaaguaaguugcagauuaauaggcaagugauaguagaccguggggaucgguccggauacagcggcaucuucucuauugaagguaaaucauguaucaaccgcugcuuuuauguugagcugaucagagggaggaaggaagagaccgaagugcuauggacaaguaauagcauugucguguucuguggcacuuccggaaccuacggcacagggucuuggccugacggagccgaucucaaccugaugccaauauga

SEQ ID NO: 153261 - RNA, 1410 nt, Artificial Sequence
  derived and/or modified CDS sequence (opt3) from neuraminidase__InfluenzaA__AHZ13526
augaaccccaaucagaagaucauuaccauaggcagcgugucccugacaaucgccacuauuugcuuccucaugcaaaucgcuauucuugucacgaccguuacacugcacuuuaaacaguacgaguguucuucaccuccaaacaaucaggugaugccgugcgaacccaucauaaucgagagaaacaugacugaaauuguauauuugaccaauacaaccaucgagaaggaaauuuguccuaaauuaguggaguacaggaacuggaguaagccacagugcaaaaucacuggguucgcacccuuuagcaaggacaauuccauacggcugucugccggaggugauauuugggucacacgcgagccuuaugugucgugugacccaggcaagugcuaccaauucgcgcuagggcagggaaccacgcucaacaauaaacauucaaacgauacuauccacgaccgaacccccuaucguacacugcuuaugaaugaacugggcguuccuuuucauuuggguacuaaacagguguguauugcuuggagcaguuccucuugccacgaugggaaggccuggcuccaugucugugugaccggacacgacaagaacgcaacagccagcuucaucuacgauggcagacugguagacuccaucggcucauggaguaaaaauauucugaggacccaggagagcgaaugcguuuguauaaacgggacgugcacuguggucaugacagauggaucugcuuccgaccgggcagauaccaagauccucuuuauugaggaggguaagaucgugcacauaucaccauuaagcggcagugcccaacauguggaagagugcucuuguuauccgcgcuaccccggggucagaugcguuuguagggacaauuggaaaggauccaaccggccuauuguggauaucaacguaaaggacuacagcaucgugucgucuuaugucugcuccggccuggugggugacacuccacgcaaaaaugaugggucaaguagcuccuacugucgaaaccccaauaacgaaaagggaaaucacggcguuaaaggcugggcuuucgacgaugggaacgacguguggaugggaagaacaauuggugaggaacuuaggucuggcuaugagaccuuuaaggucaucgggggauggagcacgccuaauucaaaauugcagauuaaccgucaggugauaguagauaguaauaaccgguccggcuacagcgguaucuucucuguugaggggaagucaugcauuaaucgcuguuuuuauguggaacugaucagaggcagggagcaggaaacccgggucugguggacaaguaacagcaucguggucuucugcggaacuuccggcaccuacgggacaggaucuuggccagacggugccgauauuaaucuaaugcccauauga

SEQ ID NO: 153262 - RNA, 1413 nt, Artificial Sequence; identical to SEQ ID NO: 148253
  derived and/or modified CDS sequence (opt3) from neuraminidase__InfluenzaA__AHZ13584

SEQ ID NO: 153263 - RNA, 1410 nt, Artificial Sequence; identical to SEQ ID NO: 150970
  derived and/or modified CDS sequence (opt3) from neuraminidase__InfluenzaA__AHZ35575

SEQ ID NO: 153264 - RNA, 1410 nt, Artificial Sequence; identical to SEQ ID NO: 150970
  derived and/or modified CDS sequence (opt3) from neuraminidase__InfluenzaA__AHZ35587

SEQ ID NO: 153265 - RNA, 1410 nt, Artificial Sequence
  derived and/or modified CDS sequence (opt3) from neuraminidase__InfluenzaA__AHZ35611
augaaccccaaucagaagaucauuaccauaggcagcgugucccugacaaucucuacuauuugcuucuuuaugcagaucgccauucucaucacgaccgucacacuucacuucaaacaguacgaguuuaacucaccuccaaauaaccagguuaugcugugugaaccgacuauaaucgagagaaauauuaccgaaaucguguauuugacaaacaccacuauugagaaggaaaucugccccaaaccugcugaguacaggaauuggaguaagccacagugugacauaacaggguucgcacccuuuagcaaagauaacuccauucgguuaucugccggaggugacaucuggguaacccgcgagccuuaugugucgugcgauccagacaaguguuaccaauucgcgcugggccaggggacgacucuaaauaacguccauucaaauaacaccgugcgagaucguacacccuauagaacucuccugaugaaugaacuuggaguuccuuuucaccugggcaccaaacaggugugcauugcuuggagcaguuccucuugucaugacgguaaggccugguugcacgucugcaucacaggggaugacaagaacgcaaccgccagcuucaucuacaauggaaggcucguggauuccguaguuucauggaguaaagagauucugcggacgcaggaaagcgagugugugugcauaaacggcacuuguacagucgugaugaccgacggcucugcuuccgggaaggcagauacuaaaauccuguuuauugaggaaggaaagaucgugcauacaucaacccucagcgguagugcccaacacgucgaggaaugcucuugcuauccacgcuacccgggcguuagaugugugugcagggacaacuggaagggguccaaucggcccauaguagauauuaacaucaaagaccacagcaucgugucgucuuacgucuguuccggauuagugggcgacacgccucgcaagaaugauucaaguagcuccucucauugccuggacccaaacaaugaggaaggugggcacggaguuaaaggcugggcuuucgaugacggcaacgauguguggauggggcgaaccauuaaugagacaagcagacuuggauaugagacuuuuaaggucaucgaagguuggucaaaccccaaaaguaaguugcagauuaauaggcaagugauaguagaccggggcgaucguuccggguacagcggaaucuucucuguugagggccgcucauguauuaacagaugcuuuuauguggaacugaucaggggucggaaagaggaaaccgagguccuauggacaaguaauagcaucguggucuucugugggacuuccggcaccuacggaacaggcucuuggccugacggggccgaucucaaccugaugccaauuuga

SEQ ID NO: 153266 - RNA, 1410 nt, Artificial Sequence; identical to SEQ ID NO: 150970
  derived and/or modified CDS sequence (opt3) from neuraminidase__InfluenzaA__AHZ35623

SEQ ID NO: 153267 - RNA, 1410 nt, Artificial Sequence; identical to SEQ ID NO: 150970
  derived and/or modified CDS sequence (opt3) from neuraminidase__InfluenzaA__AHZ35635

SEQ ID NO: 153268 - RNA, 1410 nt, Artificial Sequence
  derived and/or modified CDS sequence (opt3) from neuraminidase__InfluenzaA__AHZ35647
augaaccccaaucagaagaucauuaccauaggcagcgugucccugacaaucucuacuauuugcuucuuuaugcagaucgccauucucaucacgaccgucacacuucacuucaaacaguacgaguuuaacucaccuccaaauaaccagguuaugcugugugaaccgacuauaaucgagagaaauauuaccgaaaucguguauuugacaaacaccacuauugagaaggaaaucugccccaaaccugcugaguacaggaauuggaguaagccacagugugacauaacaggguucgcacccuuuagcaaagauaacuccauucgguuaucugccggaggugacaucuggguaacccgcgagccuuaugugucgugcgauccagacaaguguuaccaauucgcgcugggccaggggacgacucuaaauaacguccauucaaauaacaccgugcgagaucguacacccuauagaacucuccugaugaaugaacuuggaguuccuuuucaccugggcaccaaacaggugugcauugcuuggagcaguuccucuugucaugacgguaaggccugguugcacgucugcaucacaggggaugacaagaacgcaaccgccagcuucaucuacaauggaaggcucguggauuccguaguuucauggaguaaagagauucugcggacgcaggaaagcgagugugugugcauaaacggcacuuguacagucgugaugaccgacggcucugcuuccgggaaggcagauacuaaaauccuguuuauugaggaaggaaagaucgugcauacaucaacccucagcgguagugcccaacacgucgaggaaugcucuugcuauccacgcuacccggacguuagaugugugugcagggauaacuggaagggcuccaaucggcccauaguagacauuaacaucaaagaccacagcaucgugucgucuuacgucuguuccggguuagugggagauacgccucgcaagaaugacucaaguagcuccucucauugccuggauccaaacaaugaggaaggcggucacgggguuaaaggaugggcuuucgacgauggcaacgacguguggaugggccgaaccauuaaugagacaagcagacuuggguaugagacuuuuaaggucaucgaaggauggucaaaccccaaaaguaaguugcagauuaauaggcaagugauaguagaucggggugaccguuccggcuacagcgggaucuucucuguugagggaaaaucauguauuaaccgcugcuuuuauguggaacugaucagaggcaggaaggaggaaaccgagguccuauggacaaguaauagcaucguggucuucugugguacuuccgggaccuacggcacaggaucuuggccugauggcgccgaccucaaccugaugccaauuuga

SEQ ID NO: 153269 - RNA, 1410 nt, Artificial Sequence; identical to SEQ ID NO: 150970
  derived and/or modified CDS sequence (opt3) from neuraminidase__InfluenzaA__AHZ35659

SEQ ID NO: 153270 - RNA, 1410 nt, Artificial Sequence; identical to SEQ ID NO: 150970
  derived and/or modified CDS sequence (opt3) from neuraminidase__InfluenzaA__AHZ35671

SEQ ID NO: 153271 - RNA, 1410 nt, Artificial Sequence; identical to SEQ ID NO: 150970
  derived and/or modified CDS sequence (opt3) from neuraminidase__InfluenzaA__AHZ35683

SEQ ID NO: 153272 - RNA, 1410 nt, Artificial Sequence
  derived and/or modified CDS sequence (opt3) from neuraminidase__InfluenzaA__AHZ35695
augaaccccaaucagaagaucauuaccauaggcagcgugucccugacaaucucuacuauuugcuucuuuaugcagaucgccauucucaucacgaccgucacacuucacuucaaacaguacgaguuuaacccuccaccgaauaaccagguuaugcugugugaacccacuauaaucgagagaaauauuaccgaaaucguguauuugacaaacaccacuauugagaaggaaaucugcccuaaaccagcugaguacaggaauuggucaaagccccagugugacauaacaggguucgcaccuuuuaguaaagauaacagcauucgguuauccgccggaggugacaucuggguaacccgcgagccauaugugucuugcgaucccgacaaguguuaccaauucgcgcugggccaggggacgacucuaaauaacguccauucgaauaacaccgugcgagaucguacaccuuauagaacucuccugaugaaugaacuuggaguuccauuucaccugggcaccaaacaggugugcauugcuuggucaagcaguuccugucaugacgguaaggccugguugcacgucugcaucacaggggaugacaagaacgcaaccgccucuuucaucuacaaugagaggcucguggauagcguaguuuccuggucaaaagaaauucugcggacgcaggagagugagugugugugcauaaacggaacuuguacagucgugaugaccgacggcagcgcuucuggcaaggcagauacuaaaauccuguuuauugaagaggggaagaucgugcauacauccacccucucaggaagcgcccaacacgucgaagagugcaguugcuauccgcgcuaccccgguguuagaugugugugcagggacaacuggaagggcucuaaucggccuauaguagauauuaacaucaaagaccacuccaucgugagcucguacgucuguucuggguuagugggagacacgccacgcaagaaugauuccucaaguagcucccauugccuggaccccaacaaugaagagggcggucacgggguuaaaggaugggcuuucgaugacggcaacgauguguggaugggccgaaccauuaaugagacaucuagacuuggguaugaaacuuuuaaggucaucgagggauggagcaacccuaaaucaaaguugcagauuaauaggcaagugauaguagaccggggugaucguaguggcuacuccgggaucuucagcguugaaggaaacucuuguauuaaucgcugcuuuuauguggagcugaucagaggcaggaaagaagagaccgagguccuauggacaucaaacaguaucguggucuucugugguacuagcgggaccuacggcacaggauccuggccagacggcgccgaucucaaucugaugcccauuuga

SEQ ID NO: 153273 - RNA, 1410 nt, Artificial Sequence
  derived and/or modified CDS sequence (opt3) from neuraminidase__InfluenzaA__AHZ35719
augaaccccaaucagaagaucauuaccauaggcagcgugucccugacaaucucuacuauuugcuucuuuaugcagaucgccauucucaucacgaccgucacacuucacuucaaacaguacgaguuuaacucaccuccaaauaaccagguuaugcugugugaaccgacuauaaucgagagaaauauuaccgaaaucguguauuugacaaacaccacuauugagaaggaaaucugccccaaaccugcugaguacaggaauuggaguaagccacagugugacauaacaggguucgcacccuuuagcaaagauaacuccauucgguuaucugccggaggugacaucuggguaacccgcgagccuuaugugucgugcgauccagacaaguguuaccaauucgcgcugggccaggggacgacucuaaauaacguccauucaaauaacaccgugcgagaucguacacccuauagaacucuccugaugaaugaacuuggaguuccuuuucaccugggcaccaaacaggugugcauugcuuggagcaguuccucuugucaugacgguaaggccugguugcacgucugcaucacaggggaugacaagaacgcaaccgccagcuucaucuacaauggaaggcucguggauuccguaguuucauggaguaaagagauucugcggacgcaggaaagcgagugugugugcauaaacggcacuuguacagucgugaugaccgacggcucugcuuccgggaaggcagauacuaaaauccuguuuauugaggaaggaaagaucgugcauacaucaacccucagcgguagugcccaacacgucgaggaaugcucuugcuauccacgcuacccgggcguuagaugugugugcagggacaacuggaagggguccaaucggcccauaguagauauuaacaucaaagaccacagcaucgugucgucuuacgucuguuccggauuagugggcgacacgccucgcaagaaugauucaaguagcuccucucauugccuggacccaaacaaugaggaaggugggcacggaguuaaaggcugggcuuucgaugacggcaacgauguguggauggggcgaaccauuaaugagacaagcagacuuggauaugagacuuuuaaggucaucgaagguuggucaaaccccaaaaguaaguugcagauuaauaggcaagugauaguagaccggggcgaucguuccggguacagcggaaucuucucuguugagggcaaaucauguauuaaccgcugcuuuuauguggaacugaucagagguaggaaggaggaaaccgagguccuauggacaaguaauagcaucguggucuucugugggacuuccggcaccuacggaacaggcucuuggccugacggggccgaucucaaccugaccccaauuuga

SEQ ID NO: 153274 - RNA, 1410 nt, Artificial Sequence; identical to SEQ ID NO: 150970
  derived and/or modified CDS sequence (opt3) from neuraminidase__InfluenzaA__AHZ35731

SEQ ID NO: 153275 - RNA, 1410 nt, Artificial Sequence; identical to SEQ ID NO: 150970
  derived and/or modified CDS sequence (opt3) from neuraminidase__InfluenzaA__AHZ35743

SEQ ID NO: 153276 - RNA, 1410 nt, Artificial Sequence; identical to SEQ ID NO: 150970
  derived and/or modified CDS sequence (opt3) from neuraminidase__InfluenzaA__AHZ35755

SEQ ID NO: 153277 - RNA, 1410 nt, Artificial Sequence; identical to SEQ ID NO: 150970
  derived and/or modified CDS sequence (opt3) from neuraminidase__InfluenzaA__AHZ35767

SEQ ID NO: 153278 - RNA, 1410 nt, Artificial Sequence; identical to SEQ ID NO: 150970
  derived and/or modified CDS sequence (opt3) from neuraminidase__InfluenzaA__AHZ35779

SEQ ID NO: 153279 - RNA, 1410 nt, Artificial Sequence
  derived and/or modified CDS sequence (opt3) from neuraminidase__InfluenzaA__AHZ35803
augaaccccaaucagaagaucauuaccauaggcagcgugugcaugacaaucgggauggccaaccugaugcuccaaauuggaaauaucauuuccaucuggauaucucacucaauccagcuugguaacaaaaaucagauugagacuuguaaccagagugucaucacguacgaaaauaacaccuggguuaaucaaacauaugugaacauuagcaauacuaacuucgcugcaggccaguccguagugucugucaagaucgccggaaauucgucacugugcccugugagcggaugggcgauauacaguaaagacaacuccauuagaaucggcucuaagggugauguuuuugugauuagggagccauucaucagcuguuccccguuggaaugccggaccuuuuucuuaacacagggggcucugcuaaaugacaaacauucaaacggaaccaucaaggaucgcagucccuaucgaacucucaugagcuguccuauuggcgaggucccaucucccuacaacucccguuuugaaucaguggccuggagcgcaagugccugccacgacggcauaaauuggcugacaaucgggauuucuggaccugauaacggugcuguagcaguucuuaaguauaauggcaucauaaccgacacgauuaaauccuggagaaacaauauccugaggacucaggagagcgagugugccugcgugaacgggucguguuucaccaucaugacagauggaccaucugacggccaggcuuccuacaagauuuuucggaucgaaaaagguaagauugucaaaucaguggagaugaaugcccccaacuaucauuacgaagagugcaguuguuacccugauagcuccgagauaacuugcgugugccgcgacaauuggcacgggucuaacagaccaugggucagcuucaaucaaaacuuggaauaucagaucggauacauuuguucaggcaucuuuggcgauaauccgaggccccaugacaagaccgggaguugcggaccuguuuccagcaacggugcgaauggcgugaagggguucucuuuuaaauauggaaacggcguauggaucggucggacaaagucaauuaguagccgcaaaggguucgagaugauaugggauccaaacggcuggaccggaacggacaauaacuuuuccaucaagcaggacauugugggcaugaaugaauggucuggguacucggggagcuucguccaacaccccgagcucacuggucuggauuguauccgaccuugcuucuggguggaacugauuagaggcaggccaaaagagaacacaaucuggaccuccgggucaaguauaucuuuuuguggaguuaauagcgacacugugggcugguccuggcccgauggugcagagcucccguucacaaucgacaaguga

SEQ ID NO: 153280 - RNA, 1410 nt, Artificial Sequence
  derived and/or modified CDS sequence (opt3) from neuraminidase__InfluenzaA__AHZ35814
augaaccccaaucagaagaucauuaccauaggcagcgugucccugacaaucucuacuauuugcuucuuuaugcagaucgccauucucaucacgaccgucacacuucacuucaaacaguacgaguuuaacucaccuccaaauaaccagguuaugcugugugaaccgacuauaaucgagagaaauauuaccgaaaucguguauuugacaaacaccacuauugagaaggaaaucugccccaaauuagcugaguacaggaauuggaguaagccucagugugacauaacaggguucgcaccauuuagcaaagauaacuccauucggcugucugccggaggugaccuauggguaacccgcgagcccuaugugucgugcgauccugacaaguguuaccaauucgcgcucggccaggggacgacucugaauaacguccauucaaauaacaccgugcgagaucguacaccauauagaacucuucugaugaaugaauugggaguucccuuucaccucggcaccaaacaggugugcaucgcuuggagcaguuccucuugucaugacgguaaggccuggcugcacgucugcauuacaggggaugacaagaacgcaaccgccagcuucaucuacaauggaaggcugguggauuccguaguuucauggaguaaagagauccuccggacgcaggaaagcgagugugugugcauuaacggcacuuguacagucgugaugaccgacggcucugcuuccgggaaggcagauacuaaaauauuauuuaucgaggaaggaaagauugugcauacaucaacccugagcgguagugcccaacacgucgaggaaugcucuugcuauccucgcuacccaggcguuagaugugugugcagggacaacuggaagggguccaaucggccgaucguagauauaaacauuaaagaccacagcaucgugucgucuuacgucuguuccggacuugugggcgacacgccccgcaagaaugauucaaguagcuccucucauugcuuggacccuaacaaugaggaaggugggcacggaguuaaaggcugggcuuucgaugacggcaacgauguguggauggggcgaaccaucaaugagacaagcagacugggauaugagacuuuuaaggucauugaagguuggucaaacccaaaaaguaagcuacagaucaauaggcaagugauuguagaccggggcaaccguuccggguacagcggaauauucucuguugagggcaaaucauguaucaaucgcugcuuuuauguggaacucauuagagguaggaaggaggaaaccgagguccuguggacaaguaacagcaucguggucuucugugggacuuccggcaccuacggaacaggcucuuggcccgauggggccgaccuuaaucugaugccuaucuga

SEQ ID NO: 153281 - RNA, 1410 nt, Artificial Sequence
  derived and/or modified CDS sequence (opt3) from neuraminidase__InfluenzaA__AHZ35837
augaaccccaaucagaagaucauuaccauaggcagcgugugcaugacaaucgggauggccaaccugaugcuccaaauuggaaauaucauuuccaucuggauaucucacucaauccagcuugguaacaaaaaucagauugagacuuguaaccagagugucaucacguacgaaaauaacaccuggguuaaucaaacauaugugaacauuagcaauacuaacuucgcugcaggccaguccguagugucugucaagaucgccggaaauucgucacugugcccugugagcggaugggcgauauacaguaaagacaacuccauuagaaucggcucuaagggugauguuuuugugauuagggagccauucaucagcuguuccccguuggaaugccggaccuuuuucuuaacacagggggcucugcuaaaugacaaacauucaaacggaaccaucaaggaucgcagucccuaucgaacucucaugagcuguccuauuggcgaggucccaucucccuacaacucccguuuugaaucaguggccuggagcgcaagugccugccacgacggcauaaauuggcugacaaucgggauuucuggaccugauaacggugcuguagcaguucuuaaguauaauggcaucauaaccgacacgauuaaauccuggagaaacaauauccugaggacucaggagagcgagugugccugcgugaacgggucguguuucaccaucaugacagauggaccaucugacggccaggcuuccuacaagauuuuucggaucgaaaaagguaagauugucaaaucaguggagaugaaugcccccaacuaucauuacgaagagugcaguuguuacccugauagcuccgagauaacuugcgugugccgcgacaauuggcacgggucuaacagaccaugggucagcuucaaucaaaacuuggaauaucagaucggauacauuuguucaggcaucuuuggcgauaauccgaggccccaugacaagaccgggaguugcggaccuguuuccagcaacggugcgaauggcgugaagggguucucuuuuaaauauggaaacggcguauggaucggucggacaaagucaauuaguagccgcaaaggguucgagaugauaugggauccaaacggcuggaccggaacggacaauaacuuuuccaucaagcaggacauugugggcaucaaugaauggucuggguacucggggagcuucguccaacaccccgagcucacuggucuggauuguauucgaccuugcuucuggguggaacugaucagaggcaggccaaaagagaacacaauauggaccuccgggucaaguaucucuuuuuguggaguuaauagcgacacugugggcugguccuggcccgauggugcagagcucccguucacaauugacaaguga

SEQ ID NO: 153282 - RNA, 1410 nt, Artificial Sequence; identical to SEQ ID NO: 153281
  derived and/or modified CDS sequence (opt3) from neuraminidase__InfluenzaA__AHZ35848

SEQ ID NO: 153283 - RNA, 1410 nt, Artificial Sequence; identical to SEQ ID NO: 153281
  derived and/or modified CDS sequence (opt3) from neuraminidase__InfluenzaA__AHZ35859

SEQ ID NO: 153284 - RNA, 1410 nt, Artificial Sequence; identical to SEQ ID NO: 153280
  derived and/or modified CDS sequence (opt3) from neuraminidase__InfluenzaA__AHZ35870

SEQ ID NO: 153285 - RNA, 1410 nt, Artificial Sequence; identical to SEQ ID NO: 153280
  derived and/or modified CDS sequence (opt3) from neuraminidase__InfluenzaA__AHZ35882

SEQ ID NO: 153286 - RNA, 1410 nt, Artificial Sequence
  derived and/or modified CDS sequence (opt3) from neuraminidase__InfluenzaA__AHZ35894
augaaccccaaucagaagaucauuaccauaggcagcgugugcaugacaaucgggauggccaaccugaugcuccaaauuggaaauaucauuuccaucuggauaucucacucaauccagcuugguaacaaaaaucagauugagacuuguaaccagagugucaucacguacgaaaauaacaccuggguuaaucaaacauaugugaacauuagcaauacuaacuucgcugcaggccaguccguagugucugucaagaucgccggaaauucgucacugugcccugugagcgggugggcgauauacaguaaagacaacuccauuagaaucggcucuaagggugauguuuuugugauuagggagccauucaucagcuguuccccguuggaaugccggaccuuuuucuuaacacagggggcucugcuaaaugacaaacauucaaacggaaccaucaaggaucgcagucccuaucgaacucucaugagcuguccuauuggcgaggucccaucucccuacaacucccguuuugaaucaguggccuggagcgcaagugccugccacgacggcauaaauuggcugacaaucgggauuucuggaccugauaacggugcuguagcaguucuuaaguauaauggcaucauaaccgacacgauuaaauccuggagaaacaauauccugaggacucaggagagcgagugugccugcgugaacgggucguguuucaccaucaugacagauggaccaucugacggccaggcuuccuacaagauuuuucggaucgaaaaagguaagauugucaaaucaguggagaugaaugcccccaacuaucauuacgaagagugcaguuguuacccugauagcuccgagauaacuugcgugugccgcgacaauuggcacgggucuaacagaccaugggucagcuucaaucaaaacuuggaauaucagaucggauacauuuguucaggcaucuuuggcgauaauccgaggccccaugacaagaccgggaguugcggaccuguuuccagcaacggugcgaauggcgugaagggguucucuuuuaaauauggaucaggcguauggaucggucggacaaagaguauuagcucccgcaaaggguucgagaugauaugggauccaaacggcuggaccggaacggacaacaauuuuucuaucaagcaggacauugugggcaucaacgaauggucgggguacagcggauccuucguccaacaccccgagcucacuggucuggauuguauucgaccuugcuucuggguggaacugaucagaggcaggccaaaagagaauacaauauggaccucagggaguucuaucagcuuuuguggaguuaacuccgacacugugggcuggucauggcccgauggugcagagcucccguucacaauugacaaguga

SEQ ID NO: 153287 - RNA, 1410 nt, Artificial Sequence; identical to SEQ ID NO: 153281
  derived and/or modified CDS sequence (opt3) from neuraminidase__InfluenzaA__AHZ35905

SEQ ID NO: 153288 - RNA, 1410 nt, Artificial Sequence; identical to SEQ ID NO: 153281
  derived and/or modified CDS sequence (opt3) from neuraminidase__InfluenzaA__AHZ35916

SEQ ID NO: 153289 - RNA, 1410 nt, Artificial Sequence; identical to SEQ ID NO: 149006
  derived and/or modified CDS sequence (opt3) from neuraminidase__InfluenzaA__AHZ35927

SEQ ID NO: 153290 - RNA, 1410 nt, Artificial Sequence
  derived and/or modified CDS sequence (opt3) from neuraminidase__InfluenzaA__AHZ35938
augaaccccaaucagaagaucauuaccauaggcagcgugugcaugaucauugggauggccaaccugauccuccaaauuggaaauaucauauccaucuggauuucucacucaauccagcuugguaaccagaaucagauugagacauguaaccaaagugucaucacuuacgaaaauaacacguggguuaaucagaccuaugugaacauaagcaauacaaacuucgcugcaggccaguccguagugucugucaaacuggccggaaauucgucauugugcccugugagcggaugggcgauuuacaguaaggacaacuccaucagaauuggcucuaaaggugauguuuuugugaucagggagccauucaucagcuguuccccguuagaaugccggaccuuuuuccugacucagggggcucuacucaaugacaagcauucaaacggaacaauuaaagaucgcagucccuaucgaacccugaugagcuguccuauaggcgaggucccaucucccuacaacucccguuuugaaucaguggccuggagcgcaagugccugccacgacggcaucaauuggcuuacuauugggaucucuggaccugauaacggugcuguagcaguucugaaguauaauggcauaauuacagacaccaucaaguccuggagaaacaauaucuugaggacgcaagagagcgagugugccugcgugaacgggucguguuucacuauuaugaccgauggaccaucugacggccaggcuuccuacaaaaucuuucggauugaaaaggguaaaauagucaagucaguggagaugaaugcccccaacuaucauuacgaagagugcaguuguuacccugauagcuccgagaucacaugcgugugccgcgacaauuggcacgggucuaacagaccaugggucagcuucaaucagaaccucgaauaucagauuggauacaucuguucaggcaucuuuggcgauaauccgaggccccaugacaaaacugggaguugcggaccuguuuccagcaacggugcgaauggcgugaagggguucucuuuuaaguauggaaacggcguauggauuggucggaccaaaucaauaaguagccgcaagggguucgagaugaucugggauccaaacggcuggacaggaaccgacaauaacuuuuccauuaaacaagacaucgugggcauuaaugaauggucuggguacucggggagcuucguccagcaccccgagcugacgggucuggauuguauccgaccuugcuucuggguggaacucauaagaggcaggccaaaggagaacacuaucuggacauccgggucaaguauuucuuuuuguggaguuaauagcgacaccgugggcugguccuggcccgauggugcagaguuaccguucacuaucgacaaauga

SEQ ID NO: 153291 - RNA, 1410 nt, Artificial Sequence; identical to SEQ ID NO: 153280
  derived and/or modified CDS sequence (opt3) from neuraminidase__InfluenzaA__AHZ35949

SEQ ID NO: 153292 - RNA, 1410 nt, Artificial Sequence
  derived and/or modified CDS sequence (opt3) from neuraminidase__InfluenzaA__AHZ35961
augaaccccaaucagaagaucauuaccauaggcagcgugugcaugacaaucgggauggccaaccugaugcuccaaauuggaaauaucauuuccaucuggauaucucacucaauccagcuugguaacaaaaaucagauugagacuuguaaccagagugucaucacguacgaaaauaacaccuggguuaaucaaacauaugugaacauuagcaauacuaacuucgcugcaggccaguccguagugucugucaagaucgccggaaauucgucacugugcccugugagcggaugggcgauauacaguaaagacaacuccauuagaaucggcucuaagggugauguuuuugugauuagggagccauucaucagcuguuccccguuggaaugccggaccuuuuucuuaacacagggggcucugcuaaaugacaaacauucaaacggaaccaucaaggaucgcagucccuaucgaacucucaugagcuguccuauuggcgaggucccaucucccuacaacucccguuuugaaucaguggccuggagcgcaagugccugccacgacggcauaaauuggcugacaaucgggauuucuggaccugauaacggugcuguagcaguucuuaaguauaauggcaucauaaccgacacgauuaaauccuggagaaacaauauccugaggacucaggagagcgagugugccugcgugaacgggucguguuucaccaucaugacagauggaccaucugacggccaggcuuccuacaagauuuuucggaucgaaaaagguaagauugucaaaucaguggagaugaaugcccccaacuaucauuacgaagagugcaguuguuacccugauagcuccgagauaacuugcgugugccgcgacaauuggcacgggucuaacagaccaugggucagcuucaaucaaaacuuggaauaucagaucggauacauuuguucaggcaucuuuggcgauaauccgaggccccaugacaagaccgggaguugcggaccuguuuccagcaacggugcgaauggcgugaagggguucucuuuuaaauauggaaacggcguauggaucggucggacaaagucaauuaguagccgcaaaggguucgagaugauaugggauccaaacggcuggaccggaacggacaauaacuuuuccaucaagcaggacauugugggcaucaaugaauggucuggguacucggggagcuucguccaacaccccgagcucacuggucuggauuguauucgaccuugcuucuggguggaacugaucagaggcaggccaaaagaguccacaauauggaccucagggaguucuaucagcuuuuguggaguuaacuccgacacugugggcuggucauggcccgauggugcagagcucccguucacaauugacaaguga

SEQ ID NO: 153293 - RNA, 1410 nt, Artificial Sequence; identical to SEQ ID NO: 153281
  derived and/or modified CDS sequence (opt3) from neuraminidase__InfluenzaA__AHZ35972

SEQ ID NO: 153294 - RNA, 1410 nt, Artificial Sequence
  derived and/or modified CDS sequence (opt3) from neuraminidase__InfluenzaA__AHZ35983
augaaccccaaucagaagaucaccacaauuggcagcgugugcaugacuauagggauggccaaccugaugcuccaaaucggaaauauuaucuccauuuggaucucucacucaauacagcuugguaacaaaaaucagaucgagacguguaaccagagugucauuaccuacgaaaauaacacauggguuaaucaaacuuaugugaacaucagcaauaccaacuucgcugcaggccaguccguagugucugucaagauugccggaaauucgucacugugcccugugagcggaugggcgaucuacaguaaagacaacuccauaagaauuggcucuaagggugauguuuuugugaucagggagccauucauuagcuguuccccguuggaaugccggacauuuuucuuaacccagggggcucugcuaaaugacaaacauucaaacggaacuaucaaggaucgcagucccuaucgaacacucaugagcuguccuaucggcgaggucccaucucccuacaacucccguuuugaaucaguggccuggagcgcaagugccugccacgacggcauuaauuggcugaccauagggaucucuggaccugauaacggugcuguagcaguucuuaaguauaauggcauuaucacggacacuauaaaauccuggagaaacaauauucugaggacccaggagagcgagugugccugcgugaacgggucguguuucacaaucaugacugauggaccaucugacggccaggcuuccuacaagaucuuucggauugaaaaagguaagaucgucaaaucaguggagaugaaugcccccaacuaucauuacgaagagugcaguuguuacccugauagcuccgagauuaccugcgugugccgcgacaauuggcacgggucuaacagaccaugggucagcuucaaucaaaacuuggaauaucagauaggauacaucuguucaggcauuuuuggcgauaauccgaggccccaugacaagacagggaguugcggaccuguuuccagcaacggugcgaauggcgugaagggguucucuuuuaaauauggaaacggcguauggaucggucggaccaagucaaucaguagccgcaaaggguucgagaugauuugggauccaaacggcuggacgggaacugacaauaacuuuuccauaaagcaggacaucgugggcauuaaugaauggucuggguacucggggagcuucguccaacaccccgagcucacaggucuggauuguauccgaccuugcuucuggguggaacugauuagaggcaggccaaaagagaacaccaucuggacuuccgggucaaguauaucuuuuuguggaguuaauagcgacacagugggcugguccuggcccgauggugcagagcucccguucaccaucgacaaguga

SEQ ID NO: 153295 - RNA, 1410 nt, Artificial Sequence; identical to SEQ ID NO: 153281
  derived and/or modified CDS sequence (opt3) from neuraminidase__InfluenzaA__AHZ35994

SEQ ID NO: 153296 - RNA, 1410 nt, Artificial Sequence; identical to SEQ ID NO: 153281
  derived and/or modified CDS sequence (opt3) from neuraminidase__InfluenzaA__AHZ36005

SEQ ID NO: 153297 - RNA, 1410 nt, Artificial Sequence; identical to SEQ ID NO: 153281
  derived and/or modified CDS sequence (opt3) from neuraminidase__InfluenzaA__AHZ36016

SEQ ID NO: 153298 - RNA, 1410 nt, Artificial Sequence
  derived and/or modified CDS sequence (opt3) from neuraminidase__InfluenzaA__AHZ36027
augaaccccaaucagaagaucauuaccauaggcagcgugugcaugacaaucgggauggccaaccugauucuccaaaucggaaauauuaucuccauauggaucucucacucaauucagcuugguaaccagaaucagaucgagacuuguaaccaaagugucauuaucuacgaaaauaacacguggguuaaucagaccuaugugaacauaagcaauacaaacuucgcugcaggccaguccguagugucugucaaacuggccggaaauucgucauugugcccugugagcggaugggcgauuuacaguaaggacaacuccaucagaauuggcucuaaaggugauguuuuugugaucagggagccauucaucagcuguuccccguuagaaugccggaccuuuuuccugacucagggggcucuacucaaugacaagcauucaaacggaacaauuaaagaucgcagucccuaucgaacccugaugagcuguccuauaggcgaggucccaucucccuacaacucccguuuugaaucaguggccuggagcgcaagugccugccacgacggcuucaauuggcuuacuaucgggauuucuggaccugauaacggugcuguagcaguucugaaguauaauggcaucauaacagacaccauuaaguccuggagaaacaauaucuugaggacgcaagagagcgagugugccugcgugaacgggucguguuuuacuaucaugaccgauggaccaucugacggccaggcuuccuacaaaauuuuccggaucgaaaaggguaaaauugucaagucaguggagaugaaugcccccaacuaucauuacgaagagugcaguuguuacccugauagcuccgagauaacaugcgugugccgcgacaauuggcacgggucuaacagaccaugggucagcuuuaaucagaaccucgaauaucagaucggauacauuuguucaggcaucuucggcgauaauccgaggcccaacgacaaaacugggaguugcggaccuguuuccagcaauggugcgaacggcgugaagggguuuucuuucaaguauggaaacggcguauggaucggucggaccaaaucaauuaguagccgcaagggguuugagaugauaugggauccaaauggcuggacaggaaccgacaacaauuucuccaucaaacaagacauuaucggcauuaacgaauggucuggguacucggggagcuucgugcagcaucccgagcugacgggucuggauuguauccgaccuugcuuuugggucgaacucauaagaggcaggccaaaggagaauacuaucuggacauccgggucaaguauuucuuucuguggagugaacagcgacaccguuggcugguccuggcccgauggugcagaguuaccguuuacuaucgacaaauga

SEQ ID NO: 153299 - RNA, 1410 nt, Artificial Sequence
  derived and/or modified CDS sequence (opt3) from neuraminidase__InfluenzaA__AHZ36050
augaaccccaaucagaagaucauuaccauaggcagcgugucccugacaaucucuacuauuugcuucuuuaugcaaaucgccauucucaucacgaccgucacacuucacuucaaacaguacgaguuuaacucaccuccaaauaaccagguuaugcugugugaaccgacuauaaucgagagaaauauuaccgaaaucguguauuugacaaacaccacuauugagaaggaaaucugccccaaauuagcugaguacaggaauuggaguaagccucagugugacauaacaggguucgcaccauuuagcaaagauaacuccauucggcugucugccggaggugacaucuggguaacccgcgagcccuaugugucgugcgauccugacaaguguuaccaauucgcgcuaggccaggggacgacucucaauaacguccauucaaauaacaccgugcgagaucguacaccauauagaacucugcuuaugaaugaacugggaguucccuuucacuugggcaccaaacaggugugcauugcuuggagcaguuccucuugucaugacgguaaggccuggcuccacgucugcaucacaggggaugacaagaacgcaaccgccagcuucaucuacaauggaaggcugguggauuccguaguuucauggaguaaagagauucugcggacgcaggaaagcgagugugugugcauaaacggcacuuguacagucgugaugaccgacggcucugcuuccgggaaggcagauacuaaaauccucuuuauugaggaaggaaagaucgugcauacaucaaccuuaagcgguagugcccaacacgucgaggaaugcucuugcuauccucgcuacccaggcguuagaugugugugcagggacaacuggaagggguccaaucggccgauaguagauauuaacaucaaagaccacagcaucgugucgucuuacgucuguuccggacuggugggcgacacgccccgccgaaaugauucaaguagcuccucucauugccuugacccuaacaaugaggaaggugggcacggaguuaagggcugggcuuucgaugacggcaacgauguguggauggggagaaccauuaaugagacaagcagguugggauaugagacuuuuaaagucaucgaagguuggucaaacccaaagaguaaacugcagauuaaucgucaggugauaguagaccggggcaaccgcuccggguacagcggaaucuucucuguugagggcaagucauguauuaauagaugcuuuuauguggaacuaaucaggggucggaaagaggaaaccgagguccucuggacaaguaacagcaucguggucuucugugggacuuccggcaccuacggaacaggcucuuggcccgauggggccgaccugaaucuuaugccuauuuga

SEQ ID NO: 153300 - RNA, 1410 nt, Artificial Sequence
  derived and/or modified CDS sequence (opt3) from neuraminidase__InfluenzaA__AHZ36062
augaaccccaaucagaagaucauuaccauaggcagcgugugcaugacaaucgggauggccaaccugaugcuccaaauuggaaauaucauuuccaucuggauaucucacucaauccagcuugguaacaaaaaucagauugagacuuguaaccagagugucaucacguacgaaaauaacaccuggguuaaucaaacauaugugaacauuagcaauacuaacuucgcugcaggccaguccguagugucugucaagaucgccggaaauucgucacugugcccugugagcgggugggcgauauacaguaaagacaacuccauuagaaucggcucuaagggugauguuuuugugauuagggagccauucaucagcuguuccccguuggggugccggaccuuuuucuuaacacagggagcucugcuaaaugacaaacauucaaacggcaccaucaaggaucgcagucccuaucgaacucucaugagcuguccuauuggcgaagucccaucucccuacaacucccguuuugagucaguggccuggagcgcaagugccugccacgacgggauaaauuggcugacaaucggaauuucugguccugauaacggcgcuguagcaguucuuaaguauaaugggaucauaaccgacacgauuaaauccuggagaaacaauauccugaggacucaggaaagcgagugugccugcgugaacggaucguguuucaccaucaugacagauggcccaucugacggucaggcuuccuacaagauuuuucggaucgagaaagggaagauugucaaaucaguggaaaugaaugcccccaacuaucauuacgaggaaugcaguuguuacccugauagcuccgagauaacuugcgugugccgcgacaauuggcacggaucuaacagaccaugggucagcuucaaucaaaacuuggaguaucagaucggcuacauuuguucaggcaucuuuggggauaauccgaggccccaugacaagaccggaaguugcgguccuguuuccagcaacggcgcgaauggggugaagggauucucuuuuaaauauggcaacgguguauggaucgggcggacaaagucaauuaguagccgcaaaggcuucgaaaugauaugggauccaaacggauggaccggcacggacaauaacuuuuccaucaagcaggacauuguggggaucaaugaguggucuggauacucggguagcuucguccaacaccccgaacucacuggccuggauuguauucgaccuugcuucuggguggagcugaucagagggaggccaaaagaaaacacaauauggaccuccggaucaaguaucucuuuuuguggcguuaauagcgacacuguggguugguccuggcccgauggggcagagcucccguucacaauugacaaguga

SEQ ID NO: 153301 - RNA, 1410 nt, Artificial Sequence; identical to SEQ ID NO: 153281
  derived and/or modified CDS sequence (opt3) from neuraminidase__InfluenzaA__AHZ36084

SEQ ID NO: 153302 - RNA, 1410 nt, Artificial Sequence
  derived and/or modified CDS sequence (opt3) from neuraminidase__InfluenzaA__AHZ36095
augaaccccaaucagaagaucauuaccauaggcagcgugugcaugacaaucgggauggccaaccugauucuccaaaucggaaauauuaucuccauauggaucucucacucaauucagcuugguaaccagaaucagaucgagacuuguaaccaaagugucauuaucuacgaaaauaacacguggguuaaucagaccuaugugaacauaagcaauacaaacuucgcugcaggccaguccguagugucugucaaacuggccggaaauucgucauugugcccugugagcgggugggcgauuuacaguaaggacaacuccaucagaauuggcucuaaaggugauguuuuugugaucagggagccauucaucagcuguuccccguuagaaugccggaccuuuuuccugacucagggggcucuacucaaugacaagcauucaaacggaacaauuaaagaucgcagucccuaucgaacccugaugagcuguccuauaggcgaggucccaucucccuacaacucccguuuugaaucaguggccuggagcgcaagugccugccacgacggcuucaauuggcuuacuaucgggauuucuggaccugauaacggugcuguagcaguucugaaguauaauggcaucauaacagacaccauuaaguccuggagaaacaauaucuugaggacgcaagagagcgagugugccugcgugaacgggucguguuuuacuaucaugaccgauggaccaucugacggccaggcuuccuacaaaauuuuccggaucgaaaaggguaaaauugucaagucaguggagaugaaugcccccaacuaucauuacgaagagugcaguuguuacccugauagcuccgagauaacaugcgugugccgcgacaauuggcacgggucuaacagaccaugggucagcuuuaaucagaaccucgaauaucagaucggauacauuuguucaggcaucuucggcgauaauccgaggcccaacgacaaaacugggggaugcgguccuguuaguuccaauggcgcgaacggggugaagggauuuagcuucaaguauggcaacgguguauggaucgggcggaccaaaucuauuucaagucgcaagggcuuugagaugauaugggauccaaauggauggacaggcaccgacaacaauuucagcaucaaacaagacauuaucgggauuaacgaaugguccggauacucugguucguucgugcagcaucccgagcugacgggccuggauuguauccgaccuugcuuuugggucgaacucauaagagggaggccaaaggagaauacuaucuggacaagcggauccucaauuaguuucuguggcgugaacucugacaccguugguuggagcuggcccgauggggcagaguuaccguuuacuaucgacaaauga

SEQ ID NO: 153303 - RNA, 1410 nt, Artificial Sequence; identical to SEQ ID NO: 153281
  derived and/or modified CDS sequence (opt3) from neuraminidase__InfluenzaA__AHZ36106

SEQ ID NO: 153304 - RNA, 1410 nt, Artificial Sequence
  derived and/or modified CDS sequence (opt3) from neuraminidase__InfluenzaA__AHZ36117
augaaccccaaucagaagaucauuaccauaggcagcgugugcaugacaaucgggauggccaaccugauucuccaaaucggaaauauuaucuccauauggaucucucacucaauucagcuugguaaccagaaucagaucgagacuuguaaccaaagugucauuaucuacgaaaauaacacguggguuaaucagaccuaugugaacauaagcaauacaaacuucgcugcaggccaguccguagugucugucaaacuggccggaaauucgucauugugcccugugagcgggugggcgauuuacaguaaggacaacuccaucagaauuggcucuaaaggugauguuuuugugaucagggagccauucaucagcuguuccccguuagaaugccggaccuuuuuccugacucagggggcucuacucaaugacaagcauucaaacggaacaauuaaagaucgcagucccuaucgaacccugaugagcuguucuauaggcgaggucccuuccccauacaacucacguuuugaaagcguggccuggagugcaucugccugccacgacggcuucaauuggcuuacuaucgggauuuccggacccgauaacggugcuguagcaguucugaaguauaauggcaucauaacagacaccauuaagagcuggagaaacaauaucuugaggacgcaagagucggagugugccugcgugaacgggucuuguuuuacuaucaugaccgauggaccuuccgacggccaggcuucauacaaaauuuuccggaucgaaaaggguaaaauugucaagaguguggagaugaaugccccaaacuaucauuacgaagagugcagcuguuaccccgauuccucugagauaacaugcgugugccgcgacaauuggcacgggagcaacagaccuugggucucauuuaaucagaaccucgaauaucagaucggauacauuuguaguggcaucuucggcgauaauccaaggccgaacgacaaaacuggguccugcggacccguuagcucuaauggugcgaacggcgugaagggguuuucauucaaguauggaaacggcguauggaucggucggaccaaaaguauuagcucccgcaagggguuugagaugauaugggauccuaauggcuggacaggaaccgacaacaauuucucuaucaaacaagacauuaucggcauuaacgaauggucgggguacagcggauccuucgugcagcauccagagcugacgggucuggauuguauccgacccugcuuuugggucgaacucauaagaggcaggccuaaggagaauacuaucuggacaucagggaguucuauuagcuucuguggagugaacuccgacaccguuggcuggucauggccagauggugcagaguuacccuuuacuaucgacaaauga

SEQ ID NO: 153305 - RNA, 1410 nt, Artificial Sequence; identical to SEQ ID NO: 153281
  derived and/or modified CDS sequence (opt3) from neuraminidase__InfluenzaA__AHZ36128

SEQ ID NO: 153306 - RNA, 1410 nt, Artificial Sequence; identical to SEQ ID NO: 153281
  derived and/or modified CDS sequence (opt3) from neuraminidase__InfluenzaA__AHZ36139

SEQ ID NO: 153307 - RNA, 1410 nt, Artificial Sequence; identical to SEQ ID NO: 153299
  derived and/or modified CDS sequence (opt3) from neuraminidase__InfluenzaA__AHZ36150

SEQ ID NO: 153308 - RNA, 1410 nt, Artificial Sequence; identical to SEQ ID NO: 153281
  derived and/or modified CDS sequence (opt3) from neuraminidase__InfluenzaA__AHZ36161

SEQ ID NO: 153309 - RNA, 1410 nt, Artificial Sequence; identical to SEQ ID NO: 153281
  derived and/or modified CDS sequence (opt3) from neuraminidase__InfluenzaA__AHZ36172

SEQ ID NO: 153310 - RNA, 1410 nt, Artificial Sequence
  derived and/or modified CDS sequence (opt3) from neuraminidase__InfluenzaA__AHZ36183
augaaccccaaucagaagaucauuaccauaggcagcgugugcaugacaaucgggauggccaaccugaugcuccaaauuggaaauaucauuuccaucuggauaucucacucaauccagcuugguaacaaaaaucagauugagacuuguaaccagagugucaucacguacgaaaauaacaccuggguuaaucaaacauaugugaacauuagcaauacuaacuucgcugcaggccaguccguagugucugucaagaucgccggaaauucgucacugugcccugugagcggaugggcgauauacaguaaagacaacuccauuagaaucggcucuaagggugauguuuuugugauuagggagccauucaucagcuguuccccguuggaaugccggaccuuuuucuuaacacagggggcucugcuaaaugacaaacauucaaacggaaccaucaaggaucgcagucccuaucgaacucucaugagcuguccuauuggcgaggucccaucucccuacaacucccguuuugaaucaguggccuggagcgcaagugccugccacgacggcauaaauuggcugacaaucgggauuucuggaccugauaacggugcuguagcaguucuuaaguauaauggcaucauaaccgacacgauuaaauccuggagaaacaauauccugaggacucaggagagcgagugugccugcgugaacgggucguguuucaccaucaugacagauggaccaucugacggccaggcuuccuacaagauuuuucggaucgaaaaagguaagauugucaaaucaguggagaugaaugcccccaacuaucauuacgaagagugcaguuguuacccugauagcuccgagauaacuugcgugugccgcgacaauuggcacgggucuaacagaccaugggucagcuucaaucaaaacuuggaauaucagaucggauacauuuguucaggcauccucggcgauaauccgaggccccaugacaagaccgggaguugcggaccuguuuccagcaacggugcgaauggcgugaagggguuuucuuucaaauauggaaacggcguauggaucggucggacaaagucaauuaguagccgcaaaggguuugagaugauaugggauccaaacggcuggaccggaacggacaauaacuucuccaucaagcaggacauugugggcaucaaugaauggucuggguacucggggagcuuuguccaacaccccgagcugacuggucuggauuguauucgaccuugcuucuggguggaacucaucagaggcaggccaaaagagaacacaauauggaccuccgggucaaguaucucuuucuguggaguuaauagcgacacugugggcugguccuggcccgauggugcagaguuaccguuuacaauugacaaguga

SEQ ID NO: 153311 - RNA, 1410 nt, Artificial Sequence; identical to SEQ ID NO: 153280
  derived and/or modified CDS sequence (opt3) from neuraminidase__InfluenzaA__AHZ36194

SEQ ID NO: 153312 - RNA, 1410 nt, Artificial Sequence; identical to SEQ ID NO: 153299
  derived and/or modified CDS sequence (opt3) from neuraminidase__InfluenzaA__AHZ36206

SEQ ID NO: 153313 - RNA, 1410 nt, Artificial Sequence; identical to SEQ ID NO: 153281
  derived and/or modified CDS sequence (opt3) from neuraminidase__InfluenzaA__AHZ36218

SEQ ID NO: 153314 - RNA, 1410 nt, Artificial Sequence; identical to SEQ ID NO: 153299
  derived and/or modified CDS sequence (opt3) from neuraminidase__InfluenzaA__AHZ36229

SEQ ID NO: 153315 - RNA, 1410 nt, Artificial Sequence; identical to SEQ ID NO: 153281
  derived and/or modified CDS sequence (opt3) from neuraminidase__InfluenzaA__AHZ36241

SEQ ID NO: 153316 - RNA, 1410 nt, Artificial Sequence; identical to SEQ ID NO: 153281
  derived and/or modified CDS sequence (opt3) from neuraminidase__InfluenzaA__AHZ36252

SEQ ID NO: 153317 - RNA, 1410 nt, Artificial Sequence; identical to SEQ ID NO: 153281
  derived and/or modified CDS sequence (opt3) from neuraminidase__InfluenzaA__AHZ36263

SEQ ID NO: 153318 - RNA, 1410 nt, Artificial Sequence; identical to SEQ ID NO: 150970
  derived and/or modified CDS sequence (opt3) from neuraminidase__InfluenzaA__AHZ36274

SEQ ID NO: 153319 - RNA, 1410 nt, Artificial Sequence; identical to SEQ ID NO: 153281
  derived and/or modified CDS sequence (opt3) from neuraminidase__InfluenzaA__AHZ36286

SEQ ID NO: 153320 - RNA, 1410 nt, Artificial Sequence
  derived and/or modified CDS sequence (opt3) from neuraminidase__InfluenzaA__AHZ36297
augaaccccaaucagaagaucauuaccauaggcagcgugucccugacaaucucuacuauuugcuucuuuaugcaaaucgccauucucaucacgaccgucacacuucacuucaaacaguacgaguuuaacucaccuccaaauaaccagguuaugcugugugaaccgacuauaaucgagagaaauauuaccgaaaucguguauuugacaaacaccacuauugagaaggaaaucugccccaggccugcugaguaccggaauuggaguaaaccacagugugacauaacaggguucgcacccuuuagcaaggauaacuccauucgcuuaucugccggaggugacaucuggguaacccgagagccuuaugugucgugcgauccagacaaauguuaccaauucgcgcugggccaggggacgacucuaaauaacguccauucaaauaacaccgugcgugauagaacacccuauaggacucuccugaugaaugaacuuggaguuccuuuucaccugggcaccaaacaggugugcauugcuuggagcaguuccucuugucaugacgguaaggccugguugcacgucugcaucacaggggaugacaagaacgcaaccgccagcuucaucuacaauggacggcucguggauuccguaguuucauggaguaaggagauucugcgcacgcaggaaagcgagugugugugcauaaacggcacuuguacagucgugaugaccgacggcucugcuuccgggaaagcagauacuaagauccuguuuauugaggaaggaaaaaucgugcauacaucaacccucagcgguggcgcccaacacgucgaggaaugcaguugcuauccaagauacccggggguuaggugugugugccgggacaacuggaagggaucuaaucgccccauaguagauauuaacaucaaggaccacuccaucgugagcucguacgucuguucuggcuuagugggugacacgccucggaaaaaugauuccucaaguagcucccauugccuggacccaaacaaugaggaagggggacacggcguuaagggcugggcuuucgaugacgggaacgauguguggaugggaagaaccauuaaugagacaucuaggcuugguuaugagacuuuuaaagucaucgaaggcuggagcaaccccaagucaaaauugcagauuaaucgacaggugauaguagaccguggggaucgcaguggauacuccggcaucuucagcguugaggguaagucuuguauuaacagaugcuuuuauguggaacugaucagggggcggaaagaggaaaccgagguccuauggacaucaaauaguaucguggucuucuguggcacuagcggaaccuacggcacaggguccuggccugacggagccgaucucaaccugaugccaauuuga

SEQ ID NO: 153321 - RNA, 1410 nt, Artificial Sequence
  derived and/or modified CDS sequence (opt3) from neuraminidase__InfluenzaA__AHZ36309
augaaccccaaucagaagaucauuaccauaggcagcgugugcaugacaaucgggauggccaaccugaugcuccaaauuggaaauaucauuuccaucuggauaucucacucaauccagcuuggugacaaaaaccagauugagacuuguaaucagagugucaucacguacgaaaacaauaccuggguuaaccaaacauaugugaauauuagcaacacuaauuucgcugcaggccaguccguagugucugucaagaucgccgggaacucgucacugugcccugugagcggaugggcgauauacaguaaagauaauuccauuagaaucggcucuaagggugacguuuuugugauuagggagccauucaucagcuguuccccguuggaaugccggaccuuuuucuuaacacagggggcucugcuaaacgauaaacauucaaauggaaccaucaaggaccgcagucccuaucgaacucucaugagcuguccuauuggcgaggucccaucucccuacaacucccguuuugaaucaguggccuggagcgcaagugccugccacgauggcauaaacuggcugacaaucgggauuucuggaccugacaauggugcuguagcaguucuuaaguauaacggcaucauaaccgauacgauuaaauccuggagaaauaacauccugaggacucaggagagcgagugugccugcgugaaugggucguguuucaccaucaugacagacggaccaucugauggccaagcuagcuacaagauuuuucggaucgaaaaagguaagauugucaaaucaguggagaugaacgcccccaauuaucauuacgaagagugcaguuguuacccugacagcuccgagauaacuugcgugugccgcgauaacuggcacgggucuaauagaccaugggucagcuucaaccagaauuuggaauaucagaucggauacauuuguucaggcaucuuuggcgacaacccgaggccccaugauaagaccgggaguugcggaccuguuuccagcaauggugcgaacggcgugaagggguucucuuuuaaauauggaaauggcguauggaucggucggacaaagucaauuaguagccgcaaaggguucgagaugauaugggacccaaacggcuggaccggaacggacaacaauuuuuccaucaagcaggauauugugggcaucaacgaauggucuggguacucgggauccuucguccaacaccccgagcucacuggucuggacuguauucgaccuugcuucuggguggaacugaucagaggcaggccaaaagagaauacaauauggaccuccgggucaaguaucucuuuuuguggaguuaacagcgauacugugggcugguccuggcccgacggugcagagcucccguucacaauugauaaguga

SEQ ID NO: 153322 - RNA, 1410 nt, Artificial Sequence; identical to SEQ ID NO: 153281
  derived and/or modified CDS sequence (opt3) from neuraminidase__InfluenzaA__AHZ36320

SEQ ID NO: 153323 - RNA, 1410 nt, Artificial Sequence; identical to SEQ ID NO: 153281
  derived and/or modified CDS sequence (opt3) from neuraminidase__InfluenzaA__AHZ36331

SEQ ID NO: 153324 - RNA, 1410 nt, Artificial Sequence; identical to SEQ ID NO: 150970
  derived and/or modified CDS sequence (opt3) from neuraminidase__InfluenzaA__AHZ36353

SEQ ID NO: 153325 - RNA, 1410 nt, Artificial Sequence
  derived and/or modified CDS sequence (opt3) from neuraminidase__InfluenzaA__AHZ36365
augaaccccaaucagaagaucauuaccauaggcagcgugugcaugacaaucgggauggccaaccugaugcuccaaauuggaaauaucauuuccaucuggauaucucacccuauccagcuugguaacaaaaaucagauugagacuuguaaccagucagucaucacguacgaaaauaacaccuggguuaaucaaacauaugugaacauuaguaauacuaacuucgcugcaggccagagcguaguguccgucaagaucgccggaaauucuucgcugugcccagugucagggugggcgauauacagcaaagacaacaguauuagaaucggcuccaagggugauguuuuugugauuagggagccguucaucucuuguagccccuuggaaugccggaccuuuuucuuaacacagggggcucugcuaaaugacaaacauuccaacggaaccaucaaggaucgcucaccuuaucgaacucucaugaguuguccaauuggcgagguccccagcccuuacaacucucguuuugaauccguggccuggucagcaagcgccugccacgacggcauaaauuggcugacaaucgggauuaguggaccagauaacggugcuguagcaguucuuaaguauaauggcaucauaaccgacacgauuaaaucuuggagaaacaauauccugaggacucaggaguccgagugugccugcgugaacgggagcuguuucaccaucaugacagauggacccucggacggccaggcuucuuacaagauuuuucggaucgaaaaagguaagauugucaaauccguggagaugaaugccccuaacuaucauuacgaagagugcucauguuacccagauaguagcgagauaacuugcgugugccgcgacaauuggcacggguccaacagaccgugggucucuuucaaucaaaacuuggaauaucagaucggauacauuuguagcggcaucuuuggcgauaaucccaggccucaugacaagaccgggucaugcggaccaguuaguuccaacggugcgaauggcgugaagggguucagcuuuaaauauggaaacggcguauggaucggucggacaaagucuauuucaagucgcaaaggguucgagaugauaugggaucccaacggcuggaccggaacggacaauaacuuuagcaucaagcaggacauugugggcaucaaugaaugguccggguacucuggaucguucguccaacacccugagcucacuggucuggauuguauucgaccaugcuucuggguggaacugaucagaggcaggcccaaagagaacacaauauggaccagcggguccucaaucaguuuuuguggaguuaauucugacacugugggcuggagcuggccggauggugcagagcucccuuucacaauugacaaguga

SEQ ID NO: 153326 - RNA, 1410 nt, Artificial Sequence; identical to SEQ ID NO: 150970
  derived and/or modified CDS sequence (opt3) from neuraminidase__InfluenzaA__AHZ36376

SEQ ID NO: 153327 - RNA, 1410 nt, Artificial Sequence; identical to SEQ ID NO: 150970
  derived and/or modified CDS sequence (opt3) from neuraminidase__InfluenzaA__AHZ36388

SEQ ID NO: 153328 - RNA, 1410 nt, Artificial Sequence; identical to SEQ ID NO: 150970
  derived and/or modified CDS sequence (opt3) from neuraminidase__InfluenzaA__AHZ36400

SEQ ID NO: 153329 - RNA, 1410 nt, Artificial Sequence; identical to SEQ ID NO: 150970
  derived and/or modified CDS sequence (opt3) from neuraminidase__InfluenzaA__AHZ36412

SEQ ID NO: 153330 - RNA, 1410 nt, Artificial Sequence; identical to SEQ ID NO: 150970
  derived and/or modified CDS sequence (opt3) from neuraminidase__InfluenzaA__AHZ36424

SEQ ID NO: 153331 - RNA, 1410 nt, Artificial Sequence; identical to SEQ ID NO: 150970
  derived and/or modified CDS sequence (opt3) from neuraminidase__InfluenzaA__AHZ36436

SEQ ID NO: 153332 - RNA, 1410 nt, Artificial Sequence
  derived and/or modified CDS sequence (opt3) from neuraminidase__InfluenzaA__AHZ36448
augaaccccaaucagaagaucauuaccauaggcagcgugucccugacaaucucuacuauuugcuucuuuaugcaaaucgccauucucaucacgaccgucacacuucacuucaaacaguacgaguuuaacucaccuccaaauaaccagguuaugcugugugaaccgacuauaaucgagaagaauauuaccgaaaucguguauuugacaaacaccacuauugagaaagaaaucugccccaagccugcugaguacagaaauuggaguaaaccacagugugacauaacaggguucgcacccuuuagcaaggauaacuccauuagguuaucugccggaggugacaucuggguaacccgggagccuuaugugucgugcgauccagacaaguguuaccaauucgcgcugggccaggggacgacucuaaauaacguccauucaaauaacaccgugcgcgaucgaacacccuaucguacucuccugaugaaugaacuuggaguuccuuuucaccugggcaccaaacaggugugcauugcuuggagcaguuccucuugucaugacgguaaggccugguugcacgucugcaucacaggggaugacaaaaacgcaaccgccagcuucaucuacaauggaagacucguggauuccguaguuucauggaguaaggagauucugaggacgcaggaaagcgagugugugugcauaaacggcacuuguacagucgugaugaccgacggcucugcuuccgggaaagcagauacuaagauccuguuuauugaggaaggaaagaucgugcauacaucaacccucagcgguagugcccaacacgucgaggaaugcucuugcuauccacgguacccgggcguucgcugugugugcagagacaacuggaaaggguccaauaggcccauaguagauauuaacaucaaggaccacagcaucgugucgucuuacgucuguuccggauuagugggcgacacgccucggaaaaaugauucaaguagcuccucucauugccuggacccaaacaaugaggaaggugggcacggaguuaagggcugggcuuucgaugacggcaacgauguguggauggggcgcaccauuaaugagacaagccgacuuggauaugagacuuuuaaagucaucgaagguuggucaaaccccaagaguaaauugcagauuaauagacaggugauaguagacaggggcgaucgguccggguacagcggaaucuucucuguugagggcaagucauguauuaaccguugcuuuuauguggaacugauccgcgguagaaaggaggaaaccgagguccuauggacaaguaauagcaucguggucuucugugggacuuccggcaccuacggaacaggcucuuggccugacggggccgaucucaaccugaugccaauuuga

SEQ ID NO: 153333 - RNA, 1410 nt, Artificial Sequence; identical to SEQ ID NO: 150970
  derived and/or modified CDS sequence (opt3) from neuraminidase__InfluenzaA__AHZ36460

SEQ ID NO: 153334 - RNA, 1410 nt, Artificial Sequence; identical to SEQ ID NO: 150970
  derived and/or modified CDS sequence (opt3) from neuraminidase__InfluenzaA__AHZ36472

SEQ ID NO: 153335 - RNA, 1410 nt, Artificial Sequence; identical to SEQ ID NO: 150970
  derived and/or modified CDS sequence (opt3) from neuraminidase__InfluenzaA__AHZ36484

SEQ ID NO: 153336 - RNA, 1410 nt, Artificial Sequence; identical to SEQ ID NO: 150970
  derived and/or modified CDS sequence (opt3) from neuraminidase__InfluenzaA__AHZ36496

SEQ ID NO: 153337 - RNA, 1410 nt, Artificial Sequence; identical to SEQ ID NO: 150970
  derived and/or modified CDS sequence (opt3) from neuraminidase__InfluenzaA__AHZ36508

SEQ ID NO: 153338 - RNA, 1410 nt, Artificial Sequence; identical to SEQ ID NO: 150970
  derived and/or modified CDS sequence (opt3) from neuraminidase__InfluenzaA__AHZ36520

SEQ ID NO: 153339 - RNA, 1410 nt, Artificial Sequence
  derived and/or modified CDS sequence (opt3) from neuraminidase__InfluenzaA__AHZ36532
augaaccccaaucagaagaucauuaccauaggcagcgugucccugacaaucucuacuauuugcuucuuuaugcagaucgccauucucaucacgaccgucacacuucacuucaaacaguacgaguuuaacucaccuccaaauaaccagguuaugcugugugaaccgacuauaaucgagagaaauauuaccgaaaucguguauuugacaaacaccacuauugagaaggaaaucugccccaaaccugcugaguacaggacauggaguaagccacagugugacauaaccggguucgcacccuuuagcaaagauaauuccauucgguuaucugccggaggugacaucuggguaacgcgcgagccuuaugugucgugcgauccagacaaguguuaccaauucgcgcugggccaggggacuacccuaaacaauguccauucaaacaauacagugcgagaucguacucccuauagaacccuccugaugaacgaacuuggaguuccuuuucaccugggcacaaaacaggugugcauugcuuggagcaguuccucuugucaugacgguaaggccugguugcacgucugcaucaccggggaugacaagaaugcaacggccagcuucaucuacaacggaaggcucguggauuccguaguuucauggaguaaagagauucugcggacucaggaaagcgagugugugugcauaaauggcacauguaccgucgugaugacugacggcucugcuuccgggaaggcagauacaaaaauccuguuuauugaggaaggaaagaucgugcauaccucaacgcucagcgguagugcccaacacgucgaggaaugcucuugcuauccacgcuacccgggcguuagaugugugugcagggacaacuggaagggguccaaccggcccauaguagauauuaauaucaaagaccacagcaucgugucgucuuacgucuguuccggauuagugggcgacaccccucgcaagaacgauucaaguagcuccucucauugccuggacccaaauaacgaggaaggugggcacggaguuaaaggcugggcuuucgaugacggcaaugauguguggauggggcgaacaauuaacgagacuagcagacuuggauaugagaccuuuaaggucaucgaagguuggucaaaucccaaaaguaaguugcagauuaacaggcaagugauaguagaccggggcgaucguuccggguacagcggaaucuucucuguugagggcaaaucauguauuaaucgcugcuuuuauguggaacugaucagagguaggaaggaggaaacagagguccuauggaccaguaacagcaucguggucuucugugggacuuccggcacauacggaaccggcucuuggccugacggggccgaucucaaucugaugccaauuuga

SEQ ID NO: 153340 - RNA, 1410 nt, Artificial Sequence; identical to SEQ ID NO: 150970
  derived and/or modified CDS sequence (opt3) from neuraminidase__InfluenzaA__AHZ36544

SEQ ID NO: 153341 - RNA, 1410 nt, Artificial Sequence; identical to SEQ ID NO: 150970
  derived and/or modified CDS sequence (opt3) from neuraminidase__InfluenzaA__AHZ36556

SEQ ID NO: 153342 - RNA, 1410 nt, Artificial Sequence; identical to SEQ ID NO: 150970
  derived and/or modified CDS sequence (opt3) from neuraminidase__InfluenzaA__AHZ36568

SEQ ID NO: 153343 - RNA, 1410 nt, Artificial Sequence; identical to SEQ ID NO: 150970
  derived and/or modified CDS sequence (opt3) from neuraminidase__InfluenzaA__AHZ36580

SEQ ID NO: 153344 - RNA, 1410 nt, Artificial Sequence; identical to SEQ ID NO: 150970
  derived and/or modified CDS sequence (opt3) from neuraminidase__InfluenzaA__AHZ36592

SEQ ID NO: 153345 - RNA, 1410 nt, Artificial Sequence; identical to SEQ ID NO: 150970
  derived and/or modified CDS sequence (opt3) from neuraminidase__InfluenzaA__AHZ36604

SEQ ID NO: 153346 - RNA, 1410 nt, Artificial Sequence; identical to SEQ ID NO: 150970
  derived and/or modified CDS sequence (opt3) from neuraminidase__InfluenzaA__AHZ36616

SEQ ID NO: 153347 - RNA, 1410 nt, Artificial Sequence
  derived and/or modified CDS sequence (opt3) from neuraminidase__InfluenzaA__AHZ36628
augaaccccaaucagaagaucauuaccauaggcagcgugucccugacaaucucuacuauuugcuucuuuaugcagaucgccauucucaucacgaccgucacacuucacuucaaacagugugaguuuaacucaccuccaaauaaccagguuaugcugugcgaaccgacuauaaucgagagaaauauuaccgaaaucguguacuugacaaacaccacuauugagaaggaaaucugucccaaaccugcugaguauaggaauuggaguaagccacagugcgacauaacaggguucgcacccuuuagcaaagauaacuccauucgguuaucugccggaggugacaucuggguaacccgcgagccuuacgugucgugugauccagacaagugcuaucaauucgcgcugggccaggggacgacucuaaauaacguccauucaaauaacaccgugcgagaucguacacccuacagaacucuccugaugaaugaacuuggaguuccuuuucaccugggcaccaaacagguguguauugcuuggagcaguuccucuugccaugacgguaaggccugguugcacgucuguaucacaggggaugacaagaacgcaaccgccagcuucaucuauaauggaaggcucguggauuccguaguuucauggaguaaagagauucugcggacgcaggaaagcgagugcguguguauaaacggcacuugcacagucgugaugaccgacggcucugcuuccgggaaggcagauacuaaaauccuguuuauugaggaaggaaagaucgugcauacaucaacccucagcgguagugcccaacacgucgaggaaugcucuuguuacccacgcuauccgggcguuagaugcguguguagggacaacuggaagggguccaaucggcccauaguagauauuaacaucaaagaccacagcaucgugucgucuuacgucugcuccggauuagugggcgacacgccucgcaagaaugauucaaguagcuccucucauugucuggacccaaacaaugaggaaggugggcacggaguuaaaggcugggcuuucgaugacggcaacgauguguggauggggcgaaccauuaaugagacaagcagacuuggauacgagacuuuuaaggucaucgaagguuggucaaaccccaaaaguaaguugcagauuaauaggcaagugauaguagaccggggcgaucguuccggguauagcggaaucuucucuguugagggcaaaucaugcauuaaccgcuguuuuuacguggaacugaucagagguaggaaggaggaaaccgagguccuauggacaaguaauagcaucguggucuucugcgggacuuccggcaccuauggaacaggcucuuggccugacggggccgaucucaaccugaugccaauuuga

SEQ ID NO: 153348 - RNA, 1410 nt, Artificial Sequence
  derived and/or modified CDS sequence (opt3) from neuraminidase__InfluenzaA__AHZ36640
augaaccccaaucagaagaucauuaccauaggcagcgugucccugacaaucucuacuauuugcuucuuuaugcaaaucgccauucucaucacgaccgucacacuucacuucaaacaguacgaguuuaacucaccuccaaauaaccagguuaugcugugugaaccgacuauaaucgagagaaauauuaccgaaaucguguauuugacaaacaccacuauugagaaggaaaucugccccaaaccugcugaguacaggaauuggaguaagccacagugugacauaacaggguucgcacccuuuagcaaagauaacuccauucgguuaucugccggaggugacaucuggguaacccgcgagccuuaugugucgugcgauccagacaaguguuaccaauucgcgcugggccaggggacgacucuaaauaacguccauucaaauaacaccgugcacgaucgaacacccuaucguacucuccugaugaaugaacuuggaguuccuuuucaucugggcaccaaacaggugugcauugcuuggagcaguuccucuugucacgacgguaaggccugguugcaugucugcaucacaggggaugacaagaacgcaaccgccagcuucaucuacaauggaagacucguggauuccguaguuucauggaguaaagagauucugaggacgcaggaaagcgagugugugugcauaaacggcacuuguacagucgugaugaccgacggcucugcuuccgggaaggcagauacuaaaauccuguuuauugaggaaggaaagaucgugcacacaucaacccucagcgguagugcccaacacgucgaggaaugcucuugcuauccacgguacccgggcguucgcugugugugcagagacaacuggaagggguccaauaggcccauaguagauauuaacaucaaagaccauagcaucgugucgucuuacgucuguuccggauuagugggcgacacgccucggaagaaugauucaaguagcuccucucacugccuggacccaaacaaugaggaaggugggcauggaguuaaaggcugggcuuucgaugacggcaacgauguguggauggggcgcaccauuaaugagacaagccgacuuggauaugagacuuuuaaggucaucgaagguuggucaaaccccaaaaguaaguugcagauuaauagacaggugauaguagacaggggcgaucgguccggguacagcggaaucuucucuguugagggcaaaucauguauuaaccguugcuuuuauguggaacugauccgcgguagaaaggaggaaaccgagguccuauggacaaguaauagcaucguggucuucugugggacuuccggcaccuacggaacaggcucuuggccugacggggccgaucucaaccugaugccaauuuga

SEQ ID NO: 153349 - RNA, 1410 nt, Artificial Sequence; identical to SEQ ID NO: 150970
  derived and/or modified CDS sequence (opt3) from neuraminidase__InfluenzaA__AHZ36652

SEQ ID NO: 153350 - RNA, 1410 nt, Artificial Sequence; identical to SEQ ID NO: 150194
  derived and/or modified CDS sequence (opt3) from neuraminidase__InfluenzaA__AHZ36664

SEQ ID NO: 153351 - RNA, 1410 nt, Artificial Sequence; identical to SEQ ID NO: 150194
  derived and/or modified CDS sequence (opt3) from neuraminidase__InfluenzaA__AHZ36676

SEQ ID NO: 153352 - RNA, 1410 nt, Artificial Sequence; identical to SEQ ID NO: 150194
  derived and/or modified CDS sequence (opt3) from neuraminidase__InfluenzaA__AHZ36688

SEQ ID NO: 153353 - RNA, 1398 nt, Artificial Sequence; identical to SEQ ID NO: 151502
  derived and/or modified CDS sequence (opt3) from neuraminidase__InfluenzaA__AHZ39689

SEQ ID NO: 153354 - RNA, 1398 nt, Artificial Sequence; identical to SEQ ID NO: 151502
  derived and/or modified CDS sequence (opt3) from neuraminidase__InfluenzaA__AHZ39713

SEQ ID NO: 153355 - RNA, 1398 nt, Artificial Sequence; identical to SEQ ID NO: 151502
  derived and/or modified CDS sequence (opt3) from neuraminidase__InfluenzaA__AHZ39725

SEQ ID NO: 153356 - RNA, 1398 nt, Artificial Sequence; identical to SEQ ID NO: 151502
  derived and/or modified CDS sequence (opt3) from neuraminidase__InfluenzaA__AHZ39737

SEQ ID NO: 153357 - RNA, 1398 nt, Artificial Sequence
  derived and/or modified CDS sequence (opt3) from neuraminidase__InfluenzaA__AHZ39749
augaaccccaaucagaagauccugugcauuagcgccaccgcuauaaucauuggcgcaaucgccgugcucauugggaucgcgaaccuuggacugaauauagguuugcacuuaaaaccuggcuguaacugcucccauucucaaccagagacaacuaauacgucacagaccaucauuaacaauuacuauaacgaaacaaauaucacuaacauucagauggaggaaagaaccaguaggaauuucaacaaucugacaaaggggcuauguaccaucaacagcuggcacauauacggaaaagacaaugcuguccggauuggcgaguccucugauguucucgugacucgcgaaccguauguaucgugcgaccccgaugagugucgauuuuacgcccugucacaggguacaaccauccgugggaagcauagcaacggaacgauucacgacagaagucaauauagggcacuuaucuccuggccucugucuagcccacccacuguguacaacucccgggucgagugcaucggcuggucaaguaccagcugucaugauggcaaaucucgcauguccauuugcauaucagggccuaauaacaaugccagcgcugugguuugguauaacagaaggccaguggcagaaaucaauacaugggcccggaacauuuugcgcacucaggagagugaaugugucugccacaauggagugugucccguaguuuucaccgacgguucugcuacaggcccugccgauacccgaaucuacuacuuuaaggaggggaagauacucaaaugggagucccugacgggaacugcgaagcacauugaagagugcagcugcuauggcgaaagaacagguaucaccuguacuugcagggacaacuggcaggggucgaaucggccagugauccagauugauccggucgcaaugacacauaccucucaauacaucuguucccccgugcugacggacaacccucguccaaaugaucccaacauuggaaaaugcaaugacccuuauccaggcaacaauaacaacggcgugaagggguucucauaccucgauggagccaauaccugguuaggucgcacaauaaguacugcuagcagauccggcuaugagaugcugaaaguccccaacgcccuuaccgacgacaggucuaagccgauccaggggcagacaauuguuuugaaugcagauuggagcggauacucaggcaguuuuauggacuauugggcugaaggugauuguuaccgggccugcuucuacguggagcugauccgagggcgcccuaaggaggacaaaguaugguggacuuccaacagcaucgugucuauguguucaaguaccgaauuucuaggccaguggaauuggcccgauggagcgaagauugaguauuuccucuga

SEQ ID NO: 153358 - RNA, 1398 nt, Artificial Sequence; identical to SEQ ID NO: 153357
  derived and/or modified CDS sequence (opt3) from neuraminidase__InfluenzaA__AHZ39761

SEQ ID NO: 153359 - RNA, 1398 nt, Artificial Sequence; identical to SEQ ID NO: 151502
  derived and/or modified CDS sequence (opt3) from neuraminidase__InfluenzaA__AHZ39773

SEQ ID NO: 153360 - RNA, 1398 nt, Artificial Sequence; identical to SEQ ID NO: 151502
  derived and/or modified CDS sequence (opt3) from neuraminidase__InfluenzaA__AHZ39785

SEQ ID NO: 153361 - RNA, 1410 nt, Artificial Sequence
  derived and/or modified CDS sequence (opt3) from neuraminidase__InfluenzaA__AHZ39797
augaaccccaaucagaagaucauuaccauaggcagcgugucccugacaaucucuacugucugcuucuuuaugcaaauugccauccucauuacgaccguuacacuucacuucaaacaguacgaguuuaacccuccaccgaauaaccaggugaugcugugugaacccacuaucauagagagaaauaucaccgaaauuguauauuugacaaacaccacuaucgagaaggaaauuugcccuaaaccagcugaguacaggaauuggucaaagccccagugugggaucacaggauucgcaccuuuuaguaaagacaacagcauacgguuauccgccgguggcgauauuugggugacccgcgagccauaugucucuugcgaccccgauaaguguuaccaauucgcgcuggggcagggaacgacucuaaauaacgugcauucgaauaacaccguucgagaccguacaccuuauagaacucuccugaugaaugaacuuggcgugccauuucaccuggguaccaagcaggucugcaucgcuuggucaagcaguuccugucaugaugggaaagccugguugcacgugugcauuacaggagacgauaagaacgcaaccgccucuuucaucuacaauggcaggcucguagacagcguuguguccuggucaaaagagauccugcggacgcaggaaagugagugugucugcauuaacggcacuuguacaguggugaugaccgaugggagcgcuucuggaaaguccgacacuaaaauacuguuuaucgaggaagguaagauuguccauacaucaacccucagcggcagugcacaacacguugaggaaugcucuugcuauccgcgcuaccccggggugagauguguaugcagggauaacuggaagggauccaaucggccuaucguggacauaaacauuaaagaucacagcaucgucucgucuuacguguguuccggcuuaguuggugacacgccacgcaagaaugacucaaguagcuccucucauugccuggaucccaacaaugaggaagggggacacggcgugaaaggcugggccuucgacgaugggaacgacgucuggaugggacgaaccaucaaugagacaagcagacuugguuaugagacuuuuaaggugauugaaggcuggucaaacccuaaaaguaaguugcagaucaauaggcagguaauuguugaucguggggaccgguccggauacagcggcauauucucuguggaggguaaaucauguaucaaccgcugcuuuuaugucgaacugauuagagggaggaaggaggaaaccgaggugcuauggacaaguaauagcaucgucguguucuguggcacuuccggaaccuacggcacagggucuuggccagauggagcugaccucaaccugaugcccaucuga

SEQ ID NO: 153362 - RNA, 1410 nt, Artificial Sequence
  derived and/or modified CDS sequence (opt3) from neuraminidase__InfluenzaA__AHZ39821
augaaccccaaucagaagaucauuaccauaggcagcgugucccugacaaucucuacuauuugcuucuuuaugcaaacggccauccucauuaccacagucacucuucacuucaaacaguacgaguuuaacucaccuccaaauaaccagguuaugcugugugaaccgaccaucauagagagaaauaucacagaaauuguguauuugaccaacacuacaaucgagaaggaaauuugccccaaauuagcugaguacaggaauuggaguaagccucagugugacaucaccggguucgcaccauuuagcaaagauaacuccauacggcugucugccggaggugacauuuggguaacgcgcgagcccuaugugucgugcgauccugacaaguguuaccaauucgcgcuaggccaggggacuacccucaauaacguccauucaaauaacacagugcgagaucguacuccauauagaacccugcuuaugaaugaacugggaguucccuuucacuugggcacaaaacaggugugcaucgcuuggagcaguuccucuugucaugacgguaaggccuggcuccacgucugcauuaccggggaugacaagaacgcaacggccagcuucaucuacaauggaaggcugguggauuccguaguuucauggaguaaagagauccugcggacucaggaaagcgagugugugugcauuaacggcacauguaccgucgugaugacugacggcucugcuuccgggaaggcagauacaaaaauacucuuuaucgaggaaggaaagauugugcauaccucaacguuaagcgguagugcccaacacgucgaggaaugcucuugcuauccucgcuacccaggcguuagaugugugugcagggacaacuggaagggguccaaucggccgaucguagauauaaacauuaaagaccacagcaucgugucgucuuacgucuguuccggacuggugggcgacacuccccgccgaaaugauucaaguagcuccucucauugccuugacccuaacaaugaggaaggugggcacggaguuaagggcugggcuuucgaugacggcaacgauguguggauggggagaacaaucaaugagacuagcagguugggauaugagaccuuuaaagucauugaagguuggucaaacccaaagaguaaacugcagaucaaucgucaggugauuguagaccggggcaaccgcuccggguacagcggaauauucucuguugagggcaagucauguaucaauagaugcuuuuauguggaacuaauuaggggucggaaagaggaaacagagguccucuggaccaguaacagcaucguggucuucugugggaccuccggcacauacggaaccggcucuuggcccgauggggccgaccugaaucuuaugccuacuuga

SEQ ID NO: 153363 - RNA, 1410 nt, Artificial Sequence; identical to SEQ ID NO: 151437
  derived and/or modified CDS sequence (opt3) from neuraminidase__InfluenzaA__AHZ39833

SEQ ID NO: 153364 - RNA, 1410 nt, Artificial Sequence; identical to SEQ ID NO: 150194
  derived and/or modified CDS sequence (opt3) from neuraminidase__InfluenzaA__AHZ39844

SEQ ID NO: 153365 - RNA, 1410 nt, Artificial Sequence
  derived and/or modified CDS sequence (opt3) from neuraminidase__InfluenzaA__AHZ39856
augaaccccaaucagaagaucauuaccauaggcagcgugucccugacaaucucuacuauuugcuucuuuaugcaaaucgccauucucaucacgaccgucacacuucacuucaaacaguacgaguuuaacucaccuccaaauaaccagguuaugcugugugaaccgacuauaaucgagagaaauauuaccgaaaucguguauuugacaaacaccacuauugagaaggaaaucugccccaaaccugcugaguacaggaauuggaguaagccacagugugacauaacaggguucgcacccuuuagcaaagauaacuccauucgguuaucugccggaggugacaucuggguaacccgcgagccuuaugugucgugcgauccagacaaguguuaccaauucgcgcugggccaggggacgacucuaaauaacguccauucaaauaacaccgugcgagaucguacacccuauagaacucuccugaugaaugaacuuggaguuccuuuucaccugggcaccaaacaggugugcauugcuuggagcaguuccucuugucaugacgguaaggccugguugcacgucugcaucacaggggaugacaagaacgcaaccgccagcuucaucuacaauggaaggcucguggauuccguaguuucauggaguaaagagauucugcggacgcaggaaagcgagugugugugcauaaacggcacuuguacagucgugaugaccgacggcucugcuuccgggaaggcagauacuaaaauccuguuuauugaggaaggaaagaucgugcauacaucaacccucagcgguagugcccaacacgucgaggaaugcucuugcuauccacgcuacccgggcguuagaugugugugcagggacaacuggaagggguccaaucggcccauaguagauauuaacaucaaagaccacagcaucgugucgcgcuacgucuguucuggauuagugggcgacacgccucgaaagaaugauuccucaaguagcucccauugccuggacccaaacaaugaggaaggugggcacggaguuaaaggcugggcuuucgaugacggcaacgauguguggauggggagaaccauuaaugagacaucuaggcuuggauaugagacuuuuaaggucaucgaagguuggagcaaccccaaaucaaaguugccuauuaaucgucaggugauaguagaccggggcgaucgcaguggguacuccggaaucuucagcguugagggcaaaucuuguauuaacagaugcuuuuauguggaacugaucaggggucggaaggaggaaaccgagguccuauggacaucaaauaguaucguggucuucugugggacuagcggcaccuacggaacaggcuccuggccagacggggccgaucucaaccugaugcccauuuga

SEQ ID NO: 153366 - RNA, 1410 nt, Artificial Sequence; identical to SEQ ID NO: 150194
  derived and/or modified CDS sequence (opt3) from neuraminidase__InfluenzaA__AHZ39868

SEQ ID NO: 153367 - RNA, 1410 nt, Artificial Sequence
  derived and/or modified CDS sequence (opt3) from neuraminidase__InfluenzaA__AHZ39892
augaaccccaaucagaagaucauuaccauaggcagcgugucccugacaaucucuacuauuugcuucuuuaugcaaaucgccauucucaucacgaccgucacacuucacuucaaacaguacgaguuuaacucaccuccaaauaaccagguugugcugugugaaccgacuauaaucgagagaaauauuaccgaaaucguauauuugacaaacaccacuauugagaaggaaaucugccccaaaccugcugaguacaggaauuggaguaagccacagugugacauaacaggguucgcacccuuuagcaaagauaacuccauucgguuaucugccggaggugacaucugggugacccgcgagccuuaugucucgugcgauccagacaaguguuaccaauucgcgcugggccaggggacgacucuaaauaacgugcauucaaauaacaccguucgagaucguacacccuauagaacucuccugaugaaugaacuuggagugccuuuucaccugggcaccaagcaggucugcauugcuuggagcaguuccucuugucaugacgguaaagccugguugcacgugugcaucacaggggaugacaagaacgcaaccgccagcuucaucuacaauggaaggcucguagauuccguugugucauggaguaaagagauucugcggacgcaggaaagcgagugugucugcauaaacggcacuuguacaguggugaugaccgacggcucugcuuccgggaaggcagauacuaaaauccuguuuauugaggaaggaaagaucguccauacaucaacccucagcgguagugcccaacacguugaggaaugcucuugcuauccacgcuacccgggcgugagauguguaugcagggacaacuggaagggguccaaucggcccauaguggauauuaacaucaaagaccacagcaucgucucgcgcuacguguguucuggauuaguuggcgacacgccucgaaagaaugauuccucaaguagcucccauugccuggacccaaacaaugaggaaggugggcacggagugaaaggcugggcuuucgaugacggcaacgaugucuggauggggagaaccauuaaugagacaucuaggcuuggauaugagacuuuuaaggugaucgaagguuggagcaaccccaaaucaaaguugcagauuaaucggcagguaauaguugaccguggcgaucgcaguggguacuccggaaucuucagcguggagggcaaaucuuguauuaacagaugcuuuuaugucgaacugaucaggggucggaaggaggaaaccgaggugcuauggacaucaaauaguaucgucguguucugugggacuagcggcaccuacggaacaggcuccuggccugacggggccgaucucaaccugaugccaauuuga

SEQ ID NO: 153368 - RNA, 1410 nt, Artificial Sequence; identical to SEQ ID NO: 151402
  derived and/or modified CDS sequence (opt3) from neuraminidase__InfluenzaA__AHZ39904

SEQ ID NO: 153369 - RNA, 1410 nt, Artificial Sequence; identical to SEQ ID NO: 151402
  derived and/or modified CDS sequence (opt3) from neuraminidase__InfluenzaA__AHZ39916

SEQ ID NO: 153370 - RNA, 1410 nt, Artificial Sequence; identical to SEQ ID NO: 150194
  derived and/or modified CDS sequence (opt3) from neuraminidase__InfluenzaA__AHZ39928

SEQ ID NO: 153371 - RNA, 1410 nt, Artificial Sequence
  derived and/or modified CDS sequence (opt3) from neuraminidase__InfluenzaA__AHZ39940
augaaccccaaucagaagaucauuaccauaggcagcgugucccugacaaucucuacuauuugcuucuuuaugcagaucgccauucucaucacgaccgucacacuucacuucaaacaguacgaguuuaacucaccuccaaauaaccagguuaugcugugugaaccgacuauaaucgagagaaauaugaccgaaauuguguauuugacaaacaccacuaucgagaaggaaauuugccccaaaccugcugaguacaggaauuggaguaagccacagugugggaucacaggauucgcacccuuuagcaaagacaacuccauacgguuaucugccgguggcgauauuuggguaacccgcgagccuuaugugucgugcgacccagauaaguguuaccaauucgcgcuggggcagggaacgacucuaaauaacguccauucaaauaacaccgugcgagaccguacacccuauagaacucuccugaugaaugaacuuggcguuccuuuucaccuggguaccaaacaggugugcaucgcuuggagcaguuccucuugucaugaugggaaggccugguugcacgucugcauuacaggagacgauaagaacgcaaccgccagcuucaucuacaauggcaggcucguggacuccguaguuucauggaguaaagagauccugcggacgcaggaaagcgagugugugugcauuaacggcacuuguacagucgugaugaccgaugggucugcuuccggaaaggcagacacuaaaauacuguuuaucgaggaagguaagauugugcauacaucaacccucagcggcagugcccaacacgucgaggaaugcucuugcuauccacgcuacccggggguuagaugugugugcagggauaacuggaagggauccaaucggcccaucguagacauaaacauuaaagaucacagcaucgugucgucuuacgucuguuccggcuuagugggugacacgccucgcaagaccgacucaaguagcuccucucauugccuggauccaaauaacgaggaagggggacacggcguuaaaggcugggcuuucgacgaugggaaugacguguggaugggacgaacaaucaacgagacuagcagacuugguuaugagaccuuuaaggucauugaaggcuggucaaaucccaaaaguaaguugcagaucaacaggcaagugauuguagaucguggggaccgguccggauacagcggcauauucucuguugaggguaaaucauguaucaaucgcugcuuuuauguggaacugauuagagggaggaaggaggaaacagagguccuauggaccaguaacagcaucguggucuucuguggcacuuccggaacauacggcaccgggucuuggccugauggagccgaccucaaucugaugccaaucuga

SEQ ID NO: 153372 - RNA, 1410 nt, Artificial Sequence; identical to SEQ ID NO: 150194
  derived and/or modified CDS sequence (opt3) from neuraminidase__InfluenzaA__AHZ39952

SEQ ID NO: 153373 - RNA, 1410 nt, Artificial Sequence; identical to SEQ ID NO: 150194
  derived and/or modified CDS sequence (opt3) from neuraminidase__InfluenzaA__AHZ39976

SEQ ID NO: 153374 - RNA, 1410 nt, Artificial Sequence
  derived and/or modified CDS sequence (opt3) from neuraminidase__InfluenzaA__AHZ39988
augaaccccaaucagaagaucauuaccauaggcagcgugucccugacaaucucuacuauuugcuucuuuaugcaaaucgccauucucaucacgaccgucacacuucacuucaaacaguacgaguuuaacucaccuccaaauaaccagguuaugcugugugaaccgacuauaaucgagagaaauauuaccgaaaucguguauuugacaaacaccacuauugagaaggaaaucugccccaaaccugcugaguacaggaauuggaguaagccacagugugggauaacaggauucgcacccuuuagcaaagacaacuccauucgguuaucugccgguggcgauaucuggguaacccgcgagccuuaugugucgugcgacccagauaaguguuaccaauucgcgcuggggcagggaacgacucuaaauaacaugcauucaaauaacaccguccgagaccguacacccuauagaacucuccugaugaaugaacuuggcgugccuuuucaccuggguaccaagcagguuugcauugcuuggagcaguuccucuugucaugaugggaaagccugguugcacgugugcaucacaggagacgauaagaacgcaaccgccagcuucaucuacaauggcaggcucgucgacuccgugguaucauggaguaaagagauucugcggacgcaggaaagcgaguguguuugcauaaacggcacuuguacaguggucaugaccgaugggucugcuuccggaaaggcagacacuaaaauccuguuuauugaggaagguaagaucgugcauacaucaacccucagcggcaguacgcaacacguggaggaaugcucuugcuauccacgcuacccgggggucagauguguuugcagggauaacuggaagggauccaaucggcccauaguggacauuaacaucaaagaucacagcaucguaucgucuuacguguguuccggcuuagucggugacaccccucgcaagaaugacucaaguagcuccucucauugccuggauccaaacaaugaggaagggggacacggcgugaaaggcugggccuucgacgaugggaacgacguuuggaugggacgaacaauuaaugagacuagcagacuugguuaugagaccuuuaaggugaucgaaggcuggucaaaccccaaaaguaaguugcagauuaauaggcaggucauaguggaucguggggaccgguccggauacagcggcaucuucucuguagaggguaaaucauguauuaaccgcugcuuuuauguugaacugaucagagggaggaaggaggaaacagaggugcuauggaccaguaauagcaucgucguguucuguggcacuuccggaacauacggcaccgggucuuggccugauggagcugaccucaaccugaugccaauuuga

SEQ ID NO: 153375 - RNA, 1410 nt, Artificial Sequence; identical to SEQ ID NO: 150194
  derived and/or modified CDS sequence (opt3) from neuraminidase__InfluenzaA__AHZ40000

SEQ ID NO: 153376 - RNA, 1410 nt, Artificial Sequence; identical to SEQ ID NO: 150194
  derived and/or modified CDS sequence (opt3) from neuraminidase__InfluenzaA__AHZ40012

SEQ ID NO: 153377 - RNA, 1410 nt, Artificial Sequence
  derived and/or modified CDS sequence (opt3) from neuraminidase__InfluenzaA__AHZ40024
augaaccccaaucagaagaucauuaccauaggcagcgugucccugacaaucucuacuauuugcuucuuuaugcagaucgccauucucaucacgaccgucacacuucacuucaaacaguacgaguuuaacucaccuccaaauaaccagguuaugcugugugaaccgacuauaaucgagagaaauauuaccgaaaucguguauuugacaaacaccacuauugagaaggaaaucugccccaaaccugcugaguacaggaauuggaguaagccacagugugggauaacaggauucgcacccuuuagcaaagacaacuccauucgguuaucugccgguggcgauaucuggguaacccgcgagccuuaugugucgugcgacccagauaaguguuaccaauucgcgcuggggcagggaacgacucuaaauaacguccauucaaauaacaccgugcgagaccguacacccuauagaacucuccugaugaaugaacuuggcguuccuuuucaccuggguaccaaacaggugugcauugcuuggagcaguuccucuugucaugaugggaaggccugguugcacgucugcaucacaggagacgauaagaacgcaaccgccagcuucaucuacaauggcaggcucguggacuccguaguuucauggaguaaagagauucugcggacgcaggaaagcgagugugugugcauaaacggcacuuguacagucgugaugaccgaugggucugcuuccggaaaggcagacacuaaaauccuguuuauugaggaagguaagaucgugcauacaucaacccucagcggcagugcccaacacgucgaggaaugcucuugcuauccacgcuacccggggguuagaugugugugcagggauaacuggaagggauccaaucggcccauaguagacauuaacaucaaagaucacagcaucgugucgucuuacgucuguuccggcuuagugggugacacgccucgcaagaaugacucaaguagcuccucucauugccuggauccaaacaaugaggaagggggacacggcguuaaaggcugggcuuucgacgaugggaacgacguguggaugggacgaaccauuaaugagacaagcagacuugguuuugagacuuucaaggucaucgaaggcuggucaaaccccaaaaguaaguugcagauuaauaggcaagugauaguagaucguggggaccgguccggauauagcggcaucuuuucuguugaggguaaaucauguauuaaccgcugcuucuacguggaacugaucagagggaggaaggaggaaaccgagguccuauggacaaguaauagcaucguggucuucuguggcacuuccggaaccuauggcacagggucuuggccugauggagccgaccucaaccugaugccaauuuga

SEQ ID NO: 153378 - RNA, 1410 nt, Artificial Sequence; identical to SEQ ID NO: 150194
  derived and/or modified CDS sequence (opt3) from neuraminidase__InfluenzaA__AHZ40036

SEQ ID NO: 153379 - RNA, 1410 nt, Artificial Sequence; identical to SEQ ID NO: 151405
  derived and/or modified CDS sequence (opt3) from neuraminidase__InfluenzaA__AHZ40048

SEQ ID NO: 153380 - RNA, 1410 nt, Artificial Sequence; identical to SEQ ID NO: 150194
  derived and/or modified CDS sequence (opt3) from neuraminidase__InfluenzaA__AHZ40063

SEQ ID NO: 153381 - RNA, 1410 nt, Artificial Sequence
  derived and/or modified CDS sequence (opt3) from neuraminidase__InfluenzaA__AHZ40075
augaaccccaaucagaagaucauuaccauaggcagcgugucccugacaaucucuacugucugcuucuuuaugcaaauugccauccucauuacgaccguuacacuucacuucaaacaguacgaguuuaacucaccuccaaauaaccaggugaugcugugugaaccgacuaucauagagagaaauaucaccgaaauuguauauuugacaaacaccacuaucgagaaggaaauuugccccaaaccugcugaguacaggaauuggaguaagccacagugugggaucacaggauucgcacccuuuagcaaagacaacuccauacgguuaucugccgguggcgauauuugggugacccgcgagccuuaugucucgugcgacccagauaaguguuaccaauucgcgcuggggcagggaacgacucuaaauaacgugcauucaaauaacaccguucgagaccguacacccuauagaacucuccugaugaaugaacuuggcgugccuuuucaccuggguaccaagcaggucugcaucgcuuggagcaguuccucuugucaugaugggaaagccugguugcacgugugcauuacaggagacgauaagaacgcaaccgccagcuucaucuacaauggcaggcucguagacuccguugugucauggaguaaagagauccugcggacgcaggaaagcgagugugucugcauuaacggcacuuguacaguggugaugaccgaugggucugcuuccggaaaggcagacacuaaaauacuguuuaucgaggaagguaagauuguccauacaucaacccucagcggcagugcccaacacguugaggaaugcucuugcuauccacgcuacccgggggugagauguguaugcagggauaacuggaagggauccaaucggcccaucguggacauaaacauuaaagaucacagcaucgucucgucuuacguguguuccggcuuaguuggugacacgccucgcaagaaugacucaaguagcuccucucauugccuggauccaaacaaugaggaagggggacacggcgugaaaggcugggcuuucgacgaugggaacgacgucuggaugggacgaaccaucaaugagacaagcagacuugguuaugagacuuuuaaggugauugaaggcuggucaaacaguaaauccaaguugcagaucaauaggcagguaauuguugaucguggggaccggagcggauacucuggcauauucucaguggaggguaaaaguuguaucaaccgcugcuuuuaugucgaacugauuagagggaggaaggaggaaaccgaggugcuauggacaagcaauuccaucgucguguucuguggcacuucuggaaccuacggcacagggucguggcccgauggagccgaccucaaccugaugccuaucuga

SEQ ID NO: 153382 - RNA, 1410 nt, Artificial Sequence; identical to SEQ ID NO: 150194
  derived and/or modified CDS sequence (opt3) from neuraminidase__InfluenzaA__AHZ40087

SEQ ID NO: 153383 - RNA, 1410 nt, Artificial Sequence; identical to SEQ ID NO: 151405
  derived and/or modified CDS sequence (opt3) from neuraminidase__InfluenzaA__AHZ40099

SEQ ID NO: 153384 - RNA, 1410 nt, Artificial Sequence
  derived and/or modified CDS sequence (opt3) from neuraminidase__InfluenzaA__AHZ40111
augaaccccaaucagaagaucauuaccauaggcagcgugucccugacaaucucuacuauuugcuucuuuaugcagaucgccauucucaucacgaccgucacacuucacuucaaacaguacgaguuuaacccuccaccgaauaaccagguuaugcugugugaacccacuauaaucgagagaaauauuaccgaaaucguguauuugacaaacaccacuauugagaaggaaaucugcccuaaauuagcugaguacaggaauuggucaaagccacagugugacauaacaggguucgcacccuuuaguaaagauaacagcauucggcuguccgccggaggugacaucuggguaacccgcgagccuuaugugucuugcgauccagacaaguguuaccaauucgcgcuaggccaggggacgacucucaauaacguccauucgaauaacaccgugcgagaucguacacccuauagaacucugcuuaugaaugaacugggaguuccuuuucacuugggcaccaaacaggugugcauugcuuggucaagcaguuccugucaugacgguaaggccuggcuccacgucugcaucacaggggaugacaagaacgcaaccgccucuuucaucuacaauggaaggcugguggauagcguaguuuccuggucaaaagacauucugcggacgcaggagagugaaugugugugcauaaacggcacuugugcugucgugaugacagauggcagcgcaucugggaaggccgacaccaaaauccucuuuauugaggagggaaagaucgugcauacuuccacauuaucagguagcgcucaacacgucgaagagugcaguugcuauccacgcuacccgggcguuagaugugugugcagggauaacuggaaggggucuaaucggcccauaguagacauuaacaucaaagaccacuccaucgugagcucguacgucuguucuggacuggugggcgauaccccucgcaagaaugacuccucaaguagcggucauugccuugauccaaacaaugaagaagggggacacggcguuaaaggcugggccuucgacgaugggaacgacguguggaugggacgaacgauuaaugagaccuccagauuggguuaugagacauuuaaggucaucgagggcuggucuaaccccaaaagcaagcugcagauuaauaggcaagugauaguagaucgggggaaccguucaggauacaguggcaucuucuccguugaagguaaaaauuguauuaaccgcugcuuuuauguggagcuaaucagagggaggaaggaagagacugaaguccucuggaccagcaauucuaucguggucuucuguggcacaucaggaacuuacggcaccgggaguuggccugacggagcggaucugaaccuuaugccaauuuga

SEQ ID NO: 153385 - RNA, 1410 nt, Artificial Sequence
  derived and/or modified CDS sequence (opt3) from neuraminidase__InfluenzaA__AHZ40123
augaaccccaaucagaagaucauuaccauaggcagcgugucccugacaaucucuacuauuugcuucuuuaugcagaucgccauucucaucacgaccgucacacuucacuucaaacaguacgaguuuaacucaccuccaaauaaccagguuaugcugugugaaccgacuauaaccgagagaaauaucacagaaauuguguauuugaccaacacuacaaucgagaaggaaauuugccccaaaccugcugaguacaggaauuggaguaagccacagugugggaucaccggauucgcacccuuuagcaaagacaacuccauacgguuaucugccgguggcgauauuuggguaacgcgcgagccuuaugugucgugcgacccagauaaguguuaccaauucgcgcuggggcagggaacuacccuaaauaacguccauucaaauaacacagugcgagaccguacucccuauagaacccuccugaugaaugaacuuggcguuccuuuucaccuggguacaaaacaggugugcaucgcuuggagcaguuccucuugucaugaugggaaggccugguugcacgucugcauuaccggagacgauaagaacgcaacggccagcuucaucuacaauggcaggcucguggacuccguaguuucauggaguaaagagauccugcggacucaggaaagcgagugugugugcauuaacggcacauguaccgucgugaugacugaugggucugcuuccggaaaggcagacacaaaaauacuguuuaucgaggaagguaagauugugcauacccgcacgcucucaggcagcgcccaacacgucgaggaaugcaguugcuauccaagauacccggggguuaggugugugugccgggauaacuggaagggaucuaaucgccccaucguagacauaaacauuaaagaucacuccaucgugagcucguacgucuguucuggcuuagugggugacaccccucgaaagaaugacuccucaaguagcucccauugccuggauccaaacaaugaggaagggggacacggcguuaaaggcugggcuuucgacgaugggaacgacguguggaugggaagaacaaucaaugagacuucuaggcuugguuaugagaccuuuaaggucauugaaggcuggagcaaccccaaaucaaaguugcagaucaaucggcaagugauuguagaucguggggaccgcaguggauacuccggcauauucagcguugaggguaaaucuuguaucaacagaugcuuuuauguggaacugauuagggggcggaaggaggaaacagagguccuauggacuucaaauaguaucguggucuucuguggcaccagcggaacauacggcaccggguccuggccugauggagccgaccucaaccugaugccaaucuga

SEQ ID NO: 153386 - RNA, 1410 nt, Artificial Sequence; identical to SEQ ID NO: 150194
  derived and/or modified CDS sequence (opt3) from neuraminidase__InfluenzaA__AHZ40133

SEQ ID NO: 153387 - RNA, 1410 nt, Artificial Sequence; identical to SEQ ID NO: 151412
  derived and/or modified CDS sequence (opt3) from neuraminidase__InfluenzaA__AHZ40145

SEQ ID NO: 153388 - RNA, 1410 nt, Artificial Sequence
  derived and/or modified CDS sequence (opt3) from neuraminidase__InfluenzaA__AHZ40157
augaaccccaaucagaagaucauuaccauaggcagcgugucccugacaaucucuacuauuugcuucuuuaugcaaaucgccauucucaucacgaccgucacacuucacuucaaacaguacgaguuuaacucaccuccaaauaaccagguuaugcugugugaaccgacuauaaucgagagaaauauuaccgaaaucguguauuugacaaacaccacuauugagaaggaauuaugccccaaacuggcugaguacaggaauuggaguaagccucagugugacaucacaggguucgcaccauuuagcaaagauaacuccauacggcuaucugccggaggugacauuuggguaacccgcgagcccuaugugucgugcgauccugacaaguguuaccaauucgcgcucggccaggggacgacucugaauaacguccauucaaauaacaccgugcgagaucguacaccauauagaacucuucugaugaaugaauugggaguucccuuucaccucggcaccaaacaggugugcauggcuuggagcaguuccucuugucaugacgguaaggccuggcugcacgucugcaucacaggggaugacaagaacgcaaccgccagcuucauuuacaauggaaaacugguggauuccguaguuucauggaguaaggagauccucaggacgcaggaaagcgagugugugugcaucaacggcacuuguacagucgugaugaccgacggcucugcuuccgggaaagcagauacuaagauuuuauuuauagaggaaggaaagaucgugcauacaucaacccugagcgguagugcccaacacgucgaggaaugcucuugcuauccucgguacccaggcguucgcugugugugcagagacaacuggaaaggguccaauaggccgauuguagauaucaacauaaaggaccacagcauugugucgucuuacgucuguuccggacuugugggcgacacgccccggaaaaccgauucaaguagcuccucucauugcuuggacccuaauaacgaggaaggugggcacggaguuaagggcugggcuuucgaugacggcaaugauguguggauggggcgcacaaucaacgagacuagccgacugggauaugagaccuuuaaagucaucgaagguuggucaaauccaaagaguaaacuacagauuaacagacaggugaucguagacaggggcgaucgguccggguacagcggaauuuucucuguugagggcaagucauguauaaaucguugcuuuuauguggaacucauccgcgguagaaaggaggaaacagccguccuguggaccaguaacagcauuguggucuucugugggacuuccggcacauacggaaccggcucuuggcccgacggggcggaucuuaaucugaugccuaucuga

SEQ ID NO: 153389 - RNA, 1410 nt, Artificial Sequence
  derived and/or modified CDS sequence (opt3) from neuraminidase__InfluenzaA__AHZ40169
augaaccccaaucagaagaucauuaccauaggcagcgugugcaugacaaucgggauggccaaccugauucuccaaaucggaaauauuaucuccauauggaucucucacucaauucagcuugagaaccagagucagaucgaaacuuguaaucaaagcgucauuacguacgagaacaauaccuggguuaaccagacauaugugaauaucuccaacacuaauuucgcugcaggucagucuguagugucggucaaacuggccggcaacagcagcuugugcccugugagugggugggcgauauacuccaaggacaauucuguuagaauuggaagcaaaggcgauguguuugucaucagggaaccauucauuuccuguucaccguuagagugccggaccuuuuuccugacacagggugcucuacucaacgacaagcauaguaaugggaccaucaaagaucgcagccccuaucgaacucugaugucuuguccuaucggagaagugccaucccccuacaacucacguuuugagagcguagccuggagugcaucugccugccacgacggcauuaacuggcuuacaauaggcaucuccgggccugauagcggagcuguugcagugcugaaguauaaugguauuaucaccgacacgauaaagucguggagaaacaauauuuugaggacucaagagucugaaugugccugcgucaacggcuccuguuucaccaucaugacagaugggccaucagacggacaggcuaguuacaaaaucuuucggauugagaagggcaaaaucgugaagucaguggaaaugaaugcccccaacuaucauuacgaggagugcuccuguuacccugauucuagcgaaauuacuugcgucugccgcgacaauuggcacgguucaaacagaccauggguuaguuucaaucagaaccucgaguaucagauaggguacaucuguuccggaauuuuuggcgauaauccgaggcccaacgacaaaaccggcagcugcgggccugugucuucaaauggagcgaacgguguaaagggcuucaguuuuaaguaugggaauggaguguggaucggccggacaaaaagcaucuccucucgcaaggguuucgaaaugauuugggauccaaacggguggaccggcacggacaacaauuuuucgauaaaacaagacaucgucggaauuaacgaguggagcggcuacuccgggucauucgugcagcaucccgaacugacuggacuggauuguauccgaccuugcuucuggguugagcucauuagagguaggccaaaggagaauacaaucuggaccaguggcucuagcauauccuuuuguggggugaacucagacacugucggauggagcuggcccgauggcgcagaauuaccguucacaaucgacaaauga

SEQ ID NO: 153390 - RNA, 1410 nt, Artificial Sequence
  derived and/or modified CDS sequence (opt3) from neuraminidase__InfluenzaA__AHZ40180
augaaccccaaucagaagaucauuaccauaggcagcgugucccugacaaucucuacuauuugcuucuuuaugcagaucacgauucucaucaccacagucacucuucacuucaaacaguacgaguuuaacucaccuccaaauaaccagguuaugcugugugaaccgaccauaaucgagagaaauauuacagaaaucguguauuugaccaacacuacaauugagaaggaaaucugccccaaaccugccgaguacaggaauuggaguaagccacagugugggauaaccggauucgcucccuuuagcaaagacaacuccauucgguuaucugcagggggcgauaucuggguaacgcgcgagccuuaugugucgugcgacccagauaaguguuaccaauucgcccuggggcagggaacuacccuaaauaacguccauucaaauaacacagugcgagaccguacucccuauagaacccuccugaugaaugaacuuggcguuccuuuucaccuggguacaaaacaggugugcauugcguggagcaguuccucuugucaugaugggaaggcuugguugcacgucugcaucaccggagacgauaagaacgccacggcaaguuucaucuacaauggcaggcucguggacuccguaguuucauggaguaaagagauucugcggacucaggaaagcgagugugugugcauaaacggcacauguaccgucgugaugacugaugggucugccuccggaaaggcugacacaaaaauccuguuuauugaggaagguaagaucgugcauaccucaacgcucagcggcagugcacaacacgucgaggaaugcucuugcuauccacgcuacccggggguuagaugugugugcagggauaacuggaagggauccaaucggcccauaguagacauuaacaucaaagaucacagcaucgugucgucuuacgucuguuccggcuuagugggugacaccccucgcaagaaugacucaaguagcuccucucauugccuggauccaaacaaugaggaagggggacacggcguuaaaggcugggccuucgacgaugggaacgacguguggaugggacgaacaauuaaugagacuagcagacuugguuaugagaccuuuaaggucaucgaaggcuggucaaaccccaaaaguaaguugcagauuaauaggcaagugauaguagaucggggugaccguuccggauacagcggcaucuucucuguugaggguaaaucauguauuaaccgcugcuuuuauguggaacugaucagagggaggaaggaggaaacagagguccuauggacuagcaauagcaucguggucuucuguggcaccuccggaacauacggcaccgggucuuggccugauggagcugaccucaaccugaugccaauuuga

SEQ ID NO: 153391 - RNA, 1410 nt, Artificial Sequence; identical to SEQ ID NO: 151058
  derived and/or modified CDS sequence (opt3) from neuraminidase__InfluenzaA__AHZ40192

SEQ ID NO: 153392 - RNA, 1410 nt, Artificial Sequence; identical to SEQ ID NO: 150194
  derived and/or modified CDS sequence (opt3) from neuraminidase__InfluenzaA__AHZ40204

SEQ ID NO: 153393 - RNA, 1410 nt, Artificial Sequence; identical to SEQ ID NO: 150194
  derived and/or modified CDS sequence (opt3) from neuraminidase__InfluenzaA__AHZ40216

SEQ ID NO: 153394 - RNA, 1410 nt, Artificial Sequence; identical to SEQ ID NO: 151423
  derived and/or modified CDS sequence (opt3) from neuraminidase__InfluenzaA__AHZ40228

SEQ ID NO: 153395 - RNA, 1410 nt, Artificial Sequence
  derived and/or modified CDS sequence (opt3) from neuraminidase__InfluenzaA__AHZ40240
augaaccccaaucagaagaucauuaccauaggcagcgugucccugacaaucucuacuauuugcuuccucaugcaaaucgccauucuuaucacgaccgcuacacugcacuuuaaacaguacgaguucaacucaccuccaaauaaccaggucauguugugugaaccgacuauaaucgagagaaauauuaccgaaaucguuuauuuaacaaacaccacuauugagaaggaaaucugccccaaaccugcagaguacaggaauuggaguaagccacagugugggauaacaggauuugcccccuucagcaaagacaacuccauucggcugucugcggguggcgauaucugggugacccgcgagccuuauguaucgugcgacccagauaaguguuaccaauuugcucuagggcagggaacgacucucaauaacgugcauucaaauaacaccguccgagaccguacacccuauagaacucugcuuaugaaugaacugggcgugccuuuccacuuggguaccaagcagguuugcauugccuggagcaguuccucuugucaugaugggaaagcauggcuccacgugugcaucacaggagacgauaagaacgccaccgcuagcuuuaucuacaauggcaggcuggucgacuccgugguaucauggaguaaagagauucugcggacgcaggaaagcgaguguguuugcauaaacggcacuuguacaguggucaugaccgaugggucugcauccggaaaggccgacacuaaaauccucuucauugaggaagguaagaucgugcauacaucaaccuuaagcggcagugcucaacacguggaggaaugcucuugcuauccacgcuacccgggggucagauguguuugcagggauaacuggaagggauccaaucggcccauaguggacauuaacaucaaagaucgcagcaucguaucgucuuacguguguuccggccuggucggugacacgccucgaaagaaugacucaaguagcuccucucacugccuugauccaaacaaugaggaagggggacauggcgugaaaggcugggccuuugacgaugggaacgacguuuggaugggaagaaccauuaaugagacaagcagguuggguuaugagacuuucaaggugaucgaaggcuggucaaaccccaaaaguaagcugcagauuaaucggcaggucauaguggaucguggggaccgcuccggauacagcggcaucuuuucuguagaggguaaaucauguauuaacagaugcuucuauguugaacuaaucagggggcggaaggaggaaaccgaggugcucuggacaaguaauagcaucgucguguuuuguggcacuuccggaaccuacggcacagggucuuggccugauggagcggaccugaaccuuaugccaauuuga

SEQ ID NO: 153396 - RNA, 1410 nt, Artificial Sequence
  derived and/or modified CDS sequence (opt3) from neuraminidase__InfluenzaA__AHZ40252
augaaccccaaucagaagaucauuaccauaggcagcgugucccugacaaucucuacuauuugcuucuuuaugcaaaucgccauucucaucacgaccgucacacuucacuucaaacaguacgaguuuaacucaccuccaaauaaccagguuaugcugugugaaccgacuauaaucgagagaaauauuaccgaaaucguguauuugacaaacaccacuauugagaaggaaaucugccccaaaccugcugaguacaggaauuggaguaagccacagugugggauaacaggauucgcacccuuuagcaaagacaacuccauucgguuaucugccgguggcgauaucuggguaacccgcgagccuuaugugucgugcgacccagauaaguguuaccaauucgcgcuggggcagggaacgacucuaaauaacguccauucaaauaacaccgugcgagaccguacacccuauagaacucuccugaugaaugaacuuggcguuccuuuucaccuggguaccaaacaggugugcauugcuuggagcaguuccucuugucaugaugggaaggccugguugcacgucugcaucacaggagaggacaagaacgcaaccgccagcuucaucuacaauggcaggcucguggauuccauuguaucauggaguaaagaaauacugcggacgcaggagagcgaguguguuugcaucaacggcacuuguacaguggucaugaccgacgggucugcuuccggaaaggcagauacuaaaauucuguuuaucgaagaggguaagauagugcauacaucaacccucagcggcagugcccaacacguggaagagugcucuugcuauccacgcuacccgggggucagauguguuugcagggacaacuggaagggauccaaucggcccauuguggauaucaacaucaaagaccacagcauuguaucgucuuacguguguuccggcuuagucggugauacgccucgcaagaaugacucaaguagcuccucucauugccuggacccaaacaaugaagaagggggacacggcgugaaaggcugggcuuucgaugacgggaacgauguuuggaugggacgaaccaucaaugagacaagcagacuugguuaugagacuuuuaaggugauugagggcuggucaaaccccaaaaguaaguugcagauaaauaggcaggucaucguggaccguggggaucgguccggauacagcggcauuuucucuguagaagguaaaucauguaucaaccgcugcuuuuauguugagcugaucagagggaggaaggaagagaccgaggugcuauggacaaguaauagcauugucguguucuguggcacuuccggaaccuacggcacagggucuuggccugacggagccgaucucaaccugaugccaauauga

SEQ ID NO: 153397 - RNA, 1410 nt, Artificial Sequence; identical to SEQ ID NO: 153142
  derived and/or modified CDS sequence (opt3) from neuraminidase__InfluenzaA__AHZ40264

SEQ ID NO: 153398 - RNA, 1410 nt, Artificial Sequence; identical to SEQ ID NO: 150194
  derived and/or modified CDS sequence (opt3) from neuraminidase__InfluenzaA__AHZ40276

SEQ ID NO: 153399 - RNA, 1410 nt, Artificial Sequence
  derived and/or modified CDS sequence (opt3) from neuraminidase__InfluenzaA__AHZ40288
augaaccccaaucagaagaucauuaccauaggcagcgugucccugacaaucucuacuauuugcuucuuuaugcaaaucgccauucucaucacgaccgucacacuucacuucaaacaguacgaguuuaacucaccuccaaauaaccagguuaugcugugugaaccgacuauaaucgagagaaauauuaccgaaaucguguauuugacaaacaccacuauugagaaggaaaucugccccaaauuagcugaguacaggaauuggaguaagccucagugugacauaacaggguucgcaccauuuagcaaagauaacuccauucggcugucugccggaggugacaucuggguaacccgcgagcccuaugugucgugcgauccugacaaguguuaccaauucgcgcuaggccaggggacgacucucaauaacguccauucaaauaacaccgugcgagaucguacaccauauagaacucugcuuaugaaugaacugggaguucccuuucacuugggcaccaaacaggugugcauugcuuggagcaguuccucuugucaugacgguaaggccuggcuccacgucugcaucacaggggaugacaagaacgcaaccgccagcuucaucuacaauggaaggcugguggauuccguaauuucauggaguaaagacauacugcggacgcaggagagcgaauguguuugcaucaacggcacuugugcuguggucaugacagauggcucugcauccgggaaggccgacaccaaaauucucuuuaucgaggagggaaagauagugcauacuucaacauuaagcgguagugcucaacacguggaagagugcucuugcuauccucgcuacccaggcgucagauguguuugcagggauaacuggaagggguccaaucggccgauuguggacaucaacaucaaagaccacagcauuguaucgucuuacguguguuccggacuggucggcgauacgccccgcaagaaugacucaaguagcuccggucauugccuugauccuaacaaugaagaagggggacacggcgugaaaggcugggccuucgacgaugggaacgacguuuggaugggacgaaccaucaaugagaccucuagauuggguuaugagacauuuaaggugauugagggcuggagcaacccaaaaucaaagcugcagauaaauaggcaggucaucguggaucgggggaaccguaguggauacuccggcauuuucagcguagaagguaaaaauuguaucaaccgcugcuuuuauguugagcuaaucagagggaggaaggaagagacugaagugcucuggaccucuaauucaauugucguguucuguggcacaaguggaacuuacggcaccgggagcuggcccgacggagcggaucugaaccuuaugccuauauga

SEQ ID NO: 153400 - RNA, 1410 nt, Artificial Sequence
  derived and/or modified CDS sequence (opt3) from neuraminidase__InfluenzaA__AHZ40312
augaaccccaaucagaagaucauuaccauaggcagcgugucccugacaaucucuacuauuugcuucuuuaugcaaaucgccauucucaucacgaccgucacacuucacuucaaacaguacgaguuuaacuauccuccaaauaaccagguuaugcugugugaaccgacuauaaucgagagaaauauuaccgaaaucguguacuugacaaacaccacuauugagaaggaaaucugccccaaaccugcugaguauaggaauuggucaaagccacagugugggauaacaggauucgcacccuuuaguaaagacaacagcauucgguuauccgccgguggcgauaucuggguaacccgcgagccuuacgugucuugcgacccagauaaguguuaucaauucgcgcuggggcagggaacgacucuaaauaacguccauucgaauaacaccgugcgagaccguacacccuacagaacucuccugaugaaugaacuuggcguuccuuuucaccuggguaccaaacaggugugcauugcuuggucaagcaguuccugucaugaugggaaggccugguugcacgucugcaucacaggagacgauaagaacgcaaccgccucuuucaucuauaauggcaggcucguggacagcguaguuuccuggucaaaagagauucugcggacgcaggaaagugagugugugugcauaaacggcacuuguacagucgugaugaccgaugggagcgcuucuggaaaggcagacacuaaaauccuguuuauugaggaagguaagaucgugcauacauccacccucucaggcagcgcccaacacgucgaggaaugcaguugcuacccacgcuacccggggguuagaugugugugcagggauaacuggaagggaucuaaucggcccauaguagacauuaacaucaaagaucacuccguggucagcucguauguguguucuggcuuaguuggugacacgccucgcaagaaugacuccucaaguagcucccauugccuggauccaaacaaugaggaagggggacacggcgugaaaggcugggcuuucgacgaugggaacgacgucuggaugggacgaaccaucaaugagacaucuagacuugguuacgagacuuuuaaggugauugaaggcuggagcaaccccaaaucaaaguugcagaucaauaggcagguaauuguugaucguggggaccggaguggauauuccggcauauucagcguggaggguaaaucuuguaucaaccgcugcuuuuacgucgaacugauuagagggaggaaggaggaaaccgaggugcuauggacaucaaauaguaucgucguguucuguggcacuagcggaaccuauggcacaggguccuggccugauggagccgaccucaaccugaugccaaucuga

SEQ ID NO: 153401 - RNA, 1410 nt, Artificial Sequence; identical to SEQ ID NO: 150194
  derived and/or modified CDS sequence (opt3) from neuraminidase__InfluenzaA__AHZ40324

SEQ ID NO: 153402 - RNA, 1410 nt, Artificial Sequence; identical to SEQ ID NO: 150194
  derived and/or modified CDS sequence (opt3) from neuraminidase__InfluenzaA__AHZ40336

SEQ ID NO: 153403 - RNA, 1410 nt, Artificial Sequence; identical to SEQ ID NO: 153377
  derived and/or modified CDS sequence (opt3) from neuraminidase__InfluenzaA__AHZ40348

SEQ ID NO: 153404 - RNA, 1410 nt, Artificial Sequence; identical to SEQ ID NO: 151402
  derived and/or modified CDS sequence (opt3) from neuraminidase__InfluenzaA__AHZ40360

SEQ ID NO: 153405 - RNA, 1410 nt, Artificial Sequence
  derived and/or modified CDS sequence (opt3) from neuraminidase__InfluenzaA__AHZ40372
augaaccccaaucagaagaucauuaccauaggcagcgugucccugacaaucucuacuauuugcuucuuuaugcagaucgccauucucaucacgaccgucacacuucacuucaaacaguacgaguuuaacucaccuccaaauaaccagguuaugcugugugaaccgacuauaaucgagagaaauauuaccgaaaucguguauuugacaaacaccacuauugagaaggaaaucugccccaaaccugcugaguacaggaauuggaguaagccacagugugggauaacaggauucgcacccuuuagcaaagacaacuccauucgguuaucugccgguggcgauaucuggguaacccgcgagccuuaugugucgugcgacccagauaaguguuaccaauucgcgcuggggcagggaacgacucuaaauaacguccauucaaauaacaccgugcgagaccguacacccuauagaacucuccugaugaaugaacuuggcguuccuuuucaccuggguaccaaacaggugugcauugcuuggagcaguuccucuugucaugaugggaaggccugguugcacgucugcaucacaggagacgauaagaacgcaaccgccagcuucaucuacaauggcaggcucguggacuccguaguuucauggaguaaagagauucugcggacgcaggaaagcgagugugugugcauaaacggcacuuguacagucgugaugaccgaugggucugcuuccggaaaggcagacacuaaaauccuguuuauugaggaagguaagaucgugcauacaucaacccucagcggcagugcccaacacgucgaggaaugcucuugcuauccacgcuacccggggguuagaugugugugcagggauaacuggaagggauccaaucggcccauaguagacauuaacaucaaagaucacagcaucgugucgucuuacgucuguuccggcuuagugggugacacgccucgcaagaaugacucaaguagcuccucucauugccuggauccaaacaaugaggaaggggaccacggaguuaaaggcugggcuuucgaugacggcaacgauguguggauggggcgaaccauuaaugagacaagcagacuuggauaugagacuuuuaaggucaucgaagguuggucaaaccccaaaaguaaguugcagauuaauaggcaagugauaguagaccggggcgaucguuccggguacagcggaaucuucucuguugagggcaaaucauguauuaaccgcugcuuuuauguggaacugaucagagguaggaaggaggaaaccgagguccuauggacaaguaauagcaucguggucuucugugggacuuccggcaccuacggaacaggcucuuggccugacggggccgaucucaaccugaugccaauuuga

SEQ ID NO: 153406 - RNA, 1410 nt, Artificial Sequence; identical to SEQ ID NO: 151058
  derived and/or modified CDS sequence (opt3) from neuraminidase__InfluenzaA__AHZ40384

SEQ ID NO: 153407 - RNA, 1410 nt, Artificial Sequence; identical to SEQ ID NO: 150194
  derived and/or modified CDS sequence (opt3) from neuraminidase__InfluenzaA__AHZ40396

SEQ ID NO: 153408 - RNA, 1410 nt, Artificial Sequence; identical to SEQ ID NO: 150194
  derived and/or modified CDS sequence (opt3) from neuraminidase__InfluenzaA__AHZ40408

SEQ ID NO: 153409 - RNA, 1410 nt, Artificial Sequence; identical to SEQ ID NO: 150194
  derived and/or modified CDS sequence (opt3) from neuraminidase__InfluenzaA__AHZ40420

SEQ ID NO: 153410 - RNA, 1410 nt, Artificial Sequence
  derived and/or modified CDS sequence (opt3) from neuraminidase__InfluenzaA__AHZ40432
augaaccccaaucagaagaucauuaccauaggcagcgugucccugacaaucucuacuauuugcuucuuuaugcaaaucgccauucucaucacgaccgucacacuucacuucaaacaguacgaguuuaacucaccuccaaauaaccagguuaugcugugugaaccgacuauaaucgagagaaauauuaccgaaaucguguauuugacaaacaccacuauugagaaggaaaucugccccaaaccugcugaguacaggaauuggaguaagccacagugugacauaacaggguucgcacccuuuagcaaagauaacuccauucgguuaucugccggaggugacaucuggguaacccgcgagccuuaugugucgugcgauccagacaaguguuaccaauucgcgcugggccaggggacgacucuaaauaacguccauucaaauaacaccgugcgagaucguacacccuauagaacucuccugaugaaugaacuuggaguuccuuuucaccugggcaccaaacaggugugcauugcuuggagcaguuccucuugucaugacgguaaggccugguugcacgucugcaucacaggggaugacaagaacgcaaccgccagcuucaucuacaauggaaggcucguggauuccguaguuucauggaguaaagagauucugcggacgcaggaaagcgagugugugugcauaaacggcacuuguacagucgugaugaccgacggcucugcuuccgggaaggcagauacuaaaauccuguuuauugaggaaggaaagaucgugcauacaucaacccucagcgguagugcccaacacgucgaggaaugcucuugcuauccacgcuacccgggcguuagaugugugugcagggacaacuggaagggguccaaucggcccauaauugauaucaacaucaaagaccacagcauuguaucgcgcuacguguguucuggauuagucggcgacacgccucgaaagaaugauuccucaaguagcucccauugccuggacccaaacaaugaggaaggugggcacggagugaaaggcugggcuuucgaugacggcaacgauguuuggauggggagaaccaucaaugagacaucuaggcuuggauaugagacuuuuaaggugauugaagguuggagcaaccccaaaucaaaguugcagauaaaucggcaggucaucguggaccguggcgaucgcaguggguacuccggaauuuucagcguagagggcaaaucuuguaucaacagaugcuuuuauguugaacugaucaggggucggaaggaggaaaccgaggugcuauggacaucaaauaguauugucguguucugugggacuagcggcaccuacggaacaggcuccuggccugacggggccgaucucaaccugaugccaauauga

SEQ ID NO: 153411 - RNA, 1410 nt, Artificial Sequence; identical to SEQ ID NO: 150194
  derived and/or modified CDS sequence (opt3) from neuraminidase__InfluenzaA__AHZ40444

SEQ ID NO: 153412 - RNA, 1410 nt, Artificial Sequence
  derived and/or modified CDS sequence (opt3) from neuraminidase__InfluenzaA__AHZ40456
augaaccccaaucagaagaucauuaccauaggcagcgugucccugacaaucucuacuauuugcuucuuuaugcaaaucgccauucucaucacgaccgucacacuucacuucaaacaguacgaguuuaacucaccuccaaauaaccagguuaugcugugugaaccgacuauaaucgagagaaauauuaccgaaaucguguauuugacaaacaccacuauugagaaggaaaucugccccaaaccugcugaguacaggaauuggaguaagccacagugugacauaacaggguucgcacccuuuagcaaagauaacuccauucgguuaucugccggaggugacaucuggguaacccgcgagccuuaugugucgugcgauccagacaaguguuaccaauucgcgcugggccaggggacgacucuaaauaacaugcauucaaauaacaccguccgagaucguacacccuauagaacucuccugaugaaugaacuuggagugccuuuucaccugggcaccaagcagguuugcauugcuuggagcaguuccucuugucaugacgguaaagccugguugcacgugugcaucacaggggaugacaagaacgcaaccgccagcuucaucuacaauggaaggcucgucgauuccgugguaucauggaguaaagagauucugcggacgcaggaaagcgaguguguuugcauaaacggcacuuguacaguggucaugaccgacggcucugcuuccgggaaggcagauacuaaaauccuguuuauugaggaaggaaagaucgugcauacaucaacccucagcgguagugcccaacacguggaggaaugcucuugcuauccacgcuacccgggcgucagauguguuugcagggacaacuggaagggguccaaucggcccauaguggauauuaacaucaaagaccacagcaucguaucgucuuacguguguuccggauuagucggcgacacgccucgcaagaaugauucaaguagcuccucucauugccuggacccaaacaaugaggaaggugggcacggagugaaaggcugggcuuucgaugacggcaacgauguuuggauggggcgaaccauuaaugagacaagcagacuuggauaugagacuuuuaaggugaucgaagguuggucaaaccccaaaaguaaguugcagauuaauaggcaggucauaguggaccggggcgaucguuccggguacagcggaaucuucucuguagagggcaaaucauguauuaaccgcugcuuuuauguugaacugaucagagguaggaaggaggaaaccgaggugcuauggacaaguaauagcaucgucguguucugugggacuuccggcaccuacggaacaggcucuuggccugacggggccgaucucaaccugaugccaauuuga

SEQ ID NO: 153413 - RNA, 1410 nt, Artificial Sequence
  derived and/or modified CDS sequence (opt3) from neuraminidase__InfluenzaA__AHZ40468
augaaccccaaucagaagaucauuaccauaggcagcgugucccugacaaucucuacuauuugcuucuuuaugcagaucgccauucucaucacgaccgucacacuucacuucaaacaguacgaguuuaacucaccuccaaauaaccagguuaugcugugugaaccgacuauaaucgagagaaauauuaccgaaaucguguauuugacaaacaccacuauugagaaggaaaucugccccaaaccugcugaguacaggaauuggaguaagccacagugugggauaacaggauucgcacccuuuagcaaagacaacuccauucgguuaucugccgguggcgauaucuggguaacccgcgagccuuaugugucgugcgacccagauaaguguuaccaauucgcgcuggggcagggaacgacucuaaauaacguccauucaaauaacaccgugcgagaccguacacccuauagaacucuccugaugaaugaacuuggcguuccuuuucaccuggguaccaaacaggugugcauugcuuggagcaguuccucuugucaugaugggaaggccugguugcacgucugcaucacaggaaacgacaagaaugcaaccgccagcuucaucuacaacggcaggcucguggauuccguaguuucauggaguaaagagauucugcggacgcaggaaagcgagugugugugcauaaacggcacuuguacagucgugaugaccgacgggucugcuuccggaaaggcagauacuaaaauccuguuuauugaggaagguaagaucgugcauacaucaacccucagcggcagugcccaacacgucgaggaaugcucuugcuauccacgcuacccggggguuagaugugugugcagggacaauuggaagggauccaaccggcccauaguagauauuaauaucaaagaccacagcaucgugucgucuuacgucuguuccggcuuagugggugauacgccucgcaagaacgacucaaguagcuccucucauugccuggacccaaauaacgaggaagggggacacggcguuaaaggcugggcuuucgaugacgggaaugauguguggaugggacgaaccauuaacgagacaagcagacuugguuaugagacuuuuaaggucaucgaaggcuggucaaaucccaaaaguaaguugcagauuaacaggcaagugauaguagaccguggggaucgguccggauacagcggcaucuucucuguugaggguaaaucauguauuaaucgcugcuuuuauguggaacugaucagagggaggaaggaggaaaccgagguccuauggacaaguaacagcaucguggucuucuguggcacuuccggaaccuacggcacagggucuuggccugacggagccgaucucaaucugaugccaauuuga

SEQ ID NO: 153414 - RNA, 1410 nt, Artificial Sequence; identical to SEQ ID NO: 151402
  derived and/or modified CDS sequence (opt3) from neuraminidase__InfluenzaA__AHZ40480

SEQ ID NO: 153415 - RNA, 1410 nt, Artificial Sequence; identical to SEQ ID NO: 152840
  derived and/or modified CDS sequence (opt3) from neuraminidase__InfluenzaA__AHZ40492

SEQ ID NO: 153416 - RNA, 1410 nt, Artificial Sequence; identical to SEQ ID NO: 150194
  derived and/or modified CDS sequence (opt3) from neuraminidase__InfluenzaA__AHZ40503

SEQ ID NO: 153417 - RNA, 1410 nt, Artificial Sequence; identical to SEQ ID NO: 150194
  derived and/or modified CDS sequence (opt3) from neuraminidase__InfluenzaA__AHZ40515

SEQ ID NO: 153418 - RNA, 1410 nt, Artificial Sequence
  derived and/or modified CDS sequence (opt3) from neuraminidase__InfluenzaA__AHZ40527
augaaccccaaucagaagaucauuaccauaggcagcgugucccugacaaucucuacuaugugcuucuuuaugcagauugccauccucauuacgaccgucacacuucacuucaaacaguacgaguuugacucaccuccaaacaaucagguuaugcugugugaaccgacuaucauagagagaaacaucaccgaaauuguguauuugacaaauaccacuaucgagaaggaaauuugccccaaaccugcugaguacaggaacuggaguaagccacagugugggaucacaggauucgcacccuuuagcaaagauaauuccauacgguuaucugccgguggcgacauuuggguaacccgcgagccuuaugugucgugcgauccagacaaguguuaccaauucgcgcuggggcagggaacgacucuaaacaauguccauucaaacaauaccgugcgagaucguacacccuauagaacucuccugaugaacgaacuuggcguuccuuuucaccuggguaccaaacaggugugcaucgcuuggagcaguuccucuugucaugacgggaaggccugguugcacgucugcauuacaggagaugacaagaaugcaaccgccagcuucaucuacaacggcaggcucguggauuccguaguuucauggaguaaagagauccugcggacgcaggaaagcgagugugugugcauuaauggcacuuguacagucgugaugaccgacgggucugcuuccggaaaggcagauacuaaaauacuguuuaucgaggaagguaagauugugcauacaucaacccucagcggcagugcccaacacgucgaggaaugcucuugcuauccacgcuacccggggguuagaugugugugcagggacaacuggaagggauccaaccggcccaucguagauauaaauauuaaagaccacagcaucgugucgucuuacgucuguuccggcuuagugggugacacgccucgcaagaacgauucaaguagcuccucucauugccuggacccaaauaacgaggaagggggacacggcguuaaaggcugggcuuucgaugacgggaaugauguguggaugggacgaaccaucaacgagacaagcagacuugguuaugagacuuuuaaggucauugaaggcuggucaaaucccaaaaguaaguugcagaucaacaggcaagugauuguagaccguggggaucgguccggauacagcggcauauucucuguugaggguaaaucauguaucaaucgcugcuuuuauguggaacugauuagagggaggaaggaggaaaccgagguccuauggacaaguaacagcaucguggucuucuguggcacuuccggaaccuacggcacagggucuuggccugacggagccgaucucaaucugaugccaaucuga

SEQ ID NO: 153419 - RNA, 1410 nt, Artificial Sequence
  derived and/or modified CDS sequence (opt3) from neuraminidase__InfluenzaA__AHZ40539
augaaccccaaucagaagaucauuaccauaggcagcgugucccugacaaucucuacuauuugcuucuuuaugcagaucgccauucucaucacgaccgucacacuucacuucaaacaguacgaguuuaacucaccuccaaauaaccagguuaugcugugugaaccgacuauaaucgagagaaauauuaccgaaaucguguauuugacaaacaccacuauugagaaggaaaucugccccaaaccugcugaguacaggaauuggaguaagccacagugugggauaacaggauucgcacccuuuagcaaagacaacuccauucgguuaucugccgguggcgauaucuggguaacccgcgagccuuaugugucgugcgacccagauaaguguuaccaauucgcgcuggggcagggaacgacucuaaauaacguccauucaaauaacaccgugcgagaccguacacccuauagaacucuccugaugaaugaacuuggcguuccuuuucaccuggguaccaaacaggugugcauugcuuggagcaguuccucuugucaugaugggaaggccugguugcacgucugcaucacaggagacgauaagaacgcaaccgccagcuucaucuacaauggcaggcucguggacuccguaguuucauggaguaaagagauucugcggacgcaggaaagcgagugugugugcauaaacggcacuuguacagucgugaugaccgaugggucugcuuccggaaaggcagacacuaaaauccuguuuauugaggaagguaagaucgugaacacaucaacccucagcggcagugcccaacaugucgaggaaugcucuugcuauccacgcuacccggggguuagaugugugugcagggauaauuggaagggauccaaccggcccauaguagacauuaauaucaaagaucacagcaucgugucgucuuacgucuguuccggcuuagugggugacacgccucgcaagaacgacucaaguagcuccucucacugccuggauccaaauaacgaggaagggggacauggcguuaaaggcugggcuuucgacgaugggaaugacguguggaugggacgaaccauuaacgagacaagcagacuugguuaugagacuuuuaaggucaucgaaggcuggucaaaucccaaaaguaaguugcagauuaacaggcaagugauaguagaucguggggaccgguccggauacagcggcaucuucucuguugaggguaaaucauguauuaaucgcugcuuuuauguggaacugaucagagggaggaaggaggaaaccgagguccuauggacaaguaacagcaucguggucuucuguggcacuuccggaaccuacggcacagggucuuggccugauggagccgaccucaaucugaugccaauuuga

SEQ ID NO: 153420 - RNA, 1410 nt, Artificial Sequence; identical to SEQ ID NO: 150194
  derived and/or modified CDS sequence (opt3) from neuraminidase__InfluenzaA__AHZ40551

SEQ ID NO: 153421 - RNA, 1410 nt, Artificial Sequence
  derived and/or modified CDS sequence (opt3) from neuraminidase__InfluenzaA__AHZ40563
augaaccccaaucagaagaucauuaccauaggcagcgugucccugacaaucucuacugucugcuucuuuaugcaaauugccauccucauuacgaccguuacacuucacuucaaacaguacgaguuuaacucaaguccuaauaaccaggugaugcugugugaaccaacuaucauagagagaaauaucaccgaaauuguauauuugacaaacaccacuaucgagaaggaaauuugcccgaaacccgcugaguacaggaauuggagcaagccucagugugggaucacaggauucgcaccauuuuccaaagacaacucuauacgguuaucggccgguggcgauauuugggugacccgcgagcccuaugucucaugcgacccugauaaguguuaccaauucgcgcuggggcagggaacgacucuaaauaacgugcauagcaauaacaccguucgagaccguacaccauauagaacucuccugaugaaugaacuuggcgugcccuuucaccuggguaccaagcaggucugcaucgcuuggaguuccucuagcugucaugaugggaaagccugguugcacgugugcauuacaggagacgauaagaacgcaaccgccuccuucaucuacaauggcaggcucguagacucaguugugaguuggagcaaagagauccugcggacgcaggaaucugagugugucugcauuaacggcacuuguacaguggugaugaccgauggguccgcuucaggaaaggcagacacuaaaauacuguuuaucgaggaagguaagauuguccauacaagcacccucaguggcucugcccaacacguugaggaaugcuccugcuauccucgcuacccaggggugagauguguaugcagggauaacuggaagggaagcaaucggccgaucguggacauaaacauuaaagaucacucgaucgucucuuccuacguguguucaggcuuaguuggugacacgccccgcaagaaugacaguagcuccucuagccauugccuggauccuaacaaugaggaagggggacacggcgugaaaggcugggcuuucgacgaugggaacgacgucuggaugggacgaaccaucaaugagacaucaagacuugguuaugagacuuuuaaggugauugaaggcuggaguaacuccaaaagcaaguugcagaucaauaggcagguaauuguugaucguggggaccggucuggauacucaggcauauucaguguggaggguaaaagcuguaucaaccgcugcuuuuaugucgaacugauuagagggaggaaggaggaaaccgaggugcuauggacauccaauucuaucgucguguucuguggcacuucgggaaccuacggcacagggagcuggccagauggagccgaccucaaccugaugcccaucuga

SEQ ID NO: 153422 - RNA, 1410 nt, Artificial Sequence
  derived and/or modified CDS sequence (opt3) from neuraminidase__InfluenzaA__AHZ40575
augaaccccaaucagaagaucauuaccauaggcagcgugucccugacaaucucuacuauuugcuucuuuaugcagaucgccauucucaucacgaccgucacacuucacuucaaacaguacgaguuuaacucaccuccaaauaaccagguuaugcugugugaaccgacuauaaucgagagaaauauuaccgaaaucguguauuugacaaacaccacuauugagaaggaaaucugccccaaaccugcugaguacaggaauuggaguaagccacagugugggauaacaggauucgcacccuuuagcaaagacaacuccauucgguuaucugccgguggcgauaucuggguaacccgcgagccuuaugugucgugcgacccagauaaguguuaccaauucgcgcuggggcagggaacgacucuaaauaacguccauucaaauaacaccgugcgagaccguacacccuauagaacucuccugaugaaugaacuuggcguuccuuuucaccuggguaccaaacaggugugcauugcuuggagcaguuccucuugucaugaugggaaggccugguugcacgucugcaucacaggagacgauaagaacgcaaccgccagcuucaucuacaauggcaggcucguggacuccguaguuucauggaguaaagagauucugcggacgcaggaaagcgagugugugugcauaaacggcacuuguacagucgugaugaccgaugggucugcuuccggaaaggcagacacuaaaauccuguuuauugaggaagguaagaucgugcauacaucaacccucagcggcagugcccaacacgucgaggaaugcucuugcuauccacgcuacccggggguuagaugugugugcagggauaacuggaagggauccaaucggcccauaguagacauuaacaucaaagaucacagcaucgugucgucuuacgucuguuccggcuuagugggugacacgccucgcaagaaugacucaaguagcuccucucauugccuggauccaaacaaugaggaagggggacacggcguuaaaggcugggcuuucgacgaugggaacgacguguggaugggacgaaccauuaaugagacaagcagacuugguuaugagacuuuuaaggucaucgaaggcuggucaaaccccaaaaguaaguugcagauuuccaggcaagugauaguagaucguggggaccggagcggauacucuggcaucuucucaguugaggguaaaaguuguauuaaucgcugcuuuuauguggaacugaucagagggaggaaggaggaaaccgagguccuauggacaagcaacuccaucguggucuucuguggcacuucuggaaccuacggcacagggucguggccugauggagccgaccucaaucugaugccaauuuga

SEQ ID NO: 153423 - RNA, 1410 nt, Artificial Sequence; identical to SEQ ID NO: 153141
  derived and/or modified CDS sequence (opt3) from neuraminidase__InfluenzaA__AHZ40586

SEQ ID NO: 153424 - RNA, 1410 nt, Artificial Sequence
  derived and/or modified CDS sequence (opt3) from neuraminidase__InfluenzaA__AHZ40598
augaaccccaaucagaagaucauuaccauaggcagcgugugcaugacaaucgggauggccaaccugauucuccaaaucggaaauauuaucuccauauggaucucucacucaauucaggucgguaaccagagucagaucgagacuuguaaucaaagcguuauuacguacgaaaacaauaccugggugaaccagacauauguaaauaucuccaacacuaauuucgcugcaggccagccuguggucucugugaaacuugccgggaacucgucacugugcccaguuagcggaugggcgauauacaguaaggacaauuccgugagaauuggcucuaaaggugaugucuuugugaucagggagccguucauuagcuguucccccuuggaaugccggaccuuuuucuuaacacagggggcucugcuaaacgacaagcauucaaauggaaccaucaaagaucgcaguccuuaucgaacucucaugagcuguccaaucggcgagguacccucuccuuacaacucccguuuugaaucaguugccuggagcgcaagugccugccacgacggcauuaacuggcugacaauagggaucucuggaccagauuccggugcuguggcaguccuuaaguauaauggcauuaucaccgacacgauaaagagcuggagaaacgauauucugaggacucaagagucggagugugccugcgugaaugggucuuguuucaccaucaugacagacggacccuccgauggccaggcuucauacaaaaucuuucggauugaaaaggguaaaaucgugaagagugucgagaugaacgccccuaauuaucauuacgaagagugcagcuguuacccagacuccucugagauuacuugcguuugccgcgauaacuggcacgggagcaauagaccgugggugucauucaaccagaauuuggaauaucagauaggauacaucuguaguggcauuuuuggcgacaaccccaggccuaaugauaaaaccggguccugcggaccaguaagcucuaacggugcgaauggcgugaagggguucucauuuaaguauggaaacggcgucuggaucggucggacaaaaaguaucagcucccgcaagggguucgagaugauuugggaccccaauggcuggaccggaacggacaacaacuuuucuauaaaacaagauaucgugggcauuaaugaauggucgggguacagcggauccuucguucagcauccugagcucacuggucuggacuguauccgaccaugcuucuggguggaacugauuagaggcaggcccaaggagaacacaaucuggaccucagggaguucuaucagcuuuuguggagucaauuccgauacugugggcuggucauggccggacggugcagagcucccuuucacaauagauaaauga

SEQ ID NO: 153425 - RNA, 1410 nt, Artificial Sequence; identical to SEQ ID NO: 150194
  derived and/or modified CDS sequence (opt3) from neuraminidase__InfluenzaA__AHZ40609

SEQ ID NO: 153426 - RNA, 1410 nt, Artificial Sequence; identical to SEQ ID NO: 151423
  derived and/or modified CDS sequence (opt3) from neuraminidase__InfluenzaA__AHZ40629

SEQ ID NO: 153427 - RNA, 1410 nt, Artificial Sequence; identical to SEQ ID NO: 151405
  derived and/or modified CDS sequence (opt3) from neuraminidase__InfluenzaA__AHZ40641

SEQ ID NO: 153428 - RNA, 1410 nt, Artificial Sequence
  derived and/or modified CDS sequence (opt3) from neuraminidase__InfluenzaA__AHZ40653
augaaccccaaucagaagaucauuaccauaggcagcgugucccugacaaucucuacuauuugcuucuuuaugcagaucgccauucucaucacgaccgucacacuucacuucaaacaguacgaguuuaacucaccuccaaauaaccagguuaugcugugugaaccgacuauaaucgagagaaauauuaccgaaaucguguauuugacaaacaccacuauugagaaggaaaucugccccaaaccugcuggguacaggaauuggaguaagccacaguguggaauaacagguuucgcacccuuuagcaaagacaacuccauucgguuaucugccggcggggauaucuggguaacccgcgagccuuaugugucgugcgacccagauaaguguuaccaauucgcgcugggacagggcacgacucuaaauaacguccauucaaauaacaccgugcgagaccguacacccuauagaacucuccugaugaaugagcuugguguuccuuuucaccuggggaccaaacaggugugcauugcuuggagcaguuccucuugucaugauggaaaggccugguugcacgucugcaucacaggcgacgauaagaacgcaaccgccagcuucaucuacaauggcaggcucguggacuccguaguuucauggaguaaagaaauucugcggacgcaggagagcgaaugugugugcauaaacgggacuuguacagucgugaugaccgauggaucugcuuccgguaaggcagacacuaaaauccuguuuauugaggagggcaagaucgugcauacaucaacccucagcgggagugcccaacacgucgaagagugcucuugcuauccacgcuacccgggaguuagaugugugugcagggauaacuggaagggcuccaaucggcccauaguagacauuaacaucaaagaucacagcaucgugucgucuuacgucuguuccgguuuagugggggacacgccucgcaagaaugacucaaguagcuccucucauugccuggauccaaacaaugaagagggaggccacggcguuaaagggugggcuuucgacgauggaaacgacguguggaugggucgaaccauuaaugaaacaagcagacuuggcuaugagacuuuuaaggucaucgagggguggucaaaccccaaaaguaaguugcagauuaauaggcaagugauaguagaucggggagaccguuccggcuacagcgguaucuucucuguugaagggaaaucauguauuaaccgcugcuuuuauguggagcugaucagaggcaggaaggaagagaccgaaguccuauggacaaguaauagcaucguggucuucuguggaacuuccggcaccuacgggacaggaucuuggccugauggugccgaccucaaccugaugccaauuuga

SEQ ID NO: 153429 - RNA, 1410 nt, Artificial Sequence; identical to SEQ ID NO: 151423
  derived and/or modified CDS sequence (opt3) from neuraminidase__InfluenzaA__AHZ40665

SEQ ID NO: 153430 - RNA, 1410 nt, Artificial Sequence; identical to SEQ ID NO: 151423
  derived and/or modified CDS sequence (opt3) from neuraminidase__InfluenzaA__AHZ40677

SEQ ID NO: 153431 - RNA, 1410 nt, Artificial Sequence; identical to SEQ ID NO: 150194
  derived and/or modified CDS sequence (opt3) from neuraminidase__InfluenzaA__AHZ40689

SEQ ID NO: 153432 - RNA, 1410 nt, Artificial Sequence
  derived and/or modified CDS sequence (opt3) from neuraminidase__InfluenzaA__AHZ40713
augaaccccaaucagaagaucauuaccauaggcagcgugucccugacaaucucuacuauuugcuucuuuaugcagaucgccauucucaucacgaccgucacacuucacuucaaacaguacgaguuuaacucaccuccaaauaaccagguuaugcugugugaaccgacuauaaucgagagaaauauuaccgaaaucguguauuugacaaacaccacuauugagaaggaaaucugccccaaaccugcugaguacaggaauuggaguaagccacagugugggauaacaggauucgcacccuuuagcaaagacaacuccauucgguuaucugccgguggcgauaucuggguaacccgcgagccuuaugugucgugcgacccagauaaguguuaccaauucgcgcuggggcagggaacgacucuaaauaacguccauucaaauaacaccgugcgagaccguacacccuauagaacucuccugaugaaugaacuuggcguuccuuuucaccuggguaccaaacaggugugcauugcuuggagcaguuccucuugucaugaugggaaggccugguugcacgucugcaucacaggagacgauaagaacgcaaccgccagcuucaucuacaauggcaggcucguggacuccguaguuucauggaguaaagagauucugcggacgcaggaaagcgagugugugugcauaaacggcacuuguacagucgugaugaccgaugggucugcuuccggaaaggcagacacuaaaauccuguuuauugaggaagguaagaucgugcauacaucaacccucagcggcagugcccaacacgucgaggaaugcucuugcuauccacgcuacccggggguuagaugugugugcagggauaacuggaagggauccaaucggcccauaguagacauuaacaucaaagaucacagcaucgugucgucuuacgucuguuccggcuuagugggugacacgccucgcaagaaugacucaaguagcuccucucauugccuggauccaaacaaugaggaagggggacacggcguuaaaggcugggcuuucgacgaugggaacgacguguggaugggacgaaccauuaaugagacaagcagacuugguuaugagacuuuuaaggucaucgaaggcuggucaaaccccaaaaguaaguugcagauuaauaggcaagugauaguagaucguggggacaaauccggauacagcggcaucuucucuguugaggguaagucauguauuaaccggugcuuuuauguggaacugauccgcgggagaaaggaggaaaccgagguccuauggacaaguaauagcaucguggucuucuguggcacuuccggaaccuacggcacagggucuuggccugauggagccgaccucaaccugaugccaauuuga

SEQ ID NO: 153433 - RNA, 1410 nt, Artificial Sequence
  derived and/or modified CDS sequence (opt3) from neuraminidase__InfluenzaA__AHZ40725
augaaccccaaucagaagaucauuaccauaggcagcgugucccugacaaucucuacuauuugcuucuuuaugcagaucgccauucucaucacgaccgucacacuucacuucaaacaguacgaguuuaacucaccuccaaauaaccagguuaugcugugugaaccgacuauaaucgagagaaauauuaccgaaaucguguauuugacaaacaccacuauugagaaggaaaucugccccaaaccugcugaguacaggaauuggaguaagccacagugugggauaacaggauucgcacccuuuagcaaagacaacuccauucgguuaucugccgguggcgauaucuggguaacccgcgagccuuaugugucgugcgacccagauaaguguuaccaauucgcgcuggggcagggaacgacucuaaauaacguccauucaaauaacaccgugcgagaccguacacccuauagaacucuccugaugaaugaacuuggcguuccuuuucaccuggguaccaaacaggugugcauugcuuggagcaguuccucuugucaugaugggaaggccugguugcacgucugcaucacaggagacgauaagaacgcaaccgccagcuucaucuacaauggcaggcucguggacuccguaguuucauggaguaaagagauucugcggacgcaggaaagcgagugugugugcauaaacggcacuuguacagucgugaugaccgaugggucugcuuccggaaaggcagacacuaaaauccuguuuauugaggaagguaagaucgugcauacaucaacccucagcggcagugcccaacacgucgaggaaugcucuugcuauccacgcuacccggggguuagaugugugugcagggauaacuggaagggauccaaucggcccauaguagacauuaacaucaaagaucacagcaucgugucgggcuacgucuguucugguuuagugggggacacgccucgcaagaaugacuccucaaguagcucccauugccuggauccaaacaaugaggaaggaggccacggcguuaaagggugggcuuucgacgauggaaacgacguguggaugggucgaaccauuaaugagacaucuagacuuggcuaugagacuuuuaaggucaucgaaggguggagcaaccccaaaucaaaguugcagauuaauaggcaagugauaguagaucggggagaccguaguggcuacuccgguaucuucagcguugaggggaaaucuuguauuaaccgcugcuuuuauguggaacugaucagaggcaggaaggaggaaaccgagguccuauggacaucaaauaguaucguggucuucuguggaacuagcggcaccuacgggacaggauccuggccugauggugccgaccucaaccugaugccaauuuga

SEQ ID NO: 153434 - RNA, 1410 nt, Artificial Sequence; identical to SEQ ID NO: 151412
  derived and/or modified CDS sequence (opt3) from neuraminidase__InfluenzaA__AHZ40737

SEQ ID NO: 153435 - RNA, 1410 nt, Artificial Sequence
  derived and/or modified CDS sequence (opt3) from neuraminidase__InfluenzaA__AHZ40749
augaaccccaaucagaagaucauuaccauaggcagcgugucccugacaaucucuacuauuugccucuucaugcagaucgccauucuuaucacgaccgucacacugcacuuuaaacaguacgaguucaacucaccuccaaauaaccagguuauguugugugaaccgacuauaaucgagagaaauauuaccgaaaucguguauuuaacaaacaccacuauugagaaggaaaucugccccaaaccugcugaguacaggaauuggaguaagccacagugugggauaacaggauuugcacccuucagcaaagacaacuccauucggcugucugccgguggcgauaucuggguaacccgcgagccuuaugugucgugcgacccagauaaguguuaccaauuugcgcuagggcagggaacgacucucaauaacguccauucaaauaacaccgugcgagaccguacacccuauagaacucugcuuaugaaugaacugggcguuccuuuccacuuggguaccaaacaggugugcauugcuuggagcaguuccucuugucaugaugggaaggccuggcuccacgucugcaucacaggagacgauaagaacgcaaccgccagcuuuaucuacaauggcaggcugguggacuccguaguuucauggaguaaagagauucugcggacgcaggaaagcgagugugugugcauaaacggcacuuguacagucgugaugaccgaugggucugcuuccggaaaggcagacacuaaaauccucuucauugaggaagguaagaucgugcauacaucaaccuuaagcggcagugcccaacacgucgaggaaugcucuugcuauccacgcuacccggggguuagaugugugugcagggauaacuggaagggauccaaucggcccauaguagacauuaacaucaaagaucacagcaucgugucgucuuacgucuguuccggccuggugggugacacgccucgcaagaaugacucaaguagcuccucucauugccuugauccaaacaaugaggaagggggacacggcguuaaaggcugggcuuuugacgaugggaacgacguguggaugggacgaaccauuaaugagacaagcagauuggguuaugagacuuucaaggucaucgaaggcuggucaaaccccaaaaguaagcugcagauuaauaggcaagugauaguagaucguggggaccgguccggauacagcggcaucuuuucuguugaggguaaaucauguauuaaccgcugcuucuauguggaacuaaucagagggaggaaggaggaaaccgagguccucuggacaaguaauagcaucguggucuuuuguggcacuuccggaaccuacggcacagggccuuggccagauggagccgaccugaaccuuaugcccauuuga

SEQ ID NO: 153436 - RNA, 1410 nt, Artificial Sequence
  derived and/or modified CDS sequence (opt3) from neuraminidase__InfluenzaA__AHZ40761
augaaccccaaucagaagaucauuaccauaggcagcgugucccugacaaucucuacuauuugcuucuuuaugcaaaucgccauucucaucacgaccgucacacuucacuucaaacaguacgaguuuaacucaccuccaaauaaccagguuaugcugugugaaccgacuauaaucgagagaaauauuaccgaaaucguguauuugacaaacaccacuauugagaaggaauuaugccccaaacuggcugaguacaggaauuggaguaagccucagugugacaucacaggguucgcaccauuuagcaaagauaacuccauacggcuaucugccggaggugacauuuggguaacccgcgagcccuaugugucgugcgauccugacaaguguuaccaauucgcgcucggccaggggacgacucugaauaacguccauucaaauaacaccgugcgagaucguacaccauauagaacucuucugaugaaugaauugggaguucccuuucaccucggcaccaaacaggugugcauggcuuggagcaguuccucuugucaugacgguaaggccuggcugcacgucugcaucacaggggaugacaagaacgcaaccgccagcuucauuuacaauggaaaacugguggauuccguaguuucauggaguaaggagauccucaggacgcaggaaagcgagugugugugcaucaacggcacuuguacagucgugaugaccgacggcucugcuuccgggaaagcagauacuaagauuuuauuuauagaggaaggaaagaucgugcauacaucaacccugagcgguagugcccaacacgucgaggaaugcucuugcuauccucgguacccaggcguucgcugugugugcagagacaacuggaaaggguccaauaggccgauuguagauaucaacauaaaggaccacagcauugugucgucuuacgucuguuccggacuugugggcgacacgccccggaaaaccgauucaaguagcuccucucauugcuuggacccuaauaacgaggaaggugggcacggaguuaagggcugggcuuucgaugacggcaaugauguguggauggggcgcacaaucaacgagacuagccgacugggauaugagaccuuuaaagucaucgaagguuggucaaauccaaagaguaaacuacagauuaacagacaggugaucguagacaggggcgaucgguccggguacagcggaauuuucucuguugagggcaagucauguauaaaucguugcuuuuauguggaacucauccgcgguagaaagaaagagacagccguccuguggaccaguaacagcauuguggucuucugugggacuuccggcacauacggaaccggcucuuggcccgacggggcggaucuuaaucugaugccuaucuga

SEQ ID NO: 153437 - RNA, 1410 nt, Artificial Sequence; identical to SEQ ID NO: 150194
  derived and/or modified CDS sequence (opt3) from neuraminidase__InfluenzaA__AHZ40773

SEQ ID NO: 153438 - RNA, 1410 nt, Artificial Sequence; identical to SEQ ID NO: 144776
  derived and/or modified CDS sequence (opt3) from neuraminidase__InfluenzaA__AHZ40785

SEQ ID NO: 153439 - RNA, 1410 nt, Artificial Sequence; identical to SEQ ID NO: 144776
  derived and/or modified CDS sequence (opt3) from neuraminidase__InfluenzaA__AHZ40796

SEQ ID NO: 153440 - RNA, 1410 nt, Artificial Sequence; identical to SEQ ID NO: 144776
  derived and/or modified CDS sequence (opt3) from neuraminidase__InfluenzaA__AHZ40807

SEQ ID NO: 153441 - RNA, 1410 nt, Artificial Sequence; identical to SEQ ID NO: 144776
  derived and/or modified CDS sequence (opt3) from neuraminidase__InfluenzaA__AHZ40818

SEQ ID NO: 153442 - RNA, 1410 nt, Artificial Sequence; identical to SEQ ID NO: 144776
  derived and/or modified CDS sequence (opt3) from neuraminidase__InfluenzaA__AHZ40829

SEQ ID NO: 153443 - RNA, 1410 nt, Artificial Sequence; identical to SEQ ID NO: 144776
  derived and/or modified CDS sequence (opt3) from neuraminidase__InfluenzaA__AHZ40840

SEQ ID NO: 153444 - RNA, 1410 nt, Artificial Sequence; identical to SEQ ID NO: 144776
  derived and/or modified CDS sequence (opt3) from neuraminidase__InfluenzaA__AHZ40851

SEQ ID NO: 153445 - RNA, 1410 nt, Artificial Sequence; identical to SEQ ID NO: 144776
  derived and/or modified CDS sequence (opt3) from neuraminidase__InfluenzaA__AHZ40862

SEQ ID NO: 153446 - RNA, 1410 nt, Artificial Sequence; identical to SEQ ID NO: 144776
  derived and/or modified CDS sequence (opt3) from neuraminidase__InfluenzaA__AHZ40873

SEQ ID NO: 153447 - RNA, 1410 nt, Artificial Sequence; identical to SEQ ID NO: 144776
  derived and/or modified CDS sequence (opt3) from neuraminidase__InfluenzaA__AHZ40884

SEQ ID NO: 153448 - RNA, 1410 nt, Artificial Sequence; identical to SEQ ID NO: 144776
  derived and/or modified CDS sequence (opt3) from neuraminidase__InfluenzaA__AHZ40895

SEQ ID NO: 153449 - RNA, 1410 nt, Artificial Sequence; identical to SEQ ID NO: 144776
  derived and/or modified CDS sequence (opt3) from neuraminidase__InfluenzaA__AHZ40906

SEQ ID NO: 153450 - RNA, 1410 nt, Artificial Sequence; identical to SEQ ID NO: 144776
  derived and/or modified CDS sequence (opt3) from neuraminidase__InfluenzaA__AHZ40917

SEQ ID NO: 153451 - RNA, 1410 nt, Artificial Sequence; identical to SEQ ID NO: 144776
  derived and/or modified CDS sequence (opt3) from neuraminidase__InfluenzaA__AHZ40928

SEQ ID NO: 153452 - RNA, 1410 nt, Artificial Sequence; identical to SEQ ID NO: 144776
  derived and/or modified CDS sequence (opt3) from neuraminidase__InfluenzaA__AHZ40939

SEQ ID NO: 153453 - RNA, 1410 nt, Artificial Sequence; identical to SEQ ID NO: 144776
  derived and/or modified CDS sequence (opt3) from neuraminidase__InfluenzaA__AHZ40950

SEQ ID NO: 153454 - RNA, 1410 nt, Artificial Sequence; identical to SEQ ID NO: 144776
  derived and/or modified CDS sequence (opt3) from neuraminidase__InfluenzaA__AHZ40961

SEQ ID NO: 153455 - RNA, 1410 nt, Artificial Sequence; identical to SEQ ID NO: 144776
  derived and/or modified CDS sequence (opt3) from neuraminidase__InfluenzaA__AHZ40972

SEQ ID NO: 153456 - RNA, 1410 nt, Artificial Sequence; identical to SEQ ID NO: 144776
  derived and/or modified CDS sequence (opt3) from neuraminidase__InfluenzaA__AHZ40983

SEQ ID NO: 153457 - RNA, 1410 nt, Artificial Sequence; identical to SEQ ID NO: 144776
  derived and/or modified CDS sequence (opt3) from neuraminidase__InfluenzaA__AHZ40994

SEQ ID NO: 153458 - RNA, 1410 nt, Artificial Sequence; identical to SEQ ID NO: 144776
  derived and/or modified CDS sequence (opt3) from neuraminidase__InfluenzaA__AHZ41005

SEQ ID NO: 153459 - RNA, 1410 nt, Artificial Sequence; identical to SEQ ID NO: 144776
  derived and/or modified CDS sequence (opt3) from neuraminidase__InfluenzaA__AHZ41016

SEQ ID NO: 153460 - RNA, 1410 nt, Artificial Sequence; identical to SEQ ID NO: 144776
  derived and/or modified CDS sequence (opt3) from neuraminidase__InfluenzaA__AHZ41027

SEQ ID NO: 153461 - RNA, 1410 nt, Artificial Sequence; identical to SEQ ID NO: 144776
  derived and/or modified CDS sequence (opt3) from neuraminidase__InfluenzaA__AHZ41049

SEQ ID NO: 153462 - RNA, 1410 nt, Artificial Sequence; identical to SEQ ID NO: 144776
  derived and/or modified CDS sequence (opt3) from neuraminidase__InfluenzaA__AHZ41060

SEQ ID NO: 153463 - RNA, 1410 nt, Artificial Sequence; identical to SEQ ID NO: 144776
  derived and/or modified CDS sequence (opt3) from neuraminidase__InfluenzaA__AHZ41071

SEQ ID NO: 153464 - RNA, 1410 nt, Artificial Sequence; identical to SEQ ID NO: 144776
  derived and/or modified CDS sequence (opt3) from neuraminidase__InfluenzaA__AHZ41082

SEQ ID NO: 153465 - RNA, 1410 nt, Artificial Sequence; identical to SEQ ID NO: 144776
  derived and/or modified CDS sequence (opt3) from neuraminidase__InfluenzaA__AHZ41093

SEQ ID NO: 153466 - RNA, 1410 nt, Artificial Sequence; identical to SEQ ID NO: 144776
  derived and/or modified CDS sequence (opt3) from neuraminidase__InfluenzaA__AHZ41104

SEQ ID NO: 153467 - RNA, 1410 nt, Artificial Sequence; identical to SEQ ID NO: 144776
  derived and/or modified CDS sequence (opt3) from neuraminidase__InfluenzaA__AHZ41115

SEQ ID NO: 153468 - RNA, 1410 nt, Artificial Sequence; identical to SEQ ID NO: 144776
  derived and/or modified CDS sequence (opt3) from neuraminidase__InfluenzaA__AHZ41126

SEQ ID NO: 153469 - RNA, 1410 nt, Artificial Sequence; identical to SEQ ID NO: 144776
  derived and/or modified CDS sequence (opt3) from neuraminidase__InfluenzaA__AHZ41137

SEQ ID NO: 153470 - RNA, 1410 nt, Artificial Sequence; identical to SEQ ID NO: 144776
  derived and/or modified CDS sequence (opt3) from neuraminidase__InfluenzaA__AHZ41148

SEQ ID NO: 153471 - RNA, 1410 nt, Artificial Sequence; identical to SEQ ID NO: 144776
  derived and/or modified CDS sequence (opt3) from neuraminidase__InfluenzaA__AHZ41159

SEQ ID NO: 153472 - RNA, 1410 nt, Artificial Sequence; identical to SEQ ID NO: 144776
  derived and/or modified CDS sequence (opt3) from neuraminidase__InfluenzaA__AHZ41170

SEQ ID NO: 153473 - RNA, 1410 nt, Artificial Sequence; identical to SEQ ID NO: 144776
  derived and/or modified CDS sequence (opt3) from neuraminidase__InfluenzaA__AHZ41181

SEQ ID NO: 153474 - RNA, 1410 nt, Artificial Sequence; identical to SEQ ID NO: 144776
  derived and/or modified CDS sequence (opt3) from neuraminidase__InfluenzaA__AHZ41205

SEQ ID NO: 153475 - RNA, 1410 nt, Artificial Sequence; identical to SEQ ID NO: 144776
  derived and/or modified CDS sequence (opt3) from neuraminidase__InfluenzaA__AHZ41251

SEQ ID NO: 153476 - RNA, 1410 nt, Artificial Sequence; identical to SEQ ID NO: 144776
  derived and/or modified CDS sequence (opt3) from neuraminidase__InfluenzaA__AHZ41266

SEQ ID NO: 153477 - RNA, 1410 nt, Artificial Sequence; identical to SEQ ID NO: 144776
  derived and/or modified CDS sequence (opt3) from neuraminidase__InfluenzaA__AHZ41284

SEQ ID NO: 153478 - RNA, 1410 nt, Artificial Sequence; identical to SEQ ID NO: 144776
  derived and/or modified CDS sequence (opt3) from neuraminidase__InfluenzaA__AHZ41295

SEQ ID NO: 153479 - RNA, 1410 nt, Artificial Sequence; identical to SEQ ID NO: 144776
  derived and/or modified CDS sequence (opt3) from neuraminidase__InfluenzaA__AHZ41306

SEQ ID NO: 153480 - RNA, 1410 nt, Artificial Sequence; identical to SEQ ID NO: 144776
  derived and/or modified CDS sequence (opt3) from neuraminidase__InfluenzaA__AHZ41317

SEQ ID NO: 153481 - RNA, 1410 nt, Artificial Sequence; identical to SEQ ID NO: 144776
  derived and/or modified CDS sequence (opt3) from neuraminidase__InfluenzaA__AHZ41328

SEQ ID NO: 153482 - RNA, 1410 nt, Artificial Sequence; identical to SEQ ID NO: 144776
  derived and/or modified CDS sequence (opt3) from neuraminidase__InfluenzaA__AHZ41339

SEQ ID NO: 153483 - RNA, 1410 nt, Artificial Sequence; identical to SEQ ID NO: 144776
  derived and/or modified CDS sequence (opt3) from neuraminidase__InfluenzaA__AHZ41350

SEQ ID NO: 153484 - RNA, 1410 nt, Artificial Sequence; identical to SEQ ID NO: 144776
  derived and/or modified CDS sequence (opt3) from neuraminidase__InfluenzaA__AHZ41369

SEQ ID NO: 153485 - RNA, 1410 nt, Artificial Sequence; identical to SEQ ID NO: 144776
  derived and/or modified CDS sequence (opt3) from neuraminidase__InfluenzaA__AHZ41380

SEQ ID NO: 153486 - RNA, 1410 nt, Artificial Sequence; identical to SEQ ID NO: 144776
  derived and/or modified CDS sequence (opt3) from neuraminidase__InfluenzaA__AHZ41391

SEQ ID NO: 153487 - RNA, 1410 nt, Artificial Sequence; identical to SEQ ID NO: 144776
  derived and/or modified CDS sequence (opt3) from neuraminidase__InfluenzaA__AHZ41402

SEQ ID NO: 153488 - RNA, 1410 nt, Artificial Sequence; identical to SEQ ID NO: 144776
  derived and/or modified CDS sequence (opt3) from neuraminidase__InfluenzaA__AHZ41413

SEQ ID NO: 153489 - RNA, 1410 nt, Artificial Sequence; identical to SEQ ID NO: 144776
  derived and/or modified CDS sequence (opt3) from neuraminidase__InfluenzaA__AHZ41444

SEQ ID NO: 153490 - RNA, 1410 nt, Artificial Sequence; identical to SEQ ID NO: 144776
  derived and/or modified CDS sequence (opt3) from neuraminidase__InfluenzaA__AHZ41455

SEQ ID NO: 153491 - RNA, 1410 nt, Artificial Sequence; identical to SEQ ID NO: 144776
  derived and/or modified CDS sequence (opt3) from neuraminidase__InfluenzaA__AHZ41476

SEQ ID NO: 153492 - RNA, 1410 nt, Artificial Sequence; identical to SEQ ID NO: 144776
  derived and/or modified CDS sequence (opt3) from neuraminidase__InfluenzaA__AHZ41487

SEQ ID NO: 153493 - RNA, 1410 nt, Artificial Sequence; identical to SEQ ID NO: 144776
  derived and/or modified CDS sequence (opt3) from neuraminidase__InfluenzaA__AHZ41498

SEQ ID NO: 153494 - RNA, 1410 nt, Artificial Sequence; identical to SEQ ID NO: 144776
  derived and/or modified CDS sequence (opt3) from neuraminidase__InfluenzaA__AHZ41509

SEQ ID NO: 153495 - RNA, 1410 nt, Artificial Sequence; identical to SEQ ID NO: 144776
  derived and/or modified CDS sequence (opt3) from neuraminidase__InfluenzaA__AHZ41520

SEQ ID NO: 153496 - RNA, 1410 nt, Artificial Sequence; identical to SEQ ID NO: 144776
  derived and/or modified CDS sequence (opt3) from neuraminidase__InfluenzaA__AHZ41531

SEQ ID NO: 153497 - RNA, 1410 nt, Artificial Sequence; identical to SEQ ID NO: 144776
  derived and/or modified CDS sequence (opt3) from neuraminidase__InfluenzaA__AHZ41542

SEQ ID NO: 153498 - RNA, 1410 nt, Artificial Sequence; identical to SEQ ID NO: 144776
  derived and/or modified CDS sequence (opt3) from neuraminidase__InfluenzaA__AHZ41553

SEQ ID NO: 153499 - RNA, 1410 nt, Artificial Sequence; identical to SEQ ID NO: 144776
  derived and/or modified CDS sequence (opt3) from neuraminidase__InfluenzaA__AHZ41564

SEQ ID NO: 153500 - RNA, 1410 nt, Artificial Sequence; identical to SEQ ID NO: 144776
  derived and/or modified CDS sequence (opt3) from neuraminidase__InfluenzaA__AHZ41586

SEQ ID NO: 153501 - RNA, 1410 nt, Artificial Sequence; identical to SEQ ID NO: 144776
  derived and/or modified CDS sequence (opt3) from neuraminidase__InfluenzaA__AHZ41597

SEQ ID NO: 153502 - RNA, 1410 nt, Artificial Sequence; identical to SEQ ID NO: 144776
  derived and/or modified CDS sequence (opt3) from neuraminidase__InfluenzaA__AHZ41608

SEQ ID NO: 153503 - RNA, 1410 nt, Artificial Sequence; identical to SEQ ID NO: 144776
  derived and/or modified CDS sequence (opt3) from neuraminidase__InfluenzaA__AHZ41619

SEQ ID NO: 153504 - RNA, 1410 nt, Artificial Sequence; identical to SEQ ID NO: 144776
  derived and/or modified CDS sequence (opt3) from neuraminidase__InfluenzaA__AHZ41630

SEQ ID NO: 153505 - RNA, 1410 nt, Artificial Sequence; identical to SEQ ID NO: 144776
  derived and/or modified CDS sequence (opt3) from neuraminidase__InfluenzaA__AHZ41641

SEQ ID NO: 153506 - RNA, 1410 nt, Artificial Sequence; identical to SEQ ID NO: 144776
  derived and/or modified CDS sequence (opt3) from neuraminidase__InfluenzaA__AHZ41652

SEQ ID NO: 153507 - RNA, 1410 nt, Artificial Sequence; identical to SEQ ID NO: 144776
  derived and/or modified CDS sequence (opt3) from neuraminidase__InfluenzaA__AHZ41663

SEQ ID NO: 153508 - RNA, 1410 nt, Artificial Sequence; identical to SEQ ID NO: 144776
  derived and/or modified CDS sequence (opt3) from neuraminidase__InfluenzaA__AHZ41674

SEQ ID NO: 153509 - RNA, 1410 nt, Artificial Sequence; identical to SEQ ID NO: 144776
  derived and/or modified CDS sequence (opt3) from neuraminidase__InfluenzaA__AHZ41685

SEQ ID NO: 153510 - RNA, 1410 nt, Artificial Sequence; identical to SEQ ID NO: 144776
  derived and/or modified CDS sequence (opt3) from neuraminidase__InfluenzaA__AHZ41696

SEQ ID NO: 153511 - RNA, 1410 nt, Artificial Sequence; identical to SEQ ID NO: 144776
  derived and/or modified CDS sequence (opt3) from neuraminidase__InfluenzaA__AHZ41707

SEQ ID NO: 153512 - RNA, 1410 nt, Artificial Sequence; identical to SEQ ID NO: 144776
  derived and/or modified CDS sequence (opt3) from neuraminidase__InfluenzaA__AHZ41718

SEQ ID NO: 153513 - RNA, 1410 nt, Artificial Sequence; identical to SEQ ID NO: 144776
  derived and/or modified CDS sequence (opt3) from neuraminidase__InfluenzaA__AHZ41729

SEQ ID NO: 153514 - RNA, 1410 nt, Artificial Sequence; identical to SEQ ID NO: 144776
  derived and/or modified CDS sequence (opt3) from neuraminidase__InfluenzaA__AHZ41740

SEQ ID NO: 153515 - RNA, 1410 nt, Artificial Sequence; identical to SEQ ID NO: 144776
  derived and/or modified CDS sequence (opt3) from neuraminidase__InfluenzaA__AHZ41751

SEQ ID NO: 153516 - RNA, 1410 nt, Artificial Sequence; identical to SEQ ID NO: 144776
  derived and/or modified CDS sequence (opt3) from neuraminidase__InfluenzaA__AHZ41762

SEQ ID NO: 153517 - RNA, 1410 nt, Artificial Sequence; identical to SEQ ID NO: 151437
  derived and/or modified CDS sequence (opt3) from neuraminidase__InfluenzaA__AHZ42564

SEQ ID NO: 153518 - RNA, 1410 nt, Artificial Sequence; identical to SEQ ID NO: 150194
  derived and/or modified CDS sequence (opt3) from neuraminidase__InfluenzaA__AHZ42575

SEQ ID NO: 153519 - RNA, 1410 nt, Artificial Sequence
  derived and/or modified CDS sequence (opt3) from neuraminidase__InfluenzaA__AHZ42587
augaaccccaaucagaagaucauuaccauaggcagcgugucccugacaaucucuacuauuugcuucuuuaugcagaucgccauucucaucacgaccgucacacuucacuucaaacaguacgaguuuaacucaccuccaaauaaccagguuaugcugugugaaccgacuauaaucgagagaaauauuaccgaaaucguguauuugacaaacaccacuauugagaaggaaaugugccccaaaccugcugaguacaggaauuggaguaagccacagugugggaucacaggauucgcacccuuuagcaaagacaacuccauacgguuaucugccgguggcgauauuuggguaacccgcgagccuuaugugucgugcgacccagauaaguguuaccaauucgcgcuggggcagggaacgacucuaaauaacguccauucaaauaacaccgugcgagaccguacacccuauagaacucuccugaugaaugaacuuggcguuccuuuucaccuggguaccaaacaggugugcaucgcuuggagcaguuccucuugucaugaugggaaggccugguugcacgucugcauuacaggagacgauaagaacgcaaccgccagcuucaucuacaauggcaggcucguggacuccguaguuucauggaguaaagagauccugcggacgcaggaaagcgagugugugugcauuaacggcacuuguacagucgugaugaccgaugggucugcuuccggaaaggcagacacuaaaauacuguuuaucgaggaagguaagauugugcauacaucaacccucagcggcagugcccaacacgucgaggaaugcucuugcuauccacgcuacccggggguuagaugugugugcagggauaacuggaagggauccaaucggcccaucguagacauaaacauuaaagaucacagcaucgugucgucuuacgucuguuccggcuuagugggugacacgccucgcaagaaugacucaaguagcuccucucauugccuggauccaaacaaugaggaagggggacacggcguuaaaggcugggcuuucgacgaugggaacgacguguggaugggacgaaccaucaaugagacaagcagacuugguuaugagacuuuuaaggucauugaaggcuggucaaaccccaaaaguaaguugcagaucaauaggcaagugauuguagaucguggggaccgguccggauacagcggcauauucucuguugaggguaaaucauguaucaaccgcugcuuuuauguggaacugauuagagggaggaaggaggaaaccgagguccuauggacaaguaauagcaucguggucuucuguggcacuuccggaaccuacggcacagggucuuggccugauggagccgaccucaaccugaugccaaucuga

SEQ ID NO: 153520 - RNA, 1413 nt, Artificial Sequence
  derived and/or modified CDS sequence (opt3) from neuraminidase__InfluenzaA__AHZ42599
augaaccccaaucagaagaucauuaccauaggcagcgugucccugacaaucucuacuauuugcuucuuuaugcagaucgccauucucaucacgaccgucacacuucacuucaaacaguacgaguuuaacucaccuccaaagaauaaccagguuaugcugugugaaccgacuauaaucgagagaaauauuaccgaaaucguguauuugacaaacaccacuauugagaaagaaaucugccccaagccugcugaguacaggaauuggaguaaaccacagugugggauaacaggauucgcacccuuuagcaaggacaacuccauucgguuaucugccgguggcgauaucuggguaacccgcgagccuuaugugucgugcgacccagauaaguguuaccaauucgcgcuggggcagggaacgacucuaaauaacguccauucaaauaacaccgugcgagaccguacacccuauagaacucuccugaugaaugaacuuggcguuccuuuucaccuggguaccaaacaggugugcauugcuuggagcaguuccucuugucaugaugggaaggccugguugcacgucugcaucacaggagacgauaaaaacgcaaccgccagcuucaucuacaauggcaggcucguggacuccguaguuucauggaguaaggagauucugcggacgcaggaaagcgagugugugugcauaaacggcacuuguacagucgugaugaccgaugggucugcuuccgagaaagcagacacuaagauccuguuuauugaagagggaaagaucgugcauacaucaacccucagcgguagugcccaacacgucgaagagugcucuugcuauccacgcuacccgggcguuagaugugugugcagggauaacuggaaaggguccaaucggcccauaguagacauuaacaucaaggaucacagcaucgugucgucuuacgucuguuccggauuagugggcgacacgccucgcaaaaaugacucaaguagcuccucucauugccuggauccaaacaaugaagagggugggcacggaguuaagggcugggcuuucgacgauggcaacgacguguggauggggcgaaccauuaaugagacaagcagacuuggauaugaaacuuuuaaagucaucgaggguuggucaaaccccaagaguaaauugcagauuaauaggcaagugauaguagaucggggcgaccguuccggguacagcggaaucuucucuguugaaggcaagucauguauuaaccgcugcuuuuauguggagcugaucagagguaggaaggaagagaccgagguccuauggacaaguaauagcaucguggucuucugugggacuuccggcaccuacggaacaggcucuuggccugauggggccgaccucaaccugaugccaauuuga

SEQ ID NO: 153521 - RNA, 1410 nt, Artificial Sequence; identical to SEQ ID NO: 152840
  derived and/or modified CDS sequence (opt3) from neuraminidase__InfluenzaA__AHZ42611

SEQ ID NO: 153522 - RNA, 1410 nt, Artificial Sequence; identical to SEQ ID NO: 150194
  derived and/or modified CDS sequence (opt3) from neuraminidase__InfluenzaA__AHZ42622

SEQ ID NO: 153523 - RNA, 1410 nt, Artificial Sequence; identical to SEQ ID NO: 153381
  derived and/or modified CDS sequence (opt3) from neuraminidase__InfluenzaA__AHZ42634

SEQ ID NO: 153524 - RNA, 1410 nt, Artificial Sequence; identical to SEQ ID NO: 153424
  derived and/or modified CDS sequence (opt3) from neuraminidase__InfluenzaA__AHZ42646

SEQ ID NO: 153525 - RNA, 1410 nt, Artificial Sequence; identical to SEQ ID NO: 150194
  derived and/or modified CDS sequence (opt3) from neuraminidase__InfluenzaA__AHZ42657

SEQ ID NO: 153526 - RNA, 1410 nt, Artificial Sequence; identical to SEQ ID NO: 153141
  derived and/or modified CDS sequence (opt3) from neuraminidase__InfluenzaA__AHZ42669

SEQ ID NO: 153527 - RNA, 1410 nt, Artificial Sequence; identical to SEQ ID NO: 150194
  derived and/or modified CDS sequence (opt3) from neuraminidase__InfluenzaA__AHZ42681

SEQ ID NO: 153528 - RNA, 1410 nt, Artificial Sequence
  derived and/or modified CDS sequence (opt3) from neuraminidase__InfluenzaA__AHZ42693
augaaccccaaucagaagaucauuaccauaggcagcgugugcaugacaaucgggauggccaaccugauucuccaaaucggaaauauuaucuccauauggaucucucacucaauucagcuugguaaccagagucagaucgagacuuguaaucaaagcgucauuacguacgaaaacaauaccuggguuaaccagacauaugugaauaucuccaacacuaauuucgcugcaggccagucuguagugucggucaaacuggccgggaacagcagcuugugcccugugaguggaugggcgauauacuccaaggacaauucuguuagaauuggcagcaaaggugauguguuugucaucagggagccauucauuuccuguucaccguuagaaugccggaccuuuuuccugacacagggggcucuacucaacgacaagcauaguaauggaaccaucaaagaucgcagccccuaucgaacucugaugucuuguccuaucggcgaggugccaucccccuacaacucacguuuugaaagcguagccuggagugcaucugccugccacgacggcauuaacuggcuuacaauagggaucuccggaccugauagcggugcuguugcagugcugaaguauaauggcauuaucaccgacacgauaaagucguggagaaacaauauuuugaggacucaagagucugagugugccugcgucaacggguccuguuucaccaucaugacagauggaccaucagacggccaggcuaguuacaaaaucuuucggauugaaaaggguaaaaucgugaagucaguggagaugaaugcccccaacuaucauuacgaagagugcuccuguuacccugauucuagcgagauuacuugcgucugccgcgacaauuggcacgggucaaacagaccauggguuaguuucaaucagaaccucgaauaucagauaggauacaucuguuccggcauuuuuggcgauaauccgaggcccaacgacaaaaccgggagcugcggaccugugucuucaaauggugcgaacggcguaaagggguucaguuuuaaguauggaaauggcguguggaucggucggacaaaaagcaucuccucucgcaagggguucgagaugauuugggauccaaacggcuggaccggaacggacaacaauuuuucgauaaaacaagacaucgucggcauuaacgaauggagcggguacuccggaucauucgugcagcaucccgagcugacugguauggauuguauccgaccuugcuucuggguugaacugauuagaggcaggccaaaggagaauacaaucuggaccagugggucuauaaucagcuuuuguggagugaacuccgacacugucggcuggucauggcccgauggugcagagcucccguucacaauugacaaauga

SEQ ID NO: 153529 - RNA, 1410 nt, Artificial Sequence; identical to SEQ ID NO: 150194
  derived and/or modified CDS sequence (opt3) from neuraminidase__InfluenzaA__AHZ42704

SEQ ID NO: 153530 - RNA, 1410 nt, Artificial Sequence
  derived and/or modified CDS sequence (opt3) from neuraminidase__InfluenzaA__AHZ42716
augaaccccaaucagaagaucauuaccauaggcagcgugucccugacaaucucuacuauuugcuucuuuaugcagaucgccauucucaucacgaccgucacacuucacuucaaacaguacgaguuuaacucaccuccaaauaaccagguuaugcugugugaaccgacuauaaucgagagaaauauuaccgaaaucguguauuugacaaacaccacuauugagaaggaaaucugccccaaaccugcugaguacaggaauuggaguaagccacagugugggauaacaggauucgcacccuuuagcaaagacaacuccauucgguuaucugccgguggcgauaucuggguaacccgcgagccuuaugugucgugcgacccagauaaguguuaccaauucgcgcuggggcagggaacgacucuaaauaacguccauucaaauaacaccgugcgagaccguacacccuauagaacucuccugaugaaugaacuuggcguuccuuuucaccuggguaccaaacaggugugcauugcuuggagcaguuccucuugucaugaugggaaggccugguugcacgucugcaucacaggagacgauaagaacgcaaccgccagcuucaucuacaauggcaggcucguggacuccguaguuucauggaguaaagagauucugcggacgcaggaaagcgagugugugugcauaaacggcacuuguacagucgugaugaccgaugggucugcuuccggaaaggcagacacuaaaauccuguuuauugaggaagguaagaucgugcauacaucaacccucagcggcagugcccaacacgucgaggaaugcucuugcuauccacgcuacccggggguuagaugugugugcagggauaacuggaagggauccaaucggcccauaguagacauuaacaucaaagaucacagcaucgugucgucuuacgucuguuccggcuuagugggugacacgccucgcaagaaugacucaaguagcuccucucauugccuggauccaaacaaugaggaagggggacacggcguuaaaggcugggcuuucgacgaugggaacgacguguggaugggacgaaccauuaaugagacaagcagacuugguuaugagacuuuuaaggucaucgaaggcuggucaaaccccaaaaguaaguuccagauuaauaggcaagugauaguagaucguggggaccgguccggauacagcggcaucuuuucuguugaggguaaaucauguauuaaccgcugcuucuauguggaauugaucagagggaggaaggaggaaaccgagguccuguggacaaguaauagcaucguggucuucuguggcacuuccggaaccuacggcacagggucuuggccugauggagccgaccuaaaccucaugccaauuuga

SEQ ID NO: 153531 - RNA, 1410 nt, Artificial Sequence; identical to SEQ ID NO: 150194
  derived and/or modified CDS sequence (opt3) from neuraminidase__InfluenzaA__AHZ42728

SEQ ID NO: 153532 - RNA, 1410 nt, Artificial Sequence; identical to SEQ ID NO: 151437
  derived and/or modified CDS sequence (opt3) from neuraminidase__InfluenzaA__AHZ42740

SEQ ID NO: 153533 - RNA, 1410 nt, Artificial Sequence; identical to SEQ ID NO: 151405
  derived and/or modified CDS sequence (opt3) from neuraminidase__InfluenzaA__AHZ42751

SEQ ID NO: 153534 - RNA, 1410 nt, Artificial Sequence
  derived and/or modified CDS sequence (opt3) from neuraminidase__InfluenzaA__AHZ42763
augaaccccaaucagaagaucauuaccauaggcagcgugucccugacaaucucuacuauuugcuucuuuaugcaaaucgccauucucaucacgaccgucacacuucacuucaaacaguacgaguuuaacucaccuccaaauaaccagguuaugcugugugaaccgacuauaaucgagagaaauauuaccgaaaucguguauuugacaaacaccacuauugagaaggaaaucugccccaaaccugcugaguacaggaauuggaguaagccacagugugacauaacaggguucgcacccuuuagcaaagauaacuccauucgguuaucugccggaggugacaucuggguaacccgcgagccuuaugugucgugcgauccagacaaguguuaccaauucgcgcugggccaggggacgacucuaaauaacguccauucaaauaacaccgugcgagaucguacacccuauagaacucuccugaugaaugaacuuggaguuccuuuucaccugggcaccaaacaggugugcauugcuuggagcaguuccucuugucaugacgguaaggccugguugcacgucugcaucacaggggaugacaagaacgcaaccgccagcuucaucuacaauggaaggcucguggauuccguaguuucauggaguaaagagauucugcggacgcaggaaagcgagugugugugcauaaacggcacuuguacagucgugaugaccgacggcucugcuuccgggaaggcagauacuaaaauccuguuuauugaggaaggaaagaucguguauacaucaacccucagcgguagugcccaacaugucgaggaaugcucuugcuacccacgcuacccgggcguuagaugugugugcagggacaacuggaagggguccaaucggcccauaguagauauuaacaucaaagaccacagcaucgugucgcgcuaugucuguucuggauuagugggcgacacgccucgaaagaaugauuccucaaguagcucccacugccuggacccaaacaaugaggaaggugggcauggaguuaaaggcugggcuuucgaugacggcaacgauguguggauggggagaaccauuaaugagacaucuaggcuuggauacgagacuuuuaaggucaucgaagguuggagcaaccccaaaucaaaguugcagauuaaucgucaggugauaguagaccggggcgaucgcaguggguauuccggaaucuucagcguugagggcaaaucuuguauuaacagaugcuuuuacguggaacugaucaggggucggaaggaggaaaccgagguccuauggacaucaaauaguaucguggucuucugugggacuagcggcaccuauggaacaggcuccuggccugacggggccgaucucaaccugaugccaauuuga

SEQ ID NO: 153535 - RNA, 1410 nt, Artificial Sequence; identical to SEQ ID NO: 151423
  derived and/or modified CDS sequence (opt3) from neuraminidase__InfluenzaA__AHZ42775

SEQ ID NO: 153536 - RNA, 1410 nt, Artificial Sequence; identical to SEQ ID NO: 150194
  derived and/or modified CDS sequence (opt3) from neuraminidase__InfluenzaA__AHZ42787

SEQ ID NO: 153537 - RNA, 1410 nt, Artificial Sequence
  derived and/or modified CDS sequence (opt3) from neuraminidase__InfluenzaA__AHZ42799
augaaccccaaucagaagaucauuaccauaggcagcgugucccugacaaucucuacuauuugcuucuuuaugcaaaucgccauucucaucacgaccgucacacuucacuucaaacaguacgaguuuaacucaccuccaaauaaccagguuaugcugugugaaccgacuauaaucgagagaaauauuaccgaaaucguguauuugacaaacaccacuauugagaaggaaaucugccccaaaccugcugaguacaggaauuggaguaagccacagugugggauaacaggauucgcacccuuuagcaaagacaacuccauucgguuaucugccgguggcgauaucuggguaacccgcgagccuuaugugucgugcgacccagauaaguguuaccaauucgcgcuggggcagggaacgacucuaaauaacguccauucaaauaacaccgugcgagaccguacacccuauagaacucuccugaugaaugaacuuggcguuccuuuucaccuggguaccaaacaggugugcauugcuuggagcaguuccucuugucaugaugggaaggccugguugcacgucugcaucacaggagacgauaagaacgcaaccgccagcuucaucuacaauggcaggcucguggacuccguaguuucauggaguaaagagauucugcggacgcaggaaagcgagugugugugcauaaacggcacuuguacagucgugaugaccgaugggucugcuuccggaaaggcagacacuaaaauccuguuuauugaggaagguaagaucgugcauacaucaacccucagcggcagugcccaacacgucgaggaaugcucuugcuauccacgcuacccggggguuagaugugugugcagggauaacuggaagggauccaaucggcccauaauugacaucaacaucaaagaucacagcauuguaucgucuuacguguguuccggcuuagucggugacacgccucgcaagaaugacucaaguagcuccucucauugccuggauccaaacaaugaggaagggggacacggcgugaaaggcugggcuuucgacgaugggaacgacguuuggaugggacgaaccaucaaugagacaagcagacuugguuaugagacuuuuaaggugauugaaggcuggucaaaccccaaaaguaaguugcagauaaauaggcaggucaucguggaucguggggaccgguccggauacagcggcauuuucucuguagaggguaaaucauguaucaaccgcugcuuuuauguugaacugaucagagggaggaaggaggaaaccgaggugcuauggacaaguaauagcauugucguguucuguggcacuuccggaaccuacggcacagggucuuggccugauggagccgaccucaaccugaugccaauauga

SEQ ID NO: 153538 - RNA, 1410 nt, Artificial Sequence
  derived and/or modified CDS sequence (opt3) from neuraminidase__InfluenzaA__AHZ42811
augaaccccaaucagaagaucauuaccauaggcagcgugucccugacaaucucuacuauuugcuucuuuaugcagaucgccauucucaucacgaccgucacacuucacuucaaacaguacgaguuuaacucaccuccaaauaaccagguuaugcugugugaaccgacuauaaucgagagaaauauuaccgaaaucguguauuugacaaacaccacuauugagaaggaaaucugccccaaaccugcugaguacaggaauuggaguaagccacagugugggauaacaggauucgcacccuuuagcaaagacaacuccauucgguuaucugccgguggcgauaucuggguaacccgcgagccuuaugugucgugcgacccagauaaguguuaccaauucgcgcuggggcagggaacgacucuaaauaacguccauucaaauaacaccgugcgagaccguacacccuauagaacucuccugaugaaugaacuuggcguuccuuuucaccuggguaccaaacaggugugcauugcuuggagcaguuccucuugucaugaugggaaggccugguugcacgucugcaucacaggagacgauaagaacgcaaccgccagcuucaucuacaauggcaggcucguggacuccguaguuucauggaguaaagagauucugcggacgcaggaaagcgagugugugugcauaaacggcacuuguacagucgugaugaccgaugggucugcuuccggaaaggcagacacuaaaauccuguuuauugaggaagguaagaucgugcauacaucaacccucagcggcagugcccaacacgucgaggaaugcucuugcuauccacgcuacccggggguuagaugugugugcagggauaacuggaagggauccaaucggcccauaguagacauuaacaucaaagaucacagcaucgugucgucuuacgucuguuccggcuuagugggugacacgccucgcaagaaugacucaaguagcuccucucauugccuggauccaaacaaugaggaagggggacacggcguuaaaggcugggcuuucgacgaugggaacgacguguggaugggacgaaccauuaaugagacaagcagacuugguuaugagacuuuuaaggucaucgaaggcuggucaaaccccaaaaguaaguugcagauuaauaggcaagugauaguagggcggggagaucguuccggcuacagcgguaucuucucuguugaggggaaaucauguauuaaccgcugcuuuuauguggaacugaucagaggcaggaaggaggaaaccgagguccuauggacaaguaauagcaucguggucuucuguggaacuuccggcaccuacgggacaggaucuuggccugacggugccgaucucaaccugaugccaauuuga

SEQ ID NO: 153539 - RNA, 1410 nt, Artificial Sequence
  derived and/or modified CDS sequence (opt3) from neuraminidase__InfluenzaA__AHZ42823
augaaccccaaucagaagaucauuaccauaggcagcgugugcaugacaaucgggauggccaaccugauucuccaaaucggaaauauuaucuccauauggaucucucacucaauucagcuugguaaccagagucagaucgagacuuguaaucaaagcgucauuacguacgaaaacaauaccuggguuaaccagacauaugugaauaucuccaacacuaauuucgcugcagagcagucuguagugucggucaaacuggccggcaacagcagcuugugcccugugagugggugggcgauauacuccaaggacaauucuguuagaauuggaagcaaaggcgauguguuugucaucagggaaccauucauuuccuguucaccguuagagugccggaccuuuuuccugacacagggugcucuacucaacgacaagcauaguaaugggaccaucaaagaucgcagccccuaucgaacucugaugucuuguccuaucggagaagugccaucccccuacaacucacguuuugagagcguagccuggagugcaucugccugccacgacggcauuaacuggcuuacaauaggcaucuccgggccugauagcggagcuguugcagugcugaaguauaaugguauuaucaccgacacgauaaagucguggagaaacaauauuuugaggacucaagagucugaaugugccugcgucaacggcuccuguuucaccaucaugacagaugggccaucagacggacaggcuaguuacaaaaucuuucggauugagaagggcaaaaucgugaagucaguggaaaugaaugcccccaacuaucauuacgaggagugcuccuguuacccugauucuagcgaaauuacuugcgucugccgcgacaauuggcacgguucaaacagaccauggguuaguuucaaucagaaccucgaguaucagauaggguacaucuguuccggaauuuuuggcgauaauccgaggcccaacgacaaaaccggcagcugcgggccugugucuucaaauggagcgaacgguguaaagggcuucaguuuuaaguaugggaauggaguguggaucggccggacaaaaagcaucuccucucgcaaggguuucgaaaugauuugggauccaaacggguggaccggcacggacaacaauuuuucgauaaaacaagacaucgucggaauuaacgaguggagcggcuacuccgggucauucgugcagcaucccgaacugacuggacuggauuguauccgaccuugcuucuggguugagcucauuagagguaggccaaaggagaauacaaucuggaccaguggcucuagcauauccuuuuguggggugaacucagacacugucggauggagcuggcccgauggcgcagaauuaccguucacaaucgacaaauga

SEQ ID NO: 153540 - RNA, 1410 nt, Artificial Sequence
  derived and/or modified CDS sequence (opt3) from neuraminidase__InfluenzaA__AHZ42834
augaaccccaaucagaagaucauuaccauaggcagcgugucccugacaaucucuacuauuugcuucuuuaugcagacggccauccucauuaccacagucacucuucacuucaaacaguacgaguuuaacucaccuccaaauaaccagguuaugcugugugaaccgaccaucauagagagaaauaucacagaaauuguguauuugaccaacacuacaaucgagaaggaaauuugccccaaaccugcugaguacaggaauuggaguaagccacagugugggaucaccggauucgcacccuuuagcaaagacaacuccauacgguuaucugccgguggcgauauuuggguaacgcgcgagccuuaugugucgugcgacccagauaaguguuaccaauucgcgcuggggcagggaacuacccuaaauaacguccauucaaauaacacagugcgagaccguacucccuauagaacccuccugaugaaugaacuuggcguuccuuuucaccuggguacaaaacaggugugcaucgcuuggagcaguuccucuugucaugaugggaaggccugguugcacgucugcauuaccggagacgauaagaacgcaacggccagcuucaucuacaauggcaggcucguggacuccguaguuucauggaguaaagagauccugcggacucaggaaagcgagugugugugcauuaacggcacauguaccgucgugaugacugaugggucugcuuccggaaaggcagacacaaaaauacuguuuaucgaggaagguaagauugugcauaccucaacgcucagcggcagugcccaacacgucgaggaaugcucuugcuauccacgcuacccggggguuagaugugugugcagggauaacuggaagggauccaaucggcccaucguagacauaaacauuaaagaucacagcaucgugucgucuuacgucuguuccggcuuagugggugacaccccucgcaagaaugacucaaguagcuccucucauugccuggauccaaacaaugaggaagggggacacggcguuaaaggcugggcuuucgacgaugggaacgacguguggaugggacgaacaaucaaugagacuagcagacuugguuaugagaccuuuaaggucauugaaggcuggucaaaccccaaaaguaaguugcagaucaauaggcaagugauuguagaucguggggaccgguccggauacagcggcauauucucuguugaggguaaaucauguaucaaccgcugcuuuuauguggaacugauuagagggaggaaggaggaaacagagguccuauggaccaguaauagcaucguggucuucuguggcacuuccggaacauacggcaccgggucuuggccugauggagccgaccucaaccugaugccaaucuga

SEQ ID NO: 153541 - RNA, 1410 nt, Artificial Sequence; identical to SEQ ID NO: 150194
  derived and/or modified CDS sequence (opt3) from neuraminidase__InfluenzaA__AHZ42846

SEQ ID NO: 153542 - RNA, 1410 nt, Artificial Sequence; identical to SEQ ID NO: 150194
  derived and/or modified CDS sequence (opt3) from neuraminidase__InfluenzaA__AHZ42858

SEQ ID NO: 153543 - RNA, 1410 nt, Artificial Sequence; identical to SEQ ID NO: 150194
  derived and/or modified CDS sequence (opt3) from neuraminidase__InfluenzaA__AHZ42870

SEQ ID NO: 153544 - RNA, 1410 nt, Artificial Sequence; identical to SEQ ID NO: 150194
  derived and/or modified CDS sequence (opt3) from neuraminidase__InfluenzaA__AHZ42882

SEQ ID NO: 153545 - RNA, 1410 nt, Artificial Sequence
  derived and/or modified CDS sequence (opt3) from neuraminidase__InfluenzaA__AHZ42894
augaaccccaaucagaagaucauuaccauaggcagcgugucccugacaaucucuacuauuugcuucuuuaugcagaucgccauucucaucacgaccgucacacuucacuucaaacaguacgaguuuaacucaccuccaaauaaccagguuaugcugugugaaccgacuauaaucgagagaaauauuaccgaaaucguguauuugacaaacaccacuauugagaaggaaaucugccccaaaccugcugaguacaggaauuggaguaagccacagugugggauaacaggauucgcacccuuuagcaaagacaacuccauucgguuaucugccgguggcgauaucuggguaacccgcgagccuuaugugucgugcgacccagauaaguguuaccaauucgcgcuggggcagggaacgacucuaaauaacguccauucaaauaacaccgugcgagaccguacacccuauagaacucuccugaugaaugaacuuggcguuccuuuucaccuggguaccaaacaggugugcauugcuuggagcaguuccucuugucaugaugggaaggccugguugcacgucugcaucacaggagacgauaagaacgcaaccgccagcuucaucuacaauggcaggcucguggacuccguaguuucauggaguaaagagauucugcggacgcaggaaagcgagugugugugcauaaacggcacuuguacagucgugaugaccgaugggucugcuuccggaaaggcagacacuaaaauccuguuuauugaggaagguaagaucgugcauacaucaacccucagcggcagugcccaacacgucgaggaaugcucuugcuauccacgcuacccggggguuagaugugugugcagggauaacuggaagggauccaaucggcccauaguagacauuaacaucaaagaucacagcaucgugucgucuuacgucuguuccggcuuagugggugacacgccucgcaagaaugacucaaguagcuccucucauugccuggauccaaacaaugaggaagggggacacggcguuaaaggcugggcuuucgacgaugggaacgacguguggaugggacgaaccauuaaugagacaagcagacuugguuaugagacuuuuaaggucaucgaaggcuggucaaaccccaaaaguaaguugcagauuaauaggcaagugauaguagauaaaggggaccgguccggauacagcggcaucuucucuguugaggguaagucauguauuaaccguugcuuuuauguggaacugauccgcgggagaaaggaggaaaccgagguccuauggacaaguaauagcaucguggucuucuguggcacuuccggaaccuacggcacagggucuuggccugauggagccgaccucaaccugaugccaauuuga

SEQ ID NO: 153546 - RNA, 1410 nt, Artificial Sequence; identical to SEQ ID NO: 150194
  derived and/or modified CDS sequence (opt3) from neuraminidase__InfluenzaA__AHZ42906

SEQ ID NO: 153547 - RNA, 1410 nt, Artificial Sequence; identical to SEQ ID NO: 151423
  derived and/or modified CDS sequence (opt3) from neuraminidase__InfluenzaA__AHZ42918

SEQ ID NO: 153548 - RNA, 1398 nt, Artificial Sequence; identical to SEQ ID NO: 151502
  derived and/or modified CDS sequence (opt3) from neuraminidase__InfluenzaA__AHZ59750

SEQ ID NO: 153549 - RNA, 1398 nt, Artificial Sequence; identical to SEQ ID NO: 151502
  derived and/or modified CDS sequence (opt3) from neuraminidase__InfluenzaA__AHZ59762

SEQ ID NO: 153550 - RNA, 1398 nt, Artificial Sequence; identical to SEQ ID NO: 151502
  derived and/or modified CDS sequence (opt3) from neuraminidase__InfluenzaA__AHZ59774

SEQ ID NO: 153551 - RNA, 1398 nt, Artificial Sequence; identical to SEQ ID NO: 151502
  derived and/or modified CDS sequence (opt3) from neuraminidase__InfluenzaA__AHZ59786

SEQ ID NO: 153552 - RNA, 1398 nt, Artificial Sequence; identical to SEQ ID NO: 151502
  derived and/or modified CDS sequence (opt3) from neuraminidase__InfluenzaA__AHZ59798

SEQ ID NO: 153553 - RNA, 1398 nt, Artificial Sequence; identical to SEQ ID NO: 151502
  derived and/or modified CDS sequence (opt3) from neuraminidase__InfluenzaA__AHZ59810

SEQ ID NO: 153554 - RNA, 1398 nt, Artificial Sequence; identical to SEQ ID NO: 151502
  derived and/or modified CDS sequence (opt3) from neuraminidase__InfluenzaA__AHZ59822

SEQ ID NO: 153555 - RNA, 1398 nt, Artificial Sequence; identical to SEQ ID NO: 151502
  derived and/or modified CDS sequence (opt3) from neuraminidase__InfluenzaA__AHZ59834

SEQ ID NO: 153556 - RNA, 1398 nt, Artificial Sequence; identical to SEQ ID NO: 151502
  derived and/or modified CDS sequence (opt3) from neuraminidase__InfluenzaA__AHZ59846

SEQ ID NO: 153557 - RNA, 1398 nt, Artificial Sequence; identical to SEQ ID NO: 151502
  derived and/or modified CDS sequence (opt3) from neuraminidase__InfluenzaA__AHZ59858

SEQ ID NO: 153558 - RNA, 1398 nt, Artificial Sequence; identical to SEQ ID NO: 151502
  derived and/or modified CDS sequence (opt3) from neuraminidase__InfluenzaA__AHZ59870

SEQ ID NO: 153559 - RNA, 1398 nt, Artificial Sequence; identical to SEQ ID NO: 151502
  derived and/or modified CDS sequence (opt3) from neuraminidase__InfluenzaA__AHZ59882

SEQ ID NO: 153560 - RNA, 1398 nt, Artificial Sequence; identical to SEQ ID NO: 151502
  derived and/or modified CDS sequence (opt3) from neuraminidase__InfluenzaA__AHZ59918

SEQ ID NO: 153561 - RNA, 1398 nt, Artificial Sequence; identical to SEQ ID NO: 151502
  derived and/or modified CDS sequence (opt3) from neuraminidase__InfluenzaA__AHZ59930

SEQ ID NO: 153562 - RNA, 1398 nt, Artificial Sequence; identical to SEQ ID NO: 151502
  derived and/or modified CDS sequence (opt3) from neuraminidase__InfluenzaA__AHZ59942

SEQ ID NO: 153563 - RNA, 1398 nt, Artificial Sequence; identical to SEQ ID NO: 151502
  derived and/or modified CDS sequence (opt3) from neuraminidase__InfluenzaA__AHZ59954

SEQ ID NO: 153564 - RNA, 1398 nt, Artificial Sequence; identical to SEQ ID NO: 151502
  derived and/or modified CDS sequence (opt3) from neuraminidase__InfluenzaA__AHZ59966

SEQ ID NO: 153565 - RNA, 1398 nt, Artificial Sequence; identical to SEQ ID NO: 151502
  derived and/or modified CDS sequence (opt3) from neuraminidase__InfluenzaA__AHZ59991

SEQ ID NO: 153566 - RNA, 1398 nt, Artificial Sequence; identical to SEQ ID NO: 151502
  derived and/or modified CDS sequence (opt3) from neuraminidase__InfluenzaA__AHZ60003

SEQ ID NO: 153567 - RNA, 1398 nt, Artificial Sequence; identical to SEQ ID NO: 151502
  derived and/or modified CDS sequence (opt3) from neuraminidase__InfluenzaA__AHZ60015

SEQ ID NO: 153568 - RNA, 1398 nt, Artificial Sequence; identical to SEQ ID NO: 151502
  derived and/or modified CDS sequence (opt3) from neuraminidase__InfluenzaA__AHZ60027

SEQ ID NO: 153569 - RNA, 1398 nt, Artificial Sequence; identical to SEQ ID NO: 151502
  derived and/or modified CDS sequence (opt3) from neuraminidase__InfluenzaA__AHZ60039

SEQ ID NO: 153570 - RNA, 1398 nt, Artificial Sequence; identical to SEQ ID NO: 151502
  derived and/or modified CDS sequence (opt3) from neuraminidase__InfluenzaA__AHZ60051

SEQ ID NO: 153571 - RNA, 1398 nt, Artificial Sequence; identical to SEQ ID NO: 151502
  derived and/or modified CDS sequence (opt3) from neuraminidase__InfluenzaA__AHZ60063

SEQ ID NO: 153572 - RNA, 1398 nt, Artificial Sequence; identical to SEQ ID NO: 151502
  derived and/or modified CDS sequence (opt3) from neuraminidase__InfluenzaA__AHZ60075

SEQ ID NO: 153573 - RNA, 1398 nt, Artificial Sequence; identical to SEQ ID NO: 151502
  derived and/or modified CDS sequence (opt3) from neuraminidase__InfluenzaA__AHZ60087

SEQ ID NO: 153574 - RNA, 1398 nt, Artificial Sequence; identical to SEQ ID NO: 151502
  derived and/or modified CDS sequence (opt3) from neuraminidase__InfluenzaA__AHZ60099

SEQ ID NO: 153575 - RNA, 1410 nt, Artificial Sequence; identical to SEQ ID NO: 150194
  derived and/or modified CDS sequence (opt3) from neuraminidase__InfluenzaA__AHZ60111

SEQ ID NO: 153576 - RNA, 1410 nt, Artificial Sequence; identical to SEQ ID NO: 144450
  derived and/or modified CDS sequence (opt3) from neuraminidase__InfluenzaA__AIA26299

SEQ ID NO: 153577 - RNA, 1374 nt, Artificial Sequence
  derived and/or modified CDS sequence (opt3) from neuraminidase__InfluenzaA__AIC64891
augaaccccaaucagaagaucauuaccauaggcagcgugugcaugacaaucgggauggccaaccugauucuccaaaucggaaauauuaucuccauauggaucucucacucaauucagcuugguaaccagaaucagaucgagacuuguaaccaaagugucauuacguacgaaaauaacaccaauuucgcugcaggccagagcguuguguccguaaaacuggccgggaacucuucguugugcccugugucaggaugggcgaucuauagcaaggacaauagugucagaauaggcuccaaaggugauguguuuguuauuagggagccauucaucucuuguagcccguuagaaugccggacauuuuuccugacucagggggcucuacucaacgacaagcauuccaauggaaccauuaaagaucgcucacccuaccgaacacugaugaguuguccuaucggcgaggugccaagccccuauaacucucguuuugaauccgucgccuggucagcaagcgccugccacgacggcaucaauuggcuuaccauugggauaaguggaccugauaacggugcuguggcaguacugaaguacaacggcaucauuacugacacaaucaagucuuggagaaauaacauauugaggacccaggaguccgagugugccugcguuaaugggagcuguuucacggugaugacugauggaccaucgaacggccaggcuucuuauaaaauuuuucggaucgaaaaggguaaaaucgucaaguccguggagaugaaugcccccaacuaccauuaugaagagugcucauguuacccugacaguagcgagauuaccugcgugugccgcgauaauuggcacggguccaacagaccaugggucucuuucaaucaaaaccucgaauaccagaucggauauauuuguagcggcauauuuggcgacaauccgaggcccaacgauaaaacagggucaugcggaccuguuaguuccaauggugcgaacggcgugaagggguucagcuuuaaguacggaaauggcguauggaucggucggacuaaaucuauuucaagucgcaacggguucgagaugaucugggacccaaacggcuggaccggaacagauaauaacuuuagcaucaagcaggacauugugggcauaaaugaaugguccggguauucuggaucguucguccaacaucccgagcugaccggucuggacuguauccgaccuugcuucuggguggaacucauuagaggcaggccaaaagagaacacgaucuggacuagcggguccucaauuaguuuuuguggaguuaauucugauacagugggcuggagcuggcccgacggugcagaguuaccguucaccaucgauaaguga

SEQ ID NO: 153578 - RNA, 1350 nt, Artificial Sequence
  derived and/or modified CDS sequence (opt3) from neuraminidase__InfluenzaA__AID48084
augaaccccaauaagaaaaucauuaccauaggcagcaucugcauggugacagggauggucucccugaugcuccagauuggaaaccuuaucucuauuuggguuucacacaguauccauacugguaaucaacacaaggccgagccuauaagcaacacgaaucuguugaccgagaaaacaguggcuuccguaaaguuagcaggcaacucuucgcuguguccaaucaaugggugggccguguacucaaaagacaacagcauuagaaucggaaguaagggcgaugucuucgugauuagggaaccguuuaucuccugcucucaucuagaaugucggacuuucuuucucacccagggugcgcugcuuaaugacaagcacagcaacgggacaguuaaagaucgcucaccccaucgaacccugauguccugcccugugggagaggcuccaagucccuauaauagccguuucgaaucugucgccugguccgcaucagccugucacgacggcacuagcugguugacaauaggcauuagugggccugauaacggagcuguggcaguacucaaguacaaugguaucauuaccgacacgaucaaaucuuggagaaacaauauccugaggacucaggaguccgagugcgccuguguuaacggcagcugcuuuaccgugaugacagaugggccaucgaacggacaggcuucucacaagauuuucaaaauggaaaagggcaaggucgugaaauccguggagcuggacgcccccaauuaucauuacgaagaguguucaugcuauccugaugcgggugagauaacuugugucugccgggacaacuggcacgggaguaaucgcccauggguuagcuuuaaccaaaaucucgaauaccagaucggauauauuugcuccggcguguucggcgauaacccgagacccaaugacggggcaggaucuugugguccuguaagcucaaacggcgccuacggggugaagggauuuaguuucaaauacggcaauggugucuggaucgggaggaccaaguccacaaacagccggucuggcuuugagaugauaugggauccaaauggauggaccgaaacggacucaaguuucagcgugaaacaggacauuguugcuaucacugauugguccggcuauucugggucguuugugcagcaucccgaguuaacaggacuggacugcauccgcccuuguuucugggucgaacuuauucgagguagaccaaaggagagcaccaucuggacuuccggcucaaguauuucuuucugcggggugaacagcgauacaguaggaugguccuggcccgacggcgccgaguugccguuuaccauagauaaauga

SEQ ID NO: 153579 - RNA, 1410 nt, Artificial Sequence
  derived and/or modified CDS sequence (opt3) from neuraminidase__InfluenzaA__AID70507
augaaccccaaucagaagaucauuaccauaggcagcgugugcacaacuaucgggauggccaaccugauucuccaaaucggaaauauuaucuccauauggaucucucacucaauucagcuugguaaccagaaucagaucgagacguguaaccaaagugucauuaccuacgaaaauaaaacauggguuaaccagacuuaugugaauaucagcaacaccaauuucgcugcaggccaguccguagugucugucaagcuggccgggaacucgucauugugcccugugagcggaugggcgauauacaguaaagacaauuccauuagaaucggcucuaagggugauguuuuugugauuagggagccauucaucagcuguuccccguuagaaugccggacauuuuuccugacccagggggcucuacucaacgacaaacauucaaauggaacuaucaaggaucgcagucccuaucgaacacugaugagcuguccuauuggcgaggucccaucucccuacaacucccguuuugaaucaguggccuggagcgcaagugccugccacgacggcauaaacuggcuuaccaucgggauuucuggaccugauaauggugcuguagcaguucugaaguauaacggcaucauaacggacacuauuaaauccuggagaaauaacaucuugaggacccaagagagcgagugugccugcgugaaugggucguguuucacagucaugacugauggaccaucugacggccaggcuuccuacaagaucuuucggauugaaaaagguaagaucgugaaaucaguggagaugaacgcccccaauuaucauuacgaagagugcaguuguuacccugauagcuccgagauuaccugcgucugccgcgacaacuggcacgggucuaauagaccauggguuagcuucaaccagaaucucgaauaucagauaggauacaucuguucaggcauuuuuggcgauaacccgaggcccaaugacaagacagggaguugcgauccuguguccuucaacggagcgaaugguguaaagggcuuuagcuucaaauaugggaacggaguguggaucggccggaccaagucuaucucaagucgcaacgguuuugagaugauuugggacccaaauggguggacgggcacugacaacaaauucagcauaaagcaagauaucgucggaauuaaugaaugguccggcuacucugggucguucgugcagcaucccgagcugacaggacuggacuguauccgaccuugcuuuuggguugaacucauuagagguaggccaaaagagaacaccaucuggacuagcggcuccucaauaaguuucuguggggucaauucugauacagugggaugguuuuggcccgacggcgcagaguuaccguucaccaucgauaaguga

SEQ ID NO: 153580 - RNA, 1410 nt, Artificial Sequence
  derived and/or modified CDS sequence (opt3) from neuraminidase__InfluenzaA__AID70508
augaaccccaaucagaagaucauuaccauaggcagcgugugcaugacaaucgggauggccaaccugauucuccaaaucggaaauauuaucuccauauggaucucucacucaauucagcuugguaaccagagucagaucgagacuuguaaucaaagcgucauuacguacgaaaacaauaccuggguuaaccagacauaugugaauaucuccaacacuaauuucgcugcaggccagucuguagugucggucaaacuggccgggaacagcucauugugcccugugaguggaugggcgauauacuccaaggacaauucuauuagaaucggcagcaaaggugauguuuuugugauuagggagccauucaucuccuguucaccguuagaaugccggaccuuuuuccugacacagggggcucuacucaacgacaagcauaguaauggaaccaucaaagaucgcagccccuaucgaacucugaugucuuguccuauuggcgaggucccaucccccuacaacucacguuuugaaagcguggccuggagugcaucugccugccacgacggcauaaacuggcuuacaaucgggauuuccggaccuaauaacggugcuguagcaguucugaaguauaauggcaucauaaccgauacgauuaagagcuggagaaacaauaucuugaggacucaagagucggagugugccugcgugaacgggucuuguuucaccaucaugacagacggaccauccgauggccaggcuucauacaaaauuuuucggaucgaaaaggguaaaauugucaagaguguggagaugaaugcccccaacuaucauuacgaagagugcagcuguuacccugacuccucugagauaacuugcgugugccgcgauaauuggcacgggagcaacagaccaugggucucauucaaucagaaccucgaauaucagaucggauacauuuguaguggcaucuuuggcgacaauccgaggcccaacgauaaaaccggguccugcggaccuguuagcucuaauggugcgaacggcgugaagggguucucauuuaaguauggaaacggcguauggaucggucggacaaaaaguauuagcucccgcaagggguucgagaugauaugggacccaaauggcuggaccggaacggauaacaauuuuucuaucaaacaagacauugugggcaucaacgaauggucgggguacagcggauccuucguccagcaucccgagcugacuggucuggacuguauucgaccuugcuucuggguggaacucaucagaggcaggccaaaggagaauacaauauggaccucagggaguucuaucagcuuuuguggaguuaacuccgauacugugggcuggucauggcccgacggugcagaguuaccguucacaauugauaaauga

SEQ ID NO: 153581 - RNA, 1410 nt, Artificial Sequence
  derived and/or modified CDS sequence (opt3) from neuraminidase__InfluenzaA__AID70509
augaaccccaaucagaagaucauuaccauaggcagcgugugcaugacaaucgggauggccaaccugauucuccaaaucggaaauauuaucuccauauggaucucucacucaauucagcuugguaaccagagucagaucgagacuuguaaucaaagcgucauuacguacgaaaacaauaccuggguuaaccagacauaugugaauaucuccaacacuaauuucgcugcaggccagucuguagugucggucaaacuggccgggaacagcagcuugugcccugugaguggaugggcgauauacuccaaggacaauucuauuagaaucggcagcaaaggugauguuuuugugauuagggagccauucaucuccuguucaccguuagaaugccggaccuuuuuccugacacagggggcucuacucaacgacaagcauaguaauggaaccaucaaagaucgcagccccuaucgaacucugaugucuuguccuauuggcgaggucccaucccccuacaacucacguuuugaaagcguggccuggagugcaucugccugccacgacggcauaaacuggcuuacaaucgggauuuccggaccugauaauggugcuguagcaguucugaaguauaacggcaucauaaccgacacgauuaagagcuggagaaauaacaucuugaggacucaagagucggagugugccugcgugaaugggucuuguuucaccaucaugacagauggaccauccgacggccaggcuucauacaaaauuuuucggaucgaaaaggguaaaauugucaagaguguggagaugaacgcccccaauuaucauuacgaagagugcagcuguuacccugauuccucugagauaacuugcgugugccgcgacaacuggcacgggagcaauagaccaugggucucauucaaccagaaucucgaauaucagaucggauacauuuguaguggcaucuuuggcgauaacccgaggcccaaugacaaaaccggguccugcggaccuguuagcucuaacggugcgaauggcgugaagggguucucauuuaaguauggaaacggcguauggaucggucggacaaaaaguauuaacagccgcaagggguucgagaugauaugggauccaaauggcuggaccggaacggacaacaauuuuuccaucaaacaagacauugugggcaucaacgaauggucuggguacucgggaucauucguccagcaucccgagcugacuggucuggauuguauucgaccuugcuucuggguggaacucaucagaggcaggccaaaggagaauacaauauggaccuccgggucaaguaucucuuuuuguggaguuaacagcgacacugugggcugguccuggcccgauggugcagaguuaccguucacaauugacaaauga

SEQ ID NO: 153582 - RNA, 1410 nt, Artificial Sequence
  derived and/or modified CDS sequence (opt3) from neuraminidase__InfluenzaA__AID70510
augaaccccaaucagaagaucauuaccauaggcagcgugugcaucacaauugggauggccaaccugauccuccaaauuggaaauaucauauccaucuggauuucucacucaauccagcuugguaaccagagucagauugagacuuguaaucaaagcgucaucacguacgaaaacaauaccuggguuaaccagacauaugugaauauauccaacacuaauuucgcugcaggccagucuguagugucggucaaacuggccgggaacagcucauugugcccugugaguggaugggcgauuuacuccaaggacaauucuaucagaauuggcagcaaaggugauguuuuugugaucagggagccauucaucuccuguucaccguuagaaugccggaccuuuuuccugacacagggggcucuacucaacgacaagcauaguaauggaaccauuaaagaucgcagccccuaucgaacucugaugucuuguccuauaggcgaggucccaucccccuacaacucacguuuugaaagcguggccuggagugcaucugccugccacgacggcaucaacuggcuuacaauugggaucuccggaccugauaauggugcuguagcaguucugaaguauaacggcauaauuaccgacacgaucaagagcuggagaaauaacaucuugaggacucaagagucggagugugccugcgugaaugggucuuguuucaccauuaugacagauggaccauccgacggccaggcuucauacaaaaucuuucggauugaaaaggguaaaauagucaagaguguggagaugaacgcccccaauuaucauuacgaagagugcagcuguuacccugauuccucugagaucacuugcgugugccgcgacaacuggcacgggagcaauagaccaugggucucauucaaccagaaucucgaauaucagauuggauacaucuguaguggcaucuuuggcgauaacccgaggcccaaugacaaaaccggguccugcggaccuguuagcucuaacggugcgaauggcgugaagggguucucauuuaaguauggaaacggcguauggauuggucggacaaaaaguauaagcucccgcaagggguucgagaugaucugggauccaaacggcuggaccggaacggacaauaacuuuucuauuaaacaagacaucgugggcauuaaugaauggucgggguacagcggauccuucguccagcaucccgagcugacuggucuggauuguauccgaccuugcuucuggguggaacucauaagaggcaggccaaaggagaacacaaucuggaccucagggaguucuauuagcuuuuguggaguuaauuccgacacugugggcuggucauggcccgauggugcagaguuaccguucacaaucgacaaauga

SEQ ID NO: 153583 - RNA, 1410 nt, Artificial Sequence
  derived and/or modified CDS sequence (opt3) from neuraminidase__InfluenzaA__AID70511
augaaccccaaucagaagaucauuaccaugggcagcguguggaugacaauagggauggccaaccugauccuccaauccggaaauauuaucucuauuuggaucucacacaguauacagcuuagaaaccagagccagaucgagacuugcaaucaauccgucauuacguacgaaaacaauaccuggguuaaccagacauaugugaauaucucuaacacuaauuucgcugcaggucagucgguagugucagucaaacuggccggcaacagcaguuuguguccuguguccgggugggcgauuuacucuaaggacaauagcaucaggauaggauccaaaggcgauguuuuugugauucgggagccauucaucucaugcaguccguuagaaugucgcaccuuuuuccugacacagggugcucuacucaacgacaagcauagcaaugggaccauuaaagaucgaucucccuaucguacucugauguccugcccuaucggagaggucccaucacccuacaacagcagauuugaaaguguggccuggucugcauccgccugucacgacggcaucaacuggcuuacaauuggcauaagcgggccugauaauggagcuguagcaguucugaaguauaacgguaucauuaccgacacgaucaagucguggaggaauaacauauugcggacucaagagucugagugcgccugugugaauggcuccugcuucaccauuaugacagaugggccaucagacggacaggcuaguuacaaaaucuuucgcaucgaaaagggcaaaauugucaagagcguggagaugaacgcccccaauuaucauuacgaagaguguuccugcuacccugauucuagcgagaucacuugugugugcagagacaacuggcacgguucaaauaggccaugggucaguuucaaccagaaucucgaauaucagauuggguacauaugcuccggaaucuuuggcgauaacccgcggcccaaugacaaaaccggcagcugugggccuguuucuucaaacggagcgaauggugugaagggcuucaguuuuaaguaugggaacggaguauggauuggccgcacaaaaagcaucuccucucgaaaggguuucgagaugaucugggauccaaacggguggaccggcacggacaauaacuuuucgauuaaacaagacauagugggaaucaaugaauggagcggcuacuccgggucauucguccagcaucccgagcugacuggacuggauugcauuagaccuuguuucuggguggaacucaucaggggucggccaaaggagaacacaauuuggaccaguggcucuagcaucuccuuuugcgggguuaauucagacacugugggauggagcuggcccgauggcgcagaguuaccguucacaauagacaaauga

SEQ ID NO: 153584 - RNA, 1410 nt, Artificial Sequence
  derived and/or modified CDS sequence (opt3) from neuraminidase__InfluenzaA__AID70512
augaaccccaaucagaagaucauuaccauaggcagcguguggaugacaaucgggauggccaaccugauucuccaaaucggaaauauuaucuccauauggaucucucacucaauucagcuugguaaccagagucagaucgagacuugcaaucaaagcgucauuacguacgaaaacaauaccuggguuaaccagacauaugugaauaucuccaacacuaauuucgcugcaggccagucuguagugucggucaaacuggccgggaacagcucauuguguccugugaguggaugggcgauauacuccaaggacaauucuauuagaaucggcagcaaaggugauguuuuugugauuagggagccauucaucuccugcucaccguuagaaugucggaccuuuuuccugacacagggggcucuacucaacgacaagcauaguaauggaaccaucaaagaucgcagccccuaucgaacucugaugucuugcccuauuggcgaggucccaucccccuacaacucacguuuugaaagcguggccuggagugcaucugccugucacgacggcauaaacuggcuuacaaucgggauuuccggaccugauaauggugcuguagcaguucugaaguauaacggcaucauaaccgacacgauuaagagcuggagaaauaacaucuugaggacucaagagucggagugcgccugugugaaugggucuugcuucaccaucaugacagauggaccauccgacggccaggcuucauacaaaauuuuucggaucgaaaaggguaaaauugucaagaguguggagaugaaagcccccaacuaucauuacgaagaguguagcugcuacccugauuccucugagauaacuugugugugccgcgacaauuggcacgggagcaacagaccaugggucucauucaaucagaaccucgaauaucagaucggauacauuugcaguggcaucuuuggcgauaauccgaggcccaacgacaagaccggguccuguggaccuguuagcucuaauggugcgaacggcgugaagggguucucauuuaaauauggaaauggcguauggaucggucggacaaagaguauuagcucccgcaaaggguucgagaugauaugggauccaaacggcuggaccggaacggacaacaauuuuucuaucaagcaagacauuaucggcauuaacgaauggucgggguacagcggauccuucgugcagcaucccgagcugacuggucuggauugcauccgaccuuguuucugggucgaacucauaagaggcaggccaaaagagaauacaaucuggaccucagggaguucuauuagcuuuugcggagugaacuccgacacuguuggcuggucauggcccgauggugcagaguuaccguucacaaucgacaaguga

SEQ ID NO: 153585 - RNA, 1410 nt, Artificial Sequence; identical to SEQ ID NO: 148305
  derived and/or modified CDS sequence (opt3) from neuraminidase__InfluenzaA__AID70514

SEQ ID NO: 153586 - RNA, 1410 nt, Artificial Sequence
  derived and/or modified CDS sequence (opt3) from neuraminidase__InfluenzaA__AID70515
augaaccccaaucagaagaucauuaccauaggcagcgugugcaugacaaucgggauggccaaccugauucuccaaaucggaaauauuaucuccauauggaucucucacucaauucagcuuagaaaccagagucagaucgagacuuguaaucaaagcgucauuacguacgaaaacaauaccuggguuaaccagacauaugugaauaucuccaacacuaauuucgcugcaggucagucuguagugucggucaaacuggccggcaacagcucauugugcccugugagugggugggcgauauacuccaaggacaauucuauuaggaucggaagcaaaggcgauguuuuugugauucgggagccauucaucuccuguucaccguuagaaugccgcaccuuuuuccugacacagggugcucuacucaacgacaagcauaguaaugggaccaucaaagaucgaagccccuaucguacucugaugucuuguccuauuggagaggucccaucccccuacaacucaagauuugaaagcguggccuggagugcaucugccugccacgacggcauaaacuggcuuacaaucggcauuuccgggccugauaauggagcuguagcaguucugaaguauaacgguaucauaaccgacacgauuaagagcuggaggaauaacaucuugcggacucaagagucggagugugccugcgugaauggcucuuguuucaccaucaugacagaugggccauccgacggacaggcuucauacaaaauuuuucgcaucgaaaagggcaaaauugucaagaguguggagaugaacgcccccaauuaucauuacgaagagugcagcuguuacccugauuccucugagauaacuugcgugugcagagacaacuggcacgguagcaauaggccaugggucucauucaaccagaaucucgaauaucagaucggguacauuuguaguggaaucuuuggcgauaacccgcggcccaaugacaaaaccggcuccugcgggccuguuagcucuaacggagcgaauggugugaagggcuucucauuuaaguauaguaacgggguauggaucggacgcacaaaaagcauuuccucucgaaagggcuucgagaugauaugggauccaaacgguuggaccgggacggacaauaacuuuucgaucaaacaagacauugugggcaucaaugaauggagcggauacuccggcucauucguccagcaucccgagcugacugggcuggauuguauuagaccuugcuucuggguggaacucaucaggggacggccaaaggagaacacaauauggaccagugguucuagcaucuccuuuuguggcguuaauucagacacugugggguggagcuggcccgauggagcagaguuaccguucacaauugacaaauga

SEQ ID NO: 153587 - RNA, 1410 nt, Artificial Sequence; identical to SEQ ID NO: 151206
  derived and/or modified CDS sequence (opt3) from neuraminidase__InfluenzaA__AID70516

SEQ ID NO: 153588 - RNA, 1410 nt, Artificial Sequence
  derived and/or modified CDS sequence (opt3) from neuraminidase__InfluenzaA__AID70517
augaaccccaaucagaagaucauuaccauaggcagcgugugcaugacaaucgggauggccaaccugacucuccaaauuggaaauaucauuuccaucuggauaucucacucaauccagcuugguaaccagaaucagauugagacguguaaccaaagugucaucaccuacgaaaauaacacauggguuaaucagacuuaugugaacauuagcaauaccaacuucgcugcaggccaguccguagugucugucaaacuggccggaaauucgucauugugcccugugagcgggugggcgaucuacaguaaggacaacuccauaagaauuggcucuaaaggugauguuuuugugaucagggagccauucauuagcuguuccccguuagaaugccggacauuuuuccugacccagggggcucuacucaaugacaagcauucaaacggaacuaucaaagaucgcagucccuaucgaacacugaugagcuguccuaucggcgaggucccaucucccuacaacucccguuuugaaucaguggccuggagcgcaagugccugccacgacggcauuaauuggcuuaccauagggaucucuggaccugauaacggugcuguagcaguucugaaguauaauggcauuaucacggacacuauaaaguccuggagaaacaauauuuugaggacccaagagagcgagugugccugcgugaacgggucguguuucacaaucaugacugauggaccaaaugacggccaggcuucuuacaaaaucuuucggauugaaaaggguaaaaucgucaaguccguggagaugaacgcccccaauuaucauuacgaagagugcucauguuacccugauaguagcgagauuaccugcgugugccgcgacaacuggcacggguccaauagaccaugggucucuuucaaccagaaucucgaauaucagauaggauacaucuguagcggcauuuuuggcgauaacccgaggcccaaugacaaaacagggucaugcggaccuguuaguuccaacggugcgaacggcgugaagggguucagcuuuaaguauggaaauggcguauggaucggucggaccaaaucuaucucaagucgcaagggguucgagaugauuugggauccaaacggcuggacgggaacugacaauaacuuuagcauaaaacaagacaucgugggcauuaaugaaugguccggguacucuggaucguucguccagcaucccgagcugacaggucuggauuguauccgaccuugcuucuggguggaacucauuagaggcaggccaaaggagaacaccaucuggacuagcggguccucaauaaguuuuuguggaguuaauucugacacagugggcuggagcuggcccgauggugcagaguuaccguucaccaucgacaaauga

SEQ ID NO: 153589 - RNA, 1410 nt, Artificial Sequence
  derived and/or modified CDS sequence (opt3) from neuraminidase__InfluenzaA__AID70518
augaaccccaaucagaagaucauuaccauaggcagcgugugcaugacaaucgggauggccaaccugauucuccaaaucggaaauauuaucuccauauggaucucucacucaauucagcuuagaaaccagagucagaucgagacuuguaaucaaagcgucauuacguacgaaaacaauaccuggguuaaccagacauaugugaauaucuccaacacuaauuucgcugcaggucagucuguagugucggucaaacuggccggcaacucauccuugugcccugugagugggugggcgauauacuccaaggacaauucuauuaggaucggaagcaaaggcgauguuuuugugauucgggagccauucaucuccuguucaccguuagaaugccgcaccuuuuuccugacacagggugcucuacucaacgacaagcauaguaaugggaccaucaaagaucgaagccccuaucguacucugaugucuuguccuauuggagagauaccaucccccuacaacucaagauuugaaagcgucgccuggagugcaucugccugccacgacggcaucaacuggcuuacaauuggcaucuccgggccugauaauggagcuguggcaguacugaaguauaacgguauaauuaccgacacgaucaagagcuggaggaauaacaucuugcggacucaagagucggagugugccugcguuaauggcucuuguuucaccauuaugacagaugggccauccgacggacaggcuucauacaaaaucuuucgcauugaaaagggcaaaauagugaagagugucgagaugaacgcccccaauuaucauuacgaagagugcagcuguuacccugauuccucugagaucacuugcgugugcagagacaacuggcacgguagcaauaggccaugggugucauucaaccagaaucucgaauaucagauuggguacaucuguaguggaaucuuuggcgauaacccgcggcccaaugacaaaaccggcuccugcgggccugucagcucuaacggagcgaaugguguuaagggcuucucauuuaaguaugggaacggaguguggauuggccgcacaaaaaguauaagcucccgaaaggguuucgagaugaucugggauccaaacggguggaccggcacggacaauaacuuuucuauuaaacaagacaucguaggaauuaaugaauggucgggcuacagcggguccuucgugcagcaucccgagcugacuggacuggauuguaucagaccuugcuucugggucgaacucauaaggggucggccaaaggagaacacaaucuggaccucaggcaguucuauuagcuuuuguggggugaauagcgacacuguuggauggucauggcccgauggcgcagaguuaccguucacaaucgacaaauga

SEQ ID NO: 153590 - RNA, 1410 nt, Artificial Sequence
  derived and/or modified CDS sequence (opt3) from neuraminidase__InfluenzaA__AID70519
augaaccccaaucagaagaucauuaccauaggcagcgugugcaugacaaucgggauggccaaccugauucuccaaaucggaaauauuaucuccauauggaucucucacucaauucagcuugguaaccagagucagaucgagacuuguaaucaaagcgucauuacguacgaaaacaauaccuggguuaaccagacauaugugaauaucuccaacacuaauuucgcugcaggccagucuguagugucggucaaacuggccgggaacagcucauugugcccugugaguggaugggcgauauacuccaaggacaauucuauuagaaucggcagcaaaggugauguuuuugugauuagggagccauucaucuccuguucaccguuagaaugccggaccuuuuuccugacacagggggcucuacucaacgacaagcauaguaauggaaccaucaaagaucgcagccccuaucgaacucugaugucuuguccuauuggcgaggucccaucccccuacaacucacguuuugaaagcguggccuggagugcaucugccugccacgacggcauaaacuggcuuacaaucgggauuuccggaccugauaauggugcuguagcaguucugaaguauaacggcaucauaaccgacacgauuaagagcuggagaaauaacaucuugaggacucaagagucggagugugccugcgugaaugggucuuguuucaccaucaugacagauggaccauccgacggccaggcuucauacaaaauuuuucggaucgaaaaggguaaaauugucaagaguguggagaugaaagcccccaacuaucauuacgaagagugcagcuguuacccugauuccucugagauaacuugcgugugccgcgacaauuggcacgggagcaacagaccaugggucucauucaaucagaaccucgaauaucagaucggauacauuuguaguggcaucuuuggcgauaauccgaggcccaacgacaagaccggguccugcggaccuguuagcucuaauggugcgaacggcgugaagggguucucauuuaaauauggaaauggcguauggaucggucggacaaagaguauuagcucccgcaaaggguucgagaugauaugggauccaaacggcuggaccggaacggacaacaauuuuucuaucaagcaagacauugugggcaucaacgaauggucgggguacagcggauccuucguccagcaucccgagcugacuggucuggauuguauucgaccuugcuucuggguggaacucaucagaggcaggccaaaagagaauacaauauggaccucagggaguucuaucagcuuuuguggaguuaacuccgacacugugggcuggucauggcccgauggugcagaguuaccguucacaauugacaaguga

SEQ ID NO: 153591 - RNA, 1410 nt, Artificial Sequence
  derived and/or modified CDS sequence (opt3) from neuraminidase__InfluenzaA__AID70520
augaaccccaaucagaagaucauuaccauaggcagcgugugcaugacaaucgggauggccaaccugauucuccaaaucggaaauauuaucuccauauggaucucucacucaauucagcuuagaaaccagagucagaucgagacuuguaaucaaagcgucauuacguacgaaaacaauaccuggguuaaccagacauaugugaauaucuccaacacuaauuucgcugcaggucagucuguagugucggucaaacuggccggcaacagcucauugugcccugugagugggugggcgauauacuccaaggacaauucuauuaggaucggaagcaaaggcgauguuuuugugauucgggagccauucaucuccuguucaccguuagaaugccgcaccuuuuuccugacacagggugcucuacucaacgacaagcauaguaaugggaccaucaaagaucgaagccccuaucguacucugaugucuuguccuauuggagaggucccaucccccuacaacucaagauuugaaagcguggccuggagugcaucugccugccacgacggcauaaacuggcuuacaaucggcauuuccgggccugauaauggagcuguagcaguucugaaguauaacgguaucauaaccgacacgauuaagagcuggaggaauaacaucuugcggacucaagagucggagugugccugcgugaauggcucuuguuucaccaucaugacagaugggccauccgacggacaggcuucauacaaaauuuuucgcaucgaaaagggcaaaauugucaagaguguggagaugaacgcccccaauuaucauuacgaagagugcagcuguuacccugauuccucugagauaacuugcgugugcagagacaacuggcacgguagcaauaggccaugggucucauucaaccagaaucucgaauaucagaucggguacauuuguaguggaaucuuuggcgauaacccgcggcccaaugacaaaaccggcuccugcgggccuguuagcucuaacggagcgaauggugugaagggcuucucauuuaaguaugggaacggaguauggaucggccgcacaaaaaguauuagcucccgaaaggguuucgagaugauaugggauccaaacggguggaccggcacggacaauaacuuuucuaucaaacaagacauugugggaaucaaugaauggucgggcuacagcggguccuucguccagcaucccgagcugacuggacuggauuguauuagaccuugcuucuggguggaacucaucaggggucggccaaaggagaacacaauauggaccucaggcaguucuaucagcuuuugugggguuaauuccggaacugugggcuggucauggcccgacggugcagaguuaccguucacaauugauaaauga

SEQ ID NO: 153592 - RNA, 1410 nt, Artificial Sequence
  derived and/or modified CDS sequence (opt3) from neuraminidase__InfluenzaA__AID70521
augaaccccaaucagaagaucauuaccauaggcagcgugucccugacaaucucuagaauuugcuucuuuaugcaaaucgccauucucaucaacacugucacgcuucacuucaaacaguacgaguuuaauucaccuccaaacaaucagguuaugcugugugaaccgaccauaaucgagaggaacauuacaaagaucguguauuugacuaauaccacaauugaaaaagagaucugccccaaguuagcugaauaccggaguuggagcaaaccucagugugacauaaccggguucgcaccauuuuccaaggauaacucuauucgccugucggccggaggugacaucuggguaacucgagagcccuaugugucaugcgauccugacaaguguuuccaauuugcgcuaggccaggggacaacccucaauaacguccauagcaaugauacggugcacgaccguacuccauacagaacccugcuuaugaacgagcugggaguucccuuccauuugggcacaaaacaggugugcauugcuuggaguuccucuagcugucacgaugguaaggccuggcuccaugucugcaucacuggggacgauaaaaaugcaaccgccuccaucauuuauaacggaaggcugguggacucaauaguaaguuggagcaagaaaauccugcggacacaggaaucugaguguguuugcauuaauggcaccuguacgguggucaugacugauggcuccgcuucagggaaggcagacacaaagauccucuuuauagaagagggaaaaauugugcacaccagcacuuuaagugguucugcccaacacguggaggaaugcuccugcuacccucgcuauccaggcgucagauguguuugcagggauaacuggaaggggagcaaccggccgaucguggacaucaauauuaaagacuacucgaucguaucuuccuacguguguucaggauucgucggcgauacaccccgcaagccugaccgaaguagcuccucucauugccuggauccaaacaaugaggaaggugggcacggagugaaaggcugggcuuuugacgauggcaacgacguuuggauggggagaaccauuagcgagaagucaaggcuuggauaugaaacguucaaagugauagguggcuggaguaaucccaacuccaagagccagaucaaucggcaggucauuguggaucgugggaaccgcucuggauacucaggcaucuuuaguguagaggguaagagcuguaucaauagaugcuucuauguugaguugauuagggggcggaaagacgaaaccgaggugcuguggacauccaacucuauagucguguucuguggcacuucgggaaccuacggcacagggagcuggccugauggagccgacaucaaucuaaugccaauuuga

SEQ ID NO: 153593 - RNA, 1410 nt, Artificial Sequence
  derived and/or modified CDS sequence (opt3) from neuraminidase__InfluenzaA__AID70522
augaaccccaaucagaagaucauuaccauaggcagcgugucccugacaaucucuacuauuugcuucuuuaugcaaaucgccauucucaucacgaccgucacacuucacuucagacaguacgaguuuaacucaccuccaaauaaccagguuaugcugugugaaccgacuauaaucgagaggaauauuaccgaaaucguguauuugacaaacaccacuauugagaaagaaaucugccccaaguuagcugaguaccggaauuggaguaaaccucagugugacauaacaggguucgcaccauuuagcaaggauaacuccauucgccugucugccggaggugacaucuggguaacccgagagcccuaugugucgugcgauccugacaaauguuaccaauucgcgcuaggccaggggacgacucucaauaacguccauucaaauaacaccgugcgugauagaacaccauauaggacucugcuuaugaaugaacugggaguucccuuucacuugggcaccaaacaggugugcauugcuuggagcaguuccucuugucaugacgguaaggccuggcuccacgucugcaucacaggggaugacaagaacgcaaccgccagcuucaucuacaauggacggcugguggauuccguaguuucauggaguaaggagauucugcgcacgcaggaaagcgagugugugugcauaaacggcacuuguacagucgugaugaccgacggcucugcuuccgggaaagcagauacuaagauccucuuuauugaggaaggaaaaaucgugcauacaucaaccuuaagcgguagugcccaacacgucgaggaaugcucuugcuauccuagauacccaggcguuaggugugugugccgggacaacuggaagggguccaaucgcccgauaguagauauuaacaucaaggaccacagcaucgugucgucuuacgucuguuccggacuggugggcgacacgccccggaaaaaugauucaaguagcuccucucauugccuugacccuaacaaugaggaaggugggcacggaguuaagggcugggcuuucgaugacggcaacgauguguggauggggagaaccauuaaugagacaagcagguugggauaugagacuuuuaaagucaucgaagguuggucaaacccaaagaguaaacugcagauuaaucgacaggugauaguagaccguggcaaccgcuccggguacagcggaaucuucucuguugagggcaagucauguauuaauagaugcuuuuauguggaacuaaucaggggucggaaagaggaaaccgagguccucuggacaaguaacagcaucguggucuucugugggacuuccggcaccuacggaacaggcucuuggcccgauggggccgaccugaaucuuaugccuauuuga

SEQ ID NO: 153594 - RNA, 1410 nt, Artificial Sequence
  derived and/or modified CDS sequence (opt3) from neuraminidase__InfluenzaA__AID70523
augaaccccaaucagaagaucaaaaccauuggcagcgugucccugacaaacucuacuauaugcaucuucaugcaaauugccauccucauuacgaccgucacacuucacuuuaagcaguacgaguucaauucaccuccaaacaaucagguuaugcugugugaaccgacuaucauagagagaaacaucaccgaaauuguguauuugacaaauaccacuaucgagaaagaaauuugccccaaguuagcugaguacaggaacuggaguaaaccucagugugacaucacaggguuugcaccauucagcaaggauaauuccauacggcugucugccggaggugacauuuggguaacccgcgagcccuaugugucgugcgauccugacaaguguuaccaauuugcgcuaggccaggggacgacucucaacaauguccauucaaacaauaccgugcgagaucguacaccauauagaacucugcuuaugaacgaacugggaguucccuuccacuugggcaccaaacaggugugcaucgcuuggagcaguuccucuugucaugacgguaaggccuggcuccacgucugcauuacaggggaugacaaaaaugcaaccgccagcuuuaucuacaacggaaggcugguggauuccguaguuucauggaguaaggagauccugcggacgcaggaaagcgagugugugugcauuaacggcacuuguacagucgugaugaccgacggcucugcuuccgggaaagcagauacuaagauacucuucaucgaggaaggaaagauugugcauacaucaaccuuaagcgguagugcccaacacgucgaggaaugcucuugcuauccucgcuacccaggcguuagaugugugugcagggacaauuggaaaggguccaaccggccgaucguagauauaaauauuaaggaccacagcaucgugucgucuuacgucuguuccggacuggugggcgacacgccccgcaaaaacgauucaaguagcuccucucauugccuugacccuaauaacgaggaaggugggcacggaguuaagggcugggcuuuugaugacggcaaugauguguggauggggcgaaccaucaacgagacaagcagauugggauaugagacuuucaaagucauugaagguuggucaaauccaaagaguaaacugcagaucaacaggcaguuuauuguggaccggggcaaucguuccggguacagcggaauauucucuguagagggcaagucauguaucaaccgcugcuuuuauguugaacuaauuagagguaggaaggaggaaaccgaggugcucuggacaaguaauagcaucgucguguucugugggacuuccggcaccuacggaacaggcucuuggcccgauggggccgaccugaaccuuaugccuaucuga

SEQ ID NO: 153595 - RNA, 1410 nt, Artificial Sequence
  derived and/or modified CDS sequence (opt3) from neuraminidase__InfluenzaA__AID70524
augaaccccaaucagaagaucauuaccauaggcgccguguggagaacaaucagcacuauuugcuucuuuaugcaaaucgcuuuccugauuacgaccgucacacuccacuuuaaacaguacgaguucaacuccccuccaaauaaccagguuaugccgugugaacccacuaucauagagaggaauaucaccgaaauuguguaucuuacaaacaccacuaucgagaaggaaauuugcccuaaacuggcagaguaccggaauuggucuaagccacagugugacaucacaggguuugcccccuucucaaaagauaacaguauacgcuugagcgcgggaggugacauuuggguaacccgagagccuuauguguccugcgauccagacaaguguuaccaauuugcuuuaggccaggggacgacucugaauaacguccauucuaauaacaccgugcgugauagaacacccuauaggacucuacucaugaaugaacugggaguuccuuuccaccuuggcaccaaacaggugugcaucgccuggucgucaagcaguugucaugacgguaaggcauggcugcacgucugcauuacaggggaugacaagaacgccaccgcuuccuuuaucuacaauggacgguugguggauucuguaguuagcugguccaaagagauccuccgcacgcaggaaucagagugugugugcauuaacggcacuuguacagucgugaugaccgacggcagugcaagcgggaaggccgauacuaaaauacuguucaucgaggaaggaaagauugugcauacaucuacccuguccgguucagcucaacacgucgaggaaugcagcugcuauccaagauacccgggcguuaggugugugugccgggacaacuggaaggggaguaaucgccccaucguagauauaaacauuaaagaccacucuaucguguccagcuacgucuguucgggacucgugggcgacacgccucgaaagaaugauucuuccucaaguagccauugcuuagacccaaacaaugaggaaggugggcacggaguuaaaggcugggccuuugaugacggcaacgauguguggauggggagaaccaucaaugagacauccaggcugggauaugagacuuucaaggucauugaagguuggucuaaccccaaaagcaaacuucagaucaaucgucaggugauuguagaccggggcaaccgcucaggguacaguggaauauuuuccguugagggcaagagcuguaucaauagaugcuucuauguggaauugauuaggggucggaaggaggaaaccgagguccuguggacaucuaacucaaucguggucuucugugggaccaguggcacuuacggaacaggcagcuggccugauggggcggaccuaaaucucaugccaaucuga

SEQ ID NO: 153596 - RNA, 1410 nt, Artificial Sequence
  derived and/or modified CDS sequence (opt3) from neuraminidase__InfluenzaA__AID70525
augaaccccaaucagaagaucauuaccauaggcagcgugucccugacaaucuggauuaucugcuucuuuaugcaaauugccauccucauaacuacggucacccuucacuucaaacaguacgaguuuaacucuccuccaaauaaccagguuaugcugugugaaccgacaaucauugagagaaauaucacugaaauuguguauuugaccaacacaaccaucgagaaggaaauaugccccaaauuagcugaguacaggaauuggucaaagccucagugugacauuacuggguucgcaccauuuaguaaagauaacagcauccggcuguccgccggaggugacauuuggguaacacgcgagcccuaugugucuugcgauccugacaaguguuaccaauucgcgcuaggccaggggaccacgcucaauaacguccauucgaauaacacugugcgagaucguaccccauauagaacacugcuuaugaaugaacugggaguucccuuucacuugggcacuaaacaggugugcaucgcuuggucaagcaguuccugucaugacgguaaggccuggcuccacgucugcaucaccggggaugacaagaacgcaacagccucuuucauuuacaauggaaggcugguggauagcguaguuuccuggucaaaagagauacugcggacccaggaaagugagugugugugcaucaacggcacguguacugucgugaugacagacggcagcgcuucugggaaggcagauaccaaaauucucuuuaucgaggaaggaaagauagugcauacuuccacauuaucagguagcgcccaacacgucgaggaaugcaguugcuauccucgcuacccaggcguuagaugugugugcagggacaacuggaaggggucuaaucggccgauuguagauaucaacaucaaagaccacuccauugugagcucguacgucuguucuggacuggugggcgacacccccaggaagaaugauuccucaaguagcucccauugccuugacccuaacaaugaggaaggugggcacggaguuaaaggcugggcuuucgaugacggcaacgauguguggauggggcgaacgaucaaugagaccucuagauugggauaugagacauuuaaggucauugaagguuggagcaacccaaaaucaaagcugcagauaaaucgccaggugaucguagaccggggcaaccguaguggguacuccggaauuuucagcguugagggcaaaucuuguaucaaucgcugcuuuuauguggaacuaaucagagguaggaaggaggaaacugagguccucuggaccucaaacaguauuguggucuucugugggacaagcggcacuuacggaaccggcuccuggcccgauggggccgaccugaauauaaugccuaucuga

SEQ ID NO: 153597 - RNA, 1410 nt, Artificial Sequence; identical to SEQ ID NO: 147566
  derived and/or modified CDS sequence (opt3) from neuraminidase__InfluenzaA__AID70526

SEQ ID NO: 153598 - RNA, 1410 nt, Artificial Sequence
  derived and/or modified CDS sequence (opt3) from neuraminidase__InfluenzaA__AID70527
augaaccccaaucagaagaucauuaccauaggcagcgugucccugacaauguggaucauuugcuucuuuaugcaaaucgccauucucaucacuacggucacccuucacuucaaacaguacgaguuuaacucuccuccaaauaaccagguuaugcugugugaaccgacaauaaucgagagaaauauuacugaaaucguguauuugaccaacacaaccauugagaaggaaaucugccccaaauuagcugaguacaggaauuggucaaagccucagugugacauaacuggguucgcaccauuuaguaaagauaacagcauucggcuguccgccggaggugacaucuggguaacacgcgagcccuaugugucuugcgauccugacaaguguuaccaauucgcgcuaggccaggggaccacgcucaauaacguccauucgaauaacacugugcgagaucguaccccauauagaacacugcuuaugaaugaacugggaguucccuuucacuugggcacuaaacaggugugcauugcuuggucaagcaguuccugucaugacgguaaggccuggcuccacgucugcaucaccggggaugacaagaacgcaacagccucuuucaucuacaauggaaggcugguggauagcguaguuuccuggucaaaagagauucugcggacccaggaaagugagugugugugcauaaacggcacguguacugucgugaugacagacggcagcgcuucugggaaggcagauaccaaaauccucuuuauugaggaaggaaagaucgugcauacuuccacauuaucagguagcgcccaacacgucgaggaaugcaguugcuauccucgcuacccaggcguuagaugugugugcagggacaacuggaaggggucuaaucggccgauaguagauauuaacaucaaagaccacuccaucgugagcucguacgucuguucuggacuggugggcgacacccccaggaagaaugauuccucaaguagcucccauugccuugacccuaacaaugaggaaggugggcacggaguuaaaggcugggcuuucgaugacggcaacgauguguggauggggcgaacgauuaaugagaccucuagauugggauaugagacauuuaaggucaucgaagguuggagcaacccaaaaucaaagcugcagauuaaucgccaggugauaguagaccggggcaaccguaguggguacuccggaaucuucagcguugagggcaaaucuuguauuaaucgcugcuuuuauguggaacuaaucagagguaggaaggaggaaacugagguccucuggaccucaaacaguaucguggucuucugugggacaagcggcacuuacggaaccggcuccuggcccgauggggccgaccugaaucuuaugccuauuuga

SEQ ID NO: 153599 - RNA, 1410 nt, Artificial Sequence
  derived and/or modified CDS sequence (opt3) from neuraminidase__InfluenzaA__AID70528
augaaccccaaucagaagaucauuaccauaggcagcgugucccugucuaucucaacaauuugcuucuuuaugcaaaucgccauucucaucacuacggucacccuucacuucaaacaguacgaguuuaacaguccuccaaauaaccagguuaugcugugugaaccgacaauaaucgagagaaauauuacugaaaucguguauuugaccaacacaaccauugagaaggaaaucugccccaaauuagcugaguacaggaauuggagcaagccucagugugacauaacuggguucgcaccauuuuccaaagauaacucuauucggcugucggccggaggugacaucuggguaacacgcgagcccuaugugucaugcgauccugacaaguguuaccaauucgcgcuaggccaggggaccacgcucaauaacguccauagcaauaacacugugcgagaucguaccccauauagaacacugcuuaugaaugaacugggaguucccuuucacuugggcacuaaacaggugugcauugcuuggaguuccucuagcugucaugacgguaaggccuggcuccacgucugcaucaccggggaugacaagaacgcaacagccuccuucaucuacaauggaaggcugguggauucaguaguuaguuggagcaaagagauucugcggacccaggaaucugagugugugugcauaaacggcacguguacugucgugaugacagacggcuccgcuucagggaaggcagauaccaaaauccucuuuauugaggaaggaaagaucgugcauacuagcacauuaagugguucugcccaacacgucgaggaaugcuccugcuauccucgcuacccaggcguuagaugugugugcagggacaacuggaaggggagcaaucggccgauaguagauauuaacaucaaagaccacucgaucgugucuuccuacgucuguucaggacuggugggcgacacccccaggaagaaugauaguagcuccucuagccauugccuugacccuaacaaugaggaaggugggcacggaguuaaaggcugggcuuucgaugacggcaacgauguguggauggggcgaacgauuaaugagaccucaagauugggauaugagacauuuaaggucaucgaagguuggaguaacccaaaauccaagcugcagauuaaucgccaggugauaguagaccggggcaaccguagcggguacucuggaaucuucucaguugagggcaaaaguuguauuaaucgcugcuuuuauguggaacuaaucagagguaggaaggaggaaacugagguccucuggaccagcaacuccaucguggucuucugugggacaucuggcacuuacggaaccggcucguggcccgauggggccgaccugaaucuuaugccuauuuga

SEQ ID NO: 153600 - RNA, 1410 nt, Artificial Sequence; identical to SEQ ID NO: 147566
  derived and/or modified CDS sequence (opt3) from neuraminidase__InfluenzaA__AID70529

SEQ ID NO: 153601 - RNA, 1410 nt, Artificial Sequence
  derived and/or modified CDS sequence (opt3) from neuraminidase__InfluenzaA__AID70530
augaaccccaaucagaagaucauuaccauaggcagcgugucccugacaaucucuacuauuugcuucuuuaugcagaucgccauucucaucacgaccgucacacuucacuucaaacaguacgaguuuaacucaccuccaaauaaccagguuaugcugugugaaccgacuauaaucgagagaaauauuaccgaaaucguguauuugacaaacaccacuauugagaaggaaaucugccccaaauuagcugaguacaggaauuggaguaagccucagugugacauaacaggguucgcaccauuuagcaaagauaacuccauucggcugucugccggaggugacaucuggguaacccgcgagcccuaugugucgugcgauccugacaaguguuaccaauucgcgcuaggccaggggacgacucucaauaacguccauucaaauaacaccgugcgagaucguacaccauauagaacucugcuuaugaaugaacugggaguucccuuucacuugggcaccaaacaggugugcauugcuuggagcaguuccucuugucaugacgguaaggccuggcuccacgucugcaucacaggggaugacaagaacgcaaccgccagcuucaucuacaauggaaggcugguggauuccguaguuucauggaguaaagagauucugcggacgcaggaaagcgagugugugugcauaaacggcacuuguacagucgugaugaccgacggcucugcuuccgggaaggcagauacuaaaauccucuuuauugaggaaggaaagaucgugcauacaucaaccuuaagcgguagugcccaacacgucgaggaaugcucuugcuauccucgcuacccaggcguuagaugugugugcagggacaacuggaagggguccaaucggccgauaguagauauuaacaucaaagaccacagcaucgugucgucuuacgucuguuccggacuggugggcgacacgccccgcaagaaugauucaaguagcuccucucauugccuugacccuaacaaugaggaaggugggcacggaguuaaaggcugggcuuucgaugacggcaacgauguguggauggggcgaaccauuaaugagacaagcagauugggauaugagacuuuuaaggucaucgaagguuggucaaacccaaaaaguaagcugcagauuaauaggcaagugauaguagaccggggcaaccguuccggguacagcggaaucuucucuguugagggcaaaucauguauuaaucgcugcuuuuauguggaacuaaucagagguaggaaggaggaaaccgagguccucuggacaaguaacagcaucguggucuucugugggacuuccggcaccuacggaacaggcucuuggcccgauggggccgaccugaauauuaugccuauauga

SEQ ID NO: 153602 - RNA, 1410 nt, Artificial Sequence; identical to SEQ ID NO: 147566
  derived and/or modified CDS sequence (opt3) from neuraminidase__InfluenzaA__AID70531

SEQ ID NO: 153603 - RNA, 1410 nt, Artificial Sequence
  derived and/or modified CDS sequence (opt3) from neuraminidase__InfluenzaA__AID70532
augaaccccaaucagaagaucauuaccauaggcagcgugucccugacaaucucuacuauuugcuucuuuaugcagaucgccauucucaucacgaccgucacacuucacuucaaacaguacgaguuuaacucaccuccaaauaaccagguuaugcugugugaaccgacuauaaucgagagaaauauuaccgaaaucguguauuugacaaacaccacuauugagaaggaaaucugccccaaauuagcugaguacaggaauuggaguaagccucagugugacauaacaggguucgcaccauuuagcaaagauaacuccauucggcugucugccggaggugacaucuggguaacccgcgagcccuaugugucgugcgauccugacaaguguuaccaauucgcgcuaggccaggggacgacucucaauaacguccauucaaauaacaccgugcgagaucguacaccauauagaacucugcuuaugaaugaacugggaguucccuuucacuugggcaccaaacaggugugcauugcuuggagcaguuccucuugucaugacgguaaggccuggcuccacgucugcaucacaggggaugacaagaacgcaaccgccagcuucaucuacaauggaaggcugguggauuccguaguuucauggaguaaagagauucugcggacgcaggaaagcgagugugugugcauaaacggcacuuguacagucgugaugaccgacggcucugcuuccgggaaggcagauacuaaaauccucuuuauugaggaaggaaagaucgugcauacaucaaccuuaagcgguagugcccaacacgucgaggaaugcucuugcuauccucgcuacccaggcguuagaugugugugcagggacaacuggaagggguccaaucggccgauaguagauauuaacaucaaagaccacagcaucgugucgucuuacgucuguuccggacuggugggcgacacgccccgcaagaaugauucaaguagcuccucucauugccuugacccuaacaaugaggaaggugggcacggaguuaaaggcugggcuuucgaugacggcaacgauguguggauggggcgaaccauuaaugagacaagcagauugggauaugagacucugaaggucaucgaagguuggucaaacccaaaaaguaagcuacagauuaauaggcaagugauaguagaccggggcaaccguuccggguacuauggaaucuuuagcguugagggcaaaucuuguauuaaucgcugcuucuacguggaacucaucugggguagaaaggaggaaaucgagguccuguggaccucaaacaguaagguggucuuuugugggacaagcggcacuuauggaaccggcuccucucccgauggggccgaccuuaauuucaugccuauuuga

SEQ ID NO: 153604 - RNA, 1410 nt, Artificial Sequence
  derived and/or modified CDS sequence (opt3) from neuraminidase__InfluenzaA__AID70533
augaaccccaaucagaagaucauuaccauaggcagcgugucccuggccaucucuacaauuugcuucuuuaugcaaaucgcuauucucaucacuacggucacccuucacuucaaacaguacgaguuuaacucaccuccaaauaaccagguuaugcugugugaaccgacaauaaucgagagaaauauuacugaaaucguguauuugaccaacacaaccauugagaaggaaaucugccccaaauuagcagaguacaggaauuggaguaagccucagugugacauaacuggguucgccccauuuagcaaagauaacuccauucggcugucugcgggaggugacaucuggguaacacgcgagcccuaugugucgugcgauccugacaaguguuaccaauucgcucuaggccaggggaccacgcucaauaacguccauucaaauaacacugugcgagaucguaccccauauagaacacugcuuaugaaugaacugggaguucccuuucacuugggcacuaaacaggugugcauugccuggagcaguuccucuugucaugacgguaaggcauggcuccacgucugcaucaccggggaugacaagaacgccacagcuagcuucaucuacaauggaaggcugguggauuccguaguuucauggaguaaagagauucugcggacccaggaaagcgagugugugugcauaaacggcacguguacugucgugaugacagacggcucugcauccgggaaggccgauaccaaaauccucuuuauugaggaaggaaagaucgugcauacuucaacauuaagcgguagugcucaacacgucgaggaaugcucuugcuauccucgcuacccaggcguuagaugugugugcagggacaacuggaagggguccaaucggccgauaguagauauuaacaucaaagaccacagcaucgugucgucuuacgucuguuccggacuggugggcgacacccccaggaagaaugauucaaguagcuccucucauugccuugacccuaacaaugaggaaggugggcacggaguuaaaggcugggccuucgaugacggcaacgauguguggauggggcgaacgauuaaugagaccagcagauugggauaugagacauuuaaggucaucgaagguuggucaaacccaaaaaguaagcugcagauuaaucgccaggugauaguagaccggggcaaccguuccggguacagcggaaucuucucuguugagggcaaaucauguauuaaucgcugcuuuuauguggaacuaaucagagguaggaaggaggaaacugagguccucuggaccaguaacagcaucguggucuucugugggacauccggcacuuacggaaccggcucuuggcccgauggggcggaccugaaucuuaugccuauuuga

SEQ ID NO: 153605 - RNA, 1410 nt, Artificial Sequence
  derived and/or modified CDS sequence (opt3) from neuraminidase__InfluenzaA__AID70534
augaaccccaaucagaagaucauuaccauaggcagcgugucccugucuaucuacauuaucugcuucuuuaugcaaauugccauccucauaacaacugucacgcuucacuucaaacaguaugaguuuaacucaccuccaaauaaccaggcuaugccgugugaacccaccaucauugagagaaauaucacagaaauuguuuaccugacuaacaccacaaucgagaaggaaauaugcccuaaauuggcagaguauaggaauuggaguaagccacagugugacauuaccggguucgcccccuuuagcaaagauaacuccauccgguuaucugcgggaggugacauuugggugacucgcgagccuuacguaucgugcgauccagacaaguguuaucaauucgcucugggccaggggacaacccuaaauaacgugcauucaaauaacacgguccgagaucguacucccuacagaacccuccugaugaaugaacuuggagugccuuuucaccugggcacaaagcagguuugcaucgccuggagcaguuccucuugucaugacgguaaagcaugguugcacgugugcaucacuggggaugacaagaacgccaccgcuagcuucauuuauaauggaaggcucgucgauuccgugguaucauggaguaaagagauacugcggacacaggaaagcgaguguguuugcaucaacggcaccuguacgguggucaugacugacggcucugcauccgggaaggccgauacaaaaauucuguuuaucgaggaaggaaagauagugcauaccucaacucucagcgguagugcucaacacguggaggaaugcucuugcuacccacgcuacccgggcgucagauguguuugcagggacaacuggaagggguccaaucggcccauuguggauaucaacaucaaagaccacagcauuguaucgucuuauguguguuccggauuagucggcgacacaccucgcaagaaugauucaaguagcuccucucauugccuggacccaaacaaugaggaaggugggcacggagugaaaggcugggccuucgaugacggcaacgauguuuggauggggcgaaccaucaaugagacgagcagacuuggauacgagaccuuuaaggugauugaagguuggucaaaccccaaaaguaaguugcagauaaauaggcaggucaucguggaccggggcaaccguuccggguauagcggaauuuucucuguagagggcaaaucauguaucaaucgcugcuuuuacguugaacugaucagagguaggaaggaggaaacagaggugcuauggaccaguaacagcauugucguguucugugggacuuccggcacauauggaacuggcucuuggccugauggggcggaccucaaucugaugccaauauga

SEQ ID NO: 153606 - RNA, 1410 nt, Artificial Sequence
  derived and/or modified CDS sequence (opt3) from neuraminidase__InfluenzaA__AID70535
augaaccccaaucagaagaucauuaccauaggcagcgugucccuggccaugugcacaaucuguuucuuuaugcaaauugcuauccucauuacuacggucacccuucacuucaaacaguacgaguuuaacucuccuccaaauaaccaggcaaugccgugcgaacccacaaucauagagagaaauaucacugaaauuguuuaucugaccaacacaaccaucgagaaggaaauuuguccuaaauuggccgaguacaggaauuggucaaagccacagugcgacaucacuggguucgcgcccuuuaguaaagauaacagcauacgguuauccgcuggaggugacauuugggugacacgcgagccuuauguaucuugugauccagacaagugcuaccaauucgcccugggccaggggaccacgcuaaauaacgugcauucgaauaacacuguccgagaucguacccccuauagaacacuccugaugaaugaacuuggagugccuuuucaccugggcacuaagcagguuuguaucgcauggucaagcaguuccugccaugacgguaaagccugguugcacguguguauuaccggggaugacaagaacgcuacagcaucuuucaucuacaauggaaggcucgucgauagcgugguauccuggucaaaagagauccugcggacccaggaaagugagugcguuuguauuaacggcacgugcacuguggucaugacagacggcagcgccucugggaaggcugauaccaaaauacuguuuaucgaggaaggaaagauugugcauacuuccacacucucagguagcgcccaacacguggaggaaugcaguuguuauccacgcuacccgggcgucagaugcguuuguagggacaacuggaaggggucuaaucggcccaucguggauauaaacauuaaagaccacuccaucguaagcucguacgugugcucuggauuagucggcgacaccccucgcaagaaugauuccucaaguagcucccauugucuggacccaaacaaugaggaaggugggcacggagugaaaggcugggcguucgaugacggcaacgauguuuggauggggcgaacgaucaaugagaccucuagacuuggauaugagacauuuaaggugauugaagguuggagcaaccccaaaucaaaguugcagaucaauaggcaggucauuguggaccggggcaaccguaguggguacuccggaauauucagcguagagggcaaaucuugcaucaaucgcuguuuuuauguugaacugauuagagguaggaaggaggaaacugaggugcuauggaccucaaacaguaucgucguguucugcgggacaagcggcacuuacggaaccggcuccuggccugauggggcagaccucaaucugaugccaaucuga

SEQ ID NO: 153607 - RNA, 1410 nt, Artificial Sequence
  derived and/or modified CDS sequence (opt3) from neuraminidase__InfluenzaA__AID70536
augaaccccaaucagaagaucauuaccauaggcagcgugucccugacaaucucuacugucugcuucuuuaugcaaauugccauccucauuacgaccguuacacuucacuucaaacaguacgaguuuaacucaccuccaaauaaccaggugaugcugugugaaccgacuaucauagacagaaauaucaccgagauuguauauuugacaaacaccacuaucgaaaaggagauuugccccaaauuagcugaauacaggaauuggaguaagccucagugugauaucacaggguucgcaccauuuagcaaagacaacuccauacggcugucugccggaggugauauuugggugacccgcgagcccuaugucucgugcgacccugauaaguguuaccaauucgcgcuaggccaggggacgacucucaauaacgugcauucaaauaacaccguucgagaccguacaccauauagaacucugcuuaugaaugagcugggagugcccuuucacuugggcaccaagcaggucugcaucgcuuggagcaguuccucuugucaugaugguaaagccuggcuccacgugugcauuacaggggacgauaagaacgcaaccgccagcuucaucuacaauggaaggcugguagacuccguugugucauggaguaaagaaauccugcggacgcaggagagcgaaugugucugcauuaacggcacuuguacaguggugaugaccgauggcucugcuuccgggaaggcagacacuaaaauacucuuuaucgaggagggaaagauuguccauacaucaaccuuaagcgguagugcccaacacguugaagagugcucuugcuauccucgcuacccaggcgugagauguguaugcagggauaacuggaagggguccaaucggccgaucguggacauaaacauuaaagaccacagcaucgucucgucuuacguguguuccggacugguuggcgauacgccccgcaagaaugacucaaguagcuccucucauugccuugauccuaacaaugaagagggugggcacggagugaaaggcugggcuuucgacgauggcaacgacgucuggauggggcgaaccaucaaugaaacaagcagauugggauaugagacuuuuaaggugauugaggguuggucaaacccaaaaaguaagcugcagaucaauaggcagguaauuguugaucggggcaaccguuccggguacagcggaauauucucuguggaaggcaaaucauguaucaaucgcugcuuuuaugucgagcuaauuagagguaggaaggaagagaccgaagugcucuggacaaguaacagcaucgucguguucugugggacuuccggcaccuacggaacaggcucuuggcccgacggggccgaucugaaucuuaugccuaucuga

SEQ ID NO: 153608 - RNA, 1410 nt, Artificial Sequence; identical to SEQ ID NO: 147566
  derived and/or modified CDS sequence (opt3) from neuraminidase__InfluenzaA__AID70537

SEQ ID NO: 153609 - RNA, 1410 nt, Artificial Sequence
  derived and/or modified CDS sequence (opt3) from neuraminidase__InfluenzaA__AID70538
augaaccccaaucagaagaaaaucaccauuggcgccgugagccugacaaugugcacugucuguauauucaugcaaaucgcuauucucaucacgaccguuacacuucacuuuagacaguacgaguucaacuccccuccaaauaaccaggugaugcugugcgaaccgacuauuaucgagaggaauauaaccgaaaucguauauuugacaaacaccacuauugagaaggaaaucugucccaaauuagcagaguaccggaauuggucuaagccucagugcgacauuacaggguuugccccauucucaaaagauaacaguauccgccugagcgcgggaggugacauaugggugacccgagagcccuaugucuccugugauccugacaagugcuaccaauuugcucuaggccaggggacgacucucaauaacgugcauucuaauaacaccguucgugauagaacaccauauaggacucugcuuaugaaugaacugggagugcccuuccacuugggcaccaagcaggucuguauugccuggucgucaagcaguugccaugacgguaaagcauggcuccacguguguaucacaggggaugacaagaacgccaccgcuuccuuuauuuacaauggacggcugguagauucuguugugagcugguccaaagagauccugcgcacgcaggaaucagagugcgucuguaucaacggcacuugcacaguggugaugaccgacggcagugcaagcgggaaggccgauacuaaaauucucuucauagaggaaggaaagaucguccauacaucuaccuuauccgguucagcucaacacguugaggaaugcagcuguuauccuagauacccaggcgugaggugcguaugucgggacaacuggaaggggaguaaucgcccgauuguggauaucaacauaaaagaccacucuauugucuccagcuacgugugcucgggacugguuggcgacacgccccgaaagaaugauucuuccucaaguagccauugucuugacccuaacaaugaggaaggugggcacggagugaaaggcugggccuuugaugacggcaacgaugucuggauggggagaaccaucaaugagacauccagguugggauaugagacuuucaaggugaucgaagguuggucuaacccaaaaagcaagcugcagauuaaucggcagguaaucguugaccguggcaaccgcucaggguacaguggaauuuuuaguguggagggcaaaagcugcauaaauagauguuucuaugucgaacuaaucaggggucggaaggaggaaaccgaggugcucuggacaucuaacucaauugucguguuuugcgggacuuccggcaccuacggaacaggcagcuggcccgauggggcggaccugaaucuuaugccuaucuga

SEQ ID NO: 153610 - RNA, 1410 nt, Artificial Sequence
  derived and/or modified CDS sequence (opt3) from neuraminidase__InfluenzaA__AID70539
augaaccccaaucagaagaucauuaccauaggcagcgugucccugacaaucucuacuauuugcuucuuuaugcagaucgccauucucaucacgaccgucacacuucacuucaaacaguacgaguuuaacucaccuccaaauaaccagguuaugcugugugaaccgacuauaaucgagagaaauauuaccgaaaucguguauuugacaaacaccacuauugagaaggaaaucugccccaaauuagcugaguacaggaauuggaguaagccucagugugacauaacaggguucgcaccauuuagcaaagauaacuccauucggcugucugccggaggugacaucuggguaacccgcgagcccuaugugucgugcgauccugacaaguguuaccaauucgcgcuaggccaggggacgacucucaauaacguccauucaaauaacaccgugcgagaucguacaccauauagaacucugcuuaugaaugaacugggaguucccuuucacuugggcaccaaacaggugugcauugcuuggagcaguuccucuugucaugacgguaaggccuggcuccacgucugcaucacaggggaugacaagaacgcaaccgccagcuucaucuacaauggaaggcugguggauuccguaguuucauggaguaaagagauucugcggacgcaggaaagcgagugugugugcauaaacggcacuuguacagucgugaugaccgacggcucugcuuccgggaaggcagauacuaaaauccucuuuauugaggaaggaaagaucgugcauacaucaaccuuaagcgguagugcccaacacgucgaggaaugcucuugcuauccucgcuacccaggcguuagaugugugugcagggacaacuggaagggguccaaucggccgauaguagauauuaacaucaaagaccacagcaucgugucgucuuacgucuguuccggacuggugggcgacacgccccgcaagaaugauucaaguagcuccucucauugccuuaacccuaauaacgaggaaggugggcacggaguuaaaggcugggcuuucgacgauggcaaugacguguggauggggcgaaccauuaacgagacaagcagauugggauaugagacuuuuaaggucaucgaagguuggucaaauccaaaaaguaagcugcagauuaacaggcaagugauaguagaucggggcaaucguuccggguacagcggaaucuucucuguugagggcaaaucauguauuaaccgcugcuuuuauguggaacuaaucagagguaggaaggaggaaaccgagguccucuggacaaguaauagcaucguggucuucugugggacuuccggcaccuacggaacaggcucuuggcccgacggggccgaucugaaccuuaugccuauuuga

SEQ ID NO: 153611 - RNA, 1410 nt, Artificial Sequence; identical to SEQ ID NO: 147566
  derived and/or modified CDS sequence (opt3) from neuraminidase__InfluenzaA__AID70540

SEQ ID NO: 153612 - RNA, 1410 nt, Artificial Sequence; identical to SEQ ID NO: 147566
  derived and/or modified CDS sequence (opt3) from neuraminidase__InfluenzaA__AID70541

SEQ ID NO: 153613 - RNA, 1410 nt, Artificial Sequence
  derived and/or modified CDS sequence (opt3) from neuraminidase__InfluenzaA__AID70633
augaaccccaaucagaagaucauuaccauaggcagcgugugcaugacaaucgggauggccaaccugauucuccaaaucggaaauauuaucuccauaugggucucucacucaauccagcuugguaaccagagucagauugaggcuuguaaucaaagcguuaucacuuacgaaaacaauacgugggugaaccagaccuauguaaauauuuccaacacaaauuucgcagccggccagucuguggucucggugaaacuggcggggaacucaucauugugcccuguuaguggaugggcuaucuacuccaaggacaauucugugagaauaggcagcaaaggugaugucuuugugauuagggagccauucaucuccuguucaccguuagaaugccggaccuuuuuccugacucagggggcccuacucaacgacaagcauaguaauggaacaauuaaagaucgcagccccuaucgaacccugaugucuuguccuaucggcgagguaccaucccccuacaacucacguuuugaaagcguugcauggagugccucugcuugccacgacggcaucaacuggcuuacuauugggauauccggaccugauagcggugcaguggccguccugaaguauaauggcaucauuacagacaccaucaagucguggagaaacaauauauugaggacgcaagagucugagugugcuugcgugaacggguccuguuucacuauuaugaccgauggaccaucagacggccaggccaguuacaaaaucuuucggaucgaaaaggguaaaauugucaagagcguggagaugaaugcgcccaacuaucauuacgaagagugcuccuguuacccugauucuagcgagaucacaugcguuugccgcgacaauuggcacgggucaaacagaccaugggugaguuucaaucagaaccucgaauaucagauuggauacauauguuccggcguauuuggcgauaauccgaggcccaacgacaaaacugggagcugcggaccugugucuucaaauggugcaaacggcgucaagggguucaguuuuaaguauggaaauggcguguggaucggucggaccaaaagcauuuccucucgcaagggguucgagaugaucugggauccaaacggcuggacaggaaccgacaacaaauuuucgaucaagcaagacauuguuggcauaaaugaauggagcggguacuccggaucauucgugcagcaucccgagcugacgggucuggauuguauccgaccuugcuucugggucgaacucauuagaggcaggccagaggagaacacuaucuggacaagugggucuagcauuuccuuuuguggagugaauagcgacaccguaggcuggagcuggcccgauggugccgaauuaccguucacuaucgacaaauga

SEQ ID NO: 153614 - RNA, 1398 nt, Artificial Sequence
  derived and/or modified CDS sequence (opt3) from neuraminidase__InfluenzaA__AID70635
augaaccccaagcagaaaauccugugcaccagcgccacagcuauuauaaucggcgcaauugccgugcucaucgggauugcgaaucuuggacugaacaucgguuugcacuuaaagccuggcuguaauugcucccauucucaaccagagacuacgaacaccucacagacaauaaucaauaacuacuauaaugaaacuaacauuaccaauauccagauggaggaaagaacaaguaggaacuucaauaaccugaccaaagggcuauguacuauuaauagcuggcacaucuacggaaaggacaacgcuguccggauaggcgaguccucugauguucucgugacacgcgaaccguauguaucgugcgaccccgaugagugucgauuuuacgcccugucacaggguaccacgauucgugggaaacauagcaauggaacuauccacgacggcagucaauauagagcacuuauuuccuggccucugucuagcccacccaccguguacaacuccagggucgagugcaucggcuggucaaguacaagcugucaugaugggaagucucggauguccaucugcauuucaggaccuaacaauaacgccagcgcugugguuugguauaaucgcagaccaguggcagaaauaaacacuugggccaggaauaucuugcggacccaggagagugaaugugucugccacaacggugugugucccguaguuuucacagacggcucugcuaccgggccugccgauacgcgcauuuacuacuuuaaggagggaaaaauccucaagugggagucccugacuggcacagcgaaacacauagaagagugcagcugcuauggugaacgaaccgggauuacuuguacaugcagagacaauuggcagggaucgaacaggccagugauccagaucgauccggucgcaaugacccauacgucucaauacauuuguucccccgugcugaccgacaauccucggccaaacgaucccaauaucggcaagugcaacgacccuuauccaggcaauaacaauaacggggugaaaggauucucauaccucgauggugccaacacaugguuaggccguacuauuaguaccgcuagccgcuccggguaugagaugcugaagguccccaaugcccuuacagacgacagaucuaagccgauacagggacagacuaucguuuugaacgcagauuggagcggcuacucagguaguuuuauggacuauugggcugaaggggauuguuacagggccugcuucuacguggagcugauucggggccgaccuaaagaggacaagguaugguggaccuccaauagcaucgugucuauguguucaaguacagaauuucuaggacaguggaacuggcccgauggcgcgaaaaucgaguauuuccucuga

SEQ ID NO: 153615 - RNA, 1401 nt, Artificial Sequence
  derived and/or modified CDS sequence (opt3) from neuraminidase__InfluenzaA__AIG44695
augaaccccaaucagaagaucaccgccauuggcagcgugucccugauaaucgcuauuaucugccuccuuaugcaaauugcaauccugacaacuacgaugaccuugcacuucagacagaacgaguguucuaauccuucaaacaaucaggucaugccaugcgaaccgauaaucauugagaggaacacaguucauuuaaauaguacuaccaucgaacgggagauuugucccaaaguggccgaauacaagaacuggagcaaaccucagugccaaaucacaggguuugcgccauucuccaaggacaauucuauacgccugucggcuucaggagauauuuggguaacccgagagcccuaugugagcuguagucuagacaaaugcuaccaguuugcccucggucagggcacuacacugaagaacaagcacuccaaugggaccacgcaugaucguacuccucacagaacccuucugaugaacgaguugggagucccauuccaucucggcacaaaacagguguguaucgcauggucuagcuccucaugcuaugacgguaaggccuggcugcacguuugugugacuggggaugacaaaaaugcuaccgcaaguauuaucuacgauggaaugcuggucgacagcgugggcucuugguccaagaacauccucaggacacaagaaucagagugcguauguauuaaugggaccugcgccguugugaugacggauggcagcgcuaguggaaaagccgacacucgggucuuauuuauacgcgaagguaagaucauuaacaucucuccccuguccggcagcgcgcagcacguggaggagugcucguguuauccuagauacccagaagugaggugcgucugucgggauaacuggaaggggucuaaucgcccgauacuuuauauuaacauggcagacuacuccaucgagucaaguuacguuugcagcggauuggugggcgauacaccccgaaaugacgacuccucuagcucaaguaacuguagagauccuaauaacgaaaggggugccccagggguaaaaggaugggcuuucgacgauggcaaugacguguggaugggccggaccaucaagaacgggucccguagcggauaugagacuuuucgcgucgugaaugguuggacaauggccaacucuaaaucacagauuaauagacagguuaucguggauagugacggcuggagcggguacuccggaauuuucucugucgaaggcaagaaaugcauaaacagguguuuuuauguggagcugauccggggucgaccccaagagccucgcguaugguggaccucgaauagcauuaucguuuucugcgggacguccggcaccuacggaacaggcucauggccagauggggcaaacaucaauuuuaugcccauuuga

SEQ ID NO: 153616 - RNA, 1410 nt, Artificial Sequence
  derived and/or modified CDS sequence (opt3) from neuraminidase__InfluenzaA__AIJ10793
augaaccccaaucagaagaucauuaccauaggcagcgugucccugacaaucucuacuauuugcuucuuuaugcaaaucgccauucucaucacgaccgucacacuucacuucaaacaguacgaguuuaacucaccuccaaauaaccagguuaugcugugugaaccgacuauaaucgagagaaauauuaccgaaaucguguauuugacaaacaccacuauugagaaggaaaucugccccaaauuagcugaguacaggaauuggaguaagccucagugugacauaacaggguucgcaccauuuagcaaagauaacuccauucggcugucugccggaggugacaucuggguaacccgcgagcccuaugugucgugcgauccugacaaguguuaccaauucgcgcuaggccaggggacgacucucaauaacguccauucaaauaacaccgugcgagaucguacaccauauagaacucugcuuaugaaugaacugggaguucccuuucacuugggcaccaaacaggugugcauugcuuggagcaguuccucuugucaugacgguaaggccuggcuccacgucugcaucacaggggaugacaagaacgcaaccgccagcuucaucuacaauggaaggcugguggauuccguaguuucauggaguaaagagauucugcggacgcaggaaagcgagugugugugcauaaacggcacuuguacagucgugaugaccgacggcucugcuuccgggaaggcagauacuaaaauccucuuuauugaggaaggaaagaucgugcauacaucaaccuuaagcgguagugcccaacacgucgaggaaugcucuugcuauccucgcuacccaggcguuagaugugugugcagggacaacuggaagggguccaaucggccgauaguagauauuaacaucaaagaccacagcaucgugucgucuuacgucuguuccggacuggugggcgacacgccccgcaagaaugauucaaguagcuccucucauugccuugacccuaacaaugaggaaggugggcacggaguuaaaggcugggcuuucgaugacggcaacgauguguggauggggcgaaccauuaaugagacaagcagauugggauaugagacuuuuaaggccaucgaagguuggucaaacccaaaaaguaagcugcagaccaauaggcaggucauuguggaccggggcaaccguuccggguacagcggaauauucucuguagagggcaaaucauguaucaaucgcugcuuuuauguugaacuaauuagagguaggaaggaggaaacagaggugcucuggaccaguaacagcaucgucguguucugugggacuuccggcacauacggaaccggcucuuggcccgauggggcggaccugaaucuuaugccuaucuga

SEQ ID NO: 153617 - RNA, 1410 nt, Artificial Sequence; identical to SEQ ID NO: 147566
  derived and/or modified CDS sequence (opt3) from neuraminidase__InfluenzaA__AIJ10794

SEQ ID NO: 153618 - RNA, 1410 nt, Artificial Sequence; identical to SEQ ID NO: 149191
  derived and/or modified CDS sequence (opt3) from neuraminidase__InfluenzaA__AIJ10795

SEQ ID NO: 153619 - RNA, 1410 nt, Artificial Sequence; identical to SEQ ID NO: 149191
  derived and/or modified CDS sequence (opt3) from neuraminidase__InfluenzaA__AIJ10796

SEQ ID NO: 153620 - RNA, 1410 nt, Artificial Sequence
  derived and/or modified CDS sequence (opt3) from neuraminidase__InfluenzaA__AIJ10797
augaaccccaaucagaagaucauuaccauaggcagcgugucccugacaaucucuacuauuugcuucuuuaugcaaaucgccauucucaucacgaccgucacacuucacuucaaacaguacgaguuuaacucaccuccaaauaaccagguuaugcugugugaaccgacuauaaucgagagaaauauuaccgaaaucguguauuugacaaacaccacuauugagaaggaaaucugccccaaauuagcugaguacaggaauuggaguaagccucagugugacauaacaggguucgcaccauuuagcaaagauaacuccauucggcugucugccggaggugacaucuggguaacccgcgagcccuaugugucgugcgauccugacaaguguuaccaauucgcgcuaggccaggggacgacucucaauaacguccauucaaauaacaccgugcgagaucguacaccauauagaacucugcuuaugaaugaacugggaguucccuuucacuugggcaccaaacaggugugcauugcuuggagcaguuccucuugucaugacgguaaggccuggcuccacgucugcaucacaggggaugacaagaacgcaaccgccagcuucaucuacaauggaaaacugguggauuccguaguuucauggaguaaggagauucugaggacgcaggaaagcgagugugugugcauaaacggcacuuguacagucgugaugaccgacggcucugcuuccgggaaagcagauacuaagauccucuuuauugaggaaggaaagaucgugcauacaucaaccuuaagcgguagugcccaacacgucgaggaaugcucuugcuauccucgguacccaggcguucgcugugugugcagagacaacuggaaaggguccaauaggccgauaguagauauuaacaucaaggaccacagcaucgugucgucuuacgucuguuccggacuggugggcgacacgccccggaaaaaugauucaaguagcuccucucauugccuugacccuaacaaugaggaaggugggcacggaguuaagggcugggcuuucgaugacggcaacgauguguggauggggcgcaccauuaaugagacaagccgauugggauaugagacuuuuaaagucaucgaagguuggucaaacccaaagaguaaacugcagauuaauagacaggugauaguagacaggggcaaccgguccggguacagcggaaucuucucuguugaggauaagucauguauuaaucguugcuuuuauguggaacuaauccgcggcagaaaggaggaaaccgagguccucuggacaaguaacagcaucguggucuucugugguacuuccgggaccuacggcacaggaucuuggcccgacggcgccgaucugaaucuuaugccuauuuga

SEQ ID NO: 153621 - RNA, 1410 nt, Artificial Sequence
  derived and/or modified CDS sequence (opt3) from neuraminidase__InfluenzaA__AIJ10798
augaaccccaaucagaagaucauuaccauaggcagcgugucccugacaaucucuacuauuugcuucuuuaugcaaaucgccauucucaucacgaccgucacacuucacuucaaacaguacgaguuuaacucaccuccaaauaaccagguuaugcugugugaaccgacuauaaucgagagaaauauuaccgaaaucguguauuugacaaacaccacuauugagaaggaaaucugccccacauuagcugaguacaggaauuggaguaaaccucagugugacauaaccggguucgcaccauuuagcaaggauaacuccauucggcugucugccggaggugacaucuggguaacgcgcgagcccuaugugucgugcgauccugacaaauguuaccaauucgcgcuaggccaggggacuacccucaauaacguccauucaaauaacacagugcgagaucguacuccauauagaacccugcuuaugaaugaacugggaguucccuuucacuugggcacaaaacaggugugcauugcuuggagcaguuccucuugucaugacgguaaggccuggcuccacgucugcaucaccggggaugacaagaacgcaacggccagcuucaucuacaauggaaggcugguggauuccguaguuucauggaguaaggagauucugcggacucaggaaagcgagugugugugcauaaacggcacauguaccgucgugaugacugacggcucugcuuccgggaaagcagauacaaagauccucuuuauugaggaaggaaaaaucgugcauaccucaacguuaagcgguagugcccaacacgucgaggaaugcucuugcuauccucgcuacccaggcguuagaugugugugcagggacaacuggaagggguccaaucggccgauaguagauauuaacaucaaggaccacagcaucgugucgucuuacgucuguuccggacuggugggcgacacccccaggaaaaaugauucaaguagcuccucucauugccuugacccuaacaaugaggaaggugggcacggaguuaagggcugggcuuucgaugacggcaacgauguguggauggggcgaacaauuaaugagacuagcagauugggauaugagaccuuuaaagucaucgaagguuggucaaacccaaagaguaaacugcagauuaaucgccaggugauaguagaccggggcaaccguuccggguacagcggaaucuucucuguugagggcaagucauguauuaaucgcugcuuuuauguggaacuaaucagagguaggaaagaggaaacagagguccucuggaccaguaacagcaucguggucuucugugggacuuccggcacauacggaaccggcucuuggcccgauggggccgaccugaaucuuaugccuauuuga

SEQ ID NO: 153622 - RNA, 1410 nt, Artificial Sequence; identical to SEQ ID NO: 149191
  derived and/or modified CDS sequence (opt3) from neuraminidase__InfluenzaA__AIJ10799

SEQ ID NO: 153623 - RNA, 1410 nt, Artificial Sequence
  derived and/or modified CDS sequence (opt3) from neuraminidase__InfluenzaA__AIJ10800
augaaccccaaucagaagaucauuaccauaggcagcgugucccugacaaucucuacuauuugcuucuuuaugcaaaucgccauucucaucacgaccgucacacuucacuucaaacaguacgaguuuaacucaaguccuaauaaccagguuaugcugugugaaccaacuauaaucgagagaaauauuaccgaaaucguguauuugacaaacaccacuauugagaaggaaaucugcccgaaauuagcugaguacaggaauuggagcaagccccagugugacauaacaggguucgcaccuuuuuccaaagauaacucuauucggcugucggccggaggugacaucuggguaacccgcgagccauaugugucaugcgaucccgacaaguguuaccaauucgcgcuaggccaggggacgacucucaauaacguccauagcaauaacaccgugcgagaucguacaccuuauagaacucugcuuaugaaugaacugggaguuccauuucacuugggcaccaaacaggugugcauugcuuggaguuccucuagcugucaugacgguaaggccuggcuccacgucugcaucacaggggaugacaagaacgcaaccgccuccuucaucuacaauggaaaacugguggauucaguaguuaguuggagcaaggagauucugaggacgcaggaaucugagugugugugcauaaacggcacuuguacagucgugaugaccgacggcuccgcuucagggaaagcagauacuaagauccucuuuauugaggaaggaaagaucgugcauacaagcaccuuaagugguucugcccaacacgucgaggaaugcuccugcuauccccgguacccuggcguucgcugugugugcagagacaacuggaaagggagcaauaggccaauaguagauauuaacaucaaggaccacucgaucgugucuuccuacgucuguucaggacuggugggcgacacgccgcggaaaaaugauaguagcuccucuagccauugccuugaccccaacaaugaggaaggugggcacggaguuaagggcugggcuuucgaugacggcaacgauguguggauggggcgcaccauuaaugagacaucacgauugggauaugagacuuuuaaagucaucgaagguuggaguaacccuaaguccaaacugcagauuaauagacaggugauaguagacaggggcaaccggagcggguacucuggaaucuucucaguugagggcaagaguuguauuaaucguugcuuuuauguggaacuaauccgcgguagaaaggaggaaaccgagguccucuggacaagcaacuccaucguggucuucugugggacuucuggcaccuacggaacaggcucguggccagauggggccgaccugaaucuuaugcccauuuga

SEQ ID NO: 153624 - RNA, 1410 nt, Artificial Sequence; identical to SEQ ID NO: 150194
  derived and/or modified CDS sequence (opt3) from neuraminidase__InfluenzaA__AIJ10801

SEQ ID NO: 153625 - RNA, 1410 nt, Artificial Sequence; identical to SEQ ID NO: 150194
  derived and/or modified CDS sequence (opt3) from neuraminidase__InfluenzaA__AIJ10803

SEQ ID NO: 153626 - RNA, 1410 nt, Artificial Sequence; identical to SEQ ID NO: 150194
  derived and/or modified CDS sequence (opt3) from neuraminidase__InfluenzaA__AIJ10804

SEQ ID NO: 153627 - RNA, 1410 nt, Artificial Sequence; identical to SEQ ID NO: 150194
  derived and/or modified CDS sequence (opt3) from neuraminidase__InfluenzaA__AIJ10805

SEQ ID NO: 153628 - RNA, 1410 nt, Artificial Sequence
  derived and/or modified CDS sequence (opt3) from neuraminidase__InfluenzaA__AIJ10806
augaaccccaaucagaagaucauuaccauaggcagcgugucccugacaaucucuacuauuugcuucuuuaugcagaucgccauucucaucacgaccgucacacuucacuucaaacaguacgaguuuaacucaccuccaaauaaccagguuaugcugugugaaccgacuauaaucgagagaaauauuaccgaaaucguguauuugacaaacaccacuauugagaaggaaaucugccccaaaccugcugaguacaggaauuggaguaagccacagugugggauaacaggauucgcacccuuuagcaaagacaacuccauucgguuaucugccgguggcgauaucuggguaacccgcgagccuuaugugucgugcgacccagauaaguguuaccaauucgcgcuggggcagggaacgacucuaaauaacguccauucaaauaacaccgugcgagaccguacacccuauagaacucuccugaugaaugaacuuggcguuccuuuucaccuggguaccaaacaggugugcauugcuuggagcaguuccucuugucaugaugggaaggccugguugcacgucugcaucacaggagacgauaagaacgcaaccgccagcuucaucuacaauggcaggcucguggacuccguaguuucauggaguaaagagauucugcggacgcaggaaagcgagugugugugcauaaacggcacuuguacagucgugaugaccgaugggucugcuuccggaaaggcagacacuaaaauccuguuuauugaggaagguaagaucgugcauacaucaacccucagcggcagugcccaacacgucgaggaaugcucuugcuauccacgcuacccggggguuagaugugugugcagggauaacuggaagggauccaaucggcccauaguagacauuaacaucaaagaucacagcaucgugucgucuuacgucuguuccggcuuagugggugacacgccucgcaagaaugacucaaguagcauuucccauugccuggauccaaacaaugaggaagggggacacggcguuaaaggcugggcuuucgacgaugggaacgacguguggaugggacgaaccaucaaugagacaucuagacuugguuaugagacuuuuaaggucauugaaggcuggagcaaccccaaaucaaaguugcagauaaauaggcaagugaucguagaucguggggaccggaguggauacuccggcauuuucagcguugaggguaaaucuuguaucaaccgcugcuuuuauguggaacugaucagagggaggaaggaggaaaccgagguccuauggacaucaaauaguauuguggucuucuguggcacuagcggaaccuacggcacaggguccuggccugauggagccgaccucaaccugaugccaauauga

SEQ ID NO: 153629 - RNA, 1410 nt, Artificial Sequence
  derived and/or modified CDS sequence (opt3) from neuraminidase__InfluenzaA__AIJ10807
augaaccccaaucagaagaucauuaccauaggcagcgugucccugacaaucucuacuauuugcuucuuuaugcagaucgccauucucaucacgaccgucacacuucacuucaaacaguacgaguuuaacucaccuccaaauaaccagguuaugcugugugaaccgacuauaaucgagagaaauauuaccgaaaucguguauuugacaaacaccacuauugagaaggaaaucugccccaaaccugcugaguacaggaauuggaguaagccacagugugggauaacaggauucgcacccuuuagcaaagacaacuccauucgguuaucugccgguggcgauaucuggguaacccgcgaggcguaugugucgugcgacccugauaaguguuaccaauucgcucuggggcagggaacgacucuaaauaacguccauucaaauaacaccgugcgagaccguacaccauauagaacucuccugaugaaugaacuuggcguucccuuucaccuggguaccaaacaggugugcauugccuggagcaguuccucuugucaugaugggaaggcaugguugcacgucugcaucacaggagacgauaagaacgccaccgcuagcuucaucuacaauggcaggcucguggacuccguaguuucauggaguaaagagauucugcggacgcaggaaagcgagugugugugcauaaacggcacuuguacagucgugaugaccgaugggucugcauccggaaaggccgacacuaaaauccuguuuauugaggaagguaagaucgugcauacaucaacccucagcggcagugcucaacacgucgaggaaugcucuugcuauccucgcuacccagggguuagaugugugugcagggauaacuggaagggauccaaucggccgauaguagacauuaacaucaaagaucacagcaucgugucgucuuacgucuguuccggcuuagugggugacacgccccgcaagaaugacucaaguagcuccucucauugccuggauccuaacaaugaggaagggggacacggcguuaaaggcugggccuucgacgaugggaacgacguguggaugggacgaaccauuaaugagacaagcagacuugguuaugagacuuuuaaggucaucgaaggcuggucaaacccaaaaaguaaguugcagauuaauaggcaagugauaguagaucguggggaccgguccggauacagcggcaucuucucuguugaggguaaaucauguauuaaccgcugcuuuuauguggaacugaucagagggaggaaggaggaaaccgagguccuauggacaaguaauagcaucguggucuucuguggcacuuccggaaccuacggcacagggucuuggcccgauggagcggaccucaaccugaugccuauuuga

SEQ ID NO: 153630 - RNA, 1410 nt, Artificial Sequence
  derived and/or modified CDS sequence (opt3) from neuraminidase__InfluenzaA__AIJ10808
augaaccccaaucagaagaucauuaccauaggcagcgugucccugacaaucucuacuauuugcuucuuuaugcaaaucgccauucucaucacgaccgucacacuucacuucaaacaguacgaguuuaacucaccuccaaauaaccagguuaugcugugugaaccgacuauaaucgagagaaauauuaccgaaaucguguauuugacaaacaccacuauugagaaggaaaucugccccaaaccugcugaguacaggaauuggaguaagccacagugugggauaacaggauucgcacccuuuagcaaagacaacuccauucgguuaucugccgguggcgauaucuggguaacccgcgagccuuaugugucgugcgacccagauaaguguuaccaauucgcgcuggggcagggaacgacucuaaauaacguccauucaaauaacaccgugcgagaccguacacccuauagaacucuccugaugaaugaacuuggcguuccuuuucaccuggguaccaaacaggugugcauugcuuggagcaguuccucuugucaugaugggaaggccugguugcacgucugcaucacaggagacgauaagaacgcaaccgccagcuucaucuacaauggcaggcucguggacuccguaguuucauggaguaaagaggugcugcggacgcaggaaagcgagugugucugcauuaacggcacuuguacaguggugaugaccgaugggucugcuuccggaaaggcagacacuaaaauacuguuuaucgaggaagguaagauuguccauacaucaacccucagcggcagugcccaacacguugaggaaugcucuugcuauccacgcuacccgggggugagauguguaugcagggauaacuggaagggauccaaucggcccaucguggacauaaacauuaaagaucacagcaucgucucgucuuacguguguuccggcuuaguuggugacacgccucgcaagaaugacucaaguagcuccucucauugccuggauccaaacaaugaggaagggggacacggcgugaaaggcugggcuuucgacgaugggaacgacgucuggaugggacgaaccaucaaugagacaagcagacuugguuaugagacuuuuaaggugauugaaggcuggucaaaccccaaaaguaaguugcagaucaauaggcagguaauuguugaucguggggaccgguccggauacagcggcauauucucuguggaggguaaaucauguaucaaccgcugcuuuuaugucgaacugauuagagggaggaaggaggaaaccgaggugcuauggacaaguaauagcaucgucguguucuguggcacuuccggaaccuacggcacagggucuuggccugauggagccgaccucaaccugaugccaaucuga

SEQ ID NO: 153631 - RNA, 1410 nt, Artificial Sequence; identical to SEQ ID NO: 150194
  derived and/or modified CDS sequence (opt3) from neuraminidase__InfluenzaA__AIJ10809

SEQ ID NO: 153632 - RNA, 1410 nt, Artificial Sequence; identical to SEQ ID NO: 150194
  derived and/or modified CDS sequence (opt3) from neuraminidase__InfluenzaA__AIJ10810

SEQ ID NO: 153633 - RNA, 1410 nt, Artificial Sequence
  derived and/or modified CDS sequence (opt3) from neuraminidase__InfluenzaA__AIJ10812
augaaccccaaucagaagaucauuaccauaggcagcgugucccugacaaucucuacuauuugcuucuuuaugcaaaucgccauucucaucacgaccgucacacuucacuucaaacaguacgaguuuaacucaccuccaaauaaccagguuaugcugugugaaccgacuauaauggagagaaaugugaccgaaaucguauauuugacaaacaccacuauugagaaggaaaucugccccaaaccugcugaguacaggaauuggaguaagccacagugugggauuacaggauucgcacccuuuagcaaagacaacuccauccgguuaucugccgguggcgauauaugggugacccgcgagccuuaugucucgugcgacccagauaaguguuaccaauucgcgcuggggcagggaacgacucuaaauaacgugcauucaaauaacaccguucgagaccguacacccuauagaacucuccugaugaaugaacuuggcgugccuuuucaccuggguaccaagcaggucugcauugcuuggagcaguuccucuugucaugaugggaaagccugguugcacgugugcaucacaggagacgauaagaacgcaaccgccagcuucauuuacaauggcaggcucguagacuccguugugucauggaguaaagagauccugcggacgcaggaaagcgagugugucugcaucaacggcacuuguacaguggugaugaccgaugggucugcuuccggaaaggcagacacuaaaauucuguuuauagaggaagguaagaucguccauacaucaacccucagcggcagugcccaacacguugaggaaugcucuugcuauccacgcuacccgggggugagauguguaugcagggauaacuggaagggauccaaucggcccauuguggacaucaacauaaaagaucacagcauugucucgucuuacguguguuccggcuuaguuggugacacgccucgcaagaaugacucaaguagcuccucucauugccuggauccaaacaaugaggaagggggacacggcgugaaaggcugggcuuucgacgaugggaacgacgucuggaugggacgaaccaucaaugagacaagcagacuugguuaugagacuuuuaaggugaucgaaggcuggucaaaccccaaaaguaaguugcagauuaauaggcagguaaucguugaucguggggaccgguccggauacagcggcauuuucucuguggaggguaaaucauguauaaaccgcugcuuuuaugucgaacugaucagagggaggaaggaggaaaccgaggugcuauggacaaguaauagcauugucguguucuguggcacuuccggaaccuacggcacagggucuuggccugauggagccgaccucaaccugaugccaaucuga

SEQ ID NO: 153634 - RNA, 1410 nt, Artificial Sequence
  derived and/or modified CDS sequence (opt3) from neuraminidase__InfluenzaA__AIJ10813
augaaccccaaucagaagaucauuaccauaggcagcgugucccugacaaucucuacuauuugcuucuuuaugcaaaucgccauucucaucacgaccgucacacuucacuucaaacaguacgaguuuaacucaccuccaaauaaccagguuaugcugugugaaccgacuauaauggagagaaaugugaccgaaaucguauauuugacaaacaccacuauugagaaggaaaucugccccaaaccugcugaguacaggaauuggaguaagccacagugugggauuacaggauucgcacccuuuagcaaagacaacuccauccgguuaucugccgguggcgauauaugggugacccgcgagccuuaugucucgugcgacccagauaaguguuaccaauucgcgcuggggcagggaacgacucuaaauaacgugcauucaaauaaccccguucgagaccguaccccuuauagaacacuccugaugaaugaacuuggcgugccauuucaccuggguacuaagcaggucugcauugcuuggagcaguuccucuugucaugaugggaaagccugguugcacgugugcaucaccggagacgauaagaacgcaacagccagcuucauuuacaauggcaggcucguagacuccguugugucauggaguaaagagauccugcggacccaggaaagcgagugugucugcaucaacggcacguguacuguggugaugacagaugggucugcuuccggaaaggcagacaccaaaauucuguuuauagaggaagguaagaucguccauacuucaacacucagcggcagugcccaacacguugaggaaugcucuugcuauccgcgcuaccccggggugagauguguaugcagggauaacuggaagggauccaaucggccuauuguggacaucaacauaaaagaucacagcauugucucgucuuacguguguuccggcuuaguuggugacaccccacgcaagaaugacucaaguagcuccucucauugccuggaucccaacaaugaggaagggggacacggcgugaaaggcugggcuuucgacgaugggaacgacgucuggaugggacgaacgaucaaugagaccagcagacuugguuaugagacauuuaaggugaucgaaggcuggucaaacccuaaaaguaaguugcagauuaauaggcagguaaucguugaucguggggaccgguccggauacagcggcauuuucucuguggaggguaaaucauguauaaaccgcugcuuuuaugucgaacugaucagagggaggaaggaggaaacugaggugcuauggaccaguaauagcauugucguguucuguggcacauccggaacuuacggcaccgggucuuggccagauggagccgaccucaaccugaugcccaucuga

SEQ ID NO: 153635 - RNA, 1410 nt, Artificial Sequence
  derived and/or modified CDS sequence (opt3) from neuraminidase__InfluenzaA__AIJ10814
augaaccccaaucagaagaucauuaccauaggcagcgugucccugacaaucucuacuauuugcuucuuuaugcaaaucgccauucucaucacgaccgucacacuucacuucaaacaguacgaguuuaacucaccuccaaauaaccagguuaugcugugugaaccgacuauaguggagagaaauaucaccgaaauuguauauuugacaaacaccacuaucgagaaggaaauuugccccaaaccugcugaguacaggaauuggaguaagccacagugugggaucacaggauucgcacccuuuagcaaagacaacuccauacgguuaucugccgguggcgauauuugggugacccgcgagccuuaugucucgugcgacccagauaaguguuaccaauucgcgcuggggcagggaacgacucuaaauaacgugcauucaaauaacaccguucgagaccguacacccuauagaacucuccugaugaaugaacuuggcgugccuuuucaccuggguaccaagcaggucugcaucgcuuggagcaguuccucuugucaugaugggaaagccugguugcacgugugcauuacaggagacgauaagaacgcaaccgccagcuucaucuacaauggcaggcucguagacuccguugugucauggaguaaagagauccugcggacgcaggaaagcgagugugucugcauuaacggcacuuguacaguggugaugaccgaugggucugcuuccggaaaggcagacacuaaaauacuguuuaucgaggaagguaagauuguccauacaucaacccucagcggcagugcccaacacguugaggaaugcucuugcuauccacgcuacccgggggugagauguguaugcagggauaacuggaagggauccaaucggcccaucguggacauaaacauuaaagaucacagcaucgucucgucuuacguguguuccggcuuaguuggugacacgccucgcaagaaugacucaaguagcuccucucauugccuggauccaaacaaugaggaagggggacacggcgugaaaggcugggcuuucgacgaugggaacgacgucuggaugggacgaaccaucaaugagacaagcagacuugguuaugagacuuuuaaggugauugaaggcuggucaaaccccaaaaguaaguugcagaucaauaggcagguaauuguugauaaaggggaccgguccggauacagcggcauauucucuguggaggguaagucauguaucaaccguugcuuuuaugucgaacugauucgcgggagaaaggaggaaaccgaggugcuauggacaaguaauagcaucgucguguucuguggcacuuccggaaccuacggcacagggucuuggccugauggagccgaccucaaccugaugccaaucuga

SEQ ID NO: 153636 - RNA, 1410 nt, Artificial Sequence
  derived and/or modified CDS sequence (opt3) from neuraminidase__InfluenzaA__AIJ10815
augaaccccaaucagaagaucauuaccauaggcagcgugucccugacaaucucuacuauuugcuucuuuaugcagaucgccauucucaucacgaccgucacacuucacuucaaacaguacgaguuuaacucaccuccaaauaaccagguuaugcugugugaaccgacuauaaucgagagaaauauuaccgaaaucguguauuugacaaacaccacuauugagaaggaaaucugccccaaaccugcugaguacaggaauuggaguaagccacagugugggauaacaggauucgcacccuuuagcaaagacaacuccauucgguuaucugccgguggcgauaucuggguaacccgcgagccuuaugugucgugcgacccagauaaguguuaccaauucgcgcuggggcagggaacgacucuaaauaacguccauucaaauaacaccgugcgagaccguacacccuauagaacucuccugaugaaugaacuuggcguuccuuuucaccuggguaccaaacaggugugcauugcuuggagcaguuccucuugucaugaugggaaggccugguugcacgucugcaucacaggagacgauaagaacgcaaccgccagcuucaucuacaauggcaggcucguggacuccguaguuucauggaguaaagagauucugcggacgcaggaaagcgagugugugugcauaaacggcacuuguacagucgugaugaccgaugggucugcuuccggaaaggcagacacuaaaauccuguuuauugaggaagguaagaucgugcauacaucaacccucagcggcagugcccaacacgucgaggaaugcucuugcuauccacgcuacccggggguuagaugugugugcagggauaacuggaagggauccaaucggcccauaguagacauuaacaucaaagaucacagcaucgugucgucuuacgucuguuccggcuuagugggugacacgccucgcaagaaugacucaaguagcuccucucauugccuggauccaaacaaugaggaagggggacacggcguuaaaggcugggcuuucgacgaugggaacgacguguggaugggacgaaccauuaaugagacaagcagacuugguuaugagacuuuuaaggucaucgaaggcuggucaaaccccaaaaguaaguugcagauuaauaggcaagugauaguagaucguggggaccgguccggauacagcggcaucuucucuguugaggguaaaucauguauuaaccgcugcuuuuauguggaacugaucagagggaggaaggaggaaaaugagguccuauggaccaguaacagcaucguggucuucuguggcacauccggaacuuacggcaccgggucuuggccugauggagccgaccucaaucugaugccaauuuga

SEQ ID NO: 153637 - RNA, 1410 nt, Artificial Sequence
  derived and/or modified CDS sequence (opt3) from neuraminidase__InfluenzaA__AIJ10816
augaaccccaaucagaagaucauuaccauaggcagcgugucccugacaaucucuacuauuugcuucuuuaugcagaucgccauucucaucacgaccgucacacuucacuucaaacaguacgaguuuaacucaccuccaaauaaccagguuaugcugugugaaccgacuauaaucgagagaaauauuaccgaaaucguguauuugacaaacaccacuauugagaaggaaaucugccccaaaccugcugaguacaggaauuggaguaagccacagugugggauaacaggauucgcacccuuuagcaaagacaacuccauucgguuaucugccgguggcgauaucuggguaacccgcgagccuuaugugucgugcgacccagauaaguguuaccaauucgcgcuggggcagggaacgacucuaaauaacguccauucaaauaacaccgugcgagaccguacacccuauagaacucuccugaugaaugaacuuggcguuccuuuucaccuggguaccaaacaggugugcauugcuuggagcaguuccucuugucaugaugggaaggccugguugcacgucugcaucacaggagacgauaagaacgcaaccgccagcuucaucuacaauggcaggcucguggacuccguaguuucauggaguaaagagauucugcggacgcaggaaagcgagugugugugcauaaacggcacuuguacagucgugaugaccgaugggucugcuuccggaaaggcagacacuaaaauccuguuuauugaggaagguaagaucgugcauacaucaacccucagcggcagugcccaacacgucgaggaaugcucuugcuauccacgcuacccggggguuagaugugugugcagggauaacuggaagggauccaaucggcccauaguagacauuaacaucaaagaucacagcaucgugucgucuuacgucuguuccggcuuagugggugacacgccucgcaagaaugacucaaguagcuccucucauugccuggauccaaacaaugaggaagggggacacggcguuaaaggcugggcuuucgacgaugggaacgacguguggaugggacgaaccauuaaugagacaagcagacuugguuaugagacuuuuaaggucaucgaaggcuggucaaaccccaaaaguaaguugcagauuaauaggcaagugauaguagaucguggggaccgguccggauacagcggcaucuucucuguugaggguaaaggguguauuaaccgcugcuuuuauguggaacugaucagaggcaggaaggaggaaaccgagguccuauggacaucaaauaguaucguggucuucuguggaacuagcggcaccuacgggacaggauccuggccugauggugccgaccucaaccugaugccaauuuga

SEQ ID NO: 153638 - RNA, 1410 nt, Artificial Sequence; identical to SEQ ID NO: 150194
  derived and/or modified CDS sequence (opt3) from neuraminidase__InfluenzaA__AIJ10817

SEQ ID NO: 153639 - RNA, 1410 nt, Artificial Sequence; identical to SEQ ID NO: 150194
  derived and/or modified CDS sequence (opt3) from neuraminidase__InfluenzaA__AIJ10818

SEQ ID NO: 153640 - RNA, 1410 nt, Artificial Sequence
  derived and/or modified CDS sequence (opt3) from neuraminidase__InfluenzaA__AIJ10819
augaaccccaaucagaagaucauuaccauaggcagcgugucccugacaaucucuacuauuugcuucuuuaugcagaucgccauucucaucacgaccgucgcacuucacuucaaacaguacgaguuuaacucaccuccaaauaaccagguuaugcugugugaaccgacaauaaucgagagaaauauuacugaaaucguguauuugaccaacacaaccauugagaaggaaaucugccccaaaccugcugaguacaggaauuggaguaagccacagugugggauaacuggauucgcccccuuuagcaaagacaacuccauucgguuaucugcggguggcgauaucuggguaacacgcgagccuuaugugucgugcgacccagauaaguguuaccaauucgcucuggggcagggaaccacgcuaaauaacguccauucaaauaacacugugcgagaccguacccccuauagaacacuccugaugaaugaacuuggcguuccuuuucaccuggguacuaaacaggugugcauugccuggagcaguuccucuugucaugaugggaaggcaugguugcacgucugcaucaccggagacgauaagaacgccacagcuagcuucaucuacaauggcaggcucguggacuccguaguuucauggaguaaagagauucugcggacccaggaaagcgagugugugugcauaaacggcacguguacugucgugaugacagaugggucugcauccggaaaggccaacaccaaaauccuguuuauugaggaagguaagaucgugcauacuucaacacucagcggcagugcucaacacgucgaggaaugcucuugcuauccacgcuacccggggguuagaugugugugcagggacaauuggaagggauccaaccggcccauaguagauauuaauaucaaagaccacagcaucgugucgucuuacgucuguuccggcuuagugggugauaccccucgcaagaacgacucaaguagcuccucucauugccuggacccaaauaacgaggaagggggacacggcguuaaaggcugggccuucgaugacgggaaugauguguggaugggacgaacgauuaacgagaccagcagacuugguuaugagacauuuaaggucaucgaaggcuggucaaaucccaaaaguaaguugcagauuaacaggcaagugauaguagaccguggggaucgguccggauacagcggcaucuucucuguugaggguaaaucauguauuaaucgcugcuuuuauguggaacugaucagagggaggaaggaggaaacugagguccuauggaccaguaacagcaucguggucuucuguggcacauccggaacuuacggcaccgggucuuggccugacggagcggaucucaaucugaugccaauuuga

SEQ ID NO: 153641 - RNA, 1410 nt, Artificial Sequence; identical to SEQ ID NO: 150194
  derived and/or modified CDS sequence (opt3) from neuraminidase__InfluenzaA__AIJ10820

SEQ ID NO: 153642 - RNA, 1410 nt, Artificial Sequence; identical to SEQ ID NO: 150194
  derived and/or modified CDS sequence (opt3) from neuraminidase__InfluenzaA__AIJ10821

SEQ ID NO: 153643 - RNA, 1410 nt, Artificial Sequence
  derived and/or modified CDS sequence (opt3) from neuraminidase__InfluenzaA__AIJ10822
augaaccccaaucagaagaucauuaccauaggcagcgugucccugacaaucucuacuauuugcuucuuuaugcagaucgccauucucaucacgaccgucacacuucacuucaaacaguacgaguuuaacucaccuccaaauaaccagguuaugcugugugaaccgacuauaaucgagagaaauauuaccgaaaucguguauuugacaaacaccacuauugagaaggaaaucugccccaaaccugcugaguacaggaauuggaguaagccacagugugggauaacaggauucgcacccuuuagcaaagacaacuccauucgguuaucugccgguggcgauaucuggguaacccgcgagccuuaugugucgugcgacccagauaaguguuaccaauucgcgcuggggcagggaacgacucuaaauaacguccauucaaauaacaccgugcgagaccguacacccuauagaacucuccugaugaaugaacuuggcguuccuuuucaccuggguaccaaacaggugugcauugcuuggagcaguuccucuugucaugaugggaaggccugguugcacgucugcaucacaggagacgauaagaacgcaaccgccagcuucaucuacaauggcaggcucguggacuccguaguuucauggaguaaagauauucugcggacgcaggagagcgaaugugugugcauaaacggcacuuguacagucgugaugaccgacgggucugcuuccggaaaggcagauacuaaaauccuguuuauugaggaggguaagaucgugcauacaucaacccucagcggcagugcccaacacgucgaagagugcucuugcuauccacgcuacccggggguuagaugugugugcagggacaacuggaagggauccaaucggcccauaguagauauuaacaucaaagaccacagcaucgugucgucuuacgucuguuccggcuuagugggugacacgccucgcaagaaugauucaaguagcuccucucauugccuggacccaaacaaugaagaagggggacacggcguuaaaggcugggcuuucgaugacgggaacgauguguggaugggacgaaccauuaaugagacaagcagacuugguuaugagacuuuuaaggucaucgagggcuggucaaaccccaaaaguaaguugcagauuaauaggcaagugauaguagaccguggggaucgguccggauacagcggcaucuucucuguugaagguaaaucauguauuaaccgcugcuuuuauguggagcugaucagagggaggaaggaagagaaugaaguccuauggaccaguaacagcaucguggucuucuguggcacauccggaacuuacggcaccgggucuuggccugacggagccgaucucaaucugaugccaauuuga

SEQ ID NO: 153644 - RNA, 1410 nt, Artificial Sequence
  derived and/or modified CDS sequence (opt3) from neuraminidase__InfluenzaA__AIJ10823
augaaccccaaucagaagaucauuaccauaggcagcgugucccugacaaucucuacuauuugcuucuuuaugcaaaucgccauucucaucacgaccgucacacuucacuucaaccaguacgaguuuaauucaccuccaaacaaucagguuaugcugugugaaccgacuauaaucgagagaaacauuaccgaaaucguguauuugacaaccacuacaauugagaaagaaaucugccccaagccugcugaguacaggaauuggaguaaaccacagugugggauaaccggauucgcacccuuuagcaaggacaacuccauucgguuaucugccgguggcgauaucuggguaacgcgcgagccuuaugugucgugcgacccagauaaauguuaccaauucgcgcuggggcagggaacuacccuaaauaacguccauucaaauaacacagugcgagaccguacucccuuuagaacccuccugaugaaugaacuuggcguuccuuuccaccuggguacaaaacaggugugcauugcuuggagcaguuccucuugucaugaugggaaggccugguugcacgucugcaucaccggagacgauaagaacgcaacggccagcuuuaucuauaauggcaggcucguggacuccguaguuucauggaguaaggagauucugcggacucaggaaagcgagugugugugcauaaacggcacauguaccgucgugaugacugaugggucugcuuccggaaaagcagugacaaagauccuguucauugaggaagguaaaaucguccauaccucaacgcucagcggcagugcccaacacguugaggaaugcucuugcuacccacgcuauccgggggugagauguguaugcagggacaacuggaagggauccaaucggcccauaguggauauuaacaucaaggaccacagcaucgucucgggcuacguguguucugguuuaguuggggauaccccucgcaaaaaugacuccucaaguagcucccauugccugaacccaaauaacgaggaaggaggccacggcgugaaggggugggcuuuugacgauggaaaugacgucuggaugggucgaacaauuaacgagacuucuagacuuggcuacgagaccuucaaagugaucgaaggguggagcaaucccaagucaaaauugcagauuaacaggcagguaauaguugaucggggagaccguaguggcuauuccgguaucuuuagcguggaggggaagucuuguauuaaucgcugcuucuacgucgaacugaucagaggcaggaaagaggaaacagaggugcuauggacuucaaacaguaucgucguguucuguggaaccagcggcacauaugggaccggauccuggccugauggugccgaccucaaucugaugccaauuuga

SEQ ID NO: 153645 - RNA, 1410 nt, Artificial Sequence
  derived and/or modified CDS sequence (opt3) from neuraminidase__InfluenzaA__AIJ10824
augaaccccaaucagaagaucauuaccauaggcagcgugucccugacaaucucuacuauuugcuucuuuaugcaaaucgccauucucaucacgaccgucacacuucacuucaaacaguacgaguuuaacucaccuccaaauaaccagguugugcugugugaaccgacuauaaucgagagaaauauuaccgaaaucguauauuugacaaacaccacuauugagaaggaaaucugccccaaaccugcugaguacaggaauuggaguaagccacagugugggauaacaggauucgcacccuuuagcaaagacaacuccauucgguuaucugccgguggcgauaucugggugacccgcgagccuuaugucucgugcgacccagauaaguguuaccaauucgcgcuggggcagggaacgacucuaaauaacgugcauucaaauaacaccguucgagaccguacacccuauagaacucuccugaugaaugaacuuggcgugccuuuucaccuggguaccaagcaggucugcauugcuuggagcaguuccucuugucaugaugggaaagccugguugcacgugugcaucacaggagacgauaagaacgcaaccgccagcuucaucuacaauggcaggcucguagacuccguugugucauggaguaaagagauucugcggacgcaggaaagcgagugugucugcauaaacggcacuuguacaguggugaugaccgaugggucugcuuccggaaaggcagacacuaaaauccuguuuauugaggaagguaagaucguccauacaucaacccucagcggcagugcccaacacguugaggaaugcucuugcuauccacgcuacccgggggugagauguguaugcagggauaacuggaagggauccaaucggcccauaguggacauuaacaucaaagaucacagcaucgucucgucuuacguguguuccggcuuaguuggugacacgccucgcaagaaugacucaaguagcuccucucauugccuggauccaaacaaugaggaagggggacacggcgugaaaggcugggcuuucgacgaugggaacgacgucuggaugggacgaaccauuaaugagacaagcagacuugguuaugagacuuuuaaggugaucgaaggcuggucaaaccccaaaaguaaguugcagauuaauaggcagguaauaguugaucguggggaccgguccggauacagcggcaucuucucuguggaggguaaaucauguauuaaccgcugcuuuuaugucgaacugaucagagggaggaaggaggaaaccgaggugcuauggacaaguaauagcaucgucguguucuguggcacuuccggaaccuacggcacagggucuuggccugauggagccgaccucaaccugaugccaauuuga

SEQ ID NO: 153646 - RNA, 1410 nt, Artificial Sequence
  derived and/or modified CDS sequence (opt3) from neuraminidase__InfluenzaA__AIJ10827
augaaccccaaucagaagaucauuaccauaggcagcgugucccugacaaucucuacuauuugcuucuuuaugcagaucgccauucucaucacgaccgucacacuucacuucaaacaguacgaguuuaacucaccuccaaauaaccagguuaugcugugugaaccgacuauaaucgagagaaauauuaccgaaaucguguauuugacaaacaccacuauugagaaggaaaucugccccaaaccugcugaguacaggaauuggaguaagccacagugugggauaacaggauucgcacccuuuagcaaagacaacuccauucgguuaucugccgguggcgauaucuggguaacccgcgagccuuaugugucgugcgacccagauaaguguuaccaauucgcgcuggggcagggaacgacucuaaauaacguccauucaaauaacaccgugcgagaccguacacccuauagaacucuccugaugaaugaacuuggcguuccuuuucaccuggguaccaaacaggugugcauugcuuggagcaguuccucuugucaugaugggaaggccugguugcacgucugcaucacaggagacgauaagaacgcaaccgccagcuucaucuacaauggcaggcucguggacuccguaguuucauggaguaaagauauucugcggacgcaggagagcgaaugugugugcauaaacggcacuuguacagucgugaugaccgacgggucugcuuccggaaaggcagauacuaaaauccuguuuauugaggaggguaagaucgugcauacaucaacccucagcggcagugcccaacacgucgaagagugcucuugcuauccacgcuacccggggguuagaugugugugcagggacaacuggaagggauccaaucggcccauaguagauauuaacaucaaagaccacagcaucgugucgucuuacgucuguuccggcuuagugggugacacgccucgcaagaaugauucaaguagcuccucucauugccuggacccaaacaaugaagaagggggacacggcguuaaaggcugggcuuucgaugacgggaacgauguguggaugggacgaaccauuaaugagacaagcagacuugguuaugagacuuuuaaggucaucgagggcuggucaaaccccaaaaguaaguugcagauuaauaggcaagugauaguagaccguggggaucgguccggauacagcggcaucuucucuauugaagguaaaucauguaucaaccgcugcuuuuauguugagcugaucagagggaggaaggaagagaccgaagugcuauggacaaguaauagcauugucguguucuguggcacuuccggaaccuacggcacagggucuuggccugacggagccgaucucaaccugaugccaauauga

SEQ ID NO: 153647 - RNA, 1410 nt, Artificial Sequence
  derived and/or modified CDS sequence (opt3) from neuraminidase__InfluenzaA__AIJ10828
augaaccccaaucagaagaucauuaccauaggcagcgugucccugacaaucucuacuauuugcuucuuuaugcagaucgccauucucaucacgaccgucacacuucacuucaaacaguacgaguuuaacucaccuccaaauaaccagguuaugcugugugaaccgacuauaaucgagagaaauauuaccgaaaucguguauuugacaaacaccacuauugagaaggaaaucugccccaaaccugcugaguacaggaauuggaguaagccacagugugggauaacaggauucgcacccuuuagcaaagacaacuccauucgguuaucugccgguggcgauaucuggguaacccgcgagccuuaugugucgugcgacccagauaaguguuaccaauucgcgcuggggcagggaacgacucuaaauaacguccauucaaauaacaccgugcgagaccguacacccuauagaacucuccugaugaaugaacuuggcguuccuuuucaccuggguaccaaacaggugugcauugcuuggagcaguuccucuugucaugaugggaaggccugguugcacgucugcaucacaggagacgauaagaacgcaaccgccagcuucaucuacaauggcaggcucguggacuccguaguuucauggaguaaagauauucugcggacgcaggagagcgaaugugugugcauaaacggcacuuguacagucgugaugaccgacgggucugcuuccggaaaggcagauacuaaaauccuguuuauugaggaggguaagaucgugcauacaucaacccucagcggcagugcccaacacgucgaagagugcucuugcuauccacgcuacccggggguuagaugugugugcagggacaacuggaagggauccaaucggcccauaguagauauuaacaucaaagaccacagcaucgugucgucuuacgucuguuccggcuuagugggugacacgccucgcaagaaugauucaaguagcuccucucauugccuggacccaaacaaugaagaagggggacacggcguuaaaggcugggcuuucgaugacgggaacgauguguggaugggacgaaccauuaaugagacaagcagacuugguuaugagacuuuuaaggucaucgagggcuggucaaaccccaaaaguaaguugcagauuaauaggcaagugauaguagaccguggggaucgguccggauacagcggcaucuucucuauugaagguaaaucauguaucaaccgcugcuuuuauguugagcugaucagagggaggaaggaagagaccgaaguggucuggacaaguaauagcauuguggucuucuguggcacuuccggaaccuacggcacagggucuuggccugacggagccgaucuaaaccucaugccaauauga

SEQ ID NO: 153648 - RNA, 1410 nt, Artificial Sequence
  derived and/or modified CDS sequence (opt3) from neuraminidase__InfluenzaA__AIJ10829
augaaccccaaucagaagaucauuaccauaggcagcgugucccugacaaucucuacuauuugcuucuuuaugcagaucgccauucucaucacgaccgucacacuucacuucaaacaguacgaguuuaacucaccuccaaauaaccagguuaugcugugugaaccgacuauaaucgagagaaauauuaccgaaaucguguauuugacaaacaccacuauugagaaggaaaucugccccaaaccugcugaguacaggaauuggaguaagccacagugugggauaacaggauucgcacccuuuagcaaagacaacuccauucgguuaucugccgguggcgauaucuggguaacccgcgagccuuaugugucgugcgacccagauaauuguuaccaauucgcgcuggggcagggaacgacucuaaacaauguccauucaaacaauaccgugcgagaccguacacccuauagaacucuccugaugaacgaacuuggcguuccuuuucaccuggguaccaaacaggugugcauugcuuggagcaguuccucuugucaugaugggaaggccugguugcacgucugcaucacaggagacgauaagaaugcaaccgccagcuucaucuacaacggcaggcucguggacuccguaguuucauggaguaaggauauucugcggacgcaggagagcgaaugugugugcauaaacggcacuuguacagucgugaugaccgacgggucugcuuccggaaaagcagauacuaagauccuguuuauugaggaggguaaaaucgugcauacaucaacccucagcggcagugcccaacacgucgaagagugcucuugcuauccacgcuacccggggguuagaugugugugcagggacaauuggaagggauccaaccggcccauaguagauauuaauaucaaggaccacagcaucgugucgucuuacgucuguuccggcuuagugggugacacgccucgcaaaaacgauucaaguagcuccucucauugccuggacccaaauaacgaagagggggaucacggaguuaagggcugggcuuucgacgauggcaaugacguguggauggggcgaaccauuaacgaaacaagcagacuuggauaugagacuuuuaaagucaucgaggguuggucaaaucccaagaguaaauugcagauuaacaggcaagugauaguagaucggggcgaccguuccggguacagcggaaucuucucuauugaaggcaagucauguaucaaucgcugcuuuuauguugagcugaucagagguaggaaagaagagaccgaagugcuauggacaaguaacagcauugucguguucugugggacuuccggcaccuacggaacaggcucuuggccugauggggccgaccucaaucugaugccaauauga

SEQ ID NO: 153649 - RNA, 1410 nt, Artificial Sequence
  derived and/or modified CDS sequence (opt3) from neuraminidase__InfluenzaA__AIJ10830
augaaccccaaucagaagaucauuaccauaggcagcgugucccugacaaucucuacuauuugcuucuuuaugcaaaucgccauucucaucacgaccgucacacuucacuucaaacaguacgaguuuaacucaccuccaaauaaccagguuaugcugugugaaccgacuauaaucgagagaaauauuaccgaaaucguguauuugacaaacaccacuauugagaaggaaaucugccccaaaccugcugaguacaagaauuggaguaaaccacagugugggauaacaggauucgcacccuuuagcaaggacaacuccauuagguuaucugccgguggcgauaucuggguaacccgggagccuuaugugucgugcgacccagauaaguguuaccaauucgcgcuggggcagggaacgacucuaaauaacguccauucaaauaacaccgugcgcgaccgaacacccuaucguacucuccugaugaaugaacuuggcguuccuuuucaccuggguaccaaacaggugugcauugcuuggagcaguuccucuugucaugaugggaaggccugguugcacgucugcaucacaggagacgauaaaaacgcaaccgccagcuucaucuacaauggcagacucguggacuccguaguuucauggaguaaggauauucugaggacgcaggagagcgaaugugugugcauaaacggcacuuguacagucgugaugaccgacgggucugcuuccggaaaagcagauacuaagauccuguuuauugaggaggguaagaucgugcauacaucaacccucagcggcagugcccaacacgucgaagagugcucuugcuauccacgguacccggggguucgcugugugugcagagacaacuggaaaggauccaauaggcccauaguagauauuaacaucaaggaccacagcaucgugucgucuuacgucuguuccggcuuagugggugacacgccucggaaaaaugauucaaguagcuccucucauugccuggacccaaacaaugaagaagggggacacggcguuaagggcugggcuuucgaugacgggaacgauguguggaugggacgcaccauuaaugagacaagccgacuugguuaugagacuuuuaaagucaucgagggcuggucaaaccccaagaguaaauugcagauuaauagacaggugauaguagacaggggagaucgguccggguacagcggcaucuucucuauugaagguaagucauguaucaaccguugcuuuuauguugagcugauccgcgggagaaaggaagagaccgaagugcuauggacaaguaauagcauugucguguucuguggcacuuccggaaccuacggcacagggucuuggccugacggagccgaucucaaccugaugccaauauga

SEQ ID NO: 153650 - RNA, 1410 nt, Artificial Sequence; identical to SEQ ID NO: 153646
  derived and/or modified CDS sequence (opt3) from neuraminidase__InfluenzaA__AIJ10831

SEQ ID NO: 153651 - RNA, 1410 nt, Artificial Sequence; identical to SEQ ID NO: 153646
  derived and/or modified CDS sequence (opt3) from neuraminidase__InfluenzaA__AIJ10832

SEQ ID NO: 153652 - RNA, 1410 nt, Artificial Sequence
  derived and/or modified CDS sequence (opt3) from neuraminidase__InfluenzaA__AIJ10834
augaaccccaaucagaagaucauuaccauaggcagcgugucccugacaaucucuacuauuugcuucuuuaugcagaucgccauucucaucacgaccgucacacuucacuucaaacaguacgaguuuaacucaccuccaaauaaccagguuaugcugugugaaccgacuauaaucgagagaaauauuaccgaaaucguguauuugacaaacaccacuauugagaaggaaaucugccccaaaccugcugaguacaggaauuggaguaagccacagugugggauaacaggauucgcacccuuuagcaaagacaacuccauucgguuaucugccgguggcgauaucuggguaacccgcgagccuuaugugucgugcgacccagauaaguguuaccaauucgcgcuggggcagggaacgacucuaaauaacguccauucaaauaacaccgugcgagaccguacacccuauagaacucuccugaugaaugaacuuggcguuccuuuucaccuggguaccaaacaggugugcauugcuuggagcaguuccucuugucaugaugggaaggccugguugcacgucugcaucacaggagacgauaagaacgcaaccgccagcuucaucuacaauggcaggcucguggacuccguaguuucauggaguaaagauauucugcggacgcaggagagcgaaugugugugcauaaacggcacuuguacagucgugaugaccgacgggucugcuuccggaaaggcagauacuaaaauccuguuuauugaggaggguaagaucgugcauacaucaacccucagcggcagugcccaacacgucgaagagugcucuugcuauccacgcuacccggggguuagaugugugugcagggacaacuggaagggauccaaucggcccauaguagauauuaacaucaaagaccacagcaucgugucgucuuacgucuguuccggcuuagugggugacacgccucgcaagaaugauucaaguagcuccucucauugccuggacccaaacaaugaagaagggggacacggcguuaaaggcugggcuuucgaugacgggaacgauguguggaugggacgaaccauuaaugagacaagcagacuugguuaugagacuuuuaaggucaucgagggcuggucaaaccccaaaaguaaguugcagauuaauaggcaagugauaguagaccguggggaucgguccggauacagcggcaucuucucuauugaaucaaaaaguuguaucaaccgcugcuuuuauguugagcugaucagagguaggaaggaagagaccgaagugcuauggacaagcaauuccauugucguguucugugggacuucuggcaccuacggaacaggcucguggccugacggggccgaucucaaccugaugccaauauga

SEQ ID NO: 153653 - RNA, 1410 nt, Artificial Sequence
  derived and/or modified CDS sequence (opt3) from neuraminidase__InfluenzaA__AIJ10835
augaaccccaaucagaagaucauuaccauaggcagcgugucccugacaaucucuacuauuugcuucuuuaugcaaaucgccauucucaucacgaccgucacacuucacuucaaacaguacgaguuuaacucaacuccuaauaaccagguuaugcugugugaaccaaccauaaucgagagaaauauuacagaaaucguguauuugaccaacacuacaauugagaaggaaaucugcccgaaacccgcugaguacaggaauuggaguaagccucagugugggauaaccggauucgcaccauuuagcaaagacaacuccauucgguuaucugccgguggcgauaucuggguaacgcgcgagcccuaugugucgugcgacccugauaaguguuaccaauucgcgcuggggcagggaacuacccuaaauaacguccauucaaauaacacagugcgagaccguacuccauauagaacccuccugaugaaugaacuuggcguucccuuucaccuggguacaaaacaggugugcauugcuuggagcaguuccucuugucaugaugggaaggccugguugcacgucugcaucaccggagacgauaagaacgcaacggccagcuucaucuacaauggcaggcucguggacuccguaguuucauggaguaaagauauucugcggacucaggagagcgaaugugugugcauaaacggcacauguaccgucgugaugacugacgggucugcuuccggaaaggcagauacaaaaauccuguuuauugaggaggguaagaucgugcauaccucaacgcucagcggcagugcccaacacgucgaagagugcucuugcuauccucgcuacccagggguuagaugugugugcagggacaacuggaagggauccaaucggccgauaguagauauuaacaucaaagaccacagcaucgugucgucuuacgucuguuccggcuuagugggugacacccccaggaagaaugauucaaguagcuccucucauugccuggacccuaacaaugaagaagggggacacggcguuaaaggcugggcuuucgaugacgggaacgauguguggaugggacgaacaauuaaugagacuagcagacuugguuaugagaccuuuaaggucaucgagggcuggucaaacccaaaaaguaaguugcagauuaaucgccaggugauaguagaccguggggaucgguccggauacagcggcaucuucucuauugaagguaaaucauguaucaaccgcugcuuuuauguugagcugaucagagggaggaaggaagagacagaagugcuauggaccaguaauagcauugucguguucuguggcacuuccggaacauacggcaccgggucuuggcccgacggagccgaucucaaccugaugccuauauga

SEQ ID NO: 153654 - RNA, 1410 nt, Artificial Sequence; identical to SEQ ID NO: 153646
  derived and/or modified CDS sequence (opt3) from neuraminidase__InfluenzaA__AIJ10836

SEQ ID NO: 153655 - RNA, 1410 nt, Artificial Sequence
  derived and/or modified CDS sequence (opt3) from neuraminidase__InfluenzaA__AIJ10837
augaaccccaaucagaagaucauuaccauaggcagcgugucccugacaaucucuacuauuugcuucuuuaugcaaaucgccauucucaucacgaccgucacacuucacuucaaacaguacgaguuuaacucaccuccaaauaaccagguuaugcugugugaaccgacuauaaucgagagaaauauuaccgaaaucguguauuugacaaacaccacuauugagaaggaaaucugccccaaaccugcugaguacaggaauuggaguaagccacagugugggauaacaggauucgcacccuuuagcaaagacaacuccauucgguuaucugccgguggcgauaucuggguaacccgcgagccuuaugugucgugcgacccagauaaguguuaccaauucgcgcuggggcagggaacgacucuaaauaacguccauucaaauaacaccgugcgagaccguacacccuauagaacucuccugaugaaugaacuuggcguuccuuuucaccuggguaccaaacaggugugcauugcuuggagcaguuccucuugucaugaugggaaggccugguugcacgucugcaucacaggagacgauaagaacgcaaccgccagcuucaucuacaauggcaggcucguggacuccguaguuucauggaguaaagauauucugcggacgcaggagagcgaaugugugugcauaaacggcacuuguacagucgugaugaccgacgggucugcuuccggaaaggcagauacuaaaauccuguuuauugaggaggguaagaucauacauacaucaacccucagcggcagugcccaacacguggaagagugcucuugcuauccacgcuacccgggggucagauguguuugcagggacaacuggaagggauccaaucggcccauuguggauaucaacaucaaagaccacagcauuguaucgucuuacguguguuccggcuuagucggugacacgccucgcaagaaugauucaaguagcuccucucauugccuggacccaaacaaugaagaagggggacacggcgugaaaggcugggcuuucgaugacgggaacgauguuuggaugggacgaaccaucaaugagacaagcagacuugguuaugagacuuuuaaggugauugagggcuggucaaaccccaaaaguaaguugcagauaaauaggcaggucaucguggaccguggggaucgguccggauacagcggcauuuucucuaucgaagguaaaucauguaucaaccgcugcuuuuauguagagcugauuagagggaggaaggaagagaccgaaguucuauggacaaguaauagcauaguggucuucuguggcacuuccggaaccuacggcacagggucuuggccugacggagccgaucucaaccugaugccaaucuga

SEQ ID NO: 153656 - RNA, 1410 nt, Artificial Sequence; identical to SEQ ID NO: 153646
  derived and/or modified CDS sequence (opt3) from neuraminidase__InfluenzaA__AIJ10838

SEQ ID NO: 153657 - RNA, 1410 nt, Artificial Sequence
  derived and/or modified CDS sequence (opt3) from neuraminidase__InfluenzaA__AIJ10841
augaaccccaaucagaagaucauuaccauaggcagcgugucccugacaaucucuacuauuugcuucuuuaugcagaucgccauucucaucacgaccgucacacuucacuucaaacaguacgaguuuaacucaccuccaaauaaccagguuaugcugugugaaccgacuauaaucgagagaaauauuaccgaaaucguguauuugacaaacaccacuauugagaaggaaaucugccccaaaccugcugaguacaggaauuggaguaagccacagugugggauaacaggauucgcacccuuuagcaaagacaacuccauucgguuaucugccgguggcgauaucuggguaacccgcgagccuuaugugucgugcgacccagauaaguguuaccaauucgcgcuggggcagggaacgacucuaaauaacguccauucaaauaacaccgugcgagaccguacacccuauagaacucuccugaugaaugaacuuggcguuccuuuucaccuggguaccaaacaggugugcauugcuuggagcaguuccucuugucaugaugggaaggccugguugcacgucugcaucacaggagacgauaagaacgcaaccgccagcuucaucuacaauggcaggcucguggacuccguaguuucauggaguaaagauauucugcggacgcaggagagcgaaugugugugcauaaacggcacuuguacagucgugaugaccgacgggucugcuuccggagaggcagauacuaagauccuguuuauugaggaagguaaaaucgugcauacaucaacccucagcggcagugcccaacacgucgaggaaugcucuugcuauccacgcuacccggggguuagaugugugugcagggacaacuggaagggauccaaucggcccauaguagauauuaacaucaaggaccacagcaucgugucgucuuacgucuguuccggcuuagugggugacacgccucgcaaaaaugauucaaguagcuccucucauugccuggacccaaacaaugaggaagggggacacggcguuaagggcugggcuuucgaugacgggaacgauguguggaugggacgaaccauuaaugagacaagcagacuugguuaugagacuuuuaaagucaucgaaggcuggucaaaccccaagaguaaauugcagauuaauaggcaagugauaguagaccguggggaucgguccggauacagcggcaucuucucuauugaggguaagucauguaucaaccgcugcuuuuauguugaacugaucagagggaggaaagaggaaaccgaggugcuauggacaaguaauagcauugucguguucuguggcacuuccggaaccuacggcacagggucuuggccugacggagccgaucucaaccugaugccaauauga

SEQ ID NO: 153658 - RNA, 1410 nt, Artificial Sequence
  derived and/or modified CDS sequence (opt3) from neuraminidase__InfluenzaA__AIJ10842
augaaccccaaucagaagaucauuaccauaggcagcgugucccugacaaucucuacuauuugcuucuuuaugcagaucgccauucucaucacgaccgucacacuucacuucaaacaguacgaguuuaacccuccaccgaauaaccagguuaugcugugugaacccacuauaaucgagagaaauauuaccgaaaucguguauuugacaaacaccacuauugagaaggaaaucugcccuaaaccagcugaguacaggaauuggucaaagccccagugugggauaacaggauucgcaccuuuuaguaaagacaacagcauucgguuauccgccgguggcgauaucuggguaacccgcgagccauaugugucuugcgaccccgauaaguguuaccaauucgcgcuggggcagggaacgacucuaaauaacguccauucgaauaacaccgugcgagaccguacaccuuauagaacucuccugaugaaugaacuuggcguuccauuucaccuggguaccaaacaggugugcauugcuuggucaagcaguuccugucaugaugggaaggccugguugcacgucugcaucacaggagacgauaagaacgcaaccgccucuuucaucuacaauggcaggcucguggacagcguaguuuccuggucaaaagauauucugcggacgcaggagagugaaugugugugcauaaacggcacuuguacagucgugaugaccgacgggagcgcuucuggaaaggcagauacuaaaauccuguuuauugaggaggguaagaucgugcauacauccacccucucaggcagcgcccaacacgucgaagagugcaguugcuauccgcgcuaccccgggguuagaugugugugcagggacaacuggaagggaucuaaucggccuauaguagauauuaacaucaaagaccacuccaucgugagcucguacgucuguucuggcuuagugggugacacgccacgcaagaaugauuccucaaguagcucccauugccuggaccccaacaaugaagaagggggacacggcguuaaaggcugggcuuucgaugacgggaacgauguguggaugggacgaaccauuaaugagacaucuagacuugguuaugagacuuuuaaggucaucgagggcuggagcaacccuaaaucaaaguugcagauuaauaggcaagugauaguagaccguggggaucggaguggauacuccggcaucuucagcauugaagguaaaucuuguaucaaccgcugcuuuuauguugagcugaucagagggaggaaggaagagaccgaagugcuauggacaucaaauaguauugucguguucuguggcacuagcggaaccuacggcacaggguccuggccagacggagccgaucucaaccugaugcccauauga

SEQ ID NO: 153659 - RNA, 1410 nt, Artificial Sequence; identical to SEQ ID NO: 153646
  derived and/or modified CDS sequence (opt3) from neuraminidase__InfluenzaA__AIJ10843

SEQ ID NO: 153660 - RNA, 1410 nt, Artificial Sequence
  derived and/or modified CDS sequence (opt3) from neuraminidase__InfluenzaA__AIJ10844
augaaccccaaucagaagaucauuaccauaggcagcgugucccugacaaucucuacuauuugcuucuuuaugcaaaucgccauucucaucacgaccgucacacuucacuucaaacaguacgaguuuaacucaccuccaaauaaccagguuaugcugugugaaccgacuauaaucgagagaaauauuaccgaaaucguguauuugacaaacaccacuauugagaaggaaaucugccccaaaccugcugaguacaggaauuggaguaagccacagugugggauaacaggauucgcacccuuuagcaaagacaacuccauucgguuaucugccgguggcgauaucuggguaacccgcgagccuuaugugucgugcgacccagauaaguguuaccaauucgcgcuggggcagggaacgacucuaaauaacguccauucaaauaacaccgugcgagaccguacacccuuuagaacucuccugaugaaugaacuuggcguuccuuuccaccuggguaccaaacaggugugcauugcuuggagcaguuccucuugucaugaugggaaggccugguugcacgucugcaucacaggagacgauaagaacgcaaccgccagcuuuaucuauaauggcaggcucguggacuccguaguuucauggaguaaagagauucugcggacgcaggaaagcgagugugugugcauaaacggcacuuguacagucgugaugaccgaugggucugcuuccggaaaggcagugacuaaaauccuguucauugaggaagguaagaucguccauacaucaacccucagcggcagugcccaacacguugaggaaugcucuugcuacccacgcuauccgggggugagauguguaugcagggacaacuggaagggauccaaucggcccauaguggauauuaacaucaaagaccacagcaucgucucgggcuacguguguucugguuuaguuggggauacgccucgcaagaaugacuccucaaguagcggacauugccuggacccaaacaaugaggaaggcggccacggggugaaaggaugggcuuuugaugacgguaacgaugucuggaugggccgaaccauuaaugagacauccagacuuggguacgagacuuucaaggugaucaaaggauggucuaaccccaagagcaaauugcagauuaauaggcagguaauaguugaccggggcgaucguucagguuauagugggaucuuuuccguggaaggcaagagcuguauuaaccgcugcuucuacgucgagcugaucagaggaaggaaggaagagaccgaagugcuauggacaucuaauucaaucgucguguucuguggcaccagugggacuuauggaacagguagcuggccugacggcgccgaucucaaccugaugccaauuuga

SEQ ID NO: 153661 - RNA, 1410 nt, Artificial Sequence
  derived and/or modified CDS sequence (opt3) from neuraminidase__InfluenzaA__AIJ10845
augaaccccaaucagaagaucauuaccauaggcagcgugucccugacaaucucuacuauuugcuucuuuaugcaaaucgccauucucaucacgaccgucacacuucacuucaaacaguacgaguuuaacucaccuccaaauaaccagguuaugcugugugaaccgacuauaaucgagagaaauauuaccgaaaucguguauuugacaaacaccauuaucgagaaggaaauaugccccaaaccugcugaguacaggaauuggaguaagccacagugugggauuacuggauucgcacccuuuagcaaagacaacuccauccgguuaucugccgguggcgauauuuggguaacacgcgagccuuaugugucgugcgacccagauaaguguuaccaauucgcgcuggggcagggaaccacgcuaaauaacguccauucaaauaacacugugcgagaccguacccccuuuagaacacuccugaugaaugaacuuggcguuccuuuccaccuggguacuaaacaggugugcaucgcuuggagcaguuccucuugucaugaugggaaggccugguugcacgucugcaucaccggagacgauaagaacgcaacagccagcuuuauuuauaauggcaggcucguggacuccguaguuucauggaguaaagagauacugcggacccaggaaagcgagugugugugcaucaacggcacguguacugucgugaugacagaugggucugcuuccggaaaggcagugaccaaaauucuguucaucgaggaagguaagauaguccauacuucaacacucagcggcagugcccaacacguugaggaaugcucuugcuacccacgcuauccgggggugagauguguaugcagggacaacuggaagggauccaaucggcccauuguggauaucaacaucaaagaccacagcauugucucgggcuacguguguucugguuuaguuggggauaccccucgcaagaaugacuccucaaguagcucccauugccuggacccaaacaaugaggaaggaggccacggcgugaaagggugggcuuuugaugacggaaacgaugucuggaugggucgaacgaucaaugagaccucuagacuuggcuacgagacauucaaggugauugaaggguggagcaaccccaaaucaaaguugcagauaaauaggcagguaaucguugaccggggagaucguaguggcuauuccgguauuuuuagcguggaggggaaaucuuguaucaaccgcugcuucuacgucgaacugaucagaggcaggaaggaggaaacugaggugcuauggaccucaaauaguauugucguguucuguggaacaagcggcacuuaugggaccggauccuggccugacggugccgaucucaaccugaugccaauauga

SEQ ID NO: 153662 - RNA, 1410 nt, Artificial Sequence
  derived and/or modified CDS sequence (opt3) from neuraminidase__InfluenzaA__AIJ10847
augaaccccaaucagaagaucauuaccauaggcagcgugucccugacaaucucuacuauuugcuucuuuaugcagaucgccauucucaucacgaccgucacacuucacuucaaacaguacgaguuuaacucaccuccaaauaaccagguuaugcugugugaaccgacuauaaucgagagaaauauuaccgaaaucguguauuugacaaacaccacuauugagaaggaaaucugccccaaaccugcugaguacaggaauuggaguaagccacagugugggauaacaggauucgcacccuuuagcaaagacaacuccauucgguuaucugccgguggcgauaucuggguaacccgcgagccuuaugugucgugcgacccagauaaguguuaccaauucgcgcuggggcagggaacgacucuaaauaacguccauucaaauaacaccgugcgagaccguacacccuauagaacucuccugaugaaugaacuuggcguuccuuuucaccuggguaccaaacaggugugcauugcuuggagcaguuccucuugucaugaugggaaggccugguugcacgucugcaucacaggagacgauaagaacgcaaccgccagcuucaucuacaauggcaggcucguggacuccguaguuucauggaguaaagauauucugcggacgcaggagagcgaaugugugugcauaaacggcacuuguacagucgugaugaccgacgggucugcuuccggaaaggcagauacuaaaauccuguuuauugaggaggguaagaucgugcauacaucaacccucagcggcagugcccaacacgucgaagagugcucuugcuauccacgcuacccggggguuagaugugugugcagggacaacuggaagggauccaaucggcccauaguagauauuaacaucaaagaccacagcaucgugucgucuuacgucuguuccggcuuagugggugacacgccucgcaagaaugauucauucaguagcucccauugccuggacccaaacaaugaagaagggggacacggcguuaaaggcugggcuuuugaugacgggaacgauguguggaugggacgaaccauuaaugagacaucuagacuugguuaugagacuuucaaggucaucgagggcuggagcaaccccaaaucaaaguugcagauuaauaggcaagugauaguagaccguggggaucggaguggauacuccggcaucuuuagcauugaagguaaaucuuguaucaaccgcugcuucuauguugagcugaucagagggaggaaggaagagaccgaagugcuauggacaucaaauaguauugucguguucuguggcacuagcggaaccuacggcacaggguccuggccugacggagccgaucucaaccugaugccaauauga

SEQ ID NO: 153663 - RNA, 1410 nt, Artificial Sequence; identical to SEQ ID NO: 153646
  derived and/or modified CDS sequence (opt3) from neuraminidase__InfluenzaA__AIJ10848

SEQ ID NO: 153664 - RNA, 1410 nt, Artificial Sequence
  derived and/or modified CDS sequence (opt3) from neuraminidase__InfluenzaA__AIJ10849
augaaccccaaucagaagaucauuaccauaggcagcgugucccugacaaucucuacuauuugcuucuuuaugcaaaucgccauucucaucacgaccgucacacuucacuucaaacaguacgaguuuaacucaccuccaaauaaccagguuaugcugugugaaccgacuauaaucgagagaaauauuaccgaaaucguguauuugacaaacaccacuauugagaaggaaaucugccccaaaccugcugaguacaggaauuggaguaagccacagugugggauaacaggauucgcacccuuuagcaaagacaacuccauucgguuaucugccgguggcgauaucuggguaacccgcgagccuuaugugucgugcgacccagauaaguguuaccaauucgcgcuggggcagggaacgacucuaaauaacguccauucaaauaacaccgugcgagaccguacacccuuuagaacucuccugaugaaugaacuuggcguuccuuuccaccuggguaccaaacaggugugcauugcuuggagcaguuccucuugucaugaugggaaggccugguugcacgucugcaucacaggagacgauaagaacgcaaccgccagcuuuaucuauaauggcaggcucguggacuccguaguuucauggaguaaagagauucugcggacgcaggaaagcgagugugugugcauaaacggcacuuguacagucgugaugaccgaugggucugcuuccggaaaggcagugacuaaaauccuguucauugaggaagguaagaucguccauacaucaacccucagcggcagugcccaacacguugaggaaugcucuugcuacccacgcuauccgggggugagauguguaugcagggacaacuggaagggauccaaucggcccauaguggauauuaacaucaaagaccacagcaucgucucgggcuacguguguucugguuuaguuggggauacgccucgcaagaaugacuccucaaguagcucccauugccuggacccaaacaaugaggaaggaggccacggcgugaaagggugggcuuuugaugacggaaacgaugucuggaugggucgaaccauuaaugagacaucuagacuuggcuacgagacuuucaaggugaucgaaggguggagcaaccccaaaucaaaguugcagauuaauaggcagguaauaguugaccggggagaucguaguggcuauuccgguaucuuuagcguggaggggaaaucuuguauuaaccgcugcuucuacgucgaacugaucagaggcaggaaggaggaaaccgaggugcuauggacaucaaauaguaucgucguguucuguggaacuagcggcaccuaugggacaggauccuggccugacggugccgaucucaaccugaugccaauuuga

SEQ ID NO: 153665 - RNA, 1410 nt, Artificial Sequence; identical to SEQ ID NO: 153664
  derived and/or modified CDS sequence (opt3) from neuraminidase__InfluenzaA__AIJ10851

SEQ ID NO: 153666 - RNA, 1410 nt, Artificial Sequence; identical to SEQ ID NO: 153664
  derived and/or modified CDS sequence (opt3) from neuraminidase__InfluenzaA__AIJ10852

SEQ ID NO: 153667 - RNA, 1410 nt, Artificial Sequence; identical to SEQ ID NO: 153660
  derived and/or modified CDS sequence (opt3) from neuraminidase__InfluenzaA__AIJ10853

SEQ ID NO: 153668 - RNA, 1410 nt, Artificial Sequence; identical to SEQ ID NO: 153660
  derived and/or modified CDS sequence (opt3) from neuraminidase__InfluenzaA__AIJ10854

SEQ ID NO: 153669 - RNA, 1410 nt, Artificial Sequence
  derived and/or modified CDS sequence (opt3) from neuraminidase__InfluenzaA__AIJ10855
augaaccccaaucagaagaucauuaccauaggcagcgugucccugacaaucucuacuauuugcuucuuuaugcaaaucgccauucucaucacgaccgucacacuucacuucaaacaguacgaguuuaacucaccuccaaauaaccagguuaugcugugugaaccgacuauaaucgagagaaauauuaccgaaaucguguauuugacaaacaccacuauugagaaggaaaucugccccaaaccugcugaguacaggaauuggaguaagccacagugugggauaacaggauucgcacccuuuagcaaagacaacuccauucgguuaucugccgguggcgauaucuggguaacccgcgagccuuaugugucgugcgacccagauaaguguuaccaauucgcgcuggggcagggaacgacucuaaauaacguccauucaaauaacaccgugcgagaccguacacccuuuagaacucuccugaugaaugaacuuggcguuccuuuccaccuggguaccaaacaggugugcauugcuuggagcaguuccucuugucaugaugggaaggccugguugcacgucugcaucacaggagacgauaagaacgcaaccgccagcuuuaucuauaauggcaggcucguggacuccguaguuucauggaguaaagagauucugcggacgcaggaaagcgagugugugugcauaaacggcacuuguacagucgugaugaccgaugggucugcuuccggaaaggcagugacuaaaauccuguucauugaggaagguaagaucguccauacaucaacccucagcggcagugcccaacacguugaggaaugcucuugcuacccacgcuauccgggggugagauguguaugcagggacaacuggaagggauccaaucggcccauaguggauauuaacaucaaagaccacagcaucgucucgggcuacguguguucugguuuaguuggggauacgccucgcaagaaugacuccucaaguagcucccauugccuggacccaaacaaugaggaaggagaucacggcgugaaaggcugggcuuuugacgaugggaacgacgucuggaugggacgaaccauuaaugagacaucuagacuugguuacgagacuuucaaggugaucgaaggcuggagcaaccccaaaucaaaguugcagauuaauaggcagguaauaguugaucguggggaccggaguggauauuccggcaucuuuagcguggaggguaaaucuuguauuaaccgcugcuucuacgucgaacugaucagagggaggaaggaggaaaccgaggugcuauggacaucaaauaguaucgucguguucuguggcacuagcggaaccuauggcacaggguccuggccugauggagccgaccucaaccugaugccaauuuga

SEQ ID NO: 153670 - RNA, 1410 nt, Artificial Sequence
  derived and/or modified CDS sequence (opt3) from neuraminidase__InfluenzaA__AIJ10856
augaaccccaauaagaaaaucauuaccauaggcagcgugucccugacaaucucuacuauuugcuucuuuaugcagaucgccauucucaucacgaccgucacacuucacuucaagcaguacgaguuuaacucaccuccaaauaaccagguuaugcugugugaaccgacuauaaucgagagaaauauuaccgaaaucguguauuugacaaacaccacuauugagaaagaaaucugccccaagccugcugaguacaggaauuggaguaaaccacagugugggauaacaggauucgcacccuuuagcaaggacaacuccauucgguuaucugccgguggcgauaucuggguaacccgcgagccuuaugugucgugcgacccagauaaguguuaccaguucgcgcuggggcaaggaacgacucuaaagaauguccauucaaacaauaccgugcgagaccguacacccuauagaacucuccugaugaacgaacuuggcguuccuuuucaccuggguaccaaacaggugugcauugcuuggagcaguuccucuugucaugaugggaaagccugguugcacgucugcaucacaggagacgauaagaaugcaaccgccagcuucaucuacaacggcaggcucguggacuccguaguuucauggaguaaagauauucugcggacgcaggagagcgaaugugugugcauaaauggcacuuguacagucgugaugaccgacgggucugcuuccggaaaggcagauacuaagauccuguuuauugaggaggguaaaaucgugcauacaucaacccucagcggcagugcccagcacgucgaagagugcucuugcuauccacgcuacccggggguuagaugugugugcagggacaacuggaagggauccaaccggcccauaguagauauuaauaucaaagaccacagcaucgugucgucuuacgucuguuccggcuuagugggugacacgccucgcaagaacgauucauucaguagcgggcauugccuggacccaaauaacgaagagggaggccacggcguuaaagggugggcuuuugaugacggaaaugauguguggaugggucgaaccauuaacgaaacauccagacuuggcuaugagacuuucaaggucaucgagggguggucuaaucccaaaagcaaguugcaaauuaacaggcaagugauaguagaccggggagaucguucaggcuacagugguaucuuuuccauugaagggaagaguuguaucaaucgcugcuucuauguugagcugaucagaggcaggaaagaagagaccgaagugcuauggacaucuaacucaauugucguguucuguggaacuagcggcaccuacgggacaggaagcuggccugacggugccgaucucaaucugaugccaauauga

SEQ ID NO: 153671 - RNA, 1410 nt, Artificial Sequence; identical to SEQ ID NO: 153646
  derived and/or modified CDS sequence (opt3) from neuraminidase__InfluenzaA__AIJ10857

SEQ ID NO: 153672 - RNA, 1410 nt, Artificial Sequence; identical to SEQ ID NO: 150194
  derived and/or modified CDS sequence (opt3) from neuraminidase__InfluenzaA__AIJ29348

SEQ ID NO: 153673 - RNA, 1410 nt, Artificial Sequence; identical to SEQ ID NO: 150194
  derived and/or modified CDS sequence (opt3) from neuraminidase__InfluenzaA__AIJ29350

SEQ ID NO: 153674 - RNA, 1410 nt, Artificial Sequence
  derived and/or modified CDS sequence (opt3) from neuraminidase__InfluenzaA__AIJ29352
augaaccccaaucagaagaucauuaccauaggcagcgugucccugacaaucucuacuauuugcuucuuuaugcagaucgccauucucaucacgaccgucacacuucacuucaaacaguacgaguuuaacucaccuccaaauaaccagguuaugcugugugaaccgacuauaaucgagagaaauauuaccgaaaucguguauuugacaaacaccacuauugagaaggaaaucugccccaaaccugcuaaguacaggaauuggaguaaaccacagugugggauaacaggauucgcacccuuuagcaaggacaacuccauucgguuaucugccgguggcgauaucuggguaacccgcgagccuuaugugucgugcgacccagauaaguguuaccaauucgcgcuggggcagggaacgacucuaaauaacguccauucaaauaacaccgugcgagaccguacacccuauagaacucuccugaugaaugagcuuggcguuccuuuucaccuggguaccaaacaggugugcauugcuuggagcaguuccucuugucaugaugggaaggccugguugcacgucugcaucacaggagacgauaaaaacgcaaccgccagcuucaucuacaauggcaggcucguggacuccguaguuucauggaguaaggaaauucugcggacgcaggagagcgaaugugugugcauaaacggcacuuguacagucgugaugaccgaugggucugcuuccggaaaagcagacacuaagauccuguuuauugaggaggguaagaucgugcauacaucaacccucagcggcagugcccaacacgucgaagagugcucuugcuauccacgcuacccggggguuagaugugugugcagggauaacuggaaaggauccaaucggcccauaguagacauuaacaucaaggaucacagcaucgugucgucuuacgucuguuccggcuuagugggugacacgccucgcaaaaaugacucaaguagcuccucucauugccuggauccaaacaaugaagaagggggacacggcguuaagggcugggcuuucgacgaugggaacgacguguggaugggacgaaccauuaaugagacaagcagacuugguuaugagacuuuuaaagucaucgagggcuggucaaaccccaagaguaaauugcagauuaauaggcaagugauaguagaucguggggaccgguccggauacagcggcaucuucucuguugaagguaagucauguauuaaccgcugcuuuuauguggagcugaucagagggaggaaggaagagaccgaaguccuauggacaaguaauagcaucguggucuucuguggcacuuccggaaccuacggcacagggucuuggccugauggagccgaccucaaccugaugccaauuuga

SEQ ID NO: 153675 - RNA, 1410 nt, Artificial Sequence; identical to SEQ ID NO: 149191
  derived and/or modified CDS sequence (opt3) from neuraminidase__InfluenzaA__AIJ29354

SEQ ID NO: 153676 - RNA, 1410 nt, Artificial Sequence; identical to SEQ ID NO: 150970
  derived and/or modified CDS sequence (opt3) from neuraminidase__InfluenzaA__AIJ29356

SEQ ID NO: 153677 - RNA, 1410 nt, Artificial Sequence; identical to SEQ ID NO: 150970
  derived and/or modified CDS sequence (opt3) from neuraminidase__InfluenzaA__AIJ29358

SEQ ID NO: 153678 - RNA, 1410 nt, Artificial Sequence
  derived and/or modified CDS sequence (opt3) from neuraminidase__InfluenzaA__AIJ29360
augaaccccaaucagaagaucauuaccauaggcagcgugucccugacaaucucuacuauuugcuucuuuaugcagaucgccauucucacgaccacagucacucuucacuucaaacaguacgaguuuaacucaccuccaaauaaccagguuaugcugugugaaccgaccaucauagagagaaauaucacagaaauuguguauuugaccaacacuacaaucgagaaggaaauuugccccaaaccugcugaguacaggaauuggaguaagccacagugugggaucaccggauucgcacccuuuagcaaagacaacuccauacgguuaucugccgguggcgauauuuggguaacgcgcgagccuuaugugucgugcgacccagauaaguguuaccaauucgcgcuggggcagggaacuacccuaaauaacguccauucaaauaacacagugcgagaccguacucccuauagaacccuccugaugaaugaacuuggcguuccuuuucaccuggguacaaaacaggugugcaucgcuuggagcaguuccucuugucaugaugggaaggccugguugcacgucugcauuaccggagacgauaagaacgcaacggccagcuucaucuacaauggcaggcucguggacuccguaguuucauggaguaaagagauccugcggacucaggaaagcgagugugugugcauuaacggcacauguaccgucgugaugacugaugggucugcuuccggaaaggcagacacaaaaauacuguuuaucgaggaagguaagauugugcauaccucaacgcucagcggcagugcccaacacgucgaggaaugcucuugcuauccacgcuacccggggguuagaugugugugcagggauaacuggaagggauccaaucggcccaucguagacauaaacauuaaagaucacagcaucgugucgucuuacgucuguuccggcuuagugggugacaccccucgcaagaaugacucaaguagcuccucucauugccuggauccaaacaaugaggaagggggacacggcguuaaaggcugggcuuucgacgaugggaacgacguguggaugggacgaacaaucaaugagacuagcagacuugguuaugagaccuuuaaggucauugaaggcuggucaaaccccaaaaguaaguugcagaucaauaggcaagugauuguagaucguggggaccgguccggauacagcggcauauucucuguugaggguaaaucauguaucaaccgcugcuuuuauguggaacugauuagagggaggaaggaggaaacagagguccuauggaccaguaauagcaucguggucuucuguggcacuuccggaacauacggcaccgggucuuggccugauggagccgaccucaaccugaugccaaucuga

SEQ ID NO: 153679 - RNA, 1410 nt, Artificial Sequence; identical to SEQ ID NO: 150194
  derived and/or modified CDS sequence (opt3) from neuraminidase__InfluenzaA__AIJ29362

SEQ ID NO: 153680 - RNA, 1410 nt, Artificial Sequence
  derived and/or modified CDS sequence (opt3) from neuraminidase__InfluenzaA__AIL93626
augaaccccaaucagaagaucauuaccauaggcagcgugugcaugacaaucgggauggccaaccugauucuccaaaucggaaauauuaucuccauauggaucucucacucaauucagcuugguaaccagagucagaucgaggcuuguaaucaaagcgucauuacuuacgaaaacaauacguauguuaaccagaccuacgugaauaucuccaacacaaauuucgcagccggcagaucuguagugucggucaaacuggcggggaacagcucauugugcccugugaguggaugggcuauauauuccaaggacaauucuguuaggauuggcagcaaaggugauguguuugucauccgggagccauucauuuccuguucaccguuagaaugccgcaccuuuuuccugacucagggggcccuacucaacgacaagcauaguaauggaacaaucaaagaucgaagccccuaccguacccugaugucuuguccuaucggcgaggugccaucccccuauaacucaagauuugaaagcguagcauggagugccucugcuugccacgacggcauuaacuggcuuacuauagggaucuccggaccugauagcggugcaguugccgugcugaaguacaauggcauuaucacagacaccauaaagucguggaaaaacaauauuuugaggacgcaggagucugagugugcuugcgucaacggguccuguuucacuaucaugaccgauggaccaucagacggccaagccaguuauaagaucuuucggauugaaaaagguaagaucgugaaaagcguggagaugaaugcgcccaacuaccauuacgaagagugcuccuguuauccugauucuagcgagauuacaugcgucugccgcgacaauuggcacgggucaaacagaccauggguuaguuucaaucagaaccucgaauaccagauaggauauaucuguuccggcguguuuggcgauaauccgaggcccaacgacaagacugggagcugcggaccuguacugucuaauggugcaaacggcgugaagggguucucauuuaaauacggaaauggcgucuggauuggucggaccaagaguaucagcucccgcaaaggguucgagaugaucugggauccaaacggcuggacaggaaccgacaacaauuuuucuauuaagcaggacauagugggcaucaacgaauggucgggguauagcggauccuucguucaacaucccgagcugacgggucucgauuguauucgaccuugcuucuggguggaauuaaucagaggcaggccaaaagagaauacuauuuggacaucagggaguucuaucagcuuuuguggagucaacuccgacaccgugggcuggucauggcccgauggugccgagcugccguucacuauagacaaguga

SEQ ID NO: 153681 - RNA, 1410 nt, Artificial Sequence
  derived and/or modified CDS sequence (opt3) from neuraminidase__InfluenzaA__AIL93648
augaaccccaaucagaagaucauuaccauaggcagcgugucccugacaaucucuacuauuugcuucuuuaugcaaaucgccauucucaucacgaccgucacacuucacuucaaacaguacgaguuuaacucaccuccaaauaaccagguuaugcugugugaaccgacuauaaucgagagaaauauuaccgaaaucguguauuugacaaacaccacuauugagaaggaaaucugccccaaaccugcugaguacaggaauuggaguaagccacagugugggauaacaggauucgcacccuuuagcaaagacaacuccauucgguuaucugccgguggcgauaucuggguaacccgcgagccuuaugugucgugcgacccagauaaguguuaccaauucgcgcuggggcagggaacgacucuaaauaacguccauucaaauaacaccgugcgagaccguacacccuauagaacucuccugaugaaugaacuuggcguuccuuuucaccuggguaccaaacaggugugcauugcuuggagcaguuccucuugucaugaugggaaggccugguugcacgucugcaucacaggagacgauaagaacgcaaccgccagcuucaucuacaauggcaggcucguggacuccguaguuucauggaguaaagagauucugcggacgcaggaaagcgagugugugugcauaaacggcacuuguacagucgugaugaccgaugggucugcuuccggaaaggcagacacuaaaauccuguuuauugaggaaggucgcaucgugcauacaucaacccucagcggcagugcccaacacgucgaggaaugcucuugcuauccaagauacccggggguuaggugugugugccgggauaacuggaagggauccaaucgccccauaguagacauuaacaucaaggaucacagcaucgugucgucuuacgucuguuccggcuuagugggugacacgccucggaaaaaugacucaaguagcuccucucauugccuggauccaaacaaugaggaagggggacacggcguuaagggcugggcuuucgacgaugggaacgacguguggaugggaagaaccauuaaugagacaagcaggcuugguuaugagacuuuuaaagucaucgaaggcuggucaaaccccaagaguaaauugcagauuaauaaacaggugauaguagaucgaggggaccguuccggauacagcggcaucuucucuguugaggguaagucauguauuaaccgcugcuuuuauguggaacugaucagagggaggaaggaggaaaccgagguccuauggacaaguaauagcaucguggucuucuguggcacuuccggaaccuacggcacagggucuuggccugauggagccgaccucaaccugaugccaauuuga

SEQ ID NO: 153682 - RNA, 1410 nt, Artificial Sequence; identical to SEQ ID NO: 150194
  derived and/or modified CDS sequence (opt3) from neuraminidase__InfluenzaA__AIL93660

SEQ ID NO: 153683 - RNA, 1410 nt, Artificial Sequence; identical to SEQ ID NO: 150194
  derived and/or modified CDS sequence (opt3) from neuraminidase__InfluenzaA__AIL93672

SEQ ID NO: 153684 - RNA, 1410 nt, Artificial Sequence
  derived and/or modified CDS sequence (opt3) from neuraminidase__InfluenzaA__AIL93684
augaaccccaaucagaagaucauuaccauaggcagcgugugcaugacaaucgggauggccaaccugauucuccaaaucggaaauauuaucuccauauggaucucucacucaauucagcuugguaaccagagucagaucgaggcuuguaaucaaagcgucauuacuuacgaaaacaauacguggguuaaccagaccuaugugaauaucuccaacacaaauucugcaacuggccagucgguagugucagucaaacuggccgggaacagcaguuugugcccuguguccggaugggcgauauacucuaaggacaauagcguuagaauuggcuccaaaggugauguguucgucaucagggagccauuuauuucauguaguccguuagaaugccggaccuucuuucugacacagggggcucuacucaacgacaagcauagcaauggaaccaucaaagaucgcucucccuaucgaacucugauguccuguccuaucggcgaggugccaucacccuacaacagccguuucgaaaguguagccuggucugcauccgccugccacgacggcauuaacuggcuuacaauagggaucagcggaccugauucgggugcuguugcagugcugaaguauaauggcauuaucaccgacacgauaaagucuuggaaaaacaauauuuugagaacucaagaguccgagugugccugcgucaacgggucauguuuuaccaucaugacagauggaccaagugacggccaggcuagcuacaagaucuucaggauugaaaaagguaagaucgugaaauccguggagaugaaugcccccaacuaucauuacgaagagugcucuuguuacccugauagcucagagauuacuugcgucugccgggacaauuggcacgggaguaaccgcccauggguuuccuuuaaucagaaccucgaauaucagauaggauacaucuguagcggcguguucggcgauaauccgagacccaacgacaagaccgggucuugcggaccuguacugucaaauggugcgaacggcgugaagggguuuaguuucaaauauggaaauggcgucuggauugguaggacaaagagcaucuccucucggaaaggguuugagaugaucugggauccaaacggcuggaccggaacggacaacaauuucucgauuaagcaagacauagugggcaucaacgaauggagcggguacuccggaucauuuguucagcaucccgagcugacuggucucgauuguauucgcccuugcuucuggaucgaauuaauucgaggcagaccaaaagagaauacaaucuggaccagugggucuagcauauccuucuguggagugaacucagacacugucggcuggagcuggcccgauggugcagagcugccguuuacaaucgacaaguga

SEQ ID NO: 153685 - RNA, 1410 nt, Artificial Sequence
  derived and/or modified CDS sequence (opt3) from neuraminidase__InfluenzaA__AIL93719
augaaccccaaucagaagaucauuaccauaggcagcgugucccugacaaucucuacuauuugcuucuuuaugcaaaucgccauucucaucacgaccgucacacuucacuucaaacaguacgaguuuaacucaccuccaaauaaccagguuaugcugugugaaccgacuauaaucgagagaaauauuaccgaaaucguguauuugacaaacaccacuauugagaaggaaaucugccccaaaccugcugaguacaggaauuggaguaagccacagugugggauaacaggauucgcacccuuuagcaaagacaacuccauucgguuaucugccgguggcgauaucuggguaacccgcgagccuuaugugucgugcgacccagauaaguguuaccaauucgcgcuggggcagggaacgacucuaaauaacguccauucaaauaacaccgugcgagaccguacacccuauagaacucuccugaugaaugaacuuggcguuccuuuucaccuggguaccaaacaggugugcauugcuuggagcaguuccucuugucaugaugggaaggccugguugcacgucugcaucacaggagacgauaagaacgcaaccgccagcuucaucuacaauggcaggcucguggacuccguaguuucauggaguaaagagauucugcggacgcaggaaagcgagugugugugcauaaacggcacuuguacagucgugaugaccgaugggucugcuuccggaaaggcagacacuaaaauccuguuuauugaggaagguaagaucgugcauacaucaacccucagcggcagugcccaacacgucgaggaaugcucuugcuauccacgcuacccggggguuagaugugugugcagggauaacuggaagggauccaaucggcccauaguagacauuaacaucaaagaucacagcaucgugucgucuuacgucuguuccggcuuagugggugacacgccucgcaagaaugacucaaguagcuccucucauugccuggauccaaacaaugaggaagggggacacggcguuaaaggcugggcuuucgacgaugggaacgacguguggaugggacgaaccauuaaugagacaagcagacuugguuaugagacuuuuaaggucaucgaaggcuggucaaaccccaaaaguaaguugcagauuaauaaacaggugauaguagauaggggagaccgguccggguacagcggcaucuucucuguugaggguaagucauguauuaaccguugcuuuuauguggaacugauccgcgggagaaaggaggaaaccgagguccuauggacaaguaauagcaucguggucuucuguggcacuuccggaaccuacggcacagggucuuggccugauggagccgaccucaaccugaugccaauuuga

SEQ ID NO: 153686 - RNA, 1410 nt, Artificial Sequence; identical to SEQ ID NO: 153685
  derived and/or modified CDS sequence (opt3) from neuraminidase__InfluenzaA__AIL93743

SEQ ID NO: 153687 - RNA, 1410 nt, Artificial Sequence; identical to SEQ ID NO: 153685
  derived and/or modified CDS sequence (opt3) from neuraminidase__InfluenzaA__AIL93755

SEQ ID NO: 153688 - RNA, 1410 nt, Artificial Sequence; identical to SEQ ID NO: 150194
  derived and/or modified CDS sequence (opt3) from neuraminidase__InfluenzaA__AIL93767

SEQ ID NO: 153689 - RNA, 1410 nt, Artificial Sequence; identical to SEQ ID NO: 150194
  derived and/or modified CDS sequence (opt3) from neuraminidase__InfluenzaA__AIL93779

SEQ ID NO: 153690 - RNA, 1410 nt, Artificial Sequence
  derived and/or modified CDS sequence (opt3) from neuraminidase__InfluenzaA__AIL93791
augaaccccaaucagaagaucauuaccauaggcagcgugucccugacaaucucuacuauuugcuucuuuaugcaaaucgccauucucaucacgaccgucacacuucacuucaaacaguacaaguuuaacucaccuccaaauaaccagguuaugcugugugagccgacuauaaucgaaagaaauauuaccgagaucguguauuugacaaacaccacuauugaaaaagagaucugccccaagccugcugaauacaggaauuggaguaaaccacagugugggauaacaggauucgcacccuuuagcaaggacaacuccauucgguuaucugccgguggcgauaucuggguaacccgcgagccuuaugugucgugcgacccagauaaguguuaccaauucgcgcuggggcagggaacgacucuaaauaacguccauucaaauaacaccgugcgagaccguacacccuauagaacucuccugaugaaugagcuuggcguuccuuuucaccuggguaccaaacaggugugcauugcuuggagcaguuccucuugucaugaugggaaggccugguugcacgucugcaucacaggagacgauaaaaacgcaaccgccagcuucaucuacaauggcaggcucguggacuccguaguuucauggaguaaggaaauucugcggacgcaggagagcgaaugugugugcauaaacggcacuuguacagucgugaugaccgaugggucugcuuccggaaaagcagacacuaagauccuguuuauugaggaggguaagaucgugcauacacgcacccucucaggcagcgcccaacacgucgaagagugcaguugcuauccaagauacccggggguuaggugugugugccgggauaacuggaaaggaucuaaucgccccauaguagacauuaacaucaaggaucacuccaucgugagcucguacgucuguucuggcuuagugggugacacgccucggaaaaaugacuccucaaguagcucccauugccuggauccaaacaaugaagaagggggacacggcguuaagggcugggcuuucgacgaugggaacgacguguggaugggaagaaccauuaaugagacaucuaggcuugguuaugagacuuuuaaagucaucgagggcuggagcaaccccaagucaaaauugcagauuaauaaacaggugauaguagaucgaggggaccguaguggauacuccggcaucuucagcguugaagguaagucuuguauuaaccgcugcuuuuauguggagcugaucagagggaggaaggaagagaccgaaguccuauggacaucaaauaguaucguggucuucuguggcacuagcggaaccuacggcacaggguccuggccugauggagccgaccucaaccugaugccaauuuga

SEQ ID NO: 153691 - RNA, 1410 nt, Artificial Sequence; identical to SEQ ID NO: 153685
  derived and/or modified CDS sequence (opt3) from neuraminidase__InfluenzaA__AIL93803

SEQ ID NO: 153692 - RNA, 1410 nt, Artificial Sequence
  derived and/or modified CDS sequence (opt3) from neuraminidase__InfluenzaA__AIL93815
augaaccccaaucagaagaucauuaccauaggcagcgugucccugacaaucucuacuauuugcuucuuuaugcagaucgccauucucaucacgaccgucacacuucacuucaaacaguacgaguuuaacucaccuccaaauaaccagguuaugcugugugaaccgacuauaaucgagagaaauauuaccgaaaucguguauuugacaaacaccacuauugagaaggaaaucugccccaaaccugcugaguacaggaauuggaguaagccacagugugggauaacaggauucgcacccuuuagcaaagacaacuccauucgguuaucugccgguggcgauaucuggguaacccgcgagccuuaugugucgugcgacccagauaaguguuaccaauucgcgcuggggcagggaacgacucuaaauaacguccauucaaauaacaccgugcgagaccguacacccuauagaacucuccugaugaaugaacuuggcguuccuuuucaccuggguaccaaacaggugugcauugcuuggagcaguuccucuugucaugaugggaaggccugguugcacgucugcaucacaggagacgauaagaacgcaaccgccagcuucaucuacaauggcaggcucguggacuccguaguuucauggaguaaagagauucugcggacgcaggaaagcgagugugugugcauaaacggcacuuguacagucgugaugaccgaugggucugcuuccggaaaggcagacacuaaaauccuguuuauugaggaagguaagaucgugcauacaucaacccucagcggcagugcccaacacgucgaggaaugcucuugcuauccacgcuacccggggguuagaugugugugcagggauaacuggaagggauccaaucggcccauaguagacauuaacaucaaagaucacagcaucguguacucguaugucuguucuggcuuagugggugacacgccucgcaagaaugacuccucaaguagcucccauugccugaacccaaauaacgaggaagggggacacggcguuaaaggcugggcuuucgaugacgggaaugauguguggaugggacgaaccauuaacgagacaucuagacuugguuacgagacuuuuaaggucaucgaaggcuggagcaaucccaaaucaaaguugcagauuaacaggcaagugauaguagaccguggggaucggaguggauauuccggcaucuucagcguugaggguaaaucuuguauuaaucgcugcuuuuacguggaacugaucagagggaggaaggaggaaaccgagguccuauggacaucaaacaguaucguggucuucuguggcacuagcggaaccuauggcacaggguccuggccugacggagccgaucucaaucugaugccaauuuga

SEQ ID NO: 153693 - RNA, 1410 nt, Artificial Sequence; identical to SEQ ID NO: 150194
  derived and/or modified CDS sequence (opt3) from neuraminidase__InfluenzaA__AIL93827

SEQ ID NO: 153694 - RNA, 1410 nt, Artificial Sequence
  derived and/or modified CDS sequence (opt3) from neuraminidase__InfluenzaA__AIL93839
augaaccccaaucagaagaucauuaccauaggcagcgugugcaugacaaucgggauggccaaccugauucuccaaaucggaaauauuaucuccauauggaucucucacucaauucagcuugguaaccagagucagaucgaggcuuguaaucaaagcgucauuacuuacgaaaacaauacguggguuaaccagaccuaugugaauaucuccaacacaaauuucgcaacuggccagucuguagugucggucaaacuggccgggaacagcucauugugcccugugaguggaugggcgauauacuccaaggacaauucuguuagaauuggcagcaaaggugauguguuugucaucagggagccauucauuuccuguucaccguuagaaugccggaccuuuuuccugacacagggggcucuacucaacgacaagcauaguaauggaaccaucaaagaucgcagccccuaucgaacucugaugucuuguccuaucggcgaggugccaucccccuacaacucacguuuugaaagcguagccuggagugcaucugccugccacgacggcauuaacuggcuuacaauagggaucuccggaccugauagcggugcuguugcagugcugaaguauaauggcauuaucaccgacacgauaaagucguggaaaaacaauauuuugagaacucaagagucugagugugccugcgucaacggguccuguuucaccaucaugacagauggaccaucagacggccaggcuaguuacaagaucuuuaggauugaaaaagguaagaucgugaaaagcguggagaugaaugcccccaacuaucauuacgaagagugcuccuguuacccugauucuagcgagauuacuugcgucugccgggacaauuggcacgggucaaaccgcccauggguuaguuucaaucagaaccucgaauaucagauaggauacaucuguuccggcguguuuggcgauaauccgagacccaacgacaagaccgggagcugcggaccuguaucuucaaauggugcgaacggcgugaagggguucaguuuuaaauauggaaauggcgucuggauugguaggacaaagagcaucuccucucggaaaggguucgagaugaucugggauccaaacggcuggaccggaacggacaacaauuuuucgauuaagcaagacauagugggcaucaacgaauggagcggguacuccggaucauucguucagcaucccgagcugacuggucuggauuguauucgcccuugcuucuggguggaacucauccgaggcagaccaaaagagaauacaauuuggaccagugggucuagcaucuccuuuuguggagucaacucagacacugugggcuggagcuggcccgauggugcagaguuaccguucacaauagacaaguga

SEQ ID NO: 153695 - RNA, 1410 nt, Artificial Sequence
  derived and/or modified CDS sequence (opt3) from neuraminidase__InfluenzaA__AIL93850
augaaccccaaucagaagaucauuaccauaggcagcgugugcaugacaaucgggauggccaaccugauucuccaaaucggaaauauuaucuccauauggaucucucacucaauucagcuugguaaccagagucagaucgaggcuuguaaucaaagcgucauuacuuacgaaaacaauacguggguuaaccagaccuaugugaauaucuccaacacaaauuucgcaacuggccagucuguagugucggucaaacuggccgggaacagcucauugugcccugugaguggaugggcgauauacuccaaggacaauucuguuagaauuggcagcaaaggugauguguuugucaucagggagccauucauuuccuguucaccguuagaaugccggaccuuuuuccugacacagggggcucuacucaacgacaagcauaguaauggaaccaucaaagaucgcagccccuaucgaacucugaugucuuguccuaucggcgaggugccaucccccuacaacucacguuuugaaagcguagccuggagugcaucugccugccacgacggcauuaacuggcuuacaauagggaucuccggaccugauagcggugcuguugcagugcugaaguauaauggcauuaucaccgacacgauaaagucguggaaaaacaauauuuugagaacucaagagucugagugugccugcgucaacggguccuguuucaccaucaugacagauggaccaucagacggccaggcuaguuacaagaucuuuaggauugaaaaagguaagaucgugaaaagcguggagaugaaugcccccaacuaucauuacgaagagugcuccuguuacccugauucuagcgagauuacuugcgucugccgggacaauuggcacgggucaaaccgcccauggguuaguuucaaucagaaccucgaauaucagauaggauacaucuguuccggcguguuuggcgauaauccgagacccaacgacaagaccgggagcugcggaccuguaucuucaaauggugcgaagggcgugaaaggguucaguuuuaaguauggaaacggcgucuggauugguaggacaaaaagcaucuccucucggaagggguucgagaugaucugggauccaaauggcuggaccggaacggacaacaacuuuucgauuaaacaagacauagugggcaucaaugaauggagcggguacuccggaucauucguucagcaucccgagcugacuggucuggauuguauucgcccuugcuucuggguggaacucauccgaggcagaccaaaggagaacacaauuuggaccagugggucuagcaucuccuuuuguggagucaauucagacacugugggcuggagcuggcccgauggugcagaguuaccguucacaauagacaaauga

SEQ ID NO: 153696 - RNA, 1410 nt, Artificial Sequence; identical to SEQ ID NO: 153685
  derived and/or modified CDS sequence (opt3) from neuraminidase__InfluenzaA__AIL93861

SEQ ID NO: 153697 - RNA, 1410 nt, Artificial Sequence
  derived and/or modified CDS sequence (opt3) from neuraminidase__InfluenzaA__AIL93885
augaaccccaaucagaagaucauuaccauaggcagcgugucccugacaaucucuacuauuugcuucuuuaugcagaucgccauucucaucacgaccgucacacuucacuucaaacaguacgaguuugacucaccuccaaacaaucagguuaugcugugugaaccgacuauaaucgagagaaacauuaccgaaaucguguauuugacaaauaccacuauugagaaggaaaucugccccaaaccugcugaguacaggaacuggaguaagccacagugugggauaacaggauucgcacccuuuagcaaagauaauuccauucgguuaucugccgguggcgacaucuggguaacccgcgagccuuaugugucgugcgauccagacaaguguuaccaauucgcgcuggggcagggaacgacucuaaacaauguccauucaaacaauaccgugcgagaucguacacccuauagaacucuccugaugaacgaacuuggcguuccuuuucaccuggguaccaaacaggugugcauugcuuggagcaguuccucuugucaugacgggaaggccugguugcacgucugcaucacaggagaugacaagaaugcaaccgccagcuucaucuacaacggcaggcucguggauuccguaguuucauggaguaaagagauucugcggacgcaggaaagcgagugugugugcauaaauggcacuuguacagucgugaugaccgacgggucugcuuccggaaaggcagauacuaaaauccuguuuauugaggaagguaagaucgugcauacaucaacccucagcggcagugcccaacacgucgaggaaugcucuugcuauccacgcuacccggggguuagaugugugugcagggacaacuggaagggauccaaccggcccauaguagauauuaauaucaaagaccacagcaucgugucgucuuacgucuguuccggcuuagugggugacacgccucgcaagaacgauucaaguagcuccucucauugccuggacccaaauaacgaggaagggggacacggcguuaaaggcugggcuuucgaugacgggaaugauguguggaugggacgaaccauuaacgagacaagcagacuugguuaugagacuuuuaaggucaucgaaggcuggucaaaucccaaaaguaaguugcagauuaacaggcaagugauaguagaccguggggaucgguccggauacagcggcguuuucucuguggaggguaaaucauguaucaaucgcugcuuuuaugucgaacugauuagagggaggaaggaggaaaccgaggugcuauggacaaguaacagcaucgucguguucuguggcacuuccggaaccuacggcacagggucuuggccugacggagccgaucucaaucugaugccaaucuga

SEQ ID NO: 153698 - RNA, 1410 nt, Artificial Sequence; identical to SEQ ID NO: 153685
  derived and/or modified CDS sequence (opt3) from neuraminidase__InfluenzaA__AIL93897

SEQ ID NO: 153699 - RNA, 1410 nt, Artificial Sequence
  derived and/or modified CDS sequence (opt3) from neuraminidase__InfluenzaA__AIL93909
augaaccccaaucagaagaucauuaccauaggcagcgugugcaugacaaucgggauggccaaccugauucuccaaaucggaaauauuaucuccauauggaucucucacucaauucagcuugguaaccagagucagaucgagacuuguaaucaaagcgucauuacguacgaaaacaauaccuggguuaaccagacauaugugaauaucuccaacacuaauuucgcugcaggccagucuguagugucggucaaacuggccgggaacagcagcuugugcccugugaguggaugggcgauauacuccaaggacaauucuauuagaaucggcagcaaaggugauguuuuugugauuagggagccauucaucuccuguucaccguuagaaugccggaccuuuuuccugacacagggggcucuacucaacgacaagcauaguaauggaaccaucaaagaucgcagccccuaucgaacucugaugucuuguccuauuggcgaggucccaucccccuacaacucacguuuugaaagcguggccuggagugcaucugccugccacgacggcauaaacuggcuuacaaucgggauuuccggaccugauagcggugcuguagcaguucugaaguauaauggcaucauaaccgacacgauuaagucguggagaaacaauaucuugaggacucaagagucugagugugugugcgucaacggguccuguuucaccaucaugacagauggaccaucagacggccaggccaguuacaaaauuuuucggaucgaaaaggguaaaauugugaagucaguggagaugaaugcucccaacuaucauuacgaagagugcuccuguuacccugauucuagcgagauaacuugcgucugccgcgacaauuggcacgggucaaacagaccauggguuaguuucaaucagaaccucgaauaucagaucggauacauuuguuccggcaucuuuggcgauaauccgaggcccaacgacaaaaccgggagcugcggaccugugucuucaaauggugccaacggcguaaagggguucaguuuuaaguauggaaauggcguguggaucggucggacaaaaagcauuuccucucgcaagggguucgagaugauaugggauccaaacggcuggaccggaacggacaacaauuuuucgaucaaacaagacauugucggcaucaacgaauggagcggguacuccggaucauucgugcagcaucccgagcugacuggucuggauuguauucgaccuugcuucuggguugaacucaucagaggcaggccaaaggagaauacaauauggaccagugggucuagcaucuccuuuuguggagugaacucagacacugucggcuggagcuggcccgauggugcggaguuaccguucacaauugacaaauga

SEQ ID NO: 153700 - RNA, 1410 nt, Artificial Sequence; identical to SEQ ID NO: 153685
  derived and/or modified CDS sequence (opt3) from neuraminidase__InfluenzaA__AIL93920

SEQ ID NO: 153701 - RNA, 1410 nt, Artificial Sequence
  derived and/or modified CDS sequence (opt3) from neuraminidase__InfluenzaA__AIL93943
augaaccccaaucagaagaucauuaccauaggcagcgugugcaugacaaucgggauggccaaccugauucuccaaaucggaaauauuaucuccauaugggucucucacucaauccagcuugguaaccagagucagauugagacuuguaaucaaagcguuaucacguacgaaaacaauaccugggugaaccagacauauguaaauauuuccaacacuaauuucgcugcaggccagucuguggucucggugaaacuggccgggaacagcucauugugcccuguuaguggaugggcgaucuacuccaaggacaauucugugagaauaggcagcaaaggugaugucuuugugauuagggagccauucaucuccuguucaccgagugaaugccggaccuuuuucuuaacacagggggcucugcuaaacgacaagcauagcaauggaaccauuaaagaucgcucucccuaucgaacucucauguccuguccuaucggcgagguaccaucacccuacaacagccguuuugaaaguguugccuggucugcauccgccugccacgacggcaucaacuggcugacaauugggauaagcggaccugauucgggugcuguggcaguccuuaaguauaauggcaucauuaccgacacgaucaagucuuggagaaacaauauacugaggacucaagaguccgagugugccugcgugaacgggucauguuucaccauuaugacagauggaccaagugacggccaggcuagcuacaaaaucuuucggaucgaaaaggguaaaauugugaaguccgucgagaugaaugcccccaacuaucauuacgaagagugcucuuguuacccugauagcucagagaucacuugcguuugccgcgacaauuggcacgggaguaacagaccauggguguccuucaaucagaacuuggaauaucagauuggauacauauguagcggcguauuuggcgauaauccgaggcccaacgacaaaaccgggucuugcggaccugugucaaguaauggugcgaacggcgucaagggguucagcuuuaaguauggaaauggcguguggaucggucggacaaaauccauuucuucgcgcaagggguucgagaugaucugggauccaaacggcuggaccggaacggacaacaauuuuagcaucaaacaagacauuguuggcauaaaggaaugguccggguacucaggaaguuucgugcagcaucccgagcucacuggucuggauuguauccgaccuugcuucugggucgaacugauuagaggcaggccagaggagaacacaaucuggaccucugggagcuccauuucauuuuguggagugaauagcgacacuguaggcuggucuuggcccgauggugcagaacucccguucacaaucgacaaauga

SEQ ID NO: 153702 - RNA, 1410 nt, Artificial Sequence; identical to SEQ ID NO: 153685
  derived and/or modified CDS sequence (opt3) from neuraminidase__InfluenzaA__AIL93954

SEQ ID NO: 153703 - RNA, 1410 nt, Artificial Sequence; identical to SEQ ID NO: 153685
  derived and/or modified CDS sequence (opt3) from neuraminidase__InfluenzaA__AIL93966

SEQ ID NO: 153704 - RNA, 1410 nt, Artificial Sequence
  derived and/or modified CDS sequence (opt3) from neuraminidase__InfluenzaA__AIL93978
augaaccccaaucagaagaucauuaccauaggcagcgugucccugacaaucucuacuauuugccucuucaugcagaucgccauucuuaucacgaccgucacacugcacuuuaaacaguacgaguucaacucaccuccaaauaaccagguuauguugugugaaccgacuauaaucgagagaaauauuaccgaaaucguguauuuaacaaacaccacuauugagaaggaaaucugccccaaaccugcugaguacaggaauuggaguaagccacagugugggauaacaggauuugcacccuucagcaaagacaacuccauucggcugucugccgguggcgauaucuggguaacccgcgagccuuaugugucgugcgacccagauaaguguuaccaauuugcgcuagggcagggaacgacucucaauaacguccauucaaauaacaccgugcgagaccguacacccuauagaacucugcuuaugaaugaacugggcguuccuuuccacuuggguaccaaacaggugugcauugcuuggagcaguuccucuugucaugaugggaaggccuggcuccacgucugcaucacaggagacgauaagaacgcaaccgccagcuuuaucuacaauggcaggcugguggacuccguaguuucauggaguaaagagauucugcggacgcaggaaagcgagugugugugcauaaacggcacuuguacagucgugaugaccgaugggucugcuuccggaaaggcagacacuaaaauccucuucauugaggaagguaagaucgugcauacaucaaccuuaagcggcagugcccaacacgucgaggaaugcucuugcuauccacgcuacccggggguuagaugugugugcagggauaacuggaagggauccaaucggcccauaguagacauuaacaucaaagaucacagcaucgugucgucuuacgucuguuccggccuggugggugacacgccucgcaagaaugacucaaguagcuccucucauugccuugauccaaacaaugaggaagggggacacggcguuaaaggcugggcuuuugacgaugggaacgacguguggaugggacgaaccauuaaugagacaagcagauuggguuaugagacuuucaaggucaucgaaggcuggucaaaccccaaaaguaagcugcagauuaauaggcaagugauaguagaucguggggaccgguccggauacagcggcaucuuuucuguugaggguaaaucauguauuaaccgcugcuucuauguggaacuaaucagagggaggaaggaggaaaccgagguccucuggacaaguaauagcaucguggucuuuuguggcacuuccggaaccuacggcacagggucuuggccugauggagccgaccugaaccuuaugccaauuuga

SEQ ID NO: 153705 - RNA, 1410 nt, Artificial Sequence; identical to SEQ ID NO: 153694
  derived and/or modified CDS sequence (opt3) from neuraminidase__InfluenzaA__AIL93990

SEQ ID NO: 153706 - RNA, 1410 nt, Artificial Sequence; identical to SEQ ID NO: 150194
  derived and/or modified CDS sequence (opt3) from neuraminidase__InfluenzaA__AIL94001

SEQ ID NO: 153707 - RNA, 1410 nt, Artificial Sequence; identical to SEQ ID NO: 153685
  derived and/or modified CDS sequence (opt3) from neuraminidase__InfluenzaA__AIL94013

SEQ ID NO: 153708 - RNA, 1410 nt, Artificial Sequence; identical to SEQ ID NO: 153685
  derived and/or modified CDS sequence (opt3) from neuraminidase__InfluenzaA__AIL94025

SEQ ID NO: 153709 - RNA, 1410 nt, Artificial Sequence; identical to SEQ ID NO: 153685
  derived and/or modified CDS sequence (opt3) from neuraminidase__InfluenzaA__AIL94037

SEQ ID NO: 153710 - RNA, 1410 nt, Artificial Sequence; identical to SEQ ID NO: 153685
  derived and/or modified CDS sequence (opt3) from neuraminidase__InfluenzaA__AIL94049

SEQ ID NO: 153711 - RNA, 1410 nt, Artificial Sequence; identical to SEQ ID NO: 153694
  derived and/or modified CDS sequence (opt3) from neuraminidase__InfluenzaA__AIL94061

SEQ ID NO: 153712 - RNA, 1410 nt, Artificial Sequence
  derived and/or modified CDS sequence (opt3) from neuraminidase__InfluenzaA__AIL94072
augaaccccaaucagaagaucauuaccauaggcagcgugugcaugacaaucgggauggccaaccugauucuccaaaucggaaauauuaucuccauauggaucucucacucaauucagcuugguaaccagagucagaucgaggcuuguaaucaaagcgucauuacuuacgaaaacaauacguggguuaaccagaccuaugugaauaucuccaacacaaauuucgcaacuggccagucuguagugucggucaaacuggccgggaacagcagcuugugcccugugaguggaugggcgauauacuccaaggacaauucuguuagaauuggcagcaaaggugauguguuugucaucagggagccauucauuuccuguucaccguuagaaugccggaccuuuuuccugacacagggggcucuacucaacgacaagcauaguaauggaaccaucaaagaucgcagccccuaucgaacucugaugucuuguccuaucggcgaggugccaucccccuacaacucacguuuugaaagcguagccuggagugcaucugccugccacgacggcauuaacuggcuuacaauagggaucuccggaccugauagcggugcuguugcagugcugaaguauaauggcauuaucaccgacacgauaaagucguggaaaaacaauauuuugagaacucaagagucugagugugccugcgucaacggguccuguuucaccaucaugacagauggaccaucagacggccaggcuaguuacaagaucuuuaggauugaaaaagguaagaucgugaaaagcguggagaugaaugcccccaacuaucauuacgaagagugcuccuguuacccugauucuagcgagauuacuugcgucugccgggacaauuggcacgggucaaaccgcccauggguuaguuucaaucagaaccucgaauaucagauaggauacaucuguuccggcguguuuggcgauaauccgagacccaacgacaagaccgggagcugcggaccuguacugucuaauggugcgaacggcgugaagggguucucauuuaaauauggaaauggcgucuggauugguaggacaaagaguaucagcucccggaaaggguucgagaugaucugggauccaaacggcuggaccggaacggacaacaauuuuucuauuaagcaagacauagugggcaucaacgaauggucgggguacagcggauccuucguucagcaucccgagcugacuggucucgauuguauucgcccuugcuucuggaucgaauuaauucgaggcagaccaaaagagaauacaaucuggaccucagggaguucuauaucauuuuguggagugaacuccgacacugucggcuggucauggcccgauggugcagagcugccguucacaaucgacaaguga

SEQ ID NO: 153713 - RNA, 1410 nt, Artificial Sequence; identical to SEQ ID NO: 153694
  derived and/or modified CDS sequence (opt3) from neuraminidase__InfluenzaA__AIL94083

SEQ ID NO: 153714 - RNA, 1410 nt, Artificial Sequence; identical to SEQ ID NO: 153685
  derived and/or modified CDS sequence (opt3) from neuraminidase__InfluenzaA__AIL94238

SEQ ID NO: 153715 - RNA, 1410 nt, Artificial Sequence
  derived and/or modified CDS sequence (opt3) from neuraminidase__InfluenzaA__AIL94250
augaaccccaaucagaagaucauuaccauaggcagcgugugcaugacaaucgggauggccaaccugauucuccaaaucggaaauauuaucuccauauggaucucucacucaauucagcuugguaaccagagucagaucgaggcuuguaaucaaagcgucauuacuuacgaaaacaauacguggguuaaccagaccuaugugaauaucuccaacacaaauuucgcagccggccagucuguagugucggucaaacuggcggggaacagcucauugugcccugugaguggaugggcuauauacuccaaggacaauucuguuagaauuggcagcaaaggugauguguuugucaucagggagccauucauuuccuguucaccguuagaaugccggaccuuuuuccugacucagggggcccuacucaacgacaagcauaguaauggaacaaucaaagaucgcagccccuaucgaacccugaugucuuguccuaucggcgaggugccaucccccuacaacucacguuuugaaagcguagcauggagugccucugcuugccacgacggcauuaacuggcuuacuauagggaucuccggaccugauagcggugcaguugccgugcugaaguauaauggcauuaucacagacaccauaaagucguggaaaaacaauauuuugagaacgcaagagucugagugugcuugcgucaacggguccuguuucacuaucaugaccgauggaccaaaugacggccaggccucauacaagaucuuuaggauugaaaaagguaagaucgugaaaaguguggagaugaacgcgcccaauuaucauuacgaagagugcagcuguuacccugauuccucugagauuacaugcgucugccgggacaacuggcacgggagcaaucgcccauggguuucauucaaccagaaucucgaauaucagauaggauacaucuguaguggcguguuuggcgauaacccgagacccaaugacaagacuggguccugcggaccuguaagcucuaacggugcaaauggcgugaagggguucucauuuaaauauggaaacggcgucuggauugguaggaccaagaguaucagcucccggaaaggguucgagaugaucugggauccaaacggcuggacaggaaccgacaauaacuuuucuauuaagcaagacauagugggcaucaaugaauggucgggguacagcggauccuucguucagcaucccgagcugacgggucuggauuguauucgcccuugcuucuggguggaacucauccgaggcagaccaaaagagaacacuauuuggacaucagggaguucuaucagcuuuuguggagucaauuccgacaccgugggcuggucauggcccgauggugccgaguuaccguucacuauagacaaguga

SEQ ID NO: 153716 - RNA, 1410 nt, Artificial Sequence; identical to SEQ ID NO: 150194
  derived and/or modified CDS sequence (opt3) from neuraminidase__InfluenzaA__AIL94261

SEQ ID NO: 153717 - RNA, 1410 nt, Artificial Sequence; identical to SEQ ID NO: 150194
  derived and/or modified CDS sequence (opt3) from neuraminidase__InfluenzaA__AIL94273

SEQ ID NO: 153718 - RNA, 1410 nt, Artificial Sequence; identical to SEQ ID NO: 150194
  derived and/or modified CDS sequence (opt3) from neuraminidase__InfluenzaA__AIL94285

SEQ ID NO: 153719 - RNA, 1410 nt, Artificial Sequence
  derived and/or modified CDS sequence (opt3) from neuraminidase__InfluenzaA__AIL94297
augaaccccaaucagaagaucauuaccauaggcagcgugucccugacaaucucuacuauuugcuucuuuaugcaaaucgccauucucaucacgaccgucacacuucacuucaaacaguacgaguuuaacucaccuccaaauaaccagguuaugcugugugaaccgacuauaaucgagagaaauauuaccgaaaucguguauuugacaaacaccacuauugagaaggaaaucugccccaaaccugcugaguacaggaauuggaguaagccacagugugggauaacaggauucgcacccuuuagcaaagacaacuccauucgguuaucugccgguggcgauaucuggguaacccgcgagccuuaugugucgugcgacccagauaaguguuaccaauucgcgcuggggcagggaacgacucuaaauaacguccauucaaauaacaccgugcgagaccguacacccuauagaacucuccugaugaaugaacuuggcguuccuuuucaccuggguaccaaacaggugugcauugcuuggagcaguuccucuugucaugaugggaaggccugguugcacgucugcaucacaggagacgauaagaacgcaaccgccagcuucaucuacaauggcaggcucguggacuccguaguuucauggaguaaagagauucugcggacgcaggaaagcgagugugugugcauaaacggcacuuguacagucgugaugaccgaugggucugcuuccggaaaggcagacacuaaaauccuguuuauugaggaagguaagaucgugcauacacgcacccucucaggcagcgcccaacacgucgaggaaugcaguugcuauccaagauacccggggguuaggugugugugccgggauaacuggaagggaucuaaucgccccauaguagacauuaacaucaaagaucacuccaucgugagcucguacgucuguucuggcuuagugggugacacgccucgaaagaaugacuccucaaguagcucccauugccuggauccaaacaaugaggaagggggacacggcguuaaaggcugggcuuucgacgaugggaacgacguguggaugggaagaaccauuaaugagacaucuaggcuugguuaugagacuuuuaaggucaucgaaggcuggagcaaccccaaaucaaaguugcagauuaauaaacaggugauaguagaucguggggaccggaguggauacuccggcaucuucagcguugaggguaagucuuguauuaaccgcugcuuuuauguggaacugaucagagggaggaaggaggaaaccgagguccuauggacaucaaauaguaucguggucuucuguggcacuagcggaaccuacggcacaggguccuggccugauggagccgaccucaaccugaugccaauuuga

SEQ ID NO: 153720 - RNA, 1410 nt, Artificial Sequence; identical to SEQ ID NO: 153685
  derived and/or modified CDS sequence (opt3) from neuraminidase__InfluenzaA__AIL94309

SEQ ID NO: 153721 - RNA, 1410 nt, Artificial Sequence; identical to SEQ ID NO: 153704
  derived and/or modified CDS sequence (opt3) from neuraminidase__InfluenzaA__AIL94321

SEQ ID NO: 153722 - RNA, 1410 nt, Artificial Sequence; identical to SEQ ID NO: 150194
  derived and/or modified CDS sequence (opt3) from neuraminidase__InfluenzaA__AIL94368

SEQ ID NO: 153723 - RNA, 1410 nt, Artificial Sequence
  derived and/or modified CDS sequence (opt3) from neuraminidase__InfluenzaA__AIL94380
augaaccccaaucagaagaucauuaccauaggcagcgugucccugacaaucucuacuauuugcuucuuuaugcaaaucgccauucucaucacgaccgucacacuucacuucaaacaguacgaguuuaacucaccuccaaauaaccagguuaugcugugugaaccgacuauaaucgagagaaauauuaccgaaaucguguauuugacaaacaccacuauugagaaggaaaucugccccaaaccugcugaguacaggaauuggaguaagccacagugugggauaacaggauucgcacccuuuagcaaagacaacuccauucgguuaucugccgguggcgauaucuggguaacccgcgagccuuaugugucgugcgacccagauaaguguuaccaauucgcgcuggggcagggaacgacucuaaauaacguccauucaaauaacaccgugcgagaccguacacccuauagaacucuccugaugaaugaacuuggcguuccuuuucaccuggguaccaaacaggugugcauugcuuggagcaguuccucuugucaugaugggaaggccugguugcacgucugcaucacaggagacgauaagaacgcaaccgccagcuucaucuacaauggcaggcucguggacuccguaguuucauggaguaaagagauucugcggacgcaggaaagcgagugugugugcauaaacggcacuuguacagucgugaugaccgaugggucugcuuccggaaaggcagacacuaaaauccuguuuauugaggaagguaagaucgugcauacaucaacccucagcggcagugcccaacacgucgaggaaugcucuugcuauccacgcuacccggggguuagaugugugugcagggauaacuggaagggauccaaucggcccguaguggacauaaacauuaaagaucacagcaucgucucgucuuacguguguuccggcuuaguuggugacacgccucgcaagaaugacucaaguagcuccucucauugccuggauccaaacaaugaggaagggggacacggcgugaaaggcugggcuuucgacgaugggaacgacgucuggaugggacgaaccaucaaugagacaagcagacuugguuaugagacuuuuaaggugauugaaggcuggucaaaccccaaaaguaaguugcagaucaauaaacagguaauuguugauaggggagaccgguccggguacagcggcauauucucuguggaggguaagucauguaucaaccguugcuuuuaugucgaacugauucgcgggagaaaggaggaaaccgaggugcuauggacaaguaauagcaucgucguguucuguggcacuuccggaaccuacggcacagggucuuggccugauggagccgaccucaaccugaugccaaucuga

SEQ ID NO: 153724 - RNA, 1410 nt, Artificial Sequence
  derived and/or modified CDS sequence (opt3) from neuraminidase__InfluenzaA__AIL94392
augaaccccaaucagaagaucauuaccauaggcagcgugugcaugacaaucgggauggccaaccugauucuccaaaucggaaauauuaucuccauauggaucucucacucaauucagcuugguaaccagagucagaucgaggcuuguaaucaaagcgucauuacuuacgaaaacaauacguggguuaaccagaccuaugugaauaucuccaacacaaauuucgcagccggccagucuguagugucggucaaacuggcggggaacagcucauugugcccugugaguggaugggcuauauacuccaaggacaauucuguuagaauuggcagcaaaggugauguguuugucaucagggagccauucauuuccuguucaccguuagaaugccggaccuuuuuccugacucagggggcccuacucaacgacaagcauaguaauggaacaaucaaagaucgcagccccuaucgaacccugaugucuuguccuaucggcgaggugccaucccccuacaacucacguuuugaaagcguagcauggagugccucugcuugccacgacggcauuaacuggcuuacuauagggaucuccggaccugauagcggugcaguugccgugcugaaguauaauggcauuaucacagacaccauaaagucguggaaaaacaauauuuugagaacgcaagagucugagugugcuugcgucaacggguccuguuucacuaucaugaccgauggaccaucagacggccaggccaguuacaagaucuuuaggauugaaaaagguaagaucgugaaaagcguggagaugaaugcgcccaacuaucauuacgaagagugcuccuguuacccugauucuagcgagauuacaugcgucugccgggacaauuggcacgggucaaaccgcccauggguuaguuucaaucagaaccucgaauaucagauaggauacaucuguuccggcguguuuggcgauaauccgagacccaacgacaagacugggagcugcggaccuguaucuucaaauggugcaaacggcgugaagggguucaguuuuaaauauggaaauggcgucuggauugguaggaccaagagcaucuccucucggaaaggguucgagaugaucugggauccaaacggcuggacaggaaccgacaacaauuuuucgauuaagcaagacauagugggcaucaacgaauggagcggguacuccggaucauucguucagcaucccgagcugacgggucuggauuguauucgcccuugcuucuggguggaacucauccgaggcagaccaaaagagaauacuauuuggacaagugggucuagcaucuccuuuuguggagucaacucagacaccgugggcuggagcuggcccgauggugccgaguuaccguucacuauagacaaguga

SEQ ID NO: 153725 - RNA, 1410 nt, Artificial Sequence
  derived and/or modified CDS sequence (opt3) from neuraminidase__InfluenzaA__AIL94403
augaaccccaaucagaagaucauuaccauaggcagcgugugcaugacaaucgggauggccaaccugauucuccaaaucggaaauauuaucuccauauggaucucucacucaauucagcuugguaaccagagucagaucgaggcuuguaaucaaagcgucauuacuuacgaaaacaauacguggguuaaccagaccuaugugaauaucuccaacacaaauuucgcagccggccagucuguagugucggucaaacuggcggggaacagcucauugugcccugugaguggaugggcuauauacuccaaggacaauucuguuagaauuggcagcaaaggugauguguuugucaucagggagccauucauuuccuguucaccguuagaaugccggaccuuuuuccugacucagggggcccuacucaacgacaagcauaguaauggaacaaucaaagaucgcagccccuaucgaacccugaugucuuguccuaucggcgaggugccaucccccuacaacucacguuuugaaagcguagcauggagugccucugcuugccacgacggcauuaacuggcuuacuauagggaucuccggaccugauagcggugcaguugccgugcugaaguauaauggcauuaucacagacaccauaaagucguggaaaaacaauauuuugagaacgcaagagucugagugugcuugcgucaacggguccuguuucacuaucaugaccgauggaccaucagacggccaggccaguuacaagaucuuuaggauugaaaaagguaagaucgugaaaagcguggagaugaaugcgcccaacuaucauuacgaagagugcuccuguuacccugauucuagcgagauuacaugcgucugccgggacaauuggcacgggucaaaccgcccauggguuaguuucaaucagaaccucgaauaucagauaggauacaucuguuccggcguguuuggcgauaauccgagacccaacgacaagacugggagcugcgauccuguaucuucaaauggagcaaacggugugaagggcuucaguuuuaaauaugggaauggagucuggauuggcaggaccaagagcaucuccucucggaaagguuucgagaugaucugggacccaaacggguggacaggcaccgacaacaauuuuucgauuaagcaagauauagugggaaucaacgaauggagcggcuacuccgggucauucguucagcaucccgagcugacgggacuggacuguauucgcccuugcuucuggguggaacucauccgagguagaccaaaagagaauacuauuuggacaaguggcucuagcaucuccuuuuguggggucaacucagauaccgugggauggagcuggcccgacggcgccgaguuaccguucacuauagauaaguga

SEQ ID NO: 153726 - RNA, 1410 nt, Artificial Sequence; identical to SEQ ID NO: 150194
  derived and/or modified CDS sequence (opt3) from neuraminidase__InfluenzaA__AIL94426

SEQ ID NO: 153727 - RNA, 1410 nt, Artificial Sequence
  derived and/or modified CDS sequence (opt3) from neuraminidase__InfluenzaA__AIL94438
augaaccccaaucagaagaucauuaccauaggcagcgugugcaugacaaucgggauggccaaccugauucuccaaaucggaaauauuaucuccauauggaucucucacucaauucagcuugguaaccagagucagaucgaggcuuguaaucaaagcgucauuacuuacgaaaacaauacguggguuaaccagaccuaugugaauaucuccaacacaaauuucgcaacuggccagucuguagugucggucaaacuggccgggaacagcucauugugcccugugaguggaugggcgauauacuccaaggacaauucuguuagaauuggcagcaaaggugauguguuugucaucagggagccauucauuuccuguucaccguuagaaugccggaccuuuuuccugacacagggggcucuacucaacgacaagcauaguaauggaaccaucaaagaucgcagccccuaucgaacucugaugucuuguccuaucggcgaggugccaucccccuacaacucacguuuugaaagcguagccuggagugcaucugccugccacgacggcauuaacuggcuuacaauagggaucuccggaccugauagcggugcuguugcagugcugaaguauaauggcauuaucaccgacacgauaaagucguggaaaaacaauauuuugagaacucaagagucugagugugccugcgucaacggguccuguuucaccaucaugacagauggaccaucagacggccaggcuaguuacaagaucuuuaggauugaaaaagguaagaucgugaaaagcguggagaugaaugcccccaacuaucauuacgaagagugcuccuguuacccugauucuagcgagauuacuugcgucugccgggacaauuggcacgggucaaaccgcccauggguuaguuucaaucagaaccucgaauaucagauaggauacaucuguuccggcguguuuggcgauaauccgagacccaacgacaagaccgggagcugcggaccuguaucuucaaauggugcgaacggcgugaagggguucaguuuuaaauauggaaauggcgucuggauugguaggacaaagagcguguccucucggaaaggguucgagaugaucugggauccaaacggcuggaccggaacggacaacaauuuuucgaucaagcaagacauuguuggcauaaacgaauggagcggguacuccggaucauucgugcagcaucccgagcugacuggucuggauuguauccgcccuugcuucugggucgaacucauucgaggcagaccaaaagagaauacaaucuggaccagugggucuagcauuuccuuuuguggagugaacucagacacuguaggcuggagcuggcccgauggugcagaguuaccguucacaaucgacaaguga

SEQ ID NO: 153728 - RNA, 1410 nt, Artificial Sequence
  derived and/or modified CDS sequence (opt3) from neuraminidase__InfluenzaA__AIL94449
augaaccccaaucagaagaucauuaccauaggcagcgugucccugacaaucucuacuauuugcuucuuuaugcagaucgccauucucaucacgaccgucacacuucacuucaaacaguacgaguuuaacucaccuccaaauaaccagguuaugcugugugaaccgacuauaaucgagagaaauauuaccgaaaucguguauuugacaaacaccacuauugagaaggaaaucugccccaaaccugcuaaguacaggaauuggaguaaaccacagugugggauaacaggauucgcacccuuuagcaaggacaacuccauucgguuaucugccgguggcgauaucuggguaacccgcgagccuuaugugucgugcgacccagauaaguguuaccaauucgcgcuggggcagggaacgacucuaaauaacguccauucaaauaacaccgugcgagaccguacacccuauagaacucuccugaugaaugagcuuggcguuccuuuucaccuggguaccaaacaggugugcauugcuuggagcaguuccucuugucaugaugggaaggccugguugcacgucugcaucacaggagacgauaaaaacgcaaccgccagcuucaucuacaauggcaggcucguggacuccguaguuucauggaguaaggaaauucugcggacgcaggagagcgaaugugugugcauaaacggcacuuguacagucgugaugaccgaugggucugcuuccggaaaagcagacacuaagauccuguuuauugaggaggguaagaucgugcauacaucaacccucagcggcagugcccaacacgucgaagagugcucuugcuauccacgcuacccggggguuagaugugugugcagggauaacuggaaaggauccaaucggcccauaguagacauuaacaucaaggaucacagcaucguguacucguaugucuguucuggcuuagugggugacacgccucgcaaaaaugacuccucaaguagcucccauugccugaacccaaauaacgaagaagggggacacggcguuaagggcugggcuuucgaugacgggaaugauguguggaugggacgaaccauuaacgagacaucuagacuugguuacgagacuuuuaaagucaucgagggcuggagcaaucccaagucaaaauugcagauuaacaggcaagugauaguagaccguggggaucggaguggauauuccggcaucuucagcguugaagguaagucuuguauuaaucgcugcuuuuacguggagcugaucagagggaggaaggaagagaccgaaguccuauggacaucaaacaguaucguggucuucuguggcacuagcggaaccuauggcacaggguccuggccugacggagccgaucucaaucugaugccaauuuga

SEQ ID NO: 153729 - RNA, 1410 nt, Artificial Sequence; identical to SEQ ID NO: 153723
  derived and/or modified CDS sequence (opt3) from neuraminidase__InfluenzaA__AIL94461

SEQ ID NO: 153730 - RNA, 1410 nt, Artificial Sequence
  derived and/or modified CDS sequence (opt3) from neuraminidase__InfluenzaA__AIL94473
augaaccccaaucagaagaucauuaccauaggcagcgugugcaugacaaucgggauggccaaccugauucuccaaaucggaaauauuaucuccauaugggucggucacucuauccagcuuggcaaccagucacagauugagacuuguaaucaaaguguuaucacguacgaaaacaauaccugggugaaccagacauauguaaauauuagcaacacuaauuucgcugcagggcaguccguggucccugugaaacuggccggaaacucuucguugugcccaguuucaggcugggcgaucuacagcaaggacaauagugugagaauagguuccaaaggggaugucuuugugauuagggagccguucaucucuuguagccccuuagaaugccggaccuuuuuccugacacagggagcucuacucaacgacaagcauuccaauggcaccauuaaagaucgcucaccuuaucgaacucugaugaguuguccaaucggcgagguacccagcccuuacaacucucguuuugaauccguugccuggucagcaagcgccugccacgacgggaucaacuggcuuacaauuggaauaagugguccagauucuggcgcuguggcaguccugaaguauaaugggaucauuaccgacacgaucaaguccuggagaaacaauauauugaggacucaagagagcgagugugccugcgugaacggaucguguuucaccauuaugacagauggccccucugacggucaggcuuccuacaaaaucuuucggaucgaaaaggggaaaauugugaagucagucgagaugaauacuccuaacuaucauuacgaagagugcaguuguuacccagauagcuccgagauuaccugcguuugccgcgacaauuggcacggaucuaacagaccgugggugagcuucaaucagaaccucgaauaucagaucggcuacauauguucaggcguauuuggggauaaucccaggccuaacgacaaaacaggaaguugcgguccaguguccagcaauggcgccaacggggucaagggauucucuuuuaaguauggcaaugguguguggaucgggcggaccaaaucaauuaguagccgcaagggcuucgagaugaucugggaucccaacggauggacgggcacugacaacaauuuuuccaucaaacaagacauuguugggauaaaggaauggucuggauacucggguagcuucgugcagcauccugagcugacaggccuggauuguauccgaccaugcuucugggucgaacucauuagagggaggcccgaggagaacaccaucuggacuuccggaucaaguauuucuuuuuguggcgugaauagcgacaucguagguugguccuggccggauggggcggaauuaccuuucacaauagacaaauga

SEQ ID NO: 153731 - RNA, 1410 nt, Artificial Sequence; identical to SEQ ID NO: 152784
  derived and/or modified CDS sequence (opt3) from neuraminidase__InfluenzaA__AIL94484

SEQ ID NO: 153732 - RNA, 1410 nt, Artificial Sequence; identical to SEQ ID NO: 153694
  derived and/or modified CDS sequence (opt3) from neuraminidase__InfluenzaA__AIL94507

SEQ ID NO: 153733 - RNA, 1410 nt, Artificial Sequence
  derived and/or modified CDS sequence (opt3) from neuraminidase__InfluenzaA__AIL94518
augaaccccaaucagaagaucauuaccauaggcagcgugucccugacaaucucuacuauuugcuucuuuaugcaaaucgccauucucaucacgaccgucacacuucacuucaaacaguacgaguuuaacucaccuccaaauaaccagguuaugcugugugaaccgacuauaaucgagagaaauauuaccgaaaucguguauuugacaaacaccacuauugagaaggaaaucugccccaaaccugcugaguacaggaauuggaguaagccacagugugggauaacaggauucgcacccuuuagcaaagacaacuccauucgguuaucugccgguggcgauaucuggguaacccgcgagccuuaugugucgugcgacccagauaaguguuaccaauucgcgcuggggcagggaacgacucuaaauaacguccauucaaauaacaccgugcgagaccguacacccuauagaacucuccugaugaaugaacuuggcguuccuuuucaccuggguaccaaacaggugugcauugcuuggagcaguuccucuugucaugaugggaaggccugguugcacgucugcaucacaggagacgauaagaacgcaaccgccagcuucaucuacaauggcaggcucguggacuccguaguuucauggaguaaagagauucugcggacgcaggaaagcgagugugugugcauaaacggcacuuguacagucgugaugaccgaugggucugcuuccggaaaggcagacacuaaaauccuguuuauugaggaagguaagaucgugcauacaucaacccucagcggcagugcccaacacgucgaggaaugcucuugcuauccacgcuacccggggguuagaugugugugcagggauaacuggaagggauccaaucggcccauaguagacauuaacaucaaagaucacagcaucgugucgucuuacgucuguuccggcuuagugggugacacgccucgcaagaaugacucaaguagcuccucucauugccuggauccaaacaaugaggaagggggacacggcguuaaaggcugggcuuucgacgaugggaacgacguguggaugggacgaaccauuaaugagacaagcagacuugguuaugagacuuuuaaggucaucgaaggcuggucaaaccccaaaaguaaguugcagauuaauaaacaggugauaguagauaggggagaccgguccggguacagcggcaucuucucuguugaggguaagucauguauuaaccguugcuuuuauguggaacugauccgcgggagaaaggaggaaaccgagguccuauggacaaguaauagcaucguggucuucuguggcacuuccggaaccuacggcacagggucuuggccugauggagccgaccucucgcugaugccaauuuga

SEQ ID NO: 153734 - RNA, 1410 nt, Artificial Sequence
  derived and/or modified CDS sequence (opt3) from neuraminidase__InfluenzaA__AIL94530
augaaccccaaucagaagaucauuaccauaggcagcgugucccugacaaucucuacuauuugcuucuuuaugcagaucgccauucucaucacgaccgucacacuucacuucaaacaguacgaguuuaacucaccuccaaauaaccagguuaugcugugugaaccgacuauaaucgagagaaauauuaccgaaaucguguauuugacaaacaccacuauugagaaggaaaucugccccaaaccugcugaguacaggaauuggaguaagccacagugugggauaacaggauucgcacccuuuagcaaagacaacuccauucgguuaucugccgguggcgauaucuggguaacccgcgagccuuaugugucgugcgacccagauaaguguuaccaauucgcgcuggggcagggaacgacucuaaauaacguccauucaaauaacaccgugcgagaccguacacccuauagaacucuccugaugaaugaacuuggcguuccuuuucaccuggguaccaaacaggugugcauugcuuggagcaguuccucuugucaugaugggaaggccugguugcacgucugcaucacaggagacgauaagaacgcaaccgccagcuucaucuacaauggcaggcucguggacuccguaguuucauggaguaaagagauucugcggacgcaggaaagcgagugugugugcauaaacggcacuuguacagucgugaugaccgaugggucugcuuccggaaaggcagacacuaaaauccuguuuauugaggaagguaagaucgugcauacaucaacccucagcggcagugcccaacacgucgaggaaugcucuugcuauccacgcuacccggggguuagaugugugugcagggauaacuggaagggauccaaucggcccauaguagacauuaacaucaaagaucacagcaucgugucgucuuacgucuguuccggcuuagugggugacacgccucgcaagaaugacucaaguagcuccucucauugccugaacccaaauaacgaggaagggggacacggcguuaaaggcugggcuuucgaugacgggaaugauguguggaugggacgaaccauuaacgagacaagcagacuugguuaugagacuuuuaaggucaucgaaggcuggucaaaucccaaaaguaaguugcagauuaacaggcaagugauaguagaccguggggaucgguccggauacagcggcaucuucucuguugaggguaaaucauguauuaaucgcugcuuuuauguggaacugaucagagggaggaaggaggaaaccgagguccuauggacaaguaacagcaucguggucuucuguggcacuuccggaaccuacggcacagggucuuggccugacggagccgaucucaaucugaugccaauuuga

SEQ ID NO: 153735 - RNA, 1410 nt, Artificial Sequence; identical to SEQ ID NO: 153724
  derived and/or modified CDS sequence (opt3) from neuraminidase__InfluenzaA__AIL94542

SEQ ID NO: 153736 - RNA, 1410 nt, Artificial Sequence; identical to SEQ ID NO: 153694
  derived and/or modified CDS sequence (opt3) from neuraminidase__InfluenzaA__AIL94553

SEQ ID NO: 153737 - RNA, 1410 nt, Artificial Sequence; identical to SEQ ID NO: 153685
  derived and/or modified CDS sequence (opt3) from neuraminidase__InfluenzaA__AIL94564

SEQ ID NO: 153738 - RNA, 1410 nt, Artificial Sequence; identical to SEQ ID NO: 153694
  derived and/or modified CDS sequence (opt3) from neuraminidase__InfluenzaA__AIL94576

SEQ ID NO: 153739 - RNA, 1410 nt, Artificial Sequence
  derived and/or modified CDS sequence (opt3) from neuraminidase__InfluenzaA__AIL94587
augaaccccaaucagaagaucauuaccauaggcagcgugugcaugacaaucgggauggccaaccugauucuccaaaucggaaauauuaucuccauauggaucucucacucaauucagcuugguaaccagagucagaucgaggcuuguaaucaaagcgucauuacuuacgaaaacaauacguggguuaaccagaccuaugugaauaucuccaacacaaauuucgcagccggccagucuguagugucggucaaacuggcggggaacagcucauugugcccugugaguggaugggcuauauacuccaaggacaauucuguuagaauuggcagcaaaggugauguguuugucaucagggagccauucauuuccuguucaccguuagaaugccggaccuuuuuccugacucagggggcccuacucaacgacaagcauaguaauggaacaaucaaagaucgcagccccuaucgaacccugaugucuuguccuaucggcgaggugccaucccccuacaacucacguuuugaaagcguagcauggagugccucugcuugccacgacggcauuaacuggcuuacuauagggaucuccggaccugauagcggugcaguugccgugcugaaguauaauggcauuaucacagacaccauaaagucguggaaaaacaauauuuugagaacgcaagagucugagugugcuugcgucaacggguccuguuucacuaucaugaccgauggaccaucagacggccaggccaguuacaagaucuuuaggauugaaaaagguaagaucgugaaaagcguggagauggaugcgcccaauuaucauuacgaagagugcuccuguuacccugacucuagcgagauuacaugcgucugccgggauaacuggcacgggucaaaucgcccauggguuaguuucaaccagaaucucgaauaucagauaggauacaucuguuccggcguguuuggcgacaacccgagacccaaugauaagacugggagcugcggaccuguaucuucaaacggugcaaauggcgugaagggguucaguuuuaaauauggaaacggcgucuggauugguaggaccaagagcaucuccucucggaaaggguucgagaugaucugggacccaaauggcuggaacggaacagacaacaauuuuucgauuaagcaagauauagugggcaucaacgaauggagcggguacuccggaucauucguucagcaucccgagcugaccggucuggacuguauucgcccuugcuucuggguggaacucauccgaggcagaccaaaagagaauacgauuuggacugggggaaguucuaucagcuuuuguggcgucaacuccgauacaguggguuggucauggcccgacggggccgaguuaccguucaccauagauaaguga

SEQ ID NO: 153740 - RNA, 1410 nt, Artificial Sequence; identical to SEQ ID NO: 153724
  derived and/or modified CDS sequence (opt3) from neuraminidase__InfluenzaA__AIL94598

SEQ ID NO: 153741 - RNA, 1410 nt, Artificial Sequence
  derived and/or modified CDS sequence (opt3) from neuraminidase__InfluenzaA__AIL94609
augaaccccaaucagaagaucauuaccauaggcagcgugucccugacaaucucuacuauuugccucuucaugcaaaucgccauucuuaucacgaccgucacacugcacuuuaaacaguacgaguucaacucaccuccaaauaaccagguuauguugugugaaccgacuauaaucgagagaaauauuaccgaaaucguguauuuaacaaacaccacuauugagaaggaaaucugccccaaaccugcugaguacaggaauuggaguaagccacagugugggauaacaggauuugcacccuucagcaaagacaacuccauucggcugucugccgguggcgauaucuggguaacccgcgagccuuaugugucgugcgacccagauaaguguuaccaauuugcgcuagggcagggaacgacucucaauaacguccauucaaauaacaccgugcgagaccguacacccuauagaacucugcuuaugagcgaacugggcguuccuuuccacuuggguaccaaacaggugugcauugcuuggaguuccucuagcugucaugaugggaaggccuggcuccacgucugcaucacaggagacgauaagaaugcaaccgccuccuuuaucuacaacggcaggcugguggacucaguaguuaguuggagcaaagagauucugcggacgcaggaaucugagugugugugcauaaauggcacuuguacagucgugaugaccgauggguccgcuucaggaaaggcagacacuaaaauccucuucauugaggaagguaagaucgugcauacaagcaccuuaaguggcucugcccaacacgucgaggaaugcuccugcuauccacuguacccggggguucgcugugugugcagagauaacuggaagggaagcaacaggcccauaguagacauuaauaucaaagaucacucgaucgugucuuccuacgucuguucaggccuugugggugacacgccucggaagaacgacaguagcuccucuagccauugcuuggauccaaauaacgaggaagggggacacggcguuaaaggcugggcuuuugacgaugggaaugacguguggaugggacgcaccauuaacgagacaucacgacuggguuaugagacuuucaaggucaucgaaggcuggaguaaucccaaauccaagcuacagauuaacagacaggugauaguagauaggggagaccggagcggguacucuggcaucuuuucaguugaggguaaaaguuguauuaaucguugcuucuauguggaacucauccgcgggagaaaggaggaaaccgagguccuguggacaagcaacuccaucguggucuuuuguggcacuucuggaaccuacggcacagggucguggccugauggagccgaccuuaaucugaugccaauuuga

SEQ ID NO: 153742 - RNA, 1410 nt, Artificial Sequence
  derived and/or modified CDS sequence (opt3) from neuraminidase__InfluenzaA__AIL94621
augaaccccaaucagaagaucauuaccauaggcagcgugugcaugacaaucgggauggccaaccugauucuccaaaucggaaauauuaucuccauauggaucucucacucaauucagcuugguaaccagagucagaucgaggcuuguaaucaaagcgucauuacuuacgaaaacaauacguggguuaaccagaccuaugugaauaucuccaacacaaauuucgcagccggccagucuguagugccugucaaacuggcggggaacucgucauugugcccagugagcggaugggcuauauacaguaaggacaauuccguuagaauuggcucuaaaggugauguguuugucaucagggagccguucauuagcuguucccccuuagaaugccggaccuuuuuccugacucagggggcccuacucaacgacaagcauucaaauggaacaaucaaagaucgcaguccuuaucgaacccugaugagcuguccaaucggcgaggugcccucuccuuacaacucccguuuugaaucaguagcauggagcgccagugcuugccacgacggcauuaacuggcuuacuauagggaucucuggaccagauuccggugcaguugccgugcugaaguauaauggcauuaucacagacaccauaaagagcuggaaaaacaauauuuugagaacgcaagagucggagugugcuugcgucaacgggucuuguuucacuaucaugaccgauggacccuccgacggccaggccucauacaagaucuuuaggauugaaaaagguaagaucgugaaaaguguggagaugaaugcgccuaacuaucauuacgaagagugcagcuguuacccagauuccucugagauuacaugcgucugccgggacaauuggcacgggagcaaccgcccguggguuucauucaaucagaaccucgaauaucagauaggauacaucuguaguggcguguuuggcgauaaucccagaccuaacgacaagacuggguccugcggaccaguaagcucuaauggugcaaacggcgugaagggguucucauuuaaauauggaaauggcgucuggauugguaggaccaagaguaucagcucccggaaaggguucgagaugaucugggaucccaacggcuggacaggaaccgacaacgacuuuucuauuaagcaagauauagugggcaucaaugaauggucgggguacagcggauccuucguucagcauccugagcugacgggucuggacuguauucgcccaugcuucuggguggaacucauccgaggcagacccaaagagaacacuauuuggacaucagggaguucuaucagcuuuuguggagucaauuccgauaccgugggcuggucauggccggacggugccgaguuaccuuucacuauagauaaguga

SEQ ID NO: 153743 - RNA, 1410 nt, Artificial Sequence; identical to SEQ ID NO: 153694
  derived and/or modified CDS sequence (opt3) from neuraminidase__InfluenzaA__AIL94632

SEQ ID NO: 153744 - RNA, 1410 nt, Artificial Sequence; identical to SEQ ID NO: 150194
  derived and/or modified CDS sequence (opt3) from neuraminidase__InfluenzaA__AIL94643

SEQ ID NO: 153745 - RNA, 1410 nt, Artificial Sequence
  derived and/or modified CDS sequence (opt3) from neuraminidase__InfluenzaA__AIL94655
augaaccccaaucagaagaucauuaccauaggcagcgugugcaugacaaucgggauggccaaccugauucuccaaaucggaaauauuaucuccauauggaucucucacucaauucagcuugguaaccagagucagaucgagacuuguaaucaaagcgucauuacguacgaaaacaauaccuggguuaaccagacauaugugaauaucuccaacacuaauuucgcugcaggccagucuguagugucggucaaacuggccgggaacagcucauugugcccugugaguggaugggcgauauacuccaaggacaauucuauuagaaucggcagcaaaggugauguuuuugugauuagggagccauucaucuccuguucaccguuagaaugccggaccuuuuuccugacacagggggcucuacucaacgacaagcauaguaauggaaccaucaaagaucgcagccccuaucgaacucugaugucuuguccuauuggcgaggucccaucccccuacaacucacguuuugaaagcguggccuggagugcaucugccugccacgacggcauaaacuggcuuacaaucgggauuuccggaccugauagcggugcuguagcaguucugaaguauaauggcaucauaaccgacacgauuaagucguggagaaacaauaucuugaggacucaagagucugagugugccugcgugaacggguccuguuucaccaucaugacagauggaccaucagacggccaggcuaguuacaaaauuuuucggaucgaaaaggguaaaauugucaagagcguggagaugaaugcccccaacuaucauuacgaagagugcuccuguuacccugauucuagcgagauaacuugcgugugccgcgacaauuggcacgggucaaacagaccaugggucaguuucaaucagaaccucgaauaucagaucggauacauuuguuccggcaucuuuggcgauaauccgaggcccaacgacaaaaccgggagcugcggaccuguuucuucaaauggugcgaacggcgugaagggguucaguuuuaaguauggaaauggcguauggaucggucggacaaaaagcauuuccucucgcaagggguucgagaugauaugggauccaaacggcuggaccggaacggacaacaauuuuucgaucaaacaagacauugugggcaucaacgaauggagcggguacuccggaucauucguccagcaucccgagcugacuggucuggauuguauucgaccuugcuucuggguggaacucaucagaggcaggccaaaggagaauacaauauggaccagugggucuagcaucuccuuuuguggaguuaacucagacacugugggcuggagcuggcccgauggugcagaguuaccguucacaauugacaaauga

SEQ ID NO: 153746 - RNA, 1410 nt, Artificial Sequence
  derived and/or modified CDS sequence (opt3) from neuraminidase__InfluenzaA__AIL94677
augaaccccaaucagaagaucauuaccauaggcagcgugugcaugacaaucgggauggccaaccugauucuccaaaucggaaauauuaucuccauauggaucucucacucaauucagcuugguaaccagagucagaucgaggcuuguaaucaaagcgucauuacuuacgaaaacaauacguggguuaaccagaccuaugugaauaucuccaacacaaauuucgcagccggccagucuguagugccugucaaacuggcggggaacucgucauugugcccagugagcggaugggcuauauacaguaaggacaauuccguuagaauuggcucuaaaggugauguguuugucaucagggagccguucauuagcuguucccccuuagaaugccggaccuuuuuccugacucagggggcccuacucaacgacaagcauucaaauggaacaaucaaagaucgcaguccuuaucgaacccugaugagcuguccaaucggcgaggugcccucuccuuacaacucccguuuugaaucaguagcauggagcgccagugcuugccacgacggcauuaacuggcuuacuauagggaucucuggaccagauuccggugcaguugccgugcugaaguauaauggcauuaucacagacaccauaaagagcuggaaaaacaauauuuugagaacgcaagagucggagugugcuugcgucaacgggucuuguuucacuaucaugaccgauggacccuccgacggccaggccucauacaagaucuuuaggauugaaaaagguaagaucgugaaaaguguggagaugaaugcgccuaacuaucauuacgaagagugcagcuguuacccagauuccucugagauuacaugcgucugccgggacaauuggcacgggagcaaccgcccguggguuucauucaaucagaaccucgaauaucagauaggauacaucuguaguggcguguuuggcgauaaucccagaccuaacgacaagacuggguccugcggaccaguaagcucuaauggugcaaacggcgugaagggguucucauuuaaauauggaaauggcgucuggauugguaggaccaagaguaucagcucccggaaaggguucgagaugaucugggaucccaacggcuggacaggaaccgacaacaauuuuucuauuaagcaagacauagugggcaucaacgaauggucgggguacagcggauccuucguucagcauccugagcugacgggucuggauuguauucgcccaugcuucuggguggaacucauccgaggcagacccaaagagaauacuauuuggacaucagggaguucuaucagcuuuuguggagucaacuccgacaccgugggcuggucauggccggauggugccgaguuaccuuucacuauagacaaguga

SEQ ID NO: 153747 - RNA, 1410 nt, Artificial Sequence; identical to SEQ ID NO: 153685
  derived and/or modified CDS sequence (opt3) from neuraminidase__InfluenzaA__AIL94688

SEQ ID NO: 153748 - RNA, 1410 nt, Artificial Sequence
  derived and/or modified CDS sequence (opt3) from neuraminidase__InfluenzaA__AIL94700
augaaccccaaucagaagaucauuaccauaggcagcgugucccugacaaucucuacuauuugcuucuuuaugcagaucgccauucucaucacgauagucacccuucacuucaaacaguacgaguuuaacucaccuccaaauaaccagguuaugcugugugaaccgacaaucauugagagaaauaucacugaaauuguguauuugaccaacacaaccaucgagaaggaaauaugccccaaaccugcugaguacaggaauuggaguaagccacagugugggauuacuggauucgcacccuuuagcaaagacaacuccauccgguuaucugccgguggcgauauuuggguaacacgcgagccuuaugugucgugcgacccagauaaguguuaccaauucgcgcuggggcagggaaccacgcuaaauaacguccauucaaauaacacugugcgagaccguacccccuauagaacacuccugaugaaugaacuuggcguuccuuuucaccuggguacuaaacaggugugcaucgcuuggagcaguuccucuugucaugaugggaaggccugguugcacgucugcaucaccggagacgauaagaacgcaacagccagcuucauuuacaauggcaggcucguggacuccguaguuucauggaguaaagagauacugcggacccaggaaagcgagugugugugcaucaacggcacguguacugucgugaugacagaugggucugcuuccggaaaggcagacaccaaaauucuguuuaucgaggaagguaagauagugcauauuucaacucucagcggcagugcccaacacgucgaggaaugcucuugcuauccacgcuacccggggguuagaugugugugcagggauaacuggaagggauccaaucggcccaucguagacaucaacauugaggaucacagcaucgugucgucuuacgucuguuccggcuuagugggugacacaccucgcaaaaaugacucaaguagcuccucucauugccuggauccaaacaaugaagaagggggacacggcguuaagggcugggcuuucgacgaugggaacgacguguggaugggacgaaccauuaaugagacgagcagacuugguuaugagaccuuuaaagucauagagggcuggucaaaccccaagaguaaauugcagaucaauaggcaagugauuguagaucguggggaccgguccggauacagcggcaucuucucuguugaagguaagucauguaucaaccgcugcuuuuauguggagcugauuagagggaggaaagaagagacagagguccuauggaccaguaauagcauaguggucuucuguggcacuuccggaacauacggcacugggucuuggccugauggagccgaccucaaccugaugccaaucuga

SEQ ID NO: 153749 - RNA, 1410 nt, Artificial Sequence; identical to SEQ ID NO: 153694
  derived and/or modified CDS sequence (opt3) from neuraminidase__InfluenzaA__AIL94712

SEQ ID NO: 153750 - RNA, 1410 nt, Artificial Sequence; identical to SEQ ID NO: 153724
  derived and/or modified CDS sequence (opt3) from neuraminidase__InfluenzaA__AIL94723

SEQ ID NO: 153751 - RNA, 1410 nt, Artificial Sequence
  derived and/or modified CDS sequence (opt3) from neuraminidase__InfluenzaA__AIL94734
augaaccccaaucagaagaucauuaccauaggcagcgugucccugacaaucucuacuauuugcuucuuuaugcaaaucgccauucucaucacgaccgucacacuucacuucaaacaguacgaguuuaacucaccuccaaauaaccagguuaugcugugugaaccgacuauaaucgagagaaauauuaccgaaaucguguauuugacaaacaccacuauugagaaggaaaucugccccaaaccugcugaguacaggaauuggaguaagccacagugugggauaacaggauucgcacccuuuagcaaagacaacuccauucgguuaucugccgguggcgauaucuggguaacccgcgagccuuaugugucgugcgacccagauaaguguuaccaauucgcgcuggggcagggaacgacucuaaauaacgaacauucaaauaacaccguccgagaccguacacccuauagaacucuccugaugaaugagcuuggcgugccuuuucaccuggguaccaagcagguuugcauugcuuggagcaguuccucuugucaugaugggaaagccugguugcacgugugcaucacaggagacgauaagaacgcaaccgccagcuucaucuacaauggcaggcucgucgacuccgugguaucauggaguaaagaaauucugcggacgcaggagagcgaguguguuugcauaaacggcacuuguacaguggucaugaccgaugggucugcuuccggaaaggcagacacuaaaauccuguuuauugaagaggguaagaucgugcauauaucaacacucagcggcagugcccaacacguggaagagugcucuugcuauccacgcuacccgggggucagauguguuugcagggauaacuggaagggauccaaucggcccauuguggacaucaacaucaaagaucacagcauuguaucgucuuacguguguuccggcuuagucggugacaccccucgcaagaaugacucaaguagcuccucucauugccuggauccaaacaaugaagaagggggacacggcgugaaaggcugggcuuucgacgaugggaacgacguuuggaugggacgaacgaucaaugagaccagcagacuugguuaugagacauuuaaggugauugagggcuggucaaaccccaaaaguaaguugcagauaaauaggcaggucaucguggaucguggggaccgguccggauacagcggcauuuucucuguagaagguaaaucauguaucaaccgcugcuuuuauguugagcugaucagagggaggaaggaagagacugaggugcuauggaccaguaauagcauugucguguucuguggcacauccggaacuuacggcaccgggucuuggccugauggagccgaccucaaccugaugccaauauga

SEQ ID NO: 153752 - RNA, 1410 nt, Artificial Sequence; identical to SEQ ID NO: 153694
  derived and/or modified CDS sequence (opt3) from neuraminidase__InfluenzaA__AIL94746

SEQ ID NO: 153753 - RNA, 1410 nt, Artificial Sequence; identical to SEQ ID NO: 153724
  derived and/or modified CDS sequence (opt3) from neuraminidase__InfluenzaA__AIL94757

SEQ ID NO: 153754 - RNA, 1410 nt, Artificial Sequence; identical to SEQ ID NO: 153685
  derived and/or modified CDS sequence (opt3) from neuraminidase__InfluenzaA__AIL94768

SEQ ID NO: 153755 - RNA, 1410 nt, Artificial Sequence; identical to SEQ ID NO: 150194
  derived and/or modified CDS sequence (opt3) from neuraminidase__InfluenzaA__AIL94780

SEQ ID NO: 153756 - RNA, 1410 nt, Artificial Sequence; identical to SEQ ID NO: 153724
  derived and/or modified CDS sequence (opt3) from neuraminidase__InfluenzaA__AIL94803

SEQ ID NO: 153757 - RNA, 1410 nt, Artificial Sequence; identical to SEQ ID NO: 153704
  derived and/or modified CDS sequence (opt3) from neuraminidase__InfluenzaA__AIL94814

SEQ ID NO: 153758 - RNA, 1410 nt, Artificial Sequence
  derived and/or modified CDS sequence (opt3) from neuraminidase__InfluenzaA__AIL94826
augaaccccaaucagaagaucauuaccauaggcagcgugucccugacaaucucuacuauuugcuucuuuaugcaaaucgccauucucaucacgaccgucacacuucacuucaaacaguacgaguuuaacucacugccuaauaaccagguuauguugugugaaccaacuauaaucgagagaaauauuaccgaaaucguguauuuaacaaacaccacuauugagaaggaaaucugcccgaaacccgcugaguacaggaauuggaguaagccucagugugggauaacaggauucgcaccauuuagcaaagacaacuccauucggcugucugccgguggcgauaucuggguaacccgcgagcccuaugugucgugcgacccugauaaguguuaccaauucgcgcuagggcagggaacgacucucaauaacguccauucaaauaacaccgcucgagaccguacaccauauagaacucugcuuaugaaugaacugggcgugcccuuucacuuggguaccaagcagguuugcauugccuggagcaguuccucuugucaugaugggaaagcauggcuccacgugugcaucacaggagacgauaagaacgccaccgcuagcuucaucuacaauggcaggcuggucgacuccgugguaucauggaguaaagagauucugcggacgcaggaaagcgaguguguuugcauaaacggcacuuguacaguggucaugaccgaugggucugcauccggaaaggccgacacuaaaauccucuuuauugaggaagguaagaucgugcauacaucaaccuuaagcggcagugcucaacacguggaggaaugcucuugcuauccucgcuacccaggggucagauguguuugcagggauaacuggaagggauccaaucggccgauaguggacauuaacaucaaagaucacagcaucguaucgucuuacguguguuccggccuggucggugacacgccccgcaagaaugacucaaguagcuccucucauugccuuaacccuaauaacgaggaagggggacacggcgugaaaggcugggccuucgaugacgggaaugauguuuggaugggacgaaccauuaacgagacaagcagauuggguuaugagacuuuuaaggugaucgaaggcuggucaaauccaaaaaguaagcugcagauuaacaggcaggucauaguggaccguggggaucgguccggauacagcggcaucuucucuguagaggguaaaucauguauuaaucgcugcuuuuauguugaacuaaucagagggaggaaggaggaaaccgaggugcucuggacaaguaacagcaucgucguguucuguggcacuuccggaaccuacggcacagggucuuggcccgacggagcggaucugaaucuuaugccuauuuga

SEQ ID NO: 153759 - RNA, 1410 nt, Artificial Sequence
  derived and/or modified CDS sequence (opt3) from neuraminidase__InfluenzaA__AIL94850
augaaccccaaucagaagaucauuaccauaggcagcgugucccugacaaucucuacuauuugcuucuuuaugcaaaucgccauucucaucacgaccgucacacuucacuucaaacaguacgaguuuaacucaccuccaaauaaccagguuaugcuguucgaaccgacuauaaucgagagaaauauuaccgaaaucguguauuugacaaacaccacuauugagaaggaaaucugucccaaauuagcugaguacaggaauuggaguaagccucagugcgacauaacaggguuugcaccauucagcaaagauaacuccauucggcugucugccggaggugacaucuggguaacccgcgagcccuaugugucgugugauccugacaagugcuaccaauuugcgcuaggccaggggacgacucucaauaacguccauucaaaugauaccgugcgagaccguacaccauauagaacucugcuuaugaacgaacugggaguucccuuccacuugggcaccaaacagguguguauugcuuggagcaguuccucuugccaugaugguaaagccuggcuccacgucuguaucacaggggacgauaagaaugcaaccgccagcuuuaucuacaacggaaggcugguggacuccauuguaucauggaguaaagagauacugcggacgcaggaaagcgagugcguuuguaucaauggcacuugcacaguggucaugaccgauggcucugcuuccgggaaggcagacacuaaaauucucuucaucaaggagggaaagauagugcauacaucaaccuuaagcgguagugcccaacacguggaagaguguucuugcuauccucgcuacccaggcgucagaugcguuuguagggauaacuggaaaggguccaaccggccgauuguggacaucaauaucaaggaccacagcauuguaucgucuuacgugugcuccggacuggucggcgauacgccccgcaaaaacgacucaaguagcuccucucauugucuugauccuaauagcgaagagggugggcacggagugaagggcugggcuuuugacgauggcaacgacguuuggauggggcgaaccaucucagaaaagaguagauugggauaugagacauucaaggugauugaggguugguccaauccaaaaagcaaguuucagauaaacaggcaggucaucguggaucggggcaaucguucuggguacucaggaauuuucaguguagaaggcaagagcugcaucaaccgcuguuucuauguugagcugaucagagguaggaaagaagagacugaagugcuauggaccuccaauucuauugucguguuuugcgggacaucgggcacuuacggaaccggcagcuggcccgacggggccgaucucaaccugaugccuauauga

SEQ ID NO: 153760 - RNA, 1410 nt, Artificial Sequence; identical to SEQ ID NO: 147458
  derived and/or modified CDS sequence (opt3) from neuraminidase__InfluenzaA__AIL94862

SEQ ID NO: 153761 - RNA, 1410 nt, Artificial Sequence; identical to SEQ ID NO: 147458
  derived and/or modified CDS sequence (opt3) from neuraminidase__InfluenzaA__AIL94874

SEQ ID NO: 153762 - RNA, 1410 nt, Artificial Sequence
  derived and/or modified CDS sequence (opt3) from neuraminidase__InfluenzaA__AIL94886
augaaccccaaucagaagaucauuaccauaggcagcgugugcaugacaaucgggauggccaaccugaugcuccaaauuggaaauaucauuuccaucuggauaucucacucaauccagcuugguaacaaaaaucagauugagacuuguaaccagagugucaucacguacgaaaauaacaccuggguuaaucaaacauaugugaacauuagcaauacuaacuucgcugcaggccaguccguagugucugucaagaucgccggaaauucgucacugugcccugugagcggaugggcgauauacaguaaagacaacuccauuagaaucggcucuaagggugauguuuuugugauuagggagccauucaucagcuguuccccguuggaaugccggaccuuuuucuuaacacagggggcucugcuaaaugacaaacauucaaacggaaccaucaaggaucgcagucccuaucgaacucucaugagcuguccuauuggcgaggucccaucucccuacaacucccguuuugaaucaguggccuggagcgcaagugccugccacgacggcauaaauuggcugacaaucgggauuucuggaccugaugacggugcuguagcaguucuuaaguauaacggcaucauaaccgauacgauuaaauccuggagaaauaacauccugaggacucaggagagcgagugugccugcgugaaugggucguguuucaccaucaugacagacggaccaucugauggccaggcuuccuacaagauuuuucggaucgaaaaagguaagauugucaaaucaguggagaugaacgcccccaauuaucauuacgaagagugcaguuguuacccugacagcuccgagauaacuugcgugugccgcgauaacuggcacgggucuaauagaccaugggucagcuucaaccaaaauuuggaauaucagaucggauacauuuguucaggcaucuuuggcgacaacccgaggccccaugauaagaccgggaguugcggaccuguuuccagcaauggugcgaacggcgugaagggguucucuuuuaaauauggaaauggcguauggaucggucggacaaagucaauuaguagccgcaaaggguucgagaugauaugggacccaaacggcuggaccggaacggacaacaauuuuuccaucaagcaggauauugugggcaucaacgaauggucuggguacucggggagcuucguccaacaccccgagcucacuggucuggacuguauucgaccuugcuucuggguggaacugaucagaggcaggccaaaagagaauacaauauggaccuccgggucaaguaucucuuuuuguggaguuaacagcgauacugugggcugguccuggcccgacggugcagagcucccguucacaauugauaaguga

SEQ ID NO: 153763 - RNA, 1410 nt, Artificial Sequence; identical to SEQ ID NO: 150970
  derived and/or modified CDS sequence (opt3) from neuraminidase__InfluenzaA__AIL94897

SEQ ID NO: 153764 - RNA, 1410 nt, Artificial Sequence; identical to SEQ ID NO: 153758
  derived and/or modified CDS sequence (opt3) from neuraminidase__InfluenzaA__AIL94909

SEQ ID NO: 153765 - RNA, 1410 nt, Artificial Sequence; identical to SEQ ID NO: 150194
  derived and/or modified CDS sequence (opt3) from neuraminidase__InfluenzaA__AIL94921

SEQ ID NO: 153766 - RNA, 1410 nt, Artificial Sequence; identical to SEQ ID NO: 150194
  derived and/or modified CDS sequence (opt3) from neuraminidase__InfluenzaA__AIL94933

SEQ ID NO: 153767 - RNA, 1410 nt, Artificial Sequence; identical to SEQ ID NO: 153685
  derived and/or modified CDS sequence (opt3) from neuraminidase__InfluenzaA__AIL94945

SEQ ID NO: 153768 - RNA, 1410 nt, Artificial Sequence
  derived and/or modified CDS sequence (opt3) from neuraminidase__InfluenzaA__AIL94957
augaaccccaaucagaagaucauuaccauaggcagcgugugcaugacaaucgggauggccaaccugauucuccaaaucggaaauauuaucuccauauggaucucucacucaauucagcuugguaaccagagucagaucgaggcuuguaaucaaagcgucauuacuuacgaaaacaauacguggguuaaccagaccuaugugaauaucuccaacacaaauuucgcagccggccagucuguagugucggucaaacuggcggggaacaguagcuugugcccugugaguggaugggcuauauacuccaaggacaauucuguuagaauuggcagcaaaggugauguguuugucaucagggagccauucauuuccuguucaccguuagaaugccggaccuuuuuccugacucagggggcccuacucaacgacaagcauaguaauggaacaaucaaagaucgcagccccuaucgaacccugaugucuuguccuaucggcgaggugccaucccccuacaacucacguuuugaaagcguagcauggagugccucugcuugccacgacggcauuaacuggcuuacuauagggaucuccggaccugauagcggugcaguugccgugcugaaguauaauggcauuaucacagacaccauaaagucguggaaaaacaauauuuugagaacgcaagagucugagugugcuugcgucaacggguccuguuucacuaucaugaccgauggaccaucagacggccaggccaguuacaagaucuuuaggauugaaaaagguaagaucgugaaaagcguggagauggaugcgcccaauuaucauuacgaagagugcuccuguuacccugacucuagcgagauuacaugcgucugccgggauaacuggcacgggucaaaucgcccauggguuaguuucaaccagaaucucgaauaucagauaggauacaucuguuccggcguguuuggcgacaacccgagacccaaugauaagacugggagcugcggaccuguaucuucaaacggugcaaauggcgugaagggguucaguuuuaaauauggaaacggcgucuggauugguaggaccaagagcaucuccucucggaaaggguucgagaugaucugggacccaaauggcuggaacggaacagacaacaauuuuucgauuaagcaagauauagugggcaucaacgaauggagcggguacuccggaucauucguucagcaucccgagcugaccggucuggacuguauucgcccuugcuucuggguggaacucauccgaggcagaccaaaagagaauacgauuuggacuucagggucuagcaucuccuuuuguggagucaacucagauacagugggcuggagcuggcccgacggugccgaguuaccguucaccauagauaaguga

SEQ ID NO: 153769 - RNA, 1410 nt, Artificial Sequence; identical to SEQ ID NO: 153758
  derived and/or modified CDS sequence (opt3) from neuraminidase__InfluenzaA__AIL94968

SEQ ID NO: 153770 - RNA, 1410 nt, Artificial Sequence
  derived and/or modified CDS sequence (opt3) from neuraminidase__InfluenzaA__AIM55840
augaaccccaaucagaagaucauuaccauaggcagcgugugcaugacaaucgggauggccaaccugauucuccaaaucggaaauauuaucuccauauggaucucucacucaauucaggucgguaaccagagucagaucgagauuuguaaucaaagcguuaucacuuacgaaaacaauacgugggugaaccagaccuauguaaauauauccaacacaaauuucgcugcaggccagccuguggucucugugaaacuugccgggaacucgucacugugcccaguuagcggaugggcgauuuacaguaaggacaauuccgugagaaucggcucuaaaggugaugucuuugugauuagggagccguucaucagcuguucccccuuggaaugccggaccuuuuucuuaacucagggggcucugcuaaacgacaagcauucaaauggaacaaucaaagaucgcaguccuuaucgaacccucaugagcuguccaauuggcgagguacccucuccuuacaacucccguuuugaaucaguugccuggagcgcaagugccugccacgacggcauaaacuggcugacuaucgggauuucuggaccagauuccggugcuguggcaguccuuaaguauaauggcaucauaacagacaccauuaagagcuggagaaacgauauccugaggacgcaagagucggagugugccugcgugaaugggucuuguuucacuaucaugaccgacggacccuccgauggccaggcuucauacaaaauuuuucggaucgaaaaggguaaaauugugaagagugucgagaugaacgccccuaauuaucauuucgaagagugcagcuguuacccagacuccucugagauaacaugcguuugccgcgauaacuggcacgggagcaauagaccgugggugucauuuaaccagaauuuggaauaccagaucggauauauuuguaguggcaucuucggcgacaaccccaggccuaaugauaaaacuggguccugcggaccaguaagcucuaacggugcgaauggcgugaagggguuuucauucaaguacggaaacggcgucuggaucggucggaccaaaaguauuagcucccgcaagggguuugagaugauaugggaccccaauggcuggacaggaaccgacaacaacuucucuaucaaacaagauauugugggcaucaaugaauggucgggguauagcggauccuucguucagcauccugagcucacgggucuggacuguauucgaccaugcuuuuggguggaacugaucagaggcaggcccaaggagaacacuauauggacaucagggaguucuaucagcuucuguggagucaauuccgauaccgugggcuggucauggccggacggugcagagcucccuuuuacuauugauaaauga

SEQ ID NO: 153771 - RNA, 1410 nt, Artificial Sequence
  derived and/or modified CDS sequence (opt3) from neuraminidase__InfluenzaA__AIM55851
augaaccccaaucagaagaucauuaccauaggcagcgugugcaugacaaucgggauggccaaccugauucuccaaaucggaaauauuaucuccauaugggucucucacucaauccagcuugguaaccagagucagauugagacuuguaaucaaagcguuaucacguacgaaaacaauaccugggugaaccagacauauguaaauauuuccaacacuaauuucgcugcaggccagucuguggucccugugaaacuggccgggaacucgucauugugcccaguuagcggaugggcgaucuacaguaaggacaauuccgugagaauaggcucuaaaggugaugucuuugugauuagggagccguucaucagcuguucccccuuagaaugccggaccuuuuuccugacacagggggcucuacucaacgacaagcauucaaauggaaccauuaaagaucgcaguccuuaucgaacucugaugagcuguccaaucggcgagguacccucuccuuacaacucccguuuugaaucaguugccuggagcgcaagugccugccacgacggcaucaacuggcuuacaauugggauaucuggaccagauuccggugcuguggcaguccugaaguauaauggcaucauuaccgacacgaucaagagcuggagaaacaauauauugaggacucaagagucggagugugccugcgugaacgggucuuguuucaccauuaugacagauggacccuccgacggccaggcuucauacaaaaucuuucggaucgaaaagggucgcauugugaaaagugucgagaugaaugccccuaacuaucauuacgaagagugcagcuguuacccagauuccucugagaucacuugcguuugcagagacaauuggcacgggagcaacaggccgugggugucauucaaucagaaccucgaauaucagauuggauacauauguaguggcguauuuggcgauaauccccggccuaacgacaagaccggguccugcggaccagugagcucuaauggugcgaacggcgucaaaggguucucauuuaaguauggaaauggcguguggaucggucgcacaaagaguauuagcucccgaaaaggguucgagaugaucugggaucccaacggcuggaccggaacggacaacaaguuuucuaucaaacaagacauuguuggcauaaaugaauggucgggguacagcggauccuucgugcagcauccugagcugacuggucuggauuguaucagaccaugcuucugggucgaacucauuaggggccggcccgaggagaacacaaucuggaccucagggaguucuauuagcuuuuguggagugaaguccgacacuguaggcuggucauggccggauggugcagaauuaccuuucacaaucgacaaauga

SEQ ID NO: 153772 - RNA, 1410 nt, Artificial Sequence
  derived and/or modified CDS sequence (opt3) from neuraminidase__InfluenzaA__AIM55862
augaaccccaaucagaagaucauuaccauaggcagcgugugcaugacaaucgggauggccaaccugauucuccaaaucggaaauauuaucuccauaugggucucucacucaauccagcuugguaaccagagucagauugagacuuguaaucaaagcguuaucacguacgaaaacaauaccugggugaaccagacauauguaaauauuuccaacacuaauuucgcugcaggccagucuguggucccugugaaacuggccgggaacucgucauugugcccaguuagcggaugggcgaucuacaguaaggacaauuccgugagaauaggcucuaaaggugaugucuuugugauuagggagccguucaucagcuguucccccuuagaaugccggaccuuuuuccugacacagggggcucuacucaacgacaagcauucaaauggaaccauuaaagaucgcaguccuuaucgaacucugaugagcuguccaaucggcgagguacccucuccuuacaacucccguuuugaaucaguugccuggagcgcaagugccugccacgacggcaucaacuggcuuacaauugggauaucuggaccagauuccggugcuguggcaguccugaaguauaauggcaucauuaccgacacgaucaagagcuggagaaacaauauauugaggacucaagagucggagugugccugcgugaacgggucuuguuucaccauuaugacagauggacccuccgacggccaggcuucauacaaaaucuuuaagaucgaaaaagguaagauugugaaaagugucgagaugaaugccccuaacuaucauuacgaagagugcagcuguuacccagauuccucugagaucacuugcguuugccgggacaauuggcacgggagcaaccgcccgugggugucauucaaucagaaccucgaauaucagauuggauacauauguaguggcguauuuggcgauaaucccagaccuaacgacaagaccggguccugcggaccagugagcucuaauggugcgaacggcgucaagggguucucauuuaaauauggaaauggcguguggaucgguaggacaaagaguauuagcucccggaaaggguucgagaugaucugggaucccaacggcuggaacggaaccgacaauaacuuuucuaucaagcaagacauuguuggcauaaaagaauggucgggguacagcggauccuucgugcagcauccugagcugacgggucuggauuguauccgcccaugcuucugggucgaacucauucgaggcagacccgaggagaauacuaucuggacaucagggaguucuauuagcuuuuguggagugaacuccgacaccguaggcuggucauggccggauggugcagaauuaccuuucacuaucgacaaguga

SEQ ID NO: 153773 - RNA, 1410 nt, Artificial Sequence
  derived and/or modified CDS sequence (opt3) from neuraminidase__InfluenzaA__AIM55873
augaaccccaaucagaagaucauuaccauaggcagcgugugcaugacaaucgggauggccaaccugauucuccaaaucggaaauauuaucuccauaugggucucucacucaauccagcuugguaaccagagucagauugagacuuguaaucaaagcguuaucacguacgaaaacaauaccugggugaaccagacauauguaaauauuuccaacacuaauuucgcugcaggccagucuguggucccugugaaacuggccgggaacucgucauugugcccaguuagcggaugggcgaucuacaguaaggacaauuccgugagaauaggcucuaaaggugaugucuuugugauuagggagccguucaucagcuguucccccuuagaaugccggaccuuuuuccugacacagggggcucuacucaacgacaagcauucaaauggaaccauuaaagaucgcaguccuuaucgaacucugaugagcuguccaaucggcgagguacccucuccuuacaacucccguuuugaaucaguugccuggagcgcaagugccugccacgacggcaucaacuggcuuacaauugggauaucuggaccagauuccggugcuguggcaguccugaaguauaauggcaucauuaccgacacgaucaagagcuggagaaacaauauauugaggacucaagagucggagugugccugcgugaacgggucuuguuucaccauuaugacagauggacccuccgacggccaggcuucauacaaaaucuuucggaucgaaaaggguaaaauugugaagagugucgagaugaaugccccuaacuaucauuacgaagagugcagcuguuacccagauuccucugagaucacuugcguuugccgcgacaauuggcacgggagcaacagaccgugggugucauucaaucagaaccucgaauaucagauuggauacauauguaguggcguauuuggcgauaaucccaggccuaacgacaaaaccggguccugcggaccagugagcucuaauggugcgaacggcgucaagggguucucauuuaaguauggaaauggcguguggaucggucggacaaaaaguauuagcucccgcaagggguucgagaugaucugggaucccaacggcuggaccggaacggacaacaauuuuucuaucaaacaagacauuguuggcauaaaggaauggucgggguacagcggauccuucgugcagcauccugagcugacuggucuggauuguauccgaccaugcuucugggucgaacucauuagaggcaggcccgaggagaacacaaucuggaccucagggaguucuauuagcuuuuguggaguaaauuccgacacugugggcuggucauggccggauggugcagaauuaccuuucacaaucgacaaauga

SEQ ID NO: 153774 - RNA, 1410 nt, Artificial Sequence; identical to SEQ ID NO: 153773
  derived and/or modified CDS sequence (opt3) from neuraminidase__InfluenzaA__AIM55884

SEQ ID NO: 153775 - RNA, 1410 nt, Artificial Sequence; identical to SEQ ID NO: 153773
  derived and/or modified CDS sequence (opt3) from neuraminidase__InfluenzaA__AIM55918

SEQ ID NO: 153776 - RNA, 1410 nt, Artificial Sequence
  derived and/or modified CDS sequence (opt3) from neuraminidase__InfluenzaA__AIM55929
augaaccccaaucagaagaucauuaccauaggcagcgugugcaugacaaucgggauggccaaccugauucuccaaaucggaaauauuaucuccauaugggucucucacucaauccagcuugguaaccagagucagauugagacuuguaaucaaagcguuaucacguacgaaaacaauaccugggugaaccagacauauguaaauauuuccaacacuaauuucgcugcaggccagucuguggucucggugaaacuggccgggaacagcagcuugugcccuguuaguggaugggcgaucuacuccaaggacaauucugugagaauaggcagcaaaggugaugucuuugugauuagggagccauucaucuccuguucaccguuagaaugccggaccuuuuuccugacacagggggcucuacucaacgacaagcauaguaauggaaccauuaaagaucgcagccccuaucgaacucugaugucuuguccuacaggcgagguaccaucccccuacaacucacguuuugaaagcguugccuggagugcaucugccugccacgacggcaucaacuggcuuaccaucgggauuuccggaccugauagcggugcuguggcaguccugaaguauaauggcauaaucacggacacuauuaagucguggagaaacaauaucuugaggacccaagagucugagugugccugcgugaacggguccuguuucacaauaaugacugauggaccaucagacggccaggcuaguuacaaaauuuuucggaucgaaaaggguaaaaucgugaagucagucgagaugaaugcccccaacuaucauuacgaagagugcuccuguuacccugauucuagcgagauuaccugcguuugccgcgacaauuggcacgggucaaacagaccaugggugaguuucaaucagaaccucgaauaucagaucggauacauuuguuccggcguauuuggcgauaauccgaggcccaacgacaaaacagggagcugcggaccugugucuucaaauggugcgaacggcgucaagggguucaguuuuaaguauggaaauggcguguggauaggucggaccaaaagcaucuccucucgcaagggguucgagaugauuugggauccaaacggcuggacgggaacugacaacaauuuuucgaucaaacaagacaucguuggcauuaaggaauggagcggguacuccggaucauucgugcagcaucccgagcugacaggucuggauuguauacgaccuugcuucugggucgaacucaucagaggcaggccagaggagaacaccauuuggacuucagggucuagcaucuccuuuuguggagugaauagugacacaguaggcuggagcuggcccgauggugcagaauuaccguucaccauugacaaauga

SEQ ID NO: 153777 - RNA, 1410 nt, Artificial Sequence
  derived and/or modified CDS sequence (opt3) from neuraminidase__InfluenzaA__AIM55940
augaaccccaaucagaagaucauuaccauaggcagcgugugcaugacaaucgggauggccaaccugauucuccaaaucggaaauauuaucuccauaugggucucucacucaauccagcuugguaaccagagucagauugagacuuguaaucaaagcguuaucacguacgaaaacaauaccugggugaaccagacauauguaaauauuuccucuacuaacuucgcugcaggccagucgguggucccugugaaacuggccgggaauagcagcuugugcccaguuaguggaugggcgaucuacuccaaggacaacucugugagaauaggcagcaaaggugaugucuuugugauuagggagccguucaucuccuguucacccuuagaaugccggaccuuuuuccugacacagggggcucuacucaaugacaagcauaguaacggaaccauuaaagaucgcagcccuuaucgaacucugaugucuuguccaaucggcgagguacccuccccuuacaauucacguuuugaaagcguugccuggagugcaucugccugccacgacggcaucaacuggcuuacaauugggauauccggaccagauagcggugcuguggcaguccugaaguauaacggcaucauuaccgacacgaucaagucguggagaaauaacauauugaggacucaagagucugagugugccugcgugaauggguccuguuucaccauuaugacagauggacccucagacggccaggcuaguuacaaaaucuuucggaucgaaaaggguaaaauugugaagucagucgagaugaacgccccuaauuaucauuacgaagagugcuccuguuacccagauucuagcgagaucacuugcguuugccgcgacaacuggcacgggucaaauagaccgugggugaguuucaaccagaaucucgaauaucagauuggauacauauguuccggcguauuuggcgauaaccccaggccuaaugacaaaaccgggagcugcggaccagugucuucaaacggugcgaauggcgucaagggguucaguuuuaaguauggaaacggcguguggaucggucggacaaaaagcauuuccucucgcaagggguucgagaugaucugggaucccaauggcuggaccggaacggacaacaacuuuucgaucaaacaagacauuguuggcauaaaggaauggagcggguacuccggaucauucgugcagcauccugagcugacuggucuggauuguauccgaccaugcuucugggucgaacucauuagaggcaggcccgaggagaauacaaucuggaccagugggucuagcauuuccuuuuguggagugaacucagacacuguaggcuggagcuggccggauggugcagaauuaccuuucacaaucgacaaauga

SEQ ID NO: 153778 - RNA, 1410 nt, Artificial Sequence
  derived and/or modified CDS sequence (opt3) from neuraminidase__InfluenzaA__AIM55965
augaaccccaaucagaagaucauuaccauaggcagcgugugcaugacaaucgggauggccaaccugauucuccaaaucggaaauauuaucuccauaugggucucucacucaauccagcuugguaaccagagucagauugagacuuguaaucaaagcguuaucacguacgaaaacaauaccugggugaaccagacauauguaaauauuuccaacacuaauuucgcugcaggccagucuguggucccugugaaacuggccgggaacucgucauugugcccaguuagcggaugggcgaucuacaguaaggacaauuccgugagaauaggcucuaaaggugaugucuuugugauuagggagccguucaucagcuguucccccuuagaaugccggaccuuuuuccugacacagggggcucuacucaacgacaagcauucaaauggaaccauuaaagaucgcaguccuuaucgaacucugaugagcuguccaaucggcgagguacccucuccuuacaacucccguuuugaaucaguugccuggagcgcaagugccugccacgacggcaucaacuggcuuacaauugggauaucuggaccagauuccggugcuguggcaguccugaaguauaauggcaucauuaccgacacgaucaagagcuggagaaacaauauauugaggacucaagagucggagugugccugcgugaacgggucuuguuucaccauuaugacagauggacccuccgacggccaggcuucauacaaaaucuuucggaucgaaaaggguaaaauugugaagagugucgagaugaaugccccuaacuaucauuacgaagagugcagcuguuacccagauuccucugagaucacuugcguuugccgcgacaauuggcacgggagcaacagaccgugggugucauucaaucagaaccucgaauaucagauuggauacauauguaguggcguauuuggcgauaaucccaggccuaacgacaaaaccggguccugcggaccagugagcucuaauggugcgaacggcgucaagggguucucauuuaaguauggaaauggcguguggaucggucggacaaaaaguauuagcucccgcaagggguucgagaugaucugggaucccaacggcuggaccggaacggacaacaauuuuucuaucaaacaagacauuguuggcauaaaggaauggucgggguacagcggauccuucgugcagcauccugagcugacuggucuggauuguauccgaccaugcuucugggucgaacucauuagaggcaggcccgaggagaacacaaucuggaccucagggaguucuauuagcuuuuguggaguaaauuccgacgcagugggcuggucauggccggauggugccgaauuaccuuucacuaucgacaaauga

SEQ ID NO: 153779 - RNA, 1410 nt, Artificial Sequence
  derived and/or modified CDS sequence (opt3) from neuraminidase__InfluenzaA__AIM55976
augaaccccaaucagaagaucauuaccauaggcagcgugugcaugacaaucgggauggccaaccugauucuccaaaucggaaauauuaucuccauaugggucucucacucaauccagcuugguaaccagagucagauugagacuuguaaucaaagcguuaucacguacgaaaacaauaccugggugaaccagacauauguaaauauuuccaacacuaauuucgcugcaggccagucuguggucucggugaaacuggccgggaacucaucauugugcccuguuaguggaugggcgaucuacuccaaggacaauucugugagaauaggcagcaaaggugaugucuuugugauuagggagccauucaucuccuguucaccguuagaaugccggaccuuuuuccugacacagggggcucuacucaacgacaagcauaguaauggaaccauuaaagaucgcagccccuaucgaacucugaugucuuguccuaucggcgagguaccaucccccuacaacucacguuuugaaagcguugccuggagugcaucugccugccacgacggcaucaacuggcuuacaauugggauauccggaccugauagcggugcuguggcaguccugaaguauaauggcaucauuaccgacacgaucaagucguggagaaacaauauauugaggacucaagagucugagugugccugcgugaacggguccuguuucaccauuaugacagauggaccaucagacggccaggcuaguuacaaaaucuuucggaucgaaaaggguaaaauugucaagagcguggagaugaaugcccccaacuaucauuacgaagagugcuccuguuacccugauucuagcgagaucacuugcguuugccgcgacaauuggcacgggucaaacagaccaugggugaguuucaaucagaaccucgaauaucagauuggauacauauguuccggcguauuuggcgauaauccgaggcccaacgacaaaaccgggagcugcggaccugugucuucaaauggugcgaacggcgucaagggguucaguuuuaaguauggaaauggcguguggaucggucggacaaaaagcauuuccucucgcaagggguucgagaugaucugggauccaaacggcuggaccggaacggacaacaauuuuucgaucaaacaagacauuguuggcauaaaggaauggagcggguacuccggaucauucgugcagcaucccgagcugacuggucuggauuguauccgaccuugcuucugggucgaacucauuagaggcaggccagaggagaacacaaucuggaccagugggucuagcauuuccuuuuguggagugaauagcgacacuguaggcuggagcuggcccgauggugcagaauuaccguucacaaucgacaaauga

SEQ ID NO: 153780 - RNA, 1410 nt, Artificial Sequence
  derived and/or modified CDS sequence (opt3) from neuraminidase__InfluenzaA__AIM55987
augaaccccaaucagaagaucauuaccauaggcagcgugugcaugacaaucgggauggccaaccugauucuccaaaucggaaauauuaucuccauaugggucucucacucaauccagcuugguaaccagagucagauugagacuuguaaucaaagcguuaucacguacgaaaacaauaccugggugaaccagacauauguaaauauuuccaacacuaauuucgcugcaggccagucuguggucucggugaaacuggccgggaacagcagcuugugcccuguuaguggaugggcgaucuacuccaaggacaauucugugagaauaggcagcaaaggugaugucuuugugauuagggagccauucaucuccuguucaccguuagaaugccggaccuuuuuccugacacagggggcucuacucaacgacaagcauaguaauggaaccauuaaagaucgcagccccuaucgaacucugaugucuuguccuacaggcgagguaccaucccccuacaacucacguuuugaaagcguugccuggagugcaucugccugccacgacggcaucaacuggcuuaccaucgggauuuccggaccugauagcggugcuguggcaguccugaaguauaauggcauaaucacggacacuauuaagucguggagaaacaauaucuugaggacccaagagucugagugugccugcgugaacggguccuguuucacaauaaugacugauggaccaucagacggccaggcuaguuacaaaauuuuucggaucgaaaaggguaaaaucgugaagucagucgagaugaaugcccccaacuaucauuacgaagagugcuccuguuacccugauucuagcgagauuaccugcguuugccgcgacaauuggcacgggucaaacagaccaugggugaguuucaaucagaaccucgaauaucagaucggauacauuuguuccggcguauuuggcgauaauccgaggcccaacgacaaaacagggagcugcggaccugugucuucaaauggugcgaacggcgucaagggguucaguuuuaaguauggaaauggcguguggauaggucggaccaaaagcaucuccucucgcaagggguucgagaugauuugggauccaaacggcuggacgggaacugacaacaauuuuucgaucaaacaagacaucguuggcauuaaggaauggagcggguacuccggaucauucgugcagcaucccgagcugacaggucuggauuguauacgaccuugcuucugggucgaacucaucagaggcaggccagaggagaacaccauuuggacuucagggucuagcaucuccuuuuguggagugaauagugacacaguagauuggagcuggcccgacggcgcagaauuaccguucaccauugauaaauga

SEQ ID NO: 153781 - RNA, 1410 nt, Artificial Sequence
  derived and/or modified CDS sequence (opt3) from neuraminidase__InfluenzaA__AIM55998
augaaccccaaucagaagaucauuaccauaggcagcgugugcaugacaaucgggauggccaaccugauucuccaaaucggaaauacuauuuccaucugggucucucacucaauacagcuugguaaccagagucagaucgagacguguaaucaaagcguuauuaccuacgaaaacaauacaugggugaaccagacuuauguaaauaucuccaacaccaauuucgcugcaggccagucuguggucccugugaaacuggccgggaacucgucauugugcccaguuagcggaugggcgauuuacaguaaggacaauuccgugagaaucggcucuaaaggugaugucuuugugauaagggagccguucauuagcuguucccccuuagaaugccggacauuuuuccugacccagggggcucuacucaacgacaagcauucaaauggaacuaucaaagaucgcaguccuuaucgaacacugaugagcuguccaauuggcgagguacccucuccuuacaacucccguuuugaaucaguugccuggagcgcaagugccugccacgacggcaucaacuggcuuaccaucgggauuucuggaccagauuccggugcuguggcaguccugaaguauaauggcauaaucacggacacuauuaagagcuggagaaacaauaucuugaggacccaagagucggagugugccugcgugaacgggucuuguuucacaauaaugacugauggacccuccgacggccaggcuucauacaaaauuuuucggaucgaaaaggguaaaaucgugaagagugucgagaugaaugccccuaacuaucauuacgaagagugcagcuguuacccagauuccucugagauuaccugcguuugccgcgacaauuggcacgggagcaacagaccgugggugucauucaaucagaaccucgaauaucagaucggauacauuuguaguggcguauuuggcgauaaucccaggccuaacgacaaaacaggguccugcggaccagugagcucuaauggugcgaacggcgucaagggguucucauuuaaguauggaaauggcguguggauaggucggaccaaaaguaucagcucccgcaagggguucgagaugauuugggaucccaacggcuggacgggaacugacaacaaauuuucuaucaagcaagacaucguuggcauuaaugaauggucgggguacagcggauccuucgugcagcauccugagcugacaggucuggauuguauacgaccaugcuucugggucgaacucaucagaggcaggcccgaggagaacaccauuuggacuucagggaguucuaucagcuuuuguggagugaaauccgacacaguaggcuggucauggccggauggugcagaauuaccuuucaccauugacaaguga

SEQ ID NO: 153782 - RNA, 1410 nt, Artificial Sequence; identical to SEQ ID NO: 153779
  derived and/or modified CDS sequence (opt3) from neuraminidase__InfluenzaA__AIM56009

SEQ ID NO: 153783 - RNA, 1410 nt, Artificial Sequence; identical to SEQ ID NO: 153779
  derived and/or modified CDS sequence (opt3) from neuraminidase__InfluenzaA__AIM56020

SEQ ID NO: 153784 - RNA, 1410 nt, Artificial Sequence; identical to SEQ ID NO: 153779
  derived and/or modified CDS sequence (opt3) from neuraminidase__InfluenzaA__AIM56031

SEQ ID NO: 153785 - RNA, 1410 nt, Artificial Sequence
  derived and/or modified CDS sequence (opt3) from neuraminidase__InfluenzaA__AIM56042
augaaccccaaucagaagaucauuaccauaggcagcgugugcaugacaaucgggauggccaaccugauucuccaaaucggaaauauuaucuccauaugggucucucacucaauccagcuugguaaccagagucagauugagacuuguaaucaaagcguuaucacguacgaaaacaauaccugggugaaccagacauauguaaauauuuccaacacuaauuucgcugcaggccagucuguggucccugugaaacuggccgggaacucgucauugugcccaguuagcggaugggcgaucuacaguaaggacaauuccgugagaauaggcucuaaaggugaugucuuugugauuagggagccguucaucagcuguucccccuuagaaugccggaccuuuuuccugacacagggggcucuacucaacgacaagcauucaaauggaaccauuaaagaucgcaguccuuaucgaacucugaugagcuguccaaucggcgagguacccucuccuuacaacucccguuuugaaucaguugccuggagcgcaagugccugccacgacggcaucaacuggcuuacaauugggauaucuggaccagauuccggugcuguggcaguccugaaguauaauggcaucauuaccgacacgaucaagagcuggagaaacaauauauugaggacucaagagucggagugugccugcgugaacgggucuuguuucaccauuaugacagauggacccuccaauggccaggcuucauacaaaaucuuucggaucgaaaaggguaaaauugugaagagugucgagaugaacgccccuaauuaucauuacgaagagugcagcuguuacccagacuccucugagaucacuugcguuugccgcgauaacuggcacgggagcaauagaccgugggugucauucaaccagaaucucgaauaucagauuggauacauauguaguggcguauuuggcgacaaccccaggccuaaugauaaaaccggguccugcggaccagugagcucuaacggugcgaauggcgucaagggguucucauuuaaguauggaaacggcguguggaucggucggacaaaaaguauuagcucccgcaagggguucgagaugaucugggaccccaacggcuggaccggaacggauaauaacuuuucuaucaaacaagacauuguuggcauaaaggaauggucgggguacagcggauccuucgugcagcauccugagcugacuggucuggacuguauccgaccaugcuucugggucgaacucauuagaggcaggcccgaggagaauacaaucuggaccucagggaguucuauuagcuuuuguggagugaacuccgauacuguaggcuggucauggccggacggugcagaauuaccuuucacaaucgauaaauga

SEQ ID NO: 153786 - RNA, 1410 nt, Artificial Sequence
  derived and/or modified CDS sequence (opt3) from neuraminidase__InfluenzaA__AIM56053
augaaccccaaucagaagaucauuaccauaggcagcgugugcaugacaaucgggauggccaaccugauucuccaaaucggaaauauuaucuccauaugggucucucacucaauccagcuugguaaccagagucagauugagacuuguaaucaaagcguuaucacguacgaaaacaauaccugggugaaccagacauauguaaauauuuccaacacuaauuucgcugcaggccagucuguggucucggugaaacuggccgggaacucaucauugugcccuguuaguggaugggcgaucuacuccaaggacaauucugugagaauaggcagcaaaggugaugucuuugugauuagggagccauucaucuccuguucaccguuagaaugccggaccuuuuuccugacacagggggcucuacucaacgacaagcauaguaauggaaccauuaaagaucgcagccccuaucgaacucugaugucuuguccuaucggcgagguaccaucccccuacaacucacguuuugaaagcguugccuggagugcaucugccugccacgacggcaucaacuggcuuacaauugggauauccggaccugauagcggugcuguggcaguccugaaguauaauggcaucauuaccgacacgaucaagucguggagaaacaauauauugaggacucaagagucugagugugccugcgugaacggguccuguuucaccauuaugacagauggaccaucagacgaacaggcuaguuacaaaaucuuucggaucgagaagggcaaaauugucaagagcguggaaaugaaugcccccaacuaucauuacgaggagugcuccuguuacccugauucuagcgaaaucacuugcguuugccgcgacaauuggcacgguucaaacagaccaugggugaguuucaaucagaaccucgaguaucagauuggguacauauguuccggaguauuuggcgauaauccgaggcccaacgacaaaaccggcagcugcgggccugugucuucaaauggagcgaacggugucaagggcuucaguuuuaaguaugggaauggaguguggaucggccggacaaaaagcauuuccucucgcaaggguuucgaaaugaucugggauccaaacggguggaccggcacggacaacaauuuuucgaucaaacaagacauuguuggaauaaaggaguggagcggcuacuccgggucauucgugcagcaucccgaacugacuggacuggauuguauccgaccuugcuucugggucgagcucauuagagguaggccagaggaaaacacaaucuggaccaguggcucuagcauuuccuuuuguggggugaauagcgacacuguaggauggagcuggcccgauggcgcagaguuaccguucacaaucgacaaauga

SEQ ID NO: 153787 - RNA, 1410 nt, Artificial Sequence
  derived and/or modified CDS sequence (opt3) from neuraminidase__InfluenzaA__AIM56064
augaaccccaaucagaagaucauuaccauaggcagcgugugcaugacaaucgggauggccaaccugauucuccaaaucggaaauauuaucuccauaugggucucucacucaauccagcuugguaaccagagucagauugagacuuguaaucaaagcguuaucacguacgaaaacaauaccugggugaaccagacauauguaaauauuuccaacacuaauuucgcugcaggccagucuguggucccugugaaacuggccgggaacucgucauugugcccaguuagcggaugggcgaucuacaguaaggacaauuccgugagaauaggcucuaaaggugaugucuuugugauuagggagccguucaucagcuguucccccuuagaaugccggaccuuuuuccugacacagggggcucuacucaacgacaagcauucaaauggaaccauuaaagaucgcaguccuuaucgaacucugaugagcuguccaaucggcgagguacccucuccuuacaacucccguuuugaaucaguugccuggagcgcaagugccugccacgacggcaucaacuggcuuacaauugggauaucuggaccagauuccggugcuguggcaguccugaaguauaauggcaucauuaccgacacgaucaagagcuggagaaacaauauauugaggacucaagagucggagugugccugcgugaacgggucuuguuucaccauuaugacagauggacccuccgacggccaggcuucauacaaaaucuuucggaucgaaaaggguaaaauugugaagagugucgagaugaaugccccuaacuaucauuacgaagagugcagcuguuacccagauuccucugagaucacuugcguuugccgcgacaauuggcacgggagcaacagaccgugggugucauucaaucagaaccucgaauaucagauuggauacauauguaguggcguauuuggcgauaaucccaggccuaacgacaaaaccggguccugcggaccagugagcucuaauggugcgaacggcgucaagggguucucauuuaaguauggaaauggcguguggaucggucggacaaaaaguauuagcucccgcaagggguucgagaugaucugggaucccaacggcuggaccggaacggacaacaauuuuucuaucaaacaagacauuguuggcauaaaggaauggucgggguacagcggauccuucgugcagcauccugagcugacuggucuggauuguauccgaccaugcuucugggucgaacucgugagaggcaggcccgaggagaacacaauuuggaccucagggaguucuaucagcuuuuguggaguaaauuccgacacuguuggcuggucauggccggauggugcagaauuaccuuucacaauugacaaauga

SEQ ID NO: 153788 - RNA, 1410 nt, Artificial Sequence
  derived and/or modified CDS sequence (opt3) from neuraminidase__InfluenzaA__AIM56086
augaaccccaaucagaagaucauuaccauaggcagcgugugcaugacaaucgggauggccaaccugauucuccaaaucggaaauauuaucuccauaugggucucucacucaauccagcuugguaaccagagucauauugagacuuguaaucagagcguuaucacguacgaaaacaauaccugggugaaccaaacauauguaaauauuuccaacacuaauuucgcugcaggccagucuguggucccugugaaacuggccgggaacucgucauugugcccaguuagcggaugggcgaucuacaguaaggacaauuccgugagaauaggcucuaaaggugaugucuuugugauuagggagccguucaucagcuguucccccuuagaaugccggaccuuuuuccugacacagggggcucuacucaacgacaagcacucaaauggaaccauuaaagaucgcaguccuuaucgaacucugaugagcuguccaaucggcgagguacccucuccuuacaacucccguuuugaaucaguugccuggagcgcaagugccugccaugacggcaucaacuggcuuacaauugggauaucuggaccagauaauggugcuguggcaguccugaaguauaacggcaucauuaccgacacgaucaaguccuggagaaauaacauauugaggacucaggagagcgagugugccugcgugaaugggucguguuucaccauuaugacagauggacccucugacggccaggcuuccuacaaaaucuuucggaucgaaaaggguaaaauugugaagucagucgagaugaacgccccuaauuaucacuacgaagagugcaguuguuacccagauagcuccgagaucacuugcguuugccgcgacaacuggcaugggucuaauagaccgugggugagcuucaaccaaaaucucgaauaucagauuggauacauauguucaggcguauuuggcgauaaccccaggccuaaugacaaaaccgggaguugcggaccagugacauccaacggugcgaauggcgucaagggguucagcuuuaaguauggaaacggcguguggaucggucggaccaaaucuauuucaagucgcaagggguucgagaugaucugggaucccaacggcuggacgggaacugacaauaacuuuagcaucaaacaggacauuauaggcaucaaggaaugguccggguacucuggaucguucguucaacacccugagcugacaggucuggauuguauucgaccaugcuucuggguggaacucaucagaggcaggcccgaggagaauaccauuuggacuagcggguccucaaucaguuuuuguggagucaacucugacacagugggcuggagcuggccggauggugcagaauuaccuuucaccauagacaaauga

SEQ ID NO: 153789 - RNA, 1410 nt, Artificial Sequence
  derived and/or modified CDS sequence (opt3) from neuraminidase__InfluenzaA__AIM56097
augaaccccaaucagaagaucauuaccauaggcagcgugugcaugacaaucgggauggccaaccugauucuccaaaucggaaauauuaucuccauaugggucucucacucaauccagcuugguaaccagagucagauugagacuuguaaucaaagcguuaucacguacgaaaacaauaccugggugaaccagacauauguaaauauuuccaacacuaauuucgcugcagagcagucuguggucucggugaaacuggccggcaacucaucauugugcccuguuagugggugggcgaucuacuccaaggacaauucugugagaauaggaagcaaaggcgaugucuuugugauuagggaaccauucaucuccuguucaccguuagagugccggaccuuuuuccugacacagggugcucuacucaacgacaagcauaguaaugggaccauuaaagaucgcagccccuaucgaacucugaugucuuguccuaucggagaaguaccaucccccuacaacucacguuuugagagcguugccuggagugcaucugccugccacgacggcaucaacuggcuuacaauuggcauauccgggccugauagcggagcuguggcaguccugaaguauaaugguaucauuaccgacacgaucaagucguggagaaacaauauauugaggacucaagagucugaaugugccugcgugaacggcuccuguuucaccauuaugacagaugggccaucagacggacaggcuaguuacaaaaucuuucggaucgagaagggcaaaauugucaagagcguggaaaugaaugcccccaacuaucauuacgaggagugcuccuguuacccugauucuagcgaaaucacuugcguuugccgcgacaauuggcacgguucaaacagaccaugggugaguuucaaucagaaccucgaguaucagauuggguacauauguuccggaguauuuggcgauaauccgaggcccaacgacaaaaccggcagcugcgggccugugucuucaaauggagcgaacggugucaagggcuucaguuuuaaguaugggaauggaguguggaucggccggacaaaaagcauuuccucucgcaaggguuucgaaaugaucugggauccaaacggguggaccggcacggacaacaauuuuucgaucaaacaagacauuguuggaauaaaggaguggagcggcuacuccgggucauucgugcagcaucccgaacugacuggacuggauuguauccgaccuugcuucugggucgagcucauuagagguaggccagaggaaaacacaaucuggaccaguggcucuagcauuuccuuuuguggggugaauagcgacacuguaggauggagcuggcccgauggcgcagaguuaccguucacaaucgacaaauga

SEQ ID NO: 153790 - RNA, 1410 nt, Artificial Sequence
  derived and/or modified CDS sequence (opt3) from neuraminidase__InfluenzaA__AIM56108
augaaccccaaucagaagaucauuaccauaggcagcgugugcaugacaaucgggauggccaaccugauucuccaaaucggaaauauuaucuccauaugggucucucacucaauccagcuugguaaccagagucagauugagacuuguaaucaaagcguuaucacguacgaaaacaauaccuggauuaaccagacauaugugaauaucuccaacacuaauuucgcugcaggccagucuguagugccugucaaacuggccgggaacucgucauugugcccagugagcggaugggcgauauacaguaaggacaauuccguuagaauuggcucuaaaggugauguguuugucaucagggagccguucauuagcuguucccccuuagaaugccggaccuuuuuccugacacagggggcucuacucaacgacaagcauucaaauggaaccaucaaagaucgcaguccuuaucgaacucugaugagcuguccaaucggcgaggugcccucuccuuacaacucccguuuugaaucaguagccuggagcgcaagugccugccacgacggcauuaacuggcuuacaauagggaucucuggaccagauuccggugcuguugcagugcugaaguauaauggcauuaucaccgacacgauaaagagcuggagaaacaauauuuugaggacucaagagucggagugugccugcgucaacgggucuuguuucaccaucaugacagauggacccuccgacggccaggcuucauacaaaaucuuucggauugaaaaggguaaaaucgugaagaguguggagaugaaugccccuaacuaucauuacgaagagugcagcuguuacccagauuccucugagauuacuugcgucugccgcgacaauuggcacgggagcaacagaccguggguuucauucaaucagaaccucgaauaucagauaggauacaucuguaguggcguguuuggcgauaaucccaggccuaacgacaaaaccggguccugcggaccaguaagcucuaauggugcgaacggcgugaagggguucucauuuaaguauggaaauggcgucuggauuggucggacaaaaaguaucagcucccgcaagggguucgagaugaucugggaucccaacggcuggaccggaacggacaacaauuuuucuauuaaacaagacauagugggcaucaaggaauggucgggguacagcggauccuucguucagcauccugagcugacuggucuggauuguauucgaccaugcuucuggguggaacucaucagaggcaggcccgaggagaacacaauuuggaccucagggaguucuaucagcuuuuguggagucaauuccgacacugugggcuggucauggccggauggugcagaauuaccuuucacaauagacaaauga

SEQ ID NO: 153791 - RNA, 1410 nt, Artificial Sequence
  derived and/or modified CDS sequence (opt3) from neuraminidase__InfluenzaA__AIM56119
augaaccccaaucagaagaucauuaccauaggcagcgugugcaugacaaucgggauggccaaccugauucuccaaaucggaaauauuaucuccauaugggucucucacucaauccagauugguaaccagagucagaucgagacuuguaaucaaagcguuauuacguacgaaaacaauaccugggugaaccagacauauguaaauaucuccaacacuaauuucgcugcaggccagucuguggucucggugaaacuugccgggaacucaagccugugcccuguuaguggaugggcgauauacuccaaggacaauucugugagaauuggcagcaaaggugaugucuuugugaucagggagccauucauuuccuguucaccguuggaaugccggaccuuuuucuuaacacagggggcucugcuaaacgacaagcauaguaauggaaccaucaaagaucgcagccccuaucgaacucucaugucuuguccuaucggcgagguaccaucccccuacaacucacguuuugaaagcguugccuggagugcaucugccugccacgacggcauuaacuggcugacaauagggaucuccggaccugauagcggugcuguggcaguccuuaaguauaauggcauuaucaccgacacgauaaagucguggagaaacaauauucugaggacucaagagucugagugugccugcgugaacggguccuguuucaccaucaugacagauggaccaucagacggccaggcuaguuacaaaaucuuucggauugaaaaggguaaaaucgugaagucagucgagaugaaugcccccaacuaucauuacgaagagugcuccuguuacccugauucuagcgagauuacuugcguuugccgcgacaauuggcacgggucaaacagaccaugggugaguuucaaucagaacuuggaauaucagauaggauacaucuguuccggcguauuuggcgauaauccgaggcccaacgacaaaaccgggagcugcggaccugugucuucaaauggugcgaacggcgucaagggguucaguuuuaaguauggaaauggcguguggauuggucggacaaaaagcaucuccucucgcaagggguucgagaugaucugggauccaaacggcuggaccggaacggacaacaaauuuucgauuaagcaagacauaguuggcaucaaugaauggagcggguacuccggaucauucgugcagcaucccgagcucacuggucuggauuguauucgaccuugcuucugggucgaacugaucagaggcaggccagaggagaacacaauuuggaccagugggucuagcaucuccuuuuguggagugaauagcgacacuguaggcuggagcuggcccgauggugcagaacucccguucacaauagacaaauga

SEQ ID NO: 153792 - RNA, 1410 nt, Artificial Sequence
  derived and/or modified CDS sequence (opt3) from neuraminidase__InfluenzaA__AIM56130
augaaccccaaucagaagaucauuaccauaggcagcgugugcaugacaaucgggauggccaaccugauucuccaaaucggaaauauuaucuccauaugggucucucacucaauccagcuugguaaccagagucagauugagacuuguaaucaaagcguuaucacguacgaaaacaauaccugggugaaccagacauauguaaauauuuccaacacuaauuucgcugcaggccagucuguggucccugugaaacuggccgggaacucgucauugugcccaguuagcggaugggcgaucuacaguaaggacaauuccgugagaauaggcucuaaaggugaugucuuugugauuagggagccguucaucagcuguucccccuuagaaugccggaccuuuuuccugacacagggggcucuacucaacgacaagcauucaaauggaaccauuaaagaucgcaguccuuaucgaacucugaugagcuguccaaucggcgagguacccucuccuuacaacucccguuuugaaucaguugccuggagcgcaagugccugccacgacggcaucaacuggcuuacaauugggauaucuggaccagauuccggugcuguggcaguccugaaguauaauggcaucauuaccgacacgaucaagagcuggagaaacaauauauugaggacucaagagucggagugugccugcgugaacgggucuuguuucaccauuaugacagauggacccuccgacggccaggcuucauacaaaaucuuucggaucgaaaaggguaaaauugugaagagugucgagaugaaugccccuaacuaucauuacgaagagugcagcuguuacccagauuccucugagaucacuugcguuugccgcgacaauuggcacgggagcaacagaccgugggugucauucaaucagaaccucgaauaucagauuggauacauauguaguggcguauuuggcgauaaucccaggccuaacgacaaaaccggguccugcggaccagugagcucuaauggugcgaacggcgucaagggguucucauuuaaguauggaaauggcguguggaucggucggacaaaaaguauuagcucccgcaagggguucgagaugaucugggaucccaacggcuggaccggaacggacaacaaauuuucuaucaagcaagacauuguuggcauaaaugaauggucgggguacagcggauccuucgugcagcauccugagcugacuggucuggauuguauccgaccaugcuucugggucgaacucauuagaggcaggcccgaggagaacacaaucuggaccucagggaguucuauuagcuuuuguggagugaaauccgacacuguaggcuggucauggccggauggugcagaauuaccuuucacaaucgacaaguga

SEQ ID NO: 153793 - RNA, 1410 nt, Artificial Sequence
  derived and/or modified CDS sequence (opt3) from neuraminidase__InfluenzaA__AIM56141
augaaccccaaucagaagaucauuaccauaggcagcgugugcaugacaaucgggauggccaaccugauucuccaaaucggaaauauuaucuccauaugggucucucacucaauccagcuugguaaccagagucagauugagacuuguaaucaaagcguuaucauuuacgaaaacaauacgugggugaaccagaccuauguaaauaucuccaacacaaauuucgcugcaggccagucuguggucucggugaaacuggccgggaacucaucauugugcccuguuaguggaugggcgauauacuccaaggacaauucugugagaauuggcagcaaaggugaugucuuugugaucagggagccauucauuuccuguucaccguuagaaugccggaccuuuuuccugacucagggggcucuacucaacgacaagcauaguaauggaacaaucaaagaucgcagccccuaucgaacccugaugucuuguccuaucggcgagguaccaucccccuacaacucacguuuugaaagcguugccuggagugcaucugccugccacgacggcauuaacuggcuuacuauagggaucuccggaccugauagcggugcuguggcaguccugaaguauaauggcauuaucacagacaccauaaagucguggagaaacaauauuuugaggacgcaagagucugagugugccugcgugaacggguccuguuucacuaucaugaccgauggaccaucagacggccaggcuaguuacaaaaucuuucggauugaaaaggguaaaaucgucaagagcguggagaugaaugcccccaacuaucauuacgaagagugcuccuguuacccugauucuagcgagauuacaugcguuugccgcgacaauuggcacgggucaaacagaccaugggugaguuucaaucagaaccucgaauaucagauaggauacaucuguuccggcguauuuggcgauaauccgaggcccaacgacaaaacugggagcugcggaccugugucuucaaauggugcgaacggcgucaagggguucaguuuuaaguauggaaauggcguguggauuggucggaccaaaagcaucuccucucgcaagggguucgagaugaucugggauccaaacggcuggacaggaaccgacaacaauuuuucgauuaaacaagacauaguuggcaucaaggaauggagcggguacuccggaucauucgugcagcaucccgagcugacgggucuggauuguauucgaccuugcuucugggucgaacucaucagaggcaggccagaggagaacacuauuuggacaagugggucuagcaucuccuuuuguggagugaauagcgacaccguaggcuggagcuggcccgauggugcagaauuaccguucacuauagacaaauga

SEQ ID NO: 153794 - RNA, 1410 nt, Artificial Sequence; identical to SEQ ID NO: 153779
  derived and/or modified CDS sequence (opt3) from neuraminidase__InfluenzaA__AIM56152

SEQ ID NO: 153795 - RNA, 1410 nt, Artificial Sequence
  derived and/or modified CDS sequence (opt3) from neuraminidase__InfluenzaA__AIM56163
augaaccccaaucagaagaucauuaccauaggcagcgugugcaugacaaucgggauggccaaccugauucuccaaaucggaaauauuaucuccauaugggucucucacucaauccagcuugguaaccagagucauauugagacuuguaaucagagcguuaucacguacgaaaacaauaccugggugaaccaaacauauguaaauauuuccaacacuaauuucgcugcaggccagucuguggucccugugaaacuggccgggaacucgucauugugcccaguuagcggaugggcgaucuacaguaaggacaauuccgugagaauaggcucuaaaggugaugucuuugugauuagggagccguucaucagcuguucccccuuagaaugccggaccuuuuuccugacacagggggcucuacucaacgacaagcacucaaauggaaccauuaaagaucgcaguccuuaucgaacucugaugagcuguccaaucggcgagguacccucuccuuacaacucccguuuugaaucaguugccuggagcgcaagugccugccaugacggcaucaacuggcuuacaauugggauaucuggaccagauaauggugcuguggcaguccugaaguauaacggcaucauuaccgacacgaucaaguccuggagaaauaacauauugaggacucaggagagcgagugugccugcgugaaugggucguguuucaccauuaugacagauggacccucugacggccaggcuuccuacaaaaucuuucggaucgaaaaggguaaaauugugaagucagucgagaugaacgccccuaauuaucacuacgaagagugcaguuguuacccagauagcuccgagaucacuugcguuugccgcgacaacuggcaugggucuaauagaccgugggugagcuucaaccaaaaucucgaauaucagauuggauacauauguucaggcguauuuggcgauaaccccaggccuaaugacaaaaccgggaguugcggaccagugacauccaacggugcgaauggcgucaagggguucagcuuuaaguauggaaacggcguguggaucggucggaccaaaucuauuucaagucgcaagggguucgagaugaucugggaucccaacggcuggacgggaacugacaauaacuuuagcaucaaacaggacauuguuggcauaaaggaaugguccggguacucuggaucguucgugcaacacccugagcugacaggucuggauuguauccgaccaugcuucugggucgaacucauuagaggcaggcccgaggagaauaccaucuggacuagcggguccucaauuaguuuuuguggagugaacucugacacaguaggcuggagcuggccggauggugcagaauuaccuuucaccaucgacaaauga

SEQ ID NO: 153796 - RNA, 1410 nt, Artificial Sequence
  derived and/or modified CDS sequence (opt3) from neuraminidase__InfluenzaA__AIM56174
augaaccccaaucagaagaucauuaccauaggcagcgugugcaugacaaucgggauggccaaccugauucuccaaaucggaaauauuaucuccauaugggucucucacucaauccagcuugguaaccagagucagauugagacuuguaaucaaagcguuaucacguacgaaaacaauaccugggugaaccagacauauguaaauauuuccaacacuaauuucgcugcaggccagucuguggucccugugaaacuggccgggaacucgucauugugcccaguuagcggaugggcgaucuacaguaaggacaauuccgugagaauaggcucuaaaggugaugucuuugugauuagggagccguucaucagcuguucccccuuagaaugccggaccuuuuuccugacacagggggcucuacucaacgacaagcauucaaauggaaccauuaaagaucgcaguccuuaucgaacucugaugagcuguccaaucggcgagguacccucuccuuacaacucccguuuugaaucaguugccuggagcgcaagugccugccacgacggcaucaacuggcuuacaauugggauaucuggaccagauuccggugcuguggcaguccugaaguauaauggcaucauuaccgacacgaucaagagcuggagaaacaauauauugaggacucaagagucggagugugccugcgugaacgggucuuguuucaccauuaugacagauggacccuccgacggccaggcuucauacaaaaucuuucggaucgaaaaggguaaaauugugaagagugucgagaugaaugccccuaacuaucauuacgaagagugcagcuguuacccagauuccucugagaucacuugcguuugccgcgacaauuggcacgggagcaacagaccgugggugucauucaaucagaaccucgaauaucagauuggauacauauguaguggcguauuuggcgauaaucccaggccuaacgacaaaaccggguccugcggaccagugagcucuaauggugcgaacggcgucaagggguucucauuuaaguauggaaauggcguguggaucggucggacaaaaaguauuagcucccgcaagggguucgagaugaucugggaucccaacggcuggaccggaacggacaacaauuuuucuaucaaacaagacauuguuggcauaaaggaauggucgggguacagcggauccuucgugcagcauccugagcugacuggucuggauuguauccgaccaugcuucugggucgaacucauuagaggcaggcccgaggagaacacaaucuggaccucagggaguucuauuagcuuuuguggaguaaauuccgacacugugggcuggucauggccggauggugcagaauuaccuuucacaguugacaaauga

SEQ ID NO: 153797 - RNA, 1410 nt, Artificial Sequence; identical to SEQ ID NO: 153792
  derived and/or modified CDS sequence (opt3) from neuraminidase__InfluenzaA__AIM56185

SEQ ID NO: 153798 - RNA, 1410 nt, Artificial Sequence; identical to SEQ ID NO: 153791
  derived and/or modified CDS sequence (opt3) from neuraminidase__InfluenzaA__AIM56196

SEQ ID NO: 153799 - RNA, 1410 nt, Artificial Sequence; identical to SEQ ID NO: 153773
  derived and/or modified CDS sequence (opt3) from neuraminidase__InfluenzaA__AIM56207

SEQ ID NO: 153800 - RNA, 1410 nt, Artificial Sequence
  derived and/or modified CDS sequence (opt3) from neuraminidase__InfluenzaA__AIM56229
augaaccccaaucagaagaucauuaccauaggcagcgugugcaugacaaucgggauggccaaccugauucuccaaaucggaaauacuauuuccaucugggucucucacucaauacagaucgguaaccagagucagauugagacguguaaucaaagcguuaucaccuacgaaaacaauacaugggugaaccagacuuauguaaauauuuccaacaccaauuucgcugcaggccagucuguggucucggugaaacuugccgggaacucaagccugugcccuguuaguggaugggcgaucuacuccaaggacaauucugugagaauaggcagcaaaggugaugucuuugugauuagggagccauucaucuccuguucaccguuggaaugccggacauuuuucuuaacccagggggcucugcuaaacgacaagcauaguaauggaacuauuaaagaucgcagccccuaucgaacacucaugucuuguccuaucggcgagguaccaucccccuacaacucacguuuugaaagcguugccuggagugcaucugccugccacgacggcaucaacuggcugaccauugggauauccggaccugauagcggugcuguggcaguccuuaaguauaauggcaucauuacggacacuaucaagucguggagaaacaauauacugaggacccaagagucugagugugccugcgugaacggguccuguuucacaauuaugacugauggaccaucagacggccaugcuaguuacaaaaucuuucggaucgaaaaggguaaaauugugaagucagucgagaugaaugcccccaacuaucacuacgaagagugcuccuguuacccugauucuagcgagaucacuugcguuugccgcgacaauuggcaugggucaaacagaccaugggugaguuucaaucagaacuuggaauaucagauuggauacauauguuccggcguauuuggcgauaauccgaggcccaacgacaaaacagggagcugcggaccugugucuucaaauggugcgaacggcgucaagggguucaguuuuaaguauggaaauggcguguggaucggucggaccaaaagcauuuccucucgcaagggguucgagaugaucugggauccaaacggcuggacgggaacugacaacaaauuuucgaucaagcaggacauuguuggcauaaaugaauggagcggguacuccggaucauucgugcaacaccccgagcucacaggucuggauuguauccgaccuugcuucugggucgaacugauuagaggcaggccagaggagaacaccaucuggaccagugggucuagcauuuccuuuuguggagugaauagcgacacaguaggcuggagcuggcccgauggugcagaacucccguucaccaucgacaaauga

SEQ ID NO: 153801 - RNA, 1410 nt, Artificial Sequence
  derived and/or modified CDS sequence (opt3) from neuraminidase__InfluenzaA__AIM56240
augaaccccaaucagaagaucauuaccauaggcagcgugugcaugacaaucgggauggccaaccugauucuccaaaucggaaauauuaucuccauauggaucucucacucaauucaggucgguaaccagagucagaucgagacuuguaaucaaagcguuauuacguacgaaaacaauaccugggugaaccagacauauguaaauaucuccaacacuaauuucgcugcaggccagccuguggucucugugaaacuugccgggaacucgucacugugcagcguuaguggaugggcgauauacuccaaggacaauucugugagaauuggcagcaaaggugaugucuuugugaucagggagccauucauuuccuguucaccguuggaaugccggaccuuuuucuuaacacagggggcucugcuaaacgacaagcauaguaauggaaccaucaaagaucgcagccccuaucgaacucucaugucuuguccuaucggcgagguaccaucccccuacaacucacguuuugaaagcguugccuggagugcaucugccugccacgacggcauuaacuggcugacaauagggaucuccggaccugauagcggugcuguggcaguccuuaaguauaauggcauuaucaccgacacgauaaagucguggagaaacgauauucugaggacucaagagucugagugugccugcgugaauggguccuguuucaccaucaugacagacggaccaucagauggccaggcuaguuacaaaaucuuucggauugaaaaggguaaaaucgucaagagcguggagaugaacgcccccaauuaucauuacgaagagugcuccuguuacccugacucuagcgagauuacuugcguuugccgcgauaacuggcacgggucaaauagaccaugggugaguuucaaccagaauuuggaauaucagauaggauacaucuguuccggcauuuuuggcgacaacccgaggcccaaugauaaaaccgggagcugcggaccuguaucuucaaacggugcgaauggcgugaagggguucaguuuuaaguauggaaacggcgucuggaucggucggacaaaaagcaucuccucucgcaagggguucgagaugauuugggacccaaauggcuggaccggaacggacaacaacuuuucgauaaaacaagauaucgugggcauuaaugaauggagcggguacuccggaucauucguucagcaucccgagcucacuggucuggacuguauccgaccuugcuucuggguggaacugauuagaggcaggccaaaggagaacacaaucuggaccagugggucuagcauauccuuuuguggagucaauucagauacugugggcuggagcuggcccgacggugcagagcucccguucacaaucgauaaauga

SEQ ID NO: 153802 - RNA, 1410 nt, Artificial Sequence
  derived and/or modified CDS sequence (opt3) from neuraminidase__InfluenzaA__AIM56251
augaaccccaaucagaagaucauuaccauaggcagcgugugcaugacaaucgggauggccaaccugauucuccaaaucggaaauauuaucuccauaugggucucucacucaauccagcuugguaaccagagucauauugagacuuguaaucagagcguuaucacguacgaaaacaauaccugggugaaccaaacauauguaaauauuuccaacacuaauuucgcugcaggccagucuguggucccugugaaacuggccgggaacucgucauugugcccaguuagcggaugggcgaucuacaguaaggacaauuccgugagaauaggcucuaaaggugaugucuuugugauuagggagccguucaucagcuguucccccuuagaaugccggaccuuuuuccugacacagggggcucuacucaacgacaagcacucaaauggaaccauuaaagaucgcaguccuuaucgaacucugaugagcuguccaaucggcgagguacccucuccuuacaacucccguuuugaaucaguugccuggagcgcaagugccugccaugacggcaucaacuggcuuacaauugggauaucuggaccagauuccggugcuguggcaguccugaaguauaauggcaucauuaccgacacgaucaagagcuggagaaacaauauauugaggacucaggagucggagugugccugcgugaacgggucuuguuucaccauuaugacagauggacccuccgacggccaggcuucauacaaaaucuuucggaucgaaaaggguaaaauugugaagagugucgagaugaaugccccuaacuaucacuacgaagagugcagcuguuacccagauuccucugagaucacuugcguuugccgcgacaauuggcaugggagcaacagaccgugggugucauucaaucaaaaccucgaauaucagauuggauacauauguaguggcguauuuggcgauaaucccaggccuaacgacaaaaccggguccugcggaccagugagcucuaauggugcgaacggcgucaagggguucucauuuaaguauggaaauggcguguggaucggucggacaaaaaguauuagcucccgcaagggguucgagaugaucugggaucccaacggcuggaccggaacggacaacaauuuuucuaucaaacaggacauuguuggcauaaaggaauggucgggguacagcggauccuucgugcaacacccugagcugacuggucuggauuguauccgaccaugcuucugggucgaacucauuagaggcaggcccgaggagaacacaaucuggaccucagggaguucuauuagcuuuuguggaguaaauuccgacacugugggcuggucauggccggauggugcagaauuaccuuucacaaucgacaaauga

SEQ ID NO: 153803 - RNA, 1410 nt, Artificial Sequence; identical to SEQ ID NO: 153802
  derived and/or modified CDS sequence (opt3) from neuraminidase__InfluenzaA__AIM56262

SEQ ID NO: 153804 - RNA, 1410 nt, Artificial Sequence; identical to SEQ ID NO: 153773
  derived and/or modified CDS sequence (opt3) from neuraminidase__InfluenzaA__AIM56273

SEQ ID NO: 153805 - RNA, 1410 nt, Artificial Sequence
  derived and/or modified CDS sequence (opt3) from neuraminidase__InfluenzaA__AIM56284
augaaccccaaucagaagaucauuaccauaggcagcgugugcaucacaauugggauggccaaccugauccuccaaauuggaaauaucauauccaucugggucucucacucaauucagaucgguaaccagagucagauugagacuuguaaucaaagcguuaucacguacgaaaacaauaccugggugaaccagacauauguaaauauauccaacacuaauuucgcugcaggccagucuguggucucggugaaacuugccgggaacucaagccugugcccuguuaguggaugggcgauuuacuccaaggacaauucugugagaaucggcagcaaaggugaugucuuugugauuagggagccauucaucuccuguucaccguuggaaugccggaccuuuuucuuaacacagggggcucugcuaaacgacaagcauaguaauggaaccaucaaagaucgcagccccuaucgaacucucaugucuuguccuauuggcgagguaccaucccccuacaacucacguuuugaaagcguugccuggagugcaucugccugccacgacggcauaaacuggcugacaaucgggauuuccggaccugauagcggugcuguggcaguccuuaaguauaauggcaucauaaccgacacgauuaagucguggagaaacaauauccugaggacucaagagucugagugugccugcgugaacggguccuguuucaccaucaugacagauggaccaucagacggccaggcuaguuacaaaauuuuucggaucgaaaaggguaaaauugucaagagcguggagaugaaugcccccaacuaucauuacgaagagugcuccuguuacccugauucuagcgagauaacuugcguuugccgcgacaauuggcacgggucaaacagaccaugggugaguuucaaucagaacuuggaauaucagaucggauacauuuguuccggcguauuuggcgauaauccgaggcccaacgacaaaaccgggagcugcggaccugugucuucaaauggugcgaacggcgucaagggguucaguuuuaaguauggaaauggcguguggaucggucggacaaaaagcaucuccucucgcaagggguucgagaugauuugggauccaaacggcuggaccggaacggacaacaaauuuucgauaaagcaagacguugugggcaucaaugaauggagcggguacuccggaucauucguccagcaucccgagcucacuggucuggauuguauucgaccuugcuucuggguggaacugaucagaggcaggccagaggagaacacaauuuggaccagugggucuagcaucuccuuuuguggaguaaauucagacacuguuggcuggagcuggcccgauggugcagaacucccguucacaauagacaaauga

SEQ ID NO: 153806 - RNA, 1410 nt, Artificial Sequence; identical to SEQ ID NO: 153773
  derived and/or modified CDS sequence (opt3) from neuraminidase__InfluenzaA__AIM56295

SEQ ID NO: 153807 - RNA, 1410 nt, Artificial Sequence; identical to SEQ ID NO: 153773
  derived and/or modified CDS sequence (opt3) from neuraminidase__InfluenzaA__AIM56306

SEQ ID NO: 153808 - RNA, 1410 nt, Artificial Sequence; identical to SEQ ID NO: 153773
  derived and/or modified CDS sequence (opt3) from neuraminidase__InfluenzaA__AIM56317

SEQ ID NO: 153809 - RNA, 1410 nt, Artificial Sequence; identical to SEQ ID NO: 153792
  derived and/or modified CDS sequence (opt3) from neuraminidase__InfluenzaA__AIM56339

SEQ ID NO: 153810 - RNA, 1410 nt, Artificial Sequence
  derived and/or modified CDS sequence (opt3) from neuraminidase__InfluenzaA__AIM56350
augaaccccaaucagaagaucauuaccauaggcagcgugugcaugacaaucgggauggccaaccugauucuccaaaucggaaauauuaucuccauaugggucucucacucaauccagcuugguaaccagagucagauugagacuuguaaucaaagcguuaucacguacgaaaacaauaccugggugaaccagacauauguaaauauuuccaacacuaauuucgcugcaggccagucuguggucccugugaaacuggccgggaacucgucauugugcccaguuagcggaugggcgaucuacaguaaggacaauuccgugagaauaggcucuaaaggugaugucuuugugauuagggagccguucaucagcuguucccccuuagaaugccggaccuuuuuccugacacagggggcucuacucaacgacaagcauucaaauggaaccauuaaagaucgcaguccuuaucgaacucugaugagcuguccaaucggcgagguacccucuccuuacaacucccguuuugaaucaguugccuggagcgcaagugccugccacgacggcaucaacuggcuuacaauugggauaucuggaccagauuccggugcuguggcaguccugaaguauaauggcaucauuaccgacacgaucaagagcuggagaaacaauauauugaggacucaagagucggagugugccugcgugaacgggucuuguuucaccauuaugacagauggacccuccgacggccaggcuucauacaaaaucuuucggaucgaaaaggguaaaauugugaagagugucgagaugaaugccccuaacuaucauuacgaagagugcagcuguuacccagauuccucugagaucacuugcguuugccgcgacaauuggcacgggagcaacagaccgugggugucauucaaucagaaccucgaauaucagauuggauacauauguaguggcguauuuggcgauaaucccaggccuaacgacaaaaccggguccugcggaccagugagcucuaauggugcgaacggcgucaagggguucucauuuaaguauggaaauggcguguggaucggucggacaaaaaguauuagcucccgcaagggguucgagaugaucugggaucccaacggcuggaccggaacggacaacaauuuuucuaucaaacaagacauuguuggcauaaaggaauggucgggguacagcggauccuucgugcagcauccugagcugacuggucuggauuguauccgaccaugcuucugggucgaacucauuagaggcaggcccgaggagaacacaaucuggaccucagggaguucuauuagcuuuuguggaaucaauuccgacacugugggcuggucauggccggauggugcagaauuaccuuucacaauagacaaauga

SEQ ID NO: 153811 - RNA, 1410 nt, Artificial Sequence; identical to SEQ ID NO: 153802
  derived and/or modified CDS sequence (opt3) from neuraminidase__InfluenzaA__AIM56361

SEQ ID NO: 153812 - RNA, 1410 nt, Artificial Sequence; identical to SEQ ID NO: 153773
  derived and/or modified CDS sequence (opt3) from neuraminidase__InfluenzaA__AIM56372

SEQ ID NO: 153813 - RNA, 1410 nt, Artificial Sequence; identical to SEQ ID NO: 153802
  derived and/or modified CDS sequence (opt3) from neuraminidase__InfluenzaA__AIM56383

SEQ ID NO: 153814 - RNA, 1410 nt, Artificial Sequence
  derived and/or modified CDS sequence (opt3) from neuraminidase__InfluenzaA__AIM56394
augaaccccaaucagaagaucauuaccauaggcagcgugugcaugacaaucgggauggccaaccugauucuccaaaucggaaauauuaucuccauaugggucucucacucaauccagauugguaaccagagucagaucgagacuuguaaucaaagcguuauuacguacgaaaacaauaccugggugaaccagacauauguaaauaucuccaacacuaauuucgcugcaggccagucuguggucucggugaaacuugccgggaacucaagccugugcccuguuaguggaugggcgauauacuccaaggacaauucugugagaauuggcagcaaaggugaugucuuugugaucagggagccauucauuuccuguucaccguuggaaugccggaccuuuuucuuaacacagggggcucugcuaaacgacaagcauaguaauggaaccaucaaagaucgcagccccuaucgaacucucaugucuuguccuaucggcgagguaccaucccccuacaacucacguuuugaaagcguugccuggagugcaucugccugccacgacggcauuaacuggcugacaauagggaucuccggaccugauagcggugcuguggcaguccuuaaguauaauggcauuaucaccgacacgauaaagucguggagaaacaauauucugaggacucaagagucugagugugccugcgugaacggguccuguuucaccaucaugacagauggaccaucagacggccaggcuaguuacaaaaucuuucggauugaaaaggguaaaaucgucaagagcguggagaugaaugcccccaacuaucauuacgaagagugcuccuguuacccugauucuagcgagauuacuugcguuugccgcgacaauuggcacgggucaaacagaccaugggugaguuucaaucagaacuuggaauaucagauaggauacaucuguuccggcauuuuuggcgauaauccgaggcccaacgacaaaaccgggagcugcggaccuguaucuucaaauggugcgaacggcgugaagggguucaguuuuaaguauggaaauggcgucuggaucggucggacaaaaagcaucuccucucgcaagggguucgagaugauuugggauccaaacggcuggaccggaacggacaacaaauuuucgauaaagcaagacaucgugggcauuaaugaauggagcggguacuccggaucauucguucagcaucccgagcucacuggucuggauuguauccgaccuugcuucuggguggaacugauuagaggcaggccagaggagaacacaaucuggaccagugggucuagcauauccuuuuguggagucaauucagacacugugggcuggagcuggcccgauggugcagaacucccguucacaaucgacaaauga

SEQ ID NO: 153815 - RNA, 1410 nt, Artificial Sequence; identical to SEQ ID NO: 153791
  derived and/or modified CDS sequence (opt3) from neuraminidase__InfluenzaA__AIM56405

SEQ ID NO: 153816 - RNA, 1410 nt, Artificial Sequence
  derived and/or modified CDS sequence (opt3) from neuraminidase__InfluenzaA__AIM56416
augaaccccaaucagaagaucauuaccauaggcagcgugugcaugacaaucgggauggccaaccugauucuccaaaucggaaauauuaucuccauaugggucucucacucaauccagcuugguaaccagagucauauugagacuuguaaucagagcguuaucacguacgaaaacaauaccugggugaaccaaacauauguaaauauuuccaacaucaauuucgcugcaggccagucuguggucccugugaaacuggccgggaacucgucauugugcccaguuagcggaugggcgauauacaguaaggacaauuccgugagaauuggcucuaaaggugaugucuuugugaucagggagccguucauuagcuguucccccuuagaaugccggaccuuuuuccugacucagggggcucuacucaacgacaagcacucaaauggaacaaucaaagaucgcaguccuuaucgaacccugaugagcuguccaaucggcgagguacccucuccuuacaacucccguuuugaaucaguugccuggagcgcaagugccugccaugacggcauuaacuggcuuacuauagggaucucuggaccagauaauggugcuguggcaguccugaaguauaacggcauuaucacagacaccauaaaguccuggagaaauaacauuuugaggacgcaggagagcgagugugccugcgugaaugggucguguuucacuaucaugaccgauggacccucugacggccaggcuuccuacaaaaucuuucggauugaaaaggguaaaaucgugaagucagucgagaugaacgccccuaauuaucacuacgaagagugcaguuguuacccagauagcuccgagauuacaugcguuugccgcgacaacuggcaugggucuaauagaccgugggugagcuucaaccaaaaucucgaauaucagauaggauacaucuguucaggcguauuuggcgauaaccccaggccuaaugacaaaacugggaguugcggaccagugaccuccaacggugcgaauggcgucaagggguucagcuuuaaguauggaaacggcguguggauuggucggacaaaaucuaucucaagucgcaagggguucgagaugaucugggaucccaacggcuggaccggaacggacaauaacuuuagcauuaaacaggacauaguuggcaucaaggaaugguccggguacucuggaucguucgugcaacacccugagcugacuggucuggauuguauucgaccaugcuucugggucgaacucaucagaggcaggcccgaggagaauacaauuuggaccagcggguccucaaucaguuuuuguggagugaacucugacacuguaggcuggagcuggccggauggugcagaauuaccuuucacaauagacaaauga

SEQ ID NO: 153817 - RNA, 1410 nt, Artificial Sequence; identical to SEQ ID NO: 153791
  derived and/or modified CDS sequence (opt3) from neuraminidase__InfluenzaA__AIM56428

SEQ ID NO: 153818 - RNA, 1410 nt, Artificial Sequence; identical to SEQ ID NO: 153773
  derived and/or modified CDS sequence (opt3) from neuraminidase__InfluenzaA__AIM56439

SEQ ID NO: 153819 - RNA, 1410 nt, Artificial Sequence
  derived and/or modified CDS sequence (opt3) from neuraminidase__InfluenzaA__AIM56450
augaaccccaaucagaagaucauuaccauaggcagcgugugcaugacaaucgggauggccaaccugauucuccaaaucggaaauauuaucuccauauggaucucucacucaauucaggucgguaaccagagucagaucgagacuuguaaucaaagcguuauuacguacgaaaacaauaccugggugaaccagacauauguaaauaucuccaacacuaauuucgcugcaggccagccuguggucucugugaaacuugccgggaacucgucacugugcccaguuagcggaugggcgauauacaguaaggacaauuccgugagagucggcucuaaaggugauguguuuguaauuagggagccguucaucagcuguucccccuuggaaugccggaccuuuuucuuaacacagggggcucugcuaaacgacaagcauucaaauggaaccauuaaagaucgcaguccuuaucgaacucucaugagcuguccaaucggcgagguucccucuccuuacaacucccguuuugaaucaguggccuggagcgcaagugccugccacgacggcaucaacuggcugacaauugggauaucuggaccagauuccggugcugucgcagugcuuaaguauaauggcaucauuaccgacacgaucaagagcuggagaaacgauauacugaggacucaagagucggagugugccugcgugaaugggucuuguuucaccauuaugacagacggacccuccgauggccaggcuucauacaaaaucuuucggaucgaaaaggguaaaauugucaagaguguugagaugaacgccccuaauuaucauuacgaagagugcagcuguuacccagacuccucugagaucacuugcgugugccgcgauaacuggcacgggagcaauagaccguggguaucauucaaccagaauuuggaauauaaaauuggauacauauguaguggcaucuuuggcgacaaccccaggccuaaugauaagaccggguccugcggaccagugagcucuaacggugcgaauggcgucaagggguucucauuuaaauauggaaacggcguguggauuggucggacaaagaguaucagcucccgcaaaggguucgagaugaucugggaccccaauggcuggaccggaacggacaacaacuuuucuguuaagcaggauauugugggcauaaaugaauggucgggguacagcggauccuucguccaacauccugagcucacuggucuggacuguauccgaccaugcuucuggguggaacugauuagaggcaggcccaaagagaacacaaucuggaccucagggaguucuauuagcuuuuguggaguaaauuccgauacuguuggcuggucauggccggacggugcagagcucccuuucacaaucgauaaguga

SEQ ID NO: 153820 - RNA, 1410 nt, Artificial Sequence
  derived and/or modified CDS sequence (opt3) from neuraminidase__InfluenzaA__AIM56461
augaaccccaaucagaagaucauuaccauaggcagcgugugcaugacaaucgggauggccaaccugauucuccaaaucggaaauauuaucuccauaugggucucucacucaauccagauugguaaccagagucagaucgagacuuguaaucaaagcguuauuacguacgaaaacaauaccugggugaaccagacauauguaaauaucuccaacacuaauuucgcugcaggccagucuguggucucggugaaacuugccgggaacucaagccugugcccuguuaguggaugggcgauauacuccaaggacaauucugugagaauuggcagcaaaggugaugucuuugugaucagggagccauucauuuccuguucaccguuggaaugccggaccuuuuucuuaacacagggggcucugcuaaacgacaagcauaguaauggaaccaucaaagaucgcagccccuaucgaacucucaugucuuguccuaucggcgagguaccaucccccuacaacucacguuuugaaagcguugccuggagugcaucugccugccacgacggcauuaacuggcugacaauagggaucuccggaccugauagcggugcuguggcaguccuuaaguauaauggcauuaucaccgacacgauaaagucguggaaaaacaauauucugagaacucaagagucugagugugccugcgugaacggguccuguuucaccaucaugacagauggaccaucagacggccaggcuaguuacaagaucuuuaggauugaaaaagguaagaucgugaaaagcgucgagaugaaugcccccaacuaucauuacgaagagugcuccuguuacccugauucuagcgagauuacuugcguuugccgggacaauuggcacgggucaaaccgcccaugggugaguuucaaucagaacuuggaauaucagauaggauacaucuguuccggcguauuuggcgauaauccgagacccaacgacaagaccgggagcugcggaccugugucuucaaauggugcgaacggcgucaagggguucaguuuuaaauauggaaauggcguguggauugguaggacaaagagcaucuccucucggaaaggguucgagaugaucugggauccaaacggcuggaccggaacggacaacaaguuuucgauuaaacaagacauaguuggcgugaaugaauggagcggguacuccggaucauucguccagcaucccgagcucacuggucuggauuguauccgcccuugcuucuggguggaacugauucgaggcagaccagaggagaacacaaucuggaccagugggucuagcauuuccuuuuguggaguaaauucagacacuguuggcuggagcuggcccgauggugcagaacucccguucacaaucgacaaguga

SEQ ID NO: 153821 - RNA, 1410 nt, Artificial Sequence
  derived and/or modified CDS sequence (opt3) from neuraminidase__InfluenzaA__AIM56472
augaaccccaaucagaagaucauuaccauaggcagcgugugcaugacaaucgggauggccaaccugauucuccaaaucggaaauauuaucuccauaugggucucucacucaauccagauugguaaccagagucagaucgagacuuguaaucaaagcguuauuacguacgaaaacaauaccugggugaaccagacauauguaaauaucuccaacacuaauuucgcugcaggccagucuguggucucggugaaacuugccgggaacucaagccugugcccuguuaguggaugggcgauauacuccaaggacaauucugugagaauuggcagcaaaggugaugucuuugugaucagggagccauucauuuccuguucaccguuggaaugccggaccuuuuucuuaacacagggggcucugcuaaacgacaagcauaguaauggaaccaucaaagaucgcagccccuaucgaacucucaugucuuguccuaucggcgagguaccaucccccuacaacucacguuuugaaagcguugccuggagugcaucugccugcaacgacggcauuaauuggcugacaauagggaucuccggaccugauagcggugcuguggcaguccuuaaguauaacggcauuaucaccgacacgauaaagucguggagaaauaacauucugaggacucaagagucugagugugccugcgugaauggguccuguuucaccaucaugacagauggaccaucagacggccaggcuaguuacaaaaucuuucggauugaaaaggguaaaaucgucaagagcguggagaugaacgcccccaauuaucacuacgaagagugcuccuguuacccugauucuagcgagauuacuugcguuugccgcgacaacuggcaugggucaaauagaccaugggugaguuucaaccagaauuuggaauaucagauaggauacaucuguuccggcguauuuggcgauaacccgaggcccaaugacaaaaccgggagcugcggaccugugucuucaaacggugcgaauggcgucaagggguucaguuuuaaguauggaaacggcguguggauuggucggacaaaaagcaucuccucucgcaagggguucgagaugaucugggauccaaacggcuggaccggaacggacaauaaauuuucgauuaagcaagacauaguuggcaucaacgaauggagcggguacuccggaucauucgugcagcaccccgagcucacuggucuggauuguauucgaccuugcuucugggucgaacugaucagaggcaggccagaggagaauacaauuuggaccagugggucuagcaucuccuuuuguggagugaacucagacacuguaggcuggagcuggcccgauggugcagaacucccguucacaauagacaaauga

SEQ ID NO: 153822 - RNA, 1410 nt, Artificial Sequence; identical to SEQ ID NO: 153779
  derived and/or modified CDS sequence (opt3) from neuraminidase__InfluenzaA__AIM56483

SEQ ID NO: 153823 - RNA, 1410 nt, Artificial Sequence; identical to SEQ ID NO: 153802
  derived and/or modified CDS sequence (opt3) from neuraminidase__InfluenzaA__AIM56494

SEQ ID NO: 153824 - RNA, 1410 nt, Artificial Sequence; identical to SEQ ID NO: 153792
  derived and/or modified CDS sequence (opt3) from neuraminidase__InfluenzaA__AIM56505

SEQ ID NO: 153825 - RNA, 1410 nt, Artificial Sequence; identical to SEQ ID NO: 153791
  derived and/or modified CDS sequence (opt3) from neuraminidase__InfluenzaA__AIM56516

SEQ ID NO: 153826 - RNA, 1410 nt, Artificial Sequence
  derived and/or modified CDS sequence (opt3) from neuraminidase__InfluenzaA__AIM56527
augaaccccaaucagaagaucauuaccauaggcagcgugugcaugacaaucgggauggccaaccugauucuccaaaucggaaauauuaucuccauaugggucucucacucaauccagcuugguaaccagagucagauugagacuuguaaucaaagcguuaucacguacgaaaacaauaccugggugaaccagacauauguaaauauuuccaacacuaauuucgcugcagagcagucuguggucucggugaaacuggccggcaacagcagcuugugcccuguuagugggugggcgaucuacuccaaggacaauucugugagaauaggaagcaaaggcgaugucuuugugauuagggaaccauucaucuccuguucaccguuagagugccggaccuuuuuccugacacagggugcucuacucaacgacaagcauaguaaugggaccauuaaagaucgcagccccuaucgaacucugaugucuuguccuaucggagaaguaccaucccccuacaacucacguuuugagagcguugccuggagugcaucugccugccacgacggcaucaacuggcuuacaauuggcauauccgggccugauagcggagcuguggcaguccugaaguauaaugguaucauuaccgacacgaucaagucguggagaaacaauauauugaggacucaagagucugaaugugccugcgugaacggcuccuguuucaccauuaugacagaugggccaucagacggacaggcuaguuacaaaaucuuucggaucgagaagggcaaaauugugaagucagucgaaaugaaugcccccaacuaucauuacgaggagugcuccuguuacccugauucuagcgaaaucacuugcguuugccgcgacaauuggcacgguucaaacagaccaugggugaguuucaaucagaaccucgaguaucagauuggguacauauguuccggaguacugggcgauaauccgaggcccaacgacaaaaccggcagcugcgggccugugucuucaaauggagcgaacggugucaagggcuuuaguuucaaguaugggaauggaguguggaucggccggacaaaaagcauuuccucucgcaaggguuuugaaaugguuugggauccaaacggguggaccggcacggacaacaauuucucgaucaaacaagacaucgugggaauuaaggaguggagcggcuacuccgggucauuuguccagcaucccgaacugacuggacucgauuguauacgaccuugcuucuggguggaguuaaucagagguaggccagaggaaaacacaauuuggaccaguggcucuagcaucuccuucugugggguaaauucagacacuguuggauggagcuggcccgauggcgcagagcugccguuuacaauugacaaauga

SEQ ID NO: 153827 - RNA, 1410 nt, Artificial Sequence; identical to SEQ ID NO: 153773
  derived and/or modified CDS sequence (opt3) from neuraminidase__InfluenzaA__AIM56538

SEQ ID NO: 153828 - RNA, 1410 nt, Artificial Sequence
  derived and/or modified CDS sequence (opt3) from neuraminidase__InfluenzaA__AIM56549
augaaccccaaucagaagaucauuaccauaggcagcgugugcaugacaaucgggauggccaaccugauucuccaaaucggaaauauuaucuccauaugggucucucacucaauccagauugguaaccagagucagaucgagacuuguaaucaaagcguuauuacguacgaaaacaauaccugggugaaccagacauauguaaauaucuccaacacuaauuucgcugcaggccagucuguggucucggugaaacuugccgggaacucaagccugugcccuguuaguggaugggcgauauacuccaaggacaauucugugagaauuggcagcaaaggugaugucuuugugaucagggagccauucauuuccuguucaccguuggaaugccggaccuuuuucuuaacacagggggcucugcuaaacgacaagcauaguaauggaaccaucaaagaucgcagccccuaucgaacucucaugucuuguccuaucggcgagguaccaucccccuacaacucacguuuugaaagcguugccuggagugcaucugccugccacgacggcauuaacuggcugacaauagggaucuccggaccugauagcggugcuguggcaguccuuaaguauaauggcauuaucaccgacacgauaaagucguggagaaacaauauucugaggacucaagagucugagugugccugcgugaacggguccuguuucaccaucaugacagauggaccaucagacggccaggcuaguuacaaaaucuuucggauugaaaaggguaaaaucgucaagagcguggagaugaaugcccccaacuaucauuacgaagagugcuccuguuacccugauucuagcgagguuacuugcgugugccgcgacaauuggcacgggucaaacagaccauggguaaguuucaaucagaacuuggaauaucagauuggauacauauguuccggcguguuuggcgauaauccgaggcccaacgacaaaaccgggagcugcggaccugucucuucaaauggugcgaacggcgugaagggguucaguuuuaaguauggaaauggcguuuggaucggucggacaaaaagcauuuccucucgcaagggguucgagaugaucugggauccaaacggcuggaccggaacggacaacaaauuuucgaucaagcaagacauugugggcauaaaugaauggagcggguacuccggaucauucguccagcaucccgagcucacuggucuggauuguauccgaccuugcuucuggguggaacugauuagaggcaggccagaggagaacacaaucuggaccagugggucuagcauuuccuuuuguggaguaaauucagacacuguuggcuggagcuggcccgauggugcagaacucccguucacaaucgacaaauga

SEQ ID NO: 153829 - RNA, 1410 nt, Artificial Sequence
  derived and/or modified CDS sequence (opt3) from neuraminidase__InfluenzaA__AIM56560
augaaccccaaucagaagaucauuaccauaggcagcgugugcaugacaaucgggauggccaaccugauucuccaaaucggaaauauuaucuccauaugggucucucacucaauccagcuugguaaccagagucauauugagacuuguaaucagagcguuaucacguacgaaaacaauaccugggugaaccaaacauauguaaauauuuccaacacuaauuucgcugcaggccagucuguggucccugugaaacuggccgggaacucgucauugugcccaguuagcggaugggcgauccacaguaaggacaauuccgugagaauaggcucuaaaggugaugucuuugugauuagggagccguucaucagcuguucccccuuagaaugccggaccuuuuuccugacacagggggcucuacucaacgacaagcauucaaauggaaccauuaaagaucgcaguccuuaccgaacucugaugagcuguccaaucggcgagguacccucuccuuauaacucccguuuugaaucaguugccuggagcgcaagugccugccacgacggcaucaacuggcuuacaauugggauaucuggaccagauaauggugcuguggcaguccugaaguacaacggcaucauuaccgacacgaucaaguccuggagaaauaacauauugaggacucaggagagcgagugugccugcgugaaugggucguguuucaccauuaugacagauggacccucugacggccaggcuuccuauaaaaucuuucggaucgaaaaggguaaaauugugaagucagucgagaugaacgccccuaauuaccauuaugaagagugcaguuguuacccagauagcuccgagaucacuugcguuugccgcgacaacuggcacgggucuaauagaccgugggugagcuucaaccaaaaucucgaauaccagauuggauauauauguucaggcguauuuggcgauaaccccaggccuaaugacaaaaccgggaguugcggaccagugacauccaacggugcgaauggcgucaagggguucagcuuuaaguacggaaacggcguguggaucggucggaccaaaucuauuucaagucgcaagggguucgagaugaucugggaucccaacggcuggacgggaacugacaauaacuuuagcaucaaacaggacauuguuggcauaaaggaaugguccggguauucuggaucguucgugcaacacccugagcugacaggucuggauuguauccgaccaugcuucugggucgaacucauuagaggcaggcccgaggagaauaccaucuggacuagcggguccucaauuaguuuuuguggagugaacucugacacaguaggcuggagcuggccggauggugcagaauuaccuuucaccaucgacaaauga

SEQ ID NO: 153830 - RNA, 1410 nt, Artificial Sequence; identical to SEQ ID NO: 153779
  derived and/or modified CDS sequence (opt3) from neuraminidase__InfluenzaA__AIM56571

SEQ ID NO: 153831 - RNA, 1410 nt, Artificial Sequence
  derived and/or modified CDS sequence (opt3) from neuraminidase__InfluenzaA__AIM56582
augaaccccaaucagaagaucauuaccauaggcagcgugugcaucacaauugggauggccaaccugauccuccaaauuggaaauaucauauccaucugggucucucacucaauucagcuugguaaccagagucagaucgagacuuguaaucaaagcguuauuacguacgaaaacaauaccugggugaaccagacauauguaaauaucuccaacacuaauuucgcugcaggccagucuguggucucggugaaacuggccgggaacucaucauugugcccuguuaguggaugggcgauauacuccaaggacaauucugugagaauuggcagcaaaggugaugucuuugugaucagggagccauucauuuccuguucaccguuagaaugccggaccuuuuuccugacacagggggcucuacucaacgacaagcauaguaauggaaccaucaaagaucgcagccccuaucgaacucugaugucuuguccuaucggcgagguaccaucccccuacaacucacguuuugaaagcguugccuggagugcaucugccugccacgacggcauuaacuggcuuacaauagggaucuccggaccugauagcggugcuguggcaguccugaaguauaauggcauuaucaccgacacgauaaagucguggagaaacaauauuuugaggacucaagagucugagugugccugcgugaacggguccuguuucaccaucaugacagauggaccaucagacggccaggcuaguuacaaaaucuuucggauugaaaaggguaaaaucgucaagagcguggagaugaaugcccccaacuaucauuacgaagagugcuccuguuacccugauucuagcgagauuacuugcguuugccgcgacaauuggcacgggucaaacagaccaugggugaguuucaaucagaaccucgaauaucagauaggauacaucuguuccggcguauuuggcgauaauccgaggcccaacgacaaaaccgggagcugcggaccugugucuucaaauggugcgaacggcgucaagggguucaguuuuaaguauggaaauggcguguggauuggucggacaaaaagcaucuccucucgcaagggguucgagaugaucugggauccaaacggcuggaccggaacggacaacaauuuuucgauuaaacaagacauaguuggcaucaaggaauggagcggguacuccggaucauucgugcagcaucccgagcugacuggucuggauuguauucgaccuugcuucugggucgaacucaucagaggcaggccagaggagaacacaauuuggaccagugggucuagcaucuccuuuuguggagugaauagcgacacuguaggcuggagcuggcccgauggugcagaauuaccguucacaauagacaaauga

SEQ ID NO: 153832 - RNA, 1410 nt, Artificial Sequence
  derived and/or modified CDS sequence (opt3) from neuraminidase__InfluenzaA__AIM56593
augaaccccaaucagaagaucauuaccauaggcagcgugugcaugacaaucgggauggccaaccugauucuccaaaucggaaauauuaucuccauaugggucucucacucaauccagcuugguaaccagagucagauugagacuuguaaucaaagcguuaucacguacgaaaacaauaccugggugaaccagacauauguaaauauuuccaacacuaauuucgcugcagagcagucuguggucucggugaaacuggccggcaacucaucauugugcccuguuagugggugggcgaucuacuccaaggacaauucugugagaauaggaagcaaaggcgaugucuuugugauuagggaaccauucaucuccuguucaccguuagagugccggaccuuuuuccugacacagggugcucuacucaacgacaagcauaguaaugggaccauuaaagaucgcagccccuaucgaacucugaugucuuguccuaucggagaaguaccaucccccuacaacucacguuuugagagcguugccuggagugcaucugccugccacgacggcaucaacuggcuuacaauuggcauauccgggccugauagcggagcuguggcaguccugaaguauaaugguaucauuaccgacacgaucaagucguggagaaacaauauauugaggacucaagagucugaaugugccugcgugaacggcuccuguuucaccauuaugacagaugggccaucagacggacaggcuaguuacaaaaucuuucggaucgagaagggcaaaauugucaagagcguggaaaugaaugcccccaacuaucauuacgaggagugcuccuguuacccugauucuagcgaaaucacuugcguuugccgcgacaauuggcacgguucaaacagaccaugggugaguuucaaucagaaccucgaguaucagauuggguacauauguuccggaguacugggcgauaauccgaggcccaacgacaaaaccggcagcugcgggccugugucuucaaauggagcgaacggugucaagggcuuuaguuucaaguaugggaauggaguguggaucggccggacaaaaagcauuuccucucgcaaggguuuugaaaugaucugggauccaaacggguggaccgagacggacaacaauuucucgaucaaacaagacauuguuggcauaaaggaauggagcggauacuccggcucauuugugcagcaucccgagcugacugggcucgauuguauccgaccuugcuucugggucgaguuaauuagaggaaggccagaagagaacacaaucuggaccagugguucuagcauuuccuucuguggcgugaauagcgacacuguaggguggagcuggcccgauggagcagaacugccguuuacaaucgacaaauga

SEQ ID NO: 153833 - RNA, 1410 nt, Artificial Sequence
  derived and/or modified CDS sequence (opt3) from neuraminidase__InfluenzaA__AIM56604
augaaccccaaucagaagaucauuaccauaggcagcgugugcaugacaaucgggauggccaaccugauucuccaaaucggaaauauuaucuccauaugggucucucacucaauccagauugguaaccagagucagaucgagacuuguaaucaaagcguuauuacguacgaaaacaauaccugggugaaccagacauauguaaauaucuccaacauaaauuucgcugcaggccagucuguggucucggugaaacuugccgggaacucaagccugugcccuguuaguggaugggcgauuuacuccaaggacaauucugugagaaucggcagcaaaggugaugucuuugugauuagggagccauucaucuccuguucaccguuggaaugccggaccuuuuucuuaacucagggggcucugcuaaacgacaagcauaguaauggaacaaucaaagaucgcagccccuaucgaacccucaugucuuguccuauuggcgagguaccaucccccuacaacucacguuuugaaagcguugccuggagugcaucugccugccacgacggcauaaacuggcugacuaucgggauuuccggaccugauagcggugcuguggcaguccuuaaguauaauggcaucauaacagacaccauuaagucguggagaaacaauauccugaggacgcaagagucugagugugccugcgugaacggguccuguuucacuaucaugaccgauggaccaucagacggccaggcuaguuacaaaauuuuucggaucgaaaaggguaaaauugugaagucagucgagaugaaugcccccaacuaucauuacgaagagugcuccuguuacccugauucuagcgagauaacaugcguuugccgcgacaauuggcacgggucaaacagaccaugggugaguuucaaucagaacuuggaauaucagaucggauacauuuguuccggcguauuuggcgauaauccgaggcccaacgacaaaacugggagcugcggaccugugucuucaaauggugcgaacggcgucaagggguucaguuuuaaguauggaaauggcguguggaucggucggaccaaaagcaucuccucucgcaagggguucgagaugauuugggauccaaacggcuggacaggaaccgacaacaaauuuucgauaaagcaagacaucguuggcauuaaugaauggagcggguacuccggaucauucgugcagcaucccgagcucacgggucuggauuguauccgaccuugcuucugggucgaacugauuagaggcaggccagaggagaacacuaucuggacaagugggucuagcauauccuuuuguggagugaauagcgacaccguaggcuggagcuggcccgauggugcagaacucccguucacuaucgacaaauga

SEQ ID NO: 153834 - RNA, 1410 nt, Artificial Sequence
  derived and/or modified CDS sequence (opt3) from neuraminidase__InfluenzaA__AIM56615
augaaccccaaucagaagaucauuaccauaggcagcgugugcaugacaaucgggauggccaaccugauucuccaaaucggaaauauuaucuccauaugggucucucacucaauccagauugguaaccagagucagaucgagacuuguaaucaaagcguuauuacguacgaaaacaauaccugggugaaccagacauauguagacaucuccaauacuaacuucgcugcaggccagucuguggucucggugaaacuugccgggaauagcagccugugcccuguuaguggaugggcgauauacuccaaggauaacucugugagaauuggcagcaaaggugacgucuuugugaucagggagccauucauuuccuguucaccguuggaaugccggaccuuuuucuuaacacagggggcucugcuaaaugauaagcauaguaacggaaccaucaaagaccgcagccccuaucgaacucucaugucuuguccuaucggcgagguaccaucccccuacaauucacguuuugaaagcguugccuggagugcaucugccugccacgauggcauuaacuggcugacaauagggaucuccggaccugacagcggugcuguggcaguccuuaaguauaacggcauuaucaccgauacgauaaagucguggagaaauaacauucugaggacucaagagucugagugugccugcgugaauggguccuguuucaccaucaugacagacggaccaucagauggccaggcuaguuacaaaaucuuucggauugaaaaggguaaaaucgugaagucagucgagaugaacgcccccaauuaucauuacgaagagugcuccuguuacccugacucuagcgagauuacuugcguuugccgcgauaacuggcacgggucaaauagaccaugggugaguuucaaccagaauuuggaauaucagauaggauacaucuguuccggcguauuuggcgacaacccgaggcccaaugauaaaaccgggagcugcggaccugugucuucaaacggugcgaauggcgucaagggguucaguuuuaaguauagcaacggaguguggauuggccggacaaaauccaucucuucgcgcaaggguuucgagaugaucugggacccaaauggguggaccggcacggacaacaaauuuagcauuaagcaagauauaguuggaaucaacgaaugguccggcuacucagggaguuucgugcagcaucccgagcucacuggacuggacuguauucgaccuugcuucugggucgaacugaucagagguaggccagaggagaauacaauuuggaccucuggcagcuccaucucauuuuguggggugaacagcgauacuguaggauggucuuggcccgacggcgcagaacucccguucacaauagauaaauga

SEQ ID NO: 153835 - RNA, 1410 nt, Artificial Sequence; identical to SEQ ID NO: 153828
  derived and/or modified CDS sequence (opt3) from neuraminidase__InfluenzaA__AIM56626

SEQ ID NO: 153836 - RNA, 1410 nt, Artificial Sequence; identical to SEQ ID NO: 153773
  derived and/or modified CDS sequence (opt3) from neuraminidase__InfluenzaA__AIM56637

SEQ ID NO: 153837 - RNA, 1410 nt, Artificial Sequence; identical to SEQ ID NO: 153779
  derived and/or modified CDS sequence (opt3) from neuraminidase__InfluenzaA__AIM56648

SEQ ID NO: 153838 - RNA, 1410 nt, Artificial Sequence
  derived and/or modified CDS sequence (opt3) from neuraminidase__InfluenzaA__AIM56659
augaaccccaaucagaagaucauuaccauaggcagcgugugcaugacaaucgggauggccaaccugauucuccaaaucggaaauauuaucuccauaugggucucucacucaauccagcuugguaaccagagucauauugagacuuguaaucagagcguuaucacguacgaaaacaauaccugggugaaccaaacauauguaaauauuuccaacacuaauuucgcugcaggccagucuguggucccugugaaacuggccgggaacucgucauugugcccaguuagcggaugggcgaucuacaguaaggacaauuccgugagaauaggcucuaaaggugaugucuuugugauuagggagccguucaucagcuguucccccuuagaaugccggaccuuuuuccugacacagggggcucuacucaacgacaagcacucaaauggaaccauuaaagaucgcaguccuuaucgaacucugaugagcuguccaaucggcgagguacccucuccuuacaacucccguuuugaaucaguugccuggagcgcaagugccugccaugacggcaucaacuggcuuacaauugggauaucuggaccagauuccggugcuguggcaguccugaaguauaauggcaucauuaccgacacgaucaagagcuggagaaacaauauauugaggacucaggagucggagugugccugcgugaacgggucuuguuucaccauuaugacagauggacccuccgacggccaggcuucauacaaaaucuuucggaucgaaaaggguaaaauugugaagagugucgagaugaaugccccuaacuaucacuacgaagagugcagcuguuacccagauuccucugagaucacuugcguuugccgcgacaauuggcaugggagcaacagaccgugggugucauucaaucaaaaccucgaauaucagauuggauacauauguaguggcguauuuggcgauaaucccaggccuaacgacaaaaucggguccugcggaccagugagcucuaauggugcgaacggcgucaagggguucucauuuaaguauggaaauggcguguggauuggucggaccaaaaguaucagcucccgcaagggguucgagaugaucugggaucccaacggcuggacaggaaccgacaacaauuuuucuauuaaacaggacauaguuggcaucaaggaauggucgggguacagcggauccuucgugcaacacccugagcugacgggucuggauuguauucgaccaugcuucugggucgaacucaucagaggcaggcccgaggagaaaacuauuuggacaucagggaguucuaucagcuuuuguggagugaacuccgacaccguaggcuggucauggccggauggugcagaauuaccuuucacuauagacaaguga

SEQ ID NO: 153839 - RNA, 1410 nt, Artificial Sequence
  derived and/or modified CDS sequence (opt3) from neuraminidase__InfluenzaA__AIM56670
augaaccccaaucagaagaucauuaccauaggcagcgugugcaugacaaucgggauggccaaccugauucuccaaaucggaaauacuauuuccaucugggucucucacucaauacagaucgguaaccagagucagauugagacguguaaucaaagcguuaucaccuacgaaaacaauacaugggugaaccagacuuauguaaauauuuccaacaccaauuucgcugcaggccagucuguggucucggugaaacuugccgggaacucaagccugugcccuguuaguggaugggcgaucuacuccaaggacaauucugugagaauaggcagcaaaggugaugucuuugugauuagggagccauucaucuccuguucaccguuggaaugccggacauuuuucuuaacccagggggcucugcuaaacgacaagcauaguaauggaacuauuaaagaucgcagccccuaucgaacacucaugucuuguccuaucggcgagguaccaucccccuacaacucacguuuugaaagcguugccuggagugcaucugccugccacgacggcaucaacuggcugaccauugggauauccggaccugauagcggugcuguggcaguccuuaaguauaauggcaucauuacggacacuaucaagucguggagaaacaauauacugaggacccaagagucugagugugccugcgugaacggguccuguuucacaauuaugacugauggaccaucagacggccaggcuaguuacaaaaucuuucggaucgaaaaggguaaaauugugaagucagucgagaugaaugcccccaacuaucauuacgaagagugcuccuguuacccugauucuagcgagaucacuugcguuugccgcgacaauuggcacgggucaaacagaccaugggugaguuucaaucagaacuuggaauaucagauuggauacauauguuccggcguauuuggcgauaauccgaggcccaacgacaaaacagggagcugcggaccugugucuucaaauggugcgaacggcgucaagggguucaguuuuaaguauggaaauggcguguggaucggucggaccaaaagcauuuccucucgcaagggguucgagaugaucugggauccaaacggcuggacgggaacugacaacaaauuuucgaucaagcaagacauuguuggcauaaaugaauggagcggguacuccggaucauucgugcagcaucccgagcucacaggucuggauuguauccgaccuugcuucugggucgaacugauuagaggcaggccagaggagaacaccaucuggaccagugggucuagcauuuccuuuuguggagugaauagcgacacaguaggcuggagcuggcccgauggugcagaacucccguucaccaucgacaaauga

SEQ ID NO: 153840 - RNA, 1410 nt, Artificial Sequence; identical to SEQ ID NO: 153791
  derived and/or modified CDS sequence (opt3) from neuraminidase__InfluenzaA__AIM56703

SEQ ID NO: 153841 - RNA, 1410 nt, Artificial Sequence
  derived and/or modified CDS sequence (opt3) from neuraminidase__InfluenzaA__AIM56714
augaaccccaaucagaagaucauuaccauaggcagcgugugcaugacaaucgggauggccaaccugauucuccaaaucggaaauauuaucuccauaugggucucucacucaauccagauugguaaccagagucagaucgagacuuguaaucaaagcguuauuacguacgaaaacaauaccugggugaaccagacauauguaaauaucuccaacacuaauuucgcugcaggccagucuguggucucggugaaacuugccgggaacucaagccugugcccuguuaguggaugggcgauauacuccaaggacaauucugugagaauuggcagcaaaggugaugucuuugugaucagggagccauucauuuccuguucaccguuggaaugccggaccuuuuucuuaacacagggggcucugcuaaacgacaagcauaguaauggaaccaucaaagaucgcagccccuaucgaacucucaugucuuguccuaucggcgagguaccaucccccuacaacucacguuuugaaagcguugccuggagugcaucugccugccacgacggcauuaacuggcugacaauagggaucuccggaccugauagcggugcuguggcaguccuuaaguauaauggcauuaucaccgacacgauaaagucguggagaaacaauauucugaggacucaagagucugagugugccugcgugaacggguccuguuucaccaucaugacagauggaccaucagacggccaggcuaguuacaaaaucuuucggauugaaaaggguaaaaucgugaaguccgucgagaugaaugcccccaacuaucauuacgaagagugcuccuguuacccugauucuagcgagauuacuugcguuugccgcgacaauuggcacgggucaaacagaccaugggugaguuucaaucagaacuuggaauaucagauaggauacaucuguuccggcguauuuggcgauaauccgaggcccaacgacaaaaccgggagcugcggaccugugccaucuaauggugcgaacggcgucaagggguucucauuuaaguauggaaauggcguguggauuggucggacaaaaaguaucagcucccgcaagggguucgagaugaucugggaucccaacggcuggaccggaacggacaacaaauuuucuauuaagcaagacauaguuggcaucaaugaauggucgggguacagcggauccuucgugcagcauccugagcucacuggucuggauuguauucgaccaugcuucugggucgaacugaucagaggcaggcccgaggagaacacaauuuggaccucagggaguucuaucagcuuuuguggagugaauagcgacacuguaggcuggucauggccggauggugcagaacucccuuucacaauagacaaauga

SEQ ID NO: 153842 - RNA, 1410 nt, Artificial Sequence
  derived and/or modified CDS sequence (opt3) from neuraminidase__InfluenzaA__AIM56725
augaaccccaaucagaagaucauuaccauaggcagcgugugcaugacaaucgggauggccaaccugauucuccaaaucggaaauauuaucuccauaugggucucucacucaauccagauugguaaccagagucagaucgagacuuguaaucaaagcguuauuacguacgaaaacaauaccugggugaaccagacauauguaaauaucuccaacacuaauuucgcugcaggccagucuguggucucggugaaacuugccgggaacucaagccugugcccuguuaguggaugggcgauauacuccaaggacaauucugugagaauuggcagcaaaggugaugucuuugugaucagggagccauucauuuccuguucaccguuggaaugccggaccuuuuucuuaacacagggggcucugcuaaacgacaagcauaguaauggaaccaucaaagaucgcagccccuaucgaacucucaugucuuguccuaucggcgagguaccaucccccuacaacucacguuuugaaagcguugccuggagugcaucugccugccacgacggcauuaacuggcugacaauagggaucuccggaccugauagcggugcuguggcaguccuuaaguauaauggcauuaucaccgacacgauaaagucguggagaaacaauauucugaggacucaagagucugagugugccugcgugaacggguccuguuucaccaucaugacagauggaccaucagacggccaggcuaguuacaaaaucuuucggauugaaaaggguaaaaucgugaagucagucgagaugaaugcccccaacuaucauuacgaagagugcuccuguuacccugauucuagcgagguuacuugcgugugccgcgacaauuggcacgggucaaacagaccauggguaaguuucaaucagaacuuggaauaucagauuggauacauauguuccggcaucuuuggcgauaauccgaggcccaacgacaaaaccgggagcugcggaccugugucuucaaauggugcgaacggcgucaagggguucaguuuuaaguauggaaauggcguguggauuggucggacaaaaagcaucuccucucgcaagggguucgagaugaucugggauccaaacggcuggaccggaacggacaacaaauuuucgauuaagcaagacauaguuggcaucaaugaauggagcggguacuccggaucauucgugcagcaucccgagcucacuggucuggauuguauucgaccuugcuucugggucgaacugaucagaggcaggccagaggagaacacaauuuggaccagugggucuagcaucuccuuuuguggagugaauagcgacacuguaggcuggagcuggcccgauggugcagaacucccguucacaauagacaaauga

SEQ ID NO: 153843 - RNA, 1410 nt, Artificial Sequence; identical to SEQ ID NO: 153791
  derived and/or modified CDS sequence (opt3) from neuraminidase__InfluenzaA__AIM56736

SEQ ID NO: 153844 - RNA, 1410 nt, Artificial Sequence
  derived and/or modified CDS sequence (opt3) from neuraminidase__InfluenzaA__AIM56747
augaaccccaaucagaagaucauuaccauaggcagcgugugcaugacaaucgggauggccaaccugauucuccaaaucggaaauauuaucuccauaugggucucucacucaauccagauugguaaccagagucagaucgagacuuguaaucaaagcguuauuacguacgaaaacaauaccugggugaaccagacauauguaaauaucuccaacacuaauuucgcugcaggccagucuguggucucggugaaacuugccgggaacucaagccugugcccuguuaguggaugggcgauauacuccaaggacaauucugugagaauuggcagcaaaggugaugucuuugugaucagggagccauucauuuccuguucaaguuuggaaugccggaccuuuuucuuaacacagggggcucugcuaaacgacaagcauagcaauggaaccaucaaagaucgcucuccguaucgaacucucauguccugucccaucggcgagguaccuucaccauacaacagccguuuugaaaguguugccuggucugcauccgccugccacgacggcauuaacuggcugacaauagggaucagcggacccgauucgggugcuguggcaguccuuaaguauaauggcauuaucaccgacacgauaaagucuuggagaaacaauauucugaggacucaagaguccgagugugccugcgugaacgggucauguuucaccaucaugacagauggaccuagugacggccaggcuagcuacaaaaucuuucggauugaaaaggguaaaaucgugaaguccgucgagaugaaugccccaaacuaucauuacgaagagugcucuuguuaccccgauagcucagagauuacuugcguuugccgcgacaauuggcacgggaguaacagaccuuggguguccuucaaucagaacuuggaauaucagauaggauacaucuguagcggcguauuuggcgauaauccaaggccgaacgacaaaaccgggucuugcggacccgugucaaguaauggugcgaacggcgucaagggguucagcuuuaaguauggaaauggcguguggauuggucggacaaaauccaucucuucgcgcaagggguucgagaugaucugggauccuaacggcuggaccggaacggacaacaaauuuagcauuaagcaagacauaguuggcaucaaugaaugguccggguacucaggaaguuucgugcagcauccagagcucacuggucuggauuguauucgacccugcuucugggucgaacugaucagaggcaggccugaggagaacacaauuuggaccucugggagcuccaucucauuuuguggagugaauagcgacacuguaggcuggucuuggccagauggugcagaacuccccuucacaauagacaaauga

SEQ ID NO: 153845 - RNA, 1410 nt, Artificial Sequence; identical to SEQ ID NO: 153828
  derived and/or modified CDS sequence (opt3) from neuraminidase__InfluenzaA__AIM56758

SEQ ID NO: 153846 - RNA, 1410 nt, Artificial Sequence; identical to SEQ ID NO: 153791
  derived and/or modified CDS sequence (opt3) from neuraminidase__InfluenzaA__AIM56769

SEQ ID NO: 153847 - RNA, 1410 nt, Artificial Sequence
  derived and/or modified CDS sequence (opt3) from neuraminidase__InfluenzaA__AIM56780
augaaccccaaucagaagaucauuaccauaggcagcgugugcaugacaaucgggauggccaaccugauucuccaaaucggaaauauuaucuccauaugggucucucacucaauccagcuugguaaccagagucagauuggcacuuguaaucaaagcguuaucacguacgagaacaauaccugggugaaccagacauauguaaauauuuccaacacuaauuucgcugcagggcagucuguggucucggugaaacuggccggaaacagcucauugugcccuguuaguggcugggcgaucuacuccaaggacaauucugugagaauagguagcaaaggggaugucuuugugauuagggaaccauucaucuccuguucaccguuagagugccggaccuuuuuccugacacagggagcucuacucaacgacaagcauaguaauggcaccauuaaagaucgcagccccuaucgaacucugaugucuuguccuaucggcgaaguaccaucccccuacaacucacguuuugagagcguugccuggagugcaucugccugccacgacgggaucaacuggcuuacaauuggaauauccgguccugauagcggcgcuguggcaguccugaaguauaaugggaucauuaccgacacgaucaagucguggagaaacaauauauugaggacucaagaaucugagugugccugcgugaacggauccuguuucaccauuaugacagauggcccaucagacggucaggcuaguuacaaaaucuuucggaucgagaaggggaaaauuaucaagagcguggaaaugaaugcccccaacuaucauuacgaggaaugcuccuguuacccugauucuagcgagauuacuugcgucugccgcgacaauuggcacggaucaaacagaccauggguuaguuucaaucagaaccucgaguaucagauaggcuacaucuguuccggcguguuuggggauaauccgaggcccaacgacaaaaccggaagcugcgguccuguaucuucaaauggcgcgaacggggugaagggauucaguuuuaaguauggcaauggugucuggauugggcggacaaaaagcaucuccucucgcaagggcuucgaaaugaucugggauccaaacggauggaccggcacggacaacaaauuuucgauuaagcaagacauaguggggauccaugaguggagcggauacuccgguucauucguucagcaccccgaacugacuggccuggauuguauucgaccuugcuucuggguggagcucaucagagggaggccagaagagaauacaauuuggaccaguggaucuagcaucuccuuuuguggcgucaacucagacacuguggguuggagcuggcccgauggggcagaguuaccguucacaauagacaaauga

SEQ ID NO: 153848 - RNA, 1410 nt, Artificial Sequence
  derived and/or modified CDS sequence (opt3) from neuraminidase__InfluenzaA__AIM56791
augaaccccaaucagaagaucauuaccauaggcagcgugugcaugacaaucgggauggccaaccugauucuccaaaucggaaauauuaucuccauaugggucucucacucaauccagcuugguaaccagagucagauugagacuuguaaucaaagcguuaucacguacgaaaacaauaccugggugaaccagacauauguaaauauuuccaacacuaauuucgcugcaggccagucuguggucucggugaaacuggccgggaacagcucauugugcccuguuaguggaugggcgaucuacuccaaggacaauucugugagaauaggcagcaaaggugaugucuuugugauuagggagccauucaucuccuguucaccguuagaaugccggaccuuuuuccugacacagggggcucuacucaacgacaagcauaguaauggaaccauuaaagaucgcagccccuaucgaacucugaugucuuguccuaucggcgagguaccaucccccuacaacucacguuuugaaagcguugccuggagugcaucugccugccacgacggcaucuccuggcuuacaauugggauaagcggaccugauucgggugcuguggcaguccugaaguauaacggcaucauuaccgacacgaucaagucuuggagaaauaacauauugaggacucaagaguccgagugugccugcgugaaugggucauguuucaccauuaugacagauggaccaagugacggccaggcuagcuacaaaaucuuucggaucgaaaaggguaaaauugugaaguccgucgagaugaacgcccccaauuaucauuacgaagagugcucuuguuacccugauagcucagagaucacuugcguuugccgcgacaacuggcacgggaguaauagaccauggguguccuucaaccagaaucucgaauaucagauuggauacauauguagcggcguauuuggcgauaacccgaggcccaaugacaaaaccgggucuugcggaccugugucaaguaacggugcgaauggcgucaagggguucagcuuuaaguauggaaacggcguguggaucggucggacaaaauccauuucuucgcgcaagggguucgagaugaucugggauccaaauggcuggaccggaacggacaacaacuuuagcaucaaacaagacauuguuggcauaaaggaaugguccggguacucaggaaguuucgugcagcaucccgagcugacuggucuggauuguauccgaccuugcuucugggucgaacucauuagaggcaggccagaggagaauacaaucuggaccucugggagcuccauuucauuuuguggagugaacagcgacacuguaggcuggucuuggcccgauggugcagaauuaccguucacaaucgacaaauga

SEQ ID NO: 153849 - RNA, 1410 nt, Artificial Sequence
  derived and/or modified CDS sequence (opt3) from neuraminidase__InfluenzaA__AIM56813
augaaccccaaucagaagaucauuaccauaggcagcgugugcaugacaaucgggauggccaaccugauucuccaaaucggaaauauuaucuccauaugggucucucacucaauccagauugguaaccagagucagaucgagacuuguaaucaaagcguuauuacguacgaaaacaauaccugggugaaccagacauauguaaauaucuccaacacuaauuucgcugcaggccagucuguggucucggugaaacuugccgggaacucaagccugugcccuguuaguggaugggcgauauacuccaaggacaauucugugagaauuggcagcaaaggugaugucuuugugaucagggagccauucauuuccuguucaccguuggaaugccggaccuuuuucuuaacacagggggcucugcuaaacgacaagcauaguaauggaaccaucaaagaucgcagccccuaucgaacucucaugucuuguccuaucggcgagguaccaucccccuacaacucaaaguuugaaagcguugccuggagugcaucugccugccacgacggcauuaacuggcugacaauagggaucuccggaccugauaauggugcuguggcaguccuuaaguauaacggcauuaucaccgacacgauaaaaagcuggcguaauaacauucugagaacucaagagucggagugugccugcgugaaugggucuuguuucaccaucaugacagauggaccauccgacggccaggcuucauacaagaucuuuaggauugaaaaagguaagaucgugaaaagugucgagaugaacgcccccaauuaucauuacgaagagugcagcuguuacccugauuccucugagauuacuugcguuugccgggacaacuggcacgggagcaaucgcccaugggugucauucaaccagaauuuggaauaucagauaggauacaucuguaguggcguauuuggcgauaacccgagacccaaugacaagaccggguccugcggaccugugagcucuaacggugcgaauggcgucaagggguucucauuuaaauauggaaacggcguguggauugguaggacaaagaguaucagcucccggaaaggguucgagaugaucugggauccaaacggcuggaccggaacggacaauaaguuuucuauuaaacaagacauaguuggcaucaacgaauggucgggguacagcggauccuucgugcagcaucccgagcucacuggucuggauuguauucgcccuugcuucugggucgaacugauccgaggcagaccagaggagaauacaauuuggaccucagggaguucuaucagcuuuuguggagugaacuccgacacuguaggcuggucauggcccgauggugcagaacucccguucacaauagacaaguga

SEQ ID NO: 153850 - RNA, 1410 nt, Artificial Sequence
  derived and/or modified CDS sequence (opt3) from neuraminidase__InfluenzaA__AIM56824
augaaccccaaucagaagaucauuaccauaggcagcgugugcaugacaaucgggauggccaaccugauucuccaaaucggaaauauuaucuccauaugggucucucacucaauccagauugguaaccagagucagaucgagacuuguaaucaaagcguuauuacguacgaaaacaauaccugggugaaccagacauauguaaauaucuccaacacuaauuucgcugcaggccagucuguggucucggugaaacuugccgggaacucaagccugugcccuguuaguggaugggcgauauacuccaaggacaauucugugagaauuggcagcaaaggugaugucuuugugaucagggagccauucauuuccuguucaccguuggaaugccggaccuuuuucuuaacacagggggcucugcuaaacgacaagcauaguaauggaaccaucaaagaucgcagccccuaucgaacucucaugucuuguccuaucggcgagguaccaucccccuacaacucacguuuugaaagcguugccuggagugcaucugccugccacgacggcauuaacuggcugacaauagggaucuccggaccugauagcggugcuguggcaguccuuaaguauaauggcauuaucaccgacacgauaaagucguggagaaacaauauucugaggacucaagagucugagugugccugcgugaacggguccuguuucaccaucaugacagauggaccaucagacggccaggcuaguuacaaaaucuuucggauugaaaaggguaaaaucgugaagucagucgagaugaaugcccccaacuaucauuacgaagagugcuccuguuacccugauucuagcgagauuacuugcguuugccgcgacaauuggcacgggucaaacagaccaugggugaguuucaaucagaacuuggaauaucagauaggauacaucuguuccggcguauuuggcgauaauccgaggcccaacgacaaaaccgggagcugcggaccugugccaucuaauggugcgaacggcgucaagggguucucauuuaaguauaguaauggaguguggauuggccggacaaaaagcaucuccucucgcaaggguuucgagaugaucugggaucccaacggguggaccggcacggacaacaaauuuucgauuaagcaagacauaguuggaaucaaugaauggagcggcuacuccgggucauucgugcagcauccugagcucacuggacuggauuguauucgaccaugcuucugggucgaacugaucagagguaggcccgaggagaacacaauuuggaccaguggcucuagcaucuccuuuuguggggugaauagcgacacuguaggauggagcuggccggauggcgcagaacucccuuucacaauagacaaauga

SEQ ID NO: 153851 - RNA, 1398 nt, Artificial Sequence
  derived and/or modified CDS sequence (opt3) from neuraminidase__InfluenzaA__AIN76385
augaaccccaaucagaagauccugugcaccagcgccacagcuauuauaaucggcgcaauugccgugcucaucgggauugcgaaccuuggacugaauaucgguuugcacuuaaaaccuggcuguaacugcucccauucucaaccagggacuacgaauaccucacagacaauaaucaacaauuacuauaacgagacuaauauuaccaacauccagauggaagagagaacaaguaggaauuucaacagccugaccaagggacuauguacuauuaauuccuggcacaucuacggcaaagacaacgcuguccggauaggugaaucuucggauguucucgugacacgcgagccguauguaucaugcgaccccgaugaaugucgauuuuacgcccugagccaggggaccacgauucguggaaagcauaguaauggcacuauccacgacagaucccaauauagggcacuuauuucuuggccucugagcuccccacccaccguguacaacucacgggucgagugcaucggcuggaguagcacaucuugucaugaugggaaaucccgcaugucaaucugcauuagcggaccuaacaauaacgccagugcugugguuugguauaauagaaggccaguggcagagauaaacacuugggcccggaauaucuugcgcacccaggaaucugagugugucugccacaacgguauuugucccaucguguucacagacggcuccgcuaccgggccugccgauacgcgaauauacuacuuuaaggaaggaaagauucucaaaugggagagccugacuggcacagcgaagcacaucgaggaaugcucgugcuauggugagagaaccgggaucacuuguacaugcaaagacaauuggcagggaucuaacaggccaguaauucagaucgauccgguugcaaugacccauacgucccaauacauuuguucacccgugcugaccgacacaccucggccaaaugaucccaacauaggcaagugcaaugacccuuauccaggcaacaauaacaauggggucaaaggauucaguuaccucgauggugccaacacuugguuaggccguaccaucagcacagcuucccgcucuggguaugaaaugcugaaggugcccaacgcccuuacugacgacagaagcaagccgauucagggacagaccaucguguugaaugcagauuggucaggcuacagugguuccuuuauggacuauugggcugagggggauuguuacagggccugcuucuacgucgaacugauccggggccgaccuaaagaggacaagguuugguggacaagcaacucuauugugucaauguguaguagcaccgaguuucuaggacaguggaauuggcccgauggcgcgcgcauagaauauuuccucuga

SEQ ID NO: 153852 - RNA, 1410 nt, Artificial Sequence; identical to SEQ ID NO: 142135
  derived and/or modified CDS sequence (opt3) from neuraminidase__InfluenzaA__AIP93105

SEQ ID NO: 153853 - RNA, 1410 nt, Artificial Sequence
  derived and/or modified CDS sequence (opt3) from neuraminidase__InfluenzaA__AIP93117
augaaccccaaucagaagaucauuaccauaggcagcgugucccugacaaucgccacugucugcuuccucaugcaaauugcuauccuugcaacgaccguuacacugcacuuuaaacagcaugagugugacucuccugccucaaaccaggugaugccaugcgaaccgauuaucauagagagaaauaucacugaaauuguauacuugaacaauaccacaaucgagaaggaaauuugucccgagguggucgaguauaggaacuggaguaaaccucagugccaaaucaccggguucgcgccauuuagcaaggauaauuccauacgguuaucugcuggaggugacauuugggugacucgcgaacccuacguuucgugugauccuggcaaaugcuaucaguucgcccuggggcagggaacaacccuagacaacaagcacucaaauggcacgauccaugaucguauuccacaccgaacucuccugaugaacgagcuuggugugcccuuucaucuggggaccaagcaggucuguguggcauggagcaguuccucuugccacgacggaaaagccugguugcacguauguguuacaggcgaugacagaaaugcuacugccagcuucaucuacgauggcaggcucguggacuccaucgggucauggagucaaaacauucugcggacccaggaaagcgagugcgucuguauaaauggaacaugcaccguggugaugacggaugguucugcauccggccgcgcugacacuagaauccuguuuauuaaggaggggaaaaucguccauauaucaccucucagcggaagugcccagcacauugaagagugcucuuguuauccaagguacccggauguucggugcaucugucgcgacaacuggaagggcuccaaucgacccgugaucgacauuaacauggaagauuauagcaucgacucgucuuacguaugcuccgguuuagugggggauacaccuagaaacgacgauucaaguagcaauuccaacuguagggacccaaauaacgagcggggaaaucccggcgucaaaggcugggcguucgauaacggggacgauguguggaugggacguaccauuucuaaggaccugcgcagcgguuacgaaacuuuuaagguuauaggcggguggucaacaccuaauaguaaaucccaggugaacagacaagucaucguggauaauaacaauuggagcggauauucuggcauuuucucaguagaggguaagaguugcaucaacagguguuuuuacguugagcuuauccgggggcgaccacaggaaacccgcgugugguggacgagcaauuccauugucguguucugcggcaccucuggaacauauggcacugggucguggcccgacggagcaaacauaaauuuuaugccgaucuga

SEQ ID NO: 153854 - RNA, 1410 nt, Artificial Sequence
  derived and/or modified CDS sequence (opt3) from neuraminidase__InfluenzaA__AIR93973
augaaccccaaucagaagaucauuaccauaggcagcgugugcaugacaaucgggauggccaaccugauucuccaaaucggaaauauuaucuccauauggaucucucacucaauucagcuugguaguagaaaccagaucgaggcuuguaaucagagcgucauuacuuacgaaaacaauacguggguuaaccaaaccuaugugaauaucuccaacacaaauuucgcagccggccagucuguagugccugucaaacuggcggggaacucgucauugugcccagugagcggaugggcuauauacaguaaggacaauuccauuaggaucggcucuaaaggugauguuuuugugauucgggagccguucaucagcuguucccccuuagaaugccgcaccuuuuuccugacucagggggcccuacucaacgacaagcauucaaauggaacaaucaaagaucgaaguccuuaucguacccugaugagcuguccaauuggcgagguccccucuccuuacaacuccagauuugaaucaguggcauggagcgccagugcuugccacgacggcauaaacuggcuuacuaucgggauuucuggaccagauaauggugcaguagccguucugaaguauaacggcaucauaacagacaccauuaaguccuggaggaauaacaucuugcggacgcaggagagcgagugugugugcgucaaugggucguguuucacugugaugaccgauggacccucuaacggccaggcuuccuacaaaaucuuucgcauugaaaaggguaaaaucgugaagucagucgagaugaaugccccuaacuaucauuacgaagagugcaguuguuacccagacagcuccgagauuacaugcguuugcagagauaauuggcacgggucuaacaggccgugggugagcuucaaucaaaaccucgaauaucagauaggauacaucuguucaggcauuuuuggcgacaauccccggccuaacgauaaaacugggaguugcggaccaguauccagcaauggugcgaacggcgugaagggguucucuuuuaaguauggaaacggcgucuggaucggucgcaccaaaucaaucaguagccgaaauggguucgagaugauuugggaccccaacggcuggacagaaaccgauaauaacuuuuccauaaagcaggacaucgugggaauuaaugaguggucuggcuacucggggagcuucguucaacauccugaacugacgggacuggacuguaucagaccaugcuucuggguggagcucauuaggggucggcccaaagagaacacuaucuggacauccggcucaaguauaucuuuuuguggggucaauagcaacaccgugggaugguccuggccggauggcgcagaauuaccuuucacuaucgacaaguga

SEQ ID NO: 153855 - RNA, 1410 nt, Artificial Sequence
  derived and/or modified CDS sequence (opt3) from neuraminidase__InfluenzaA__AIR93984
augaaccccaaucagaagaucauuaccauaggcagcgugugcaugacaaucgggauggccaaccugauucuccaaaucggaaauauuaucuccauauggaucucucacucaauucagcuugguaaccagaaucagaucgagacuuguaaccaaagugucauuacguacgaaaauaacaccuggguuaaucagacauaugugaacaucagcaauacuaacuucgcugcaggccaguccguagugucugucaaacuggccggaaauucgucauugugcccugugagcggaugggcgauauacaguaaggacaacuccauuagaaucggcucuaaaggugauguuuuugugauuagggagccauucaucagcuguuccccguuagaaugccggaccuuuuuccugacacagggggcucuacucaaugacaagcauucaaacggaaccaucaaagaucgcagucccuaucgaacucugaugagcuguccuauuggcgaggucccaucucccuacaacucccguuuugaaucaguggccuggagcgcaagugccugccacgacggcauaaauuggcuuacaaucgggauuucuggaccugauaacggugcuguagcaguucugaaguauaauggcaucauaaccgacacgauuaaguccuggagaaacaauaucuugaggacucaagagagcgagugugccugcgugaacgggucguguuucaccgucaugacagauggaccaucuaauggccaggcuuccuacaaaaucuuucggauugaaaaggguaaaaucgugaagucaguggagauuaacgcccccaauuaucauuacgaagagugcaguuguuacccugacagcuccgagauaacuugcgucugccgcgauaacuggcacgggucuaauagaccauggguuagcuucaaccagaaucucgaauaucagaucggauacauuuguucaggcaucuuuggcgacaacccgaggcccaaugauaaaaccgggaguugcggaccuguguccagcaacggugcgaacggcguaaagggguucucuuuuaaguauggaaauggcguguggaucggucggacaaaaucaauuaguagccgcaacggguucgagaugauaugggacccaaauggcuggaccggaacggauaacaauuuuuccaucaagcaagacauugucggcaucaacgaauggucuggguacucggggagcuucgugcagcaucccgagcugacuggucugggcuguauucgaccuugcuucuggguugaacucaucagagggaggccaaaagagaauacaauauggaccuccggaucaaguaucucuuuuuguggcgugaacagcgacacugucgguugguccuggcccgauggggcagaguuaccguucacaauugacaaguga

SEQ ID NO: 153856 - RNA, 1410 nt, Artificial Sequence
  derived and/or modified CDS sequence (opt3) from neuraminidase__InfluenzaA__AIR93995
augaaccccaaucagaagaucauuauaaucggcagcgugugcaugaccauugggauggccaaccugauccuccaaauuggaaauaucauauccaucuggauuucucacucaauccagcuugguaaccagaaucagauugagacauguaaccaaagugucaucacuuacgaaaauaacacguggguuaaucagaccuaugugaacauaagcaauacaaacuucgcugcaggccaguccguagugccugucaaacuggccggaaauucuucguugugcccagugucagggugggcgauuuacagcaaggacaacaguaucagaauuggcuccaaaggugauguuuuugugaucagggagccguucaucucuuguagccccuuagaaugccggaccuuuuuccugacucagggggcucuacucaaugacaagcauuccaacggaacaauuaaagaucgcucaccuuaucgaacccugaugaguuguccaauaggcgagguccccagcccuuacaacucucguuuugaauccguggccuggucagcaagcgccugccacgacggcaucaauuggcuuacuauugggaucaguggaccagauaacggugcuguagcaguucugaaguauaauggcauaauuacagacaccaucaagucuuggaaaaacaauaucuugagaacgcaagaguccgagugugugugcgucaacgggagcuguuucacugugaugaccgauggacccucgaauggccaggccucuuacaagauuuuuaggaucgaaaaagguaagauugugaaauccgucgagaugaacgcuccuaauuaucauuacgaagagugcucauguuacccagacaguagcgagauaacaugcguuugccgggauaacuggcacggguccaaucgcccgugggugucuuucaaccagaaucucgaauaucagaucggauacauuuguagcggcguauuuggcgacaaccccagaccuaaugauaagacugggucaugcggaccagugaguuccaacggugccaacggcgucaagggguucagcuuuaaauauggaaauggcguguggaucgguaggaccaagucuaucucaagucggaacggguucgagaugauuugggaccccaauggcuggacaggaaccgauaacaauuuuagcauaaaacaagacaucauuggcaucaacgaaugguccggguacucuggaucguucguucagcauccugagcugacggguauggacuguauucgcccaugcuucuggguggaacugauccgaggcagacccaaggagaauacuauauggacaagcggguccucaaucaguuuuuguggagucaacucugauaccgugggcuggagcuggccggacggugcggagcucccuuucacuauugauaaauga

SEQ ID NO: 153857 - RNA, 1401 nt, Artificial Sequence
  derived and/or modified CDS sequence (opt3) from neuraminidase__InfluenzaA__AIR94118
augaaccccaaucagaagaucauugccauaggcagcgugucccugaucauugcuaucauuugccuccuuaugcaaaucgcaauacugaccacaacuaugacguugcacuucagacagaacgaguguaauaacucuucaaauaaccaggucaugccuugcgaaccaaucauuaucgagaggaauaccguucauuuaaacaguacaacuauugaacgggagaucuguccgaaaguggccgaauacaagaauuggagcaaaccccagugccaaauaaccggguuugcgccuuucuccaaggacaacucuauucgccugucggcuggaggugauaucuggguaacacgagagccauaugugucauguagccuagacaaaugcuaccaguuugcccucggccaggggaccacucugaagaauaagcacaguaacggaacaacccaugaucguacgccccacagaacucuucugaugaaugaguugggcgucccuuuccaucucgguaccaaacagguguguauugcaugguccucuagcuccugcuaugacgggaaggccuggcugcacaucuguguuacaggagaugacaaaaacgcuacugcaucaaucauuuacaauggcaugcugguggauaguauaggcagcuggucuaagaacauccucaggacccaagaauccgagugcgucuguauuaacgggacaugcgccgugguaaugaccgacggaucagcuagcgguaaagccgauacgcggguuuuauuuaucaaggaaggcaagauaauuaauaucaguccacugucuggguccgcgcagcacguggaggagugcagcuguuauccccgcuacccugaagucagaugcguguguagggacaacuggaaaggaucgaaucggccaauccuuuauauuaacauggcagauuacucuaucgaguccucauacgugugcaguggcuuggucggugacacuccgcgcaaugaugacagcuccucuagcucaaacuguaaggaccccaauagugaacgaggggccccuggaguuaaaggcugggcuuucgaugacggcaacgauguguggauggggagaacaauuaagaauggauccaggagcgguuaugagaccuuucggguagugaacggcuggacugucgccaauucuaaaucacaggugaaccgucagguuauaguggacagugaugacuggagcggguacuccggaaucuucucugucgaaggcaagaaaugcauuaaucgcuguuuuuauguggagcugaucagagguaggccacaagagccccggguaugguggacaucgaacagcaucauuguuuucugcgggaccuccggcacguacggaaccggcucauggccugauggggcaaauauaaacuuuaugccaaucuga

SEQ ID NO: 153858 - RNA, 1410 nt, Artificial Sequence
  derived and/or modified CDS sequence (opt3) from neuraminidase__InfluenzaA__AIT38335
augaaccccaaucagaagaucauuaccauaggcagcgugucccugacaaucgccacuauuugcuuccucaugcaaaucgcuauucuugucacgaccguuacacugcacuuuaaacaguacgaguguaacucuccuccaacuaaucaggugauguugugcgaaccgaccaucauagagagaaacaucacagaaauuguauauuuaaccaauacuacaaucgagaaggaaauuugucccaaacugguggaguacaggaacuggucaaagccucagugcaaaaucaccggguucgcaccauuuaguaaggacaauagcauacggcuauccgccggaggugauauuugggucacgcgcgagcccuaugugucuugugacccugauaagugcuaccaauucgcgcucggccaggggacuacccugaacaaucgacauucgaacgacacaguucacgaucguacuccauauagaacccuucugaugaaugaauugggaauccccuuucaucucggcacaaaacagguguguauugcuuggucaagcaguuccugccacgacgguaaggccuggcugcaugucugugugaccgggcacgaugagaacgcaacggccucuuucaucuacgacggaaggcugguagauagcaucguuuccuggucaaaacggauucuccgcacucaggaaagugagugcguguguauagacggcacaugcaccgucgugaugacugauggcagcgcuucugggagagcagacacaaggaucuuauuuauuaaggagggaaaaaucauacacauuucccaacugucagguagcgcccagcauguggaagagugcaguuguuauccucgguacccaggcguccgcugcguuugucgagauaauuggaaggggucuaacagaccgaucguggacaucaauguaaaggacuacuccauuaacagcucguaugugugcucuggacuugucggcgauacccccaggaaaaacgacuccuucucaaguagcuacuguuugaauccuaacaaugaagagggugggcacggagugaagggcugggcuuuugaugacggcgaugacguuuggauggggcggacgaucaacgaaaaacugcguuccggauaugagaccuucaaggugauuaaagguuggucuaagccaaauagcaaacuacagauaaaccgccaggucaucguggauagaggcaauaggucaggguacaguggaaucuuuuccguagagggcaaggguugcauuaaccgguguuucuauguugaacucauccgagggcgcaagcaagagacagaagugugguggacuagcaauucuauugucguguuuugcggcaccucaggaacauacggcacugggaguuggcccgacggagccaacauaaaucugaugccuaucuga

SEQ ID NO: 153859 - RNA, 1410 nt, Artificial Sequence
  derived and/or modified CDS sequence (opt3) from neuraminidase__InfluenzaA__AIT38346
augaaccccaaucagaagaucauuaccauaggcagcaucucccugacaauugccacuaucugcuuccuccuucaaguggcuauucuggucacgaccguuacauugcacuuuaaacaguucgaguguaacccuacuccaaauaaccaggugauguuaugcgaaccgaccguaaucgagagaaauauaacaaagaucguguaccugaccaacacuacagucgaaaaagagauuugucccaagccugcagaauauaggaauuggucuaaaccacagugcaagaucaccggguuugcccccuucucaaaggacaacaguauucggcuaagcgcgggaggugauaucugggugacgcgcgagccuuacguuuccugugcuccaaauaaaugcuaucaauuugcccucggccaggggacuacccugaacaaucgacauucuaacgacacagugcacgaucguacucccuacagaacccuucugaugaaugaguugggaauaccuuuccaucucggcacaaagcaggucuguauugcauggucgucaagcaguugccacgacgguaaagccuggcugcauguguguguaaccgggcacgauaagaacgcuacggcauccuuuaucuaugacggaaggcugguugauucuauuggcagcugguccaaaaauauccuccggacucaggaaucagagugcguguguaucaacggcacaugcaccgucgugaugacugacgggagugccagcggacgcgcugauacaaagauuuuauucauaaaggaagguaaaaucauucacaucucucaacuguccggcucagcccagcauguggaggagugcagcuguuacccaagauauccgggggucaggugcguuugucgggacaacuggaagggaaguaaucgccccauaguggauauuaacguacgagacuacucuaucguguccagcuacgucugcucgggccuugugggugauaccccuaggaaaaaugacucuuuuuccucaagucacuguuugaacccaaauaacgaagaagggggacauggcguuaagggcugggcguucgacgauggggacgauguguggaugggaagaacgaucagcgagaaacugcgguccgguuaugagaccuuuaaggucauuaaaggcuggucuaagcccaauagcaagcuacagaucaaccgucaggugauuguagaccgcgggaauagaucaggauacaguggcauauucuccguugaagguaaaagcugcaucaacagguguuuuuauguggagcucauucgggggcgaaagcaagagacagaagucugguggacuucuaauucaaucguggucuucugcggcaccaguggaacauacggcacugggagcuggccugauggagcagacaucaaccugaugccaauuuga

SEQ ID NO: 153860 - RNA, 1410 nt, Artificial Sequence
  derived and/or modified CDS sequence (opt3) from neuraminidase__InfluenzaA__AIT38361
augaaccccaaucagaagaucauuaccauaggcagcaucucccugacaauugccacuaucugcuuccucaugcaaguggcuauucuugucacgaccguuacacugcacuuuaaacaguacgaguguaacucuacuccuaauaaccaggugauguugugcgaaccaaccguaaucgagagaaauauaacaaagaucguguauuuaaccaacacuacagucgugaaagaaguuuguccgaagcccgcagaguacaggaauuggucaaaaccucagugcaagauuaccggguucgccccauuuaguaaggacaacagcauccggcuguccgcgggaggugauauuugggugacgcgcgaacccuaugucucuugugcuccuaauaaaugcuaccaauucgcccuaggccaggggacuacccucaacaaucgacauucgaacgacacagugcacgaucguacuccauauagaacccugcuuaugaaugagcugggaauccccuuucauuugggcacaaagcagguauguauagcauggucaagcaguuccugcuacgacgguaaagccuggcuccacguuugugugaccgggcaugauaagaacgcuacggcaucuuucauuuaugacggaaggcuggucgauagcaucggcuccuggaguaaaaauauucugcggacucaggagucagaaugcguguguaucaacggcacaugcaccguggucaugacugacgggagcgccucuggacgcgcugauacaaagauccucuuuauuaaggaggguaaaauaauccacauuucccaauuaucaggcagcgcccagcacguugaagagugcaguuguuacccuagauacccaggggugaggugcguaugucgggacaacuggaagggaucuaaucgcccgaucguggauauaaacaugcgagacuauuccauugucagcucguacgugugcucuggccugguuggugauacccccagagagaaugacuccuucucaaguagccauugucuuaacccuaauaacgaagaagggggacacggcgugaaaggcugggcguuugacgauggggacgaugucuggaugggaaggacgaucuccgagaaguugcggucugguuaugagaccuucaaagugaucaagggcuggagcaaaccaaauucaaagcugcagauuaaccgucagguaaucguugaccgcgggaauagaaguggauacuccggcauuuuuagcguggaagguaagucuugcauaaacagguguuucuaugucgagcuaauccgggggcgaaaacaagagacagaagugugguggacuucaaauaguauugucguguuuugcggcaccagcggaacauacggcacuggguccuggcccgauggagcagacaucaaccucaugccuaucuga

SEQ ID NO: 153861 - RNA, 1410 nt, Artificial Sequence
  derived and/or modified CDS sequence (opt3) from neuraminidase__InfluenzaA__AIT38375
augaaccccaaucagaagaucauuaccauaggcagcgugugcaugacaaucgggauggucaaccugauucuccaaaucggaaauauuaucuccauauggaucucucacucaauucagcuugguaaccagaaucagaucgagauuuguaaccaaaguguuaucacuuacgaaaauaacacgugggugaaucagaccuauguaaacauaagcaauacaaacuucgccgcuggccaguccguggucccugugaaacuggcaggaaauucuucguugugcucaguuagcggaugggccauuuacaguaaggacaacuccaucagaauuggcucuaaaggugauguguuugucaucagggagccauucaucagcuguuccccguuagaaugccggaccuuuuuccugacucagggggcgcuacucaaugacaagcauucaaacggaacaauuaaagaucgcagucccuaucgaacccugaugagcuguccuauaggcgaggugccaucucccuacaacucccguuuugaaucaguagcuuggagcgccagugcaugccacgacggcaucaauuggcuuacuauugggaucucuggaccugauaacggugccguugcugugcugaaguauaauggcauaauuacagacaccaucaaguccuggagaaacaauaucuugaggacgcaagagagcgagugugcaugcgucaacgggucguguuucacugugaugaccgauggaccaucugacggccaggccuccuacaaaauuuuucggaucgaaaaggguaaaauugugaagucagucgagaugaaugcucccaacuaucauuacgaagagugcaguuguuacccugauagcuccgagauaacaugcguuugccgcgacaauuggcacgggucuaacagaccaugggugagcuucaaucagaaccucgaauaucagaucggauacauuuguucaggcaucuuuggcgauaauccgaggcccaacgacaaaacugggaguugcggaccuguauccagcaauggugccaacggcgugaagggguucucuuuuaaguauggaaacggcgucuggaucggucggaccaaaucaauuaguagccgcaauggguucgagaugauaugggauccaaacggcuggacaggaaccgacaauaacuuuuccaucaagcaagacauugugggcaucaaugaauggucuggguacucggggagcuucguucagcaucccgagcugacgggucuggauuguauucgaccuugcuucuggguggaacucaucagaggcaggccaaaagagaacacuauauggacauccgggucaaguaucucuuuuuguggagucaauagcgacaccgugggcugguccuggcccgauggugcggaguuaccguucacuauugacaaguga

SEQ ID NO: 153862 - RNA, 1410 nt, Artificial Sequence
  derived and/or modified CDS sequence (opt3) from neuraminidase__InfluenzaA__AIT93148
augaaccccaaucagaagaucauuaccauaggcagcgugugcaugacaaucgggauggccaaccugauucuccaaaucggaaauauuaucuccauaugggucucucacucaauccagcuugguaaccagagucagauugagacuuguaaucaaagcguuaucacguacgaaaacaauaccugggugaaccagacauauguaaauauuuccaacacuaauuucgcugcaggccagucuguggucucggugaaacuggccgggaacucaucauugugcccuguuaguggaugggcgaucuacuccaaggacaauucugugagaauaggcagcaaaggugaugucuuugugauuagggagccauucaucuccuguucaccguuagaaugccggaccuuuuuccugacacagggggcucuacucaacgacaagcauaguaauggaaccauuaaagaucgcagccccuaucgaacucugaugucuuguccuaucggcgagguaccaucccccuacaacucacguuuugaaagcguugccuggagugcaucugccugccacgacggcaucaacuggcuuacaauugggauauccggaccugauagcggugcuguggcaguccugaaguauaauggcaucauuaccgacacgaucaagucguggagaaacaauauauugaggacucaagagucugagugugccugcgugaacggguccuguuucaccauuaugacagauggaccaucagacggccaggcuaguuacaaaaucuuucggaucgaaaaggguaaaauugucaagagcguggagaugaaugcccccaacuaucauuacgaagagugcuccuguuacccugauucuagcgagaucacuugcguuugccgcgacaauuggcacgggucaaacagaccaugggugaguuucaaucagaaccucgaauaucagauuggauacauauguuccggcguauuuggcgauaauccgaggcccaacgacaaaaccgggagcugcggaccugugucuucaaauggugcgaacggcgucaagggguucaguuuuaaguauggaaauggcguguggaucggucggacaaaaagcauuuccucucgcaagggguucgagaugaucugggauccaaacggcuggaccggaacggacaacaaauuuucgaucaagcaagacauuguuggcauaaaugaauggagcggguacuccggaucauucgugcagcaucccgagcugacuggucuggauuguauccgaccuugcuucugggucgaacucauuagaggcaggccagaggagaacacaaucuggaccagugggucuagcauuuccuuuuguggagugaauagcgacacuguaggcuggagcuggcccgauggugcagaauuaccguucacaaucgacaaauga

SEQ ID NO: 153863 - RNA, 1410 nt, Artificial Sequence; identical to SEQ ID NO: 146688
  derived and/or modified CDS sequence (opt3) from neuraminidase__InfluenzaA__AIU39701

SEQ ID NO: 153864 - RNA, 1410 nt, Artificial Sequence; identical to SEQ ID NO: 144786
  derived and/or modified CDS sequence (opt3) from neuraminidase__InfluenzaA__AIU39703

SEQ ID NO: 153865 - RNA, 1410 nt, Artificial Sequence
  derived and/or modified CDS sequence (opt3) from neuraminidase__InfluenzaA__AIU39705
augaaccccaaucagaagaucauuaccauaggcagcgugugcaugacaaucgggauggccaaccugauucuccaaaucggaaauauuaucuccauauggaucucucacucaauucagcuugguaaccagagucagaucgagacuuguaaucaaagcgucauuacguacgaaaacaauaccuggguuaaccagacauaugugaauaucuccaacacuaauuucgcugcaggccagucuguagugucggucaaacuggccgggaacagcagcuugugcccugugaguggaugggcgauauacuccaaggacaauucuauuagaaucggcagcaaaggugauguuuuugugauuagggagccauucaucuccuguucaccguuagaaugccggaccuuuuuccugacacagggggcucuacucaacgacaagcauaguaauggaaccaucaaagaucgcagccccuaucgaacucugaugucuuguccuauuggcgaggucccaucccccuacaacucacguuuugaaagcguggccuggagugcaucugccugccacgacggcauaaacuggcuuacaaucgggauuuccggaccugauaauggugcuguagcaguucugaaguauaacggcaucauaaccgacacgauuaagagcuggagaaauaacaucuugaggacucaagagucggagugugccugcgugaaugggucuuguuucaccgucaugacagauggaccauccgacggccaggcuucauacaaaaucuuucggauugaaaaggguaaaaucgugaagaguguggagaugaacgcccccaauuaucauuacgaagagugcagcuguuacccugauuccucugagauuacuugcgucugccgcgacaacuggcacgggagcaauagaccauggguuucauucaaccagaaucucgaauaucagauaggauacaucuguaguggcauuuuuggcgauaacccgaggcccaaugacaacaccggguccugcggaccugugagcucuaauggugcgaacggcguaaaaggguucucauuuaaguauggaaacggcguguggaucggucggacaaagaguaucagcucccgcaauggguucgagaugauuugggauccaaacggcuggaccggaacggacaauaacuuuucuauaaaacaagacaucgucggcauuaaugaauggucgggguacagcggauccuucgugcagcaucccgagcugacuggucuggauuguauccgaccuugcuucuggguugaacucauuagaggcaggccaaaggagaacacaaucuggaccucagggaguucuauaucauuuuguggagucaauuccgacacugugggcuggucauggcccgauggugcagaguuaccguucacaaucgacaaauga

SEQ ID NO: 153866 - RNA, 1413 nt, Artificial Sequence
  derived and/or modified CDS sequence (opt3) from neuraminidase__InfluenzaA__AIU46611
augaaccccaaucagaagauuaccugcaucagcgccacaggcaugacucuguccguggucucuaugcucauagggaucgcuaaccuuggacugaauauugguuugcacuacaaaguuggcgacucaacgaacaucaauauuccuaacaugaaugagaccaguccaacaacuaccaucauaaacaaucauccgcaaaacaauuucacaaacaucaccaauauuaucgugacuagaaacgaagaggggcacuuacugaaucuaacaaagccccucugugaaguaaacagcuggcauauucuguccaaagauaacgcaaucaggauaggagaggacgcccacauuaucgugacccgggaaccuuaucuuucuugcgauccacagggcugucgcauguuugcgcugucgcaggguacgacuuugcgagggaagcaugcuaauggaaccauucacgaccguucacccuucagagcccucgucagcugggagaugggccaggcaccuaguccauacaacacaaggguggagugcaucggcugguccucuacuagcugucacgaugggaucucccggaugucaauuugcauaaguggacccaauaacaaugccagcgcuguugugugguaugguggccgcccugucaccgaaaucccaucuugggcagggaacauucugagaacacaagaguccgaaugugugugccauggaggcaucuguccgguaguuaugaccgacggucccgccaauaacagggcugagacgaaaauaauuuacuuuaaggaggggaagaucaaaaagaucgaggaacugaaaggagaugcccagcacauugaagagugcucauguuauggcgcgagcgaaaugaucaagugcauuugccgggacaauuggaaaggcgcaaaccgcccugugauaacuaucgauccagagaugaugacacauaccaguaaguaccucuguucuaagauuuuaacugacacaucccgacccaaugauccuaccaacgggaauugcgaggccccaaucacgggagguagccccgacccgggcgucaaaggguucgcuuuucuggauggagaaaacucguggcuuggcagaaccaucucuaaggacuccaggucagguuaugagauguugaaagugccuaaugccgaaacagacacucagaguggggcaauuagccaccagauaaucgugaacaaccaaaauugguccggcuacucuggagcuuucauugauuacugggccaacaaggaguguuuuaaucccugcuucuaugucgaacugauccggggccguccaaaagagagcucaguucuauggaccaguaacuccauuguggcgcucugugggagcaaggagcgccugggaucuuggucauggcacgacggugccgaaaucauauacuuuaaauga

SEQ ID NO: 153867 - RNA, 1410 nt, Artificial Sequence
  derived and/or modified CDS sequence (opt3) from neuraminidase__InfluenzaA__AIV09221
augaaccccaaucagaagaucauuaccauaggcagcgugugcaugacaaucgggauggccaaccugauucuccaaaucggaaauauuacuuccaucuggauaucucacucaauccagauugguaacagaaaucagaucgaggcuuguaaccagagugucauuacguacgaaaauaacaccuggguuaaucaaacauaugugaacaucagcaauacuaacuucgcaguaggccaguccguggucccugugaaacuugccggaaauucuucgcugugcccaguuucagggugggcgauauacagcaaggacaacaguauuaggaucggcuccaaaggugauguguuugucauucgggagccguucaucucuuguagccccuuggaaugccgcaccuuuuucuuaacacagggggcucugcuaaaugacaagcauuccaacggaaccaucaaagaucgaucaccuuaucguacucucaugaguuguccaauuggcgaggugcccagcccuuacaacucuagauuugaauccguagccuggucagcaagcgccugccacgacggcauaaauuggcugacaaucgggauuaguggaccagauaacggugcuguugcagugcuuaaguauaauggcaucauaaccgacacgauuaagucuuggaggaacaauauccugcggacucaggaguccgagugugucugcgugaacgggagcuguuucaccgugaugacagauggacccucgaauggccaagccucuuacaaaaucuuucgcauugaaaaggguaaaaucgucaaguccguugagaugaacgcuccuaauuaucauuacgaagagugcucauguuacccagacaguagcgagauuacuugcgugugcagagauaacuggcacggguccaauaggccguggguaucuuucaaccagaauuuggaauaucagauaggauacaucuguagcggcauuuuuggcgacaacccccggccuaaugauaaaaccgggucaugcggaccagugcccaguaacggugccaacggcgucaagggguucuccuuuaaguauggaaauggcguguggaucggucgcacaaaaagcaucucuucacgaaacggguucgagaugauuugggacccuaauggcuggaccgaaacggauaacgacuuuaguauaaagcaggacaucguuggaauuaaugaguggagcggcuacuccgggucuuucgugcaacauccagaacucacuggacuggauuguaucagacccugcuucugggucgagcugauuaggggucggccgaaagagaacacaaucuggaccucgggcagcuccauaucauuuuguggggugaauaguaacacuguagacuggucuuggccugauggagcggaacuccccuucacaaucgacaaguga

SEQ ID NO: 153868 - RNA, 1410 nt, Artificial Sequence
  derived and/or modified CDS sequence (opt3) from neuraminidase__InfluenzaA__AIW60703
augaaccccaaucagaagaucauuaccauaggcagcgugucccugacaaucgccacuauuugcuuccucaugcaaaucgucauucuuguuacgaccgugacacugcacuuuaaacaguacgaguguaacucuccuccaaauaaccagguaauguugugcgaaccgacuaucauagagagaaauaucaccgaaauuguguauuuaacaaacaccacuaucgagaaggaaauuugucccaaacuggcugaguacaggaauuggucaaagccucagugcaaaaucacaggguucgcaccauuuaguaaggacaacagcauacggcuauccgccggaggugauauuugggucacccgcgagcccuaugugucuugugacccugauaagugcuaccaauucgcgcucggccaggggacgacucugaauaaccgacauucgaaugacaccguucacgaucguacaccauauagaacucuucugaugaacgaauugggagugcccuuucaucucggcaccaaacaggucuguaucgcuuggucaagcaguuccugccacgacgguaaggccuggcugcauguguguguaacagggcacgaugagaaugcaaccgccucuuucauuuacgacggaaggcugguugauagcaucggcuccuggaguaaaaagauccuccggacgcaggaaucagagugcguguguauuaacggcacuugcacagucgugaugaccgacgggagcgcuucuggacgcgcagauacuaaaauauuauuuaucgaggaagguaagauugugcacaucuccccucugucaggcagcgcccaacaugucgaggaaugcaguuguuauccacaguacucugggguuagaugcguguguagggacaauuggaagggauccaaccggccgauaguagauauuaacgugaaagacuacagcaucgucucgucuuaugugugcuccggccuuguuggugacacaccccgcaagaaugauucaaguagcuccucucacuguuugaacccuaauaacgaggaagggggacauggcgugaaaggcugggcuuucgacgaugggaaugacgucuggaugggacgaaccaucagcgagaagcugagaucagguuacgagacguuuaaagugauuggcggguggaguaagccaaacuccaaacuacagaucaauaggcagguaauuguugaucggggaaaccguagcggcuauucugguauauucucaguggaagggaagaauugcaucaaccgcuguuuuuacgucgagcucauuagaggcaggaagcaagaaaccgaggugugguggacaaguaauagcaucgucguguucugcggaacuuccggcaccuaugggacaggaucuuggcccgacggugccgauaucaaccugaugccuauuuga

SEQ ID NO: 153869 - RNA, 1410 nt, Artificial Sequence
  derived and/or modified CDS sequence (opt3) from neuraminidase__InfluenzaA__AIW60704
augaaccccaaucagaagaucauuaccauaggcagcgugucccugacaaucgccacuauuugcuuccucaugcaaaucgucauucuuguuacgaccgugacacugcacuuuaaacaguacgaguguaacucuccuccaaauaaccagguaauguugugcgaaccgacuaucauagagagaaauaucaccgaaauuguguauuuaacaaacaccacuaucgagaaggaaauuugucccaaacuggcugaguacaggaauuggucaaagccucagugcaaaaucacaggguucgcaccauuuaguaaggacaacagcauacggcuauccgccggaggugauauuugggucacccgcgagcccuaugugucuugugacccugauaagugcuaccaauucgcgcucggccaggggacgacucugaauaaccgacauucgaaugacaucguucacgaucguaccccauauagaacacuucugaugaacgaauugggagugcccuuucaucucggcacuaaacaggucuguauugcuuggucaagcaguuccugccacgacgguaaggccuggcugcauguguguguaaccgggcacgaugagaaugcaacagccucuuucaucuacgacggaaggcugguugauagcaucggcuccuggaguaaaaagauucuccggacccaggaaucagagugcguguguauaaacggcacgugcacugucgugaugacagacgggagcgcuucuggacgcgcagauaccaaaaucuuauuuauugaggaagguaagaucgugcacauauccccucugucaggcagcgcccaacaugucgaggaaugcaguuguuauccacaguacucugggguuagaugcguguguagggacaauuggaagggauccaaccggccgauuguagauaucaacgugaaagacuacagcaucgucucgucuuaugugugcuccggccuuguuggugacacuccccgcaagaaugauucaaguagcuccucucacuguuugaacccuaauaacgaggaagggggacauggcgugaaaggcugggcuuucgacgaugggaaugacgucuggaugggacgaacaauuagcgagaagcugagaucagguuacgagaccuuuaaagugaucggcggguggaguaagccaaacuccaaacuacagauuaauaggcagguaauaguugaucggggaaaccguagcggcuauucugguaucuucucaguggaagggaagaauugcauuaaccgcuguuuuuacgucgagcucaucagaggcaggaagcaagaaacggaggugugguggaccaguaauagcaucgucguguucugcggaacauccggcacuuaugggaccggaucuuggcccgacggugccgauauuaaccugaugccuauauga

SEQ ID NO: 153870 - RNA, 1410 nt, Artificial Sequence
  derived and/or modified CDS sequence (opt3) from neuraminidase__InfluenzaA__AIW60705
augaaccccaaucagaagaucauuaccauaggcagcgugucccugacaaucgccacuauuugcuuccucaugcaaaucgcuauucuugucacgaccguuacacugcacuuuaaacaguacgaguguaacucuccuccaaauaaccaggugauguugugcgaaccgacuaucauagagagaaauaucaccgaaauuguauauuuaacaaacaccacuaucgagaaggaaauuugucccaaacuggcagaguacaggaauuggucaaagccucagugcaaaaucacaggguucgccccauuuaguaaggacaacagcauacggcuauccgcgggaggugauauuugggugacccgcgagcccuaugucucuugugacccugauaagugcuaccaauucgcucucggccaggggacgacucugaauaaccgacauucgaaugacaccgugcacgaucguacaccauauagaacucuucugaugaacgaauugggaguucccuuucaucucggcaccaaacagguguguaucgccuggucaagcaguuccugccacgacgguaaggcauggcugcaugucugugugacagggcacgaugagaaugccaccgcuucuuucauuuacgacggaaggcugguagauagcaucggcuccuggaguaaaaagauccuccggacgcaggaaucagagugcguuuguauuaacggcacuugcacaguggucaugaccgacgggagcgcaucuggacgcgccgauacuaaaauauuauuuaucgaggaagguaagauugugcacaucuccccucugucaggcagcgcucaacauguggaggaaugcaguuguuauccaagauacucuggggucaggugcguuugucgggacaauuggaagggauccaaccgcccgauaguggauauuaacguaaaagacuacagcaucgugucgucuuaugucugcuccggccuugugggugacacaccccgaaagaaugauucaaguagcuccucucacuguuugaacccuaauaacgaggaagggggacauggcguuaaaggcugggccuucgacgaugggaaugacguguggaugggaagaaccaucagcgagaaguuuaggucagguuacgagacguucaaagucauuggcggguggaguaagccaaacuccaaacugcagaucaaucgucaggugauuguagaucggggaaaccgcagcggcuauucugguauauuuucaguugaagggaagaguugcaucaauagauguuucuacguggagcuaauuaggggccggaagcaggaaaccgaggucugguggacaagcaacuccaucguggucuuuugcggaacuucuggcaccuaugggacaggaucguggcccgacggugcggauaucaaucucaugccuauuuga

SEQ ID NO: 153871 - RNA, 1410 nt, Artificial Sequence; identical to SEQ ID NO: 153870
  derived and/or modified CDS sequence (opt3) from neuraminidase__InfluenzaA__AIW60706

SEQ ID NO: 153872 - RNA, 1410 nt, Artificial Sequence
  derived and/or modified CDS sequence (opt3) from neuraminidase__InfluenzaA__AIW60708
augaaccccaaucagaagaucauuaccauaggcagcgugucccugacaaucgccacuauuugcuuccucaugcagaucgcuauucuugucacgaccguuacacugcacuuuaaacaguacgaguguaacucuccuccaaauaaccaggugauguugugcgaaccgacuaucauagagagaaauaucaccgaaauuguauauuuaacaaacaccacuaucgagaaggaaauuugucccaaacuggcagaguacaggaauuggucaaagccucagugcaacaucacaggguucgccccauuuaguaaagacaauagcauacggcuauccgcgggaggugauauuugggugacccgcgagcccuaugucucuugugacccugauaagugcuaccaauucgcucucggccaggggacgacucugaacaaucgacauucgaacgacaccgugcacgaucguacaccauauagaacucuucugaugaaugaauugggaguucccuuucaucucggcaccaaacagguguguaucgccuggucaagcaguuccugccacgacgguaaggcauggcugcaugucugugugacagggcacgaugagaacgccaccgcuucuuucauuuacaauggaaggcugguagacagcaucggcuccuggucaaagaaaauccuccggacgcaggaaagugagugcguuuguauuaacggcacuugcacaguggucaugaccgaugggagcgcaucuggaaaggccgacacuaaaauauuauuuaucgaggaagguaagauugugcacaucuccccucugucaggcagcgcucaacauguggaggaaugcaguuguuauccacgcuacccgggggucagaugcguuuguagggauaacuggaagggaucuaaucggcccauaguggacauuaacguaaaagauuacuccaucgugagcucguaugucugcucuggccuugugggugacacaccucgcaagaaugacuccucaaguagcucccacuguuugaacccaaauaacgaggaagggggacauggcguuaaaggcugggccuucgaugacgggaaugauguguggaugggacgaaccaucucugagaagcugagaagcgguuacgagacguuuaaagucauugaaggcuggucaaaccccaauaguaagcuacagaucaacaggcaagugauuguagaccggggaaauuccagcggguauucuggcauauucucaguugaggguaaaaguugcaucaaccguuguuuuuacguggaacucauucgcgggagaaagcaggagaccgaagucugguggacaagcaauuccaucgugguccugugcggcacuucuggaaccuauggcacagggucguggccugauggagcggacaucaaccuuaugccaauuuga

SEQ ID NO: 153873 - RNA, 1410 nt, Artificial Sequence
  derived and/or modified CDS sequence (opt3) from neuraminidase__InfluenzaA__AIW60710
augaaccccaaucagaagaucauuaccauaggcagcgugucccugacaaucgccacuauuugcuuccucaugcaaaucgcuauucuugucacgaccguuacacugcacuuuaaacaguacgaguguaacucuccuccaaauaaccaggugauguugugcgaaccgacuaucauagagagaaauaucaccgaaauuguauauuuaacaaacaccacuaucgagaaggaaauuugucccaaacuggcagaguacaggaauuggucaaagccucagugcaacaucacaggguucgccccauuuaguaaagacaauagcauacggcuauccgcgggaggugauauuugggugacccgcgagcccuaugucucuugugacccugauaagugcuaccaauucgcucucggccaggggacgacucugaacaauggacauucgaacgacaccgugcacgaucgaacaccauaucguacucuucugaugaaugaauugggcguucccuuucaucucgguaccaaacagguguguaucgccuggucaagcaguuccugccacgacgggaaggcauggcugcaugucugugugacaggagaugacgagaacgccaccgcuucuuucauuuacaauggcagacugguagauagcaucggcuccuggucaaagaaaauccucaggacgcaggaaagugagugcguuuguauuaacgggacuugcacaguggucaugaccgacggaagcgcaucugguaaggccgauacuaaaauauuauuuaucgaggaaggcaagauugugcacacauccucacugagcgggagugcucaacacguggaggaaugcucuuguuauccucgguacccaggaguccgcugcguuuguagagacaacuggaagggcuccaauaggccgaccguggauaucaacguaaaagacuacagcauagugucgucuuaugucugcuccggucuugugggggacacgccccggaagaaugauucaaguagcuccucucauuguuuggacccuaacaaugaggaaggaggccacggcguuaaagggugggccuucgaugacggaaacgauguguggaugggucgcaccauuagcgagaagcugcgaucaggcuacgagacauuuaaagucaucgaaggguggaguaagccaaauuccaaacuacagaucaacagacaggugauuguagacaggggaaaucggagcggcuauucugguaucuucucaguugagaguaagagcugcauuaaccguuguuuuuacguggaacucauacgcgggagaaagcaggagacugaaguccuguggaccuccaauucuaucguggucuucugcggcacaucgggaacuuauggcaccgggagcuggcccgauggagcggacauuaaccuuaugccuaucuga

SEQ ID NO: 153874 - RNA, 1410 nt, Artificial Sequence; identical to SEQ ID NO: 142639
  derived and/or modified CDS sequence (opt3) from neuraminidase__InfluenzaA__AIW60711

SEQ ID NO: 153875 - RNA, 1410 nt, Artificial Sequence; identical to SEQ ID NO: 142639
  derived and/or modified CDS sequence (opt3) from neuraminidase__InfluenzaA__AIW60712

SEQ ID NO: 153876 - RNA, 1410 nt, Artificial Sequence
  derived and/or modified CDS sequence (opt3) from neuraminidase__InfluenzaA__AIW60713
augaaccccaaucagaagaucauuaccauaggcagcgugucccugacaaucucuacuauuugcuucuuuaugcaaaucgccauucucaucacgaccgucacacuucacuucaaacaguacgaguuuucaaguccuccaaacaaucagguuaugcugugugaaccgacuauaaucgagagaaacauuaccgaaaucguguauuugacaaauaccacuauugagaaggaaaucugccccaaauuagcugaguacaggaacuggagcaagccucagugugacauaacaggguucgcaccauuuuccaaagauaauucuauucggcugucggccggaggugacaucuggguaacccgcgagcccuaugugucaugcgauccugacaaguguuaccaauucgcgcuaggccaggggacgacucucaacaauguccauagcaacgauaccgugcacgaccgaacaccauaucguacucugcuuaugaaugaacugggaguucccuuucauuugggcaccaaacaggugugcauugcuuggaguuccucuagcugucacgaugguaaggccuggcuccaugucugcgugacaggggacgauaagaacgcaaccgccuccuucaucuacaauggaagacugguagacucaaucguuaguuggagcaaagagauucugaggacgcaggaaucugagugugugugcauaaacggcacuuguacagucgugaugaccgauggcuccgcuucagggaaggcagacacuaaaauccucuuuauugaggaaggaaagaucgugcacacaagcaccuuaagugguucugcccaacacgucgaggaaugcuccugcuauccucgguacccaggcguucgcugugugugcagagauaauuggaaggggagcaacaggccgauaguagacauuaacaucaaagacuacucgaucgcuucuuccuauguguguucaggacuggucggcgauacgccccggaagaaugacaguagcuccucuagccauugccuugauccuaacaaugaggaaggugggcacggagugaaaggcugggccuucgacgauggcaacgacguuuggauggggcgcaccauuucagagaaguugcgaaguggauacgagacauuuaaagugaucgaagguugguccaauccaaacagcaagcugcagauuaauagacaggucauaguggauaggggcaaccggucuggguauucaggaaucuucaguguagagggcaaaagcuguauuaaucguugcuuuuacguugaacuaauccgcgguagaaaggaggaaacugaggugcucuggaccuccaacucuaucgucguguucugugggacaucgggcacuuauggaaccggcagcuggcccgacggggcggauauuaaucugaugccuauauga

SEQ ID NO: 153877 - RNA, 1410 nt, Artificial Sequence
  derived and/or modified CDS sequence (opt3) from neuraminidase__InfluenzaA__AIW60714
augaaccccaaucagaagaucauuaccauaggcagcgugucccugacaaucucuacuauuugcuucuuuaugcaaaucgccauucucaucacgaccgucacacuucacuucaaacaguacgaguuuucaaguccuccaaacaaucagguuaugcugugugaaccgacuauaaucgagagaaacauuaccgaaaucguguauuugacaaauaccacuauugagaaggaaaucugccccaaauuagcugaguacaggaacuggagcaagccucagugugacauaacaggguucgcaccauuuuccaaagauaauucuauucggcugucggccggaggugacaucuggguaacccgcgagcccuaugugucaugcgauccugacaaguguuaccaauucgcgcuaggccaggggacgacucucaacaauguccauagcaacgauaccgugcacgaccgaacaccauaucguacucugcuuaugaaugaacugggaguucccuuucauuugggcaccaaacaggugugcauugcuuggaguuccucuagcugucacgaugguaaggccuggcuccaugucugcgugacaggggacgauaagaacgcaaccgccuccuucaucuacaauggaagacugguagacucaaucguuaguuggagcaaagagauucugaggacgcaggaaucugagugugugugcauaaacggcacuuguacagucgugaugaccgauggcuccgcuucagggaaggcagacacuaaaauccucuuuauugaggaaggaaagaucgugcacacaagcaccuuaagugguucugcccaacacgucgaggaaugcuccugcuauccucgguacccaggcguucgcugugugugcagagauaauuggaaggggagcaacaggccgauaguagacauuaacaucaaagacuacucgaucgcuucuuccuauguguguucaggacuggucggcgauacgccccggaagaaugacaguagcuccucuagccauugccuugauccuaacaaugaggaaggugggcacggagugaaaggcugggccuucgacgauggcaacgacguuuggauggggcgcaccauuucagagaaguugcgaaguggauacgagacauuuaaagugaucgaagguugguccaauccaaacagcaagcugcagauuaauagacaggucauagugggcagggggaaccggucuggauauucaggcaucuucaguguagaggguaaaagcuguauuaaucguugcuuuuacguugaacuaauccgcgggagaaaggaggaaacugaggugcucuggaccuccaacucuaucgucguguucuguggcacaucgggaacuuauggcaccgggagcuggcccgauggagcggacauuaaucugaugccuauauga

SEQ ID NO: 153878 - RNA, 1410 nt, Artificial Sequence
  derived and/or modified CDS sequence (opt3) from neuraminidase__InfluenzaA__AIW60715
augaaccccaaucagaagaucauuaccauaggcagcgugucccugacaaucucuacuauuugcuucuuuaugcaaaucgccauucucaucacgaccgucacacuucacuucaaacaguacgaguuuaacucaccuccaaauaaccagguuaugcugugugaaccgacuauaaucgagagaaauauuaccgaaaucguguauuugacaaacaccacuauugagaaggaaaucugccccaaauuagcugaguacaggaauuggaguaagccucagugugacauaacaggguucgcaccauuuagcaaagauaacuccauucggcugucugccggaggugacaucuggguaacccgcgagcccuaugugucgugcgauccugacaaguguuaccaauucgcgcuaggccaggggacgacucucaauaacguccauucaaaugauaccgugcgagaccguacaccauauagaacucugcuuaugaacgaacugggaguucccuuucacuugggcaccaaacaggugugcauugcuuggagcaguuccucuugucaugaugguaaggccuggcuccacgucugcaucacaggggacgauaagaaugcaaccgccagcuucaucuacaacggaaggcugguggacuccauuguaucauggaguaaaaagauacugcggacgcaggagagcgaauguguuugcaucaauggcacuuguacaguggucaugaccgauggcucugcuuccgggaaagcagacacuaagauucucuuuaucgaggagggaaagauagugcauacaucaaccuuaagcgguagugcccaacacguggaagagugcucuugcuauccucgcuacccaggcgucagauguguuugcagggauaacuggaaaggguccaaccggccgauuguggacaucaauaucaaggaccacagcauuguaucgucuuacguguguuccggacuggucggcgauacgccccgcaaaaacgacucaaguagcuccucucauugccuugauccuaauaacgaagagggugggcacggagugaagggcugggcuuucgacgauggcaaugacguuuggauggggcgaaccaucagcgaaaaaucaagauugggauaugagacauuuaaggugauugaggguuggaguaacccaaaauccaagcugcagauaaauaggcaggucaucguggaucggggcaaccguagcggguacucuggaauuuucucaguagaaggcaagaguuguaucaaucgcugcuuuuauguugagcuaaucagagguaggaaagaagagacugaagugcucuggaccagcaacuccauugucguguucugugggacaucuggcacuuacggaaccggcucguggcccgacggggccgauauaaaucugaugccuaucuga

SEQ ID NO: 153879 - RNA, 1410 nt, Artificial Sequence; identical to SEQ ID NO: 144559
  derived and/or modified CDS sequence (opt3) from neuraminidase__InfluenzaA__AIW60716

SEQ ID NO: 153880 - RNA, 1410 nt, Artificial Sequence
  derived and/or modified CDS sequence (opt3) from neuraminidase__InfluenzaA__AIY54970
augaaccccaaucagaagaucauuaccauaggcagcgugucccugacaaucucuacuauuugcuucuuuaugcaaaucgccauucucaucacgaccgucacacuucacuucaaacaguacgaguuuaacucaccuccaaauaaccagguuaugcugugugaaccgacuauaaucgagagaaauauuaccgaaaucguguauuugacaaacaccacuauugagaaggaaaucugccccaaauuagcugaguacaggaauuggaguaagccucaguguaacauaacaggguucgcaccauuuagcaaagacaauuccauucggcugucugccggaggugauaucuggguaacccgcgagcccuaugugucgugcgacccugauaaguguuaccaauucgcgcuaggccaggggacgacucucaacaauguccauucaaacgacaccgugcacgaucgaacaccauaucguacucugcuuaugaaugaacugggaguucccuuucauuugggcaccaaacaggugugcauugcuuggagcaguuccucuugucacgacgguaaggccuggcuccaugucugcgugacaggggaugacgagaacgcaaccgccagcuucaucuacaauggaagacugguagauuccaucguuucauggaguaagaaaauucugaggacgcaggaaagcgagugugugugcauaaacggcacuuguacagucgugaugaccgacggcucugcuuccgggaaggcagauacuaaaauccucuuuauugaggaaggaaagaucgugcacacaucaaccuuaagcgguagugcccaacacgucgaggaaugcucuugcuauccucgguacccaggcguucgcugugugugcagagacaacuggaagggguccaauaggccgauaguagauauuaacaucaaagacuacagcaucgugucgucuuaugucuguuccggacuggugggcgacacgccccggaagaccgauucaaguagcuccucucauugccuugacccuaauaacgaggaaggugggcacggaguuaaaggcugggcuuucgaugacggcaaugauuuguggauggggcgcacaauuagccagaaccugcgaucaggauacgagacuuuuaaggugaucgaggguuggaguaauccaaacuccaaacuacagauuaauagacaggucauaguggacaggggcaaccggagcggguauucuggaaucuucucaguagaaggcaagaguuguauuaaucguugcuuuuacguugagcucauccgcgguagaaaacaagaaaccgaggugcuguggacaagcaacuccaucgucguguucugugggacuucuggcaccuauggaacaggcucguggcccgauggggccgacauuaaucuuaugccuauauga

SEQ ID NO: 153881 - RNA, 1410 nt, Artificial Sequence
  derived and/or modified CDS sequence (opt3) from neuraminidase__InfluenzaA__AIY54974
augaaccccaaucagaagaucauuaccauaggcagcgugucccugacaaucucuacuauuugcuucuuuaugcaaaucgccauucucaucacgaccgucacacuucacuucaaacaguacgaguuuaacucaccuccaaauaaccagguuaugcugugugaaccgacuauaaucgagagaaauauuaccgaaaucguguauuugacaaacaccacuauugagaaggaaaucugccccaaauuagcugaguacaggaauuggaguaagccucagugugacauaacaggguucgcaccauuuagcaaagauaacuccauucggcugucugccggaggugacaucuggguaacccgcgagcccuaugugucgugcgauccugacaaguguuaccaauucgcgcuaggccaggggacgacucucaauaacguccauucaaaugauaccgugcacgaccgaacaccauaucguacucugcuuaugagcgaacugggaguucccuuucauuugggcaccaaacaggugugcauugcuuggaguuccucuagcugucacgaugguaaggccuggcuccaugucugcgugacaggggacgauaagaacgcaaccgccuccuucaucuacaauggaagacugguagacucaaucguuaguuggagcaaaaagauucugaggacgcaggagucugaaugugugugcauaaacggcacuuguacagucgugaugaccgauggcuccgcuucagggaaagcagacacuaagauccucuuuauugaggagggaaagaucgugcacacaagcaccuuaagugguucugcccaacacgucgaagagugcuccugcuauccucgguacccaggcguucgcugugugugcagagauaauuggaaagggagcaacaggccgauaguagacauuaacaucaaggacuacucgaucgugucuuccuaugucuguucaggacuggugggcgauacgccccggaaaaaugacaguagcuccucuagccauugccuugauccuaacaaugaagagggugggcacggaguuaagggcugggcuuucgacgauggcaacgacguguggauggggcgcaccauuucagaaaaauugcgaaguggauacgagacauuuaaggucaucgaggguugguccaauccaaacagcaaacugcagauuaauagacaggugaagguagauaggggcaaccggucuggguauucaggaauauucaguguugaaggcaagagcuguaucaaucguugcuuuuacguggagcuaauucgcgguagaaaagaagagacuaagguccucuggaccuccaacucuaucguggucuucugugggacaucgggcacuuauggaaccggcagcuggcccgacggggccgauaucaaucugaugccuauuuga

SEQ ID NO: 153882 - RNA, 1410 nt, Artificial Sequence
  derived and/or modified CDS sequence (opt3) from neuraminidase__InfluenzaA__AIY54982
augaaccccaaucagaagaucauuaccauaggcagcgugucccugacaaucucuacuauuugcuucuuuaugcaaaucgccauucucaucacgaccgucacacuucacuucaaacaguacgaguuuaacucaccuccaaauaaccagguuaugcugugugaaccgacuauaaucgagagaaauauuaccgaaaucguguauuugacaaacaccacuauugagaaggaaaucugccccaaauuagcugaguacaggaauuggaguaagccucagugugacauaacaggguucgcaccauuuagcaaagauaacuccauucggcugucugccggaggugacaucuggguaacccgcgagcccuaugugucgugcgauccugacaaguguuaccaauucgcgcuaggccaggggacgacucucaauaacguccauucaaaugauaccgugcacgaccgaacaccauaucguacucugcuuaugaacgaacugggaguucccuuucauuugggcaccaaacaggugugcauugcuuggagcaguuccucuugucacgaugguaaggccuggcuccaugucugcgugacaggggacgauaagaaugcaaccgccagcuucaucuacaacggaagacugguagacuccaucguuucauggaguaaagagauucugaggacgcaggaaagcgagugugugugcauaaauggcacuuguacagucgugaugaccgauggcucugcuuccgggaaggcagacacuaaaauccucuuuauugaggaaggaaagaucgugcacacaucaaccuuaagcgguagugcccaacacgucgaggaaugcucuugcuauccucgguacccaggcguucgcugugugugcagagauaacuggaagggguccaacaggccgauaguagacauuaauaucaaagacuacagcaucgugucgucuuaugucuguuccggacuggugggcgauacgccccggaagaacgacucaaguagcuccucucauugccuugauccuaauaacgaggaaggugggcacggaguuaaaggcugggcuuucgacgauggcaaugacguguggauggggcgcaccauuagcgagaaguuucgaucaggauacgagacauucaaagucaucgaagguuggaguaacccaaauuccaaguugcagauuaacagacaggugauaguagauaggggcaaucggagcggguauucuggaaucuuuucaguugagggcaaaaguuguauuaaccguugcuucuacguggaacugauccgcgguagaaaggaggaaacugagguccuauggaccagcaauuccaucguggucuucugugggacaucuggcacuuauggaaccggcucguggcccgacggggccgauauuaaccucaugccuauauga

SEQ ID NO: 153883 - RNA, 1410 nt, Artificial Sequence
  derived and/or modified CDS sequence (opt3) from neuraminidase__InfluenzaA__AIY54990
augaaccccaaucagaagaucauuaccauaggcagcgugucccugacaaucucuacuauuugcuucuuuaugcagaucgccauucucaucacgaccgucacacuucacuucaaacaguacgaguuuucaaguccuccaaacaaucagguuaugcugugugaaccgacuauaaucgagagaaacauuaccgaaaucguguauuugacaaauaccacuauugagaaggaaaucugccccaaauuagcugaguacaggaacuggagcaagccucagugugggauaacaggauucgcaccauuuuccaaagacaauucuauucggcugucggccgguggcgauaucuggguaacccgcgagcccuaugugucaugcgacccugauaaguguuaccaauucgcgcuagggcagggaacgacucucaacaauguccauagcaacgacaccgugcacgaucgaacaccauaucguacucugcuuaugaaugaacugggcguucccuuucauuuggguaccaaacaggugugcauugcuuggaguuccucuagcugucacgacgggaaggccuggcuccaugucugcgugacaggagaugacaagaacgcaaccgccuccuucaucuacaauggcagacugguagauucaaucguuaguuggagcaaagagauucugaggacgcaggaaucugagugugugugcauaaacggcacuuguacagucgugaugaccgacggguccgcuucaggaaaggcagauacuaaaauccucuuuauugaggaagguaagaucgugcacacaagcaccuuaaguggcucugcccaacacgucgaggaaugcuccugcuauccucgguacccagggguucgcugugugugcagagacaauuggaagggaagcaacaggccgauaguagauauuaacaucaaagacuacucgaucgugucucgguaugucuguuccggccuggugggugacacgccccgcaagaaugauucaaguagcuccucucauugccuugacccuaacaaugaggaagggggacacggcguuaaaggcugggcuuucgaugacgggaacgauguguggaugggacgaaccauuagcgagaagucaagaagugguuacgagacauuuaaagucaucgaaggcugguccaauccaaacagcaaguugcagauuaauaggcaagugauaguagaccgggggaaccguucuggauauucaggcaucuucaguguugaggguaaaagcuguauuaaucgcugcuuuuacguggaacugaucagagggaggaaggaggaaacugagguccuauggaccuccaacucuaucguggucuucuguggcacaucgggaacuuauggcaccgggagcuggcccgauggagccgacauuaaucucaugccuauauga

SEQ ID NO: 153884 - RNA, 1401 nt, Artificial Sequence
  derived and/or modified CDS sequence (opt3) from neuraminidase__InfluenzaA__AJD78177
augaaccccaaucagaagaucauugccauaggcagcgugucccugaucauugcugucaucugccuccuuaugcaaauugcaauccugaccacaacuaugacguugcacuucaugcagaacgaguguucuaauccuucaaacaaucagguuaugccaugcgaaccgauaaucauugagagaaacaccgugcauuuaaauaacacaacuaucgaaagggagauuugucccaaagccgcggaauacaagaauuggaguaaaccucagugccaaaucaccggguuugcuccauucagcaaggacaacuccauacggcugucugccggaggugauauuuggguaacacgcgagcccuaugugucguguucacuagacaaaugcuaccaguuugcacucggccaggggaccacucugaagaauaagcacagcaacggaacaacccaugaucgaacgccucaccguacucuucugaugaaugaguugggcgucccauuccaucucgguaccaaacagguguguaucgccuggaguuccucuagcugcuaugacgggaaggcuuggcugcacauuuguguuacaggagaugacaaaaacgcaacugccuccaucaucuacgauggcaugcugguggacucaauuggcaguuggagcaagaauauacucagaacccaagaaucugagugcgucuguaucaacgggacaugcgcugugguaaugaccgauggauccgccucagguaaagcggacacgaggguuuuauuuauucgggaaggcaagaucauaaacauuagcccccugagugggucugcacagcacguggaggagugcuccuguuauccucgcuacccagaagucagaugcguguguagggauaauuggaagggaagcaaccggccgauccuuuauaucaauauggccgacuacucgauugagucuuccuacgugugcucaggcuuggucggugauacuccccgcaacgacgacaguagcuccucuagcaauugucgagauccuaacaaugaaagaggggcuccaggaguuaaaggcugggccuucgacgauggcaacgacguguggauggggaggacaaucaagaauggaucacggagugguuaugagaccuuucguguagugaacggcuggacuauggcaaauuccaaaagccagauuaaccgccaggucauaguggauucugacgauuggucaggguacaguggaaucuucagcguugaaggcaagaaaugcauuaauagauguuuuuauguggagcugaucaggggucggccccaagagccucgagucugguggacauccaacucuaucauuguguucugcgggaccucgggcacguacggaaccggcagcuggccagacggggcuaauauaaacuuuaugcccaucuga

SEQ ID NO: 153885 - RNA, 1401 nt, Artificial Sequence
  derived and/or modified CDS sequence (opt3) from neuraminidase__InfluenzaA__AJD78189
augaaccccaaucagaagaucauugccauaggcagcgugucccugaucauugcuaucauuugccuccuuaugcaaaucgcaauacugaccacaacuaugacguugcacuucagacagaacgaguguaauaacucuucaaauaaccaggucaugccuugcgaaccaaucauuaucgagaggaauaccguucauuuaaacaguacaacuauugaacgggagaucuguccgaaaguggccgaauacaagaauuggagcaaaccccagugccaaauaaccggguuugcgccuuucuccaaggacaacucuauucgccugucggcuggaggugauaucuggguaacacgagagccauaugugucauguagccuagacaaaugcuaccaguuugcccucggccaggggaccacucugaagaauaagcacaguaacggaacaacccaugaucguacgucccacagaacucuucugaugaaugaguugggcguccccuuccaucucgguaccaaacagguguguauugcauggucuagcuccucaugcuaugacgggaaggccuggcugcacaucuguguuacaggagaugacaaaaacgcuacugcaaguaucauuuacaauggcaugcugguggauagcauaggcucuugguccaagaacauccucaggacccaagaaucagagugcgucuguauuaacgggacaugcgccgugguaaugaccgacggaagcgcuagugguaaagccgauacgcggguuuuauuuauccgcgaaggcaagauaauuaauaucucuccucuguccgggagcgcgcagcacguggaggagugcucguguuauccaagauaccccgaagucaggugcgugugucgggacaacuggaagggaucuaaucgcccuauccuuuauauuaacauggcagauuacuccaucgagucaaguuacgugugcagcggcuuggucggugacacuccacgaaaugaugacuccucuagcucaaguaacuguaaagaccccaauuccgaaagaggggccccgggaguuaagggcugggcuuucgaugacggcaacgauguguggauggggaggacaauuaaaaauggaagccggucugguuaugagaccuuucguguacugaacggcuggacuguggccaauucaaagagucagauaaaccgccaggucaucguggacagcgaugacugguccggguacucuggaauuuucucgguugaaggcaaaaagugcaucaauagauguuuuuauguggagcuaaucaggggucggccucaagagccacgagucugguggacaagcaacuccauuauaguguucugcgggaccucaggcacguacggaaccggcaguuggcccgauggggcaaauaucaacuuuaugccuauuuga

SEQ ID NO: 153886 - RNA, 1401 nt, Artificial Sequence
  derived and/or modified CDS sequence (opt3) from neuraminidase__InfluenzaA__AJD78201
augaaccccaaucagaagaucaccgccauuggcagcgugucccugauaaucgcuauuaucugccuccuuaugcaaauugcaauccugacaacuacgaugaccuugcacuucagacagaaagaguguucuaacccuucaaauaaccaggucaugccaugcgaaccgauaaucauugagaggaauacaguucauuuaaacaguacuaccaucgaacgggagauuugucccaagguggccgaauacaaaaauuggagcaagccucagugccugaucacaggguuugcgccauucuccaaagacaacucuauacgccuaucggcuggaggugauauuuggguaacccgagagcccuaugugucauguagcccugacaagugcuaccaauuugcccucggccaggggacuacacugaagaauaaacacaguaacggaaccacgcaugaucguacuccacacagaacccuucugaugaaugaguugggcguccccuuccaucucgguacaaaacagguguguaucgcaugguccucuagcuccugcuaugacgggaaggccuggcugcacauuuguguuacuggagaugacaagaacgcuaccgcaucaaucaucuacgauggcaugcugguggacaguauuggcagcuggucuaaaaauauacucaggacacaggaauccgagugcgucuguaucaacgggaccugcgccgugguaaugacggauggaucagcuagcgguguugccgacacucggguguuauuuauucgcgaaggcaagaucauaaauauuagaccucugagugggucugcgcaacacgucgaggagugcuccuguuauccaagguacccggaagugcggugcgugugucgcgauaacuggaagggaagcaaccgacccaucaucuauauuaauauggcagacuacucgaucgagucuuccuacgucugcucaggccuuguuggugauacaccuagaaacgacgacaguagcuccucuagcaauuguagggauccaaacaaugaacguggggcccccggagugaaaggcugggcuuucgacgauggcaacgacguauggauggggcggaccauuaagaauggaucacgcagugguuaugagacuuuuagagugauaaacggcuggacaauggccaauuccaaaagccagaucaacaggcaggucauuguggauucugacgauuggucaggguacaguggaaucuucagcguugaaggcaagaaaugcaucaaucgguguuuuuauguggaguugauucgaggucgcccucaggagccaagagucugguggaccuccaacucuauaaucguguucugcgggacgucgggcaccuacggaacaggcagcuggcccgacggggcaaauauuaacuuuaugccgaucuga

SEQ ID NO: 153887 - RNA, 1401 nt, Artificial Sequence
  derived and/or modified CDS sequence (opt3) from neuraminidase__InfluenzaA__AJD78213
augaaccccaaucagaagaucaccgccauuggcagcgugucccugauaaucgcuauuaucugccucuucaugcaaauugcaauccuuacaacuacgaugacccugcacuuuagacagaaagaguguucuaacccuucaaauaaccaggucaugccaugcgaaccgauaaucauugagaggaauacaguucauuugaacaguacuaccaucgaacgggagauuugucccaagguggccgaauacaaaaauuggagcaagccucagugcuuaaucacaggguucgcgccauuuuccaaagacaacucuauacgccugucggcuggaggugauauuuggguaacccgagagcccuaugugucauguagcccugacaagugcuaccaauucgcccuaggccaggggacuacacucaagaauaaacacaguaacggaaccacgcaugaucguacuccacacagaacccugcuuaugaaugagcugggcguccccuuucauuuggguacaaaacagguguguaucgcaugguccucuagcuccugcuaugacgggaaggccuggcuccacauuuguguuacuggagaugacaagaacgcuaccgcaucaaucaucuacgauggcaugcugguggacaguauuggcagcuggucuaaaaauauacugaggacacaggaauccgagugcgucuguaucaacgggaccugcgccgugguaaugacggauggaucagcuagcgguguugccgacacucggguccucuucauucgcgaaggcaagaucauaaauauuagaccuuuaagugggucugcgcaacacguggaggagugcuccuguuauccaagguacccggaagugcggugcgugugucgcgauaacuggaagggaagcaaccgacccaucaucuauauuaauauggcagacuacucgaucgagucuuccuacgucugcucaggccugguuggugauacaccuagaaacgacgacaguagcuccucuagcaauuguagggauccaaacaaugaacguggggcccccggagugaaaggcugggcuuuugacgauggcaacgacguauggauggggcggaccauuaagaauggaucacgcagugguuaugagacuuucagagugauaaacggcuggacaauggccaauuccaaaagccagaucaacaggcaggucauuguggauucugacgauuggucaggguacaguggaaucuuuagcguugaaggcaagaaaugcaucaaucgguguuucuauguggagcuuauucgaggucgcccucaggagccaagagucugguggaccuccaacucuauaaucguguuuugcgggacgucgggcaccuacggaacaggcagcuggcccgacggggcaaauauuaacuucaugccgaucuga

SEQ ID NO: 153888 - RNA, 1410 nt, Artificial Sequence; identical to SEQ ID NO: 150970
  derived and/or modified CDS sequence (opt3) from neuraminidase__InfluenzaA__AJI80140

SEQ ID NO: 153889 - RNA, 1410 nt, Artificial Sequence; identical to SEQ ID NO: 150970
  derived and/or modified CDS sequence (opt3) from neuraminidase__InfluenzaA__AJI80152

SEQ ID NO: 153890 - RNA, 1410 nt, Artificial Sequence; identical to SEQ ID NO: 153746
  derived and/or modified CDS sequence (opt3) from neuraminidase__InfluenzaA__AJI80164

SEQ ID NO: 153891 - RNA, 1410 nt, Artificial Sequence; identical to SEQ ID NO: 153685
  derived and/or modified CDS sequence (opt3) from neuraminidase__InfluenzaA__AJI80175

SEQ ID NO: 153892 - RNA, 1410 nt, Artificial Sequence; identical to SEQ ID NO: 153685
  derived and/or modified CDS sequence (opt3) from neuraminidase__InfluenzaA__AJI80187

SEQ ID NO: 153893 - RNA, 1410 nt, Artificial Sequence; identical to SEQ ID NO: 153685
  derived and/or modified CDS sequence (opt3) from neuraminidase__InfluenzaA__AJI80199

SEQ ID NO: 153894 - RNA, 1410 nt, Artificial Sequence; identical to SEQ ID NO: 153685
  derived and/or modified CDS sequence (opt3) from neuraminidase__InfluenzaA__AJI80211

SEQ ID NO: 153895 - RNA, 1410 nt, Artificial Sequence; identical to SEQ ID NO: 151919
  derived and/or modified CDS sequence (opt3) from neuraminidase__InfluenzaA__AJI80223

SEQ ID NO: 153896 - RNA, 1410 nt, Artificial Sequence; identical to SEQ ID NO: 153685
  derived and/or modified CDS sequence (opt3) from neuraminidase__InfluenzaA__AJI80235

SEQ ID NO: 153897 - RNA, 1410 nt, Artificial Sequence; identical to SEQ ID NO: 151919
  derived and/or modified CDS sequence (opt3) from neuraminidase__InfluenzaA__AJI80247

SEQ ID NO: 153898 - RNA, 1410 nt, Artificial Sequence; identical to SEQ ID NO: 153704
  derived and/or modified CDS sequence (opt3) from neuraminidase__InfluenzaA__AJI80259

SEQ ID NO: 153899 - RNA, 1410 nt, Artificial Sequence; identical to SEQ ID NO: 150194
  derived and/or modified CDS sequence (opt3) from neuraminidase__InfluenzaA__AJI80271

SEQ ID NO: 153900 - RNA, 1410 nt, Artificial Sequence; identical to SEQ ID NO: 153685
  derived and/or modified CDS sequence (opt3) from neuraminidase__InfluenzaA__AJI80283

SEQ ID NO: 153901 - RNA, 1410 nt, Artificial Sequence
  derived and/or modified CDS sequence (opt3) from neuraminidase__InfluenzaA__AJI80306
augaaccccaaucagaagaucauuaccauaggcagcgugucccugacaaucucuacuauuugcuucuuuaugcaaaucgccauucucaucacgaccgucacacuucacuucaaacaguacgaguuuaacucaccuccaaauaaccagguuaugcugugugaaccgacuauaaucgagagaaauauuaccgaaaucguguauuugacaaacaccacuauugagaaggaaaucugccccaaaccugcugaguacaggaauuggaguaagccacagugugggauaacaggauucgcacccuuuagcaaagacaacuccauucgguuaucugccgguggcgauaucuggguaacccgcgagccuuaugugucgugcgacccagauaaguguuaccaauucgcgcuggggcagggaacgacucuaaauaacguccauucaaauaacaccgugcucgaccgaacacccuaucguacucugcuuaugaaugaacugggcguuccuuuucacuuggguaccaaacaggugugcauugcuuggagcaguuccucuugucaugaugggaaggccuggcuccacgucugcaucacaggagacgauaagaacgcaaccgccagcuucaucuacaauggcagacugguggacuccguaguuucauggaguaaagagauucugaggacgcaggaaagcgagugugugugcauaaacggcacuuguacagucgugaugaccgaugggucugcuuccggaaaggcagacacuaaaauccucuuuauugaggaagguaagaucgugcauacaucaaccuuaagcggcagugcccaacacgucgaggaaugcucuugcuauccacgguacccggggguucgcugugugugcagagauaacuggaagggauccaauaggcccauaguagacauuaacaucaaagaucacagcaucgugucgucuuacgucuguuccggccuggugggugacacgccucggaagaaugacucaaguagcuccucucauugccuugauccaaacaaugaggaagggggacacggcguuaaaggcugggcuuucgacgaugggaacgacguguggaugggacgcaccauuaaugagacaagccgauuggguuaugagacuuuuaaggucaucgaaggcuggucaaaccccaaaaguaagcugcagauuaauaaacaggugauaguagauagaggggacagguccggauacagcggcaucuucucuguugaggguaagucauguauuaaccggugcuuuuauguggaacuaauccgugggcgcaaggaggaaaccgagguccucuggacaaguaauagcaucguggucuucuguggcacuuccggaaccuacggcacagggucuuggccugauggagccgaccugaaccuuaugccaauuuga

SEQ ID NO: 153902 - RNA, 1410 nt, Artificial Sequence
  derived and/or modified CDS sequence (opt3) from neuraminidase__InfluenzaA__AJI80318
augaaccccaaucagaagaucauuaccauaggcagcgugugcaugacaaucgggauggccaaccugauucuccaaaucggaaauauuaucuccauauggaucucucacucaauucagcuugguaaccagagucagaucgaggcuuguaaucaaaacgucauuacuuacgaaaauaacacguggguuaaucagaccuaugugaacaucagcaauacaaacuucgcaacuggccaguccguagugucugucaaacuggccggaaauucgucauugugcccugugagcgggugggcgauauacaguaaggacaacuccguuagaauuggcucuaaaggugauguguuugucaucagggagccauucauuagcuguuccccguuagaaugccggaccuuuuuccugacacagggggcucuacucaaugacaagcauucaaacggaaccaucaaagaucgcagucccuaucgaacucugaugagcuguccuaucggcgaggugccaucucccuacaacucccguuuugaaucaguagccuggagcgcaagugccugccacgacggcauuaauuggcuuacaauagggaucucuggaccugauuccggugcuguugcagugcugaaguauaacggcauuaucaccgacacgauaaagagcuggaaaaauaacauuuugagaacucaagagucggagugugccugcgucaaugggucuuguuucaccaucaugacagauggaccauccgacggccaggcuucauacaagaucuuuaggauugaaaaagguaagaucgugaaaaguguggagaugaacgcccccaauuaucauuacgaagagugcagcuguuacccugauuccucugagauuacuugcgucugccgggacaacuggcacgggagcaaucgcccauggguuucauucaaccagaaucucgaauaucagauaggauacaucuguaguggcguguuuggcgauaacccgagacccaaugacaagaccggguccugcggaccuguaagcucuaacggugcgaauggcgugaagggguucucauuuaaauauggaaacggcgucuggauugguaggacaaagaguaucagcucccggaaaggguucgagaugaucugggauccaaacggcuggaccggaacggacaauaacuuuucuauuaagcaagacauagugggcaucaaugaauggucgggguacagcggauccuucguucagcaucccgagcugacuggucuggauuguauucgcccuugcuucuggguggaacucauccgaggcagaccaaaagagaacacaauuuggaccucagggaguucuaucagcuuuuguggagucaauuccgacacugugggcuggucauggcccgauggugcagaguuaccguucacaauagacaaguga

SEQ ID NO: 153903 - RNA, 1410 nt, Artificial Sequence
  derived and/or modified CDS sequence (opt3) from neuraminidase__InfluenzaA__AJI80329
augaaccccaaucagaagaucauuaccauaggcagcgugugcaugacaaucgggauggccaaccugauucuccaaaucggaaauauuaucuccauauggaucucucacucaauucagcuugguaaccagagucagaucgagacuuguaaucaaagcgucauuacguacgaaaacaauaccuggguuaaccagacauaugugaauaucuccaacacuaauuucgcugcaggccagucuguagugucggucaaacuggccgggaacagcucauugugcccugugaguggaugggcgauauacuccaaggacaauucuguuagaauuggcagcaaaggugauguguuugucaucagggagccauucauuuccuguucaccguuagaaugccggaccuuuuuccugacacagggggcucuacucaacgacaagcauaguaauggaaccaucaaagaucgcagccccuaucgaacucugaugucuuguccuaucggcgaggugccaucccccuacaacucacguuuugaaagcguagccuggagugcaucugccugccacgacggcauuaacuggcuuacaauagggaucuccggaccugauagcggugcuguugcagugcugaaguauaauggcauuaucaccgacacgauaaagucguggaaaaacaauauuuugagaacucaagagucugagugugccugcgucaacggguccuguuucaccaucaugacagauggaccaucagacggccaggcuaguuacaagaucuuuaggauugaaaaagguaagaucgugaaaagcguggagaugaaugcccccaacuaucauuacgaagagugcuccuguuacccugauucuagcgagauuacuugcgucugccgggacaauuggcacgggucaaaccgcccauggguuaguuucaaucagaaccucgaauaucagauaggauacaucuguuccggcguguuuggcgauaauccgagacccaacgacaagaccgggagcugcggaccuguaucuucaaauggugcgaacggcgugaagggguucaguuuuaaauauggaaauggcgucuggauugguaggacaaagagcaucuccucucggaaaggguucgagaugaucugggauccaaacggcuggaccggaacggacaacaauuuuucgauuaagcaagacauagugggcaucaacgaauggagcggguacuccggaucauucguucagcaucccgagcugacuggucuggauuguauucgcccuugcuucuggguggaacucauccgaggcagaccaaaagagaauacaauuuggaccagugggucuagcaucuccuuuuguggagucaacucagacacugugggcuggagcuggcccgauggugcagaguuaccguucacaauagacaaguga

SEQ ID NO: 153904 - RNA, 1410 nt, Artificial Sequence
  derived and/or modified CDS sequence (opt3) from neuraminidase__InfluenzaA__AJI80340
augaaccccaaucagaagaucauuaccauaggcagcgugugcaugacaaucgggauggccaaccugauucuccaaaucggaaauauuaucuccauauggaucucucacucaauucagcuugguaaccagagucagaucgagacuuguaaucaaagcgucauuacguacgaaaacaauaccuggguuaaccagacauaugugaauaucuccaacacuaauuucgcugcaggccagucuguagugucggucaaacuggccgggaacagcucauugugcccugugaguggaugggcgauauacuccaaggacaauucuauuagaaucggcagcaaaggugauguuuuugugauuagggagccauucaucuccuguucaccguuagaaugccggaccuuuuuccugacacagggggcucuacucaacgacaagcauaguaauggaaccaucaaagaucgcagccccuaucgaacucugaugucuuguccuauuggcgaggucccaucccccuacaacucacguuuugaaagcguggccuggagugcaucugccugccacgacggcauaaacuggcuuacaaucgggauuuccggaccugauagcggugcuguagcaguucugaaguauaauggcaucauaaccgacacgauuaagucguggaaaaacaauaucuugagaacucaagagucugagugugccugcgugaacggguccuguuucaccaucaugacagauggaccaucagacggccaggcuaguuacaagauuuuuaggaucgaaaaagguaagauugucaaaagcguggagaugaaugcccccaacuauuacuacgaagagugcuccuguuauccugauucuagcgagauaacuugcgugugccgggacaauuggcaugggucaaaccgcccaugggucaguuucaaucagaaccucgaauaccagaucggauauauuuguuccggcaucuuuggcgauaauccgagacccaacgacaagaccgggagcugcggaccuguuucuucaaauggugcgaacggcgugaagggguucaguuuuaaauacggaaauggcguauggaucgguaggacaaagagcauuuccucucggaaaggguucgagaugauaugggauccaaacggcuggaccggaacggacaacaauuuuucgaucaagcaagacauugugggcaucaacgaauggagcggguauuccggaucauucguccagcaccccgagcugacuggucuggauuguauucgcccuugcuucuggguggaacucauccgaggcagaccaaaagagaauacaauauggaccagugggucuagcaucuccuuuuguggaguuaacucagacacugugggcuggagcuggcccgauggugcagaguuaccguucacaauugacaaguga

SEQ ID NO: 153905 - RNA, 1410 nt, Artificial Sequence; identical to SEQ ID NO: 150194
  derived and/or modified CDS sequence (opt3) from neuraminidase__InfluenzaA__AJI80351

SEQ ID NO: 153906 - RNA, 1410 nt, Artificial Sequence
  derived and/or modified CDS sequence (opt3) from neuraminidase__InfluenzaA__AJI80363
augaaccccaaucagaagaucauuaccauaggcagcgugucccugacaaucucuacuauuugcuucuuuaugcaaaucgccauucucaucacgaccgucacacuucacuucaaacaguacgaguuuaacucacugccuaauaaccagguuauguugugugaaccaacuauaaucgagagaaauauuaccgaaaucguguauuuaacaaacaccacuauugagaaggaaaucugcccgaaacccgcugaguacaggaauuggaguaagccucagugugggauaacaggauucgcaccauuuagcaaagacaacuccauucggcugucugccgguggcgauaucuggguaacccgcgagcccuaugugucgugcgacccugauaaguguuaccaauucgcgcuagggcagggaacgacucucaauaacguccauucaaauaacaccgcucgagaccguacaccauauagaacucugcuuaugaaugaacugggcgugcccuuucacuuggguaccaagcagguuugcauugccuggagcaguuccucuugucaugaugggaaagcauggcuccacgugugcaucacaggagacgauaagaacgccaccgcuagcuucaucuacaauggcaggcuggucgacuccgugguaucauggaguaaagagauucugcggacgcaggaaagcgaguguguuugcauaaacggcacuuguacaguggucaugaccgaugggucugcauccggaaaggccgacacuaaaauccucuuuauugaggaagguaagaucgugcauacaucaaccuuaagcggcggggcucaacacguggaggaaugcaguugcuauccucgcuacccaggagucagauguguuugcagggauaacuggaagggcucuaaucggccgauaguggacauuaacaucaaagaucacuccaucguaagcucguacguguguucuggucuggucggggacacgccccgcaagaaugacuccucaaguagcucccauugccuuaacccuaauaacgaggaaggaggccacggcgugaaagggugggccuucgaugacggaaaugauguuuggaugggucgaaccauuaacgagacaucuagauugggcuaugagacuuuuaaggugaucgaaggguggagcaauccaaaaucaaagcugcagauuaacaggcaggucauaguggaccggggagaucguaguggcuacuccgguaucuucagcguagaggggaaaucuuguauuaaucgcugcuuuuauguugaacuaaucagaggcaggaaggaggaaaccgaggugcucuggacaucaaacaguaucgucguguucuguggaacuagcggcaccuacgggacaggauccuggcccgacggugcggaucugaaucuuaugccuauuuga

SEQ ID NO: 153907 - RNA, 1410 nt, Artificial Sequence
  derived and/or modified CDS sequence (opt3) from neuraminidase__InfluenzaA__AJI80375
augaaccccaaucagaagaucauuaccauaggcagcgugucccugacaaucucuacuauuugccucuucaugcagaucgccauucuuaucacgaccgucacacugcacuuuaaacagcaugaguucaacucaccuccaaauaaccagguuauguugugugaaccgacuauaaucgagagaaauauuaccgaaaucguguacuuaacaaacaccacuauugagaaggaaaucugccccaaaccugcugaguauaggaauuggaguaagccacagugugggauaacaggauuugcacccuucagcaaagacaacuccauucggcugucugccgguggcgauaucuggguaacccgcgagccuuacgugucgugcgacccagauaaguguuaucaauuugcgcuagggcagggaacgacucucaauaacguccacucaaauaacaccgugcgagaccguacacccuacagaacucugcuuaugaaugaacugggcguuccuuuccauuuggguaccaaacaggugugcauugcuuggagcaguuccucuugucacgaugggaaggccuggcuccaugucugcaucacaggagacgauaagaacgcaaccgccagcuuuaucuauaauggcaggcugguggacuccguaguuucauggaguaaagagauucugcggacgcaggaaagcgagugugugugcauaaacggcacuuguacagucgugaugaccgaugggucugcuuccggaaaggcagacacuaaaauccucuucauugaggaagguaagaucgugcacacaucaaccuuaagcggcagugcccaacacgucgaggaaugcucuugcuacccacgcuauccggggguuagaugugugugcagggauaacuggaagggauccaaucggcccauaguagacauuaacaucaaagaucauagcaucgugucgucuuacgucuguuccggccuggugggugacacgccucgcaagaaugacucaaguagcuccucucacugccuugauccaaacaaugaggaagggggacauggcguuaaaggcugggcuuuugacgaugggaacgacguguggaugggacgaaccauuaaugagacaagcagauuggguuacgagacuuucaaggucaucgaaggcuggucaaaccccaaaaguaagcugcagauuaauaggcaagugauaguagaucguggggaccgguccggauauagcggcaucuuuucuguugaggguaaaucauguauuaaccgcugcuucuacguggaacuaaucagagggaggaaggaggaaaccgagguccucuggacaaguaauagcaucguggucuuuuguggcacuuccggaaccuauggcacagggucuuggccugauggagccgaccugaaccuuaugccaauuuga

SEQ ID NO: 153908 - RNA, 1410 nt, Artificial Sequence; identical to SEQ ID NO: 153724
  derived and/or modified CDS sequence (opt3) from neuraminidase__InfluenzaA__AJI80387

SEQ ID NO: 153909 - RNA, 1410 nt, Artificial Sequence; identical to SEQ ID NO: 153724
  derived and/or modified CDS sequence (opt3) from neuraminidase__InfluenzaA__AJI80398

SEQ ID NO: 153910 - RNA, 1410 nt, Artificial Sequence; identical to SEQ ID NO: 153724
  derived and/or modified CDS sequence (opt3) from neuraminidase__InfluenzaA__AJI80409

SEQ ID NO: 153911 - RNA, 1410 nt, Artificial Sequence; identical to SEQ ID NO: 153724
  derived and/or modified CDS sequence (opt3) from neuraminidase__InfluenzaA__AJI80420

SEQ ID NO: 153912 - RNA, 1410 nt, Artificial Sequence; identical to SEQ ID NO: 153724
  derived and/or modified CDS sequence (opt3) from neuraminidase__InfluenzaA__AJI80431

SEQ ID NO: 153913 - RNA, 1410 nt, Artificial Sequence; identical to SEQ ID NO: 153719
  derived and/or modified CDS sequence (opt3) from neuraminidase__InfluenzaA__AJI80442

SEQ ID NO: 153914 - RNA, 1410 nt, Artificial Sequence; identical to SEQ ID NO: 153724
  derived and/or modified CDS sequence (opt3) from neuraminidase__InfluenzaA__AJI80454

SEQ ID NO: 153915 - RNA, 1410 nt, Artificial Sequence; identical to SEQ ID NO: 153719
  derived and/or modified CDS sequence (opt3) from neuraminidase__InfluenzaA__AJI80465

SEQ ID NO: 153916 - RNA, 1410 nt, Artificial Sequence; identical to SEQ ID NO: 153724
  derived and/or modified CDS sequence (opt3) from neuraminidase__InfluenzaA__AJI80477

SEQ ID NO: 153917 - RNA, 1410 nt, Artificial Sequence; identical to SEQ ID NO: 153724
  derived and/or modified CDS sequence (opt3) from neuraminidase__InfluenzaA__AJI80488

SEQ ID NO: 153918 - RNA, 1410 nt, Artificial Sequence; identical to SEQ ID NO: 153746
  derived and/or modified CDS sequence (opt3) from neuraminidase__InfluenzaA__AJI80499

SEQ ID NO: 153919 - RNA, 1410 nt, Artificial Sequence; identical to SEQ ID NO: 153724
  derived and/or modified CDS sequence (opt3) from neuraminidase__InfluenzaA__AJI80510

SEQ ID NO: 153920 - RNA, 1410 nt, Artificial Sequence; identical to SEQ ID NO: 153746
  derived and/or modified CDS sequence (opt3) from neuraminidase__InfluenzaA__AJI80521

SEQ ID NO: 153921 - RNA, 1410 nt, Artificial Sequence
  derived and/or modified CDS sequence (opt3) from neuraminidase__InfluenzaA__AJJ98767
augaaccccaaucagaagaucauuaccauaggcagcgugucccugacaaucucuacuauuugcuucuuuaugcagaucgccauucucaucacgaccgucacacuucacuucaaacaguacgaguuuaacucaccuaguaauaaccagguuaugcugugugaaccaacuauaaucgagagaaauauuaccgaaaucguguauuugacaaacaccacuauugagaaggaaaaaugcccgaagcccgcugaguacaggaauuggagcaaaccucagugugacaucacaggguucgcaccauuuuccaaggauaacucuauacgguuaucggccggaggugacauuuggguaacccgcgagcccuaugugucaugcgauccugacaaguguuaccaauucgcgcugggccaggggacgacucuaaauaacguccauagcaauaacaccgugcgagaucguacaccauauagaacucuccugaugaaugaacuuggaguucccuuucaccugggcaccaaacaggugugcaucgcuuggaguuccucuagcugucaugacgguaaggccugguugcacgucugcauuacaggggaugacaaaaacgcaaccgccuccuucaucuacaauggaaggcucguggauucaguaguuaguuggagcaaggagauccugcggacgcaggaaucugagugugugugcauuaacggcacuuguacagucgugaugaccgacggcuccgcuucagggaaagcagauacuaagauacuguuuaucgaggaaggaaagauugugcauacaagcacccucagugguucugcccaacacgucgaggaaugcuccugcuauccucgcuacccaggcguuagaugugugugcagggacaacuggaaagggagcaaucggccgaucguagauauaaacauuaaggaccacucgaucgugucuuccuacgucuguucaggauuagugggcgacacgccccgcaaaaaugauaguagcuccucuagccauugccuggacccuaacaaugaggaaggugggcacggaguuaagggcugggcuuucgaugacggcgaugacguguggauggggcgaaccaucucagagaaaaguagacuuggauaugagacauuuaaggucauugaagguugguccaacccaaaaagcaaguugcagaucaauaggcaagugauuguagaucggggcaaccguucuggguacucaggaauauucaguguugagggcaagagcuguaucaaucgcugcuuuuauguggaacugauuagagguaggaaagaggaaacugacguccuauggaccuccaacucuaucguggucuucugugggacaucgggcacuuacggaaccggcagcuggcccgauggggccgacaucaaucucaugccuauuuga

SEQ ID NO: 153922 - RNA, 1410 nt, Artificial Sequence
  derived and/or modified CDS sequence (opt3) from neuraminidase__InfluenzaA__AJJ98779
augaaccccaaucagaagaucauuaccauaggcagcgugucccugacaaucucuacuauuugcuucuuuaugcaaacggccauccucauuaccacagucacucuucacuucaaacaguacgaguuuaacucaccuccaaauaaccagguuaugcugugugaaccgaccaucauagagagaaauaucacagaaauuguguauuugaccaacacuacaaucgagaaggaaauuugccccaaaccugcugaguacaggaauuggaguaagccacagugugacaucaccggguucgcacccuuuagcaaagauaacuccauacgguuaucugccggaggugacauuuggguaacgcgcgagccuuaugugucgugcgauccagacaaguguuaccaauucgcgcugggccaggggacuacccuaaauaacguccauucaaaugauacagugcgagaccguacucccuauagaacccuccugaugaacgaacuuggaguuccuuuucaccugggcacaaaacaggugugcaucgcuuggagcaguuccucuugucaugaugguaaggccugguugcacgucugcauuaccggggacgauaagaaugcaacggccagcuucaucuacaacggaaggcucguggacuccaucguaucauggacuaaagagauucugcggacacaggaaagugaguguguuugcauaaauggcaccuguacuguggucaugacagauggcagcgcuucugggaaggcagacaccaaaauccuguuuauugaggaaggaaagaucgugcauacguccacccucucagguagcgcccaacacguggaggaaugcaguugcuauccacgcuacccgggcgucagauguguuugcagggauaacuggaaggggucuaaccggcccauaguggacauuaauaucaaagaccacuccaucguaagcucguacguguguucuggauuagucggcgauacaccucgcaagaacgacuccucaaguagcucccauugccuggauccaaauaacgaggaaggugggcacggagugaaaggcugggcuuucgacgauggcaaugacguuuggauggggcgaacuauuucugagaagaguagacuuggauaugagaccuuuaaagugaucgaagguuggucaaaccccaagaguaaauugcagauuaauaggcaggucauaguggaucggggcaaccguuccggguacagcggaaucuucucuguagagggcaagucauguauuaaucgcugcuuuuauguugaacugaucagagguaggaaggaggaaacagaggugcuauggacuagcaacagcaucgucguguucugugggaccuccggcacauacggaaccggcucuuggccugacggggccgauauuaaucucaugccaauauga

SEQ ID NO: 153923 - RNA, 1410 nt, Artificial Sequence; identical to SEQ ID NO: 150194
  derived and/or modified CDS sequence (opt3) from neuraminidase__InfluenzaA__AJJ98791

SEQ ID NO: 153924 - RNA, 1410 nt, Artificial Sequence
  derived and/or modified CDS sequence (opt3) from neuraminidase__InfluenzaA__AJJ98803
augaaccccaaucagaagaucauuaccauaggcagcgugucccugacaaucucuacuauuugcuucuuuaugcagaucgccauucucaucacgaccgucacacuucacuucaaacaguacgaguuuaacucaccuccaaauaaccagguuaugcugugugaaccgacuauaaucgagagaaauauuaccgaaaucguguauuugacaaacaccacuauugagaaggaaaucugccccaaaccugcugaguacaggaauuggaguaagccacagugugggauaacaggauucgcacccuuuagcaaagacaacuccauucgguuaucugccgguggcgauaucuggguaacccgcgagccuuaugugucgugcgacccagauaaguguuaccaauucgcgcuggggcagggaacgacucuaaauaacguccauucaaauaacaaggugcgagaccguacccccuauagaacacuccugaugaaugaacuuggcguuccuuuucaccuggguacuaaacaggugugcauugcuuggagcaguuccucuugucaugaugggaaggccugguugcacgucugcaucaccggagacgauaaaaacgcaacagccagcuucaucuacaauggcaggcucguggacuccguaguuucauggaguaaggagauucugcggacccaggaaagcgagugugugugcauaaacggcacguguacugucgugaugacagaugggucugcuuccggaaaagcagacaccaagauccuguuuauugaggaagguaagaucgugcauacuucaacacucagcggcagugcccaacacgucgaggaaugcucuugcuauccacgcuacccggggguuagaugugugugcagggauaacuggaaaggauccaaucggcccauaguagacauuaacaucaaggaucacagcaucgugucgucuuacgucuguuccggcuuagugggugacaccccucgcaaaaaugacucaaguagcuccucucauugccuggauccaaacaaugaggaagggggacacggcguuaagggcugggcuuucgacgaugggaacgacguguggaugggacgaacgauuaaugagaccagcagacuugguuaugagacauuuaaagucaucgaaggcuggucaaaccccaagaguaaauugcagauuaauaggcaagugauaguagaucguggggaccgguccggauacagcggcaucuucucuguugaggguaagucauguauuaaccgcugcuuuuauguggaacugaucagagggaggaaggaggaaacugagguccuauggaccaguaauagcaucguggucuucuguggcacauccggaacuuacggcaccgggucuuggccugauggagccgaccucaaccugaugccaauuuga

SEQ ID NO: 153925 - RNA, 1410 nt, Artificial Sequence; identical to SEQ ID NO: 150194
  derived and/or modified CDS sequence (opt3) from neuraminidase__InfluenzaA__AJJ98815

SEQ ID NO: 153926 - RNA, 1410 nt, Artificial Sequence
  derived and/or modified CDS sequence (opt3) from neuraminidase__InfluenzaA__AJJ98827
augaaccccaaucagaagaucauuaccauaggcagcgugucccugacaaucucuacuauuugcuucuuuaugcagaucgccauucucaucacgaccgucacacuucacuucaaacaguacgaguuuaacucaccuccaaauaaccagguuaugcugugugaaccgacuauaaucgagagaaauauuaccgaaaucguguauuugacaaacaccacuauugagaaggaaaucugccccaaaccugcugaguacaggaauuggaguaagccacagugugggauaacaggauucgcacccuuuagcaaagacaacuccauucgguuaucugccgguggcgauaucuggguaacccgcgagccuuaugugucgugcgacccagauaaguguuaccaauucgcgcuggggcagggaacgacucuaaauaacguccauucaaauaacaccgugcgagaccguacacccuauagaacucuccugaugaaugaacuuggcguuccuuuucaccuggguaccaaacaggugugcauugcuuggagcaguuccucuugucaugaugggaaggccugguugcacgucugcaucacaggagacgauaagaacgcaaccgccagcuucaucuacaauggcaggcucguggacuccguaguuucauggaguaaagagauucugcggacgcaggaaagcgagugugugugcauaaacggcacuuguacagucgugaugaccgaugggucugcuuccggaaaggcagacacuaaaauccuguuuauugaggaagguaagaucgugcauacaucaacccucagcggcagugcccaacacgucgaggaaugcucuugcuauccacgcuacccggggguuagaugugugugcagggauaacuggaagggauccaaucggcccauaguagacauuaacaucaaagaucacaauaucgugagcucguacgucuguucuggcuuagugggugacacgccucgcaagaacgacuccucaaguagcucccauugccuggauccaaauaacgaggaagggggacacggcguuaaaggcugggcuuucgacgaugggaaugacguguggaugggacgaaccauuaacgagacaucuagacuugguuaugagacuuuuaaggucaucgaaggcuggagcaaucccaaaucaaaguugcagauuaacaggcaagugauaguagaucguggggaccggaguggauacuccggcaucuucagcguugaggguaaaucuuguauuaaucgcugcuuuuauguggaacugaucagagggaggaaggaggaaaccgagguccuauggacaucaaacaguaucguggucuucuguggcacuagcggaaccuacggcacaggguccuggccugauggagccgaccucaaucugaugccaauuuga

SEQ ID NO: 153927 - RNA, 1410 nt, Artificial Sequence; identical to SEQ ID NO: 149191
  derived and/or modified CDS sequence (opt3) from neuraminidase__InfluenzaA__AJJ98839

SEQ ID NO: 153928 - RNA, 1410 nt, Artificial Sequence; identical to SEQ ID NO: 147566
  derived and/or modified CDS sequence (opt3) from neuraminidase__InfluenzaA__AJJ98851

SEQ ID NO: 153929 - RNA, 1410 nt, Artificial Sequence
  derived and/or modified CDS sequence (opt3) from neuraminidase__InfluenzaA__AJJ98863
augaaccccaaucagaagaucauuaccauaggcagcgugucccugacaaucucuacuauuugcuucuuuaugcaaaucgccauucucaucacgaccgucacacuucacuucaaacaguacgaguuuaacucaccuccaaauaaccagguuaugcugugugaaccgacuauaaucgagagaaauauuaccgaaaucguguauuugacaaacaccacuauugagaaggaaaucugccccaaaccugcugaguacaggaauuggaguaagccacagugugacauaacaggguucgcacccuuuagcaaagauaacuccauucgguuaucugccggaggugacaucuggguaacccgcgagccuuaugugucgugcgauccagacaaguguuaccaauucgcgcugggccaggggacgacucuaaauaacguccauucaaauaacaccgugcgagaacguacacccuauagaacucuccugaugaaugagcuuggaguuccuuuucaccugggcaccaaacaggugugcauugcuuggagcaguuccucuugucaugaugguaaggccugguugcacgucugcaucacaggggacgauaagaacgcaaccgccagcuucaucuacaauggaaggcucguggacuccguaguuucauggaguaaagaaauucugcggacgcaggagagcgaguguauaugcaucaacggcacuuguacaguggucaugaccgauggcucugcuuccgggaaggcagacacuaaaauucuguuuaucgaagagggaaagauagugcauacaucaacccucagcgguagugcccaacacguggaagagugcucuugcuauccacgcuacccgggcgucagauguguuugcagggauaacuggaagggguccaaucggcccauuguggacaucaacaugaaagaucacagcaucguaucgucuuacguguguuccggauuagucggcgacacgccucgcaagaaugacucaaguagcuccucucauugccuggauccaaacaaugaagagggugggcacggagugaaaggcugggcuuucgacgauggcaacgacguuuggauggggcgaaccauuagcgagaagucaagacuuggauaugaaacauuuaaagugaucgaggguuggaguaaucccaaguccaaauugcagauuaacaggcaggucauaguggaucggggcaaucguagcggguacucuggaaucuucucaguagaaggcaagaguuguauuaaccgcugcuuuuauguugagcugaucagagguaggaaggaagagacugaggugcuauggaccagcaauuccaucgucguguucugugggacaucuggcacuuacggaaccggcucguggccugacggggccgauauuaaccucaugccaauauga

SEQ ID NO: 153930 - RNA, 1410 nt, Artificial Sequence
  derived and/or modified CDS sequence (opt3) from neuraminidase__InfluenzaA__AJJ98875
augaaccccaaucagaagaucauuaccauaggcagcgugucccugacaaucucuacuauuugcuucuuuaugcagaucgccauucucaucacgaccgucacacuucacuucaaacaguacgaguuuaacucaccuccaaauaaccagguuaugcugugugaaccgacuauaaucgagagaaauauuaccgaaaucguguauuugacaaacaccacuauugagaaggaaaucugccccaaaccugcugaguacaggaauuggaguaagccacagugugacauaacaggguucgcacccuuuagcaaagauaacuccauucgguuaucugccggaggugacaucuggguaacccgcgagccuuaugugucgugcgauccagacaaguguuaccaauucgcgcugggccaggggacgacucuaaauaacguccauucaaaugauaccgugcgaaaccguacacccuauagaacucuccugaugaaugaacuuggaguuccuuuucaccugggcaccaaacaggugugcauugcuuggagcaguuccucuugucaugacgguaaggccugguugcacgucugcaucacaggggaugacaagaacgcaaccgccagcuucaucuacaauggaaggcucguggauuccguaguuucauggaguaaagagauucugcggacgcaggaaagcgagugugugugcauaaacggcacuuguacagucgugaugaccgacggcucugcuuccgggaaggcagauacuaaaauccuguuuauugaggaaggaaagaucgugcauacaucaacccucagcgguagugcccaacacgucgaggaaugcucuugcuauccacgcuacccgggcguuagaugugugugcagggacaacuggaagggguccaaucggcccauaguagauauuaacaucaaagaccacagcaucgugucgucuuacgucuguuccggauuagugggcgacacgccucgcaagaaugauucaaguagcuccucucauugccuggacccaaacaaugaggaaggugggcacggaguuaaaggcugggcuuucgaugacggcaacgauguguggauggggcgaaccauuagcgagaagucaagacuuggauaugagacauuuaaagucaucgaagguuggaguaaucccaaguccaaauugcagauuaacaggcaagugauaguagaccggggcaaucguagcggguacucuggaaucuucucaguugagggcaagaguuguauuaaccgcugcuuuuauguggaacugaucagagguaggaaggaggaaacugagguccuauggaccagcaauuccaucguggucuucugugggacaucuggcacuuacggaaccggcucguggccugauggggccgacauuaaccucaugccaauauga

SEQ ID NO: 153931 - RNA, 1410 nt, Artificial Sequence
  derived and/or modified CDS sequence (opt3) from neuraminidase__InfluenzaA__AJJ98887
augaaccccaaucagaagaucauuaccauaggcagcgugucccugacaaucucuacuauuugcuucuuuaugcaaaucgccauucucaucacgaccgucacacuucacuucaaacaguacgaguuuaacucaccuccaaauaaccagguuaugcugugugaaccgacuauaaucgagagaaauauuaccgaaaucguguauuugacaaacaccacuauugagaaggaaaucugccccaaauuagcugaguacaggaauuggaguaagccucagugugacauaacaggguucgcaccauuuagcaaagauaacuccauucggcugucugccggaggugacaucuggguaacccgcgagcccuaugugucgugcgauccugacaaguguuaccaauucgcgcuaggccaggggacgacucucaauaacguccauucaaauaacaccgugcgaaaucguacaccauauagaacucugcuuaugaacgaacugggaguucccuuucacuugggcaccaaacaggugugcauugcuuggagcaguuccucuugucaugaugguaaggccuggcuccacgucugcaucacaggggacgauaagaaugcaaccgccagcuucaucuacaacggaaggcugguggacuccauuguaucauggaguaaagagauacugcggacgcaggaaagcgaguguguuugcaucaacggcacuuguacaguggucaugaccgauggcucugcuuccgggaaggcagacacuaaaauucucuuuaucgaggaaggaaagauagugcauacaucaaccuuaagcgguagugcccaacacguggaggaaugcucuugcuauccucgcuacccaggcgucagauguguuugcagggauaauuggaagggguccaaccggccgauuguggacaucaauaucaaagaucacagcauuguaucgucuuacguguguuccggacuggucggcgacacgccccgcaagaacgacucaaguagcuccucucauugccuugauccuaauaacgaggaaggugggcacggagugaaaggcugggcuuucgacgauggcaaugacguuuggauggggcgaaccaucagcgagaagucaagauugggauaugagacauuuaaagugauugaagguuggaguaacccaaaguccaaacugcagauaaauaggcaggucaucguggaucggggcaaccguagcggguacucuggaauuuucucaguagagggcaagaguuguaucaaucgcugcuuuuauguugaacuaaucagagguaggaaggaggaaacugacgugcucuggaccagcaacuccauugucguguucugugggacaucuggcacuuacggaaccggcucguggcccgauggggccgacauaaaucugaugccuaucuga

SEQ ID NO: 153932 - RNA, 1410 nt, Artificial Sequence
  derived and/or modified CDS sequence (opt3) from neuraminidase__InfluenzaA__AJJ98899
augaaccccaaucagaagaucauuaccauaggcagcgugucccugacaaucucuacuauuugcuucuuuaugcaaacggccauccucauuaccacagucacucuucacuucaaacaguacgaguuuaacucaccuccaaauaaccagguuaugcugugugaaccgaccaucauagagagaaauaucacagaaauuguguauuugaccaacacuacaaucgagaaggaaauuugccccaaauuagcugaguacaggaauuggaguaagccucagugugacaucaccggguucgcaccauuuagcaaagauaacuccauacggcugucugccggaggugacauuuggguaacgcgcgagcccuaugugucgugcgauccugacaaguguuaccaauucgcgcuaggccaggggacuacccucaauaacguccauucaaauaacacagugcgaaaucguacuccauauagaacccugcuuaugaacgaacugggaguucccuuucacuugggcacaaaacaggugugcaucgcuuggagcaguuccucuugucaugaugguaaggccuggcuccacgucugcauuaccggggacgauaagaaugcaacggccagcuucaucuacaacggaaggcugguggacuccaucguaucauggaguaaagagauucugcggacucaggaaagcgaguguguuugcauaaacggcacauguaccguggucaugacugauggcucugcuuccgggaaggcagacacaaaaauccucuuuauugaggaaggaaagaucgugcauaccucaacguuaagcgguagugcccaacacguggaggaaugcucuugcuauccucgcuacccaggcgucagauguguuugcagggauaauuggaagggguccaaccggccgauaguggacauuaauaucaaagaucacagcaucguaucgucuuacguguguuccggacuggucggcgacacaccccgcaagaacgacucaaguagcuccucucauugccuugauccuaauaacgaggaaggugggcacggagugaaaggcugggcuuucgacgauggcaaugacguuuggauggggcgaaccauuagcgagaagucaagauugggauaugagacuuuuaaagugaucgaagguuggaguaacccaaaguccaaacugcagauuaauaggcaggucauaguggaucggggcaaccguagcggguacucuggaaucuucucaguagagggcaagaguuguauuaaucgcugcuuuuauguugaacuaaucagagguaggaaggaggaaaccgaggugcucuggacaagcaacuccaucgucguguucugugggacuucuggcaccuacggaacaggcucguggcccgacggggccgauauuaaucugaugccuauauga

SEQ ID NO: 153933 - RNA, 1410 nt, Artificial Sequence; identical to SEQ ID NO: 150194
  derived and/or modified CDS sequence (opt3) from neuraminidase__InfluenzaA__AJJ98911

SEQ ID NO: 153934 - RNA, 1410 nt, Artificial Sequence; identical to SEQ ID NO: 150970
  derived and/or modified CDS sequence (opt3) from neuraminidase__InfluenzaA__AJJ98923

SEQ ID NO: 153935 - RNA, 1410 nt, Artificial Sequence
  derived and/or modified CDS sequence (opt3) from neuraminidase__InfluenzaA__AJJ98935
augaaccccaaucagaagaucauuaccauaggcagcgugucccugacaaucucuacuauuugcuucuuuaugcagaucgccauucucaucacgaccgucacacuucacuucaaaagauacgaguuuaacucaccuccaaauaaccagguuaugcugugugaaccgacuauaaucgagaggaauauuaccgaaaucguguauuugacaaacaccacuauugagaaggaaaucugccccaaaccugcugaguaccggaauuggaguaagccacagugugggauaacaggauucgcacccuuuagcaaagacaacuccauucgcuuaucugccgguggcgauaucuggguaacccgagagccuuaugugucgugcgacccagauaaguguuaccaguucgcgcuggggcaaggaacgacucuaaauaacguccauucaaauaacaccgugcgugacagaacacccuauaggacucuccugaugaaugaacuuggcguuccuuuucaccuggguaccaaacaggugugcauugcuuggagcaguuccucuugucaugaugggaaggccugguugcacgucugcaucacaggagacgauaagaacgcaaccgccagcuucaucuacaauggccggcucguggacuccguaguuucauggaguaaagagauucugcgcacgcaggaaagcgagugugugugcauaaacggcacuuguacagucgugaugaccgaugggucugcuuccggaaaggcagacacuaaaauccuguuuauugaggaagguaagaucgugcauacaucaacccucagcggcagugcccagcacgucgaggaaugcucuugcuauccaagauacccggggguuaggugugugugccgggauaacuggaagggauccaaucgccccauaguagacauuaacaucaaagaucacagcaucgugucgucuuacgucuguuccggcuuagugggugacacgccucgaaagaaugacucaaguagcuccucucauugccuggauccaaacaaugaggaagggggacacggcguuaaaggcugggcuuucgacgaugggaacgacguguggaugggaagaaccauuaaugagacaagcaggcuugguuaugagacuuuuaaggucaucgaaggcuggucaaaccccaaaaguaaguugcaaauuaaucggcaagugauaguagaucguggggaccgcuccggauacagcggcaucuucucuguugaggguaaaucauguauuaacagaugcuuuuauguggaacugaucagggggcggaaggaggaaaccgagguccuauggacaaguaauagcaucguggucuucuguggcacuuccggaaccuacggcacagggucuuggccugauggagccgaccucaaccugaugccaauuuga

SEQ ID NO: 153936 - RNA, 1410 nt, Artificial Sequence
  derived and/or modified CDS sequence (opt3) from neuraminidase__InfluenzaA__AJJ98947
augaaccccaaucagaagaucauuaccauaggcagcgugucccugacaaucucuacuauuugcuucuuuaugcaaaucgccauucucaucacgaccgucacacuucacuucaaacaguacgaguuuaacucaccuccaaauaaccagguuacucugugugaaccgaccauaaucgagagaaauauuacagaaaucguguauuugaccaacacuacaauugagaaggaaaucugccccaaauuagcugaguacaggaauuggaguaagccucagugugacauaaccggguucgcaccauuuagcaaagauaacuccauucggcugucugccggaggugacaucuggguaacgcgcgagcccuaugugucgugcgauccugacaaguguuaccaauucgcgcuaggccaggggacuacccucaauaacguccauucaaauaacacagugcgagaucguacuccauauagaacccugcuuaugaaugaacugggaguucccuuucacuugggcacaaaacaggugugcauugcuuggagcaguuccucuugucaugacgguaaggccuggcuccacgucugcaucaccgggaacgauaagaaugcaacggccagcuucaucuacaacggaaggcugguggacuccguaguuucauggaguaaagagauucugcggacucaggaaagcgagugugugugcauaaacggcacauguaccgucgugaugacugauggcucugcuuccgggaaggcagacacaaaaauccucuuuauugaggaaggaaagaucgugcauaccucaacguuaagcgguagugcccaacacgucgaggaaugcucuugcuauccucgcuacccaggcguuagaugugugugcagggauaauuggaagggguccaaccggccgauaguagacauuaauaucaaagaucacagcaucgugucgucuuacgucuguuccggacuggugggcgacacccccaggaagaacgacucaaguagcuccucucauugccuugauccuaauaacgaggaaggugggcacggaguuaaaggcugggcuuucgacgauggcaaugacguguggauggggcgaacaauuaacgagacuagcagauugggauaugagaccuuuaaggucaucgaagguuggucaaauccaaaaaguaagcugcagauuaaccgccaggugauaguagaucggggcaaucguuccggguacagcggaaucuucucuguugagggcaaaucauguauuaaccgcugcuuuuauguggaacuaaucagagguaggaaggaggaaacagagguccucuggaccaguaauagcaucguggucuucugugggacuuccggcacauacggaaccggcucuuggcccgacggggccgaucugaaccuuaugccuauuuga

SEQ ID NO: 153937 - RNA, 1410 nt, Artificial Sequence
  derived and/or modified CDS sequence (opt3) from neuraminidase__InfluenzaA__AJJ98971
augaaccccaaucagaagaucauuaccauaggcagcgugucccugacaaucucuacuauuugcuucuuuaugcagaucgccauucucaucacgaccgucacacuucacuucaaacaguacgaguuuaacucaccuccaaauaaccagguuaugcugugugaaccgacuauaaucgagagaaauauuaccgaaaucguguauuugacaaacaccacuauugagaaggaaaucugccccaaauuagcugaguacaggaauuggaguaagccucagugugacauaacaggguucgcaccauuuagcaaagauaacuccauucggcugucugccggaggugacaucuggguaacccgcgagcccuaugugucgugcgauccugacaaguguuaccaauucgcgcuaggccaggggacgacucucaauaacguccauucaaaugauaccgugcgaaaccguacaccauauagaacucugcuuaugaaugaacugggaguucccuuucacuugggcaccaaacaggugugcauugcuuggagcaguuccucuugucaugacgguaaggccuggcuccacgucugcaucacaggggaugacaagaacgcaaccgccagcuucaucuacaauggaaggcugguggauuccguaguuucauggaguaaagagauucugcggacgcaggaaagcgagugugugugcauaaacggcacuuguacagucgugaugaccgacggcucugcuuccgggaaggcagauacuaaaauccucuuuauugaggaaggaaagaucgugcauacaucaaccuuaagcgguagugcccaacacgucgaggaaugcucuugcuauccucgcuacccaggcguuagaugugugugcagggacaacuggaagggguccaaucggccgauaguagauauuaacaucaaagaccacagcaucgugucgucuuacgucuguuccggacuggugggcgacacgccccgcaagaaugauucaaguagcuccucucauugccuugacccuaacaaugaggaaggugggcacggaguuaaaggcugggcuuucgaugacggcaacgauguguggauggggcgaaccauuagcgagaagucaagauugggauaugagacauuuaaagucaucgaagguuggaguaauccaaaguccaaacugcagauuaacaggcaagugauaguagaccggggcaaucguagcggguacucuggaaucuucucaguugagggcaagaguuguauuaaccgcugcuuuuauguggaacuaaucagagguaggaaggaggaaacugagguccucuggaccagcaauuccaucguggucuucugugggacaucuggcacuuacggaaccggcucguggcccgauggggccgacauuaaccugaugccuauauga

SEQ ID NO: 153938 - RNA, 1410 nt, Artificial Sequence
  derived and/or modified CDS sequence (opt3) from neuraminidase__InfluenzaA__AJJ98995
augaaccccaaucagaagaucauuaccauaggcagcgugucccugacaaucucuacuauuugcuucuuuaugcagaucgccauucucaucacgaccgucacacuucacuucaaacaguacgaguuuaacucaccuccaaauaaccagguuaugcugugugaaccgacuauaaucgagagaaauaugaccgaaauuguguauuugacaaacaccacuaucgagaaggaaauuugccccaaaccugcugaguacaggaauuggaguaagccacagugugacaucacaggguucgcacccuuuagcaaagauaacuccauacgguuaucugccggaggugacauuuggguaacccgcgagccuuaugugucgugcgauccagacaaguguuaccaauucgcgcugggccaggggacgacucuaaauaacguccauucaaauaacaucgugcgagaucguacccccuauagaacacuccugaugaaugaacuuggaguuccuuuucaccugggcacuaaacaggugugcauugcuuggagcaguuccucuugucaugacgguaaggccugguugcacgucugcaucaccggggaugacaagaacgcaacagccagcuucaucuacaauggaaggcucguggauuccguaguuucauggaguaaagagauucugcggacccaggaaagcgagugugugugcauaaacggcacguguacugucgugaugacagacggcucugcuuccgggaaggcagauaccaaaauccuguuuauugaggaaggaaagaucgugcauacuucaacacucagcgguagugcccaacacgucgaggaaugcucuugcuauccacgcuacccgggcguuagaugugugugcagggacaacuggaagggguccaaucggcccauaguagauauuaacaucaaagaccacagcaucgugucgucuuacgucuguuccggauuagugggcgacaccccucgcaagaaugauucaaguagcuccucucauugccuggacccaaacaaugaggaaggugggcacggaguuaaaggcugggcuuucgaugacggcaacgauguguggauggggcgaacgauuaaugagaccagcagacuuggauaugagacauuuaaggucaucgaagguuggucaaaccccaaaaguaaguugcagauuaauaggcaagugauaguagaccgguccgaucguagcggcuacucugggaucuucucaguugagggaaaaaguuguauuaaccgcugcuuuuauguggaacugaucagaggcaggaaggaggaaacugagguccuauggaccagcaauuccaucguggucuucugugguacaucugggacuuacggcaccggaucguggccugacggcgccgaucucaaccugaugccaauuuga

SEQ ID NO: 153939 - RNA, 1410 nt, Artificial Sequence; identical to SEQ ID NO: 149191
  derived and/or modified CDS sequence (opt3) from neuraminidase__InfluenzaA__AJJ99007

SEQ ID NO: 153940 - RNA, 1410 nt, Artificial Sequence
  derived and/or modified CDS sequence (opt3) from neuraminidase__InfluenzaA__AJJ99019
augaaccccaaucagaagaucauuaccauaggcagcgugucccugacaaucucuacuauuugcuucuuuaugcaaacggccauccucauuaccacagucacucuucacuucaaacagugugaguuuaacucaccuccaaauaaccagguuaugcugugcgaaccgaccaucauagagagaaauaucacagaaauuguguacuugaccaacacuacaaucgagaaggaaauuugucccaaauuagcugaguauaggaauuggaguaagccucagugcgacaucaccggguucgcaccauuuagcaaagauaacuccauacggcugucugccggaggugacauuuggguaacgcgcgagcccuacgugucgugugauccugacaagugcuaucaauucgcgcuaggccaggggacuacccucaauaacguccauucaaauaacacagugcgagaucguacuccauacagaacccugcuuaugaaugaacugggaguucccuuucacuugggcacaaaacagguguguaucgcuuggagcaguuccucuugccaugacgguaaggccuggcuccacgucuguauuaccggggaugacaagaacgcaacggccagcuucaucuauaauggaaggcugguggauuccguaguuucauggaguaaagagauccugcggacucaggaaagcgagugcguguguauuaacggcacaugcaccgucgugaugacugacggcucugcuuccgggaaggcagauacaaaaauacucuuuaucgaggaaggaaagauugugcauaccucaacguuaagcgguagugcccaacacgucgaggaaugcucuuguuacccucgcuauccaggcguuagaugcguguguagggacaacuggaagggguccaaucggccgaucguagauauaaacauuaaagaccacagcaucgugucgaauuacgucugcucuggacuggugggcgacacccccaggaagaacgauuccucaaguagcucccauugucuugacccuaauaacgaggaaggugggcacggaguuaaaggcugggcuuucgaugacggcaaugauguguggauggggcgaacaaucucugaaaagagcagauuuggauacgagacuuucaaagucauugaggguuggucaaacccaaagaguaaauugcagaucaaucgccaggugauuguagaccggggcaaccguuccggguauagcggaauauuuucuguugagggcaagucaugcaucaaucgcuguuucuacguggaacugauuagagguaggaaggaggaaaccgagguccuauggacaaguaacagcaucguggucuucugcgggacuuccggcaccuauggaacaggcucuuggcccgauggggccgacaucaaucucaugccuauuuga

SEQ ID NO: 153941 - RNA, 1410 nt, Artificial Sequence
  derived and/or modified CDS sequence (opt3) from neuraminidase__InfluenzaA__AJJ99031
augaaccccaaucagaagaucauuaccauaggcagcgugucccugacaaucucuacuauuugcuucuuuaugcagaucgccauucucaucacgaccgucacacuucacuucaaacaguacgaguuuaacucaccuccaaauaaccagguuaugcugugugaaccgacuauaaucgagagaaauauuaccgaaaucguguauuugacaaacaccacuauugagaaggaaaucugccccaaauuagcugaguacaggaauuggaguaagccucagugugacauaacaggguucgcaccauuuagcaaagauaacuccauucggcugucugccggaggugacaucuggguaacccgcgagcccuaugugucgugcgauccugacaaguguuaccaauucgcgcuaggccaggggacgacuauuaauaacguccauucaaaugauaccgugcgagaccguacaccauauagaacucuccugaugaacgaacuuggaguucccuuucaccugggcaccaaacaggugugcaucgcuuggagcaguuccucuugucaugaugguaaggccugguugcacgucugcaucacaggggacgauaagaaugcaaccgccagcuucauuuacaacggaaggcucguggacuccguaguuucauggaguaaagagauacugcggacgcaggaaagcgagugugugugcaucaauggcacuuguacagucgugaugaccgauggcucugcuuccgggaaggcagacacuaaaauucuguuuaucgaggaaggaaagauagugcauacaucaacccucagcgguagugcccaacacgucgaggaaugcucuugcuauccucgcuacccaggcguuagaugugugugcagggauaacuggaagggguccaaccggccgauuguagacaucaauaucaaagaccacagcauugugucgucuuacgucuguuccggauuagugggcgauacgccccgcaagaacgacucaaguagcuccucucauugccuggauccuaauaacgaggaaggugggcacggaguuaaaggcugggcuuucgacgauggcaaugacguguggauggggcgaaccaucagcgagaagucaagacuuggauaugagacauuuaaagucauugaagguuggaguaacccaaaguccaaauugcagauaaauaggcaagugaucguagaucggggcaaccguagcggguacucuggaauuuucucaguugagggcaagaguuguaucaaucgcugcuuuuauguggaacugaucagagguaggaaggaggaaacugagguccuauggaccagcaacuccauuguggucuucugugggacaucuggcacuuacggaaccggcucguggcccgacggggccgauauaaaucucaugccuaucuga

SEQ ID NO: 153942 - RNA, 1410 nt, Artificial Sequence
  derived and/or modified CDS sequence (opt3) from neuraminidase__InfluenzaA__AJJ99043
augaaccccaaucagaagaucauuaccauaggcagcgugucccugacaaucucuacuauuugcuucuuuaugcaaaucgccauucucaucacgaccgucacacuucacuucaaacaguacgaguuuaacucaccuccaaauaaccagguuaugcugugugaaccgacuauaaucgagagaaauauuaccgaaaucguguauuugacaaacaccacuauugagaaggaaaucugccccaaauuagcugaguacaggaaguggaguaaaccucaguguaauauaacaggguucgcaccauuuagcaaggacaacuccauucggcugucugccggaggugauaucuggguaacccgcgagcccuaugugucgugcgacccugauaaguguuaccaauucgcgcuaggccaggggacgacucucaauaacguccauucaaaugacaccgugcgagaucguacaccauauagaacucugcuuaugaacgaacugggaguucccuuucacuugggcaccaaacaggugugcauugcuuggagcaguuccucuugucaugacgguaaggccuggcuccacgucugcgugacaggggaugacaaaaaugcaaccgccagcuucaucuacaacggaaggcugguagauuccaucguuucauggaguaaggagauucugcggacgcaggaaagcgagugugugugcauaaauggcacuuguacagucgugaugaccgacggcucugcuuccgggaaagcagauacuaagauccucuuuauugaggaaggaaagaucgugcauacaucaaccuuaagcgguagugcccaacacgucgaggaaugcucuugcuauccucgcuacccaggcguuagaugugugugcagggacaacuggcggggguccaaccgcccgauaguagauauuaauaugaaagacuacagcaucgugucgucuuaugucuguuccggacuggugggcgacacgccccgaaagaacgauucaaguagcuccggucacugccuugacccuaauaacgaggaagggggacauggcguuaaaggcugggcuuucgaugacgggaaugauguguggaugggaagaaccaucucugaaaagagcaggucagguuacgagacauuuaaagucauugagggcuggaguaacccaaauuccaaguugcagaucaaccgucaggugauuguagaccgggggaaucgcagcggauauucuggcauauucucaguugaggguaaaaguuguaucaacagaugcuuuuacguggaacugauuagggggcggaaggaggaaacugagguccuauggaccagcaauuccaucguggucuucuguggcacaucuggaacuuauggcaccgggucguggcccgauggagccgacaucaaccucaugccuauuuga

SEQ ID NO: 153943 - RNA, 1410 nt, Artificial Sequence
  derived and/or modified CDS sequence (opt3) from neuraminidase__InfluenzaA__AJJ99067
augaaccccaaucagaagaucauuaccauaggcagcgugucccugacaaucucuacuauuugcuucuuuaugcagaucgccauucucaucacgaccgucacacuucacuucaaacaguacgaguuuaacucaccuccaaauaaccagguuaugcugugugaaccgacuauaaucgagagaaauauuaccgaaaucguguauuugacaaacaccacuauugagaaggaaaucugccccaaaccugcugaguacaggaauuggaguaagccacagugugggauaacaggauucgcacccuuuagcaaagacaacuccauucgguuaucugccgguggcgauaucuggguaacccgcgagccuuaugugucgugcgacccagauaaguguuaccaauucgcgcuggggcagggaacgacucuaaauaacguccauucaaauaacaccgugcgaggccguacacccuauagaacucuccugaugaaugaacuugguguuccuuuucaccuggggaccaaacaggugugcauugcuuggagcaguuccucuugucaugacggaaaggccugguugcacgucugcaucacaggcgaugacaagaacgcaaccgccagcuucaucuacaauggcaggcucguggauuccguaguuucauggaguaaagacauucugcggacgcaggagagcgaaugugugugcauaaacgggacuuguacagucgugaugaccgauggaucugcuuccgguaaggcagacacuaaaauccuguuuauugaggagggcaagaucgugcauacaucaacccucagcgggagugcccaacacgucgaagagugcucuugcuauccacgcuacccgggaguuagaugugugugcagggauaacuggaagggcuccaaucggcccauaguagacauuaacaucaaagaucacagcaucgugucgucuuacgucuguuccgguuuagugggggacacgccucgcaagaaugacucaaguagcuccucucauugccuggauccaaacaaugaagagggaggccacggcguuaaagggugggcuuucgacgauggaaacgacguguggaugggucgaaccauuaaugaaacaagcagacuuggcuaugagacuuuuaaggucaucgagggguggucaaaccccaaaaguaaguugcagauuaauaggcaagugauaguagaucggggagaccguuccggcuacagcgguaucuucucuguugaagggaaaucauguauuaaccgcugcuuuuauguggagcugaucagaggcaggaaggaagagaccgaaguccuauggacaaguaauagcaucguggucuucuguggaacuuccggcaccuacgggacaggaucuuggccugauggugccgaccucaaccugaugccaauuuga

SEQ ID NO: 153944 - RNA, 1410 nt, Artificial Sequence
  derived and/or modified CDS sequence (opt3) from neuraminidase__InfluenzaA__AJJ99079
augaaccccaaucagaagaucauuaccauaggcagcgugucccugacaaucucuacuauuugcuucuuuaugcagaucgccauucucaucacgaccgucacacuucacuucaaacaguacgaguuuaacucaccuccaaauaaccagguuaugcugugugaaccgacuauaaucgagagaaauauuaccgaaaucguguauuugacaaacaccacuauugagaaggaaaucugccccaaaccugcugaguacaggaauuggaguaagccacagugugggauaacaggauucgcacccuuuagcaaagacaacuccauucgguuaucugccgguggcgauaucuggguaacccgcgagccuuaugugucgugcgacccagauaaguguuaccaauucgcgcuggggcagggaacgacucuaaauaacguccauucaaauaacaccgugcgaaaucguacacccuauagaacucuccugaugaacgaacuuggcguuccuuuucaccuggguaccaaacaggugugcauugcuuggagcaguuccucuugucaugacgggaaggccugguugcacgucugcaucacaggagaugacaagaaugcaaccgccagcuucaucuacaacggcaggcucguggauuccguaguuucauggaguaaagagauucugcggacgcaggaaagcgagugugugugcauaaacggcacuuguacagucgugaugaccgacgggucugcuuccggaaaggcagauacuaaaauccuguuuauugaggaagguaagaucgugcauacaucaacccucagcggcagugcccaacacgucgaggaaugcucuugcuauccacgcuacccggggguuagaugugugugcagggacaauuggaagggauccaaccggcccauaguagauauuaauaucaaagaccacagcaucgugucgucuuacgucuguuccggcuuagugggugauacgccucgcaagaacgacucaaguagcuccucucauugccuggacccaaauaacgaggaagggggacacggcguuaaaggcugggcuuucgaugacgggaaugauguguggaugggacgaaccauuaacgagacaagcagacuugguuaugagacuuuuaaggucaucgaaggcuggucaaaucccaaaaguaaguugcagauuaacaggcaagugauaguagaccguggggaucgguccggauacagcggcaucuucucuguugaggguaaaucauguauuaaucgcugcuuuuauguggaacugaucagagggaggaaggaggaaaccgagguccuauggacaaguaacagcaucguggucuucuguggcacuuccggaaccuacggcacagggucuuggccugacggagccgaucucaaucugaugccaauuuga

SEQ ID NO: 153945 - RNA, 1410 nt, Artificial Sequence
  derived and/or modified CDS sequence (opt3) from neuraminidase__InfluenzaA__AJJ99091
augaaccccaaucagaagaucauuaccauaggcagcgugucccugacaaucucuacuauuugcuucuuuaugcaaaucgccauucucaucacgaccgucacacuucacuucaaacaguacgaguuuaacucaccuccaaauaaccagguuaugcugugugaaccgacuauaaucgagagaaauauuaccgaaaucguguauuugacaaacaccacuauugagaaggaaaucugccccaaaccugcugaguacaggaauuggaguaagccacagugugggauaacaggauucgcacccuuuagcaaagacaacuccauucgguuaucugccgguggcgauaucuggguaacccgcgagccuuaugugucgugcgacccagauaaguguuaccaauucgcgcuggggcagggaacgacucuaaauaacguccauucaaauaacaccgugcgagaccguacacccuauagaacucuccugaugaaugaacuuggcguuccuuuucaccuggguaccaaacaggugugcauugcuuggagcaguuccucuugucaugaugggaaggccugguugcacgucugcaucacaggagacgauaagaacgcaaccgccagcuucaucuacaauggcaggcucguggacuccguaguuucauggaguaaagagauucugcggacgcaggaaagcgagugugugugcauaaacggcacuuguacagucgugaugaccgaugggucugcuuccggaaaggcagacacuaaaauccuguuuauugaggaagguaagaucgugcauacaucaacccucagcggcagugcccaacacgucgaggaaugcucuugcuauccacgcuacccggggguuagaugugugugcagggauaacuggaagggauccaaucggcccauaguagacauuaacaucaaagaucacagcaucgugucgucuuacgucuguuccggcuuagugggugacacgccucgcaagaaugacucaaguagcuccucucauugccuggauccaaacaaugaggaagggggacacggcguuaaaggcugggcuuucgacgaugggaacgaccuuuggaugggacgaaccauuaaugagacaagcagauuggguuaugagacuuuuaaggugaucgaaggcuggucaaaccccaaaaguaagcugcagauuaauaggcaggucauaguggaucguggggaccgguccggauacagcggcaucuucucuguagaggguaaaucauguauuaaccgcugcuuuuauguugaacuaaucagagggaggaaggaggaaaccgaggugcucuggacaaguaauagcaucgucguguucuguggcacuuccggaaccuacggcacagggucuuggccugauggagccgaccugaaccuuaugccaauuuga

SEQ ID NO: 153946 - RNA, 1410 nt, Artificial Sequence
  derived and/or modified CDS sequence (opt3) from neuraminidase__InfluenzaA__AJJ99103
augaaccccaaucagaagaucauuaccauaggcagcgugucccugacaaucucuacuauuugcuucuuuaugcagaucgccauucucaucacgaccgucacacuucacuucaaacaguacgaguuuaacucaccuccaaauaaccagguuaugcugugugaaccgacuauaaucgagagaaauaugaccgaaauuguguauuugacaaacaccacuaucgagaaggaaauuugccccaaaccugcugaguacaggaauuggaguaagccacagugugacaucacaggguucgcacccuuuagcaaagauaacuccauacgguuaucugccggaggugacauuuggguaacccgcgagccuuaugugucgugcgauccagacaaguguuaccaauucgcgcugggccaggggacgacucuaaauaacguccauucaaauaacaccgugcgaaaucguacacccuauagaacucuccugaugaacgaacuuggaguuccuuuucaccugggcaccaaacaggugugcaucgcuuggagcaguuccucuugucaugaugguaaggccugguugcacgucugcauuacaggggacgauaagaaugcaaccgccagcuucaucuacaacggaaggcucguggacuccguaguuucauggaguaaagagauccugcggacgcaggaaagcgagugugugugcauuaacggcacuuguacagucgugaugaccgauggcucugcuuccgggaaggcagacacuaaaauacuguuuaucgaggaaggaaagauugugcauacaucaacccucagcgguagugcccaacacgucgaggaaugcucuugcuauccacgcuacccgggcguuagaugugugugcagggauaauuggaagggguccaaccggcccaucguagacauaaauauuaaagaucacagcaucgugucgucuuacgucuguuccggauuagugggcgacacgccucgcaagaacgacucaaguagcuccucucauugccuggauccaaauaacgaggaaggugggcacggaguuaaaggcugggcuuucgacgauggcaaugacguguggauggggcgaaccaucaacgagacaagcagacuuggauaugagacuuuuaaggucauugaagguuggucaaaucccaaaaguaaguugcagaucaacaggcaagugauuguagaucgguccgaccguagcggcuacucugggauauucucaguugagggaaaaaguuguaucaaucgcugcuuuuauguggaacugauuagaggcaggaaggaggaaaccgagguccuauggacaagcaacuccaucguggucuucugugguacuucugggaccuacggcacaggaucguggccugauggcgccgaccucaaucugaugccaaucuga

SEQ ID NO: 153947 - RNA, 1410 nt, Artificial Sequence; identical to SEQ ID NO: 153413
  derived and/or modified CDS sequence (opt3) from neuraminidase__InfluenzaA__AJJ99115

SEQ ID NO: 153948 - RNA, 1410 nt, Artificial Sequence; identical to SEQ ID NO: 152333
  derived and/or modified CDS sequence (opt3) from neuraminidase__InfluenzaA__AJJ99127

SEQ ID NO: 153949 - RNA, 1410 nt, Artificial Sequence; identical to SEQ ID NO: 153621
  derived and/or modified CDS sequence (opt3) from neuraminidase__InfluenzaA__AJJ99139

SEQ ID NO: 153950 - RNA, 1410 nt, Artificial Sequence
  derived and/or modified CDS sequence (opt3) from neuraminidase__InfluenzaA__AJJ99151
augaaccccaaucagaagaucauuaccauaggcagcgugucccugacaaucucuacuauuugcuucuuuaugcagaucgccauucucaucacgaccgucacacuucacuucaaacaguacgaguuuaacucaccuccaaauaaccagguuaugcugugugaaccgacuauaaucgagagaaauauuaccgaaaucguguauuugacaaacaccacuauugagaaggaaaucugccccaaaccugcugaguacaggaauuggaguaagccacagugugacauaacaggguucgcacccuuuagcaaagauaacuccauucgguuaucugccggaggugacaucuggguaacccgcgagccuuaugugucgugcgauccagacaaguguuaccaauucgcgcugggccaggggacgacucuaaauaacguccauucaaauaacaccgugcgagaucguacacccuauagaacucuccugaugaaugaacuuggaguuccuuuucaccugggcaccaaacaggugugcauugcuuggagcaguuccucuugucaugacgguaaggccugguugcacgucugcaucacaggggaugacaagaacgcaaccgccagcuucaucuacaauggaaggcucguggauuccguaguuucauggaguaaagagauucugcggacgcaggaaagcgagugugugugcauaaacggcacuuguacagucgugaugaccgacggcucugcuuccgggaaggcagauacuaaaauccuguuuauugaggaaggaaagaucgugcauacaucaacccucagcgguagugcccaacacgucgaggaaugcucuugcuauccacgcuacccgggcguuagaugugugugcagggacaacuggaagggguccaaucggcccauaguagauauuaacaucaaagaccacagcaucgugucgucuuacgucuguuccggauuagugggcgacacgccucgcaagaaugauucaaguagcuccucucauugccuggacccaaacaaugaggaaggugggcacggaguuaaaggcugggcuuucgaugacggcaacgauguguggauggggcgaaccauuagcgagaagucaagacuuggauaugagacauuuaaagucaucgaagguuggaguaaucccaaguccaaauugcagauuaacaggcaagugauaguagaccggggcaaucguagcggguacucuggaaucuucucaguugagggcaagaguuguauuaaccgcugcuuuuauguggaacugaucagagguaggaaggaggaaacugagguccuauggaccagcaauuccaucguggucuucugugggacaucuggcacuuacggaaccggcucguggccugauggggccgacauuaaccucaugccaauauga

SEQ ID NO: 153951 - RNA, 1410 nt, Artificial Sequence; identical to SEQ ID NO: 144647
  derived and/or modified CDS sequence (opt3) from neuraminidase__InfluenzaA__AJJ99163

SEQ ID NO: 153952 - RNA, 1410 nt, Artificial Sequence
  derived and/or modified CDS sequence (opt3) from neuraminidase__InfluenzaA__AJJ99175
augaaccccaaucagaagaucauuaccauaggcagcgugucccugacaaucucuacuauuugccucuucaugcagaucgccauucuuaucacgaccgucacacugcacuuuaaacaguacgaguucaacucaccuccaaauaaccagguuauguugugugaaccgacuauaaucgagagaaauauuaccgaaaucguguauuuaacaaacaccacuauugagaaggaaaucugccccaaacuggcugaguacaggaauuggaguaagccucagugugacauaacaggguuugcaccauucagcaaagauaacuccauucggcuaucugccggaggugacaucuggguaacccgcgagcccuaugugucgugcgauccugacaaguguuaccaauuugcgcucggccaggggacgacucugaauaacguccauucaaauaacaccgugcgagaucguacaccauauagaacucuucugaugaaugaauugggaguucccuuccaccucggcaccaaacaggugugcauugcuuggagcaguuccucuugucaugacgguaaggccuggcugcacgucugcaucacaggggaugacaagaacgcaaccgccagcuuuaucuacaauggaaggcugguggauuccguaguuucauggaguaaagagauucuccggacgcaggaaagcgagugugugugcauaaacggcacuuguacagucgugaugaccgacggcucugcuuccgggaaggcagauacuaaaaucuuauucauugaggaaggaaagaucgugcauacaucaacccugagcgguagugcccaacacgucgaggaaugcucuugcuauccucgcuacccaggcguuagaugugugugcagggacaacuggaagggguccaaucggccgauaguagauauuaacaucaaagaccacagcaucgugucgucuuacgucuguuccggacuugugggcgacacgccccgcaagaaugauucaaguagcuccucucauugcuuggacccuaacaaugaggaaggugggcacggaguuaaaggcugggcuuuugaugacggcaacgauguguggauggggcgaaccauuagcgagaagucaagacugggauaugagacauucaaagucaucgaagguuggaguaauccaaaguccaaacuacagauuaacaggcaagugauaguagaccggggcaaucguagcggguacucuggaaucuuuucaguugagggcaagaguuguauuaaccgcugcuucuauguggaacucaucagagguaggaaggaggaaacugagguccuguggaccagcaauuccaucguggucuuuugugggacaucuggcacuuacggaaccggcucguggcccgaugggacagacauuaaccuuaugccuauauga

SEQ ID NO: 153953 - RNA, 1410 nt, Artificial Sequence
  derived and/or modified CDS sequence (opt3) from neuraminidase__InfluenzaA__AJJ99199
augaaccccaaucagaagaucauuaccauaggcagcgugucccugacaaucucuacuauuugcuucuuuaugcaaaucgccauucucaucacgaccgucacacuucacuucaaacaguacgaguuuaacucaccuccaaauaaccagguuaugcugugugaaccgacuauaaucgagagaaauauuaccgaaaucguguauuugacaaacaccacuauugagaaggaaaucugccccaaauuagcugaguacaggaauuggaguaagccucagugugacauaacaggguucgcaccauuuagcaaagauaacuccauucggcugucugccggaggugacaucuggguaacccgcgagcccuaugugucgugcgauccugacaaguguuaccaauucgcgcuaggccaggggacgacucucaauaacguccauucaaaugauaccgugcgaaaccguacaccauauagaacucugcuuaugaaugaacugggaguucccuuucacuugggcaccaaacaggugugcauugcuuggagcaguuccucuugucaugacgguaaggccuggcuccacgucugcaucacaggggaugacaagaacgcaaccgccagcuucaucuacaauggaaggcugguggauuccauuguaucauggaguaaagagauacugcggacgcaggaaagcgaguguguuugcaucaacggcacuuguacaguggucaugaccgacggcucugcuuccgggaaggcagauacuaaaauucucuuuaucgaggaaggaaagauagugcauacaucaaccuuaagcgguagugcccaacacguggaggaaugcucuugcuauccucgcuacccaggcgucagauguguuugcagggacaacuggaagggguccaaucggccgauuguggauaucaacaucaaagaccacagcauuguaucgucuuacguguguuccggacuggucggcgacacgccccgcaagaaugauucaaguagcuccucucauugccuugacccuaacaaugaggaaggugggcacggagugaaaggcugggcuuucgaugacggcaacgauguuuggauggggcgaaccaucagcgagaagucaagauugggauaugagacauuuaaagugauugaagguuggaguaauccaaaguccaaacugcagauaaacaggcaggucaucguggaccggggcaaucguagcggguacucuggaauuuucucaguagagggcaagaguuguaucaaccgcugcuuuuauguugaacuaaucagagguaggaaggaggaaacugaggugcucuggaccagcaauuccauugucguguucugugggacaucuggcacuuacggaaccggcucguggcccgauggggccgacauaaaccugaugccuaucuga

SEQ ID NO: 153954 - RNA, 1410 nt, Artificial Sequence; identical to SEQ ID NO: 144791
  derived and/or modified CDS sequence (opt3) from neuraminidase__InfluenzaA__AJJ99211

SEQ ID NO: 153955 - RNA, 1410 nt, Artificial Sequence
  derived and/or modified CDS sequence (opt3) from neuraminidase__InfluenzaA__AJJ99223
augaaccccaaucagaagaucauuaccauaggcagcgugucccugacaaucucuacuauuugcuucuuuaugcagaucgccauucucaucacgaccgucacacuucacuucaaacaguacgaguuuaacucaccuccaaauaaccagguuaugcugugugaaccgacuauaaucgagagaaauauuaccgaaaucguguauuugacaaacaccacuauugagaaggaaaucugccccaaauuagcugaguacaggaauuggaguaagccucagugugacauaacaggguucgcaccauuuagcaaagauaacuccauucggcugucugccggaggugacaucuggguaacccgcgagcccuaugugucgugcgauccugacaaguguuaccaauucgcgcuaggccaggggacgacucucaauaacguccauucaaaugauaccgugcgaaaccguacaccauauagaacucugcuuaugaaugaacugggaguucccuuucacuugggcaccaaacaggugugcauugcuuggagcaguuccucuugucaugacgguaaggccuggcuccacgucugcaucacaggggaugacaagaacgcaaccgccagcuucaucuacaauggaaggcugguggauuccauuguaucauggaguaaagagauacugcggacgcaggaaagcgaguguguuugcaucaacggcacuuguacaguggucaugaccgacggcucugcuuccggggaggcagauacuaagauucucuuuaucgaagagggaaaaauagugcauacaucaaccuuaagcgguagugcccaacacguggaagagugcucuugcuauccucgcuacccaggcgucagauguguuugcagggacaacuggaagggguccaaucggccgauuguggauaucaacaucaaggaccacagcauuguaucgucuuacguguguuccggacuggucggcgacacgccccgcaaaaaugauucaaguagcuccucucauugccuugacccuaacaaugaagagggugggcacggagugaagggcugggcuuucgaugacggcaacgauguuuggguggggcgaaccaucagcgagaaaucaagauugggauaugaaacauuuaaggucauugaggguuggaguaauccaaaauccaagcugcagauaaacaggcaagugaucguagaccggggcaaucguagcggguacucuggaauuuucucaguugaaggcaaaaguuguaucaaccgcugcuuuuauguggagcuaaucagagguaggaaggaagagacugagguccucuggaccagcaauuccauuguggucuucugugggacaucuggcacuuacggaaccggcucguggcccgauggggccgacauaaaccugaugccuaucuga

SEQ ID NO: 153956 - RNA, 1410 nt, Artificial Sequence
  derived and/or modified CDS sequence (opt3) from neuraminidase__InfluenzaA__AJJ99235
augaaccccaaucagaagaucauuaccauaggcagcgugucccugacaaucucuacuauuugcuucuuuaugcaaaucgccauucucaucacgaccgucacacuucacuucaaacaguacgaguuuaacucaccuccaaauaaccagguuaugcugugugaaccgacuauaaucgagagaaauauuaccgaaaucguguauuugacaaacaccacuauugagaaggaaaucugccccaaaccugcugaguacaggaauuggaguaagccacagugugacauaacaggguucgcacccuuuagcaaagauaacuccauucgguuaucugccggaggugacaucuggguaacccgcgagccuuaugugucgugcgauccagacaaguguuaccaauucgcgcugggccaggggacgacucuaaauaacguccauucaaaugauaccgugcgagaccguacacccuauagaacucuccugaugaacgaacuuggaguuccuuuucaccugggcaccaaacaggugugcauugcuuggagcaguuccucuugucaugaugguaaggccugguugcacgucugcaucacaggggacgauaagaaugcaaccgccagcuucaucuacaacggaaggcucguggacuccauuguaucauggaguaaagagauacugcggacgcaggaaagcgaguguguuugcaucaauggcacuuguacaguggucaugaccgauggcucugcuuccggggaggcagacacuaagauucuguuuaucgaagagggaaaaauagugcauacaucaacccucagcgguagugcccaacacguggaagagugcucuugcuauccacgcuacccgggcgucagauguguuugcagggauaacuggaagggguccaaccggcccauuguggacaucaauaucaaggaccacagcauuguaucgucuuacguguguuccggauuagucggcgauacgccucgcaaaaacgacucaaguagcuccucucauugccuggauccaaauaacgaagagggugggcacggagugaagggcugggcuuucgacgauggcaaugacguuuggauggggcgaaccaucagcgagaaaucaagacuuggauaugaaacauuuaaggugauugaggguuggaguaaccccaaauccaaguugcagauaaauaggcaggucaucguggaucggggcaaccguagcggguacucuggaauuuucucaguagaaggcaaaaguuguaucaaucgcugcuuuuauguugagcugaucagagguaggaaggaagagacugaggugcuauggaccagcaacuccauugucguguucugugggacaucuggcacuuacggaaccggcucguggccugacggggccgauauaaaucucaugccaaucuga

SEQ ID NO: 153957 - RNA, 1410 nt, Artificial Sequence
  derived and/or modified CDS sequence (opt3) from neuraminidase__InfluenzaA__AJJ99246
augaaccccaaucagaagaucauuaccauaggcagcgugugcaugacaaucgggauggccaaccugauucuccaaaucggaaauauuaucuccauauggaucucucacucaauucagcuugguaaccagagucagaucgagacuuguaaucaaaacgucauuacguacgaaaauaacaccuggguuaaucagacauaugugaacaucagcaauacuaacuucgcugcaggccaguccguagugucugucaaacuggccgggaauagcucauugugcccugugagcggaugggcgauauacaguaaggacaacuccguuagaauuggcucuaaaggugauguguuugucaucagggagccauucauuagcuguuccccguuagaaugccggaccuuuuuccugacacagggggcucuacucaaugacaagcauucaaacggaaccaucaaagaucgcagucccuaucgaacucugaugagcuguccuaucggcgaggugccaucucccuacaacucccguuuugaaucaguagccuggagcgcaagugccugccacgacggcauuaauuggcuuacaauagggaucucuggaccugauuccggugcuguugcagugcugaaguauaacggcauuaucaccgacacgauaaagagcuggagaaauaacauuuugaggacucaagagucggagugugccugccucaaugggucuuguuucaccaucaugacagauggaccauccgacggccaggcuucauacaaaaucuuucggauugaaaaggguaaaaucgucaagaguguggagaugaacgcccccaauuaucauuacgaagagugcagcuguuacccugauuccucugagauuacuugcgugugccgcgacaacuggcacgggagcaauagaccaugggucucauucaaccagaaucuggaauaucagauaggauacaucuguaguggcauuuuuggcgauaacccgaggcccaaugacaaaaccggguccugcggaccuguuucgucuucaggugcgaacggcgugaagggguucaguuuuaaguauggaaauggcguauggaucggucggacaaaaagcaucuccucucgcaagggguucgagaugauuugggauccaaacggcuggaccggaacggacaacaauuuuucgauaaaacaagacaucgugggcauuaacgaauggagcggguacuccggaucauucguccagcaucccgagcugacuggucucgauuguauccgaccuugcuucuggguggaauuaauuagaggcaggccaaaggagaauacaaucuggaccagugggucuagcauauccuuuuguggaguuaacucagacacugugggcuggagcuggcccgauggugcagagcugccguucacaaucgacaaauga

SEQ ID NO: 153958 - RNA, 1410 nt, Artificial Sequence
  derived and/or modified CDS sequence (opt3) from neuraminidase__InfluenzaA__AJJ99257
augaaccccaaucagaagaucauuaccauaggcagcgugugcaugacaaucgggauggccaaccugauucuccaaaucggaaauauuaucuccauauggaucucucacucaauucagcuugguaaccagaaucagaucgagacuuguaaccaaagugucauuacguacgaaaauaacaccuggguuaaucagacauaugugaacaucagcaauacuaacuucgcugcaggccaguccguagugucugucaaacuggccggaaauucgucauugugcccugugagcggaugggcgauauacaguaaggacaacuccauuagaaucggcucuaaaggugauguuuuugugauuagggagccauucaucagcuguuccccguuagaaugccggaccuuuuuccugacacagggggcucuacucaaugacaagcauucaaacggaaccaucaaagaucgcagucccuaucgaacucugaugagcuguccuauuggcgaggucccaucucccuacaacucccguuuugaaucaguggccuggagcgcaagugccugccacgacggcauaaauuggcuuacaaucgggauuucuggaccugauaacggugcuguagcaguucugaaguauaauggcaucauaaccgacacgauuaaguccuggagaaacaauaucuugaggacucaagagagcgagugugccugcgugaacgggucguguuucaccaucaugacagauggaccaucugacggccaggcuuccuacaaaauuuuucggaucgaaaaggguaaaauugucaagucaguggagaugaaugcccccaacuaucauuacgaagagugcaguuguuacccugauagcuccgagauaacuugcgugugccgcgacaauuggcacgggucuaacagaccaugggucagcuucaaucagaaccucgaauaucagaucggauacauuuguucaggcaucuuuggcgauaauccgaggcccaacgacaaaaccgggaguugcggaccuguuccauccaauggugcgaacggcgugaagggguucagcuuuaaguauggaaacggcguauggaucggucggacaaaaucuauuucaagucgcaagggguucgagaugauaugggaucccaauggcuggaccggaacggacaacagcuuuuccaucaaacaagacauugugggcacuaaugaauggucuggguacucggggagcuucguccagcauccugagcugacaggucuggauuguauccgaccaugcuucuggguggaacucauuagaggcaggcccaaggagaacaccaucuggacuuccgggucaaguauaucuuuuuguggaguuaauagcggcacaguggguugguccuggccggacggggcagaguuaccuuucaccaucgauaaauga

SEQ ID NO: 153959 - RNA, 1413 nt, Artificial Sequence; identical to SEQ ID NO: 144680
  derived and/or modified CDS sequence (opt3) from neuraminidase__InfluenzaA__AJJ99269

SEQ ID NO: 153960 - RNA, 1410 nt, Artificial Sequence; identical to SEQ ID NO: 149006
  derived and/or modified CDS sequence (opt3) from neuraminidase__InfluenzaA__AJJ99280

SEQ ID NO: 153961 - RNA, 1410 nt, Artificial Sequence; identical to SEQ ID NO: 148757
  derived and/or modified CDS sequence (opt3) from neuraminidase__InfluenzaA__AJJ99291

SEQ ID NO: 153962 - RNA, 1413 nt, Artificial Sequence
  derived and/or modified CDS sequence (opt3) from neuraminidase__InfluenzaA__AJJ99303
augaaccccaaucagaagaucauuaccauaggcagcaucuccauugccaucgggauuaucucucugaugcuccaaauaggaaacaucauuucaaucugggcuagucacagcauucagacagguucccagaauaacacuggcaucugcaaucagagaauaauuacguacgagaacucuaccugggugaaucauacauaugucaacaucaauaacacuaauguuguggcaggggaagacaaaaccucgguaacacuugccggaaacucaagccuguguaguauuuccggcugggcgaucuacaccaaggauaauucuaucaggauugguagcaaaggggacguguucgucauacgggagccuuuuaucuccugcucacacuuggaaugucgcacuuucuuuuuaacacaaggagcucugcuaaacgauaagcauaguaauggcaccgugaaagaccgaagcccauaucgugcccucaugucuugcccgcugggcgaggcacccuccccuuacaacucaaaguucgaaagcguugccuggagugcuucugcaugucacgaugggaugggauggcuuacgauugguaucuccggcccagacaacggggccguggcuguccugaaguauaauggaauaauuacuggcaccaucaaaagcuggaagaaacagaucuugagaacacaggagucggagugcguguguaugaacgguucuugcuuuacuauuaugaccgaugggcccuccaauaaggccgcgucauacaaaaucuucaagauugaaaagggaaaaguaacaaagaguauggagcucaacgcaccuaauuuucauuaugaagaguguagcugcuacccagacaccggcauaguuaugugugugugcagggauaacuggcacggcuccaaucggcccugggucucuuucaaccagaaucuggacuaccaaaucggguauauuugcagcggaguguuuggugauaacccucgcccagaggacggcgaagggucauguaauccggugacggucgauggagccaacggcguuaaagguuucaguuacaaguaugacaaugggguguggaucggcagaacuaaauccaacaggcugcggaagggauuugagaugaucugggaccccaauggcuggacaaacaccgauagcgacuucucuguaaaacaggauguggucgcuauuacugacuggucaggguacagugguagcuuugugcagcacccugaacucacaggauuagauugcauacgcccauguuucuggguugagcuggugcgaggccuucccagagaaaacaccacgaucuggaccuccgggucuucgauuagcuucugcggagucaauuccgacacagccaacuggucauggccugauggcgcagaguugccauuuacuaucgacaaguga

SEQ ID NO: 153963 - RNA, 1410 nt, Artificial Sequence
  derived and/or modified CDS sequence (opt3) from neuraminidase__InfluenzaA__AJJ99314
augaaccccaaucagaagaucauuaccauaggcagcgccugcaugacaaucgggauggcuaaccugauucuccaaaucggaaauauuaucuccauauggaucucucacucaauucagcuugguaaccagaaucagaucgagacuuguaaccaaagugugauuacguacgaaaauaacaccugggucaaucagacauauguuaacaucagcaauacuaacuucgcagccggccaguccgugguaucugugaaacuggcgggaaauucgucauugugcccugucagcggaugggcuauauacaguaaggacaacuccauuagaaucggcucuaaaggugauguguuuguuauuagggagccauucaucagcuguuccccguuagaaugccggaccuuuuuccugacacagggggcccuacucaaugacaagcauucaaacggaaccaucaaagaucgcagucccuaucgaacucugaugagcuguccuauuggcgaggugccaucucccuacaacucccguuuugaaucagucgcauggagcgccagugcuugccacgacggcauaaauuggcuuacaaucgggauuucuggaccugauaacggugcaguggccguacugaaguauaauggcaucauaaccgacacgauuaaguccuggagaaacaauaucuugaggacucaagagagcgagugugcuugcguuaacgggucguguuucaccgugaugacagauggaccaucugacggccaggccuccuacaaaaucuuucggauugaaaaggguaaaaucgucaagucaguggagaugaaugcgcccaacuaucauuacgaagagugcaguuguuacccugauagcuccgagauuacuugcgugugccgcgacaauuggcacgggucuaacagaccaugggucagcuucaaucagaaccucgaauaucagauaggauacaucuguucaggcauuuuuggcgauaauccgaggcccaacgacaaaaccgggaguugcggaccuguuuccagcaauggugcaaacggcgugaagggguucucuuuuaaguauggaaacggcguauggaucggucggacaaaaucaaucaguagccgcaauggguucgagaugauuugggauccaaacggcuggaccggaacggacaauaacuuuuccauaaagcaagacaucgugggcauuaaugaauggucuggguacucggggagcuucguccagcaucccgagcugacuggucuggauuguauccgaccuugcuucuggguggaacucauuagaggcaggccaaaagagaacacaaucuggaccuccgggucaaguauaucuuuuuguggaguuaauagcgacacugugggcugguccuggcccgauggugccgaguuaccguucacaaucgacaaguga

SEQ ID NO: 153964 - RNA, 1413 nt, Artificial Sequence
  derived and/or modified CDS sequence (opt3) from neuraminidase__InfluenzaA__AJJ99326
augaaccccaaucagaagaucauuaccauaggcagcaucuccauugccaucgggauuaucucucugaugcuccaaauaggaaacaucauuucaaucugggcuagucacagcauucagacagguucccagaauaacacuggcaucugcaaucagagaauaauuacguacgagaacucuaccugggugaaucauacauaugucaacaucaauaacacuaauguuguggcaggggaagacaaaaccucgguaacacuugccggaaacucaagccuguguaguauuuccggcugggcgaucuacaccaaggauaauucuaucaggauugguagcaaaggggacguguucgucauacgggagccuuuuaucuccugcucacacuuggaaugucgcacuuucuuuuuaacacaaggagcucugcuaaacgauaagcauaguaauggcaccgugaaagaccgaagcccauaucgugcccucaugucuugcccgcugggcgaggcacccuccccuuacaacucaaaguucgaaagcguugccuggagugcuucugcaugucacgaugggcuuggauggcugacgauugguaucuccggcccagacaacggggccguggcugucuugaaguauaauggaauaauuacuggcaccaucaaaagcuggaagaaacagauccucagaacacaggagucggagugcguguguaugaacgguucuugcuuuacuauuaugaccgaugggcccuccaauaaggccgcgucauacaaaaucuucaagauugaaaagggaaaaguaacaaagaguauagagcugaacgcaccuaauuuuuauuacgaagaguguagcugcuacccagacaccggcaucguuaugugugugugcagggauaacuggcauggcuccaaucggcccugggucucuuucaaccagaaucuggacuaucaaauuggguacaucugcagcggaguguuuggugauaacccucgcccagaggacggcgaagggucauguaauccggugacggucgauggagccaacggcguuaaagguuucaguuauaaguacgggaauggcguguggaucggaagaacuaaauccaacaggcuccggaagggcuuugagaugauuugggaccccaauggguggacaaacaccgacagcgauuucucuguaaaacaggacguggucgcuauaacugauuggucaggauauagugguagcuuugugcagcacccugaauuaacaggccuggacugcauccgcccauguuucuggguugagcuugugcgaggguugcccagagaaaacaccacgauuuggaccuccggaucuucgaucagcuucugcggcgucaauuccgauacagccaacuggucauggccugacggugcagagcugccauuuacuauugauaaguga

SEQ ID NO: 153965 - RNA, 1410 nt, Artificial Sequence; identical to SEQ ID NO: 146430
  derived and/or modified CDS sequence (opt3) from neuraminidase__InfluenzaA__AJJ99337

SEQ ID NO: 153966 - RNA, 1410 nt, Artificial Sequence; identical to SEQ ID NO: 145893
  derived and/or modified CDS sequence (opt3) from neuraminidase__InfluenzaA__AJJ99348

SEQ ID NO: 153967 - RNA, 1410 nt, Artificial Sequence; identical to SEQ ID NO: 144786
  derived and/or modified CDS sequence (opt3) from neuraminidase__InfluenzaA__AJJ99359

SEQ ID NO: 153968 - RNA, 1410 nt, Artificial Sequence
  derived and/or modified CDS sequence (opt3) from neuraminidase__InfluenzaA__AJJ99370
augaaccccaaucagaagaucauuaccauaggcagcgugugcaugaucauugggauggccaaccugauccuccaaauuggaaauaucauauccaucuggauuucucacucaauccagcuugguaaccagagucagauugagacauguaaucaaagcgucaucacuuacgaaaacaauacguggguuaaccagaccuaugugaauauauccaacacaaauuucgcugcaggccagucuguagugucggucaaacuggccgggaacagcucauugugcccugugaguggaugggcgauuuacuccaaggacaauucuaucagaauuggcagcaaaggugauguuuuugugaucagggagccauucaucuccuguucaccguuagaaugccggaccuuuuuccugacucagggggcucuacucaacgacaagcauaguaauggaacaauuaaagaucgcagcccccaccgaacccugaugucuuguccuauaggcgaggucccaucccccuauaacucacguuuugaaagcguggccuggagugcaucugccugccaugacggcaucaacuggcuuacuauugggaucuccggaccugauaauggugcuguagcaguucugaaguacaacggcauaauuacagacaccaucaagagcuggagaaauaacaucuugaggacgcaagagucggagugugccugcgugaaugggucuuguuucacuauuaugaccgauggaccauccgaccggcaggcuucauauaaaaucuuucgcauugaaaagggcaaaauagucaagaguguggagaugaacgcccccaauuaccacuaugaagagugcagcuguuacccugauuccucugagaucacaugcgugugcagagacaacuggcaugguagcaauaggccaugggucucauucaaccagaaucucgaauaccagauuggguauaucuguaguggaaucuuuggcgauaacccgcggcccaaugacaaaacuggcuccugcgggccuguuagcucuaacggagcgaauggugugaagggcuucucauuuaaguacgggaacggaguauggauuggccgcaccaaaaguauaagcucccgaaaggguuucgagaugaucugggauccaaacggguggacaggcaccgacaauaacuuuucuauuaaacaagacaucgugggaauuaaugaauggucgggcuauagcggguccuucguccagcaccccgagcugacgggacuggauuguaucagaccuugcuucuggguggaacucauaaggggucggccaaaggagaacacuaucuggacaucaggcaguucuauuagcuuuugugggguuaauuccgacaccgugggauggucauggcccgauggcgcagaguuaccguucacuaucgacaaauga

SEQ ID NO: 153969 - RNA, 1410 nt, Artificial Sequence; identical to SEQ ID NO: 148305
  derived and/or modified CDS sequence (opt3) from neuraminidase__InfluenzaA__AJJ99381

SEQ ID NO: 153970 - RNA, 1410 nt, Artificial Sequence
  derived and/or modified CDS sequence (opt3) from neuraminidase__InfluenzaA__AJJ99392
augaaccccaaucagaagaucauuaccauaggcagcgugugcaugacaaucgggauggccaaccugauucuccaaaucggaaauauuaucuccauauggaucucucacucaauucagcuugguaaccagaaucagaucgagacuuguaaccaaagugucauuacguacgaaaauaacaccuggguuaaucagacauaugugaacaucagcaauacuaacuucgcugcaggccaguccguagugucugucaaacuggccggaaauucgucauugugcccugugagcgggugggcgauauacaguaaggacaacuccauuagaaucggcucuaaaggugauguuuuugugauuagggagccauucaucagcuguuccccguuagaaugccggaccuuuuuccugacacagggggcucuacucaaugacaagcauucaaacggaaccaucaaagaucgcagucccuaucgaacucugaugagcuguccuauuggcgaggucccaucucccuacaacucccguuuugaaucaguggccuggagcgcaagugccugccacgacggcauaaauuggcuuacaaucgggauuucuggaccugauaacggugcuguagcaguucugaaguauaauggcaucauaaccgacacgauuaaguccuggagaaacaauaucuugaggacucaagagagcgagugugccugcgugaacgggucguguuucaccgucaugacagauggaccaucugacggccaggcuuccuacaaaaucuuucggauugaaaaggguaaaaucgugaagucaguggagaugaaugcccccaacuaucauuacgaagagugcaguuguuacccugauagcuccgagauuacuugcgucugccgcgacaauuggcacgggucuaacagaccauggguuagcuucaaucagaaccucgaauaucagauaggauacaucuguucaggcauuuuuggcgauaauccgaggcccaacgacaaaaccgggaguugcggaccuguguccccaaauggugcgaacggcguaaagggguucagcuuuaaguauggaaacggcguguggaucggucggacaaaaucuaucucaagucgcaauggguucgagaugauuugggaucccaacggcuggaccggaacggacaauaacuuuagcauaaagcaagacaucgucggcauuaaugaaugguccggguacucuggaucguucgugcagcauccugagcugacuggucuggauuguauccgaccaugcuucuggguugaacucauuagaggcaggcccaaagagaacacaaucuggaccagcggguccucaauaaguuuuuguggagucaauucugacacugugggcuggagcuggccggauggugcaaaguuaccuuucacaaucgacaaauga

SEQ ID NO: 153971 - RNA, 1410 nt, Artificial Sequence; identical to SEQ ID NO: 144786
  derived and/or modified CDS sequence (opt3) from neuraminidase__InfluenzaA__AJJ99403

SEQ ID NO: 153972 - RNA, 1413 nt, Artificial Sequence; identical to SEQ ID NO: 145509
  derived and/or modified CDS sequence (opt3) from neuraminidase__InfluenzaA__AJJ99415

SEQ ID NO: 153973 - RNA, 1413 nt, Artificial Sequence
  derived and/or modified CDS sequence (opt3) from neuraminidase__InfluenzaA__AJJ99427
augaaccccaaucagaagaucauuaccauaggcagcaucuccauugccaucgggauuaucucucugaugcuccaaauaggaaacaucauuucaaucugggcuagucacagcauucagacagguucccagaauaacacuggcaucugcaaucagagaauaauuacguacgagaacucuaccugggugaaucauacauaugucaacaucaauaacacuaauguuguggcaggggaagacaaaaccucgguaacacuugccggaaacucaagccuguguaguauuuccggcugggcgguguacaccaaggauaauucuaucaggaucgguagcaaaggggacgucuucgugauucgggagccuuuuauauccugcucacacuuggaaugucgcacuuucuuuuuaacacaaggagcucugcuaaacgauaagcauaguaauggcaccguuaaagaccgaagcccauaucgugcccucaugucuugcccgcugggcgaggcacccuccccuuacaacucaaaguucgaaagcguggccuggagugcuucugcaugucacgaugggaugggauggcuuacgaucgguauuuccggcccagacaacggggccgucgcugugcugaaguauaauggaaucauaacuggcaccauuaaaagcuggaagaaacagaucuugagaacacaggagucggagugcguauguaugaacgguucuugcuuuacuaucaugaccgaugggcccuccgacaaggccgcgucauacaaaauuuucaagaucgaaaagggaaaaguuacaaagaguauugagcucaaugcaccuaacuuuuauuacgaagaguguagcugcuacccagauaccggcauagugaugugugucugcagggacaauuggcauggcuccaaccggcccugggugucuuucaaucagaaccuggauuaucaaaucggguacauuugcagcggaguguuuggugacaauccucgcccagaggauggcgaagggucauguaacccggucacgguugacggagccaauggcgugaaagguuucaguuauaaguacgggaacggcguauggaucggaagaacuaaauccaauaggcugcggaagggcuuugagaugaucugggaccccaacggguggauuaauacagauagcgacuucucugugaaacaggaugucguggcuauaaccgacuggucaggauauagugguagcuuuguucagcacccugaacucacuggcuuagauugcauccgcccauguuucuggguggagcugguccgagggcuucccagagaaaacacaaccauuuggacguccggaucuucgaucagcuucugcggcgugaacuccgacaccgccaauuggucauggccugauggugcagaguugccauuuacaauugacaaguga

SEQ ID NO: 153974 - RNA, 1413 nt, Artificial Sequence
  derived and/or modified CDS sequence (opt3) from neuraminidase__InfluenzaA__AJJ99439
augaaccccaaucagaagaucauuaccauaggcagcaucuccauugccaucgggauuaucucucugaugcuccaaauaggaaacaucauuucaaucugggcuagucacagcauucagacagguucccagaauaacacuggcaucugcaaucagagaauaauuacguacgagaacucuaccugggugaaucauacauaugucaacaucaauaacacuaauguuguggcaggggaagacaaaaccucgguaacacuugccggaaacucaagccuguguaguaccuccggcugggcgauuuacacuaaggauaauucuaucaggaucgguagcaaaggggacguguucgucauucgggagccuuuuauauccugcucacacuuggaaugucgcacauucuuuuuaacccaaggagcucugcuaaacgauaagcauaguaauggcacggugaaagaccgaagcccauaucgugcccucaugucuugcccgcugggcgaggcacccuccccuuacaacucaaaguucgaaagcguugccuggagugcuucugcaugucacgaugggaugggauggcuuacuaucgguauuuccggcccagacaacggggccguggcuguccugaaguauaauggaaucauaaccggcacaauuaaaagcuggaagaaacagaucuugagaacucaggagucggagugcguguguaugaacgguucuugcuuuaccaucaugacagaugggcccuccaauaaggccgcgucauacaaaauuuucaagaucgaaaagggaaaaguaaccaagaguauugagcucaacgcaccuaauuuuuauuacgaagaguguagcugcuacccagacacgggcauaguuaugugugugugcagggauaacuggcauggcuccaaucggcccugggucucuuucaaccagaaucuggacuaucaaaucggguacauuugcagcggaguguuuggugauaacccucgcccagaggacggcgaagggucauguaauccggugacugucgauggagccaacggcguuaaagguuucaguuauaaguacgggaauggcguguggaucggaagaacaaaauccaacaggcugcggaagggcuuugagaugaucugggaccccaauggguggaccaacacugacagcgauuucucuguaaaacaggacguggucgcuauuacagauuggucaggauauagugguagcuuugugcagcacccugaacucaccggcuuagacugcauacgcccauguuucuggguugagcuggugcgagggcuucccagagaaaacacgaccaucuggacauccggaucuucgauuagcuucugcggcgucaauuccgauacugccaacuggucauggccugacggugcagaguugccauuuaccaucgauaaguga

SEQ ID NO: 153975 - RNA, 1413 nt, Artificial Sequence
  derived and/or modified CDS sequence (opt3) from neuraminidase__InfluenzaA__AJJ99451
augaaccccaaucagaagaucauuaccauaggcagcaucuccauugccaucgggauuaucucucugaugcuccaaauaggaaacaucauuucaaucugggcuagucacagcauucagacagguucccagaauaacacuggcaucugcaaucagagaauaauuacguacgagaacucuaccugggugaaucauacauaugucaacaucaauaacacuaauguuguggcaggggaagacaaaaccucgguaacacuugccggaaacucaagccuguguaguauuuccggcugggcgaucuacaccaaggauaauucuaucaggauugguagcaaaggggacguguucgucauacgggagccuuuuaucuccugcucacacuuggaaugucgcacuuucuuuuuaacacaaggagcucugcuaaacgauaagcauaguaaucgaaccgugaaagaccguagcccauauagagcccucaugucuugcccgcugggcgaggcacccuccccuuacaacucaaaguucgaaagcguugccuggagugcuucugcaugucacgauggcaugggguggcuuacgauuggaaucuccgguccagacaacggcgccguggcuguccugaaguauaaugggauaauuacuggaaccaucaaaagcuggaagaaacagaucuugaggacacaggagucggagugcguguguaugaacggcucuugcuuuacuauuaugaccgauggucccuccaauaaggccgcgucauacaaaaucuucaagauugaaaaggggaaaguaacaaagaguauagagcucaacgcaccuaauuuucauuaugaagaguguagcugcuacccagacaccggaaucguuaugugugugugccgggauaacuggcacggcuccaaucgccccugggucucuuucaaccagaaucuggacuaccaaauuggcuauaucugcagcgggguguuuggagauaacccuagaccagaggacggugaaggcucauguaauccggugacggucgauggggccaacggaguuaaaggcuucaguuacaaguaugacaaugguguguggaucgggaggacuaaauccaaccggcugcgcaagggcuuugagaugauuugggaccccaauggauggacaaacaccgauagcgacuucucuguaaaacaggauguggucgcuauaacugacuggucaggcuacagugggagcuuugugcagcacccugaacucacaggauuagauugcauccgaccauguuucuggguugagcuggugagaggucuucccagggaaaacaccacgauuuggaccuccgggucuucgaucagcuucugcggcgucaauuccgacacagccaacuggucauggccugauggagcagaguugccauuuacuauugacaaguga

SEQ ID NO: 153976 - RNA, 1413 nt, Artificial Sequence; identical to SEQ ID NO: 144680
  derived and/or modified CDS sequence (opt3) from neuraminidase__InfluenzaA__AJJ99463

SEQ ID NO: 153977 - RNA, 1410 nt, Artificial Sequence
  derived and/or modified CDS sequence (opt3) from neuraminidase__InfluenzaA__AJJ99474
augaaccccaaucagaagaucauuaccauaggcagcgugugcaugacaaucgggauugccaaccugauccuccaaauuggaaauaucauauccaucuggauuucucacucaauccagcuugguaaccagaaucagauugagacuuguaaccaaagugucaucauauacgaaaauaacacguggguuaaucagaccuaugugaacauuagcaauacaaacuucgcugcaggccaguccguagugucugucaaacuggccggaaauucgucauugugcccugugagcgggugggcgaucuacaguaaggacaacuccauuagaaucggcucuaaaggugauguuuuugugaucagggagccauucauuagcuguuccccguuagaaugccggaccuuuuuccugacucagggggcucuacucaaugacaagcauucaaacggaacaauaaaagaucgcagucccuaucgaacccugaugagcuguccuaucggcgaggucccaucucccuacaacucccguuuugaaucaguggccuggagcgcaagugccugccacgacggcauuaauuggcuuacuaucgggauaucuggaccugauaacggugcuguagcaguucugaaguauaauggcauuaucacagacaccaucaaguccuggagaaacaauauuuugaggacgcaagagagcgagugugccugcgugaacgggucguguuucacuaucaugaccgauggaccaucugacggccaggcuuccuacaaaauuuuucggauagaaaaggguaaaaucauuaagucagucgagaugaaugcccccaacuaucauuacgaagagugcaguuguuacccugauagcuccgagaucacaugcgugugccgcgacaauuggcacgggucuaacagaccaugggugagcuucaaucagaaccucgaauaucagaucggauacauuuguucaggcauauuuggcgauaauccgaggcccaacgacaaaacugggaguugcggaccugucuccagcaauggugcgaacggcguuaagggguucucuuuuaaguauggaaacggcguguggaucggucggaccaaaucaauuaguagccgcaagggguucgagaugaucugggauccaaauggcuggacaggaaccgacaacuccuuuucuauuaaacaagacaucguaggcauaaaugaauggucgggguacagcggauccuucgugcagcaucccgagcugacgggucuggauuguauccgaccuugcuucugggucgaacucauuagaggcaggccaaaggagaacacuaucuggacaucagggaguucuauuagcuuuuguggaguuaauuccggcaccguggguuggucauggcccgacggggcagaguuaccguucacuaucgauaaauga

SEQ ID NO: 153978 - RNA, 1410 nt, Artificial Sequence; identical to SEQ ID NO: 148757
  derived and/or modified CDS sequence (opt3) from neuraminidase__InfluenzaA__AJJ99496

SEQ ID NO: 153979 - RNA, 1410 nt, Artificial Sequence
  derived and/or modified CDS sequence (opt3) from neuraminidase__InfluenzaA__AJJ99507
augaaccccaaucagaagaucauuaccauaggcagcgugugcaugacaaucgggauggccaaccugauucuccaaaucggaaauauuaucuccauauggaucucucacucaauucagcuugguaaccagaaucagaucgagacuuguaaccaaagugucauuacguacgaaaauaacaccuggguuaaucagacauaugugaacaucagcaauacuaacuucgcugcaggccaguccguagugucugucaaacuggccggaaauucgucauugugcccugugagcgggugggcgauauacaguaaggacaacuccauuagaaucggcucuaaaggugauguuuuugugauuagggagccauucaucagcuguuccccguuagaaugccggaccuuuuuccugacacagggggcucuacucaaugacaagcauucaaacggaaccaucaaagaucgcagucccuaucgaacucugaugagcuguccuauuggcgaggucccaucucccuacaacucccguuuugaaucaguggccuggagcgcaagugccugccacgacggcauaaauuggcuuacaaucgggauuucuggaccugauaacggugcuguagcaguucugaaguauaauggcaucauaaccgacacgauuaaguccuggagaaacaauaucuugaggacucaagagagcgagugugccugcgugaacgggucguguuucaccgucaugacagauggaccaucugacggccaggcuuccuacaaaaucuuucggauugaaaaggguaaaaucgugaagucaguggagaugaaugcccccaacuaucauuacgaagagugcaguuguuacccugauagcuccgagauuacuugcgucugccgcgacaauuggcacggggcgaacagaccauggguuucuuucaaucagaaccucgaauaucagauaggauacaucuguagcggcauuuuuggcgauaauccgaggcccaacgacaaaaccgggucaugcggaccugugaguuccaauggugcaaacggcguaaagggguucagcuuuaaguaugauaacggaguguggaucggccggacaaaaucuaucucaagucgcaaugguuucgagaugauuugggacccaaacggguggaccggcacggacaaugauuuuagcauaaagcaagacaucgucggaauuaacgaaugguccggcuacucugggucguucgugcagcaucccgagcugacuggacuggauuguauccgaccuugcuucuggguugaacucauuagagguaggccaaaagagaauacaaucuggaccagcggcuccucaauaaguuuuuguggggugaacucugacacugucggauggagcuggcccgauggcgccgaguuaccguucacaaucgacaaguga

SEQ ID NO: 153980 - RNA, 1410 nt, Artificial Sequence; identical to SEQ ID NO: 144786
  derived and/or modified CDS sequence (opt3) from neuraminidase__InfluenzaA__AJJ99518

SEQ ID NO: 153981 - RNA, 1410 nt, Artificial Sequence
  derived and/or modified CDS sequence (opt3) from neuraminidase__InfluenzaA__AJJ99529
augaaccccaaucagaagaucauuaccauaggcagcgugugcaugacaaucgggauggccaaccugauucuccaagucggaaauaucauuuccaucuggauaucucacucaauccagcuugguaaccagaaucagauugagacuuguaaccaaaguguuaucacguacgaaaauaacaccugggugaaucagacauauguaaacauuagcaauacuaacuucgcugcaggccaguccguggucucugugaaacuggccgggaauagcucauugugcccuguuagcggaugggcgaucuacaguaaggacaacuccauaagaauuggcucuaaaggugauguguuugucaucagggagccauucauuagcuguuccccguuagaaugccggaccuuuuuccugacacagggggcucuacucaaugacaagcauucaaacggaaccaucaaagaucgcagucccuaucgaacucugaugagcuguccuaucggcgaggugccaucucccuacaacucccguuuugaaucaguagccuggagcgcaagugccugccacgacggcuucaauuggcuuacaauugggauaucuggaccugauaacggugcuguugcagugcugaaguauaauggcaucauuaccgacacgaucaaguccuggagaaacaauauauugaggacucaagagagcgagugugccugcgucaacgggucguguuuuaccauuaugacagauggaccaucugacggccaggcuuccuacaaaaucuuccggaucgaaaaggguaaaauuaucaagucaguggagaugaaugcccccaacuaucauuacgaagagugcaguuguuacccugauagcuccgagauuacuugcgugugccgcgacaauuggcacgggucuaacagaccaugggucagcuuuaaucagaaccucgaauaucagauaggauacaucuguucaggcauuuucggcgauaauccgaggcccaacgacaaaaccgggaguugcggaccuguuuccagcaauggugcgaacggcgugaagggguuuucuuucaaguauggaaacggcguauggaucggucggacaaaaucaaucaguagccgcaagggguuugagaugauuugggauccaaauggcuggaccggaacggacaacuccuucucuauaaaacaagacaucgugggcauuaaugaauggucgggguacagcggauccuucguccagcaucccgagcugacuggucuggauuguauccgaccuugcuuuuggguggaacucauuagaggcaggccaaaggagaacacaaucuggaccucagggaguucuauaucguucuguggaguuaauuccggcacuguggguuggucauggcccgacggggcagaguuaccguuuacaaucgauaaauga

SEQ ID NO: 153982 - RNA, 1410 nt, Artificial Sequence
  derived and/or modified CDS sequence (opt3) from neuraminidase__InfluenzaA__AJJ99540
augaaccccaaucagaagaucauuaccauaggcagcgugugcaugacaaucgggauggccaaccugauucuccaaaucggaaauauuaucuccauauggaucucucacucaauucagcuugguaaccagaaucagaucgagacuuguaaccaaagugucauuacguacgaaaauaacaccuggguuaaucagacauaugugaacaucagcaauacuaacuucgcugcaggccaguccguagugucugucaaacuggccggaaauucgucauugugcccugugagcggaugggcgauauacaguaaggacaacuccauuagaaucggcucuaaaggugauguuuuugugauuagggagccauucaucagcuguuccccguuagaaugccggaccuuuuuccugacacagggggcucuacucaaugacaagcauucaaacggaaccaucaaagaucgcagucccuaucgaacucugaugagcuguccuauuggcgaggucccaucucccuacaacucccguuuugaaucaguggccuggagcgcaagugccugccacgacggcauaaauuggcuuacaaucgggauuucuggaccugauaacggugcuguagcaguucugaaguauaauggcaucauaaccgacacgauuaaguccuggagaaacaauaucuugaggacucaagagagcgagugugccugcgugaacgggucguguuucaccaucaugacagauggaccaucugacggccaggcuuccuacaaaauuuuucggaucgaaaaggguaaaauugucaagucaguggagaugaaugcccccaacuaucauuacgaagagugcaguuguuacccugauagcuccaaaauaacuugcgugugccgcgacaauuggcacgggucuaacagaccaugggucagcuucaaucagaaccucgaguaucagaucggauacauuuguucaggcaucuuuggcgauaauccgaggcccaacgacaagaccgggaguugcggaccuguuuccagcaauggugcgaacggcgugaagggguucucuuuuaaauauggaaacggcaucuggauuggucggacaaagucaauaaguagccgcaaaggguucgaaaugaucugggauccaaauggcuggaccggaacggacaacaauuuuuccauuaagcaagacaucguaggcauuaacgaguggucuggguacucggggagcuucgugcagcaucccgaacugacuggucuggauuguauccgaccuugcuucugggucgagcucauaagaggcaggccaaaagaaaauacaaucuggaccuccgggucaaguauuucuuuuuguggagugaacagcgacacuguuggcugguccuggcccgauggugcagaguuaccguucacaaucgacaaguga

SEQ ID NO: 153983 - RNA, 1410 nt, Artificial Sequence
  derived and/or modified CDS sequence (opt3) from neuraminidase__InfluenzaA__AJJ99551
augaaccccaaucagaagaucauuaccauaggcagcgugugcaugacaaucgggauggccaaccugauucuccaaaucggaaauauuaucuccauauggaucucucacucaauucagcuugguaaccagagucagacugagacguguaaucaaagcgucaucaccuacgaaaacaauacauggguuaaccagacuuaugugaauauuuccaacaccaauccugcugcaggccagucuguagugucggucaaacuggccgggaacaguagcuugugcccagugaguggaugggcgaucuacuccaaggacaauucuauaagaauuggcagcaaaggugauguuuucgugaucagggagccguuuauuuccuguucaaguuuagaaugccggacauucuuucugacccagggggcucuacucaacgacaagcauagcaauggaacuaucaaagaucgcucucccuaucgaacacugauguccuguccuaucggcgaggucccaucacccuacaacagccguuucgaaaguguggccuggucugcauccgccugccacgacggcauuaacuggcuuaccauagggaucagcggaccugauaauggugcuguagcaguucugaaguauaacggcauuaucacggacacuauaaagucguggagaaauaacauuuugaggacccaagagucugagugugccugcgugaauggguccuguuuuacaaucaugacugauggaccaucagacggccaggcuaguuacaaaaucuuccggauugaaaaggguaaaaucgucaagagcguggagaugaacgcccccaauuaucauuacgaagagugcuccuguuacccugauucuagcgagauuaccugcgugugccgcgacaacuggcacgggucaaauagaccaugggucaguuuuaaccagaaucucgaauaucagauaggauacaucuguuccggcauuuucggcgauaacccgaggcccaaugacaaaacagggagcugcggaccuguuucuucaaacggugcgaauggcgugaagggguuuaguuucaaguauggaaacggcguauggaucggucggaccaaaagcaucuccucucgcaagggguuugagaugauuugggauccaaacggcuggacgggaacugacaauaacuucucgauaaaacaagacaucgugggcauuaaugaauggagcggguacuccggaucauuuguccagcaucccgagcugacaggucuggauuguauccgaccuugcuucuggguggaacucauuagaggcaggccaaaggagaacaccaucuggacuucagggucuagcauauccuucuguggaguuaauucagacacagugggcuggagcuggcccgauggugcagaguuaccguuuaccaucgacaaauga

SEQ ID NO: 153984 - RNA, 1410 nt, Artificial Sequence; identical to SEQ ID NO: 148773
  derived and/or modified CDS sequence (opt3) from neuraminidase__InfluenzaA__AJJ99562

SEQ ID NO: 153985 - RNA, 1410 nt, Artificial Sequence
  derived and/or modified CDS sequence (opt3) from neuraminidase__InfluenzaA__AJJ99573
augaaccccaaucagaagaucauuaccauaggcagcgugugcaugacaaucgggauggccaaccugauucuccaaaucggaaauauuaucuccauauggaucucucacucaauucagcuugguaaccagagucagaucgagacuuguaaucaaagcgucauuacguacgaaaacaauaccuggguuaaccagacauaugugaauaucuccaacacuaauuucgcugcaggccagucuguagugucggucaaacuggccgggaacagcagcuugugcccugugaguggaugggcgauauacuccaaggacaauucuauuagaaucggcagcaaaggugauguuuuugugauuagggagccauucaucuccuguucaccguuagaaugccggaccuuuuuccugacacagggggcucuacucaacgacaagcauaguaauggaaccaucaaagaucgcagccccuaucgaacucugaugucuuguccuauuggcgaggucccaucccccuacaacucacguuuugaaagcguggccuggagugcaucugccugccacgacggcauaaacuggcuuacaaucgggauuuccggaccugauaauggugcuguagcaguucugaaguauaacggcaucauaaccgacacgauuaagagcuggagaaauaacaucuugaggacucaagagucggagugugccugcgugaaugggucuuguuucaccaucaugacagauggaccauccgacggccaggcuucauacaaaauuuuucggaucgaaaaggguaaaauugucaagaguguggagaugaacgcccccaauuaucauuacgaagagugcagcuguuacccugauuccucugagauaacuugcgugugccgcgacaacuggcacgggagcaauagaccaugggucucauucaaccagaaucucgaauaucagaucggauacauuuguaguggcaucuuuggcgauaacccgaggcccaaugacaaaaccggguccugcggaccuguuagcucuaacggugcgaauggcgugaagggguucucauuuaaguauggaaacggcguauggaucggucggacaaaaaguauuagcucccgcaagggguucgagaugauaugggauccaaacggcuggaccggaacggacaauaacuuuucuaucaaacaagacguggucggcauuaaugaauggucgggguacagcggauccuucgugcagcaucccgagcugacuggucuggauuguauccgaccuugcuucuggguugaacucauuagaggcaggccaaaggagaacacaaucuggaccucagggaguucuauaucauuuuguggagucaauuccgacacugugggcuggucauggcccgauggugcagaguuaccguucacaaucgacaaauga

SEQ ID NO: 153986 - RNA, 1410 nt, Artificial Sequence; identical to SEQ ID NO: 153963
  derived and/or modified CDS sequence (opt3) from neuraminidase__InfluenzaA__AJJ99584

SEQ ID NO: 153987 - RNA, 1410 nt, Artificial Sequence
  derived and/or modified CDS sequence (opt3) from neuraminidase__InfluenzaA__AJJ99595
augaaccccaaucagaagaucauuaccauaggcagcgugugcaugacaaucgggauggccaaccugauuuuccaaaucggaaauauuaucuccauauggaucucucacucaauucagcucgguaaccagaaucagaucgagacuuguaaccaaagugucauuacguacgaaaauaacaccuggguuaaucagacauaugugaacaucagcaauacuaacuuugcugcaggccaguccguagugucugucaaacuugccggaaauucgucacugugcccugugagcggaugggcgauauacaguaaggacaacuccauuagaaucggcucuaaaggugauguuuucgugauuagggagccauuuaucagcuguuccccguuggaaugccggaccuucuuuuuaacacagggggcucugcuaaaugacaagcauucaaacggaaccaucaaagaucgcagucccuaucgaacucucaugagcuguccuauuggcgaggucccaucucccuacaacucccguuucgaaucaguggccuggagcgcaagugccugccacgacggcauaaauuggcugacaaucgggauuucuggaccugauaacggugcuguagcaguucuuaaguauaauggcaucauaaccgacacgauuaaguccuggagaaacaauauccugaggacucaagagagcgagugugccugcgugaacgggucguguuuuaccgucaugacagauggaccaucugacggccaggcuuccuacaaaaucuuccggauugaaaaggguaaaaucgugaagucaguggagaugaaugcccccaacuaucauuacgaagagugcaguuguuacccugauagcuccgagauuacuugcgucugccgcgacaauuggcacgggucuaacagaccauggguuagcuuuaaucagaacuuggaauaucagauaggauacaucuguucaggcauuuucggcgauaauccgaggcccaacgacaaaaccgggaguugcggaccuguguccagcaauggugcgaacggcguaaagggguuuucuuucaaguauggaaacggcguguggaucggucggacaaaaucaaucaguagccgcaauggguuugagaugauuugggauccaaacggcuggaccggaacggacaauaacuucuccauaaagcaagacaucgucggcauuaaugaauggucuggguacucggggagcuucgugcagcaucccgagcucacuggucuggauuguauccgaccuugcuuuuggguugaacugauuagaggcaggccaaaagagaacacaaucuggaccuccgggucaaguauaucuuucuguggagugaauagcgacacugucggcugguccuggcccgauggugcagagcucccguuuacaaucgacaaguga

SEQ ID NO: 153988 - RNA, 1410 nt, Artificial Sequence
  derived and/or modified CDS sequence (opt3) from neuraminidase__InfluenzaA__AJJ99606
augaaccccaaucagaagaucauuaccauaggcagcgugugcaugacaaucgggauggccaaccugauucuccaaaucggaaauauuaucuccauauggaucucucacucaauucagcuugguaaccagaaucagaucgagacuuguaaccaaagugucauuacguacgaaaauaacaccuggguuaaucagacauaugugaacaucagcaauacuaacuucgcugcaggccaguccguagugucugucaaacuggccggaaauucgucauugugcccugugagcggaugggcgauauacaguaaggacaacuccauuagaaucggcucuaaaggugauguuuuugugauuagggagccauucaucagcuguuccccguuagaaugccggaccuuuuuccugacacagggggcucuacucaaugacaagcauucaaacggaaccaucaaagaucgcagucccuaucgaacucugaugagcuguccuauuggcgaggucccaucucccuacaacucccguuuugaaucaguggccuggagcgcaagugccugccacgacggcauaaauuggcuuacaaucgggauuucuggaccugauaacggugcuguagcaguucugaaguauaauggcgugaucaccgacacgauaaaguccuggagaaacaauauuuugaggacucaagagagcgagugugccugcgucaacgggucguguuucaccgugaugacagauggaccaucugacggccaggcuuccuacaaaaucuuucggaucgaaaaggguaaaauugugaagucagucgagaugaaugcccccaacuaucauuacgaagagugcaguuguuacccugauagcuccgagaucacuugcguuugccgcgacaauuggcacgggucuaacagaccaugggugagcuucaaucagaaccucgaauaucagauuggauacauauguucaggcaucuuuggcgauaauccgaggcccaacgacaaaaccgggaguugcggaccuguauccagcaauggugcgaacggcgugaagggguucucuuuuaaguauggaaacggcgucuggauuggucggacaaaaucaaucaguagccgcaauggguucgagaugaucugggauccaaacggcuggaccggaacggacaauaacuuuuccauuaagcaagacauagugggcaucaaugaauggucuggguacucggggagcuucguucagcaucccgagcugacuggucuggauuguauucgaccuugcuucuggguggaacucaucagaggcaggccaaaagagaacacaauuuggaccuccgggucaaguaucucuuuuuguggagucaauagcgacacugugggcugguccuggcccgauggugcagaguuaccguucacaauagacaaguga

SEQ ID NO: 153989 - RNA, 1413 nt, Artificial Sequence; identical to SEQ ID NO: 145509
  derived and/or modified CDS sequence (opt3) from neuraminidase__InfluenzaA__AJJ99618

SEQ ID NO: 153990 - RNA, 1413 nt, Artificial Sequence
  derived and/or modified CDS sequence (opt3) from neuraminidase__InfluenzaA__AJJ99630
augaaccccaaucagaagaucauuaccauaggcagcaucuccauugccaucgggauuaucucucugaugcuccaaauaggaaacaucauuucaaucugggcuagucacagcauucagacagguucccagaauaacacuggcaucugcaaucagagaauaauuacguacgagaacucuaccugggugaaucauacauaugucaacaucaauaacacuaauguuguggcaggggaagacaaaaccucgguaacacuugccggaaacucaagccuguguaguauuuccggcugggcgaucuacaccaaggauaauucuaucaggauugguagcaaaggggacguguucgucauacgggagccuuuuaucuccugcucacacuuggaaugucgcacuuucuuuuuaacacaaggagcucugcuaaacgauaagcauaguaauggcaccgugaaagaccgaagcccauaucgugcccucaugucuugcccgcugggcgaggcacccuccccuuacaacucaaaguucgaaagcguugccuggagugcuucugcaugucacgaugggaugggauggcuuacgauugguaucuccggcccagacaacggggccguggcuguccugaaguauaauggaauaauuacuggcaccaucaaaagcuggaagaaacagaucuugagaacacaggagucggagugcguguguaugaacgguucuugcuuuacuauuaugaccgaugggcccuccaauaaggccgcgucauacaaaaucuucaagauugaaaagggaaaaguaacaaagaguauagagcucaacgcaccuaauuuuuauuacgaagaguguagcugcuacccagacaccggcaucguuaugugugugugcagggauaacuggcauggcuccaaucggcccugggucucuuucaaccagaaucuggacuaucaaauuggguacaucugcagcggaguguuuggugauaacccucgcccagaggacggcgaagggucauguaauccggugacggucgauggagccaacggcguuaaagguuucaguuauaaguacgggaauggcguguggaucggaagaacuaaauccaacaggcugcggaagggcuuugagaugauuugggaccccaauggguggacaaacaccgacagcgauuucucuaugaaacagaacguaguggcuauaacugacuggucaggauauagugguagcuuuguccagcacccugaacucacaggcuuagauugcauccgcccauguuucuggguggagcugguucgagggcuucccagagaaaauaccacgauuuggaccuccggaucuucgaucagcuucugcggcgugaacuccgacacagccaauuggucauggccugauggugcagaguugccauuuacuauugacaaguga

SEQ ID NO: 153991 - RNA, 1413 nt, Artificial Sequence; identical to SEQ ID NO: 145509
  derived and/or modified CDS sequence (opt3) from neuraminidase__InfluenzaA__AJJ99642

SEQ ID NO: 153992 - RNA, 1413 nt, Artificial Sequence; identical to SEQ ID NO: 145509
  derived and/or modified CDS sequence (opt3) from neuraminidase__InfluenzaA__AJJ99654

SEQ ID NO: 153993 - RNA, 1413 nt, Artificial Sequence
  derived and/or modified CDS sequence (opt3) from neuraminidase__InfluenzaA__AJJ99666
augaaccccaaucagaagaucauuaccauaggcagcaucuccauugccaucgggauuaucucucugaugcuccaaauaggaaacaucauuucaaucugggcuagucacagcauucagacagguucccagaauaacacuggcaucugcaaucagagaauaauuacguacgagaacucuaccugggugaaucauacauaugucaacaucaauaacaauaacguuguggcaggggaagacaaaacuucgguaacccuugccggaaauucaagccuguguaguauuuccggcugggcgaucuacacaaaggauaacucuaucaggauugguagcaaaggggacguguucgucauacgggagccuuuuaucuccugcucacacuuggaaugucgcaccuucuuuuuaacucaaggagcucugcuaaaugauaagcauaguaacggcacagugaaagaccgaagcccauaucgugcccucaugucuugcccgcugggcgaggcacccuccccuuacaacucaaaguucgaaagcguugccuggagugcuucugcaugucacgaugggaugggauggcuuaccauugguaucuccggcccagacaauggggccguggcuguccugaaguauaacggaauaauuacgggcacuaucaaaagcuggaagaaacagaucuugagaacccaggagucggagugcguguguaugaaugguucuugcuuuacaauuaugacugaugggcccuccaacaaggccgcgucauacaaaaucuucaagauugaaaagggaaaaguaaccaagaguauagagcucaaugcaccuaacuuucauuaugaagaguguagcugcuacccagacacaggcaucguuaugugugugugcagggauaauuggcacggcuccaaccggcccugggucucuuucaaucagaaccuggacuaccaaauuggguauaucugcagcggaguguuuggugauaauccucgcccagaggacggcgaagggucauguaacccggugaccgucgauggagccaauggcguuaaagguuucaguuacaaguaugacaacgggguguggaucggcagaacgaaauccaauaggcugcggaagggauuugagaugauuugggaccccaacggcuggacuaacacagauagcgacuucucuguaaaacaggauguggucgcuauaaccgacuggucaggguacagugguagcuuugugcagcacccugaacucacuggauuagauugcauccgcccauguuucuggguugagcuggugcgaggccuucccagagaaaauacaaccauuuggacguccgggucuucgaucagcuucugcggagucaacuccgacaccgccaauuggucauggccugauggcgcagaguugccauuuacaauugacaaguga

SEQ ID NO: 153994 - RNA, 1410 nt, Artificial Sequence
  derived and/or modified CDS sequence (opt3) from neuraminidase__InfluenzaA__AJJ99677
augaaccccaaucagaagaucauuaccauaggcagcgugugcaugacaaucgggauggccaaccugauucuccaaaucggaaauauuaucuccauauggaucucucacucaauucagcuugguaaccagaaucagaucgagacuuguaaccaaagugucauuacguacgaaaauaacaccuggguuaaucagacauaugugaacaucagcaauacuaacuucgcugcaggccaguccguagugucugucaaacuggccggaaauucgucauugugcccugugagcgggugggcgauauacaguaaggacaacuccauuagaaucggcucuaaaggugauguuuuugugauuagggagccauucaucagcuguuccccguuagaaugccggaccuuuuuccugacacagggggcucuacucaaugacaagcauucaaacggaaccaucaaagaucgcagucccuaucgaacucugaugagcuguccuauuggcgaggucccaucucccuacaacucccguuuugaaucaguggccuggagcgcaagugccugccacgacggcauaaauuggcuuacaaucgggauuucuggaccugauaacggugcuguagcaguucugaaguauaauggcaucauaaccgacacgauuaaguccuggagaaacaauaucuugaggacucaagagagcgagugugccugcgugaacgggucguguuucaccaucaugacagauggaccaucugacggccaggcuuccuacaaaauuuuucggaucgaaaaggguaaaauuauaaagucagucgagaugaaugcccccaacuaucauuacgaagagugcaguuguuacccugauagcuccgagaucacuugcgugugccgcgacaauuggcacgggucuaacagaccaugggugagcuucaaucagaaccucgaauaucagauuggauacaucuguucaggcaucuuuggcgauaauccgaggcccaacgacaaaaccgggaguugcggaccugucuccagcaauggugcgaacggcguuaagggguucucuuuuaaguauggaaacggcguguggauuggucggacaaaaucaauaaguagccgcaagggguucgagaugaucugggauccaaauggcuggaccggaacggacaacuccuuuucuauuaaacaagacaucguaggcaugaaugaauggucgggguacagcggauccuucgugcagcaucccgagcugacuggucuggauuguauucgaccuugcuucugggucgaacucaucagaggcaggccaaaggagaacacaauauggaccucagggaguucuaucagcuuuuguggaguuaauuccggcacuguggguuggucauggcccgacggggcagaguuaccguucacaauugauaaauga

SEQ ID NO: 153995 - RNA, 1410 nt, Artificial Sequence
  derived and/or modified CDS sequence (opt3) from neuraminidase__InfluenzaA__AJJ99688
augaaccccaaucagaagaucauuaccauaggcagcgugugcaugacaaucgggauggccaaccugauucuccaaaucggaaauauuaucuccauauggaucucucacucaauucagcuugguaaccagaaucagaucgagacuuguaaccaaagugucauuacguacgaaaauaacaccuggguuaaucagacauaugugaacaucagcaauacuaacuucgcugcaggccaguccguagugucugucaaacuggccggaaauucgucauugugcccugugagcgggugggcgauauacaguaaggacaacuccauuagaaucggcucuaaaggugauguuuuugugauuagggagccauucaucagcuguuccccguuagaaugccggaccuuuuuccugacacagggggcucuacucaaugacaagcauucaaacggaaccaucaaagaucgcagucccuaucgaacucugaugagcuguccuauuggcgaggucccaucucccuacaacucccguuuugaaucaguggccuggagcgcaagugccugccacgacggcauaaauuggcuuacaaucgggauuucuggaccugauaacggugcuguagcaguucugaaguauaauggcaucauaaccgacacgauuaaguccuggagaaacaauaucuugaggacucaagagagcgagugugccugcgugaacgggucguguuucaccaucaugacagauggaccaucugacggccaggcuuccuacaaaauuuuucggaucgaaaaggguaaaauuauaaagucagucgagaugaaugcccccaacuaucauuacgaagagugcaguuguuacccugauagcuccgagaucacuugcgugugccgcgacaauuggcacgggucuaacagaccaugggugagcuucaaucagaaccucgaauaucagauuggauacaucuguucaggcaucuuuggcgauaauccgaggcccaacgacaaaaccgggaguugcggaccugucuccagcaauggugcgaacggcguuaagggguucucuuuuaaguauggaaacggcguguggauuggucggacaaaaucaauaaguagccgcaagggguucgagaugaucugggauccaaauggcuggaccggaacggacaacuccuuuucuauuaaacaagacaucguaggcauuaaugaauggucgggguacagcggauccuucgugcagcaucccgagcugacuggucuggauuguauccgaccuugcuucugggucgaacucauaagaggcaggccaaaggagaacacaaucuggaccucagggaguucuauuagcuuuuguggaguuaauuccggcacuguggguuggucauggcccgacggggcagaguuaccguucacaaucgauaaauga

SEQ ID NO: 153996 - RNA, 1410 nt, Artificial Sequence
  derived and/or modified CDS sequence (opt3) from neuraminidase__InfluenzaA__AJJ99710
augaaccccaaucagaagaucauuaccauaggcagcgugugcaugacaaucgggauggccaaccugauucuccaaaucggaaauauuaucuccauauggaucucucacucaauucagcuugguaaccagagucagaucgagacuuguaaucaaagcgucauuacguacgaaaacaauaccuggguuaaccagacauaugugaauaucuccaacacuaauuucgcugcaggccagucuguagugucggucaaacuggccgggaacagcucauugugcccugugaguggaugggcgauauacuccaaggacaauucuauuagaaucggcagcaaaggugauguuuuugugauuagggagccauucaucuccuguucaccguuagaaugccggaccuuuuuccugacacagggggcucuacucaacgacaagcauaguaauggaaccaucaaagaucgcagccccuaucgaacucugaugucuuguccuauuggcgaggucccaucccccuacaacucacguuuugaaagcguggccuggagugcaucugccugccacgacggcauaaacuggcuuacaaucgggauuuccggaccugauaauggugcuguagcaguucugaaguauaacggcaucauaaccgacacgauuaagagcuggagaaauaacaucuugaggacucaagagucggagugugccugcgugaaugggucuuguuucaccaucaugacagauggaccauccgacggccaggcuucauacaaaauuuuucggaucgaaaaggguaaaauugucaagaguguggagaugaacgcccccaauuaucauuacgaagagugcagcuguuacccugauuccucuaaaauaacuugcgugugccgcgacaacuggcacgggagcaauagaccaugggucucauucaaccagaaucucgaguaucagaucggauacauuuguaguggcaucuuuggcgauaacccgaggcccaaugacaagaccggguccugcggaccuguuagcucuaacggugcgaauggcgugaagggguucucauuuaaauauggaaacggcguauggaucggucggacaaagaguauuagcucccgcaaaggguucgaaaugauaugggauccaaacggcuggaccggaacggacaauaacuuuucuaucaagcaagacauugugggcaucaaugaguggucgggguacagcggauccuucguccagcaucccgaacugacuggucuggauuguauucgaccuugcuucuggguggagcucaucagaggcaggccaaaagaaaacacaauauggaccucagggaguucuaucagcuuuuguggaguuaauuccgacacugugggcuggucauggcccgauggugcagaguuaccguucacaauugacaaguga

SEQ ID NO: 153997 - RNA, 1410 nt, Artificial Sequence; identical to SEQ ID NO: 148305
  derived and/or modified CDS sequence (opt3) from neuraminidase__InfluenzaA__AJJ99721

SEQ ID NO: 153998 - RNA, 1410 nt, Artificial Sequence; identical to SEQ ID NO: 148305
  derived and/or modified CDS sequence (opt3) from neuraminidase__InfluenzaA__AJJ99732

SEQ ID NO: 153999 - RNA, 1410 nt, Artificial Sequence; identical to SEQ ID NO: 149005
  derived and/or modified CDS sequence (opt3) from neuraminidase__InfluenzaA__AJJ99743

SEQ ID NO: 154000 - RNA, 1410 nt, Artificial Sequence; identical to SEQ ID NO: 146339
  derived and/or modified CDS sequence (opt3) from neuraminidase__InfluenzaA__AJJ99754

SEQ ID NO: 154001 - RNA, 1410 nt, Artificial Sequence
  derived and/or modified CDS sequence (opt3) from neuraminidase__InfluenzaA__AJJ99765
augaaccccaaucagaagaucauuaccauaggcagcgugugcaugacaaucgggauggccaaccugauucuccaaaucggaaauauuaucuccauauggaucucucacucaauucagcuugguaaccagaaucagaucgagacuuguaaccaaagugucauuacguacgaaaauaacaccuggguuaaucagacauaugugaacaucagcaauacuaacuucgcuaccggccaguccguagugucugucaaacuggcaggaaauucgucauugugcccugugagcggaugggccauauacaguaaggacaacuccauuagaaucggcucuaaaggugauguuuuugugauuagggagccauucaucagcuguuccccguuagaaugccggacauuuuuccugacccagggggcgcuacucaaugacaagcauucaaacggaacuaucaaagaucgcagucccuaucgaacacugaugagcuguccuauuggcgaggucccaucucccuacaacucccguuuugaaucaguggcuuggagcgccagugcaugccacgacggcauaaauuggcuuaccaucgggauuucuggaccugauaacggugccguagcuguucugaaguauaauggcaucauaacggacacuauuaaguccuggagaaacaauaucuugaggacccaagagagcgagugugcaugcgugaacgggucguguuucacagucaugacugauggaccaucugacggccaggccuccuacaaaaucuuucggauugaaaaggguaaaaucgugaagucaguggagaugaaugcucccaacuaucauuacgaagagugcaguuguuacccugauagcuccgagauuaccugcgucugccgcgacaauuggcacgggucuaacagaccauggguuagcuucaaucagaaccucgaauaucagauaggauacaucuguucaggcauuuuuggcgauaauccgaggcccaacgacaaaacagggaguugcggaccuguguccagcaauggugccaacggcguaaagggguucucuuuuaaguauggaaacggcguguggaucggucggaccaaaucaaucaguagccgcaauggguucgagaugauuugggauccaaacggcuggacgggaacugacaauaacuuuuccauaaagcaagacaucgucggcauuaaugaauggucuggguacucggggagcuucgugcagcaucccgagcugacaggucuggauuguauccgaccuugcuucuggguugaacucauuagaggcaggccaaaagagaacaccaucuggacuuccgggucaaguauaucuuuuuguggagugaauagcgacacagucggcugguccuggcccgauggugcggaguuaccguucaccaucgacaaguga

SEQ ID NO: 154002 - RNA, 1413 nt, Artificial Sequence
  derived and/or modified CDS sequence (opt3) from neuraminidase__InfluenzaA__AJJ99777
augaaccccaaucagaagaucauuaccauaggcagcaucuccauugccaucgggauuaucucucugauacuccaaaucggaaacauuaucucaauuugggcuagucacagcauccagacagguucccagaauaacacuggcauaugcaaucagagaauuaucacguacgagaacucuaccugggugaaucauacauaugugaacauuaauaacacuaauguuguggcaggggaagacaaaaccucgguaacacuugccggaaacucaagccuguguaguaucuccggcugggcgaucuacaccaaggauaauucuauuaggauagguagcaaaggggacguguucgucauccgggagccuuuuauuuccugcucacacuuggaaugucgcacuuucuuuuuaacacaaggagcucugcuaaacgauaagcauaguaauggcaccgugaaagaccgaagcccauaucgugcccucaugucuugcccgcugggcgaggcacccuccccuuacaacucaaaguucgaaagcguugccuggagugcuucugcaugucacgaugggaugggauggcuuacgaucgguauauccggcccagacaacggggccguggcuguccugaaguauaauggaauuaucacuggcaccaucaaaagcuggaagaaacagauuuugagaacacaggagucggagugcguguguaugaacgguucuugcuuuacuaucaugaccgaugggcccuccaauaaggccgcgucauacaaaauuuucaagauagaaaagggaaaaguaacaaagaguaucgagcucaacgcaccuaauuuuuauuacgaagaguguagcugcuacccagacaccggcauuguuaugugugugugcagggauaacuggcauggcuccaaucggcccugggucucuuucaaccagaaucuggacuaucaaaucggguacaucugcagcggaguguuuggugauaacccucgcccagaggacggcgaagggucauguaauccggugacggucgauggagccaacggcguuaaagguuucaguuauaaguacgggaauggcguguggauuggaagaacuaaauccaacaggcugcggaagggcuuugagaugauaugggaccccaauggguggacaaacaccgacagcgauuucucuguaaaacaggacguggucgcuaucacugauuggucaggauauagugguagcuuugugcagcacccugaacucacaggcuuagacugcauucgcccauguuucuggguugagcuggugcgagggcuucccagagaaaacaccgccgucuggacguccggaucuucgaucagcuucugcggcgucaauuccgauaccgcaaacuggucauggccugacggugcugaguugccauuuacaauugauaaguga

SEQ ID NO: 154003 - RNA, 1410 nt, Artificial Sequence; identical to SEQ ID NO: 144786
  derived and/or modified CDS sequence (opt3) from neuraminidase__InfluenzaA__AJJ99788

SEQ ID NO: 154004 - RNA, 1413 nt, Artificial Sequence
  derived and/or modified CDS sequence (opt3) from neuraminidase__InfluenzaA__AJJ99800
augaaccccaaucagaagaucauuaccauaggcagcaucuccauugccaucgggauuaucucucugaugcuccaaauaggaaacaucauuucaaucugggcuagucacagcauucagacagguucccagaauaacacuggcaucugcaaucagagaauaauuacguacgagaacucuaccugggugaaucauacauaugucaacaucaauaacacuaauguuguggcaggggaagacaaaaccucgguaacacuugccggaaacucaagccuguguaguauuuccggcugggcgaucuacaccaaggauaauucuaucaggauugguagcaaaggggacguguucgucauacgggagccuuuuaucuccugcucacacuuggaaugucgcacuuucuuuuuaacacaaggagcucugcuaaacgauaagcauaguaauggcaccgugaaagaccgaagcccauaucgugcccucaugucuugcccgcugggcgaggcacccuccccuuacaacucaaaguucgaaagcguugccuggagugcuucugcaugucacgaugggaugggauggcuuacgauugguaucuccggcccagacaacggggccguggcuguccugaaguauaauggaauaauuacuggcaccaucaaaagcuggaagaaacagaucuugagaacacaggagucggagugcguguguaugaacgguucuugcuuuacuauuaugaccgaugggcccuccaauaaggccgcgucauacaaaaucuucaagauugaaaagggaaaaguaacaaagaguauagagcucaacgcaccuaauuuuuauuacgaagaguguagcugcuacccagacaccggcaucguuaugugugugugcagggauaacuggcauggcuccaaucggcccugggucucuuucaaccagaaucuggacuaucaaauuggguacaucugcagcggaguguuuggugauaacccucgcccagaggacggcgaagggucauguaauccggugacggucgauggagccaacggcguuaaagguuucaguuauaaguacgggaauggcguguggaucggaagaacuaaauccaacaggcugcggaagggcuuugagaugauuugggaccccaauggguggacaaacaccgacagcgauuucucuguaaaacaggacguggucgcuauaacugauuggucaggauauagugguagcuuugugcagcacccugaacucacaggcuuagacugcauccgcccauguuucuggguugagcuggugcgagggcuucccagagaaaacaccacgauuuggaccuccggaucuucgaucagcuucugcggcgucaauuccgauacagccaacuggucauggccugacggugcagaguugccauuuauuaucgauaaguga

SEQ ID NO: 154005 - RNA, 1413 nt, Artificial Sequence; identical to SEQ ID NO: 145509
  derived and/or modified CDS sequence (opt3) from neuraminidase__InfluenzaA__AJJ99812

SEQ ID NO: 154006 - RNA, 1413 nt, Artificial Sequence
  derived and/or modified CDS sequence (opt3) from neuraminidase__InfluenzaA__AJJ99824
augaaccccaaucagaagaucauuaccauaggcagcaucuccauugccaucgggacaauuucucugaugcuccaaaucggaaacauaaucucaauuugggcuagucacagcauccagacugguucccagaauaacacgggcauuugcaaucagagaaucauaaccuacgagaacucuacaugggugaaucauacuuaugucaacauuaauaacaccaauguuguggcaggggaagacaaaacaucgguaacccuugccggaaacucaagccuguguaguaucuccggcugggcgauuuacacuaaggauaauucuaucaggaucgguagcaaaggggacguguucgucauucgggagccuuuuauauccugcucacacuuggaaugucgcacauucuuuuuaacccaaggagcucugcuaaacgauaagcauaguaauggcacggugaaagaccgaagcccauaucgugcccucaugucuugcccgcugggcgaggcacccuccccuuacaacucaaaguucgaaagcguugccuggagugcuucugcaugucacgaugggaugggauggcuuacuaucgguauuuccggcccagacaacggggccguggcuguccugaaguauaauggaaucauaaccggcacaauuaaaagcuggaagaaacagaucuugagaacucaggagucggagugcguguguaugaacgguucuugcuuuaccaucaugacagaugggcccuccaauaaggccgcgucauacaaaauuuucaagaucgaaaagggaaaaguaaccaagaguauugagcucaacgcaccuaauuuucauuaugaagaguguagcugcuacccagacacgggcauaguuaugugugugugcagggauaacuggcacggcuccaaucggcccugggucucuuucaaccagaaucuggacuaccaaaucggguauauuugcagcggaguguuuggugauaacccucgcccagaggacggcgaagggucauguaauccggugacugucgauggagccaacggcguuaaagguuucaguuacaaguaugacaaugggguguggaucggcagaacaaaauccaacaggcugcggaagggauuugagaugaucugggaccccaauggcuggaccaacacugauagcgacuucucuguaaaacaggauguggucgcuauuacagacuggucaggguacagugguagcuuugugcagcacccugaacucaccggauuagauugcauacgcccauguuucuggguugagcuggugcgaggccuucccagagaaaacacgaccaucuggacauccgggucuucgauuagcuucugcggagucaauuccgacacugccaacuggucauggccugauggcgcagaguugccauuuaccaucgacaaguga

SEQ ID NO: 154007 - RNA, 1410 nt, Artificial Sequence; identical to SEQ ID NO: 153995
  derived and/or modified CDS sequence (opt3) from neuraminidase__InfluenzaA__AJJ99835

SEQ ID NO: 154008 - RNA, 1410 nt, Artificial Sequence; identical to SEQ ID NO: 148305
  derived and/or modified CDS sequence (opt3) from neuraminidase__InfluenzaA__AJJ99846

SEQ ID NO: 154009 - RNA, 1410 nt, Artificial Sequence; identical to SEQ ID NO: 148305
  derived and/or modified CDS sequence (opt3) from neuraminidase__InfluenzaA__AJJ99857

SEQ ID NO: 154010 - RNA, 1410 nt, Artificial Sequence
  derived and/or modified CDS sequence (opt3) from neuraminidase__InfluenzaA__AJJ99868
augaaccccaaucagaagaucauuaccauaggcagcgugugcaugacaaucgggauggccaaccugauucuccaaaucggaaauauuaucuccauauggaucucucacucaauucagcuugguaaccagaaucagaucgagacuuguaaccaaagugucauuacguacgaaaauaacaccuggguuaaucagacauaugugaacaucagcaauacuaacuucgcugcaggccaguccguagugucugucaaacuggccggaaauucgucauugugcccugugagcggaugggcgauauacaguaaggacaacuccauuagaaucggcucuaaaggugauguuuuugugauuagggagccauucaucagcuguuccccguuagaaugccggaccuuuuuccugacacagggggcucuacucaaugacaagcauucaaacggaaccaucaaagaucgcagucccuaucgaacucugaugagcuguccuauuggcgaggucccaucucccuacaacucccguuuugaaucaguggccuggagcgcaagugccugccacgacggcauaaauuggcuuacaaucgggauuucuggaccugauaacggugcuguagcaguucugaaguauaauggcaucauaaccgacacgauuaaguccuggagaaacaauaucuugaggacucaagagagcgagugugccugcgugaacgggucguguuucaccgucaugacagauggaccaucugacggccaggcuuccuacaaaaucuuucggauugaaaaggguaaaaucgugaagucaguggagaugaaugcccccaacuaucauuacgaagagugcaguuguuacccugauagcuccgucauuacuugcguuugccgcgacaauuggcacgggucuaacagaccaugggugagcuucaaucagaaccucgaguaucagauaggauacaucuguucaggcauuuuuggcgauaauccgaggcccaacgacaaaaccgggaguugcggaccuguauccagcaauggugcgaacggcgugaagggguucucuuuuaaguauggaaacggcgucuggaucggucggacaaaaucaaucaguagccgcaauggguucgaaaugauuugggauccaaacggcuggaccggaacggacaauaacuuuuccauaaagcaaaauaucgugggcauuaacgaguggucuggguacucggggagcuucguucagcaucccgaacugacuggucuggacuguauccgaccuugcuucuggguggagcucauuagaggcaggccaaaagaaaauacaaucuggaccuccgggucaaguauaucuuuuuguggagucaacagcgauacugugggcugguccuggcccgacggugcagaguuaccguucacaaucgauaaguga

SEQ ID NO: 154011 - RNA, 1410 nt, Artificial Sequence; identical to SEQ ID NO: 147205
  derived and/or modified CDS sequence (opt3) from neuraminidase__InfluenzaA__AJJ99879

SEQ ID NO: 154012 - RNA, 1410 nt, Artificial Sequence; identical to SEQ ID NO: 144786
  derived and/or modified CDS sequence (opt3) from neuraminidase__InfluenzaA__AJJ99890

SEQ ID NO: 154013 - RNA, 1410 nt, Artificial Sequence
  derived and/or modified CDS sequence (opt3) from neuraminidase__InfluenzaA__AJJ99901
augaaccccaaucagaagaucauuaccauaggcagcgugugcaugacaaucgggauggccaaccugauucuccaaaucggaaauauuaucuccauauggaucucucacucaauucagcuugguaaccagaaucagaucgagacuuguaaccaaagugucauuacguacgaaaauaacaccuggguuaaucagacauaugugaacaucagcaauacuaacuucgcugcaggccaguccguagugucugucaaacuggccggaaauucgucauugugcccugugagcgggugggcgauauacaguaaggacaacuccauuagaaucggcucuaaaggugauguuuuugugauuagggagccauucaucagcuguuccccguuagaaugccggaccuuuuuccugacacagggggcucuacucaaugacaagcauucaaacggaaccaucaaagaucgcagucccuaucgaacucugaugagcuguccuauuggcgaggucccaucucccuacaacucccguuuugaaucaguggccuggagcgcaagugccugccacgacggcauaaauuggcuuacaaucgggauuucuggaccugauaacggugcuguagcaguucugaaguauaauggcaucauaaccgacacgauuaaguccuggagaaacaauaucuugaggacucaagagagcgagugugccugcgugaacgggucguguuucaccaucaugacagauggaccaucugacggccaggcuuccuacaaaauuuuucggaucgaaaaggguaaaauugucaagucaguggagaugaaugcccccaacuaucauuacgaagagugcaguuguuacccugauagcuccgagauaacuugcgugugccgcgacaauuggcacgggucuaacagaccaugggucagcuucaaucagaaccucgaauaucagaucggauacauuuguucaggcaucuuuggcgauaauccgaggcccaacgacaaaaccgggaguugcggaccuguuuccagcaauggugcgaacggcgugaagggguucucuuuuaaguauggaaacggcguauggaucggucggacaaaaucaauuaguagccgcaagggguucgagaugauaugggauccaaauggcuggaccggaacggacaacuccuuuucuaucaaacaagacauugugggcaucaaugaauggucgggguacagcggauccuucguccagcaucccgagcugacuggucuggauuguauucgaccuugcuucuggguggaacucaucagaggcaggccaaaggagaacacaauauggaccucagggaguucuaucagcuuuuguggaguugacuccggcacuguggguuggucauggcccgauggggcagaguuaccguucacaauugacaaauga

SEQ ID NO: 154014 - RNA, 1410 nt, Artificial Sequence
  derived and/or modified CDS sequence (opt3) from neuraminidase__InfluenzaA__AJJ99912
augaaccccaaucagaagaucauuaccauaggcagcgugugcaugacaaucgggauggccaaccugauucuccaaaucggaaauauuaucuccauauggaucucucacucaauucagcuugguaaccagagucagaucgagacuuguaaucaaagcgucauuacguacgaaaacaauaccuggguuaaccagacauaugugaauaucuccaacacuaauuucgcugcaggccagucuguagugucggucaaacuggccgggaacagcucauugugcccugugaguggaugggcgauauacuccaaggacaauucuauuagaaucggcagcaaaggugauguuuuugugauuagggagccauucaucuccuguucaccguuagaaugccggaccuuuuuccugacacagggggcucuacucaacgacaagcauaguaauggaaccaucaaagaucgcagccccuaucgaacucugaugucuuguccuauuggcgaggucccaucccccuacaacucacguuuugaaagcguggccuggagugcaucugccugccacgacggcauaaacuggcuuacaaucgggauuuccggaccugauaauggugcuguagcaguucugaaguauaacggcaucauaaccgacacgauuaagagcuggagaaauaacaucuugaggacucaagagucggagugugccugcgugaaugggucuuguuucaccaucaugacagauggaccauccgacggccaggcuucauacaaaauuuuucggaucgaaaaggguaaaauugucaagaguguggagaugaacgcccccaauuaucauuacgaagagugcagcuguuacccugauuccucuaaaauaacuugcgugugccgcgacaacuggcacgggagcaauagaccaugggucucauucaaccagaaucucgaguaucagaucggauacauuuguaguggcaucuuuggcgauaacccgaggcccaaggacaagaccggguccugcggaccuguuagcucuaauggugcgaacggcgugaaaggguucucauuuaaguauggaaauggcguauggaucggucggacaaaaaguauuagcucccgcaagggguucgaaaugauaugggauccaaacggcuggaccggaacggacaacaauuuuucuaucaaacaagacauugugggcaucaacgaguggucgggguacagcggauccuucguccagcaucccgaacugacuggucuggauuguauucgaccuugcuucuggguggagcucaucagaggcaggccaaaggaaaauacaauauggaccucagggaguucuaucagcuuuuguggaguuaacuccgacacugugggcuggucauggcccgauggugcagaguuaccguucacaauugacaaauga

SEQ ID NO: 154015 - RNA, 1410 nt, Artificial Sequence; identical to SEQ ID NO: 148305
  derived and/or modified CDS sequence (opt3) from neuraminidase__InfluenzaA__AJJ99923

SEQ ID NO: 154016 - RNA, 1410 nt, Artificial Sequence; identical to SEQ ID NO: 148757
  derived and/or modified CDS sequence (opt3) from neuraminidase__InfluenzaA__AJJ99934

SEQ ID NO: 154017 - RNA, 1410 nt, Artificial Sequence; identical to SEQ ID NO: 148305
  derived and/or modified CDS sequence (opt3) from neuraminidase__InfluenzaA__AJJ99945

SEQ ID NO: 154018 - RNA, 1410 nt, Artificial Sequence
  derived and/or modified CDS sequence (opt3) from neuraminidase__InfluenzaA__AJJ99956
augaaccccaaucagaagaucauuaccauaggcagcgugugcaugacaaucgggauggccaaccugauucuccaaaucggaaauauuaucuccauauggaucucucacucaauucagcuugguaaccagaaucagaucgagacuuguaaccaaagugucauuacguacgaaaauaacaccuggguuaaucagacauaugugaacaucagcaauacuaacuucgcugcaggccaguccguagugucugucaaacuggccggaaauucgucauugugcccugugagcgggugggcgauauacaguaaggacaacuccauuagaaucggcucuaaaggugauguuuuugugauuagggagccauucaucagcuguuccccguuagaaugccggaccuuuuuccugacacagggggcucuacucaaugacaagcauucaaacggaaccaucaaagaucgcagucccuaucgaacucugaugagcuguccuauuggcgaggucccaucucccuacaacucccguuuugaaucaguggccuggagcgcaagugccugccacgacggcauaaauuggcuuacaaucgggauuucuggaccugauaacggugcuguagcaguucugaaguauaauggcaucauaaccgacacgauuaaguccuggagaaacaauaucuugaggacucaagagagcgagugugccugcgugaacgggucguguuucaccgucaugacagauggaccaucugacggccaggcuuccuacaaaaucuuucggauugaaaaggguaaaaucgugaagucaguggagaugaaugcccccaacuaucauuacgaagagugcaguuguuacccugauagcuccgagauuacuugcgucugccgcgacaauuggcacgggucuaacagaccauggguuagcuucaaucagaaccucgaauaucagauaggauacaucuguucaggcauuuuuggcgauaauccgaggcccaacgacaaaaccgggaguugcggaccugugcuguccaauggugcgaacggcguaaagggguucagcuuuaaguauggaaacggcguguggaucggucggacaaaaucuaucucaagucgcaauggguucgagaugauuugggauccaaacggcuggaccggaacggacaauaacuuuagcauaaagcaagacaucgucggcauuaaugaaugguccggguacucuggaucguucgugcagcaucccgagcugacuggucucgauuguauccgaccuugcuucuggguugaauuaauuagaggcaggccaaaagagaacacaaucuggaccagcggguccucaauaaguuuuuguggagucaauucugacacugugggcuggagcuggcccgauggugcagagcugccguucacaaucgacaaguga

SEQ ID NO: 154019 - RNA, 1410 nt, Artificial Sequence; identical to SEQ ID NO: 144786
  derived and/or modified CDS sequence (opt3) from neuraminidase__InfluenzaA__AJJ99967

SEQ ID NO: 154020 - RNA, 1413 nt, Artificial Sequence
  derived and/or modified CDS sequence (opt3) from neuraminidase__InfluenzaA__AJJ99991
augaaccccaaucagaagaucauuaccauaggcagcaucuccauugccaucgggauuaucucucugaugcuccaaauaggaaacaucauuucaaucugggcuagucacagcauucagacagguucccagaauaacacuggcaucugcaaucagagaauaauuacguacgagaacuguaccugggugaaucauacauaugucaacaucaauaacacuaauguuguggcaggggaagacaaaaccucuguaacacuugccggaaacucgucacugugcagcauuaguggcugggcgaucuacaccaaggauaauuccaucaggauugguucuaaaggggacguguucgucauacgggagccuuuuaucagcuguucccacuuggaaugccgcacuuucuuuuuaacacaaggagcucugcuaaacgauaagcauucaaauggcaccgugaaagaccgaaguccauaucgugcccucaugagcuguccgcugggcgaggcacccucuccuuacaacuccaaguucgaaucaguugccuggagcgcuagugcaugccacgaugggaugggauggcuuacgauugguaucucuggcccagacaacggggccguggcuguccugaaguauaauggaauaauuacuggcaccaucaaauccuggaagaaacagaucuugagaacacaggagagcgagugugugugcaugaacgguucguguuuuacuauuaugaccgaugggcccucuaauaaggccgcguccuacaaaaucuucaagauugaaaagggaaaaguaacaaagucaauagagcucaacgcaccuaauuuucauuaugaagagugcaguuguuacccagacaccggcaucguuaugugcgugugcagggauaacuggcacggcagcaaucggcccugggucuccuucaaccagaaucuggacuaccaaauuggguauaucuguucuggaguguuuggugauaacccucgcccagaggacggcgaagggagcugcaauccggugacggucgauggagccaacggcguuaaagguuucucauacaaguaugacaaugggguguggaucggcagaacuaaaaguaacaggcugcggaagggauuugagaugauuugggaccccaauggcuggacaaacaccgauuccgacuucagcguaaaacaggauguggucgcuauaacugacuggucuggguacucaggaaguuuugugcagcacccugaacucacagguuuagauuguauccgcccaugcuucuggguugagcuggugcgaggccuucccagagaaaacaccacgauuuggaccagcggguccucuaucucguucuguggagucaauagcgacacagccaacugguccuggccugauggcgcagaguugccauuuacuauugacaaguga

SEQ ID NO: 154021 - RNA, 1410 nt, Artificial Sequence; identical to SEQ ID NO: 153995
  derived and/or modified CDS sequence (opt3) from neuraminidase__InfluenzaA__AJK00003

SEQ ID NO: 154022 - RNA, 1410 nt, Artificial Sequence
  derived and/or modified CDS sequence (opt3) from neuraminidase__InfluenzaA__AJK00014
augaaccccaaucagaagaucauuaccauaggcagcgugugcaugacaaucgggauggccaaccugauucuccaaaucggaaauauuaucuccauauggaucucucacucaauucagcuugguaaccagagucagaucgagacuuguaaucaaagcgucauuacguacgaaaacaauaccuggguuaaccagacauaugugaauaucuccaacacuaauuucgcugcaggccagucuguagugucggucaaacuggccgggaacagcucauugugcccugugaguggaugggcgauauacuccaaggacaauucuauuagaaucggcagcaaaggugauguuuuugugauuagggagccauucaucuccuguucaccguuagaaugccggaccuuuuuccugacacagggggcucuacucaacgacaagcauaguaauggaaccaucaaagaucgcagccccuaucgaacucugaugucuuguccuauuggcgaggucccaucccccuacaacucacguuuugaaagcguggccuggagugcaucugccugccacgacggcauaaacuggcuuacaaucgggauuuccggaccugauaauggugcuguagcaguucugaaguauaacggcgugaucaccgacacgauaaagagcuggagaaauaacauuuugaggacucaagagucggagugugccugcgucaaugggucuuguuucaccaucaugacagauggaccauccgacggccaggcuucauacaaaaucuuucggauugaaaaggguaaaaucgugaagaguguggagaugaacgcccccaauuaucauuacgaagagugcagcuguuacccugauuccucugagauuacuugcgucugccgcgacaacuggcacgggagcaauagaccauggguuucauucaaccagaaucucgaauaucagauaggauacaucuguaguggcauuuuuggcgauaacccgaggcccaaugacaaaaccggguccugcggaccugugagcucuaacggugcgaauggcguaaagggguucucauuuaaguauggaaacggcguguggaucggucggacaaaaaguaucagcucccgcaagggguucgagaugauuugggauccaaacggcuggaccggaacggacaauaacuuuucuacuaaacaagacauagucggcaucaaugaauggucgggguacagcggauccuucgugcagcaucccgagcugacaggucuggauuguauucgaccuugcuucuggguugaacucaucagaggcaggccaaaggagaacaccauuuggacuucagggaguaucauaucuuuuuguggagugaauagcgacacagucggcugguccuggcccgauggugcagaguuaccguucaccaucgacaacuga

SEQ ID NO: 154023 - RNA, 1410 nt, Artificial Sequence
  derived and/or modified CDS sequence (opt3) from neuraminidase__InfluenzaA__AJK00025
augaaccccaaucagaagaucauuaccauaggcagcgugugcaugacaaucgggauggccaaccugauucuccaaaucggaaauauuaucuccauauggaucucucacucaauucagcuugguaaccagaaucagaucgagacuuguaaccaaagugucauuacguacgaaaauaacaccuggguuaaucagacauaugugaacaucagcaauacuaacuucgcugcaggccaguccguagugucugucaaacuggccggaaauucgucauugugcccugugagcgggugggcgauauacaguaaggacaacuccauuagaaucggcucuaaaggugauguuuuugugauuagggagccauucaucagcuguuccccguuagaaugccggaccuuuuuccugacacagggggcucuacucaaugacaagcauucaaacggaaccaucaaagaucgcagucccuaucgaacucugaugagcuguccuauuggcgaggucccaucucccuacaacucccguuuugaaucaguggccuggagcgcaagugccugccacgacggcauaaauuggcuuacaaucgggauuucuggaccugauaacggugcuguagcaguucugaaguauaauggcaucauaaccgacacgauuaaguccuggagaaacaauaucuugaggacucaagagagcgagugugccugcgugaacgggucguguuucaccaucaugacagauggaccaucugacggccaggcuuccuacaaaauuuuucggaucgaaaaggguaaaauugucaagucaguggagaugaaugcccccaacuaucauuacgaagagugcaguuguuacccugauagcuccgagauaacuugcgugugccgcgacaauuggcacgggucuaacagaccaugggucagcuucaaucagaaccucgaauaucagaucggauacauuuguucaggcaucuuuggcgauaauccgaggcccaacgacaaaaccgggaguugcggaccuguuuccagcaauggugcgaacggcgugaagggguucucuuuuaaguauggaaacggcguauggaucggucggacaaaaucaauuaguagccgcaagggguucgagaugauaugggauccaaauggcuggaccggaacggacaacuccuuuucuaucaaacaagacauugugggcaucaaugaauggucgggguacagcggauccuucguccagcaucccgagcugacuggucuggauuguauucgaccuugcuucuggguggaacucaucagaggcaggccaaaggagaacacaauauggaccucagggaguucuaucagcuuuuguggaguuaauuccggcacuguggguuggucauggcccgacggggcagaguuaccguucacaauugauaaauga

SEQ ID NO: 154024 - RNA, 1410 nt, Artificial Sequence
  derived and/or modified CDS sequence (opt3) from neuraminidase__InfluenzaA__AJK00036
augaaccccaaucagaagaucauuaccauaggcagcgugugcaugacaaucgggauggccaaccugauucuccaaaucggaaauauuaucuccauauggaucucucacucaauucagcuugguaaccagagucagaucgagacuuguaaucaaagcgucauuacguacgaaaacaauaccuggguuaaccagacauaugugaauaucuccaacauaaauuucgcugcaggccagucuguagugucggucaaacuggccgggaacagcucauugugcccugugaguggaugggcgauuuacuccaaggacaauucuaucagaauuggcagcaaaggugauguuuuugugaucagggagccauucaucuccuguucaccguuagaaugccggaccuuuuuccugacucagggggcucuacucaacgacaagcauaguaauggaacaauuaaagaucgcagccccuaucgaacccugaugucuuguccuauaggcgaggucccaucccccuacaacucacguuuugaaagcguggccuggagugcaucugccugccacgacggcaucaacuggcuuacuauugggaucuccggaccugauaauggugcuguagcaguucugaaguauaacggcauaauuacagacaccaucaagagcuggagaaauaacaucuugaggacgcaagagucggagugugccugcgugaaugggucuuguuucacuauuaugaccgauggaccauccgacggccaggcuucauacaaaaucuuucggauugaaaaggguaaaauagucaagaguguggagaugaacgcccccaauuaucauuacgaagagugcagcuguuacccugauuccucugagaucacaugcgugugccgcgacaacuggcacgggagcaauagaccaugggucucauucaaccagaaucucgaauaucagauuggauacaucuguaguggcaucuuuggcgauaacccgaggcccaaugacaaaacuggguccugcggaccuguuagcucuaacggugcgaauggcgugaagggguucucauuuaaguauggaaacggcguauggauuggucggaccaaaaguauaagcucccgcaagggguucgagaugaucugggauccaaacggcuggacaggaaccgacaauaacuuuucuauuaaacaagacaucgugggcauuaaugaauggucgggguacagcggauccuucguccagcaucccgagcugacgggucuggauuguauccgaccuugcuucuggguggaacucauaagaggcaggccaaaggagaacacuaucuggacaucagggaguucuauuagcuuuuguggaguuaauuccgacaccgugggcuggucauggcccgauggugcagaguuaccguucacuaucgacaaauga

SEQ ID NO: 154025 - RNA, 1410 nt, Artificial Sequence; identical to SEQ ID NO: 149005
  derived and/or modified CDS sequence (opt3) from neuraminidase__InfluenzaA__AJK00047

SEQ ID NO: 154026 - RNA, 1410 nt, Artificial Sequence; identical to SEQ ID NO: 149005
  derived and/or modified CDS sequence (opt3) from neuraminidase__InfluenzaA__AJK00058

SEQ ID NO: 154027 - RNA, 1410 nt, Artificial Sequence
  derived and/or modified CDS sequence (opt3) from neuraminidase__InfluenzaA__AJK00069
augaaccccaaucagaagaucauuaccauaggcagcgugugcaugacaaucgggauggccaaccugauucuccaaaucggaaauauuaucuccauauggaucucucacucaauucagcuugguaaccagaaucagaucgagacuuguaaccaaagugucauuacguacgaaaauaacaccuggguuaaucagacauauuucaacaucagcaauacuaacuuugcugcaggccaguccgugguaucugugaaacuggccggaaauucgucauugugcccugucagcggaugggcgauauacaguaaggacaacuccauuagaaucggcucuaaaggugauguguucguuauuagggagccauuuaucagcuguuccccguuagaaugccggaccuucuuucugacacagggggcucuacucaaugacaagcauucaaacggaaccaucaaagaucgcagucccuaucgaacucugaugagcuguccuauuggcgaggugccaucucccuacaacucccguuucgaaucagucgccuggagcgcaagugccugccacgacggcauaaauuggcuuacaaucgggauuucuggaccugauaacggugcuguggcaguacugaaguauaauggcaucauaaccgacacgauuaaguccuggagaaacaauaucuugaggacucaagagagcgagugugccugcguuaacgggucguguuuuaccgugaugacagauggaccaucugacggccaggcuuccuacaaaaucuuccggauugaaaaggguaaaaucgucaagucaguggagaugaaugcccccaacuaucauuacgaagagugcaguuguuacccugauagcuccgagauuacuugcgugugccgcgacaauuggcacgggucuaacagaccaugggucagcuuuaaucagaaccucgaauaucagauaggauacaucuguucaggcauuuucggcgauaauccgaggcccaacgacaaaaccgggaguugcggaccuguuuccagcaauggugcgaacggcgugaagggguuuucuuucaaguauggaaacggcguauggaucggucggacaaaaucaaucaguagccgcaauggguuugagaugauuugggauccaaacggcuggaccggaacggacaauaacuucuccauaaagcaagacaucgugggcauuaaugaauggucuggguacucggggagcuucguccagcaucccgagcugacuggucuggauuguauccgaccuugcuuuuggguggaacucauuagaggcaggccaaaagagaacacaaucuggaccuccgggucaaguauaucuuucuguggaguuaauagcgacacugugggcugguccuggcccgauggugcagaguuaccguuuacaaucgacaaguga

SEQ ID NO: 154028 - RNA, 1413 nt, Artificial Sequence; identical to SEQ ID NO: 145509
  derived and/or modified CDS sequence (opt3) from neuraminidase__InfluenzaA__AJK00081

SEQ ID NO: 154029 - RNA, 1413 nt, Artificial Sequence; identical to SEQ ID NO: 144680
  derived and/or modified CDS sequence (opt3) from neuraminidase__InfluenzaA__AJK00093

SEQ ID NO: 154030 - RNA, 1413 nt, Artificial Sequence
  derived and/or modified CDS sequence (opt3) from neuraminidase__InfluenzaA__AJK00105
augagccccaaccagaagaucauuaccauaggcuccaucucuauugccaucgggauuaucucacugaugcuccaaauaggaaauacaaucaguauuugggcuagccacuccauccagacugguucucagaacaauacgggcauuugcaaccagagaaucauaaccuacgaaaauucgacaugggugaaccauacuuaugucaauauuaacaauaccaacguuguggcaggggaggacaaaacaucaguaacccuugccggaaauagcagucuguguuccaucucuggcugggcgauuuacacuaaggauaacagcaucaggaucgguuccaaaggggacguguucgucauucgggagccuuuuauaucaugcagucacuuggaaugucgcacauucuuuuuaacccaaggagcucugcuaaaugauaagcauagcaacggcacggugaaagaccgaucuccauaucgugcccucauguccugcccgcugggcgaggcacccucaccuuacaauagcaaguucgaaaguguugccuggucugcuuccgcaugucacgaugggaugggauggcuuacuaucgguauuagcggcccagacaacggggccguggcuguccugaaguauaacggaaucauaaccggcacaauuaaaucguggaagaaacagaucuugagaacucaggagucugagugcguguguaugaaugguuccugcuuuaccaucaugacagaugggcccucaaacaaggccgcgaguuacaaaauuuucaagaucgaaaagggaaaaguaaccaagagcauugagcucaaugcaccuaacuuucauuaugaagaguguuccugcuacccagacacgggcauaguuaugugugugugcagggauaauuggcacggcucuaaccggcccugggucagcuucaaucagaaccuggacuaccaaaucggguauauuugcucaggaguguuuggugauaauccucgcccagaggacggcgaagggaguuguaacccggugacugucgauggagccaauggcguuaaagguuucuccuacaaguaugacaacgggguguggaucggcagaacaaaaagcaauaggcugcggaagggauuugagaugaucugggaccccaacggcuggaccaauacugauucugacuucucaguaaaacaggauguggucgcuauuacagacuggaguggguacagcggauccuuugugcagcacccugaacucaccgguuuagauugcauacgcccauguuucuggguugagcuggugcgaggccuucccagagaaaacacgaccaucuggacaucugggucgagcauuuccuucugcggagucaacucagacacugccaauuggaguuggccugauggcgcagaguugccauuuaccaucgacaaguga

SEQ ID NO: 154031 - RNA, 1410 nt, Artificial Sequence; identical to SEQ ID NO: 147061
  derived and/or modified CDS sequence (opt3) from neuraminidase__InfluenzaA__AJK00116

SEQ ID NO: 154032 - RNA, 1410 nt, Artificial Sequence; identical to SEQ ID NO: 145893
  derived and/or modified CDS sequence (opt3) from neuraminidase__InfluenzaA__AJK00127

SEQ ID NO: 154033 - RNA, 1410 nt, Artificial Sequence; identical to SEQ ID NO: 144786
  derived and/or modified CDS sequence (opt3) from neuraminidase__InfluenzaA__AJK00138

SEQ ID NO: 154034 - RNA, 1350 nt, Artificial Sequence
  derived and/or modified CDS sequence (opt3) from neuraminidase__InfluenzaA__AJK00152
augaaccccaaucagaagaucauuaccauaggcagcaucugcauggugacagggauugucucccugaugcuccaaaucggaaacauuaucucuauguggguuucacacaguauacagacuagaaaucagcaucagacggagccuaucaggaacaccaauuuccuuacagaaaacgccguggcuagcguaacucuggcagguaauuccucuuuguguccaauucggggcugggccgugcacucgaaagacaacucaauccgcauugggagcaagggagaugucuuugugauccgagagccguucauaaguugcucccauuuagaaugucguaccuuuuuccugacacaaggcgcgcuaauuaaugacaaacacucuaacgguaccguuaaggauagaagcccccauaggacucucauguccugcccugugggggaggcuccaucacccuacaauagucgguuugaaagcgucgccuggucugcauccgccugucacgacggaacaucauggcugaccaucggcauuagcggcccugauaacggggcuguggcaguacuuaaauauaauggaaucaucacggacacuauuaagaguuggcgcaacaauauacugagaacccaggagucugagugcgccuguguuaacgguuccugcuucacagugaugacugauggcccaagcaacgggcaggcuucguacaagaucuuuaaaauggaaaagggaaaagucgugaagucuguggaguugaaugcccccaacuaucacuacgaagaguguuccugcuauccugacgcgggcgagauuaccugugucugcagggauaauuggcaugguucaaaccggccauggguuaguuucaaucagaaccucgaauaccaaaucggguauauaugcagcggaguguuuggcgacaauccgcgccccaacgauggcacaggguccuguggaccuguaucuccaaauggugcauacggcauuaaaggguucagcuuuaaguacggaaacggcguguggaucggucgaaccaagucaacgaauaguagauccggguucgagaugaucugggaccccaacggcuggacuggaacagauagcgacuuuucugucaaacaggacauuguggaaaucaccgauuggucaggcuauagugggagcuucguucagcacccugagcugacuggacuggacugcauuaggccauguuucuggguggaacucauacggggucgucccaaggaguccacaaucuggaccucuggcucgagcauuuccuuuugcggggucaauucagauacggugaguuggucuuggccggacggagccgaguuaccuuucaccaucgauaaauga

SEQ ID NO: 154035 - RNA, 1350 nt, Artificial Sequence
  derived and/or modified CDS sequence (opt3) from neuraminidase__InfluenzaA__AJK00167
augaaccccaaucagaagaucauuaccauaggcagcaucugcauggugauugggaucgucucccugaugcuccaaauuggaaacaugaucucuauauggguuucacacaguauccagacagguaaucagcaucaggccgagccuauuagaaacgcuaauuuccuuacugaaaacgcaguggccagcguaacgcuggcgggcaauuccucuuuguguccagugagggggugggcuguccacucgaaagacaacucaauccggauuggaagcaagggcgauguguuuguuauccgcgagccguucauaaguugcucccauuuagaaugucgaaccuuuuuccugacacaaggugcccuacucaaugacaaacacucuaacgggacugugaaggaucguagcccccauagaacccugauguccugcccugucggagaggcaccaucacccuacaauaguagguuugaaagcguggccuggucugcuuccgcaugucacgacggcacaucauggcuuaccauuggcaucagcgggccugauaacggagccguagcuguucugaaauauaaugguauuaucacugacacaaucaagaguuggcggaacaauauuuugcgcacccaggagucugagugcgccugugugaacggcuccugcuucacggucaugacugaugggccaagcaacggacaggcgucguacaagauauuuaaaauggaaaagggcaaaguggugaagucugucgagcucaaugcacccaacuaucacuacgaagaguguuccugcuauccugacgccggugagaucaccuguguuugcagagauaauuggcaugggucaaacaggccaugggugaguuucaaucagaaccuggaauaccaaauuggauauaucugcagcggcguauuuggcgacaauccgcggcccaacgaugggacaggauccugugguccugugucuccaaauggcgcuuacgggauaaaaggauucagcuuuaaguacggcaacggugucuggauugggcgcacuaagucaaccaauagucgauccggcuucgagaugaucugggaccccaacggauggacagaaaccgauagcaauuuuucugugaaacaggacaucguugccauuacggacuggucaggcuauagugggagcuucgugcagcacccugagcugacuggacucgauugcaucagaccauguuucugggucgaauuaauuaggggucggcccaaggaguccacaauauggaccucuggcucgagcaucuccuuuugcggggugaacucagacacuguaaguuggucuuggccggauggagcagagcugccuuucacaauugacaaauga

SEQ ID NO: 154036 - RNA, 1350 nt, Artificial Sequence
  derived and/or modified CDS sequence (opt3) from neuraminidase__InfluenzaA__AJK00178
augaaccccaaucagaagaucauuaccauaggcagcaucugcauggugauugggaucgucucccugaugcuccaaauuggaaacaugaucucuauaugggccucacacaguaucagaacagguaaucagaaccagguugagccuauuaucaauacuaacuucccaacggaaaaagcugcagccagcauuacccuugcgggcaauuccucucuguguccgaucagggggugggcuauacauucgaaggacaacucaauucggaucggaagcaaaggcgauguguuuguaauucgcgagcccuucaucaguugcucccacuuggaaugucgaacauuuuucuuaacucagggugcccugcuaaaugacaagcauucuaacgggaccgugaaagaucguagcccucacagaacacucauguccugcccagucggagaggcacccucaccuuacaauaguagguuugaaagcguggccuggucugcuuccgcaugucaugacggcaccucauggcugacuaucggcauuagcgggccagauaacggagccguugcugugcuuaaguauaaugguauaaucacagacaccauuaagacguggcggaacaauauccugcgcacucaagagagugagugcgccugugucaacggcucuugcuucaccgugaugacagaugggcccuccgacggacaggcgagcuacaaaauauuuaagauggaaaaaggcaagguaauuaaaucgguugaguuggaugcaccuaacuaucacuacgaagaguguucuugcuauccagacgccggugagaucacuugugugugcagagauaauuggcacggguccaacaggccgugggucucauucaaucagaaccucgaauaccagaucggauauauuugcaguggcguguuuggcgacaauccccggccuaccgaugggacaggaagcugugguccagugucccauaacggcgcuuacggggucaagggauucucuuuuaaguacggcaaugguguuuggaucgggcgcaccaaaagccccaacucacgaaguggcuucgagaugauuugggacccuaauggaugguccgaaacggacagcucuuuuucagugaagcaagauauaguagccaucacugacuggaguggcuauagcggguccuucgugcagcacccagagcugacaggacuggauugcauuagacccuguuucugggucgaacucaucaggggucggccgaaagagucuaccguguggacuucgggcagcuccaucucauuuugcgggguuaacagugacacagugucuuggagcuggccugauggagcagaguuacccuucaccauugacaaguga

SEQ ID NO: 154037 - RNA, 1350 nt, Artificial Sequence
  derived and/or modified CDS sequence (opt3) from neuraminidase__InfluenzaA__AJK00199
augaaccccaaucagaagaucauuaccauaggcagcaucugcauggugauugggaucgucucccugaugcuccaaauuggaaacaugaucucuauauggguuucacacaguauccagacagguaaucagaaccagguggagccuauuaucaauacuaacuuccuuacggaaaaagccguagugagcauuacccuggcuggcaauuccucuuuguguccaaucagagggugggcaauacauucgaaggacaacucaauuaggaucggaagcaaaggcgaugucuuugugauucgggagccguucaucaguugcucccacuuagaaugucgcacauuuuuccugacucaaggugcccuacucaaugacaagcauucuaacgggaccguuaaagaucgaagcccccaccguacacugauguccugcccugugggagaggcgccaucacccuacaauaguagauuugaaagcgucgcuuggucugccuccgcaugucaugacggcaccucauggcuuacuaucggcauuagcgggccugauaacggagccgcugcagugcugaaguauaaugguauaaucacagacaccauuaagaguuggaggaacaauaucuugcggacgcaggagucugagugcgccuguguaaacggcuccugcuucacuguuaugaccgaugggccaagcgacggacaggcuucguacaaaauauuuaagauggaaaaaggcaaggugauuaaaucugucgagcucgaugcccccaacuaucacuacgaagaguguuccugcuauccugacgcgggugagaucacaugugugugccgcgauaauuggcacgggucaaacagaccaugggugaguuucaaucagaaccuggaauaccaaaucggauauauuugcagcggcgucuuuggcgacaauccgaggcccaacgaugggacuggauccuguucuccuguuagccauaauggugcauacggcgugaagggguucucauuuaaguacggaaacggcguauggaucggucggaccaaaaguccaaauucccgcagcggguucgagaugauuugggaccccaacggcuggucugaaacagacucaaguuuuagcgugaagcaggauauagucgccaucaccgacugguccggauauucuggcucguucgugcagcacccugagcugacggggcucgauugcauucgaccauguuucuggguugaauuaaucagaggaaggcccaaagagagcacuguguggacauccgguucaaguaucucuuuuugcggcgucaauagcgacaccguguccuggucauggccggauggggcugagcugccuuucacuauugacaaguga

SEQ ID NO: 154038 - RNA, 1350 nt, Artificial Sequence
  derived and/or modified CDS sequence (opt3) from neuraminidase__InfluenzaA__AJK00208
augaaccccaaucagaagaucauuaccauaggcagcaucugcauggugacagggauugucucccugaugcuccaaaucggaaacauuaucucuauguggguuucacacaguauacagacuagaaaucagcaucagacggagccuaucaggaacaccaauuuccuuacagaaaacgccguggcuagcguaacucuggcagguaauuccucuuuguguccaauucggggcugggccgugcacucgaaagacaacucaauccgcauugggagcaagggagaugucuuugugauccgagagccguucauaaguugcucccauuuagaaugucguaccuuuuuccugacacaaggcgcgcuacucaaugacaaacacucuaacgguaccguuaaggauagaagcccccauaggacucugauguccugcccugugggggaggcuccaucacccuacaauagucgguuugaaagcgucgccuggucugcauccgccugucacgacggaacaucauggcuuaccauuggcaucagcggcccugauaacggggcuguggcaguacugaaauauaauggaauuaucacggacacuaucaagaguuggcgcaacaauauuuugagaacccaggagucugagugcgccuguguuaacgguuccugcuucacagugaugacugauggcccaagcaacgggcaggcuucguacaagauauuuaaaauggaaaagggaaaagucgugaagucuguggagcucaaugcccccaacuaucacuacgaagaguguuccugcuauccugacgcgggcgagaucauuugugucugcagggauaauuggcaugguucaaaccggccauggguuaguuucaaucagaaccuggaauaccaaaucggguauauaugcagcggaguguuuggcgacaauccgcgccccaacgauggcaccggguccuguggaccuguaucuccaaauggugcauacggcauuaaaggguucagcuuuaaguacggaaacggcguguggaucggucgaacaaagucaaccaauaguagauccggguucgagaugaucugggaccccaacggcuggacgggaacugauagcgacuuuucugucaaacaggacauuguggaaaucacagauuggucaggcuauagugggagcuucguucagcacccugagcugaccggacucgacugcauuaggccauguuucuggguggaauuaauacggggucgucccaaggaguccacuaucuggacaucuggcucgagcauuuccuuuugcggggucaauucagauaccgugaguuggucuuggccggacggagccgagcugccuuucacgaucgauaaauga

SEQ ID NO: 154039 - RNA, 1350 nt, Artificial Sequence
  derived and/or modified CDS sequence (opt3) from neuraminidase__InfluenzaA__AJK00219
augaaccccaaucagaagaucauuaccauaggcagcaucugcauggugacagggauugucucccugaugcuccaaaucggaaacauuaucucuauguggguuucacacaguauacagacuagaaaucagcaucaggccgagccuaucaggaacacgaauuuccuuaccgaaaacgcuguggcaagcguaacacuggccgguaauuuguccuuauguccaauucggggcugggcggugcacucuaaagacaacaauauccgcauugggucgaagggagaugucuuugugauccgagagccguucauaucaugcagccaucuggaaugucguaccuuuuuccuaacucaaggcgcucuccugaacgacaaacacaguaaugguacaguuaaggauagaagcccccauaggacccuuaugucuugcccugugggggaggccccaagccccuacaacucccgguuugaaucagucgcauggagugccagcgcuugucacgacggaacuucuuggcugacaauuggcaucuccggcccugauaauggggcaguggccguauugaaauauaacggaauuaucaccgacacgaucaagucauggcgcaauaacauucucagaacucaggagagcgagugcgcuuguguuaacgguaguugcuucaccgugaugacagauggcccaucuaaugggcaggccuccuacaagauauuuaaaauggaaaagggaaaagucgugaaguccguggagcugaacgcgcccaauuaucacuacgaagaguguucgugcuauccugacgcaggcgagaucauuugugucugcagggauaacuggcaugguucuaaucggccauggguuuccuucaaccagaaucuggaauaccaaaucggguauauaugcucaggaguguuuggcgacaacccgcgccccaaugauggcacugggaguuguggaccuguaagcccaaacggugccuacggcauuaaaggguucuccuuuaaguacggaaauggcguguggaucggucgaaccaagucuacaaacagcagaucaggguucgagaugaucugggaccccaauggcuggaccggaacggauagugacuuuuccgucaaacaggacauuguggaaaucacugauuggagcggcuauucugggucauucguucagcacccugagcucacaggauuagacugcauuaggccauguuucuggguggaacugauacggggucgucccaaggagaguaccaucuggacuagcggcuccucuauuucguuuugcggggucaacagcgauacaguguccuggucauggccggacggagcugagcuuccuuucaccaucgauaaauga

SEQ ID NO: 154040 - RNA, 1350 nt, Artificial Sequence
  derived and/or modified CDS sequence (opt3) from neuraminidase__InfluenzaA__AJK00230
augaaccccaaucagaagaucauuaccauaggcagcaucugcauggugacagggauugucucccugaugcuccaaaucggaaacauuaucucuauguggguuucacacaguauacagacuagaaaucagcaucagacggagccuaucaggaacaccaauuuccuuacagaaaacgccguggcuagcguaacucuggcagguaauuccucuuuguguccaauucggggcugggccgugcacucgaaagacaacucaauccgcauugggagcaagggagaugucuuugugauccgagagccguucauaaguugcucccauuuagaaugucguaccuuuuuccugacacaaggcgcgcuaauuaaugacaaacacucuaacgguaccguuaaggauagaagcccccauaggacucucauguccugcccugugggggaggcuccaucacccuacaauagucgguuugaaagcgucgccuggucugcauccgccugucacgacggaacaucauggcugaccaucggcauuagcggcccugauaacggggcuguggcaguacuuaaauauaauggaaucaucacggacacuauuaagaguuggcgcaacaauauacugagaacccaggagucugagugcgccuguguuaacgguuccugcuucacagugaugacugauggcccaagcaacgggcaggcuucguacaagaucuuuaaaauggaaaagggaaaagucgugaagucuguggaguugaaugcccccaacuaucacuacgaagaguguuccugcuauccugacgcgggcgagauuaucugugucugcagggauaauuggcaugguucaaaccggccauggguuaguuucaaucagaaccucgaauaccaaauaggguauauuugcagcggaguguuuggcgacaauccgcgccccaacgauggcaccggguccuguggaccuguaucuccaaauggugcauacggcaucaaaggguucagcuuuaaguacggaaacggcguguggaucggucgaacaaagucaaccaauaguagauccggguucgagaugauuugggaccccaacggcuggacgggaacugauagcgacuuuucugucaaacaggacaucguggaaauuacagauuggucaggcuauagugggagcuucguucagcacccugagcugaccggacuggacugcauaaggccauguuucuggguggaacucauccggggucgucccaaggaguccacuauuuggacaucuggcucgagcaucuccuuuugcggggucaauucagauaccgugaguuggucuuggccggacggagccgaguuaccuuucacgaucgauaaauga

SEQ ID NO: 154041 - RNA, 1380 nt, Artificial Sequence
  derived and/or modified CDS sequence (opt3) from neuraminidase__InfluenzaA__AJS18470
augaaccccaaucagaagaucacuugcauuagcgccacaggcgugacucuguccgucguuucucuccuuauagggaucgcuaaccugggauugaauauugguuuacacuacaaaguggacgauucaacgaccaucaacauuccuaauaugaacgagacaaauccaacuaucaccaacauaacaaauaucauuguaaacaagaaugaagagagaaccuuccugaaccuaacuaaaccgcucugugaagugaauaguuggcauauccugagcaaggacaacgcaauuaggaucggcgaggaugcccacauacuugucacacgggaacccuaucuguccugcgacccucaagggugucgcauguuugcguugucucagggaaccacgcuccgaggccgucaugcuaaugguacuauucacgauagaucgccauucagggcccugaucucaugggagauggggcaggcacccagcccuuacaacacccggguggagugcauuggauggaguuccacaucuugucaugacggcaucagccgcauguccaucugcauuucaggcccaaacaauaacgccagugcuguugugugguauagagggaggcccgucacugaaauaccuagcugggugggaaauauccugcggacccaggagucugaauguguaugccacaaagguauuuguccaguugugaugacagauggcccggcaaacaauaaggccgcuaccaagaucauauacuuuaaagaggggaagauucagaaaaucgaggaacuccaaggaaacgcccagcacgucgaggaaugcuccuguuauggcgcggcagguaugaucaagugcgugugccgcgacaauuggaaaggggccaaccgacccauuaucacgauugauccugagaugaugacucauacaucaaaguacuuauguagcaagauacugaccgacaccaguagaccaaaugaucccacaaacggaaauugcgacgcuccuaucauuggcggcucuccagaucccggggugaaaggauucgccuaucuugacggugaaaacuccugguugggcaggaccaucagcaaggacucgcggucuggguacgagaugcugaaagucccgaaugcagagacggauacccaguccggaccuacaucauaccaacuaaucguuaacaaucagaacuggaguggcuauagcggugcuuuuauugacuacugggccaacaagggguguuucaaucccugcuuuuauguggaacucauacguggccgcccaaaagagaucgauguacuguggacuuccaacucuaugguggcgcuuuguggaagcagagaaaggcugggcucauggaguuggcacgacggggccgagauuaucuacuucaaguga

SEQ ID NO: 154042 - RNA, 1380 nt, Artificial Sequence
  derived and/or modified CDS sequence (opt3) from neuraminidase__InfluenzaA__AJS18481
augaaccccaaucagaagauuaccugcaucagcgccacaggcgugacucuguccgucguuucucuccuuauagggaucgcuaaccugggauugaauauugguuuacacuacaaagugucagacaguacgaccaucaacagcccuaauaugaacgagacaaauccaacuaccacaaacauuaccaauaucauaguaaacaagaaugaagagagaacuuuccugaaccuaacaaaaccgcucugugaagucaauuccuggcauauccugucuaaggauaacgcaauuaggaucggcgaggaagcccacauucuugugacccgggagcccuaucugucgugcgacccucaagggugucgcauguuugcguugucacagggaacgacucuccgaggccgucaugcuaaugguaccauccacgauagaagcccauucagggcccugauaaguugggagauggggcaggcacccuccccuuacaacacacggguggaaugcauuggauggucuagcacuuccugucaugacggcaucucacgcaugaguauuugcaucagcggcccaaacaauaacgccucugcuguugugugguauagagggaggcccgucaccgagaucccuuccugggcaggaaauauucugcggacacaggaaucagagugugugugccacaaagguauauguccaguaguuaugaccgauggcccggccaacaauaaggcugccacgaagaucauuuacuuucgcgaggggaaaauccaaaagauagaggaacuccagggaaacgcgcagcacauugaagagugcagcuguuauggcgcagccgguaugaucaaaugcgcuugccgagacaauuggaagggggccaacagacccaucauuacuaucgauccugaaaugaugacacauaccaguaaauacuuauguucuaagauucugacugacacauccaggccaaaugaucccaccaacggaaauugcgacgcaccugugacgggcggcagcccagaucccgggauaaagggauucgcuuuucuugacggugagaacucgugguugggccggaccaucucuaaaaauucccguucaggguaugagaugcugaaggucccgaacgccgaaacagauacucagaguggaccuaccagcuaccaacuaauugugaauaaccagaacugguccggcuacucuggugcguucaucgacuauugggccaauaaagaguguuuuaaccccugcuucuacguggaacucauccgcgggagaccaaaggagagcgacguccuguggacaucaaauaguaugguugcacuuuguggcuccagggaacggcugggaagcuggucuuggcacgauggcgcugagauuauauauuuuaaauga

SEQ ID NO: 154043 - RNA, 1410 nt, Artificial Sequence
  derived and/or modified CDS sequence (opt3) from neuraminidase__InfluenzaA__AKA59350
augaaccccaaucagaagaucauuaccauaggcagcgugugcaugacaaucggggucgccaaccugauucuccaaaucggaaauauuaucuccauauggaucucucacucaauucagcuugguaaccagaaucagaucgagacuuguaaccaaaguguuauuacguacgaaaauaacaccugggugaaucagacagacguaaacaucagcaauacuaacuucgcugcaggccaguccguggucucugugaaacuggccggaaauucgucauugugcccuguuagcggaugggcgauauauaguaaggauaacuccauuagaaucggcucuaaaggugacguguuugucauuagggagccauucaucagcuguuccccguuagaaugccggaccuuuuuccugacacagggggcucuacucaaugauaagcauucaaacggaaccaucaaagaccgcagucccuaccgaacucugaugagcuguccuauuggcgaggugccaucucccuauaacucccguuuugaaucaguagccuggagcgcaagugccugccacgauggcauaaauuggcuuacaaucgggauuucuggaccugacaacggugcuguugcagugcugaaguacaauggcaucauaaccgauacgauuaaguccuggagaaacaauaucuugaggacucaagagagcgagugugucugcgugaacgggucguguuucaccgugaugacagacggaccaucuaauggccaggccuccuauaaaaucuuucggauugaaaaggguaaaaucgucaagucaguugagaugaacgcucccaauuaccauuaugaagagugcaguuguuacccugauagcuccgagauuacuugcgugugccgcgacaacuggcacgggucuaauagaccaugggugagcuucaaccagaaucucgaauaccagauaggauauaucuguucaggcauuuuuggcgauaacccgaggcccaaugacaaaaccgggaguugcggaccuguauccagcaacggugccaacggcgucaagggguucucuuuuaaguacggaaauggcguguggaucggucggacaaaaucaaucaguagccgcaacggguucgagaugauuugggauccaaauggcuggaccggaacggacaacaauuuuuccauaaagcaagacaucguuggcauuaacgaauggucuggguauucggggagcuucgugcagcaucccgagcugacuggucuggauuguauccgaccuugcuucugggucgaacucauuagaggcaggccaaaagagaauacaguguggaccuccgggucaaguaucucuuuuuguggaguaaacagcgacacuguuggcugguccuggcccgauggugcggaguuaccguucacaauagacaaguga

SEQ ID NO: 154044 - RNA, 1410 nt, Artificial Sequence
  derived and/or modified CDS sequence (opt3) from neuraminidase__InfluenzaA__AKA59352
augaaccccaaucagaagaucauuaccauaggcagcgugugcaugacaaucgggauggccaaccugaugcuccaaauuggaaauaucauuuccaucuggauaucucacucaauccagcuugguaaccagaaucagauugagacuuguaaccaaagugucaucacguacgaaaauaacaccuggguuaaucagacauaugugaacauuagcaauacuaaccuggcuguaggccaguccguggucucuaccaaauuggcaggaaauucgucauuaugcccugugagcggaugggccaucuacaguaaggacaacuccauaagaauuggcucuaaaggugauguuuucgugaucagggagccauuuauuagcuguuccccgcuggaaugccggacauucuuucuaacccagggggcgcuccugaaugacaagcauucaaacggaacuaucaaagaucgcagucccuaucgaacacuuaugagcuguccuaucggcgaggucccaucucccuacaacucccguuucgaaucaguggcuuggagcgccagugcaugccacgacggcauuaauuggcugaccauagggaucucuggaccugauaacggugccguagcuguuuugaaguauaauggcauuaucacggacacuauaaaguccuggagaaacaauauucucaggacccaagagagcgagugugcaugcgugaacgggucguguuuuacagucaugacugauggaccaucugacggccaggccuccuacaaaaucuuccggaucgaaaaggguaaaauugugaagucaguggagaugaaugcucccaacuaucauuacgaagagugcaguuguuacccugauagcuccgagauuaccugcgucugccgcgacaauuggcacgggucuaacagaccauggguuagcuuuaaucagaaccuggaauaucagaucggauacauauguucaggcaucuucggcgauaauccgaggcccaacgacaaaacagggaguugcggaccuguguccagcaauggugccaacggcguaaagggguuuucuuucaaguauggaaacggcguguggauuggucggaccaaaucaaucaguagccgcaauggguuugagaugaucugggauccaaacggcuggacgggaacugacaauaacuucuccauuaagcaagacauagucggcaucaaugaauggucuggguacucggggagcuuugugcagcaucccgagcugacaggucucgauuguauucgaccuugcuucuggguugaauuaaucagaggcaggccaaaagagaacaccauuuggacuuccgggucaaguaucucuuucuguggagugaauagcgacacagucggcugguccuggcccgauggugcggagcugccguuuaccauagacaaguga

SEQ ID NO: 154045 - RNA, 1410 nt, Artificial Sequence
  derived and/or modified CDS sequence (opt3) from neuraminidase__InfluenzaA__AKA59354
augaaccccaaucagaagaucauuaccauaggcagcgugugcaugacaaucggggucgccaaccugauucuccaaaucggaaauauuaucuccauauggaucucucacucaauucagcuugguaaccagaaucagaucgagacuuguaaccaaaguguuauuacguacgaaaauaacaccugggcuaaucagacauaugugaacaucagcaauacuaacuucgcagccggccaguccguagugucugucaaacuggcgggaaauucgucauugugcccugugagcgggugggcuauauacaguaaggacaacuccauuagaaucggcucuaaaggugauguuuuugugauuagggagccauucaucagcuguuccccguuagaaugccggaccuuuuuccugacacagggggcccuacucaaugacaagcauucaaacggaaccaucaaagaucgcagucccuaucgaacucugaugagcuguccuauuggcgaggucccaucucccuacaacucccguuuugaaucaguggcauggagcgccagugcuugccacgacggcauaaauuggcuuacaaucgggauuucuggaccugauaacggugcaguagccguucugaaguauaauggcaucauaaccgacacgauuaaguccuggagaaacaauaucuugaggacucaagagagcgagugugugugcgucaacgggucguguuucaccgugaugacagauggaccaucuaauggccaggcuuccuacaaaaucuuucggauugaaaaggguaaaaucgugaagucagucgagaugaacgcccccaauuaucauuacgaagagugcaguuguuacccugacagcuccgagauuacuugcguuugccgcgauaacuggcacgggucuaauagaccaugggugagcuucaaccagaaucucgaauaucagauaggauacaucuguucaggcauuuuuggcgacaacccgaggcccaaugauaaaaccgggaguugcggaccuguauccagcaacggugcgaacggcgugaagggguucucuuuuaaguauggaaauggcgucuggaucggucggacaaaaucaaucaguagccgcaacggguucgagaugauuugggacccaaauggcuggaccgaaacggauaacaauuuuuccauaaagcaagacaucgugggaauuaacgaguggucuggcuacucggggagcuucguucagcaucccgaacugacuggacuggacuguauccgaccuugcuucuggguggagcucauuagagguaggccaaaagagaauacagucuggaccuccggcucaaguaucucuuuuuguggggugaacagcgauacuguaggaugguccuggcccgacggcgcagaauuaccguucacaauagauaaguga

SEQ ID NO: 154046 - RNA, 1380 nt, Artificial Sequence
  derived and/or modified CDS sequence (opt3) from neuraminidase__InfluenzaA__AKS48026
augaaccccaaucagaagauuaccugcaucagcgccacaggcgugacucuguccgucguuucucuccuuauagggaucgcuaaccugggauugaauauugguuuacacuacaaagugucagacaguacgaccaucaacauuccuaauaugaacgagacaaauccaacuaccacaaacaucaccaauauaaucguaaacaagaaugaagagagaacuuuccugaaccuaacaaaaccgcucugugaagugaauagcuggcauauucuguccaaggauaacgcaaucaggauuggcgaggacgcccacauccuugucacccgggaacccuaucugucuugcgauccucaagggugucgcauguuugcguugucgcagggaacgacucuccgaggccgucaugcuaaugguaccauacacgacaaaucaccauucagagcccugauuagcugggagauggggcaggcacccaguccuuacaacacaaggguggagugcaucggaugguccucuacuagcugucaugauggcauuucccggaugucaaucugcaucaguggcccaaacaauaacgccagcgcuguugugugguaucgcgggagacccgucaccgaaauuccuucuugggugggaaauauacugaggacacaggaguccgaauguguaugccacaaggguaucuguccaguugugaugaccgacggcccggcaaacaauaaggccgcuacgaaaauuaucuacuuuaaggaggggaaaauacaaaagauugaggaacuccagggaaacgcccagcacaucgaggaaugcucauguuauggcgcggcagguaugaucaaaugcgucugccgggauaauuggaagggggccaaccgccccauuaucacuauugacccugagaugaugacacauaccagcaaguacuuauguaguaaaauacugacugauacaucucgaccaaaugaccccaccaacggaaauugcgaugaaccuaucacgggcggcuccccagaccccggggugaagggauucgcuuuucuugauggugagaacagcugguugggcagaaccauuucgaaagacucuagguccggguaugagaugcugaaggugccgaaugccgaaacagacacucagucaggaccuaccaguuaccaacuaaucgucaacaaucagaacuggagcggcuacuccggugcauucaucgauuauugggcuaacaaagaguguuuuaaucccugcuucuacguugaacucauucgggggcguccaaaggagauagacgugcugugggccucuaacagcaugguagcgcuuuguggcucacgcgaaagacugggaaguugguccuggcacgauggcgccgagaucauuuauuuuaaauga

SEQ ID NO: 154047 - RNA, 1380 nt, Artificial Sequence
  derived and/or modified CDS sequence (opt3) from neuraminidase__InfluenzaA__AKS48040
augaaccccaaucagaagauuaccugcaucagcgccacaggcaugacucuguccguggucucucuccuuauagggaucgcuaaccugggauugaauauugguuuacacuacaaaguuucagacaguacgaccaucaacauuccuaauaugaacgagacaaauccaacuaccacaaacaucaccaauauaaucgugaacaagaaugaagagagaacuuuccugaaccuaacaaaaccgcucugugaaguaaauagcuggcauauucuguccaaggauaacgcaaucaggauuggcgaggacgcccacauccuugugacccgggaacccuaucugucuugcgauccucaagggugucgcauguuugcguugucgcagggaacgacucuccgaggccgucaugcuaaugguaccauacacgacagaucaccauucagggcccugauuagcugggagauggggcaggcacccaguccuuacaacacacgggucgagugcaucggaugguccucuacuagcugucaugauggcauuucccgcaugucaaucugcaucaguggcccaaacaauaacgccagcgcugugguuugguauagagggaggcccgugaccgaaauuccuucuugggucggaaauauacugcggacacaggaguccgaaugugugugccacaaagguaucuguccaguaguuaugaccgacggcccggcaaacaauaaggccgcuacgaagauuaucuacuuuaaagaggggaagauacagaaaauugaggaacuccaaggaaacgcccagcacaucgaggaaugcucauguuauggcgcggcagguaugaucaagugcgugugccgcgauaauuggaaaggggccaaccgacccauuaucacuauugacccugagaugaugacacauaccagcaaguacuuauguaguaagauacugacugauacaucuagaccaaaugaccccaccaacggaaauugcgaugcuccuaucacgggcggcuccccagaccccggggucaaaggauucgccuuucuugauggugaaaacagcugguugggcaggaccauuucgaaggacucucgguccggguaugagaugcugaaagugccgaaugcagagacagacacucagucaggaccuaccaguuaccaacuaaucgugaacaaucagaacuggagcggcuacuccggugcuuucaucgauuauugggccaacaaggaauguuuuaaucccugcuucuacgucgagcucauucgugggcgcccaaaagaaauagacguucugugggcgucuaacagcaugguggcccuuuguggcucaagagagaggcugggaaguugguccuggcacgauggcgcagaaaucauuuauuuuaaguga

SEQ ID NO: 154048 - RNA, 1380 nt, Artificial Sequence
  derived and/or modified CDS sequence (opt3) from neuraminidase__InfluenzaA__ALO75898
augaaccccaaucagaagauuaccugcaucagcgccacaggcgugacucuguccgucguuucucuccuuauagggaucgcuaaccugggauugaauauugguuuacacuacaaagugucagacaguacgaccaucaacauuccuaauaugaacgagacaaauccaacuaccacaaacaucaccaauauaaucguaaacaagaaugaagagagaacuuuccugaaccuaacaaaaccgcucugugaagugaauagcuggcauauucuguccaaggauaacgcaaucaggauuggcgaggacgcccacauccuugucacccgggaacccuaucugucuugcgauccucaagggugucgcauguuugcguugucgcagggaacgacucuccgaggccgucaugcuaaugguaccauacacgacagaucaccauucagggcccugauuagcugggagauggggcaggcacccaguccuuacaacacacggguggagugcaucggaugguccucuacuagcugucaugauggcauuucccgcaugucaaucugcaucaguggcccaaacaauaacgccagcgcuguugugugguauagagggaggcccgucaccgaaauuccuucuugggugggaaauauacugcggacacaggaguccgaauguguaugccacaaagguaucuguccaguugugaugaccgacggcccggcaaacaauaaggccgcuacgaagauuaucuacuuuaaagaggggaagauacagaaaauugaggaacuccaaggaaacgcccagcacaucgaggaaugcucauguuauggcgcggcagguaugaucaagugcgucugccgcgauaauuggaaaggggccaaccgacccauuaucacuauugacccugagaugaugacacauaccagcaaguacuuauguaguaagauacugacugauacaucuagaccaaaugaccccaccaacggaaauugcgaugcuccuaucacgggcggcuccccagaccccggggugaaaggauucgccuuucuugauggugaaaacagcugguugggcaggaccauuucgaaggacucucgguccggguaugagaugcugaaagugccgaaugcagagacagacacucagucaggaccuaccaguuaccaacuaaucgucaacaaucagaacuggagcggcuacuccggugcuuucaucgauuauugggccaacaaggaauguuuuaaucccugcuucuacguugagcucauucgugggcgcccaaaagaaauagacgugcugugggcgucuaacagcaugguagcccuuuguggcucaagagagaggcugggaaguugguccuggcacgauggcgcagaaaucauuuauuuuaaguga

SEQ ID NO: 154049 - RNA, 1380 nt, Artificial Sequence; identical to SEQ ID NO: 154048
  derived and/or modified CDS sequence (opt3) from neuraminidase__InfluenzaA__ALO75910

SEQ ID NO: 154050 - RNA, 1380 nt, Artificial Sequence
  derived and/or modified CDS sequence (opt3) from neuraminidase__InfluenzaA__ALO75922
augaaccccaaucagaagauuaccugcaucagcgccacaggcgugacucuguccgucguuucucuccuuauagggaucgcuaaccugggauugaauauugguuuacacuacaaagugucagacaguacgaccaucaacauuccuaauaugaacgagacaaauccaacuaccacaaacaucaccaauauaaucguaaacaagaaugaagagagaacuuuccugaaccuaacaaaaccgcucugugaagugaauagcuggcauauucuguccaaggauaacgcaaucaggauuggcgaggacgcccacauccuugucacccgggaacccuaucugucuugcgauccucaagggugucgcauguuugcguugucgcagggaacgacucuccgaggccgucaugcuaaugguaccauacacgacagaucaccauucagggcccugauuagcugggagauggggcaggcacccaguccuuacaacacacggguggagugcaucggaugguccucuacuagcugucaugauggcauuucccgcaugucaaucugcaucaguggcccaaacaauaacgccagcgcuguugugugguauagagggaggcccgucaccgaaauuccuucuugggugggaaauauacugcggacacaggaguccgaauguguaugccacaaagguaucuguccaguugugaugaccgacggcccggcaaacaauaaggccgcuacgaagauuaucuacuuuaaagaggggaagauacagaaaauugaggaacuccaaggaaacgcccagcacaucgaggaaugcucauguuauggcgcggcagguaugaucaagugcgucugccgcgauaauuggaaaggggccaaccgacccauuaucacuauugacccugagaugaugacacauaccagcaaguacuuauguaguaagauacugacugauacaucuagaccaaaugaccccaccaacggaaauugcgaugaaccuaucacgggcggcuccccagaccccggggugaaaggauucgcuuuucuugauggugagaacagcugguugggcaggaccauuucgaaggacucucgguccggguaugagaugcugaaagugccgaaugccgaaacagacacucagucaggaccuaccaguuaccaacuaaucgucaacaaucagaacuggagcggcuacuccggugcauucaucgauuauugggcuaacaaggaguguuuuaaucccugcuucuacguugaacucauucgugggcgcccaaaagagauagacgugcugugggccucuaacagcaugguagcgcuuuguggcucaagagaaaggcugggaaguugguccuggcacgauggcgccgagaucauuuauuuuaaguga

SEQ ID NO: 154051 - RNA, 1401 nt, Artificial Sequence
  derived and/or modified CDS sequence (opt3) from neuraminidase__InfluenzaA__ALT20083
augaaccccaaucagagaaucaccgccauuggcagcgugucccugauaaucgcuauuaucugccuccuuaugcaaauugcaauccugacaacuacgaugaccuugcacuucaggcagaacgaguguucuaauccuucaaacaaucaggucaugccaugcgaaccgauaaucauugagcggaacacaguucauuuaaauaguacuaccaucgaacgcgagauuugucccaagguggccgaauacaaaaacuggagcaagccucagugccaaaucacaggguuugcgccauucuccaaagacaauucuauacgacugucggcuucaggagauauuuggguaacccgugagcccuaugugagcuguagucuaaacaagugcuaccaguuugcccucggucagggcacuacacugaaaaauaagcacuccaacgggaccacgcaugacagaacuccucacaggacccuucugaugaaugaguugggagucccauuccaucucggcacaaaacagguguguaucgcauggucuagcuccucaugcuaugaugguaaggccuggcugcacguuugugugacuggggacgauaagaacgcuaccgcaaguauuaucuacgacggaaugcuggucgauagcaucggcucuugguccaaaaauauucuccggacacaagaaucagagugcguguguauaaacggaaccugcgccguaguuaugacggacgggagcgcuaguggaaaggccgauacucgcguguuauuuaucagagaagguaaaauuaucaacauaucuccccuguccggcagcgcgcagcacgucgaggagugcucguguuauccuagguacccagaagugcggugcgugugucgcgacaauuggaaggggucuaaccgaccgauucuuuauaucaauauggcagauuacuccaucgagucaaguuacgucugcagcggauugguuggcgacacacccagaaacgaugacuccucuagcucaaguaauuguagggacccuaacaaugaacggggugccccaggggugaagggaugggcuuucgaugacggcaacgauguauggaugggccguaccauuaaaaaugggucccgcagcggauaugagacuuuuagaguggucaacgguuggacaauggccaauucuaagucacagaucaacaggcaagugauuguugacaguaaugauuggagcggcuacuccgggauauucucuguggaaggcaaaaagugcaucaaccgguguuuuuaugucgagcugauucgaggccgcccccaggagccuagagugugguggaccucgaauagcaucaucguauucugcgguacguccgggaccuacggcacaggaucauggccagacggcgcaaacauuaacuuuaugcccauauga

SEQ ID NO: 154052 - RNA, 1410 nt, Artificial Sequence
  derived and/or modified CDS sequence (opt3) from neuraminidase__InfluenzaA__AMA65392
augaaccccaaucagaagaucauuaccauaggcagcgugugcaugacaaucgggauggccaaccugauucuccaaaucggaaauauuaucuccauaugggucucucacucaauccagauugguaaccagagucagaucgagacuuguaaucaaagcguuauuacguacgaaaacaauaccugggugaaccagacauauguaaauaucuccaacacuaauuucgcugcaggccagucuguggucucggugaaacuugccgggaacucaagccugugcccuguuaguggaugggcgauauacuccaaggacaauucugugagaauuggcagcaggggugaugucuuugugauccgggagccauucauuuccuguucaccguuggaaugccgcaccuuuuucuuaacacagggggcucugcuaaacgacaaacauaguaauggaaccaucaaggaucgaagccccuaucguacucucaugucuuguccuaucggcgagguaccaucccccuacaacucaagauuugaaagcguugccuggagugcaucugccugccacgacggcauuaacuggcugacaauagggaucuccggaccugauagcggugcuguggcaguccuuaaauauaauggcauuaucaccgacacgauaaagucguggaggaacaauauucugcggacucaagagucugagugugccugcgugaacggguccuguuucaccaucaugacagauggaccaucagacggccaggcuaguuacaagaucuuucgcauugaaaaagguaagaucauuaaaagcguggagaugaaggcccccaauuaucauuacgaagagugcuccuguuacccugauucuagcgagauaacuugcgucugcagagacaacuggcacgggucaaauaggccauggguuaguuucaaccagaauuuggaauaucagaugggauacaucuguuccggcguguuuggcgauaacccgcggcccaaugacaaaaccgggagcugcggaccuguaucuucaaacggugcgaauggcgugaagggguucaguuuuaaguauggaaacggcgucuggauuggucgcacaaaaagcaucuccucucgaaagggguucgagaugaucugggauccaaauggcuggaccggaacggacaacaaauuuucgauuaagcaagacauagugggcaucaacgaauggagcggguacuccggaucauucguucagcaucccgagcucacuggucuggauuguauuagaccuugcuucuggguggaacugaucaggggccggccagaggagaauacaauuuggaccagugggucuagcaucuccuuuuguggagucaacucagacacugugggcuggagcuggcccgauggugcagaacucccguucacaauagacaaauga

SEQ ID NO: 154053 - RNA, 1410 nt, Artificial Sequence
  derived and/or modified CDS sequence (opt3) from neuraminidase__InfluenzaA__AMA65394
augaaccccaaucagaagaucauuaccauaggcagcgugugcaugacaaucgggauggccaaccugauucuccaaaucggaaauauuaucuccauaugggucucucacucaauccagauugguaaccagagucagaucgagacuuguaaucaaagcguuauuacguacgaaaacaauaccugggugaaccagacauauguaaauaucuccaacacuaauuucgcugcaggccagucuguggucucggugaaacuugccgggaacucaagccugugcccuguuaguggaugggcgauauacuccaaggacaauucugugagaauuggcagcaaaggugaugucuuugugaucagggagccauucauuuccuguucaccguuggaaugccggaccuuuuucuuaacacagggggcucugcuaaacgacaagcauaguaauggaaccaucaaagaucgcagccccuaucgaacucucaugucuuguccuaucggcgagguaccaucccccuacaacucacguuuugaaagcguugccuggagugcaucugccugccacgacggcauuaacuggcugacaauagggaucuccggaccugauagcggugcuguggcaguccuuaaguauaauggcauuaucaccgacacgauaaagucguggagaaacaauauucugaggacucaagagucugagugugccugcgugaacggguccuguuucaccaucaugacagauggaccaucagacggccaggcuaguuacaaaaucuuucggauugaaaaggguaaaaucauuaagagcguggagaugaaagcccccaauuaucauuacgaagagugcuccuguuacccugauucuagcgagauaacuugcgucugccgcgacaacuggcacgggucaaauagaccauggguuaguuucaaccagaauuuggaauaucagaugggauacaucuguuccggcguguuuggcgauaacccgaggcccaaugacaagaccgggagcugcggaccuguaucuucaaacggugcgaauggcgugaagggguucaguuuuaaauauggaaacggcgucuggauuggucggacaaagagcaucuccucucgcaaaggguucgagaugaucugggauccaaauggcuggaccggaacggacaacaaguuuucgauuaaacaagacauagugggcaucaacgaauggagcggguacuccggaucauucguucagcaucccgagcucacuggucuggauuguauucgaccuugcuucuggguggaacugaucagaggcaggccagaggagaauacaauuuggaccagugggucuagcaucuccuuuuguggagucaacucagacacugugggcuggagcuggcccgauggugcagaacucccguucacaauagacaaguga

SEQ ID NO: 154054 - RNA, 1410 nt, Artificial Sequence
  derived and/or modified CDS sequence (opt3) from neuraminidase__InfluenzaA__BAA00618
augaaccccaaucagaagaucauuaccaugggcagcguguccauaaucauugccaucgucugccugcucaugcaaauugcuauccuuguuacaacugugacgcugcacuucagacagcaugagucugacucaccuccaaguaaccagguaauaccgugugaacccaucauuaucgagaggaauauuaccgaaaucguguacuugaacaauacaacuauagagaaagaaaccugcccuaagagcgucgaguaucggaacugguccaaaccacaguguaagauuacaggguuugcacccuucucuaaagauaauucgauccgcuuaucagccggaggugacauuugggugacccgagagccuuacguuagcugcgauccaggcaaguguuaucaauuugcgcuggggcagggaacuacacuagacaacaagcacaguaaugauaccauccaugaccguaucccccacagaacgcuccugaugaacgaacuuggcgugccuuuccaucuggguacuaggcaggucugcauugcuugguccucuagcuccugucacgaugggaaagccugguugcacgugugcguaaccggagacgauaagaaugcaacagccucauuuauauacaacggccggcucguugacaguaucggcagcuggucucagaauauucugcgcacucaagaguccgaaugugugugcaucaacgggaccuguacagucgugaugaccgauggaucagcuagcgguagagcagacacgaggauacuguucauugaggagggcaaaaucgugcauaucaguccacucucuggguccgcccagcacgucgaagagugcagcugcuauccgcgguaccccgauguucgcuguauuugccgagacaauuggaagggaucgaacucuccugugguagacaucaacaugaaagauuauuccauugacucaaguuacguguguagcggcuuagucggugauacuccaagaaaugacgauagguccucuaagagcaacugccggaaucccaacaaugaacgugggaaccauggagugaagggcugggcuuuugacaauggcgaugacguuuggauggggcgcacaauaucaaaagaucugagaaguggauacgagaccuucaaggugaucgguggcugguccacuccuaacagcaaaucucagacaaauaggcaggucauuguggacucaaacaauuggaguggguauagcggaaucuuuuccguagaaggcaagucuuguaucaaccggugcuucuacguugagcuuauucgaggucgcaaacaagagaccagagugugguggacgucgaauagcauagucguguuuugugggaccuccggcacauauggaacuggcucauggccagauggggccaacaucgacuucaugcccauuuga

SEQ ID NO: 154055 - RNA, 1410 nt, Artificial Sequence
  derived and/or modified CDS sequence (opt3) from neuraminidase__InfluenzaA__BAA00619
augaaccccaaucagaagaucauuaccauaggcagcgugucccugacauucgccgcuaucugcuuucucaugcaaauugcaauccuugucacuacgguuacccugaacuucaaacaguacgagugugacccuccagccacaaaucaggugaugccgugcgaacccauuaucauagagagaaacaucacugaaauuguauauuugaccaauacaaccaucgagagggaaauuuguccuaaguuaguggaguaccggaacuggucuaaaccacagugcaagaucacuggguuugcgcccuucucaaaagauaauaguauacgccugagcgcuggaggugacauuugggucacacgagagccuuauguguccugugauccaggccguugcuaccaauuugcccuagggcagggaaccacgcucgacaacaagcacucuaaugauacuauccaugacagaacaccccacaggacccugcuuaugaacgaacugggcguuccuuuccauuuggguacucgccagguguguauugcauggucgucaagcaguugccacgaugggaaggccuggcuccaugucuguaucaccggauaugacaaaaaugcuacagcauccuuuaucuacgauggccgccugguggacucuauuggcagcugguccaagaacauacugagaacccaggagucagaaugcguauguaucaaugggacgugcacuguugugaugacagauggaagugccagcgguagggcugacacccggauucucuucaucgaggagggccgcauaguccacauuucuccauuauccgggucagcccaacacguggaagagugcagcuguuauccgcgauaccccggagugagaugcaucuguagggauaacuggaaaggcaguaaucggccugucguugacaucaacgugaaggacuacucuauuaacuccagcuauguaugcucgggucuggugggggauacuccacguaauaacgaccggucuuccaauucauacugucagaaccccaauaacgaaaaaggaaaucauggcgucaagggcugggcguuugaugacgggaacgauguguggaugggaagaacaaucagugaggacagcagguccgguuaucagaccuucaagguuauuggcggguggucuacgccuaauagcaaacuucagauaaaccggcaagugaucgucgauucagacaaucgaaguggauacuccggcauuuuuagcguggaagguaagucuugcaucaaccgcuguuucuauguagaguugaucagagggaggcggcaggagacccgcguuugguggacaucaaauaguauuguggucuuuugcggcacuagcggaaccuacggcacaggguccuggccagauggagcagacauaaaccugaugcccaucuga

SEQ ID NO: 154056 - RNA, 1410 nt, Artificial Sequence
  derived and/or modified CDS sequence (opt3) from neuraminidase__InfluenzaA__BAA00620
augaaccccaaucagaagaucaugaccauuggcagcgugucccugauaaucgccgcugucugcuuccucaugcaaauugcaauccuuguuacaacugugacgcugcacuuuaaacagugugagugcgacucuccuucaaacaaucagguaaagccaugugaaccgauuaucauagagagaaacaucaccgaaauuguguacuugaauaacacaacuaucgagaaagaaaccugccccaaguuagucgaguauaggaauuggaguaaaccucaguguaagauuacaggguucgccccauuuagcaaggauaacuccauccggcugucugcgggaggugacauaugggugacccgcgagcccuacguuucgugcgauccuggcaaauguuaucaauucgcucuagggcagggaacuacacucgacaauaagcauucaaacgauaccauucacgaccgaaucccacaucguacgcugcuuaugaaugaacugggcgugcccuuucacuuggguacuagacaggucugcauugccuggagcaguuccucuugucaugaugggaaagcauggcuccacgugugcguaaccggagacgauaagaacgccacagcuagcuucaucuacgacggcaggcugguugauuccaucggcucauggagucagaauauucugcggacucaagagagcgaaugugugugcauaaacgggaccugcacagucgugaugaccgacggaucugcauccggucgcgccgauacgagaauccucuuuauugaggagggcaaaaucgugcacauaucaccuuuaagcgggagugcucagcaugucgaagaguguucuugcuauccaagguacccgaauguucgguguauuugccgcgacaacuggaagggauccaaccgacccaucguggacaucaauaugaaggauuauagcauugacucgucuuacguauguuccggccuggugggugauacuccuagaaacgacgauaggucaaguaaaagcaauugccggaacccaaauaacgaaaaggggaaucacggagucaaaggcugggccuucgacaacggcgaugacguguggauggggcguacaaucuccaaggaucuucgcucuggauacgagaccuuuaaaguuauugguggcugguucacucccaauagcaagucacaggugaacagacaggucauaguggacagugauaauagguccggguauagcggaaucuuuucuguagaaggcaaaucauguauuaaccggugcuucuacguugaguugauccgaggucgcgggcaagagacaagagugugguggaccaguaauagcaucgucguguuuuguggcacguccggaaccuauggcaaggggucuuggccugacggagcgaacauuaauuucaugccaauauga

SEQ ID NO: 154057 - RNA, 1410 nt, Artificial Sequence
  derived and/or modified CDS sequence (opt3) from neuraminidase__InfluenzaA__BAA00621
augaaccccaaucagaagaucauuaccauaggcagcgugucccugacaaucgccacuauuugcuuccucaugcaaaucgcuauucuugucacgaccguuacacugcacuuuaaacaguacgagugugacucuccugcaaacaaucaggugaugccaugcgaaccgaucauaaucgagagaaacauuacugaaaucguauauuugaccaauacaaccauugagaaggaaaucugucccaaauuaguggaguacaggaacuggucaaagccucagugcaaaauaacuggguucgccccauuuaguaaggauaauagcauucggcuguccgcgggaggugacaucugggucacacgcgagcccuaugugucuugugauccuggcaagugcuaccaauucgcucuagggcagggaaccacgcucgacaacaaacauucgaaugauacuauucacgaccgaaccccacaucguacacugcuuaugaacgaacugggcguucccuuucacuuggguacuagacagguguguaucgccuggucaagcaguuccugccaugaugggaaggcauggcuccacgucugugugaccggauaugacaaaaaugccacagcuucuuucaucuacgauggcaggcugguagacagcauuggcuccuggucacagaacauacugcggacccaagagagugaaugcguuuguaucaaugggacgugcacuguggucaugacagauggaagcgcaucuggucgcgccgacaccaagauucucuuuaucgaggagggcaaaauagugcacacuuccccuuuaucagggagcgcucagcauguggaagagugcaguuguuauccaagauacccgggagucaggugcauuugucgggauaacuggaagggcucuaaucgccccguuguggacaucaacguaaaggacuacuccaucgauagcucguaugugugcucuggucuggucggggacacaccucgaaagaacgauagauccucaaguagcuacuguaggaauccaaacaaugaaaaaggaacccacggcgugaaaggcugggccuucgacgaugggaacgacguuuggaugggacggacgauuuccgaggauucucguagcgguuaugaaaccuuuaaggugaucggcggguggucaacacccaauaguaaacuucagauuaaccgccaggucauaguggacuccaaugauagaagcggauacucuggcaucuucucaguagaggguaagaguugcauuaacagguguuuuuauguugaguugauccgggggcgagaacaagagacucgcgugugguggaccagcaauuccaucgucguguucugcggcacaucuggaacuuacggcaccgggucguggccugacggagcggauauuaaccugaugccaauauga

SEQ ID NO: 154058 - RNA, 1413 nt, Artificial Sequence
  derived and/or modified CDS sequence (opt3) from neuraminidase__InfluenzaA__BAA06714
augaaccccaaucagaagaucauuaccauaggcagcaucuccauggccauugggaucauuucucugauccuccaaauaggaaacaucauuucaaucugggugagucacagcauucagacagguucccagaaucauacuggcaucugcaaccagagaauaauuacguacgaaaauucuaccugggucaaccaaacauauguuaauaucaacaauacuaacgugguagcugggaaagacaagaccucggugacacuugcaggaaauucaagccuguguccuauuaggggcugggccaucuacaccaaagauaacaguauccggauugguuccaagggggacgucuucgugauacgcgagccauuuaucucuugcagccacuuggagugucgaacuuucuuuuuaacacagggagcgcugcuaaaugauaaacauuccaacggcaccguuaaggaccguucaccguauagaaggcucaugaguugcccccugggcgaagcuccuagcccauacaauucucgguucgaguccauugccuggucagcaagcgccugucacgaugggaugggauggcuuacgaucgguauaaguggccccgacgauggggcuguggcaguccugaaguauaacggaauuaucacugaaaccaucaaaucuuggaagaaacgcauuuugagaacacaggaguccgagugcguguguguaaacggcagcugcuuuacuaucaugaccgacgguccuucgaaugggcaggccucuuacaggauuuucaagauagaaaaaggaaagguuacaaaguccaucgagcucgaugcuccaaacucacauuaugaagaguguaguugcuaccccgacaccggcacggugaugugugucugccgggauaauuggcacggcagcaaccgcccuuggguguccuuuaaucaaaaccuggacuaccagauuggguauaucugcucuggaguguucggugauaauccaccgcccaaagacggcaaggggagcugugacccugucacuguugauggagccgacggcgugaaagguuuuucauaccgauaugggaacggcguauggaucggaagaacaaagaguaauagguuccggaaaggcuuugagaugauuugggauccaaacggguggaccgacacugauuccgacuuccuggugaagcaggaugucguggcgaugacagacuggagcggauacucugguucauuuguucagcaccccgaacucaccggcuuagauugcaugcguccuuguuucuggguggagcugguccgcgggagaccaagggaaaauacgaccauauggacaaguggaagcuccaucucuuucugcggcgugaacucggacacugcaaauuggagcuggcccgauggugccgagcuuccguuuaccauugacaaauga

SEQ ID NO: 154059 - RNA, 1413 nt, Artificial Sequence
  derived and/or modified CDS sequence (opt3) from neuraminidase__InfluenzaA__BAA06715
augaaccccaaucagaagaucauuaccauaggcagcaucuccauggccauugggaucauuucucugauccuccaaauaggaaacaucauuucaaucugggcuagucacagcauucagacagguucccagaaucauacuggcaucugcaaccagagaauaauuacguacgaaaauucuaccugggugaaccaaacauaugucaauaucaacaauacuaacguuguggcagggaaagacaagaccucgguaacacuugccggaaauucaagccuguguccuauuaggggcugggcgaucuacaccaaagauaacaguauccggauugguuccaagggggacguguucgucauacgcgagccauuuaucucuugcagccacuuggagugucgaacuuucuuuuuaacacagggagcucugcuaaaugauaaacauuccaacggcaccgugaaggaccguucaccguauagagcccucaugaguugcccccugggcgaagcaccuagcccauacaauucuagguucgaguccguugccuggucagcuagcgcaugucacgaugggaugggauggcuuacgauugguaucaguggccccgacaacggggccguggcuguccugaaguauaacggaauaauuacugaaaccaucaaaucuuggaagaaacggaucuugcgcacacaggaguccgagugcguguguguaaauggcagcugcuuuacuauuaugaccgaugguccuucgaacggggccgcgucuuacagaaucuucaagauugaaaaaggaaagguuacaaaguccauagagcucgacgcaccaaauuaucauuacgaagaguguucaugcuaccccgauaccggcacggugaugugugucugcagggacaacuggcacggcaguaaucggccuagcguguccuuuaaccagaaucuggauuaucaaaucggguacauuugcucuggaguguucggugacaacccacgcccgaaagauggcgaggggagcuguaaucccgucacuguugacggagccgacggcgugaaggguuuuucauaucgauacgggaacggcguauggaucggaagaacaaaaaguaauaggcugcggaagggcuucgaaaugaucugggauccuaacggguggaccgacacugauuccgacuuuagcgugaaacaggaugucguggcuaugacagacuggucuggauauucagguaguuucguucagcacccagagcucaccggcuuagauugcaugcgucccuguuuuuggguggaacugauucgcgggagaccuagggagaagacgaccauauggacaagcggauccucuaucucguucugcggcgucaauagcgacacugccaacugguccuggccagauggugcagaacuucccuucaccauugacaaauga

SEQ ID NO: 154060 - RNA, 1410 nt, Artificial Sequence
  derived and/or modified CDS sequence (opt3) from neuraminidase__InfluenzaA__BAA06716
augaacaccaaucagagaaucauuacaauaggcacuaucugccugauuguggggaucauuagccuccuucugcaaaucggaaacauaaucuuguuauggaugucccacucuauucagacgggugagaagucacaucccaaagucuguaaucagaguguuaucaccuacgaaaacaauacaugggugaaccagacuuauguaaauauuagcaacaccaauaucgccgcuggccaaggggugacaccuauaauucuggcaggaaacuccucucuaugcccaaucucgggcugggccauuuacucaaaggacaauagcaucaggaucgguaguaaaggggauauuuucgucaugcgggagccguuuauauccuguucucaccucgaaugccgcaccuucuuucugacucagggagcgcuucugaacgaccgacauagcaauggcacagugaaggaucguucccccuauagaaccuugaugucauguccuaucggcgaggcuccaagucccuacaacagcagguucgaaucuguugccugguccgcaucagccugccacgacgggaugggauggcucacgauugguaucagcggcccugauaauggggcuguggcaguccugaaauauaacggaauaauuacugacaccaucaagaguuggcggaacaagauccugcgcacacaggagucugagugugugugcauuaauggcuccuguuuuacuaucaugaccgaugguccaagcaacgggcaggccucguacaaacucuucaagauggaaaaaggaaagauuauaaaaucuaucgaguuagacgcucccaauuaucauuacgaagagugcuccuguuacccugauacaggcaagguaguuugcgugugcagagacaacuggcacgccucaaauaggccaugggucaguuuugaucaaaaccuggacuaucagauuggcuacaucuguagcgggguguucggagauaauccgcgguccaacgacgguaagggcaauugcgggcccgugcuuucuaacggagcgaauggcgucaaagguuuuagcuuccgcuaugggaacggcguuuggaucggacgaaccaagucaauuaguuccagaaggggcuuugagaugauaugggacccuaauggguggacggaaacugauagcucuuucucaaugaaacaggacaucauugcauugacagauuggaguggauacagcgguuccuuugugcagcacccagagcugaccggcaugaacuguauccggcccugcuucuggguagaacuaauucgugggcaaccuaaggagucuacuaucuggacaucgggaagcuccauaucauucuguggcgugaauagugguaccgccucuuggagcuggccagacggggcugaucuccccuuuacgaucgacaaauga

SEQ ID NO: 154061 - RNA, 1413 nt, Artificial Sequence
  derived and/or modified CDS sequence (opt3) from neuraminidase__InfluenzaA__BAA06717
augaaccccaaucagaagaucauuaccauaggcagcaucuccauggccauugggaucauuucucugauccuccaaauaggaaacaucauuucaaucugggcuagucacagcauucagacagguucccagaaucauacuggcaucugcaaccagagaaugauaacguacgaaaauucuaccugggugaaccaaacauaugucaauauuucgaacacuaauguuguggcagggaaagacaagaccucaguaacacuugccggaaacagcagucuguguccuaucaggggcugggcgauuuacaccaaagauaauuccauccggaucgguucuaagggggacguguucgucauucgcgagccauuuauaagcugcucccacuuggagugucgaacuuucuuuuuaacacagggagcucugcuaaacgauaaacauucaaauggcaccgugaaggaccguaguccguauagagcccucaugagcugcccccugggcgaagcaccuucuccauacaacuccagguucgagucaguugccuggagcgcuagugcaugucacgaugggaugggauggcuuacgaucgguauuucuggccccgacgauggggccguggcuguccugaaguauaauggaaucauaacugaaaccauuaaauccuggcggaagcagaucuugcgcacacaggagagcgagugcguguguguaaacggcucgugcuuuacuaucaugaccgacgguccuucugaugggccagccuccuacagaauuuucaaaaucgaaaagggaaaaguuacaaagucaauugagcucgacgcgcccaacuaucauuacgaagaguguaguugcuacccugauaccggcacggugaugugugucugcagggacaauuggcacggcagcaaccggccauggguguccuuuaaucaaaaccuggauuaucagauaggguacaucugcucuggaguguucggugacaauccgcgccccaaggacggcgaggggagcuguaacccugucacuguugauggagcagacggcgugaaagguuuuucauaucgauacgggaauggcguauggauuggaagaacaaagaguaacaggcugcggaaaggcuucgaaaugaucugggauccaaauggguggaccgacacugauuccgacuuuagcgugaagcaggaugucguggccaugacagacuggucuggauauucagguaguuucguucagcaccccgagcucaccggcuuagauugcaugcguccuuguuuuuggguggaacugauccgcgggagaccaagggagaaaacgaccauuuggacaagcggauccucuauaucguucugcggcgucaacagcgacacugcuaauugguccuggcccgauggugccgaacuuccguucaccaucgacaaguga

SEQ ID NO: 154062 - RNA, 1413 nt, Artificial Sequence
  derived and/or modified CDS sequence (opt3) from neuraminidase__InfluenzaA__BAA06718
augaaccccaaucagaagaucauuaccauaggcagcaucugcauggccauugggaucauuucccugauccuccaaauaggaaacaucgugucuauuuggaucucacacaguauucagacagguagccagaauuacacuggcaucuguaaccagagaauaauuacguaugaaaauuccaccugggucaaccaaacauacguuaauaucaacaauacuaacgugguagcugggcaggacaccacaucuguggcacuugccggaaauucgucacugugcccuauuagcggcugggcgaucuauaguaaagauaacuccaucaggauugguucuaagggggacgucuucgugauacgggagccauuuaucagcuguucccauuuggagugccgcaccuucuuuuuaacucagggagcucugcuaaaugauaaacacucaaacggcacaguuaaggaccgaaguccguaccguagacucaugagcugucccauuggcgaagccccuucuccauauaauuccagguucgagucaguggcauggagcgccagugcuugccaugaugggaugggauggcugaccaucgguauaucuggccccgacgauggggcagucgccgugcuuaaauacaacggaauuaucacggaaacuaucaaguccuggcggaagcgcauucugagaacccaggagagcgaguguguaugcguuaacggcucguguuuuacaaucaugacugacgguccuaauaacgggccagcuucuuauaggauuuucaaaauagaaaagggaaaaaucaccaaguccauugaguuggaugcccccaauucacacuacgaagagugcaguuguuacccugacgcgggcacagugaugugcgucugccgggauaacuggcauggcagcaaucgcccauggguguccuuuaaccaaaaucucgacuaucagaucggguacaucuguucuggaguguucggugauaacccgcgacccaaagacggcaaggggagcugcgacccugucaccguugauggagcagacggcgugaaggguuuuucauauagauacgggaauggcguauggauuggaaggacgaaaaguaacuccagccggcguggcuucgagaugauaugggauccaaauggguggacugacacagauucuaaguuucuggugaaacaggacgucguggccaugaccgauuggucaggauauagugguagcuucguucagcaccccgaacugacuggccucgacuguaugcgcccuugcuuuuggguggaguuagucagagggaggccacgggaaaacacaaccaucuggacguccggaucuucgauuagcuucuguggcgugaauggugauaccgcuaacugguccuggcccgacggggccgagcugccguucacaaucgauaaguga

SEQ ID NO: 154063 - RNA, 1413 nt, Artificial Sequence
  derived and/or modified CDS sequence (opt3) from neuraminidase__InfluenzaA__BAA06720
augaaccccaaucagaagaucauuaccauaggcagcaucuccauggccauugggaucauuucucugauccuccaaauaggaaacaucauuucaaucugggugagucacagcauucagacagguucccagaaucauacuggcaucugcaaccagagaauaauuacguacgaaaauucuaccugggucaaccaaacauauguuaauaucaacaauacuaacgugguagcugggaaagacaagaccucggugacacuugcaggaaauucaagccuguguccuauuuugggcugggccaucuacaccaaagauaacaguaucaggauugguuccaagggggacgucuucgugauacgggagccauuuaucucuugcagccacuuagagugucgcacuuucuuucugacacagggagcgcuacucaaugauaaacauuccaacggcaccguuaaggaccgaucaccguaucguagacugaugaguugcccccuuggcgaagcuccuagcccauacaauucuagguucgaguccguggccuggucagcaagcgccugucacgaugggaugggauggcugacgauugguaucaguggccccgacgauggggcugucgcaguguugaaguauaacggaauaauuacugaaaccaucaaaucuuggaagaaacggauccuccgcacacaggaguccgagugcguauguguuaacggcagcugcuuuacuauuaugaccgacgguccuucgaauggggccgcuucuuacagaaucuucaagauugaaaaaggaaaggugacaaaguccauagagcuggaugccccaaacucacauuaugaagaguguaguugcuaccccgacaccggcacggucaugugugugugcagggauaauuggcacggcagcaaccggccuuggguguccuuuaaucagaaccuggacuaccaaaucggguauauuugcucuggagucuucggugauaauccaccgcccaaagacggcaaggggagcuguaacccuguuacuguggacggagcggauggcguaaaagguuuuucauaccgcuaugggaauggcguguggaucggacgaacaaagaguaacagauucaggaaaggcuuugagaugaucugggacccaaauggguggaccgauacugacuccgauuucagcgucaagcaggacgugguugcaaugacagauuggucuggauacucagguaguuuugugcagcaccccgaacucaccggcuuagacugcaugcggccuuguuucugggucgagcuggugcgugggcgcccaagagaaaacacgaccauuuggacaagcggauccucuauaucguucugcggcguaaauagcgauacugccaacugguccuggcccgacggugcugagcuuccguuuaccaucgauaaauga

SEQ ID NO: 154064 - RNA, 1410 nt, Artificial Sequence
  derived and/or modified CDS sequence (opt3) from neuraminidase__InfluenzaA__BAD16637
augaaccccaaucagaagaucauuaccauaggcagcgugucccugacaaucgccacugucugcuuccucaugcaaauugcuauccuugcaacgaccguuacacugcacuuuaaacagcaugagugugacucuccugccucaaaccaggugaugccaugcgaaccgauuaucauagagagaaauaucacugaaauuguauacuugaacaauaccacaaucgagaaggaaauuugucccgagguggucgaguauaggaacuggaguaaaccucagugccaaaucaccggguucgcgccauuuagcaaggauaauuccauacgguuaucugcuggaggugacauuugggugacucgcgaacccuacguuucgugugauccuggcaaaugcuaucaguucgcccuggggcagggaacaacccuagacaacaagcacucaaauggcacgauccaugaucguauuccacaccgaacucuccugaugaacgagcuuggugugcccuuucaucuggggaccaagcaggucuguguggcauggagcaguuccucuugccacgacggaaaagccugguugcacguauguguuacaggcgaugacagaaaugcuacugccagcuucaucuacgauggcaggcucguggacuccaucgggucauggagucaaaacauucugcggacccaggaaagcgagugcgucuguauaaauggaacaugcaccguggugaugacggaugguucugcauccggccgcgcugacacuagaauccuguuuauuaaggaggggaaaaucguccauauaucaccucucagcggaagugcccagcacauugaagagugcucuuguuauccaagguacccggauguucggugcaucugucgcgacaacuggaagggcuccaaucgacccgugaucgacauuaacauggaagauuauagcaucgacucgucuuacguaugcuccgguuuagugggggauacaccuagaaacgacgauucaaguagcaauuccaacuguagggacccaaauaacgagcggggaaaucccggcgucaaaggcugggcguucgauaacggggacgauguguggaugggacguaccauuucuaaggacagccgcucagguuacgaaacuuuuaagguuauaggcggguggaguacaccuaauuccaaaagccaggugaacagacaagucaucgugggaaauaacaauuggucuggcuauucagguauuuucaguguagagggcaagagcugcaucaacagguguuuuuacguugagcugauccgggggaugccacaggaaacccgagugugguggacguccaauucuauugucguguucugcggaaccucgggcacauaugggacuggaagcuggcccgauggugcaaacauaaauuuuaugccgaucuga

SEQ ID NO: 154065 - RNA, 1410 nt, Artificial Sequence
  derived and/or modified CDS sequence (opt3) from neuraminidase__InfluenzaA__BAD16638
augaaccccaaucagaagaucauuaccauaggcagcgugucccugacaaucgccacugucugcuuccucaugcaaauugcuauccuugcaacgaccguuacacugcacuuuaaacagcaugagugugacucuccugccucaaaccaggugaugccaugcgaaccgauuaucauagagagaaauaucacugaaauuguauacuugaacaauaccacaaucgagaaggaaauuugucccgagguggucgaguauaggaacuggaguaaaccucagugccaaaucaccggguucgcgccauuuagcaaggauaauuccauacgguuaucugcuggaggugacauuugggugacucgcgaacccuacguuucgugugauccuggcaaaugcuaucaguucgcccuggggcagggaacaacccuagacaacaagcacucaaauggcacgauccaugaucguauuccacaccgaacucuccugaugaacgagcuuggugugcccuuucaucuggggaccaagcaggucuguguggcauggagcaguuccucuugccacgacggaaaagccugguugcacguauguguuacaggcgaugacagaaaugcuacugccagcuucaucuacgauggcaggcucguggacuccaucgggucauggagucaaaacauucugcggacccaugaaagcgagugcgucuguauaaauggaacaugcaccguggugaugacggaugguucugcauccggccgcgcugacacuagaauccuguuuauuaaggaggggaaaaucguccacauaucaccucucagcggaagugcccagcauauugaagagugcucuuguuauccaagguacccggauguucggugcaucugucgcgacaacuggaagggcuccaaucgacccgugaucgacauuaacauggaagauuauagcaucgacucgucuuacguaugcuccgguuuagugggggauacaccuagaaacgacgauucaaguagcaauuccaacuguagggacccaaauaacgagcggggaaaucccggcgucaaaggcugggcguucgauaacggggacgauguguggaugggacguaccauuaauaaggacucucgcagcgguuacgaaacuuuuaagguuauaggcggguggucaacaccuaacaguaaaucccaggugaauagacaggucaucguggauaacaauaacuggagcggauauucuggcauuuucucaguagaggguaagaguugcaucaauagguguuuuuacguugagcugauccgggggcgaccacaagaaacccgcgugugguggacgagcaacuccauugucguguucugcggcaccucuggaacauauggcacugggucguggcccgacggagcaaauauaaacuuuaugccgaucuga

SEQ ID NO: 154066 - RNA, 1410 nt, Artificial Sequence; identical to SEQ ID NO: 151245
  derived and/or modified CDS sequence (opt3) from neuraminidase__InfluenzaA__BAD16639

SEQ ID NO: 154067 - RNA, 1410 nt, Artificial Sequence
  derived and/or modified CDS sequence (opt3) from neuraminidase__InfluenzaA__BAD16640
augaaccccaaucagaagaucauuaccauaggcagcgugucccugacaaucgccacugucugcuuccucaugcaaauugcuauccuuguuacgaccgugacacugcacuuuaaacagcaugagugugacucuccugcaucaaaccagguaaugccaugcgaaccgauuaucauagagagaaauaucacugaaauuguguacuugaacaauaccacaaucgagaaggaaauuugucccgaggucguggaguauaggaacuggaguaaaccucagugccaaaucaccggguucgccccauuuagcaaggauaauuccauacgguuaucugcgggaggugacauuuggguuacucgcgaacccuacgugucgugugauccuggcaaaugcuaucaguucgcucuggggcagggaacaacccuagacaacaagcacucaaaugauacgauccaugaccguauuccacaccgaacucuccugaugaacgagcuuggcguccccuuucaucuggguaccagacagguguguguagccuggagcaguuccucuugccacgaugggaaggcaugguugcacguuugugugacaggagacgauaaaaaugccacugcuagcuucaucuacgacggcaggcucauggauuccaucggcucauggagucaaaacauucugcggacccaggaaagcgagugcgucuguauaaaugggacaugcaccguggugaugacggacggaucugcauccggucgcgccgauacuagaauccuguuuauugaggaaggcaagaucguccauauaucaccucucagcgggagugcucagcacguugaggaaugcucuuguuauccaagguacccggacgugcggugcauuugucgcgacaacuggaaaggauccaaucgacccguaaucgauaucaacauggaggacuauagcauugauucgucuuacgugugcuccggcuuagucggugacacaccuagaaacgaugacaggucaaguaauagcaacugucggaauccaaacaaugaacgugggaaccccggagugaagggcugggccuucgauaauggcgacgauguuuggauggggcgcaccaucuccaaagaccugagaucuggauacgagacuuuuaaggugauugguggcuggagcacaccuaacucaaagagucagauaaauaggcaagucaucguggauuccaacaauuggagcggguauucuggaauuuucucaguagagggcaaaaguugcaucaaccgguguuuuuacguugaacuuauccgaggucgccagcaggagaccagagugugguggacgagcaauuccauugucguguucugcgggaccucuggcacauauggaacuggcucguggccagacggggcgaacauaaauuuuaugcccaucuga

SEQ ID NO: 154068 - RNA, 1410 nt, Artificial Sequence
  derived and/or modified CDS sequence (opt3) from neuraminidase__InfluenzaA__BAD16641
augaaccccaaucagaagaucauuaccauaggcagcgccucccugacaaucgcuacugugugcuuccucaugcaaauugcaauccuugucacgaccguuacacugcacuuuaaacagcaugagugugacucuccugccucaaaccaggugaugccaugcgaaccgauuaucauagagagaaauacuaccgaaaucguauacuugaacaauacaaccauugagaaggaaaucugucccaaaguggucgaguauaggaacuggaguaagccucagugcaaaauuacuggguucgcgccauuuagcaaggauaauuccauccgguuaucugcuggaggugacauaugggugacacgcgagcccuacguuucgugugauccuggcaagugcuaucaauucgcccuggggcagggaaccacgcuagacaacaaacacucaaaugauacuauucaugaccgaaucccacaccguacccuccugaugaacgaacuuggcgugcccuuucaucuggguacaagacaggucuguauugcauggagcaguuccucuugccacgaugggaaggccugguugcacguguguguaacuggagacgauaaaaaugcuaccgccagcuucaucuacgacggcaggcucguugauuccaucggcucauggagucagaacauucugcggacacaagagagcgaaugcguguguauaaaugggaccugcacggucgugaugacugacggaucugcauccggucgcgcugauacaagaauccuguuuauugaggagggcaagaucgugcauauaucaccucucagcgggagugcccagcacgucgaagagugcucuuguuauccaagguacccggacguucggugcauuugucgcgacaacuggaaaggauccaaucgacccgugguagauaucaacauggaagacuauagcaucgauucgucuuacgugugcuccggcuuagucggugacaccccuagaaacgaugacaggucaaguaauagcaacugucggaauccaaacaaugagaaggggaaccagggagugaagggcugggcguucgauaauggcgacgauguuuggauggggcguacuauuuccaaagaccugcgcucuggauacgaaacauuuaaggugaucgguggcuggagcacccccaacucaaaaagucagauuaauagacaagucauaguggauuccgacaacaggagcggguauucuggaaucuucucaguagagggcaagaguugcauuaaucgguguuuuuacguugagcuuauccgaggucgcaaacaggaaacgagagugugguggaccagcaacuccaucgucguguucugcgggacaucuggcacuuauggaaccggcucguggccugacggggcaaauauuaacuugaugccaauauga

SEQ ID NO: 154069 - RNA, 1410 nt, Artificial Sequence
  derived and/or modified CDS sequence (opt3) from neuraminidase__InfluenzaA__BAD16642
augaaccccaaucagaagaucauuaccauaggcagcgugucccugacaaucgccacugucugcuuccucaugcaaauugcuauccuuguuacgaccgugacacugcacuuuaaacaguacgagugugacucuccugcaucaaaccagguaaugccaugcgaaccgauuaucauagagagaaauaucacugaaauuguguauuugaacaauaccacaaucgauaaggagaaaugucccaaggucguggaauacaggaacuggaguaaaccucagugccaaauuaccggguucgccccauuuagcaaggacaauuccauccgguuaucugcgggaggugauauauggguuacucgcgagcccuaugugucgugugaccauggcaagugcuaccaguucgcucuggggcagggaacaacccuagauaacaaacacucaaaugacacgauucaugaucgaaucccucaccguacucuccugaugaacgagcuuggcgucccauuucaucuggguaccagacagguguguauugccuggagcaguuccucuugccacgacgggaaggcaugguugcacguauguaucacaggagaugacaaaaaugccacugcuagcuucaucuaugauggcaggcucguugacuccauuggcucauggagucaaaacauacugcggacccaggaaagcgagugcguguguaucaaugggacaugcaccgucgugaugacggauggaucugcauccggucgcgccgacacuaggauucuguuuaucgaagagggcaagauagugcauauuucaccccucagcgggagugcucagcacgucgaggaaugcucuuguuacccuagauauccaggaguucggugcaucugucgcgacaacuggaaaggcuccaaucgaccggugguagauaucaacauggaggacuacagcauugauucgucuuacgugugcuccgguuuagucggggacacacccagaaacgaugacaggucaaguaauagcaacugucggaauccuaacaaugaacguggaaaccagggcgugaagggcugggccuucgauaauggggacgauguuuggaugggacgcaccaucuccaaggaccugagaucugguuaugagacuuuuaaagugauuggcggguggagcacaccaaacucaaagagucaaauaaauaggcaggucaucguggauuccgacaaccggagcggauacucuggcauuuucucaguagaagguaaaaguugcaucaaucgauguuuuuauguugagcuuauccgcgggagaaagcaggagaccagggugugguggacgagcaacuccauugucguguucugcggcaccucuggaacauacggcacugggucguggcccgacggagcgaauauaaacuuuaugccuaucuga

SEQ ID NO: 154070 - RNA, 1410 nt, Artificial Sequence
  derived and/or modified CDS sequence (opt3) from neuraminidase__InfluenzaA__BAD16643
augaaccccaaucagaagaucauuaccauaggcagcgugucccugacaaucgccacuauuugcuuccucaugcaaaucgcuauucuugucacgaccguuacacugcacuuuaaacaguacgagugugacucuccugcaaacaaucaggugaugccaugcgaaccgaucauaaucgagagaaacauuacugaaaucguauauuugaccaauacaaccauugagaaggaaaucugucccaaauuaguggaguacaggaacuggucaaagccucagugcaaaauaacuggguucgccccauuuaguaaggauaauagcauucggcuguccgcgggaggugacaucugggucacacgcgagcccuaugugucuugugauccuggcaagugcuaccaauucgcucuagggcagggaaccacgcucgacaacaaacauucgaaugauacuauucacgaccgaaccccacaucguacacugcuuaugaacgaacugggcguucccuuucacuuggguacuagacagguguguaucgccuggucaagcaguuccugccaugaugggaaggcauggcuccacgucugugugaccggauaugacaaaaaugccacagcuucuuucaucuacgauggcaggcugguagacagcauuggcuccuggucacagaacauacugcggacccaagagagugaaugcguuuguaucaaugggacgugcacuguggucaugacagauggaagcgcaucuggucgcgccgacaccaagauucucuuuaucgaggagggcaaaauagugcacauuuccccuuuaucagggagcgcucagcauguggaagagugcaguuguuauccaagauacccgggagucaggugcaucugucgggauaacuggaagggcucuaaucgccccguuguggacaucaacguaaaggacuacuccauugauagcucguaugugugcucuggucuggucggggacacuccucgaaacaaugauagauccucaaacaguuacuguaggaauccaaacaaugaaaaaggaaaccacggcgugaagggcugggccuucgacgaugggaaugacguuuggaugggacggacaaucagcgaggauucccguucugguuaugaaaccuuuaaagugauuggcgggcuuuucacgcccaacagcaaguugcagauaaaucgccaggucaucguggacucagauaacagaaguggauacuccggcauuuuuagcguagaggguaaaucuugcaucaauagguguuucuauguugagcugauccgggggcgagaacaagagacccgcgugugguggacaucaaacaguauugucguguuuugcggcacuagcggaaccuacggcacaggguccuggccugacggagcggauauaaaucuaaugccaaucuga

SEQ ID NO: 154071 - RNA, 1410 nt, Artificial Sequence
  derived and/or modified CDS sequence (opt3) from neuraminidase__InfluenzaA__BAD16644
augaaccccaaucagaagaucauuaccauaggcagcgugucccugacaaucgccacuauuugcuuccucaugcaaaucgcuauucuugucacgaccguuacacugcacuuuaaacaguacgagugugacucuccuccaaacaaucaggugaugccgugcgaacccaucauaaucgagagaaacauuacugaaaucguauauuugaccaauacaaccauugagaaggaaaucuguccuaaauuaguggaguacaggaacuggucaaagccacagugcaaaauaacuggguucgcacccuuuaguaaggauaauagcauucggcuguccgccggaggugacaucugggucacacgcgagccuuaugugucuugugauccaggcaagugcuaccaauucgcgcuagggcagggaaccacgcucgacaacaaacauucgaaugauacuauucacgaccgaacaccccaucguacccugcuuaugaacgaacugggcguuccuuuucacuuggguacuagacagguguguaucgcuuggucaaggagcaguugccaugaugggaaggccuggcuccacgucugugugaccggauaugacaaaaaugcaacagccuccuucaucuacgauggccggcugguagacucuauuggcagcugguccaagaacauacugcgcacccaggagucagaaugcguuuguaucaaugggacgugcacuguggucaugacagauggaagugcuagcgguagagcagacaccaaaauucucuuuaucgaggagggcaagauagugcacauuucuccauuauccgggucagcccaacauguggaagagugcagcuguuauccgagguaccccggaguccggugcaucugucgcgauaacuggaagggcaguaaucgaccuguuguggacaucaacguaaaagacuacucuauugauuccagcuaugugugcucgggucuggucggggacacuccaagaaacaaugauaggucuuccaacucauacugucggaaucccaacaaugaaaagggaaaccacggcgugaaaggcugggcuuucgacgaugggaaugacguuuggaugggacguacaaucagugaggauagccgcuccgguugcgaaaccuuuaaggugauuggcggguggucuacgccuaacagcaaacuucagauaaauagacaggucaucguggacucagauaacaggaguggauauuccggcauuuucagcguagaggguaagucuuguaucaaucggugcuuuuacguugaguugauccgagggcgcgaacaggagaccagagugugguggacaucaaacaguauugucguguucuguggcacuagcggaaccuauggcacaggguccuggccagacggagccgauauaaaucugaugcccaucuga

SEQ ID NO: 154072 - RNA, 1410 nt, Artificial Sequence; identical to SEQ ID NO: 142624
  derived and/or modified CDS sequence (opt3) from neuraminidase__InfluenzaA__BAD16645

SEQ ID NO: 154073 - RNA, 1410 nt, Artificial Sequence; identical to SEQ ID NO: 150592
  derived and/or modified CDS sequence (opt3) from neuraminidase__InfluenzaA__BAD16646

SEQ ID NO: 154074 - RNA, 1410 nt, Artificial Sequence; identical to SEQ ID NO: 142624
  derived and/or modified CDS sequence (opt3) from neuraminidase__InfluenzaA__BAD16647

SEQ ID NO: 154075 - RNA, 1410 nt, Artificial Sequence
  derived and/or modified CDS sequence (opt3) from neuraminidase__InfluenzaA__BAD16648
augaaccccaaucagaagaucauuaccauaggcagcgugucccugacaaucgccacuauuugcuuccucaugcaaaucgcuauucuugucacgaccguuacacugcacuuuaaacaguacgaguguucuucaccuccaaacaaucaggugaugccgugcgaacccaucauaaucgagagaaacauuacugaaaucguauauuugaccaauacaaccauugagaaggaaaucuguccuaaauuaguggaguacaggaacuggaguaagccacagugcaaaauaacuggguucgcacccuuuagcaaggacaauuccauucggcugucugccggaggugauaucugggucacacgcgagccuuaugugucgugugacccaggcaagugcuaccaauucgcgcuagggcagggaaccacgcucgauaacaaacauucaaaugacacuauucacgaucgaacccccuaucguacacugcuuaugaacgaacugggcguuccuuuucauuuggguacuagacagguguguaucgcuuggagcaguuccucuugccacgacgggaaggccuggcuccaugucugugugaccggauacgauaaaaaugcaacagccagcuucaucuaugacggcaggcugguagauuccauuggcucauggaguaagaacauacugcggacccaggagagcgaaugcguuuguaucuacgggacgugcacuguggucaugacagacggaucugcuuccgagcgcgcagagaccaaaauucucuuuaucgaagaggguaagauagugcacauuucaccauuaagcggcagugcccaacacguggaagagugcucuuguuacccgagauaucccggggucaggugcguuugucgggauaauuggaagggauccaaccgcccugugguagacaucaaugugaaagauuacagcaucgucucgucuuaugugugcuccggccugguuggugacacuccacgaaagaacgacagaucaaguagcuccuacuguaggaaccccaauaacgaaaaagggaaucauggagugaagggcugggcuuucgaugacggcaacgaugucuggauggggcggacaauuucugaggagagccguucaggauaugaaaccuuuaaagugaucgguggcuggaguacgccuaauuccaaacuucagauuaaccgccagguaauaguugacagcgauaauagaucuggguacucaggaaucuucaguguggagggcaagagcugcauuaacagguguuuuuaugucgaauugauccggggucgagagcaggaaacccgcgugugguggacauccaauucuaucgucguguucugcgggacuucgggcaccuacggaacaggcagcuggccagacggggccgauauuaaccugaugcccauauga

SEQ ID NO: 154076 - RNA, 1410 nt, Artificial Sequence
  derived and/or modified CDS sequence (opt3) from neuraminidase__InfluenzaA__BAE07203
augaaccccaaucagaagaucaccacaauuggcagcauaugcauggugaucgggauugucucccugaugcuccaaaucggaaacauuaucucuauauggguuucacacaguauccagacugguaaucagcaucaggccgagccuuguaaccaaagcauuaucacguacgaaaauaacaccugggugaaucagacauauguaaacauuuccaauacuaacuuccuuaccgagaaagcuguggcaucugucacacuggccggcaauucgucauugugcccaaucagcgggugggcgguguacaguaaggacaacggaauaagaauuggcuccaaaggugauguuuuugugaucagggaaccguucauuucuuguagccacuuagagugccggaccuuuuuccugacucagggggcucuacucaaugacaagcauuccaacggaacagucaaagaucgcucaccccaccgaacccugaugaguuguccugugggcgaagccccaagccccuauaauucucguuuugaguccguagcauggucagccagcgcuugccaugacggcacgaguuggcuuacuaucgggaucucuggaccugauaacggugcaguugccgugcugaaguacaacggcauuauaaccgacacaaucaaguccuggagaaauaacauuaugaggacucaggagagcgaaugugcuugcgucaaugggucguguuucaccgugaugacagauggaccaucuaacggccaagccuccuauaaaaucuuucggauagagaaggguaaaguggucaagucagcggaauugaaugcacccaacuaccacuaugaggagugcaguuguuacccugacgccggggaaauuaccugcguuugccgcgauaauuggcacggaagcaacagaccauggguguccuucaaucagaaccucgaguacaggaucggcuauaucuguucuggcguauuuggggacaauccgcggcccaacgauggaacggguagcugcggcccugugucaccaaaaggggcuuacggaauuaagggcuucaguuuuaaguaugguaauggggucuggaucggccgcacuaaauccacaaacagccgaucuggauucgaaaugauuugggaccccaauggcuggaccgggacugauucaaacuuuagugugaagcaggacauaguugccaucacagacuggagcggauacuccgguucuuucgugcagcauccugagcugaccggccuggauuguauuagaccaugcuucugggucgaacucaucagggggcggcccaaagagucgacgaucuggaccagcggauccucaauuaguuuuuguggcgugaacucugacacaguagguuggagcuggccggauggggcagaguuaccuuucacuauagacaaguga

SEQ ID NO: 154077 - RNA, 1410 nt, Artificial Sequence
  derived and/or modified CDS sequence (opt3) from neuraminidase__InfluenzaA__BAF46322
augaaccccaauccuaagaucauuaccauaggcagcgugucccugacaaucucuacuauuugcuucuuuaugcagaucgccauucucaucacgaccgucacacuucacuucaaacaauacgaguuuaacucaccaccgaauaaccagguuaugcugugugaacccacuauaaucgagagaaauauuaccgaaaucguguauuugacaaacaccacuauugagaaggaaaucugcccuaaauuagcugaguacaggaauuggaguaagccacagugugacauaacaggguucgcacccuuuagcaaagauaacuccauucggcugucugccggaggugacaucuggguaacccgcgagccuuaugugucgugcgauccagacaaguguuaccaguucgcgcuaggccaagggacgacucucaauaacguccauucaaaugauaccgugcacgaccgaacacccuaucguacucugcuuaugaacgaacugggaguuccuuuucauuugggcaccaaacaggugugcauugcuuggagcaguuccucuugucacgaugguaaggccuggcuccaugucugcgugacaggggacgauaagaaugcaaccgccagcuucaucuacaacggaagacugguagacuccaucguuucauggaguaaaaagauucugaggacgcaggagagcgaaugugugugcauaaauggcacuuguacagucgugaugaccgauggcucugcuuccgggaaagcagacacuaagauccucuuuauugaggagggaaagaucgugcacacaucaaccuuaagcgguagugcccagcacgucgaagagugcucuugcuauccacgguacccgggcguucgcugugugugcagagauaacuggaaaggguccaacaggcccauaguagacauuaauaucaaggacuacagcaucgugucgucuuaugucuguuccggacuggugggcgauacgccucggaaaaacgacucaaguagcuccucucauugccuugauccaaauaacgaagagggugggcacggaguuaagggcugggcuuucgacgauggcaaugacguguggauggggcgcaccauuagcgaaaaauugcgaucaggauacgagacauuuaaggucaucgaggguuggaguaaccccaauuccaaacugcaaauuaacagacaggugauaguagauaggggcaaucggagcggguauucuggaaucuucucaguugaaggcaagaguuguauuaaccguugcuuuuacguggagcuaauccgcgguagaaaggaagagacugaaguccucuggaccagcaauuccaucguggucuucugugggacaucuggcacuuauggaaccggcucguggccugacggggccgauauuaaccugaugccaauauga

SEQ ID NO: 154078 - RNA, 1410 nt, Artificial Sequence; identical to SEQ ID NO: 142762
  derived and/or modified CDS sequence (opt3) from neuraminidase__InfluenzaA__BAF46323

SEQ ID NO: 154079 - RNA, 1410 nt, Artificial Sequence
  derived and/or modified CDS sequence (opt3) from neuraminidase__InfluenzaA__BAF46324
augaaccccaaucagaagaucauuaccauaggcagcgugucccugacaaucucuacuauuugcuucuuuaugcaaaucgccauucucaucacgaccgucacacuucacuucaaacaguacgaguuuaacucaccuccaaauaaccagguuaugcugugugaaccgacuauaaucgagagaaauauuaccgaaaucguguauuugacaaacaccacuauugagaaggaaaucugccccaaauuagcugaguacaggaauuggaguaagccucagugugacauaacaggguucgcaccauuuagcaaagauaacuccauucggcugucugccggaggugacaucuggguaacccgcgagcccuaugugucgugcgauccugacaaguguuaccaauucgcgcuaggccaggggacgacucucaauaacguccauucaaaugauauugugcacgaccgaaccccauaucguacacugcuuaugaacgaacugggaguucccuuucauuugggcacuaaacaggugugcaucgcuuggagcaguuccucuugucacgaugguaaggccuggcuccaugucugggugaccggggacgauaagaaugcaacagccagcuucaucuacaacggaagacugguagacuccauuguuucauggaguaaaaagauacugaggacccaggagagcgaaugcguguguaucaauggcacgugcacugucgugaugacagauggcucugcuuccgggaaagcagacaccaagauucucuuuaucgaggagggaaagauagugcacacuucaacauuaagcgguagugcccaacacgucgaagaguguucuugcuauccucgguacccaggcguucgcugcguguguagagauaacuggaaaggguccaacaggccgauuguagacaucaauaucaaggacuacagcauugugucgucuuaugucugcuccggacuggugggcgauacgccccggaaaaacgacucaaguagcuccucucauugucuugauccuaauaacgaagagggugggcacggaguuaagggcugggcuuucgacgauggcaaugacguguggauggggcgcaccaucagcgaaaaauugcgaucaggauacgagaccuuuaaggucauugaggguuggaguaacccaaauuccaaacugcagauaaacagacaggugaucguagauaggggcaaucggagcggguauucuggaauuuucucaguugaaggcaagaguugcaucaaccguuguuuuuacguggagcuaauccgcgguagaaaggaagagacagaaguccucuggacuagcaauuccauuguggucuucugcgggaccucuggcacauauggaacuggcucguggcccgacggggccgauauaaaccugaugccuaucuga

SEQ ID NO: 154080 - RNA, 1410 nt, Artificial Sequence
  derived and/or modified CDS sequence (opt3) from neuraminidase__InfluenzaA__BAF46332
augaaccccaaucagaagaucauuaccauaggcagcgugucccugacaaucucuacuauuugcuucuuuaugcagaucgccauucucaucacgaccgucacacuucacuucaaacaguacgaguuuaacucaccuccaaauaaccagguuaugcugugugaaccgacuauaaucgagagaaauauuaccgaaaucguguauuugacaaacaccacuauugagaaggaaaucugccccaaauuagcugaguacaggaaguggaguaaaccucaguguaauauaacaggguucgcaccauuuagcaaggacaacuccauucggcugucugccggaggugauaucuggguaacccgcgagcccuaugugucgugcgacccugauaaguguuaccaauucgcgcuaggccaggggacgacucucaauaacguccauucaaaugacaccgugcgagaucguacaccauauagaacucugcuuaugaacgaacugggaguucccuuucacuugggcaccaaacaggugugcauugcuuggagcaguuccucuugucaugacgguaaggccuggcuccacgucugcgugacaggggaugacaaaaaugcaaccgccagcuucaucuacaacggaaggcugguagauuccaucguuucauggaguaaggagauucugcggacgcaggaaagcgagugugugugcauaaauggcacuuguacagucgugaugaccgacggcucugcuuccgggaaagcagauacuaagauccucuuuauugaggaaggaaagaucgugcauacaucaaccuuaagcgguagugcccaccacgucgaggaaugcucuugcuauccucgcuacccaggcguuagaugugugugcagggacaacuggaaaggguccaaccggccgauaguagauauuaauaucaaggacuacagcaucgugucgucuuaugucuguuccggacuggugggcgacacgccccgcaaaaacgauucaaguagcuccucucauugccuugacccuaauaacgaggaaggugggcacggaguuaagggcugggcuuucgaugacggcaaugauguguggauggggcgaaccauuagcgagaaauugagaucaggauacgagacauuuaaggucaucgaagguuggaguaacccaaauuccaaacugcaaauuaacaggcaagugauaguagaccggggcaaucguagcggguauucuggaaucuucucaguugagggcaagaguuguauuaaccgcugcuuuuacguggaacuaaucagagguaggaaggaggaaacugagguccucuggaccagcaauuccaucguggucuucugugggacaucuggcacuuauggaaccggcucguggcccgauggggccgacauuaaccugaugccuauauga

SEQ ID NO: 154081 - RNA, 1410 nt, Artificial Sequence
  derived and/or modified CDS sequence (opt3) from neuraminidase__InfluenzaA__BAF46334
augaaccccaaucagaagaucauuaccauaggcagcgugucccugacaaucucuacuauuugcuucuuuaugcagaucgccauucucaucacgaccgucacacuucacuucaaacaguacgaguuuaacucaccuccaaauaaccagguuaugcugugugaaccgacuauaaucgagagaaauauuaccgaaaucguguauuugacaaacaccacuauugagaaggaaaucugccccaaauuagcugaguacaggaaguggaguaaaccucaguguaauauaacaggguucgcaccauuuagcaaggacaacuccauucggcugucugccggaggugauaucuggguaacccgcgagcccuaugugucgugcgacccugauaaguguuaccaauucgcgcuaggccaggggacgacucucaauaacguccauucaaaugacaccgugcgagaucguacaccauauagaacucugcuuaugaacgaacugggaguucccuuucacuugggcaccaaacaggugugcauugcuuggagcaguuccucuugucaugacgguaaggccuggcuccacgucugcgugacaggggaugacaaaaaugcaaccgccagcuucaucuacaacggaaggcugguagauuccaucguuucauggaguaaggagauucugcggacgcaggaaagcgagugugugugcauaaauggcacuuguacagucgugaugaccgacggcucugcuuccgggaaagcagauacuaagauccucuuuauugaggaaggaaagaucgugcauacaucaaccuuaagcgguagugcccaacacgucgaggaaugcucuugcuauccucgcuacccaggcguuagaugugugugcagggacaacuggaaaggguccaaccggccgauaguagauauuaauaucaaggacuacagcaucgugucgucuuaugucuguuccggacuggugggcgacacgccccgcaaaaacgauucaaguagcuccucucacugccuugacccuaauaacgaggaaggugggcauggaguuaagggcugggcuuucgaugacggcaaugauguguggauggggcgaaccauuagcgagaaauugagaucaggauacgagacauuuaaggucaucgaagguuggaguaacccaaauuccaaacugcagauuaacaggcaagugauaguagaccggggcaaucguagcggguauucuggaaucuucucaguugagggcaagaguuguauuaaccgcugcuuuuacguggaacuaaucagagguaggaaggaggaaacugagguccucuggaccagcaauuccaucguggucuucugugggacaucuggcacuuauggaaccggcucguggcccgauggggccgacauuaaccugaugccuauauga

SEQ ID NO: 154082 - RNA, 1410 nt, Artificial Sequence; identical to SEQ ID NO: 154081
  derived and/or modified CDS sequence (opt3) from neuraminidase__InfluenzaA__BAF46335

SEQ ID NO: 154083 - RNA, 1410 nt, Artificial Sequence
  derived and/or modified CDS sequence (opt3) from neuraminidase__InfluenzaA__BAF46337
augaaccccaaucagaagaucauuaccauaggcagcgugucccugacaaucucuacuauuugcuucuuuaugcaaaucgccauucucaucacgaccgucacacuucacuucaaacaguacgaguuuaacucaccuccaaauaaccagguuaugcugugugaaccgacuauaaucgagagaaauauuaccgaaaucguguauuugacaaacaccacuauugagaaggaaaucugccccaaauuagcugaguacaggaaguggaguaaaccucaguguaauauaacaggguucgcaccauuuagcaaggacaacuccauucggcugucugccggaggugauaucuggguaacccgcgagcccuaugugucgugcgacccugauaaguguuaccaauucgcgcuaggccaggggacgacucucaauaacguccauucaaaugacaccgugcgaguucguacaccauauagaacucugcuuaugaacgaacugggagugcccuuucacuugggcaccaaacaggucugcauugcuuggagcaguuccucuugucaugaugguaaggccuggcuccacgugugcguaacaggggacgauaaaaaugcaaccgccagcuucaucuacaacggaaggcugguugacuccaucgugucauggaguaaggagauucugcggacgcaggaaagcgagugugucugcauaaauggcacuuguacaguggugaugaccgauggcucugcuuccgggaaagcagacacuaagauccucuuuauugaggaaggaaagaucguccauacaucaaccuuaagcgguagugcccaacacguugaggaaugcucuugcuauccucgcuacccaggcgugagauguguaugcagggauaacuggaaaggguccaaccggccgauaguggacauuaauaucaaggauuacagcaucgucucgucuuauguguguuccggacugguuggcgacacgccccgcaaaaacgacucaaguagcuccucucacugccuugauccuaauaacgaggaaggugggcauggagugaagggcugggcuuucgacgauggcaaugacgucuggauggcccgaaccauuagcgagaaauugagaucaggguacgagacauuuaaggugaucgaaggauggaguaacccaaauuccaaacugcagauuaacaggcagguaauaguugaucgggguaaucguagcggcuauucugggaucuucucaguggagggaaagaguuguauuaaccgcugcuuuuacgucgaacuaaucagaggcaggaaggaggaaacugaggugcucuggaccagcaauuccaucgucguguucugugguacaucugggacuuauggcaccggaucguggcccgacggcgcggauauuaaccugaugccuauauga

SEQ ID NO: 154084 - RNA, 1410 nt, Artificial Sequence; identical to SEQ ID NO: 154081
  derived and/or modified CDS sequence (opt3) from neuraminidase__InfluenzaA__BAF46345

SEQ ID NO: 154085 - RNA, 1410 nt, Artificial Sequence
  derived and/or modified CDS sequence (opt3) from neuraminidase__InfluenzaA__BAF46346
augaaccccaaucagaagaucauuaccauaggcagcgugucccugacaaucucuacuauuugcuucuuuaugcaaaucgccauucucaucacgaccgucacacuucacuucaaacaguacgaguuuaacucaccuccaaauaaccagguuaugcugugugaaccgacuauaaucgagagaaauauuaccgaaaucguguauuugacaaacaccacuauugagaaggaaaucugccccaaauuagcugaguacaggaaguggaguaaaccucaguguaauauagcaggguucgccccauuuagcaaggacaacuccauucggcugucugcgggaggugauaucuggguaacacgcgagcccuaugugucgugcgacccugauaaguguuaccaauucgcucuaggccaggggaccacgcucaauaacguccauucaaaugacacugugcgagaucguaccccauauagaacacugcuuaugaacgaacugggaguucccuuucacuugggcacuaaacaggugugcauugccuggagcaguuccucuugucaugacgguaaggcauggcuccacgucugcgugaccggggaugacaaaaaugccacagcuagcuucaucuacaacggaaggcugguagauuccaucguuucauggaguaaggagauucugcggacccaggaaagcgagugugugugcauaaauggcacguguacugucgugaugacagacggcucugcauccgggaaagccgauaccaagauccucuuuauugaggaaggaaagaucgugcauacuucaacauuaagcgguagugcucaacacgucgaggaaugcucuugcuauccucgcuacccaggcguuauaugugugugcagagacaacuggaaaggguccaacaggccgauuguagauaucaauaucaaggacuacagcauugugucgucuuaugucuguuccggacuggugggcgacacgccccggaaaaacgauucaaguagcuccucucacugccuugacccuaauaacgaggaaggugggcauggaguuaagggcugggccuucgaugacggcaaugauguguggauggggcgcaccaucagcgagaaauugcgaucaggauacgagaccuuuaaggucauugaagguuggaguaacccaaauuccaaacugcagauaaacagacaggugaucguagacaggggcaaucggagcggguauucuggaauuuucucaguugagggcaagaguuguaucaaccguugcuuuuacguggaacuaauccgcgguagaaaggaggaaacagagguccucuggacuagcaauuccauuguggucuucugugggaccucuggcacauauggaacuggcucguggcccgauggggcggacauaaaccugaugccuaucuga

SEQ ID NO: 154086 - RNA, 1410 nt, Artificial Sequence
  derived and/or modified CDS sequence (opt3) from neuraminidase__InfluenzaA__BAF46347
augaaccccaaucagaagaucauuaccauaggcagcgugucccugacaaucucuacuauuugcuucuuuaugcaaaucgccauucucaucacgaccgucacacuucacuucaaacaguacgaguuuaacucaccuccaaauaaccagguuaugcugugugaaccgacuauaaucgagagaaauauuaccgaaaucguguauuugacaaacaccacuauugagaaggaaaucugccccaaauuagcugaguacaggaaguggaguaaaccucaguguaauauaacaggguucgcaccauuuagcaaggacaacuccauucggcugucugccggaggugauaucuggguaacccgcgagcccuaugugucgugcgacccugauaaguguuaccaauucgcgcuaggccaggggacgacucucaauaacguccauucaaaugacaccgugcgagaucguacaccauauagaacucugcuuaugaacgaacugggaguucccuuucacuugggcaccaaacaggugugcauugcuuggagcaguuccucuugucaugacgguaaggccuggcuccacgucugcgugacaggggaugacaaaaaugcaaccgccacguucaucuacaacggaaggcugguagauagcaucguuuccuggucaaaggagauucugcggacucaggaaagugagugugugugcauaaauggcacauguaccgucgugaugacugacggcagcgcuucugggaaagcagauacaaagauccucuuuauugaggaaggaaagaucgugcauaccuccacguuaucagguagcgcccaacacgucgaggaaugcaguugcuauccucgcuacccaggcguuagaugugugugcagggacaacuggaaagggucuaaccggccgauaguagauauuaauaucaaggacuacuccaucgugagcucguaugucuguucuggacuggugggcgacacccccaggaaaaacgauuccucaaguagcucccacugccuugacccuaauaacgaggaaggugggcauggaguuaagggcugggcuuucgaugacggcaaugauguguggauggggcgaacaauuucugagaaauugagaagcggauacgagacuuuuaaggucaucgaagguuggucaaacccaaauaguaaacugcagauuaaccgccaggugauaguagaccggggcaaucguuccggguauagcggaaucuucucuguugagggcaagucauguauuaaccgcugcuuuuacguggaacuaaucagagguaggaaggaggaaaccgagguccucuggacaaguaauagcaucguggucuucugugggacuuccggcaccuauggaacaggcucuuggcccgauggggccgacauuaaccugaugccuauauga

SEQ ID NO: 154087 - RNA, 1410 nt, Artificial Sequence
  derived and/or modified CDS sequence (opt3) from neuraminidase__InfluenzaA__BAF46349
augaaccccaaucagaagaucauuaccauaggcagcgugucccugacaaucucuacuauuugcuucuuuaugcagaucgccauucucaucacgaccgucacacuucacuucaaacaguacgaguuuaacucaccuccaaauaaccagguuaugcugugugaaccgacuauaaucgagagaaauauuaccgaaaucguguauuugacaaacaccacuauugagaaggaaaucugccccaaauuagcugaguacaggaaguggaguaaaccucaguguaauauaacaggguucgcaccauuuagcaaggacaacuccauucggcugucugccggaggugauaucuggguaacccgcgagcccuaugugucgugcgacccugauaaguguuaccaauucgcgcuaggccaggggacgacucucaauaacguccauucaaaugacaccgugcgagcucguacaccauauagaacucugcuuaugaacgaacugggaguucccuuucacuugggcaccaaacaggugugcauugccuggagcaguuccucuugucaugaugguaaggcauggcuccacgucugcgugacaggggacgauaaaaaugccaccgcuagcuucaucuacaacggaaggcugguagacuccaucguuucauggaguaaggagauucugcggacgcaggaaagcgagugugugugcauaaauggcacuuguacagucgugaugaccgauggcucugcauccgggaaagccgacacuaagauccucuuuauugaggaaggaaagaucgugcauacaucaaccuuaagcgguagugcucaacacgucgaggaaugcucuugcuauccucgcuacccaggcguuagaugugugugcagggauaacuggaaaggguccaaccggccgauaguagacauuaauaucaaggauuacagcaucgugucgucuuaugucuguuccggacuggugggcgacacgccccgcaaaaacgacucaaguagcuccucucacugccuugauccuaauaacgaggaaggugggcauggaguuaagggcugggccuucgacgauggcaaugacguguggauggggcgaaccauuagcgagaaauugagaucaggauacgagacauuuaaggucuucgaagguuggaguaacccaaauuccaaacugcagaucaacaggcaagugauuguagaucggggcaaucguagcggguauucuggaauauuuucaguugagggcaagaguuguaucaaccgcugcuucuacguggaacuaauuagagguaggaaggaggaaacugagguccucuggaccagcaauuccaucguggucuucugugggacaucuggcacuuauggaaccggcucguggcccgacggggcggauaucaaccugaugccuauuuga

SEQ ID NO: 154088 - RNA, 1410 nt, Artificial Sequence; identical to SEQ ID NO: 154081
  derived and/or modified CDS sequence (opt3) from neuraminidase__InfluenzaA__BAF46350

SEQ ID NO: 154089 - RNA, 1410 nt, Artificial Sequence
  derived and/or modified CDS sequence (opt3) from neuraminidase__InfluenzaA__BAF46351
augaaccccauccagaagauuauaaccaucggcagcgugucccugacaauuucuacuaucugcuucuuuaugcagauugccauccucauaacgaccgucacacuucacuucaaacaguacgaguuuaauucaccuccaaacaaucagguuaugcugugugaaccgacuaucauugagagaaacaucaccgaaauuguguauuugacaaauaccacuaucgagaaggaaauaugccccaaauuagcugaguacaggaaguggaguaaaccucaguguaacauuacaggguucgcaccauuuagcaaggacaauuccauccggcugucugccggaggugauauuuggguaacccgcgagcccuaugugucgugcgacccugauaaguguuaccaauucgcgcuaggccaggggacgacucucaacaauguccauucaaacgacaccgugcgagaucguacaccauauagaacucugcuuaugaaugaacugggaguucccuuucacuugggcaccaaacaggugugcaucgcuuggagcaguuccucuugucaugacgguaaggccuggcuccacgucugcgugacaggggaugacaaaaacgcaaccgccagcuucaucuacaauggaaggcugguagauuccauuguuucauggaguaaggagauacugcggacgcaggaaagcgagugugugugcaucaacggcacuuguacagucgugaugaccgacggcucugcuuccgggaaagcagauacuaagauucucuuuaucgaggaaggaaagauagugcauacaucaaccuuaagcgguagugcccaacacgucgaggaaugcucuugcuauccucgcuacccaggcguuagaugugugugcagggacaauuggaaaggguccaaccggccgaugguagauauuaacaucaaggacuacagcaucgugucgucuuaugucuguuccggacuggugggcgacacgccccgcaaaaaugauucaaguagcuccucucacugccuugacccuaacaaugaggaaggugggcauggaguuaagggcugggcuuucgaugacggcaacgauguguggauggggcgaaccauuagcgagaaauugagaucaggauacgagacauuuaaggucaucgaagguuggaguaauccaaacuccaaacugcagauuaauaggcaagugauaguagaccggggcaaccguagcggguauucuggaaucuucucaguugagggcaagaguuguauuaaucgcugcuuuuacguggaacuaaucagagguaggaaggaggaaacugagguccucuggaccagcaacuccaucguggucuucugugggacaucuggcacuuauggaaccggcucguggcccgauggggccgacauuaaucugaugccuauauga

SEQ ID NO: 154090 - RNA, 1410 nt, Artificial Sequence
  derived and/or modified CDS sequence (opt3) from neuraminidase__InfluenzaA__BAF46368
augaaccccaaucagaagaucauuaccauaggcagcgugucccugacaaucucuacuauuugcuucuuuaugcagaucgccauucucaucacgaccgucacacuucacuucaaacaguacgaguuuaacucaccuccaaauaaccagguuaugcugugugaaccgacuauaaucgagagaaauauuaccgaaaucguguauuugacaaacaccacuauugagaaggaaaucugccccaaauuagcugaguacaggaauuggaguaagccucaguguaacauaacaggguucgcaccauuuagcaaagacaauuccauucggcugucugccggaggugauaucuggguaacccgcgagcccuaugugucgugcgacccugauaaguguuaccaauucgcgcuaggccaggggacgacucucaacaauguccauucaaacgacaccgugcgagaacguacaccauauagaacucugcuuaugaaugagcugggaguucccuuucacuugggcaccaaacaggugugcauugcuuggagcaguuccucuugucaugaugguaaggccuggcuccacgucugcgugacaggggacgauaagaacgcaaccgccagcuucaucuacaauggaaggcugguagacuccaucguuucauggaguaaagaaauucugcggacgcaggagagcgagugugugugcauaaacggcacuuguacagucgugaugaccgauggcucugcuuccgggaaggcagacacuaaaauccucuuuauugaagagggaaagaucgugcauacaucaaccuuaagcgguagugcccaacacgucgaagagugcucuugcuauccucgcuacccaggcguuagaugugugugcagggauaacuggaagggguccaaucggccgauaguagacauuaacaucaaagauuacagcaucgugucgucuuaugucuguuccggacuggugggcgacacgccccgcaagaaugacucaaguagcuccucucacugccuugauccuaacaaugaagagggugggcauggaguuaaaggcugggcuuucgacgauggcaacgacguguggauggggcgaaccauuagcgagaaguugagaucaggauacgaaacauuuaaagucaucgaggguuggaguaauccaaacuccaagcugcagauuaauaggcaagugauaguagaucggggcaaccguagcggguauucuggaaucuucucaguugaaggcaaaaguuguauuaaucgcugcuuuuacguggagcuaaucagagguaggaaggaagagacugagguccucuggaccagcaacuccaucguggucuucugugggacaucuggcacuuauggaaccggcucguggcccgacggggccgauauuaaucugaugccuauauga

SEQ ID NO: 154091 - RNA, 1410 nt, Artificial Sequence
  derived and/or modified CDS sequence (opt3) from neuraminidase__InfluenzaA__BAF46369
augaaccccaaucagaagaucauuaccauaggcagcgugucccugacaaucucuacuauuugcuucuuuaugcaaaucgccauucucaucacgaccgucacacuucacuucaaacaguacgaguuuaacucaccuccaaauaaccagguuaugcugugugaaccgacuauaaucgagagaaauauuaccgaaaucguguauuugacaaacaccacuauugagaaggaaaucugccccaaauuagcugaguacaggaauuggaguaagccucaguguaacauaacaggguucgcaccauuuagcaaagacaauuccauucggcugucugccggaggugauaucuggguaacccgcgagcccuaugugucgugcgacccugauaaguguuaccaauucgcgcuaggccaggggacgacucucaacaauguccauucaaacgacaccgugcacgaucgaacaccauaucguacucugcuuaugaaugaacugggaguucccuuucauuugggcaccaaacaggugugcauugcuuggagcaguuccucuugucacgacgguaaggccuggcuccaugucugcgugacaggggaugacaagaacgcaaccgccagcuucaucuacaauggaaaacugguagauuccaucguuucauggaguaaggagauucugagaacgcaggaaagcgagugugugugcauaaacggcacuuguacagucgugaugaccgacggcucugcuuccgggaaagcagauacuaagauccucuuuauugaggaaggaaagaucgugcacacaucaaccuuaagcgguagugcccaacacgucgaggaaugcucuugcuauccuagguacccaggcguucggugugugugccgcgacaacuggaaaggguccaauagaccgauaguagauauuaacaucaaggacuacagcaucgugucgucuuaugucuguuccggacuggugggcgacacgcccaggaaaaaugauucaaguagcuccucucauugccuugacccuaacaaugaggaaggugggcacggaguuaagggcugggcuuucgaugacggcaacgauguguggauggggcggaccauuagcgagaaaucacgcaguggauacgagacauuucaggucaucgaagguugguccaauagcaacucuaaguugcagauuaaucgacaggugauaguagacagaggcaacaggucaggguauaguggaaucuucagcguugagggcaaauccuguauuaaucggugcuuuuacguggaacugauccguggucgcaaggaggaaacugagguccuauggaccucuaacucgaucguggucuucugugggacaagcggcacuuauggaaccggcuccuggccagauggggccgacauuaaucucaugcccauauga

SEQ ID NO: 154092 - RNA, 1410 nt, Artificial Sequence
  derived and/or modified CDS sequence (opt3) from neuraminidase__InfluenzaA__BAF46370
augaaccccaaucagaagaucauuaccauaggcagcgugucccugacaaucucuacuauuugcuucuuuaugcaaaucgccauucucaucacgaccgucacacuucacuucaaacaguacgaguuuaacucacugccuaauaaccagguuauguugugugaaccaacuauaaucgagagaaauauuaccgaaaucguguauuuaacaaacaccacuauugagaaggaaaucugcccgaaacuggcugaguacaggaauuggaguaagccccaguguaacauaacaggguucgcaccuuuuagcaaagacaauuccauucggcuaucugccggaggugauaucuggguaacccgcgagccauaugugucgugcgaccccgauaaguguuaccaauucgcgcucggccaggggacgacucugaacaauguccauucaaacgacaccgugcacgaucgaacaccuuaucguacucuucugaugaaugaauugggaguuccauuucaucucggcaccaaacaggugugcauugcuuggagcaguuccucuugucacgacgguaaggccuggcugcaugucugcgugacaggggaugacaagaacgcaaccgccagcuucaucuacaauggaagacugguagauuccaucguuucauggaguaaagagauucucaggacgcaggaaagcgagugugugugcauaaacggcacuuguacagucgugaugaccgacggcucugcuuccgggaaggcagauacuaaaaucuuauuuauugaggaaggaaagaucgugcacacaucaacccugagcgguagugcccaacacgucgaggaaugcucuugcuauccccgguacccuggcguucgcugugugugcagagacaacuggaagggguccaauaggccaauaguagauauuaacaucaaagacuacagcaucgugucgucuuaugucuguuccggacuugugggcgacacgccgcggaagaaugauucaaguagcuccucucauugcuuggaccccaacaaugaggaaggugggcacggaguuaaaggcugggcuuucgaugacggcaacgauguguggauggggcgcaccauuagcgagaagcugcgaucaggauacgagacauuuaaagucaucgaagguuggaguaauccuaacuccaagcuacagauuaauagacaggugauaguagacaggggcaaccggagcggguauucuggaaucuucucaguugagggcaaaaguuguauuaaucguugcuuuuacguggaacucauccgcgguagaaaggaggaaacugagguccuguggaccagcacauccaucguggucuucugugggucuucgggcacuuauggaaccggcagcuggccagauggggccgacauuaaccuuaugcccauauga

SEQ ID NO: 154093 - RNA, 1410 nt, Artificial Sequence
  derived and/or modified CDS sequence (opt3) from neuraminidase__InfluenzaA__BAF46371
augaaccccaaucagaagaucauuaccauaggcagcgugucccugacaaucucuacuauuugcuucuuuaugcaaaucgccauucucaucacgaccgucacacuucacuucaaacaguacgaguuuaacucaccuccaaauaaccagguuaugcugugugaaccgacuauaaucgagagaaauauuaccgaaaucgugcauuugacaaacaccacuauugagaaggaaaucugccccaaauuagcugaguauaggaauuggaguaagccucaguguaacauaacaggguucgcaccauuuagcaaagacaauuccauucggcugucugccggaggugauaucuggguaacccgcgagcccuacgugucgugcgacccugauaaguguuaucaauucgcgcuaggccaggggacgacucucaacaauguccacucaaacgacaccgugcaugaucgaacaccauaccguacucugcuuaugaaugaacugggaguucccuuucacuugggcaccaaacaggugugcauugcuuggagcaguuccucuugucaugacgguaaggccuggcuccacgucugcgugacaggggaugacaagaacgcaaccgccagcuucaucuauaauggaagacugguagauuccaucguuucauggaguaaagagauucugaggacgcaggaaagcgagugugugugcauaaacggcacuuguacagucgugaugaccgacggcucugcuuccgggaaggcagauacuaaaauccucuuuauugaggaaggaaagaucgugcacacaucaaccuuaagcgguagugcccaacaugucgaggaaugcucuugcuacccucgguauccaggcguucgcugugugugcagagacaacuggaagggguccaauaggccgauaguagauauuaacaucaaagacuacagcaucgugucgucuuacgucuguuccggacuggugggcgacacgccccggaagaaugauucaaguagcuccucucacugccuugacccuaacaaugaggaaggugggcauggaguuaaaggcugggcuuucgaugacggcaacgauguguggauggggcgcaccauuagcgagaaguugcgaucaggauaugagacauuuaaagucaucgaagguuggaguaauccaaacuccaagcugcagacuaauagacaggugauuguagacaggagcaaccggucuggcuacucagggauauucaguguugagggaaaaagcuguaucaaucguugcuuuuauguggaacuaauucgcggcagaaaggaggaaaccgagguccucuggacauccaacucuaucguggucuucugugguacuucggggaccuacggcacaggaagcuggcccgauggcgccgacaucaaucugaugccuauuuga

SEQ ID NO: 154094 - RNA, 1410 nt, Artificial Sequence
  derived and/or modified CDS sequence (opt3) from neuraminidase__InfluenzaA__BAF46372
augaaccccaaucagaagaucauuaccauaggcagcgugucccugacaaucucuacuauuugcuucuuuaugcaaaucgccauucucaucacgaccgucacacuucacuucaaacaguacgaguuuaacucaccuccaaauaaccagguuaugcugugugaaccgacuauaaucgagagaaauauuaccgaaaucguguauuugacaaacaccacuauugagaaggaaaucugccccaaauuagcugaguacaggaauuggaguaagccucagugugacauagcaggguucgccccauuuagcaaagauaacuccauucggcugucugcgggaggugacaucuggguaacacgcgagcccuaugugucgugcgauccugacaaguguuaccaauucgcucuaggccaggggaccacgcucaauaacguccauucaaaugauacugugcacgaccgaaccccauaucguacacugcuuaugaacgaacugggaguucccuuucauuugggcacuaaacaggugugcauugccuggagcaguuccucuugucacgaugguaaggcauggcuccaugucugcgugaccggggacgauaagaaugccacagcuagcuucaucuacaacggaagacugguagacuccaucguuucauggaguaaaaagauucugaggacccaggagagcgaaugugugugcauaaauggcacguguacugucgugaugacagauggcucugcauccgggaaagccgacaccaagauccucuuuauugaggagggaaagaucgugcacacuucaacauuaagcgguagugcucaacacgucgaagagugcucuugcuauccucgguacccaggcguucgcugugugugcagagauaacuggaaaggguccaacaggccgauaguagacauuaauaucaaggacuacagcaucgugucgucuuaugucuguuccggacuggugggcgauacgccccggaaaaacgacucaaguagcuccucucauugccuugauccuaauaacgaagagggugggcacggaguuaagggcugggccuucgacgauggcaaugacguguggauggggcgcaccauuagcgaaaaauugcgaucaggauacgagaccuuuaaggucaucgaggguuggaguaacccaaauuccaaacugcagauuaacagacaggugauaguagauaggggcaaucggagcggguauucuggaaucuucucaguugaaggcaagaguuguauuaaccguugcuuuuacguggagcuaauccgcgguagaaaggaagagacagaaguccucuggacuagcaauuccaucguggucuucugugggaccucuggcacauauggaacuggcucguggcccgacggggcggauauuaaccugaugccuauauga

SEQ ID NO: 154095 - RNA, 1410 nt, Artificial Sequence
  derived and/or modified CDS sequence (opt3) from neuraminidase__InfluenzaA__BAF46385
augaaccccaaucagaagaucauuaccauaggcagcgugucccugacaaucucuacuauuugcuucuuuaugcaaaucgccauucucaucacgaccgucacacuucacuucaaacaguacgaguuuaacucaccuccaaauaaccagguuaugcugugugaaccgacuauaaucgagagaaauauuaccgaaaucguguauuugacaaacaccacuauugagaaggaaaucugccccaaauuagcugaguacaggaauuggaguaagccucaguguaacauaacaggguucgcaccauuuagcaaagacaauuccauucggcugucugccggaggugauaucuggguaacccgcgagcccuaugugucgugcgacccugauaaguguuaccaauucgcgcuaggccaggggacgacucucaacaauguccauucaaacgacaccgugcacgaucgaacaccauaucguacucugcuuaugaaugaacugggaguucccuuucauuugggcaccaaacaggugugcauugcuuggagcaguuccucuuguccugacgguaaggccuggcuccacgucugcgugacaggggaugacaagaacgcaaccgccagcuucaucuacaauggaagacugguagauuccaucguuucauggaguaaagagauucugaggacgcaggaaagcgagugugugugcauaaacggcacuuguacagucgugaugaccgacggcucugcuuccgggaaggcagauacuaaaauccucuuuauugaggaaggaaagaucgugcauacaucaaccuuaagcgguagugcccaacacgucgaggaaugcucuugcuauccacgguacccgggcgcucgcuguguuugcagagacaacuggaagggguccaauaggcccauaguggauauuaacaucaaagacuacagcaucguaucgucuuauguguguuccggacuggucggcgacacgccucggaagaaugauucaaguagcuccucucacugccuugacccaaacaaugaggaaggugggcauggagugaaaggcugggccuucgaugacggcaacgauguuuggauggggcgcaccauuagcgagaaguugcgaucaggauacgagacauuuaaagugaucgaagguuggaguaaucccaacuccaagcugcagacuaauagacaggucauuguggacaggggcaaccggagcggguauucuggaauauucucaguagagggcaaaaguuguaucaaucguugcuuuuacguugaacuaauucgcgguagaaaggaggaaaccgaggugcucuggacaagcaacuccaucgucguguucugugggacuucuucgaccuauggcacaggaagcuggccugauggcgcggacaucaaucugaugccaauuuga

SEQ ID NO: 154096 - RNA, 1410 nt, Artificial Sequence
  derived and/or modified CDS sequence (opt3) from neuraminidase__InfluenzaA__BAF46386
augaaccccaaucagaagaucauuaccauaggcagcgugucccugacaaucucuacuauuugcuucuuuaugcaaaucgccauucucaucacgaccgucacacuucacuucaaacaguacgaguuuaacucaccuccaaauaaccagguuaugcugugugaaccgacuauaaucgagagaaauauuaccgaaaucguguauuugacaaacaccacuauugagaaggaaaucugccccaaauuagcugaguacaggaauuggaguaagccucaguguaacauaacaggguucgcaccauuuagcaaagacaauuccauucggcugucugccggaggugauaucuggguaacccgcgagcccuaugugucgugcgacccugauaaguguuaccaauucgcgcuaggccaggggacgacucucaacaauguccauucaaacgacaccgugcacgaucgaacaccauaucguacucugcuuaugaaugaacugggaguucccuuucauuugggcaccaaacaggugugcauugcuuggagcaguuccucuugucacgacgguaaggccuggcuccaugucugcgugacaggggaugacaagaacgcaaccgccagcuucaucuacaauggaagacugguagauuccaucguuucauggaguaaagagauucugaggacgcaggaaagcgagugugugugcauaaacggcacuuguacagucgugaugaccgacggcucugcuuccgggaaggcagauacuaaaauccucuuuauugaggaaggaaagaucgugcacacaucaaccuuaagcgguagugcccaacacgucgaggaaugcucuugcuauccucgguacccaggcguucgcugugugugcagagacaacuggaagggguccaauaggccgauaguagauauuaacaucaaagacuacagcaucgugucgucuuaugucuguuccggacuggugggcgacacgccccggaagaaugauucaaguagcuccucucauugccuugacccuaacaaugaggaaggugggcacggaguuaaaggcugggcuuucgaugacggcaacgauguguggauggggcgcaccauuagcgagaaguugcgaucaggauacgagacauuuaaagucaucgaagguuggaguaauccaaacuccaagcugcagacuaauagacaggugauuguagacaggggcaaccggagcggguauucuggaauauucucaguugagggcaaaaguuguaucaaucguugcuuuuacguggaacuaauucgcgguagaaaggaggaaaccgagguccucuggacaagcaacuccaucguggucuucugugggacuucuucgaccuauggcacaggaagcuggcccgauggcgccgacaucaaucugaugccuauuuga

SEQ ID NO: 154097 - RNA, 1410 nt, Artificial Sequence; identical to SEQ ID NO: 144612
  derived and/or modified CDS sequence (opt3) from neuraminidase__InfluenzaA__BAF46387

SEQ ID NO: 154098 - RNA, 1410 nt, Artificial Sequence
  derived and/or modified CDS sequence (opt3) from neuraminidase__InfluenzaA__BAF46388
augaaccccaaucagaagaucauuaccauaggcagcgugucccugacaaucucuacuauuugcuucuuuaugcaaaucgccauucucaucacgaccgucacacuucacuucaaacaguacgaguuuaacucaccuccaaauaaccagguuaugcugugugaaccgacuauaaucgagagaaauauuaccgaaaucguguauuugacaaacaccacuauugagaaggaaaucugccccaaauuagcugaguacaggaauuggaguaagccucaguguaacauaacaggguucgcaccauuuagcaaagacaauuccauucggcugucugccggaggugauaucuggguaacccgcgagcccuaugugucgugcgacccugauaaguguuaccaauucgcgcuaggccaggggacgacucucaacaauguccauucaaacgacaccgugcacgaucgaacaccauaucguacucugcuuaugaaugaacugggaguucccuuucauuugggcaccaaacaggugugcauugcuuggagcaguuccucuugucacgacgguaaggccuggcuccaugucugcgugacaggggaugacaagaacgcaaccgccagcuucaucuacaauggaagacugguagauuccaucguuucauggaguaaagagauucugaggacgcaggaaagcgagugugugugcauaaacggcacuuguacagucgugaugaccgacggcucugcuuccgggaaggcagauacuaaaauccucuuuauugaggaaggaaagaucgugcacacaucaaccuuaagcgguagugcccaacacgucgaggaaugcucuugcuauccucgguacccaggcguucgcugugugugcagagacaacuggaagggguccaauaggccgauaguagauauuaacaucaaagacuacagcaucgugucgucuuaugucuguuccggacuggugggcgacacgccccggaagaaugauucaaguagcuccucucauugccuugacccuaacaaugaggaaggugggcacggaguuaaaggcugggcuuucgaugacggcaacgauguguggauggggcgcaccauuagcgagaaguugcgaucaggauacgagacauuuaaagucaucgaagguuggaguaauccaaacuccaagcugcagauuaauagacaggacauaguggauaggggcaaccggagcggguauucuggaaucuucucaguagagggcaaaaguuguauuaaucguugcuuuuacguugaacuaauccgcgguagaaaggaggaaaacgaggugcucuggacuagcaauuccaucgucguguucugugggaccucuggcacauauggaacuggcucguggcccgacggggccgauauuaaccugaugccuauauga

SEQ ID NO: 154099 - RNA, 1410 nt, Artificial Sequence
  derived and/or modified CDS sequence (opt3) from neuraminidase__InfluenzaA__BAF47922
augaaccccaaucagaagaucauuaccauaggcagcgugucccugacaaucucuacuauuugcuucuuuaugcaaaucgccauucucaucacgaccgucacacuucacuucaaacaguacgaguuuaacucaccuccaaauauacagguuaugcugugugaaccgacuaucauugagagaaacaucaccgaaauuguguauuugacaaauaccacuaucgagaaggaaauaugccccaaauuagcugaguacaggaacuggaguaagccucagugugacauuacaggguucgcaccauuuagcaaagauaauuccauccggcugucugccggaggugacauuuggguaacccgcgagcccuaugugucgugcgauccugacaaguguuaccaauucgcgcuaggccaggggacgacucucaacaauguccauucaaacgauaccgugcacgaccgaacaccauaucguacucugcuuaugaaugaacugggaguucccuuucauuugggcaccaaacaggugugcaucgcuuggagcaguuccucuugucacgaugguaaggccuggcuccaugucugcgugacaggggacgauaagaacgcaaccgccagcuucaucuacaauggaagacugguagacuccauuguuucauggaguaaagagauacugaggacgcaggaaagcgagugugugugcaucaacggcacuuguacagucgugaugaccgauggcucugcuuccgggaaggcagacacuaaaauucucuuuaucgaggaaggaaagauagugcacacaucaaccuuaagcgguagugcccaacacgucgaggaaugcucuugcuauccucgguacccaggcguucgcugugugugcagagauaauuggaagggguccaacaggccgauuguagacaucaacaucaaagacuacagcauugcuucgucuuauguguguuccggacuggucggcgauacgccccggaagaaugacucaaguagcuccucucauugccuugauccuaacaaugaggaaggugggcacggagugaaaggcugggccuucgacgauggcaacgacguuuggauggggcgcaccaucagcgagaaguugcgaucaggauacgagacauuuaaagugauugaagguuggaguaauccaaacuccaagcugcagauaaauagacaggucaucguggauaggggcaaccggagcggguauucuggaauuuucucaguagagggcaaaaguuguaucaaucguugcuuuuacguugaacuaauccgcgguagaaaggaggaaacugaggugcucuggaccagcaacuccauugucguguucugugggacaucuggcacuuauggaaccggcucguggcccgacggggcggauauaaaucugaugccuaucuga

SEQ ID NO: 154100 - RNA, 1410 nt, Artificial Sequence; identical to SEQ ID NO: 142742
  derived and/or modified CDS sequence (opt3) from neuraminidase__InfluenzaA__BAF47923

SEQ ID NO: 154101 - RNA, 1410 nt, Artificial Sequence
  derived and/or modified CDS sequence (opt3) from neuraminidase__InfluenzaA__BAF47924
augaaccccaaucagaagaucauuaccauaggcagcgugucccugacaaucucuacuauuugcuucuuuaugcaaaucgccauucucaucacgaccgucacacuucacuucaaacaguacgaguuuaacucaccuccaaauaaccagguuaugcugugugaaccgacuauaaucgagagaaauauuaccgaaaucguguauuugacaaacaccacuauugagaaggaaaucugccccaaauuagcugaguacaggaauuggaguaagccucaguguaacauaacaggguucgcaccauuuagcaaagacaauuccauucggcugucugccggaggugauaucuggguaacccgcgagcccuaugugucgugcgacccugauaaguguuaccaauucgcgcuaggccaggggacgacucucaacaauguccauucaaacgacaccgugcacgaucgaacaccauaucguacucugcuuaugaaugaacugggaguucccuuucauuugggcaccaaacaggugugcauugcuuggagcaguuccucuugucacgacgguaaggccuggcuccaugucugcgugacaggggaugacaagaacgcaaccgccagcuucaucuacaauggaagacugguagauuccaucguuucauggaguaaagagauucugaggacgcaggaaagcgagugugugugcauaaacggcacuuguacagucgugaugaccgacggcucugcuuccgggaaggcagauacuaaaauccucuuuauugaggaaggaaagaucgugcacacaucaaccuuaagcgguagugcccaacacgucgaggaaugcucuugcuauccucgguacccaggcguucgcugugugugcagagacaacuggaagggguccaauaggccgauaguagauauuaacaucaaagacuacagcaucgugucgucuuaugucuguuccggacuggugggcgacacgccccggaagaaugauucaaguagcuccucucauugccuugacccuaacagcgaggaaggugggcacggaguuaaaggcugggcuuucgaugacggcaaugauguguggauggggcgcaccauuucagagaaguugcgaaguggauacgagacauuuaaagucaucgaagguugguccaacccaaauagcaagcugcagacuaacagacaggugauuguagacaggggcaaucggucuggguauucaggaauauucaguguugagggcaaaagcuguaucaaccguugcuuuuacguggaacuaauucgcgguagaaaggaggaaaccgagguccucuggacauccaauucuaucguggucuucugugggacuucgggcaccuauggaacaggcagcuggcccgauggggccgacaucaaccugaugccuauuuga

SEQ ID NO: 154102 - RNA, 1410 nt, Artificial Sequence; identical to SEQ ID NO: 142760
  derived and/or modified CDS sequence (opt3) from neuraminidase__InfluenzaA__BAF47925

SEQ ID NO: 154103 - RNA, 1410 nt, Artificial Sequence; identical to SEQ ID NO: 142760
  derived and/or modified CDS sequence (opt3) from neuraminidase__InfluenzaA__BAF47926

SEQ ID NO: 154104 - RNA, 1410 nt, Artificial Sequence; identical to SEQ ID NO: 148747
  derived and/or modified CDS sequence (opt3) from neuraminidase__InfluenzaA__BAF47927

SEQ ID NO: 154105 - RNA, 1410 nt, Artificial Sequence; identical to SEQ ID NO: 144612
  derived and/or modified CDS sequence (opt3) from neuraminidase__InfluenzaA__BAF47928

SEQ ID NO: 154106 - RNA, 1410 nt, Artificial Sequence
  derived and/or modified CDS sequence (opt3) from neuraminidase__InfluenzaA__BAF47929
augaaccccaaucagaagaucauuaccauaggcagcgugucccugacaaucucuacuauuugcuucuuuaugcaaaucgccauucucaucacgaccgucacacuucacuucaaacaguacgaguuuaacucaccuccaaauaaccagguuaugcugugugaaccgacuauaaucgagagaaauauuaccgaaaucguguauuugacaaacaccacuacagagaaggaaauuugccccaaauuagcugaguacaggaauuggaguaagccucaguguaacaucaccggguucgcaccauuuagcaaagacaauuccauacggcugucugccggaggugauauuuggguaacgcgcgagcccuaugugucgugcgacccugauaaguguuaccaauucgcgcuaggccaggggacuacccucaacaauguccauucagacgauacagugcacgaccgaacuccauaucguacccugcuuaugaacgaacugggaguucccuuucauuugggcacaaaacaggugugcaucgcuuggagcaguuccucuugucacgaugguaaggccuggcuccaugucugcgugaccggggacgauaagaaugcaacggccagcuucauuuacaacggaagacugguagacuccaucguuucauggaguaaagagauccugaggacucaggaaagcgagugugugugcauuaauggcacauguaccgucgugaugacugauggcucugcuuccgggaaggcagacacaaaaauacucuuuaucgaggaaggaaagauugugcacaccucaacguuaagcgguagugcccaacacgucgaggaaugcucuugcuauccucgguacccaggcguucgcugugugugcagagauaacuggaagggguccaacaggccgaucguagacauaaauauuaaagacuacagcaucgugucgucuuaugucuguuccggacuggugggcgauacaccccggaagaacgacucaaguagcuccucucauugccuugauccuaauaacgaggaaggugggcacggaguuaaaggcugggcuuucgacgauggcaaugacguguggauggggcgcaccaucagcgagaaguugcgaucaggauacgagacuuuuaaagucauugaagguuggaguaacccaaauuccaagcugcagaucaacagacaggugauuguagauaggggcaaucggagcggguauucuggaauauucucaguugagggcaaaaguuguaucaaccguugcuuuuacguggaacuaauucgcgguagaaaggaggaaaaugagguccucuggaccagcaacuccaucguggucuucugugggacaucuggcacuuauggaaccggcucguggcccgacggggccgauaucaaucugaugccuauuuga

SEQ ID NO: 154107 - RNA, 1410 nt, Artificial Sequence
  derived and/or modified CDS sequence (opt3) from neuraminidase__InfluenzaA__BAF47930
augaaccccaaucagaagaucauuaccauaggcagcgugucccugacaaucucuacuauuugcuucuuuaugcaaaucgccauucucaucacgaccgucacacuucacuucaaacaguacgaguuuaacucaccuccaaauaaccagguuaugcugugugaaccgacuauaaucgagagaaauauuaccgaaaucguguauuugacaaacaccacuauugagaaggaaaucugccccaaauuagcugaguacaggaauuggaguaagccucaguguaacauaacaggguucgcaccauuuagcaaagacaauuccauucggcugucugccggaggugauaucuggguaacccgcgagcccuaugugucgugcgacccugauaaguguuaccaauucgcgcuaggccaggggacgacucucaacaauguccauucaaacgacaccgugcacggacgaacaccauaucguacucugcuuaugaaugaacugggcguucccuuucauuuggguaccaaacaggugugcauugcuuggagcaguuccucuugucacgaugggaaggccuggcuccaugucugcgugacaggagacgauaagaacgcaaccgccagcuucaucuacaauggcagacugguagacuccaucguuucauggaguaaagagauucugaggacgcaggaaagcgagugugugugcauaaacggcacuuguacagucgugaugaccgaugggucugcuuccggaaaggcagacacuaaaauccucuuuauugaggaagguaagaucgugcacacaucaaccuuaagcggcagugcccaacacgucgaggaaugcucuugcuauccucgguacccagggguucgcugugugugcagagauaacuggaagggauccaauaggccgauaguagacauuaacaucaaagauuacagcacggugucgucuuaugucuguuccggccuggugggugacacaccccggaagaaugacucaaguagcuccgggcauugccuugauccuaacaaugaggaaggaggccacggcguuaaagggugggcuuucgacgauggaaacgacguguggaugggucgcaccaucucugagaaguugcgaagcggcuacgagacuuuuaaagucauugaaggguggucaaauccaaacaguaagcugcagaucaauagacaggugauuguagauaggggaaaccgguccggcuauagcgguauauucucuguugaggggaaaucauguaucaaucguugcuuuuacguggaacuaauucgcggcagaaaggaggaaaccgagguccucuggacaaguaacagcaucguggucuucuguggaacuuccggcaccuaugggacaggaucuuggcccgacggugccgauaucaaucugaugccuauuuga

SEQ ID NO: 154108 - RNA, 1410 nt, Artificial Sequence; identical to SEQ ID NO: 148747
  derived and/or modified CDS sequence (opt3) from neuraminidase__InfluenzaA__BAF47931

SEQ ID NO: 154109 - RNA, 1410 nt, Artificial Sequence
  derived and/or modified CDS sequence (opt3) from neuraminidase__InfluenzaA__BAF47932
augaaccccaaucagaagaucauuaccauaggcagcgugucccugacaaucucuacuauuugcuucuuuaugcaaaucgccauucucaucacgaccgucacacuucacuucaaacaguacgaguuuaacucaccuccaaauaaccagguuaugcugugugaaccgacuauaaucgagagaaauauuaccgaaaucguguauuugacaaacaccacuauugagaaggaaaucugccccaaauuagcugaguacaggaauuggaguaagccucaguguaacauaacaggguucgcaccauuuagcaaagacaauuccauucggcugucugccggaggugauaucuggguaacccgcgagcccuaugugucgugcgacccugauaaguguuaccaauucgcgcuaggccaggggacgacucucaacaauguccauucaaacgacaccgugcacgaucgaacaccauaucguacucugcuuaugaaugaacugggaguucccuuucauuugggcaccaaacaggugugcauugcuuggagcaguuccucuugucacgacgguaaggccuggcuccaugucugcgugacaggggaugacaagaacgcaaccgccagcuucaucuacaauggaagacugguagauuccaucguuucauggaguaaagagauucugaggacgcaggaaagcgagugugugugcauaaacggcacuuguacagucgugaugaccgacggcucugcuuccgggaaggcagauacuaaaauccucuuuauugaggaaggaaagaucgugcacacaucaaccuuaagcgguagugcccaacacgucgaggaaugcucuugcuauccucgguacccaggcguucgcugugugugcagagacaacuggaagggguccaauaggccgauaguagauauuaacaucaaagacuacagcaucgugucgucuuaugucuguuccggacuggugggcgacacgccccggaagaaugauucaaguagcuccggucauugccuugacccuaacaaugaggaagggggacacggcguuaaaggcugggcuuucgaugacgggaacgauguguggaugggacgcaccauuucugagaaguugcgaagcgguuacgagacauuuaaagucaucgaaggcuggucaaauccaaacaguaagcugcagauuaauagacaggugauaguagacagggggaaccgguccggauauagcggcaucuucucuguugaggguaaaucauguauuaaucguugcuuuuacguggaacuaauccgcgggagaaaggaggaaacugagguccucuggaccaguaacagcaucguggucuucuguggcacauccggaacuuauggcaccgggucuuggcccgauggagccgacauuaaucugaugccuauauga

SEQ ID NO: 154110 - RNA, 1410 nt, Artificial Sequence; identical to SEQ ID NO: 142760
  derived and/or modified CDS sequence (opt3) from neuraminidase__InfluenzaA__BAF47933

SEQ ID NO: 154111 - RNA, 1410 nt, Artificial Sequence; identical to SEQ ID NO: 142762
  derived and/or modified CDS sequence (opt3) from neuraminidase__InfluenzaA__BAF47934

SEQ ID NO: 154112 - RNA, 1410 nt, Artificial Sequence; identical to SEQ ID NO: 142762
  derived and/or modified CDS sequence (opt3) from neuraminidase__InfluenzaA__BAF47935

SEQ ID NO: 154113 - RNA, 1410 nt, Artificial Sequence
  derived and/or modified CDS sequence (opt3) from neuraminidase__InfluenzaA__BAF47936
augaaccccaaucagaagaucauuaccauaggcagcgugucccugacaaucucuacuauuugcuucuuuaugcaaaucgccauucucaucacgaccgucacacuucacuucaaacaguacgaguuuaacucaccuccaaauaaccagguuaugcugugugaaccgacuauaaucgagagaaauauuaccgaaaucguguauuugacaaacaccacuauugagaaggaaaucugccccaaauuagcugaguacaggaauuggaguaagccucaguguaacauaacaggguucgcaccauuuagcaaagacaauuccauucggcugucugccggaggugauaucuggguaacccgcgagcccuaugugucgugcgacccugauaaguguuaccaauucgcgcuaggccaggggacgacucucaacaauguccauucaaacgacaccgugcacgaucgaacaccauaucguacucugcuuaugaaugaacugggaguucccuuucauuugggcaccaaacaggugugcauugcuuggagcaguuccucuugucacgacgguaaggccuggcuccaugucugcaucacaggggaugacaagaacgcaaccgccagcuucaucuacaauggaagacugguggauuccauuguaucauggaguaaagagauacugaggacgcaggaaagcgaguguguuugcaucaacggcacuuguacaguggucaugaccgacggcucugcuuccgggaaggcagauacuaaaauucucuuuaucgaggaaggaaagauagugcacacaucaaccuuaagcgguagugcccaacacguggaggaaugcucuugcuauccucgguacccaggcguccgcuguguuugcagagacaacuggaagggguccaauaggccgauuguggauaucaacaucaaagacuacagcauuguaucgucuuauguguguuccggacuggucggcgacacgccccggaagaaugauucaaguagcuccggucauugccuugacccuaacaaugaggaagggggacacggcgugaaaggcugggcuuucgaugacgggaacgauguuuggaugggacgcaccaucucugagaaguugcgaagcgguuacgagacauuuaaagugauugaaggcuggucaaauccaaacaguaagcugcagauaaauagacaggucaucguggacagggggaaccgguccggauauagcggcauuuucucuguagaggguaaaucauguaucaaucguugcuuuuacguugaacuaauccgcgggagaaaggaggaaacugaggugcucuggaccaguaacagcauugucguguucuguggcacauccggaacuuauggcaccgggucuuggcccgauggagccgacauaaaucugaugccuaucuga

SEQ ID NO: 154114 - RNA, 1410 nt, Artificial Sequence
  derived and/or modified CDS sequence (opt3) from neuraminidase__InfluenzaA__BAF47937
augaaccccaaucagaagaucauuaccauaggcagcgugucccugacaaucucuacuauuugcuucuuuaugcaaaucgccauucucaucacgaccgucacacuucacuucaaacaguacgaguuuaacucaccuccaaauaaccagguuaugcugugugaaccgacuauaaucgagagaaauauuaccgaaaucguguauuugacaaacaccacuauugagaaggaaaucugccccaaauuagcugaguacaggaauuggaguaagccucaguguaacauaacaggguucgcaccauuuagcaaagacaauuccauucggcugucugccggaggugauaucuggguaacccgcgagcccuaugugucgugcggcccugacaaguguuaccaauucgcgcuagggcagggaacgacucucaacaauguccauucaaacgauaccgugcacgaccgaacaccauaucguacucugcuuaugaaugaacugggcguucccuuucauuuggguaccaaacaggugugcauugcuuggagcaguuccucuugucacgaugggaaggccuggcuccaugucugcgugacaggagacgauaagaacgcaaccgccagcuucaucuacaauggcagacugguagacuccaucguuucauggaguaaagagauucugaggacgcaggaaagcgagugugugugcauaaacggcacuuguacagucgugaugaccgaugggucugcuuccggaaaggcagacacuaaaauccucuuuauugaggaagguaagaucgugcacacaucaaccuuaagcggcagugcccaacacgucgaggaaugcucuugcuauccucgguacccagggguucgcugugugugcagagauaacuggaagggauccaauaggccgauaguagacauuaacaucaaagauuacagcaucgugucgucuuaugucuguuccggccuggugggugacacgccccggaagaaugacucaaguagcuccucucauugccuugauccuaacaaugaggaagggggacacggcguuaaaggcugggcuuucgacgaugggaacgacguguggaugggacgcaccauuagcgagaaguugcgaucagguuacgagacauuuaaagucaucgaaggcuggaguaauccaaacuccaagcugcagauuaauagacaggugauaguagauagggggaaccggagcggauauucuggcaucuucucaguugaggguaaaaguuguauuaaucguugcuuuuacguggaacuaauccgcgggagaaaggaggaaacugagguccucuggaccagcaacuccaucguggucuucuguggcacaucuggaacuuauggcaccgggucguggcccgacggagccgauauuaaucugaugccuauauga

SEQ ID NO: 154115 - RNA, 1410 nt, Artificial Sequence
  derived and/or modified CDS sequence (opt3) from neuraminidase__InfluenzaA__BAF47938
augaaccccaaucagaagaucauuaccauaggcagcgugucccugacaaucucuacuauuugcuucuuuaugcaaaucgccauucucaucacgaccgucacacuucacuucaaacaguacgaguuuaacucacugccuaauaaccagguuauguugugugaaccaacuauaaucgagagaaauauuaccgaaaucguguauuuaacaaacaccacuauugagaaggaaaucugcccgaaacuggcugaguacaggaauuggaguaagccccaguguaacauaacaggguucgcaccuuuuagcaaagacaauuccauucggcuaucugccggaggugauaucuggguaacccgcgagccauaugugucgugcgaccccgauaaguguuaccaauucgcgcucggccaggggacgacucugaacaauguccauucaaacgacaccgugcacggacgaacaccuuaucguacucuucugaugaaugaauugggcguuccauuucaucucgguaccaaacaggugugcauugcuuggagcaguuccucuugucacgaugggaaggccuggcugcaugucugcgugacaggagacgauaagaacgcaaccgccagcuucaucuacaauggcagacugguagacuccaucguuucauggaguaaagagauucucaggacgcaggaaagcgagugugugugcauaaacggcacuuguacagucgugaugaccgaugggucugcuuccggaaaggcagacacuaaaaucuuauuuauugaggaagguaagaucgugcacacaucaacccugagcggcagugcccaacacgucgaggaaugcucuugcuauccccgguacccugggguucgcugugugugcagagauaacuggaagggauccaauaggccaauaguagacauuaacaucaaagauuacagcaucgugucgucuuaugucuguuccggccuugugggugacacgccgcggaagaccgacucaaguagcuccucucauugcuuggaucccaauaacgaggaagggggacacggcguuaaaggcugggcuuucgacgaugggaaugacguguggaugggacgcacaauuagcgagaagcugcgaucagguuacgagacuuuuaaagucaucgaaggcuggaguaacccuaauuccaagcuacagauuaacagacaggugauaguagauagggggaaucggagcggauauucuggcaucuucucaguugaggguaaaaguuguauuaaccguugcuuuuacguggaacucauccgcgggagaaaggaggaaaccgagguccuguggacaagcaauuccaucguggucuucuguggcacuucuggaaccuauggcacagggucguggccagacggagccgauauuaaccuuaugcccauauga

SEQ ID NO: 154116 - RNA, 1410 nt, Artificial Sequence; identical to SEQ ID NO: 142762
  derived and/or modified CDS sequence (opt3) from neuraminidase__InfluenzaA__BAF47939

SEQ ID NO: 154117 - RNA, 1410 nt, Artificial Sequence
  derived and/or modified CDS sequence (opt3) from neuraminidase__InfluenzaA__BAF47940
augaaccccaaucagaagaucauuaccauaggcagcgugucccugacaaucucuacuauuugcuucuuuaugcaaaucgccauucucaucacgaccgucacacuucacuucaaacaguacgaguuuaacucaccuccaaauaaccagguuaugcugugugaaccgacuauaaucgagagaaauauuaccgaaaucguguauuugacaaacaccacuauugagaaggaaaucugccccaaauuagcugaguacaggaauuggaguaagccucagugugacauaacaggguucgcaccauuuagcaaagauaacuccauucggcugucugccggaggugacaucuggguaacccgcgagcccuaugugucgugcgauccugacaaguguuaccaauucgcgcuaggccaggggacgacucucaauaacguccauucaaaugauaccgugcacgaccgaacaccauaucguacucugcuuaugaacgaacugggaguucccuuucauuugggcaccaaacaggugugcauugcuuggagcaguuccucuugucacgaugguaaagccuggcuccaugucugcgugacaggggacgauaagaaugcaaccgccagcuucaucuacaacggaagacugguagacuccaucguuucauggaguaaaaagauucugaggacgcaggagagcgaaugugugugcauaaauggcacuuguacagucgugaugaccgauggcucugcuuccgggaaagcagacacuaagauccucuuuauugaggagggaaagaucgugcacacaucaaccuuaagcgguagugcccaacacgucgaagagugcucuugcuauccucgguacccaggcguucgcugugugugcagagauaacuggaaaggguccaacaggccgauaguagacauuaauaucaaggacuacagcaucgugucgucuuaugucuguuccggacuggugggcgauacgccccggaaaaacgacucaaguagcuccucucauugccuugauccuaauaacgaagagggugggcacggaguuaagggcugggcuuucgacgauggcaaugacguguggauggggcgcaccauuagcgaaaaauugcgaucaggauacgagacauuuaaggucaucgaggguuggaguaacccaaauuccaaacugcagauuaacagacaggugauaguagauaggggcaaucggagcggguauucuggaaucuucucaguugaaggcaagaguuguauuaaccguugcuuuuacguggagcuaauccgcgguagaaaggaaaagacugagguccucuggaccagcaauuccaucguggucuucugugggacaucuggcacuuauggaaccggcucguggcccgacggggccgauauuaaccugaugccuauauga

SEQ ID NO: 154118 - RNA, 1410 nt, Artificial Sequence; identical to SEQ ID NO: 142760
  derived and/or modified CDS sequence (opt3) from neuraminidase__InfluenzaA__BAF47941

SEQ ID NO: 154119 - RNA, 1410 nt, Artificial Sequence
  derived and/or modified CDS sequence (opt3) from neuraminidase__InfluenzaA__BAF47943
augaaccccaaucagaagaucauuaccauaggcagcgugucccugacaaucucuacuauuugcuucuuuaugcaaaucgccauucucaucacgaccgucacacuucacuucaaacaguacgaguuuaacucaccuccaaauaaccagguuaugcugugugaaccgacuauaaucgagagaaauauuaccgaaaucguguauuugacaaacaccacuauugagaaggaaaucugccccaaauuagcugaguacaggaauuggaguaagccucaguguaacauaacaggguucgcaccauuuagcaaagacaauuccauucggcugucugccggaggugauaucuggguaacccgcgagcccuaugugucgugcgacccugauaaguguuaccaauucgcgcuaggccaggggacgacucucaacaauguccauucaaacgacaccgugcacgaucgaacaccauaucguacucugcuuaugauugaacugggaguucccuuucauuugggcaccaaacaggugugcaucgcuuggagcaguuccucuugucacgacgguaaggccuggcuccaugucugcgugacaggggaugacaagaaugcaaccgccagcuucaucuacaacggaagacugguagauuccauuguuucauggaguaaagagauacugaggacgcaggaaagcgagugugugugcaucaauggcacuuguacagucgugaugaccgacggcucugcuuccgggaaggcagauacuaaaauucucuuuaucgaggaaggaaagauagugcacacaucaaccuuaagcgguagugcccaacacgucgaggaaugcucuugcuauccucgguacccaggcguucgcugugugugcagagacaacuggaagggguccaacaggccgauuguagauaucaauaucaaagacuacagcauugugucgucuuaugucuguuccggacuggugggcgacacgccccggaagaacgauucaaguagcuccucucauugccuugacccuaauaacgaggaaggugggcacggaguuaaaggcugggcuuucgaugacggcaaugauguguggauggggcgcaccaucagcgagaaguugcgaucaggauacgagacauuuaaagucauugaagguuggaguaacccaaauuccaagcugcagacuaacagacaggugauaguagacaggggcaaucggagcggguauucuggaaucuucucaguugagggcaaaaguuguauuaaccguugcuuuuacguggaacuaauccgcgguagaaaggaggaaaccgagguccucuggacaagcaauuccaucguggucuucugugggacuucuggcaccuauggaacaggcucguggcccgauggggccgacauuaaccugaugccuauauga

SEQ ID NO: 154120 - RNA, 1410 nt, Artificial Sequence
  derived and/or modified CDS sequence (opt3) from neuraminidase__InfluenzaA__BAF47944
augaaccccaaucagaagaucauuaccauaggcagcgugucccugacaaucucuacuauuugcuucuuuaugcaaaucgccauucucaucacgaccgucacacuucacuucaaacaguacgaguuuaacucaccuccaaauaaccagguuaugcugugugaaccgacuauaaucgagagaaauauuaccgaaaucguguauuugacaaacaccacuauugagaaggaaaucugccccaaauuaacagaguacaggaauuggaguaagccucaguguaacauaaccggguucgcuccauuuagcaaagacaauuccauucggcugucugcaggaggugauaucuggguaacgcgcgagcccuaugugucgugcgacccugauaaguguuaccaauucgcccuaggccaggggacuacccucaacaauguccauucaaacgacccagugcacgaucgaacacccuaucguacucugcuuaugaaugaacugggaguuccuuuucauuugggcaccaaacaggugugcauugcguggagcaguuccucuugucacgacgguaaggcuuggcuccaugucugcgugacaggggaugacaagaacgccaccgccagcuucaucuacaauggaagacugguagauuccaucguuucauggaguaaagagauucugaggacgcaggaaagcgagugugugugcauaaacggcacuuguacagucgugaugaccgacggcucugcauccgggaaggcugauacuaaaauccucuuuauugaggaaggaaagaucgugcacacaucaaccuuaagcgguagugcacaacacgucgaggaaugcucuugcuauccacgguacccgggcguucgcugugugugcagagacaacuggaagggguccaauaggcccauaguagauauuaacaucaaagacuacagcaucgugucgucuuaugucuguuccggacuggugggcgacacgccucggaagaaugauucaaguagcuccucucauugccuugacccaaacaaugaggaaggugggcacggaguuaaaggcugggccuucgaugacggcaacgauguguggauggggcgcaccauuagcgagaaguugcgaucaggauacgagacauuuaaagucaucgaagguuggaguaaucccaacuccaagcugcagacuaauagacaggugauuguagacaggggcaaccggagcggguauucuggaauauucucaguugagggcaaaaguuguaucaaucguugcuuuuacguggaacuaauucgcgguagaaaggaggaaaccgagguccucuggacaagcaacuccaucguggucuucugugggacuucuggcaccuauggaacaggcucguggccugauggggcugacaucaaucugaugccaauuuga

SEQ ID NO: 154121 - RNA, 1410 nt, Artificial Sequence
  derived and/or modified CDS sequence (opt3) from neuraminidase__InfluenzaA__BAF47945
augaaccccaaucagaagaucauuaccauaggcagcgugucccugacaaucucuacuauuugcuucuuuaugcaaaucgccauucucaucacgaccgucacacuucacuucaaacaguacgaguuuaacucaccuccaaauaaccagguuaagcugugugaaccgacuauaaucgagagaaauauuaccgaaaucguguauuugacaaacaccacuauugagaaagaaaucugccccaaguuagcugaguacaggaauuggaguaaaccucaguguaacauaacaggguucgcaccauuuagcaaggacaauuccauucggcugucugccggaggugauaucuggguaacccgcgagcccuaugugucgugcgacccugauaaguguuaccaauucgcgcuaggccaggggacgacucucaacaauguccauucaaacgacaccgugcacgaucgaacaccauaucguacucugcuuaugaaugaacugggaguucccuuucauuugggcaccaaacaggugugcauugcuuggagcaguuccucuugucacgacgguaaggccuggcuccaugucugcgugacaggggaugacaaaaacgcaaccgccagcuucaucuacaauggaagacugguagauuccaucguuucauggaguaaggagauucugaggacgcaggaaagcgagugugugugcauaaacggcacuuguacagucgugaugaccgacggcucugcuuccgggaaagcagauacuaagauccucuuuauugaggaaggaaagaucgugcacacaucaaccuuaagcgguagugcccaacacgucgaggaaugcucuugcuauccucgguacccaggcguucgcugugugugcagagacaacuggaaaggguccaauaggccgauaguagauauuaacaucaaggacuacagcaucgugucgucuuaugucuguuccggacuggugggcgacacgccccggaaaaaugauucaaguagcuccucucauugccuugacccuaacaaugaggaaggugggcacggaguuaagggcugggcuuucgaugacggcaacgauguguggauggggcgcaccauuagcgagaaauugcgaucaggauacgagacauuuaaggucaucgaagguuggaguaauccaaacuccaaacugcagacuaauagacaggugauuguagacaggggcaaccggagcggguauucuggaauauucucaguugagggcaagaguuguaucaaucguugcuuuuacguggaacuaauucgcgguagaaaggaggaaaccgagguccucuggacaagcaacuccaucguggucuucugugggacuucuggcaccuauggaacaggcucguggcccgauggggccgacaucaaucugaugccuauuuga

SEQ ID NO: 154122 - RNA, 1410 nt, Artificial Sequence
  derived and/or modified CDS sequence (opt3) from neuraminidase__InfluenzaA__BAF47946
augaaccccaaucagaagaucauuaccauaggcagcgugucccugacaaucucuacuauuugcuucuuuaugcaaaucgccauucucaucacgaccgucacacuucacuucaaacaguacgaguuuaacucaccuccaaauaaccagguuaugcugugugaaccgacuauaaucgagagaaauauuaccgaaaucguguauuugacaaacaccacuauugagaaggaaaucugccccaaauuagcugaguacaggaauuggaguaagccucaguguaacauaacaggguucgcaccauuuagcaaagacaauuccauucggcugucugccggaggugauaucuggguaacccgcgagcccuaugugucgugcgacccugauaaguguuaccaauucgcgcuaggccaggggacgacucucaacaauguccauucaaacgacaccgugcacgaucgaacaccauaucguacucugcuuaugaaugaacugggaguucccuuucauuugggcaccaaacaggugugcauugcuuggagcaguuccucuugucacgacgguaaggccuggcuccaugucugcgugacaggggaugacaagaacgcaaccgccagcuucaucuacaauggaagacugguagauuccaucguuucauggaguaaagagauucugaggacgcaggaaagcgagugugugugcauaaacggcacuuguacagucgugaugaccgacggcucugcuuccgggaaggcagauacuaaaauccucuuuauugaggaaggaaagaucgugcacacaucaaccuuaagcgguagugcccaacacgucgaggaaugcucuugcuauccucgguacccaggcguucgcugugugugcagagacaacuggaagggguccaauaggccgauaguagauauuaacaucaaagacuacagcaucgugucgucuuaugucuguuccggacuggugggcgacacgccccggaagaaugauucaaguagcuccucucauugccuugacccuaacaaugaggaaggugggcacggaguuaaaggcugggcuuucgaugacggcaacgauguguggauggggcgcaccauuagcgagaaguugcgaucaggauacgagacauuuaaaguccuggaagguuggaguaauccaaacuccaagcuacagacuaauagacaggugaucguagacaggggcaaccggagcggguauucuggaauuuucucaguugagggcaaaaguuguauaaaucguugcuuuuacguggaacucauccgcgguagaaaggaggaaaccgagguccuguggacaagcaacuccauuguggucuucugugggacuucuggcaccuauggaacaggcucguggcccgauggggccgacaucaaucuuaugccuaucuga

SEQ ID NO: 154123 - RNA, 1410 nt, Artificial Sequence
  derived and/or modified CDS sequence (opt3) from neuraminidase__InfluenzaA__BAF47948
augaaccccaaucagaagaucauuaccauaggcagcgugucccugacaaucucuacuauuugcuucuuuaugcaaaucgccauucucaucacgaccgucacacuucacuucaaacaguacgaguuuaacucaccuccaaauaaccagguuaugcugugugaaccgacuauaaucgagagaaauauuaccgaaaucguguauuugacaaacaccacuauugagaaggaaaucugccccaaauuagcugaguacaggaauuggaguaagccucagugugacauaacaggguucgcaccauuuagcaaagauaacuccauucggcugucugccggaggugacaucuggguaacccgcgagcccuaugugucgugcgauccugacaaguguuaccaauucgcgcuaggccaggggacgacucucaauaacguccauucaaaugauaaggugcacgaccgaaccccauaucguacacugcuuaugaacgaacugggaguucccuuucauuugggcacuaaacaggugugcauugcuuggagcaguuccucuugucacgaugguaaggccuggcuccaugucugcgugaccggggacgauaaaaaugcaacagccagcuucaucuacaacggaagacugguagacuccaucguuucauggaguaagaaaauucugaggacccaggagagcgaaugugugugcauaaauggcacguguacugucgugaugacagauggcucugcuuccgggaaggcagacaccaagauccucuuuauugaggagggaaaaaucgugcacacuucaacauuaagcgguagugcccaacacgucgaagagugcucuugcuauccucgguacccaggcguucgcugugugugcagagauaacuggaagggguccaacaggccgauaguagacauuaauaucaaagacuacagcaucgugucgucuuaugucuguuccggacuggugggcgauacgccccggaagaacgacucaaguagcuccucucauugccuugauccuaauaacgaagagggugggcacggaguuaaaggcugggcuuucgacgauggcaaugacguguggauggggcgcaccauuagcgaaaaguugcgaucaggauacgagaccuuuaaagucaucgaggguuggaguaacuccaauagcaagcugcagauuaacagacaggugauaguagauaggggcaaucggucuggguauucaggaaucuucaguguugaaggcaagagcuguauuaaccguugcuuuuacguggagcuaauccgcgguagaaaagaagagacagaaguccucuggacuuccaauucuaucguggucuucugugggaccucgggcacauauggaacuggcagcuggccagacggggccgauauuaaccugaugcccauauga

SEQ ID NO: 154124 - RNA, 1410 nt, Artificial Sequence
  derived and/or modified CDS sequence (opt3) from neuraminidase__InfluenzaA__BAF47949
augaaccccaaucagaagaucauuaccauaggcagcgugucccugacaaucucuacuauuugcuucuuuaugcaaaucgccauucucaucacgaccgucacacuucacuucaaacaguacgaguuuaacucaccuccaaauaaccagguuaugcugugugaaccgacuauaaucgagagaaauauuaccgaaaucguguauuugacaaacaccacuauugagaaggaaaucugccccaaauuagcugaguacaggaauuggaguaagccucagugugacauaacaggguucgcaccauuuagcaaagauaacuccauucggcugucugccggaggugacaucuggguaacccgcgagcccuaugugucgugcgauccugacaaguguuaccaauucgcgcuaggccaggggacgacucucaauaacguccauucaaaugauaaggugcacgaccgaaccccauaucguacacugcuuaugaacgaacugggaguucccuuucauuugggcacuaaacaggugugcauugcuuggagcaguuccucuugucacgaugguaaggccuggcuccaugucugcgugaccggggacgauaaaaaugcaacagccagcuucaucuacaacggaagacugguagacuccaucguuucauggaguaagaaaauucugaggacccaggagagcgaaugugugugcauaaauggcacguguacugucgugaugacagauggcucugcuuccgggaaggcagacaccaagauccucuuuauugaggagggaaaaaucgugcacacuucaacauuaagcgguagugcccaacacgucgaagagugcucuugcuauccucgguacccaggcguucgcugugugugcagagauaacuggaagggguccaacaggccgauaguagacauuaauaucaaagacuacagcaucgugucgucuuaugucuguuccggacuggugggcgauacgccccggaagaacgacucaaguagcuccucucauugccuugauccuaauaacgaagagggugggcacggaguuaaaggcugggcuuucgacgauggcaaugacguguggauggggcgcaccauuagcgaaaaguugcgaucaggauacgagaccuuuaaagucaucgaggguuggaguaacccaaauuccaagcugcagauuaacagacaggugauaguagauaggggcaaucggagcggguauucuggaaucuucucaguugaaggcaagaguuguauuaaccguugcuuuuacguggagcuaauccgcgguagaaaagaagagacagaaguccucuggacuagcaauuccaucguggucuucugugggaccucuggcacauauggaacuggcucguggcccgacggggccgauauuaaccugaugccuauauga

SEQ ID NO: 154125 - RNA, 1410 nt, Artificial Sequence; identical to SEQ ID NO: 142762
  derived and/or modified CDS sequence (opt3) from neuraminidase__InfluenzaA__BAF47950

SEQ ID NO: 154126 - RNA, 1410 nt, Artificial Sequence
  derived and/or modified CDS sequence (opt3) from neuraminidase__InfluenzaA__BAF47951
augaaccccaaucagaagaucauuaccauaggcagcgugucccugacaaucucuacuauuugcuucuuuaugcaaaucgccauucucaucacgaccgucacacuucacuucaaacaguacgaguuuaacucaccuccaaauaaccagguuaugcugugugaaccgacuauaaucgagagaaauauuaccgaaaucguguauuugacaaacaccacuauugagaaggaaaucugccccaaauuagcugaguacaggaauuggaguaagccucagugugacauaacaggguucgcaccauuuagcaaagauaacuccauucggcugucugccggaggugacaucuggguaacccgcgagcccuaugugucgugcgauccugacaaguguuaccaauucgcgcuaggccaggggacgacucucaauaacguccauucaaaugauaccgugcacgaccgaacaccauaucguacucugcuuaugaacgaacugggaguucccuuucauuugggcaccaaacaggugugcauugcuuggagcaguuccucuugucacgaugguaaggccuggcuccaugucugcgugacaggggacgauaagaaugcaaccgccagcuucaucuacaacggaagacugguagacuccaucguuucauggaguaaaaagauucugaggacgcaggagagcgaaugugugugcauaaauggcacuuguacagucgugaugaccgauggcucugcuuccgggaaagcagacacuaagauccucuuuauugaggagggaaagaucgugcacacaucaaccuuaagcgguagugcccaacacgucgaagagugcucuugcuauccucgguacccaggcguucgcugugugugcagagauaacuggaaaggguccaacaggccgauaguagacauuaauaucaaggacuacagcaucgugucgucuuaugucuguuccggacuggugggcgauacgccccggaaaaacgacucaaguagcuccucucauugccuugauccuaauaacgaagagggugggcacggaguuaagggcugggcuuucgacgauggcaaugacguguggauggggcgcaccauuagcgaaaaauugcgaucaggauacgagacauuuaaggucaucgaggguuggaguaacuccaauagcaaacugcagauuaacagacaggugauaguagauaggggcaaucggucuggguauucaggaaucuucaguguugaaggcaagagcuguauuaaccguugcuuuuacguggagcuaauccgcgguagaaaggaagagacugaaguccucuggaccuccaauucuaucguggucuucugugggacaucgggcacuuauggaaccggcagcuggccagacggggccgauauuaaccugaugcccauauga

SEQ ID NO: 154127 - RNA, 1410 nt, Artificial Sequence
  derived and/or modified CDS sequence (opt3) from neuraminidase__InfluenzaA__BAF47952
augaaccccaaucagaagaucauuaccauaggcagcgugucccugacaaucucuacuauuugcuucuuuaugcaaaucgccauucucaucacgaccgucacacuucacuucaaacaguacgaguuuaacucaccuccaaauaaccagguuaugcugugugaaccgacuauaaucgagagaaauauuaccgaaaucguguauuugacaaacaccacuauugagaaggaaaucugccccaaauuagcugaguacaggaauuggaguaagccucaguguaacauaacaggguucgcaccauuuagcaaagacaauuccauucggcugucugccggaggugauaucuggguaacccgcgagcccuaugugucgugcgacccugauaaguguuaccaauucgcgcuaggccaggggacgacucucaacaauguccauucaaacgacaccgugcacgaucgaacaccauaucguacucugcuuaugaaugaacugggaguucccuuucauuugggcaccaaacaggugugcauugcuuggagcaguuccucuugucacgacgguaaggccuggcuccaugucugcgugacaggggaugacaagaacgcaaccgccagcuucaucuacaauggaagacugguagauuccaucguuucauggaguaaagagauucugaggacgcaggaaagcgagugugugugcauaaacggcacuuguacagucgugaugaccgacggcucugcuuccgggaaggcagauacuaaaauccucuuuauugaggaaggaaagaucgugcacacaucaaccuuaagcgguagugcccaacacgucgaggaaugcucuugcuauccucgguacccaggcguucgcugugugugcagagacaacuggaagggguccaauaggccgauaguagauauuaacaucaaagacuacagcaucgugucgucuuaugucuguuccggacuggugggcgacacgccccggaagaaugauucaaguagcuccucucauugccuugacccuaacaaugaggaaggugggcacggaguuaaaggcugggcuuucgaugacggcaacgauguguggauggggcgcaccauuagcgagaaguugcgaucaggauacgagacauuuaaagucaucgaagguuggaguaauccaaacuccaagcugcagacuaauagacaggugauuguagacaggggcaaccggagcggguauucuggaauauucucaguugagggcaaaaguuguaucaaucguugcuuuuacguggaacuaauucgcgguagaaaggaggaaaccgagguccucuggacaagcaacuccaucguggucuucugugggacuucuggcaccuauggaacaggcucguggcccgauggggccaauaucaaccugaugccuauuuga

SEQ ID NO: 154128 - RNA, 1410 nt, Artificial Sequence
  derived and/or modified CDS sequence (opt3) from neuraminidase__InfluenzaA__BAF47953
augaaccccaaucagaagaucauuaccauaggcagcgugucccugacaaucucuacuauuugcuucuuuaugcaaaucgccauucucaucacgaccgucacacuucacuucaaacaguacgaguuuaacucaccuccaaauaaccagguuaugcugugugaaccgacuauaaucgagagaaauauuaccgaaaucguguauuugacaaacaccacuauugagaaggaaaucugccccaaauuagcugaguacaggaauuggaguaagccucagugugacauaacaggguucgcaccauuuagcaaagauaacuccauucggcugucugccggaggugacaucuggguaacccgcgagcccuaugugucgugcgauccugacaaguguuaccaauucgcgcuaggccaggggacgacucucaauaacguccauucaaaugauaccgugcacgaccgaacaccauaucguacucugcuuaugaacgaacugggaguucccuuucauuugggcaccaaacaggugugcauugcuuggagcaguuccucuugucacgaugguaaggccuggcuccaugucugcgugacaggggacgaugagaaugcaaccgccagcuucaucuacaacggaagacugguagacuccaucguuucauggaguaagaaaauucugaggacgcaggaaagcgagugugugugcauaaauggcacuuguacagucgugaugaccgauggcucugcuuccgggaaggcagacacuaaaauccucuuuauugaggaaggaaagaucgugcacacaucaaccuuaagcgguagugcccaacacgucgaggaaugcucuugcuauccucgguacccaggcguucgcugugugugcagagauaacuggaagggguccaacaggccgauaguagacauuaauaucaaagacuacagcaucgugucgucuuaugucuguuccggacuggugggcgauacgccccggaagaacgacucaaguagcuccucucauugccuugauccuaauaacgaggaaggugggcacggaguuaaaggcugggcuuucgacgauggcaaugacguguggauggggcgcaccauuagcgagaaguugcgaucaggauacgagacauuuaaagucaucgaagguuggaguaacccaaauuccaagcugcagauuaacagacaggugauaguagauaggggcaaucggagcggguauucuggaaucuucucaguugagggcaaaaguuguauuaaccguugcuuuuacguggaacuaauccgcgguagaaaggaggaaacugagguccucuggaccagcaauuccaucguggucuucugugggacaucuggcacuuauggaaccggcucguggcccgacggggccgauauuaaccugaugccuauauga

SEQ ID NO: 154129 - RNA, 1410 nt, Artificial Sequence; identical to SEQ ID NO: 154081
  derived and/or modified CDS sequence (opt3) from neuraminidase__InfluenzaA__BAF47954

SEQ ID NO: 154130 - RNA, 1410 nt, Artificial Sequence; identical to SEQ ID NO: 154081
  derived and/or modified CDS sequence (opt3) from neuraminidase__InfluenzaA__BAF47955

SEQ ID NO: 154131 - RNA, 1410 nt, Artificial Sequence
  derived and/or modified CDS sequence (opt3) from neuraminidase__InfluenzaA__BAF47956
augaaccccaaucagaagaucauuaccauaggcagcgugucccugacaaucucuacuauuugcuucuuuaugcagaucgccauucucaucacgaccgucacacuucacuucaaacaguacgaguuuaacucaccuccaaauaaccagguuaugcugugugaaccgacuauaaucgagagaaauauuaccgaaaucguguauuugacaaacaccacuauugagaaggaaaucugccccaaauuagcugaguacaggaaguggaguaaaccucaguguaauauaacaggguucgcaccauuuagcaaggacaacuccauucggcugucugccggaggugauaucuggguaacccgcgagcccuaugugucgugcgacccugauaaguguuaccaauucgcgcuaggccaggggacgacucucaauaacguccauucaaaugacaccgugcgagaucguacaccauauagaacucugcuuaugaacgaacugggaguucccuuucacuugggcaccaaacaggugugcauugcuuggagcaguuccucuugucaugacgguaaggccuggcuccacgucugcgugacaggggaugacaaaaaugcaaccgccagcuucaucuacaacggaaggcugguagauuccaucguuucauggaguaaggagauucugcggacgcaggaaagcgagugugugugcauaaauggcacuuguacagucgugaugaccgacggcucugcuuccgggaaagcagauacuaagauccucuuuauugaggaaggaaagaucgugcauacaucaaccuuaagcgguagugcccaacacgucgaggaaugcucuugcuauccucgcuacccaggcguuagaugugugugcagggacaacuggaaaggguccaaccggccgauaguagauauuaauaucaaggacuacagcaucgugucgucuuaugucuguuccggacuggugggcgacacgccccgcaaaaacgauucaaguagcuccucucacugccuugacccuaauaacgaggaaggugggcauggaguuaagggcugggcuuucgaugacggcaaugauguguggauggggcgaaccauuagcgagaaauugagaucaggauacgagacauuuaaggucaucgaagguuggaguaacccaaauuccaaacugcagauuaacaggcaagugauaguagaccggggcaaucguagcggguauucuggaaucuucucaguugagggcaagaguuguauuaaccgcugcuuuuacguggaacuaaucagagguaggaaggaggaaacugagguccucuggaccagcaauuccaucguggucuucugugggacaucuggcacuuauggaaccggcucguggcccgauggggccgacauuaacuucaugccuauauga

SEQ ID NO: 154132 - RNA, 1410 nt, Artificial Sequence
  derived and/or modified CDS sequence (opt3) from neuraminidase__InfluenzaA__BAF47958
augaaccccaaucagaagaucauuaccauaggcagcgugucccugacaaucucuacuauuugcuucuuuaugcagaucgccauucucaucacgaccgucacacuucacuucaaacaguacgaguuuaacucaccuccaaauaaccagguuaugcugugugaaccgacuauaaucgagagaaauauuaccgaaaucguguauuugacaaacaccacuauugagaaggaaaucugccccaaauuagcugaguacaggaaguggaguaaaccucaguguaauauaacaggguucgcaccauuuagcaaggacaacuccauucggcugucugccggaggugauaucuggguaacccgcgagcccuaugugucgugcgacccugauaaguguuaccaauucgcgcuaggccaggggacgacucucaauaacguccauucaaaugacaccgugcgagaucguacaccauauagaacucugaugaugaacgaacuuggaguucccuuucaccugggcaccaaacaggugugcauugcuuggagcaguuccucuugucaugacgguaaggccugguugcacgucugcgugacaggggaugacaaaaaugcaaccgccagcuucaucuacaacggaaggcucguagauuccaucguuucauggaguaaggagauucugcggacgcaggaaagcgagugugugugcauaaauggcacuuguacagucgugaugaccgacggcucugcuuccgggaaagcagauacuaagauccuguuuauugaggaaggaaagaucgugcauacaucaacccucagcgguagugcccaacacgucgaggaaugcucuugcuauccucgcuacccaggcguuagaugugugugcagggacaacuggaaaggguccaaccggccgauaguagauauuaauaucaaggacuacagcaucgugucgucuuaugucuguuccggauuagugggcgacacgccccgcaaaaacgauucaaguagcuccucucacugccuggacccuaauaacgaggaaggugggcauggaguuaagggcugggcuuucgaugacggcaaugauguguggauggggcgaaccauuagcgagaaacuuagaucaggauacgagacauuuaaggucaucgaagguuggaguaacccaaauuccaaauugcagauuaacaggcaagugauaguagaccggggcaaucguagcggguauucuggaaucuucucaguugagggcaagaguuguauuaaccgcugcuuuuacguggaacugaucagagguaggaaggaggaaacugagguccuauggaccagcaauuccaucguggucuucugugggacaucuggcacuuauggaaccggcucguggacagauggggccgacauuaacuucaugcccauauga

SEQ ID NO: 154133 - RNA, 1410 nt, Artificial Sequence
  derived and/or modified CDS sequence (opt3) from neuraminidase__InfluenzaA__BAF47959
augaaccccaaucagaagaucauuaccauaggcagcgugucccugacaaucucuacuauuugcuucuuuaugcaaaucgccauucucaucacgaccgucacacuucacuucaaacaguacgaguuuaacucaccuccaaauaaccagguuaugcugugugaaccgacuauaaucgagagaaauauuaccgaaaucguguauuugacaaacaccacuauugagaaggaaaucugccccaaauuagcugaguacaggaauuggaguaagccucaguguaacauaacaggguucgcaccauuuagcaaagacaauuccauucggcugucugccggaggugauaucuggguaacccgcgagcccuaugugucgugcgacccugauaaguguuaccaauucgcgcuaggccaggggacgacucucaacaauguccauucaaacuauaccgugcacgaccgaacaccauaccguacucugcuuaugaaugaacugggaguucccuuucauuugggcaccaaacaggugugcauugcuuggagcaguuccucuugucacgaugguaaggccuggcuccaugucugcgugacaggggacgauaagaacgcaaccgccagcuucaucuauaauggaagacugguagacuccaucguuucauggaguaaagagauucugaggacgcaggaaagcgagugugugugcauaaacggcacuuguacagucgugaugaccgauggcucugcuuccgggaaggcagacacuaaaauccucuuuauugaggaaggaaagaucgugcacacaucaaccuuaagcgguagugcccaacacgucgaggaaugcucuugcuacccucgguacccaggcguucgcugugugugcagagauaacuggaagggguccaauaggccgauaguagacauuaacaucaaagauuauagcaucgugucgucuuacgucuguuccggacuggugggcgacacgccccggaagaaugacucaaguagcuccggucauugccuugauccuaacaaugaggaagggggacacggcguuaaaggcugggcuuucgacgaugggaacgacguguggaugggacgcaccauuucugagaaguugcgaagcgguuaugagacauuuaaagucaucgaaggcuggucaaauccaaacaguaagcugcagauuaauagacaggugauaguagauagggggaaccgguccggauacagcggcaucuucucuguugaggguaaaucauguauuaaucguugcuuuuauguggaacuaauccgcgggagaaaggaggaaacugagguccucuggaccaguaacagcaucguggucuucuguggcacauccggaacuuacggcaccgggucuuggcccgacggagccgauauuaaucugaugccuauauga

SEQ ID NO: 154134 - RNA, 1410 nt, Artificial Sequence
  derived and/or modified CDS sequence (opt3) from neuraminidase__InfluenzaA__BAF47960
augaaccccaaucagaagaucauuaccauaggcagcgugucccugacaaucucuacuauuugcuucuuuaugcaaaucgccauucucaucacgaccgucacacuucacuucaaacaguacgaguuuaacucaccuccaaauaaccagguuaugcugugugaaccgacuauaaucgagagaaauauuaccgaaaucguguauuugacaaacaccacuauugagaaggaaaucugccccaaauuagcugaguacaggaauuggaguaagccucaguguaacauaacaggguucgcaccauuuagcaaagacaauuccauucggcugucugccggaggugauaucuggguaacccgcgagcccuaugugucgugcgacccugauaaguguuaccaauucgcgcuaggccaggggacgacucucaacaauguccauucaaacgacaccgugcacaaucgaacaccauaucguacucugcuuaugaacgaacugggaguucccuuucauuugggcaccaaacaggugugcauugcuuggagcaguuccucuugucacgaugguaaggccuggcuccaugucugcgugacaggggacgauaagaaugcaaccgccagcuucaucuacaacggaagacugguagacuccaucguuucauggaguaaagagauucugaggacgcaggaaagcgagugugugugcauaaacggcacuuguacagucgugaugaccgauggcucugcuuccgggaaggcagacacuaaaauccucuuuauugaggaaggaaagaucgugcacacaucaaccuuaagcgguagugcccaacacgucgaggaaugcucuugcuauccucgguacccaggcguucgcugugugugcagagauaauuggaagggguccaacaggccgauaguagacauuaauaucaaagauuacagcaucgugucgucuuaugucuguuccggacuggugggcgacacgccccggaagaacgacucaaguagcuccggucauugccuugauccuaauaacgaggaagggggacacggcguuaaaggcugggcuuucgacgaugggaaugacguguggaugggacgcaccauuucugagaaguugcgaagcgguuacgagacauuuaaagucaucgaaggcuggucaaacccaaauaguaagcugcagauuaacagacaggugauaguagauagggggaaucgguccggauauagcggcaucuucucuguugaggguaaaucauguauuaaccguugcuuuuacguggaacuaauccgcgggagaaaggaggaaacugagguccucuggaccaguaauagcaucguggucuucuguggcacauccggaacuuauggcaccgggucuuggcccgacggagccgauauuaaccugaugccuauauga

SEQ ID NO: 154135 - RNA, 1410 nt, Artificial Sequence
  derived and/or modified CDS sequence (opt3) from neuraminidase__InfluenzaA__BAF47975
augaaccccaaucagaagaucauuaccauaggcagcgugucccugacaaucucuacuauuugcuucuuuaugcagaucgccauucucaucacgaccgucacacuucacuucaaacaguacgaguuuaacucaccuccaaauaaccagguuaugcugugugaaccgacuauaaucgagagaaauauuaccgaaaucguguauuugacaaacaccacuauugagaaggaaaucugccccaaauuagcugaguacaggaaguggaguaaaccucaguguaauauaacaggguucgcaccauuuagcaaggacaacuccauucggcugucugccggaggugauaucuggguaacccgcgagcccuaugugucgugcgacccugauaaguguuaccaauucgcgcuaggccaggggacgacucucaauaacguccauucaaaugacaccgugcgagaucguacaccauauagaacucugcuuaugaacgaacugggaguucccuuucacuugggcaccaaacaggugugcauugcuuggagcaguuccucuugucaugacgguaaggccuggcuccacgucugcgugacaggggaugacaaaaaugcaaccgccagcuucaucuacaacggaaggcugguagauuccaucguuucauggaguaaggagauucugcggacgcaggaaagcgagugugugugcauaaauggcacuuguacagucgugaugaccgacggcucugcuuccgggaaagcagauacuaagauccucuuuauugaggaaggaaagaucgugcauacaucaaccuuaagcgguagugcccaacacgucgaggaaugcucuugcuauccucgcuacccaggcguuagaugugugugcagggacaacuggaaaggguccaaccggccgauaguagauauuaauaucaaggacuacagcaucgugucgucuuaugucuguuccggacuggugggcgacacgccccgcaaaaacgauucaaguagcuccucucacugccuugacccuaauaacgaggaaggugggcauggaguuaagggcugggcuuucgaugacggcaaugauguguggauggggcgaaccauuagcgagaaauugagaucaggauacgagacauuuaaggucaucgaagguuggaguaacccaaauuccaaacugcagauuaacaggcaagugauaguagaccggggcaaucguagcggguauucuggaaucuucucaguugagggcaagaguuguauuaaccgcugcuuuuacguggaacuaaucagagguaggaaggaggaaacugagguccucuggaccagcaauuccaucguggucuucugugggacaucuggcacuuauggaaccggcucguggcccgauggggccgacauuaaccacaugccuauauga

SEQ ID NO: 154136 - RNA, 1410 nt, Artificial Sequence; identical to SEQ ID NO: 142760
  derived and/or modified CDS sequence (opt3) from neuraminidase__InfluenzaA__BAF47976

SEQ ID NO: 154137 - RNA, 1410 nt, Artificial Sequence
  derived and/or modified CDS sequence (opt3) from neuraminidase__InfluenzaA__BAF47977
augaaccccaaucagaagaucauuaccauaggcagcgugucccugacaaucucuacuauuugcuucuuuaugcaaaucgccauucucaucacgaccgucacacuucaguucaaacaguacgaguuuaacucaccuccaaauaaccagguuaugcugugugaaccgacuauaaucgagagaaauauuaccgaaaucguguauuugacaaacaccacuauugagaaggaaaucugccccaaauuagcugaguacaggaauuggaguaagccucaauguaacauaacaggguucgcaccauuuagcaaagacaauuccauucggcugucugccggaggugauaucuggguaacccgcgagcccuaugugucgugcgacccugauaaguguuaccaguucgcgcuaggccaggggacgacucucaacaauguccacucaaacgacaccgugcauggacgaacaccauaucguacucugcuuaugaaugaacugggcguucccuuucacuuggguaccaaacaggugugcauugcuuggagcaguuccucuugucaugaugggaaggccuggcuccacgucugcgugacaggagacgauaagaacgcaaccgccagcuucaucuacaauggcagacugguagacuccaucguuucauggaguaaagagauucugaggacgcaagaaagcgagugugugugcauaaacggcacuuguacagucgugaugaccgaugggucugcuuccggaaaggcagacacuaaaauccucuuuauugaggaagguaagaucgugcauacaucaaccuuaagcggcagugcccagcacgucgaggaaugcucuugcuauccucgguacccagggguucgcugugugugcagagauaacuggaagggauccaauaggccgauaguagacauuaacaucaaagauuacagcaucgugucgucuuaugucuguuccggccuggugggugacacgccccggaagaaugacucaaguagcuccucucacugccuugauccuaacaaugaggaagggggacauggcguuaaaggcugggcuuucgacgaugggaacgacguguggaugggacgcaccauuagcgagaaguugcgaucagguuacgagacauuuaaagucaucgaaggcuggaguaauccaaacuccaagcugcagacuaauagacaggugauuguagauagggggaaccggagcggauauucuggcauauucucaguugaggguaaaaguuguaucaaucguugcuuuuacguggaacuaauucgcgggagaaaggaggaaaccgagguccucuggacaagcaacuccaucguggucuucuguggcacuucuggaaccuauggcacagggucguggcccgacggagccgauaucaaucugaugccuauuuga

SEQ ID NO: 154138 - RNA, 1410 nt, Artificial Sequence
  derived and/or modified CDS sequence (opt3) from neuraminidase__InfluenzaA__BAF47978
augaaccccaaucagaagaucauuaccauaggcagcgugucccugacaaucucuacuauuugcuucuuuaugcaaaucgccauucucgucacgaccguuacacuucacuucaaacaguacgaguuuaacucaccuccaaauaaccaggugaugcugugugaaccgacuaucauagagagaaauaucaccgaaauuguauauuugacaaacaccacuaucgagaaggaaauuugccccaaauuagcugaguacaggaauuggaguaagccucaguguaacaucacaggguucgcaccauuuagcaaagacaauuccauacggcugucugccggaggugauauuugggugacccgcgagcccuaugucucgugcgacccugauaaguguuaccaauucgcgcuaggccaggggacgacucucaacaaugugcauucaaacgacaccguucacgaucgaacaccauaucguacucugcuuaugaaugaacugggagugcccuuucauuugggcaccaagcaggucugcaucgcuuggagcaguuccucuugucacgacgguaaagccuggcuccaugugugcguaacaggggaugacaagaacgcaaccgccagcuucauuuacaauggaagacugguugauuccaucgugucauggaguaaagagauccugaggacgcaggaaagcgagugugucugcauuaacggcacuuguacaguggugaugaccgacggcucugcuuccgggaaggcagauacuaaaauacucuuuaucgaggaaggaaagauuguccacacaucaaccuuaagcgguagugcccaacacguugaggaaugcucuugcuauccucgguacccaggcgugcgcuguguaugcagagacaacuggaagggguccaauaggccgaucguggauauaaacauuaaagacuacagcaucgucucgucuuauguguguuccggacugguuggcgacacgccccggaagaaugauucaaguagcuccucucauugccuugacccuaacaaugaggaaggugggcacggagugaaaggcugggcuuucgaugacggcaacgaugccuggauggggcgcaccaucagcgagaaguugcgaucaggauacgagacauuuaaagucauugaagguuggaguaauccaaacuccaagcugcagaucaauagacaggugauuguagacaggggcaaccggagcggguauucuggaauauucucaguugagggcaaaaguuguaucaaucguugcuuuuacguggaacuaauucgcgguagaaaggaggaaacugagguccucuggaccagcaacuccaucguggucuucugugggacaucuggcacuuauggaaccggcucguggcccgauggggcggacaucaaucugaugccuauuuga

SEQ ID NO: 154139 - RNA, 1410 nt, Artificial Sequence
  derived and/or modified CDS sequence (opt3) from neuraminidase__InfluenzaA__BAF47979
augaaccccaaucagaagaucauuaccauaggcagcgugucccugacaaucucuacuauuugcuucuuuaugcaaaucgccauucucaucacgaccgucacacuucacuucaaacaguacgaguuuaacucaccuccaaauaaccagguuaugcugugugaaccgacuauaaucgagagaaauauuaccgaaaucguguauuugacaaacaccacuauugagaaggaaaucugccccaaauuagcugaguacaggaauuggaguaagccucaguguaacauaacaggguucgcaccauuuagcaaagacaauuccauucggcugucugccggaggugauaucuggguaacccgcgagcccuaugugucgugcgacccugauaaguguuaccaauucgcgcuaggccaggggacgacucucaacaauguccauucaaacgacaccgugcacaaucgaacaccauaucguacucugcuuaugaacgaacugggaguucccuuucauuugggcaccaaacaggugugcauugcuuggagcaguuccucuugucacgaugguaaggccuggcuccaugucugcgugacaggggacgauaagaaugcaaccgccagcuucaucuacaacggaagacugguagacuccaucguuucauggaguaaagagauucugaggacgcaggaaagcgagugugugugcauaaacggcacuuguacagucgugaugaccgauggcucugcuuccgggaaggcagacacuaaaauccucuuuauugaggaaggaaagaucgugcacacaucaaccuuaagcgguagugcccaacacgucgaggaaugcucuugcuauccucgguacccaggcguucgcugugugugcagagauaauuggaagggguccaacaggccgauaguagacauuaauaucaaagauuacagcaucgugucgucuuaugucuguuccggacuggugggcgacacgccccggaagaacgacucaaguagcuccucucauugccuugauccuaauaacgaggaaggugggcacggaguuaaaggcugggcuuucgacgauggcaaugacguguggauggggcgcaccauuagcgagaaguugcgaucaggauacgagacauuuaaagucaucgaagguuggaguaacccaaauuccaagcugcagacuaacagacaggugauuguagauaggggcaaucggagcggguauucuggaauauucucaguugagggcaaaaguuguaucaaccguugcuuuuacguggaacuaauucgcgguagaaaggaggaaaccgagguccucuggacaagcaauuccaucguggucuucugugggacuucuggcaccuauggaacaggcucguggcccgacggggccgauaucaaccugaugccuauuuga

SEQ ID NO: 154140 - RNA, 1410 nt, Artificial Sequence; identical to SEQ ID NO: 144612
  derived and/or modified CDS sequence (opt3) from neuraminidase__InfluenzaA__BAF47980

SEQ ID NO: 154141 - RNA, 1410 nt, Artificial Sequence
  derived and/or modified CDS sequence (opt3) from neuraminidase__InfluenzaA__BAF47981
augaaccccaaucagaagaucauuaccauaggcagcgugucccugacaaucucuacuauuugccucuucaugcagaucgccauucuuaucacgaccgucacacugcacuuuaaacaguacgaguucaacucaccuccaaauaaccagguuauguugugugaaccgacuauaaucgagagaaauauuaccgaaaucguguauuuaacaaacaccacuauugagaaggaaaucugccccaaacuggcugaguacaggaaguggaguaaaccucaguguaauauaacaggguuugcaccauucagcaaggacaacuccauucggcuaucugccggaggugauaucuggguaacccgcgagcccuaugugucgugcgacccugauaaguguuaccaauuugcgcucggccaggggacgacucugaauaacguccauucaaaugacaccgugcgaaaccguacaccauauagaacucuucugaugaaugaauugggaguucccuuccaccucggcaccaaacaggugugcauugcuuggagcaguuccucuugucaugaugguaaggccuggcugcacgucugcgugacaggggacgauaaaaacgcaaccgccagcuuuaucuacaauggaaggcugguagacuccaucguuucauggaguaaggagauucuccggacgcaggaaagcgagugugugugcauaaacggcacuuguacagucgugaugaccgauggcucugcuuccgggaaagcagacacuaagaucuuauucauugaggaaggaaagaucgugcauacaucaacccugagcgguagugcccaacacgucgaggaaugcucuugcuauccucgcuacccaggcguuagaugugugugcagggauaacuggaaaggguccaaucggccgauaguagacauuaacaucaaggauuacagcaucgugucgucuuaugucuguuccggacuugugggcgacacgccccgcaaaaaugacucaaguagcuccucucacugcuuggauccuaacaaugaggaaggugggcauggaguuaagggcugggcuuuugacgauggcaacgacguguggauggggcgaaccauuagcgagaaacugagaucaggauacgagacauucaaggucaucgaagguuggaguaauccaaacuccaaacuacagauuaauaggcaagugauaguagaucggggcaaccguagcggguauucuggaaucuuuucaguugagggcaagaguuguauuaaucgcugcuucuacguggaacucaucagagguaggaaggaggaaacugagguccuguggaccagcaacuccaucguggucuuuugugggacaucuggcacuuauggaaccggcucguggcccgacggggccgauauuaaucuuaugccuauauga

SEQ ID NO: 154142 - RNA, 1410 nt, Artificial Sequence
  derived and/or modified CDS sequence (opt3) from neuraminidase__InfluenzaA__BAF47982
augaaccccaaucagaagaucauuaccauaggcagcgugucccugacaaucucuacuauuugcuucuuuaugcagaucgccauucucaucacgaccgucacacuucacuucaaacaguacgaguuuaacucaccuccaaauaaccagguuaugcugugugaaccgacuauaaucgagagaaauauuaccgaaaucguguauuugacaaacaccacuauugagaaggaaaucugccccaaauuagcugaguacaggaaguggaguaaaccucaguguaauauaacaggguucgcaccauuuagcaaggacaacuccauucggcugucugccggaggugauaucuggguaacccgcgagcccuaugugucgugcgacccugauaaguguuaccaauucgcgcuaggccaggggacgacucucaauaacguccauucaaaugacaccgugcgaaaccguacaccauauagaacucugcuuaugaaugaacugggaguucccuuucacuugggcaccaaacaggugugcauugcuuggagcaguuccucuugucaugaugguaaggccuggcuccacgucugcgugacaggggacgauaaaaacgcaaccgccagcuucaucuacaauggaaggcugguagacuccaucguuucauggaguaaggagauucugcggacgcaggaaagcgagugugugugcauaaacggcacuuguacagucgugaugaccgauggcucugcuuccgggaaagcagacacuaagauccucuuuauugaggaaggaaagaucgugcauacaucaaccuuaagcgguagugcccaacacgucgaggaaugcucuugcuauccucgcuacccaggcguuagaugugugugcagggauaacuggaaaggguccaaucggccgauaguagacauuaacaucaaggauuacagcaucgugucgucuuaugucuguuccggacuggugggcgacacgccccgcaaaaaugacucaaguagcuccucucacugccuugauccuaacaaugaggaaggugggcauggaguuaagggcugggcuuucgacgauggcaacgacguguggauggggcgaaccauuagcgagaaauugagaucaggauacgagacauuuaaggucaucgaagguuggaguaauccaaacuccaaacugcagauuaauaggcaagugauaguagaucggggcaaccguagcggguauucuggaaucuucucaguugagggcaagaguuguauuaaucgcugcuuuuacguggaacuaaucagagguaggaaggaggaaacugagguccucuggaccagcaacuccaucguggucuucugugggacaucuggcacuuauggaaccggcucguggcccgacggggccgauauuaaucugaugccuauauga

SEQ ID NO: 154143 - RNA, 1410 nt, Artificial Sequence; identical to SEQ ID NO: 144612
  derived and/or modified CDS sequence (opt3) from neuraminidase__InfluenzaA__BAF47983

SEQ ID NO: 154144 - RNA, 1410 nt, Artificial Sequence
  derived and/or modified CDS sequence (opt3) from neuraminidase__InfluenzaA__BAF47984
augaaccccaaucagaagaucauuaccauaggcagcgugucccugacaaucucuacuauuugcuucuuuaugcaaaucgccauucucaucacgaccgucacacuucacuucaaacaguacgaguuuaacucaccuccaaauaaccagguuaugcugugugaaccgacuauaaucgagagaaauauuaccgaaaucguguauuugacaaacaccacuauugagaaggaaaucugccccaaauuagcugaguacaggaauuggaguaagccucaguguaacauaacaggguucgcaccauuuagcaaagacaauuccauucggcugucugccggaggugauaucuggguaacccgcgagcccuaugugucgugcgacccugauaaguguuaccaauucgcgcuaggccaggggacgacucucaacaauguccauucaaacgacaccgugcacggacgaacaccauaucguacucugcuuaugaaugaacugggcguucccuuucauuuggguaccaaacaggugugcauugcuuggagcaguuccucuugucacgaugggaaggccuggcuccaugucugcgugacaggagacgauaagaacgcaaccgccagcuucaucuacaauggcagacugguagacuccaucguuucauggaguaaagagauucugaggacgcaggaaagcgagugugugugcauaaacggcacuuguacagucgugaugaccgaugggucugcuuccggaaaggcagacacuaaaauccucuuuauugaggaagguaagaucgugcacacaucaaccuuaagcggcagugcccaacacgucgaggaaugcucuugcuauccucgguacccagggguucgcugugugugcagagauaacuggaagggauccaauaggccgauaguagacauuaacaucaaagauuacagcaucgugucgucuuaugucuguuccggccuggugggugacacgccccggaagaaugacucaaguagcuccucucauugccuugauccuaacaaugaggaaggggaccacggaguuaaaggcugggcuuucgaugacggcaacgauguguggauggggcgcaccauuagcgagaaguugcgaucaggauacgagacauuuaaagucaucgaagguuggaguaauccaaacuccaagcugcagauuaauagacaggugauaguagacaggggcaaccggagcggguauucuggaaucuucucaguugagggcaaaaguuguauuaaucguugcuuuuacguggaacuaauccgcgguagaaaggaggaaacugagguccucuggaccagcaacuccaucguggucuucugugggacaucuggcacuuauggaaccggcucguggcccgauggggccgacauuaaucugaugccuauauga

SEQ ID NO: 154145 - RNA, 1410 nt, Artificial Sequence
  derived and/or modified CDS sequence (opt3) from neuraminidase__InfluenzaA__BAF47985
augaaccccaaucagaagaucauuaccauaggcagcgugucccugacaaucucuacuauuugcuucuuuaugcaaaucgccauucucaucacgaccgucacacuucacuucaaacaguacgaguuuaacuucccuccaaauaaccagguuaugcugugugaaccgacuauaaucgagagaaauauuaccgaaaucguguauuugacaaacaccacuauugagaaggaaaucugccccaaauuagcugaguacaggaauuggucaaagccucagugugacauaacaggguuugcaccauucaguaaagauaacagcauucggcuguccgccggaggugacaucuggguaacccgcgagcccuaugugucuugcgauccugacaaguguuaccaauuugcgcuaggccaggggacgacucucaauaacguccauucgaaugauaccgugcacgaccgaacaccauaucguacucugcuuaugaacgaacugggaguucccuuccauuugggcaccaaacaggugugcauugcuuggucaagcaguuccugucacgaugguaaagccuggcuccaugucugcgugacaggggacgauaagaaugcaaccgccucuuuuaucuacaacggaagacugguagacagcaucguuuccuggucaaagaagauucugaggacgcaggagagugaaugugugugcauaaauggcacuuguacagucgugaugaccgauggcagcgcuucugggaaagcagacacuaagauccucuucauugaggagggaaagaucgugcacacauccaccuuaucagguagcgcccaacacgucgaagagugcaguugcuauccucgguacccaggcguucgcugugugugcagagauaacuggaaagggucuaacaggccgauaguagacauuaauaucaaggacuacuccaucgugagcucguaugucuguucuggacuggugggcgauacgccccggaaaaacgacuccucaaguagcucccauugccuugauccuaauaacgaagagggugggcacggaguuaagggcugggcuuuugacgauggcaaugacguguggauggggcgcaccauuucugaaaaauugcgaagcggauacgagacauucaaggucaucgaggguuggucaaacccaaauaguaaacugcagauuaacagacaggugauaguagauaggggcaaucgguccggguauagcggaaucuuuucuguugaaggcaagucauguauuaaccguugcuucuacguggagcuaauccgcgguagaaaggaagagacugaaguccucuggaccaguaauagcaucguggucuucugugggacauccggcacuuauggaaccggcucuuggcccgacggggccgauauuaaccugaugccuauauga

SEQ ID NO: 154146 - RNA, 1410 nt, Artificial Sequence
  derived and/or modified CDS sequence (opt3) from neuraminidase__InfluenzaA__BAF47986
augaaccccaaucagaagaucauuaccauaggcagcgugucccugacaaucucuacuauuugcuucuuuaugcaaaucgccauucucaucacgaccgucacacuucacuucaaacaguacgaguuuaacuucccuccaaauaaccagguuaugcugugugaaccgacuauaaucgagagaaauauuaccgaaaucguguauuugacaaacaccacuauugagaaggaaaucugccccaaauuagcugaguacaggaauuggucaaagccucagugugacauaacaggguuugcaccauucaguaaagauaacagcauucggcuguccgccggaggugacaucuggguaacccgcgagcccuaugugucuugcgauccugacaaguguuaccaauuugcgcuaggccaggggacgacucucaauaacguccauucgaaugauaccgugcacgaccgaacaccauaucguacucugcuuaugaacgaacugggaguucccuuccauuugggcaccaaacaggugugcauugcuuggucaagcaguuccugucacgaugguaaagccuggcuccaugucugcgugacaggggacgauaagaaugcaaccgccucuuuuaucuacaacggaagacugguagacagcaucguuuccuggucaaagaagauucugaggacgcaggagagugaaugugugugcauaaauggcacuuguacagucgugaugaccgauggcagcgcuucugggaaagcagacacuaagauccucuucauugaggagggaaagaucgugcacacauccaccuuaucagguagcgcccaacacgucgaagagugcaguugcuauccucgguacccaggcguucgcugugugugcagagauaacuggaaagggucuaacaggccgauaguagacauuaauaucaaggacuacuccaucgugagcucguaugucuguucuggacuggugggcgauacgccccggaaaaacgacuccucaaguagcucccauugccuugauccuaauaacgaagagggugggcacggaguuaagggcugggcuuuugacgauggcaaugacguguggauggggcgcaccauuucugaaaaauugcgaagcggauacgagacauucaaggucaucgaggguuggucaaacccaaauaguaaacugcagauuaacagacaggugauaguagauaggggcaaucgguccggguauagcggaaucuuuucuguugaaggcaagucauguauuaaccgucgcuucuacguggagcuaaucagagguaggaaggaagagacugaaguccucuggaccaguaauagcaucguggucuucugcgggacauccggcacuuauggaaccggcucuuggcccgacggggccgauauuaaccugaugccuauauga

SEQ ID NO: 154147 - RNA, 1410 nt, Artificial Sequence
  derived and/or modified CDS sequence (opt3) from neuraminidase__InfluenzaA__BAF47987
augaaccccaaucagaagaucauuaccauaggcagcgugucccugacaaucucuacuauuugcuucuuuaugcaaaucgccauucucaucacgaccgucacacuucacuucaaacaguacgaguuuaacuucccuccaaauaaccagguuaugcugugugaaccgacuauaaucgagagaaauauuaccgaaaucguguauuugacaaacaccacuauugagaaggaaaucugccccaaauuagcugaguacaggaauuggucaaagccucagugugacauaacaggguuugcaccauucaguaaagauaacagcauucggcuguccgccggaggugacaucuggguaacccgcgagcccuaugugucuugcgauccugacaaguguuaccaauuugcgcuaggccaggggacgacucucaauaacguccauucgaaugauaaggugcacgaccgaaccccauaucguacacugcuuaugaacgaacugggaguucccuuccauuugggcacuaaacaggugugcauugcuuggucaagcaguuccugucacgaugguaaggccuggcuccaugucugcgugaccggggacgauaaaaaugcaacagccucuuuuaucuacaacggaagacugguagacagcaucguuuccuggucaaagaaaauucugaggacccaggagagugaaugugugugcauaaauggcacguguacugucgugaugacagauggcagcgcuucugggaaggcagacaccaagauccucuucauugaggagggaaaaaucgugcacacuuccacauuaucagguagcgcccaacacgucgaagagugcaguugcuauccucgguacccaggcguucgcugugugugcagagauaacuggaaggggucuaacaggccgauaguagacauuaauaucaaagacuacuccaucgugagcucguaugucuguucuggacuggugggcgauacuccccggaagaacgacuccucaaguagcucccauugccuugauccuaauaacgaagagggugggcacggaguuaaaggcugggcuuuugacgauggcaaugacguguggauggggcgcacgauuucugaaaaguugcgaagcggauacgagaccuucaaagucaucgaggguuggucaaacccaaauaguaagcugcagauuaacagacaggugauaguagauaggggcaaucgguccggguauagcggaaucuuuucuguugaaggcaagucauguauuaaccguugcuucuacguggagcuaauccgcgguagaaaagaagagacagaaguccucuggaccaguaauagcaucguggucuucugugggaccuccggcacauauggaacuggcucuuggcccgacggggccgauauuaaccugaugccuauauga

SEQ ID NO: 154148 - RNA, 1410 nt, Artificial Sequence; identical to SEQ ID NO: 142762
  derived and/or modified CDS sequence (opt3) from neuraminidase__InfluenzaA__BAF47988

SEQ ID NO: 154149 - RNA, 1410 nt, Artificial Sequence; identical to SEQ ID NO: 142762
  derived and/or modified CDS sequence (opt3) from neuraminidase__InfluenzaA__BAF47989

SEQ ID NO: 154150 - RNA, 1410 nt, Artificial Sequence
  derived and/or modified CDS sequence (opt3) from neuraminidase__InfluenzaA__BAF47990
augaaccccaaucagaagaucauuaccauaggcagcgugucccugacaaucucuacuauuugcuucuuuaugcaaaucgccauucucaucacgaccgucacacuucacuucaaacaguacgaguuuaacucaccuccaaauaaccagguuaugcugugugaaccgacuauaaucgagagaaauauuaccgaaaucguguauuugacaaacaccacuauugagaaggaaaucugccccaaauuagcugaguacaggaauuggaguaagccucaguguaacauaacaggguucgcaccauuuagcaaagacaauuccauucggcugucugccggaggugauaucuggguaacccgcgagcccuaugugucgugcgacccugauaaguguuaccaauucgcgcuaggccaggggacgacucucaacaauguccauucaaacgacaccgugcacgaucgaacaccauaucguacucugcuuaugaaugaacugggaguucccuuucauuugggcaccaaacaggugugcauugcuuggagcaguuccucuugucacgacgguaaggccuggcuccaugucugcgugacaggggaugacaagaacgcaaccgccagcuucaucuacaauggaagacugguagauuccaucguuucauggaguaaagagauucugaggacgcaggaaagcgagugugugugcauaaacggcacuuguacagucaucaugaccgacggcucugcuuccgggaaggcagauacuaaaauucucuuuaucgaggaaggaaagauagugcacacaucaaccuuaagcgguagugcccaacacguggaggaaugcucuugcuauccucgguacccaggcguccgcuguguuugcagagacaacuggaagggguccaauaggccgauuguggauaucaacaucaaagacuacagcauuguaucgucuuauguguguuccggacuggucggcgacacgccccggaagaaugauucaaguagcuccucucauugccuugacccuaacaaugaggaaggugggcacggagugaaaggcugggcuuucgaugacggcaacgauguuuggauggggcgcaccgugagcgagaaguugcgaucaggauacgagacauuuaaagucaucgaagguuggaguaauccaaacuccaagcugcagauuaauagacaggugauaguagacaggggcaaccggagcggguauucuggaaucuucucaguugagggcaaaaguuguauuaaucguugcuuuuacguggaacuaauccgcgguagaaaggaggaaacugagguccucuggaccagcaacuccaucguggucuucugugggacaucuggcacuuauggaaccggcucguggcccgauggggccgacauuaaucugaugccuauauga

SEQ ID NO: 154151 - RNA, 1410 nt, Artificial Sequence
  derived and/or modified CDS sequence (opt3) from neuraminidase__InfluenzaA__BAF47991
augaaccccaaucagaagaucauuaccauaggcagcgugucccugacaaucucuacuauuugcuucuuuaugcaaaucgccauucucaucacgaccgucacacuucacuucaaacaguacgaguuuaacucaccuccaaauaaccagguuaugcugugugaaccgacuauaaucgagagaaauauuaccgaaaucguguauuugacaaacaccacuauugagaaggaaaucugccccaaauuagcugaguacaggaauuggaguaagccucagugugacauaacaggguucgcaccauuuagcaaagauaacuccauucggcugucugccggaggugacaucuggguaacccgcgagcccuaugugucgugcgauccugacaaguguuaccaauucgcgcuaggccaggggacgacucucaauaacguccauucaaaugauauugugcacgaccgaaccccauaucguacacugcuuaugaacgaacugggaguucccuuucauuugggcacuaaacaggugugcaucgcuuggagcaguuccucuugucacgaugguaaggccuggcuccaugucugcgugaccggggacgauaagaaugcaacagccagcuucaucuacaacggaagacugguagacuccauuguuucauggaguaaaaagauacugaggacccaggagagcgaaugugugugcaucaauggcacguguacugucgugaugacagauggcucugcuuccgggaaagcagacaccaagauucucuuuaucgaggagggaaagauagugcacacuucaacauuaagcgguagugcccaacacgucgaagagugcucuugcuauccucgguacccaggcauucgcuguguuugcagagauaacuggaaaggguccaacaggccgaucguggacaucaauauuaaggacuacagcaucguaucgucuuauguguguuccggacuggucggcgauacgccccggaaaaacgacucaaguagcuccucucauugccuugauccuaauaacgaagagggugggcacggagugaagggcugggcuuucgacgauggcaaugacguuuggauggggcgcaccauuagcgaaaaauugcgaucaggauacgagaccuuuaaggugauagaggguuggaguaacccaaauuccaaacugcagaucaacagacaggucauuguggauaggggcaaucggagcggguauucuggaaucuucucaguagaaggcaagaguuguaucaaccguugcuuuuacguugagcuaauucgcgguagaaaggaagagacagaagugcucuggacuagcaauuccauagucguguucugugggaccucuggcacauauggaacuggcucguggcccgacggggccgauaucaaccugaugccuauuuga

SEQ ID NO: 154152 - RNA, 1410 nt, Artificial Sequence
  derived and/or modified CDS sequence (opt3) from neuraminidase__InfluenzaA__BAF47992
augaaccccaaucagaagaucauuaccauaggcagcgugucccugacaaucucuacuauuugcuucuuuaugcaaaucgccauucucaucacgaccgucacacuucacuucaaacaguacgaguuuaacucaccuccaaauaaccagguuaugcugugugaaccgacuauaaucgagagaaauauuaccgaaaucguguauuugacaaacaccacuauugagaaggaaaucugccccaaauuagcugaguacaggaauuggaguaagccucaguguaacauaacaggguucgcaccauuuagcaaagacaauuccauucggcugucugccggaggugauaucuggguaacccgcgagcccuaugugucgugcgaaccugacaaguguuacccauucgcgcuaguccaaggcacgacucucaacaaugugcauucaaacgauaccguucacgaccgaacacccuaucguacucugcuuaugaaugagcugggggugccuuuucauuugggaaccaagcaggucugcauugcuuggagcaguuccucuugucacgauggcaaagccuggcuccaugugugcguaacaggugacgauaagaacgcaaccgccagcuucaucuacaaugggagacugguugacuccaucgugucauggaguaaagaaauucugaggacgcaggagagcgagugugucugcauaaacggaacuuguacaguggugaugaccgauggcucugcuuccggcaaggcagacacuaaaauccucuuuauugaagaggggaagaucguccacacaucaaccuuaagcggaagugcccagcacguugaagagugcucuugcuauccacgguacccgggugugcgcuguguaugcagagauaacuggaagggcuccaauaggcccauaguggacauuaacaucaaagauuacagcaucgucucgucuuauguguguuccgggcugguuggagacacgccucggaagaaugacucaaguagcuccggccauugccuugauccaaacaaugaagagggugggcacggagugaaaggcugggcuuucgacgauggcaacgacgucuggauggggcgcaccauuucugagaaguugcgaagcggauacgaaacauuuaaagugaucgaggguuggucaaaucccaacaguaagcugcaaauuaauagacagguaauaguugauaggggcaaccgguccggguauagcggaaucuucucuguggaaggcaaaucauguauuaaucguugcuuuuacgucgagcuaauccgcgguagaaaggaagagacugaggugcucuggaccaguaacagcuucgucguguucugugggacauccggcacuuauggaaccggcucuuggccugacggggccgauaucaaucugaugccaauuuga

SEQ ID NO: 154153 - RNA, 1410 nt, Artificial Sequence; identical to SEQ ID NO: 154109
  derived and/or modified CDS sequence (opt3) from neuraminidase__InfluenzaA__BAF47993

SEQ ID NO: 154154 - RNA, 1410 nt, Artificial Sequence; identical to SEQ ID NO: 142760
  derived and/or modified CDS sequence (opt3) from neuraminidase__InfluenzaA__BAF47994

SEQ ID NO: 154155 - RNA, 1410 nt, Artificial Sequence
  derived and/or modified CDS sequence (opt3) from neuraminidase__InfluenzaA__BAF47995
augaaccccaaucagaagaucauuaccauaggcagcgugucccugacaaucucuacuauuugcuucuuuaugcaaaucgccauucucaucacgaccgucacacuucacuucaaacaguacgaguuuaacucaccuccaaauaaccagguuaugcugugugaaccgacuauaaucgagagaaauauuaccgaaaucguguauuugacaaacaccacuauugagaaggaaaucugccccaaauuagcugaguacaggaauuggaguaagccucaguguaacauaacaggguucgcaccauuuagcaaagacaauuccauucggcugucugccggaggugauaucuggguaacccgcgagcccuaugugucgugcgacccugauaaguguuaccaauucgcgcuaggccaggggacgacucucaacaauguccauucaaacgacaccgugcacggacgaacaccauaucguacucugcuuaugaaugaacugggcguucccuuucauuuggguaccaaacaggugugcauugcuuggagcaguuccucuugucacgaugggaaggccuggcuccaugucugcgugacaggagacgauaagaacgcaaccgccagcuucaucuacaauggcagacugguagacuccaucguuucauggaguaaagagauucugaggacgcaggaaagcgagugugugugcauaaacggcacuuguacagucgugaugaccgaugggucugcuuccggaaaggcagacacuaaaauccucuuuauugaggaagguaagaucgugcacacaucaaccuuaagcggcagugcccaacacgucgaggaaugcucuugcuauccucgguacccagggguucgcugugugugcagagauaacuggaagggauccaauaggccgauaguagacauuaacaucaaagauuacagcaucgugucgucuuaugucuguuccggccuggugggugacacgccccggaagaaugacucaaguagcuccucucauugccuugauccuaacaaugaggaagggggacacggcguuaaaggcugggcuuucgacgaugggaacgacguguggaugggacgcaccauuagcgagaaguugcgaucagguuacgagacauuuaaagucaucgaaggcuggaguaauccaaacuccaagcugcagauuaauagacaggugauaguagauagggggaaccggagcggauauucuggcaucuucucaguugaggguaaaaguuguauuaaucguugcuuuuacguggaacuaauccgcgggagaaaggaggaaacugagguccucuggaccagcaacuccaucguggucuucuguggcacaucuggaacuuauggcaccgggucguggcccgacggagccgauauuaaucugaugccuauauga

SEQ ID NO: 154156 - RNA, 1410 nt, Artificial Sequence; identical to SEQ ID NO: 154155
  derived and/or modified CDS sequence (opt3) from neuraminidase__InfluenzaA__BAF47996

SEQ ID NO: 154157 - RNA, 1410 nt, Artificial Sequence; identical to SEQ ID NO: 142762
  derived and/or modified CDS sequence (opt3) from neuraminidase__InfluenzaA__BAF47997

SEQ ID NO: 154158 - RNA, 1410 nt, Artificial Sequence
  derived and/or modified CDS sequence (opt3) from neuraminidase__InfluenzaA__BAF57504
augaaccccaaucagaagaucauuaccauaggcagcgugucccugacaaucucuacuauuugcuucuuuaugcaaaucgccauucucaucacgaccgucacacuucacuucaaacaguacgaguuuaacccuccaccgaauaaccagguuaugcugugugaacccacuauaaucgagagaaauauuaccgaaaucguguauuugacaaacaccacuauugagaaggaaaucugcccuaaauuagcugaguacaggaauuggucaaagccacaguguaacauaacaggguucgcacccuuuaguaaagacaauagcauucggcuguccgccggaggugauaucuggguaacccgcgagccuuaugugucuucggacccagauaagugcuaccaauucgcgcuaggccaggggacgacucucaacaauguccauucaaacgacaccgugcacgaucgaacacccuaucguacucugcuuaugaaggaacugggaguuccuuuucauuugggcaccaaacagguguguauugcuuggagcaguuccucuugccacgacgguaaggccuggcuccaugucugugugacaggggaugacgagaaugcaaccgccagcuucaucuacaacggaagacugguagauuccguugugucauggaguaaaaagauccugaggacgcaggaaagcgagugcgucuguauuaauggcacuugcacaguggugaugaccgacggcucugcuuccgggaaagcagauacuaagauacucuuuaucgaggaaggaaagauuguccacacaagcucauuaagugguucugcccaacacguugaggaauguuccugcuauccacgguacccgggcgugcgcugcguauguagagacaacuggaaagggagcaacaggcccaucguggauauaaauauuaaggacuacucgaucgucucuuccuaugugugcucaggacugguuggcgacaccccucggaaaaacgauaguagcuccucuagccauugucuugacccaaauaacgaggaaggugggcacggagugaagggcugggcuuucgaugacggcaaugaugucuggauggggcgcacgaucucagagaaauugcgaaguggauacgagaccuuuaaggugauugaagguugguccaaccccaauagcaaacugcagaucaacagacagguaauuguugacaggggcaaucggucuggguauucaggaauauucaguguggagggcaagagcugcaucaaccguuguuuuuacgucgaacuaauucgcgguagaaagcaggagacagaagugcucuggacuuccaauucuaucgucguguucugcgggaccucgggcacauauggaacuggcagcuggccugauggggccgacaucaaccugaugccaauuuga

SEQ ID NO: 154159 - RNA, 1410 nt, Artificial Sequence
  derived and/or modified CDS sequence (opt3) from neuraminidase__InfluenzaA__BAF57508
augaaccccaaucagaagaucauuaccauaggcagcgugucccugacaaucucuacuauuugcuucuuuaugcaaaucgccauucucaucacgacccuuacacugcacuucaaacaguacgaguuuaacucaccuccaaauaaccaggucauguugugugaaccgacuauaaucgagagaaauauuaccgaaaucguuuauuuaacaaacaccacuauugagaaggaaaucugccccaaacuggcugaguacaggaauuggaguaagccucaguguaacauaacaggguucgcaccauuuagcaaagacaauuccauucggcuaucugccggaggugauaucugggugacccgcgagcccuauguaucgugcgacccugauaaguguuaccaauucgcgcucggccaggggacgacucugaacaaugugcauucaaacgacaccguccacgaucgaacaccauaucguacucuucugaugaaugaauugggagugcccuuucaucucggcaccaagcagguuugcauugcuuggagcaguuccucuugucacgacgguaaagccuggcugcaugugugcgucacaggggaugacgagaacgcaaccgccagcuucaucuacaauggaagacugguggauuccaucguaucauggaguaagaaaauucucaggacgcaggaaagcgaguguguuugcauaaacggcacuuguacaguggucaugaccgacggcucugcuuccgggaaggcagauacuaaaaucuuauuuauugaggaaggaaagaucgugcacacaucaacccugagcgguagugcccaacacguggaggaaugcucuugcuauccucgguacccaggcguccgcuguguuugcagagacaacuggaagggguccaauaggccgauaguggauauuaacaucaaagacuacagcaucguaucgucuuauguguguuccggacuugucggcgacacgccccggaagaaugauucaaguagcuccucucauugcuuggacccuaacaaugaggaaggugggcacggagugaaaggcugggcuuucgaugacggcaacgauguuuggauggggcgcaccauuagcgagaagcugcgaucaggauacgagacauuuaaagugaucgaagguuggaguaauccaaacuccaagcuacagauuaauagacaggucauaguggacaggggcaaccggagcggguauucuggaaucuucucaguagagggcaaaaguuguauuaaucguugcuuuuacguugaacucauccgcgguagaaagcaggagacugaagugcuguggaccagcaacuccaucgucguguucugugggacaucuggcacuuauggaaccggcucguggcccgauggggccgacauuaaucuuaugccuauauga

SEQ ID NO: 154160 - RNA, 1410 nt, Artificial Sequence; identical to SEQ ID NO: 143977
  derived and/or modified CDS sequence (opt3) from neuraminidase__InfluenzaA__BAF57511

SEQ ID NO: 154161 - RNA, 1410 nt, Artificial Sequence
  derived and/or modified CDS sequence (opt3) from neuraminidase__InfluenzaA__BAF57515
augaaccccaaucagagaaucauuaccauaggcagcgugucccugacaaucucuacuauuugcuucuuuaugcaaaucgccauucucaucacgaccgucacacuucacuucaagcaguacgaguuuaacucaccuccaaauaaccagguuaugcugugugaaccgacuauaaucgagaggaauauuaccgaaaucguguauuugacaaacaccacuauugagaaagaaaucugccccaaguuagcugaguaccggaauuggaguaaaccucaguguaacauaacaggguucgcaccauuuagcaaggacaauuccauucgccugucugccggaggugauaucuggguaacccgagagcccuaugugucgugcgacccugauaaauguuaccaauucgcgcuaggccaggggacgacucucaacaauguccauucaaacgacaaggugcacgaucguaccccauauagaacacugcuuaugaaugaacugggaguucccuuucauuugggcacuaaacaggugugcauugcuuggagcaguuccucuugucacgacgguaaggccuggcuccaugucugcgugaccggggaugacgagaacgcaacagccagcuucaucuacaauggaaggcugguagauuccaucguuucauggaguaagaaaauucugcggacccaggaaagcgagugugugugcauaaacggcacguguacugucgugaugacagacggcucugcuuccgggaaggcagauaccaaaauccucuuuauugaggaaggaaagaucgugcacacuucaacauuaagcgguagugcccaacacgucgaggaaugcucuugcuauccucgcuacccaggcguuagaugugugugcagggacaacuggaagggguccaaucggccgauaguagauauuaacaucaaagacuacagcaucgugucgucuuaucuguguuccggacuugucggcgacacgccccgcaagaaugauucaaguagcuccucucauugcuuggacccuaacaaugaggaaggugggcacggagugaaaggcugggcuuucgaugacggcaacgauguuuggauggggcgaaccauuagcgagaagcugagaucaggauacgagaccuuuaaagugaucgaagguuggagucauccaaauucccagcuacagauuaacaggcaggucauaguggaccggggcaaucguagcggguauucuggaaucuucucaguagagggcaagaguuguauuaaccgcugcuuuuacguugaacucaucagagguaggaaacaagagacagaagugcuguggacuagcaauuccaucgucguguucugugggaccucuggcacauauggaacuggcucguggcccgauggggccgacauuaaccuuaugccuauauga

SEQ ID NO: 154162 - RNA, 1410 nt, Artificial Sequence
  derived and/or modified CDS sequence (opt3) from neuraminidase__InfluenzaA__BAF57522
augaaccccaaucagaagaucauuaccauaggcagcgugucccugacaaucucuacuauuugcuucuuuaugcaaaucgccauucucaucacgaccgucacacuucacuucaaacaguacgaguuuaacucaccuccaaauaaccagguuaugcugugugaaccgacuauaaucgagagaaauauuaccgaaaucguguauuugacaaacaccauuaucgagaaggaaauaugccccaaauuagcugaguacaggaauuggaguaagccucaguguaacauuacuggguucgcaccauuuagcaaagacaauuccauccggcugucugccggaggugauauuuggguaacacgcgagcccuaugugucgugcgacccugauaaguguuaccaauucgcgcuaggccaggggaccacgcucaacaauguccauucaaacgacacugugcacgaucgaaccccauaucguacacugcuuaugaaugaacugggaguucccuuucauuugggcacuaaacaggugugcaucgcuuggagcaguuccucuugucacgacgguaaggccuggcuccaugucugcgugaccggggaugacgagaacgcaacagccagcuucaucuacaauggaagacugguagauuccauuguuucauggaguaagaaaauacugaggacccaggaaagcgagugugugugcaucaacggcacguguacugucgugaugacagacggcucugcuuccgggaaggcagauaccaaaauucucuuuaucgaggaaggaaagauagugcacacuucaacauuaagcgguagugcccaacacgucgaggaaugcucuugcuauccucgguacccaggcguucgcugugugugcagagacaacuggaagggguccaauaggccgauuguagauaucaacaucaaagacuacagcauugugucgucuuaugucuguuccggacuggugggcgacacgccccggaagaaugaucgcucacgaaguagccauugccuugacccuaacaaugaggaaggugggcacggaguuaaaggcugggcuuucgaugacggcaacgauguguggauggggagaaccaucuccgagaaguugaggucuggauacgagaccuuuaaagucauugaagguuggagcaagccaaauucaaaacugcagauaaaccgucaggugaucguagaccggggcaaucgcacaggguauaguggaauuuucuccguugagggcaagagcuguaucaacagaugcuuuuacguggaacuaaucaggggucggaagcaggagacugaaguccucuggaccucuaauucaauuguggucuucugugggacaaguggcacuuauggaaccggcagcuggcccgauggggccgacauaaaccugaugccuaucuga

SEQ ID NO: 154163 - RNA, 1410 nt, Artificial Sequence
  derived and/or modified CDS sequence (opt3) from neuraminidase__InfluenzaA__BAF57529
augaaccccaaucagaagaucauuaccauaggcagcgugucccugacaaucucuacuauuugcuucuuuaugcaaaucgccauucucaucacgaccgucacacuucacuucaaacaguacgaguuuaacucaccuccaaauaaccagguuaugcugugugaaccgacuauaaucgagagaaauauuaccgaaaucguguauuugacaaacaccacuauugagaaggaaaucugccccaaauuagcugaguacaggaauuggaguaagccucagugugacauaacaggguucgcaccauuuagcaaagauaacuccauucggcugucugccggaggugacaucuggguaacccgcgagcccuaugugucgugcgauccugacaaguguuaccaauucgcgcuaggccaggggacgacucucaauaacguccauucaaaugauaaggugcacgaacgaaccccauaucguacacugcuuaugaacgagcugggaguucccuuucauuugggcacuaaacaggugugcauugcuuggagcaguuccucuugucacgacgguaaggccuggcuccaugucugcgugaccggggaugacaaaaaugcaacagccagcuucaucuacaacggaagacugguagauuccaucguuucauggaguaagaaaauucugaggacccaggaaagcgagugugugugcauaaauggcacguguacugucgugaugacagacggcucugcuuccgggaaggcagauaccaagauccucuuuauugaggaaggaaaaaucgugcacacuucaacauuaagcgguagugcccaacacgucgaggaaugcucuugcuauccucgguacccaggcguucgcugugugugcagagacaacuggaagggguccaacaggccgauaguagauauuaauaucaaagacuacagcaucgugucgucuuaugucuguuccggacuggugggcgacacgccccggaagaacgauucaaguagcuccucucauugccuugacccuaauaacgaggaaggugggcacggaguuaaaggcugggcuuucgaugacggcaaugauguguggauggggcgcaccauuagcgagaaguugcgaucaggauacgagaccuuuaaagucaucgaagguuggaguaacccaaauuccaagcugcagauuaacagacaggugauaguagacaggggcaaucggagcggguauucuggaaucuucucaguugagggcaagaguuguauuaaccguugcuuuuacguggaacuaauccgcgguagaaaagaggaaacagagguccucuggacuagcaauuccaucguggucuucugugggaccucuggcacauauggaacuggcucguggcccgauggggccgacauuaaccugaugccuauauga

SEQ ID NO: 154164 - RNA, 1410 nt, Artificial Sequence; identical to SEQ ID NO: 149599
  derived and/or modified CDS sequence (opt3) from neuraminidase__InfluenzaA__BAF57532

SEQ ID NO: 154165 - RNA, 1410 nt, Artificial Sequence; identical to SEQ ID NO: 149599
  derived and/or modified CDS sequence (opt3) from neuraminidase__InfluenzaA__BAF57536

SEQ ID NO: 154166 - RNA, 1410 nt, Artificial Sequence
  derived and/or modified CDS sequence (opt3) from neuraminidase__InfluenzaA__BAF57539
augaaccccaaucagaagaucauuaccauaggcagcgugucccugacaaucucuacuauuugcuucuuuaugcaaaucgccauucucaucacgaccgucacacuucacuucaaacaguacgaguuuaacucaccuccaaauaaccagguuaugcugugugaaccgacuauaaucgagagaaauauuaccgaaaucguguauuugacaaacaccacuauugagaaggaaaucugccccaaauuagcugaguacaggaauuggaguaagccucagugugacauaacaggguucgcaccauuuagcaaagauaacuccauucggcugucugccggaggugacaucuggguaacccgcgagcccuaugugucgugcgauccugacaaguguuaccaauucgcgcuaggccaggggacgacucucaauaacguccauucaaaugauaccgugcacgaccgaacaccauaucguacucugcuuaugaacgaacugggaguucccuuucauuugggcaccaaacaggugugcauugcuuggagcaguuccucuugucacgaugguaaagccuggcuccaugucugcgugacaggggacgauaagaaugcaaccgccagcuucaucuacaacggaagacugaucgacuccauuguaucauggaguaaaaagauacugaggacgcaggagagcgaauguguuugcaucaauggcacuuguacaguggucaugaccgauggcucugcuuccgggaaagcagacacuaagauucucuuuaucgaggagggaaagauagugcacacaucaaccuuaagcgguagugcccaacacguggaagagugcucuugcuauccucgguacccaggcguccgcuguguuugcagagauaacuggaaaggguccaacaggccgauuguggacaucaauaucaaggacuacagcauuguaucgucuuauguguguuccggacuggucggcgauacgccccggaaaaacgacucaaguagcuccucucauugccuugauccuaauaacgaagagggugggcacggagugaagggcugggcuuucgacgauggcaaugacguuuggauggggcgcaccaucagcgaaaaauugcgaucaggauacgagacauuuaaggugauugaggguuggaguaacccaaauuccaaacugcagauaaacagacaggucaucguggauaggggcaaucggagcggguauucuggaauuuucucaguagaaggcaagaguuguaucaaccguugcuuuuacguugagcuaauccgcgguagaaaggaaaagacugaggugcucuggaccagcaauuccauugucguguucugugggacaucuggcacuuauggaaccggcucguggcccgacggggccgauauaaaccugaugccuaucuga

SEQ ID NO: 154167 - RNA, 1410 nt, Artificial Sequence
  derived and/or modified CDS sequence (opt3) from neuraminidase__InfluenzaA__BAF57543
augaaccccaaucagaagaucauuaccauaggcagcgugucccugacaaucucuacuauuugcuucuuuaugcaaaucgccauucucaucacgaccgucacacuucacuucaaacaguacgaguuuaacucaccuccaaauaaccagguuaugcugugugaaccgacuauaaucgagagaaauauuaccgaaaucguguauuugacaaacaccacuauugagaaggaaaucugccccaaauuagcugaguacaggaauuggaguaagccucagugugacauaacaggguucgcaccauuuagcaaagauaacuccauucggcugucugccggaggugacaucuggguaacccgcgagcccuaugugucgugcgauccugacaaguguuaccaauucgcgcuaggccaggggacgacucucaauaacguccauucaaaugauaccgugcacgaccgaacaccauaucguacucugcuuaugaacgaacugggaguucccuuucauuugggcaccaaacaggugugcauugcuuggagcaguuccucuugucacgaugguaaggccuggcuccaugucugcgugacaggggacgauaagaaugcaaccgccagcuucaucuacaacggaagacugguagacuccaucguuucauggaguaaaaagauucugaggacgcaggagagcgaaugugugugcauaaauggcacuuguacagucgugaugaccgauggcucugcuuccgggaaagcagacacuaagauccucuuuauugaggagggaaagaucgugcacacaucaaccuuaagcgguagugcccaacacgucgaagagugcucuugcuauccucgguacccaggcguucgcugugugugcagagauaacuggaaaggguccaacaggccgauaguagacauuaauaucaaggacuacagcaucgugucgucuuaugucuguuccggacuggugggcgauacgccccggaaaaacgacucaaguagcuccucucauugccuugauccuaauaacgaagagggugggcacggaguuaagggcugggcuuucgacgauggcaaugacguguggauggggcgcaccauuagcgaaaaauugcgaucaggauacgagacauuuaaggucaucgaggguuggaguaacccaaauuccaaacugcagauuaacagacaggugauaguagauaggggcaaucggagcggguauucugccaucuucucaguugaaggaaagaguuguauuaaccguugcuuuuacguggagcuaauccgcggcagaaaggaagagacugaaguccucuggaccagcaauuccaucguggucuucugugguacaucugggacuuauggcaccggaucguggcccgacggcgcggauauuaaccugaugccuauauga

SEQ ID NO: 154168 - RNA, 1410 nt, Artificial Sequence
  derived and/or modified CDS sequence (opt3) from neuraminidase__InfluenzaA__BAF57547
augaaccccaaucagaagaucauuaccauaggcagcgugucccugacaaucucuacuauuugcuucuuuaugcaaaucgccauucucaucacgaccgucacacuucacuucaaacaguacgaguuuaacucaccuccaaauaaccagguuaugcugugugaaccgacuauaaucgagagaaauauuaccgaaaucguguauuugacaaacaccacuauugagaaggaaaucugccccaaauuagcugaguacaggaauuggaguaagccucagugugacauaacaggguucgcaccauuuagcaaagauaacuccauucggcugucugccggaggugacaucuggguaacccgcgagcccuaugugucgugcgauccugacaaguguuaccaauucgcgcuaggccaggggacgacucucaauaacguccauucaaaugauaccgugcacgaccgaacaccauaucguacucugcuuaugaacgaacugggaguucccuuucauuugggcaccaaacaggugugcauugcuuggagcaguuccucuugucacgaugguaaggccuggcuccaugucugcgugacaggggacgauaagaaugcaaccgccagcuucaucuacaacggaagacugguagacuccaucguuucauggaguaaaaagauucugaggacgcaggagagcgaaugugugugcauaaauggcacuuguacagucgugaugaccgauggcucugcuuccgggaaagcagacacuaagauccucuuuauugaggagggaaagaucgugcacacaucaaccuuaagcgguagugcccaacacgucgaagagugcucuugcuauccucgguacccaggcguucgcugugugugcagagauaacuggaaaggguccaacaggccgauaguagacauuaauaucaaggacuacagcaucgugucgucuuaugucuguuccggacuggugggcgauacgccccggaaaaacgacucaaguagcuccucucauugccuugauccuaauaacgaagagggugggcacggaguuaagggcugggcuuucgacgauggcaaugacguguggauggggcgcaccauuagcgaaaaauugcgaucaggauacgagacauuuaaggucaucgaggguuggaguaacccaaauuccaaacugcagauuaacagacaggugauaguagauaggggcaaucggagcggguauucuggaaucuucucaguugaaggcaagaguuguauuaaccguugcuuuuacguggagcuaauccgcgguagaaaggaagagacugaagcccucuggaccagcaauuccaucgucguguucugugggacaucuggcacuuauggaaccggcucguggcccgacggggcggauauuaaccugaugccuauauga

SEQ ID NO: 154169 - RNA, 1410 nt, Artificial Sequence; identical to SEQ ID NO: 142762
  derived and/or modified CDS sequence (opt3) from neuraminidase__InfluenzaA__BAF57551

SEQ ID NO: 154170 - RNA, 1410 nt, Artificial Sequence; identical to SEQ ID NO: 142762
  derived and/or modified CDS sequence (opt3) from neuraminidase__InfluenzaA__BAF57555

SEQ ID NO: 154171 - RNA, 1410 nt, Artificial Sequence; identical to SEQ ID NO: 142760
  derived and/or modified CDS sequence (opt3) from neuraminidase__InfluenzaA__BAF57559

SEQ ID NO: 154172 - RNA, 1410 nt, Artificial Sequence
  derived and/or modified CDS sequence (opt3) from neuraminidase__InfluenzaA__BAF57563
augaaccccaaucagaagaucauuaccauaggcagcgugucccugacaaucucuacuauuugcuucuuuaugcaaaucgccauucucaucacgaccgucacacuucacuucaaacaguacgaguuuaacucaccuccaaauaaccagguuaugcugugugaaccgacuauaaucgagagaaauauuaccgaaaucguguauuugacaaacaccacuauugagaaggaaaucugccccaaauuagcugaguacaggaauuggaguaagccucagugugacauaacaggguucgcaccauuuagcaaagauaacuccauucggcugucugccggaggugacaucuggguaacccgcgagcccuaugugucgugcgauccugacaaguguuaccaauucgcgcuaggccaggggacgacucucaauaacguccauucaaaugauauugugcacgaccgaaccccauaucguacacugcuuaugaacgaacugggaguucccuuucauuugggcacuaaacaggugugcaucgcuuggagcaguuccucuugucacgaugguaaggccuggcuccaugucugcgugaccggggacgauaagaaugcaacagccagcuucaucuacaacggaagacugguagacuccauuguuucauggaguaaagagauacugaggacccaggaaagcgagugugugugcaucaauggcacguguacugucgugaugacagauggcucugcuuccgggaaggcagacaccaaaauucucuuuaucgaggaaggaaagauagugcacacuucaacauuaagcgguagugcccaacacgucgaggaaugcucuugcuauccucgguacccaggcguucgcugugugugcagagauaacuggaagggguccaacaggccgauuguagacaucaauaucaaagacuacagcauugugucgucuuaugucuguuccggacuggugggcgauacgccccggaagaacgacucaaguagcuccucucauugccuugauccuaauaacgaggaaggugggcacggaguuaaaggcugggcuuucgacgauggcaaugacguguggauggggcgcaccaucagcgagaaguugcgaucaggauacgagaccuuuaaagucauugaagguuggaguaacccaaauuccaagcugcagauaaacagacaggugaucguagauaggggcaaucggagcggguauucuggaauuuucucaguugagggcaaaaguuguaucaaccguugcuuuuacguggaacuaauccgcgguagaaaggaggaaacagagguccucuggacuagcaauuccauuguggucuucugugggaccucuggcacauauggaacuggcucguggcccgacggggccgauauaaaccugaugccuaucuga

SEQ ID NO: 154173 - RNA, 1410 nt, Artificial Sequence; identical to SEQ ID NO: 142760
  derived and/or modified CDS sequence (opt3) from neuraminidase__InfluenzaA__BAF57571

SEQ ID NO: 154174 - RNA, 1410 nt, Artificial Sequence; identical to SEQ ID NO: 149504
  derived and/or modified CDS sequence (opt3) from neuraminidase__InfluenzaA__BAF57575

SEQ ID NO: 154175 - RNA, 1410 nt, Artificial Sequence; identical to SEQ ID NO: 142375
  derived and/or modified CDS sequence (opt3) from neuraminidase__InfluenzaA__BAF57579

SEQ ID NO: 154176 - RNA, 1410 nt, Artificial Sequence
  derived and/or modified CDS sequence (opt3) from neuraminidase__InfluenzaA__BAF57583
augaaccccaaucagaagaucauuaccauaggcagcgugucccugacaaucucuacuauuugcuucuuuaugcagaucgccauucucaucacgaccgucacacuucacuucaaacaguacgaguuuaacucaccuccaaauaaccagguuaugcugugugaaccgacuauaaucgagagaaauauuaccgaaaucguguauuugacaaacaccacuauugagaaggaaaucugccccaaauuagcugaguacaggaauuggaguaagccucaguguaacauaacaggguucgcaccauuuagcaaagacaauuccauucggcugucugccggaggugauauccgcguaacccgagagcccuaugugucgugcgacccugauaaguguuaccaauucgcgcuaggccaggggacgacucucaacaauguccauucaaacgacaccgugcacgaucguacaccauauagaacucugcuuaugaaugaacugggaguucccuuucauuugggcaccaaacaggugugcauugcuuggagcaguuccucuugucacgacgguaaggccuggcuccaugucugcgugacaggggaugacaagaacgcaaccgccagcuucaucuacaauggaaggcugguagauuccaucguuucauggaguaaagagauucugcggacgcaggaaagcgagugugugugcauaaacggcacuuguacagucgugaugaccgacggcucugcuuccgggaaggcagauacuaaaauccucuuuauugaggaaggaaagaucgugcacacaucaaccuuaagcgguagugcccaacacgucgaggaaugcucuugcuauccucgcuacccaggcguuagaugugugugcagggacaacuggaagggguccaaucggccgauaguagauauuaacaucaaagacuacagcaucgugucgucuuaugucuguuccggacuggugggcgacacgccccgcaagaaugauucaaguagcuccucucauugccuugacccuaacaaugaggaaggugggcacggaguuaaaggcugggcuuucgaugacggcaacgauguguggauggggcgaaccauuagcgagaaguugagaucaggauacgagacauuuaaagucaucgaagguuggaguaauccaaacuccaagcugcagauuaauaggcaagugauaguagaccggggcaaccguagcggguauucuggaaucuucucaguugagggcaaaaguuguauuaaucgcugcuuuuacguggaacuaaucagagguaggaaggaggaaacugagguccucuggaccagcaacuccaucguggucuucugugggacaucuggcacuuauggaaccggcucguggcccgauggggccgacauuaaucugaugccuauauga

SEQ ID NO: 154177 - RNA, 1410 nt, Artificial Sequence
  derived and/or modified CDS sequence (opt3) from neuraminidase__InfluenzaA__BAF57587
augaaccccaaucagaagaucauuaccauaggcagcgugucccugacaaucucuacuauuugcuucuuuaugcaaaucgccauucucaucacgaccgucacacuucacuucaaacagugugaguuuaacucaccuccaaauaaccagguuaugcugugcgaaccgacuauaaucgagagaaauauuaccgaaaucguguacuugacaaacaccacuauugagaaggaaaucugucccaaauuagcugaguauaggaauuggaguaagccucagugcaacauaacaggguucgcaccauuuagcaaagacaauuccauucggcugucugccggaggugauaucuggguaacccgcgagcccuacgugucgugugacccugauaagugcuaucaauucgcgcuaggccaggggacgacucucaacaauguccauucaaacgacaccgugcacgaucgaacaccauaccguacucugcuuaugaaugaacugggaguucccuuucauuugggcaccaaacagguguguauugcuuggagcaguuccucuugccacgacgguaaggccuggcuccaugucugugugacaggggaugacaagaacgcaaccgccagcuucaucuauaauggaagacugguagauuccaucguuucauggaguaaagagauucugaggacgcaggaaagcgagugcguguguauaaacggcacuugcacagucgugaugaccgacggcucugcuuccgggaaggcagauacuaaaauccucuuuauugaggaaggaaagaucgugcacacaucaaccuuaagcgguagugcccaacacgucgaggaaugcucuuguuacccucgguauccaggcguucgcugcguguguagagacaacuggaagggguccaauaggccgauaguagauauuaacaucaaagacuacagcaucgugucgucuuacgucugcuccggacuggugggcgacacgccccggaagaaugauucaaguagcuccucucauugucuugacccuaacaaugaggaaggugggcacggaguuaaaggcugggcuuucgaugacggcaacgauguguggauggggcgcaccauuagcgagaaguugcgaucaggauaugagacauuuaaagucaucgaagguuggaguaauccaaacuccaagcugcagauuaauagacaggugauaguagacaggggcaaccggagcggguacucuggaaucuucucaguugagggcaaaaguugcauuaaucguuguuuuuauguggaacuaauccgcgguagaaaggaggaaacugagguccucuggaccagcaacuccaucguggucuucugcgggacaucuggcacuuacggaaccggcucguggcccgauggggccgacauuaaucugaugccuauauga

SEQ ID NO: 154178 - RNA, 1410 nt, Artificial Sequence
  derived and/or modified CDS sequence (opt3) from neuraminidase__InfluenzaA__BAF57591
augaaccccaaucagaagaucauuaccauaggcagcgugucccugacaaucucuacuauuugcuucuuuaugcaaaucgccauucucaucacgaccgucacacuucacuucaaacaguacgaguuuaacucaccuccaaauaaccagguuaugcugugugaaccgacuauaaucgagagaaauauuaccgaaaucguguauuugacaaacaccacuauugagaaggaaaucugccccaaauuagcugaguacaggaauuggaguaagccucagugugacauaacaggguucgcaccauuuagcaaagauaacuccauucggcugucugccggaggugacaucuggguaacccgcgagcccuaugugucgugcgauccugacaaguguuaccaauucgcgcuaggccaggggacgacucucaauaacguccauucaaaugauaccgugcacgaccgaacaccauaucguacucugcuuaugaacgaacugggaguucccuuucauuugggcaccaaacaggugugcauugcuuggagcaguuccucuugucacgaugguaaggccuggcuccaugucugcgugacaggggacgauaagaaugcaaccgccagcuucaucuacaacggaagacugguagacuccaucguuucauggaguaaagagauucugaggacgcaggaaagcgagugugugugcauaaauggcacuuguacagucgugaugaccgauggcucugcuuccgggaaggcagacacuaaaauccucuuuauugaggaaggaaagaucgugcacacaucaaccuuaagcgguagugcccaacacgucgaggaaugcucuugcuauccucgguacccaggcguucgcugugugugcagagauaacuggaagggguccaacaggccgauaguacauauuaauaucaaagacuacagcaucgugucgucuuaugucuguuccggacuggugggcgacacgccccggaagaacgauucaaguagcuccucucacugccuuaauccuaacaaugaggaaggugggcauggaguuaaaggcugggcuuucgacgauggcaacgacguguggauggggcgcaccauuagcgagaaguugcgacugggauacgagacauuuaaagucaucgaagguuggucaaauccaaacaguaagcuacagauuaauagacaggugauaguagauaggggcaaccgguccggguauagcggaaucuucucuguugagggcaaaucauguauuaaucguugcuuuuacguggaacucauccgcgguagaaaggaggaaacugagguccuguggaccaguaacagcaucguggucuucugugggacauccggcacuuauggaaccggcucuuggcccgacggggccgauauuaaucuuaugccuauauga

SEQ ID NO: 154179 - RNA, 1410 nt, Artificial Sequence
  derived and/or modified CDS sequence (opt3) from neuraminidase__InfluenzaA__BAF57595
augaaccccaaucagaagaucauuaccauaggcagcgugucccugacaaucucuacuauuugcuucuuuaugcaaaucgccauucucaucacgaccgucacacuucacuucaaacaguacgaguuuaacucaccuccaaauaaccagguuaugcugugugaaccgacuauaaucgagagaaauauuaccgaaaucguguauuugacaaacaccacuauugagaaggaaaucugccccaaaauagcugaguacaggaauuggaguaagccucaguguaacauuacaggguucgcaccauuuagcaaagacaauuccauccgguuaucugccggaggugauauuuggguaacccgcgagcccuaugugucgugcgacccugauaaguguuaccaauucgcgcugggccaggggacgacucuaaacaauguccauucaaacgacaccgugcacgaucgaacaccauaucguacucuccugaugaaugaacuuggaguucccuuucaucugggcaccaaacaggugugcaucgcuuggagcaguuccucuugucacgacgguaaggccugguugcaugucugcgugacaggggaugacaagaacgcaaccgccagcuucaucuacaauggaagacucguagauuccauuguuucauggaguaaagagauacugaggacgcaggaaagcgagugugugugcgucaacggcacuuguacaguggugaugaccgacggcucugcuuccgggaaggcagauacuaaaauccuguuuauugaggaaggaaagaucguccacacaucaacccucagcgguagugcccaacacguugaggaaugcucuugcuauccucgguacccaggcgugcgcuguguaugcagagacaacuggaagggguccaauaggccgauaguggauauuaacaucaaagacuacagcaucgucucgucuuauguguguuccggauuaguuggcgacacgccccggaagaaugauucaaguagcuccucucauugccuggacccuaacaaugaggaaggugggcacggagugaaaggcugggcuuucgaugacggcaacgaugucuggauggggcgcaccauuagcgagaaacuucgaucaggauacgagacauuuaaggugaucgaagguuggaguaauccaaacuccaaguugcagauuaauagacagguaauaguugacaggggcaaccggagcggguauucuggaaucuucucaguggagggcaaaaguuguauuaaucguugcuuuuacgucgaacugauccgcgguagaaaggaggaaacugaggugcuauggaccagcaacuccaucgucguguucugugggacaucuggcacuuauggaaccggcucguggcccgauggggccgacauuaaucucaugccuauauga

SEQ ID NO: 154180 - RNA, 1410 nt, Artificial Sequence; identical to SEQ ID NO: 149504
  derived and/or modified CDS sequence (opt3) from neuraminidase__InfluenzaA__BAF57599

SEQ ID NO: 154181 - RNA, 1410 nt, Artificial Sequence
  derived and/or modified CDS sequence (opt3) from neuraminidase__InfluenzaA__BAF57603
augaaccccaaucagaagaucauuaccauaggcagcgugucccugacaaucucuacuauuugcuucuuuaugcaaaucgccauucucaucacgaccgucacacuucacuucaaacaguacgaguuuaacucaccuccaaauaaccagguuaugcugugugaaccgacuauaaucgagagaaauauuaccgaaaucguguauuugacaaacaccacuauugagaaggaaaucugccccaaauuagcugaguacaggaauuggaguaagccucaguguaacauaacaggguucgcaccauuuagcaaagacaauuccauucggcugucugccggaggugauaucuggguaacccgcgagcccuaugugucgugcgacccugauaaguguuaccaauucgcgcuaggccaggggacgacucucaacaauguccauucaaacgacaccgugcacgaucgaacaccauaucguacucugcuuaugaaugaacugggaguucccuuucauuugggcaccaaacaggugugcauugcuuggagcaguuccucuugucacgacgguaaggccuggcuccaugucugcgugacaggggaugacaagaacgcaaccgccagcuucaucuacaauggaagacugguagauuccaucguuucauggaguaaagagauucugaggacgcaggaaagcgagugugugugcauaaacggcacuuguacagucgugaugaccgacggcucugcuuccgggaaggcagauacuaaaauccucuuuauugaggaaggaaagaucgugcacacaucaaccuuaagcgguagugcccaacacgucgaggaaugcucuugcuauccucgguacccaggcguucgcugugugugcagagacaacuggaagggguccaauaggccgauaguagauauuaacaucaaagacuacagcaucgugucgucuuaugucuguuccggacuggugggcgacacgccccggaagaaugauucaaguagcuccucucauugccuugacccuaacaaugaggaaggugggcacggaguuaaaggcugggcuuucgaugacggcaacgauguguggauggggcgcaccauuagcgagaaguugcgaucaggauacgagacauuuaaagucaucgaagguuggaguaauccagacuccaagcugcagauuaacagacaggugauaguagauaggggcaaucggagcggguauucuggaaucuucucaguugagggcaaaaguuguauuaaccguugcuuuuacguggaacuaauccgcgguagaaaggaggaaacugagguccucgggaccagcaauuccaucguggucuucuguggcacaucuggaacuuauggcaccgggucguggcccgacggagccgauauuaaccugaugccuauauga

SEQ ID NO: 154182 - RNA, 1410 nt, Artificial Sequence; identical to SEQ ID NO: 149599
  derived and/or modified CDS sequence (opt3) from Neuraminidase__InfluenzaA__BAF62620

SEQ ID NO: 154183 - RNA, 1413 nt, Artificial Sequence
  derived and/or modified CDS sequence (opt3) from neuraminidase__InfluenzaA__BAF63036
augaaccccaaucagaagaucauuaccauaggcagcaucuccauugccaucgggauuaucucucugaugcuccaaauaggaaacaucauuucaaucugggcuagucacagcauucagacagguucccagaaucauacuggcaucugcaaccagagaauaauuacguacgaaaauucuaccugggugaaccacacauaugucacuaucaauaacaccaauguuguggcagggaaagacaagacaucgguaacccuugccggaaacucaagccuguguaguauuuccggcugggcgaucuacacuaaagauaauucuaucaggauugguagcaagggggacguguucgucauacgggagccuuuuaucuccugcucacauuuggagugucgcacauucuuuuuaacccaaggagcucugcuaaacgauaaacacaguaauggcacggugaaggaccgaagcccauaucgugcccucaugucuugcccgcugggcgaagcacccuccccuuacaacucaaaguucgagagcguugccuggagugcuucugcaugucaugaugggaugggauggcuuacuauugguaucuccggcccagacaauggggccguggcuguccugaaauauaacggaauaauuaccgaaacaaucaagagcuggaaaaagagaaucuugaggacucaggagucggagugcguguguguaaacggcucuugcuuuaccauuaugacagauggucccuccaauggggccgcgucauacaaaaucuucaagauugaaaagggaaaaguuaccaagaguauagagcucaacgcaccuaauuuucacuaugaagaguguagcugcuacccagacacgggcacugugaugugugucugccgggauaacuggcacggcuccaaucgccccugggugucuuucaaccagaaucuggacuaccagaucggguauauuugcagcggaguguuuggugauaacccuagaccaaaagacggcaaggggucauguaauccggucacaguugauggagccgacggcgugaaagguuucaguuacaaguaugggaacggcguauggaucggaaggaccaaauccaaucggcugcgcaagggcuuugagaugaucugggaccccaacggguggacugauacagacagcgauuucucugugaagcaagacgucguggcuauuaccgauuggucaggauacagugguagcuuuguucagcauccugaacucacgggcuuagacugcauacgaccauguuucuggguggagcuggucagagggcuucccagggaaaauaccacaaucuggacuuccggaucuucgauuagcuucugcggcgugaacuccgauaccgccaauuggucauggccugacggugcagaguugccauuuacaaucgauaaauga

SEQ ID NO: 154184 - RNA, 1413 nt, Artificial Sequence; identical to SEQ ID NO: 149489
  derived and/or modified CDS sequence (opt3) from neuraminidase__InfluenzaA__BAF63040

SEQ ID NO: 154185 - RNA, 1413 nt, Artificial Sequence
  derived and/or modified CDS sequence (opt3) from neuraminidase__InfluenzaA__BAF63047
augaaccccaaucagaagaucauuaccauaggcagcaucuccauugccaucgggauuaucucucuggugcuccaaauaggaaacaucauuucaaucugggcuagucacagcauucagacagguucccagaaucauacuggcaucugcaaccagagaauaauuacguacgaaaauucuaccugggucaaccacacauauguuaauaucaacaauacuaacgugguagcagggaaagacaagaccucggugacacuugccggaaauucaagccuguguaguauuuccggcugggcgaucuacaccaaagauaacucuaucaggauugguagcaagggggacgucuucgugauacgggagccuuuuaucuccugcucacauuuggagugucgcacuuucuuuuuaacacaaggagcucugcuaaaugauaaacacaguaacggcaccguuaaggaccgaagcccauaucgugcccucaugucuugcccgcugggcgaagcacccuccccuuacaauucaaaguucgagagcguggccuggagugcuucugcaugucaugaugggaugggauggcuuacgauugguaucuccggcccagacaacggggccgucgcugugcugaaauauaacggaauaauuacugaaaccaucaagagcuggaaaaagagaaucuugaggacacaggagucggagugcguauguguuaauggcucuugcuuuacuauuaugaccgauggucccuccaacggggccgcgucauacaaaaucuucaagauugaaaagggaaaagugacaaagaguauagagcucaaugcaccuaacuuucacuaugaagaguguagcugcuacccagacaccggcacggucaugugugugugccgggauaauuggcacggcuccaaccgccccugggugucuuucaaucagaaccuggacuaccagaucggguauauuugcagcggagucuuuggugauaauccuagaccaaaagacggcgaggggucauguaacccgguuacuguggauggagccgacggcguaaaggguuucaguuacaaauaugggaauggcguguggaucggaaggacaaaguccaaccggcugcgcaaaggcuuugaaaugaucugggaccccaauggguggaccgauacugacagcgauuucucugucaagcaagacgugguugcuauuacagauuggucaggauacagugguagcuuugugcagcauccugagcucaccggcuuagacugcauacgaccauguuucugggucgaacuggugagagggcuucccagggagaacacgaccaucuggacauccggaucuucgauuagcuucugcggcguaaauuccgauacugccgacuggucauggccugauggugcagaauugccauuuaccaucgacaaguga

SEQ ID NO: 154186 - RNA, 1413 nt, Artificial Sequence
  derived and/or modified CDS sequence (opt3) from neuraminidase__InfluenzaA__BAF63058
augaaccccaaucagaagaucauuaccauaggcagcaucuccauugccaucgggauuaucucucugaugcuccaaauaggaaacaucauuucaaucugggcuagucacagcauucagacagguucccagaaucauacuggcaucugcaaccagagaauaauuacguacgaaaauucuaccugggugaaccacacauaugucaauaucaacaauacuaacguuguggcagggaaagacaagaccucgguaacacuugccggaaauucaagccugugugcgauuaguggcugggcuaucuacaccaaagauaacuccaucaggauugguucuaagggggacguguucgucauacgggagccuuuuaucagcugcucccauuuggagugucgcacuuucuuuuuaacacaaggagcccugcuaaaugauaaacacucaaacggcaccgugaaggaccgaaguccauaucgugcacucaugagcugcccgcugggcgaagcccccucuccuuacaauuccaaguucgagucaguugcuuggagcgcaagugccugucaugaugggaugggauggcuuacgauugguaucucuggcccagacaacggggcuguggccguccugaaauauaacggaauaauuacugaaaccaucaaguccuggaaaaagagaaucuugaggacacaggagagcgagugcguguguguaaauggcucgugcuuuacuauuaugaccgauggucccucuaacgaagcggcauccuacaaaaucuucaagauugagaaggggaaaguuacaaagucaauagaacucaaugccccuaacuuucacuaugaggaguguaguugcuacccagacaccggaacggugaugugugucugccgggauaauuggcacggcagcaaccgccccuggguguccuucaauccuaaccuggacuaccagaucggcuauauuugcucugggguguuuggagauaauccaagaccgaaagacggugaaggcagcuguaaccccgucacuguugauggggcugacggagugaagggcuucucauacaaauaugguaaugggguauggaucggcaggacaaagaguaaccggcugcgcaaaggauuugagauggugugggacccuaauggcuggaccgauacugacuccgauuucagcgucaagcaggacgugguugccaucacagauuggucuggguacucaggaaguuuugugcaacauccagaacucaccgguuuagacugcauucgacccuguuucugggucgagcuggugagaggccuuccuaaggaaaacacgaccauauggacaagcggguccucuaucucguucugcggaguaaauagcgauacugcaaacugguccuggccagacggcgcugaguugcccuuuaccauugauaaauga

SEQ ID NO: 154187 - RNA, 1413 nt, Artificial Sequence; identical to SEQ ID NO: 149489
  derived and/or modified CDS sequence (opt3) from neuraminidase__InfluenzaA__BAF63065

SEQ ID NO: 154188 - RNA, 1413 nt, Artificial Sequence; identical to SEQ ID NO: 149489
  derived and/or modified CDS sequence (opt3) from neuraminidase__InfluenzaA__BAF63069

SEQ ID NO: 154189 - RNA, 1413 nt, Artificial Sequence; identical to SEQ ID NO: 149489
  derived and/or modified CDS sequence (opt3) from neuraminidase__InfluenzaA__BAF63079

SEQ ID NO: 154190 - RNA, 1413 nt, Artificial Sequence; identical to SEQ ID NO: 149489
  derived and/or modified CDS sequence (opt3) from neuraminidase__InfluenzaA__BAF63092

SEQ ID NO: 154191 - RNA, 1413 nt, Artificial Sequence; identical to SEQ ID NO: 149489
  derived and/or modified CDS sequence (opt3) from neuraminidase__InfluenzaA__BAF63098

SEQ ID NO: 154192 - RNA, 1413 nt, Artificial Sequence
  derived and/or modified CDS sequence (opt3) from neuraminidase__InfluenzaA__BAF63104
augaaccccaaucagaagaucauuaccauaggcagcaucuccauugccaucgggauuaucucucugaugcuccaagugggaauagucguuucaaucugggcuagucacagcauucagacagguucccagaaccauacuggcaucugcaaucagagaauuaucacguacgagaacucuaccugggugaaucacacauauguaaacauaaauaacacuaauguggucgcagggaaagacaagaccucgguggcccuugcgggaaacucaagccuguguaguauuuccggcugggcuaucuacacaaaagauaauucuauuaggaucgguagcaagggggacguuuucgugauccgggaaccuuuuauuuccugcucacauuuggagugucgcaccuucuuuuuaacucaaggagcccugcuaaacgauaaacacaguaauggcacagucaaggaccgaagcccauaucgugcacucaugucuugcccgcugggcgaagcccccuccccuuacaacucaaaguucgagagcguggcuuggagugcaucugccugucaugaugggaugggauggcuuaccauagguaucuccggcccagacaauggggcuguagccguucugaaauauaacggaauuaucacggaaacuauaaagagcuggaaaaagagaauuuugaggacccaggagucggagugcgugugugucaacggcucuugcuuuacaaucaugacugauggucccuccaauggggcggcaucauacaaaaucuucaagauugaaaagggacaggugaccaaaaguguggagcucaacgccccuaauuuucacuaugaagaguguagcugcuacccagacacaggcaccgucauguguguuugccgggauaacuggcacggcuccaaucgccccugggugucuuucaaccagaaucuggacuaccaaaucggguauauuugcagcggaguauuuggugauaacccuagaccaaaggacggcaaagggucauguaauccggugacggucgauggagcugacggcgugaaggguuucaguuacaaauaugggaacggcguuuggauaggaaggacuaaguccaaucggcugcgcaaaggcuuugagaugaucugggaccccaacggguggacagauaccgacagcgauuucucugugaagcaggacgucguggccauuacugauuggucaggauacagugguagcuuuguacagcauccugaacucacaggcuuagacugcauccgaccauguuucuggguugagcuggugagagggcuucccagggaaaauaccacgaucuggaccuccggaucuucgauuagcuucugcggcgucgauuccgacacagcaaacuggucauggccugauggugcugaguugccauuuacuauagacaaguga

SEQ ID NO: 154193 - RNA, 1413 nt, Artificial Sequence
  derived and/or modified CDS sequence (opt3) from neuraminidase__InfluenzaA__BAF63112
augaaccccaaucagaagaucauuaccauaggcagcaucuccauugccaucgggauuaucucucugaugcuccaagugggaaacauaaucucaauuugggcuagucacagcauccagacagguucccagaaucauacuggcauuugcaaccagagaaucauaacguacgagaauagcaccugggucaaccacacauauguuaauauuaacaauacuaacgugguagcagggaaagacaagaccucgguggcccuugcgggaaauucaagccuguguaguaucuccggcugggcuauuuacacaaaagauaacucuaucaggaucgguagcaagggggacgucuucgugauucgggaaccuuuuauauccugcucacauuuggagugucgcaccuucuuuuuaacucaaggagcccugcuaaaugauaaacacaguaacggcacaguuaaggaccgaagcccauaucgugcacucaugucuugcccgcugggcgaagcccccuccccuuacaauucaaaguucgagagcguggcuuggagugcaucugccugucaugaugggaugggauggcuuaccaucgguauuuccggcccagacaacggggcugucgccgugcugaaauauaacggaaucauaacggaaacuauuaagagcuggaaaaagagaaucuugaggacccaggagucggagugcguauguguuaauggcucuugcuuuacaaucaugacugauggucccuccaacggggcggcaucauacaaaauuuucaagaucgaaaagggacaggugaccaaaagugucgagcucaaugccccuaacuuucacuaugaagaguguagcugcuacccagacacaggcaccgugaugugugugugccgggauaauuggcacggcuccaaccgccccugggucucuuucaaucagaaccuggacuaccaaauuggguauauaugcagcggaguuuuuggugauaauccuagaccaaaggacggcaaagggucauguaacccggugacgguagauggagcugacggcgugaaggguuucaguuacaaauaugggaauggcgucuggaucggaaggacuaaguccaaccggcugcgcaaaggcuuugagaugauuugggaccccaauggguggacagauaccgacagcgauuucucugugaagcaggacguuguggccaucacugauuggucaggauacagugguagcuuuguccagcauccugaacucacaggcuuagacugcauccgaccauguuucuggguggagcugguaagagggcuucccagggaaaacaccacgauuuggaccuccggaucuucgauaucuuucugcggcguugauuccgacacagcaaauuggucauggccugauggugcugaguugccauuuacuaucgacaaguga

SEQ ID NO: 154194 - RNA, 1413 nt, Artificial Sequence
  derived and/or modified CDS sequence (opt3) from neuraminidase__InfluenzaA__BAF63116
augaaccccaaucagaagaucauuaccauaggcagcaucuccauugccaucgggauuaucucucugaugcuccaagugggaaacauaaucucaauuugggcuagucacagcauccagacagguucccagaaucauacuggcauuugcaaccagagaaucauaacguacgagaauagcaccugggucaaccacacauauguuaauauuaacaauacuaacgugguagcagggaaagacaagaccucgguggcccuugcgggaaauucaagccuguguaguaucuccggcugggcuauuuacacaaaagauaacucuaucaggaucgguagcaagggggacgucuucgugauucgggaaccuuuuauauccugcucacauuuggagugucgcaccuucuuuuuaacucaaggagcccugcuaaaugauaaacacaguaacggcacaguuaaggaccgaagcccauaucgugcacucaugucuugcccgcugggcgaagcccccuccccuuacaauucaaaguucgagagcguggcuuggagugcaucugccugucaugaugggcuuggauggcugaccaucgguauuuccggcccagacaacggggcugucgccguguugaaauauaacggaaucauaacggaaacuauuaagagcuggaaaaagagaauccucaggacccaggagucggagugcguauguguuaauggcucuugcuuuacaaucaugacugauggucccuccaacggggcggcaucauacaaaauuuucaagaucgaaaagggacaggugaccaaaagugucgagcugaaugccccuaacuuucacuaugaagaguguagcugcuacccagacacaggcaccgugaugugugugugccgggauaauuggcacggcuccaaccgccccugggucucuuucaauccugaccuggauuaccagauuggguauauaugcagcggaguuuuuggugacaacccaagaccgaaggauggcaaagggucauguaaucccgugacgguagacggagcugacggcgugaaggguuucaguuacaaauaugggaacggcgucuggaucggaaggacuaaguccaaucggcuccgcaaaggcuuugagaugauuugggauccuaacggguggacagacaccgauagcgacuucucugugaagcaagauguuguggccaucacugacuggucaggauacagugguagcuuuguccagcauccagaauuaacaggccuggauugcauccgacccuguuucuggguggagcuuguaagaggguugccuagggaaaauaccacgauuuggaccuccggaucuucgauaucuuucugcggcguugacuccgauacagcaaacuggucauggccagacggugcugagcugcccuuuacuaucgauaaguga

SEQ ID NO: 154195 - RNA, 1413 nt, Artificial Sequence
  derived and/or modified CDS sequence (opt3) from neuraminidase__InfluenzaA__BAF63124
augaaccccaaucagaagaucauuaccauaggcagcaucuccauugccaucgggauuaucucucugaugcuccaaauaggaaacaucauuucaaucugggcuagucacagcauucagacagguucccagaaucauacuggcaucugcaaccagagaauaauuacguacgaaaauucuaccugggugaaccacacauaugucaauaucaacaauacuaacguuguggcagggaaagacaagaccucgguaacacuugccggaaauucaagccuguguaguauuuccggcugggcgaucuacaccaaagauaacucuaucaggauugguagcaagggggacguguucgucauacgggagccuuuuaucuccugcucacauuuggagugucgcacuuucuuuuuaacacaaggagcucugcuaaaugauaaacacaguaacggcaccgugaaggaccgaagcccauaucgugcccucaugucuugcccgcugggcgaagcacccuccccuuacaauucaaaguucgagagcguugccuggagugcuucugcaugucaugaugggaugggauggcuuacgauugguaucuccggcccagacaacggggccguggcuguccugaaauauaacggaauaauuacugaaaccaucaagagcuggaaaaagagaaucuugaggacacaggagucggagugcguguguguaaauggcucuugcuuuacuauuaugaccgauggucccuccaacggggccgcgucauacaaaaucuucaagauugaaaagggaaaaguuacaaagagucgggagcucaaugcaccuaacuuucacuaugaagaguguagcugcuacccagacaccggcacggugaugugugucugccgcgauaauuggcacggcuccaacagacccugggugucuuucaauccuaaccuggacuaccagauaggguauaucugcagcggaguggucggugauaauccaaggccgaaagacggcaaggggucauguaaccccguuacugccgauggagcugacggcgugaaagguuuuaguuacaaguaugggaauggcguauggauuggacggacaaaauccaaccgccugcgaaagggcuucgagaugaucugggacccuaauggguggaccgauacugacagcgauuuuucugugaagcaggacgucguggccaucacagauuggucaggauacagugguagcuucguucaacauccagaacucaccggcuuagacugcauuagacccuguuuuuggguggagcuggucagggggcuuccucgggaaaacacgaccauauggacauccggaucuucgaucagcuucugcggcguggauuccgacacugcaaauuggucauggccagauggugcugaguugcccuucaccauugacaaauga

SEQ ID NO: 154196 - RNA, 1413 nt, Artificial Sequence; identical to SEQ ID NO: 149551
  derived and/or modified CDS sequence (opt3) from neuraminidase__InfluenzaA__BAF63132

SEQ ID NO: 154197 - RNA, 1413 nt, Artificial Sequence
  derived and/or modified CDS sequence (opt3) from neuraminidase__InfluenzaA__BAF63136
augaaccccaaucagaagaucauuaccauaggcagcaucuccauugccaucgggauuaucucucugaugcuccaaauaggaaacaucauuucaaucugggcuagucacagcauucagacagguucccagaaucauacuggcaucugcaaccagagaauaauuacguacgaaaauucuaccugggugaaccacacauaugucaauaucaacaauacuaacguuguggcagggaaagacaagaccucgguaacacuugccggaaauucaagccuguguaguauuuccggcugggcgaucuacaccaaagauaacucuaucaggauugguagcaagggggacguguucgucauacgggagccuuuuaucuccugcucacauuuggaguguaaaacuuucuuuuuaacacaaggagcucugcuaaaugauaagcacaguaacggcaccgugaaggaccgcagcccauaucgagcccucaugucuugcccgcugggcgaagcacccuccccuuacaauucaaaauucgagagcguugccuggagugcuucugcaugucaugaugggaugggauggcuuacgauugguaucuccggcccagacaacggggccguggcuguccugaaguauaacggaauaauuacuggcaccaucaaaagcuggaagaaacagaucuugcguacacaggaaucggagugcguguguaugaaugguucuugcuuuacuauuaugaccgaugggcccuccaacggagccgcgucauacaagaucuucaagauugagaaaggcaagguaacaaaaaguauagaacucaaugcaccuaacuuucacuaugaggaauguagcugcuacccagacaccggcacgguuaugugugugugcagagauaauuggcacggguccaacaggcccugggucucuuucaaucagaaccuggacuaccaaaucggauauauuugcagcgguguguuuggcgauaauccucggccaaaggacggggagggaucauguaacccggugacugucgauggcgccaaugguguuaaaggguucaguuacaaguauggcaacggaguguggaucggccgcacaaaauccaauagacugaggaagggguuugagaugaucugggaccccaacggauggaccaauacugacagcgauuucucuguaaagcaggacguggucgcuauuacagauuggucagguuacaguggcagcuuugugcagcauccugaacucaccggguuagacugcauacggccauguuucuggguugagcuggugcgcggacuuccccgagaaaacacgaccaucuggacauccgguucuucgauuagcuucugcggcgucaacuccgauacugccaauuggucauggccugacggggcagaguugccauuuaccaucgauaaauga

SEQ ID NO: 154198 - RNA, 1350 nt, Artificial Sequence
  derived and/or modified CDS sequence (opt3) from neuraminidase__InfluenzaA__BAH24021
augaaccccaaucagaagaucauuaccauaggcagcaucugcauggugauugggaucgucucccugaugcuccaaauuggaaacaugguuucucuuugggugucacacaguauccagacagguaaucagcaucagguagagccuauaagcaacacuaauuuccugacggaaaaagccguggcuuccgucaccuuggcaggcaacucuucguuauguccaaucagagggugggccgugcacucaaaggacaauagcauuaggaucggaaguaaaggcgauguuuuugugauucgggagccguucaucuccugcucucaucuggaaugucgcacauuuuuccuaacucaaggugcgcuccugaacgacaagcacagcaaugggaccgucaaagaucgaagcccccaucguacacuuaugucaugcccugugggagaggcuccaagucccuacaacagcagauuugaaucuguagccugguccgcaucagccugucacgacggcaccagcuggcugacuauaggcauuagugggccugauaauggagcuguugcaguguugaaguauaacgguaugaucacagacaccauuaagucuuggaggaauaacauccuccggacgcaggaguccgagugcgccugugucaauggcagcugcuucacugugaugaccgaugggccaucgaacggacaggcuucuuacaaaaucuuuaagauggaaaaaggcaagguggucaaauccguugagcuggacgcccccaacuaucacuacgaagaguguucaugcuauccugaugcgggugagauuacaugugugugccgcgacaauuggcaugggaguaacagaccauggguauccuucaaucagaaccuggaauaccaaauaggauauaucugcuccggcguguuuggcgauaauccgaggcccaacgggggaacugguucuuguggcccugucagcccaaauggggcauacggagugaagggcuucucauuuaaguacgguaacgggguuuggauuggccggaccaaaagucccuccagccgcucuggauucgagaugaucugggacccuaauggcuggacagaaaccgauucaaguuuuagcgugaagcaggacauagucgccauuacggacugguccggguauucuggaucguucgugcagcacccagagcucacugguuuagauugcauccgacccuguuucuggguagaacugaucagaggcaggccgaaagagagcacaauuuggaccuccgggucaaguaucucuuuuugcggaguuaacagcgacacuguguccuggucauggccugauggcgcugagcuucccuucacaauugacaaguga

SEQ ID NO: 154199 - RNA, 1410 nt, Artificial Sequence; identical to SEQ ID NO: 144941
  derived and/or modified CDS sequence (opt3) from neuraminidase__InfluenzaA__BAH95825

SEQ ID NO: 154200 - RNA, 1410 nt, Artificial Sequence; identical to SEQ ID NO: 144776
  derived and/or modified CDS sequence (opt3) from neuraminidase__InfluenzaA__BAH95826

SEQ ID NO: 154201 - RNA, 1410 nt, Artificial Sequence
  derived and/or modified CDS sequence (opt3) from neuraminidase__InfluenzaA__BAJ07994
augaaccccaaucagaagaucaccacaauuggcagcauaugcauggugaucgggauugucucccugaugcuccaaaucggaaacauuaucucuauauggguuucacacaguauccagacugguaaucagcaucaggccgagccuuguaaccaaagcauuaucacguacgaaaauaacaccugggugaaucagacauauguaaacauuuccaauacuaacuuccuuaccgagaaagcuguggcaucugucacacuggccggcaauucgucauugugcccaaucagcgggugggcgguguacaguaaggacaacggaauaagaauuggcuccaaaggugauguuuuugugaucagggaaccguucauuucuuguagccacuuagagugccggaucuuuuuccugacccagggggcucuacucaaugacaagcauuccaacggaacugucaaagaucgcucaccccaccgaacacugaugaguuguccugugggcgaagccccaagccccuauaauucucguuuugaguccguagcauggucagccagcgcuugccaugacggcaccaguuggcuuacgaucgggauuucuggaccugauaacggugcaguugccgugcugaaguacaacggcauaaucacugacaccauuaaguccuggagaaauaacaucaugaggacacaggagagcgaaugugcuugcgucaaugggucguguuucacugugaugaccgauggaccaucuaacggccaagccuccuauaaaauauuucggauugagaaggguaaaguggucaagucagcggaauugaaugcacccaacuaccacuaugaggagugcaguuguuacccugacgccggggaaaucacaugcguuugccgcgauaauuggcacggaagcaacagaccauggguguccuucaaucagaaccucgaguacaggaucggcuauauuuguucuggcguauuuggggacaauccgcggcccaacgauggaaccgguagcugcggcccugugucaccaaaaggggcuuacggaaucaagggcuucaguuuuaaguaugguaauggggucuggauuggccgcacgaaauccacuaacagccgaucuggauucgaaaugauaugggaccccaauggcuggacagggaccgauucaaacuuuagugugaagcaggacaucguugccauuacugacuggagcggauacuccgguucuuucgugcagcauccugagcugacaggccuggauuguaucagaccaugcuucugggucgaacucaucagggggcggcccaaagagucgaccauuuggacgagcggauccucaauaaguuuuuguggcgugaacucugacaccguagguuggagcuggccggauggggcagaguuaccuuucacaaucgacaaguga

SEQ ID NO: 154202 - RNA, 1350 nt, Artificial Sequence
  derived and/or modified CDS sequence (opt3) from neuraminidase__InfluenzaA__BAK23415
augaaccccaaucagaagaucauuaccauaggcagcgugugcaugaucauugggaucgucucccugaugcuccaaauuggaaacaugaucucuauauggguuggucacucaauccagacaggcaaucagugucaugccgagccuauuaguaacacuaaauucccaacggaaaaggcugcagccagcgugacccuugcgggaaauuccucucugugcccgaucucggggugggcuguauacucaaaagacaacagcauuagaaucggcaguaggggugauguguuugucauacgggagcccuucauuuccuguucucacuuggaaugccgcacauuuuucuuaacucagggggcccugcuaaaugacaagcauagcaacggaaccgugaaagaucgauccccucaccguacacucaugucauguccaguuggcgaggcacccaguccuuauaauagcagauuugaaucuguggccugguccgcuucagcaugccaugacggcaccagcuggcugacuaucgggauuaguggaccagauaacggugccgucgcugugcuuaaguacaauggcaucaucacagacaccauuaagucuuggaggaacaauauacugcggacgcaagaguccgagugugccugcaucaacgggagcuguuucacuguaaugaccgauggacccucgucuggccaggcguccuauaaaauuuuuaagauggaaaaagguaagguugugaaaucagucgaguuggacgcaccuaauuaccacuaugaagagugcaguuguuacccagaugccggggagaucacaugcgugugccgcgacaacuggcacggaagcaacagaccguggguguccuucaaucagaaccucgaauaucagauaggcuacauuuguucuggcgucuuuggggauaaucccaggccuaacgacggaacugguagcugcggcccaguuucacccaauggggcuuacggagugaagggcuucaguuuuaaguaugguaacgggguauggaucggccggaccaaauccacaaauagccgcucuggauucgagaugaucugggauccuaacggcuggaccgggacggacucaaguuuuagcgugaagcaagacauugucgccaucacugauugguccggauacucugguucguucgugcagcauccagaacugacaggccuggacuguauucgacccugcuucuggguugagcucauaagagggaggccgaaagaaagcaccaucuggacuuccggaucaaguauuucuuuuuguggcgugaauagcgauacagucuccuggucauggccugacggugcagaguuacccuucaccaucgauaaguga

SEQ ID NO: 154203 - RNA, 1350 nt, Artificial Sequence
  derived and/or modified CDS sequence (opt3) from neuraminidase__InfluenzaA__BAK23416
augaaccccaaucagaagaucauuaccauaggcagcaucugcauggugauugggaucgucucccugaugcuccaaauuggaaacaugaucucuauauggguuucacacaguauccagacagguaaucagugucaggccgagccuauuagcaacacuaaauuccuuacggaaaaggcuguggcauccguaacccuggccggcaauucuucguugugcccaaucucagggugggcgguguacagcaaagacaacaguauuagaaucggauccaggggcgaugucuuugugauacgggagccguucauuucuuguagccauuuagaaugccgcacauuuuuccugacucaaggugcucuacucaaugacaagcacuccaacgggaccguuaaagaucgaucaccccaucguacacugaugaguuguccugugggagaggccccaagccccuauaauucuagauuugaauccgucgcauggucagccagcgcuugccacgacggcaccaguuggcuuacuaucggcauuucugggccugauaacggagcaguggccguacugaaguacaaugguaucaucacagacaccauuaaguccuggaggaacaauauauugcggacgcaggagagcgagugugcuugcguuaacggcucguguuucacugugaugaccgaugggccaucuuccggacaggccucauauaaaaucuuuaagauggaaaaaggcaaggucgugaaaaguguggagcucgacgcgcccaauuaccauuaugaagagugcagcuguuacccugaugcaggagagauuacaugcgucugccgcgacaacuggcacggguccaacagaccauggguuucuuucaaucagaaccuggaauaucaaaucggauacauauguagcggcguguuuggcgauaauccgaggcccaacgacgggacuggaucaugcgguccugccaguccaaauggcgcuuacgggguaaagggauucuccuuuaaguauggcaacgguguguggauugggcggaccaaaagcacaaauucucgcucaggcuucgagaugaucugggaucccaacggauggaccggcacggacaguagcuuuuccgucaagcaggacaucguggccauuacugauuggucuggguacucggguagcuucguucagcacccugaacugacaggucucgacuguauccgaccaugcuucuggguggaguuaauuagaggcaggcccaaagaauccaccauauggacuucagggaguucuaucagcuuuuguggagucaauuccgauacagugucauggagcuggccggacggcgcagagcugccuuucaccauugauaaguga

SEQ ID NO: 154204 - RNA, 1350 nt, Artificial Sequence
  derived and/or modified CDS sequence (opt3) from neuraminidase__InfluenzaA__BAK23417
augaaccccaaucagaagaucauuaccauaggcagcaucugcauggugauugggaucgucucccugaugcuccaaauuggaaacaugaucucuauauggguuucacacaguauccagacagguaaucagugucagagcgagccuauuuccaacacuaaauuccuuacggaaaaggccguggcuucuguaacccuggcaggcaauucgucauugugcccaaucagcgggugggccguguacaguaaagacaacuccauuagaaucggaucuaggggcgaugucuuugugauacgggagccguucauuagcuguucccauuuagaaugccgcacauuuuuccugacucaaggugcgcuacucaaugacaagcacucaaacgggaccguuaaagaucgaaguccccaucguacacugaugagcuguccugugggagaggcuccaucucccuauaauuccagauuugaaucagucgccuggagcgcaagugccugccacgacggcaucucuuggcuuaccauuggcaucuccgggccugauaacggagcuguggcaguacugaaguacaaugguaucauuacugacacaauaaagagcuggaggaacaauaucuugcggacccaggagucggagugugccugcguuaacggcucuuguuucacggugaugacugaugggccauccucaggacaggcuaguuauaaaauuuuuaagauggaaaaaggcaaggucgugaaaagcguggagcucgacgcccccaauuaccauuaugaagagugcuccuguuacccugaugcgggugagauaaccugcgucugccgcgacaacuggcacgggucuaacagaccauggguuagcuucaaucagaaccuggaauaucaaaucggauacauuuguucaggcguguuuggcgauaauccgaggcccaacgacgggacaggaaguugcgguccuguauccccaaauggcgcauacggggugaagggauucagcuuuaaguauggcaacggugucuggaucgggcggacuaaaucuaccaauucacgcaguggcuucgagaugaucugggaucccaacggauggacaggcaccgacagcuccuuuucugugaagcaggacauuguugccaucacggauuggucgggguacagcggauccuucgugcagcacccugaacugacuggucucgacuguauucgaccaugcuucugggucgaguuaauaagaggcaggcccaaagaaucaacaaucuggaccagugggucuagcauuuccuuuuguggagugaauggcgauacuguaucauggagcuggccggacggugcugagcugccuuucacaaucgauaaguga

SEQ ID NO: 154205 - RNA, 1350 nt, Artificial Sequence
  derived and/or modified CDS sequence (opt3) from neuraminidase__InfluenzaA__BAK23418
augaaccccaaucagaccaucauuacaauaggcagcaucugcauggugauugggaucgucucccugaugcuccaaauuggaaacaugaucucuauauggguuucacacaguauccagacugguaaucagugucaggccgagccuauuagcaacacgaaguuccuuaccgaaaaagcuguggcauccguaacacuggccggcaauucuucguugugcccaaucucagggugggcgguguacagcaaggacaacaguauuagaaucggauccaggggcgaugucuuugugauacgggagccguucauuucuuguagccauuuagaaugccgcaccuuuuuccugacucaaggugcucuacucaaugacaaacacuccaacgggacaguuaaggaucgaucaccccaucguacccugaugaguuguccugugggagaggccccaagccccuauaauucuagauuugaauccgucgcauggucagccagcgcuugccacgacggcacuuccuggcuuacaaucggcauuucugggccugauaacggagcaguggccguacugaaauacaaugguaucaucaccgacacgauuaaguccuggaggaacaauauauugcggacucaggagagcgagugugcuugcguuaacggcucguguuucaccgugaugacagaugggccaucuuccggacaggccucauauaagaucuuuaaaauggaaaagggcaaagucgugaagaguguggagcucgacgcgcccaauuaccauuaugaagagugcagcuguuacccugaugcaggagagauuacuugcgucugccgcgacaacuggcacggguccaacagaccauggguuucuuucaaucagaaccuggaauaucaaaucggauacauauguagcggcguguuuggcgauaauccgaggcccaacgacgggaccggaucaugcgguccuguaaguccaaauggcgccuacggggugaaaggauucuccuuuaaguauggcaacggugucuggauugggcggacaaagagcaccaauucucgcucaggcuucgagaugaucugggaucccaacggauggacgggcacugacaguagcuuuuccgugaaacaggacaucguugcuauuacagauuggucuggguacucggguagcuucgugcagcacccugaacugaccggucucgacuguauccgaccaugcuucugggucgaguuaauuagaggcaggcccaaggaauccacuauauggacaucagggaguucuaucagcuuuuguggagugaauagugauaccguaucauggagcuggccggacggcgccgagcugccuuucacgauugauaaauga

SEQ ID NO: 154206 - RNA, 1350 nt, Artificial Sequence; identical to SEQ ID NO: 144625
  derived and/or modified CDS sequence (opt3) from neuraminidase__InfluenzaA__BAK23420

SEQ ID NO: 154207 - RNA, 1350 nt, Artificial Sequence; identical to SEQ ID NO: 144625
  derived and/or modified CDS sequence (opt3) from neuraminidase__InfluenzaA__BAK23421

SEQ ID NO: 154208 - RNA, 1350 nt, Artificial Sequence
  derived and/or modified CDS sequence (opt3) from neuraminidase__InfluenzaA__BAK23422
augaaccccaaucagaagaucauuaccauaggcagcgugugcauggucaucgggauuguuucccugaugcuccaaaucggaaacaugauuucuaucugggugggucacucaauacagacaggcaaucagugucaugccgagccuaucaguaacacuaaauucccaacggaaaaggcugcagccagcguaacccuugcgggaaauuccucucugugcccgauuucggggugggcuguguacucaaaagacaacagcaucagaauuggcaguaggggugaugucuuugugauccgggagcccuucauauccuguucucacuuggaaugccgcacauuuuucuuaacucagggggcccugcuaaaugacaagcauagcaacggaaccguuaaagaucgauccccucaccguacacucaugucauguccagugggcgaggcacccaguccuuauaauagcagauuugaaucugucgccugguccgcuucagcaugccaugacggcaccagcuggcugacuauugggaucaguggaccagauaacggugccguggcuguacuuaaguacaauggcauuaucacagacaccaucaagucuuggaggaacaauauucugcggacgcaagaguccgagugugccugcguuaacgggagcuguuucacugugaugaccgauggacccucgucuggccaggcguccuauaaaauauuuaagauggaaaaagguaaggucgugaaaucaguggaguuggacgcaccuaauuaccacuaugaagagugcaguuguuacccagaugccggggagaucacaugcgucugccgcgacaacuggcacggaagcaacagaccguggguuuccuucaaucagaaccucgaauaucagauuggcuacaucuguucuggcguguuuggggauaaucccaggccuaacgacggaacugguagcugcggcccaguaucacccaauggggcuuacggagugaagggcuucaguuuuaaguaugguaacggggucuggauaggccggaccaaauccacaaauagccgcucuggauucgagaugauuugggauccuaacggcuggaccgggacggacucaaguuuuagcgugaagcaagacaucguugccaucacugauugguccggauacucugguucguucgugcagcauccagaacugacaggccuggacuguauucgacccugcuucugggucgagcucaucagagggaggccgaaagaaagcaccauuuggacuuccggaucaaguauaucuuuuuguggcgugaauagcgauacaguauccuggucauggccugacggugcagaguuacccuucaccaucgauaaguga

SEQ ID NO: 154209 - RNA, 1350 nt, Artificial Sequence
  derived and/or modified CDS sequence (opt3) from neuraminidase__InfluenzaA__BAK23423
augaaccccaaucagaagaucauuaccauaggcagcaucugcauggugauugggaucgucucccugaugcuccaaauuggaaacaugaucucuauauggguuucacacaguauccagacagguaaucagugucaggccgagccuauuagcacuacgaaauuccuuaccgaaaaggcuguggcauccguaacacuggccggcaacucuucguugugcccaaucucagggugggcgguguacagcaaagacaauaguauuagaaucggaccgaggggcgaugucuuugugauacgggagcccuucauuuccuguucucauuuagaaugccgcaccuuuuuccugacucaaggugcucuacucaacgacaagcacagcaaugggacaguuaaagaucgauccccucaucguacccugaugucauguccagugggagaggcccccaguccuuauaacagcagauuugaaucugucgcaugguccgccucagcuugccacgacggcaucagcuggcuuacuauuggcaucagugggccagauaauggagcaguggccguacugaaguacaacgguaucauuacagacaccauaaagucuuggaggaauaacaucuugcggacgcaggaguccgagugugcuugcguuaauggcagcuguuucacugugaugaccgaugggcccucgucuggacaggccuccuauaaaauuuuuaagauggaaaaaggcaaggucgugaaaucaguggagcucgacgcgccuaacuaccauuaugaagagugcaguuguuacccagaugccggugagaucacaugcgucugccgcgacaauuggcacgggagcaacagaccguggguuuccuucaaccagaaucuggaauaucaaauaggauacauuuguucuggcguguuuggcgauaaccccaggccuaaugacgggacuggaagcugcgguccaguaucacccaacggcgcauacggggugaagggauucaguuuuaaguauggcaauggugucuggaucgggcggaccaaauccacaaacagccgcucuggcuucgagaugaucugggauccuaauggauggaccggcacggacucaaguuuuagcgugaagcaggacauuguugcuaucacugauugguccggguacucuggaucguucgugcagcacccagaacugacaggucucgacuguauucgacccugcuucugggucgaguuaauaagaggcaggccgaaagaaagcaccaucuggacuuccgggucaaguauuucuuuuuguggagugaacagcgauacaguauccuggucauggccugacggcgccgagcugcccuucaccaucgauaaguga

SEQ ID NO: 154210 - RNA, 1350 nt, Artificial Sequence
  derived and/or modified CDS sequence (opt3) from neuraminidase__InfluenzaA__BAK23424
augaaccccaaucagaagaucauuaccauaggcagcaucugcauggugauugggaucgucucccugaugcuccaaauuggaaacaugaucucuauauggguuucacacaguauccagacagguaaucagugucagggcgagccuauuagcaacacuaaauuccuuacggaaaaggccguggcuuccguaacccuggcaggaaauucuucguugugcccaaucucagggugggccguguacagcaaagacaacaguauuagaaucggcuccaggggugaugucuuugugauacgggagccguucauuucuuguagccauuuagaaugccgcacauuuuuccugacucaaggggcgcuacucaaugacaagcacuccaacggaaccguuaaagaucgaucaccccaucguacacugaugaguuguccugugggcgaggcuccaagccccuauaauucuagauuugaauccgucgccuggucagcaagcgccugccacgacggcaccaguuggcuuacuaucgggauuucuggaccugauaacggugcuguggcaguacugaaguacaauggcaucaucacagacaccauuaaguccuggaggaacaauauauugcggacgcaggagagcgagugugccugcguuaacgggucguguuucacugugaugaccgauggaccaucuuccggccaggcuucauauaaaaucuuuaagauggaaaaagguaaggucgugaaaaguguggagcucgacgcccccaauuaccauuaugaagagugcagcuguuacccugaugcgggggagauuacaugcgucugccgcgacaacuggcacggauccaacagaccauggguuucuuucaaucagaaccuggaauaucaaaucggcuacauauguagcggcguguuuggggauaauccgaggcccaacgacggaacugguucaugcggcccuguauucaguaauggggcauacggagugaagggcuuuuccuucaaguaugguaacggggucuggauuggccggaccaaaagcacaaauucucgcucaggauuugagaugaucugggauccaaacggcuggaccgggacggacaguagcuucuccggaaagcaggacaucguggccauuacugauuggucugguuacucgggcagcuucguucagcaccccgaacugacagggcucgacuguauccgaccuugcuuuuggguggaguuaauuagaggaaggccaaaagaauccaccauauggacuucaggcaguucuaucagcuucuguggugucaauuccgauacagugucauggagcuggcccgacggggcugagcugccguuuaccauugauaaguga

SEQ ID NO: 154211 - RNA, 1350 nt, Artificial Sequence
  derived and/or modified CDS sequence (opt3) from neuraminidase__InfluenzaA__BAK23425
augaaccccaaucagaagaucauuaccauaggcagcaucugcauggugauugggaucgucucccugaugcuccaaauuggaaacaugaucucuauauggguuucacacaguauccagacagguaaucagugucaggccgagccuauuagcaacacuaaauuccuuacggaaaaggcuguggcauccguaacccuggccggcaauucuucguugugcccaaucucagggugggcgguguacagcaaagacaacaguauuagaaucggauccaggggcgaugucuuugugauacgggagccguucauuucuuguagccauuuagaaugccgcacauuuuuccugacucaaggugcucuacucaaugacaagcacuccaacgggaccguuaaagaucgaucaccccaucguacacugaugaguuguccugugggagaggccccaagccccuauaauucuagauuugaauccgucgcauggucagccagcgcuugccacgacggcaucaguuggcuuaccauuggcaucucugggccugauaacggagcaguggccguacugaaguacaaugguaucauuacugacacaauaaaguccuggaggaacaauaucuugcggacccaggagagcgagugugcuugcguuaacggcucguguuucacggugaugacugaugggccaucuuccggacaggccucauauaaaauuuuuaagauggaaaaaggcaaggucgugaaaaguguggagcucgacgcgcccaauuaccauuaugaagagugcagcuguuacccugaugccggugagauaaccugcgucugccgcgacaacuggcacggguccaacagaccauggguuucuuucaaucagaaccuggaauaucaaaucggauacauuuguagcggcguguuuggcgauaauccgaggcccaacgacgggacaggaucaugcgguccuguaaguccaaauggcgcauacggggugaagggauucuccuuuaaguauggcaacggugucuggaucgggcggacuaaaagcaccaauucucgcucaggcuucgagaugaucugggaucccaacggauggauuggcacagacaguagcuuuuccgugaagcaggacaucguugcuauuaccgauuggucuggguacucgggauccuucgugcagcacccugaacugacgggucucgacuguauacgaccaugcuucugggucgaguuaaucagaggcaggcccaaagaauccacuauuuggacaucagggaguucuaucagcuuuuguggagugaauagcgauaccguaucauggagcuggccggacggcgccgagcugccuuucacuaucgauaaguga

SEQ ID NO: 154212 - RNA, 1350 nt, Artificial Sequence
  derived and/or modified CDS sequence (opt3) from neuraminidase__InfluenzaA__BAK23426
augaaccccaaucagaagaucauuaccauaggcagcaucugcauggugauugggaucgucucccugaugcuccaaauuggaaacaugaucucuauauggguuucacacaguauccagacagguaaucagugucaggccgagccuauuagcaacacuaaauucuuuacggaaaaggcuguggcauccguaacccuugccggcaauucuucgcugugcccaaucucagggugggcgguguacagcaaagacaacaguauuagaaucggauccaggggcgaugucuucauaauucgggagccguuuaucucuuguagccauuuggaaugccgcacauucuuuuuaacucaaggugcucugcuaaaugacaagcacuccaacgggaccgugaaagaucgaucaccccaucguacacucaugaguuguccuguuggagaggccccaagccccuauaauucuagauucgaauccguggcauggucagccagcgcuugccacgacggcaccaguuggcugacuauuggcaucucugggccugauaacggagcagucgccgugcuuaaguacaaugguaucauuacagacaccauaaaguccuggaggaacaauauccugcggacgcaggagagcgagugugcuugcguaaacggcucguguuuuacuguuaugaccgaugggccaucuuccggacaggccucauauaaaauuuucaagauggaaaaaggcaagguggucaaaaguguggaguuggacgcgcccaauuaccauuaugaagagugcagcuguuacccugaugcaggagagaucacaugcgugugccgcgacaacuggcacggguccaacagaccaugggucucuuuuaaucagaaccucgaauaucaaauaggauacauuuguagcggcguuuucggcgauaauccgaggcccaacgacgggacuggaucaugcgguccugugaguccaaauggcgccuacgggguaaagggauuuuccuucaaguauggcaacgguguguggaucgggcggaccaaaagcacaaauucucgcucaggcuuugagaugaucugggaucccaacggauggaccggcacggacaguagcuucuccgucaagcaggacauuguggcuaucacugauuggucuggguacucggguagcuucguucagcacccugaacugacaggucuggacuguauucgaccaugcuuuuggguggagcucauaagaggcaggcccaaagaauccaccaucuggacuucagggaguucuauuagcuucuguggagucaauuccgauacagugucauggagcuggccggacggcgccgaguuaccuuuuaccaucgauaaguga

SEQ ID NO: 154213 - RNA, 1350 nt, Artificial Sequence; identical to SEQ ID NO: 154211
  derived and/or modified CDS sequence (opt3) from neuraminidase__InfluenzaA__BAK23427

SEQ ID NO: 154214 - RNA, 1350 nt, Artificial Sequence
  derived and/or modified CDS sequence (opt3) from neuraminidase__InfluenzaA__BAK23428
augaaccccaaucagaagaucauuaccauaggcagcaucugcauggugauugggaucgucucccugaugcuccaaauuggaaacaugaucucuauauggguuucacacaguauccagacagguaaucagugucaggccgagccuauuagcaacacuaaauuccuuacggaaaaggcuguggcauccguaacccuggccggcaauucuucguugugcccaaucucagggugggcgguguacagcaaagacaacaguauuagaaucggauccaggggcgaugucuuugugauacgggagccguucauuucuuguagccauuuagaaugccgcacauuuuuccugacucaaggugcucuacucaaugacaagcacuccaacgggaccguuaaagaucgaucaccccaucguacacugaugaguuguccugugggagaggccccaagccccuauaauucuagauuugaauccgucgcauggucagccagcgcuugccacgacggcaccaguuggcuuacuaucggcauuucugggccugauaacggagcaguggccguacugaaguacaaugguaucaucacagacaccauuaaguccuggaggaacaauauauugcggacgcaggagagcgagugugcuugcguuaacggcucguguuucacugugaugaccgaugggccaucuuccggacaggccucauauaaaaucuuuaagauggaaaaaggcaaggucgugaaaaguguggagcucgacgcgcccaauuaccauuaugaagagugcagcuguuacccugaugcaggagagauuacaugcgucugccgcgacaacuggcacggguccaacagaccauggguuucuuucaaucagaaccuggaauaucaaaucggauacauauguagcggcguguuuggcgauaauccgaggcccaacgacgggacuggaucaugcgguccuguaaguccaaauggcgccuacggggugaagggauucuccuuuaaguauggcaacggugucuggauugggcggaccaaaagcacaaauucucgcucaggcuucgagaugaucugggaucccaacggauggaccggcacggacaguagcguguccguuaagcaggacaucguggcuauuacugauuggucuggguacucggguagcuuuguccagcacccugaacugacaggucucgacuguauccgaccaugcuucagaguggaguuaauuaggggccggcccaaagaauccaccauauggacuucagggaguucuaucagcuucuguggaguaaauuccgauacaguuucauggagcuggccggacggcgccgagcugccuuuuaccauugauaaguga

SEQ ID NO: 154215 - RNA, 1350 nt, Artificial Sequence; identical to SEQ ID NO: 154211
  derived and/or modified CDS sequence (opt3) from neuraminidase__InfluenzaA__BAK23429

SEQ ID NO: 154216 - RNA, 1350 nt, Artificial Sequence
  derived and/or modified CDS sequence (opt3) from neuraminidase__InfluenzaA__BAK23430
augaaccccaaucagaagaucauuaccauaggcagcaucugcauggugauugggaucgucucccugaugcuccaaauuggaaacaugaucucuauauggguuucacacaguauccagacagguaaucagugucaggccgagccuauuagcaacacuaaauuccuuacggaaaaggcuguggcauccguaacccuggccggcaauucuucguugugcccaaucucagggugggcgguguacagcaaagacaacaguauuagaaucggauccaggggcgaugucuuugugauacgggagccguucauuucuuguagccauuuagaaugccgcacauuuuuccugacucaaggugcucuacucaaugacaagcacuccaacgggaccguuaaagaucgaucaccccaucguacacugaugaguuguccugugggagaggccccaagccccuauaauucuagauuugaauccgucgcauggucagccagcgcuugccacgacggcaucaguuggcuuaccauuggcaucucugggccugauaacggagcaguggccguacugaaguacaaugguaucauuacugacacaauaaaguccuggaggaacaauaucuugcggacccaggagagcgagugugcuugcguuaacggcucguguuucacggugaugacugaugggccaucuuccggacaggccucauauaaaauuuuuaagauggaaaaaggcaaggucgugaaaaguguggagcucgacgcgcccaauuaccauuaugaagagugcagcuguuacccugaugccggugagauaaccugcgucugccgcgacaacuggcacggguccaacagaccauggguuucuuucaaucagaaccuggaauaucaaaucggauacauuuguagcggcguguuuggcgauaauccgaggcccaacgacgggacaggaucaugcgguccuguaaguccaaauggcgcauacggggugaagggauucuccuuuaaguauggcaacggugucuggaucgggcggacuaaaagcaccaauucucgcucaggcuucgagaugaucugggaucccaacggauggauuggcacagacaguagcuuuuccgugaagcaggacaucguugcuauuaccgauuggucuggguacucgggauccuucgugcagcacccugaacugacgggucucgacuguaugcgaccaugcuucugggucgaguuaauaagaggcaggcccaaagaauccacuaucuggacaucagggaguucuauuagcuuuuguggagugaauagcgauaccguaucauggagcuggccggacggcgccgagcugccuuucacuaucgauaaguga

SEQ ID NO: 154217 - RNA, 1350 nt, Artificial Sequence
  derived and/or modified CDS sequence (opt3) from neuraminidase__InfluenzaA__BAK23431
augaaccccaaucagaagaucauuaccauaggcagcaucugcauggugauugggaucgucucccugaugcuccaaauuggaaacaugaucucuauauggguuucacacaguauccagacagguaaucagugucaggccgagccuauuagcaacacuaaauuccuuacggaaaaggcuguggcauccguaacccuggccggcaauucuucguugugcccaaucucagggugggcgguguacagcaaagacaacaguauuagaaucggauccaggggcgaugucuuugugauacgggagccguucauuucuuguagccauuuagaaugccgcacauuuuuccugacucaaggugcucuacucaaugacaagcacuccaacgggaccguuaaagaucgaucaccccaucguacacugaugaguuguccugugggagaggccccaagccccuauaauucuagauuugaauccgucgcauggucagccagcgcuugccacgacggcaccaguuggcuuacuaucggcauuucugggccugauaacggagcaguggccguacugaaguacaaugguaucaucacagacaccauuaaguccuggaggaacaauauauugcggacgcaggagagcgagugugcuugcguuaacggcucguguuucacugugaugaccgaugggccaucuuccggacaggccucauauaaaaucuuuaagauggaaaaaggcaaggucgugaaaaguguggagcucgacgcgcccaauuaccauuaugaagagugcagcuguuacccugaugccggugagauuacaugcgucugccgcgacaacuggcacggguccaacagaccauggguuucuuucaaucagaaccuggaauaucaaaucggauacauauguagcggcguguuuggcgauaauccgaggcccaacgacgggacuggaucaugcgguccuguaaguccaaauggcgcauacggggugaagggauucuccuuuaaguauggcaacggugucuggauugggcggaccaaaagcacaaauucucgcucaggcuucgagaugaucuggggacccaacggcuggaccgggacggauaguagcuuuuccgugaagcaggacaucguugcuauuacugacuggucuggauacucggguagcuucgugcagcacccugaacugacaggccucgauuguauccgaccaugcuucugggucgaguuaauuagagggaggcccaaagaauccaccauauggacuucaggaaguucuaucagcuuuuguggcguaaauuccgacacagugucauggagcuggccggauggugccgagcugccuuucaccauugacaaguga

SEQ ID NO: 154218 - RNA, 1350 nt, Artificial Sequence; identical to SEQ ID NO: 154211
  derived and/or modified CDS sequence (opt3) from neuraminidase__InfluenzaA__BAK23432

SEQ ID NO: 154219 - RNA, 1350 nt, Artificial Sequence; identical to SEQ ID NO: 154211
  derived and/or modified CDS sequence (opt3) from neuraminidase__InfluenzaA__BAK23433

SEQ ID NO: 154220 - RNA, 1410 nt, Artificial Sequence
  derived and/or modified CDS sequence (opt3) from neuraminidase__InfluenzaA__BAM65748
augaaccccaaucagaagaucauuaccauaggcagcgugucccugacaaucucuacuauuugcuucuuuaugcaaaucgccauucucaucacgaccgucacacuucacuucaaacaguacgaguuuaacucaccuccaaauaaccagguuaugcugugugaaccgacuauaaucgagagaaauauuaccgaaaucguguauuugacaaacaccacuauugagaaggaaaucugccccaaauuagcugaguacaggaauuggaguaagccucagugugacauaacaggguucgcaccauuuagcaaagauaacuccauucggcugucugccggaggugacaucuggguaacccgcgagcccuaugugucgugcgauccugacaaguguuuccaauuugcgcuaggccaggggacgacucucaauaacguccauucaaaugauaccgugcacgaccgaacaccauaccguacucugcuuaugaacgaacugggaguucccuuccauuugggcaccaaacaggugugcauugcuuggagcaguuccucuugucacgaugguaaggccuggcuccaugucugcgugacaggggacgauaagaaugcaaccgccagcuuuaucuauaacggaagacugguagacuccaucguuucauggaguaaaaagauucugaggacgcaggagagcgaaugugugugcauaaauggcacuuguacagucgugaugaccgauggcucugcuuccgggaaagcagacacuaagauccucuucauugaggagggaaagaucgugcacacaucaaccuuaagcgguagugcccaacacgucgaagagugcucuugcuacccucgguauccaggcguucgcugugugugcagagauaacuggaaaggguccaacaggccgauaguagacauuaauaucaaggacuacagcaucgugucgucuuacgucuguuccggacuggugggcgauacgccccggaaaaccgacucaaguagcuccucucauugccuugauccuaacaaugaagagggugggcacggaguuaagggcugggcuuuugacgauggcaacgacguguggauggggcgcacaauuagcgaaaaaucacgauugggauaugagacuuucaaggucaucgguggcuggaguaauccaaacuccaaaagccagauuaauagacaggugauaguagauauggggaacaggucuggauacucaggcaucuuuaguguugaggguaagagcuguauuaaucggugcuucuauguggaacugauccgugggcgcaaggacgagaccgaaguccuauggacauccaacucuaucguggucuucuguggcacuucgggaaccuacggcacagggagcuggcccgauggagccgacauuaaacucauguccauauga

SEQ ID NO: 154221 - RNA, 1350 nt, Artificial Sequence
  derived and/or modified CDS sequence (opt3) from neuraminidase__InfluenzaA__BAM85817
augaaccccaaucagaagaucauuaccauaggcagcaucugcauggugacagggauugucucccugaugcuccaaaucggaaacaugauuucuaucuggguuucacacaguauacauacugguaaucagcaccagagcgagccuaucuccaacacgaauuuccuuaccgaaaaagccguggcuucuguaaagcuggcaggcaacucgucauuguguccaauuaaugggugggccguguacagcaaagacaacaguaucagaauuggauccaagggcgaugucuuugugaucagggagccguucauaucuugcagccauuuagaaugucggacauuuuuccugacucagggugcgcuacucaaugacaaacacuccaacgggaccguuaaggaucgcucaccccaucgaacacugaugaguugcccugugggagaggcuccaagccccuauaauucucguuuugaauccgucgccuggucagcaagcgccugucacgacggcaccaguuggcuuacuauuggcaucucugggccugauaacggagcuguggcaguacugaaguacaaugguauuaucacagacaccaucaaauccuggagaaacaauauuuugaggacgcaagagagcgagugcgccuguguuaacggcucgugcuucacugugaugaccgaugggccaucuaacggacaggcuucccacaagauauuuaaaauggaaaagggcaaagucgugaagucaguggagcucgacgcccccaauuaucauuacgaagaguguaguugcuauccuaacgcgggugagaucacaugugucugccgggauaauuggcacgggagcaaccgcccauggguuuccuucaaucagaaccuggaauaccagauuggauauaucugcucuggcguguuuggcgacaauccgagacccaacgaugggacuggaagcugugguccuguaucaaguaauggcgcauacggggugaagggauucuccuuuaaauacggcaacggugucuggauagggaggaccaagagcacaaauucucggucaggcuucgagaugauuugggacccaaacggauggaccgaaacggauaguagcuuuuccgugaaacaagacaucguugccaucacugacuggucuggcuauucggggagcuucgugcagcaucccgagcugacaggacucgauugcauucgcccuuguuucugggucgaauuaauccgagguagaccaaaggaguccaccauuuggacuucaggcaguucuauauccuuuugcggggugaauagcgacacaguaggauggucauggcccgauggcgcugagcugccguucaccaucgacaaauga

SEQ ID NO: 154222 - RNA, 1350 nt, Artificial Sequence
  derived and/or modified CDS sequence (opt3) from neuraminidase__InfluenzaA__BAM85818
augaaccccaaucagaagaucauuaccauaggcagcaucugcauggugauugggaucgucucccugaugcuccaaauuggaaacaugaucucuauauggguuucacacaguauccagacagguaaucagcaucaggccgagccuauuagaaacacuaauuuccuuacggaaaacgcuguggcaagcguaacccuggccggcaauuccucuuuguguccaaucagggggugggcggugcacucgaaagacaacucaauucggaucggaagcaagggcgaugucuuugugauacgcgagccguucauuaguugcucccauuuagaaugucgaacauuuuuccugacucaaggugcucuacucaaugacaaacacucuaacgggaccguuaaggaucguagcccccauagaacacugauguccugcccugugggagaggccccaucacccuacaauaguagguuugaaagcgucgcauggucugccuccgcuugucacgacggcaccucauggcuuacuaucggcauuagcgggccugauaacggagcaguggccguacugaaauauaaugguaucaucacagacaccauuaagaguuggcggaacaauauauugcgcacgcaggagucugagugcgcuuguguuaacggcuccugcuucacugugaugaccgaugggccaagcaacggacaggccucguacaagaucuuuaaaauggaaaagggcaaagucgugaagucuguggagcucaaugcgcccaacuaucacuacgaagaguguuccugcuauccugacgcaggagagauuaucugugucugcagagauaauuggcaugggucaaacaggccauggguuaguuucaaucagaaccuggaauaccaaauaggauauauuugcagcggcguguuuggcgacaauccgcggcccaacgaugggacaggauccugugguccuguaucuccaaauggcgccuacgggaucaaaggauucagcuuuaaguacggcaacgguguguggaucgggcgcacuaagucaaccaauagucgauccggcuucgagaugauuugggaccccaacggauggacaggcaccgauagcaauuuuucugucaaacaggacaucguggcuauuacggacuggucaggguauagugguagcuucguucagcacccugaacugacuggucucgauugcauaagaccauguuucuggguggaguuaaucaggggccggcccaaggaauccacaauuuggaccucugggucgagcaucuccuuuugcggagucaacucagacacugugaguuggucuuggccggauggcgccgagcugccuuucacaaucgacaaauga

SEQ ID NO: 154223 - RNA, 1350 nt, Artificial Sequence
  derived and/or modified CDS sequence (opt3) from neuraminidase__InfluenzaA__BAM85819
augaaccccaaucagaagaucauuaccauaggcagcaucugcauggugauugggaucgucucccugaugcuccaaauuggaaacaugaucucuauauggguuucacacaguauccagacagguaaucagaaccagguggagccuauuaucaauacuaacuuccuuacggaaaaagccguagcuagcauuacccuggcaggcaauuccucuuuguguccaaucagagggugggccauacauucgaaggacaacucaauuaggaucggaagcaaaggcgauguguuugucauucgggagccguucaucaguugcucccacuuagaaugucgcacauuuuuccugacucaaggugcgcuacucaaugacaagcauucuaacgggaccgugaaagaucgaagcccccaccguacacugauguccugcccuguuggagaggcuccaucacccuacaauaguagauuugaaagcguggccuggucugcauccgccugucaugacggcaccucauggcuuacuaucggcauuagcgggccugauaacggagcugucgcagugcugaaguauaaugguauaaucacagacaccauuaagaguuggaggaacaauaucuugcggacgcaggagucugagugcgccuguguaaacggcuccugcuucacuguuaugaccgaugggccaagcgacggacaggcuucguacaaaauauuuaagauggaaaaaggcaaggugauuaaaucugucgagcucgaugcccccaacuaucacuacgaagaguguuccugcuauccugacgcgggugagaucacaugugugugccgcgauaauuggcacgggucaaacagaccaugggugaguuucaaucagaaccuggaauaccaaaucggauauauuugcagcggcgucuuuggcgacaauccgaggcccaacgaugggacuggauccugugguccuguuucucauaauggcgcauacggggugaagggauucagcuuuaaguacggcaacgguguauggaucgggcggaccaaaucaccaaauagucgcuccggcuucgagaugauuugggaccccaacggauggagcgaaacagacucuucauuuagugugaagcaggauauagucgccaucaccgacuggagcggcuauuccgggucuuucgugcagcacccugagcugacgggacucgauugcauucgaccauguuucuggguugaauuaaucagagguaggcccaaagagucgacuguguggacaagcggcuccucaaucaguuuuugcggggucucuagcgacaccguguccuggucauggccggauggagcugagcugccuuucacuauugacaaguga

SEQ ID NO: 154224 - RNA, 1350 nt, Artificial Sequence
  derived and/or modified CDS sequence (opt3) from neuraminidase__InfluenzaA__BAM85820
augaaccccaaucagaagaucauuaccauaggcagcaucugcauggugauugggaucgucucccugaugcuccaaauuggaaacaugaucucuauauggguuucacacaguauccagacagguaaucagcaucaggccgagccuauuagcaacacuaauuuccuuacggaaaaagcuguggcauccguaacccuggccggcaacucuucguuguguccaaucagagggugggcggugcacucaaaggacaauagcauuaggaucggaaguaaaggcgaugucuuugugauacgggagccguucauuuccugcucucauuuagaaugucgcacauuuuuccugacucaaggugcucuacucaacgacaagcacagcaaugggaccguuaaagaucgaucaccccaucguacacugauguccugcccugugggagaggccccaagucccuacaacagcagauuugaaucugucgcaugguccgccucagcuugucacgacggcaccagcuggcuuacuaucggcauuagugggccugauaauggagcaguggccguacugaaguauaacgguaucaucacagacaccauuaagucuuggaggaauaacauauugcggacgcaggaguccgagugcgcuuguguuaauggcagcugcuucacugugaugaccgaugggccaucgaacggacaggccucuuacaaaaucuuuaagauggaaaaaggcaaggucgugaaauccguggagcucgacgcgcccaacuaucacuacgaagaguguucaugcuauccugaugccggugagauuacaugugucugccgcgacaauuggcaugggaguaacagaccauggguuagcuucaaucagaaccuggaauaccaaaucggauauauaugcuccggcguguuuggcgauaauccgaggcccaacgacgggacuggaucuugugguccuguaagcccaaauggcgcauacggggugaagggauucucauuuaaguacggcaacggugucuggauugggcggaccaaaaguacaaauucccgcagcggcuucgagaugaucugggaucccaacggauggaccggcacggacucuucauuuagugugaagcaggacaucguugcuauuacugauuggagcggguauuccggaucuuucgugcagcacccugaacugacaggucucgacugcauccgaccauguuucugggucgaguuaauuagaggcaggcccaaagaaucgaccauauggacuagcggguccucaaucaguuuuugcggaguaaauucugauacagugagcugguccuggccggacggcgccgagcugccuuucaccauugauaaguga

SEQ ID NO: 154225 - RNA, 1350 nt, Artificial Sequence; identical to SEQ ID NO: 143056
  derived and/or modified CDS sequence (opt3) from neuraminidase__InfluenzaA__BAM85821

SEQ ID NO: 154226 - RNA, 1350 nt, Artificial Sequence
  derived and/or modified CDS sequence (opt3) from neuraminidase__InfluenzaA__BAM85822
augaaccccaaucagaagaucauuaccauaggcagcaucugcauggugacagggauugucucccugaugcuccaaaucggaaacaugauuucuaucuggguuucacacaguauacauacugguaaucagcaccagagcgagccuaucuccaacacgaauuuccuuaccgaaaaagccguggcuucuguaaagcuggcaggcaacucgucauuguguccaauuaaugggugggccguguacagcaaagacaacaguaucagaauuggauccaagggcgaugucuuugugaucagggagccguucauaucuugcagccauuuagaaugucggacauuuuuccugacucagggugcgcuacucaaugacaaacacuccaacgggaccguuaaggaucgcucaccccaucgaacacugaugaguugcccugugggagaggcuccaagccccuauaauucucguuuugaauccgucgccuggucagcaagcgccugucacgacggcaccaguuggcuuacuauuggcaucucugggccugauaacggagcuguggcaguaguuaaguacaaugguauuaucacagacaccaucaaauccuggagaaacaauauucugaggacgcaagagagcgagugcgccugugugaacggcucgugcuucacugucaugaccgaugggccaucuaacucccaggcuucacacaagauauuuaaaauggaaaagggaaaaguggugaagagugucgaguuggacgcccccaauuaucauuacgaagaguguagcugcuauccugaugcgggcgagaucacauguguuugccgggacaacuggcacgguuccaaucgcccaugggugucuuucaaccagaaucucgaauaccagauuggguauaucugcagcggaguauuuggcgauaacccgagacccaaugacggcacugggucauguggaccugugaguuccaacggugcauacggcgucaagggguucagcuuuaaauacggaaauggcguguggauagguaggaccaagucuacaaacucacggaguggguucgagaugauuugggauccaaauggcuggaccgaaacggacagcuccuuuucuguuaaacaagacaucguggccaucacugauuggucgggauauagcggcuccuucguccagcaucccgagcugacagggcuggacugcauucgcccuuguuucuggguggaacucauccgaggaagaccaaaggagucaaccauuuggacaagugguucuagcauauccuuuugcggcguaaacucagauacuguuggguggagcuggcccgacggagcugaguuaccguucaccaucgauaaauga

SEQ ID NO: 154227 - RNA, 1410 nt, Artificial Sequence
  derived and/or modified CDS sequence (opt3) from neuraminidase__InfluenzaA__BAM85823
augaaccccaaucagaagaucaccacaauuggcagcauaugcauggugaucgggauugucucccugaugcuccaaaucggaaacauuaucucuauauggguuucacacaguauccagacugguaaucagcaucaggccggcccuuguaaccaaagcauuaucacguacgagaauaacaccugggugaaucagacauauguaaacauuuccaauacuaacuuccuuaccgagaaaacaguggcuucugucacccuggcaggaaauucgucauugugcccaaucagcgggugggccguguacaguaaggacaacggcauaagaauugguuccaaaggggauguuuuugugaucagggaaccguucauuucuuguagccacuuagaaugccggaccuuuuuccugacacagggagcgcuacucaaugacaagcauuccaacggcaccgucaaagaucgcucaccccaccgaacgcugaugaguuguccugugggcgaggcuccaagccccuauaauucucguuuugaauccguagccuggucagcaagcgccugccaugacgggaucaacuggcuuacuaucggaauuagugguccugauaacggcgcuguugcagugcugaaguacaaugggauaaucaccgacacaauuaagucuuggagaaacaauaucuugaggacucaggaguccgagugugccugcgucaacggaagcuguuucaccauaaugacagauggcccaucgaauggucaggcuucuuauaaaauuuuucggaucgaaaaggggaaaguggugaaguccgucgagcucaacgcccccaauuaccacuaugaagagugcucauguuacccugacgcgggagagaucacuugcguuugccgcgauaacuggcacggcaguaauagaccaugggugagcuucaaccaaaaucuggaauaccagauuggcuauaucuguuccgggauuuuuggagacaacccgaggcccaaugaugguacgggcucuugcgggccuguaagcccaaacggagcauacggcauaaaagguuucucauuuaaguaugggaauggcguguggaucggacggacuaagaguacaaacucccgcagcggcuucgagaugauuugggaccccaacggguggaccggaacugauucuaauuuuucagucaaacaggacaucguggccaucacagacuggagugguuacagcggcuccuucguucaacauccugaacugaccgggcucgauuguauucgaccaugcuucuggguggaguuaauaagaggaaggcccaaggaaucuacgaucuggaccucgggcagcuccauuucauuuuguggugucaacagugacacagugggguggucuuggccggauggcgcugagcugccuuucacuaucgacaaauga

SEQ ID NO: 154228 - RNA, 1350 nt, Artificial Sequence
  derived and/or modified CDS sequence (opt3) from neuraminidase__InfluenzaA__BAM85824
augaaccccaaucagaagaucauuaccauaggcagcaucugcauggugauugggaucgucucccugcuccuucaaauuggaaacaugaucucuauauggaucucacacaguauucagacagguaaucagcaucaggccgagagcaucuccaacacuaauccucugacggaaaaagcuguugcaucugugaccuuggccggcaacucgucauuauguccaauuagagggugggcgguacacagcaaggacaauaguaucaggauaggauccaaaggcgauguguucgucauucgggagccguuuaucucuugcagccaucuggaaugucgcacauucuuucuaacucaaggugcucuccugaacgacaagcacuccaaugggaccgugaaagaucgaucaccccaucguacacuuaugaguugcccuguuggagaggccccaagccccuacaacucuagauucgaauccguggcauggucagccagcgcuugucacgacggcaccaguuggcugacuauuggcaucucugggccugauaauggagcagucgccguguugaaguauaacgguaucauuacagacaccauaaaguccuggaggaauaacauccuccggacgcaggagagcgagugcgcuuguguaaauggcucgugcuuuacuguuaugaccgaugggccaucuaacggacaggccuccuacaaaauuuucaagauggaaaaaggcaagguggucaaaucaguggagcuggacgcgcccaacuaucacuacgaagaguguaguugcuauccugaugcaagcgagaucacaugugugugccgcgacaauuggcaugguuccaacagaccaugggucucuuuuaaucagaaccuggaauaccaaauaggguauauuugcagcggaguuuucggcgauaauccgaggcccaacgacggcacugggucauguggaccuauguuuccaaauggugccuacggcaucaagggguucaguuuuaaguacggaaacggcguguggaucggucggaccaaauccacaaauagccgcucuggguucgagaugauuugggaucccaacggcuggaccggaacggacucaaguuuuagcguaaagcaggacaucguggcuauuacugauugguccggcuauucugggucguucguccagcacccugaacucacaggauuagacugcauacgaccauguuucuggguggagcugaucagagguaggcccaaagaaagcaccauuuggacuuccggcucaaguaucucuuuuugcgggguuaauagcgauacaguguccuggucauggccggacggagccgagcuuccuuucaccaucgauaaguga

SEQ ID NO: 154229 - RNA, 1350 nt, Artificial Sequence
  derived and/or modified CDS sequence (opt3) from neuraminidase__InfluenzaA__BAM85825
augaaccccaaucagaagaucauuaccauaggcagcaucugcauggugauugggaucgucucccugaugcuccaaauuggaaacaugaucucuauauggguuucacacaguauccagacagguaaucagaaccagguggagccuauuaucaauacuaacuuccuuacggaaaaagccguagcuagcauuacccuggcaggcaauuccucuuuguguccaaucagagggugggccauacauucgaaggacaacucaauuaggaucggaagcaaaggcgauguguuugucauucgggagccguucaucaguugcucccacuuagaaugucgcacauuuuuccugacucaaggugcgcuacucaaugacaagcauucuaacgggaccgugaaagaucgaagcccccaccguacacugauguccugcccuguuggagaggcuccaucacccuacaauaguagauuugaaagcguggccuggucugcauccgccugucaugacggcaccucauggcuuacuaucggcauuagcgggccugauaacggagcugucgcagugcugaaguauaaugguauaaucacagacaccauuaagaguuggaggaacaauaucuugcggacgcaggagucugagugcgccuguguaaacggcuccugcuucacuguuaugaccgaugggccaagcaacggacaggcuucguacaaaauauuuaagauggaaaaaggcaaggugauuaaaucugucgagcucgacgcccccaauuaucacuacgaagaguguuccugcuauccugaugcgggugagaucacaugugugugccgcgacaacuggcacgggucaaauagaccaugggugaguuucaaccagaaucuggaauaccaaaucggauauauuugcagcggcgucuuuggcgauaacccgaggcccaaugacgggacuggauccugugguccuguuucucauaacggcgcauacggggugaagggauucagcuuuaaguacggcaaugguguauggaucgggcggaccaaaucaccaaacagucgcuccggcuucgagaugauuugggaucccaauggauggagcgaaacagacucuucauuuagugugaagcaggacauagucgccaucaccgauuggagcggcuauuccgggucuuucgugcagcacccugagcugacgggacucgacugcauucgaccauguuucuggguugaauuaaucagagguaggcccaaagagucgacuguguggacaagcggcuccucaaucaguuuuugcggggucaacucugauaccgugagcugguccuggccggacggagcugagcugccuuucacuauugauaaguga

SEQ ID NO: 154230 - RNA, 1350 nt, Artificial Sequence
  derived and/or modified CDS sequence (opt3) from neuraminidase__InfluenzaA__BAM85826
augaaccccaaucagaagaucauuaccauaggcagcaucugcauggugauugggaucgucucccugaugcuccaaauuggaaacaugaucucuauauggguuucacacaguauccagacagguaaucagagacaggccgagccuauuagcaacacuaaauuccuuacggaaaaggcuguggcauccguaacccuggccggcaauucuucguuguguccaaucucagggugggcgguguacagcaaagacaacaguauuaggaucggaucccggggcgaugucuuugugauacgcgagccguucauuucuugcagccauuuagaaugucgaacauuuuuccugacucaaggugcucuacucaaugacaagcacuccaacgggaccguuaaagaucguucaccccauagaacacugaugaguugcccugugggagaggccccaagccccuauaauucuagguuugaauccgucgcauggucagccagcgcuugucacgacggcaccaguuggcuuacuaucggcauuucugggccugauaacggagcaguggccguacugaaguacaaugguaucaucacagacaccauuaaguccuggcggaacaauauauugcgcacgcaggagagcgagugcgcuuguguuaacggcucgugcuucacugugaugaccgaugggccaucuaauggacaggccuccuauaaaaucuuuaagauggaaaaaggcaaggucgugaaaucaguggagcucgacgcgcccaacuaccauuaugaagaguguaguugcuacccugaugccggugagauuacaugugucugcagagacaacuggcacgggagcaauaggccauggguuuccuucaaccagaaucuggaauaucaaaucggauacauaugcucuggcguguuuggcgauaacccgcggcccaaugacgggacuggaagcugugguccuguaucacugaacggcgcauacggggugaagggauucaguuuuaaguauggcaauggugucuggauugggcgcaccaaauccacaaacagccgaucuggcuucgagaugaucugggauccaaauggauggaccggcacggacucaaguuuuagcgugaagcaggacaucguugcuauuacugauugguccggguacucuggaucguucgugcagcaccccgaacucacagguuuagacugcaucagaccuuguuucugggucgagcugauuaggggccggccaaaagaaagcaccauauggacuuccgggucaaguaucucuuuuugcggagugaacagcgauacaguauccuggucauggcccgacggcgccgagcuuccguucaccauugauaaguga

SEQ ID NO: 154231 - RNA, 1350 nt, Artificial Sequence
  derived and/or modified CDS sequence (opt3) from neuraminidase__InfluenzaA__BAM85827
augaaccccaaucagaagaucauuaccauaggcagcaucugcauggugauuggggucguuucccugaugcuccaaacaggaaacaucauuucuaucugggugucacacaguauacagaaagguaaucagcaucaggccgagagcaucuccaacacuaauccucuuacggaaaaggcuguagcaucugugacccuggccggcaacucgucauuguguccaauuagagggugggcgguccacagcaaagacaauaacaucaggauuggaaguaagggcgauguguucguuauccgggagccguuuauauccugcucucauuuagaaugucgcacauucuuucugacucaaggugcucuacucaaugacaaacacagcaacgggaccgugaaggaucgaucaccccaucguacacugauguccugcccugucggagaggccccaagucccuacaauagcagauucgaaucuguggcaugguccgccucagcuugucacgacggcaccagcuggcuuacuauuggcaucagugggccugauaacgaggcaguagccguucugaaguauaauggaauuaucacagacaccaucaaaucuuggaggaacaauauuuugcggacgcaggaguccgaaugcgcuugugugaacgguagcugcuuuacugucaugaccgauggcccaucgaacgggcaggccucuuacaagauauucaaaauggagaagggaaaaguggugaaguccgucgaacucgacgcgcccaauuaucacuacgaggaguguucaugcuauccugaugcaggcgaaaucacauguguuugccgcgacaacuggcaugguaguaauagaccaugggugagcuuuaaccagaaucuggaguaccaaauuggguauaucugcuccggaguauucggcgauaacccgaggcccaaugacggcacugggucuuguggaccuaugagcccaaacggugccuacggcgugaagggguuuucauucaaauacggaaauggcgucuggauaggucggaccaagaguacaaccucccgcagcggguuugaaaugauuugggaucccaacggcuggacgggaacugacucuucauucagugugaaacaggacaucguugcuaucacagauuggagcggcuauuccgggucuuuugugcagcacccugagcugaccggacucgacugcauucgaccauguuucugggucgaauuaaucagagguaggcccaaggagucgacuauuuggacaagcggcuccucaauaaguuucugcgggguggauucugacaccguaagcugguccuggccggauggagccgagcugccuuuuacgaucgacaaauga

SEQ ID NO: 154232 - RNA, 1350 nt, Artificial Sequence
  derived and/or modified CDS sequence (opt3) from neuraminidase__InfluenzaA__BAM85828
augaaccccaaucagaagaucauuaccauaggcagcaucugcauggugauugggaucgucucccugaugcuccaaauuggaaacaugaucucuauauggguuucacacaguauccagacagguaaucagagacaggccgagccuauuagcaacacuaaauuccuuacggaaaaggcuguggcauccguaacccuggccggcaauucuucguuguguccaaucucagggugggcgguguacagcaaagacaacaguauuaggaucggaucccggggcgaugucuuugugauacgcgagccguucauuucuugcagccauuuagaaugucgaacauuuuuccugacucaaggugcucuacucaaugacaagcacuccaacgggaccguuaaagaucguucaccccauagaacacugaugaguugcccugugggagaggccccaagccccuauaauucuagguuugaauccgucgcauggucagccagcgcuugucacgacggcaccaguuggcuuacuaucggcauuucugggccugauaacggagcaguggccguacugaaguacaaugguaucaucacagacaccauuaaguccuggcggaacaauauauugcgcacgcaggagagcgagugcgcuuguguuaacggcucgugcuucacugugaugaccgaugggccaucuaauggacaggccuccuauaaaaucuuuaagauggaaaaaggcaaggucgugaaaucaguggagcucgacgcgcccaacuaccauuaugaagaguguaguugcuacccugaugccggugagauuacaugugucugcagagacaacuggcacgggagcaauaggccauggguuuccuucaaccagaaucuggaauaucaaaucggauacauaugcucuggcguguuuggcgauaacccgcggcccaaugacgggacuggaagcugugguccuguaucaccaaacggcgcauacggggugaagggauucaguuuuaaguauggcaauggugucuggauugggcgcaccaaauccacaaacagccgaucuggcuucgagaugaucugggaucccaauggauggaccggcacggacucaaguuuuagcgugaagcaggacaucguugcuauuacugauugguccggguacucuggaucguucgugcagcacccugaacugacaggucucgacugcaucagaccauguuucugggucgaguuaauuaggggccggcccaaagaaagcaccauauggacuuccgggucaaguaucucuuuuugcggagugaacagcgauacaguauccuggucauggccggacggcgccgagcugccuuucaccauugauaaguga

SEQ ID NO: 154233 - RNA, 1350 nt, Artificial Sequence
  derived and/or modified CDS sequence (opt3) from neuraminidase__InfluenzaA__BAM85829
augaaccccaaucagaagaucauuaccauaggcagcaucugcaugauuaucgggauugugucccugaugcuccaaaucggaaacauaaucucuauuugggucucacacaguauccagacagguaaucagcaucaggccgagccuauuagcgacacuaacuuccuuacggaaaaagcuguugcauccgugauccuggccggcaauucuucguugugucacauaucagggugggcgguacauagcaaggauaacaguauuagaaucggauccaaaggcgacguguuugucauuagggagccauucaucucuugcagccacuuagaaugucggaccuuuuuccugacacaaggugcucuacucaaugauaagcauuccaacgggacugugaaagaccgcucaccgcaccgaacccugaugaguugccccguuggagaggccccuagcccauacaauucucguuuugaauccguggcauggucagccagcgcuugucacgauggcacaaguuggcuuaccaucggcauuucugggcccgacaacggagcagucgccgugcugaaguauaaugguauaaucacugauacaauuaaguccuggagaaacuacaucuugaggacccaggagagcgagugcgcuuguguaaauggcucgugcuucacgguuaugacugacgggccuucuaacggacaggccuccuauaaaauauuuaagauugaaaaaggcaagguggucaaaucaguggagcucgaugcgccaaauuaccauuaugaagaguguaguugcuaccccgacgccggugagaucaccugugugugccgggauaacuggcacgggagcaaccgcccuugggucuccuucaaucagaaccuggaauaucaaaucggauacauuugcucuggcguuuuuggcgacacaccaagaccgaaugaugggacuggaagcuguggucccgugucaccuaacggcgcauacgggguaaagggauucaguuuuaaguauggcaaugguguguggaucgggaggaccaaauccacaaacagccggucuggcuucgagaugauuugggacccaaauggauggaccggcacggacucaaguuuuagcgucaagcaggaucugguggcuauaacugacugguccggguacucuggaucguucguucagcaucccgaacucacagguuuagauugcauccgcccuuguuucuggguggagcugauucgaggcagaccaaaagaaagcaccaucuggacuuccgggucaaguaucucuuuuugcggagucaacagcgacacagugggcugguccuggcccgauggugccgagcuuccguucaccauugacaaguga

SEQ ID NO: 154234 - RNA, 1413 nt, Artificial Sequence
  derived and/or modified CDS sequence (opt3) from neuraminidase__InfluenzaA__BAM85830
augaaccccaaucagaagaucauuaccauaggcagcaucugcauggccauugggacaaucucccugauucuccaaaucggaaacauaaucucuauuuggaucucacacaguauucagacugguagccagaaucauacgggcaucuguaaccagagaauaauuaccuacgagaauaacacaugggugaaucaaacuuaugucaacaucuccaauaccaacguuguggcugggaaagacacaaccucuaugauucuugcaggaaauucgucacugugcccuaucaggggcugggccaucuacagcaaggauaacaguauucggauagguuccaaaggggacguauucgugauccgcgaaccauuuauuucuuguagccacuuggagugccgaacuuucuuuuuaacacagggagcgcugcuaaaugauaagcauuccaacggcaccgucaaagaccguucaccguauagagcucucaugaguugucccaucggcgaagccccuagcccauacaauucuagguucgaguccguggcauggucagccagcgcuugccacgaugggaugggauggcugacgauagguauuaguggccccgacgauggggcaguugccgugcuuaaguauaacggaaucaucacugaaauuaucaagucuuggcggaaacagauucugcgcacccaggaguccgagugugucugcgugaacggcagcuguuuuacaauaaugacugacgguccuucgaaugggccagcuucuuacagaaucuucaagauuaaaaagggaaaaaucaccaaguccaucgaauuggaugcccccaacucacauuaugaggaaugcaguuguuacccugacacaggcaagguaaugugcguuugcagggauaauuggcacggcagcaaccggccauggguguccuuuaaucaaaaccucgacuaccagauuggguauauauguucuggagucuucggugauaauccgcgccccaaagacggcaaggggagcugcgacccugugaacguggauggagcggacggcgucaaagguuuuucauaccgauaugggaauggcguuuggaucggaagaaccaagaguaacuccagcaggaaaggcuucgagaugauuugggauccaaauggguggacggacacugauggaaacuuucuggugaagcaggacguaguggcaaugacagauuggucugguuacucaggcaguuucguccagcaccccgagcugaccgggcucgacuguaugcggccuugcuuuuggguggaauuaauccguggacaaccacgcgagaaaacuacaauuuggaccagcggcuccucuaucucguucugugguguuaauagcgauacggugaacugguccuggcccgacggggccgaacugccguucaccauagauaaguga

SEQ ID NO: 154235 - RNA, 1413 nt, Artificial Sequence
  derived and/or modified CDS sequence (opt3) from neuraminidase__InfluenzaA__BAM85831
augaaccccaaucagaagaucauuaccauaggcagcaucuccauugccaucgggauuaucucucugaugcuccaaauaggaaacaucauuucaaucugggcuagucacagcauucagacagguucccagaaucauacuggcgugugcaaccagagaaucauaacguacgaaaauucuaccugggucaaccacacauauguuaauauuaacaauacuaacgugaucgcagggaaagacaagaccucgguaacacuugccggaaauucaagccuguguaguauuuccggcugggcgaucuacaccaaagauaacucuaucaggauugguagcaagggggacguguucgucauacgggagccuuuuaucuccugcucacauuuggagugucgcacuuucuuuuuaacacaaggagcucugcuaaaugauaaacacaguaacggcaccgugaaggaccgaagcccauaucgugcccucaugucuugcccgcugggcgaagcacccuccccuuacaauucaaaguucgagagcguugccuggagugcuucugcaugucaugaugggauuggauggcuuacgaucgguauauccggcccagacaacggggccguggcuguccugaaauauaacggaauuaucacugaaaccaucaagagcuggaaaaagcagauuuugagaacacaggagucggagugcguguguguaaauggcucuugcuuuacuaucaugaccgauggucccuccaacggggccgcgucauacaaaauuuucaagauagaaaagggaaaaguuacaaagaguaucgagcucaaugcaccuaacuuucacuaugaagaguguagcugcuacccagacaccggcacggugaugugugucugcagggauaauuggcacggcuccaaccggcccugggugucuuucaaucagaaccuggacuaccaaauuggguauaucugcagcggaguguuuggugauaauccucgcccaagagacggcgaggggucauguaacccggucacugccgauggagcuaauggcguuaaagguuucaguuacaaguaugggaacggcguguggaucggaaggacaaaauccaaucggcugcgcaagggcuuugaaaugauuugggaccccaacggguggaccgacacugauagcgacuucucuguaaaacaggauguggucgccauaacagacuggucaggauacagugguagcuuugugcagcauccugagcucaccggcuuagggugcauccgaccauguuucuggguugaacuggugagaggacuucccagggagaauacgaccauuuggacauccgguucuucgaucagcuucugcggcgucaacuccgauacugcaaacuggucauggccugacggggcugaauugccauuuaccauugauaaguga

SEQ ID NO: 154236 - RNA, 1413 nt, Artificial Sequence; identical to SEQ ID NO: 149556
  derived and/or modified CDS sequence (opt3) from neuraminidase__InfluenzaA__BAM85832

SEQ ID NO: 154237 - RNA, 1410 nt, Artificial Sequence
  derived and/or modified CDS sequence (opt3) from neuraminidase__InfluenzaA__BAM85833
augaaccccaaucagaagaucauuaccauaggcagcacaugcauggugaucgggauuaucucccugauucuccaaaucggaaacauaaucucuauuugggucucacacaguauccagacugguaaucagaaccagccugagacguguaaucaaagcguuauuaccuacgaaaacaaaacaugggugaaucagacuuauguaaacaucuccaauaccaaccuugugauagagagagacgucauuucuguggcccuguugggcaauucgucauuaugcccaaucagcgggugggcuauuuacaguaaggauaacggaaucaggaucggcuccaaaggugacguuuucgugauucgggaaccguuuauaucuuguagccaucuggagugccgcacauucuuucuaacccagggggcacuccugaaugauaagcacuccaacggaacugucaaagaccgaucacccuaucguacacuuaugaguuguccugugggcgaagccccaagccccuacaauucuagauucgaguccguagcguggucagcuagcgccugccaugauggcaucaguuggcugaccguugggauuucuggaccugacaacggugcaguggccgucuugaaguauaacggcaucauaacggauacugugaaguccuggaggaauaacauucuccggacccaggagagcgaaugugcuugcaucaaugggucguguuuuacaaucaugacugacggaccaucuaacggccaagcauccuacaaaauuuucaagaucgagaaagguaagguggucaaaucaguugaacugaaugcccccaacuaucacuacgaggagugcaguuguuacccugaugcuagcgaaauuaugugcgugugccgcgacaauuggcauggguccaacagaccauggguaucuuuuaauaggaaccuggaguaucagauaggauacaucuguagcggcguguucggcgauaauccgcggcccaacgacgggaccggaucaugcgguccugucaguuccaauggcgccuauggggugaagggauuuagcuucaaguacggcaaagguguuuggauugggcgcacaaagucuaccucaagucgaagcggcuuugaaaugaucugggauccaaacggauggacggagacugacuccucuuucucggugaaacaggacaucgucgcgauuacagauuggagcggcuauuccgggucauuugugcagcaccccgaacucaccggauuagacuguauaagaccuugcuucuggguagagcugaucaggggucggccaaaggagaauacuauuuggacaaguggcucuagcaucuccuucugugggguuaacucagauaccgugggauggagcuggcccgacggcgcagaacuuccguuuacgauugauaaauga

SEQ ID NO: 154238 - RNA, 1410 nt, Artificial Sequence
  derived and/or modified CDS sequence (opt3) from neuraminidase__InfluenzaA__BAM85834
augaaccccaaucagaagaucauuaccauaggcagcgugucccugacagucgccacuguuugcuuccucaugcaaaucgcuauucuuacgaccacagugacucugcacuuuaaacagaacgaguguucuaucccugcaaauaaccagguaaugccaugcgaaccgauugugaucgagagaaauauaaccgaaaucgucuacuugaacaauacaaccauugagaaggaaaucuguuuaaaagccgcggaguauaggaacuggucaaagccccagugccaaauuacuggguucgcuccuuuuaguaaagacaauagcauccggcuguccgccggaggugauauaugggugacacgcgagccauacguuucuugugaccccucgaagugcuaucaguucgcacuaggccaggggaccacgcucgaaaacaagcauucaaauggaacuauucacgaucgaaucccucaucguacccugcuuaugaacgagcugggcgugccauuucacuuggguacaaaacaggucuguauugccuggagcaguuccucuugccaugacgggaaggcuuggcuccacguguguguaacuggagaugacagaaaugcaaccgccagcuucaucuacgauggcaugcugguugacuccaucggcucauggagucaaaacauucugaggacacaggaaagcgagugcguguguauaaaugggaccugcgcugucgugaugacggauggaucugccuccggucgggcggacacucgcauccucuuuauuagagagggcaaaaucgugcacauaucacccuuaagcgggagugcacagcauauugaagagugcucuuguuauccuagguacccaaucauccggugcgucugucgcgauaacuggaagggauccaaccgaccgguuauugacaucaauauggccgauuauagcauugacucgucuuacgugugcuccggccugguaggugacacacccagaaacgaugacucaaguagcuccucuaauuguagggauccuaacaaugaacgggggaacccaggagugaaaggcugggcuuucgacaauggcaacgaugucuggauggggcguaccauaagcaaggacucacgcaguggauacgagacuuuuagagugaucgguggcugggccacagcaaauuccaagagccagaccaacaggcaaguuauuguggauaauaacaauuggucuggguauucaggaaucuucagugucgaaagcaaauccugcaucaaccgguguuuuuacguggagcuuauucgaggccgcccccaggagacgagaguaugguggaccucuaauucgauaguuguguucugcgguacaagcgggacuuauggcaccggauccuggccugacggcgcuaacaucaacuuuaugccaauuuga

SEQ ID NO: 154239 - RNA, 1410 nt, Artificial Sequence
  derived and/or modified CDS sequence (opt3) from neuraminidase__InfluenzaA__BAM85835
augaaccccaaucagaagaucauuaccauaggcagcgugucccugacaaucgccacugucugcuuccucaugcaaauugcuauccuugcaacgaccguuacacugcacuuuaaacagaacgaguguucuauuccugccaauaaccaggugguaccaugcgaaccgaucauaaucgagagaaauauuacugaaaucguguacuugaacaauaccacaauugagaaggaaaucuguucaaaagcggucgacuauaggaacuggaguaagccccagugccaaauaaccggguucgcuccuuuuagcaaagauaauuccauucgguuaucugccggaggugacaucugggugacucgcgagccauacguuucgugugauacaucaaagugcuaucaguucgcacugggccaggggaccacgcuagacaacaagcauagcaauggaacuauucacgaucgaaucccccaucguacccuccugaugaacgagcuuggcgugccuuuucaccuggguacaaaacaggucuguaucgccuggaguuccucuagcugccaugacgggaaggcuugguugcacguguguguaacuggagaugacagaaaugcaaccgccuccuucauuuacaacggcaugcucguugauucaauaggcaguuggagccaaaauauccugaggacacaggaaucugagugcguguguauuaacggguccugcaccgucgugaugacggacggaucagcuagcgguaaagccgauacucggauccuguuugugaaggaaggcaaaauaauucacaucaguccacucucuggguccgcgcagcauaucgaggagugcagcuguuauccccgcuacccuaacgucagaugcguuuguagggacaauuggcggggaucgaaccgcccagugauugauaucaauauggcagacuauucuauugacuccucauacguaugcaguggcuuagugggugauacaccgcgaaacgacgauaauagcuccucuagcaacuguagagaccccaauaacgaaagggggaauccuggagucaagggcugggccuucgauucaggcgacgauguguggauggggcggaccauaagucgugacucccgcagcggauacgagacuuuuaagguuaucgguggcugggcuacagccaacucuaaaucacagaccaguagacaagugauugucgauaauaacaauuggagcggguauuccggaguguucucuguagaacacaagucgugcaucaacagguguuuuuacguugagcugauccggggccgaccacaggaaacgcgcgugugguggaccagcaauuccauugucguguucugcgguacaucagggacuuauggcaccggaaguuggcccgacggcgcaaacauaaacuuuaugccuaucuga

SEQ ID NO: 154240 - RNA, 1410 nt, Artificial Sequence
  derived and/or modified CDS sequence (opt3) from neuraminidase__InfluenzaA__BAM85836
augaaccccaaucagaagaucauuaccauaggcagcgugucccugacaaucgccacuauuugcuuccucaugcaaaucgcuauucuugcaacgaccgucacacugcacuuuaaacagaacggguguucuaucccuucaaauaaccagguugugccaugcgagccgauaaucguagaaagaaauauuacugagaucguguacuugaacaauaccacaauugaaaaggaguuaugucccaaaguccuggaauauagggacuggaguaagccucagugccaaaucaccggauucgccccauuuagcaaagauaacuccauacggcuaucugcggguggcgacauuugggugacucgcgagcccuacguuucguguucaccugauaagugcuaucaguucgcucucgggcagggaacaacccuggacaaucgacauagcaacggcacgauccacgaucguauuccacauagaacucuucugaugaaugaguugggugugcccuuucaccucgggaccaagcaggucuguaucgccuggaguuccucuagcugccaugacggaagggcauggcugcacguguguguaacaggcgaugaccggaacgccacugcuuccuucaucuacgauggcaugcugguugacucaauugggaguuggagccaaaauauacuccgcacccaggaaucugagugcguguguaucaacggaacaugcaccgucgugaugacggaugguuccgcaucaggcagagccgacacuaggauuuuauuugugaaagaagggaagaucguccacauaagcccucugaguggaucugcucagcauauugaggagugcuccuguuauccacgguacccggauguucgcugcgugugucgagacaauuggaaaggcagcaacagacccaucaucgacauuaacauggccgauuauucgaucgguucuuccuacguaugcucagggcuugugggagacacaccuaggaaugaugacaguagcuccaacucuaauugucgggauccaaacaaugaacguggcaaccccggcgucaaggggugggcguucgacuacggaaaugauguguggaugggucgcaccauuagcaaagacucaagaaguggcuaugagacuuuuaggguuauagggggauggacaaccgcaaacuccaagagccaggugaaucggcaagucaucguggauaacucuaauuggucaggcuacagugguauuuucagcguagaagggaaguccugcaucaaccgauguuuuuauguugaguugauccgcggcagaccucaggaaacgagggugugguggaccucuaauucgauugucguguucugcggaacaagcggcacuuacgggaccggauccuggccagacggugccaacauaaauuuuaugcccaucuga

SEQ ID NO: 154241 - RNA, 1410 nt, Artificial Sequence
  derived and/or modified CDS sequence (opt3) from neuraminidase__InfluenzaA__BAO79717
augaaccccaaucagaagaucauuaccauaggcagcgugucccugacaaucucuacuauuugcuucuuuaugcagaucgccauucucaucacgaccgucacacuucacuucaaacaguacgaguuuaacucaccuccaaauaaccagguuaugcugugugaaccgacuauaaucgagagaaauauuaccgaaaucguguauuugacaaacaccacuauugagaaggaaaucugccccaaaccugcugaguacaggaauuggaguaagccacagugugggauaacaggauucgcacccuuuagcaaagacaacuccauucgguuaucugccgguggcgauaucuggguaacccgcgagccuuaugugucgugcgacccagauaaguguuaccaauucgcgcuggggcagggaacgacucuaaauaacguccauucaaauaacaccgugcgagaccguacacccuauagaacucuccugaugaaugaacuuggcguuccuuuucaccuggguaccaaacaggugugcauugcuuggagcaguuccucuugucaugaugggaaggccugguugcacgucugcaucacaggagacgauaagaacgcaaccgccagcuucaucuacaauggcaggcucguggacuccguaguuucauggaguaaagauauucugcggacgcaggagagcgaaugugugugcauaaacggcacuuguacagucgugaugaccgacgggucugcuuccggaaaggcagauacuaaaauccuguuuauugaggaggguaagaucgugcauacaucaacccucagcggcagugcccaacacgucgaagagugcucuugcuauccacgcuacccggggguuagaugugugugcagggacaacuggaagggauccaaucggcccauaguagauauuaacaucaaagaccacagcaucgugucgucuuacgucuguuccggcuuagugggugacacgccucgcaagaaugauucaaguagcuccucucauugccuggacccaaacaaugaagaagggggacacggcguuaaaggcugggcuuucgaugacgggaacgauguguggaugggacgaaccauuaaugagacaagcagacuugguuaugagacuuuuaaggucaucgagggcuggucaaaccccaaaaguaaguugcagauuaauaggcaagugauaguagaccguggggaucgguccggauacagcggcaucuucucuguugaagguaaaaacuguauuaaucgcugcuuuuauguggagcugaucagagggaggaaggaagagaccgaaguccuauggacaucaaacaguaucguggucuucuguggcacuagcggaaccuacggcacaggguccuggccugacggagccgaucucaaucugaugccaauuuga

SEQ ID NO: 154242 - RNA, 1413 nt, Artificial Sequence; identical to SEQ ID NO: 143107
  derived and/or modified CDS sequence (opt3) from neuraminidase__InfluenzaA__CAA33354

SEQ ID NO: 154243 - RNA, 1404 nt, Artificial Sequence
  derived and/or modified CDS sequence (opt3) from Neuraminidase__InfluenzaA__CAB95858
augaaccccaaucagaagaucauugcccugggcagcguguccauaaccaucgcuacaauuugccuccuuaugcaaaucgcaauucuggccacuacgaugaccuugcacuucaacgaguguacaaauccuucuaacaaucaggcgaugccaugcgaaccgaucauaaucgagagaaacauuacugaaaucguccauuuaaauaacaccacaauugagaaagaaucaugucccaagguugcugaguacaaaaauuggaguaagccucagugccagaucaccggguuugccccauucagcaaagacaacuccauaaggcugucugcaggaggugauauuugggugacucgggagcccuauguaucguguggccuagggaauugcuaccaauuugcccucggacagggcacaacccugaacaauaagcacucaaacgguacgauccaugaccgcagcccucaccgaacucuucugaugaaugaauugggggugccauuccaucucggaaccaagcaggucuguauugcuuggaguuccucuagcugccacgauggcaaagcauggcugcacguguguguuacaggcgacgaucguaacgccacugcuuccaucaucuaugacgggaugcugaccgauucaauuggaaguuggagcaagaacauacucagaacacaggagucugaaugcguguguaucaaugguaccugcacggucgugaugacugacggcuccgccucagggagggcggauacaaaaauuuuauuuauccgggagggaaagauaguacauauuagcccccugaguggcucugcacaacacguugaggaaugcuccuguuacccucgcuauccagaggugagaugcgucuguagggacaacuggaaagguagcaaucggccggugcuuuacaucaacguggccgauuauucggucgacucuuccuacguuugcucaggguuggugggagauacuccccgcaaugacgacaguagcuccucuagcaacugucgagauccuaauaacgaaagaggcggcccagggguaaagggaugggcuuucgacaaugguaacgauguguggaugggcaggaccaucaagaaagacucacggaguggguacgagacauuucgugucgugggaggcuggaccacggccaauuccaagagccagauuaaccgccagguuaucguggauucugacaauuggucagguuauagugggauuuucagcgucgaaggcaaaaccugcauaaacagauguuuuuacguggagcugaucaggggacggccccaggagacacgaguaugguggacuuccaauucuauuaucguuuucugcggcaccucggggacauauggaacugguagcuggccugauggcgcaaacaucaacuuuauguccauuuga

SEQ ID NO: 154244 - RNA, 1404 nt, Artificial Sequence
  derived and/or modified CDS sequence (opt3) from neuraminidase__InfluenzaA__CAB95859
augaaccccaaucagaagaucauugcccugggcagcguguccauaaccaucgcuacaauuugccuccuuaugcaaaucgcaauucuggccacuacgaugaccuugcacuucaacgaguguacaaauccuucuaacaaucaggcggucccaugcgaaccgaucauaaucgagagaaacauuacugaaaucguucauuuaaauaacaccacaauugagaaagaaucaugucccaagguggcugaguacaaaaauuggaguaagccucagugccagaucaccggguuugccccauucagcaaagacaacuccauaaggcugucugcaggaggugauauuuggguaacucgggagcccuaugugucguguggccuagggaagugcuaccaauuugcccucggacagggcacaacccugaauaacaagcacucaaaugguacgauccaugaccgcagcccucaccgaacucuucugaugaacgaauugggggucccauuccaucucggaaccaaacagguguguauugcuuggaguuccucuagcugccacgauggcaaggcauggcugcacguuugugugacaggcgacgaucguaaugccacugcuuccaucaucuaugacgggaugcugaccgauucaauuggaaguuggagcaaaaacauacucagaacacaggagucugaaugcgucuguaucaacgguaccugcacggugguaaugacugacggcuccgccucagggagggcggauacaaagauuuuauuuauccgggagggaaaaauaguucauauuggcccccugagcgguagugcacaacacguggaggaaugcucuuguuacccucgcuauccagaggucagaugcguguguagggacaauuggaagggguccaaccggccggugcuuuacaucaaugucgccgauuauagcguugacucgucuuacgugugcuccggauugguaggcgauacuccccgcaacgacgacucaaguagcuccucuaauugucgagauccuaacaaugaaagaggcgggccaggagugaaggguugggcuuucgacaacggcaaugaugucuggauggggaggaccaucaaaaaggacagccggucaggauacgagacauuucgugugguuggcgguuggaccacggccaacaguaaaucccagauuaaucgccaggugaucgucgauagcgacaacuggucuggguauucaggcauuuucaguguggaaggaaagaccugcauaaauagauguuuuuacguagagcugaucaggggccggccccaggagacacgaguuugguggacuagcaacuccauuaucguguucugcgggaccucuggaacauaugguacuggcucguggccugauggggcaaauaucaacuuuaugagcauuuga

SEQ ID NO: 154245 - RNA, 1410 nt, Artificial Sequence; identical to SEQ ID NO: 142621
  derived and/or modified CDS sequence (opt3) from Neuraminidase__InfluenzaA__CAC19707

SEQ ID NO: 154246 - RNA, 1410 nt, Artificial Sequence
  derived and/or modified CDS sequence (opt3) from neuraminidase__InfluenzaA__CAD29959
augaaccccaaucagaagaucauuaccauaggcagcgugucccugacaaucgccacuauuugcuuccucaugcaaaucgcuauucuugucacgaccguuacacugcacuuuaaacaguacgaguguaacucuccuccaaauaaccaggugauguugugcgaaccgacuaucauagagagaaauaucaccgaaauuguauauuuaacaaacaccacuaucgagaaggaaauuugucccaaacuggcagaguacaggaauuggucaaagccucagugcaacaucacaggguucgccccauuuaguaaagacaauagcauacggcuauccgcgggaggugauauuugggugacccgcgagcccuaugucucuugugacccugauaagugcuaccaauucgcucucggccaggggacgacucugaacaauggacauucgaacgacaccgugcacgaucgaacaccauaucguacucuucugaugaaugaauugggcguucccuuucaucucgguaccaaacagguguguaucgccuggucaagcaguuccugccacgacgggaaggcauggcugcaugucugugugacaggagaugacgagaacgccaccgcuucuuucauuuacaauggcagacugguagauagcaucggcuccuggucaaagaaaauccucaggacgcaggaaagugagugcguuuguauuaacgggacuugcacaguggucaugaccgacggaagcgcaucugguaaggccgauacuaaaauauuauuuaucgaggaaggcaagauugugcacacauccccucugucagggagcgcucaacacguggaggaaugcaguuguuauccacgguacccgggaguccgcugcguuuguagagacaacuggaagggcucuaauaggcccaucguggauauaaacguaaaagacuacuccauugugagcucguaugucugcucuggucuugugggggacaccccucggaagaaugauuccucaaguagcucccauuguuugaacccaaauaacgaggaaggaggccacggcguuaaagggugggccuucgacgauggaaaugacguguggaugggucgcacgaucucugagaagcugcgaagcggcuacgagaccuuuaaagucaucgaaggguggucaaagcccaacaguaaacuacagauuaauagacaggugaucguagauaggggaaaccgguccggcuauagcgguauuuucucuguugaggggaagucaugcauaaaucguuguuuuuacguggaacucauccgcggcagaaagcaggagacagaaguccuguggaccaguaacagcauuguggucuucugcggaacuuccggcacauaugggacuggaucuuggccugacggugcggauaucaaucuuaugccaaucuga

SEQ ID NO: 154247 - RNA, 1410 nt, Artificial Sequence
  derived and/or modified CDS sequence (opt3) from neuraminidase__InfluenzaA__CAD29960
augaaccccaaucagaagaucauuaccauaggcagcgugucccugacaaucgccacuauuugcuuccucaugcaaaucgcuauucuugucacgaccguuacacugcacuuuaaacaguacgaguguaacccuccaccgaauaaccaggugauguugugcgaacccacuaucauagagagaaauaucaccgaaauuguauauuuaacaaacaccacuaucgagaaggaaauuuguccuaaacuggcagaguacaggaauuggucuaagccacagugcaacaucacaggguucgcccccuuuucaaaagacaauaguauacggcuaagcgcgggaggugauauuugggugacccgcgagccuuaugucuccugugacccagauaagugcuaccaauucgcucucggccaggggacgacucugaacaauggacauucuaacgacaccgugcacguucgaacacccuaucguacucuucugaugaaugaauugggcgugccuuuucaucucgguaccaagcaggucuguaucgccuggucgucaagcaguugccacgaugggaaagcauggcugcauguguguguaacaggagacgaugagaacgccaccgcuuccuucauuuacaauggcagacugguugacucuaucggcagcugguccaagaaaauccucaggacgcaggaaucagagugcguguguauuaacgggacuugcacagucgugaugaccgauggaagugcaagcgguaaggccgacacuaaaauauuauuuaucgaggaaggcaagauugugcacacaucuccacuguccgggucagcucaacacgucgaggaaugcagcuguuauccgcgguaccccggaguucgcugcguguguagagauaacuggaagggcaguaauaggccuaucguagacauaaacgugaaagauuacucuauugucuccagcuaugugugcucgggucuuguuggggacaccccacggaagaaugacucuuccucaaguagccauuguuugaaccccaauaacgaggaaggaggccacggcgugaaagggugggccuucgaugacggaaaugaugucuggaugggucgcacgaucuccgagaagcugcgaucuggcuacgagaccuuuaaagugaucgaaggguggagcaagccuaacucaaaacuacagauuaauagacagguaaucguugacaggggaaaccggaguggcuauuccgguauuuucagcguggaggggaagucuugcauaaaucguuguuuuuacgucgaacucauccgcggcagaaagcaggagacagaagugcuguggacuucaaacaguauugucguguucugcggaaccagcggcacauaugggacuggauccuggccagauggugcggacaucaaucuuaugcccaucuga

SEQ ID NO: 154248 - RNA, 1410 nt, Artificial Sequence
  derived and/or modified CDS sequence (opt3) from neuraminidase__InfluenzaA__CAD29961
augaaccccaaucagaagaucauuaccauaggcagcgugucccugacaaucucuacuauuugcuucuuuaugcaaaucgccauucucgucacgaccguuacacuucacuucaaacaguacgaguguaacucaccuccaaauaaccaggugaugcugugcgaaccgacuaucauagagagaaauaccacagaaaucguauauuugaccaacacuacaauugagaaggaaaucugucccaaauuagcugaguacaggaauuggaguaagccucagugcaacauuaccggguuugcaccauucagcaaagacaauuccauccggcugucugccggaggugauauaugggugacgcgcgagcccuaugucucgugugacccugauaagugcuaccaauuugcgcuaggccaggggacuacccucaacaauggacauucaaacgacacagugcacgaucgaacuccauaucguacccugcuuaugaaugaacugggcguucccuuccauuuggguacaaaacagguguguauugcuuggagcaguuccucuugccacgacgggaaggccuggcuccaugucugugugaccggagaugacgagaacgcaacggccagcuuuaucuacaauggcagacugguagauuccauuggcucauggaguaagaaaauccugaggacucaggaaagcgagugcguuuguaucaacgggacaugcaccguggucaugacugacggaucugcuuccgguaaggcagauacaaaaauucucuucauagaggaaggcaagaucgugcacaccucaacguuaagcgggagugcccaacacguggaggaaugcucuuguuauccucgguacccaggaguccgcugcguuuguagagacaacuggaagggcuccaauaggccgauuguggauaucaacauaaaagacuacagcauuguaucgucuuaugugugcuccggucuggucggggacacaccccggaagaaugauucaaguagcuccucucauugucuugacccuaacaaugaggaaggaggccacggcgugaaagggugggcuuuugaugacggaaacgauguuuggaugggucgcaccaucagcgagaaguugcgaucaggcuacgagacuuucaaagugaucgaaggguggaguaagccaaauuccaaacugcagauuaacagacaggucaucguggacaggggaaaucggagcggcuauucugguauauuuucaguagaggggaagaguugcauuaaccguuguuucuacguugaacuaauccgcggcagaaagcaggagaccgaagugcucuggacaagcaauuccauugucguguuuugcggaacuucuggcaccuaugggacaggaucgggucccgauggcgccgacaucaaccugaugccuaucuga

SEQ ID NO: 154249 - RNA, 1410 nt, Artificial Sequence; identical to SEQ ID NO: 149593
  derived and/or modified CDS sequence (opt3) from neuraminidase__InfluenzaA__CAD29962

SEQ ID NO: 154250 - RNA, 1410 nt, Artificial Sequence; identical to SEQ ID NO: 142332
  derived and/or modified CDS sequence (opt3) from neuraminidase__InfluenzaA__CAD29963

SEQ ID NO: 154251 - RNA, 1410 nt, Artificial Sequence; identical to SEQ ID NO: 142332
  derived and/or modified CDS sequence (opt3) from neuraminidase__InfluenzaA__CAD29964

SEQ ID NO: 154252 - RNA, 1410 nt, Artificial Sequence; identical to SEQ ID NO: 142332
  derived and/or modified CDS sequence (opt3) from neuraminidase__InfluenzaA__CAD29965

SEQ ID NO: 154253 - RNA, 1410 nt, Artificial Sequence; identical to SEQ ID NO: 142332
  derived and/or modified CDS sequence (opt3) from neuraminidase__InfluenzaA__CAD29966

SEQ ID NO: 154254 - RNA, 1410 nt, Artificial Sequence; identical to SEQ ID NO: 142088
  derived and/or modified CDS sequence (opt3) from neuraminidase__InfluenzaA__CAD29967

SEQ ID NO: 154255 - RNA, 1410 nt, Artificial Sequence; identical to SEQ ID NO: 142088
  derived and/or modified CDS sequence (opt3) from neuraminidase__InfluenzaA__CAD29968

SEQ ID NO: 154256 - RNA, 1410 nt, Artificial Sequence; identical to SEQ ID NO: 142621
  derived and/or modified CDS sequence (opt3) from neuraminidase__InfluenzaA__CAD29969

SEQ ID NO: 154257 - RNA, 1410 nt, Artificial Sequence
  derived and/or modified CDS sequence (opt3) from neuraminidase__InfluenzaA__CAD29970
augaaccccaaucagaagaucauuaccauaggcagcgugucccugacaaucgccacuauuugcuuccucaugcaaaucgcuauucuugucacgaccguuacacugcacuuuaaacaguacgaguguaacucuccuccaaauaaccaggugauguugugcgaaccgacuaucauagagagaaauaucaccgaaauuguauauuuaacaaacaccacuaucgagaaggaaauuugucccaaacuggcagaguacaggaauuggucaaagccucagugcaaaaucacaggguucgccccauuuaguaaggacaacagcauacggcuauccgcgggaggugauauuugggugacccgcgagcccuaugucucuugugacccugauaagugcuaccaauucgcucucggccaggggacgacucugaauaaccgacauucgaaugacaccgugcacgaucguacaccauauagaacucuucugaugaacgaauugggaguucccuuucaucucggcaccaaacagguguguaucgccuggucaagcaguuccugccacgacgguaaggcauggcugcaugucugugugacagggcacgaugagaaugccaccgcuucuuucauuuacgacggaaggcugguagauagcaucggcuccuggaguaaaaagauccuccggacgcaggaaucagagugcguuuguauuaacggcacuugcacaguggucaugaccgacgggagcgcaucuggacgcgccgauacuaaaauauuauuuaucgaggaagguaagauugugcacaucuccccucugucaggcagcgcucaacauguggaggaaugcaguuguuauccaagauacccggggauaaggugcgucugucgggacaauuggaagggaucuaaccgccccauuguugauaucaacgugaaagacuacuccaucguaagcucguaugugugcucuggccuugucggugacacaccucgaaagaaugauuccucaaguagcucccacuguuugaacccaaauaacgaggaagggggacauggcgugaaaggcugggccuucgacgaugggaaugacguuuggaugggaagaaccauuucugagaagcugaggagcgguuacgagacguuuaaagugaucgaaggcuggucaaagcccaacaguaaacuacagauuaaucggcaggucauaguggaucgugggaaccgcuccggauauagcggcaucuucucuguagaggguaagucaugcauuaauagauguuuuuacguugaacucaucagggggcggaagcaggagaccgaagugugguggacaaguaacagcaucgucguguucugcggcacuuccggaaccuauggcacagggucuuggccugacggagcggauauuaaucugaugccaauauga

SEQ ID NO: 154258 - RNA, 1410 nt, Artificial Sequence; identical to SEQ ID NO: 144603
  derived and/or modified CDS sequence (opt3) from neuraminidase__InfluenzaA__CAD29971

SEQ ID NO: 154259 - RNA, 1410 nt, Artificial Sequence
  derived and/or modified CDS sequence (opt3) from neuraminidase__InfluenzaA__CAD29972
augaaccccaaucagaagaucauuaccauaggcagcgugucccugacaaucgccacuauuugcuuccucaugcaaaucgucauucuuguuacgaccgugacacugcacuuuaaacaguacgaguguaacucuccuccaaauaaccagguaauguugugcgaaccgacuaucauagagagaaauaucaccgaaauuguguauuuaacaaacaccacuaucgagaaggaaauuugucccaaacuggcugaguacaggaauuggucaaagccucagugcaacaucacaggguucgcaccauuuaguaaagacaauagcauacggcuauccgccggaggugauauuugggucacccgcgagcccuaugugucuugugacccugauaagugcuaccaauucgcgcucggccaggggacgacucugaacaauggacauucgaacgacaccguucacgaucgaacaccauaucguacucuucugaugaaugaauugggcgugcccuuucaucucgguaccaagcaggucuguaucgcuuggucaagcaguuccugccacgacgggaaagccuggcugcauguguguguaacaggagaugacaagaacgcaaccgccucuuucauuuacaauggcagacugguugauagcaucggcuccuggaguaaaaagauccucaggacgcaggagucagaaugcguguguauuaacgggacuugcgcugucgugaugacagacggaagcgcaucugguaaagccgauaccaagauauuauuuaucgaggagggcaagauugggcacacuucccugcuuucaggaagcgcucaacacguggaagagugcaguuguuauccucgguacccaggcguccgcugcguuuguagagacaacuggaaagguucuaauaggccgaucguggauauaaacguaaaggacuacuccauugugagcucguaugucugcucuggguuggugggagacacaccccggaaaaaugauuccucaaguagcucccauugucuggacccuaacaaugaagagggcggccacgggguuaagggaugggccuucgaugacgguaacgauguguggaugggccgcaccaucucugaaaaacuacgaagcggguacgagacguuuaaggucaucgagggauggucaaaaccaaauaguaagcuccagauuaacagacaggugaucguagacaggggcaaucgguccgguuauagcgggauuuucucuguugaaggcaagucaugcauaaaccguuguuuuuacguggagcugauccgcggaagaaaucaggaaaccgagauucuuuggacaaguaacagcaucgucguguucugcggcacuuccgggaccuauggaacagguucuuggcccgauggcgcggacaucaaucugaugccuauuuga

SEQ ID NO: 154260 - RNA, 1410 nt, Artificial Sequence
  derived and/or modified CDS sequence (opt3) from neuraminidase__InfluenzaA__CAD29973
augaaccccaaucagaagaucauuaccauaggcagcgugucccugacaaucgccacuauuugcuuccucaugcaaaucgcuauucuugucacgaccguuacacugcacuuuaaacaguacgaguguaacucuccuccaaauaaccaggugauguugugcgaaccgacuaucauagagagaaauaucaccgaaauuguauauuuaacaaacaccacuaucgagaaggaaauuugucccaaacuggcagaguacaggaauuggucaaagccucagugcaaaaucacaggguucgccccauuuaguaaggacaacagcauacggcuauccgcgggaggugauauuugggugacccgcgagcccuaugucucuugugacccuggcaagugcuaccaauucgcucucgggcagggaacgacucugaauaaccgacauucgaaugauaccgugcacgaccguacaccauauagaacucuucugaugaacgaauugggcguucccuuucaucucgguaccaaacagguguguaucgccuggucaagcaguuccugccacgaugggaaggcauggcugcaugucugugugacaggacacgacgagaaugccaccgcuucuuucauuuacgauggcaggcugguagacagcaucggcuccuggaguaaaaagauccuccggacgcaggaaucagagugcguuuguauuaacgggacuugcacaguggucaugaccgauggaagcgcaucuggucgcgccgacacuaaaauauuauuuaucgaggaaggcaagauugugcacaucuccccucugucagggagcgcucaacauguggaggaaugcaguuguuauccaagauacucuggagucaggugcguuugucgggauaauuggaagggcuccaaccgcccgauaguggacauuaacguaaaagauuacagcaucgugucgucuuaugucugcuccggucuugugggggacacaccccgaaagaaugacucaaguagcuccucucacuguuugaacccuaauaacgaggaaggaggccauggcguuaaagggugggccuucgaugacggaaaugauguguggauggguagaaccaucagcgagaagcugaggucaggcuacgagacguuuaaagucauugggggauggaguaagccaaacuccaaacuacagaucaaucgucaggugauuguagaccggggcaaccgcagcgguuauucugggauauucucaguugaaggcaagaguugcaucaauagauguuuuuacguggagcucauuaggggacggaagcaggaaaccgaggucugguggacaagcaacuccaucguggucuucugcggcacuucugggaccuauggaacagguucguggcccgauggcgcggacaucaaucugaugccuauuuga

SEQ ID NO: 154261 - RNA, 1410 nt, Artificial Sequence; identical to SEQ ID NO: 150632
  derived and/or modified CDS sequence (opt3) from neuraminidase__InfluenzaA__CAD29974

SEQ ID NO: 154262 - RNA, 1410 nt, Artificial Sequence
  derived and/or modified CDS sequence (opt3) from neuraminidase__InfluenzaA__CAD29984
augaaccccaaucagaagaucauuaccauaggcagcgugucccugacaaucgccacuauuugcuuccucaugcagaucgcuauucuugucacgaccguuacacugcacuuuaaacaguacgaguguaacucuccuccaaauaaccaggugauguugugcgaaccgacuaucauagagagaaauaucaccgaaauuguauauuuaacaaacaccacuaucgagaaggaaauuugucccaaacuggcagaguacaggaauuggucaaagccucagugcaacaucacaggguucgccccauuuaguaaagacaauagcauacggcuauccgcgggaggugauauuugggugacccgcgagcauuaugucucuugugaccgagauaagugcuaccaauucgcucucggccaggggacgacucugaacaauggacacucgaacgacaccgugcaugaucguacacccuauagaacucuucugaugaaugaauugggcguuccuuuucaccucgguaccaaacagguguguaucgccuggucaagcaguuccugccaucacgggaaggcauggcugcacgucugugugacaggagacgaugagaacgccaccgcuucuuucauuuacaauggcaggcugguagacagcaucggcuccuggucaaagaaaauccuccggacgcaggaaagugagugcguuuguauuaacgggacuugcacaguggucaugaccgauggaagcgcaucugguaaggccgacacuaaaauauuauuuaucaaggagggcaagauugugcauacauccucacugagcgggagugcucaacacguggaagagugcucuuguuauccacgcuaccccggagucagaugcguuuguagggauaacuggaaaggcuccaaucggccuaucguggacauaaacguaaaggauuacagcauugugucgucuuaugucugcuccggucuugugggggacaccccacgcaaaaaugacucaaguagcuccucucauuguuuggauccgaacaaugaagagggaggccacggcguuaaggggugggccuucgacgauggaaacgacguguggaugggucgaacgaucagcgaaaaacugagaucaggcuacgagaccuuuaaggucaucgagggguggaguaaagcaaauuccaagcuacagauuaacaggcaagugaucguagaucggggaaaucguagcggcuauucugguauuuucucaguugaaaguaagagcugcauaaaccgcuguuuuuacguggagcucaucagagggaggaaacaggaaacagagguccuguggacuuccaauucuauuguggucuucugcggcaccucgggaacauauggcacugggagcuggcccgacggagcggauaucaaccuuaugccuaucuga

SEQ ID NO: 154263 - RNA, 1410 nt, Artificial Sequence
  derived and/or modified CDS sequence (opt3) from neuraminidase__InfluenzaA__CAD29985
augaaccccaaucagaagaucauuaccauaggcagcgugucccugacaaucgccacuauuugcuuccucaugcaaaucgcuauucuugucacgaccguuacacugcacuuuaaacaguacgaguguaacucuccuccaaauaaccaggugauguugugcgaaccgacuaucauagagagaaauaucaccgaaauuguauauuuaacaaacaccacuaucgagaaggaaauuugucccaaacuggcagaguacaggaauuggucaaagccucagugcaacaucacaggguucgccccauuuaguaaagacaauagcauacggcuauccgcgggaggugauauuugggugacccgcgagcccuaugucucuugugacccugauaagugcuaccaauucgcucucggccaggggacgacucugaacaauggacauucgaacgacaccgugcacgaucgaacaccauaucguacucuucugaugaaugaauugggcguucccuuucaucucgguaccaaacagguguguaucgccuggucaagcaguuccugccacgacgggaaggcauggcugcaugucugugugacaggagaugacgagaacgccaccgcuucuuucauuuacaauggcagacugguagauagcaucggcuccuggucaaagaaaauccucaggacgcaggaaagugagugcguuuguauuaacgggacuugcacaguggucaugaccgacggaagcgcaucugguaaggccgauacuaaaauauuauuuaucgaggaaggcaagauugugcacaucuccacacugucagggagcgcucaacacguggaggaaugcaguuguuauccucgguacccaggaguccgcugcguuuguagagacaacuggaagggcucuaauaggccgauaguggauauuaacguaaaagacuacuccaucgugagcucguaugucugcucuggucuugugggggacacgccccggaagaaugauuccuucucaaguagccauuguuuggacccuaacaaugaggaaggaggccacggcguuaaagggugggccuuugaugacggaaacgauguguggaugggucgcaccaucuccgagaagcugcgaucuggcuacgagaccuucaaagucauugaaggguggagcaagccaaauucaaaacuacagaucaacagacaggugauuguagagaggggaaaucggaguggcuauuccgguauauuuagcguugaagggaagucuugcaucaaccguuguuucuacguggagcucauucgcggcagaaaggaagagacagaggucugguggacuucaaauaguaucguggucuuuugcggaaccagcaggacauauggcacuggguccuggcccgacggagcggauaucaaccugaugccuauuuga

SEQ ID NO: 154264 - RNA, 1410 nt, Artificial Sequence
  derived and/or modified CDS sequence (opt3) from neuraminidase__InfluenzaA__CAD29988
augaaccccaaucagaagaucauuaccauaggcagcgugucccugacaaucgccacuauuugcuuccucaugcaaaucgcuauucuugucacgaccguuacacugcacuuuaaacaguacgaguguaacucuccuccaaauaaccaggugauguugugcgaaccgacuaucauagagagaaauaucaccgaaauuguauauuuaacaaacaccacuaucgagaaggaaauuugucccaaacuggcagaguacaggaauuggucaaagccucagugcaacaucacaggguucgccccauuuaguaaagacaauagcauacggcuauccgcgggaggugauauuugggugacccgcgagcccuaugucucuugugacccugauaagugcuaccaauucgcucucggccaggggacgacucugaacaauggacauucgaacgacaccgugcacgaucgaacaccauaucguacucuucugaugaaugaauugggcguucccuuucaucucgguaccagacagguguguaucgccuggucaagcaguuccugccacgacgggaaggcauggcugcaugucugugugacaggagaugacgagaacgccaccgcuucuuucauuuacaauggcaggcugguagauagcaucggcuccuggaguaaaaagauccuccggacgcaggaaucagagugcguuuguauuaacgggacuugcacaguggucaugaccgacggaagcgcaucugagaaagccgauacuaagauauuauuuaucgaagaggguaaaauugugcacaucuccacacugucaggcagcgcucaacacguggaagagugcaguuguuauccucgcuacccaggggucagaugcguuuguagggacaacuggaagggaucuaaucggccgauaguggauauuaacguaaaggacuacuccaucgugagcucguaugucugcucuggccuugugggugacacccccaggaaaaaugauuccuucucaaguagccauuguuuggacccuaacaaugaagaagggggacacggcguuaagggcugggccuuugaugacgggaacgauguguggaugggacgaacgaucuccgagaaacugagaucugguuacgagaccuucaaggucauugagggcuggagcaaaccaaauucaaagcuacagaucaaccgccaggugauuguagaacgggggaaucguaguggauauuccggcauauuuagcguugaggguaaaucuugcaucaaccgcuguuucuacguggaacucauuagagggaggaaggaggagacagaagucugguggacuucaaauaguaucguggucuuuugcggcaccagcggaacauauggcacuggguccuggcccgacggagcggauaucaaccugaugccuauuuga

SEQ ID NO: 154265 - RNA, 1410 nt, Artificial Sequence
  derived and/or modified CDS sequence (opt3) from neuraminidase__InfluenzaA__CAD29990
augaaccccaaucagaagaucauuaccauaggcagcgugucccugacaaucgccacuauuugcuuccucaugcaaaucgcuauucuugucacgaccguuacacugcacuuuaaacaguacgaguguaacucuccuccaaauaaccaggugauguugugcgaaccgacuaucauagagagaaauaucaccgaaauuguauauuuaacaaacaccacuaucgagaaggaaauuugucccaaacuggcagaguacaggaauuggucaaagccucagugcaacaucacaggguucgccccauuuaguaaagacaauagcauacggcuauccgcgggaggugauauuugggugacccgcgagcccuaugucucuugugacccugauaagugcuaccaauucgcucucggccaggggacgacucugaacaauggacauucgaacgacaccgugcacggccgaacaccauaucguacucuucugaugaaugaauuggguguucccuuucaucucgggaccaaacagguguguaucgccuggucaagcaguuccugccacgauggaaaggcauggcugcaugucugugugacaggcgacgaugagaacgccaccgcuucuuucauuuacaauggcagacugguagacagcaucggguccuggucaaagaaaauccucaggacgcaggaaagugagugcguuuguauuaacggaacuugcacaguggucaugaccgaugguagcgcaucuggcaaggccgacacuaaaauauuauuuaucgaggaagggaagauugugcacacaucccugcuuucaggaagcgcucaacacguggaggaaugcaguuguuauccucgguacccaggcguccgcugcguuuguagagauaacuggaaggguucuaauaggccgaucguggacauaaacguaaaagauuacuccauugugagcucguaugucugcucuggguuggugggagacacgccccggaagaaugacaacuccucaaguagccauugucuggauccuaauaacgaggaaggcggccacgggguuaaaggaugggccuucgacgaugguaaugacguguggaugggccgcaccaucuccgagaagcuacgaucuggguacgagaccuuuaaagucaucgaaggauggagcaagccaaacucaaaacuccagauuaauagacaggugaucguagauaggggcaaccggagugguuauuccgggauuuucagcguugagggcaagucuugcauaaaucguuguuuuuacguggaacugauccgcggaagaaagcaggagacagaaguccuuuggacuucaaacaguauuguggucuucugcggcaccagcgggacauauggaacugguuccuggcccgacggcgcggauaucaaucugaugccuaucuga

SEQ ID NO: 154266 - RNA, 1410 nt, Artificial Sequence; identical to SEQ ID NO: 142109
  derived and/or modified CDS sequence (opt3) from neuraminidase__InfluenzaA__CAD29991

SEQ ID NO: 154267 - RNA, 1410 nt, Artificial Sequence
  derived and/or modified CDS sequence (opt3) from neuraminidase__InfluenzaA__CAD29992
augaaccccaaucagaagaucauuaccauaggcagcgugucccugacaaucgccacuauuugcuuccucaugcaaaucgcuauucuugucacgaccguuacacugcacuuuaaacaguacgaguguaacucuccuccaaauaaccaggugauguugugcgaaccgacuaucauagagagaaauaucaccgaaauuguauauuuaacaaacaccacuaucgagaaggaaauuugucccaaacuggcagaguacaggaauuggucaaagccucagugcaacaucacaggguucgccccauuuaguaaagacaauagcauacggcuauccgcgggaggugauauuugggugacccgcgagcccuaugucucuugugacccugauaagugcuaccaauucgcucucggccaggggacgacucugaacaauggacauucgaacgacaccgugcacgaucgaacaccauaucguacucuucugaugaaugaauugggcguucccuuucaucucgguaccaaacagguguguaucgccuggucaagcaguuccugccacgacgggaaggcauggcugcaugucugugugacaggagaugacgagaacgccaccgcuucuuucauuuacaauggcagacugguagauagcaucggcuccuggucaaagaaaauccucaggacgcaggaaagugagugcguuuguauuaacgggacuugcacaguggucaugaccgacggaagcgcaucugguaaggccgauacuaaaauauuauuuaucgaggaaggcaagauugugcacacaucccugcuuucagggagcgcucaacacguggaggaaugcaguuguuauccucgguacccaggaguccgcugcguuuguagagacaacuggaagggcucuaauaggccgaucguggauauaaacguaaaagaccgguccauugugagcucguacgucugcucugguuuggugggggacacccccaggaagaaugauuccucaaguagcucccauugucuggacccuaacaaugaggaaggaggccacggcguuaaagggugggccuucgaugacggaaacgauguguggaugggucgaacgaucucugagaagcuaagaagcggcuaugagaccuuuaaagucaucgaaggguggucaaagccaaauaguaaacuccagauuaaccgccaggugaucguagaccggggaaaucguuccggcuacagcgguauuuucucuguugaggggaagucaugcauaaaccgcuguuuuuauguggaacugaucagaggcaggaagcaggagacagaaguccuuuggaccaguaauagcauuguggucuucugcggaacuuccggcacauacgggacuggaucuuggcccgauggugcggacaucaaccugaugccuaucuga

SEQ ID NO: 154268 - RNA, 1410 nt, Artificial Sequence
  derived and/or modified CDS sequence (opt3) from neuraminidase__InfluenzaA__CAD29993
augaaccccaaucagaagaucauuaccauaggcagcgugucccugacaaucgccacuacgugcuuccucaugcaaauugcuauccuugucaccacaguuacucugcacuuuaaacaguacgaguguaacucuccuccaaauaaccaggugauguugugcgaaccgaccauuaucgagagaaauauaacagaaaucguauauuuaaccaacacuacaauugagaaggaaaucugucccaaacuggcagaguacaggaauuggucaaagccucagugcaacauuaccggguucgccccauuuaguaaagacaauagcauccggcuauccgcgggaggugauauaugggugacgcgcgagcccuaugucucuugugacccugauaagugcuaccaauucgcucucggccaggggacuacccugaacaauggacauucgaacgacacagugcacgaucgaacuccauaucguacccuucugaugaaugaauugggcguucccuuucaucucgguacaaaacagguguguauugccuggucaagcaguuccugccacgacgggaaggcauggcugcaugucugugugaccggagaugacgagaacgccacggcuucuuucaucuacaauggcagacugguagauagcauuggcuccuggucaaagaaaauccucaggacucaggaaagugagugcguuuguaucaacgggacaugcaccguggucaugacugacggaagcgcaucugguaaggccgauacaaaaauuuuauuuauagaggaaggcaagaucgugcacaccuccccucugucagggagcgcucaacacguggaggaaugcaguuguuauccacgguacccgggaguccgcugcguuuguagagacaacuggaagggcucuaauaggcccauuguggauaucaacguaaaagacuacuccauagugagcucguaugucugcucuggucuugugggggacacgccucggaagaaugauuccucaaguagcucccauuguuuggacccaaacaaugaggaaggaggccacggcguuaaagggugggccuucgaugacggaaacgauguguggaugggucgcaccauuucugagaagcugcgaagcggcuacgagacauuuaaagucaucgaaggguggucaaagcccaauaguaaacuacagaucaacagacaggugauuguagacaggggaaaucgguccggcuauagcgguaucuucucuguugaggggaagucaugcauuaaccguuguuuuuacguggaacucauacgcggcagaaagcaggagacugaaguccuguggaccaguaauagcaucguggucuucugcggaacauccggcacuuaugggaccggaucuuggccugauggugcggacauuaaccuuaugccaaucuga

SEQ ID NO: 154269 - RNA, 1410 nt, Artificial Sequence; identical to SEQ ID NO: 143797
  derived and/or modified CDS sequence (opt3) from neuraminidase__InfluenzaA__CAD29994

SEQ ID NO: 154270 - RNA, 1413 nt, Artificial Sequence; identical to SEQ ID NO: 144501
  derived and/or modified CDS sequence (opt3) from neuraminidase__InfluenzaA__CAD57252

SEQ ID NO: 154271 - RNA, 1413 nt, Artificial Sequence
  derived and/or modified CDS sequence (opt3) from neuraminidase__InfluenzaA__CAD57253
augaaccccaaucagaagaucauuaccauaggcagcaucagaauugccaucgggauuaucucccugaugcuccaaauaggaaacaucauuucuaucugggcuucacacaguauucagacagguagccagaaucauacuggcgugugcaaccagaggaucauaacguacgaaaauuccaccugggucaaccacacauauguuaauauuaacaauacuaacgugaucgcagggaaagacaagaccucuguaacacuugccggaaauucgucacuguguagcauuaguggcugggcgaucuacaccaaagauaacuccauccggauugguucuaagggggacguguucgucauacgcgagccuuuuaucagcugcucccauuuggagugucgaacuuucuuuuuaacacaaggagcucugcuaaaugauaaacacucaaacggcaccgugaaggaccguaguccauauagagcccucaugagcugcccgcugggcgaagcacccucuccuuacaauuccaaguucgagucaguugccuggagcgcuagugcaugucaugaugggaugggauggcuuacgauugguaucucuggcccagacaacggggccguggcuguccugaaauauaacggaauaauuacugaaaccaucaaguccuggaaaaagcagaucuugaggacacaggagagcgagugcguguguguaaauggcucgugcuuuacuauuaugaccgauggucccucuaacggggccgcguccuacaaaaucuucaagauugaaaagggaaaaauaacaaagucaaucgagcucaaugcaccuaacuuucacuaugaagaguguaguugcuacccagacaccggcacgguuaugugugugugccgggauaauuggcacggcagcaaccgccccugggucuccuucaaucagaaccuggacuaccaaauuggguauaucugcucuggaguguuuggugauaauccuagaccaaaagacggcgaggggagcuguaacccggugacugucgauggagccaauggcguuaaggguuucucauacaaauaugggaacggcguguggaucggaaggacaaagaguaaucggcugcgcaaaggcuuugaaaugauuugggaccccaacggguggaccgacacugauuccgacuucagcguaaagcaggauguggucgcuauaacagacuggucuggauacucagguaguuuugugcagcauccugagcucaccggcuuagauugcauccgaccauguuucuggguugaacuggugagagggcuucccaaggagaauacgaccauuuggacaagcggauccucuaucucguucugcggcgucaacagcgacacugccaacugguccuggccugauggugcagaauugccauuuaccauugacaaauga

SEQ ID NO: 154272 - RNA, 1413 nt, Artificial Sequence; identical to SEQ ID NO: 142444
  derived and/or modified CDS sequence (opt3) from neuraminidase__InfluenzaA__CAD57255

SEQ ID NO: 154273 - RNA, 1413 nt, Artificial Sequence
  derived and/or modified CDS sequence (opt3) from neuraminidase__InfluenzaA__CAD57256
augaaccccaaucagaagaucauuaccauaggcagcaucuccguggccauugggaucauuucucugaugcuccaaaucggaaacauaaucucaauuugggcuagucacagcauccagacagguucccagaaucauacuggcauuugcaaccagagaaucauaacguacgaaaauucuaccugggucaaccacacauauguuaauauuaacaauacuaacgugguagcagggaaagacaagaccucggugacacuugccggaaauucaagccuguguaguaucuccggcugggcgauuuacaccaaagauaacucuaucaggaucgguagcaagggggacgucuucgugauucgggagccuuuuauauccugcucacauuuggagugucgcacuuucuuuuuaacacaaggagcucugcuaaaugauaaacacaguaacggcaccguuaaggaccgaagcccauaucgugcccucaugucuugcccgcugggcgaagcacccuccccuuacaauucaaaguucgagagcguggccuggagugcuucugcaugucaugaugggaugggauggcuuacgaucgguauuuccggcccagacaacggggccgucgcugugcugaaauauaacggaaucauaacugaaaccauuaagagcuggaaaaagagaaucuugaggacacaggagucggagugcguauguguuaauggcucuugcuuuacuaucaugaccgauggucccuccaacggggccgcgucauaccggauuuucaaaaucgaaaagggacgcgugacaaagaguauugagcucgacgcaccuaauuaucacuacgaagaguguagcugcuacccagauaccggcacggucaugugugugugcagagacaacuggcacggcuccaauaggcccugggugucuuuuaaccagaaucuggauuaucagauaggguacaucugcagcggagucuucggugacaacccucggccaaaagauggcgaggggucauguaauccgguuacuguggacggagccgacggcguaaaggguuuuaguuauaaauacgggaacggcguguggauuggacgcacaaaguccaaucgacugagaaaaggcuucgaaaugaucugggaucccaacggguggaccgacacugauagcgacuuuucugucaagcaagaugugguugcuaucacagacuggucaggauauagugguagcuucgugcagcauccugagcucaccggcuuagauugcauuaggccauguuuuugggucgaacuggugcgggggcguccccgcgagaauacgaccauauggacauccggaucuucgaucagcuucugcggcguaaacuccgacacugccaauuggucauggccugauggugcagaacuuccauucaccauugacaaauga

SEQ ID NO: 154274 - RNA, 1413 nt, Artificial Sequence
  derived and/or modified CDS sequence (opt3) from neuraminidase__InfluenzaA__CAD57257
augaaccccaaucagaagaucauuaccauaggcagcaucuccauugccaucgggauuaucucucugaugcuccaaauaggaaacaucauuucaaucugggcuagucacagcauucagacagguucccagaaucauacuggcaucugcaaccagagaauaauuacguacgaaaauucuaccugggugaaccacacauaugucaauaucaacaauacuaacguuguggcagggaaagacaagaccucgguaacacuugccggaaauucaagccuguguaguauuuccggcugggcgaucuacaccaaagauaacucuaucaggauugguagcaagggggacguguucgucauacgggagccuuuuaucuccugcucacauuuggagugucgcacuuucuuuuuaacacaaggagcucugcuaaaugauaaacacaguaacggcaccgugaaggaccgaagcccauaucgugcccucaugucuugcccgcugggcgaagcacccuccccuuacaauucaaaguucgagagcguugccuggagugcuucugcaugucaugaugggaugggauggcuuacgauugguaucuccggcccagacaacggggccguggcuguccugaaauauaacggaauaauuacugaaaccaucaagagcuggaaaaagagaaucuugaggacacaggagucggagugcguguguguaaauggcucuugcuuuacuauuaugaccgauggucccuccaacggggccgcgucauacaaaaucuucaagauugaaaagggaaaaguuacaaagaguauagagcucaaugcaccuaacagccacuaugaagaguguuccugcuacccagacaccggcacggugaugugugucugccgggauaauuggcacggcucuaaccgccccugggugagcuuuaaucagaaccuggacuaccagaucggguauauuugcucaggaguguucggugauaauccuagaccaaaagacggcgaggggaguuguaacccggucacuguugauggagccgacggcgugaaggguuuuuccuacagguaugggaauggcguauggaucggacggacaaaaagcaaccgccugcgaaagggcuucgaaaugaucugggaccccaauggguggaccgauacugacucugauuuuucaaugaaacaagacguggucgcuaugacagauuggaguggauacagcgguuccuucgugcagcauccugagcucaccggcuuagacugcauuagaccauguuuuuggguugaacuggugagggggcggccccgugagaacacgaccauauggacaucuggaucgagcaucuccuucugcggcgucaauucagauacugccaacuggaguuggccugacggugcagaacuuccauucaccauugauaaguga

SEQ ID NO: 154275 - RNA, 1413 nt, Artificial Sequence
  derived and/or modified CDS sequence (opt3) from neuraminidase__InfluenzaA__CAD57258
augaaccccaaucagaagaucauuaccauaggcagcaucuccguggccauugggaucauuucucugauccuccaaauaggaaacaucauuucaaucugggcuagucacagcauucagacagguucccagaauuacacuggcaucugcaaccagagaauaauuacguaugaaaauucuaccugggucaaccaaacauacguuaauaucaacaauacuaacgugguagcagggaaagacaagaccucgauggugcuugccggaaauucaagccuguguccuauuaggggcugggcgaucuauacaaaagauaacaguauccggauugguuccaagggggacauauucgucauccgcgagccauuuauuucuugcagccauuuggagugucgaaccuucuuuuuaacucagggagcucugcuaaaugauaaacacuccaacggcacagugaaggaccguucaccguacagagcccucaugaguugcccccugggcgaagcaccuagcccauauaauucuagguucgaguccguugccuggucagcuagcgcaugucaugaugggcuuggauggcugaccaucgguauaaguggccccgacaacggggccguggcugucuugaaguacaacggaauuaucacggaaacuaucaaaucuuggaagaaacagauucuccggacccaggaguccgagugcguguguguaaauggcagcugcuuuacaaucaugacugaugguccuucgaaccgcgccgcgucuuauagaauuuucaagauagaaaaagggaggguuaccaaguccaucgagcuggacgcaccaaauuaccacuacgaagaguguucaugcuaucccgauacaggaaccgugaugugugucugccgggacaacuggcauggcaguaaucgcccuugggugagcuuuaaccaaaaucuggauuaccagauuggcuauaucugcuccgggguguucggagacaacccacgaccgaaggauggugagggcucuuguaaucccgucacgguugacggggccgacggagugaaaggcuuuagcuacagauaugguaacgggguauggaucggcaggacuaagucaaaucggcuccguaaaggauucgaaaugauuugggauccuaacggcuggacagacaccgauagugacuuuuccaugaagcaggauguggucgcuaugacugacuggagcggguacucuggaucauucgugcagcacccagaguuaacaggucuggauugcaugcgccccuguuuuuggguugaacuugugagaggcuugccuagggagaauaccacgauauggaccagugggagcuccaucucuuucugcggagucaacucggaaacagccaauuggagcuggccagacggcgcagagcugcccuucacuauugauaaauga

SEQ ID NO: 154276 - RNA, 1413 nt, Artificial Sequence
  derived and/or modified CDS sequence (opt3) from neuraminidase__InfluenzaA__CAD57259
augaaccccaaucagaagaucauuaccauaggcagcaucuccauugccaucgggauuaucucucugauacuccaaaucggaaacauuaucucaauuugggcuagucacagcauccagacagagucccagaaucauacugguauaugcaaccagagaauuaucacguacgaaaauucuaccugggugaaccaaacauaugucaauauuaacaauacuaacguugcagccggcaaagacaagaccucgaugacacuugcggggaauagcagccuguguccuaucaggggaugggcuaucuacaccaaagauaacaguauucggauaggcuccaagggugacaucuucgugauucgcgagccauuuaucucuugcagccacuuggaaugucgaacuuucuuuuuaacacagggggcccugcuaaaugauaaacauuccaacggaaccguaaaggaccguucaccguauagagcacucaugaguugcccccugggcgaggccccuagcccauacaauucuagguucgaauccguggcuuggucagcaagcgccugucacgauggccuuggguggcugacgauaggaauuaguggucccgacaacggcgcugucgccguguugaaguauaacgggaucaucacugagaccauuaaaucuuggaagaaacggauccuccgcacacaggaguccgaaugcguuuguaugaauggaagcugcuuuacuauuaugaccgauggcccuucgaacggugcggcaucuuacagaauauucaagaucgagaaagggagggugacaaaguccauugaacuggacgccccaaauuaucauuacgaggaguguucaugcuaccccgaaaccggaacggucaugugugugugccgggauaacuggcacggcaguaaucgcccuuggguaucauuuaaccagaaucuggacuaucaaaucggcuacaucugcuccgggguuuucggagauaacccacgaccgaaggacggugagggcucuuguaaucccgugacugucgauggggcugacggagugaaaggcuuuagcuauagauacgguaacgggguguggauuggcaggacaaagucaaaucggcuccguaaaggauucgaaaugauaugggacccuaacggcuggaccgauacugacagugauuuuuccaugaagcaggacaucgucgccaugacagauuggagcggguauucuggaucauucguucagcacccagaguuaaccggucuggacugcaugcgccccuguuuuuggguggaacuuguaagaggcuugccuagggagaauacgaccauuuggacaagugggagcuccaucucuuucugcggagugaacucggauacugcaaauuggagcuggccagacggcgcugagcugcccuucaccauugauaaauga

SEQ ID NO: 154277 - RNA, 1413 nt, Artificial Sequence
  derived and/or modified CDS sequence (opt3) from neuraminidase__InfluenzaA__CAD57264
augaaccccaaucagaagaucauuaccauaggcagcaucuccguggccauugggaucauuucucugauccuccaaauaggaaacaucauuucaaucugggcuagucacagcauucagacagguucccagaauuacacuggcaucugcaaccagagaauaauuacguaugaaaauucuaccugggucaaccaaacauacguuaauaucaacaauacuaacgugguagcagggaaagacaagaccucgaugacacuugccggaaauucaagccuguguccuauuaggggcugggcgaucuauaccaaagauaacaguauccggauugguuccaagggggacguguucgucauacgcgagccauuuaucucuugcagccauuuggagugucgaacuuucuuuuuaacacagggagcucugcuaaaugauaaacacuccaacggcaccgugaaggaccguucaccguacagagcccucaugaguugcccccugggcgaagcaccuagcccauauaauucuagguucgaguccguugccuggucagcuagcgcaugucaugaugggcuuggauggcugacgauugguaucaguggccccgacaacggggccguggcugucuugaaguacaacggaauaauuacugaaaccaucaaaucuuggaagaaacagauccuccggacacaggaguccgagugcguguguguaaauggcagcugcuuuacuauuaugaccgaugguccuucgaacggggccgcgucuuaucgcaucuucaagauugaaaaaggaagaguuacaaaguccauagagcuggacgcaccaaauuaccacuacgaagaguguucaugcuaucccgauaccggcacggugaugugugucugcagggacaacuggcauggcaguaaucggccuugggugagcuuuaaccaaaaucuggauuaccagaucggguauauuugcuccggaguguucggugacaacccacgcccgaaggauggcgaggggucuuguaaucccgucacuguugacggagccaacggcgugaaagguuuuagcuaccgauaugggaauggcguauggaucggaagaacaaagucaaacaggcuccggaaaggcuucgaaaugaucugggacccuaauggguggaccgauacugacagugauuuuuccaugaagcaggacguggucgcuaugacagauuggagcggauacucugguucauucgugcagcacccagaguuaaccggccuggacugcaugcgucccuguuuuuggguugaacuugugcgcggguugccuagagagaacacgaccauuuggacaaguggaagcuccauaucuuucugcggcgucaauucggaaacugccaacuggagcuggccagauggugcagagcugcccuucaccaucgacaaauga

SEQ ID NO: 154278 - RNA, 1350 nt, Artificial Sequence
  derived and/or modified CDS sequence (opt3) from neuraminidase__InfluenzaA__CBW54819
augaaccccaaucagaagaucauuaccauaggcagcaucugcauggugauugggaucgucucccugaugcuccaaauuggaaacaugaucucuauauggguuucacacaguauccagacagguaaucagugucaggccgagccuauuagcaacacuaaauuccuuacggaaaaggcuguggcauccguaacccuggccggcaauucuucguugugcccaaucucagggugggcgguguacagcaaagacaacaguauuagaaucggauccaggggcgaugucuuugugauacgggagccguucauuucuuguagccauuuagaaugccgcacauuuuuccugacucaaggugcucuacucaaugacaagcacuccaacgggaccguuaaagaucgaucaccccaucguacacugaugaguuguccugugggagaggccccaagccccuauaauucuagauuugaauccgucgcauggucagccagcgcuugccacgacggcaucaguuggcuuaccauuggcaucucugggccugauaacggagcaguggccguacugaaguacaaugguaucauuacugacacaauaaaguccuggaggaacaauaucuugcggacccaggagagcgagugugcuugcguuaacggcucguguuucacggugaugacugaugggccaucuuccggacaggccucauauaaaauuuuuaagauggaaaaaggcaaggucgugaaaaguguggagcucgacgcgcccaauuaccauuaugaagagugcagcuguuacccugaugcaggagagauaaccugcgucugccgcgacaacuggcacggguccaacagaccauggguuucuuucaaucagaaccuggaauauaggaucggauacauuuguagcggcguguuuggcgauaauccgcggcccaacgacgggacaggaucaugcgguccuguaaguccaaauggcgccuacggggugaagggauucuccuuuaaguauggcgauggugucuggaucgggcgcacuaaaagcaccaacucucgaucaggcuucgagauggugugggaccccaauggauggacaggcaccgacaguagcuuuuccguuaagcaagauaucguggcuauuacggacuggucuggguacucggguagcuucguccagcacccugaacugacuggucucgauuguaucagaccaugcuucuggguggaguuaauuaggggccggcccaaagaauccacaauauggaccucagggaguucuaucagcuuuuguggaguaaacuccgacacuguuucauggagcuggccggauggcgccgagcugccuuucacaauugacaaguga

SEQ ID NO: 154279 - RNA, 1350 nt, Artificial Sequence
  derived and/or modified CDS sequence (opt3) from neuraminidase__InfluenzaA__CBW54821
augaaccccaaucagaagaucauuaccauaggcagcaucugcauugugaucgggauugucucccugaugcuccaaaucggaaacaugauaucuaucuggguuucacacaguauucagacagguaaucagugucaggccgagccuaucagcaacacuaaauuccuuacggaaaaggcuguggcauccguaacccuggccggcaauucuucguugugcccaauuucagggugggcgguguacagcaaagacaacaguaucagaauaggauccaggggcgaugucuuugugauucgggagccguucaucucuuguagccauuuagaaugccgcacauuuuuccugacucaaggugcucuacucaaugacaagcacuccaacgggaccguuaaagaucgaucaccccaucguacacugaugaguuguccugugggagaggccccaagccccuauaauucuagauuugaauccgucgcauggucagccagcgcuugccacgacggcauuaguuggcuuaccaucggcaucucugggccugauaacggagcaguggccguacugaaguacaaugguauuauaacugacacaaucaaguccuggaggaacaauauuuugcggacccaggagagcgagugugcuugcaucaacggcucguguuucacgguuaugacugaugggccaucuuccggacaggccucauauaaaauauuuaagauggaaaaaggcaagguggucaaaaguguggagcucgacgcgcccaauuaccauuaugaagagugcagcuguuacccugaugcaggagagauuaccugcgugugccgcgacaacuggcacggguccaacagaccaugggucucuuucaaucagaaccuggaauaucaaaucggauacaucuguagcggcguuuuuggcgauaauccgaggcccaacgacgggacaggaucaugcgguccugugaguccaaauggcgccuacgggguaaagggauucuccuuuaaguauggcaacgguguguggauugggcggacuaaaagcaccaauucucgcucaggcuucgagaugaucugggaucccaacggauggacaggcaccgacaguagcuuuuccgucaagcaggacauuguggcuauaacggauuggucuggguacucggguagcuucguucagcacccugaacugacuggucucgacuguauccgaccaugcuucuggguggaguuaauuagaggccagcccaaagaauccacaaucuggaccucagggaguucuaucagcuuuuguggagucaauuccgauacugugucauggagcuggccggacggcgccgagcugccuuucacaauugauaaguga

SEQ ID NO: 154280 - RNA, 1410 nt, Artificial Sequence
  derived and/or modified CDS sequence (opt3) from neuraminidase__InfluenzaA__CCG47912
augaaccccaaucagaagaucauuaccauaggcagcgugucccugacaaucgccacuaugugccucuucaugcaaauugcuauccuuauuacgaccgucacacugcacuuuaaacaguacgagugugacucuccugcaaacaaucagguuaugccaugcgaaccgaucauaaucgagaagaacauuacuaaaaucguguauuugaccaauacaaccauugaaaaggagguaugucccaaauuaggggaauacagaaacuggucaaagccucagugcaggaucacuggauucgccccauuuaguaaggauaauagcauacggcuguccgcggguggcgcuauuugggugacacgcgagcccuaugucucuugugacccuaacaaaugcuaccaauucgcccuagggcagggaaccacgcucgauaaucgacauucgaacgacacuauccacgaucguaccccauauagaacacugcuuaugaaugagcugggcgugcccuuucauuuggguacuaggcagguuuguauugcauggucaagcaguuccugccacgacgggaaggccuggcuccaugugugugucaccggacacgauaaaaacgcuacagcaucuuucaucuacgacggcaagcugguggauagcaucuccucauggagucagaauauucugcggacccaagaaagcgagugcguauguauaaacggcaucugcacgguugugaugacugacgggucugccuccggaaaagcugauacaaagauucucuuuaucgaagaggguaaggucauacacauuucaccuuuacugggcagcgcccagcauguggaggaaugcaguuguuauccacgcuacccggacgugagaugcaucuguagggauaauuggaaagggucuaaccggcccaucgucgacauucgcaugaaggacuacuccaucggaagcucguauaugugcucuggccuuguuggugauaccccucgaaacaaugacggguccucaaacaguaauuguagaaacccaaauaacgagaggggaaaucacggcgugaaaggcugggcguucgaugacgggaacgauauuuggaugggacggacuauaagcaaggacucccguuuggguuacgaaacauuuaaaguagugggcggguggucucagcccaauagcaaguuccagaucaaccgccaagucauuguggauucagacaauagaaguggauauuccggcaucuuuagcguugaggguaaaucuugcaucaacagguguuucuacguggaacugauucgggggcgacgccaggagaccagagucugguggacgucaaauaguauagugguauuuugcggcaccagcggaacauauggcuccgggucuuggccugauggagcagacaucaacuucaugccaauuuga

SEQ ID NO: 154281 - RNA, 1353 nt, Artificial Sequence
  derived and/or modified CDS sequence (opt3) from neuraminidase__InfluenzaA__AAF74321
augaaccccaaucagaagaucauuaccauaggcagcaucugcaugguggucgggauuaucucccugaugcuccaaauuggaaacaucauaucuguuugggugucacacacaauccagacuuggcauccuaaucagccagagccguguaaccagaguauuaauuucuacacggaacaagccgcugcaagcguaacccuugccgguaacuccucucugugccccaucucgggcugggcgauuuauucaaaagacaauagcaucagaauagggaguaagggagauguguuugucauuagggagccuuucaucuccuguucucacuuggaaugccggacauuuuucuuaacucagggcgcucugcuaaacgacaaacauagcaaugguaccgugaaggaucgcuccccauaccgaacacucaugucaugucccguuggggaggccccuaguccauauaacagccguuuugaaucuguggcaugguccgccucagcuugccacgacggaauuagcuggcugaccaucggcaucaguggccccgauaauggggcagucgccgugcuuaaauacaacggaauuauaacugacacaaucaagucuuggagaaauaacauucugaggacccaggaguccgagugugcuugcguaaaugguagcuguuucacgguuaugacugauggcccuucgaacgaacaggccucuuauaagaucuuuaaaauagagaaggggcggguggucaaauccguggaauugaacgcgccaaauuaccauuaucaagagugcucauguuacccggacgcaggagagauuaccugcgugugccgcgauaacuggcacggcaguaauagacccugggucagcuucaaccagaaucucgaauaccagaucgguuauaucuguuccgggguuuuuggagacucuccuaggccaaacgauggcacaggcagcugcgggcccgugucacugaauggagccuacgguguaaagggcuucaguuuuaaauaugggaacggaguguggauuggccggacuaaguccaccagcucucgcucagguuucgagaugaucugggacccuaauggguggacagaaaccgauaguagcuuuucccugaagcaggacauuauagcuaucacggacuggucuggcuacucgggcagcuucauucaacacccagagcucacuggauuaaacuguaugcgacccugcuucugggucgaacugaucagagggaggccgaaagagaagacaaucuggaccuccggaucaaguauuucuuuuuguggugugaauagcgauacuguuggcugguccuggccugacggggccgagcuucccuucacaauagauaaauga

SEQ ID NO: 154282 - RNA, 1353 nt, Artificial Sequence
  derived and/or modified CDS sequence (opt3) from neuraminidase__InfluenzaA__AAF74322
augaaccccaaucagaagaucauuaccauaggcagcaucugcaugguggucgggauuaucucccugaugcuccaaauuggaaacacaaucucuguuugggugucacacauaaucaaaacuuggcauccuaaucagccagagccguguaaccagaguauuaauuucuacacggaacaggccgcugcaagcguaacccuugccgguaacuccucucugugccccaucucgggcugggcgauuuauucaaaggacaauagcaucagaauagggaguaaaggagauguguuugucauuagggagccuuucaucuccuguucucacuuggaaugccggacauuuuucuuaacucaaggcgcucugcuaaacgacaagcauagcaaugguaccgugaaagaucgcuccccauaccgaacacucaugucaugucccguuggggaggccccuaguccauauaacagccguuuugaaucuguggcaugguccgccucagcuugccacgacggaauuagcuggcugaccaucggcaucaguggccccgauaauggggcagucgccgugcuuaaguacaacggaauuauaacugacacaaucaagucuuggagaaauaacacccugaggacgcaggaguccgagugugcuugcguaaaugguagcuguuucacuguuaugaccgauggcccuucgaacgaacaggccucuuauaaaauuuuuaagaucgagaaagggcggguggucaaguccguggaauugaacgcgccaaauuaccauuaugaggagugcucauguuacccggacgcaggagaaauaacaugcgugugccgcgauaacuggcacggcaguaauagacccugggucagcuucaaccagaaucucgaguaccaaauugguuauaucuguuccgggguuuuuggagacucuccuaggccaaacgauggcacuggcagcugcgggcccgugucacugaauggagccuacgguguaaaaggcuucaguuuuaaguaugggaacggaguguggaucggccggaccaaguccacaagcucucgcucagguuucgaaaugauuugggacccuaauggguggaccgagacggauaguagcuuuucccugaaacaggacaucauugcuauaacugacuggucuggcuacucgggcagcuucauccagcacccagaacucacaggauuaaacuguaugcgacccugcuucugggucgagcugauuagagggaggccgaaggagaaaaccaucuggacuuccggaucaaguaucucuuuuuguggugugaauagcgauacaguuggcugguccuggccugacggggccgaacuucccuucaccauugauaaguga

SEQ ID NO: 154283 - RNA, 1353 nt, Artificial Sequence
  derived and/or modified CDS sequence (opt3) from neuraminidase__InfluenzaA__AAF74323
augaaccccaaucagaagaucauuaccauaggcagcaucugcaugguggucgggauuaucucccugaugcuccaaauuggaaacaucauaucuguuuggaucucacacauuauccagacauggcauccuaaucagccagagccguguaaccagaguauuaauuucuacacugaacaagccgcugcaagcgugacgcuugccgguaacuccucucugugccccaucucgggcugggcgauauauucaaaagacaauagcauuagaaucgggaguaagggagauguauuugugauuagggagccuuucaucuccuguucucacuuggaaugccggaccuuuuucuuaacacagggcgcucugcuaaacgacaaacauagcaaugguacugucaaggaucgcuccccauaccgaacccucaugucaugucccgugggggaggccccuaguccauauaacagccguuuugaaucuguugcaugguccgccucagcuugccacgacggaaucagcuggcugacaauuggcauaaguggccccgauaaugaggcaguggccguccuuaaauacaacgggaucauuaccgacacuaucagaucuuggaggaauaacauacugcggacacaggaguccgaaugugcuugcgugaauggaagcuguuucaccguaaugacggaugguccuucgaacgagcaggccucuuauaagauuuuuaagaucgaaaaaggccgcguugugaaguccgucgaguugaacgcgccaaauuaccauuaugaggaaugcucauguuacccggacgcaggggagaucacuugcgugugcagagauaacuggcacggaaguaauaggcccugggugagcuucaaccaaaaucucgaauaccagauuggcuauaucuguuccggugucuuuggggacucuccucggccaaacgauggaaccggcagcugcggccccguuucacugaauggggccuacggagugaaagguuucaguuuuaaguauggcaacgggguauggauuggacgcacaaaauccacuagcucucgaucaggcuucgagaugauaugggacccuaaugguuggaccgaaacagauaguagcuuuucccugaagcaggacaucauugcugugaccgacuggucuggguacucgggcagcuucauccagcacccagagcucacgggauuaaacuguaugagacccugcuucugggucgagcugaucaggggccggccgaaggagaaaacuauuuggacauccgggucaaguauaucuuuuuguggagugaauagcgauaccguugguugguccuggccugacggcgccgaacuucccuucacuaucgauaaguga

SEQ ID NO: 154284 - RNA, 1353 nt, Artificial Sequence
  derived and/or modified CDS sequence (opt3) from neuraminidase__InfluenzaA__AAF74324
augaaccccaaucagaagaucauuaccauaggcagcaucugcaugguggucgggauuaucucccugaugcuccaaauuggaaacaucauaucuguuugggugucacacaucauucagacauggcauccuaaucagccagagccguguaaccagaguaucaauuucuacacugaacaagccgcugcaagcguaacgcuugccgguaacuccucucugugccccauuucgggcugggcgaucuauucaaaagacaauagcauaagaauugggaguaagggagauguguuugucaucagggagccuuucauuuccuguucucacuuggaaugccggaccuuuuucuuaacacagggcgcucugcuaaacgacaaacauagcaaugguacugugaaggaucgcuccccauaccgaacccucaugucaugucccguuggggaggccccuaguccauauaacagccguuuugaaucuguggcaugguccgccucagcuugccacgacggaaucagcuggcugacaaucggcauuaguggccccgauaauggggcagucgccgugcuuaaauacaacggaauaaucaccgacacuauuaagucuuggagaaauaacauccugaggacacaggaguccgagugugcuugcguaaaugguagcuguuucaccguuaugacggauggcccuucgaacgaacaggccucuuauaagauauuuaaaauugagaaggggcggguggucaaauccguggaauugaacgcgccaaauuaccauuaugaggagugcucauguuacccggacgcaggagaaaucacuugcgugugccgcgauaacuggcacggcaguaauagacccugggucagcuucaaccaaaaucucgaguaccagaucgguuauauuuguuccgggguuuuuggagacucuccuaggccaaacgauggcaccggcagcugcgggcccgugucacugaauggagccuacgguguaaagggcuucaguuuuaaauaugggaacggaguguggaucggccggacaaaguccacuagcucucgcucagguuucgaaaugauuugggacccuaauggguggaccgagacagauaguagcuuuucccugaagcaggacauaaucgcuauuaccgacuggucuggcuacucgggcagcuucauccagcacccagaacucacgggauuaaacuguaugcgacccugcuucugggucgagcugaucagagggaggccgaaagagaagacuauuuggacauccggaucaagugugucuuuuugugguguuaauagcgauaccaugggcugguccuggccugacggggccgaacuucccuucacuauagauaaauga

SEQ ID NO: 154285 - RNA, 1353 nt, Artificial Sequence
  derived and/or modified CDS sequence (opt3) from neuraminidase__InfluenzaA__AAF74325
augaaccccaaucagaagaucauuaccauaggcagcaucugcaugguggucgggauuaucucccugaugcuccaaauuggaaacacaaucucuguuugggugucacacauaaucaaaacuuggcauccuaaucagccagagccguguaaccagaguauuaauuucuacacggaacaggccgcugcaagcguaacccuugccgguaacuccucucugugccccaucucgggcugggcgauuuauucaaaggacaauagcaucagaauagggaguaaaggagauguguuugucauuagggagccuuucaucuccuguucucacuuggaaugccggacauuuuucuuaacucaaggcgcucugcuaaacgacaagcauagcaaugguaccgugaaagaucgcuccccauaccgaacacucaugucaugucccguuggggaggccccuaguccauauaacagccguuuugaaucuguggcaugguccgccucagcuugccacgacggaauuagcuggcugaccaucggcaucaguggccccgauaauggggcagucgccgugcuuaaguacaacggaauuauaacugacacaaucaagucuuggagaaauaacacccugaggacgcaggaguccgagugugcuugcguaaaugguagcuguuucacuguuaugaccgauggcccuucgaacgaacaggccucuuauaaaauuuuuaagaucgagaaagggcggguggucaaguccguggaauugaacgcgccaaauuaccauuaugaggagugcucauguuacccggacgcaggagaaauaacaugcgugugccgcgauaacuggcacggcaguaauagacccugggucagcuucaaccagaaucucgaguaccaaauugguuauaucuguuccgggguuuuuggagacucuccuaggccaaacgauggcacuggcagcugcgggcccgugucacugaauggagccuacgguguaaaaggcuucaguuuuaaguaugggaacggaguguggaucggccggaccaaguccacaagcucucgcucagguuucgaaaugauuugggacccuaauggguggaccgagacggauaguagcuuuucccugaaacaggacaucauugcuauaacugacuggucuggcuacucgggcagcuucauccagcacccagaacucacaggauuaaacuguaugcgacccugcuucugggucgagcugauuagagggaggccgaaggagaaaaccaucuggacuuccggaucaaguaucucuuuuuguggugugaauagcgauacaguuggcugguccuggccugacggggccgaacuucccuauaccauugauaaguga

SEQ ID NO: 154286 - RNA, 1410 nt, Artificial Sequence; identical to SEQ ID NO: 144776
  derived and/or modified CDS sequence (opt3) from neuraminidase__InfluenzaA__EPI239900

SEQ ID NO: 154287 - RNA, 1410 nt, Artificial Sequence; identical to SEQ ID NO: 145125
  derived and/or modified CDS sequence (opt3) from neuraminidase__InfluenzaA__EPI221062

SEQ ID NO: 154288 - RNA, 1410 nt, Artificial Sequence; identical to SEQ ID NO: 144776
  derived and/or modified CDS sequence (opt3) from neuraminidase__InfluenzaA__EPI534079

SEQ ID NO: 154289 - RNA, 1410 nt, Artificial Sequence; identical to SEQ ID NO: 144776
  derived and/or modified CDS sequence (opt3) from neuraminidase__InfluenzaA__AGM53851

SEQ ID NO: 154290 - RNA, 1410 nt, Artificial Sequence
  derived and/or modified CDS sequence (opt3) from neuraminidase__InfluenzaA__EPI731464
augaaccccaaucagaagaucauuaccauaggcagcgugugcaugacaaucgggauggccaaccugauucuccaaaucggaaauauuaucuccauauggaucucucacucaauucagcuugguaaccagaaucagaucgagacuuguaaccaaagugucauuacguacgaaaauaacaccuggguuaaucagacauaugugaacaucagcaauacuaacuucgcugcaggccaguccguagugucugucaaacuggccgggggaucgucauugugcccugugagcggcugggcgauauacaguaaggacaauuccguuagaauugguucuaaaggggauguguuugucaucagggagccauucauuagcuguuccccguuagaaugccggaccuuuuuccugacacagggagcucuacucaacgacaagcauucaaauggcaccaucaaagaucgcagucccuaucgaacucugaugagcuguccuaucggcgaggugccaucucccuacaacucccguuuugaaucaguagccuggagcgcaagugccugccacgacgggauuaacuggcuuacaauaggaaucucugguccugauaauggcgcuguugcagugcugaaguauaacgggauuaucaccgacacgauaaaguccuggagaaauaacauuuugaggacucaagagagcgagugugccugcgucaauggaucguguuucaccgugaugacagauggcccaucuaacggucaggcuuccuacaaaaucuuucggaucgaaaaggggaaaauugugaagucagucgagaugaaugcccccaacuaucauuacgaagagugcaguuguuacccugacagcuccgagaucacuugcguuugccgcgauaauuggcacggaucuaacagaccaugggugagcuucaaucagaaccucgaauaucagauuggcuacauauguucaggcaucuuuggggacaauccgaggcccaacgauaaaaccggaaguugcgguccuguauccagcaauggcgcgaacggggugaagggauucucuuuuaaguauggcaacggugucuggauugggcggacaaaaucaaucaguagccgcaauggcuucgagaugaucugggacccaaacggauggaccggcacggauaauaacuuuuccauuaagcaagacauaguggggaucaaugaauggucuggauacucggguagcuucguucagcaucccgagcugacuggccuggacuguauucgaccuugcuucuggguggaacucaucagagggaggccaaaagagaacacaauuuggaccuccggaucaaguaucucuuuuuguggcgucaauagcgauacuguggguugguccuggcccgacggggcagaguuaccguucacaauagauaaguga

SEQ ID NO: 154291 - RNA, 1410 nt, Artificial Sequence; identical to SEQ ID NO: 144776
  derived and/or modified CDS sequence (opt3) from neuraminidase__InfluenzaA__EPI696973

SEQ ID NO: 154292 - RNA, 1410 nt, Artificial Sequence
  derived and/or modified CDS sequence (opt3) from neuraminidase__InfluenzaA__EPI662593
augaaccccaaucagaagaucauuaccauaggcagcaucugcaugacaauugggauggccaaccugauccuccaaauuggaaauaucauauccaucugggugucucacucaauucagaucgguaaccagagucagauugagacuuguaaucaaagcgucaucacguacgaaaacaauaccuggguuaaccagacauaugugaauauauccaacacuaauuucgcugcaggccagucuguagugucggucaaacuugccgggaacucaagccugugcccugugaguggaugggcgauuuacuccaaggacaauucuguuagaaucggcagcaaaggugauguguuugucauuagggagccauucaucuccuguucaccguuggaaugccggaccuuuuucuuaacacagggggcucugcuaaacgacaagcauaguaauggaaccaucaaagaucgcagccccuaucgaacucucaugucuuguccuauuggcgaggugccaucccccuacaacucacguuuugaaagcguagccuggagugcaucugccugccacgacggcauaaacuggcugacaaucgggauuuccggaccugauagcggugcuguugcagugcuuaaguauaauggcaucauaaccgacacgauuaagucguggagaaacaauauccugaggacucaagagucugagugugccugcgucaacggguccuguuucaccaucaugacagauggaccaucagacggccaggcuaguuacaaaauuuuucggaucgaaaaggguaaaauuauaaagagcguggagaugaaagcccccaauuaucauuacgaagagugcuccuguuacccugauucuagcgagaucacuugcgugugccgcgacaacuggcacgggucaaauagaccaugggucaguuucaaccagaauuuggaauaucagaugggauacauuuguuccggcguuuuuggcgauaacccgaggcccaaugacaagaccgggagcugcggaccugugucuucaaacggugcgaauggcguaaagggguucaguuuuaaauauggaaacggcguguggaucggucggacaaagagcaucuccucucgcaaaggguucgagaugauuugggauccaaauggcuggaccggaacggacaacaaguuuucgauaaaacaagacaucgucggcauuaacgaauggagcggguacuccggaucauucgugcagcaucccgagcucacuggucuggauuguauccgaccuugcuucuggguugaacugauuagaggcaggccagaggagaauacaaucuggaccagugggucuagcauauccuuuuguggagugaacucagacacugucggcuggagcuggcccgauggugcagaacucccguucacaaucgacaaguga

SEQ ID NO: 154293 - RNA, 1410 nt, Artificial Sequence; identical to SEQ ID NO: 154292
  derived and/or modified CDS sequence (opt3) from neuraminidase__InfluenzaA__EPI830229

SEQ ID NO: 154294 - RNA, 1410 nt, Artificial Sequence; identical to SEQ ID NO: 151885
  derived and/or modified CDS sequence (opt3) from neuraminidase__InfluenzaA__AGU92879

SEQ ID NO: 154295 - RNA, 1410 nt, Artificial Sequence; identical to SEQ ID NO: 151884
  derived and/or modified CDS sequence (opt3) from neuraminidase__InfluenzaA__AGU92857

SEQ ID NO: 154296 - RNA, 1410 nt, Artificial Sequence; identical to SEQ ID NO: 151883
  derived and/or modified CDS sequence (opt3) from neuraminidase__InfluenzaA__AGU92846

SEQ ID NO: 154297 - RNA, 1410 nt, Artificial Sequence; identical to SEQ ID NO: 151894
  derived and/or modified CDS sequence (opt3) from neuraminidase__InfluenzaA__AGU92835

SEQ ID NO: 154298 - RNA, 1410 nt, Artificial Sequence; identical to SEQ ID NO: 151870
  derived and/or modified CDS sequence (opt3) from neuraminidase__InfluenzaA__AGU92703

SEQ ID NO: 154299 - RNA, 1410 nt, Artificial Sequence
  derived and/or modified CDS sequence (opt3) from neuraminidase__InfluenzaA__EPI643117
augaaccccaaucagaagaucauuaccauaggcagcgugucccugacaaucucuacuauuugcuucuuuaugcaaaucgccauucucaucacgaccgucacacuucacuucaaacaguacgaguuuaacucaccuccaaauaaccagguuaugcugugugaaccgacuauaaucgagagaaauauuaccgaaaucguguauuugacaaacaccacuauugagaaggaaaucugccccaaaccugcugaguacaggaauuggaguaagccacagugugggauaacaggauucgcacccuuuagcaaagacaacuccauucgguuaucugccgguggcgauaucuggguaacccgcgagccuuaugugucgugcgacccagauaaguguuaccaauucgcgcuggggcagggaacgacucuaaauaacguccauucaaauaacaccgugcgagaccguacacccuauagaacucuccugaugaaugaacuuggcguuccuuuucaccuggguaccaaacaggugugcauugcuuggagcaguuccucuugucaugaugggaaggccugguugcacgucugcaucacaggagacgauaagaacgcaaccgccagcuucaucuacaauggcaggcucguggacuccguaguuucauggaguaaagauauucugcggacgcaggagagcgaauguauaugcaucaacggcacuuguacaguggucaugaccgacgggucugcuuccggaaaggcagauacuaaaauucuguuuaucgaggaggguaagauagugcauacaucaacccucagcggcagugcccaacacguggaagagugcucuugcuauccacgcuacccgggggucagauguguuugcagggacaacuggaagggauccaaucggcccauuguggauaucaacaucaaagaccacagcauuguaucgucuuacguguguuccggcuuagucggugacacgccucgcaagaaugauucaaguagcuccucucauugccuggacccaaacaaugaagaagggggacacggcgugaaaggcugggcuuucgaugacgggaacgauguuuggaugggacgaaccaucaaugagacaagcagacuugguuaugagacuuuuaaggugauugagggcuggucaaaccccaaaaguaaguugcagaccaauaggcaggucauaguggaccguggggaucgguccggauacagcggcaucuucucuguagaagguaaaucauguauuaaccgcugcuuuuauguugagcugaucagagggaggaaggaagagacagaagugcuauggaccaguaauagcaucgucguguucuguggcacuuccggaacauacggcaccgggucuuggccugacggagccgaucucaaccugaugccaauuuga

SEQ ID NO: 154300 - RNA, 1410 nt, Artificial Sequence
  derived and/or modified CDS sequence (opt3) from neuraminidase__InfluenzaA__EPI675797
augaaccccaaucagaagaucauuaccauaggcagcgugucccugacaaucucuacuauuugcuucuuuaugcaaaucgccauucucaucacgaccgucacacuucacuucaaacaguacgaguuuaacucaccuccaaauaaccagguuaugcugugugaaccgacuauaaucgagagaaauauuaccgaaaucguguauuugacaaacaccacuauugagaaggaaaucugccccaaaccugcugaguacaggaauuggaguaagccacagugugggauaacaggauucgcacccuuuagcaaagacaacuccauucgguuaucugccgguggcgauaucuggguaacccgcgagccuuaugugucgugcgacccagauaaguguuaccaauucgcgcuggggcagggaacgacucuaaauaacguccauucaaauaacaaggugcgagaccguacccccuauagaacacuccugaugaaugaacuuggcguuccuuuucaccuggguacuaaacaggugugcauugcuuggagcaguuccucuugucaugaugggaaggccugguugcacgucugcaucaccggagacgauaaaaacgcaacagccagcuucaucuacaauggcaggcucguggacuccguaguuucauggaguaaggauauucugcggacccaggagagcgaauguauaugcaucaacggcacguguacuguggucaugacagacgggucugcuuccggaaaagcagauaccaagauucuguuuaucgaggaggguaagauagugcauacuucaacacucagcggcagugcccaacacguggaagagugcucuugcuauccacgcuacccgggggucagauguguuugcagggacaacuggaaaggauccaaucggcccauuguggauaucaacaucaaggaccacagcauuguaucgucuuacguguguuccggcuuagucggugacaccccucgcaaaaaugauucaaguagcuccucucauugccuggacccaaacaaugaagaagggggacacggcgugaagggcugggcuuucgaugacgggaacgauguuuggaugggacgaacgaucaaugagaccagcagacuugguuaugagacauuuaaagugauugagggcuggucaaaccccaagaguaaauugcagacuaauaggcaggucauaguggaccguggggaucgguccggauacagcggcaucuucucuguagaagguaagucauguauuaaccgcugcuuuuauguugagcugaucagagggaggaaggaagagaccgaagugcuauggacaaguaauagcaucgucguguucuguggcacuuccggaaccuacggcacagggucuuggccugacggagccgaucucaaccugaugccaauuuga

SEQ ID NO: 154301 - RNA, 1410 nt, Artificial Sequence; identical to SEQ ID NO: 154299
  derived and/or modified CDS sequence (opt3) from neuraminidase__InfluenzaA__EPI578429

SEQ ID NO: 154302 - RNA, 1410 nt, Artificial Sequence; identical to SEQ ID NO: 154299
  derived and/or modified CDS sequence (opt3) from neuraminidase__InfluenzaA__EPI614405

SEQ ID NO: 154303 - RNA, 1350 nt, Artificial Sequence; identical to SEQ ID NO: 154221
  derived and/or modified CDS sequence (opt3) from neuraminidase__InfluenzaA__AAT73329

SEQ ID NO: 154304 - RNA, 1350 nt, Artificial Sequence; identical to SEQ ID NO: 154221
  derived and/or modified CDS sequence (opt3) from neuraminidase__InfluenzaA__AAW80723

SEQ ID NO: 154305 - RNA, 1350 nt, Artificial Sequence; identical to SEQ ID NO: 154221
  derived and/or modified CDS sequence (opt3) from neuraminidase__InfluenzaA__EF541467

SEQ ID NO: 154306 - RNA, 1398 nt, Artificial Sequence; identical to SEQ ID NO: 151502
  derived and/or modified CDS sequence (opt3) from neuraminidase__InfluenzaA__EPI439509

SEQ ID NO: 154307 - RNA, 1410 nt, Artificial Sequence
  derived and/or modified CDS sequence (opt3) from neuraminidase__InfluenzaA__EPI482776
augaacaccaaucagagaaucauuacaauaggcacugugugcaugaucgucgggauuaucagccugcuccuucaaauuggaaacaucguuucccuguggauaucucacucaauccagacggguugggagaaucauaccgugauguguaaccagaguguaauuacauacgugaauaacacuugggucaauaggaccuaugugaacaucagcaauauuaagaucgccacaauacaggacguuaccuccauuaucuuggcuggcaacucuucguuaugccccgugucagggugggcagucuacagcaaagauaauaguauucggaucggauccaagggcgacaucuucgugauucgcgaaccuuuuauaucuuguagccaacuggagugccgaacuuucuuucuaacacagggugcccuccugaacgauaaacacuccaaugggaccguaaaggaccguucaccauauagaacgcuuaugaguuguccgaucggagaagcgcccagcccuuacaacucuagguucgaguccguugcuuggucagccagcgcaugccaugauggcaugggcuggcugacuauugggaucaguggaccagacaauggugccguggcugucuugaaauauaacggcauaauuaccgauacaaucaagucuuggcggaacaagauccuccgcacucaggaauccgagugugugugcaugaaugggagcuguuuuaccgugcugacagacggacccucgaacggccaggcaucuuacaaaauuuucaaggucgagaaagguaagaucauuaaauccauagaacuggaugccccuaauuaucacuacgaggaaugcucauguuacccagacaccgggaagguuaugugcgugugcagagauaacuggcaugcuaguaauaggcccugggugagcuuuaaccaaaaucucgacuaucagaucggauacauuuguuccggcguguucggcgauaacccucggucuaaugacgggaagggaaacugcgguccagucuuaagcaauggcgccaacggggugaaaggauuuucauaucgcuacggcaaugguguuuggaucgggcgaacgaagaguaucaacuccagaagcggcuucgagaugauuugggacccgaauggauggacugagacagauucuucauuuaguaugaaacaggacauaaucgcgcugaacgauuggagcggcuauuccgggucuuucgugcagcaccccgaacuuaccggaaugaacuguauuaggccuugcuuuugggucgaguugauccggggucaaccaaaggaaucgacuauuugggcaagcggcuccucaaucaguuucugugggguaaauucugagacagccagcugguccuggcccgacggagcugaucugccuuucaccauagacaaauga

SEQ ID NO: 154308 - RNA, 1410 nt, Artificial Sequence
  derived and/or modified CDS sequence (opt3) from neuraminidase__InfluenzaA__EPI745533
augaaccccaaucagaagaucauuaccauaggcagcgugugcaucacaauugggauggccaaccugauccuccaaauuggaaauaucauauccaucuggauuucucacucaauccagcuugguaaccagaaucagauugagacuuguaaccaaagugucaucacguacgaaaauaacaccuggguuaaucagacauaugugaacauaagcaauacuaacuucgcugcaggccaguccguagugucugucaaacuggccggaaauucgucauugugcccugugagcgggugggcgauuuacaguaaggacaacuccaucagaauuggcucuaaaggugauguuuuugugaucagggagccauucaucagcuguuccccguuagaaugccggaccuuuuuccugacacagggggcucuacucaaugacaagcauucaaacggaaccauuaaagaucgcagucccuaucgaacucugaugagcuguccuauaggcgaggucccaucucccuacaacucccguuuugaaucaguggccuggagcgcaagugccugccacgacggcaucucuuggcuuacaauugggaucuccggaccugauaauggugcuguagcaguucugaaguauaacggcauaauuaccgacacgaucaagagcuggagaaauaacaucuugaggacucaagagucggagugugccugcgugaaugggucuuguuucaccgucaugacagauggaccauccgacggccaggcuucauacaaaauuuuucggaucgaaaaggguaaaauugugaagaguguggagaugaacgcccccaauuaucauuacgaagagugcagcuguuacccugauuccucugagauaacuugcgucugccgcgacaacuggcacgggagcaauagaccauggguuucauucaaccagaaucucgaauaucagaucggauacauuuguaguggcaucuuuggcgauaacccgaggcccaaugacaaaaccggguccugcggaccugugagcucuaacggugcgaauggcguaaagggguucucauuuaaguauggaaacggcguguggaucggucggacaaaaaguauuagcucccgcaacggguucgagaugauaugggauccaaauggcuggaccggaacggacaacaauuuuucuaucaagcaagacauugucggcaucaacgaauggucgggguacagcggauccuucgugcagcaucccgagcugacuggucuggauuguauuaaaccuugcuucuggguugaacucauccgaggcagaccaaaggagaauacaauauggaccucagggaguucuaucagcuuuuguggagugaacuccgacacugucggcuggucauggcccgauggugcagaguuaccguucacaauugacaaauga

SEQ ID NO: 154309 - RNA, 1410 nt, Artificial Sequence; identical to SEQ ID NO: 144776
  derived and/or modified CDS sequence (opt3) from neuraminidase__InfluenzaA__AEE69012

SEQ ID NO: 154310 - RNA, 1410 nt, Artificial Sequence; identical to SEQ ID NO: 144776
  derived and/or modified CDS sequence (opt3) from neuraminidase__InfluenzaA__EPI176609

SEQ ID NO: 154311 - RNA, 1410 nt, Artificial Sequence; identical to SEQ ID NO: 144776
  derived and/or modified CDS sequence (opt3) from neuraminidase__InfluenzaA__EPI176472

SEQ ID NO: 154312 - RNA, 1410 nt, Artificial Sequence
  derived and/or modified CDS sequence (opt3) from neuraminidase__InfluenzaA__EPI280340
augaaccccaaucagaagaucauuaccauaggcagcgugugcaucacaauugggauggccaaccugauccuccaaauuggaaauaucauauccaucuggauuucucacucaauccagcuugguaaccagaaucagauugagacuuguaaccaaagugucaucacguacgaaaauaacaccuggguuaaucagacauaugugaacauaagcaauacuaacuucgcugcaggccaguccguagugucugucaaacuggccggaaauucgucauugugcccugugagcgggugggcgauuuacaguaaggacaacuccaucagaauuggcucuaaaggugauguuuuugugaucagggagccauucaucagcuguuccccguuagaaugccggaccuuuuuccugacacagggggcucuacucaaugacaagcauucaaacggaaccauuaaagaucgcagucccuaucgaacucugaugagcuguccuauaggcgaggucccaucucccuacaacucccguuuugaaucaguggccuggagcgcaagugccugccacgacggcaucucuuggcuuacaauugggaucuccggaccugauaauggugcuguagcaguucugaaguauaacggcauaauuaccgacacgaucaagagcuggagaaauaacaucuugaggacucaagagucggagugugccugcgugaaugggucuuguuucaccgucaugacagauggaccauccgacggccaggcuucauacaaaauuuuucggaucgaaaaggguaaaauugugaagaguguggagaugaacgcccccaauuaucauuacgaagagugcagcuguuacccugauuccucugagauaacuugcgucugccgcgacaacuggcacgggagcaauagaccauggguuucauucaaccagaaucucgaauaucagaucggauacauuuguaguggcaucuuuggcgauaacccgaggcccaaugacaaaaccggguccugcggaccugugagcucuaacggugcgaauggcguaaagggguucucauuuaaguauggaaacggcguguggaucggucggacaaaaaguauuagcucccgcaacggguucgagauaaucugggauccaaauggcuggaccggaacggacaacaauuuuucuauuaagcaagacaucgucggcauuaacgaauggucgggguacagcggauccuucgugcagcaucccgagcugacuggucuggauuguauccgaccuugcuucuggguugaacucauaagaggcaggccaaaagagaauacaaucuggaccucagggaguucuauuagcuuuuguggagugaacuccgacacugucggcuggucauggcccgauggugcagaguuaccguucacaaucgacaaguga

SEQ ID NO: 154313 - RNA, 1410 nt, Artificial Sequence; identical to SEQ ID NO: 144776
  derived and/or modified CDS sequence (opt3) from neuraminidase__InfluenzaA__EPI240318

SEQ ID NO: 154314 - RNA, 1410 nt, Artificial Sequence; identical to SEQ ID NO: 144776
  derived and/or modified CDS sequence (opt3) from neuraminidase__InfluenzaA__EPI183133

SEQ ID NO: 154315 - RNA, 1410 nt, Artificial Sequence; identical to SEQ ID NO: 144776
  derived and/or modified CDS sequence (opt3) from neuraminidase__InfluenzaA__EPI369141

SEQ ID NO: 154316 - RNA, 1410 nt, Artificial Sequence
  derived and/or modified CDS sequence (opt3) from neuraminidase__InfluenzaA__EPI482787
augaacaccaaucagagaaucauuacaauaggcacugugugccugaucgucgggauuguuagccuccuucugcaaaucggaaacauuguguccuuguggaucucucacucaauacagacggguaagaggagucaucccgagaccuguagccagaauguaaucacauacgaaaacaauacuugggugaaccagaccuaugucaauauuuccaacacaaauaucguggacggccaagggguuaccucuauuaucuuagccggaaacucgccucugugcccaauaucaggcugggcuauuuacagcaaagauaauaguauccggauugguuccaagggggacaucuucgugauccgcgagccguuuauuucuuguagccaccuagaaugccgaacuuucuuucucacacagggagcacugcuuaacgaucgucauuccaauggcaccgucaaagacagaucacccuauaggacgcugaugaguuguccuauaggcgaggccccaagccccuacaacucucgguucgaauccguggcguggucagcuagcgccugccacgaugggaugggaugguugacuaucgguauuaguggcccugacaauggggcaguagccguucucaaguauaacggaaucauaaccgauacaauuaaaucuuggcgcaacaagauccugagaacucaggaguccgagugugugugcaucaauggcagcuguuuuaccauuaugacagacgguccaucgaacgggcaggcuucuuacaagaucuucaaaauggaaaagggaaaaauuauaaaguccgucgagcuggaugcacccaauuaucauuacgaagagugcucauguuacccugacaccggcaaaguggugugcgucugcagggauaacuggcacgccaguaaucggccauggguuacguuugaccaaaaccucaauuaucagaucggcuacauuuguagcgggguguucggagauaacccgcgcuccaaugacgguaagggcaacugcgggcccguaccuucuaauggagcuaacggcgugaaggguuuuagcuuccgauaugggaauggcgucuggaucggaagaacuaaaucaaucaguuccaggagcggcuuugagaugauuugggacccaaacggguggacagaaaccgauucuucauucaguauaaagcaggacaucauugccuuaacugauuggagcggauacuccgguucuuuugugcagcaccccgagcugacaggcaugaauuguaucaaaccuugcuucuggguugaacuuauucgggggcaaccaaaggagucgaccaucuggacgagcggauccucaauaaguuucuguggcguggacucugaaaccgucagcugguccuggcccgauggugcggacuugccguuuacaaucgauaaauga

SEQ ID NO: 154317 - RNA, 1410 nt, Artificial Sequence
  derived and/or modified CDS sequence (opt3) from neuraminidase__InfluenzaA__EPI482790
augaacaccaaucagagaaucauuacaauaggcacugugugccugaucgucgggauuaucagccuccuucugcaaauuggaaacaugguuuccuuguggaucucucacucaauacagacggguggcaagaaucauaccgagauguguaaccagaaugugaucacauacguaaacaauacuugggugaacaggaccuaugucaauauuaguaacacaaaaaucgugaauguucaggacguggucagcgugauuuuaaccgggaacuccucucugugccccaucucgggaugggccauauacucaaaggauaauagcauucggaucggcaguaaaggugacauuuucguaauccgcgaaccuuuuaucuccuguucucaccuagagugccgaacuuucuuucucacacaaggggcucugcuuaacgauaagcauagcaauggaaccguuaaagaccguuccccauauagaacgcugaugucauguccggugggcgaagcacccaguccuuacaacagcagguucgagucugucgccugguccgcgucagcuugccacgauggcauggggugguugacuauuggaauaagcgguccagacaacggcgccguggcagugcucaaguauaaugggaucauuaccgauacaaucaagaguuggcggaacaaaauacugcgcacucaggaaucugagugugucugcaugaauggauccuguuuuaccguucugacagacggccccagcaacggucaggccucguacaagauuuucaaaauggagaaggggaaaaucaucaagucuauugaacucgaugcuccuaauuaucauuacgaggaaugcuccuguuacccagacgcaggaaaggugaugugcguaugcagagauaacuggcacgccucaaauaggcccugggugaguuuugaccagaacuuagauuaucaaaucggcuacauuuguagcggcgucuucggggacaauccucgguccaacgacggaaaagguaauugcggcccagugcacucuaacggggcuaauggaguuaagggcuuuagcuaucgcuacgguaacgggguguggauaggccgaaccaaaucaaucaauaguagauccggauucgagaugauuugggauccgaacggcuggacggggacugacagcucuuuuucaaugaagcaggauaucaucgcccugacagacuggaguggauauagcgguuccuucguccagcaucccgagcuuaccggcaugaacuguauuaggccuugcuuuuggguggaauugauacgggggcagccaaaagagaauacuaucugggcgucuggaucgagcauuuccuucuguggcguaaacggugaaacagcaucauggaguuggcccgauggggccgaccugccuuucaccaucgauaaguga

SEQ ID NO: 154318 - RNA, 1410 nt, Artificial Sequence
  derived and/or modified CDS sequence (opt3) from neuraminidase__InfluenzaA__EPI291797
augaacaccaaucagagaaucauuacaauaggcacugugugcaugaucguggggauuaucagccugcuccuucaaauuggaaacaucguuucccuguggauaucucacucaauccagacggguugggagaaucauaccgaaauguguaaccagagugugauuacauacguaaauaacacuugggugaauaggaccuaugucaacaucagcaauacaaacauugccaccauccaggacgugacuuccauaauuuuggcuggcaauucuucguuaugccccguuucagggugggcaaucuacagcaaggauaacaguauucggaucggauccaaaggcgacaucuucgugauucgcgagccuuuuauaucuuguagccaacuggaaugccgaacauucuuucuaacccagggugcccuccugaaugauaagcacuccaacgggacggucaaagaccguucaccauauagaacucuuaugaguuguccgaucggagaggcgcccagcccuuacaauucuagguucgaauccguggcuuggucagccagcgcaugccaugauggcaugggcuggcugaccauugggaucaguggaccagacaacggugccguagcuguuuugaaguauaacggcauaauuacagauacuaucaaaucuuggcggaauaagauccuccgcacccaggaguccgagugugugugcaugaacgggagcuguuuuacaguccugaccgacggacccucgaauggccaggcaucuuacaagauuuucaaaguggaaaaggguaaaaucauuaaguccauagagcuggaugccccuaacuaucacuacgaagagugcucauguuacccagacacggggaaagugaugugcgucugcagagauaauuggcaugcuaguaacaggcccuggguuagcuuuaaucaaaaccucgacuaucagaucggauacauuuguuccggcguguucggcgauaauccucggucuaacgacgggaagggaaauugcgguccaguauuaagcaacggcgccaauggggugaagggauuuucauaucgcuacggcaacggugucuggaucgggcgaacuaaaaguaucaauuccagaagcggcuucgagaugauuugggacccgaacggauggacagaaaccgauucuucauuuaguaugaagcaggacauaaucgcgcugacugauuggagcggcuauuccgggucuuucgugcagcaccccgagcuuacaggaaugaacuguauuaggccuugcuuuuggguugaauugauccggggucaaccaaaagagucgaccauuugggcaagcggcuccucaaucaguuucuguggggucaauucugaaacggccagcugguccuggcccgacggagcugaucugccuuucaccauagacaaguga

SEQ ID NO: 154319 - RNA, 1410 nt, Artificial Sequence; identical to SEQ ID NO: 154318
  derived and/or modified CDS sequence (opt3) from neuraminidase__InfluenzaA__EPI482798

SEQ ID NO: 154320 - RNA, 1410 nt, Artificial Sequence
  derived and/or modified CDS sequence (opt3) from neuraminidase__InfluenzaA__EPI638969
augaacaccaaucagagaaucauuacaauaggcacugugugcaugaucgucgggaugauuagccugcuccuucaaaucggauccauuguuucucuguggaucucacacaguauacagacggguugggagaaccauaccggcguguguaaucagagcguaaucacauacgugaacaauacuugggucaacaggaccuaugugaauauuuccaacaucaagauugccacaauccaggacguuacccccauaauuuuggcuggaaauucuucguuaugcccugugaacgggugggcagucuacucaaaagauaauagcauccggauuggcaguaagggugacaucuucgugauccgcgaaccauuuauuuccuguucucaacuggagugccgaacuuucuuucuaacacagggggcccuccugaacgauaaacacagcaauggaaccguaaaggaccguuccccguauagaacgcuuaugucaugucccauaggcgaagcgccuaguccauacaacagcagguucgagucuguugcuugguccgccucagcaugccaugauggcaugggguggcugacuaucggaauuagcggucccgacaauggcgccguggcugucuugaaauauaacgggaucauaaccgauacaauuaagaguuggcggaacaagauccuccgcacucaggaaucugagugugugugcaugaauggauccuguuuuaccgugcugacagacggcccuagcaacggucaggcaucguacaaaaucuucaaggucgagaaagggaagauuaucaaaucuauugaacuggaugccccaaauuaucacuacgaggaaugcuccuguuaccccgacaccggaaagguuaugugcgugugcagagauaacuggcaugcuucaaauaggccuuggguaaguuuuaaccaaaaucucgacuaucagauaggcuacaucuguagcggcguguucggggauaacccacgguccacggacggaaaggguaauugcggcccggucuuaucuaacggggccaauggagugaaaggcuuuagcuaucgcuacgguaacgggguuuggauuggccgaacuaagucaaucaauaguagauccggauucgagaugaucugggaccccaacggcuggacagagaccgauagcucuuuuucaaugaaacaggacauuauagcgcugaaugauuauaguggguacagcggauccuucgugcagcacccugaacuuacugguaugaacuguaucaggccaugcuuuugggucgaguugauucggggccaacccaaggaaucuacaaucugggcaucggggagcuccauuucauucuguggagugaacagugagaccgccucuuggagcuggccugacggcgcugaucugccauucgccaucgacaaauga

SEQ ID NO: 154321 - RNA, 1410 nt, Artificial Sequence
  derived and/or modified CDS sequence (opt3) from neuraminidase__InfluenzaA__ABI19012
augaacaccaaucagagaaucauuacaauaggcacugugugccugaucgucgggauuaucagccuccuucugcaaauuggaaacaugguuuccuuguggaucucucacucaauacagacggguggcaagaaucauaccgagauguguaaccagaaugugaucacauacguaaacaauacuugggugaacaggaccuaugucaauauuaguaacacaaaaaucgugaauguucaggacguggucagcgugauuuuaaccgggaacuccucucugugccccaucucgggaugggccauauacucaaaggauaauagcauucggaucggcaguaaaggugacauuuucguaauccgcgaaccuuuuaucuccuguucucaccuagagugccgaacuuucuuucucacacaaggggcucugcuuaacgauaagcauagcaauggaaccguuaaagaccguuccccauauagaacgcugaugucauguccgauuggcgaagcacccaguccuuacaacagcagguucgagucuguggccugguccgcgucagcuugccacgauggcauggggugguugacuauaggaaucagcgguccagacaacggcgccgucgcagugcucaaguauaaugggauuaucaccgauacaauaaagaguuggcggaacaaaauucugcgcacucaggaaucugagugugugugcaugaauggauccuguuuuaccguccugacagacggccccagcaacggucaggccucguacaagaucuucaaaauggagaaggggaaaaucauuaagucuaucgaacucgaugcuccuaauuaucauuacgaggaaugcuccuguuacccagacgcaggaaagguuaugugcgugugcagagauaacuggcacgccucaaauaggcccuggguaaguuuugaccagaacuuagauuaucaaauuggcuacauauguagcggcguguucggggacaauccucgguccaacgacggaaaagguaauugcggcccaguccacucuaacggggcuaauggagugaagggcuuuagcuaucgcuacgguaacgggguuuggaucggccgaaccaaaucaauuaauaguagauccggauucgagaugaucugggauccgaacggcuggacggggacugacagcucuuuuucaaugaagcaggauaucauugcccugacagacuggaguggauauagcgguuccuucgugaggcaucccgagcuuaccggcaugaacuguauacggccuugcuuuugggucgaauugauccgugggcagccaaaagagaauacuauuugggcgucuggaucgagcaucuccuucuguggcgugaacggugaaacagcaucauggaguuggcccgauggggccgaccugccuuucaccauugauaaguga

SEQ ID NO: 154322 - RNA, 1410 nt, Artificial Sequence
  derived and/or modified CDS sequence (opt3) from neuraminidase__InfluenzaA__EPI687791
augaaccccaaucagaagaucauuaccauaggcagcaucugcaugacaauugggauggccaaccugauccuccaaauuggaaauaucauauccaucugggugucucacucaauucagaucgguaaccagagucagauugagacuuguaaucaaagcgucaucacguacgaaaacaauaccuggguuaaccagacauaugugaauauauccaacacuaauuucgcugcaagacagucuguagugucggucaaacuugccggcaacucaagccugugcccugugagugggugggcgauuuacuccaaggacaauucuguuaggaucggaagcaaaggcgauguguuugucauucgggagccauucaucuccuguucaccguuggaaugccgcaccuuuuucuuaacacagggugcucugcuaaacgacaagcauaguaaugggaccaucaaagaucgaagccccuaucguacucucaugucuuguccuauuggagaggugccaucccccuacaacucaagauuugaaagcguagccuggagugcaucugccugccacgacggcauaaacuggcugacaaucggcauuuccgggccugauagcggagcuguugcagugcuuaaguauaaugguaucauaaccgacacgauuaagucguggaggaacaauauccugcggacucaagagucugagugugccugcgucaacggcuccuguuucaccaucaugacagaugggccaucagacggacaggcuaguuacaaaauuuuucgcaucgaaaagggcaaaauuauaaagagcguggagaugaaagcccccaauuaucauuacgaagagugcuccuguuacccugauucuagcgagaucacuugcgugugcagagacaacuggcacgguucaaauaggccaugggucaguuucaaccagaauuuggaauaucagaugggguacauuuguuccggaguuuuuggcgauaacccgcggcccaaugacaagaccggcagcugcgggccugugucuucaaacggagcgaaugguguaaagggcuucaguuuuaaauaugggaacggaguguggaucggccgcacaaagagcaucuccucucgaaaagguuucgagaugauuugggauccaaauggguggaccggcacggacaacaaguuuucgauaaaacaagacaucgucggaauuaacgaauggagcggcuacuccgggucauucgugcagcaucccgagcucacuggacuggauuguaucagaccuugcuucuggguugaacugauuaggggucggccagaggagaauacaaucuggaccaguggcucuagcauauccuuuuguggggugaacucagacacugucggauggagcuggcccgauggcgcagaacucccguucacaaucgacaaguga

SEQ ID NO: 154323 - RNA, 1410 nt, Artificial Sequence
  derived and/or modified CDS sequence (opt3) from neuraminidase__InfluenzaA__EPI841266
augaaccccaaucagaagaucauuaccauaggcagcaucugcaugacaauugggauggccaaccugauccuccaaauuggaaauaucauauccaucugggugucucacucaauucagaucgguaaccagagucagauugagacuuguaaucaaagcgucaucacguacgaaaacaauaccuggguuaaccagacauaugugaauauauccaacacuaauuucgcugcaagacagucuguagugucggucaaacuugccggcaacucaagccugugcccugugagugggugggcgauuuacuccaaggacaauucuguuaggaucggaagcaaaggcgauguguuugucauucgggagccauucaucuccuguucaccguuggaaugccgcaccuuuuucuuaacacagggugcucugcuaaacgacaagcauaguaaugggaccaucaaagaucgaagccccuaucguacucucaugucuuguccuauuggagaggugccaucccccuacaacucaagauuugaaagcguagccuggagugcaucugccugccacgacggcauaaacuggcugacaaucggcauuuccgggccugauagcggagcuguugcagugcuuaaguauaaugguaucauaaccgacacgauuaagucguggaggaacaauauccugcggacucaagagucugagugugccugcgucaacggcuccuguuucaccaucaugacagaugggccaucagacggacaggcuaguuacaaaauuuuucgcaucgaagagggcaagauuauaaaaagcguggaaaugaaggcccccaauuaucauuacgaggagugcuccuguuacccugauucuagcgaaaucacuugcgugugcagagacaacuggcacgguucaaauaggccaugggucaguuucaaccagaauuuggaguaucagaugggguacauuuguuccggaguuuuuggcgauaacccgcggcccaaugacaaaaccggcagcugcgggccugugucuucaaacggagcgaaugguguaaagggcuucaguuuuaaguaugggaacggaguguggaucggccgcacaaaaagcaucuccucucgaaaggguuucgaaaugauuugggauccaaauggguggaccggcacggacaacaaauuuucgauaaagcaagacaucgucggaauuaacgaguggagcggcuacuccgggucauucgugcagcaucccgaacucacuggacuggauuguaucagaccuugcuucuggguugagcugauuaggggucggccagaggaaaauacaaucuggaccaguggcucuagcauauccuuuuguggggugaacucagacacugucggauggagcuggcccgauggcgcagagcucccguucacaaucgacaaauga

SEQ ID NO: 154324 - RNA, 1410 nt, Artificial Sequence
  derived and/or modified CDS sequence (opt3) from neuraminidase__InfluenzaA__EPI291844
augaacaccaaucagagaaucauuacaauaggcacugugugccugaucgucgggauuaucagccuccuucugcaaauuggaacgaugguuuccuuguggaucucucacucaauacagaccgguggcaagaaccauacagagauguguaaucagaacgugaucacuuacguaaauaacaccugggugaauaggacauaugucaacauuaguaauaccaaaaucgugaacguucaggacguggucagcgugauuuuaacuggaaauuccucucugugccccaucucggggugggccauauacucaaaggauaacagcauucggaucggcaguaaaggugacauuuucguaauccgcgaaccuuuuaucuccuguucucaccuagagugccgaacauucuuucucacccaaggggcucugcuuaaugauaagcauagcaacggaacgguuaaagaccguuccccauauagaacucugaugucauguccgauuggcgaagcacccaguccuuacaauagcagguucgagucuguggccugguccgcgucagcuugccacgauggcauggggugguugaccauaggaaucagcgguccagacaacggcgccgucgcagugcucaaguauaacgggauuaucacagauacuauaaagaguuggcggaauaaaauucugcgcacccaggaaucugagugugugugcaugaacggauccuguuuuacaguccugaccgacggccccagcaauggucaggccucguacaagaucuucaaaauggagaaggggaaaaucauuaagucuaucgaacucgaugcuccuaacuaucauuacgaggaaugcuccuguuacccagacgcaggaaagguuaugugcgugugcagagauaauuggcacgccucaaacaggcccuggguaaguuuugaccagaauuuagauuaucaaauuggcuacauauguagcggcguguucggggacaacccucgguccaaugacggaaaagguaacugcggcccaguccacucuaauggggcuaacggagugaagggcuuuagcuauaaauacgguaaugggguuuggaucggccgcacgaagucaauuaacagucgauccggauucgagaugaucugggauccgaauggcuggacugggacagacagcucuuuuucaaugaaacaggauaucauugcccugaccgacuggaguggauauagcgguuccuucgugcagcaucccgagcuuacuggcaugaacuguauaagaccuugcuuuugggucgaauugaucagggggcagccaaaggagaacacaauuugggcgucuggaucgagcaucuccuucuguggcgugaauggugaaaccgcaucauggaguuggcccgauggggccgaccugccuuucacgauugauaaauga

SEQ ID NO: 154325 - RNA, 1410 nt, Artificial Sequence
  derived and/or modified CDS sequence (opt3) from neuraminidase__InfluenzaA__EPI558120
augaacaccaaucagagaaucauuacaauaggcacugugugcaugaucgucgggauuaucagccugcuccuucaaauuggaaacaucguuucccuguggauaucucacucaauccagacggguugggagaaucauaccgaaauguguaaccagagugugauuacauacguaaauaacacuuggaugaauaggaccuaugugaacaucagcaauauuaagaucgccacaauacaggacgucaccuccauuguguuggcuggcaacucuucguuaugccccguuucagggugggcaguguacagcaaagauaauaguauccggauuggauccaagggcgacaucuucgucauccgcgagccuuuuauuucuuguagccaacuggaaugccgaacuuucuuucuaacacagggugcccuccugaacgauaaacacuccaaugggaccgugaaggaccguucaccauauagaacgcuuaugaguuguccgauaggagaggcgcccagcccuuacaacucuagguucgaauccguagcuuggucagccagcgcaugccaugauggcaugggcuggcugacuaucgggauuaguggaccagacaauggugccguugcuguguugaaauauaacggcaucauaaccgauacaauuaagucuuggcggaacaagauccuccgcacucaggaguccgagugugucugcaucaaugggagcuguuuuaccgugcugacagacggacccucgaacggccaggcaucuuacaaaauuuucaagguggaaaaagguaagaucauuaaauccauagagcuggaugccccuaauuaucacuacgaagagugcucauguuacccagacaccgggaaggucaugugcaucugcagagauaacuggcaugcuaguaauaggcccuggguuagcuuugaccaaaaccucgauuaucagauuggauacaucuguuccggcguguucggcgacaauccucggucuaacgacgggaagggaaauugcgguccaguauuaagcaacggcgccaauggggugaaaggauuuucauaucgcuacggcaacggugucuggaucgggcgaacgaagaguauuaauuccagaagcggcuucgagaugauaugggauccgaacggauggacugaaacagacucuucauuuaguaugaaacaggauaucauugcgcugaaugacuggagcggcuauuccgggucuuucgugcagcaccccgagcuuaccggaaugaacuguaucaggccuugcuuuuggguugaauugauucggggucaaccaaaggagucgacuaucugggcaagcggcuccucaauaaguuucuguggggugaacucugaaacagccagcugguccuggcccgauggagcugaccugccuuucaccaucgauaaauga

SEQ ID NO: 154326 - RNA, 1410 nt, Artificial Sequence
  derived and/or modified CDS sequence (opt3) from neuraminidase__InfluenzaA__EPI564138
augaaccccaaucagaagaucauuaccauaggcagcgugucccugacaaucucuacuauuugcuucuuuaugcaaaucgccauucucaucacgaccgucacacuucacuucaaacaguacgaguuuaacucaccuccaaauaaccagguuaugcugugugaaccgacuauaaucgagagaaauauuaccgaaaucguguauuugacaaacaccacuauugagaaggaaaucugccccaaaccugcugaguacaggaauuggaguaagccacagugugggauaacaggauucgcacccuuuagcaaagacaacuccauucgguuaucugccgguggcgauaucuggguaacccgcgagccuuaugugucgugcgacccagauaaguguuaccaauucgcgcuggggcagggaacgacucuaaauaacguccauucaaauaacaccgugcgagaccguacacccuauagaacucuccugaugaaugaacuuggcguuccuuuucaccuggguaccaaacaggugugcauugcuuggagcaguuccucuugucaugaugggaaggccugguugcacgucugcaucacaggagacgauaagaacgcaaccgccagcuucaucuacaauggcaggcucguggacuccguaguuucauggaguaaagauauucugcggacgcaggagagcgaaugugugugcauaaacggcacuuguacagucgugaugaccgacgggucugcuuccggaaaggcagauacuaaaauccuguuuauugaggaggguaagaucgugcauacaucaaagcucagcggcagugcccaacacgucgaagagugcucuugcuauccacgcuacccggggguuagaugugugugcagggacaacuggaaaggauccaaucggcccauaguagauauuaacaucaaggaccacagcaucgugucgucuuacgucuguuccggcuuagugggugacaccccucgcaaaaaugauucaaguagcuccucucauugccuggacccaaacaaugaagaagggggacacggcguuaagggcugggcuuucgaugacgggaacgauguguggaugggacgaacgauuaaugagaccagcagacuugguuaugagacauuuaaagucguggagggcuggucaaaccccaagaguaaauugcagaucaauaggcagguaauuguugaccguggggaucgguccggauacagcggcauauucucuguggaagguaagucauguaucaaccgcugcuuuuaugucgagcugauuagagggaggaaggaagagacugaagugcuauggaccaguaauagcaucgucguguucuguggcacauccggaacuuacggcaccgggucuuggccugacggagccgaucucaaccugaugccaaucuga

SEQ ID NO: 154327 - RNA, 1410 nt, Artificial Sequence
  derived and/or modified CDS sequence (opt3) from neuraminidase__InfluenzaA__ANM92825
augaaccccaaucagaagaucauuaccauaggcagcaucugcaugacaauugggauggccaaccugauccuccaaauuggaaauaucauauccaucugggugucucacucaauucagaucgguaaccagagucagauugagacuuguaaucaaagcgucaucacguacgaaaacaauaccuggguuaaccagacauaugugaauauauccaacacuaauuucgcugcaggccagucuguagugucggucaaacuugccgggaacucaagccugugcccugugaguggaugggcgauuuacuccaaggacaauucuguuagaaucggcagcaaaggugauguguuugucauuagggagccauucaucuccuguucaccguuggaaugccggaccuuuuucuuaacacagggggcucugcuaaacgacaagcauaguaauggaaccaucaaagaucgcagccccuaucgaacucucaugucuuguccuauuggcgaggugccaucccccuacaacucacguuuugaaagcguagccuggagugcaucugccugccacgacggcauaaacuggcugacaaucgggauuuccggaccugauagcggugcuguugcagugcuuaaguauaauggcaucauaaccgacacgauuaagucguggagaaacaauauccugaggacucaagagucugagugugccugcgucaacggguccuguuucaccaucaugacagauggaccaucagacggccaggcuaguuacaaaauuuuucggaucgaaaaggguaaaauuauaaagagcguggagaugaaagcccccaauuaucauuacgaagagugcuccuguuacccugauucuagcgagaucacuugcgugugccgcgacaacuggcacgggucaaauagaccaugggucaguuucaaccagaauuuggaauaucagaugggauacauuuguuccggcguuuuuggcgauaacccgaggcccaaugacaagaccgggaacugcggaccugugagcucuaauggugcgaacggcguaaagggguucucauuuaaauauggaaauggcguguggaucggucggacaaagaguaucagcucccgcaaaggguucgagaugauuugggauccaaacggcuggaccggaacggacaacaaguuuucuauaaaacaagacaucgucggcauuaaugaauggucgggguacagcggauccuucgugcagcaucccgagcucacuggucuggauuguauccgaccuugcuucuggguugaacugauuagaggcaggccagaggagaacacaaucuggaccucagggaguucuauauccuuuuguggagugaauagcgacacugucggcuggucauggcccgauggugcagaacucccguucacaaucgacaaguga

SEQ ID NO: 154328 - RNA, 1410 nt, Artificial Sequence
  derived and/or modified CDS sequence (opt3) from neuraminidase__InfluenzaA__EPI291694
augaacaccaaucagagaaucauuacaauaggcacugugugccugaucgucgggauuguuagccuccuucugcaaaucggaaacauuguguccuuguggaucucucacucaauacagacgggugagaagaaucauagugaaguauguaaccagaauaucauuaccuacgagaacaaaacaugggugaaucagacuuaugucaacaucagcaauaccaacauugccgaaggccaaggggugacauccaucauauuagcuggaaauucuucgcugugccccguuucaggcugggcaauuuacagcaaggacaacaguaucaggauugguuccaaaggggauaucuucgugauccgggagccuuuuauuucuuguagccaccuagaaugccgcaccuucuuucucacucagggagcccugcuuaaugaccgacauuccaacggcacagucaaggaucguucaccauauagaacccugaugaguuguuugacgggcgaggcgccgagccccuacaauucuagguucgaguccguggcuuggucagccagcgcaugccacgacgggaugggauggcucacuauagguaucaguggcccugauaacggggccguagcuguucugaaauauaacggaauuaucaccgacacaauaaagucuuggcggaauaagauucugcgcacucaggaauccgagugugugugcaucaacggcagcuguuuuaccaucaugacagaugguccaucgaaugggcaggcaucuuacaaaauuuucaagauggaaaaaggaaagaucauuaaauccgucgagcucgacgcccccaacuaucauuacgaggaaugcucauguuacccugauaccggcaagguggugugcgucugcagagacaauuggcacgcuaguaacaggccauggguuagcuuugaucaaaauuuagacuaucagauaggcuacaucuguuccgggguguucggagauaacccccggucuaaugacgguaagggcaacugcgggccuguaccaagcaauggagccaacggcgugaaagguuuuucauuccgcuaugggaauggcgucuggauuggacgaacgaagaguaucaucuccagaagcggcuuugagaugauuugggacccgaacggguggacugaaacagauucuucauucaguauaaaacaggacaucauugcgcugaccgauuggagcggauacuccgguucuuuugugcagcaccccgagcuuacuggcaugaauuguaucaggccuugcuucuggguugaauugauucgggggcaaccaaaggagucgacaaucuggaccagcggauccucaauaaguuucuguggcguggacucugagacggcaagcugguccuggcccgauggugccgaccugccuuuuaccaucgauaaauga

SEQ ID NO: 154329 - RNA, 1410 nt, Artificial Sequence; identical to SEQ ID NO: 145262
  derived and/or modified CDS sequence (opt3) from neuraminidase__InfluenzaA__EPI241027

SEQ ID NO: 154330 - RNA, 1410 nt, Artificial Sequence; identical to SEQ ID NO: 144786
  derived and/or modified CDS sequence (opt3) from neuraminidase__InfluenzaA__EPI177405

SEQ ID NO: 154331 - RNA, 1410 nt, Artificial Sequence; identical to SEQ ID NO: 144786
  derived and/or modified CDS sequence (opt3) from neuraminidase__InfluenzaA__EPI242475

SEQ ID NO: 154332 - RNA, 1410 nt, Artificial Sequence
  derived and/or modified CDS sequence (opt3) from neuraminidase__InfluenzaA__EPI590131
augaacgccaaucagagaaucauuaccauaggcacagugugccugaucauugggaucauuagccuccuucugcaaaucggaaacauggucuccuuguggauaucucacucaauccagacugguggcaagaaucauacggagauguguaaccagaauguuauuaccuacgugaacaauacauggguaaacaggacuuaugugaauaucaguaacaccaaaauugucaaugugcaggacguugugagcgucaucuuaacagggaacuccucucugugcucgauaucaggaugggcuauuuacagcaaggauaauaguauccggauuggcuccaaaggugacaucuucgugauccgcgaacccuuuauuucuuguagccaccuagagugccgaaccuucuuucucacucaaggggcacugcuuaacgauaagcauuccaauggaacaguaaaagaccguucaccuuauagaacccugaugaguuguccaauaggcgaagccccgagccccuacaacucuagguucgaguccguugcguggucagcuagcgccugccacgauggcaucgggugguugacgauuggaaucagugguccugacaacggcgcaguggccguccucaaguauaaugggauaauuacugauaccaucaagucuuggcggaacaaaauccugcgcacacaggaauccgagugugugugcaugaauggaagcuguuuugcugugcugacugacggcccaucgaacggucaggcaucuuacaagauuuucaaagucaagcaggggaaaaucauuaaguccauagagcucgaugcccccaauuaucauuacgaagagugcucauguuacccugacgcuggaaagguuaugugcgugugcagagauaacuggcacgccaguaauaggccaugggugagcuuugaccaagauuuaaacuaucagaucggcuacauuuguuccggcguauucggggacaauccccggucuaacgacggaaaagguaauugcggcccuguccacagcaacggggcgaauggagugaagggcuuuucauaucgcuacgguaacgggguuuggaucggccgaaccaaaaguauccauuccagaagcggauucgaaaugauuugggauccaaauggcuggacagggaccgacucuucauuuaguaugaagcaggauauaaucgcacugacggacuggagcggauauuccgguucuuucgugcagcacccggagcuuacuggcaugaacuguauuaggcccugcuuuugggucgaguugauccgggggcaaccuaaagaaaacacaauuugggccucgggaagcuccaucucauucuguggcgugaauggugagaccgcuaguuggucuuggccagauggggccgaccugcccuucacuauagauaaguga

SEQ ID NO: 154333 - RNA, 1410 nt, Artificial Sequence
  derived and/or modified CDS sequence (opt3) from neuraminidase__InfluenzaA__EPI68596
augaacaccaaucagagaaucauuacaauaggcacugugugccugaucgucgggauuguuagccuccuucugcaaaucggaaacauuguguccuuguggaucucucacucaauacagacgggugagaagaaucauagugaaaucuguagccagaacguaauuaccuacgagaauaacacaugggugaaucagacuuaugucaacaucuccaauaccaacauugccgacggccaaggggugacaucuaucauauuagcuggaaauucgucacugugccccauuagcggcugggcaaucuacaguaaagauaacuccauuaggaucgguucuaagggggacaucuucguuauucgggaaccuuuuauaagcuguucccaccuagagugccgcaccuucuuucucacucagggagcccugcuuaaugaucgacauucaaacggcacagugaaagaccguaguccauauagaacccugaugagcuguccgaucggcgaagcgcccucuccuuacaauuccagguucgagucagucgcuuggagcgccagugcaugccacgaugggaugggaugguugacgauugguaucucuggcccagacaacggggccguggcuguacucaaguauaacggaauaauuacugauaccaucaaauccuggcggaauaagauccugcgcacacaggagagcgaauguguuugcauuaacggcucguguuuuacuaucaugaccgacggucccucuaaugggcaggcauccuacaagauuuucaaaauggagaagggaaaaauaaucaagucaguggaacuggaugccccuaacuaucauuacgaggagugcaguuguuacccagacacaggcaaagucgugugcgugugcagagauaauuggcacgcuagcaacaggcccugggucuccuuugaccaaaaucucgauuaucagauuggcuacaucuguucugggguuuucggagacaacccucggagcaaugacgguaagggcaacugcgggccaguguuaucaaauggagccaacggcguaaaggguuuuaguuuccgcuaugggaauggcguguggaucggacgaaccaaauccauuagcucuagaucaggcuuugaaaugauaugggauccgaacggguggacggagacugacaguagcuucuccaucaagcaggauauuaucgcgcugacagacuggucuggauacucggguagcuuuguccagcaccccgaacuuaccggcaugaauuguauuaggccuugcuucuggguggaguugauccgggggcaaccaaaagaauccacuauauggacaucaggaaguucuaucagcuucuguggcguugauuccgagaccgcaucauggagcuggcccgacggugccgaucugccuuuuacgauugacaaguga

SEQ ID NO: 154334 - RNA, 1365 nt, Artificial Sequence; identical to SEQ ID NO: 143767
  derived and/or modified CDS sequence (opt3) from neuraminidase__InfluenzaA__EPI115409

SEQ ID NO: 154335 - RNA, 1365 nt, Artificial Sequence; identical to SEQ ID NO: 143767
  derived and/or modified CDS sequence (opt3) from neuraminidase__InfluenzaA__ABD77678/m1

SEQ ID NO: 154336 - RNA, 1410 nt, Artificial Sequence; identical to SEQ ID NO: 144776
  derived and/or modified CDS sequence (opt3) from neuraminidase__InfluenzaA__EPI185224

SEQ ID NO: 154337 - RNA, 1410 nt, Artificial Sequence; identical to SEQ ID NO: 154292
  derived and/or modified CDS sequence (opt3) from neuraminidase__InfluenzaA__EPI697745

SEQ ID NO: 154338 - RNA, 1410 nt, Artificial Sequence; identical to SEQ ID NO: 154292
  derived and/or modified CDS sequence (opt3) from neuraminidase__InfluenzaA__EPI768524

SEQ ID NO: 154339 - RNA, 1410 nt, Artificial Sequence
  derived and/or modified CDS sequence (opt3) from neuraminidase__InfluenzaA__EPI726929
augaaccccaaucagaagaucauuaccauaggcagcaucuccaugacaauugggauggccaaccugauccuccaaauuggaaauaucauaucuaucugggugucacacaguauucagaucgguaaccagagccagauugagacuugcaaucaauccgucaucacguacgaaaacaauaccuggguuaaccagacauaugugaauauaucuaacacuaauuucgcugcaggccagucgguagugucagucaaacuugccgggaacagcagucuguguccuguguccggaugggcgauuuacucuaaggacaauagcguuagaaucggcuccaaaggugauguguuugucauuagggagccauucaucucaugcaguccguuggaaugucggaccuuuuucuuaacacagggggcucugcuaaacgacaagcauagcaauggaaccaucaaagaucgcucucccuaucgaacucucauguccugcccuauuggcgaggugccaucacccuacaacagccguuuugaaaguguagccuggucugcauccgccugucacgacggcauaaacuggcugacaaucgggauuagcggaccugauucgggugcuguugcagugcuuaaguauaauggcaucauaaccgacacgauuaagucuuggagaaacaauauccugaggacucaagaguccgagugcgccugugucaacgggucaugcuucaccaucaugacagauggaccaagugacggccaggcuagcuacaaaauuuuucggaucgaaaaggguaaaauuauaaaguccguggagaugaaagcccccaauuaucauuacgaagaguguucuugcuacccugauagcucagagaucacuugugugugccgcgacaacuggcacgggaguaauagaccaugggucuccuucaaccagaauuuggaauaucagaugggauacauuugcagcggcguuuuuggcgauaacccgaggcccaaugacaagaccgggucuuguggaccugugucaaguaacggugcgaauggcguaaagggguucagcuuuaaauauggaaacggcguguggaucggucggacaaaguccaucucuucgcgcaaaggguucgagaugauuugggauccaaauggcuggaccggaacggacaacaaguuuagcauaaaacaagacaucgucggcauuaacgaaugguccggguacucaggaaguuucgugcagcaucccgagcucacuggucuggauugcauccgaccuuguuucuggguugaacugauuagaggcaggccagaggagaauacaaucuggaccucugggagcuccauaucauuuugcggagugaacagcgacacugucggcuggucuuggcccgauggugcagaacucccguucacaaucgacaaguga

SEQ ID NO: 154340 - RNA, 1410 nt, Artificial Sequence; identical to SEQ ID NO: 154339
  derived and/or modified CDS sequence (opt3) from neuraminidase__InfluenzaA__EPI813816

SEQ ID NO: 154341 - RNA, 1410 nt, Artificial Sequence
  derived and/or modified CDS sequence (opt3) from neuraminidase__InfluenzaA__EPI466627
augaaccccaaucagaagaucauuaccauaggcagcgugugcaugacaaucgggauggccaaccugauucuccaaaucggaaauauuaucuccauaugggucucucacucaauccagcuugguaaccagagucagauugagacuuguaaucaaagcguuaucacguacgaaaacaauaccugggugaaccagacauauguaaauauuuccaacacuaauuucgcugcaggccagucuguggucucggugaaacuggccgggaacagcagcuugugcccuguuaguggaugggcgaucuacuccaaggacaauucugugagaauaggcagcaaaggugaugucuuugugauuagggagccauucaucuccuguucaccguuagaaugccggaccuuuuuccugacacagggggcucuacucaacgacaagcauaguaauggaaccauuaaagaucgcagccccuaucgaacucugaugucuuguccuaucggcgagguaccaucccccuacaacucacguuuugaaagcguugccuggagugcaucugccugccacgacggcaucaacuggcuuacaauugggauauccggaccugauagcggugcuguggcaguccugaaguauaauggcaucauuaccgacacgaucaagucguggagaaacaauauauugaggacucaagagucugagugugccugcgugaacggguccuguuucaccauuaugacagauggaccaucagacggccaggcuaguuacaaaaucuuucggaucgaaaaggguaaaauugugaagucagucgagaugaaugcccccaacuaucauuacgaagagugcuccuguuacccugauucuagcgagaucacuugcguuugccgcgacaauuggcacgggucaaacagaccaugggugaguuucaaucagaaccucgaauaucagauuggauacauauguuccggcguauuuggcgauaauccgaggcccaacgacaaaaccgggagcugcggaccugugucuucaaauggugcgaacggcgucaagggguucaguuuuaaguauggaaauggcguguggaucggucggacaaaaagcauuuccucucgcaagggguucgagaugaucugggauccaaacggcuggaccggaacggacaacaauuuuucgaucaaacaagacauuguuggcauaaacgaauggagcggguacuccggaucauucgugcagcaucccgagcugacuggucuggauuguauccgaccuugcuucugggucgaacucauuagaggcaggccagaggagaauacaaucuggaccagugggucuagcauuuccuuuuguggagugaacucagacacuguaggcuggagcuggcccgauggugcagaauuaccguucacaaucgacaaguga

SEQ ID NO: 154342 - RNA, 1410 nt, Artificial Sequence
  derived and/or modified CDS sequence (opt3) from neuraminidase__InfluenzaA__EPI541965
augaaccccaaucagaagaucauuaccauaggcagcgugugcaugacaaucgggauggccaaccugauucuccaaaucggaaauauuaucuccauaugggucucucacucaauccagcuugguaaccagagucagauugagacuuguaaucaaagcguuaucacguacgaaaacaauaccugggugaaccagacauauguaaauauuuccaacacuaauuucgcugcaggccagccuguggucucugugaaacuggccgggaacucgucauugugcccaguuagcggaugggcgaucuacaguaaggacaauuccgugagaauaggcucuaaaggugaugucuuugugauuagggagccguucaucagcuguucccccuuagaaugccggaccuuuuuccuggcucagggggcccuacucaacgacaagcauucaaauggaacaauuaaagaucgcaguccuuaucgaacccugaugagcuguccaaucggcgagguacccucuccuuacaacucccguuuugaaucaguugcauggagcgccagugcuugccacgacggcaucaacuggcuuacuauugggauaucuggaccagauuccggugcaguggccguccugaaguauaauggcaucauuacagacaccaucaagagcuggagaaacaauauauugaggacgcaagagucggagugugcuugcgugaacgggucuuguuucacuauuaugaccgauggacccuccgacggccaggccucauacaaaaucuuucggaucgaaaaggguaaaauugugaagagugucgagaugaaugcgccuaacuaucauuacgaagagugcagcuguuacccagauuccucugagaucacaugcguuugccgcgacaauuggcacgggagcaacagaccgugggugucauucaaucagaaccucgaauaucagauuggauacauauguaguggcguauuuggcgauaaucccaggccuaacgacaaaacuggguccugcggaccagugagcucuaauggugcaaacggcgucaagggguucucauuuaaguauggaaauggcguguggaucggucggaccaaaaguauuagcucccgcaagggguucgagaugaucugggaucccaacggcuggacaggaaccgacaacaauuuuucuaucaaacaagacauuguuggcauaaacgaauggucgggguacagcggauccuucgugcagcauccugagcugacgggucuggauuguauccgaccaugcuucugggucgaacucauuagaggcaggcccgaggagaauacuaucuggacaucagggaguucuauuagcuuuuguggagugaacuccgacaccguaggcuggucauggccggauggugccgaauuaccuuucacuaucgacaaguga

SEQ ID NO: 154343 - RNA, 1410 nt, Artificial Sequence
  derived and/or modified CDS sequence (opt3) from neuraminidase__InfluenzaA__EPI652004
augaaccccaaucagaagaucauuaccauaggcagcgugugcaugacaaucgggauggccaaccugauucuccaaaucggaaauauuaucuccauaugggucucucacucaauccagauugguaaccagagucagaucgagacuuguaaucaaagcguuauuacguacgaaaacaauaccugggugaaccagacauauguaaauaucuccaacacuaauuucgcugcaggccagucuguggucucggugaaacuugccgggaacucaagccugugcccuguuaguggaugggcgauauacuccaaggacaauucugugagaauuggcagcaaaggugaugucuuugugaucagggagccauucauuuccuguucaccguuggaaugccggaccuuuuucuuagcucagggggcccugcuaaacgacaagcauaguaauggaacaaucaaagaucgcagccccuaucgaacccucaugucuuguccuaucggcgagguaccaucccccuacaacucacguuuugaaagcguugcauggagugccucugcuugccacgacggcauuaacuggcugacuauagggaucuccggaccugauagcggugcaguggccguccuuaaguauaauggcauuaucacagacaccauaaagucguggagaaacaauauucugaggacgcaagagucugagugugcuugcgugaacggguccuguuucacuaucaugaccgauggaccaucagacggccaggccaguuacaaaaucuuucggauugaaaaggguaaaaucgucaagagcguggagaugaaugcgcccaacuaucauuacgaagagugcuccuguuacccugauucuagcgagauuacaugcguuugccgcgacaauuggcacgggucaaacagaccaugggugaguuucaaucagaacuuggaauaucagauaggauacaucuguuccggcguauuuggcgauaauccgaggcccaacgacaaaacugggagcugcggaccugugucuucaaauggugcaaacggcgucaagggguucaguuuuaaguauggaaauggcguguggauuggucggaccaaaagcaucuccucucgcaagggguucgagaugaucugggauccaaacggcuggacaggaaccgacaacaauuuuucgauuaaacaagacauaguuggcaucaacgaauggagcggguacuccggaucauucgugcagcaucccgagcucacgggucuggauuguauucgaccuugcuucugggucgaacugaucagaggcaggccagaggagaauacuauuuggacaagugggucuagcaucuccuuuuguggagugaacucagacaccguaggcuggagcuggcccgauggugccgaacucccguucacuauagacaaguga

SEQ ID NO: 154344 - RNA, 1410 nt, Artificial Sequence
  derived and/or modified CDS sequence (opt3) from neuraminidase__InfluenzaA__EPI62526
augaacaccaaucagagaaucauuacaauaggcacugugugccugaucgucgggauuguuagccuccuucugcaaaucggaaacauuguguccuuguggaucucucacucaauacagacgggugagaagaaucaucccgaaaucuguagucagaacguaauuaccuacgagaauaacacaugggugaaucagacuuaugucaacaucagcaauaccaacauuguggacggccaagggguuacauccaucauauuagccggaaauucuucgcugugcccuauuucaggcugggcuaucuacagcaaagauaacaguauuaggaucgguuccaagggggacaucuucgugauucgggaaccauuuauaucuuguagccaccuagagugccgcaccuucuuucucacucagggagcacugcuuaaugaucgacauuccaacggcacagucaaagaccguucaccguauagaacccugaugaguugucccaucggcgaagccccuagcccauacaauucuagguucgaguccguggcguggucagcuagcgccugccacgaugggaugggaugguugacgauugguaucaguggccccgacaacggggcaguagccguucucaaguauaacggaauaauuacugauaccaucaaaucuuggcggaauaagauccugcgcacacaggaguccgaaugugugugcauuaacggcagcuguuuuacuaucaugaccgacgguccuucgaaugggcaggcuucuuacaagauuuucaaaauggagaagggaaaaauaaucaaguccgucgaacuggaugcaccaaacuaucauuacgaggagugcucauguuaccccgacacaggcaaaguggugugcgucugcagagauaauuggcacgccaguaacaggccuuggguuagcuuugaccaaaaucucgauuaucagauuggcuacaucuguuccgggguguucggagacaacccacggucuaaugacgguaagggcaacugcgggccgguauuaagcaauggagcuaacggcgugaaggguuuuucauuccgcuaugggaauggcgucuggaucggacgaaccaaaaguauuuccagcagaucuggcuuugaaaugauaugggaucccaacggguggacggagacugacucaaguuucagcaucaagcaggauauuaucgcccugacagacugguccggauacucugguucguuugugcagcacccugaacuuaccggcaugaauuguauuaggccaugcuucuggguugaguugauccgggggcaacccaaagaaagcacuauauggacauccggaucaaguaucucuuucuguggcguggauagcgagaccgcguccuggucauggccugacggugcagaucugccauuuacgauugacaaguga

SEQ ID NO: 154345 - RNA, 1410 nt, Artificial Sequence; identical to SEQ ID NO: 144776
  derived and/or modified CDS sequence (opt3) from neuraminidase__InfluenzaA__EPI189183

SEQ ID NO: 154346 - RNA, 1410 nt, Artificial Sequence; identical to SEQ ID NO: 144776
  derived and/or modified CDS sequence (opt3) from neuraminidase__InfluenzaA__EPI180576

SEQ ID NO: 154347 - RNA, 1410 nt, Artificial Sequence
  derived and/or modified CDS sequence (opt3) from neuraminidase__InfluenzaA__EPI346918
augaacaccaaucagagaaucauuacaauaggcacugugugcaugaucgucgggauuaucagccugcuccuucaaauuggaaacaucguuucccuguggauaucucacucaauccagacggguugggagaaucauaccgaaauguguaaccagaaugugauuacauacguaaacaauacuugggugaacaggaccuaugucaaugugaguaacacaaauaucgccaccauucaggacguuacuagcaucguguuggcuggcaacuccucuuuaugccccgucucggggugggcaauauacucaaaggauaauagcauucggaucggaaguaaaggcgacauuuucgugauccgcgagccuuuuaucuccuguucucaacuggaaugccgaacauucuuucuaacccagggugcccuccugaacgauaagcacagcaaugggacgguaaaagaccguuccccauauagaacucuuaugucauguccgauuggagaggcgcccaguccuuacaacagcagguucgaaucuguugcuugguccgccucagcaugccaugauggcaugggcuggcugaccauagggaucagcggaccagacaacggugccguggcugucuugaaguauaauggcauuaucacagauacuauaaaaaguuggcggaacaagauucuccgcacccaggagucugagugugugugcaugaauggguccuguuuuacagugcugaccgacggacccagcaacggccaggcaucguacaagaucuucaaagucgaaaaggguagaaucauuaaaucuaucgagcuggaugccccuaauuaucacuacgaagagugcuccuguuacccagacacggggaagguuaugugcgugugcagggauaacuggcaugcuucaaaucggcccuggguaaguuuuaaccaaaaucucgacuaucagauuggauacauauguagcggcguguucggcgauaacccucgcuccaaugacgggaaaggaaacugcgguccagucuuaucuaauggcgccaacggggugaagggauuuagcuaucgauacggcaaugguguuuggaucgggagaacuaagucaauuaacaguaggcggggcuucgagaucaucugggacccgaacggauggacagaaaccgauuccagcuuuucuaugaaacaggacauuauagcgcugacugauuggucaggcuauagugggagcuucgugcagcaccccgagcuuacaggaaugaauuguauccguccuugcuuuugggucgaauugauucgcggucaaccaaaggaguccaccaucugggcaucuggcucgagcauuuccuucuguggggugaacucagaaacggccaguuggucuuggcccgacggagcugaucugccuuucaccaucgacaaauga

SEQ ID NO: 154348 - RNA, 1410 nt, Artificial Sequence; identical to SEQ ID NO: 145364
  derived and/or modified CDS sequence (opt3) from neuraminidase__InfluenzaA__EPI240976

SEQ ID NO: 154349 - RNA, 1410 nt, Artificial Sequence; identical to SEQ ID NO: 142143
  derived and/or modified CDS sequence (opt3) from neuraminidase__InfluenzaA__EPI3165

SEQ ID NO: 154350 - RNA, 1410 nt, Artificial Sequence; identical to SEQ ID NO: 154069
  derived and/or modified CDS sequence (opt3) from neuraminidase__InfluenzaA__EPI957

SEQ ID NO: 154351 - RNA, 1410 nt, Artificial Sequence; identical to SEQ ID NO: 150194
  derived and/or modified CDS sequence (opt3) from neuraminidase__InfluenzaA__EPI507593

SEQ ID NO: 154352 - RNA, 1410 nt, Artificial Sequence; identical to SEQ ID NO: 150194
  derived and/or modified CDS sequence (opt3) from neuraminidase__InfluenzaA__EPI461954

SEQ ID NO: 154353 - RNA, 1410 nt, Artificial Sequence; identical to SEQ ID NO: 150194
  derived and/or modified CDS sequence (opt3) from neuraminidase__InfluenzaA__EPI461954

SEQ ID NO: 154354 - RNA, 1410 nt, Artificial Sequence
  derived and/or modified CDS sequence (opt3) from neuraminidase__InfluenzaA__EPI668104
augaaccccaaucagaagaucauuaccauaggcagcgugucccugacaaucucuacuauuugcuucuuuaugcaaaucgccauucucaucacgaccgucacacuucacuucaaacaguacgaguuuaacucaccuccaaauaaccagguuaugcugugugaaccgacuauaaucgagagaaauauuaccgaaaucguguauuugacaaacaccacuauugagaaggaaaucugccccaaaccugcugaguacaggaauuggaguaagccacagugugggauaacaggauucgcacccuuuagcaaagacaacuccauucgguuaucugccgguggcgauaucuggguaacccgcgagccuuaugugucgugcgacccagauaaguguuaccaauucgcgcuggggcagggaacgacucuaaauaacguccauucaaauaacaccgugcgagaccguacacccuauagaacucuccugaugaaugaacuuggcguuccuuuuuaccuggguaccaaacaggugugcauugcuuggagcaguuccucuugucacgaugggaaggccugguugcaugucugcaucacaggagacgauaagaacgcaaccgccagcuucaucuauaauggcaggcucguggacuccguaguuucauggaguaaagauauucugcggacgcaggagagcgaaugugugugcauaaacggcacuuguacagucgugaugaccgacgggaacgcuucuggaaaggcagauacuaaaauccuguuuauugaggaggguaagaucgugcacacauccaagcucucaggcagcgcccaacaugucgaagagugcaguugcuacccacgcuacccggggguuagaugugugugcagggacaauuggaaaggaucuaaccggcccauaguagauauuaauaucaaggaccacuccaucgugagcucguaugucuguucuggcuuagugggugacaccccucgcaaaaacgauuccucaaguagcucccacugccuggacccaaauaacgaagaagggggacauggcguuaagggcugggcuuucgaugacgggaaugauguguggaugggacgaacgauuaacgagaccucuagacuugguuacgagacauuuaaagucguggagggcuggagcaaucccaagucaaaauugcagaucaacaggcagguaauuguugaccguggggaucggaguggauauuccggcauauucagcguggaagguaagucuuguaucaaucgcugcuuuuacgucgagcugauuagagggaggaaggaagagacugaagugcuauggaccucaaacaguaucgucguguucuguggcacaagcggaacuuauggcaccggguccuggccugacggagccgaucucaaucugaugccaaucuga

SEQ ID NO: 154355 - RNA, 1410 nt, Artificial Sequence
  derived and/or modified CDS sequence (opt3) from neuraminidase__InfluenzaA__EPI578445
augaaccccaaucagaagaucauuaccauaggcagcgugucccugacaaucucuacuauuugcuucuuuaugcaaaucgccauucucaucacgaccgucacacuucacuucaaacaguacgaguuuaacucaccuccaaauaaccagguuaugcugugugaaccgacuauaaucgagagaaauauuaccgaaaucguguauuugacaaacaccacuauugagaaggaaaucugccccaaaccugcugaguacaggaauuggaguaagccacagugugggauaacaggauucgcacccuuuagcaaagacaacuccauucgguuaucugccgguggcgauaucuggguaacccgcgagccuuaugugucgugcgacccagauaaguguuaccaauucgcgcuggggcagggaacgacucuaaauaacguccauucaaauaacaccgugcgagaccguacacccuauagaacucuccugaugaaugaacuuggcguuccuuuucaccuggguaccaaacaggugugcauugcuuggagcaguuccucuugucaugaugggaaggccugguugcacgucugcaucacaggagacgauaagaacgcaaccgccagcuucaucuacaauggcaggcucguggacuccguaguuucauggaguaaagauauucugcggacgcaggagagcgaaugugugugcauaaacggcacuuguacagucgugaugaccgacgggaacgcuucuggaaaggcagauacuaaaauccuguuuauugaggaggguaagaucgugcauacauccaagcucucaggcagcgcccaacacgucgaagagugcaguugcuauccacgcuacccggggguuagaugugugugcagggacaauuggaaaggaucuaaccggcccauaguagauauuaauaucaaggaccacuccaucgugagcucguacgucuguucuggcuuagugggugacaccccucgcaaaaacgauuccucaaguagcucccauugccuggacccaaauaacgaagaagggggacacggcguuaagggcugggcuuucgaugacgggaaugauguguggaugggacgaacgauuaacgagaccucuagacuugguuaugagacauuuaaagucguggagggcuggagcaaucccaagucaaaauugcagaucaacaggcagguaauuguugaccguggggaucggaguggauacuccggcauauucagcguggaagguaagucuuguaucaaucgcugcuuuuaugucgagcugauuagagggaggaaggaagagacugaagugcuauggaccucaaacaguaucgucguguucuguggcacaagcggaacuuacggcaccggguccuggccugacggagccgaucucaaucugaugccaaucuga

SEQ ID NO: 154356 - RNA, 1410 nt, Artificial Sequence; identical to SEQ ID NO: 154355
  derived and/or modified CDS sequence (opt3) from neuraminidase__InfluenzaA__EPI551883

SEQ ID NO: 154357 - RNA, 1410 nt, Artificial Sequence
  derived and/or modified CDS sequence (opt3) from neuraminidase__InfluenzaA__EPI344388
augaaccccaaucagaagaucauuaccauaggcagcgugucccugaucauugccacaaucugcuuccucaugcaaauugcuauccuugucacuacgguuacccugcacuuuaaacagcaugacuacaacucuccuccaaauaaccaggcaauguugugugagccgacaauaaucgaaagaaauacuaccgagauuguguauuuaacaaacaccacuaucgaaaaggagauuugccccaaacuggccgaauacaggaauuggucaaagccucaguguaacaucacaggguucgcgccauuuaguaaagauaauagcauacggcuauccgcuggaggugacauuuggguaacccgcgagcccuaugugucuugcgauccugacaaguguuaccaauucgcccucggccaggggacgacucugaacaauggacacucgaacaauaccguccaugaucgaacaccauaucguacucuucugaugaacgaguugggcgugcccuuucaccucgguaccagacagguuugcauggcauggucaagcaguuccugucaugacgggaaggccuggcugcacgugugcaucacaggaaaugauaacaacgcuaccgcaucuuucauuuacaauggcaggcuggucgacagcaucggcuccuggaguaaaaacauccuccggacgcaggaaagugagugugugugcauuaaugggacuuguacaguaguuaugaccgauggaagcgccucugguaaggcugacacuaaaauauuauuuguggaagagggcaagaucguccacauuuccacacugucagggagcgcccaacauguggaggaaugcaguugcuauccucgcuucccaggagugagaugugucugcagggauaacuggaaaggcucuaaucggccgaucguugacauaaacgugaagaauuacuccauuguaagcucguacguguguucuggucuugucggggauacccccaggaaguccgacucagugaguagcuccuauugcuuggacccuaacaaugagaaaggaggccacggcguuaaggggugggcguuugaugacggaaacgauguguggaugggucgaacgaucaaugaaacccugagacuaggcuacgagacauucaaagucaucgaaggguggucuaaggcaaacagcaaacuccagacuaaucgccaggugauuguagagaagggagaccggucaggcuauagugguaucuuuuccguugaggggaaaagcuguauuaaccguugcuucuacguggaacugauacgcggcagaaaggaggaaaccaaggucugguggacaucuaauucaaucguggucuuuuguggaacuucaggcaccuaugggacaggaagcuggccagauggugccgacauuaaccuuaugcccaucuga

SEQ ID NO: 154358 - RNA, 1410 nt, Artificial Sequence; identical to SEQ ID NO: 154357
  derived and/or modified CDS sequence (opt3) from neuraminidase__InfluenzaA__EPI347601

SEQ ID NO: 154359 - RNA, 1410 nt, Artificial Sequence
  derived and/or modified CDS sequence (opt3) from neuraminidase__InfluenzaA__EPI642512
augaaccccaaucagaagaucauuaccauaggcagcaucucccugauuaucgccacaauuugcuuccucaugcaaaucgcuauacuugugaucacugucacgcugcacuuuaaacagcauaacugugacucuucaccuaauaaccagguuauguucugcgagccaaccauuaucgaaagaaauaagacagagauuguguacuugaucaacacuaccguagaaaaagagauauguccgaagcccacagaauauaggaauuggaguaaaccucagugcaacauuaccggguuugcaccauucagcaaggauaauuccauccgguuaucugccggaggugacauuugggugacucgcgagcccuacgucucgugugauccugacaagugcuaucaauuugcgcugggccaggggacaacccuaaacaauggacacucaaacgauacggugcaugaccgaacuccauaccguacccuccugaugaaugagcuuggcguucccuuccaccuggguacaagacagguguguaucgcuuggagcaguuccucuugccaugaugggaaagccugguugcacgucuguaucacuggagacgauggcaacgcaaccgccagcuuuauuuauaauggcaggcucguggacuccauagggucauggaguaagaacauccugcggacacaggaaagcgagugcguauguauuaacggaaccugcacgguugugaugacugaugguucugcuuccggcaaagcagacacaaagauccuguucauagaagaggggaaaauuauccacaucucaacccucagcggaagugcccaacaugucgaggaaugcucuuguuacccucgcuauccaggcgugagaugcguguguagggauaauuggaaggguuccaaccggccgauugucgacaucaauguuaaggacuacagcauugugucgucuuacguaugcuccggguuagugggagauacuccccgcaaaaacgacucauuuaguagcucccacugucuggauccuaauaacgaggaaggcggccauggggucaagggaugggcuuucgacgaugguaaugacguguggaugggccgaacaauaucugagaaaagcagacuuggguaugaaaccuuuaagguugugaaaggauggucagagccaaacaguaaguugcagacgaauaggcaggucaucgugggccgggguaaccguuccggguacagcggcauuuucucuaucgagggcaaaaauugcaucaaccgcuguuuuuauguagaacugauuagaggaaggaaggaggaaaccaagguuugguggacaucaaauaguauaguggucuucugcgggacuagcggaaccuacgguacaggcuccuggcccgauggggccgacaucaaccuaaugccuauuuga

SEQ ID NO: 154360 - RNA, 1410 nt, Artificial Sequence
  derived and/or modified CDS sequence (opt3) from neuraminidase__InfluenzaA__AIE52540
augaaccccaaucagaagaucauuaccauaggcagcgugucccugaucauugccacaaucugcuuccucaugcaaauugcuauccuugucacuacgguuacccugcacuuuaaacagcaugacuacaacucuccuccaaauaaccaggugauguugugugagccgacaauaaucgaaagaaauacuaccgagauuguauauuuaacaaacaucaccauugaaaaggagaucugccccaaacuggcagaauacaggaauuggucaaagccucaguguaacauaacuggguucgccccauuuaguaaagauaauagcauucggcuauccgcgggaggugacaucugggugacacgcgagcccuaugucucuugcgauccugacaaguguuaccaauucgcucucggccaggggaccacgcugaacaaucgacacucgaacaauacugugcaugaucguucaccauauagaacccuucugaugaacgaguugggaguucccuuucaccucggcacaaggcaagugugcauugccuggagcaguuccucuugucaugacgguaaggcauggcugcacgucugcaucacuggggaugacaauaacgccaccgcuagcuucaucuacaacggacggcugguggauuccauuggcucauggaguaaaaauauacuccgcacacaggaaagcgaguguguaugcaucaacggcaccuguacgguugugaugacugacgggucugcauccggaaaggccgauacaaaaauuuuauuuaucgaagaggguaagauaguccacauuucaacccugagcggcagugcucagcauguggaggaaugcucuugcuauccuagauacccaggggugaggugugucugccgggacaauuggaaaggauccaaccgcccgaucguugauaucaauaugaaggacuacagcauugccucgucuuauguguguuccggccuuguaggugacacuccccgaaagaacgauucauucaguagcucccacugcuuggacccuaauaacgagaaagggggacauggcgugaagggcugggcguuugaugacgggaaugaugucuggaugggaagaacaaucucugaagaguucaggcuggguuacgaaaccuuuaaagugauuaagggcuggagcaacccaaauucaaaacuacagacgaaccggcagguuauaguggagaaggggaaucguaguggauauuccggcgucuucagcaucgaggacaaaucuuguauuaaccgcugcuuuuacguggaacucaucagagguaggaaggaggaaaccaagguaugguggacaucaaauaguaucguuguguucugugggacuagcggcaccuauggaacaggcuccuggcccgauggggcagacauuaaccugaugccuauauga

SEQ ID NO: 154361 - RNA, 1410 nt, Artificial Sequence; identical to SEQ ID NO: 154360
  derived and/or modified CDS sequence (opt3) from neuraminidase__InfluenzaA__EPI465399

SEQ ID NO: 154362 - RNA, 1410 nt, Artificial Sequence; identical to SEQ ID NO: 154360
  derived and/or modified CDS sequence (opt3) from neuraminidase__InfluenzaA__EPI328899

SEQ ID NO: 154363 - RNA, 1410 nt, Artificial Sequence; identical to SEQ ID NO: 154360
  derived and/or modified CDS sequence (opt3) from neuraminidase__InfluenzaA__EPI328901

SEQ ID NO: 154364 - RNA, 1410 nt, Artificial Sequence
  derived and/or modified CDS sequence (opt3) from neuraminidase__InfluenzaA__EPI574645
augaaccccaaucagaagaucauuaccauaggcagcgugucccugacaaucucuacuauuugcuucuuuaugcaaaucgccauucucaucacgaccgucacacuucacuucaaacaguacgaguuuaacucaccuccaaauaaccagguugugcugugugaaccgacuauaaucgagagaaauauuaccgaaaucguauauuugacaaacaccacuauugagaaggaaaucugccccaaaccugcugaguacaggaauuggaguaagccacagugugggauaacaggauucgcacccuuuagcaaagacaacuccauucgguuaucugccgguggcgauaucugggugacccgcgagccuuaugucucgugcgacccagauaaguguuaccaauucgcgcuggggcagggaacgacucuaaauaacggccauucaaauaacaccgugcgagaccguacacccuauagaacucuccugaugaaugaacuugguguuccuuuucaccuggggaccaaacaggugugcauugcuuggagcaguuccucuugucaugauggaaaggccugguugcacgucugcaucacaggcgacgauaagaacgcaaccgccagcuucaucuacaauggcaggcucguggacuccguaguuucauggaguaaagauauucugcggacgcaggagagcgaaugugugugcauaaacgggacuuguacagucgugaugaccgacggaucugcuuccgguaaggcagauacuaaaauccuguuuauugaggagggcaagaucauacauacaucaacccucagcgggagugcccaacacguggaagagugcucuugcuauccacgcuacccgggagucagauguguuugcagggacaacuggaagggcuccaaucggcccauuguggauaucaacaucaaagaccacagcauuguaucgucuuacguguguuccgguuuagucggggacacgccucgcaagaaugauucaaguagcuccucucauugccuggacccaaacaaugaagagggaggccacggcgugaaagggugggcuuucgaugacggaaacgauguuuggaugggucgaaccaucaaugaaacaagcagacuuggcuaugagacuuuuaaggugauugagggguggucaaaccccaaaaguaaguugcagauaaauaggcaggucaucguggaccggggagaucguuccggcuacagcgguauuuucucuguagaagggaaaucauguaucaaccgcugcuuuuauguugagcugaucagaggcaggaaggaagagaaugaagugcuauggaccaguaacagcauugucguguucuguggaacauccggcacuuacgggaccggaucuuggccugacggugccgaucucaaucugaugccaauauga

SEQ ID NO: 154365 - RNA, 1410 nt, Artificial Sequence
  derived and/or modified CDS sequence (opt3) from neuraminidase__InfluenzaA__EPI563214
augaaccccaaucagaagaucauuaccauaggcagcgugucccugacaaucucuacuauuugcuucuuuaugcaaaucgccauucucaucacgaccgucacacuucacuucaaacaguacgaguuuaacucaccuccaaauaaccagguuaugcugugugaaccgacuauaaucgagagaaauauuaccgaaaucguguauuugacaaacaccacuauugagaaggaaaucugccccaaaccugcugaguacaggaauuggaguaagccacaguguagcauaacaggguucgcacccuuuuccaaagacaacucuauucgguuaucggccggaggugauaucuggguaacccgcgagccuuaugugucaugcgacccagauaaguguuaccaauucgcgcugggccaggggacgacucuaaauaacguccauagcaauaacaccgugcgagaccguacacccuauagaacucuccugaugaaugaacuuggaguuccuuuucaccugggcaccaaacaggugugcauugcuuggaguuccucuagcugucaugaugguaaggccugguugcacgucugcaucacaggggacgauaagaacgcaaccgccuccuucaucuacaauggaaggcucguggacucaguaguuaguuggagcaaagauauucugcggacgcaggagucugaaugugugugcauaaacggcacuuguacagucgugaugaccgacggcuccgcuucagggaaggcagauacuaaaauccuguuuauugaggagggaaagaucguguauacaagcaagcucagugguucugcccaacaugucgaagagugcuccugcuacccacgcuacccgggcguuagaugugugugcagggacaacuggaaagggagcaaucggcccauaguagauauuaacaucaaggaccacucgaucgugucuuccuaugucuguucaggauuagugggcgacaccccucgcaaaaaugauaguagcuccucuagccacugccuggacccaaacaaugaagagggugggcauggaguuaagggcugggcuuucgaugacggcaacgauguguggauggggcgaacgauuaaugaaaccucaagacuuggauacgagacauuuaaagucguggaggguuggaguaaccccaaguccaaauugcagaucaauaggcagguaauuguugaccggggcgaucguagcggguauucuggaauauucucaguggaaggcaagaguuguaucaaccgcugcuuuuacgucgagcugauuagagguaggaaggaagagacugaagugcuauggaccagcaauuccaucgucguguucugugggacaucuggcacuuauggaaccggcucguggccugacggggccgaucucaaccugaugccaaucuga

SEQ ID NO: 154366 - RNA, 1410 nt, Artificial Sequence; identical to SEQ ID NO: 154365
  derived and/or modified CDS sequence (opt3) from neuraminidase__InfluenzaA__EPI553998

SEQ ID NO: 154367 - RNA, 1410 nt, Artificial Sequence
  derived and/or modified CDS sequence (opt3) from neuraminidase__InfluenzaA__EPI551568
augaaccccaaucagaagaucauuaccauaggcagcgugucccugacaaucucuacuauuugcuucuuuaugcaaaucgccauucucaucacgaccgucacacuucacuucaaacaguacgaguuuaacucaccuccaaauaaccagguuaugcugugugaaccgacuauaaucgagagaaauauuaccgaaaucguguauuugacaaacaccacuauugagaaggaaaucugccccaaaccugcugaguacaggaauuggaguaagccacaguguagcauaacaggguucgcacccuuuuccaaagacaacucuauucgguuaucggccggaggugauaucuggguaacccgcgagccuuaugugucaugcgacccagauaaguguuaccaauucgcgcugggccaggggacgacucuaaauaacguccauagcaauaacauugugcgagaccguacccccuauagaacacuccugaugaaugaacuuggaguuccuuuucaccugggcacuaaacaggugugcaucgcuuggaguuccucuagcugucaugaugguaaggccugguugcacgucugcaucaccggggacgauaagaacgcaacagccuccuucauuuacaauggaaggcucguggacucaguaguuaguuggagcaaagauauacugcggacccaggagucugaaugugugugcaucaacggcacguguacugucgugaugacagacggcuccgcuucagggaaggcagauaccaaaauucuguuuaucgaggagggaaagauaguguauacuagcaagcucagugguucugcccaacaugucgaagagugcuccugcuacccacgcuacccgggcguuagaugugugugcagggacaacuggaaagggagcaaucggcccauuguagauaucaacaucaaggaccacucgauugugucuuccuaugucuguucaggauuagugggcgacacaccucgcaaaaaugauaguagcuccucuagccacugccuggacccaaacaaugaagagggugggcauggaguuaagggcugggcuuucgaugacggcaacgauguguggauggggcgaaccaucaaugaaacgucaagacuuggauacgagaccuuuaaagucguggaggguuggaguaaccccaaguccaaauugcagauuaauaggcagguaauaguugaccggggcgaucguagcggguauucuggaaucuucucaguggaaggcaagaguuguauuaaccgcugcuuuuacgucgagcugaucagagguaggaaggaagagacagaagugcuauggacuagcaauuccaucgucguguucugugggaccucuggcacauauggaacuggcucguggccugacggggccgaucucaaccugaugccaauuuga

SEQ ID NO: 154368 - RNA, 1410 nt, Artificial Sequence
  derived and/or modified CDS sequence (opt3) from neuraminidase__InfluenzaA__EPI629737
augaaccccaaucagaagaucauugccauaggcagcgugucccugaccaucucuacaauuugcuucuuuaugcaaaucgcuauucucaucacuacggucacccuucacuucaaacaguacgaguuuaacucaccuccaaauaaccagguuaugcugugugaaccgacaauaaucgagagaaauauuacugaaaucguguauuugaccaacacaaccauugagaaggaaaucugccccaaaccugcagaguacaggaauuggaguaagccacaguguagcauaacuggguucgcccccuuuuccaaagacaacucuauucgguuaucggcgggaggugauaucuggguaacacgcgagccuuaugugucaugcgacccagauaaguguuaccaauucgcucugggccaggggaccacgcuaaauaacguccauagcaauaacacugugcgagaccguacccccuauagaacacuccugaugaaugaacuuggaguuccuuuucaccugggcacuaaacaggugugcauugccuggaguuccucuagcugucaugaugguaaggcaugguugcacgucugcaucaccggggacgauaagaacgccacagcuuccuucaucuacaauggaaggcucguggacucaguaguuaguuggagcaaagauauucugcggacccaggagucugaaugugugugcauaaacggcacguguacugucgugaugacagacggcuccgcaucagggaaggccgauaccaaaauccuguuuauugaggagggaaagaucguguauacuagcaagcucagugguucugcucaacaugucgaagagugcuccugcuacccacgcuacccgggcguuagaugugugugcagggacaacuggaaagggagcaaucggcccauaguagauauuaacaucaaggaccacucgaucgugucuuccuaugucuguucaggauuagugggcgacacaccucgcaaaaaugauaguagcuccucuagccacugccuggacccaaacaaugaagagggugggcauggaguuaagggcugggccuucgaugacggcaacgauguguggauggggcgaaccauuaaugaaacgucaagacuuggauacgagaccuuuaaagucguggaggguuggaguaaccccaaguccaaauugcagaucaauaggcagguaauuguugaccggggcgaucguagcggguauucuggaauauucucaguggaaggcaagaguuguaucaaccgcugcuuuuacgucgagcugauuagagguaggaaggaagagacagaagugcuauggacuagcaauuccaucgucguguucugugggaccucuggcacauauggaacuggcucguggccugacggggcggaucucaaccugaugccaaucuga

SEQ ID NO: 154369 - RNA, 1410 nt, Artificial Sequence; identical to SEQ ID NO: 154365
  derived and/or modified CDS sequence (opt3) from neuraminidase__InfluenzaA__EPI631886

SEQ ID NO: 154370 - RNA, 1410 nt, Artificial Sequence; identical to SEQ ID NO: 154365
  derived and/or modified CDS sequence (opt3) from neuraminidase__InfluenzaA__EPI577025

SEQ ID NO: 154371 - RNA, 1410 nt, Artificial Sequence; identical to SEQ ID NO: 151919
  derived and/or modified CDS sequence (opt3) from neuraminidase__InfluenzaA__EPI404926

SEQ ID NO: 154372 - RNA, 1410 nt, Artificial Sequence; identical to SEQ ID NO: 151919
  derived and/or modified CDS sequence (opt3) from neuraminidase__InfluenzaA__EPI492687

SEQ ID NO: 154373 - RNA, 1410 nt, Artificial Sequence
  derived and/or modified CDS sequence (opt3) from neuraminidase__InfluenzaA__EPI530648
augaaccccaaucagaagaucauuaccauaggcagcgugucccugacaaucucuacuauuugcuucuuuaugcagaucgccauucucaucacgaccgucacacuucacuucaaacaguacgaguuuaacucaccuccaaauaaccagguuaugcugugugaaccgacuauaaucgagagaaauauuaccgaaaucguguauuugacaaacaccacuauugagaaggaaaucugccccaaaccugcugaguacaggaauuggaguaagccacagugugggauaacaggauucgcacccuuuagcaaagacaacuccauucgguuaucugccgguggcgauaucuggguaacccgcgagccuuaugugucgugcgacccagauaaguguuaccaauucgcgcuggggcagggaacgacucuaaauaacguccauucaaauaacaccgugcgagaccguacacccuauagaacucuccugaugaaugaacuuggcguuccuuuucaccuggguaccaaacaggugugcauugcuuggagcaguuccucuugucaugaugggaaggccugguugcacgucugcaucacaggagacgauaagaacgcaaccgccagcuucaucuacaauggcaggcucguggacuccguaguuucauggaguaaagauauucugcggacgcaggagagcgaaugugugugcauaaacggcacuuguacagucgugaugaccgacgggucugcuuccggaaaggcagauacuaaaauccuguuuauugaggaggguaagaucgugcauacaucaacccucagcggcagugcccaacacgucgaagagugcucuugcuauccacgcuacccggggguuagaugugugugcagggacaacuggaagggauccaaucggcccauaguagauauuaacaucaaagaccacagcaucgugucgucuuacgucuguuccggcuuagugggugacacgccucgcaagaaugauucaaguagcuccucucauugccuggacccaaacaaugaagaagggggacacggcguuaaaggcugggcuuucgaugacgggaacgauguguggaugggacgaaccauuaaugagacaagcagacuugguuaugagacuuuuaaggucaucgagggcuggucaaaccccaaaaguaaguugcagaccaauaggcaagugauuguagaccguggggaucgguccggauacagcggcauauucucuguugaagguaaaucauguaucaaccgcugcuuuuauguggagcugauuagagggaggaaggaagagacagaaguccuauggaccaguaauagcaucguggucuucuguggcacuuccggaacauacggcaccgggucuuggccugacggagccgaucucaaccugaugccaaucuga

SEQ ID NO: 154374 - RNA, 1410 nt, Artificial Sequence; identical to SEQ ID NO: 154355
  derived and/or modified CDS sequence (opt3) from neuraminidase__InfluenzaA__EPI684314

SEQ ID NO: 154375 - RNA, 1410 nt, Artificial Sequence
  derived and/or modified CDS sequence (opt3) from neuraminidase__InfluenzaA__EPI614459
augaaccccaaucagaagaucauuaccauaggcagcgugucccugacaaucucuacuauuugcuucuuuaugcagaucgccauucucaucacgaccgucacacuucacuucaaacaguacaaguuuaacucaccuccaaauaaccagguuaugcugugugagccgacuauaaucgaaagaaauauuaccgagaucguguauuugacaaacaccacuauugaaaaagagaucugccccaagccugcugaauacaggaauuggaguaaaccacagugugggauaacaggauucgcacccuuuagcaaggacaacuccauucgguuaucugccgguggcgauaucuggguaacccgcgagccuuaugugucgugcgacccagauaaguguuaccaauucgcgcuggggcagggaacgacucuaaauaacguccauucaaauaacaccgugcgagaccguacacccuauagaacucuccugaugaaugagcuuggcguuccuuuucaccuggguaccaaacaggugugcauugcuuggagcaguuccucuugucaugaugggaaggccugguugcacgucugcaucacaggagacgauaaaaacgcaaccgccagcuucaucuacaauggcaggcucguggacuccguaguuucauggaguaaggauauucugcggacgcaggaaagcgagugugugugcauaaacggcacuuguacagucgugaugaccgacgggucugcuuccggaaaagcagauacuaagauccuguuuauugaagaggguaagaucgugcauacaucaacccucagcggcagugcccaacacgucgaggaaugcucuugcuauccacgcuacccggggguuagaugugugugcagggacaacuggaaaggauccaaucggcccauaguagauauuaacaucaaggaccacagcaucgugucgucuuacgucuguuccggcuuagugggugacacgccucgcaaaaaugauucaaguagcuccucucauugccuggacccaaacaaugaggaagggggacacggcguuaagggcugggcuuucgaugacgggaacgauguguggaugggacgaaccauuaaugagacaagcagacuugguuaugaaacuuuuaaagucaucgagggcuggucaaaccccaagaguaaauugcagaccaauaggcaagugauuguagaccguggggaucgguccggauacagcggcauauucucuguugaggguaagucauguaucaaccgcugcuuuuauguggaacugauuagagggaggaaggaggaaacagagguccuauggaccaguaauagcaucguggucuucuguggcacuuccggaacauacggcaccgggucuuggccugacggagccgaucucaaccugaugccaaucuga

SEQ ID NO: 154376 - RNA, 1410 nt, Artificial Sequence; identical to SEQ ID NO: 154375
  derived and/or modified CDS sequence (opt3) from neuraminidase__InfluenzaA__EPI541466

SEQ ID NO: 154377 - RNA, 1410 nt, Artificial Sequence; identical to SEQ ID NO: 154375
  derived and/or modified CDS sequence (opt3) from neuraminidase__InfluenzaA__EPI696968

SEQ ID NO: 154378 - RNA, 1410 nt, Artificial Sequence; identical to SEQ ID NO: 154375
  derived and/or modified CDS sequence (opt3) from neuraminidase__InfluenzaA__EPI674598

SEQ ID NO: 154379 - RNA, 1410 nt, Artificial Sequence; identical to SEQ ID NO: 154373
  derived and/or modified CDS sequence (opt3) from neuraminidase__InfluenzaA__EPI530678

SEQ ID NO: 154380 - RNA, 1410 nt, Artificial Sequence
  derived and/or modified CDS sequence (opt3) from neuraminidase__InfluenzaA__EPI530680
augaaccccaaucagaagaucauuaccauaggcagcgugucccugacaaucucuacuauuugcuucuuuaugcagaucgccauucucaucacgaccgucacacuucacuucaaacaguacgaguuuaacucaccuccaaauaaccagguuaugcugugugaaccgacuauaaucgagagaaauauuaccgaaaucguguauuugacaaacaccacuauugagaaggaaaucugccccaaaccugcugaguacaggaauuggaguaagccacagugugggauaacaggauucgcacccuuuagcaaagacaacuccauucgguuaucugccgguggcgauaucuggguaacccgcgagccuuaugugucgugcgacccagauaaguguuaccaauucgcgcuggggcagggaacgacucuaaauaacguccauucaaauaacaccgugcgagaccguacacccuauagaacucuccugaugaaugaacuuggcguuccuuuucaccuggguaccaaacaggugugcauugcuuggagcaguuccucuugucaugaugggaaggccugguugcacgucugcaucacaggagacgauaagaacgcaaccgccagcuucaucuacaauggcaggcucguggacuccguaguuucauggaguaaagauauucugcggacgcaggagagcgaaugugugugcauaaacggcacuuguacagucgugaugaccgacgggucugcuuccggaaaggcagauacuaaaauccuguuuauugaggaggguaagaucgugcauacaucaacccucagcggcagugcccaacacgucgaagagugcucuugcuauccacgcuacccggggguuagaugugugugcagggacaacuggaagggauccaaucggcccauaguagauauuaacaucaaagaccacagcaucgugucgucuuacgucuguuccggcuuagugggugacacgccucgcaagaaugauucaaguagcuccucucauugccuggacccaaacaaugaagaagggggacacggcguuaaaggcugggcuuucgaugacgggaacggaguguggaugggucgaaccauuaaugagacaagcagacuuggcuaugagacuuuuaaggucaucgagggguggucaaaccccaaaaguaaguugcagaccaauaggcaagugauuguagaucggggagaccguuccggcuacagcgguauauucucuguugaagggaaaucauguaucaaccgcugcuuuuauguggagcugauuagaggcaggaaggaagagacagaaguccuauggaccaguaauagcaucguggucuucuguggaacuuccggcacauacgggaccggaucuuggccugauggugccgaccucaaccugaugccaaucuga

SEQ ID NO: 154381 - RNA, 1410 nt, Artificial Sequence; identical to SEQ ID NO: 142086
  derived and/or modified CDS sequence (opt3) from neuraminidase__InfluenzaA__EPI7603

SEQ ID NO: 154382 - RNA, 1410 nt, Artificial Sequence; identical to SEQ ID NO: 154373
  derived and/or modified CDS sequence (opt3) from neuraminidase__InfluenzaA__EPI814527

SEQ ID NO: 154383 - RNA, 1410 nt, Artificial Sequence; identical to SEQ ID NO: 154373
  derived and/or modified CDS sequence (opt3) from neuraminidase__InfluenzaA__EPI674737

SEQ ID NO: 154384 - RNA, 1410 nt, Artificial Sequence; identical to SEQ ID NO: 154373
  derived and/or modified CDS sequence (opt3) from neuraminidase__InfluenzaA__EPI614443

SEQ ID NO: 154385 - RNA, 1410 nt, Artificial Sequence; identical to SEQ ID NO: 154373
  derived and/or modified CDS sequence (opt3) from neuraminidase__InfluenzaA__EPI551812

SEQ ID NO: 154386 - RNA, 1410 nt, Artificial Sequence; identical to SEQ ID NO: 154373
  derived and/or modified CDS sequence (opt3) from neuraminidase__InfluenzaA__EPI696961

SEQ ID NO: 154387 - RNA, 1410 nt, Artificial Sequence; identical to SEQ ID NO: 154373
  derived and/or modified CDS sequence (opt3) from neuraminidase__InfluenzaA__EPI740789

SEQ ID NO: 154388 - RNA, 1410 nt, Artificial Sequence
  derived and/or modified CDS sequence (opt3) from neuraminidase__InfluenzaA__EPI377498
augaaccccaaucagaagaucauuaccauaggcagcgugucccugacaaucucuacuauuugcuucuuuaugcaaaucgccauucucaucacgaccgucacacuucacuucaaacaguacgaguuuaacucaccuccaaauaaccagguuaugcugugugaaccgacuauaaucgagagaaauauuaccgaaaucguguauuugacaaacaccacuauugagaaggaaaucugccccaaaccugcugaguacaggaauuggaguaagccacagugugggauaacaggauucgcacccuuuagcaaagacaacuccauucgguuaucugccgguggcgauaucuggguaacccgcgagccuuaugugucgugcgacccagauaaguguuaccaauucgcgcuggggcagggaacgacucuaaauaacguccauucaaauaacaccgugcacgaccgaacacccuaucguacucuccugaugaaugaacuuggcguuccuuuucaucuggguaccaaacaggugugcauugcuuggagcaguuccucuugucacgaugggaaggccugguugcaugucugcaucacaggagacgauaagaacgcaaccgccagcuucaucuacaauggcagacucguggacuccguaguuucauggaguaaagagauucugaggacgcaggaaagcgagugugugugcauaaacggcacuuguacagucgugaugaccgaugggucugcuuccggaaaggcagacacuaaaauccuguuuauugaggaagguaagaucgugcacacaucaacccucagcggcagugcccaacacgucgaggaaugcucuugcuauccacgguacccggggguucgcugugugugcagagauaacuggaagggauccaauaggcccauaguagacauuaacaucaaagaucauagcaucgugucgucuuacgucuguuccggcuuagugggugacacgccucggaagaaugacucaaguagcuccucucacugccuggauccaaacaaugaggaagggggacauggcguuaaaggcugggcuuucgacgaugggaacgacguguggaugggacgcaccauuaaugagacaagccgacuugguuaugagacuuuuaaggucaucgaaggcuggucaaaccccaaaaguaaguugcagauuaauagacaggugauaguagauaggggagaccgguccggguacagcggcaucuucucuguugaggguaaaucauguauuaaccguugcuuuuauguggaacugauccgcgggagaaaggaggaaaccgagguccuauggacaaguaauagcaucguggucuucuguggcacuuccggaaccuacggcacagggucuuggccugauggagccgaccucaaccugaugccaauuuga

SEQ ID NO: 154389 - RNA, 1410 nt, Artificial Sequence; identical to SEQ ID NO: 154388
  derived and/or modified CDS sequence (opt3) from neuraminidase__InfluenzaA__EPI377498

SEQ ID NO: 154390 - RNA, 1410 nt, Artificial Sequence; identical to SEQ ID NO: 154388
  derived and/or modified CDS sequence (opt3) from neuraminidase__InfluenzaA__EPI391246

SEQ ID NO: 154391 - RNA, 1410 nt, Artificial Sequence; identical to SEQ ID NO: 154388
  derived and/or modified CDS sequence (opt3) from neuraminidase__InfluenzaA__EPI407122

SEQ ID NO: 154392 - RNA, 1410 nt, Artificial Sequence; identical to SEQ ID NO: 154388
  derived and/or modified CDS sequence (opt3) from neuraminidase__InfluenzaA__EPI407125

SEQ ID NO: 154393 - RNA, 1410 nt, Artificial Sequence; identical to SEQ ID NO: 154355
  derived and/or modified CDS sequence (opt3) from neuraminidase__InfluenzaA__EPI562038

SEQ ID NO: 154394 - RNA, 1410 nt, Artificial Sequence; identical to SEQ ID NO: 154355
  derived and/or modified CDS sequence (opt3) from neuraminidase__InfluenzaA__EPI562038

SEQ ID NO: 154395 - RNA, 1410 nt, Artificial Sequence; identical to SEQ ID NO: 150665
  derived and/or modified CDS sequence (opt3) from neuraminidase__InfluenzaA__EU716525

SEQ ID NO: 154396 - RNA, 1350 nt, Artificial Sequence
  derived and/or modified CDS sequence (opt3) from neuraminidase__InfluenzaA__EPI232422
augaaccccaaucagaagaucauuaccauaggcagcaucugcauggugauugggaucgucucccugaugcuccaaauuggaaacaugaucucuauauggguuucacacaguauccagacagguaaucagagacaggccgagccuauuagcaacacuaaauuccuuacggaaaaggcuguggcauccguaacccuggccggcaauucuucguuguguccaaucucagggugggcgguguacagcaaagacaacaguauuaggaucggaucccggggcgaugucuuugugauacgcgagccguucauuucuugcagccauuuagaaugucgaacauuuuuccugacucaaggugcucuacucaaugacaagcacuccaacgggaccguuaaagaucguucaccccauagaacacugaugaguugcccugugggagaggccccaagccccuauaauucuagguuugaauccgucgcauggucagccagcgcuugucacgacggcaccaguuggcuuacuaucggcauuucugggccugauaacggagcaguggccguacugaaguacaaugguaucaucacagacaccauuaaguccuggcggaacaauauauugcgcacgcaggagagcgagugcgcuuguguuaacggcucgugcuucacugugaugaccgaugggccaucuuccggacaggccucauauaaaaucuuuaagauggaaaaaggcaaggucgugaaaaguguggagcucgacgcgcccaauuaccauuaugaagaguguagcugcuacccugaugccggugagauuacaugugucugcagagacaacuggcacggguccaacaggccauggguuucuuucaaucagaaccuggaauaucaaaucggauacauaugcagcggcguguuuggcgauaauccgcggcccaacgacgggacuggaucaugugguccuguaaguccaaauggcgcauacggggugaagggauucuccuuuaaguauggcaacggugucuggauugggcgcaccaaaagcacaaauucucgaucaggcuucgagaugaucugggaucccaacggauggaccggcacggacaguagcuuuuccgugaagcaggacaucguugcuauuacugauuggucuggguacucgggauccuucgugcagcacccugaacugacaggucucgacugcaucagaccauguuucugggucgaguuaauuaggggccggcccaaagaauccaccauauggacuucagggaguucuaucagcuuuugcggagugaauagcgauacaguaucauggagcuggccggacggcgccgagcugccuuucaccauugauaaguga

SEQ ID NO: 154397 - RNA, 1350 nt, Artificial Sequence; identical to SEQ ID NO: 154232
  derived and/or modified CDS sequence (opt3) from neuraminidase__InfluenzaA__EPI227593

SEQ ID NO: 154398 - RNA, 1350 nt, Artificial Sequence
  derived and/or modified CDS sequence (opt3) from neuraminidase__InfluenzaA__EPI435658
augaaccccaaucagaagaucgugaccauuggcagcauaugcauggucaucgggauuaucucccugaugcuccaaauuggaaacaucauaucuaucuggguuucacacaguauucagacagguaaucagcaucagacugagccuaucagaaacacgaauuuccuuaccgaaaacgccguggcuagcguaacacuggcaggcaauuccucuuuguguccaauuagggggugggccgugcacucgaaagacaacucaauccggauaggaagcaagggcgaugucuuugugauucgcgagccguucaucaguugcucccauuuagaaugucgaaccuuuuuccugacucaaggugcgcuacucaaugacaaacacucuaacgggacaguuaaggaucguagcccccauagaacccugauguccugcccuauuggagaggcuccaucacccuacaauaguagguuugaaagcguggccuggucugcauccgccugucacgacggcacuucauggcuuaucaucggcauuagcgggccugauaacggagcugucgcagugcugaaauauaaugguauaaucacagacaccauuaagaguuggcggaacaauaucuugcgcacgcaggagucugagugcgccuguguaaacggcuccugcuucacuguuaugaccgaugggccaagcaacggacaggcuucguacaagauauuuaaaauugaaaagggcaaaguggucaagucuguggagcucaaugcccccaacuaucacuacgaagaguguuccugcuauccugacgcgggugagaucaucugugugugcagagauaauuggcaugggucaaacaggccaugggucaguuucaaucagaaccuggaauaccaaauuggauauaucugcagcggcguuuuuggcgacaauccgcggcccaacgaugggacaggauccugugguccugugucuccaaauggcgcauacgggguaaaaggauucagcuuuaaguacggcaacgguguguggauugggcgcacuaagucaacccacagucgauccggcuucgagaugauaugggaccccaauggauggacaggcaccgauagcgaauuuucuaugaaacaggacaucgucgccauuacggacuggucaggguauagugguagcuucgugcagcauccugagcugacuggacucgauugcaucagaccauguuucuggguugaauuaaucaggggccggcccaaggaguccacaauuuggaccucugggucgagcauauccuuuugcggagugaacucagacacugucaguuggucuuggccggauggcgcugagcugccuuucacaaucgacaaauga

SEQ ID NO: 154399 - RNA, 1350 nt, Artificial Sequence; identical to SEQ ID NO: 154398
  derived and/or modified CDS sequence (opt3) from neuraminidase__InfluenzaA__EPI492513

SEQ ID NO: 154400 - RNA, 1350 nt, Artificial Sequence; identical to SEQ ID NO: 147745
  derived and/or modified CDS sequence (opt3) from neuraminidase__InfluenzaA__EPI165066

SEQ ID NO: 154401 - RNA, 1350 nt, Artificial Sequence
  derived and/or modified CDS sequence (opt3) from neuraminidase__InfluenzaA__EPI531308
augaaccccaaucagaagaucauuaccauaggcagcaucugcauggugacaggggucguuucccugaugcuccaagugggaaacaugauuucuaucuggauuucacacaguauccauacugguaaucagcaccaggccgagccuauaagcaacacgaauuuccauaccgaaaaagcuguaguguccgcaaaacuugccggcaacucuucgcuguguccaaucaaugggugggcggucuacucaaaggacaacagcauuagaaucggaaguaagggcgauguguuuguuauuagggagccguucaucuccugcucucacuuggaaugucggacauuuuucuuaacucagggugcucugcuaaaugacaaacauagcaacgggaccgccaaggaucgcucaccccaccgaacacucauguccugcccugugggagaggcaccaagucccuauaauagccguuuugaaucugucgccugguccgcuucagcaugucacgacggcaccagcuggcugacuauaggcauuagugggccugauaacggagccguggcuguacuuaaguacaaugguaucauuacagacaccaucaaaucuuggagaaacaauguucugaggacgcaagaguccgagugcgccugugugaacggcuauugcuucacugucaugaccgaugggccaagcaacggacaggcgucgcauaagaucuuuaaaauggaaaagggcaaagugauuaagucuguggaguuggacgcacccaauuaccacuaugaagaguguuccugcuacccugaugccggugagauaacaugugucugccgggacaacuggcaugggucaaaucgcccauggaucaguuucaaccagaaucucgaauaucagauuggauacaucugcagcggcguuuuuggcgauaacccgagacccaaugacgggaagggauccugugguccugugucuagcaacggcgcuuacgggguaaaaggauucucauuuaaguauggcaaugguguguggauagggaggacuaaaaguaccaacucccggagcggcuucgagaugauuugggauccaaauggauggacagaaaccgacucuucauuuagugucaagcaagacaucguggccaucacggauuggagcggcuacuccgggucuuucguucagcaccccgagcugacuggacuggacugcauucgcccuuguuucuggguggaacucauccgagguagaccaaaagagggcacaauuuggaccucggggagcuccauaucauuuugcggagucaguggcgauacuguggguuggucuuggcccgacggggcagaguuaccguucacaaucgauaaguga

SEQ ID NO: 154402 - RNA, 1350 nt, Artificial Sequence
  derived and/or modified CDS sequence (opt3) from neuraminidase__InfluenzaA__EPI433308
augaaccccaaucagaagaucauuaccauaggcagcaucugcauggugauugggaucgucucccugaugcuccaaauuggaaaccuuaucucuauauggguuucacacaguauccagagagguaaucugaaccagguggagccuauuagcaauacauccuucccaacugaaaaagccguagcuucugugacguuggcaggcaacucgucauuauguccgaucagggggugggccguccauagcaaggacaauaguauucggaucggauccaaaggcgauguguuuguuauacgcgagcccuucauuucuugcagccaccuggaaugucgaaccuuuuuccuaacacagggugcgcuccugaacgacaagcauuccaaugggacugugaaagaucguucaccucacagaacccuuaugaguugcccagucggagaggcucccagcccuuacaacucuagguuugaauccguggccuggucagcaagcgccugucaugacggcacaaguuggcugaccaucggcauuucugggccagauaauggagcuguagcaguugugaaguauaacgguaucaucacugacacaauuaaguccuggggcaauaacauauugcggacccaagagagcgagugcgccugugucaaugggucgugcuucacggugaugacugauggacccucuaacggccaggcuuccuacaaaaucuuuaagauggaaaaagguaaggugauuaaaucagucgagcucgacgccccuaacuaucacuacgaagaguguaguugcuauccagaugcgggggagaucaccuguguuugccgcgacaauuggcacggaagcaacagaccguggguguccuucaaucagaaccuggaauaccagauaggcuauauuugcucuggcguauuuggggauaaucccaggccuaacgacggaacagguagcuguggcccagugucacccaauggggcauacggagucaagggcuucaguuuuaaguacgguaacgggguguggaucggccggacuaaauccccuaauagccgcucuggauucgagaugaucugggauccaaacggcuggucagaaaccgacaguagcuuuuccguuaagcaagacauucuggccgugacagauuggucuggguauucggguagcuucguccagcaucccgagcucaccggauuagacugcauccgaccguguuucuggguggaacugauuagaggcaggccugaggaguccacgauauggacuucagggaguucuaucagcuuuugcggaguaaauuccgauacaguuucauggagcuggcccgacggcgcugaacuuccauucaccauugauaaauga

SEQ ID NO: 154403 - RNA, 1350 nt, Artificial Sequence
  derived and/or modified CDS sequence (opt3) from neuraminidase__InfluenzaA__EPI114974
augaaccccaaucagaagaucauuaccauaggcagcaucugcauggugauugggaucgucucccugaugcuccaaauuggaaacaugaucucuauauggguuucacacaguauccagacagguaaucagagacaggccgagccuauuagcaacacuaaauuccuuacggaaaaggcuguggcauccguaacccuggccggcaauucuucguuguguccaaucucagggugggcgguguacagcaaagacaacaguauuaggaucggaucccggggcgaugucuuugugauacgcgagccguucauuucuugcagccauuuagaaugucgaacauuuuuccugacucaaggugcucuacucaaugacaagcacuccaacgggaccguuaaagaucguucaccccauagaacacugaugaguugcccugugggagaggccccaagccccuauaauucuagguuugaauccgucgcauggucagccagcgcuugucacgacggcaccaguuggcuuacuaucggcauuucugggccugauaacggagcaguggccguacugaaguacaaugguaucaucacagacaccauuaaguccuggcggaacaauauauugcgcacgcaggagagcgagugcgcuuguguuaacggcucgugcuucacugugaugaccgaugggccaucuaauggacaggccuccuauaaaaucuuuaagauggaaaaaggcaaggucgugaaaucaauugagcucgacgcgcccaacuaccauuaugaagaguguaguugcuacccugaugccggugagaucacaugugugugcagagacaacuggcacgggagcaauaggccaugggucuccuucaaccagaaucuggaauaucaaauaggauacauuugcucuggcguuuuuggcgauaacccgcggcccaaugacgggacuggaagcugugguccugugucaccaaacggcgcauacgggguaaagggauucaguuuuaaguauggcaaugguguguggaucgggcgcaccaaauccacaaacagccgaucuggcuucgagaugaucugggaucccaauggauggaccggcacggacucaaguuuuagcgucaagcaggacauuguggcuaucacugauugguccggguacucuggaucguucguucagcacccugaacugacaggucucgacugcauuagaccauguuucuggguggaguuaauaaggggccggcccaaagaaagcaccaucuggacuuccgggucaaguauuucuuuuugcggagucaacagcgauacaguguccuggucauggccggacggcgccgagcugccuuucaccaucgauaaguga

SEQ ID NO: 154404 - RNA, 1350 nt, Artificial Sequence
  derived and/or modified CDS sequence (opt3) from neuraminidase__InfluenzaA__EPI622495
augaaccccaaucagaagaucaccacaauuggcagcauaugcauggugaucgggauugucucccugaugcuccaaaucggaaacaugguuucuauuugggugucacacaguauccagacuagaaaucagaggcaggccgagccuauaagcaacacgcggucccuuaccgaaaaagcuguagcaucugugacacuggccgguaauucgucauuguguccaaucagcggcugggcggucuacaguaaggacaacuccauucgcaucgggucuaaaggagauguguucguuauucgagagccguuuaucagcugcucccauuuagaaugucguacuuucuuucugacccaaggcgcucuacucaaugacaagcacucaaacgguacagugaaagauagaaguccccauaggacccugaugagcugcccugucggggaggccccaucucccuauaauucccgguucgaaucaguggcauggagcgccagugcuugucacgacggaacuucuuggcuuacaauaggcauuuccggcccugauaacggggcaguagccguugugaaguacaauggaaucauuaccgacacgaucaagagcuggcgcaacaauauccugagaacucaggagucggagugcgucugugugaacgguucuugcuuuaccgugaugacagauggcccauccaauaaacaggcuucauauaagauuuucaaaauggaaaaggggaaagucguuaagaguauagaguuggacgcccccaacuaccauuaugaagaguguagcugcuacccugaugcgggagagaucacuugugugugcagggacaacuggcacggcuccaaucggccauggcucucuuuuaaccagaaucuggaauaucaaauugguuacaucugcagcgggguauucggagauaacccgcgccccaaugacggcaccggcucaugugggccugugaguuccaacggagcauacggugucaagggcuuuagcuucaaauaugggaauggaguguggauaggccgaacaaagucuaccaacucaagaagugguuuugagaugauuugggauccaaauggguggacgggcacugacagcuccuucucuaugaaacaggacaucguugccaucacagauuggucgggauacagcggcuccuuugugcagcaccccgaacugaccgggcucgacugcauuaggccuuguuucugggucgaguuagugcggggacguccaaaggaagguacuaucuggacaucaggcaguucuauuagcuucugcgggguaaacuccgauaccguuucauggagcuggcccgacggagcugagcugccguuuacgauagauaaauga

SEQ ID NO: 154405 - RNA, 1350 nt, Artificial Sequence
  derived and/or modified CDS sequence (opt3) from neuraminidase__InfluenzaA__EPI349847
augaaccccaaucagaagaucaccacaauuggcagcauaugcauggugaucgggauugucucccugaugcuccaaaucggaaacaugguuucuauuugggugucacacaguauccagacuagaaaucagaggcaggccgagccuauaagcaacacgcggucccuuaccgaaaaagcuguagcaucugugacacuggccgguaauucgucauuguguccaaucagcggcugggcggucuacaguaaggacaacuccauucgcaucgggucuaaaggagauguguucguuauucgagagccguuuaucagcugcucccauuuagaaugucguacuuucuuucugacccaaggcgcucuacucaaugacaagcacucaaacgguacagugaaagauagaaguccccauaggacccugaugagcugcccugucggggaggccccaucucccuauaauucccgguucgaaucaguggcauggagcgccagugcuugucacgacggaacuucuuggcuuacaauaggcauuuccggcccugauaacggggcaguagccguugugaaguacaauggaaucauuaccgacacgaucaagagcuggcgcaacaauauccugagaacucaggagucggagugcgucugugugaacgguucuugcuuuaccgugaugacagauggcccauccaauaaacaggcuucauauaagauuuucaaaauggaaaaggggaaagucguuaagaguauagaguuggacgcccccaacuaccauuaugaagaguguagcugcuacccugaugcgggagagaucacuugugugugcagggacaacuggcacggcuccaaucggccauggcucucuuuuaaccagaaucuggaauaucaaauugguuacaucugcagcgggguauucggagauaacccgcgccccaaugacggcaccggcucaugugggccugugagucacaacggagcauacggugucaagggcuuuuccuucaaauaugggaauggaguguggauaggccgaacaaagagcaccaacucuagaucagguuuugagaugauuugggauccaaauggguggacgggcacugacaguagcuucuccaugaaacaggacaucguugccaucacagauuggucuggauacucgggcagcuuugugcagcaucccgaacugaccgggcucgacugcauuaggccuuguuucugggucgaguuagugcggggacguccaaaggaagguacuaucuggacauccggcucaaguauuucuuucugcgggguaaacagcgauaccguuuccuggucauggcccgacggagcugagcugccguuuacgauagauaaauga

SEQ ID NO: 154406 - RNA, 1350 nt, Artificial Sequence
  derived and/or modified CDS sequence (opt3) from neuraminidase__InfluenzaA__EPI174804
augaaccccaaucagaagaucauuaccauaggcagcaucugcauggugauugggaucgucucccugaugcuccaaauuggaaacaugguuucuaucugggugucacacaguauacagacaagaaaucagaggcaggccgagccuaucagcaacacuaaaucccuuacggaaaaggcuguagcaucugugacccuggccgguaauucgucauuguguccaauuagcggcugggcggucuacaguaaagacaacuccauccggauugggucuaagggagauguguucguuauccgcgagccguuuauaagcugcucccauuuagaaugucgaacauucuuucugacucaaggcgcucuacucaaugacaaacacucaaacgguaccauuaaggaucguaguccccauagaacacugaugagcugcccugugggggaggccccaucucccuauaauuccagguucgaaucagucgcauggagcgccagugcuugucacgacggaaccucuuggcuuacuaucggcauuuccggcccugauaacggggcaguggccguacugaaguacaauggaaucaucacagacaccauuaaaagcuggcggaacaauauauugcgcacgcaggagucggagugcgcuuguguuaacgguucuugcuuugccgugaugacugauggcccauccaauagacaggcgucauauaagaucuucaaaauggaaaaggggaaagucgugaagaguauugagcucgacgcacccaacuaccauuaugaagaguguagcugcuacccugaugccggagagaucaccugugugugcagggacaacuggcacggcuccaaucggccauggcugucuuuuaaccagaaucuggaauaucaaauagguuacauuugcagcggggucuucggagauaacccgcgccccaaugacggcacaggcucaugugggccuguuaguuccaacggagcuuacggugugaagggcuuuagcuucaaauaugggaauggaguauggaucggccgaacuaagucuaccaacucaagaagugguuuugagaugaucugggauccaaauggguggacagaaaccgacagcuccuucucuaugaaacaggacauuguggccaucacggauuggucgggcuacagcggauccuuuguccagcaccccgagcucacuggcuuagacugcauuaggccuuguuucuggguggaacugguucgggggcguccaaaggagucaacaauauggaccaguggaucuagcaucuccuucugcggugugaacucagauacugucagcuggucuuggcccgacggcgcagagcuuccguuuacaauugauaaauga

SEQ ID NO: 154407 - RNA, 1350 nt, Artificial Sequence
  derived and/or modified CDS sequence (opt3) from neuraminidase__InfluenzaA__EPI492441
augaaccccaaucagaagaucauggccauuggcagcgugugcauggucauagggaucguuucccugaugcuccaaauuggaaacaccaucucuauuugggugucacacaguuuccagacaagaguacagcaucaggcugagccuaucaggaauacuaacuuucuuacggaaaaugcaguggccagcgucacccuggcggguaacuccucuuuguguccaauacggggcugggcugugcacucgaaagacaauucaauccgcauugggagcaagggagauguuuucgugauccgagagccguuuauuaguugcucccauuuagaaugucguacauucuuucugacucaaggcgcccuacucaacgacaaacacucuaauagaaccgucaaggauaggagcccccaucggacacugauguccugcccugugggugagguaccaucacccuacaacagucgcuucgaaagcguugcauggucugccuccgcuugucacgacgggaccucauggcuuacuaucggaauaagcggcccugauaauggcgcaguggccguccugaaauauaacgggauuaucacagacaccauuaagaguuggagaaauaacaucuugaggacgcaggagucugagugcgcuugugugaauggauuuugcuucacugugaugaccgaugguccauccaacggccaggccagcuacaagaucuuuaaaaugaagaaagggaaggucguuaaaucgguggaacucaacgcgcccaauuaucacuacgaggaauguucuugcuauccugacgcaggagagauuauguguguaugccgggauaacuggcauggcuccaaucgcccaugggugucauucaaccagaaucuggaguaccaaauagguuauaucugcaguggggucuuuggagacaacccgcgacccaaugauggcacaggcagcugugggccuguguccccaaacggagccuacgguauuaagggcuucucuuuuaaguacgggaauggaguuuggaucggcagaacuaaaagcaccaacucaaggagugguuucgaaauggugugggaccccaauggguggacagauaccgacuccgacuucagcauaaagcaggauauugucgcuaucacggacuggucuggcuauucaggaaguuuugugcagcacccugagcugacuggccucgauugcauccggccauguuucuggguagaauuaauucgugggcgccccaaagagagcacaaucuggaccuccggaucuucgauuagcuuuugcgguguuaacuccgaaacugugucauggaguuggccggacggcgccgagcugccuuucacaauagauaaguga

SEQ ID NO: 154408 - RNA, 1350 nt, Artificial Sequence; identical to SEQ ID NO: 154035
  derived and/or modified CDS sequence (opt3) from neuraminidase__InfluenzaA__EPI164142

SEQ ID NO: 154409 - RNA, 1350 nt, Artificial Sequence
  derived and/or modified CDS sequence (opt3) from neuraminidase__InfluenzaA__EPI827076
augaaccccaaucagaagaucgugaccauuggcagcauaugcauggucaucgggauuaucucccugaugcuccaaauuggaaacaucauaucuaucuggguuucacacaguauucagacagguaaucagcaucagacugagccuaucagaaacacgaauuuccuuaccgaaaacgccguggcuagcguaacacuggcaggcaauuccucuuuguguccaauuaaagggugggccgugcacucgaaggacaacucaaucaggauaggaagcaaaggcgaugucuuugugauucgggagccguucaucaguugcucccauuuagaaugucgcaccuuuuuccugacucaaggugcgcuacucaaugacaagcacucuaacgggacaguuaaagaucgaagcccccaucguacccugauguccugcccuauuggagaggcuccaucacccuacaauaguagauuugaaagcguggccuggucugcauccgccugucacgacggcacuucauggcuuaucaucggcauuagcgggccugauaacggagcugucgcagugcugaaguauaaugguauaaucacagacaccauuaagaguuggaggaacaauaucuugcggacgcaggagucugagugcgccuguguaaacggcuccugcuucgcuguuaugacugaugggccaagcaacggacaggccucguacaaaauauuuaagauugaaaaaggcaagguggucaaaucuguggagcucaaugcgcccaacuaucacuacgaagaguguuccugcuauccugacgccggugagaucaucugugugugccgcgauaauuggcaugggucaaacagaccaugggucaguuucaaucagaaccuggaauaccaaauuggauauaucugcagcggcguuuuuggcgacaauccgaggcccaacgaugggaccggauccugugguccugugucuagcaauggcgcauacgggguaaagggauucucauuuaaguacggcaacgguguguggauugggcggacaaaaaguacucacucccgcagcggcuucgagaugauaugggacccaaauggauggaccggcacagauucugaauuuucaaugaagcaggacaucgucgcuauuaccgacuggaguggguauagcggauccuucgugcagcaucccgagcugacgggucucgauugcauccgaccuuguuucuggguugaauuaaucagaggcaggccaaaagagucuacuauuuggacaucggggagcuccauaucauuuugcggagugaacagugacaccgucucuuggagcuggcccgauggcgccgagcugccguucacuaucgacaaguga

SEQ ID NO: 154410 - RNA, 1350 nt, Artificial Sequence; identical to SEQ ID NO: 144627
  derived and/or modified CDS sequence (opt3) from neuraminidase__InfluenzaA__EPI168491

SEQ ID NO: 154411 - RNA, 1350 nt, Artificial Sequence
  derived and/or modified CDS sequence (opt3) from neuraminidase__InfluenzaA__EPI827078
augaaccccaaucagaagaucauuaccauaggcagcaucugcauggugauugggaucgccucccugaugcuccaaauuggaaacaucauaucuaucuggauuucacacaguauccagacagguaaucagugucagaacgagagcauuuccaauacuaaauuccuugcugaaaaggcagucgccucuguuacgcuggcgggcaacucgucauugugcccugugagcgggugggcuguauacaguaaagacaauuccaucagaauaggaucuaagggcgauguguuugucauuagggagccauucaucagcuguucccauuuagaaugccggaccuuuuuccugacacaaggugcccuacucaacgacaaacacucaaaugggacugugaaggaucgcaguccgcaucgaacccugaugagcugucccguuggagaggcaccuucuccauauaacucccguuuugaaucaguggccuggagcgcuagugcaugccacgacggcacaucuuggcuuaccauuggcaucuccgggcccgauagcggagccgucgcugugcugaaguacaaugguaucauuacugacacaauaaaaucguggagaaacaauaucaugaggacccaggagucugagugugccugcguaaacggcuccuguuucacgauuaugacugaugggccuucaaguggacaggcgagcuauaagaucuuuaaaauggaaaagggcaaaguuauaaaguccguggaguuggacgcaccaaauuaccauuaugaagagugcucuuguuaccccgaugccggugagauuaccugcgucugccgggacaacuggcacgggagcaaccgcccuuggaucucauucaaucagaaccucgaauaucaaaucggauacauuuguaguggcguguuuggcgauaauccaagaccgaacgacgggacaggauccugcggucccguguucccuaauggcgcuuacggggucaagggauuuagcuucaaauauggcaacgguguuuggaucgggaggacuaagucuaccaauucacggaguggcuuugagaugauuugggauccaaacggauggacaggcaccgacagcuccuucucugugaaacaggacauaguagccaucacggaauggucgggguacagcggauccuucgugcagcaccccgagcugacuggucuggauuguauucgcccuugcuuuugggucgaacucauccgaggcagaccaaaggagucaacaaucuggaccagugggucuagcauuuccuucuguggagugaauggcgacacuguuucauggagcuggcccgauggugcagaguuaccguuuacaauagacaaauga

SEQ ID NO: 154412 - RNA, 1350 nt, Artificial Sequence
  derived and/or modified CDS sequence (opt3) from neuraminidase__InfluenzaA__EPI594521
augaaccccaaucagaagaucauuaccauaggcagcaucugcguggggauuggaaucgucucccugaugcuccaaauugguaacaugguuucuaucugggugaaucacucaauacagacagagaaccagugucaggccgaaaguaucagcaauacuaaauuccuuacggagaaggcuguagcaccugugacccugaugggcaacuccucuuugugcccaauuucggggugggccguccauucaaaagacaauagcaucagaauuggaaguaagggcgauguguuuguuaucagggaaccguucauauccuguucucacuuagagugccggacauuuuuccugacucaaggugcgcuacucaacgacaaacauagcaaugggaccgugaaggaucgcucaccccaccgagcucugauguccuguccugucggagaagccccaagucccuacaacagccguuuugagucuguggcaugguccgccucagcuugccaugacggcacaggcuggcuuaccauugggaucagcggaccugauaauggugcaguagccguucugaaguauaacggcauuaucacugacacaaucaaaaguuggagaaauaacauuuugaggacccaggagucugaaugugcuugcgugaauggguccuguuucacggucaugacugauggaccaagcaacggccaggccucguacaagauauuuaaacucgagaaggguaaaguggugaagucugucgaacuggacgcgcccaacuaucacuacgaggagugcuccuguuauccugaugcaggggaaauuaccugcguuugccgggacaauuggcacggaucaaaccgcccaugggugaguuucaaucagaaccuggaguaccaaaucggcuauaucuguagcggcguauuuggggauaauccgagacccaacgacggaacagguuccugcggcccugugucuccaaauggggccuacggagucaagggcuucagcuuuaaauacgguaacgggguguggauaggcaggacuaagucaaccaauagucgguccggauucgaaaugauuugggaucccaacggcuggacagagaccgacagcucuuuuucaguuaaacaggacaucguggcuaucacggauuggaguggguauagcggauccuucguccagcauccugaacucacugguuuagacuguauucgcccaugcuucuggguggagcugauccgaggcagacccaaggagucuacaauuuggaccucggggagcuccauaucauuuuguggaguaaauagugauacuguuggcuggucuuggccggacggugccgaagugccuuucacaaucgauaaauga

SEQ ID NO: 154413 - RNA, 1410 nt, Artificial Sequence
  derived and/or modified CDS sequence (opt3) from neuraminidase__InfluenzaA__EPI5787
augaaccccaaucagaagaucauuaccauaggcagcaucugcaugguggucgggauuaucucccugaugcuccaaauuggaaacaucauaucuaucuggguuucacacaguauucagacagguaaucagcaucaggccgagccuuguaaccaaagcaucauuacuuacgaaaauaacacgugggugaaucagaccuauguaaacaucuccaauacaaacuuccuuacugagaaagcuguggcaucugucacccuggccggcaauucgucauugugcccaauaagcgggugggcggugcacaguaaggacaacggaauuagaaucggcuccaaaggugauguuuuugugauuagggaaccguucaucucuuguagccauuuagagugccggacauuuuuccugacccagggggcucuacucaaugacaagcacuccaacggaacugucaaagaucgcucaccccaucgaacacugaugaguuguccugugggcgaagccccaagccccuacaauucucguuuugaguccguagcauggucagccagcgcuugccacgacggcaccaguuggcuuacgaucgggauuucuggaccugauaacggugcaguugccgugcugaaguauaacggcauaaucacugacaccauuaaguccuggagaaauaacaucuugaggacacaggagagcgaaugugcuugcgucaaugggucguguuucacugugaugaccgauggaccaucuaacggccaagccuccuacaaaauauuuaagauggagaaagguaagguggucaaaucaguugaacucaaugcgcccaacuaucacuacgaggagugcaguuguuauccugacgcaggggaaauuacaugcgugugccgggauaauuggcauggaagcaaccgcccauggguauccuucaaucagaaccuggaguaccagaucggcuacaucuguucuggcguguuuggggacaauccgagacccaacgauggaaccgguagcugcggcccugucucaccaaauggggccuauggagugaagggcuucaguuuuaaguacgguaacgggguuuggauuggcaggacgaaauccacuaauagccggucuggauucgaaaugaucugggaccccaacggcuggacagggaccgauucaaguuuuagcgugaagcaggacauugucgcuauaacugacugguccggauauucugguucguucgugcaacacccugagcugacaggccucgauuguauccgcccaugcuucuggguagaauuaauucgagggagacccaaagagagcaccaucuggacguccggaucaaguaucucuuuuuguggcguuaacagcgacaccguggguugguccuggccggaugacgccgagcugccuuucacaauugauaaguga

SEQ ID NO: 154414 - RNA, 1410 nt, Artificial Sequence; identical to SEQ ID NO: 154413
  derived and/or modified CDS sequence (opt3) from neuraminidase__InfluenzaA__EPI5787

SEQ ID NO: 154415 - RNA, 1350 nt, Artificial Sequence; identical to SEQ ID NO: 149113
  derived and/or modified CDS sequence (opt3) from neuraminidase__InfluenzaA__EPI267031

SEQ ID NO: 154416 - RNA, 1350 nt, Artificial Sequence; identical to SEQ ID NO: 150693
  derived and/or modified CDS sequence (opt3) from neuraminidase__InfluenzaA__EPI376539

SEQ ID NO: 154417 - RNA, 1350 nt, Artificial Sequence
  derived and/or modified CDS sequence (opt3) from neuraminidase__InfluenzaA__EPI124069
augaaccccaaucagaagaucauuaccauaggcagcaucugcauggugauugggaucgucucccugaugcuccaaauuggaaacaugaucucuauauggguuucacacaguauccagacagguaaucagcaucaggccgagagcauuuccaacacuaauccucuuacggaaaaagcuguggcaucuguaacccuggccggcaacucgucauuguguccaaucagagggugggcggugcacagcaaggacaauaacauuaggaucggaaguaaaggcgaugucuucgugauacgggagccguuuauuuccugcucucauuuagaaugucgcacauucuuucugacucaaggugcucuacucaaugacaagcacagcaacgggaccguuaaagaucgaucaccccaucguacacugauguccugcccugugggagaggccccaagucccuacaauagcagauucgaaucugucgcaugguccgccucagcuugucacgacggcaccagcuggcuuacuaucggcauuagugggccugauaacgaggcaguggccguacugaaguauaauggaaucaucacagacaccauuaagucuuggaggaacaauauauugcggacgcaggaguccgaaugcgcuuguguuaacgguagcugcuuuacugugaugaccgauggcccaucggacgggcaggccucuuacaaaaucuucaagauggagaaaggaaaggucgugaaauccguggaacucgaugcgcccaacuaucacuacgaggaguguucaugcuauccugacgcaggcgaaauuacaugugucugccgcgauaauuggcaugguaguaacagaccauggguuagcuuuaaucagaaccuggaguaccaaaucggguauauaugcuccggaguguucggcgacaauccgaggcccaacgauggcacugggucuuguggaccuaugagcccaaauggugccuacggcguaaagggguuuucauucaaguacggaaacggcguguggauuggucggaccaaaaguacaaauucccgcagcggguuugaaaugaucugggaccccaacggcuggaccggaacggacucuucauucagugucaagcaggauaucguggcuauuacugacuggagcggcuauuccgggucuuuuguucagcacccugagcugacaggacucgauugcauccgaccauguuucuggguggaauuaauuagagguaggcccaaagagucgaccauauggacuagcggcuccucaaucaguuucugcggggucaauucugacacagugagcugguccuggccggauggagccgagcugccuuuuaccauugacaaguga

SEQ ID NO: 154418 - RNA, 1350 nt, Artificial Sequence
  derived and/or modified CDS sequence (opt3) from neuraminidase__InfluenzaA__EPI342499
augaaccccaaucagaagaucauuaccauaggcagcaucugcauggugauugggaucgucucccugaugcuccaaauuggaaacaugaucucuauauggaucucacacaguauucagaaagguaaucagcauagaacagagagcaucuccaacacuaauccucuuacggaaaaggccguugcuucugugacccugacaggcaacucgucauuguguccaauuagggggugggcaguacacagcaaagacaauaacauccggauaggaaguaagggcgauguguucgucauucgcgagccguuuaucuccugcucucauuuagaaugucgaacuuucuuucugacccagggugcccuacucaaugacaaacacagcaacgggacagugaaggaucguucaccccauagaacccugauguccugcccucuuggagaggcgccaagucccuacaauagcagguucgaaucuguugcuugguccgccucagcaugucacgacggcacuggcuggcugacaauugggaucagcggaccugauaacgaggccguggcugucuugaaguauaaugguaucauuaccgacacgauaaaaaguuggcggaacaauauccuccgcacucaagagucugaaugcgcaugugugaacggcuccugcuuuaccguaaugacagaugggccaagcaacggacaggccucguacaagauuuucaaaaugagaaagggcaaaguugugaagucugucgagcuggacgcucccaauuaucacuacgaagaguguuccugcuauccugauacuggugagaucaccugugugugcagggacaacuggcaugggucaaaucggccauggauaaguuuuaaccagaaucuggaauaccagauuggauauaucugcagcggcaucuucggcgauaacccgcgccccaaugacgggacaggauccugugguccuaugucuccaaacggcgccuacggggugaagggauuuagcuucaaauacggcaauggugucuggauugggcgaaccaagucaacgaacaguagauccggcuuugagaugaucugggaucccaauggauggacugaaacagacagcucuuucucaguuaaacaagacauuguggcgauaaccgauuggaguggcuauagcggguccuuuguacagcacccugagcucacuggauuagacugcaucaggccauguuucuggguggaacugauucggggucgucccaaggagucuacaaucuggaccucgggcagcuccaucucauucugcggggucaacagugauacggugucuuggagcuggccggacggagcagagcuuccuuuuaccauugauaaauga

SEQ ID NO: 154419 - RNA, 1350 nt, Artificial Sequence
  derived and/or modified CDS sequence (opt3) from neuraminidase__InfluenzaA__EPI103069
augaaccccaaucagaagaucauuaccauaggcagcaucugcauggugauugggaucgucucccugaugcuccaaauuggaaacaugaucucuauauggguuucacacaguauccagacagguaaucagagacaggccgagccuauuagcaacacuaaauuccuuacggaaaaggcuguggcauccguaacccuggccggcaauucuucguuguguccaaucucagggugggcgguguacagcaaagacaacaguauuaggaucggaucccggggcgaugucuuugugauacgcgagccguucauuucuugcagccauuuagaaugucgaacauuuuuccugacucaaggugcucuacucaaugacaagcacuccaacgggaccaucaaagaucguucaccccauagaacacugaugaguugcccuguuggagaggccccaagccccuauaauucuagguuugaauccguggcauggucagccagcgcuugucacgacggcaccaguuggcuuacuauuggcaucucugggccugauaacggagcagucgccgugcugaaguacaaugguaucauuacagacaccauaaaguccuggcggaacaauaucuugcgcacgcaggagagcgagugcgcuuguguaaacggcucgugcuucacuguuaugaccgaugggccaucuuccggacaggccucauauaaaauuuuuaagauggaaaaaggcaagguggucaaaaguguggagcucgacgcgcccaauuaccauuaugaagaguguagcugcuacccugaugcaggagagaucacaugugugugcagagacaacuggcacggguccaacaggccaugggucucuuucaaucagaaccuggaauaucaaauaggauacauuugcagcggcguuuuuggcgauaauccgcggcccaacgacgggacuggaucaugugguccugugaguccaaauggcgccuacgggguaaagggauucuccuuuaaguauggcaacgguguguggaucgggcgcaccaaaagcacaaauucucgaucaggcuucgagaugaucugggaucccaacggauggaccggcacggacaguagcuuuuccgucaagcaggacauuguggcuaucacugauuggucuggguacucggguagcuucguucagcacccugaacugacaggucucgacugcauuagaccauguuucuggguggaguuaauaaggggccggcccaaagaauccaccaucuggacuucagggaguucuauuagcuuuugcggagucaauuccgauacagugucauggagcuggccggacggcgccgagcugccuuucaccaucgauaaguga

SEQ ID NO: 154420 - RNA, 1350 nt, Artificial Sequence; identical to SEQ ID NO: 154396
  derived and/or modified CDS sequence (opt3) from neuraminidase__InfluenzaA__EPI227595

SEQ ID NO: 154421 - RNA, 1410 nt, Artificial Sequence
  derived and/or modified CDS sequence (opt3) from neuraminidase__InfluenzaA__EPI569385
augaaccccaaucagaagaucauuaccauaggcagcgugucccugacaaucgccacugucugcuuccucaugcaaauugcuauccuugcaacgaccguuacacugcacuuuaaacagaacgaguguucuauuccuccaaauaaccaggugguaccgugcgaacccaucauaaucgagaagaauauuacugaaaucguguacuugaacaauaccacaauugagaaagaagucuguccugaggugccagaguauagaaacuggucaaagccccagugccaaaucaccggguucgccccuuuuaguaaagacaauagcauaagguuauccgcgggaggugauauuuggguuacucgggaaccauacgugucuuguucgcccggcaagugcuaucaguucgcucuggggcagggaacaacccuaaacaauaagcauucaaacggcacgauccacgaccgcauuccucaucgaacucuccugaugagcgagcuuggugucccauuucaccuggggaccaaacagguguguaucgccuggaguuccucuagcugccaugauggaaaggcaugguugcacguauguguuacaggcgacgaucguaaugccacugcuuccuucaucuacgacggcaugcucgcagauucaauugggaguuggagccaaaacauacugagaacccaggaaucugagugcguguguaucaauggaacaugcaccgucgugaugacggacgguuccgccucaggcagggcugauacucggauucuguuuaucaaagaggggaagauagugcacauuagcccgcucaguggaucugcccagcauaucgaagagugcuccuguuauccccgcuacccugacgucagaugcguuuguagggauaacuggaaaggcagcaaccggccagugaucgacauuaauauggcggauuauucgaucgacucuuccuacguaugcucagguuuagugggggacacaccccgcaacgaugacaguagcuccucuagcaauugucgagauccuaacaaugaaagaggaaacccaggcgucaagggcugggcauucgacaaugggaacgauguguggaugggaaggaccauuucagaggacagucgguccgguuacgaaacuuuucguguuacagauggcuggaccacggccaauagcaagucucaggugaaccgccaaauaaucgucgacaauaacaauuggucaggguauaguggaauuuucagcguggagggcaaauccugcaucaacagauguuuuuacguagagcugaucaggggucggccccaggaaacccgaguuugguggacaucuaauucgauuguggucuucugcgggacuagcggcaccuauggaacaggcuccuggccggauggggcuaacauaaacuuuaugccuaucuga

SEQ ID NO: 154422 - RNA, 1380 nt, Artificial Sequence
  derived and/or modified CDS sequence (opt3) from neuraminidase__InfluenzaA__EPI736916
augaaccccaaucagaagauuaccugcaucagcgccacaggcgugacucuguccgucguuucucuccuuauagggaucgcuaaccugggauugaauauugguuuacacuacaaagugucagacaguacgaccaucagcauuccuaacaugaaugagacaaacccaacuaccacaaauaucaccaacauaaucguaaauaagaacgaagagagaacuuuccugaaucuaacaaaaccgcucugugaagugaacuccuggcauauucugucuaaggauaaugcaaucaggauuggcgaggacgcccacauccuugucacccgggaacccuaucugucgugcgauccucaagggugucgcauguuugcguugucacagggaacgacucuccgaggccgucaugcuaacgguaccauacacgacagaagcccauucagggcccugauuaguugggagauggggcaggcacccuccccuuacaauacacggguggagugcaucggauggucuagcacuuccugucaugauggcauuucacgcaugaguaucugcaucagcggcccaaacaacaaugccucugcuguugugugguauagagggaggcccgucaccgaaauuccuuccugggcaggaaacauacugcggacacaggagucagaaugugugugccacaaagguaucuguccaguaguuaugaccgacggcccggccaauaacaaggcugccacgaagauuaucuacuuuaaagaggggaaggugcagaaaauagaggaacuccaaggaaaugcgcagcacauugaggaaugcagcuguuauggcgcagccgguaugaucaagugcgucugccgcgauaacuggaaaggggcuaaucgacccaucauuacuaucgacccugagaugaugacacauaccaguaaguacuuauguucuaagauucugacugauacauccagaccaaacgaccccaccaauggaaacugcgaugccccuauaacgggcggcagcccagaccccggggugaaaggauucgcauuucuugauggugaaaauucgugguugggcaggaccaucucuaaggacucccggucaggguaugagaugcugaaagugccgaacgcugagacagacacucagaguggaccuaccagcuaccaacuaauugucaauaaccagaauugguccggcuacucuggugccuucaucgauuauugggcgaacaaggaauguuuuaaccccugcuucuacguugagcucauccgugggcgcccaaaagaaagcgacgugcuguggacaucaaauaguaugguagcccuuuguggcuccagagagaggcugggaagcuggucuuggcacgauggcgcagaaauuauauauuuuaaguga

SEQ ID NO: 154423 - RNA, 1380 nt, Artificial Sequence; identical to SEQ ID NO: 154042
  derived and/or modified CDS sequence (opt3) from neuraminidase__InfluenzaA__EPI593891

SEQ ID NO: 154424 - RNA, 1380 nt, Artificial Sequence
  derived and/or modified CDS sequence (opt3) from neuraminidase__InfluenzaA__EPI691380
augaaccccaaucagaagaucgugugcauuagcgucaccggcguuacacuguccgugguaucucuccuuauagggaucacuaaccugggauugaauauugguuuacacuacaaagugucagacaguacgaccaucaacauuccuaauaugaacgagacaaauccaacuaccacaaacaucaccaauauaaucaugaacaagaaugaagagagaacuuuccugaaacuaacaaagccgcucugugaagucaacagcuggcauauucuguccaaagauaaugccaucaggauuggcgaggacgcucacauccuugugacccgggaacccuaucugucuugcgauccucaagggugucgcauguuugcauugucgcagggaacgacucuccgaggccagcaugccaacgguaccauacacgaccguucaccauucagagcgcugauuagcugggagauggggcaggcucccaguccuuacaauacaaggguugagugcaucggaugguccucuacuagcugucaugauggcauuucccggaugucaaucugcaucaguggcccaaacaacaaugccagcgcaguggucugguaucgcgggagacccgugaccgaaauuccuucuugggccggaaacauacugaggacacaagaguccgaauguguaugccacaaggguaucuguccaguugugaugaccgacggcccggcuaauaacaaggcagccacgaaaauuaucuacuuuaaggaggggaaaauacagaagacugaggaacuccagggaaaugcucagcacauugaggaaugcucauguuauggcgccgcggguaugaucaaaugcgucugccgggauaacuggaagggggcaaaucgccccaucauuacaaucgacccugagaugaugacccauacuagcaaguacuuauguaguaaaauucugacagauaccucucgaccaaacgaccccacgaauggaaacugcgaugccccuauaaccggcggcuccccagaccccggggugaagggauucgcuuuucuugauggugaaaauagcugguugggcagaacaaucucgaaagacucuagguccggguaugagaugcugaaggugccgaacgccgagauugacauccaaucaggaccuaucaguuaccagcuagucguuaauaaccagaauuggagcggcuacuccggugcauucauugauuauugggcuaacaaagaauguuuuaaccccugcuucuacguggagcucauacgggggcguccaaaggaaucuggcguacuguggacuagcaauucaaugguggcccuuuguggaagucgcgagagacugggcuccuggagcuggcacgacggggcggaaaucauuuauuuuaaauga

SEQ ID NO: 154425 - RNA, 1413 nt, Artificial Sequence
  derived and/or modified CDS sequence (opt3) from neuraminidase__InfluenzaA__EPI533584
augaaccccaaucagaagaucacgugcauuagcgccacaggcaugacucuguccguggucucuaugcucauagggaucgcuaaccuuggacugaauauugguuugcacuacaaaguuucagacaguacgaacaucaauauuccuaacaugaaugagaccagcccaacaacuaccaucauaaacaaucauccgcaaaacaauuucacaaacaucaccaauauuaucgugacuaagaacgaagagggccacuuacugaaucuaacaaaaccccucugugaaguaaacuccuggcauauucugucuaaggauaacgcaaucagaauaggggaggacgcccacauuaucgugaccagggaaccuuaucuuucgugcgauccacagggaugucggauguuugcgcugucacagggcacgacuuugcgcgguaaacaugcuaaugggaccauucacgaccgaagccccuuccgugcccucgucaguugggagaugggacaggcaccuuccccauacaacacaagaguggagugcaucggcuggucuagcacuuccugucacgauggcaucucaaggaugaguauuugcauaagcgggcccaauaacaaugccucugcuguugugugguauggaggucggccugucaccgaaaucccauccugggcaggcaacauucugcgcacacaagagucagaaugugugugccaugggggaaucuguccgguaguuaugaccgacggccccgccaauaacagagcugagacgaagauaauuuacuuuaaggaggguaaaaucaagaaaaucgaggaacugaagggggaugcccagcacauugaagagugcagcuguuauggagcgagugaaaugaucaaaugcauuugcagggacaauuggaagggcgcaaaccggccugugauaacuaucgauccagagaugaugacacauaccucuaaguaccucuguuccaaaauuuuaacugacacaagccgccccaaugauccuaccaacggcaagugcgaggccccaaucaccgggggaucgcccgacccgggugucaaaggcuucgcuuuucuggauggggaaaauucuuggcuuggacgaaccaucuccaaggacucaagaaguggcuaugagauguugaaagugccuaacgccgaaacagacacucagagcggugcaauuucccaccagauaaucgugaauaaccaaaacuggucuggguacagcggcgcuuucauugauuacugggccaauaaggaguguuuuaaccccugcuucuaugucgaacugaucaggggacggccaaaagagucaaguguucuauggaccuccaauagcauuguggcgcucuguggcucuaaggagcgucuggggucauggaguuggcacgacggagccgaaaucauauacuuuaaguga

SEQ ID NO: 154426 - RNA, 1380 nt, Artificial Sequence; identical to SEQ ID NO: 154046
  derived and/or modified CDS sequence (opt3) from neuraminidase__InfluenzaA__EPI641400

SEQ ID NO: 154427 - RNA, 1380 nt, Artificial Sequence; identical to SEQ ID NO: 154046
  derived and/or modified CDS sequence (opt3) from neuraminidase__InfluenzaA__EPI587620

SEQ ID NO: 154428 - RNA, 1410 nt, Artificial Sequence
  derived and/or modified CDS sequence (opt3) from neuraminidase__InfluenzaA__EPI569392
augaaccccaaucagaagaucgugaccauuggcagccugucccucgggcuugucguuuucaacgugcuguugcacgccguaucuauaaucuuaacagugcuggcucuaggaaaaucagagaauaacgguauuugcaauggcacugucgugagagaauacaacgagacgguuaggaucgaaaaggugacccaaugguauaauacaagugucguggaguacguaccucauuggaacgaagggacuuauauuaauaacaccgagccaaucugugacguuaaaggauuugcaccguucagcaaggauaauggcauacggguggguucccgcgggcacaucuuugucauucgagagcccuucgugucuugcucgccugugggaugucguacauuuuuccucacccagggcucacugcuuaacgacaaacauagcaauggcacugucaaggauagaaguccauuuaggacacugauguccguugaaguggggcagucucccaacguauaccaggcccgguucgaggcgguggcuuggagcgccaccgcaugccacgacggaaagaaauggauggccaucggugucacgggcccugauuccaaggcuguggcaguugugcauuaugggggagucccaacugacgugguaaauucaugggccggcgauauuuugcgcacccaagaaaguagcuguacaugcauccaggguaacuguuacuggguuaugacugacgggcccgcuaacagacaggcccaguauaggauauacaaagcgaaucaaggaaagauuaucggccggaaagaugugucuuuuuccggcgggcacauugaggagugcucauguuacccuaacgacggaaaggucgaaugcgugugucgcgauaauuggaccgguacaaaccgaccaguccucaucaucagcccggaccugaguuauagagugggcuaccugugcgcagggcuccccucugauaccccuaggggagaggacacgcaguucguuggcuccugcacuagcccaauggguaaucagggguauggcgugaagggauuuggcuuccggcaggggacagacguaugggucggacguaccauuucgcgcacuucuagauccgguuuugaaauaaucaggauuaaaaacggcuggacacaaaccucaaaggagcagauccggcgacaggugguuguggauaauaguaacuggagcggguacuccggaucuuucacguuacccgucgaacugagcggccgcgagugucuugugccuugcuucuggguagagaugauaagagguaggccagaggaacggaccauuuggacaucaaguuccagcaucgugaugugugggguugacuaugaaaucgccgauuggucuuggcacgacggcgcuauuuugcccuuugauaucgacaaauga

SEQ ID NO: 154429 - RNA, 1368 nt, Artificial Sequence
  derived and/or modified CDS sequence (opt3) from neuraminidase__InfluenzaA__EPI459857
augaaccccaaucagaagaucauuaccauaggcagcaucugcauggugauugggacagucucccugaucguucaagugggaaacauuauccucauauggguaaaucacucuauccagacuuguauuacguacgagaacaauaccugggugaaccagacauaugucucaaauacuaacuuccuuaccggucaggccguggcuaguguuacacuggcaggcaauagcuccuugugcccuaucucugggugggccauuuacucgaaagacaacggaaucagaauaggcucaaagggugauguguuugucauuagggaaccauucaucagcuguagucauuuagagugccggaccuuuuuccugacucaaggggcgcuacucaaugacaaacacuccaacggaacaauuaaggaucgcucuccguaucgaacccugaugagcugucccgugggcgaagcuccuuccccauacaauucacguuuugagaguguagccuggagcgcaucugccugccaugacggcaucaacuggcuuacgaucgggauuuccggacccgauaaugaagcuguugcagugcugaaauauaacggugucauaacugacaccaucaagucauggagaaacaauauuuugaggacacaggagagcgagugugccugcgugaacggcaguuguuucacugugaugaccgaugggccuucuaauggacaggcuuccuacaagaucuuuaaaauagaaaagggcaaagucguucggagcguggagcucgacgccccaaacuaucacuacgaagagugcucguguuaccccgaugcgggugagauuacaugcguaugccgcgacaauuggcaugggucuaacagaccuuggguguccuucaaucagaaccuggaauaucaaaccggauacaucuguucaggcgucuuuggcgauaguccaaggccgaaugacgggacgggaagcugcggucccguguccucuaacggcgcauucgggguuaagggauuuagcuucaaauauggcaaugguguguggaucgggcggacuaagacaaccaacucacgcaguggcuuugagaugauuugggauccuaauggauggacugaaacagacuccagcuucucuaugaagcaggacaucauugccauaaccgauuggucaggcuacagugggagcuucguccagcacccagagcugacgggacucaacuguaugcgacccugcuuuuggguggaauuaaucagaggucagccuagggagaauaccauuuggacauccgggucuucgaucagcuucuguggcguaaacuccgagacuguuggauggucauggccagacggcgcugaacugcccuuuaccaucgauaaauga

SEQ ID NO: 154430 - RNA, 1416 nt, Artificial Sequence
  derived and/or modified CDS sequence (opt3) from neuraminidase__InfluenzaA__EPI242204
augaaccccaaucagaagcuguucgcccucagcggcguggcuaucgcacuuuccguccugaacuuguuaauugggauaucuaauguuggacugaacgugucacuacaccucaaaggugagggcguaaagcaagaaaauaaccugaccugcacaacuaucacgcagaauaacaccacaguggucgagaauacuuacgugaacaauaccacaauuaucaacaaagggaccaaucuuaaggccccuaacuaucuguugcucaauaaaagucuguguagcguugaaggauggguggucauugcgaaggacaacgcuaucagauuuggcgaguccgaacagauaaucgugacuagggagccauacguaucuugcgauccgucggguuguaagauguaugcccugcaucaggggacaaccauucggaacaaacacucaaauggaacgauccaugaccgcacuaccuuccgaggccucauuagcacacccuuaggcacuccuccaaccguuaguaacuccgauuuuaucugcgugggguggucuagcacauccugucacgacggagucggucguaugaccauaugcauucaaggcaauaacgauaaugcaacggccacuguguacuauaacagaaggcugacaaccacuaucaagacaugggcuaaaaauauucuucggacccaggagucagaaugugugugccauaacgggacgugugcagucguuaugaccgacggacccgccaguagccaggcuuacacaaagaucauguauuuccacaaaggcuugaucauuaaggaggaaccucugcgcgguucugccagacacauagaggagugcuccuguuacgggcaugaucagaaggugucaugcguaugcagggacaauuggcaaggagcgaaccggccaaucauugaaaucgauaugagcacucuagagcacaccagucgcuacguguguacaggcguccucacugacaccucucgacccggcgauaaaccuaauggggacugcuccaacccaauaacaggaagcccgggugcacccggcgugaagggguuuggauuccugaauggcgauaacaccuggcuugguagaacuauuucgccuaggucucgguccggguuugaaaugcugaaaaucccaaaugccgagacggaccccaacucacguaucauugaacgccaggagaucguugacaacaguaauuggagcggcuauuccggaucuuucauugauuacugggacgaggcuaacgaauguuauaauccuugcuuuuacguggaguugauaagaggcaggccagaagaggccaaguaugucugguggacaagcaacucacucaucgcacugugugggagucccguguccguaggaagcgguucuuucccggauggcgcucagauucaguacuuuucauga

SEQ ID NO: 154431 - RNA, 1416 nt, Artificial Sequence
  derived and/or modified CDS sequence (opt3) from neuraminidase__InfluenzaA__EPI408029
augaaccccaaucagaagcuguucgcccucagcggcguggcuaucgcacuuuccguccugaacuuguuaauugggauaucuaauguuggacugaacaugucacuacaccucaaaggugagggcgugaagcaagaaaauaaccugaccugcacaacuaucacgcagaauaacaccacaguaguggagaauacuuacgucaacaauaccacaauuaucaacaaagggaccaaucuuaaggccccuaacuaucuguugcucaauaaaagucuguguagcguggaaggauggguugugauugcgaaggacaacgcuaucagauuuggcgaguccgaacagauaaucgucacuagggagccauacgugucuugcgauccgucggguuguaagauguaugcccugcaucaggggacaaccauucggaacaaacacucaaauggaacgauccaugaccgcacuaccuuccgaggccucuuaagcacaccccugggcacuccuccaaccguaaguaacuccgauuuuauuugcguuggguggucuagcacauccugucacgacggagugggucguaugaccaucugcauacaaggcaauaacgauaaugcaacggccacugucuacuauaacagaaggcuuacaaccacuauuaagacaugggcuaaaaauaucuugcggacccaggagucagaaugugugugccauaacgggacgugugcaguggucaugaccgacggacccgccaguagccaggcuuacacaaagauuauguauuuccacaaaggccugaucaucaaggaggaaccucuacgcgguucugccagacacauugaggagugcuccuguuacgggcaugaucagaagguuucaugcgugugcagggacaauuggcaaggagcgaaccggccaauaaucgaaauugauaugagcacucucgagcacaccagucgcuacguauguacaggcgugcugacugacaccucucgacccggcgauaaaccuaauggggacugcuccaacccaaucacaggaagcccgggugcacccggcgucaagggguuuggauuccuuaauggcgauaacaccuggcuggguagaacuauaucgccuaggucucgguccggguuugaaauguugaaaauuccaaaugccgagacggaccccaacucacguaucaucgaacgccaggagauuguggacaacaguaauagaagcggcuauuccggaucuuucaucgauuacugggacgaggcuaacgaauguuauaauccuugcuuuuacguugagcucauuaggggccggccagaagaggccaaguaugugugguggacaagcaacucacugauagcauuaugugggagucccgucuccgugggaagcgguucuuucccggauggcgcucagauccaguacuuuucauga

SEQ ID NO: 154432 - RNA, 1398 nt, Artificial Sequence; identical to SEQ ID NO: 151502
  derived and/or modified CDS sequence (opt3) from neuraminidase__InfluenzaA__EPI439509

SEQ ID NO: 154433 - RNA, 1350 nt, Artificial Sequence; identical to SEQ ID NO: 154035
  derived and/or modified CDS sequence (opt3) from neuraminidase__InfluenzaA__EPI164223

SEQ ID NO: 154434 - RNA, 1398 nt, Artificial Sequence; identical to SEQ ID NO: 151502
  derived and/or modified CDS sequence (opt3) from neuraminidase__InfluenzaA__EPI486493

SEQ ID NO: 154435 - RNA, 1398 nt, Artificial Sequence
  derived and/or modified CDS sequence (opt3) from neuraminidase__InfluenzaA__EPI740737
augaaccccaaucagaagauccugugcaccagcgccacagcuauuacuauauccgcaaucgccgugcucauuggcaucgcgaaccuugggcugaauauuggauugcacuuaaaaccugguuguaacugcucucauucacaaccagagacgaccaauacaagucagacuaucauaaacaauuacuauaacgaaaccaauaucacaaacauucagaucgaggaaagaaccagcaggaauuucaacaaucugacuaagggccuauguacaauuaacuccuggcacaucuacgggaaagacaaugcuguccggauaggagagucuucggauguucucgugacccgcgaaccguauguaucaugcgaccccgaugagugucgauuuuacgcccugagccagggcacgacuauucgugguaagcauaguaacgggaccauccacgacagaucccaauauagggcacuuauuucuuggccucugagcuccccacccacagugcauaacucacgggucgagugcaucggauggaguagcacuucuugucacgauggcaaaucccgcaugucaaucugcauuagcggcccuaauaacaaugccagugcugugguuugguacaacagaaggccaguggcagaaauaaauaccugggcccggaacaucuugcgcacacaggagucugaaugugucugccacaauggggugugucccguaguuuucaccgacggaccugcuacggguccagccgauacucgaauuuauuacuuuaaggagggcaagauccucaaaugggagucccugacagggaccgcgaagcauauagaagagugcagcugcuacggagaaagaacuggcauuacauguaccugcagggacaacuggcaggguucgaaucggccggugguccagaucgaucccguggcaaugacgcacaccucucaauauaucuguuccccugugcugacagacucaccacgucccaacgauccuaauauugggaaaugcaacgacccauaccccggaaauaacaauaacggcgucaagggcuucaguuaucucgauggggccaacacuugguuaggacgcaccaucagcacagcuuccagaucugguuacgagaugcugaaaguuccgaaugcccuuacugacgacaggagcaagccuauucagggccagaccauaguguugaacgcagauuggucaggguauaguggauccuuuauggacuacugggcugaaggcgauuguuaucgggccugcuucuacguagagcugauccgaggucgccccaaggaggacaaagugugguggacaagcaauucuauugucucaauguguaguagcaccgaauuucuagggcaguggaacuggccagauggcgcgaagaucgaguacuuccucuga

SEQ ID NO: 154436 - RNA, 1398 nt, Artificial Sequence
  derived and/or modified CDS sequence (opt3) from neuraminidase__InfluenzaA__EPI730494
augaaccccaaucagaagauccugugcaccagcgccacagcuauuacuauaggcgcaaucgccgugcucauugggaucgcgaaccuuggacugaauauugguuugcacuuaaaaccuggcuguaacugcucccauucucaaccagagaucacgaauaccucacagacaauaaucaacaauuacuauagugaaacuaacauuaccaauauccagauggaggaaagaacaagcaagaacuucaauaaccugaccaaagggcuauguacuauuaauuccuggcacaucuacggaaaggacaacgcugucaggauaggcgagucuucggauguucucgugacacgggaaccguauguaucaugcgaccccgaugagugucgcuuuuacgcccugagccaggguaccacgauucgagggaaacauaguaauggaacuauccacgaccguucccaauauagagcacuuauuucuuggccucugagcuccccacccaccguguacaacucaagggucgagugcaucggcuggaguagcacaucuugucaugauggcaagucccggaugucaaucugcauuagcgggccuaacaauaacgccagugcugugguuugguauaaucgcagaccaguggcagaaauaaacacuugggccaggaauaucuugcggacccaggagucugaaugugucugccacaacggagugugucccguaguuuucacagacgguuccgcuaccggcccugccgauacgcgcauuuacuacuuuaaggaggggaaaauccucaagugggagagccugacuggaacagcgaaacacauagaagagugcucgugcuauggcgaacgaaccgguauuacuuguacaugcagagacaauuggcaggggucuaacaggccagugauccagaucgauccggucgcaaugacccauacgucccaauacauuuguucacccgugcugaccgacaauccucggccaaacgaucccaauaucggaaagugcaacgacccuuauccaggcaauaacaauaacggcauuaaaggguucaguuaccucgauggagccaacacaugguuaggucguacuauaagcaccgcuucccgcucuggcuaugagaugcugaaggugcccaaugcccuuacagacgacagaagcaagccgauccaggggcagacuauugucuugaacgcagauuggucaggauacaguggcuccuuuauggacuauugggcugaaggugauuguuacagggccugcuucuacguugagcugauccgggggcgaccuaaagaggacaaggugugguggaccagcaauucuaucguaucaauguguaguagcacagaauuucuaggccaguggaacuggcccgauggagcgaaaauugaguauuuccucuga

SEQ ID NO: 154437 - RNA, 1398 nt, Artificial Sequence
  derived and/or modified CDS sequence (opt3) from neuraminidase__InfluenzaA__EPI712925
augaaccccaaucagaagauccugugcaccagcgccacagcuauuacuauaggcgcaaucgccgugcucauugggaucgcgaaccuuggacugaauauugguuugcacuuaaaaccuggcuguaacugcucccauucucaaccagagacgaccaauacaucacagacuaucauaaacaauuacuauaacgaaaccaauaucacaaacauucagaucgaggaaagaaccaguaggaauuucaacaaucugacuaaggggcuauguacaauuaacagcuggcacaucuacggaaaagacaaugcuguccggauaggcgaguccucugauguucucgugacccgcgaaccguauguaucgugcgaccccgaugagugucgauuuuacgcccugucacaggguacgacuauucgugggaagcauagcaacggaaccauccacgacagaagucaauauagggcacuuauuuccuggccucugucuagcccacccacagugcauaacucccgggucgagugcaucggcuggucaaguacuagcugucacgauggcaaaucucgcauguccaucugcauuucagggccuaauaacaaugccagcgcugugguuugguacaacagaaggccaguggcagaaauaaauaccugggcccggaacaucuugcgcacacaggagagugaaugugucugccacaauggagugugucccguaguuuucaccgacgguccugcuacgggcccagccgauacucgaauuuauuacuuuaaggaggggaagauccucaaaugggagucucugacaggaaccgcgaagcauauagaagagugcuccugcuacggcgaaagaacugguauuacauguaccugcagggacaacuggcaggggagcaaucggccggugguccagaucgaucccguggcaaugacgcacaccucgcaauauaucuguucuccugugcugacagacuccccacgucccaacgauccuaauauuggaaaaugcaacgacccauaccccggcaauaacaauaacggcgucaagggguucucauaucucgauggagccaacacuugguuaggucgcaccaucaguacagcuagcagauccggcuacgagaugcugaaaguuccgaaugcccuuacugacgacaggucuaagccuauucaggggcagaccauaguguugaacgcagauuggagcggauauucaggcaguuuuauggacuacugggcugaaggugauuguuaucgggccugcuucuacguagagcugauccgagggcgccccaaggaggacaaagugugguggacauccaauagcauugucucuauguguucaaguaccgaauuucuaggccaguggaacuggccagauggagcgaagaucgaguacuuccucuga

SEQ ID NO: 154438 - RNA, 1398 nt, Artificial Sequence
  derived and/or modified CDS sequence (opt3) from neuraminidase__InfluenzaA__EPI448938
augaaccccaaucagaagauccugugcaccagcgccacagcuauuauaaucggcgcaauugccgugcucaucgggauggcgaaccuuggacugaauauugguuugcacuuaaaaccuggcuguaacugcucccauucucaaccagagacuacgaauaccucacagacaaucauaaacaauuacuauaacgaaacuaauaucaccaacauucagauggaggaaagaacaaguaggaauuucaacaaucugaccaaggggcuauguacuaucaacagcuggcacauuuacggaaaagacaaugcuguccggaucggcgaguccucugauguucucgugacacgcgaaccguauguaucgugcgaccccgaugagugucgauuuuacgcccugucacaggguaccacgauacgugggaagcauagcaacggaacuauucacgacagaagucaauauagggcacuuaucuccuggccucugucuagcccacccaccguguacaacucccgggucgagugcauuggcuggucaaguacaagcugucaugauggcaaaucucgcauguccaucugcaucucagggccuaauaacaaugccagcgcugugguuugguauaacagaaggccaguggcagaaauuaauacuugggcccggaacauauugcgcacccaggagagugaaugugucugccacaauggagugugucccguaguuuucacagacgguucugcuaccggcccugccgauacgcgaaucuacuacuuuaaggaggggaagauucucaaaugggagucccugacuggaacagcgaagcacaucgaagagugcagcugcuauggcgaaagaaccgguauaacuuguacaugcagggacaacuggcaggggucgaaucggccagugauucagaucgauccggucgcaaugacccauacgucucaauacaucuguucccccgugcugaccgacaacccucguccaaaugaucccaacauuggaaaaugcaaugacccuuauccaggcaacaauaacaacggcgugaagggguucucauaccucgauggagccaauacaugguuaggucgcacuaucaguaccgcuagcagauccggcuaugagaugcugaaaguccccaacgcccuuacagacgacaggucuaagccgauucaggggcagacuauaguuuugaaugcagauuggagcggauacucaggcaguuuuauggacuauugggcugaaggugauuguuaccgggccugcuucuacguggagcugauccgagggcgcccuaaggaggacaaaguaugguggaccuccaacagcauugugucuauguguucaaguacagaauuucuaggccaguggaauuggcccgauggagcgaagaucgaguauuuccucuga

SEQ ID NO: 154439 - RNA, 1410 nt, Artificial Sequence
  derived and/or modified CDS sequence (opt3) from neuraminidase__InfluenzaA__EPI445995
augaaccccaaucagaagaucauugcccugggcagcgcuucccucaccauagcaaucauuugccuucugauccaaauugccaucuuggcgacaacuaugacguuacacuucaugcagaacgagcauaccaauucuacaagaaacaaaguggucccuugugaaucaauaaucauugagaggaauaucacugaaauuguucaccugaacgggaccaucauagagaaggaaaguugcccaaaagcuguggaguacaagaauuggagcaaaccgcagugucagauuacaggauuugcccccuucuccaaggacaacucuauccggcuaucggccgguggcgauauuuggguaacccgcgagccuuaugugucaugcagccucaguaaguguuaccaauuugcacuggggcagggaacuacacuuaauaaccgacauuccaauggcaccacgcacgaccguucuccauauagaacucuguugaugagcgaacucgguguccccuuccaucuggggaccaaacaggugugcaucgcuugguccucaaguagcugucacgauggaagggcauggcugcacguuugcgugacaggcgacgauaagaacgccacugcuucugucaucuacggcgggaugcucaccgacuccauuggaucauggagcaaaaauauauuacggacacaggagagugaaugugugugcaucaacgguaccuguacgguaguuaugacugauggcucugccuccgggcgcgcggacacacggauucuguuuaucagggagggaaagauagugcauauuagcccucuuucgggcucugcacaacacgucgaggaaugcuccugcuauccacgguaccccgaggugcgcugugugugccgagauaauuggaaagguucaaacagaccugucuuguauaucaacguugccgacuacaguaucgauagcuccuacguguguucugggcugguaggagacaccccaaggaaugaagauagcucaaguuccagcaacugccgggacccgaauaacgagcguggcggccccggggugaagggaugggcuuucgacaauggugaugacgucuggaugggccgcacuauuaagaaagauucuagagccggguaugaaacauuuagggugguugacggauggacccuagcaaacucaaagagucagacgaauagacaggugaucgucgauagcgacaacugguccggcuacucugguauguucucgguggaggggaaaaccuguauuaaucgaugcuuuuauguagagcucauacgcggcagaccucaggaaacaaggguuugguggacuagcaacuccaucauuguguucuguggaaccucaggcacauacgggacuggaaguuggccagauggugcugacaucaauuuuaugucuaucuga

SEQ ID NO: 154440 - RNA, 1410 nt, Artificial Sequence
  derived and/or modified CDS sequence (opt3) from neuraminidase__InfluenzaA__EPI470861
augaaccccaaucagaagaucauugccauaggcagcgugucccugaccaucgcuacaauuugccuccuuaugcaaaucgcaauucuggccacuacgaugaccuugcacuucaaacagaacgaguguaucaauucuucaaacaaucaggucguuccuugcgaaccaauaaucauugagagaaacaucacagaaauugugcauuuaaauaguacuacccuggagaaggaaaucuguccgaaaguagcggacuacaggaacuggagcaagccccagugccaaauaacaggguuugcuccuuucuccaaagauaauucuauucggcuaucggccggaggugacaucugggugacccgcgagccauaugucucauguggccucgggaagugcuaccaguuugcacugggacagggcacuacacuugagaacaagcacagcaaugguaccgcccaugaucgaacgccccaccguacucuguugaugaacgaacucggggugccuuuccaucuggcuaccaaacagguuuguauugcauggaguuccucuagcugccacgacggaaaggccuggcugcacgugugugucacaggcgaugacagaaaugcuacugccuccaucaucuaugauggcauucucguggacucaauagggaguuggagcaaaaacaucuuaaggacccaagagucugaaugcguauguauuaauggaacaugcgcgguugugaugaccgaugguuccgcaucaggccgggccgacacgcgcauccuguuuauaagagaggggaagauugcucauaucagcccacuuaguggaucugcccagcacgucgaggaaugcuccuguuaccccagguauccugaggugcggugcgugugucgcgauaacuggaaaggcagcaaccgaccagucuuguacaucaauauggcaaacuauucgauugacucuuccuacguuugcucaggucuggugggggauacuccgagaaaugacgacaggaguagcuccucuaacugucgggaucccaauaacgaacguggagcuccuggcguaaagggcugggccuucgacaaugggaacgauaucuggaugggacgcacaauuaagaaagacagcagaucagguuacgagaccuuuagggugauaggcggguggacuacagcgaauaguaagucccagaucaaccggcaggucauuguggauagcgacaauucuucaggauauaguggcaucuucagcguugaagguaaauccugcaucaaccgauguuuuuacguggagcuaauucgcgggagaccaaaggagaccagggucugguggacgucuaauucgauaaucguguucugcggcaccagcggaacauauggcacuggguccuggcccgauggagccaacauuaauuuuaugccuaucuga

SEQ ID NO: 154441 - RNA, 1401 nt, Artificial Sequence
  derived and/or modified CDS sequence (opt3) from neuraminidase__InfluenzaA__EPI498036
augaaccccaaucagaagaucauugccauaggcagcgugucccugaucauugcuaucauuugccuccuuaugcaaaucgcaauacugaccacaacuaugacguugcacuucagacagaacgaguguucuaauccuucaaacaaucaggucaugccaugcgaaccgaucauuuuagagaggaacaccguucaucugaauaguacaaucauugaacgggagaucugucccaaaguggccgacuacaagaacuggagcaaaccucagugccaaauaacuggguuugcgccauucuccaaggauaauucuauucgccuaucggcuggaggugacaucuggguaacccgagaacccuaugugucauguagccucgauaaaugcuaccaguuugcccugggccaggggacaacccuuaagaacaagcacaguaauggaacuacacaugaccguaccccucacagaacgcuguugaugaacgagcucggcgucccauuccaucuggguacuaaacagguguguauugcaugguccucuagcuccugcuaugaugggaaggccuggcugcacaucuguguuaccggagacgauaaaaaugcuacagcaucaaucauuuacgacggcaugcucguggauaguauaggcagcuggucuaagaacaucuuaaggacucaagaguccgaaugcgucuguauuaaugggaccugcgccgugguaaugacagacggaucagcuagcgguaaagccgauacccggguucuguuuauccgcgagggcaagauaauuaacaucaguccccuuucuggguccgcgcagcacguggaagagugcagcuguuauccuagauacccagaggucaggugcgugugucgggacaacuggaagggaucgaaucgcccgaucuuguauauuaacauggcagauuacucuaucgaauccucauacgugugcaguggccuggucggugacacgccccgaaaugacgauagcuccucuagcucaaacuguagagacccuaauaacgagaggggagccccagggguuaaaggcugggcuuucgaugacggcaaugauguguggauggggcggacuauuaagaacggaagucguuccgguuaugaaacauuucgcguagugaauggcuggaccauggccaacagcaaaucucagauaaauagacaggucaucguggacucagaugacuggaguggguacagcggaauuuucuccguugagggcaagaaaugcaucaacagguguuuuuauguggaacuaauccggggucgaccccaagagccucgcgucugguggacuucuaauucgauuauaguguucugcgggacaagcggcaccuacggaacgggcuccuggccagauggggcaaacaucaauuuuaugcccguauga

SEQ ID NO: 154442 - RNA, 1410 nt, Artificial Sequence
  derived and/or modified CDS sequence (opt3) from neuraminidase__InfluenzaA__EPI470902
augaaccccaaucagaagaucguggccauuggcagcgcuucccugaccauagcaacaaugugccuccuuaugcagaucgcccuguucgcgacuacgaugaccuugcacuuuaaacagacaggguguacuaacucuucagacaaucaggcugucccuugcggaccaauuaucauugagagaaacaucaccgaaauaguucauuuaaauaguacaacccuggagaaggaaacuuguccgaaaagcgccgguuacaggaacugguccaagccccagugccaaaucacaggcuucgcaccuuuuucuaaagauaauucgauucggcuagccgcugcaggggacaucugggugacccgcgagccauauguaucauguggacucggcaagugcuaccaguucgcccugggucaggggacgacucuugauaacaagcacagcaauggaaccacacaugaccgaacuccccaccguacccuguugaugaacgaacucggcgugccuuuucaucuggcuacaaaacaggucuguauugccuggaguuccucuagcugccacgauggcaaggcguggcugcacguguguguuaccggggacgauaaaaaugcaacggccuccaucauauaugacgguauucucguggauucaaucgcuaguuggagcaagaacauuuuaagaacucaagagucugagugcgucuguaucaauggaacaugcaccgugguaaugacugacggcuccgccucagggagggcagauacacggauccuguucauucgcgaaggaaaaauaguucauaucagcccacuuaguggcucugcucagcacguggaggaaugcuccuguuaccccagauauccugaggucaggugcgugugucgggacaacuggaaggguagcaaucgcccaguguuguuuauuaacauggccgauuacucgaucgacucuuccuaugucugcucagggcugguuggagacaccccgcgaaacgaugacagaaguagcuccucuaauuguagggaucccaacaaugagcggggcgcgccuggcgugaaggggugggccuucgacagcggaaacgauauauggaugggucguacgauugaaaaagacucacgcaguggcuacgagaccuuuagaguaaucgggggaugguccacagcaaauagcaagucucagaucaacaggcaagugauugucgaucgggacaauucaaguggcuacagcgguaucuucuccguggaagggaaaucuugcauuaaccgauguuuuuauguugagcuaauacgcggcagaccaaaggaaaauagggugugguggacuucgaacagcaucauugucuucugcggaaccuccggcacauacgggacuggaucauggcccgauggugcuaauaucaaccucaugccuaucuga

SEQ ID NO: 154443 - RNA, 1401 nt, Artificial Sequence
  derived and/or modified CDS sequence (opt3) from neuraminidase__InfluenzaA__EPI838241
augaaccccaaucagaagaucaccgccauuggcagcgugucccugauaaucgcuauuaucugccuccuuaugcaaauugcaauccugacaacuacgaugaccuugcacuucagacagaacgaguguucuaauucaaguaacaaucaggucaugccuugcgaaccaauaaucauugagaggaacacaguucauuuaaauagcacuaccaucgaacgggagauuuguccgaaaguggccgaauacaagaacugguccaaaccccagugccaaaucacaggguuugcgccuuucucuaaggacaauucgauacgccugucagcuagcggagauauuuggguaacccgagagccauaugugaguuguucccuagacaaaugcuaccaguuugcccucggucagggcacuacacugaagaacaagcacucuaaugggaccgcacaugaucguacgccccacagaacucuucugaugaacgaguugggagucccuuuccaucucggcaccaaacagguguguaucgccuggagcuccucaaguugcuaugacgguaaggcuuggcugcacguuugugugacaggggaugacaaaaaugcaacugccagcauuaucuacgauggaaugcuggucgacucuaucggcuccuggucaaagaacauucucaggacccaagaaagcgagugcguguguauaaauggcacaugcgcuguaguuaugaccgaugggagugccucuggaaaagcggacacgcggguguuauuuauccgcgaagguaagauuaucaacauauccccacugagcggcucggcacagcacgucgaggagugcucuuguuaucccagauacccugaagugaggugcgugugucgggauaacuggaagggguccaaucgcccaauucuuuauaucaacauggccgacuacucaaucgagaguagcuacgucugcuccggauugguuggcgauacuccgcgaaaugacgacucuagcucaaguuccaacuguagagaucccaauaacgaaaggggugcuccuggggugaaaggaugggccuucgacgauggcaaugacguauggaugggccggacaauuaagaacgggagccguucuggauaugagaccuuucgcguggucaaugguuggacuauggcaaacucaaaaagucagaucaauagacaggugauuguugaaagcgaugacugguccggcuacucugggauauucucgguggagggaaagaaaugcaucaacagguguuuuuaugucgagcugauucggggccgaccacaagaaccccgcgugugguggacaagcaauuccaucaucguauucugcgguaccucagggacguacggcaccggaaguuggccugauggcgcuaacauuaauuuuaugccaauauga

SEQ ID NO: 154444 - RNA, 1401 nt, Artificial Sequence; identical to SEQ ID NO: 154443
  derived and/or modified CDS sequence (opt3) from neuraminidase__InfluenzaA__EPI680525

SEQ ID NO: 154445 - RNA, 1401 nt, Artificial Sequence; identical to SEQ ID NO: 154051
  derived and/or modified CDS sequence (opt3) from neuraminidase__InfluenzaA__EPI690481

SEQ ID NO: 154446 - RNA, 1755 nt, Artificial Sequence
  derived and/or modified CDS sequence (opt3) from hemagglutinin__InfluenzaB__ABL76276
augaaggccaucauugugcugcucauggucguuaccagcaacgcugacagaauaugcacaggcaucacuuccucuaauucaccccacgugguaaaaacggcaacccagggggaagugaacgucacaggagugauuccucuuacuaccacaccaaccaagagucauuucgccaaucugaaagguacuaagacaaggggcaaauuguguccgaccugcuuaaacuguacggaucuggacguugcgcuagggcggcccaugugcgugggaaucacuccuagcgcuaaggccuccauucuccacgaaguccgcccagugaccucuggcuguuuucccaucaugcaugaucgaacaaagauacgucaacugccuaaucuucugagagguuacgagaaaaucagguugucgacucagaacguaauuaaugcagaaaaggccccagggggacccuaucggcucggcaccucaggcagcugcccuaacgcuacaagucgcuccggguucuuugcaaccauggccugggcuguuccaagagacaauaacaaaacggccacuaauccgcugacaguggaggucccccacaucuguaccaaggaagaggaucagauuacuguguggggauuccauucugacaacaaaacacagaugaagaaucuguacggugauagcaacccucaaaaguuuaccuccucagcgaauggcgugacgacccacuaugucagucagaucgggggauucccagaccagacagaggauggcggucucccccagagcgggaggauaguuguggacuacaugguacaaaaaccuggaaagacuggcaccauuguguaucagcggggcaucuuacugccacagaaagucuggugcgcaucugggcgcuccaaggugauuaaaggaucacuucccuugaucggugaagccgauugucugcacgagaaguacggcgggcuaaacaaaagcaagccguauuacacaggagaacaugcuaaggccaucggcaacugcccuauuuggguuaaaacuccccucaagcuggcaaaugguaccaaauaccgaccuccagcuaaacuucugaaggagagaggguuuuucggcgccauagcgggauuuuuggagggcgggugggaaggaaugaucgccgguuggcacggcuauacaagucauggggcacacggaguggcugucgccgcugaccucaagucuacccaggaggccauuaacaagaucacuaaaaaucugaacuccuuaagcgaacuggaggugaagaaucuccaaaggcuuucgggcgcaauggaugaacugcacaacgagauauuggagcuagacgaaaaaguagacgaucugcgggccgacacgauuucuucccagaucgagcucgcuguucugcuuucaaaugaagguaucauuaacagugaggaugaacaucuguuggcgcucgagcguaagcugaaaaagauguuagggcccagcgcaguggacaucggcaauggauguuucgagacaaagcacaaaugcaaccagaccugccuggaucgcauugccgcuggcacuuuuaaugccggggaguucucccuaccaaccuuugacucucucaacauaacagcagccagccugaaugaugacggacuugauaaccauaccaucuugcuguacuauucaacugcugccaguucccucgcagucacacugaugauugcgaucuucaucguguacaugauuagcagagacaaugucucuuguucaauaugccuuuga

SEQ ID NO: 154447 - RNA, 1755 nt, Artificial Sequence
  derived and/or modified CDS sequence (opt3) from hemagglutinin__InfluenzaB__ABL76287
augaaggccaucauugugcugcucauggucguuaccagcaacgcugacagaauaugcacaggcaucacuuccucuaauucaccccacgugguaaaaacggcaacccagggggaagugaacgucacaggagugauuccucuuacuaccacaccaaccaagagucauuucgccaaucugaaagguacuaagacaaggggcaaauuguguccgaccugcuuaaacuguacggaucuggacguugcgcuagggcggcccaugugcgugggagucacuccuagcgcuaaggccuccauccuccacgaagugcgcccaguaaccucuggcuguuuucccauuaugcaugaucgaacaaagauccgucaacugccuaaucuucugagagguuacgagaaaauaagguugucgacucagaacguuaucaaugcagaaaaggccccagggggacccuaucggcucggcaccucaggcagcugcccuaacgcuacaagucgcuccggguucuuugcaaccauggccugggcugugccaagagacaauaacaaaacggccacuaauccgcugacaauugaggucccccacaucuguaccaaggaagaggaucagauuacuguguggggauuccauucugacaacaaaauccagaugaagaaucuguacggugauagcaacccucaaaaguuuacauccucagcgaauggcgugaccacgcacuaugucagucagauagggggauucccagaccagaccgaggauggcggucucccccagagcgggaggauuguuguggacuacaugguacaaaaaccuggaaagacaggcacuaucguguaucagcggggcauuuuacugccacagaaagucuggugcgcaucugggcgcuccaaggugaucaaaggaucacuucccuugaucggugaagccgauugucugcacgagaaguacggcgggcuaaacaaaagcaagccguauuacaccggagaacaugcuaaggccauuggcaacugcccuauauggguuaaaacaccccucaagcuggcaaaugguacuaaauaccgaccuccagcuaaacuucugaaggagagaggguuuuucggcgccaucgcgggauuuuuggagggcgggugggaaggaaugauugccgguuggcacggcuauaccagucauggggcacacggaguggcugucgccgcugaccucaagucuacacaggaggccaucaacaagauaaccaaaaaucugaacuccuuaagcgaacuggaggugaagaaucuccaaaggcuuucgggcgcaauggaugaacugcacaacgagauuuuggagcuagacgaaaaaguagacgaucugcgggccgacacuaucucuucccagaucgagcucgcuguucugcuuucaaaugaagguauuaucaacagugaggaugaacaucuguuggcgcucgagcguaagcugaaaaagauguuagggcccagcgcaguggacauuggcaauggauguuucgagacgaagcacaaaugcaaccagacaugccuggaucgcauagccgcuggcaccuuuaaugccggggaguucucccuaccaacuuuugacucucucaacaucaccgcagccagccugaaugaugacggacuugauaaccauacaauuuugcuguacuauucaaccgcugccaguucccucgcagucacucugaugaucgcgaucuucauuguguacaugauaagcagagacaaugucucuuguucaaucugccuuuga

SEQ ID NO: 154448 - RNA, 1755 nt, Artificial Sequence
  derived and/or modified CDS sequence (opt3) from hemagglutinin__InfluenzaB__ABL76298
augaaggccaucauugugcugcucauggucguuaccagcaacgcugacagaauaugcacaggcaucacuuccucuaauucaccccacgugguaaaaacggcaacccagggggaagugaacgucacaggagugauuccucuuacuaccacaccaaccaagagucauuucgccaaucugaaagguacuaagacaaggggcaaauuguguccgaccugcuuaaacuguacggaucuggacguugcgcuagggcggcccaugugcgugggagucacuccuagcgcuaaggccuccauccuccacgaagugcgcccaguaaccucuggcuguuuucccauuaugcaugaucgaacaaagauccgucaacugccuaaucuucugagagguuacgagaaaauaagguugucgacucagaacguuaucaaugcagaaaaggccccagggggacccuaucggcucggcaccucaggcagcugcccuaacgcuacaagucgcuccggguucuuugcaaccauggccugggcugugccaagagacaauaacaaaacggccacuaauccgcugacagucgaggugccccacauuuguaccaaggaagaggaucagaucacuguguggggauuccauucugacaacaaaacacagaugaagaaucuguacggugauagcaacccucaaaaguuuaccuccucagcgaauggcgucacgacccacuauguuagucagauugggggauucccagaccagacagaggauggcggucucccccagagcgggaggaucgugguagacuacauggugcaaaaaccuggaaagacuggcaccauagucuaucagcggggcauuuuacugccacagaaaguguggugcgcaucugggcgcuccaagguuaucaaaggaucacuucccuugauuggugaagccgauugucugcacgagaaguacggcgggcuaaacaaaagcaagccguauuacacaggagaacaugcuaaggccaucggcaacugcccuaucugggugaaaacuccccucaagcuggcaaaugguaccaaauaccgaccuccagcuaaacuucugaaggagagaggguuuuucggcgccauugcgggauuuuuggagggcgggugggaaggaaugauagccgguuggcacggcuauacaagucauggggcacacggagucgcuguggccgcugaccucaagucuacccaggaggccaucaacaagauuacuaaaaaucugaacuccuuaagcgaacuggagguaaagaaucuccaaaggcuuucgggcgcaauggaugaacugcacaacgagaucuuggagcuagacgaaaaaguugacgaucugcgggccgacacgauaucuucccagauugagcucgcugugcugcuuucaaaugaagguaucaucaacagugaggaugaacaucuguuggcgcucgagcguaagcugaaaaagauguuagggcccagcgcagucgacauuggcaauggauguuucgagacaaagcacaaaugcaaccagaccugccuggaucgcaucgccgcuggcacuuuuaaugccggggaguucucccuaccaaccuuugacucucucaacauuacagcagccagccugaaugaugacggacuugauaaccauaccauauugcuguacuauucaacugcugccaguucccucgcagugacacugaugaucgcgauuuucaucgucuacauggugagcagagacaauguuucuuguucaaucugccuuuga

SEQ ID NO: 154449 - RNA, 1755 nt, Artificial Sequence
  derived and/or modified CDS sequence (opt3) from hemagglutinin__InfluenzaB__ABL76309
augaaggccaucauugugcugcucauggucguuaccagcaacgcugacagaauaugcacaggcaucacuuccucuaauucaccccacgugguaaaaacggcaacccagggggaggugaacgucacaggagugauuccucuuacuaccacaccaaccaagagucauuucgccaaucugaaagguacuaagacaaggggcaaauuguguccgaccugcuuaaacuguacggaucuggacguugcgcuagggcggcccaugugcgugggagucacuccuagcgcuaaggccuccauccuccacgaagugcgcccaguaaccucuggcuguuuucccauuaugcaugaucgaacaaagauccgucaacugccuaaucuucugagagguuacgagaaaauaagguugucgacucagaacguuaucaaugcagaaaaggccccagggggacccuaucggcucggcaccucaggcagcugcccuaacgcuacaagucgcuccggguucuuugcaaccauggccugggcugugccaagagacaauaacaaaacggccacuaauccgcugacagucgaggugccccacauuuguaccaaggaagaggaucagaucacuguguggggauuccauucugacaacaaaacacagaugaagaaucuguacggugauagcaacccucaaaaguuuaccuccucagcgaauggcgucacgacccacuauguuagucagauugggggauucccagaccagacagaggauggcggucucccccagagcgggaggaucgugguagacuacauggugcaacggccuggaaaaacuggcaccauagucuaucagcgcggcauuuuacugccacagaagguguggugcgcaucugggcgauccaaaguuaucaagggaucacuucccuugauuggugaagccgauugucugcacgagaaauacggcgggcuaaacaagagcaaaccguauuacacaggagaacaugcuaaggccaucggcaacugcccuaucugggugaagacuccccucaaacuggcaaaugguaccaaguacagaccuccagcuaaacuucugaaggagaggggguuuuucggcgccauugcgggauuuuuggagggcgggugggaaggaaugauagccgguuggcacggcuauacaagucauggggcacacggagucgcuguggccgcugaccucaaaucuacccaggaggccaucaacaagauuacuaagaaucugaacuccuuaagcgaacuggagguuaaaaaucuccaacggcuuucgggcgcaauggaugaacugcacaacgagaucuuggagcuagacgaaaagguagacgaucugcgugccgacacgauaucuucccagauugagcucgcugugcugcuuucaaaugaagguaucaucaacagugaggaugaacaucuguuggcgcucgagcgcaaacugaagaaaauguuagggcccagcgcagucgacauuggcaauggauguuucgagacaaagcacaagugcaaccagaccugccuggauagaaucgccgcuggcacuuuuaaugccgaagaguucucccuaccaaccuuugacucucucaacauuacagcagccagccugaaugaugacgggcuugauaaccauaccauauugcuguacuauucaacugcugccaguucccucgcagugacacugaugaucgcgauuuucaucgucuacaugaucagcagggacaaugugucuuguucaauuugccuuuga

SEQ ID NO: 154450 - RNA, 1755 nt, Artificial Sequence
  derived and/or modified CDS sequence (opt3) from hemagglutinin__InfluenzaB__ABL76331
augaaggccaucauugugcugcucauggucguuaccagcaacgcugacagaauaugcacaggcaucacuuccucuaauucaccccacgugguaaaaacggcaacccagggggaagugaacgucacaggagugauuccucuuacuaccacaccaaccaagagucauuucgccaaucugaaagguacuaagacaaggggcaaauuguguccgaccugcuuaaacuguacggaucuggacguugcgcuagggcggcccaugugcgugggaaucacuccuagcgcuaaggccuccauucuccacgaaguccgcccagugaccucuggcuguuuucccaucaugcaugaucgaacaaagauacgucaacugccuaaucuucugagagguuacgagaaaaucagguugucgacucagaacguaauuaaugcagaaaaggccccagggggacccuaucggcucggcaccucaggcagcugcccuaacgcuacaagucgcuccggguucuuugcaaccauggccugggcuguuccaagagacaauaacaaaacggccacuaauccgcugacaaucgaggugccccacauuuguaccaaggaagaggaucagaucacugucuggggauuccauucugacaacaaaacacagaugaagaaucuguacggugauagcaacccucaaaaguuuaccuccucagcgaauggcgugacgacccacuaugugagucagauagggggauucccagaccagacagaggauggcggucucccccagagcgggaggauugucguugacuacauggugcaaaaaccuggaaagacuggcaccaucguauaucagcggggcauuuuacugccacagaaaguguggugcgcaucugggcgcuccaaggucaucaaaggaucacuucccuugaucggugaagccgauugucugcacgagaaguacggcgggcuaaacaaaagcaagccguauuacacaggagaacaugcuaaggccauuggcaacugcccuauaugggugaaaacuccccucaagcuggcaaaugguaccaaauaccgaccuccagcuaaacuucugaaggagagaggguuuuucggcgccaucgcgggauuuuuggagggcgggugggaaggaaugauugccgguuggcacggcuauacaagucauggggcacacggaguugcuguggccgcugaccucaagucuacccaggaggccaucaacaagauaacuaaaaaucugaacuccuuaagcgaacuggaggucaagaaucuccaaaggcuuucgggcgcaauggaugaacugcacaacgagauuuuggagcuagacgaaaaaguggacgaucugcgggccgacacgaucucuucccagaucgagcucgcuguacugcuuucaaaugaagguauuaucaacagugaggaugaacaucuguuggcgcucgagcguaagcugaaaaagauguuagggcccagcgcaguugacauuggcaauggauguuucgagacaaagcacaaaugcaaccagaccugccuggaucgcauagccgcuggcacuuuuaaugccggggaguucucccuaccaaccuuugacucucucaacaucacagcagccagccugaaugaugacggacuugauaaccauaccauuuugcuguacuauucaacugcugccaguucccucgcagugacacugaugaucgcgaucuucauugucuacaugauaagcagagacaaugugucuuguucaaucugccuuuga

SEQ ID NO: 154451 - RNA, 1755 nt, Artificial Sequence
  derived and/or modified CDS sequence (opt3) from hemagglutinin__InfluenzaB__ABL76342
augaaggccaucauugugcugcucauggucguuaccagcaacgcugacagaauaugcacaggcaucacuuccucuaauucaccccacgugguaaaaacggcaacccagggggaggugaacgucacaggagugauuccucuuacuaccacaccaaccaagagucauuucgccaaucugaaagguacuaagacaaggggcaaauuguguccgaccugcuuaaacuguacggaucuggacguugcgcuagggcggcccaugugcgugggagucacuccuagcgcuaaggccuccauccuccacgaagugcgcccaguaaccucuggcuguuuucccauuaugcaugaucgaacaaagauccgucaacugccuaaucuucugagagguuacgagaaaauaagguugucgacucagaacguuaucaaugcagaaaaggccccagggggacccuaucggcucggcaccucaggcagcugcccuaacgcuacaagucgcuccggguucuuugcaaccauggccugggcugugccaagagacaauaacaaaacggccacuaauccgcugacagucgaggugccccacauuuguaccaaggaagaggaucagaucacuguguggggauuccauucugacaacaaaacacagaugaagaaucuguacggugauagcaacccucaaaaguuuaccuccucagcgaauggcgucacgacccacuauguuagucagauuggggacuucccagaucagacagaggacggaggccucccccagagcgguaggaucgugguagauuacauggugcaaaaaccugggaagacuggaaccauagucuaucagcggggcauuuuacugccacagaaaguguggugcgcaucuggccgcuccaagguuauccgagggucacuucccuugauuggagaagccgacugucugcacgagaaauacgguggccuaaacaagagcaaaccguauuacacaggggaacaugcuaaggccaucggaaacugcccuaucugggugaagacuccccucaaacuggcaaauggcaccaaguacagaccuccagcuaaacuucugaaggagaggggguuuuucggugccauugcgggcuuuuuggagggaggcugggaagggaugauagccggauggcacgguuauacaagucauggcgcacacggggucgcuguggccgcugaucucaaaucuacccaggaggccaucaacaagauuacuaagaaucugaacuccuuaagcgaacuggagguuaaaaaucuccaacggcuuucgggagcaauggacgaacugcacaacgagaucuuggagcuagacgaaaagguagaugaccugcgugccgauacgauaucuucccagauugagcucgcugugcugcuuucaaaugaaggcaucaucaacagugaggacgaacaucuguuggcgcucgagcgcaaacugaagaaaauguuaggucccagcgcagucgauauugggaauggcuguuucgagacaaagcacaagugcaaccagaccugccuggacagaaucgccgcuggaacuuuuaaugccggcgauuucucccuaccaaccuuugacucucucaacauuacagcagccagccugaaugaugacgggcuugauaaccauaccauauugcuguacuauucaacugcugccaguucccucgcagugacacugaugaucgcgauuuucaucgucuacaugaucagcagggacaaugugucuuguucaauuugccuuuga

SEQ ID NO: 154452 - RNA, 1755 nt, Artificial Sequence
  derived and/or modified CDS sequence (opt3) from hemagglutinin__InfluenzaB__ABL76353
augaaggccaucauugugcugcucauggucguuaccagcaacgcugacagaauaugcacaggcaucacuuccucuaauucaccccacgugguaaaaacggcaacccagggggaggugaacgucacaggagugauuccucuuacuaccacaccaaccaagagucauuucgccaaucugaaagguacuaagacaaggggcaaauuguguccgaccugcuuaaacuguacggaucuggacguugcgcuagggcggcccaugugcgugggagucacuccuagcgcuaaggccuccauccuccacgaagugcgcccaguaaccucuggcuguuuucccauuaugcaugaucgaacaaagauccgucaacugccuaaucuucugagagguuacgagaaaauaagguugucgacucagaacguuaucaaugcagaaaaggccccagggggacccuaucggcucggcaccucaggcagcugcccuaacgcuacaagucgcuccggguucuuugcaaccauggccugggcugugccaagagacaauaacaaaacggccacuaauccgcugacagucgaggugccccacauuuguaccaaggaagaggaucagaucacuguguggggauuccauucugacaacaaaacacagaugaagaaucuguacggugauagcaacccucaaaaguuuaccuccucagcgaauggcgucacgacccacuauguuagucagauugggggauucccagaccagacagaggauggcggucucccccagagcgggaggaucgugguagacuacauggugcaaaaaccuggaaagacuggcaccauagucuaucagcggggcauuuuacugccacagaaaguguggugcgcaucugggcgcuccaagguuauccgaggaucacuucccuugauuggugaagccgauugucugcacgagaaauacggcgggcuaaacaagagcaaaccguauuacacaggagaacaugcuaaggccaucggcaacugcccuaucugggugaagacuccccucaaacuggcaaaugguaccaaguacagaccuccagcuaaacuucugaaggagaggggguuuuucggcgccauugcgggauuuuuggagggcgggugggaaggaaugauagccgguuggcacggcuauacaagucauggggcacacggagucgcuguggccgcugaccucaaaucuacccaggaggccaucaacaagauuacuaagaaucugaacuccuuaagcgaacuggagguuaaaaaucuccaacggcuuucgggcgcaauggaugaacugcacaacgagaucuuggagcuagacgaaaagguagacgaucugcgugccgacacgauaucuucccagauugagcucgcugugcugcuuucaaaugaagguaucaucaacagugaggaugaacaucuguuggcgcucgagcgcaaacugaagaaaauguuagggcccagcgcagucgacauuggcaauggauguuucgagacaaagcacaagugcaaccagaccugccuggauagaaucgccgcuggcacuuuuaaugccggggacuucucccuaccaaccuuugauucucucaacauuacagcagccagccugaaugacgauggacuugacaaccauaccauauugcuguacuauucaacugcugccaguucccucgcagugacacugaugaucgcgauuuucaucgucuacaugaucagcagggauaaugugucuuguucaauuugccuuuga

SEQ ID NO: 154453 - RNA, 1755 nt, Artificial Sequence
  derived and/or modified CDS sequence (opt3) from hemagglutinin__InfluenzaB__ABL76375
augaaggccaucauugugcugcucauggucguuaccagcaacgcugacagaauaugcacaggcaucacuuccucuaauucaccccacgugguaaaaacggcaacccagggggaagugaacgucacaggagccauuccucuuacuaccacaccaaccaagagucauuucgcgaaucugaaagguacuaagacaaggggcaaauuguguccgaccugcuuaaacuguacggaucuggacguggcucuagggcggcccaugugcguuggaaucacuccuagcgccaaggcauccauucuccacgaagugcgcccagucaccucuggcuguuuucccaucaugcaugaucgaacaaagauacgucaacugccuaaucuucugagagguuacgagaaaaucagguugucgacucagaacgugauuaaugccgaaaaggcuccagggggacccuaucggcucggcaccucaggcagcugcccuaacgcaacaaguaaauccggguucuuugccaccauggcuugggccguaccacgcgacaauaacaagacggcgacuaauccgcugacaguugaggugccccacaucuguaccaaagaagaggaucagauuacugucuggggauuccauucugacaacaagacacagaugaagaaucuguacggugauagcaacccucaaaaauuuaccuccucagcaaauggcaucacgacccacuaugugagucagauagggggauucccagaccagacagaggauggcggucucccccagagcgggagaauuguggucgacuacaugguucaaaagccuggaaaaacuggcaccaucguguaucagaggggcauuuuacugccacagaagguauggugcgccucugggcgguccaaagugaucaagggaucacuucccuugaucggugaagcugauugucugcacgagaaauacggcgggcuaaacaagagcaagccguauuacacaggagaacaugccaaagcaauuggcaacugcccuauaugggucaagacuccccucaaacuggcuaaugguaccaaguaccgcccuccagccaaacuucugaaggagcgaggguuuuucggcgcgaucgccggauuuuuggagggcgggugggaaggaaugauugcagguuggcacggcuauacaagucauggggcucacggaguggccguugcugccgaccucaagucuacccaggaggcaaucaacaaaauaacuaagaaucugaacuccuuaagcgaacuggaggugaaaaaucuccaaagacuuucgggcgccauggaugaacugcacaacgagauuuuggagcuagacgaaaaggucgacgaucugagggcugacacgaucucuucccagaucgagcucgcggugcugcuuucaaaugaagguauuaucaacagugaggaugaacaucuguuggcacucgagcggaaacugaagaagauguuagggcccagcgccguagacauuggcaauggauguuucgagacaaaacacaagugcaaccagaccugccuggaucguauagcugccggcacuuuuaaugcaggggaguucucccuaccaaccuuugacucucucaacaucacagccgcuagccugaaugaugacggacuugauaaccauaccauuuugcuguacuauucaacugccgcaaguucccucgcgguuacacugaugaucgcuaucuucauuguguacaugauaagccgcgacaaugucucuuguucaaucugccuuuga

SEQ ID NO: 154454 - RNA, 1755 nt, Artificial Sequence; identical to SEQ ID NO: 154453
  derived and/or modified CDS sequence (opt3) from hemagglutinin__InfluenzaB__ABL76386

SEQ ID NO: 154455 - RNA, 1755 nt, Artificial Sequence
  derived and/or modified CDS sequence (opt3) from hemagglutinin__InfluenzaB__ABL76408
augaaggccaucauugugcugcucauggucguuaccagcaacgcugacagaauaugcacaggcaucacuuccucuaauucaccccacgugguaaaaacggcaacccagggggaggugaacgucacaggagccauuccucuuacuaccacaccaaccaagagucauuucgcgaaucugaaagguacuaagacaaggggcaaauuguguccgaccugcuuuaacuguacggauuuagacguggcucuggggcggcccaugugcguuggaaucacuccuagcgccaaggcauccauucuacacgaagugcgcccagucaccucuggcuguuuccccaucaugcaugaucgaacaaagauacgucaacucccuaaucugcuuagagguuacgagaaaaucaggcugucgacucagaacgugauugacgccgaaaaggcuccagggggacccuaucgguugggcaccucaggcagcugcccuaaugcaacaaguaaauccggguuuuucgccaccauggcuugggccguaccacgcggaaacaauaagacggcgacuaacccgcucacaguugaggugccccacaucuguaccaaagaagaggaucagauuacugucugggguuuucauucugacaauaagacacagaugaagaaccuguacggcgauagcaauccucaaaaauucaccuccucagcaaacgggaucacgacccacuaugugagucagauaggaggcuuuccagaccagacagaggauggugggcugccccagagcggaagaauuguggucgacuacaugguucaaaagccuggcaaaacuggcaccaucguguaucagagggggauucucuuaccacagaagguauggugcgccucuggacgguccaaagugaucaaggguucacugccccuuaucggcgaagcugauuguuugcacgagaaauacgggggacugaauaagagcaagccguauuacacaggcgaacaugccaaagcaauugguaacugcccuauaugggucaagacuccccuaaaacucgcuaacgggaccaaguaccgcccuccagccaaacugcuuaaggagcgaggcuucuuuggagcgaucgccggcuuccuggaagggggaugggaggguaugauugcaggcuggcacggguauacaagucauggagcucacggcguggccguugcugccgacuugaagucuacccaggaggcaaucaauaaaauaacuaagaaccucaauucccugagcgaauuagaggugaaaaaccugcaaagacucucgggugccauggaugaacuucacaaugagauucuggaguuggacgaaaaggucgacgaucuaagggcugacacgaucucuucccagaucgagcuggcggugcuccugucaaacgaagggauuaucaauagugaggaugaacaucuucuggcauuggagcggaaacucaagaagaugcugggccccagcgccguagacauuggaaacggcuguuuugagacaaaacacaagugcaaucagaccugcuuagaucguauagcugccgggacuuucaacgcaggagaauuuucccugccaaccuucgacucucuaaauaucacagccgcuagccucaacgaugacggucuggauaaucauaccauucuuuuguacuauucaacugccgcaaguucccuggcgguuacacucaugaucgcuaucuucauuguguacaugauaagccgcgacaacgucucuuguucaaucugccuguga

SEQ ID NO: 154456 - RNA, 1755 nt, Artificial Sequence
  derived and/or modified CDS sequence (opt3) from hemagglutinin__InfluenzaB__ABL76419
augaaggccaucauugugcugcucauggucguuaccagcaacgcugacagaauaugcacaggcaucacuuccucuaauucaccccacgugguaaaaacggcaacccagggggaggugaacgucacaggagccauuccucuuacuaccacaccaaccaagagucauuucgcgaaucugaaagguacuaagacaaggggcaaauuguguccgaccugcuuuaacuguacggauuuagacguggcucuggggcggcccaugugcguuggaaucacuccuagcgccaaggcauccauucuacacgaaauccgcccagugaccucuggcuguuuccccauaaugcaugaucgaacaaagauccgucaacucccuaaucugcuuagagguuacgagaaaauuaggcugucgacucagaacgucaucgacgccgaaaaggcuccagggggacccuaucgguugggcaccucaggcagcugcccuaaugcaacaaguaaauccggguuuuucgccaccauggcuugggccgugccacgcggaaacaauaagacggcgacuaacccgcucacaguagagguuccccacauuuguaccaaagaagaggaucagaucacugugugggguuuucauucugacaauaagacacagaugaagaaccuguacggcgauagcaauccucaaaaauucaccuccucagcaaacgggauaacgacccacuaugucagucagauuggaggcuuuccagaccagacagaggauggugggcugccccagagcggaagaaucgugguggacuacaugguccaaaagccuggcaaaacuggcaccauuguuuaucagagggggauccucuuaccacagaagguguggugcgccucuggacgguccaaaguaaucaaggguucacugccccuuauuggcgaagcugauuguuugcacgagaaauacgggggacugaauaagagcaagccguauuacacaggcgaacaugccaaagcaauagguaacugcccuaucugggugaagacuccccuaaaacucgcuaacgggaccaaguaccgcccuccagccaaacugcuuaaggagcgaggcuucuuuggagcgauugccggcuuccuggaagggggaugggaggguaugaucgcaggcuggcacggguauacaagucauggagcucacggcgucgccguggcugccgacuugaagucuacccaggaggcaauaaauaaaauuacuaagaaccucaauucccugagcgaauuagagguuaaaaaccugcaaagacucucgggugccauggaugaacuucacaaugagauccuggaguuggacgaaaagguggacgaucuaagggcugacacgaucucuucccagauugagcuggcgguccuccugucaaacgaagggaucauuaauagugaggaugaacaucuucuggcauuggagcggaaacucaagaagaugcugggccccagcgccguggacauaggaaacggcuguuuugagacaaaacacaagugcaaucagaccugcuuagaucguaucgcugccgggacuuucaacgcaggagaauuuucccugccaaccuucgacucucuaaauauuacagccgcuagccucaacgaugacggucuggauaaucauaccauccuuuuguacuauucaacugccgcaaguucccuggcgguaacacucaugaucgcuauuuucauaguuuacaugaucagccgcgacaacgugucuuguucaauuugccuguga

SEQ ID NO: 154457 - RNA, 1758 nt, Artificial Sequence
  derived and/or modified CDS sequence (opt3) from hemagglutinin__InfluenzaB__ABL76441
augaaggccaucauugugcugcucauggucguuaccagcaacgcugacagaauaugcacaggcaucacuuccucuaauucaccccacgugguaaaaacggcaacccagggggaggugaacgucacaggagugauuccucuuacuaccacaccaaccaagagucauuucgccaaucugaaagguacuaagacaaggggcaaauuguguccgaagugcuuaaacuguaccgaucuggacguugcgcuagggcggcccaagugcacgggaaauaucccuagcgcuaaaguguccauucuccacgaaguccgcccagugacuucuggcuguuuucccaucaugcaugaucgaaccaagauacgucaacugccuaaccuucugagagguuacgagcacaucagguugucgacacauaauguaauuaacgccgaaaaagcaccagggggacccuauaagaucggcacuucaggcagcugcccuaauguuaccaacgggaauggauucuuugccacaauggcuugggcagugccgaaaaacgacaauaacaagaccgccacgaauagucucacuauugaggucccauacaucuguacagaaggugaggaucagauaaccguguggggcuuccacuccgacaacgagacucagauggcuaagcuguauggggauucuaaaccccagaaguuuacaagcuccgccaacggagugaccacgcacuacgucucacaaauuggcgguuucccuaaucagaccgaagacgggggacugccacagaguggccggaucguuguggauuauaugguacagaaaagcggcaagcccgggacaauuacuuaccaacgcggaauccucuuaccucagaaaguguggugcgcgucugguagauccaaggucaucaaaggcucacugccacuuauuggggaggcagacuguuugcaugaaaaguauggaggccugaacaagagcaaacccuacuacaccggugagcacgccaaggcuauagggaauugcccgaucugggugaaaacaccucuaaagcucgccaacggcacuaaauauaggcccccagcaaagcugcuuaaggagcggggauuuuucggcgcuauugccggguuucuggaaggagguugggagggcaugaucgcgggguggcauggauacaccagucacggcgcccacgguguugcaguggcugccgauuugaaaucuacacaggaagcuauaaauaagauuaccaaaaaccucaauucccugagcgaguuagaagucaagaaccugcagcgccucucgggggccauggacgagcuucauaaugagauccuggaauuggaugagaaaguggacgaccuacgagcagauacuaucucuucccaaauugaacuggccguacuccugucaaacgagggcaucauuaauagugaagacgagcaccuucuggcuuuggagagaaagcucaagaaaaugcugggaccuagcgcgguugaaauaggcaacggguguuucgagacgaagcauaaaugcaaucagacaugcuuagauaggaucgcagccggaaccuuugacgcuggugaguucucccugcccacuuuugauucucuaaacauuaccgccgcaagccucaaugacgaugaacuggacaaccacacaauccuuuuguauuacucaaccgccgcuaguucccuggccgugacucucaugaucgcaauuuucgucguguauauggucagccgggauaacgugucuuguucaauaugccuguga

SEQ ID NO: 154458 - RNA, 1758 nt, Artificial Sequence
  derived and/or modified CDS sequence (opt3) from hemagglutinin__InfluenzaB__ABL76463
augaaggccaucauugugcugcucauggucguuaccagcaacgcugacagaauaugcacaggcaucacuuccucuaauucaccccacgugguaaaaacggcaacccagggggaagugaacgucacaggagugauuccucuuacuaccacaccaaccaagagucauuucgccaaucugaaagguacuaagacaaggggcaaauuguguccgaagugcuuaaacuguaccgaucuggacguugcgcuagggcggcccaagugcacgggaaauaucccuagcgcuaaaguguccauucuccacgaaguccgcccagugacuucuggcuguuuucccaucaugcaugaucgaaccaagauacgucaacugccuaaccuucugagagguuacgagcacaucagguugucgacacauaauguaauuaacgccgaaaaagcaccagggggacccuauaagaucggcacuucaggcagcugcccuaauguuaccaacgggaauggauucuuugccacaauggcuugggcagugccgaaaaacgacaauaacaagaccgccacgaauagucucacuauugaggucccauacaucuguacagaaggugaggaucagauaaccguguggggcuuccacuccgacaacgagacucagauggcuaagcuguauggggauucuaaaccccagaaguuuacaagcuccgccaacggagugaccacgcacuacgucucacaaauuggcgguuucccuaaucagaccgaagacgggggacugccacagaguggccggaucguuguggauuauaugguacagaaaagcggcaagacagggacuauuaccuaccaacgcggaauccucuuaccccagaaaguguggugcgcgucugguagauccaaggucaucaaaggcucacugccucuuauuggggaggcagacuguuugcaugaaaaguauggaggccugaacaagagcaaaccauacuacacaggugagcacgccaaggcuauagggaauugccccaucugggugaaaacuccgcuaaagcucgccaacggcaccaaauauaggccucccgcaaagcugcuuaaggagcggggauuuuucggcgcuauugccggguuucuggaaggagguugggagggcaugaucgcgggguggcauggauacacaagucacggcgcccacgguguugcaguggcugccgauuugaaaucuacccaggaagcuauaaauaagauuacuaaaaaccucaauucccugagcgaguuagaagucaagaaccugcagcgccucucgggggccauggacgagcuucauaaugagauccuggaauuggaugagaaagugaacgaccuacgagcagacacgaucucuucccaaauugaacuggccguacuccugucaaaugagggcaucauuaacagugaagaugagcaccuucuggcuuuggagagaaagcucaagaaaaugcugggaccaagcgcgguugaaauaggcaauggguguuucgagacaaagcauaaaugcaaccagaccugcuuagacaggaucgcagccggaacuuuugaugcuggugaguucucccugccuaccuuugacucucuaaauauuacagccgcaagccucaacgaugacggccuggauaaccacaccauccuuuuguauuacucaacugccgcuaguucccuggccgugacacucaugaucgcaauuuucgucguguauauggucagccgggacaaugugucuuguucaauaugccuguga

SEQ ID NO: 154459 - RNA, 1758 nt, Artificial Sequence
  derived and/or modified CDS sequence (opt3) from hemagglutinin__InfluenzaB__ABL76474
augaaggccaucauugugcugcucauggucguuaccagcaacgcugacagaauaugcacaggcaucacuuccucuaauucaccccacgugguaaaaacggcaacccagggggaggugaacgucacaggagugauuccucuuacuaccacaccaaccaagagucauuucgccaaucugaaagguacuaagacaaggggcaaauuguguccgaagugcuuaaacuguaccgaucuggacguugcgcuagggcggcccaagugcacgggaaauaucccuagcgcuaaaguguccauucuccacgaaguccgcccagugacuucuggcuguuuucccaucaugcaugaucgaaccaagauacgucaacugccuaaccuucugagagguuacgagcacaucagguugucgacacauaauguaauuaacgccgaaaaagcaccagggggacccuauaagaucggcacuucaggcagcugcccuaauguuaccaacgggaauggauucuuugccacaauggcuugggcagugccgaaaaacgacaauaacaagaccgccacgaauagucucacuauugaggucccauacaucuguacagaaggugaggaucagauaaccguguggggcuuccacuccgacaacgagacucagauggcuaagcuguauggggauucuaaaccccagaaguuuacaagcuccgccaacggagugaccacgcacuacgucucacaaauuggcgguuucccuaaucagaccgaagacgggggacugccacagaguggccggaucguuguggauuauaugguacagaaaagcggcaagacagggacuauuaccuaccaacgcggaauccucuuaccccagaaaguguggugcgcgucugguagauccaaggucaucaaaggcucacugccucuuauuggggaggcagacuguuugcaugaaaaguauggaggccugaacaagagcaaaccauacuacacaggugagcacgccaaggcuauagggaauugccccaucugggugaaaacuccgcuaaagcucgccaacggcaccaaauauaggccucccgcaaagcugcuuaaggagcggggauuuuucggcgcuauugccggguuucuggaaggagguugggagggcaugaucgcgggguggcauggauacacaagucacggcgcccacgguguugcaguggcugccgauuugaaaucuacccaggaagcuauaaauaagauuacuaaaaaccucaauucccugagcgaguuagaagucaagaaccugcagcgccucucgggggccauggacgagcuucauaaugagauccuggaauuggaugagaaaguggacgaccuacgagcagauacgaucucuucccaaauugaacuggccguacuccugucaaacgagggcaucauuaauagugaagacgagcaccuucuggcuuuggagagaaagcucaagaaaaugcugggaccaagcgcgguugaaauaggcaacggguguuucgagacaaagcauaaaugcaaucagaccugcuuagauaggaucgcagccggaacuuuugacgcuggugaguucucccugccuaccuuugauucucuaaacauuacagccgcaagccucaaugacgaugaacuggacaaccacaccauccuuuuguauuacucaacugccgcuaguucccuggccgugacacucaugaucgcaauuuucgucguguauauggucagccgggauaacgugucuuguucaauaugccuguga

SEQ ID NO: 154460 - RNA, 1758 nt, Artificial Sequence
  derived and/or modified CDS sequence (opt3) from hemagglutinin__InfluenzaB__ABL76485
augaaggccaucauugugcugcucauggucguuaccagcaacgcugacagaauaugcacaggcaucacuuccucuaauucaccccacgugguaaaaacggcaacccagggggaggugaacgucacaggagugauuccucuuacuaccacaccaaccaagagucauuucgccaaucugaaagguacuaagacaaggggcaaauuguguccgaagugcuuaaacuguaccgaucuggacguugcgcuagggcggcccaagugcacgggaaauaucccuagcgcugaaguguccauucuccacgagguccgcccagugacuucuggcuguuuucccaucaugcaugaucgaaccaaaauacgucaacugccuaaccuucugagagguuacgaacacaucagguugucgacacauaauguaauuaacgccgagaaggcaccagggggacccuauaaaaucggcacuucaggcagcugcccuaauguuaccaacgggaauggauucuuugugacaauggccugggcugucccaaagaacgacaauaacaaaaccgcaacgaauagucucacuauugaagugccguacaucuguacagagggugaggaucagauaaccguguggggcuuccacuccgacaacgaaacucagauggccaagcuguauggggauucuaagccccagaaauuuacaagcuccgcuaacggagucaccacgcacuacguuucacaaauuggcgguuucccuaaucagaccgaggacgggggacugccacagaguggccggaucgugguagauuauauggugcaaaagagcggcaaaacagggacuauuaccuaccagcgcggaauccucuuaccccagaaggucuggugcgccucugguagauccaaagugaucaagggcucacugccucuuauuggggaagcggacuguuugcaugagaaauauggaggccugaacaagagcaagccauacuacacaggugagcacgcaaaagccauagggaauugccccaucuggguuaagacuccgcuaaaacucgcuaacggcaccaaguauaggccucccgccaaacugcuuaaggaacggggauuuuucggcgcaauugcuggguuucuggagggagguugggaaggcaugaucgccggguggcauggauacacaagucacggcgcgcacgguguggccgucgcagcugauuugaagucuacccaggaggccauaaauaaaauuacuaagaaccucaauucccugagcgaauuagaggugaaaaaccugcagcgccucucgggggcuauggacgagcuucauaaugaaauccuggaguuggaugaaaagguagacgaccuacgagccgauacgaucucuucccaaauugagcuggcaguucuccugucaaacgaaggcaucauuaauagugagaacgagcaccuucuggccuuggaaagaaaacucaagaagaugcugggaccaagcgcuguggagauaggcaauggguguuucgaaacaaaacauaagugcaaccagaccugcuuagacaggaucgcggcaggaacuuuugaugccggugaguucucccugccuaccuuugacucucuaaauauuacagcugccagccucaacgaugacggccuggauaaccacaccauccuuuuguauuacucaacugcagccaguucccuggcugucacacucaugaucgccauuuucguggucuauauggugagccgggacaauguuucuuguucaauaugccuguga

SEQ ID NO: 154461 - RNA, 1758 nt, Artificial Sequence
  derived and/or modified CDS sequence (opt3) from hemagglutinin__InfluenzaB__ABL76507
augaaggccaucauugugcugcucauggucguuaccagcaacgcugacagaauaugcacaggcaucacuuccucuaauucaccccacgugguaaaaacggcaacccagggggaggugaacgucacaggagugauuccucuuacuaccacaccaaccaagagucauuucgccaaucugaaagguacuaagacaaggggcaaauuguguccgaagugcuuaaacuguaccgaucuggacguugcgcuagggcggcccaagugcacgggaaauaucccuagcgcugaaguguccauucuccacgagguccgcccagugacuucuggcuguuuucccaucaugcaugaucgaaccaaaauacgucaacugccuaaccuucugagagguuacgaacacaucagguugucgacacauaauguaauuaacgccgagaaggcaccagggggacccuauaaaaucggcacuucaggcagcugcccuaauguuaccaacgggaauggauucuuugccacaauggcuugggcagugccaaagaacgacaauaacaaaaccgccacgaauagucucacuauugaagucccguacaucuguacagagggugaggaucagauaaccguguggggcuuccacuccgacaacgaaauucagauggcuaagcuguauggggauucuaagccccagaaauuuacuagcuccgccaacggagugacaacccacuacgucucacaaaucggcgguuucccuaaucagacggaggacgggggacugccacagaguggccggauuguuguggauuauaugguacaaaagagcggcaaaaccgggacaaucacuuaccagcgcggaauccucuuaccccagaagguguggugcgcgucugguagauccaaagucauuaagggcucacugccucuuauaggggaagcagacuguuugcaugagaaauauggaggccugaacaagagcaagccauacuacaccggugagcacgccaaagcuaucgggaauugccccauuugggugaagacaccgcuaaaacucgccaacggcacuaaguauaggccucccgcaaaacugcuuaaggaacggggauuuuucggcgcuaucgccggguuucuggagggagguugggaaggcaugauagcgggguggcauggauacaccagucacggcgcccacgguguugcaguggcugccgauuugaagucuacacaggaggcuauuaauaaaaucaccaagaaccucaauucccugagcgaauuagaggucaaaaaccugcagcgccucucgggggccauggacgagcuucauaaugaaauccuggaguuggaugaaaagguggacgaccuacgagcagauacuauuucuucccaaaucgagcuggccguacuccugucaaacgaaggcauuauaaauagugaggacgagcaccuucuggcuuuggaaagaaaacucaagaagaugcugggaccaagcgcgguugagaucggcaacggguguuucgaaacgaaacauaagugcaaucagacaugcuuagauaggauugcagccggaaccuuugacgcuggugaguucucccugccuacuuuugauucucuaaacaucaccgccgcaagccucaaugacgauggccuggacaaccacacaauccuuuuguauuacucaaccgccgcuaguucccuggccgugacucucaugauugcaauauucgucguguauauggucagccgggauaacgugucuuguucaaucugccuguga

SEQ ID NO: 154462 - RNA, 1758 nt, Artificial Sequence
  derived and/or modified CDS sequence (opt3) from hemagglutinin__InfluenzaB__ABL76518
augaaggccaucauugugcugcucauggucguuaccagcaacgcugacagaauaugcacaggcaucacuuccucuaauucaccccacgugguaaaaacggcaacccagggggaggugaacgucacaggagugauuccucuuacuaccacaccaaccaagagucauuucgccaaucugaaagguacuaagacaaggggcaaauuguguccgaagugcuuaaacuguaccgaucuggacguugcgcuagggcggcccaagugcacgggaaauaucccuagcgcugaaguguccauucuccacgagguccgcccagugacuucuggcuguuuucccaucaugcaugaucgaaccaaaauacgucaacugccuaaccuucugagagguuacgaacacaucagguugucgacacauaauguaauuaacgccgagaaggcaccagggggacccuauaaaaucggcacuucaggcagcugcccuaauguuaccaacgggaauggauucuuugccacaauggcuugggcagugccaaagaacgacaauaacaaaaccgccacgaauagucucacuauugaagucccguacaucuguacagagggugaggaucagauaaccguguggggcuuccacuccgacaacgaaaaccagauggcuaagcuguauggggauucuaagccccagaaauuuacuagcuccgccaauggagugacaacccacuacgucucacaaauuggcgguuucccuaaccagacggaggacgggggacugccacagaguggccggaucguuguggauuauaugguacaaaagagcggcaaaaccgggacaauuacuuaccagcgcggaauccucuuaccccagaagguguggugcgcgucugguagauccaaagucaucaagggcucacugccucuuauuggggaagcagacuguuugcaugagaaauauggaggccugaauaagagcaagccauacuacaccggugagcacgccaaagcuauagggaacugccccaucugggugaagacaccgcuaaaacucgccaauggcacuaaguauaggccucccgcaaaacugcuuaaggaacggggauuuuucggcgcuauugccggguuucuggagggagguugggaaggcaugaucgcgggguggcauggauacaccagucacggcgcccacgguguugcaguggcugccgauuugaagucuacacaggaggcuauaaacaaaauuaccaagaaucucaacucccugagcgaauuagaggucaaaaaucugcagcgccucucgggggccauggacgagcuucauaacgaaauccuggaguuggaugaaaagguggacgaccuacgagcagauacuaucucuucccaaauugagcuggccguacuccugucaaaugaaggcaucauuaacagugaggacgagcaccuucuggcuuuggaaagaaaacucaagaagaugcugggaccaagcgcgguugagauaggcaauggguguuucgaaacgaaacauaagugcaaccagacaugcuuagauaggaucgcagccggaaccuuugacgcuggugaguucucccugccuacuuuugauucucuaaauauuaccgccgcaagccucaacgacgauggccuggacaaccacacaauccuuuuguauuacucaaccgccgcuaguucccuggccgugacucucaugaucgcaauuuucgucguguauauggucagccgggauaaugugucuuguucaauaugccuguga

SEQ ID NO: 154463 - RNA, 1758 nt, Artificial Sequence
  derived and/or modified CDS sequence (opt3) from hemagglutinin__InfluenzaB__ABL76529
augaaggccaucauugugcugcucauggucguuaccagcaacgcugacagaauaugcacaggcaucacuuccucuaauucaccccacgugguaaaaacggcaacccagggggaggugaacgucacaggagugauuccucuuacuaccacaccaaccaagagucauuucgccaaucugaaagguacuaagacaaggggcaaauuguguccgaagugcuuaaacuguaccgaucuggacguugcgcuagggcggcccaagugcacgggaaauaucccuagcgcugaaguguccauucuccacgagguccgcccagugacuucuggcuguuuucccaucaugcaugaucgaaccaaaauacgucaacugccuaaccuucugagagguuacgaacacaucagguugucgacacauaauguaauuaacgccgagaaggcaccagggggacccuauaaaaucggcacuucaggcagcugcccuaauguuaccaacgggaauggauucuuugugacaauggccugggcugucccaaagaacgacaauaacaaaaccgcaacgaauagucucacuauugaagugccguacaucuguacagagggugaggaucagauaaccguguggggcuuccacuccgacaacgaaacucagauggccaagcuguauggggauucuaagccccagaaauuuacaagcuccgcuaacggagucaccacgcacuacguuucacaaauuggcgguuucccuaaucagaccgaggacgggggacugccacagaguggccggaucgugguagauuauauggugcaaaagagcggcaaaacagggacuauuaccuaccagcgcggaauccucuuaccccagaaggucuggugcgccucugguagauccaaagugaucaagggcucacugccucuuauuggggaagcggacuguuugcaugagaaauauggaggccugaacaagagcaagccauacuacacaggugagcacgcaaaagccauagggaauugccccaucuggguuaagacuccgcuaaaacucgcuaacggcaccaaguauaggccucccgccaaacugcuuaaggaacggggauuuuucggcgcaauugcuggguuucuggagggagguugggaaggcaugaucgccggguggcauggauacacaagucacggcgcgcacgguguggccgucgcagcugauuugaagucuacccaggaggccauaaauaaaauuacuaagaaccucaauucccugagcgaauuagaggugaaaaaccugcagcgccucucgggggcuauggacgagcuucauaaugaaauccuggaguuggaugaaaagguagacgaccuacgagccgauacgaucucuucccaaauugagcuggcaguucuccugucaaacgaaggcaucauuaauagugaggacgagcaccuucuggccuuggaaagaaaacucaagaagaugcugggaccaagcgcuguggagauaggcaacggguguuucgaaacaaaacauaagugcaaucagaccugcuuagauaggaucgcggcaggaacuuuugacgccggugaguucucccugccuaccuuugauucucuaaacauuacagcugccagccucaaugacgauggccuggacaaccacaccauccuuuuguauuacucaacugcagccaguucccuggcugucacacucaugaucgccauuuucguggucuauauggugagccgggauaacguuucuuguucaauaugccuguga

SEQ ID NO: 154464 - RNA, 1758 nt, Artificial Sequence
  derived and/or modified CDS sequence (opt3) from hemagglutinin__InfluenzaB__ABL76540
augaaggccaucauugugcugcucauggucguuaccagcaacgcugacagaauaugcacaggcaucacuuccucuaauucaccccacgugguaaaaacggcaacccagggggaggugaacgucacaggagugauuccucuuacuaccacaccaaccaagagucauuucgccaaucugaaagguacuaagacaaggggcaaauuguguccgaagugcuuaaacuguaccgaucuggacguugcgcuagggcggcccaagugcacgggaaauaucccuagcgcugaaguguccauucuccacgaggucaaaccagugacuucuggcuguuuucccaucaugcaugaucgcaccaagauacgacaacugccuaaccuucugcgugguuacgaacacaucagauugucgacacauaauguaauuaacgccgagaaagcaccagggggacccuauaagaucggcacuucaggcagcugcccuaauguuaccaacgggaauggauucuuugccacaauggcuugggcagugccgaaaaacgacaauaacaagaccgccacgaauagucucacuauugaagucccauacaucuguacagagggugaggaucagauaaccguguggggcuuccacuccgacaacgaaacucagauggcuaagcuguauggggauucuaaaccccagaaguuuacaagcuccgccaacggagugaccacgcacuacgucucacaaauuggcgguuucccuaaucagaccgaggacgggggacugccacagaguggcaggaucguuguggauuauaugguacagaaaagcggcaagacagggacuauuaccuaccaacggggaauccucuuaccccagaaaguguggugcgcgucuggucgcuccaaggucaucaaaggcucacugccucuuauuggggaagcagacuguuugcaugagaaguauggaggccugaacaagagcaaaccauacuacacaggugagcacgccaaggcuauagggaauugccccaucugggugaaaacuccgcuaaagcucgccaacggcaccaaauauagaccucccgcaaagcugcuuaaggaaaggggauuuuucggcgcuauugccggguuucuggagggagguugggaaggcaugaucgcgggguggcauggauacacaagucacggcgcccacgguguugcaguggcugccgauuugaaaucuacccaggaggcuauaaauaagauuacuaaaaaccucaauucccugagcgaauuagaggucaagaaccugcagcggcucucgggggccauggacgagcuucauaaugaaauccuggaguuggaugaaaaaguggacgaccuacgcgcagauacgaucucuucccaaauugagcuggccguacuccugucaaacgaaggcaucauuaauagugaggacgagcaccuucuggcuuuggaacgaaagcucaagaaaaugcugggaccaagcgcgguugagauaggcaacggguguuucgaaacaaagcauaaaugcaaucagaccugcuuagauagaaucgcagccggaacuuuugacgcuggugaguucucccugccuaccuuugauucucuaaacauuacagccgcaagccucaaugacgauggccuggacaaccacaccauccuuuuguauuacucaacugccgcuaguucccuggccgugacacucaugaucgcaauuuucgucguguauauggucagcagggauaacgugucuuguucaauaugccuguga

SEQ ID NO: 154465 - RNA, 1758 nt, Artificial Sequence
  derived and/or modified CDS sequence (opt3) from hemagglutinin__InfluenzaB__ABL76551
augaaggccaucauugugcugcucauggucguuaccagcaacgcugacagaauaugcacaggcaucacuuccucuaauucaccccacgugguaaaaacggcaacccagggggaggugaacgucacaggagugauuccucuuacuaccacaccaaccaagagucauuucgccaaucugaaagguacuaagacaaggggcaaauuguguccgaagugcuuaaacuguaccgaucuggacguugcgcuagggcggcccaagugcacgggaaauaucccuagcgcugaaguguccauucuccacgagguccgcccagugacuucuggcuguuuucccaucaugcaugaucgaaccaaaauacgucaacugccuaaccuucugagagguuacgaacacaucagguugucgacacauaauguaauuaacgccgagaaggcaccagggggacccuauaaaaucggcacuucaggcagcugcccuaauguuaccaacgggaauggauucuuugccacaauggcuugggcagugccaaagaacgacaauaacaaaaccgccacgaauagucucacuauugaagucccguacaucuguacagagggugaggaucagauaaccguguggggcuuccacuccgacaacgaaacucagauggcuaagcuguauggggauucuaagccccagaaauuuacaagcuccgccaacggagugaccacgcacuacgucucacaaauuggcgguuucccuaaucagaccgaggacgggggacugccacagaguggccggaucguuguggauuauaugguacaaaagagcggcaaaacagggacuauuaccuaccagcgcggaauccucuuaccccagaagguguggugcgcgucugguagauccaaagucaucaagggcucacugccucuuauuggggaagcagacuguuugcaugagaaauauggaggccugaacaagagcaagccauacuacacaggugagcacgccaaagcuauagggaauugccccaucugggugaagacuccgcuaaaacucgccaacggcaccaaguauaggccucccgcaaaacugcuuaaggaacggggauuuuucggcgcuauugccggguuucuggagggagguugggaaggcaugaucgcgggguggcauggauacacaagucacggcgcccacgguguugcaguggcugccgauuugaagucuacccaggaggcuauaaauaaaauuacuaagaaccucaauucccugagcgaauuagaggucaaaaaccugcagcgccucucgggggccauggacgagcuucauaaugaaauccuggaguuggaugaaaagguggacgaccuacgagcagauacgaucucuucccaaauugagcuggccguacuccugucaaacgaaggcaucauuaauagugaggacgagcaccuucuggcuuuggaaagaaaacucaagaagaugcugggaccaagcgcgguugagauaggcaacggguguuucgaaacaaaacauaagugcaaucagaccugcuuagauaggaucgcagccggaacuuuugacgcuggugaguucucccugccuaccuuugauucucuaaacauuacagccgcaagccucaaugacgauggccuggacaaccacaccauccuuuuguauuacucaacugccgcuaguucccuggccgugacacucaugauggcaaucuucgucguguauauggucagccgggauaacgugucuuguucaauuugccuguga

SEQ ID NO: 154466 - RNA, 1758 nt, Artificial Sequence
  derived and/or modified CDS sequence (opt3) from hemagglutinin__InfluenzaB__ABL76562
augaaggccaucauugugcugcucauggucguuaccagcaacgcugacagaauaugcacaaggaucacuuccucuaauucaccccacgugguaaaaacggcaacccagggcgaggugaacgucacaggggugauuccucuuacuaccacaccaaccaagagucauuucgccaaucugaaaggaacuaagacacgggguaaauuguguccgaagugcuuaaacuguaccgaucuggacguugcgcuaggccgccccaagugcacggggaauaucccuagcgcugaaguguccauucuccacgagguccgaccagugacuucuggauguuuucccaucaugcaugaucguaccaaaauaagacaacugccuaaccuucugaggggcuacgaacacauccgguugucgacacauaauguaauuaacgccgagaaggcaccaggugggcccuauaaaaucggaacuucaggcagcugcccuaauguuaccaacggcaauggguucuuugccacaauggcuugggcagugccaaagaacgacaauaacaaaaccgccacgaauagucucacuauugaagucccguacaucuguacagagggagaggaucagauaaccgugugggguuuccacuccgacaacgaaacucagauggcuaagcuguauggcgauucuaagccccagaaauuuacaagcuccgccaacggggugaccacgcacuacgucucacaaauuggaggcuucccuaaucagaccgaggacggugggcugccacagaguggacgcaucguuguggauuauaugguacaaaagagcggcaaaacaggcacuauuaccuaccagagagggauccucuuaccccagaagguguggugcgcgucuggaagguccaaagucaucaaggguucacugccucuuauuggcgaagcagacuguuugcaugagaaauaugggggacugaacaagagcaagccauacuacacaggcgagcacgccaaagcuauagguaauugccccaucugggugaagacuccgcuaaaacucgccaacgggaccaaguaucggccucccgcaaaacugcuuaaggaacgcggcuuuuucggagcuauugccggcuuucuggaagggggaugggaggguaugaucgcgggcuggcauggguacacaagucacggagcccacggcguugcaguggcugccgauuugaagucuacccaggaggcuauaaauaaaauuacuaagaaccucaauucccugagcgaauuagaggucaaaaaccugcagcgacucucgggugccauggacgagcuucauaaugaaauccuggaguuggaugaaaagguggacgaccuaagagcagauacgaucucuucccaaauugagcuggccguacuccugucaaacgaagggaucauuaauagugaggacgagcaccuucuggcuuuggaaaggaaacucaagaagaugcugggcccaagcgcgguugagauaggaaacggcuguuucgaaacaaaacauaagugcaaucagaccugcuuagaucggaucgcagccgggacuuuugacgugggagaguucucccugccuaccuuugauucucuaaacauuacagcugccagccucaaugacgauggucuggacaaccacaccauccuuuuguauuacucaacugcagccaguucccuggcugucacacucaugaucgccauuuucguggucuauauggugagccgugauaacguuucuuguucaauaugccuguga

SEQ ID NO: 154467 - RNA, 1758 nt, Artificial Sequence
  derived and/or modified CDS sequence (opt3) from hemagglutinin__InfluenzaB__ABL76573
augaaggccaucauugugcugcucauggucguuaccagcaacgcugacagaauaugcacaggcaucacuuccucuaauucaccccacgugguaaaaacggcaacccagggggaggugaacgucacaggagugauuccucuuacuaccacaccaaccaagagucauuucgccaaucugaaagguacuaagacaaggggcaaauuguguccgaagugcuuaaacuguaccgaucuggacguugcgcuagggcggcccaagugcacgggaaauaucccuagcgcugaaguguccauucuccacgagguccgcccagugacuucuggcuguuuucccaucaugcaugaucgaaccaaaauacgucaacugccuaaccuucugagagguuacgaacacaucagguugucgacacauaauguaauuaacgccgagaaggcaccagggggacccuauaaaaucggcacuucaggcagcugcccuaauguuaccaacgggaauggauucuuugccacaauggcuugggcagugccaaagaacgacaauaacaaaaccgccacgaauagucucacuauugaagucccguacaucuguacagagggugaggaucagauaaccguguggggcuuccacuccgacaacgaaacucagauggcuaagcuguauggggauucuaagccccagaaauuuacaagcuccgccaacggagugaccacgcacuacgucucacaaauuggcgguuucccuaaucagaccgaggacgggggacugccacagaguggccggaucguuguggauuauaugguacaaaagagcggcaaaacagggacuauuaccuaccagcgcggaauccucuuaccccagaagguguggugcgcgucugguagauccaaagucaucaagggcucacugccucuuauuggggaagcagacuguuugcaugagaaauauggaggccugaacaagagcaagccauacuacacaggugagcacgccaaagcuauagggaauugccccaucugggugaagacuccgcuaaaacucgccaacggcaccaaguauaggccucccgcaaaacugcuuaaggaacggggauuuuucggcgcuauugccggguuucuggagggagguugggaaggcaugaucgcgggguggcauggauacacaagucacggcgcccacgguguugcaguggcugccgauuugaagucuacccaggaggcuauaaauaaaauuacuaagaaccucaauucccugagcgaauuagaggucaaaaaccugcagcgccucucgggggccauggacgagcuucauaaugaaauccuggaguuggaugaaaagguggacgaccuacgagcagauacgaucucuucccaaauugagcuggccguacuccugucaaacgaaggcaucauuaauagugaggacgagcaccuucuggcuuuggaaagaaaacucaagaagaugcugggaccaagcgcgguugagauaggcaacggguguuucgaaacaaaacauaagugcaaucagaccugcuuagauaggaucgcagccggaacuuuugacgcuggugaguucucccugccuaccuuugauucucuaaacauuacagccgcaagccucaaugacgauggccuggacaaccacaccauccuuuuguauuacucaacugccgcuaguucccuggccgugacacucaugaucgcaauuuucgucguguauauggucagccgggauaacgugucuuguucaauaugccuguga

SEQ ID NO: 154468 - RNA, 1758 nt, Artificial Sequence; identical to SEQ ID NO: 154467
  derived and/or modified CDS sequence (opt3) from hemagglutinin__InfluenzaB__ABL76584

SEQ ID NO: 154469 - RNA, 1758 nt, Artificial Sequence; identical to SEQ ID NO: 154467
  derived and/or modified CDS sequence (opt3) from hemagglutinin__InfluenzaB__ABL76595

SEQ ID NO: 154470 - RNA, 1758 nt, Artificial Sequence; identical to SEQ ID NO: 154467
  derived and/or modified CDS sequence (opt3) from hemagglutinin__InfluenzaB__ABL76606

SEQ ID NO: 154471 - RNA, 1758 nt, Artificial Sequence
  derived and/or modified CDS sequence (opt3) from hemagglutinin__InfluenzaB__ABL76617
augaaggccaucauugugcugcucauggucguuaccagcaacgcugacagaauaugcacaggcaucacuuccucuaauucaccccacgugguaaaaacggcaacccagggggaggugaacgucacaggagugauuccucuuacuaccacaccaaccaagagucauuucgccaaucugaaagguacugaaacaaggggcaaguuguguccgaaaugcuuaaacuguaccgaucuggacguugcgcuagggcggcccaagugcacgggaaauaucccuagcgcuaagguguccauucuccacgagguccgcccagugacuucuggcuguuuucccaucaugcaugaucgaaccaaaauacgucaacugccuaaccuucugagagguuacgaacacaucagguugucgacacauaauguaauuaacgccgagaaggcaccagggggacccuauaaaaucggcacuucaggcagcugcccuaauguuaccaacgggaauggauucuuugccacaauggcuugggcagugccaaagaacgacaauaacaaaaccgccacgaauagucucacuauugaagucccguacaucuguacagagggugaggaucagauaaccguguggggcuuccacuccgacaacgaaacucagauggcuaagcuguauggggauucuaagccccagaaauuuacaagcuccgccaacggagugaccacgcacuacgucucacaaauuggcgguuucccuaaucagaccgaggacgggggacugccacagaguggccggaucguuguggauuauaugguacaaaagagcggcaaaacagggacuauuaccuaccagcgcggaauccucuuaccccagaagguguggugcgcgucugguagauccaaagucaucaagggcucacugccucuuauuggggaagcagacuguuugcaugagaaauauggaggccugaacaagagcaagccauacuacacaggugagcacgccaaagcuauagggaauugccccaucugggugaagacuccgcuaaaacucgccaacggcaccaaguauaggccucccgcaaaacugcuuaaggaacggggauuuuucggcgcuauugccggguuucuggagggagguugggaaggcaugaucgcgggguggcauggauacacaagucacggcgcccacgguguugcaguggcugccgauuugaagucuacccaggaggcuauaaauaaaauuacuaagaaccucaauucccugagcgaauuagaggucaaaaaccugcagcgccucucgggggccauggacgagcuucauaaugaaauccuggaguuggaugaaaagguggacgaccuacgagcagauacgaucucuucccaaauugagcuggccguacuccugucaaacgaaggcaucauuaauagugaggacgagcaccuucuggcuuuggaaagaaaacucaagaagaugcugggaccaagcgcgguugagauaggcaacggguguuucgaaacaaaacauaagugcaaucagaccugcuuagauaggaucgcagccggaacuuuugacgcuggugaguucucccugccuaccuuugauucucuaaacauuacagccgcaagccucaaugacgauggccuggacaaccacaccauccuuuuguauuacucaacugccgcuaguucccuggccgugacacucaugaucgcaauuuucgucguguauauggucagccgggauaacgugucuuguucaauaugccuguga

SEQ ID NO: 154472 - RNA, 1755 nt, Artificial Sequence
  derived and/or modified CDS sequence (opt3) from hemagglutinin__InfluenzaB__ABL76628
augaaggccaucauugugcugcucauggucguuaccagcaacgcugacagaauaugcacaggcaucacuuccucuaauucaccccacgugguaaaaacggcaacccagggggaggugaacgucacaggagugauuccucuuacuaccacaccaaccaagaguuacuucgccaaucugaaagguacuaggacacggggcaaguuguguccggauugcuuaaacuguaccgaccuggauguugcgcuagggcgccccaugugcgugggaacgacuccuagcgcuaaagccuccauccuccaugaaguccgaccagugaccucuggcuguuuucccauuaugcacgaccguacaaagaucagacaacuggcaaaucuucugagggguuaugagaacauacgguugucgacucagaauguaaucgaugccgaaaaggcuccugggggaccauaccgccucggcaccucaggcagcugccccaacgcaacaaguaaauccggguucuuugccaccauggcuugggccguuccuaaggacaauaacaaaaaugcgacgaacccacugacuguggaggucccgcauauuuguacagaaggagaggaucagaucaccgugugggguuuccacucugacaauaagacucagaugaaaaaccuguauggcgauagcaauccccaaaaguuuacauccucagcaaacggggugaccacgcauuacgucagucagauuggaggcuucccugaccagaccgaggauggugggcucccacagagcggaagaaucguuguggacuauaugaugcaaaagcccggcaaaacaggcacuauaguauaccagcgcgggguguuacugccucagaaggucuggugcgccucuggacgguccaaagugauuaaggguucacuuccauugaucggcgaagcugauugucugcacgagaaauaugggggacuaaacaagagcaaacccuacuacaccggcgaacacgccaaggcaauugguaauugcccgaucuggguuaagacaccucucaaacuggcuaacgggacuaaguauaggcccccagccaaacuucugaaggagcgaggcuuuuucggagcgaucgccggcuuuuuggaagggggaugggaagguaugauugcaggcuggcauggguacaccagucacggagcucauggcguggccgucgcugccgaccucaaaucuacacaggaggcaauaaauaagaucaccaagaacuuaaauucccugagcgaacuggaggugaaaaaccuccaaagacuuucgggugccauggacgaacugcacaaugagauuuuggagcuagaugaaaagguagacgaucugagggcugacacuaucucuucccagauagagcucgcgguucugcuuucaaacgaagggauuaucaauagugaggaugaacaccuguuggcacucgagcggaaacugaagaaaauguuaggcccuagcgccguggacaucggaaacggcuguuucgagacgaagcauaagugcaaucagacaugccuggaucguauugcugccgggaccuuuaacgcaggagaguucucccuacccacuuuugacucucucaauaucaccgccgcuagccugaacgaugacggucuugauaaucacacaauuuugcuguauuacucaaccgccgcaaguucccucgcggucacucugaugcuugcuauauucaucguguauauggucagccgcgacaacgugucuuguucaauuugccuguga

SEQ ID NO: 154473 - RNA, 1755 nt, Artificial Sequence
  derived and/or modified CDS sequence (opt3) from hemagglutinin__InfluenzaB__ABL76639
augaaggccaucauugugcugcucauggucguuaccagcaacgcugacagaauaugcacaggcaucacuuccucuaauucaccccacgugguaaaaacggcaacccagggggaggugaacgucacaggagugauuccucuuacuaccacaccaaccaagaguuacuucgccaaucugaaagguacuaggacacggggcaaguuguguccggauugcuuaaacuguaccgaccuggauguugcgcuagggcgccccaugugcgugggaacgacuccuagcgcuaaagccuccauccuccaugaaguccgaccagugaccucuggcuguuuucccauuaugcacgaccguacaaagaucagacaacuggcaaaucuucugagggguuaugagaacauacgguugucgacucagaauguaaucgaugccgaaaaggcuccugggggaccauaccgccucggcaccucaggcagcugccccaacgcaacaaguaaauccggguucuuugccaccauggcuugggccguuccuaaggacaauaacaaaaaugcgacgaacccacugacuguggaggucccguauauuuguacagaaggagaggaucagaucaccgugugggguuuccauucugacaauaagacucagaugaaaaaccuguacggcgauagcaauccccaaaaguuuacauccucagcaaacggggugaccacgcacuaugucagucagauuggaggcuucccugaccagaccgaggauggugggcucccacagagcggaagaaucguuguggacuacaugaugcaaaagcccggcaaagccggcacaauaguauaucagcgcgggguguuacugccucagaaggucuggugcgcuucuggacgguccaaagugauuaaggguucacuuccauugaucggcgaagccgauugucugcaugagaaauacgggggacuaaacaagagcaaacccuacuauacuggcgaacacgcaaaggcuauugguaauugcccgaucuggguuaagaccccucucaaacuggccaacgggacaaaguacaggcccccagcgaaacuucugaaggagcgaggcuuuuucggagccaucgcaggcuuuuuggaagggggaugggaagguaugauugcuggcuggcacggguauacuucccauggagcccacggcguggcugucgccgcagaccucaaaucuacccaggaggccauaaauaagaucacaaagaaccugaauaguuuaagcgaacuggaggugaaaaaccuccaaagacuuucgggugcuauggacgaacugcauaaugagauuuuggagcuagaugaaaagguagacgaucugagggcggacaccaucucuucccagauagagcucgcaguucugcuuucaaacgaagggauuaucaauagugaggaugaacaccuguuggcccucgagcggaaacugaagaaaauguuaggcccuagcgcuguggacaucggaaacggcuguuucgagacuaagcacaagugcaaucagacgugccuggaucguauugccgcagggacauuuaacgccggagaguucucccuacccaccuuugacucucucaauaucacugcugccagccugaacgaugacggucuugauaaucauaccauuuugcuguacuauucaacagcagcgaguucccucgcugucacccugaugcuugccauauucaucguguacauggucagccgcgacaacgugucuuguucaauuugccuguga

SEQ ID NO: 154474 - RNA, 1755 nt, Artificial Sequence
  derived and/or modified CDS sequence (opt3) from hemagglutinin__InfluenzaB__ABL76683
augaaggccaucauugugcugcucauggucguuaccagcaacgcugacagaauaugcacaggcaucacuuccucuaauucaccccacgugguaaaaacggcaacccagggggaggugaacgucacaggagugauuccucuuacuaccacaccaaccaagaguuacuucgccaaucugaaagguacuaggacacggggcaaguuguguccggauugcuuaaacuguaccgaccuggauguugcgcuagggcgccccaugugcgugggaacgacuccuagcgcuaaagccuccauccuccaugaaguccgaccagugaccucuggcuguuuucccauuaugcacgaccguacaaagaucagacaacuggcaaaucuucugagggguuaugagaacauacgguugucgacucagaauguaaucgaugccgaaaaggcuccugggggaccauaccgccucggcaccucaggcagcugccccaacgcaacaaguaaauccggguucuuugccaccauggcuugggccguuccuaaggacaauaacaaaaaugcgacgaacccacugacuguggaggucccguauauuuguacagaaggagaggaucagaucaccgugugggguuuccauucugacaauaagacucagaugaaaaaccuguacggcgauagcaauccccaaaaguuuacauccucagcaaacggggugaccacgcacuaugucagucagauuggaggcuucccugaccagaccgaggauggugggcucccacagagcggaagaaucguuguggacuacaugaugcaaaagcccggcaaaacaggcacuauaguauaucagcgcgggguguuacugccucagaaggucuggugcgccucuggacgguccaaagugauuaaggguucacuuccauugaucggcgaagcugauugucugcaugagaaauacgggggacuaaacaagagcaaacccuacuauaccggcgaacacgccaaggcaauugguaauugcccgaucuggguuaagacaccucucaaacuggcuaacgggacuaaguacaggcccccagccaaacuucugaaggagcgaggcuuuuucggagcgaucgccggcuuuuuggaagggggaugggaagguaugauugcaggcuggcacggguauaccagucauggagcucacggcguggccgucgcugccgaccucaaaucuacacaggaggcaauaaauaagaucaccaagaacuuaaauucccugagcgaacuggaggugaaaaaccuccaaagacuuucgggugccauggacgaacugcauaaugagauuuuggagcuagaugaaaagguagacgaucugagggcugacacuaucucuucccagauagagcucgcgguucugcuuucaaacgaagggauuaucaauagugaggaugaacaccuguuggcacucgagcggaaacugaagaaaauguuaggcccuagcgccguggacaucggaaacggcuguuucgagacgaagcacaagugcaaucagacaugccuggaucguauugcugccgggaccuuuaacgcaggagaguucucccuacccacuuuugacucucucaauaucaccgccgcuagccugaacgaugacggucuugauaaucauacaauuuugcuguacuauucaaccgccgcaaguucccucgcggucacucugaugcuugcuauauucaucguguacauggucagccgcgacaacgugucuuguucaauuugccuguga

SEQ ID NO: 154475 - RNA, 1752 nt, Artificial Sequence
  derived and/or modified CDS sequence (opt3) from hemagglutinin__InfluenzaB__ABL76694
augaaggccaucauugugcugcucauggucguuaccagcaacgcugacagaauaugcacaggcaucacuuccucuaauucaccccacgugguaaaaacggcaacccagggggaggugaacgucacaggagugauuccucuuacuaccacaccaaccaagagucauuucgccaaucugaaagguacuaagacaaggggcaaauuguguccgaacugcuuaaauuguaccgaucuggacguugcgcuagggcggcccaugugcgugggaacgacuccuagcgcuaaggccuccauccuccacgaaguccgcccagugaccucuggcuguuuucccauuaugcaugaucgaacaaagauccgucaacugccuaaccuucugagagguuacgagaauauaagguugucgacucagaacguaaucaaugcagaacgggccccagggggacccuaucgccucggcaccucaggcagcugcccuaacguuacaaguagagacggguucuuugcuaccauggcaugggccgugccaagggauaauaaaacggcuacuaacccgcugacagucgaggugcccuacauuuguaccaagggagaagaccagaucacugugugggguuuccacuccgauaauaaaacacagaugaagaaccuguauggcgacucuaauccucaaaaauuuaccagcuccgccaacggggucacgacccauuacguuucacagauuggaggcuucccaaaccagacagaggauggugggcucccccagaguggacggaucgugguagacuauauggugcaaaagccuggcaagacuggcaccauagucuaccagcgcgggguguuacugccacagaaaguuuggugcgcgagcggacgaucuaaggugauuaaagguucccuucccuugaucggcgaggcagauugucugcacgaaaaguaugggggacuaaauaaaucaaagccguacuacacaggcgagcacgccaaagcuauugguaacugcccuaucugggucaagacuccccucaagcuggccaaugggaccaaauauagaccuccagcaaaacuucugaaggaaaggggcuuuuucggagcuaucgccggcuuuuuggaagggggaugggaggguaugauugcgggcuggcauggguacacaagccacggagcccauggcguggcaguagcugccgaccucaagaguacccaggaggcuauaaacaaaaucacuaagaaucugaacucuuuauccgagcuggaaguuaagaaucuccaacggcuuagcggugccauggaugagcugcacaacgaaauuuuggagcuagacgagaaaguggacgaucugcgugcagacacgaucucgucucagauagaacucgccguccugcuuuccaaugaggggauuaucaacucagaagaugagcaccuguuggcucucgaacgcaagcugaaaaagauguuaggccccagugcgguggacaucggaaauggcuguuucgagacaaaacauaagugcaaccagaccugccuggauagaauugcagccgggacuuuuaaugcuggagaguucagccuaccaaccuuugacucccucaacaucacagccgcaucucugaaugaugacggucuugauaaccacaccauuuugcuguauuacagcacugccgcuucaagucucgccgucacacugaugauagcaaucuucauuguguauaugguuuccagggacaacgugagcuguucuaucugccuuuga

SEQ ID NO: 154476 - RNA, 1758 nt, Artificial Sequence
  derived and/or modified CDS sequence (opt3) from hemagglutinin__InfluenzaB__ABL76716
augaaggccaucauugugcugcucauggucguuaccagcaacgcugacagaauaugcacaggcaucacuuccucuaauucaccccacgugguaaaaacggcaacccagggggaggugaacgucacaggagugauuccucuuacuaccacaccaaccaagagucauuucgccaaucugaaagguacugaaacaaggggcaaguuguguccgaaaugcuuaaacuguaccgaucuggacguugcgcuagggcggcccaagugcacgggaaauaucccuagcgcucgcguguccauucuccacgagguccgaccagugacuucuggcuguuuucccaucaugcaugaucguaccaagauaagacaacugccuaaccuucugagggguuacgaacacauccgguugucgacacauaauguaauuaacgccgagaaugcaccagggggacccuauaaaaucggcacuucaggcagcugcccuaacguuaccaaugggaacggauucuuugccacaauggcuugggcagugccaaagaaugacaacaauaaaaccgccacgaacagucucacuauugaagucccguacaucuguacagagggugaggaucagauaaccguguggggcuuccacuccgacaacgaaacucagauggcuaagcuguauggggauucuaaaccccagaaguuuacaagcuccgccaauggagugaccacgcacuacgucucacaaauuggcgguuucccuaaccagaccgaggacgggggacugccacagaguggccgcaucguuguggauuauaugguacaaaagagcggcaaaacagggacuauuaccuaccagagaggaauccucuuaccccagaagguguggugcgcgucugguagguccaaagucaucaagggcucacugccucuuauuggggaagcagacuguuugcaugagaaauauggaggccugaauaagagcaaaccauacuacacaggugagcacgccaaggcuauagggaacugccccaucugggugaagacuccgcuaaaacucguuaauggcaccaaguaucggccucccgccaaacugcuuaaggaacgcggauuuuucggcgcaauugcuggguuucuggagggagguugggaaggcaugaucgccggguggcauggauacacaagucacggcgcgcacgguguggccgucgcagcugauuugaaaucuacccaggaggccauaaacaagauuacuaagaaucucaacucccugagcgaauuagaggugaaaaaucugcagcgacucucgggggcuauggacgagcuucauaacgaaauccuggaguuggaugaaaagguagacgaccuaagagccgauacgaucucuucccaaauugagcuggcaguucuccugucaaaugaaggcaucauuaacagugaggacgagcaccuucuggccuuggaaaggaaacucaagaaaaugcugggaccaagcgcuguggagauaggcaauggguguuucgaaacaaagcauaagugcaaccagaccugcuuagaucggaucgcggcaggaacuuuugacgccggugaguucucccugccuaccuuugauucucuaaauauuacagcugccagccucaacgacgauggccuggacaaccacaccauccuuuuguauuacucaacugcagccaguucccuggcugucacacucaugaucgccauuuucguggucuauauggugagccgugauaauguuucuuguucaauaugccuguga

SEQ ID NO: 154477 - RNA, 1755 nt, Artificial Sequence
  derived and/or modified CDS sequence (opt3) from hemagglutinin__InfluenzaB__ABL76760
augaaggccaucauugugcugcucauggucguuaccagcaacgcugacagaauaugcacaggcaucacuuccucuaauucaccccacgugguaaaaacggcaacccagggggaagugaacgucacaggagugauuccucuuacuaccacaccaaccaagagucauuucgccaaucugaaagguacuaagacaaggggcaaauuguguccgaccugcuuaaacuguacggaucuggacguugcgcuagggcggcccaugugcgugggagucacuccuagcgcuaaggccuccauccuccacgaagugcgcccaguaaccucuggcuguuuucccauuaugcaugaucgaacaaagauccgucaacugccuaaucuucugagagguuacgagaaaauaagguugucgacucagaacguuaucaaugcagaaaaggccccagggggacccuaucggcucggcaccucaggcagcugcccuaacgcuacaagucgcuccggguucuuugcaaccauggccugggcugugccaagagacaauaacaaaacggccacuaauccgcugacaauugaggucccccacaucuguaccaaggaagaggaucagauuacuguguggggauuccauucugacaacaaaacacagaugaagaaucuguacggugauagcaacccucaaaaguuuaccuccucagcgaauggcgugacgacccacuaugucagucagaucgggggauucccagaccagacagaggauggcggucucccccagagcgggaggauaguuguggacuacaugguacaaaaaccuggaaagacuggcaccauuguguaucagcggggcaucuuacugccacagaaagucuggugcgcaucugggcgcuccaaggugauuaaaggaucacuucccuugaucggugaagccgauugucugcacgagaaguacggcgggcuaaacaaaagcaagccguauuacacaggagaacaugcuaaggccaucggcaacugcccuauuuggguuaaaacuccccucaagcuggcaaaugguaccaaauaccgaccuccagcuaaacuucugaaggagagaggguuuuucggcgccauagcgggauuuuuggagggcgggugggaaggaaugaucgccgguuggcacggcuauacaagucauggggcacacggaguggcugucgccgcugaccucaagucuacccaggaggccauuaacaagaucacuaaaaaucugaacuccuuaagcgaacuggaggugaagaaucuccaaaggcuuucgggcgcaauggaugaacugcacaacgagauauuggagcuagacgaaaaaguagacgaucugcgggccgacacgauuucuucccagaucgagcucgcuguucugcuuucaaaugaagguaucauuaacagugaggaugaacaucuguuggcgcucgagcguaagcugaaaaagauguuagggcccagcgcaguggacaucggcaauggauguuucgagacaaagcacaaaugcaaccagaccugccuggaucgcauugccgcuggcacuuuugacgccggggaguucucccuaccaaccuuugauucucucaauauaacagcagccagccugaacgacgauggacuugacaaucauaccaucuugcuguacuauucaacugcugccaguucccucgcagucacacugaugauugcgaucuucaucguguacaugauuagcagagauaacgucucuuguucaauaugccuuuga

SEQ ID NO: 154478 - RNA, 1755 nt, Artificial Sequence
  derived and/or modified CDS sequence (opt3) from hemagglutinin__InfluenzaB__ABL76771
augaaggccaucauugugcugcucauggucguuaccagcaacgcugacagaauaugcacaggcaucacuuccucuaauucaccccacgugguaaaaacggcaacccagggggaagugaacgucacaggagugauuccucuuacuaccacaccaaccaagagucauuucgccaaucugaaagguacuaagacaaggggcaaauuguguccgaccugcuuaaacuguacggaucuggacguugcgcuagggcggcccaugugcgugggagucacuccuagcgcuaaggccuccauccuccacgaagugcgcccaguaaccucuggcuguuuucccauuaugcaugaucgaacaaagauccgucaacugccuaaucuucugagagguuacgagaaaauaagguugucgacucagaacguuaucaaugcagaaaaggccccagggggacccuaucggcucggcaccucaggcagcugcccuaacgcuacaagucgcuccggguucuuugcaaccauggccugggcugugccaagagacaauaacaaaacggccacuaauccgcugacaauugaggucccccacaucuguaccaaggaagaggaucagauuacuguguggggauuccauucugacgauaaaacacagaugaagaaccuguacggugacagcaauccucaaaaguuuaccuccucagcgaacggcgugacgacccacuaugucagucagaucgggggauucccagaucagacagaggacggcggucucccccagagcgggaggauaguuguggauuacaugguacaaaaaccuggaaagacuggcaccauuguguaucagcggggcaucuuacugccacagaaagucuggugcgcaucugggcgcuccaaggugauuaaaggaucacuucccuugaucggugaagccgacugucugcacgagaaguacggcgggcuaaauaaaagcaagccguauuacacaggagaacaugcuaaggccaucggcaacugcccuauuuggguuaaaacuccccucaagcuggcaaacgguaccaaauaccgaccuccagcuaagcugcugaaagagagaggguuuuucggcgccauagcgggauuuuuggagggcgggugggaaggaaugaucgccgguuggcacggcuauacaagucauggggcacacggaguggcugucgccgcugaucucaagucuacccaggaggccauuaauaagaucacuaaaaaccuuaauuccuuaagcgaacuggaggugaagaaccuccaaaggcuuucgggcgcaauggacgaacugcacaaugagauauuggagcuagacgaaaaaguagaugaccugcgggccgauacgauuucuucccagaucgagcucgcuguucugcuuucaaacgaagguaucauuaauagugaggacgaacaucuguuggcgcucgagcguaagcugaaaaagaucuuagggcccagcgcaguggauauuggcaacggauguuucgagacaaagcacaaaugcaaucagaccugccuggaccgcauagccgcuggcacuuuugaugccggggaguucucccuaccaaccuuugacucucucaacaucacagcagccagccugaaugaugacggacuugauaaccauaccauuuugcuguacuauucaacugcugccaguucccucgcagucacacugaugaucgcgaucuucauuguguacaugauaagcagagacaaugucucuuguucaaucugccuuuga

SEQ ID NO: 154479 - RNA, 1755 nt, Artificial Sequence
  derived and/or modified CDS sequence (opt3) from hemagglutinin__InfluenzaB__ABL76782
augaaggccaucauugugcugcucauggucguuaccagcaacgcugacagaauaugcacaggcaucacuuccucuaauucaccccacgugguaaaaacggcaacccagggggaagugaacgucacaggagugauuccucuuacuaccacaccaaccaagagucauuucgccaaucugaaagguacuaagacaaggggcaaauuguguccgaccugcuuaaacuguacggaucuggacguugcgcuagggagccccaugugcgugggaaucacuccuuccgcuaaggccucuauucuccacgaaguccggccagugaccucgggcuguuuucccaucaugcaugaucgcacaaagauacgacaacugccuaaucuucugcgugguuacgagaaaaucagauugucaacucagaacguaauuaauaucgaaaaggcaccagggggacccuauaggcucggcaccagcggcaguugcccuaacgccacaucccggucuggguucuuugcuaccauggcaugggccguuccacgcgacaauaacaaaacggcuacuaauccgcugacaguggaggucccccacauuuguaccaaggaagaggaucagaucacuguguggggauuccauagcgacaacaaagcccagaugaagaaucuguacggugauuccaacccucaaaaguuuacaucaagugcgaauggcgugaccacgcacuaugucagccagauagggggauucccagaccagaccgaggauggcggucucccccagucugggagaauuguuguggacuacaugguacaaaaaccuggaaagacaggcacuaucguguaucagaggggcauuuuacugccacagaaagucuggugcgcauccgggcggucaaaggugaucaaaggaagccuucccuugaucggugaagccgauugucugcacgagaaguacggcgggcuaaacaaaaguaagccguauuacaccggagaacaugcuaaggccauuggcaacugcccuauauggguuaaaacaccccucaagcuggcaaaugguacuaaauaccgcccuccagcuaaacuucugaaggagcgaggguuuuucggcgccaucgcgggauuuuuggagggcgggugggaaggaaugauugccgguuggcacggcuauaccucucauggggcacacggaguggcugucgccgcugaccucaaguccacacaggaggccaucaacaagauaaccaaaaaucugaacagcuuaucggaacuggaggugaagaaucuccaaagacuuucuggcgcaauggaugaacugcacaacgagauuuuggagcuagacgaaaaaguagacgaucugagggccgacacuaucuccucacagaucgagcucgcuguucugcuuaguaaugaagguauuaucaacagcgaggaugaacaucuguuggcgcucgagcggaagcugaaaaagauguuagggcccuccgcaguggacauuggcaauggauguuucgagacgaagcacaaaugcaaccagacaugccuggaucguauagccgcuggcaccuuuaaugccggggaguucucucuaccaacuuuugacagccucaacaucaccgcagccucacugaaugaugacggacuugauaaccauacaauuuugcuguacuauaguaccgcugccuccagccucgcagucacucugaugaucgcgaucuucauuguguacaugauaucucgcgacaaugucucauguaguaucugccuuuga

SEQ ID NO: 154480 - RNA, 1755 nt, Artificial Sequence; identical to SEQ ID NO: 154453
  derived and/or modified CDS sequence (opt3) from hemagglutinin__InfluenzaB__ABL76793

SEQ ID NO: 154481 - RNA, 1755 nt, Artificial Sequence; identical to SEQ ID NO: 154453
  derived and/or modified CDS sequence (opt3) from hemagglutinin__InfluenzaB__ABL76815

SEQ ID NO: 154482 - RNA, 1758 nt, Artificial Sequence
  derived and/or modified CDS sequence (opt3) from hemagglutinin__InfluenzaB__ABL76826
augaaggccaucauugugcugcucauggucguuaccagcaacgcugacagaauaugcacaggcaucacuuccucuaauucaccccacgugguaaaaacggcaacccagggggaggugaacgucacaggagugauuccucuuacuaccacaccaaccaagagucauuucgccaaucugaaagguacuaagacaaggggcaaauuguguccggaaugcuuaaacuguaccgaucuggacguugcgcuagggcggcccaagugcacgggaaauaucccuagcgcuaagguguccauucuccacgagguccgcccagugacuucuggcuguuuucccaucaugcaugaucgaaccaaaauacgucaacugccuaaccuucugagagguuacgaacacaucagguugucgacacauaauguaauuaacgccgagaaggcaccagggggacccuauaaaaucggcacuucaggcagcugcccuaauguuaccaacgggaauggauucuuugccacaauggcuugggcagugccaaagaacgacaauaacaaaaccgccacgaauagucucacuauugaagucccguacaucuguacagagggugaggaucagauaaccguguggggcuuccacuccgacaacgaaacucagauggcuaagcuguauggggauucuaagccccagaaauuuacaagcuccgccaacggagugaccacgcacuacgucucacaaauuggcgguuucccuaaucagaccgaggacgggggacugccacagaguggccggaucguuguggauuauaugguacaaaagagcggcaaaacagggacuauuaccuaccagcgcggaauccucuuaccccagaagguguggugcgcgucugguagauccaaagucaucaagggcucacugccucuuauuggggaagcagacuguuugcaugagaaauauggaggccugaacaagagcaagccauacuacacaggugagcacgccaaagcuauagggaauugccccaucugggugaagacuccgcuaaaacucgccaacggcaccaaguauaggccucccgcaaaacugcuuaaggaacggggauuuuucggcgcuauugccggguuucuggagggagguugggaaggcaugaucgcgggguggcauggauacacaagucacggcgcccacgguguugcaguggcugccgauuugaagucuacccaggaggcuauaaauaaaauuacuaagaaccucaauucccugagcgaauuagaggucaaaaaccugcagcgccucucgggggccauggacgagcuucauaaugaaauccuggaguuggaugaaaagguggacgaccuacgagcagauacgaucucuucccaaauugagcuggccguacuccugucaaacgaaggcaucauuaauagugaggacgagcaccuucuggcuuuggaaagaaaacucaagaagaugcugggaccaagcgcgguugagauaggcaacggguguuucgaaacaaaacauaagugcaaucagaccugcuuagauaggaucgcagccggaacuuuugacgcuggugaguucucccugccuaccuuugauucucuaaacauuacagccgcaagccucaaugacgauggccuggacaaccacaccauccuuuuguauuacucaacugccgcuaguucccuggccgugacacucaugaucgcaauuuucgucguguauauggucagccgggauaacgugucuuguucaauaugccuguga

SEQ ID NO: 154483 - RNA, 1758 nt, Artificial Sequence
  derived and/or modified CDS sequence (opt3) from hemagglutinin__InfluenzaB__ABL76837
augaaggccaucauugugcugcucauggucguuaccagcaacgcugacagaauaugcacaggcaucacuuccucuaauucaccccacgugguaaaaacggcaacccagggggaggugaacgucacaggagugauuccucuuacuaccacaccaaccaagagucauuucgccaaucugaaagguacuaagacaaggggcaaauuguguccgaagugcuuaaacuguaccgaucuggacguugcgcuagggcggcccaagugcacgggaaauaucccuagcgcugaaguguccauucuccacgagguccgcccagugacuucuggcuguuuucccaucaugcaugaucgaaccaaaguacgucaacugccuaaccuucugagagguuacgaacacauaagguugucgacacauaauguuaucaacgccgagaaggcaccagggggacccuauaaaauuggcacuucaggcagcugcccuaaugugaccaacgggaauggauucuuugccacaauggcuugggcagucccaaagaacgacaauaacaaaaccgccacgaauagucucacuguggaagugccguacaucuguacagagggugaggaucagauuaccgucuggggcuuccacuccgacucugaaacucagauggcuaagcuguauggggauagcaagccccagaaauuuacauccucaaguaacggaguuaccacgcacuacgugagccaaaucggcgguuucccuaaccagaccgaggacgggggacugccacagucuggccggauaguaguggauuauaugguccagaaguccggcaaaacagggacuauuaccuaccaacgcggaauccucuuaccccagaagguguggugcgccucagguagaagcaaaguuauuaagggcagucugccucuuaucggggaagcggacuguuugcaugagagguauggaggccugaauaaaucuaagccauacuacacaggugagcacgcaaaggccaucgggaacugccccauuugggugaaaacuccgcuaaagcucgcuaauggcaccaaauaucggccucccgccaagcugcuuaaagaacgcggauuuuucggcgcaauagcuggguuucuggagggagguugggaaggcaugaucgccggguggcauggauacacaucccacggcgcgcacggugucgccguggcagcugaucucaagagcacccaggaggccauuaacaagaucacuaaaaauuugaacucgcugucugaauuagagguaaagaaucugcagcgacucuccggggcuauggacgagcuucauaacgaaauacuggaguuggaugaaaaaguugacgaccuaagagccgauacgauuucaagucaaaucgagcuggcagugcuccugagcaaugaaggcaucauuaacuccgaggacgagcaccuucuggccuuggaaaggaagcucaaaaagaugcugggaccaucugcugucgagaucggcaauggguguuucgaaacaaagcauaaaugcaaccagaccugcuuagaucggauugcggcaggaacuuuugacgccggugaguucagccugccuaccuuugauucacuaaauauaacagcugccagucucaacgacgauggccuggacaaucacaccauccuuuuguauuacuccacugcagccagcucucuggcugugacacucaugauugccaucuucgucguguauaugguuucacgugauaacgugaguuguagcaucugccuguga

SEQ ID NO: 154484 - RNA, 1755 nt, Artificial Sequence
  derived and/or modified CDS sequence (opt3) from hemagglutinin__InfluenzaB__ABL76848
augaaggccaucauugugcugcucauggucguuaccagcaacgcugacagaauaugcacaggcaucacuuccucuaauucaagucacgugguaaaaacggcaacccagggggaagugaacgucacaggagccauuccccuuacuaccacaccuaccaagagccauuucgcgaaucugaaagguacuaagacaaggggcaaauuguguccaaccugcuuaaacuguacggaucuggacguggcucuagggcggccgaugugcguuggaaucacucccccugccaaggcauccauucuccacgaagugcgcccagucaccucuggcuguuuucccaucaugcaugaucgaacaaagauacgucaacugccuaaucuucugagagguuacgagaaaaucagguugucgacucagaacgugauuaaugccgaaaaggcuccagggggacccuaucggcucggcaccucaggcagcugcccuaacgcaacaaguaaauccggguucuuugccaccauggcuugggccguaccacgcgacaauaacaagacggcgacuaauccgcugacaguugaggugccccacaucuguaccaaagaagaggaucagauuacugucuggggauuccauucugacaacaagacacagaugaagaaucuguacggugauagcaacccucaaaaauuuaccuccucagcaaauggcaucacgacccacuaugugagucagauagggggauucccagaccagacagaggauggcggucucccccagagcgggagaauuguggucgacuacaugguucaaaagccuggaaaaacuggcaccaucguguaucagaggggcauuuuacugccacagaagguauggugcgccucugggcgguccaaagugaucaagggaucacuucccuugaucggugaagcugauugucugcacgagaaauacggcgggcuaaacaagagcaagccguauuacacaggagaacaugccaaagcaauuggcaacugcccuauaugggucaagacuccccucaaacuggcuaaugguaccaaguaccgcccuccagccaaacuucugaaggagcgaggguuuuucggcgcgaucgccggauuuuuggagggcgggugggaaggaaugauugcagguuggcacggcuauacaagucauggggcucacggaguggccguugcugccgaccucaagucuacccaggaggcaaucaacaaaauaacuaagaaucugaacuccuuaagcgaacuggaggugaaaaaucuccaaagacuuucgggcgccauggaugaacugcacaacgagauuuuggagcuagacgaaaaggucgacgaucugagggcugacacgaucucuucccagaucgagcucgcggugcugcuuucaaaugaagguauuaucaacagugaggaugaacaucuguuggcacucgagcggaaacugaagaagauguuagggcccagcgccguagacauuggcaauggauguuucgagacaaaacacaagugcaaccagaccugccuggaucguauagcugccggcacuuuuaaugcaggggaguucucccuaccaaccuuugacucucucaacaucacagccgcuagccugaaugaugacggacuugauaaccauaccauuuugcuguacuauucaacugccgcaaguucccucgcgguuacacugaugaucgcuaucuucauuguguacaugauaagccgcgacaaugucucuuguucaaucugccuuuga

SEQ ID NO: 154485 - RNA, 1755 nt, Artificial Sequence; identical to SEQ ID NO: 154453
  derived and/or modified CDS sequence (opt3) from hemagglutinin__InfluenzaB__ABL76859

SEQ ID NO: 154486 - RNA, 1755 nt, Artificial Sequence
  derived and/or modified CDS sequence (opt3) from hemagglutinin__InfluenzaB__ABL76881
augaaggccaucauugugcugcucauggucguuaccagcaacgcugacagaauaugcacaggcaucacuuccucuaauucaccccacgugguaaaaacggcaacccagggggaggugaacgucacaggagugauuccucuuacuaccacaccaaccaagagucauuucgccaaucugaaagguacuaggacacggggcaaguuguguccggauugcuuaaacuguaccgaccuggauguugcgcuagggcgccccaugugcgugggaacgacuccuagcgcuaaagccuccauccuccacgaaguccgaccagugaccucuggcuguuuucccauuaugcaugaccguacaaagaucagacaacugccuaaucuucugagggguuacgagaacauacgguugucgacucagaauguaaucgaugcagaaaaggccucagggggaccauaucgccucggcaccagcggcaguugccccaacgcuacauccaaaucuggguucuuugcaaccauggccugggcuguuccuaaggacaauaacaaaaaugccacgaacccacugacuguggaggucccguacauuuguacagaaggagaggaucagaucaccgugugggguuuccacagcgacaaugagacucagaugaagaaccuguauggcgauuccaauccccaaaaauuuacaucaagugcgaacggggugaccacgcauuacgucagccagauuggaggcuucccugaccagaaggaagauggugggcucccacagucuggaagaaucguuguggacuauaugguacaaaagcccggcaaaaccggcacaauaguguaccagcgcggggucuuacugccucagaagguguggugcgcauccggacggucaaaaguuauuaaggguagccuuccauugaucggcgaggccgauugucugcacgaaaaauaugggggacuaaacaagaguaaacccuacuacacuggcgagcacgcuaaggccauugguaauugcccgaucugggugaagaccccucucaaacuggcaaacgggacaaaguauaggcccccagcuaaacuucugaaggagcgaggcuuuuucggagccaucgcgggcuuuuuggaagggggaugggaggguaugauugccggcuggcauggguacacuucucacggagcacauggcgucgcuguggccgcugaccucaaauccacccaggaagccauaaauaagaucacaaagaaccugaauagcuuaucggagcuggaaguuaaaaaccuccaaagacuuucuggugcaauggacgagcugcacaaugagauuuuggaacuagaugagaagguagacgaucugagggccgacaccaucuccucacagauagaacucgcugugcugcuuaguaacgaggggauuaucaauagcgaagaugagcaccuguuggcgcucgagcggaaacugaagaaaauguuaggcccuuccgcagucgacaucggaaacggcuguuucgaaacuaagcauaagugcaaucagacgugccuggaucguauugccgcugggacauuuaacgccggagaguucucucuacccaccuuugacagccucaauaucacugcagccucacugaacgaugacggucuugauaaucacaccauuuugcuguauuacaguacagcugccuccagccucgcagugacccugaugcuugcgauauucaucgucuauauggugucucgcgacaacguuucauguaguauuugccuguga

SEQ ID NO: 154487 - RNA, 1755 nt, Artificial Sequence
  derived and/or modified CDS sequence (opt3) from hemagglutinin__InfluenzaB__ABL76892
augaaggccaucauugugcugcucauggucguuaccagcaacgcugacagaauaugcacaggcaucacuuccucuaauucaccccacgugguaaaaacggcaacccagggggaggugaacgucacaggagugauuccucuuacuaccacaccaaccaagagucauuucgccaaucugaaagguacuaggacacggggcaaguuguguccggauugcuuaaacuguaccgaccuggauguugcgcuagggcgccccaugugcgugggaacgacuccuagcgcuaaagccuccauccuccacgaaguccgaccagugaccucuggcuguuuucccauuaugcaugaccguacaaagaucagacaacugccuaaucuucugagggguuacgagaacauacgguugucgacucagaauguaaucgaugcagaaaaggccccagggggacccuaucgccucggcaccucaggcagcugcccuaacgcuacaaguaaauccggguucuuugcaaccauggccugggcuguuccaaaggacaauaacaaaaaugccacgaacccgcugacuguggagguccccuacguguguacagaaggagaggaucagauuaccgugugggguuuccacucugacaauaagacucagaugaaaaaccuguauggcgauagcaauccucaaaaguuuacauccucagcgaacggggucaccacgcauuacguuagucagaucggaggcuucccagaccagaccgaggauggugggcucccccagagcggaagaauugugguagacuauauggugcaaaagccuggcaaaacaggcacuaucgucuaccagaggggaguguuacugccacagaagguuuggugcgcaucugggcgguccaaagugauaaaggguucacuucccuugauuggcgaagccgauugucugcacgagaaauaugggggacuaaacaagagcaaaccguacuacaccggcgaacacgcuaaggccaucgguaauugcccuauuugggucaagacaccccucaaacuggcaaacgggacuaaguaucgcccuccagcuaaacuucugaaggagcgaggcuuuuucggagccaucgcgggcuuuuuggaagggggaugggaagguaugaucgccggcuggcauggguacaccagucacggagcacauggcguggcuguagccgcugaccucaaaucuacacaggaggccauuaauaagauaaccaagaacuuaaauucccugagcgaacuggagguuaaaaaccuccaaagacuuucgggugcaauggacgaacugcacaaugagaucuuggagcuagaugaaaagguggacgaucugagggccgacacuauuucuucccagaucgagcucgcuguccugcuuucaaacgaagggauaauuaauagugaggaugaacaccuguuggcgcucgagcggaaacugaagaaaauguuaggccccagcgcaguggacaucggaaacggcuguuucgagacgaagcauaagugcaaucagacaugccuggaucguaucgccgcugggaccuuuaacgccggagaguucucccuaccaacuuuugacucucucaauauuaccgcagccagccugaacgaugacggucuugauaaucacacaaucuugcuguauuacucaaccgcugccaguucccucgcagucacucugaugcuugcgauuuucauaguguauaugguuagccgcgacaacgugucuuguucaaucugccuguga

SEQ ID NO: 154488 - RNA, 1755 nt, Artificial Sequence
  derived and/or modified CDS sequence (opt3) from hemagglutinin__InfluenzaB__ABL76903
augaaggccaucauugugcugcucauggucguuaccagcaacgcugacagaauaugcacaggcaucacuuccucuaauucaccccacgugguaaaaacggcaacccagggggaggugaacgucacaggagugauuccucuuacuaccacaccaaccaagaguuacuucgccaaucugaaagguacuaggacacggggcaaguuguguccggauugcuuaaacuguaccgaccuggauguugcgcuagggcgccccaugugcgugggaacgacuccuagcgcuaaagccuccauccuccaugaaguccgaccagugaccucuggcuguuuucccauuaugcacgaccguacaaagaucagacaacugccuaaucuucugagggguuaugagaacauacgguugucgacucagucaguaaucgaugcagaaaaggccccagggggacccuaccgccucggcaccagcggcaguugcccuaaugcuacauccaaaucuggguucuuugcaaccauggccugggcuguuccaaaggacaacaauaaaaacgccacgaauccgcugacuguggagguccccuauauuuguacagaaggagaggaucagaucaccgugugggguuuccauagcgacgauaagacucagaugaaaaaccuguacggcgacuccaauccucaaaaguuuacaucaagugcgaacggggugaccacgcacuaugucagccagauuggaggcuucccagaucagaccgaggacggugggcucccccagucuggaagaaucguuguggauuacaugauacaaaagccuggcaaaacaggcacuauuguauaucagaggggaguguuacugccacagaaggucuggugcgcauccgggcggucaaaagugaucaaggguagccuucccuugauuggcgaagccgacugucugcaugagaaauacgggggacuaaauaagaguaaaccguacuauaccggcgaacacgcuaaggccaucgguaacugcccuaucuggguuaagacaccccucaaacuggcaaacgggacuaaguaccgcccuccagcuaaacuucugaaggagcgaggcuuuuucggagccauugcgggcuuuuuggaagggggaugggaagguaugauagccggcuggcacggguauaccucucauggagcacacggcguggcugucgccgcugaccucaaauccacacaggaggccaucaauaagauuaccaagaaccugaauagcuuaucggaacuggaggugaaaaaccuccaaagacuuucuggugcaauggaugaacugcauaaugagaucuuggagcuagacgaaaagguagaugaccugagggccgauacuauauccgcucagauugagcucgcgguucugcuuucaaacgaagggaucaucaauagugaggacgaacaccuguuggcacucgagcggaaacugaagaaaauguuaggccccagcgccguggauauuggaaacggcuguuucgagacgaagcacaagugcaaucagacaugccuggaccguaucgcugccgggaccuuuaacgcaggagaguucucccuaccaacuuuugauucucucaauauuaccgccgcuagccugaacgacgauggucuugacaaucauacaauauugcuguacuauucaaccgccgcaaguucccucgcggucacucugaugcuugcuaucuucauuguguacauggucagccgcgacaacgugucuuguucaaucugccuguga

SEQ ID NO: 154489 - RNA, 1758 nt, Artificial Sequence
  derived and/or modified CDS sequence (opt3) from hemagglutinin__InfluenzaB__ABL76914
augaaggccaucauugugcugcucauggucguuaccagcaacgcugacagaauaugcacaggcaucacuuccucuaauucaccccacgugguaaaaacggcaacccagggggaggugaacgucacaggagugauuccucuuacuaccacaccaaccaagagucauuucgccaaucugaaagguacuaagacaaggggcaaauuguguccgaagugcuuaaacuguaccgaucuggacguugcgcuagggcggcccaagugcacgggaaauaucccuagcgcugaaguguccauucuccacgagguccgcccagugacuucuggcuguuuucccaucaugcaugaucgaaccaaaauacgucaacugccuaaccuucugagagguuacgaacacaucagguugucgacacauaauguaauuaacgccgagaaggcaccagggggacccuauaaaaucggcacuucaggcagcugcccuaauguuaccaacgggaauggauucuuugccacaauggcuugggcagugccaaagaacgacaauaacaaaaccgccacgaauagucucacuauugaagucccguacaucuguacagagggugaggaucagauaaccguguggggcuuccacuccgacaacgaagcucagauggccaagcuguauggggauucuaagccccagaaauuuacuagcuccucaaacggagugacaacccacuacgucagucaaauuggcgguuucccuaaucagacggaggacgggggacugccacagagcggccggaucguuguggauuauaugguacagaagucuggcaaaaccgggacaauuacuuaccaacgcggaauccucuuaccccagaagguguggugcgcguccgguagaucaaaagucaucaagggcagccugccucuuauuggggaagcagacuguuugcaugagagguauggaggccugaacaaaaguaagccauacuacaccggugagcacgccaaggcuauagggaauugccccaucugggugaaaacaccgcuaaagcucgccaacggcacuaaauaucggccucccgcaaagcugcuuaaagaacgcggauuuuucggcgcuauugccggguuucuggagggagguugggaaggcaugaucgcgggguggcauggauacaccucucacggcgcccacgguguugcaguggcugccgauuugaaguccacacaggaggcuauaaauaagauuaccaaaaaccucaauagccugucggaauuagaggucaagaaccugcagcgacucucuggggccauggacgagcuucauaaugaaauccuggaguuggaugaaaaaguggacgaccuaagagcagauacuaucuccucacaaauugagcuggccguacuccugaguaacgaaggcaucauuaauagcgaggacgagcaccuucuggcuuuggaaaggaagcucaaaaagaugcugggaccauccgcgguugagauaggcaacggguguuucgaaacgaagcauaaaugcaaucagacaugcuuagaucggaucgcagccggaaccuuugacgcuggugaguucucucugccuacuuuugauagccuaaacauuaccgccgcaucacucaaugacgauggccuggacaaccacacaauccuuuuguauuacaguaccgccgcuuccagccuggccgugacucucaugaucgcaauuuucgucguguauauggucucucgugauaacgugucauguaguauaugccuguga

SEQ ID NO: 154490 - RNA, 1755 nt, Artificial Sequence
  derived and/or modified CDS sequence (opt3) from hemagglutinin__InfluenzaB__ABL76936
augaaggccaucauugugcugcucauggucguuaccagcaacgcugacagaauaugcacaggcaucacuuccucuaauucaccccacgugguaaaaacggcaacccagggggaagugaacgucacaggagugauuccucuuacuaccacaccaaccaagagucauuucgccaaucugaaagguacuaagacaaggggcaaauuguguccgaccugcuuaaacuguacggaucuggacguugcgcuagggcggcccaugugcgugggaacuaccccuagcgcuaaggccuccauccuccacgaaguccgcccagugacaucuggcuguuuucccauuaugcaugaucgaacuaagauccgucaacugccuaaucuucugagagguuacgagaaaauaagguugucgacccagaacguaaucaaugcagaaaaggccccagggggacccuaucggcucggcacaucaggcagcugcccuaacgcuaccagucgcuccggguucuuugcaacgauggccugggcuguuccaagagacaauaacaaaacugccacaaauccgcugaccguggagguccccuacauuuguacuaaggaagaggaucagaucacaguguggggauuccacucugacgauaaaacccagaugaagaaccuguauggugacagcaauccucaaaaguuuacguccucagcgaacggcgugaccacacauuacgucagucagauugggggauucccagaucagacugaggacggcggucucccccagagcgggaggaucguuguggauuauaugguacaaaaaccuggaaagaccggcacaauaguguaccagcggggcgucuuacugccacagaaaguguggugcgcaucugggcgcuccaagguuauuaaaggaucacuucccuugaucggugaagccgacugucugcacgagaaguauggcgggcuaaauaaaagcaagccguacuacacuggagaacacgcuaaggccauuggcaacugcccuaucugggugaaaaccccacucaagcuggcaaacgguacaaaauaucgacccccugcuaagcugcugaaagagagaggguuuuucggcgccaucgcgggauuuuuggagggcgggugggaaggaaugauugccgguuggcauggcuacaccagucacggggcacauggagucgcuguggccgcugaucucaagucuacucaggaggccauaaauaagaucacgaaaaaccuuaauuccuuaagcgaacuggagguaaagaaccuccaaaggcuuucgggcgcaauggacgaacugcacaaugagauuuuggagcuagacgaaaaaguugaugaccugcgggccgauacaaucucuucccagauagagcucgcugugcugcuuucaaacgaagguauuaucaauagugaggacgaacaccuguuggcgcucgagcguaagcugaaaaagauguuagggcccagcgcagucgauaucggcaacggauguuucgagaccaagcauaaaugcaaucagacuugccuggaccgcauugccgcuggcaccuuuaacgccggggaguucucccuaccaacauuugauucucucaauaucaccgcagccagccugaacgacgauggacuugacaaucacacuauuuugcuguauuacucaacagcugccaguucccucgcagugacgcugaugauagcgaucuucauugucuauauggugagcagagauaacguuucuuguucaaucugccuuuga

SEQ ID NO: 154491 - RNA, 1755 nt, Artificial Sequence
  derived and/or modified CDS sequence (opt3) from hemagglutinin__InfluenzaB__ABL76947
augaaggccaucauugugcugcucauggucguuaccagcaacgcugacagaauaugcacaggcaucacuuccucuaauucaccccacgugguaaaaacggcaacccagggggaagugaacgucacaggagccauuccucuuacuaccacaccaaccaagagucauuucgcgaaucugaaagguacuaagacaaggggcaaauuguguccgaccugcuuaaacuguacggaucuggacguggcucuagggcggcccaugugcguuggaaucacuccuagcgccaaggcauccauucuccacgaagugcgcccagucaccucuggcuguuuucccaucaugcaugaucgaacaaagauacgucaacugccuaaucuucugagagguuacgagaaaaucagguugucgacucagaacgugauuaaugccgaaaaggcuccagggggacccuaucggcucggcaccucaggcagcugcccuaacgcaacaagucgcuccggguucuuugccaccauggcuugggccguaccaagagacaauaacaaaacggcgacuaauccgcugacaguugaggugccccacaucuguaccaaggaagaggaucagauuacugucuggggauuccauucugacgauaaaacacagaugaagaaccuguacggugacagcaauccucaaaaguuuaccuccucaacgaacggcaucaccacacacuaugugagucagauagggggauucccagaucagacugaggacggcggucucccccagagcgggaggauuguggucgauuacaugguucaaaaaccuggaaagaccggcacaaucguguaucagcggggcauuuuacugccacagaaaguauggugcgcaucugggcgcuccaaggugaucaaaggaucacuucccuugaucggugaagccgacugucugcacgagaaguacggcgggcuaaauaaaagcaagccguauuacacuggagaacaugcuaaggccauuggcaacugcccuauaugggucaaaaccccacucaagcuggcaaacgguacaaaauaccgacccccugcuaagcugcugaaagagagaggguuuuucggcgccaucgcgggauuuuuggagggcgggugggaaggaaugauugccgguuggcacggcuauaccagucauggggcacacggaguggcuguugccgcugaucucaagucuacucaggaggccaucaauaagauaacgaaaaaccuuaauuccuuaagcgaacuggaggugaagaaccuccaaaggcuuucgggcgcaauggacgaacugcacaaugagauuuuggagcuagacgaaaaagucgaugaccugcgggccgauacaaucucuucccagaucgagcucgcugugcugcuuucaaacgaagguauuaucaauagugaggacgaacaucuguuggcgcucgagcguaagcugaaaaagauguuagggcccagcgcaguagauauuggcaacggauguuucgagaccaagcacaaaugcaaucagacuugccuggaccgcauagccgcuggcaccuuuaacgccggggaguucucccuaccaacauuugauucucucaauaucaccgcagccagccugaacgacgauggacuugacaaucauacuauuuugcuguacuauucaacagcugccaguucccucgcaguuacgcugaugaucgcgaucuucauuguguacaugauaagcagagauaacgucucuuguucaaucugccuuuga

SEQ ID NO: 154492 - RNA, 1758 nt, Artificial Sequence
  derived and/or modified CDS sequence (opt3) from hemagglutinin__InfluenzaB__ABL76958
augaaggccaucauugugcugcucauggucguuaccagcaacgcugacagaauaugcacaggcaucacuuccucuaauucaccccacgugguaaaaacggcaacccagggggaagugaacgucacaggagugauuccucuuacuaccacaccaaccaagagucauuucgccaaucugaaagguacuaagacaaggggcaaauuguguccgaagugcuuaaacuguaccgaucuggacguugcgcuagggcggcccaagugcacgggaaauaucccuagcgcuaaaguguccauucuccacgaaguccgcccagugacuucuggcuguuuucccaucaugcaugaucgaaccaagauacgucaacugccuaaccuucugagagguuacgagcacaucagguugucgacacauaauguaauuaacgccgaaaaagcaccagggggacccuauaagaucggcacuucaggcagcugcccuaauguuaccaacgggaauggauucuuugccacaauggcuugggcagugccgaaaaacgacaauaacaagaccgccacgaauagucucacuauugaggucccauacaucuguacagaaggugaggaucagauaaccguguggggcuuccacuccgacaacgaggcucagauggccaagcuguauggggauucuaaaccccagaaguuuacuagcuccgcgaacggagugacaacccacuacgucucacaaauuggcgguuucccuaaucagacggaagacgggggacugccacagaguggccggaucguuguggauuauaugguacagaaaagcggcaagaccgggacaauuacuuaccaacgcggaauccucuuaccccagaaaguguggugcgcaucugguagauccaaggucaucaaaggcucacugccucuuauuggggaggccgacuguuugcaugaaaaguauggaggccugaacaagagcaaaccauacuacaccggugagcacgcuaaggccauagggaauugccccaucugggugaaaacaccgcuaaagcucgcaaacggcacuaaauauaggccucccgcuaagcugcuuaaggagcggggauuuuucggcgccauugcgggguuucuggaaggagguugggagggcaugaucgccggguggcauggauacaccagucacggcgcacacgguguugcuguggccgcugauuugaaaucuacacaggaagccauaaauaagauuaccaaaaaccucaauucccugagcgaguuagaagucaagaaccugcagcgccucucgggggcaauggacgagcuucauaaugagauccuggaauuggaugagaaaguggacgaccuacgagccgauacuaucucuucccaaauugaacuggcuguacuccugucaaacgagggcaucauuaauagugaagacgagcaccuucuggcguuggagagaaagcucaagaaaaugcugggaccaagcgcaguugaaauaggcaacggguguuucgagacgaagcauaaaugcaaucagacaugcuuagauaggaucgccgcuggaaccuuuaacgccggugaguucucccugccuacuuuugacucucuaaauauuaccgcagccagccucaacgaugacggccuggauaaccacacaauccuuuuguauuacucaaccgcugccaguucccuggcagugacucucaugaucgcgauuuucgucguguauauggucagccgggacaauauaucuuguucaaucugccuguga

SEQ ID NO: 154493 - RNA, 1758 nt, Artificial Sequence
  derived and/or modified CDS sequence (opt3) from hemagglutinin__InfluenzaB__ABL76969
augaaggccaucauugugcugcucauggucguuaccagcaacgcugacagaauaugcacaggcaucacuuccucuaauucaccccacgugguaaaaacggcaacccagggggaagugaacgucacaggagugauuccucuuacuaccacaccaaccaagagucauuucgccaaucugaaagguacuaggacacggggcaaguuguguccgaaaugcuuaaacuguaccgaucuggacguugcgcuagggcgccccaagugcacgggaaauaucccuagcgcuaagguguccauucuccacgaaguccgaccagugacuucuggcuguuuucccaucaugcaugaucguaccaaaauaagacaacugccuaaccuucugagggguuacgagcacauccgguugucgauucauaauguaaucaacgccgaaaaggcaccagggggacccuauaaaauuggcacaucaggcagcugcccuaauguuacuaacgggaauggauucuuugccaccauggcuugggcagugccaaagaacgacaauaacaaaacagccaccaauagucucacgaucgaggucccguacauauguacugaaggugaggaucagauuacaguguggggcuuccacuccgacaacgaggcucagauggccaagcuguauggggauucuaagccccagaaauuuaccagcuccgcgaacggagugacuacacacuacgucucacaaaucggcgguuucccuaaucagaccgaagacgggggacugccacagaguggccgcauuguuguggauuauaugguacagaagaguggcaaaacggggaccaucacauaccaaagaggaauccucuuaccccagaagguguggugcgcaucugguagguccaaagucauuaagggcucacugccucuuauaggggaggccgacuguuugcaugaaaaauauggaggccugaacaagagcaagccauacuacacuggugagcacgcuaaagccaucgggaauugccccauuugggugaagaccccgcuaaaacucgcaaacggcacaaaguaucggccucccgcuaaacugcuuaaggagcgcggauuuuucggcgccaucgcgggguuucuggaaggagguugggagggcaugauagccggguggcauggauacacuagccacggcgcacacgguguugcuguggccgcugauuugaagucuacccaggaagccauuaauaaaaucacaaagaaccucaauucccugagcgaguuagaagucaaaaaccugcagcgacucucgggggcaauggacgagcuucauaaugagauccuggaauuggaugagaagguggacgaccuaagagccgauaccauuucuucccaaaucgaacuggcuguacuccugucaaacgagggcauuauaaauagugaagacgagcaccuucuggcguuggagaggaaacucaagaagaugcugggaccaagcgcaguugaaaucggcaacggguguuucgagacuaaacauaagugcaaucagacgugcuuagaucggauugccgcuggaacauuugacgccggugaguucucccugccuaccuuugauucucuaaacaucacugcagccagccucaaugacgauggccuggacaaccacaccauccuuuuguauuacucaacagcugccaguucccuggcagugacccucaugauugcgauauucgucguguauauggucagccgugauaacgugucuuguucaaucugccuguga

SEQ ID NO: 154494 - RNA, 1755 nt, Artificial Sequence
  derived and/or modified CDS sequence (opt3) from hemagglutinin__InfluenzaB__ABL76980
augaaggccaucauugugcugcucauggucguuaccagcaacgcugacagaauaugcacaggcaucacuuccucuaauucaccccacgugguaaaaacggcaacccagggggaagugaacgucacaggagugauuccucuuacuaccacaccaaccaagagucauuucgccaaucugaaagguacuaagacaaggggcaaauuguguccgaccugcuuaaacuguacggaucuggacguugcgcuagggcggcccaugugcgugggaaucacuccuagcgcuaaggccuccauucuccacgaaguccgcccagugaccucuggcuguuuucccaucaugcaugaucgaacaaagauacgucaacugccuaaucuucugagagguuacgagaaaaucagguugucgacucagaacguaauuaaugcagaaaaggccccagggggacccuaucggcucggcaccucaggcagcugcccuaacgcuacaaguaaauccggguucuuugcaaccauggccugggcuguuccacgcgacaauaacaagacggccacuaauccgcugacaguggagguccccuacaucuguaccaaagaagaggaucagauuacuguguggggauuccacucugacaacaagacacagaugaagaaucuguauggugauagcgacccucaaaaauuuaccuccucagcgaacggcgugacgacccauuacgucagucagaucgggggauucccagaucagacagaggacggcggucucccccagagcgggagaauaguuguggauuauaugguacaaaagccuggaaaaacuggcaccauuguguaccagaggggcaucuuacugccacagaaggucuggugcgcaucugggcgguccaaagugauuaagggaucacuucccuugaucggugaagccgacugucugcacgagaaauauggcgggcuaaauaagagcaagccguacuacacaggagaacacgcuaaagccaucggcaacugcccuauuuggguuaagacuccccucaaacuggcaaacgguaccaaguaucgcccuccagcuaaacuucugaaggagcgaggguuuuucggcgccauagcgggauuuuuggagggcgggugggaaggaaugaucgccgguuggcauggcuacacaagucacggggcacauggaguggcugucgccgcugaucucaagucuacccaggaggccauuaauaaaaucacuaagaacuuaaauucccugagcgaacuggaggugaaaaaccuccaaagacuuucgggcgcaauggacgaacugcacaaugagauauuggagcuagacgaaaagguagaugaccugagggccgauacgauuucuucccagaucgagcucgcuguucugcuuucaaacgaagguaucauuaauagugaggacgaacaccuguuggcgcucgagcggaaacugaagaagauguuagggcccagcgcaguggauaucggcaacggauguuucgagacaaaacauaagugcaaucagaccugccuggaccguauugccgcuggcacuuuuaacgccggggaguucucccuaccaaccuuugauucucucaauauaacagcagccagccugaacgacgauggacuugacaaucacaccaucuugcuguauuacucaacugcugccaguucccucgcagucacacugaugauugcgaucuucaucguguauaugauuagccgcgauaacgucucuuguucaauaugccuuuga

SEQ ID NO: 154495 - RNA, 1752 nt, Artificial Sequence
  derived and/or modified CDS sequence (opt3) from hemagglutinin__InfluenzaB__ABL76991
augaaggccaucauugugcugcucauggucguuaccagcaacgcugacagaauaugcacaggcaucacuuccucuaauucaccccacgugguaaaaacggcaacccagggggaggugaacgucacaggagugauuccucuuacuaccacaccaaccaagagucauuucgccaaucugaaagguacuaagacaaggggcaaauuguguccgaacugcuuaaauuguaccgaucuggacguugcgcuagggcggcccaugugcaucggaauuacgccuagcgcuaaggccuccauccuccacgaagugcgcccagucacuucuggcuguuuucccauaaugcaugaucgaaccaagauccgucaacugccuaaccuucugagagguuacgagcacauuagguugucgacacauaaugugaucaacgcagaacgggccccagggggacccuaucgccucggcacuucaggcagcugcccuaauguaaccaguagauccggguucuuugcuacaauggcaugggccguuccaagggacaacaaaaccgcuacgaauccgcugacuguggagguccccuacauuuguacaaagggagaagaucagaucaccgugugggguuuccacucugacaacaaaauacagaugaagaaucuguauggcgauagcaacccucagaaauuuacuuccucagccaaugggauuacaacccacuacgugagucaaaucggaggcuucccaaaccagacggaggacggugggcucccccagagcggacggauugucguugauuauauggugcagaagccuggcaagaccggcacaaucguauaccaacgcgggguguuacugccacagaaagucuggugcgcgucuggacgauccaaggugaucaaagguucacuucccuugauuggcgaggcagacugucugcaugaaaaguaugggggacuaaacaaaagcaagccguacuacacuggcgagcacgccaaagcuauagguaauugcccuaucuggguuaagacuccccucaagcuggccaacgggacaaaauauagaccuccagcaaagcugcugaaagaaaagggcuuuuucggagcuauugccggcuuuuuggaagggggaugggaggguaugaucgcgggcuggcauggguacaccagucacggagcccacggcguggcagucgcugccgaucucaaaucuacccaggaggcuauaaauaagauuacaaagaaccuuaauuccuuaagcgagcuggaagugaaaaaccuccagaggcuuucgggugccauggacgagcugcauaaugaaaucuuggagcuagaugagaagguagacgaccugcgggcagauaccaucucuucccaaauugaacucgccguucugcuuucaaacgaggggaucauuaauagugaagacgagcaccuguuggcucucgaacguaaacugaagaaaauguuaggccccagcgcgguggauauaggaaacggcuguuucgagacuaagcauaagugcaaucagacgugccuggaccgcaucgcagccgggacauuuaacgcuggagaguucucccuaccaaccuuugauucucucaauauuacugccgcaagccugaacgacgauggucuugacaaucacaccaucuugcuguauuacucaacagccgcuaguucccucgccgucacccugaugaucgcaauuuucauaguguauauggucagcagagauaacgugucuuguucaaucugccuuuga

SEQ ID NO: 154496 - RNA, 1755 nt, Artificial Sequence
  derived and/or modified CDS sequence (opt3) from hemagglutinin__InfluenzaB__ABL77002
augaaggccaucauugugcugcucauggucguuaccagcaacgcugacagaauaugcacaggcaucacuuccucuaauucaccccacgugguaaaaacggcaacccagggggaagugaacgucacaggagugauuccucuuacuaccacaccaaccaagagucauuucgccaaucugaaagguacuaagacaaggggcaaauuguguccgaccugcuuaaacuguacggaucuggacguugcgcuagggcggcccaugugcgugggagucacuccuagcgcuaaggccuccauccuccacgaagugcgcccaguaaccucuggcuguuuucccauuaugcaugaucgaacaaagauccgucaacugccuaaucuucugagagguuacgagaaaauaagguugucgacucagaacguuaucaaugcagaaaaggccccagggggacccuaucggcucggcaccucaggcagcugcccuaacgcuacaagucgcuccggguucuuugcaaccauggccugggcugugccaagagacaauaacaaaacggccacuaauccgcugacaauugaggucccccacaucuguaccaaggaagaggaucagauuacuaucuggggauuccauucugacgauaaaacacagaugaagaaccuguacggugacagcaauccucaaaaguuuaccuccucagcgaacggcgugacgacccacuaugugagucagauagggggauucccagaucagacagaggacggcggucucccccagagcgggaggauugucguugauuacauggugcaaaaaccuggaaagacuggcaccaucguauaucagcggggcauuuuacugccacagaaaguguggugcgcaucugggcgcuccaaggucaucaaaggaucacuucccuugaucggugaagccgacugucugcacgagaaguacggcgggcuaaauaaaagcaagccguauuacacaggagaacaugcuaaggccauuggcaacugcccuauaugggugaaaacuccccucaagcuggcaaacgguaccaaauaccgaccuccagcuaagcugcugaaagagagaggguuuuucggcgccaucgcgggauuuuuggagggcgggugggaaggaaugauugccgguuggcacggcuauacaagucauggggcacacggaguugcuguggccgcugaucucaagucuacccaggaggccaucaauaagauaacuaaaaaccuuaauuccuuaagcgaacuggaggucaagaaccuccaaaggcuuucgggcgcaauggacgaacugcacaaugagauuuuggagcuagacgaaaaaguggaugaccugcgggccgauacgaucucuucccagaucgagcucgcuguacugcuuucaaacgaagguauuaucaauagugaggacgaacaucuguuggcgcucgagcguaagcugaaaaagauguuagggcccagcgcaguugauauuggcaacggauguuucgagacaaagcacaaaugcaaucagaccugccuggaccgcauagccgcuggcacuuuugaugccggggaguucucccuaccaaccuuugacucucucaacaucacagcagccagccugaaugaugacggacuugauaaccauaccauuuugcuguacuauucaacugcugccaguucccucgcagugacacugaugaucgcgaucuucauugucuacaugauaagcagagacaaugugucuuguucaaucugccuuuga

SEQ ID NO: 154497 - RNA, 1755 nt, Artificial Sequence
  derived and/or modified CDS sequence (opt3) from hemagglutinin__InfluenzaB__ABL77013
augaaggccaucauugugcugcucauggucguuaccagcaacgcugacagaauaugcacaggcaucacuuccucuaauucaccccacgugguaaaaacggcaacccagggggaagugaacgucacaggagugauuccucuuacuaccacaccaaccaagaguuacuucgccaaucugaaagguacuaagacaaggggcaaauuguguccgaccugcuuaaacuguacggaucuggacguugcgcuagggcggcccaugugcgugggaaucacuccuagcgcuaaggccuccauucuccaugaaguccgcccagugaccucuggcuguuuucccaucaugcacgaucgaacaaagauacgucaacugccuaaucuucugagagguuaugagaaaaucagguugucgacucagaacguaauuaaugcagaaaaggccccagggggacccuaccggcucggcaccucaggcagcugcccuaacgcuacaaguaaauccggguucuuugcaaccauggccugggcuguuccacgcgacaauaacaagacggccacuaauccgcugacaguggagguccccuauaucuguaccaaagaagaggaucagauuacuguguggggauuccauucugacaacaagaaucagaugaagaaccuguacggugauagcgacccucaaaaauuuacauccucagcgaauggcgugaccacgcacuaugucagucagaucgggggauucccagaucagaccgaggacggcggucucccccagagcgggagaauaguuguggauuacaugguacaaaagccuggaaaaacaggcacuauuguguaucagaggggcaucuuacugccacagaaggucuggugcgcaucugggcgguccaaagugauuaagggaucacuucccuugaucggugaagccgacugucugcaugagaaauacggcgggcuaaacaagagcaagccguacuauaccggagaacacgcuaaagccaucggcaacugcccuauuuggguuaagacaccccucaaacuggcaaaugguacuaaguaccgcccuccagcuaaacuucugaaggagcgaggguuuuucggcgccauagcgggauuuuuggagggcgggugggaaggaaugaucgccgguuggcacggcuauaccagucauggggcacacggaguggcugucgccgcugaucucaagucuacacaggaggccauuaacaaaaucaccaagaaucugaacuccuuaagcgaacuggaggugaaaaaucuccaaagacuuucgggcgcaauggacgaacugcauaacgagauauuggagcuagacgaaaagguagaugaccugagggccgauacuauuucuucccagaucgagcucgcuguucugcuuucaaaugaagguaucauuaacagugaggacgaacaccuguuggcgcucgagcggaaacugaagaagauguuagggcccagcgcaguggauaucggcaauggauguuucgagacgaaacacaagugcaaccagacaugccuggaccguauugccgcuggcaccuuuaaugccggggaguucucccuaccaacuuuugauucucucaacauaaccgcagccagccugaaugacgauggacuugacaaccauacaaucuugcuguacuauucaaccgcugccaguucccucgcagucacucugaugauugcgaucuucaucguguacaugauuagccgcgauaaugucucuuguucaauaugccuuuga

SEQ ID NO: 154498 - RNA, 1755 nt, Artificial Sequence
  derived and/or modified CDS sequence (opt3) from hemagglutinin__InfluenzaB__ABL77024
augaaggccaucauugugcugcucauggucguuaccagcaacgcugacagaauaugcacaggcaucacuuccucuaauucaccccacgugguaaaaacggcaacccagggggaagugaacgucacaggagccauuccucuuacuaccacaccaaccaagagucauuucgcgaaucugaaagguacuaagacaaggggcaaauuguguccgaccugcuuaaacuguacggaucuggacguggcucuagggcggcccaugugcguuggaaucacuccuagcgccaaggcauccauucuccacgaagugcgcccagucaccucuggcuguuuucccaucaugcaugaucgaacaaagauacgucaacugccuaaucuucugagagguuacgagaaaaucagguugucgacucagaacgugauuaaugccgaaaaggcuccagggggacccuaucggcucggcaccucaggcagcugcccuaacgcaacaaguaaauccggguucuuugccaccauggcuugggccguaccacgcgacaauaacaagacggcgacuaauccgcugacaguugaggugccccacaucuguaccaaagaagaggaucagauuacugucuggggauuccauucugacgauaagacacagaugaagaaccuguacggugacagcaauccucaaaaauuuaccuccucagcaaacggcaucacgacccacuaugugagucagauagggggauucccagaucagacagaggacggcggucucccccagagcgggagaauuguggucgauuacaugguucaaaagccuggaaaaacuggcaccaucguguaucagaggggcauuuuacugccacagaagguauggugcgccucugggcgguccaaagugaucaagggaucacuucccuugaucggugaagcugacugucugcacgagaaauacggcgggcuaaauaagagcaagccguauuacacaggagaacaugccaaagcaauuggcaacugcccuauaugggucaagacuccccucaaacuggcuaacgguaccaaguaccgcccuccagccaaacuucugaaggagcgaggguuuuucggcgcgaucgccggauuuuuggagggcgggugggaaggaaugauugcagguuggcacggcuauacaagucauggggcucacggaguggccguugcugccgaucucaagucuacccaggaggcaaucaauaaaauaacuaagaacuuaaauucccugagcgaacuggaggugaaaaaccuccaaagacuuucgggcgccauggacgaacugcacaaugagauuuuggagcuagacgaaaaggucgaugaccugagggcugauacgaucucuucccagaucgagcucgcggugcugcuuucaaacgaagguauuaucaauagugaggacgaacaucuguuggcacucgagcggaaacugaagaagauguuagggcccagcgccguagauauuggcaacggauguuucgagacaaaacacaagugcaaucagaccugccuggaccguauagcugccggcacuuuuaacgcaggggaguucucccuaccaaccuuugauucucucaauaucacagccgcuagccugaacgacgauggacuugacaaucauaccauuuugcuguacuauucaacugccgcaaguucccucgcgguuacacugaugaucgcuaucuucauuguguacaugauaagccgcgauaacgucucuuguucaaucugccuuuga

SEQ ID NO: 154499 - RNA, 1755 nt, Artificial Sequence
  derived and/or modified CDS sequence (opt3) from hemagglutinin__InfluenzaB__ABL77035
augaaggccaucauugugcugcucauggucguuaccagcaacgcugacagaauaugcacaggcaucacuuccucuaauucaccccacgugguaaaaacggcaacccagggggaagugaacgucacaggagccauuccucuuacuaccacaccaaccaagagucauuucgcgaaucugaaagguacuaagacaaggggcaaauuguguccgaccugcuuaaacuguacggaucuggacguggcucuagggcggcccaugugcguuggaaucacuccuagcgccaaggcauccauucuccacgaagugcgcccagucaccucuggcuguuuucccaucaugcaugaucgaacaaagauacgucaacugccuaaucuucugagagguuacgagaaaaucagguugucgacucagaacgugauuaaugccgaaaaggcuccagggggacccuaucggcucggcaccucaggcagcugcccuaacgcaacaagucgcuccggguucuuugccaccauggcuugggccguaccaagagacaauaacaaaacggcgacuaauccgcugacaguugaggugccccacaucuguaccaaggaagaggaucagauuacugucuggggauuccauucugacgauaaaacacagaugaagaaccuguacggugacagcaauccucaaaaguuuaccuccucagcaaacggcgugacgacccacuaugugagucagaucgggggauucccagaucagacagaggacggcggucucccccagagcgggaggauagucguugauuacauggugcaaaaaccuggaaagacuggcaccauuguauaucagcggggcaucuuacugccacagaaaguguggugcgccucugggcgcuccaaggucauuaaaggaucacuucccuugaucggugaagcugacugucugcacgagaaguacggcgggcuaaauaaaagcaagccguauuacacaggagaacaugccaaggcaaucggcaacugcccuauuugggugaaaacuccccucaagcuggcuaacgguaccaaauaccgaccuccagccaagcugcugaaagagagaggguuuuucggcgcgauagccggauuuuuggagggcgggugggaaggaaugaucgcagguuggcacggcuauacaagucauggggcucacggaguugccguggcugccgaucucaagucuacccaggaggcaauuaauaagaucacuaaaaaccuuaauuccuuaagcgaacuggaggucaagaaccuccaaaggcuuucgggcgccauggacgaacugcacaaugagauauuggagcuagacgaaaaaguggaugaccugcgggcugauacgauuucuucccagaucgagcucgcgguacugcuuucaaacgaagguaucauuaauagugaggacgaacaucuguuggcacucgagcguaagcugaaaaagauguuagggcccagcgccguugauaucggcaacggauguuucgagacaaagcacaaaugcaaucagaccugccuggaccgcauugcugccggcacuuuuaacgcaggggaguucucccuaccaaccuuugauucucucaauauaacagccgcuagccugaacgacgauggacuugacaaucauaccaucuugcuguacuauucaacugccgcaaguucccucgcggugacacugaugauugcuaucuucaucgucuacaugauuagcagagauaacgugucuuguucaauaugccuuuga

SEQ ID NO: 154500 - RNA, 1755 nt, Artificial Sequence
  derived and/or modified CDS sequence (opt3) from hemagglutinin__InfluenzaB__ABL77046
augaaggccaucauugugcugcucauggucguuaccagcaacgcugacagaauaugcacaggcaucacuuccucuaauucaccccacgugguaaaaacggcaacccagggggaagugaacgucacaggagccauuccucuuacuaccacaccaaccaagagucauuucgcgaaucugaaagguacuaagacaaggggcaaauuguguccgaccugcuuaaacuguacggaucuggacguggcucuagggcggcccaugugcguuggaaucacuccuagcgccaaggcauccauucuccacgaagugcgcccagucaccucuggcuguuuucccaucaugcaugaucgaacaaagauacgucaacugccuaaucuucugagagguuacgagaaaaucagguugucgacucagaacgugauuaaugccgaaaaggcuccagggggacccuaucggcucggcaccucaggcagcugcccuaacgcaacaaguaaauccggguucuuugccaccauggcuugggccguaccacgcgacaauaacaagacggcgacuaauccgcugacaguugaggugccccacaucuguaccaaagaagaggaucagauuacugucuggggauuccauucugacgauaagacacagaugaagaaccuguacggugacagcaauccucaaaaauuuaccuccucagcaaacggcaucacgacccacuaugugagucagauagggggauucccagaucagacagaggacggcggucucccccagagcgggagaauuguggucgauuacaugguucaaaagccuggaaaaacuggcaccaucguguaucagaggggcauuuuacugccacagaagguauggugcgccucugggcgguccaaagugaucaagggaucacuucccuugaucggugaagcugacugucugcacgagaaauacggcgggcuaaauaagagcaagccguauuacacaggagaacaugccaaagcaauuggcaacugcccuauaugggucaagacuccccucaaacuggcuaacgguaccaaguaccgcccuccagccaaacuucugaaggagcgaggguuuuucggcgcgaucgccggauuuuuggagggcgggugggaaggaaugauugcagguuggcacggcuauacaagucauggggcucacggaguggccguugcugccgaucucaagucuacccaggaggcaaucaauaaaauaacuaagaacuuaaauucccugagcgaacuggaggugaaaaaccuccaaagacuuucgggcgccauggacgaacugcacaaugagauuuuggagcuagacgaaaaggucgaugaccugagggcugauacgaucucuucccagaucgagcucgcggugcugcuuucaaacgaagguauuaucaauagugaggacgaacaucuguuggcacucgagcggaaacugaagaagauguuagggcccagcgccauugauauaggcaacggauguuucgagacaaaacacaagugcaaucagaccugccuggaccguaucgcugccggcacuuuuaacgcaggggaguucucccuaccaaccuuugauucucucaauauuacagccgcuagccugaacgacgauggacuugacaaucauaccaucuugcuguacuauucaacugccgcaaguucccucgcgguaacacugaugaucgcuauuuucauaguuuacaugaucagccgcgauaacgugucuuguucaauuugccuuuga

SEQ ID NO: 154501 - RNA, 1755 nt, Artificial Sequence
  derived and/or modified CDS sequence (opt3) from hemagglutinin__InfluenzaB__ABL77057
augaaggccaucauugugcugcucauggucguuaccagcaaagcugacagaauaugcacaggcaucacuuccucuaacucaccccacgugguaaagacggcaacccagggggaggugaaugucacaggagccauuccucuuacuaccacaccaaccaaaagucauuucgcgaaccugaaggguacuaaaacaaggggcaaguuguguccgaccugcuuaaauuguacggaucuggacguggcucuagggcggcccaugugcguuggaaucacuccuagcgccaaggcauccauucuccacgaagugaaaccagucaccucuggcuguuuucccaucaugcaugaucgcacaaagauacgacaacugccuaaccuucugcgugguuacgagaaaaucagauugucgacucagaaugugauuaacgccgaaaaggcuccagggggacccuauaggcucggcaccucaggcagcugcccuaaugcaacaaguaaauccggguucuuugccaccauggcuugggccguaccacgggacaacaauaagacggcgacuaacccgcugacaguugaggugccccacaucuguaccaaggaagaggaucagauuacugucuggggauuccauucugacaauaaaccucagaugaagaaccuguacggugauagcaauccacaaaaauuuacauccucagcaaacggcaucaccacgcacuaugugagucagauagggggauuccccgagcagaccgaagacggcggucucccucagagcgggcgcauuguggucgauuacaugguucaaaagccaggaaaaacaggcacuaucguguaucagagaggcauuuuacugccccagaagguauggugcgccucugggagguccaaagugaucaagggaucacuuccguugaucggugaggcugacugucugcacgaaaaguacggcgggcuaaauaaaagcaagccuuauuacaccggagagcaugccaaagcaauuggcaacugccccauaugggucaagacaccacucaaacuggcuaacgguacuaaguaccggccucccgccaagcugcugaaagagcgcggguuuuucggcgcgaucgccggauuuuuggaaggcgggugggagggaaugauugcagguuggcacggcuauaccagucauggggcucacggaguggccguugcugccgaucucaagucuacacaggaagcaaucaauaaaauaaccaagaaccuuaauuccuuaagcgagcuggaagugaaaaaccuccaacgacuuucgggcgccauggacgagcugcacaaugagauuuuggaacuagaugagaaggucgacgaccugagagcugauacuaucucuucccagaucgaacucgcggugcugcuuucaaacgaggguauuaucaauagugaagacgagcaucuguuggcacucgagaggaagcugaaaaagauguuagggccaagcgccguagauauuggcaacggauguuucgaaacgaaacacaagugcaaucagacaugccuggaccggauagcugccggcaccuuuaacgcaggggaguucucccuacccacuuuugauucucucaauaucaccgccgcuagccugaacgacgauggacuugacaaucauacaauuuugcuguacuauucaaccgccgcaaguucccucgcgguuacucugaugaucgcuaucuucauuguguacaugauaagccgugauaacgucucuuguucaaucugccuuuga

SEQ ID NO: 154502 - RNA, 1758 nt, Artificial Sequence
  derived and/or modified CDS sequence (opt3) from hemagglutinin__InfluenzaB__ABL77068
augaaggccaucauugugcugcucauggucguuaccagcaacgcugacagaauaugcacaggcaucacuuccucuaauucaccccacgugguaaaaacggcaacccagggggaggugaacgucacaggagugauuccucuuacuaccacaccaaccaagagucauuucgccaaucugaaagguacuaagacaaggggcaaauuguguccgaagugcuuaaacuguaccgaucuggacguugcgcuagggcggcccaagugcacgggaaauaucccuagcgcuaaaguguccauucuccacgaaguccgcccagugacuucuggcuguuuucccaucaugcaugaucgaaccaagauacgucaacugccuaaccuucugagagguuacgagaggauccgguugucgaaucacaacguaauuaaugccgaaaaagcaccagggggacccuauaagaucggcacaucaggcagcugcccuaacguuacuaaugggaacggauucuuugccaccauggcuugggcagugccgaaaaaugagaacaauaagacagccaccaacagucucacgauugaagucccauacaucuguacugagggugaggaccagauaacaguguggggcuuccauuccgauaacgaaaaucagauggcuaagcuguauggggacucuaaaccccagaaguuuaccagcuccgccaacggagugacuacacacuacgucucacaaauuggcgguuucccuaaucagaccgaggaugggggacugccacagaguggccgcaucguuguggacuauaugguacagaaaagcggcaagacggggaccauuacauaccaaagaggaauccucuuaccccagaaaguguggugcgcgucugguagguccaaggucaucaaaggcucacugccucuuauuggggaagcagauuguuugcacgagaaguauggaggccugaacaagagcaaaccauacuacacuggugagcaugccaaggcuauagggaauugccccaucugggugaaaaccccgcuaaagcucgccaacggcacaaaauaucggccucccgcaaagcugcuuaaggaacgcggauuuuucggcgcuauugccggguuucuggagggagguugggaaggcaugaucgcgggguggcacggauacacaagucauggcgcccacgguguugcaguggcugccgacuugaaaucuacccaggaggcuauaaauaagauuacuaaaaaccucaauucccugagcgaauuagaggucaagaaccugcagcgacucucgggggccauggaugagcuucacaaugaaauccuggaguuggacgaaaaaguggaugaccuaagagcagacaccaucucuucccaaauugagcuggccguacuccugucaaacgaaggcaucauuaauagugaggaugagcaucuucuggcuuuggaaaggaagcucaagaaaaugcugggaccaagcgcgguugagauaggcaacggguguuucgaaacuaagcacaaaugcaaucagacgugcuuagaccggaucgcagccggaacauuuaacgcuggugaguucucccugccuaccuuugauucucuaaacauuacugccgcaagccucaaugacgauggccuggacaaccauaccauccuuuuguauuacucaacagccgcuaguucccuggccgugacccucaugaucgcaauuuucgucguguauauggucagccgugauaaugugucuuguucaauaugccuguga

SEQ ID NO: 154503 - RNA, 1758 nt, Artificial Sequence
  derived and/or modified CDS sequence (opt3) from hemagglutinin__InfluenzaB__ABL77090
augaaggccaucauugugcugcucauggucguuaccagcaacgcugacagaauaugcacaggcaucacuuccucuaauucaccccacgugguaaaaacggcaacccagggggaggugaacgucacaggagugauuccucuuacuaccacacugaccaagagucauuucgccaauuugaaagguacuaagacaaggggcaaauuauguccaaagugccugaacuguaccgaucuagacguugcgcucgggcggccgaagugcacgggaaauauccccagcgcuaaaguguccauucugcacgaaguccgcccugugacuucuggcuguuuuccaaucaugcaugaucgaaccaagauacgucaacuucccaaccuguugagagguuacgagaggauccggcucucgaaucacaacguaauuaaugccgaaaaagcaccugggggaccauauaagaucggcacaucaggcagcugccccaacguuacuaaugggaacggauucuuugccaccauggcuugggcagugccuaaaaaugagaacaauaagacagccaccaacagucugacgauugaagucccauacaucuguacugagggugaggaccagauaacaguguggggcuuccauuccgauaacgaaauucagauggugaagcuguauggggacucuaaaccgcagaaguuuaccagcuccgcuaauggagucacuacacacuacguuucacaaaucggcgguuuccccaaccagauugaggaugggggacucccucagaguggccgcaucgugguagacuauauggugcagaaaagcggcaagaccgggacgaucaccuaccaaagaggaauuuuacugccacagaaagucuggugcgccucugguagguccaagauaaucaaaggcucacuucccuugauuggggaagcggauugucugcacgagaaguauggaggccuaaauaagagcaaaccuuacuacacaggugagcaugcaaaggccaucgggaacugcccaauaugggugaaaacuccccucaagcuggcuaauggcaccaaauaucggccgccugccaaacuucugaaggaacgcggauuuuucggcgcaauugcuggguuuuuggagggagguugggaaggcaugaucgccggguggcacggauacacaagucauggcgcgcacgguguugccguggcagcugaccucaagucuacucaggaggccaucaacaagauuaccaaaaaucugaacuccuuaagcgaacuggaggucaagaaucuccagcgacuuucgggggcuauggaugagcugcacaacgaaaucuuggagcuagacgaaaaaguggaugaccugagagccgacacaauuucuucccaaauagagcucgcaguacugcuuucaaaugaaggcaucauuaacagugaggaugagcaucuguuggcccucgaaaggaagcugaagaaaauguuaggacccagcgcuguugagaucggcaauggguguuucgaaaccaagcacaaaugcaaccagacuugccuggaccggaucgcggcaggaacguuuaaugccggugaguucucccuaccaacauuugauucucucaacauuaccgcugccagccugaacgacgauggccuugacaaucauacuauauugcuguauuacucaaccgcagccaguucccucgcugugacacugaugaucgccauuuucgucguguauauggucagccgugauaacgugucuuguucaaucugccuuuga

SEQ ID NO: 154504 - RNA, 1755 nt, Artificial Sequence
  derived and/or modified CDS sequence (opt3) from hemagglutinin__InfluenzaB__ABL77101
augaaggccaucauugugcugcucauggucguuaccagcaaagcugacagaauaugcacaggcaucacuuccucuaacucaccccacgugguaaagacggcaacccagggggaggugaaugucacaggagccauuccucuuacuaccacaccaaccaaaagucauuucgcgaaccugaaggguacuaaaacaaggggcaaguuguguccgaccugcuuaaauuguacggaucuggacguggcucuagggcggcccaugugcguuggaaucacuccuagcgccaaggcauccauucuccacgaagugaaaccagucaccucuggcuguuuucccaucaugcaugaucgcacaaagauacgacaacugccuaaccuucugcgugguuacgagaaaaucagauugucgacucagaaugugauuaacgccgaaaaggcuccagggggacccuauaggcucggcaccucaggcagcugcccuaaugcaacaaguaaauccggguucuuugccaccauggcuugggccguaccacgggacaacaauaagacggcgacuaacccgcugacaguugaggugccccacaucuguaccaaggaagaggaucagauuacugucuggggauuccauucugacgauaaaacacagaugaagaaucuguacggugacagcaacccucaaaaauuuaccuccucagcaaauggcaucacgacccacuaugugagucagauagggggauucccagagcagacagaagauggcggucucccccagagcgggcgcauuguggucgacuacaugguucaaaagccuggaaaaacuggcaccaucguguaucagagaggcauuuuacugccacagaagguauggugcgccucugggagguccaaagugaucaagggaucacuucccuugaucggugaggcugauugucugcacgaaaaguacggcgggcuaaacaaaagcaagccguauuacacaggagagcaugccaaagcaauuggcaauugcccuauaugggucaagacuccccucaaacuggcuaacgguaccaaguaccggccuccagccaaacuucugaaggagcgcggguuuuucggcgcgaucgccggauuuuuggaaggcgggugggagggaaugauugcagguuggcacggcuauacaagucauggggcucacggaguggccguugcugccgaccucaagucuacccaggaagcaaucaacaaaauaacuaagaaucugaacuccuuaagcgagcuggaagugaaaaaucuccaacgacuuucgggcgccauggaugagcugcacaacgagauuuuggaacuagacgagaaggucgacgaucugagagcugacacgaucucuucccagaucgaacucgcggugcugcuuucaaaugaggguauuaucaacagugaagaugagcaucuguuggcacucgagaggaagcugaaaaagauguuagggcccagcgccguagacauuggcaauggauguuucgaaacaaaacacaagugcaaccagaccugccuggaucggauagcugccggcacuuuuaaugcaggggaguucucccuaccaaccuuugacucucucaacaucacagccgcuagccugaaugaugacggacuugauaaccauaccauuuugcuguacuauucaacugccgcaaguucccucgcgguuacacugaugaucgcuaucuucauuguguacaugauaagccgugacaaugucucuuguucaaucugccuuuga

SEQ ID NO: 154505 - RNA, 1758 nt, Artificial Sequence
  derived and/or modified CDS sequence (opt3) from hemagglutinin__InfluenzaB__ABL77134
augaaggccaucauugugcugcucauggucguuaccagcaacgcugacagaauaugcacaggcaucacuuccucuaauucaccccacgugguaaaaacggcaacccagggggaggugaacgucacaggagugauuccucuuacuaccacaccaaccaagagucauuucgccaaucugaaagguacuaagacaaggggcaaauuguguccgaagugcuuaaacuguaccgaucuggacguugcgcuagggcggcccaagugcacgggaaauaucccuagcgcuaaaguguccauucuccacgaaguccgcccagugacuucuggcuguuuucccaucaugcaugaucgaaccaagauacgucaacugccuaaccuucugagagguuacgagaggauccgguugucgaaucacaacguaauuaaugccgaaaaagcaccagggggacccuauaagaucggcacaucaggcagcugcccuaacguuacuaaugggaacggauucuuugccaccauggcuugggcagugccgaaaaaugagaacaauaagacagccaccaacagucucacgauugaagucccauacaucuguacugagggugaggaccagauaacaguguggggcuuccauuccgauaacgaagcucagauggccaagcuguauggggacucuaaaccccagaaguuuaccagcuccgcgaauggagugacuacacacuacgucucacaaauuggcgguuucccuaaccagaccgaggaugggggacugccacagaguggccgcaucguuguggacuauaugguacagaaaagcggcaagacggggaccauuacauaccaaagaggaauccucuuaccccagaaaguguggugcgcaucugguagguccaaggucaucaaaggcucacugccucuuauuggggaagccgauuguuugcacgagaaguauggaggccugaauaagagcaaaccauacuacacuggugagcaugcuaaggccauagggaacugccccaucugggugaaaaccccgcuaaagcucgcaaauggcacaaaauaucggccucccgcuaagcugcuuaaggaacgcggauuuuucggcgccauugcgggguuucuggagggagguugggaaggcaugaucgccggguggcacggauacacaagucauggcgcacacgguguugcuguggccgcugacuugaaaucuacccaggaggccauaaacaagauuacuaaaaaucucaacucccugagcgaauuagaggucaagaaucugcagcgacucucgggggcaauggaugagcuucacaacgaaauccuggaguuggacgaaaaaguggaugaccuaagagccgacaccaucucuucccaaauugagcuggcuguacuccugucaaaugaaggcaucauuaacagugaggaugagcaucuucuggcguuggaaaggaagcucaagaaaaugcugggaccaagcgcaguugagauaggcaauggguguuucgaaacuaagcacaaaugcaaccagacgugcuuagaccggaucgccgcuggaacauuuaaugccggugaguucucccugccuaccuuugauucucuaaacauuacugcagccagccucaacgacgauggccuggacaaucauaccauccuuuuguauuacgcuacagccgcaucaagucuggcggugacccucaugaucgcuauuuucgucguguauauggucucccgugauaacgugagcuguucuauaugccuguga

SEQ ID NO: 154506 - RNA, 1758 nt, Artificial Sequence
  derived and/or modified CDS sequence (opt3) from hemagglutinin__InfluenzaB__ABL77145
augaaggccaucauugugcugcucauggucguuaccagcaacgcugacagaauaugcacaggcaucacuuccucuaauucaccccacgugguaaaaacggcaacccagggggaagugaacgucacaggagugauuccucuuacuaccacaccaaccaagagucauuucgccaaucugaaagguacuaagacaaggggcaaauuguguccgaagugcuuaaacuguaccgaucuggacguugcgcuagggcggcccaagugcacgggaaauaucccuagcgcuaaaguguccauucuccacgaaguccgcccagugacuucuggcuguuuucccaucaugcaugaucgaaccaagauacgucaacugccuaaccuucugagagguuacgagaggauccgguugucgaaucacaacguaauuaaugccgaagaggcaccagggggacccuauaaaaucggcacaucaggcagcugcccuaacguuacuaaugggaacggauucuuugccaccauggcuugggcagugccaaagaaugaaaacaauaaaacagccaccaacagucucacgauugaggucccguacaucuguacugagggugaagaccagauaacaguguggggcuuccauuccgauucugagacccagauggcuaagcuguauggggacagcaagccccagaaauuuacuuccucagccaacggagugacaacccacuacgucagucaaauuggcgguuucccuaaucagacggaagaugggggacugccacagagcggccgcaucguuguggacuauaugguacagaagucuggcaaaaccgggacaauuacuuaccaaagaggaauccucuuaccccagaagguguggugcgcguccgguaggucaaaagucaucaagggcagccugccucuuauuggggaggcagauuguuugcacgagaaauauggaggccugaacaagaguaagccauacuacaccggugaacaugccaaagcuauagggaauugccccaucugggugaagacaccgcuaaaacucgccaacggcacuaaguaucggccucccgcaaaacugcuuaaggagcgcggauuuuucggcgcuauugccggguuucuggaaggagguugggagggcaugaucgcgggguggcacggauacaccucucauggcgcccacgguguugcaguggcugccgacuugaaguccacacaggaagcuauaaauaaaauuaccaagaaccucaauagccugucggaguuagaggucaaaaaccugcagcgacucucuggggccauggaugaacuucacaaugagauccuggaauuggacgagaagguggaugaccuaagagcagacacuaucuccucacaaauugaacuggccguacuccugaguaacgagggcaucauuaauagcgaggaugaacaucuucuggcuuuggagaggaaacucaagaagaugcugggaccauccgcgguugaaauaggcaacggguguuucgagacgaaacacaagugcaaucagacaugcuuagaccggaucgcagccggaaccuuuaacgcuggugaguucucucugccuacuuuugauagccuaaauauuaccgccgcaucacucaacgacgauggccuggacaaccauacaauccuuuuguauuacaguaccgccgcuuccagccuggccgugacucucaugaucgcaauuuucgucguguauauggucucucgugauaaugugucauguaguauaugccuguga

SEQ ID NO: 154507 - RNA, 1755 nt, Artificial Sequence
  derived and/or modified CDS sequence (opt3) from hemagglutinin__InfluenzaB__ABL77156
augaaggccaucauugugcugcucauggucguuaccagcaacgcugacagaauaugcacaggcaucacuuccucuaauucaccccacgugguaaaaacggcaacccagggggaggugaacgucacaggagugauuccucuuacuaccacaccaaccaagaguuacuucgccaaucugaaagguacuaggacacggggcaaguuguguccggauugcuuaaacuguaccgaccuggauguugcgcuagggcgccccaugugcgugggaacgacuccuagcgcuaaagccuccauccuccaugaaguccgaccagugaccucuggcuguuuucccauuaugcacgaccguacaaagaucagacaacugccuaaucuucugagggguuaugagaacauacgguugucgacucagaauguaaucgaugcagaaaaggccccagggggacccuaccgccucggcaccucaggcagcugcccuaacgcuacaaguaaauccggguucuuugcaaccauggccugggcuguuccaaaggacaauaacaaaaaugccacgaacccgcugacuguggagguccccuauguguguacagaaggagaggaucagauuaccgugugggguuuccauucugacgauaagacucagaugaaaaaucuguacggcgacagcaacccucaaaaguuuacauccucagcgaauggggucaccacgcacuauguuagucagaucggaggcuucccagaucagaccgaggacggugggcucccccagagcggaagaauugugguagauuacauggugcaaaagccuggcaaaacaggcacuaucgucuaucagaggggaguguuacugccacagaagguuuggugcgcaucugggcgguccaaagugauaaaggguucacuucccuugauuggcgaagccgacugucugcaugagaaauacgggggacuaaacaagagcaaaccguacuauaccggcgaacacgcuaaggccaucgguaacugcccuauuugggucaagacaccccucaaacuggcaaaugggacuaaguaccgcccuccagcuaaacuucugaaggagcgaggcuuuuucggagccaucgcgggcuuuuuggaagggggaugggaagguaugaucgccggcuggcacggguauaccagucauggagcacacggcguggcuguagccgcugaccucaaaucuacacaggaggccauuaacaagauaaccaagaaucugaacuccuuaagcgaacuggagguuaaaaaucuccaaagacuuucgggugcaauggaugaacugcauaacgagaucuuggagcuagacgaaaagguggaugaccugagggccgauacuauuucuucccagaucgagcucgcuguccugcuuucaaaugaagggauaauuaacagugaggacgaacaccuguuggcgcucgagcggaaacugaagaaaauguuaggccccagcgcaguggauaucggaaauggcuguuucgagacgaagcacaagugcaaccagacaugccuggaccguaucgccgcugggaccuuuaaugccggagaguucucccuaccaacuuuugauucucucaacauuaccgcagccagccugaaugacgauggucuugacaaccauacaaucuugcuguacuauucaaccgcugccaguucccucgcagucacucugaugcuugcgauuuucauaguguacaugguuagccgcgacaaugugucuuguucaaucugccuguga

SEQ ID NO: 154508 - RNA, 1758 nt, Artificial Sequence
  derived and/or modified CDS sequence (opt3) from hemagglutinin__InfluenzaB__ABL77178
augaaggccaucauugugcugcucauggucguuaccagcaacgcugacagaauaugcacaggcaucacuuccucuaauucaccccacgugguaaaaacggcaacccagggggaggugaacgucacaggagugauuccucuuacuaccacaccaaccaagagucauuucgccaaucugaaagguacuaagacaaggggcaaauuguguccgaagugcuuaaacuguaccgaucuggacguugcgcuagggcggcccaagugcacgggaaauaucccuagcgcuaaaguguccauucuccacgaaguccgcccagugacuucuggcuguuuucccaucaugcaugaucgaaccaagauacgucaacugccuaaccuucugagagguuacgagaggauccgguugucgaaucacaacguaauuaaugccgaaaaagcaccagggggacccuauaagaucggcacaucaggcagcugcccuaacguuacuaaugggaacggauucuuugccaccauggcuugggcagugccgaaaaaugagaacaauaagacagccaccaacagucucacgauugaagucccauacaucuguacugagggugaggaccagauaacaguguggggcuuccauuccgauucugaaacccagauggcuaagcuguauggggacagcaaaccccagaaguuuacuuccucagccaacggagugacaacccacuacgucagucaaauuggcgguuucccuaaucagacggaggaugggggacugccacagagcggccgcaucguuguggacuauaugguacagaaaucuggcaagaccgggacaauuacuuaccaaagaggaauccucuuaccccagaaaguguggugcgcguccgguaggucaaaggucaucaaaggcagccugccucuuauuggggaagcagauuguuugcacgagaaguauggaggccugaacaagaguaaaccauacuacaccggugagcaugccaaggcuauagggaauugccccaucugggugaaaacaccgcuaaagcucgccaacggcacuaaauaucggccucccgcaaagcugcuuaaggaacgcggauuuuucggcgcuauugccggguuucuggagggagguugggaaggcaugaucgcgggguggcacggauacaccucucauggcgcccacgguguugcaguggcugccgacuugaaauccacacaggaggcuauaaauaagauuaccaaaaaccucaauagccugucggaauuagaggucaagaaccugcagcgacucucuggggccauggaugagcuucacaaugaaauccuggaguuggacgaaaaaguggaugaccuaagagcagacacuaucuccucacaaauugagcuggccguacuccugaguaacgaaggcaucauuaauagcgaggaugagcaucuucuggcuuuggaaaggaagcucaagaaaaugcugggaccauccgcgguugagauaggcaacggguguuucgaaacgaagcacaaaugcaaucagacaugcuuagaccggaucgcagccggaaccuuuaacgcuggugaguucucucugccuacuuuugauagccuaaauauuaccgccgcaucacucaacgacgauggccuggacaaccauacaauccuuuuguauuacaguaccgccgcuuccagccuggccgugacucucaugaucgcaauuuucgucguguauauggucucucgugauaaugugucauguaguauaugccuguga

SEQ ID NO: 154509 - RNA, 1755 nt, Artificial Sequence
  derived and/or modified CDS sequence (opt3) from hemagglutinin__InfluenzaB__ABL77189
augaaggccaucauugugcugcucauggucguuaccagcaacgcugacagaauaugcacaggcaucacuuccucuaauucaccccacgugguaaaaacggcaacccagggggaggugaacgucacaggagugauuccucuuacuaccacaccaaccaagaguuacuucgccaaucugaaagguacuaggacacggggcaaguuguguccggauugcuuaaacuguaccgaccuggauguugcgcuagggauccccaugugcgugggaacgacuccuagcgcuaaagccuccauucuccaugaaguccgcccagugaccucuggcuguuuucccaucaugcacgaccgaacaaagauacgucaacugccuaaucuucugagagguuaugagaacaucagguugucgacucagaauguaauugaugcagaaaaggccccagggggacccuaccggcucggcaccucaggcagcugcccuaacgcuacaaguaaauccggguucuuugcaaccauggccugggcuguuccaaaggacaauaacaaaaaugccacgaacccgcugacuguggagguccccuauguguguacagaaggagaggaucagaucaccgugugggguuuccauucugacaauaagauucagaugaaaaaccuguacggcgauagcaauccucaaaaguuuacuuccucagcgaacggggucacaacccacuauguuagucagaucggaggcuucccagaccagacggaggauggugggcucccccagagcggacgcauagugguagacuacauggugcaaaagccuggcaaaaccggcacaauugucuaucagagagggguguuacugccacagaagguuuggugcgcaucuggaagguccaaagugaucaaggguucacuucccuugauuggcgaagccgauugucugcaugagaaauacgggggacuaaacaagagcaaaccguacuauacuggcgaacacgcuaaggccaucgguaauugcccuaucugggucaagaccccacucaaacuggcaaacgggacaaaguaccggcccccugcuaaacuucugaaggagcgcggcuuuuucggagccauugcgggcuuuuuggaagggggaugggaagguaugauagccggcuggcacggguauacuucccauggagcacacggcguggcuguagccgcugaccucaaaucuacccaggaggccaucaauaagauuacaaagaaccugaauaguuuaagcgaacuggagguuaaaaaccuccaacgacuuucgggugcaauggacgaacugcauaaugagaucuuggagcuagaugaaaagguggacgaucugagagccgacaccauaucuucccagauugagcucgcuguccugcuuucaaacgaagggaucaucaauagugaggaugaacaccuguuggcgcucgagaggaaacugaagaaaauguuaggccccagcgcaguggacauuggaaacggcuguuucgagacuaagcacaagugcaaucagacgugccuggaucggaucgccgcugggacauuuaacgccggagaguucucccuaccaaccuuugacucucucaauauuacugcagccagccugaacgaugacggucuugauaaucauaccauauugcuguacuauucaacagcugccaguucccucgcagucacccugaugcuugcgaucuucauuguguacaugguuagccgugacaacgugucuuguucaaucugccuguga

SEQ ID NO: 154510 - RNA, 1758 nt, Artificial Sequence
  derived and/or modified CDS sequence (opt3) from hemagglutinin__InfluenzaB__ABL77200
augaaggccaucauugugcugcucauggucguuaccagcaacgcugacagaauaugcacaggcaucacuuccucuaauucaccccacgugguaaaaacggcaacccagggggaggugaacgucacaggagugauuccucuuacuaccacaccaaccaagagucauuucgccaaucugaaagguacuaagacaaggggcaaauuguguccgaagugcuuaaacuguaccgaucuggacguugcgcuagggcggcccaagugcaugggaaauaucccuagcgcuaaaguguccauucuccacgaaguccgcccagugacgucuggcuguuuucccaucaugcaugaucgaacuaagauacgucaacugccuaaccuucugagagguuacgagcacaucagguugucgacccauaauguaauuaacgccgaaaaagcaccagggggacccuauaagaucggcacaucaggcagcugcccuaauguuacuaacgggaauggauucuuugccaccauggcuugggcagugccgaaaaacgacaauaacaagacagccaccaauagucucacgauugaggucccauacaucuguacugaaggugaggaucagauaacaguguggggcuuccacuccgacaacgagacccagauggcuaagcuguauggggauucuaaaccccagaaguuuacuagcuccgccaacggagugacaacccacuacgucucacaaauuggcgguuucccuaaucagacggaagacgggggacugccacagaguggccggaucguuguggauuauaugguacagaaaagcggcaaggcggggaccauuacauaccaacgcggaauccucuuaccccagaaaguguggugcgcaucugguagauccaaggucaucaaaggcucacugccucuuauuggggaggccgacuguuugcaugaaaaguauggaggccugaacaagagcaaaccauacuacacuggugagcacgcuaaggccauagggaauugccccaucugggugaaaaccccgcuaaagcucgcaaacggcacaaaauauaggccucccgcuaagcugcuuaaggagcggggauuuuucggcgccauugcgggguuucuggaaggagguugggagggcaugaucgccggguggcauggauacacaagucacggcgcacacgguguugcuguggccgcugauuugaaaucuacccaggaagccauaaauaagauuacuaaaaaccucaauucccugagcgaguuagaagucaagaaccugcagcgccucucgggggcaauggacgagcuucauaaugagauccuggaauuggauggcaaaguggacgaccuacgagccgauaccaucucuucccaaauugagcuggcuguacuccugucaaacgaaggaaucauuaauagugaggacgaacaccuucuggcguuggagagaaagcucaagaaaaugcugggcccaagcgcaguugagauagggaacggauguuucgaaacuaagcauaaaugcaaucagacgugcuuagauaggaucgccgcugguacauuugacgccggcgaguucucccugccuaccuuugauucucuaaacauuacugcagccagccucaaugacgaugggcuggacaaccacaccauccuuuuguauuacucaacagcugccaguucccuggcagugacccucaugaucgcgauuuucgucguguauauggucagccgggauaacgugucuuguucaauaugccuguga

SEQ ID NO: 154511 - RNA, 1755 nt, Artificial Sequence
  derived and/or modified CDS sequence (opt3) from hemagglutinin__InfluenzaB__ABL77222
augaaggccaucauugugcugcucauggucguuaccagcaacgcugacagaauaugcacaggcaucacuuccucuaauucaccccacgugguaaaaacggcaacccagggggaggugaacgucacaggagugauuccucuuacuaccacaccaaccaagaguuacuucgccaaucugaaagguacuaggacacggggcaaguuguguccggauugcuuaaacuguaccgaccuggauguugcgcuagggcgccccaugugcgugggaacgacuccuagcgcuaaagccuccauccuccaugaaguccgaccagugaccucuggcuguuuucccauuaugcacgaccguacaaagaucagacaacuggcaaaucuucugagggguuaugagaacauacgguugucgacucagaauguaaucgaugccgaaaaggcuccugggggaccauaccgccucggcaccucaggcagcugccccaacgcaacaaguaaauccggguucuuugccaccauggcuugggccguuccuaaggacaauaacaaaaaugcgacgaacccacugacuguggaggucccguauauuuguacagaaggagaggaucagaucaccgugugggguuuccauucugacagcaagacucagaugaaaaaucuguacggcgauuccaacccccaaaaguuuacaucaagugcaaauggggugaccacgcacuaugucagccagauuggaggcuucccugaccagaccgaggauggugggcucccacagucuggaagaaucguuguggacuacaugaugcaaaagcccggcaaaacaggcacuauaguauaucagcgcgggguguuacugccucagaaggucuggugcgccuccggacggucaaaagugauuaaggguagccuuccauugaucggcgaagcugauugucugcaugagaaauacgggggacuaaacaagaguaaacccuacuauaccggcgaacacgccaaggcaauugguaacugcccgaucuggguuaagacaccucucaaacuggcuaaugggacuaaguacaggcccccagccaaacuucugaaggagcgaggcuuuuucggagcgaucgccggcuuuuuggaagggggaugggaagguaugauugcaggcuggcacggguauaccucucauggagcucacggcguggccgucgcugccgaccucaaauccacacaggaggcaauaaacaagaucaccaagaaucugaacagcuuaucggaacuggaggugaaaaaucuccaaagacuuucuggugccauggacgaacugcauaacgagauuuuggagcuagaugaaaagguagacgaucugagggcugacacuaucuccucacagauagagcucgcgguucugcuuaguaaugaagggauuaucaacagcgaggaugaacaccuguuggcacucgagcggaaacugaagaaaauguuaggcccuuccgccguggacaucggaaauggcuguuucgagacgaagcacaagugcaaccagacaugccuggaucguauugcugccgggaccuuuaaugcaggagaguucucucuacccacuuuugacagccucaacaucaccgccgcuucacugaaugaugacggucuugauaaccauacaauuuugcuguacuauaguaccgccgcauccagccucgcggucacucugaugcuugcuauauucaucguguacauggucucucgcgacaaugugucauguaguauuugccuguga

SEQ ID NO: 154512 - RNA, 1758 nt, Artificial Sequence
  derived and/or modified CDS sequence (opt3) from hemagglutinin__InfluenzaB__ABL77233
augaaggccaucauugugcugcucauggucguuaccagcaacgcugacagaauaugcacaggcaucacuuccucuaauucaccccacgugguaaaaacggcaacccagggggaggugaacgucacaggagugauuccucuuacuaccacaccaaccaagagucauuucgccaaucugaaagguacuaagacaaggggcaaauuguguccgaagugcuuaaacuguaccgaucuggacguugcgcuagggcggcccaagugcacgggaaauaucccuagcgcugaaguguccauucuccacgagguccgcccagugacuucuggcuguuuucccaucaugcaugaucgaaccaaaauacgucaacugccuaaccuucugagagguuacgaacacaucagguugucgacacauaauguaauuaacgccgagaaggcaccagggggacccuauaaaaucggcacuucaggcagcugcccuaauguuaccaacgggaauggauucuuugccacaauggcuugggcagugccaaagaacgacaauaacaaaaccgccacgaauagucucacuauugaagucccguacaucuguacagagggugaggaucagauaaccauuuggggcuuccacuccgacaacgaagcucagauggccaagcuguauggggauucuaagccccagaaauuuacuagcuccgcgaacggagugacaacccacuacgugucacaaaucggcgguuucccuaaucagacggaggacgggggacugccacagaguggccggauugucguugauuauauggugcaaaagagccgcaaaaccggcacaaucacuuaccagagagggauccucuuaccccagaagguauggugcgcaucuggaagguccaaagugauuaaggguucacugccucuuauaggcgaagccgacuguuugcaugagaaauaugggggacugaacaagagcaagccauacuacaccggcgagcacgcuaaagccaucgguaauugccccauuugggucaagacaccgcuaaaacucgcaaacgggacuaaguaucggccucccgcuaaacugcuuaaggaacgcggcuuuuucggagccaucgcgggcuuucuggaagggggaugggaggguaugauagccggcuggcauggguacaccagucacggagcacacggcguggcuguugccgcugauuugaagucuacacaggaggccauuaauaaaaucaccaagaaccucaauucccugagcgaauuagaggugaaaaaccugcagcgacucucgggugcaauggacgagcuucauaaugaaauccuggaguuggaugaaaaggucgacgaccuaagagccgauacuauuucuucccaaaucgagcuggcugugcuccugucaaacgaagggauuauaaauagugaggacgagcaccuucuggcguuggaaaggaaacucaagaagaugcugggcccaagcgcaguagagaucggaaacggcuguuucgaaacgaaacauaagugcaaucagacaugcuuagaucggauugccgcugggaccuuugacgccggagaguucucccugccuacuuuugauucucuaaacaucaccgcagccagccucaaugacgauggucuggacaaccacacaauccuuuuguauuacucaaccgcugccaguucccuggcaguuacucucaugauugcgauauucguggucuauauggugagccgugauaacgucucuuguucaaucugccuguga

SEQ ID NO: 154513 - RNA, 1758 nt, Artificial Sequence
  derived and/or modified CDS sequence (opt3) from hemagglutinin__InfluenzaB__ABL77244
augaaggccaucauugugcugcucauggucguuaccagcaacgcugacagaauaugcacaggcaucacuuccucuaauucaccccacgugguaaaaacggcaacccagggggaggugaacgucacaggagugauuccucuuacuaccacaccaaccaagagucauuucgccaaucugaaagguacuaagacaaggggcaaauuguguccgaagugcuuaaacuguaccgaucuggacguugcgcuagggcggcccaagugcacgggaacuaucccuagcgcuaaagccuccauucuccacgaagugaagccagucaccucuggcuguuuucccaucaugcaugaucgcacaaaaauacgacaacugccuaaucuucugcgugguuacgagcacaucagauugucgacucauaacgugauuaaugcagaaaccgccccagggggacccuauaagguaggcacaucaggcagcugcccuaacguuaccaaugggaacggauucuuugcuacgauggcaugggccgugccgaaaaaugacaacaauaagacugcuacaaacccacucaccgucgaggugcccuacaucuguacugaaggugaggaucagauuacaguguggggcuuccacagugacaaugaggcccagauggucaagcuguauggggauuccaaaccucagaaguuuaccucuagcgcgaacggaguuacgacccacuacgugucccaaaucggcgguuucccaaaccaggcagaagacgggggacugccccagucaggcaggauaguaguggauuauaugguccagaaaaguggcaagacagggacuauuaccuaccaacggggaauccucuuaccucagaaaguguggugcgccagcggucgcucuaagguuauuaaaggcucccugccacuuaucggggaggcugacuguuugcaugaaaaguauggaggccugaauaagucaaaacccuacuacacaggugagcacgccaaggcaaucgggaacugcccgauuugggugaaaacuccucuaaagcucgcuaauggcaccaaauauagacccccagccaagcugcuuaaggagaaaggauuuuucggcgcgauagccggguuucuggaaggagguugggagggcaugaucgcaggguggcauggauacacaagccacggcgcucacggugucgccguggcugccgauuugaagaguacccaggaagcaauuaacaaaaucacuaagaaucucaacucucuguccgaguuagaaguuaaaaaucugcagaggcucagcggggccauggacgagcuucauaacaagauacuggaguuggaugaaaagguagacgaccuacgggcugauacgauuucgucucaaaucgagcuggcggugcuccuguccaaugaaggcaucauuaacucagaggacgaacaccuucuggcauuggagcgcaaacucaagaaaaugcugggaccuagugccgucgagaucggcaauggguguuucgaaacaaagcauaaaugcaaccagaccugcuuagaucgaauugcugccggaacuuuuaaugccggugaguucagccugcccaccuuugacucccuaaacauaacagcagcuucucucaaugaugacggccuggauaaccacaccauccuuuuguauuacagcacugccgcaucaagucuggcggugacacucaugauugcuaucuucaucgucuauaugguguccagagacaacguuagcuguucuauuugccuguga

SEQ ID NO: 154514 - RNA, 1752 nt, Artificial Sequence
  derived and/or modified CDS sequence (opt3) from hemagglutinin__InfluenzaB__ABL77255
augaaggccaucauugugcugcucauggucguuaccagcaacgcugacagaauaugcacaggcaucacuuccucuaauucaccccacgugguaaaaacggcaacccagggggaggugaacgucacaggagugauuccucuuacuaccacaccaaccaagagucauuucgccaaucugaaagguacuaagacaaggggcaaauuguguccgaacugcuuaaauuguaccgaucuggacguugcgcuagggcggcccaugugcaugggaacgaucccuagcgcuaaggccuccauucuccacgaagugcgcccagucacuucuggcuguuuucccaucaugcaugaucgaaccaagauacgucaacugccuaaccuucugagagguuacgagaauaucagguugucgacacacaacgugauuaaugcagaacgggccccagggggacccuaucgccucggcacuucaggcagcugcccuaacguaaccaguagaaauggguucuuugcuacaauggcaugggccguuccaagggacaacaaaaccgcuacgaauccgcugacuguggagguccccuacaucuguacaaagggagaagaucagauuaccgugugggguuuccauuccgacgauaaaacucagaugaagaaccuguauggcgacucuaauccucagaaauuuacaagcuccgccaacggggugaccacgcacuacgucucacaaaucggagauuucccaaaccagaccgaggacggcggucucccccagagugggcggauaguuguggauuauaugguacagaagccuggaaagacaggcacuauuguguaccaacgcggcgucuuacugccacagaaaguguggugcgcgagcgggcgaucuaagguuaucaaaggaucccuucccuugauuggugaggcagacugucugcacgaaaaguauggcgggcuaaauaaaucaaagccguacuacaccggagagcaugccaaagcuaucggcaacugcccuaucugggugaagacaccccucaagcuggccaaugguacuaaauauagaccuccagcaaaacuucugaaggaaaggggguuuuucggcgcuauugccggauuuuuggagggcgggugggagggaaugauagcggguuggcacggcuacaccagccauggggcccacggagucgcaguggcugccgaucucaagaguacacaggaagcuaucaacaaaauuaccaagaaucugaacucuuuauccgagcuggaaguaaagaaucuccagcggcuuagcggcgccauggacgagcugcacaacgaaaucuuggagcuagacgagaaaguugaugaccugcgugcagauacuauaucgucucaaauugaacucgccgugcugcuuuccaaugaggguaucaucaacucagaagacgagcaucuguuggcucucgaacgcaagcugaaaaagauguuagggcccagugcggucgauauuggcaauggauguuucgagacgaaacacaagugcaaccagacaugccuggacagaaucgcagccggcaccuuuaaugcuggggaguucagccuaccaacuuuugauucccucaacauuaccgccgcaucucugaaugacgauggacuugacaaccauacaauauugcuguauuacagcaccgccgcuucaagucucgccgugacucugaugaucgcaauuuucaucgucuauaugguguccagggauaacguuagcuguucuaucugccuuuga

SEQ ID NO: 154515 - RNA, 1752 nt, Artificial Sequence
  derived and/or modified CDS sequence (opt3) from hemagglutinin__InfluenzaB__ABL77266
augaaggccaucauugugcugcucauggucguuaccagcaacgcugacagaauaugcacaggcaucacuuccucuaauucaccccacgugguaaaaacggcaacccagggggaggugaacgucacaggagugauuccucuuacuaccacaccaaccaagagucauuucgccaaucugaaagguacuaagacaaggggcaaauuguguccgaacugcuuaaauuguaccgaucuggacguugcgcuagggcggcccaugugcgugggaacgacuccuagcgcuaaggccuccauccuccacgaaguccgcccagugaccucuggcuguuuucccauuaugcaugaucgaacaaagauccgucaacugccuaaccuucugagagguuacgagaauauaagguugucgacucagaacguaaucaaugcagaacgggccccagggggacccuaucgccucggcaccucaggcagcugcccuaacguuacaaguagagacggguucuuugcuaccauggcaugggccgugccaagggauaauaaaacggcuacuaacccgcugacagucgaggugcccuacauuuguaccaagggagaagaccagaucacugugugggguuuccacuccgauucuaaaacacagaugaagaaucuguauggcgacagcaacccucaaaaauuuaccuccucagccaauggggucacgacccauuacguuagucagauuggaggcuucccaaaccagacagaggauggugggcucccccagagcggacggaucgugguagacuauauggugcaaaagccuggcaagacuggcaccauagucuaccagcgcgggguguuacugccacagaaaguuuggugcgcgucuggacgauccaaggugauuaaagguucacuucccuugaucggcgaggcagauugucugcacgaaaaguaugggggacuaaacaaaagcaagccguacuacacaggcgagcacgccaaagcuauugguaauugcccuaucugggucaagacuccccucaagcuggccaacgggaccaaauauagaccuccagcaaagcugcugaaagaaaggggcuuuuucggagcuaucgccggcuuuuuggaagggggaugggaggguaugauugcgggcuggcauggguacacaagucacggagcccauggcguggcaguagcugccgaccucaagucuacccaggaggcuauaaauaaaaucacuaagaaccuuaauuccuuaagcgagcuggaaguuaagaaccuccaacggcuuucgggugccauggaugagcugcacaaugaaauuuuggagcuagacgagaaaguggacgaucugcgugcagacacgaucucuucccagauagaacucgccguccugcuuucaaacgaggggauuaucaauagugaagaugagcaccuguuggcucucgaacgcaagcugaaaaagauguuaggccccagcgcgguggacaucggaaacggcuguuucgagacaaaacauaagugcaaucagaccugccuggauagaauugcagccgggacuuuuaacgcuggagaguucucccuaccaaccuuugacucucucaauaucacagccgcaagccugaacgaugacggucuugauaaucacaccauuuugcuguauuacucaacugccgcuaguucccucgccgucacacugaugauagcaaucuucauuguguauaugguuagcagggacaacgugucuuguucaaucugccuuuga

SEQ ID NO: 154516 - RNA, 1752 nt, Artificial Sequence
  derived and/or modified CDS sequence (opt3) from hemagglutinin__InfluenzaB__ABL77277
augaaggccaucauugugcugcucauggucguuaccagcaacgcugacagaauaugcacaggcaucacuuccucuaauucaccccacgugguaaaaacggcaacccagggggaggugaacgucacaggagugauuccucuuacuaccacaccaaccaagagucauuucgccaaucugaaagguacuaagacaaggggcaaauuguguccgaacugcuuaaauuguaccgaucuggacguugcgcuagggcggcccaugugcgugggaaacacgccuagcgcuaaggccuccauccuccacgaaguccgcccagugacuucuggcuguuuucccauuaugcaugaucgaaccaagauccgucaacugccuaaucuucugagagguuacgagaacauaagguugucgacacagaauguaaucaacgcagaacgggccccagggggacccuaucgccucggcacuucaggcagcugcccuaauguuaccaacagagacggguucuuugcuacaauggcaugggccgugccaagggauaauaaaaccgcuacgaacccgcugacugucgaggugcccuacauuuguacaaagggagaagaccagaucaccgugugggguuuccacagugauaauaaaauucagaugaagaaccuguauggcgacuccaacccucaaaaauuuacuucuagcgccaauggggucacaacccauuacguuucccagaucggaggcuucccaaaccagacggaggauggugggcucccccagucaggacggauagugguagacuauauggugcaaaagccuggcaagaccggcacaauugucuaccagcgcgggguguuacugccacagaaaguuuggugcgcgaguggacgaagcaaggugaucaaagguucucuucccuugauuggcgaggcagauugucugcacgaaaaguaugggggacuaaauaaauccaagccguacuacacuggcgagcacgccaaagcuaucgguaacugcccuaucugggucaagaccccacucaagcuggccaaugggacaaaauauagacccccugcaaaacuucugaaggaaaggggcuuuuucggagcuauugccggcuuuuuggaagggggaugggaggguaugauagcgggcuggcauggguacacuucacacggagcccauggcguggcaguagcugccgaccucaagagcacccaggaggcuaucaacaaaauuacaaagaaucugaacaguuuaucugagcuggaaguuaagaaucuccaacggcuuuccggugccauggaugagcugcacaacgaaaucuuggagcuagacgagaaaguggacgaucugcgugcagacaccauaagcucgcagauugaacucgccguccugcuuucuaaugaggggaucaucaacuccgaagaugagcaccuguuggcucucgaacgcaagcugaaaaagauguuaggccccucagcgguggacauuggaaauggcuguuucgagacuaaacauaagugcaaccagacgugccuggauagaaucgcagccgggacauuuaaugcuggagaguucagucuaccaaccuuugacagccucaacauuacugccgcaucccugaacgaugacggucuugauaaucacaccauauugcuguauuacucuacagccgcuagcucacucgccgucacccugaugaucgcaauuuucaucguguauaugguuaguagggacaacguguccuguagcaucugccuuuga

SEQ ID NO: 154517 - RNA, 1752 nt, Artificial Sequence
  derived and/or modified CDS sequence (opt3) from hemagglutinin__InfluenzaB__ABL77288
augaaggccaucauugugcugcucauggucguuaccagcaacgcugacagaauaugcacaggcaucacuuccucuaauucaccccacgugguaaaaacggcaacccagggggaggugaacgucacaggagugauuccucuuacuaccacaccaaccaagagucauuucgccaaucugaaagguacuaagacaaggggcaaauuguguccgaacugcuuaaauuguaccgaucuggacguugcgcuagggcggcccaugugcgugggaacgacuccuagcgcuaaggccuccauccuccacgaaguccgcccagugaccucuggcuguuuucccauuaugcaugaucgaacaaagauccgucaacugccuaaccuucugagagguuacgagcacauaagguugucgacucagaauguaaucaacgcagaaaaagccccagggggacccuauaagcucggcaccucaggcagcugcccuaaugcuacaagucgguccggguucuuugcaaccauggccugggcuguuccacgcgacaacaaaacggccacuaauccgcugacaguggagguccccuacauuuguaccaagggagaagaucagaucacugugugggguuuccauucugacacaaaaacccagaugaagaaccuguauggcgauagcaauccucaaaaguuuacguccucagcgaacggggugaccacacacuacgucagucagauuggaggcuucccagaccagacugaggauggugggcucccccagagcggaagaaucguuguggacuauaugguacaaaaaccuggcaagaccggcacaauaguguaccagaggggagucuuacugccacagaaaguguggugcgcaucugggcgguccaagguuauuaaagguucacuucccuugaucggcgaggccgauugucugcacgaaaaguaugggggacuaaauaaaagcaagccguacuacacuggcgagcaugcuaaggccauugguaacugcccuaucugggugaaaaccccucucaagcuggcaaacgggacaaaauaucgcccacccgcuaagcugcugaaagaacgaggcuuuuucggagccaucgcgggcuuuuuggaagggggaugggaggguaugauugccggcuggcacggguacaccagucauggagcacacggcgucgcuguggccgcugaccucaagucuacucaggaggccauaaauaagaucacgaaaaaccuuaauuccuuaagcgagcuggaaguaaagaaccuccaaagacuuucgggugcaauggaugagcugcacaaugaaauuuuggagcuagacgagaaaguugacgaucugagggccgacacaaucucuucccagauagaacucgcugugcugcuuucaaacgaggggauuaucaauagugaagaugagcaucuguuggcgcucgaacggaagcugaaaaagauguuaggccccagcgcagucgacaucggaaacggcuguuucgagaccaagcacaaaugcaaucagacuugccuggaucguauugccgcugggaccuuuaacgccggagaguucucccuaccaacauuugacucucucaauaucaccgcagccagccugaacgaugacggucuugauaaucauacuauuuugcuguauuacucaacagcugccaguucccucgcagugacgcugaugauagcgaucuucauugucuauauggugagccgcgacaacguuucuuguucaaucugccuuuga

SEQ ID NO: 154518 - RNA, 1752 nt, Artificial Sequence
  derived and/or modified CDS sequence (opt3) from hemagglutinin__InfluenzaB__ABL77299
augaaggccaucauugugcugcucauggucguuaccagcaacgcugacagaauaugcacaggcaucacuuccucuaauucaccccacgugguaaaaacggcaacccagggggaggugaacgucacaggagugauuccucuuacuaccacaccaaccaagagucauuucgccaaucugaaagguacuaagacaaggggcaaauuguguccgaacugcuuaaauuguaccgaucuggacguugcgcuagggcggcccaugugcaucggaaacauuccuagcgcuaaggccuccauccuccacgaagugcgcccagucacgucuggcuguuuucccauaaugcaugaucgaacuaagauccgucaacugccuaaucuucugagagguuacgagcacauuagguugucgacccauaacgugaucaaugcagaacgggccccagggggacccuaucgccucggcacaucaggcagcugcccuaacguaacaaguagauccggguucuuugcuaccauggcaugggccguuccaagggacaauaaaacagcuaccaacccgcugacgguggagguccccuacauuuguacuaagggagaagaucagaucacagugugggguuuccacucugacaaugagacccagaugaaaaaccuguauggcgauagcaauccucagaaguuuacuuccucagccaacgggauaacaacccacuacgugagucaaauuggaggcuucccaaaccagacggaggacggugggcucccccagagcggacggaucgucguugauuauauggugcagaaaccuggcaagaccggcacaauuguauaccaacgcgggguguuacugccacagaaggucuggugcgcgucuggacgauccaaagugaucaaggguucacuucccuugaucggcgaagcagacugucugcaugagaaauaugggggacuaaauaagagcaaaccguacuacacuggcgaacacgccaaggcuauugguaacugcccuauauggguuaaaacuccccucaagcuggccaaugggacaaaguauagaccuccagcaaaacuucugaaggagaggggcuuuuucggagcuaucgccggcuuuuuggaagggggaugggaagguaugauugcgggcuggcauggguacaccagucacggagcccacggcguggcagucgcugccgaucucaaaucuacccaggaggcuaucaacaagauaacuaaaaaucugaacuccuuaagcgaacuggaggugaagaaucuccagcggcuuucgggugccauggacgaacugcauaacgagauuuuggagcuagaugaaaagguagacgaccugcgugcagauaccaucucuucccaaaucgagcucgccguucugcuuucaaaugaagggauuaucaacagugaggacgaacaccuguuggcucucgagcgcaaacugaagaaaauguuaggccccagcgcgguggauauuggaaauggcuguuucgagacuaagcauaaaugcaaccagacgugccuggacagaauagcagccgggacauuuaaugcuggagaguucucccuaccaaccuuugauucucucaacaucacugccgcaagccugaaugacgauggucuugacaaccacaccauuuugcuguauuacucaacagccgcuaguucccucgccgucacccugaugaucgcaaucuucauuguguauauggucagcagggauaacgugucuuguucaauaugccuuuga

SEQ ID NO: 154519 - RNA, 1752 nt, Artificial Sequence
  derived and/or modified CDS sequence (opt3) from hemagglutinin__InfluenzaB__ABL77310
augaaggccaucauugugcugcucauggucguuaccagcaacgcugacagaauaugcacaggcaucacuuccucuaauucaccccacgugguaaaaacggcaacccagggggaggugaacgucacaggagugauuccucuuacuaccacaccaaccaagagucauuucgccaaucugaaagguacuaagacaaggggcaaauuguguccgaacugcuuaaauuguaccgaucuggacguugcgcuagggcggcccaugugcaucggaacgauuccuagcgcuaaggccuccauccuccacgaagugcgcccagucacuucuggcuguuuucccauaaugcaugaucgaaccaagauccgucaacugccuaaccuucugagagguuacgagcacauuagguugucgacacauaaugugaucaacgcagaacgggccccagggggacccuaucgccucggcacuucaggcagcugcccuaauguaaccaguagauccggguucuuugcuacaauggcaugggccguuccaagggacaacaaaaccgcuacgaauccgcugacuguggagguccccuacauuuguacaaagggagaagaucagaucaccgugugggguuuccacucugacaacaaaaaucagaugaagaaccuguauggcgauagcaauccucagaaauuuacuuccucagccaacggggugacaacccacuacgucagucaaauaggaggcuucccaaaccagacggaggacggugggcucccccagagcggacggauuguuguggauuauaugguacagaagccuggcaagaccggcacaaucguguaccaacgcggggucuuacugccacagaaaguguggugcguuucuggacgauccaaggugauuaaagguucacuucccuugaucggcgaggcggacugucugcaugaaaaguaugggggacuaaauaaaagcaagccguacuacacuggcgagcacgcaaaagccaucgguaacugcccuauuugggucaagacuccccucaagcuggcuaaugggacaaaauauagaccuccagccaaacuucugaaggaaaggggcuuuuucggagcaauagcuggcuuuuuggaagggggaugggaggguaugaucgccggcuggcauggguacaccagucacggagcgcacggcguggccguagcagcugaucucaagucuacccaggaggccauuaacaaaaucacaaagaaucugaacuccuuaagcgagcuggaaguuaagaaucuccagcggcuuucgggugcuauggacgagcugcauaacgaaauauuggagcuagaugagaaaguggacgaccugcgugccgauaccauuucuucccaaaucgaacucgcaguccugcuuucaaaugaggggaucauuaacagugaagacgagcaccuguuggcccucgaacgcaagcugaaaaagauguuaggccccagcgcuguggauaucggaaauggcuguuucgagacuaaacauaagugcaaccagacgugccuggacagaauugcggcagggacauuuaaugccggagaguucucccuaccaaccuuugauucucucaacauaacugcugccagccugaaugacgauggucuugacaaccacaccaucuugcuguauuacucaacagcagccaguucccucgcugucacccugaugauugccaucuucaucguguauaugguuagcagggauaacgugucuuguucaauuugccuuuga

SEQ ID NO: 154520 - RNA, 1758 nt, Artificial Sequence
  derived and/or modified CDS sequence (opt3) from hemagglutinin__InfluenzaB__ABL77321
augaaggccaucauugugcugcucauggucguuaccagcaacgcugacagaauaugcacaggcaucacuuccucuaauucaccccacgugguaaaaacggcaacccagggggaagugaacgucacaggagugauuccucuuacuaccacaccaaccaagagucauuucgccaaucugaaagguacuaagacaaggggcaaauuguguccgaagugcuuaaacuguaccgaucuggacguugcgcuagggcggcccaagugcacgggaacuaucccuagcgcuaaaguguccauucuccacgaagucaagccagugaccucuggcuguuuucccaucaugcaugaucgcacaaaaauacgacaacugccuaaucuucugcgugguuacgagcacaucagauugucgacucauaacguaauuaaugccgaaaaggcaccagggggacccuauaaaaucggcaccucaggcagcugcccuaacauuacaaaugggaacggauucuuugccaccauggcuugggcaguuccaaagaaugacaacaauaagacggccacuaacagucucacaguggaggucccguacaucuguaccgaaggugaggaucagauaacuguguggggcuuccacuccgacaaugagacacagauggcuaaacuguauggggauucuaagccccagaaauuuaccagcuccgccaacggagugacgacccacuacgucucacaaauuggcgguuucccuaaccaggcggaagacgggggacugccacagaguggcaggaucguuguggauuauaugguacaaaagagcggcaaaacagggacuauuaccuaccagcggggaauccucuuaccccagaagguguggugcgcaucuggucgcuccaaagucaucaagggcucacugccucuuauuggggaggccgacuguuugcaugaaaaguauggaggccugaauaaaagcaagccauacuacacaggugagcacgcuaaagccauagggaacugccccaucugggugaagacuccgcuaaaucucgcaaacggcaccaaauauagaccucccgcuaagcugcuuaaggagaggggauuuuucggcgccauugcgggguuucuggaaggagguugggagggcaugaucgccggguggcauggauacacaagucacggcgcacacgguguugcuguggccgcugauuugaaaucuacccaggaagccauaaauaagauuacuaaaaaccucaauucccugagcgaguuagaagucaagaaccugcagcggcucucgggggcaauggacgagcuucauaaugagauccuggaauuggaugagaaaguggacgaccuacgcgccgauacgaucucuucccaaauugaacuggcuguacuccugucaaacgagggcaucauuaauagugaagacgagcaccuucuggcguuggagcgaaagcucaagaaaaugcugggaccaagcgcaguugaaauaggcaacggguguuucgagacaaagcauaaaugcaaucagaccugcuuagauagaaucgccgcuggaacuuuuaacgccggugaguucucccugccuaccuuugacucucuaaauauuacagcagccagccucaacgaugacggccuggauaaccacaccauccuuuuguauuacucaacugcugccaguucccuggcagugacacucaugaucgcgauuuucauagucuauauggugagcagggacaaugucucuuguucaaucugccuguga

SEQ ID NO: 154521 - RNA, 1755 nt, Artificial Sequence
  derived and/or modified CDS sequence (opt3) from hemagglutinin__InfluenzaB__ABL77332
augaaggccaucauugugcugcucauggucguuaccagcaacgcugacagaauaugcacaggcaucacuuccucuaauucaccccacgugguaaaaacggcaacccagggggaggugaacgucacaggagugauuccucuuacuaccacaccaaccaagagucauuucgccaaucugaaagguacuaagacaaggggcaaauuguguccgaacugcuuaaauuguaccgaucuggacguugcgcuagggcggcccaugugcgugggaacgacuccuagcgcuaaggccuccauccuccacgaaguccgcccagugaccucuggcuguuuucccauuaugcaugaucgaacaaagauccgucaacugccuaaccuucugagagguuacgagaauauaagguugucgacucagaacguaaucaaugcagaaaaagccccagggggacccuauaagcucggcaccucaggcagcugcccuaacgcuacaagucgguccggguucuuugcaaccauggccugggcuguuccacgcgacaauaacaaaacggccacuaauccgcugacaguggagguccccuacauuuguaccaagggagaagaucagaucacugugugggguuuccacucugacgauaaaacacagaugaagaaccuguauggcgacagcaauccucaaaaguuuaccuccucagcgaacggggugacgacccauuacgucagucagauuggaggcuucccagaucagacagaggacggugggcucccccagagcggaagaaucguuguggauuauaugguacaaaaaccuggcaagacuggcaccauaguguaccagaggggagucuuacugccacagaaaguguggugcgcaucugggcgguccaagguuauuaaagguucacuucccuugaucggcgaggccgacugucugcacgaaaaguaugggggacuaaacaaaagcaagccguacuacacaggcgagcacgcuaaggccauugguaauugcccuaucugggugaaaacuccccucaagcuggcaaacgggaccaaauaucgcccuccagcuaagcugcugaaagaacgaggcuuuuucggagccaucgcgggcuuuuuggaagggggaugggaggguaugauugccggcuggcauggguacacaagucacggagcacauggcgucgcuguggccgcugaucucaagucuacccaggaggccauaaauaagaucacuaaaaaccuuaauuccuuaagcgagcuggaaguaaagaaccuccaaagacuuucgggugcaauggacgagcugcacaaugaaauuuuggagcuagacgagaaaguugaugaccugagggccgauacgaucucuucccagauagaacucgcugugcugcuuucaaacgaggggauuaucaauagugaagacgagcaccuguuggcgcucgaacggaagcugaaaaagauguuaggccccagcgcagucgauaucggaaacggcuguuucgagacaaagcauaaaugcaaucagaccugccuggaccguauugccgcugggacuuuuaacgccggagaguucucccuaccaaccuuugauucucucaauaucacagcagccagccugaacgacgauggucuugacaaucacgcuauuuugcuguauuacucaaccgccgcaaguucccucgcggugacucugaugauagcuaucuucauugucuauauggugagccgcgauaacguuucuuguucaaucugccuuuga

SEQ ID NO: 154522 - RNA, 1755 nt, Artificial Sequence
  derived and/or modified CDS sequence (opt3) from hemagglutinin__InfluenzaB__ABL77343
augaaggccaucauugugcugcucauggucguuaccagcaacgcugacagaauaugcacaggcaucacuuccucuaauucaccccacgugguaaaaacggcaacccagggggaggugaacgucacaggagugauuccucuuacuaccacaccaaccaagagucauuucgccaaucugaaagguacuaagacaaggggcaaauuguguccgaacugcuuaaauuguaccgaucuggacguugcgcuagggcggcccaugugcgugggaacgacuccuagcgcuaaggccuccauccuccacgaaguccgcccagugaccucuggcuguuuucccauuaugcaugaucgaacaaagauccgucaacugccuaaccuucugagagguuacgagaauauaagguugucgacucagaacguaaucaaugcagaaaaagccccagggggacccuaucggcucggcaccucaggcagcugcccuaacgcuacaagucgcuccggguucuuugcaaccauggccugggcuguuccaagagacaauaacaagacggccacuaauccgcugacaguggagguccccuacauuuguaccaaaggagaagaucagaucacugugugggguuuccacucugacaacaagauucagaugaaaaaucuguauggcgauagcaacccucaaaaguuuacauccucagcgaacggggugaccacgcauuacgucagucagaucggaggcuucccagaccagaccgaggauggugggcucccccagagcggaaggauaguuguggacuauaugguacaaaagccuggcaaaacaggcacuauuguguaccagcgcggggucuuacugccacagaagguguggugcgcaucuggacgguccaaaguugugaaggguucacuucccuugaucggcgaggccgauugucugcacgaaaaauaugggggacuaaauaagagcaaaccguacuacaccggcgagcacgcuaaggccauugguaacugcccuaucugggucaagacaccccucaaacuggcaaaugggacuaaguaucgaccuccagcuaaacuucugaaggaaagaggcuuuuucggagccaucgcgggcuuuuuggaagggggaugggaggguaugauugccggcuggcauggguacaccagucacggagcacauggcguggcuguagccgcugaccucaaaucuacacaggaggccauaaacaagaucaccaagaaucugaacuccuuaagcgagcuggaaguuaaaaaucuccaaaggcuuucgggugcaauggaugagcugcacaacgaaauuuuggagcuagacgagaagguggacgaucugcgggccgacacuaucucuucccagauagaacucgcuguccugcuuucaaaugaggggauuaucaacagugaagaugagcaccuguuggcgcucgaacguaaacugaagaaaauguuaggccccagcgcaguggacaucggaaauggcuguuucgagacgaagcauaagugcaaccagacaugccuggaucgcauugccgcugggaccuuuaaugccggagaguucucccuaccaacuuuugacucucucaacaucaccgcagccagccugaaugaugacggucuugauaaccacacaauuuugcuguauuacucaaccgcugccaguucccucgcagucacucugaugauagcgaucuucauuguguauaugguuagcagagacaacgugucuuguucaaucugccuuuga

SEQ ID NO: 154523 - RNA, 1755 nt, Artificial Sequence
  derived and/or modified CDS sequence (opt3) from hemagglutinin__InfluenzaB__ABL77365
augaaggccaucauugugcugcucauggucguuaccagcaacgcugacagaauaugcacaggcaucacuuccucuaauucaccccacgugguaaaaacggcaacccagggggaggugaacgucacaggagugauuccucuuacuaccacaccaaccaagagucauuucgccaaucugaaagguacuaagacaaggggcaaauuguguccgaacugcuuaaauuguaccgaucuggacguugcgcuagggcggcccaugugcgugggaacgacuccuagcgcuaaggccuccauccuccacgaaguccgcccagugaccucuggcuguuuucccauuaugcaugaucgaacaaagauccgucaacugccuaaccuucugagagguuacgagaauauaagguugucgacucagaacguaaucaaugcagaaaaagccccagggggacccuaucggcucggcaccucaggcagcugcccuaacgcuacaagucgcuccggguucuuugcaaccauggccugggcuguuccaagagacaauaacaagacggccacuaauccgcugacaguggagguccccuacguguguaccgaaggagaggaucagauuacugugugggguuuccacucugacaacaaaacacagaugaagaaucuguauggcgauagcaacccucaaaaauuuaccuccucagcgaacggggucacgacccauuacguuagucagaucggaggcuucccagaccaggcagaggauggugggcucccccagagcggaaggauugugguagacuauauggugcaaaagccuggcaagacaggcacuaucgucuaccagcgcgggguguuacugccacagaaaguuuggugcgccucuggacgguccaaggugauaaaagguucacuucccuugauuggcgaagcugauugucugcacgagaaguaugggggacuaaauaaaagcaagccguacuacaccggcgaacacgccaaagcaaucgguaacugcccuauuugggucaagacaccccucaagcuggcuaaugggacuaaauaucgaccuccagccaaacuucugaaggagagaggcuuuuucggagcgaucgccggcuuuuuggaagggggaugggaagguaugaucgcaggcuggcauggguacaccagucacggagcucauggcguggccguagcugccgaccucaagucuacacaggaggcaauuaacaaaauaaccaagaaucugaacuccuuaagcgaacuggagguuaagaaucuccaaaggcuuucgggugccauggaugaacugcacaacgagaucuuggagcuagacgaaaaaguggacgaucugcgggcugacacuauuucuucccagaucgagcucgcgguccugcuuucaaaugaagggauaauuaacagugaggaugaacaccuguuggcacucgagcguaagcugaaaaagauguuaggccccagcgccguggacaucggaaauggcuguuucgagacgaaacauaagugcaaccagacaugccuggaucgcaucgcugccgggaccuuuaaugcaggagaguucucccuaccaacuuuugacucucucaacauuaccgccgcuagccugaaugaugacggucuugauaaccacacaaucuugcuguauuacucaaccgccgcaaguucccucgcggucacucugaugauugcuauauucaucguguauaugguuagcagagacaacgugucuuguucaauuugccuuuga

SEQ ID NO: 154524 - RNA, 1755 nt, Artificial Sequence
  derived and/or modified CDS sequence (opt3) from hemagglutinin__InfluenzaB__ABL84340
augaaggccaucauugugcugcucauggucguuaccagcaacgcugacagaauaugcacaggcaucacuuccucuaauucaccccacgugguaaaaacggcaacccagggggaagugaacgucacaggagugauuccucuuacuaccacaccaaccaagagucauuucgccaaucugaaagguacuaagacaaggggcaaauuguguccgaccugcuuaaacuguacggaucuggacguugcgcuagggcggcccaugugcgugggaaucacuccuagcgcuaaggccuccauucuccacgaaguccgcccagugaccucuggcuguuuucccaucaugcaugaucgaacaaagauacgucaacugccuaaucuucugagagguuacgagaaaaucagguugucgacucagaacguaauuaaugcagaaaaggccccagggggacccuaucggcucggcaccucaggcagcugcccuaacacaaccaguaaauccggguucuuugcuacgauggcaugggccguuccacgcgacaauaacaagacugcuacaaauccgcugaccguggaggucccccacaucuguacuaaagaagaggaucagauuacaguguggggauuccauucugacaacaagacccagaugaagaaucuguacggugauagcaacccucaaaaauuuacguccucagccaauggcgugaccacacacuaugucagucagaucgggggauucccagaccagacugaggauggcggucucccccagagcgggagaauaguuguggacuacaugguacaaaagccuggaaaaaccggcacaauuguguaucagaggggcaucuuacugccacagaaggucuggugcgcgucugggcgguccaaagugauuaagggaucacuucccuugaucggugaagcagauugucugcacgagaaauacggcgggcuaaacaagagcaagccguauuacacuggagaacaugccaaagcuaucggcaacugcccuauuuggguuaagaccccucucaaacuggccaaugguacaaaguaccgcccacccgcaaaacuucugaaggagcgaggguuuuucggcgcuauagccggauuuuuggagggcgggugggaaggaaugaucgcggguuggcacggcuauaccagucauggggcccacggaguggcagucgcugccgaccucaagucuacucaggaggcuauuaacaaaaucacgaagaaucugaacuccuuaagcgaacuggaggugaaaaaucuccaaagacuuucgggcgccauggaugaacugcacaacgagauauuggagcuagacgaaaagguagacgaucugagggcagacacaauuucuucccagaucgagcucgccguucugcuuucaaaugaagguaucauuaacagugaggaugaacaucuguuggcucucgagcggaaacugaagaagauguuagggcccagcgcgguggacaucggcaauggauguuucgagaccaaacacaagugcaaccagacuugccuggaucguauugcagccggcaccuuuaaugcuggggaguucucccuaccaacauuugacucucucaacauaaccgccgcaagccugaauggagauggucuugacaaccauacuaucuugcuguacuauucaacagccgcuaguucccucgccgucacgcugaugauugcaaucuucaucguguacaugauuagccgcgauaaugucucuuguucaauaugccuuuga

SEQ ID NO: 154525 - RNA, 1755 nt, Artificial Sequence; identical to SEQ ID NO: 154446
  derived and/or modified CDS sequence (opt3) from hemagglutinin__InfluenzaB__ABN50382

SEQ ID NO: 154526 - RNA, 1755 nt, Artificial Sequence; identical to SEQ ID NO: 154446
  derived and/or modified CDS sequence (opt3) from hemagglutinin__InfluenzaB__ABN50393

SEQ ID NO: 154527 - RNA, 1755 nt, Artificial Sequence
  derived and/or modified CDS sequence (opt3) from hemagglutinin__InfluenzaB__ABN50404
augaaggccaucauugugcugcucauggucguuaccagcaacgcugacagaauaugcacaggcaucacuuccucuaauucaccccacgugguaaaaacggcaacccagggggaagugaacgucacaggagugauuccucuuacuaccacaccaaccaagagucauuucgccaaucugaaagguacuaagacaaggggcaaauuguguccgaccugcuuaaacuguacggaucuggacguugcgcuagggcggcccaugugcgugggagucacuccuagcgcuaaggccuccauccuccacgaagugcgcccaguaaccucuggcuguuuucccauuaugcaugaucgaacaaagauccgucaacugccuaaucuucugagagguuacgagaaaauaagguugucgacucagaacguuaucaaugcagaaaaggccccagggggacccuaucggcucggcaccucaggcagcugcccuaacgcuacaagucgcuccggguucuuugcaaccauggccugggcugugccaagagacaauaacaaaacggccacuaauccgcugacagucgaggugccccacauuuguaccaaggaagaggaucagaucacuguguggggauuccauucugacaacaaaacacagaugaagaaucuguacggugauagcaacccucaaaaguuuaccuccucagcgaauggcgucacgacccacuauguuagucagauugggggauucccagaccagacagaggauggcggucucccccagagcgggaggaucgugguagacuacauggugcaaaaaccuggaaagacuggcaccauagucuaucagcggggcauuuuacugccacagaaaguguggugcgcaucugggcgcuccaagguuaucaaaggaucacuucccuugauuggugaagccgauugucugcacgagaaguacggcgggcuaaacaaaagcaagccguauuacacaggagaacaugcuaaggccaucggcaacugcccuaucugggugaaaacuccccucaagcuggcaaaugguaccaaauaccgaccuccagcuaaacuucugaaggagagaggguuuuucggcgccauugcgggauuuuuggagggcgggugggaaggaaugauagccgguuggcacggcuauacaagucauggggcacacggagucgcuguggccgcugaccucaagucuacccaggaggccaucaacaagauuacuaaaaaucugaacuccuuaagcgaacuggagguaaagaaucuccaaaggcuuucgggcgcaauggaugaacugcacaacgagaucuuggagcuagacgaaaaaguugacgaucugcgggccgacacgauaucuucccagauugagcucgcugugcugcuuucaaaugaagguaucaucaacagugaggaugaacaucuguuggcgcucgagcguaagcugaaaaagauguuagggcccagcgcagucgacauuggcaauggauguuucgagacaaagcacaaaugcaaccagaccugccuggaucgcaucgccgcuggcacuuuuaaugccggggaguucucccuaccaaccuuugacucucucaacauuacagcagccagccugaaugaugacggacuugauaaccauaccauauugcuguacuauucaacugcugccaguucccucgcagugacacugaugaucgcgauuuucaucgucuacaugaucagcagagacaaugugucuuguucaauuugccuuuga

SEQ ID NO: 154528 - RNA, 1755 nt, Artificial Sequence; identical to SEQ ID NO: 154455
  derived and/or modified CDS sequence (opt3) from hemagglutinin__InfluenzaB__ABN50415

SEQ ID NO: 154529 - RNA, 1755 nt, Artificial Sequence; identical to SEQ ID NO: 154455
  derived and/or modified CDS sequence (opt3) from hemagglutinin__InfluenzaB__ABN50426

SEQ ID NO: 154530 - RNA, 1755 nt, Artificial Sequence
  derived and/or modified CDS sequence (opt3) from hemagglutinin__InfluenzaB__ABN50437
augaaggccaucauugugcugcucauggucguuaccagcaacgcugacagaauaugcacaggcaucacuuccucuaauucaccccacgugguaaaaacggcaacccagggggaggugaacgucacaggagugauuccucuuacuaccacaccaaccaagaguuacuucgccaaucugaaagguacuaggacacggggcaaguuguguccggauugcuuaaacuguaccgaccuggauguugcgcuagggcgccccaugugcgugggaacgacuccuagcgcuaaagccuccauccuccaugaaguccgaccagugaccucuggcuguuuucccauuaugcacgaccguacaaagaucagacaacugccuaaucuucugagggguuaugagaacauacgguugucgacucagaauguaaucgaugcagaaaaggccccagggggacccuaccgccucggcaccucaggcagcugcccuaacgcuacaaguaaauccggguucuuugcaaccauggccugggcuguuccaaaggacaauaacaaaaaugccacgaacccgcugacuguggagguccccuauauuuguacagaaggagaggaucagaucaccgugugggguuuccauucugacaauaagacucagaugaaaaaccuguacggcgauccuaauccacaaaaguuuacaagcuccgcgaacggggugaccacgcacuaugucucacagauuggaggcuuccccgaccagaccgaggauggugggcucccucagaguggaagaaucguuguggacuacaugaugcaaaagccaggcaaaacaggcacuauaguauaucagaggggaguguuacugccccagaaggucuggugcgcaagcgggaaaucuaaggugauuaaagguucccuuccguugaucggcgaagccgauugucugcaugagaaguacgggggacuaaacaaaucaaagccuuacuauaccggcgaacacgcuaaggccauugguaauugccccaucuggguuaaaacaccacucaagcuggcaaacgggacuaaauaccggccucccgcuaagcugcugaaagagcgcggcuuuuucggagccaucgcgggcuuuuuggaagggggaugggaagguaugauugccggcuggcacggguauaccagccauggagcacacggcguggcugucgccgcugaccucaagaguacacaggaggccauaaauaagaucaccaaaaaccuuaauucuuuauccgaacuggaggugaagaaccuccaacgacuuagcggugcaauggacgaacugcauaaugagauuuuggagcuagaugaaaaaguagacgaucugagagccgacacuaucucgucucagauagagcucgcuguucugcuuuccaacgaagggauuaucaauucagaggaugaacaccuguuggcgcucgagaggaagcugaaaaagauguuaggcccaagugcaguggacaucggaaacggcuguuucgagacgaagcacaaaugcaaucagacaugccuggaucggauugccgcugggaccuuuaacgccggagaguucagccuacccacuuuugacucccucaauaucaccgcagccucucugaacgaugacggucuugauaaucauacaauuuugcuguacuauagcaccgcugccucaagucucgcagucacucugaugcuugcgauauucaucguguacauggucucccgugacaacgugagcuguucuauuugccuguga

SEQ ID NO: 154531 - RNA, 1758 nt, Artificial Sequence
  derived and/or modified CDS sequence (opt3) from hemagglutinin__InfluenzaB__ABN50459
augaaggcccugaucgugcuccuuauggucguuaccagcaacgcugacagaauuugcacaggcauaacuuccucuaauucaccccacgugguaaaaacggcaacccagggggaggugaacgucacaggagugaucccucugacuaccacaccaaccaagagucauuucgccaauuugaaagguacuaagacaaggggcaaauuauguccgaagugccugaacuguaccgaucuagacguugcgcucgggcggcccaagugcacgggaaauauuccuagcgcugaaguguccauccugcacgagguccgcccagugacuucuggcuguuuucccauuaugcaugaucgaaccaaaauccgucaacuuccuaaccuguugagagguuacgaacacauaaggcucucgacacauaauguaaucaacgccgagaaggcaccagggggacccuauaaaauuggcacuucaggcagcugcccuaauguuaccaacgggaauggauucuuugccacaauggcuugggcagugccaaagaacgacaauaacaaaaccgccacgaauagucugacuaucgaagucccguacauuuguacagagggugaggaucagaucaccauauggggcuuccacuccgacaacgaaauucagauggcuaagcuguauggggauucuaagccccagaaauuuacuagcuccgccaacggagugacaacccacuacgugucacaaaucggcgguuucccuaaucagacggaggacgggggacucccacagaguggccggauugucguugauuauauggugcagaaguccggcaaaaccgggacaaucacuuaccaacgcggaaucuuacugccccagaagguauggugcgcgucugguagauccaaagugauuaagggcucacuuccuuugauaggggaagcagacugucugcaugagaaauauggaggccuaaacaagagcaagccauacuacaccggugagcacgccaaagcuaucgggaauugccccauuugggucaagacaccgcucaaacuggccaacggcacuaaguauaggccucccgcaaaacuucugaaggaacggggauuuuucggcgcuaucgccggguuuuuggagggagguugggaaggcaugauagcgggguggcauggauacaccagucacggcgcccacgguguggcaguugcugccgaucucaagucuacacaggaggcuauuaauaaaaucaccaagaaccugaauagcuuaagcgaacuggaggugaaaaaccuccagcgccuuucgggggccauggacgagcugcauaaugaaaucuuggagcuagaugaaaaggucgacgaccugcgagcagauacuauuucuucccaaaucgagcucgccgugcugcuuucaaacgaaggcauuauaaauagugaggacgagcaccuguuggcucucgaaagaaaacugaagaagauguuaggaccaagcgcgguagagaucggcaacggguguuucgaaacgaaacauaagugcaaucagacaugccuggauaggauugcagccggaaccuuugacgcuggugaguucucccuaccuacuuuugauucucucaacaucaccgccgcaagccugaaugacgauggccuugacaaccacacaaucuugcuguauuacucaaccgccgcuaguucccucgccguuacucugaugauugcaauauucguggucuauauggugagccgggauaacgucucuuguucaaucugccuuuga

SEQ ID NO: 154532 - RNA, 1758 nt, Artificial Sequence
  derived and/or modified CDS sequence (opt3) from hemagglutinin__InfluenzaB__ABN50470
augaaggccaucauugugcugcucauggucguuaccagcaacgcugacagaauaugcacaggcaucacuuccucuaauucaccccacgugguaaaaacggcaacccagggggaggugaacgucacaggagugauuccucuuacuaccacaccaaccaagagucauuucgccaaucugaaagguacuaagacaaggggcaaauuguguccgaagugcuuaaacuguaccgaucuggacguugcgcuagggcggcccaagugcacgggaaauaucccuagcgcuaaaguguccauucuccacgaaguccgcccagugacuucuggcuguuuucccaucaugcaugaucgaaccaagauacgucaacugccuaaccuucugagagguuacgagaggauccgguugucgaaucacaacguaauuaaugccgaaaaagcaccagggggacccuauaagaucggcacaucaggcagcugcccuaacguuacuaaugggaacggauucuuugccaccauggcuugggcagugccgaaaaaugagaacaauaagacagccaccaacagucucacgauugaagucccauacaucuguacugagggugaggaccagauaacaguguggggcuuccauuccgauaacgaaauucagauggcuaagcuguauggggacucuaaaccccagaaguuuaccagcuccgccaauggagugacuacacacuacgucucacaaaucggcgguuucccuaaccagaccgaggaugggggacugccacagaguggccgcauuguuguggacuauaugguacagaaaagcggcaagacggggaccaucacauaccaaagaggaauccucuuaccccagaaaguguggugcgcgucugguagguccaaggucauuaaaggcucacugccucuuauaggggaagcagauuguuugcacgagaaguauggaggccugaauaagagcaaaccauacuacacuggugagcaugccaaggcuaucgggaacugccccauuugggugaaaaccccgcuaaagcucgccaauggcacaaaauaucggccucccgcaaagcugcuuaaggaacgcggauuuuucggcgcuaucgccggguuucuggagggagguugggaaggcaugauagcgggguggcacggauacacaagucauggcgcccacgguguugcaguggcugccgacuugaaaucuacccaggaggcuauuaacaagaucacuaaaaaucucaacucccugagcgaauuagaggucaagaaucugcagcgacucucgggggccauggaugagcuucacaacgaaauccuggaguuggacgaaaaaguggaugaccuaagagcagacaccauuucuucccaaaucgagcuggccguacuccugucaaaugaaggcauuauaaacagugaggaugagcaucuucuggcuuuggaaaggaagcucaagaaaaugcugggaccaagcgcgguugagaucggcaauggguguuucgaaacuaagcacaaaugcaaccagacgugcuuagaccggauugcagccggaacauuuaaugcuggugaguucucccugccuaccuuugauucucuaaacaucacugccgcaagccucaacgacgauggccuggacaaucauaccauccuuuuguauuacucaacagccgcuaguucccuggccgugacccucaugauugcaauauucgucguguauauggucagccgugauaacgugucuuguucaaucugccuguga

SEQ ID NO: 154533 - RNA, 1755 nt, Artificial Sequence
  derived and/or modified CDS sequence (opt3) from hemagglutinin__InfluenzaB__ABN50481
augaaggccaucauugugcugcuccuugucguuaccagcaacgcugacagaauaugcacaggcaucacuuccucuaauucaccccacgugguaaaaacggcaacccagggggaggugaacgucacaggagccauuccucugacuaccacaccaaccaagagucauuucgcgaauuugaaagguacuaagacaaggggcaaauuauguccgaccugcuuuaacuguacggaucuggacguggcucuagggcggcccaugugcguuggaaucacuccuagcgccaaggcauccauucuccacgaagugcgcccagucaccucuggcuguuuccccaucaugcaugaucgaacaaagauacgucaacugccuaaucuucugagagguuacgagaaaaucagguugucgacucagaacgugauugacgccgaaaaggcuccagggggacccuaucggcucggcaccucaggcagcugcccuaaugcaacaaguaaauccggguuuuucgccaccauggcuugggccguaccacgcgauaacaauaagacggcgacuaacccgcugacaguugaggugccccacaucuguaccaaagaagaggaccagauuacugucuggggauuucauucugauaauaagacacagaugaagaaccuguacggugacagcaauccucaaaaauucaccuccucagcaaacggcaucacgacccacuaugugagucagauagggggauuuccagaucagacagaggacggcggucucccccagagcgggagaauuguggucgauuacaugguucaaaagccuggaaaaacuggcaccaucguguaucagaggggcauuuuacugccacagaagguauggugcgccucugggcgguccaaagugaucaagggaucacuucccuugaucggugaagcugacugucugcacgagaaauacggcgggcuaaauaagagcaagccguauuacacaggagaacaugccaaagcaauuggcaacugcccuauaugggucaagacuccccucaaacuggcuaacgguaccaaguaccgcccuccagccaaacuucugaaggagcgaggguucuuuggcgcgaucgccggauucuuggagggcgggugggaaggaaugauugcagguuggcacggcuauacaagucauggggcucacggaguggccguugcugccgaucucaagucuacccaggaggcaaucaauaaaauaacuaagaacuuaaauucccugagcgaacuggaggugaaaaaccuccaaagacuuucgggcgccauggacgaacugcacaaugagauuuuggagcuagacgaaaaggucgaugaccugagggcugauacgaucucuucccagaucgagcucgcggugcugcuuucaaacgaagguauuaucaauagugaggacgaacaucuguuggcacucgagcggaaacugaagaagauguuagggcccagcgccguagauauuggcaacggauguuuugagacaaaacacaagugcaaucagaccugccuggaccguauagcugccggcacuuucaacgcaggggaauuuucccuaccaaccuucgauucucucaauaucacagccgcuagccugaacgacgauggacuugacaaucauaccauuuugcuguacuauucaacugccgcaaguucccucgcgguuacacugaugaucgcuaucuucauuguguacaugauaagccgcgauaacgucucuuguucaaucugccuuuga

SEQ ID NO: 154534 - RNA, 1755 nt, Artificial Sequence
  derived and/or modified CDS sequence (opt3) from hemagglutinin__InfluenzaB__ABN50503
augaaggccaucauugugcugcucauggucguuaccagcaacgcugacagaauaugcacaggcaucacuuccucuaauucaccccacgugguaaaaacggcaacccagggggaagugaacgucacaggagugauuccucuuacuaccacaccaaccaagagucauuucgccaaucugaaagguacuaagacaaggggcaaauuguguccgaccugcuuaaacuguacggaucuggacguugcgcuagggcggcccaugugcgugggagucacuccuagcgcuaaggccuccauccuccacgaagugcgcccaguaaccucuggcuguuuucccauuaugcaugaucgaacaaagauccgucaacugccuaaucuucugagagguuacgagaaaauaagguugucgacucagaacguuaucaaugcagaaaaggccccagggggacccuaucggcucggcaccucaggcagcugcccuaacgcuacaagucgcuccggguucuuugcaaccauggccugggcugugccaaaagacaauaacaagacggccacuaauccgcugacagucgaggugccccacauuuguaccaaagaagaggaucagaucacuguguggggauuccauucugacgauaagacacagaugaagaaccuguacggugacagcaauccucaaaaauuuaccuccucagcgaacggcgucacgacccacuauguuagucagauugggggauucccagaucagacagaggacggcggucucccccagagcgggagaaucgugguagauuacauggugcaaaagccuggaaaaacuggcaccauagucuaucagaggggcauuuuacugccacagaagguguggugcgcaucugggcgguccaaaguuaucaagggaucacuucccuugauuggugaagccgacugucugcacgagaaauacggcgggcuaaauaagagcaagccguauuacacaggagaacaugcuaaagccaucggcaacugcccuaucugggugaagacuccccucaaacuggcaaacgguaccaaguaccgcccuccagcuaaacuucugaaggagcgaggguuuuucggcgccauugcgggauuuuuggagggcgggugggaaggaaugauagccgguuggcacggcuauacaagucauggggcacacggagucgcuguggccgcugaucucaagucuacccaggaggccaucaauaaaauuacuaagaacuuaaauucccugagcgaacuggagguuaaaaaccuccaaagacuuucgggcgcaauggacgaacugcacaaugagaucuuggagcuagacgaaaagguagaugaccugagggccgauacgauaucuucccagauugagcucgcugugcugcuuucaaacgaagguaucaucaauagugaggacgaacaucuguuggcgcucgagcggaaacugaagaagauguuagggcccagcgcagucgauauuggcaacggauguuucgagacaaaacacaagugcaaucagaccugccuggaccguaucgccgcuggcacuuuuaacgccggggaguucucccuaccaaccuuugauucucucaauauuacagcagccagccugaacgacgauggacuugacaaucauaccauauugcuguacuauucaacugcugccaguucccucgcagugacacugaugaucgcgauuuucaucgucuacaugaucagccgcgauaacgugucuuguucaauuugccuuuga

SEQ ID NO: 154535 - RNA, 1755 nt, Artificial Sequence
  derived and/or modified CDS sequence (opt3) from hemagglutinin__InfluenzaB__ABN50514
augaaggccaucauugugcugcucauggucgcuaccagcaacgcagacagaauaugcacaggcaucacuuccucuaauucaccccacguugugaaaacggccacccagggggagguaaacgugacaggagucauuccucuuacuaccacaccaaccaagaguuacuucgcgaaucugaaagguacuaggacacggggcaaguuguguccggauugcuuaaacuguaccgaccuggauguggcucuagggcgccccaugugcguuggaacgacuccuagcgccaaagcauccauccuccaugaagugcgaccagucaccucuggcuguuuucccauuaugcacgaccguacaaagaucagacaacugccuaaucuucugagggguuaugagaacauacgguugucgacucagaaugugaucgaugccgaaaaggcuccagggggacccuaccgccucggcaccucaggcagcugcccuaacgcaacaaguaaauccggguucuuugccaccauggcuugggccguaccaaaggacaauaacaaaaaugcgacgaacccgcugacuguugaggugcccuaugucuguacagaaggagaggaucagauuaccgugugggguuuccauucugacaauaagccucagaugaaaaaccuguacggcgauagcaauccacaaaaguuuacuuccucagcaaacggggugacaacccacuaugucagucagaucggaggcuuccccgaccagacggaggauggugggcucccucagagcggaagaauuguuguggacuacaugguacaaaagccaggcaaaaccggcacaaucguguaucagaggggagucuuacugccccagaagguguggugcgccucugggcgguccaaaguuauaaaggguucacuuccguugauuggcgaagcugauugucugcaugagaaauacgggggacuaaacaagagcaaaccuuacuauacuggcgaacacgccaaggcaaucgguaauugccccauuugggugaagaccccacucaaacuggcuaacgggacaaaguaccgcccucccgccaaacuucugaaggagcgaggcuuuuucggagcgaucgccggcuuuuuggaagggggaugggaagguaugaucgcaggcuggcacggguauacuucccauggagcucacggcgucgccguggcugccgaccucaaaucuacccaggaggcaauuaauaagauaacaaagaaccugaauaguuuaagcgaacuggagguuaaaaaccuccaaagacuuucgggugccauggacgaacugcaugaugagaucuuggagcuagacgaaaagguagaugaccugagggcugauaccauuucuucccagaucgagcucgcggugcugcuuucaaaugaagggauaauuaacagugaggacgaacaccuguuggcacucgagcggaaacugaagaaaauguuaggcccaagcgccgucgauaucggaaauggcuguuucgagacuaagcacaagugcaaccagacgugccuggaccguaucgcugccgggacauuuaaugcaggagaguucucccuacccaccuuugauucucucaacauuacugccgcuagccugaaugacgauggucuugacaaccauaccaucuugcuguacuauucaacagccgcaaguucccucgcggugacccugaugcuugcuauuuucauagucuacauggugagccgcgacaauguuucuuguucaaucugccuguga

SEQ ID NO: 154536 - RNA, 1755 nt, Artificial Sequence
  derived and/or modified CDS sequence (opt3) from hemagglutinin__InfluenzaB__ABN50525
augaaggccaucauugugcugcucauggucguuaccagcaacgcugacagaauaugcacaggcaucacuuccucuaauucaccccacgugguaaaaacggcaacccagggggaggugaacgucacaggagugauuccucuuacuaccacaccaaccaagaguuacuucgccaaucugaaagguacuaggacacggggcaaguuguguccggauugcuuaaacuguaccgaccuggauguugcgcuagggcgccccaugugcgugggaacgacuccuagcgcuaaagccuccauccuccaugaaguccgaccagugaccucuggcuguuuucccauuaugcacgaccguacaaagaucagacaacugccuaaucuucugagggguuaugagaacauacgguugucgacucagaauguaaucgaugcagaaaaggccccagggggacccuaccgccucggcaccucaggcagcugcccuaacgcuacaaguaaauccggguucuuuucuaccauggcaugggccguuccaaaggacaauaacaaaaaugcuacgaacccgcugacuguggagguccccuauguguguacagaaggagaggaucagauuaccgugugggguuuccauagcgacaauaagacucagaugaaaaaccuguacggcgauuccaauccucaaaaguuuacaucaagugccaacggggucaccacgcacuauguuagccagaucggaggcuucccagaccagaccgaggauggugggcucccccagucuggaagaauugugguagacuacauggugcaaaagccuggcaaaacaggcacuaucgucuaucagaggggaguguuacugccacagaagguuuggugcgcguccgggcggucaaaagugauaaaggguagccuucccuugauuggcgaagcagauugucugcaugagaaauacgggggacuaaacaagaguaaaccguacuauaccggcgaacacgccaaggcuaucgguaauugcccuauuugggucaagacaccccucaaacuggccaacgggacuaaguaccgcccuccagcaaaacuucugaaggagcgaggcuuuuucggagcuaucgccggcuuuuuggaagggggaugggaagguaugaucgcgggcuggcacggguauaccucucauggagcccacggcguggcaguagcugccgaccucaaauccacacaggaggcuauuaauaagauaaccaagaaccugaauagcuuaucggaacuggagguuaaaaaccuccaaagacuuucuggugccauggacgaacugcauaaugagaucuuggagcuagaugaaaagguggacgaucugagggcagacacuauuuccucacagaucgagcucgccguccugcuuaguaacgaagggauaauuaauagcgaggaugaacaccuguuggcucucgagcggaaacugaagaaaauguuaggccccuccgcgguggacaucggaaacggcuguuucgagacgaagcacaagugcaaucagacaugccuggaucguaucgcagccgggaccuuuaacgcuggagaguucucucuaccaacuuuugacagccucaauauuaccgccgcaucacugaacgaugacggucuugauaaucauacaaucuugcuguacuauaguaccgccgcuuccagccucgccgucacucugaugcuugcaauuuucauaguguacaugguuucucgcgacaacgugucauguaguaucugccuguga

SEQ ID NO: 154537 - RNA, 1758 nt, Artificial Sequence
  derived and/or modified CDS sequence (opt3) from hemagglutinin__InfluenzaB__ABN50536
augaaggccaucauugugcugcucauggucguuaccagcaacgcugacagaauaugcacaggcaucacuuccucuaauucaccccacgugguaaaaacggcaacccagggggaagugaacgucacaggagugauuccucuuacuaccacaccaaccaagagucauuucgccaaucugaaagguacuaagacaaggggcaaauuguguccgaagugcuuaaacuguaccgaucuggacguugcgcuagggcggcccaagugcacgggaaauaucccuagcgcuaaaguguccauucuccacgaaguccgcccagugacuucuggcuguuuucccaucaugcaugaucgaaccaagauacgucaacugccuaaccuucugagagguuacgagaggauccgguugucgaaucacaacguaauuaaugccgaagaggcaccagggggacccuauaaaaucggcacaucaggcagcugcccuaacguuacuaaugggaacggauucuuugccaccauggcuugggcagugccaaagaaugaaaacaauaaaacagccaccaacagucucacgauugaggucccguacaucuguacugagggugaagaccagauaacaguguggggcuuccauuccgauaacgagauucagauggcuaagcuguauggggacucuaagccccagaaauuuaccagcuccgccaauggagugacuacacacuacgucucacaaaucggcgguuucccuaaccagaccgaagaugggggacugccacagaguggccgcauuguuguggacuauaugguacagaagaguggcaaaacggggaccaucacauaccaaagaggaauccucuuaccccagaagguguggugcgcgucugguagguccaaagucauuaagggcucacugccucuuauaggggaggcagauuguuugcacgagaaauauggaggccugaauaagagcaagccauacuacacuggugaacaugccaaagcuaucgggaacugccccauuugggugaagaccccgcuaaaacucgccaauggcacaaaguaucggccucccgcaaaacugcuuaaggagcgcggauuuuucggcgcuaucgccggguuucuggaaggagguugggagggcaugauagcgggguggcacggauacacuagccauggcgcccacgguguugcaguggcugccgacuugaagucuacccaggaagcuauuaacaaaaucacaaagaaucucaacucccugagcgaguuagaggucaaaaaucugcagcgacucucgggggccauggaugaacuucacaacgagauccuggaauuggacgagaagguggaugaccuaagagcagacaccauuucuucccaaaucgaacuggccguacuccugucaaaugagggcauuauaaacagugaggaugaacaucuucuggcuuuggagaggaaacucaagaagaugcugggaccaagcgcgguugaaaucggcaauggguguuucgagacuaaacacaagugcaaccagacgugcuuagaccggauugcagccggaacauuuaaugcuggugaguucucccugccuaccuuugauucucuaaacaucacugccgcaagccucaacgacgauggccuggacaaucauaccauccuuuuguauuacucaacagccgcuaguucccuggccgugacccucaugauugcaauauucgucguguauauggucagccgugauaacgugucuuguucaaucugccuguga

SEQ ID NO: 154538 - RNA, 1758 nt, Artificial Sequence
  derived and/or modified CDS sequence (opt3) from hemagglutinin__InfluenzaB__ABN50547
augaaggccaucauugugcugcucauggucguuaccagcaacgcugacagaauaugcacaggcaucacuuccucuaauucaccccacgugguaaaaacggcaacccagggggaagugaacgucacaggagugauuccucuuacuaccacaccaaccaagagucauuucgccaaucugaaagguacuaagacaaggggcaaauuguguccgaagugcuuaaacuguaccgaucuggacguugcgcuagggcggcccaagugcacgggaaauaucccuagcgcuaaaguguccauucuccacgaaguccgcccagugacuucuggcuguuuucccaucaugcaugaucgaaccaagauacgucaacugccuaaccuucugagagguuacgagcacaucagguugucgacacauaauguaauuaacgccgaaaaagcaccagggggacccuauaagaucggcacuucaggcagcugcccuaauguuaccaacgggaauggauucuuugccacaauggcuugggcagugccaaagaacgacaauaacaagaccgccacgaauagucucacuauugaggucccguacaucuguacagaaggugaggaucagcugaccguguggggcuuccacuccgacaacgagaaccagauggcuaagcuguauggggauucuaaaccccagaaguuuacuagcuccgccaauggagugacaacccacuacgucucacaaauaggcgguuucccuaaccagacggaagacgggggacucccacagaguggccggauuguuguggauuauaugguacagaaaagcggcaagaccgggacaaucacuuaccaacgcggaauuuuacugccccagaaaguguggugcgcgucugguagauccaaggucaucaaaggcucacuuccuuugaucggggaggcagacugucugcaugaaaaguauggaggccuaaauaagagcaaaccauacuacaccggugagcacgccaaggcuauugggaacugccccauaugggugaaaacaccgcucaagcuggccaauggcacuaaauauaggccucccgcaaaacuucugaaggagcggggauuuuucggcgcuaucgccggguuuuuggaaggagguugggagggcaugauugcgggguggcauggauacaccagucacggcgcccacgguguugcaguggcugccgaucucaaaucuacacaggaagcuaucaacaagauaaccaaaaaucugaacuccuuaagcgagcuggaagucaagaaucuccagcgccuuucgggggccauggacgagcugcauaacgagauuuuggaacuagaugagaaaguggacgaccugcgagcagauacuaucucuucccaaaucgaacucgccguacugcuuucaaaugagggcauuaucaacagugaagacgagcaccuguuggcucucgagagaaagcugaagaaaauguuaggaccaagcgcgguugaaauuggcaauggguguuucgagacgaagcauaaaugcaaccagacaugccuggauaggauagcagccggaaccuuugacgcuggugaguucucccuaccuacuuuugauucucucaauaucaccgccgcaagccugaacgacgauggccuugacaaccacacaauuuugcuguauuacucaaccgccgcuaguucccucgccgugacucugaugaucgcaaucuucgucguguauauggucagccgggauaaugugucuuguucaauuugccuuuga

SEQ ID NO: 154539 - RNA, 1758 nt, Artificial Sequence
  derived and/or modified CDS sequence (opt3) from hemagglutinin__InfluenzaB__ABN50558
augaaggccaucauugugcugcucauggucguuaccagcaacgcugacagaauaugcacaggcaucacuuccucuaauucaccccacgugguaaaaacggcaacccagggggaagugaacgucacaggagugauuccucuuacuaccacaccaaccaagagucauuucgccaaucugaaagguacuaagacaaggggcaaauuguguccgaagugcuuaaacuguaccgaucuggacguugcgcuagggcggcccaagugcacgggaaauaucccuagcgcuaaaguguccauucuccacgaaguccgcccagugacuucuggcuguuuucccaucaugcaugaucgaaccaagauacgucaacugccuaaccuucugagagguuacgagcacaucagguugucgacacauaauguaauuaacgccgaaaaagcaccagggggacccuauaagaucggcacuucaggcagcugcccuaauguuaccaacgggaauggauucuuugccacaauggcuugggcagugccaaagaacgacaauaacaagaccgccacgaauagucucacuauugaggucccguacaucuguacagaaggugaggaucagauaaccguguggggcuuccacuccgacaaggagacucagauggcuaaacuguauggggauucuaagccccagaaauuuacaagcuccgccaacggagugaccacgcacuacgucucacaaauuggcgguuucccuaaccagaccgaagacgggggacugccacagaguggccggaucguuguggauuauaugaugcagaaaagcggcaaaacagggacuauuaccuaccaacgcggaauccucuuaccccagaagguauggugcgcgucugguagauccaaagugaucaagggcucacugccucuuauuggggaggcagacuguuugcaugaaaaguauggaggccugaauaaaagcaagccauacuacacaggugagcacgccaaagcuauagggaacugccccaucugggucaagacuccgcuaaaacucgccaauggcaccaaguauaggccucccgcaaagcugcuuaaagagcggggauuuuucggcgcuauugccggguuucuggaaggagguugggagggcaugaucgcgggguggcauggauacacaagucacggcgcccacgguguggcaguugcugccgauuugaagucuacccaggaagcuauaaacaaaauuacuaagaaucucaacucccugagcgaguuagaagugaaaaaucugcagcgccucucgggggccauggacgagcuucauaacgagauccuggaauuggaugagaaggucgacgaccuacgagcagauacgaucucuucccaaauugaacuggccgugcuccugucaaaugagggcaucauuaacagugaagacgagcaccuucuggcuuuggagagaaagcucaaaaagaugcugggaccaagcgcgguagaaauaggcaauggguguuucgagacaaaacauaagugcaaccagaccugcuuagauaggaucgcagccggaacuuuugacgcuggugaguucucccugccuaccuuugauucucuaaauauuacagccgcaagccucaacgacgauggccuggacaaucacaccauccuuuuguauuacucaacugccgcuaguucccuggccguuacacucaugaucgcaauuuucguggucuauauggugagccgggauaacgucucuuguucaauaugccuguga

SEQ ID NO: 154540 - RNA, 1755 nt, Artificial Sequence; identical to SEQ ID NO: 154455
  derived and/or modified CDS sequence (opt3) from hemagglutinin__InfluenzaB__ABN50569

SEQ ID NO: 154541 - RNA, 1758 nt, Artificial Sequence; identical to SEQ ID NO: 154467
  derived and/or modified CDS sequence (opt3) from hemagglutinin__InfluenzaB__ABN50580

SEQ ID NO: 154542 - RNA, 1758 nt, Artificial Sequence
  derived and/or modified CDS sequence (opt3) from hemagglutinin__InfluenzaB__ABN50591
augaaggccaucauugugcugcucauggucguuaccagcaacgcugacagaauaugcacaggcaucacuuccucuaauucaccccacgugguaaaaacggcaacccagggggaggugaacgucacaggagugauuccucuuacuaccacaccaaccaagagucauuucgccaaucugaaagguacuaagacaaggggcaaauuguguccgaagugcuuaaacuguaccgaucuggacguugcgcuagggcggcccaagugcacgggaaauaucccuagcgcuaaaguguccauucuccacgaaguccgcccagugacuucuggcuguuuucccaucaugcaugaucgaaccaagauacgucaacugccuaaccuucugagagguuacgagaggauccgguugucgaaucacaacguaauuaaugccgaaaaagcaccagggggacccuauaagaucggcacaucaggcagcugcccuaacguuacuaaugggaacggauucuuugccaccauggcuugggcagugccgaaaaaugagaacaauaagacagccaccaacagucucacgauugaagucccauacaucuguacugagggugaggaccagauaacaguguggggcuuccauuccgauaacgaagcucagauggccaagcuguauggggacucuaaaccccagaaguuuaccagcuccgcgaauggagugacuacacacuacgucucacaaauuggcgguuucccuaaccagaccgaggaugggggacugccacagaguggccgcaucguuguggacuauaugguacagaaaagcggcaagacggggaccauuacauaccaaagaggaauccucuuaccccagaaaguguggugcgcaucugguagguccaaggucaucaaaggcucacugccucuuauuggggaagccgauuguuugcacgagaaguauggaggccugaauaagagcaaaccauacuacacuggugagcaugcuaaggccauagggaacugccccaucugggugaaaaccccgcuaaagcucgcaaauggcacaaaauaucggccucccgcuaagcugcuuaaggaacgcggauuuuucggcgccauugcgggguuucuggagggagguugggaaggcaugaucgccggguggcacggauacacaagucauggcgcacacgguguugcuguggccgcugacuugaaaucuacccaggaggccauaaacaagauuacuaaaaaucucaacucccugagcgaauuagaggucaagaaucugcagcgacucucgggggcaauggaugagcuucacaacgaaauccuggaguuggacgaaaaaguggaugaccuaagagccgacaccaucucuucccaaauugagcuggcuguacuccugucaaaugaaggcaucauuaacagugaggaugagcaucuucuggcguuggaaaggaagcucaagaaaaugcugggaccaagcgcaguugagauaggcaauggguguuucgaaacuaagcacaaaugcaaccagacgugcuuagaccggaucgccgcuggaacauuuaaugccggugaguucucccugccuaccuuugauucucuaaacauuacugcagccagccucaacgacgauggccuggacaaucauaccauccuuuuguauuacucaacagcugccaguucccuggcagugacccucaugaucgcgauuuucgucguguauauggucagccgugauaacgugucuuguucaauaugccuguga

SEQ ID NO: 154543 - RNA, 1758 nt, Artificial Sequence
  derived and/or modified CDS sequence (opt3) from hemagglutinin__InfluenzaB__ABN50602
augaaggccaucauugugcugcucauggucguuaccagcaacgcugacagaauaugcacaggcaucacuuccucuaauucaccccacgugguaaaaacggcaacccagggggaggugaacgucacaggagugauuccucuuacuaccacaccaaccaagagucauuucgccaaucugaaagguacuaagacaaggggcaaauuguguccgaagugcuuaaacuguaccgaucuggacguugcgcuagggcggcccaagugcaugggaacgaucccuagcgcuaaagccuccauucuccacgaagugaagccagucacuucuggcuguuuucccaucaugcaugaucgcaccaaaauacgacaacugccuaaucuucugcgugguuacgagaacaucagauugucgacacacaaugugauuaacgcagaaacugccccagggggacccuauaagaucggcaccucaggcagcugcccuaauauuacaaacgggaauggauucuuugcuaccauggcaugggccguaccgaaaaacgacaauaacaagacggcuacuaauccacucacaguugaggugcccuacaucuguaccgaaggugaggaucagauaacugucuggggcuuccauagugacaacgagacacagauggugaagcuguauggggauuccaaaccucagaaguuuaccucuagcgccaacggagugacggcgcacuacgucucccaaauuggcgguuucccaaaucaggcagaagacgggggacugccccagucaggcaggaucguuguggauuauaugguacagaaaaguggcaagaccgggacaauuacuuaccaacggggaauccucuuaccucagaaaguguggugcgccagcggucgcucuaaggucaucaaaggcucccugccacuuauuggggaggcugacuguuugcacgaaaaguauggaggccugaacaagucaaaacccuacuacaccggugagcaugccaaggcaauagggaauugcccgaucugggugaaaacaccucuaaagcucgcuaacggcacuaaauauagacccccagccaagcugcuuaaggagaggggauuuuucggcgcgauugccggguuucuggaaggagguugggagggcaugaucgcaggguggcacggauacaccagccauggcgcucacgguguugccguggcugccgauuugaaaaguacacaggaagcaauaaauaagauuaccaaaaaccucaauucucuguccgaguuagaagucaagaaccugcagcggcucagcggggccauggacgagcuucacaaugagauccuggaauuggaugagaaaguggacgaccuacgcgcugauacuaucucgucucaaauugaacuggcgguacuccuguccaacgagggcaucauuaauucagaagacgagcaucuucuggcauuggagcgaaagcucaagaaaaugcugggaccuagugccguugauauaggcaacggguguuucgaaacgaagcacaaaugcaaucagacaugcuuagacagaaucgcugccggaaccuuuaacgccggugaguucagccugcccacuuuugauucccuaaauauuaccgcagcuucucucaacgacgauggccuggacaaccauacaauccuuuuguauuacagcaccgccgcaucaagucuggcggugacucucaugaucgcuauuuucauagucuauaugguguccagggauaaugucagcuguucuaucugccuguga

SEQ ID NO: 154544 - RNA, 1752 nt, Artificial Sequence
  derived and/or modified CDS sequence (opt3) from hemagglutinin__InfluenzaB__ABN50624
augaaggccaucauugugcugcucauggucguuaccagcaacgcugacagaauaugcacaggcaucacuuccucuaauucaccccacgugguaaaaacggcaacccagggggaggugaacgucacaggagugauuccucuuacuaccacaccaaccaagagucauuucgccaaucugaaagguacuaagacaaggggcaaauuguguccgaacugcuuaaauuguaccgaucuggacguugcgcuagggcggcccaugugcaucggaacgauuccuagcgcuaaggccuccauccuccacgaagugcgcccagucacuucuggcuguuuucccauaaugcaugaucgaaccaagauccgucaacugccuaaccuucugagagguuacgagaauauuagguugucgacacacaacgugaucaaugcagaacgggccccagggggacccuaucgccucggcacuucaggcagcugcccuaacguaaccaguaaauccggguucuuugcuacaauggcaugggccguuccaagagacaauaagaccgcuacgaacccgcugacuguggagguccccuacauuuguacaaaaggagaagaucagaucaccgugugggguuuccauucugacaauaagaaccagaugaaaaaucuguauggcgauagcaacccucagaaguuuacuuccucagugaacggggucacaacccacuacguuagucaaauaggaggcuucccaaaucagacggaggacggugggcucccccagagcggaaggauugugguagauuauauggugcagaagccuggcaaaaccggcacaaucgucuaccaacgcgggguguuacugccacagaagguuuggugcgccucuggacgguccaaagugauuaaggguucacuucccuugaucggcgaggcggacugucugcacgaaaaauaugggggacuaaacaagagcaaaccguacuacacuggcgagcaugcaaaggccaucgguaauugcccuauuugggucaagaccccacucaaacuggcuaacgggacaaaguaucgacccccugccaaacuucugaaggaaagaggcuuuuucggagcaauagcuggcuuuuuggaagggggaugggaggguaugaucgccggcuggcacggguacacuucccauggagcgcacggcguggccguagcagcugaucucaaaucuacccaggaggccauuaauaagaucacaaagaaccugaauaguuuaagcgagcuggaaguuaaaaaccuccagaggcuuucgggugcuauggacgagcugcacaaugaaauauuggagcuagaugagaagguggacgaccugcgggccgauaccauuucuucccaaaucgaacucgcaguccugcuuucaaacgaggggaucauuaauagugaagacgagcaucuguuggcccucgaacguaaacugaagaaaauguuaggccccagcgcuguggauaucggaaacggcuguuucgagacuaagcacaagugcaaucagacgugccuggaccgcauugcggcagggacauuuaacgccggagaguucucccuaccaaccuuugauucucucaauauaacugcugccagccugaacgacgauggucuugacaaccauaccaucuugcuguauuacucaacagcagccaguucccucgcugucacccugaugauugccaucuucaucguguauaugguuagcagagauaaugugucuuguucaauuugccuuuga

SEQ ID NO: 154545 - RNA, 1752 nt, Artificial Sequence
  derived and/or modified CDS sequence (opt3) from hemagglutinin__InfluenzaB__ABN50635
augaaggccaucauugugcugcucauggucguuaccagcaacgcugacagaauaugcacaggcaucacuuccucuaauucaccccacgugguaaaaacggcaacccagggggaggugaacgucacaggagugauuccucuuacuaccacaccaaccaagagucauuucgccaaucugaaagguacuaagacaaggggcaaauuguguccgaacugcuuaaauuguaccgaucuggacguugcgcuagggcggcccaugugcaucggaacgauuccuagcgcuaaggccuccauccuccacgaagugcgcccagucacuucuggcuguuuucccauaaugcaugaucgaaccaagauccgucaacugccuaaccuucugagagguuacgagcacauuagguugucgacacauaaugugaucaacgcagaacgggccccagggggacccuaucgccucggcacuucaggcagcugcccuaauguaaccaguagauccggguucuuugcuacaauggcaugggccguuccaagggacaacaaaaccgcuacgaauccgcugacuguggagguccccuacauuuguacaaagggagaagaucagaucaccgugugggguuuccacucugacagcaaaacucagaugaagaaccuguauggcgauuccaauccucagaaauuuacaucaagugccaacggggugaccacgcacuacgucagccaaauaggaggcuucccaaaucagaccgaggacggugggcucccccagucuggacggauuguuguggauuauaugguacagaagccuggcaagacaggcacuaucguguaccaacgcggggucuuacugccacagaaaguguggugcgcguccggacgaucaaagguuauuaaagguagccuucccuugaucggcgaggcagacugucugcaugaaaaguaugggggacuaaacaaaaguaagccguacuacaccggcgagcacgccaaagcuaucgguaacugcccuauuugggugaagacaccccucaagcuggccaaugggacuaaauauagaccuccagcaaaacuucugaaggaaaggggcuuuuucggagcuauagccggcuuuuuggaagggggaugggaggguaugaucgcgggcuggcauggguacaccucucacggagcccacggcgucgcaguggcugccgaucucaaguccacacaggaggcuauuaacaaaaucaccaagaaucugaacagcuuaucggagcuggaaguaaagaaucuccagcggcuuucuggugccauggacgagcugcauaacgaaauauuggagcuagaugagaaaguugacgaccugcgugcagauacuauuuccucacaaaucgaacucgccgugcugcuuaguaaugaggggaucauuaacagcgaagacgagcaccuguuggcucucgaacgcaagcugaaaaagauguuaggccccuccgcggucgauaucggaaauggcuguuucgagacgaaacauaagugcaaccagacaugccuggacagaauugcagccgggaccuuuaaugcuggagaguucucucuaccaacuuuugauagccucaacauaaccgccgcaucacugaaugacgauggucuugacaaccacacaaucuugcuguauuacaguaccgccgcuuccagccucgccgugacucugaugauugcaaucuucaucgucuauauggugucuagggauaauguuucauguaguauuugccuuuga

SEQ ID NO: 154546 - RNA, 1752 nt, Artificial Sequence
  derived and/or modified CDS sequence (opt3) from hemagglutinin__InfluenzaB__ABN50646
augaaggccaucauugugcugcucauggucguuaccagcaacgcugacagaauaugcacaggcaucacuuccucuaauucaccccacgugguaaaaacggcaacccagggggaggugaacgucacaggagugauuccucuuacuaccacaccaaccaagagucauuucgccaaucugaaagguacuaagacaaggggcaaauuguguccgaacugcuuaaauuguaccgaucuggacguugcgcuagggcggcccaugugcaucggaacgauuccuagcgcuaaggccuccauccuccacgaagugcgcccagucacuucuggcuguuuucccauaaugcaugaucgaaccaagauccgucaacugccuaaccuucugagagguuacgagcacauuagguugucgacacauaaugugaucaacgcagaacgggccccagggggacccuaucgccucggcacuucaggcagcugcccuaauguaaccaguagauccggguucuuugcuacaauggcaugggccguuccaagggacaacaaaaccgcuacgaauccgcugacuguggagguccccuacauuuguacaaagggagaagaucagaucaccgugugggguuuccacucugacaacaaaaaucagaugaagaaccuguauggcgauagcaauccucagaaauuuacuuccucagccaacggggugacaacccacuacgucagucaaauaggaggcuucccaaaccagacggaggacggugggcucccccagagcggacggauuguuguggauuauaugguacagaagccuggcaagaccggcacaaucguguaccaacgcggggucuuacugccacagaaaguguggugcgcgucuggacgauccaagguuauuaaagguucacuucccuugaucggcgaggcagacugucugcaugaaaaguaugggggacuaaauaaaagcaagccguacuacacuggcgagcacgccaaagcuaucgguaacugcccuauuugggugaagacuccccucaagcuggccaaugggacaaaauauagaccuccagcaaaacuucugaaggaaaggggcuuuuucggagcuauagccggcuuuuuggaagggggaugggaggguaugaucgcgggcuggcauggguacaccagucacggagcccacggcgucgcaguggcugccgaucucaagucuacccaggaggcuauuaacaaaaucacaaagaaucugaacuccuuaagcgagcuggaaguaaagaaucuccagcggcuuucgggugccauggacgagcugcauaacgaaauauuggagcuagaugagaaaguugacgaccugcgugcagauaccauuucuucccaaaucgaacucgccgugcugcuuucaaaugaggggaucauuaacagugaagacgagcaccuguuggcucucgaacgcaagcugaaaaagauguuaggccccagcgcggucgauaucggaaauggcuguuucgagacuaaacauaagugcaaccagacgugccuggacagaauugcagccgggacauuuaaugcuggagaguucucccuaccaaccuuugauucucucaacauaacugccgcaagccugaaugacgauggucuugacaaccacaccaucuugcuguauuacucaacagccgcuaguucccucgccgugacccugaugauugcaaucuucaucgucuauauggugagcagggauaacguuucuuguucaauuugccuuuga

SEQ ID NO: 154547 - RNA, 1752 nt, Artificial Sequence
  derived and/or modified CDS sequence (opt3) from hemagglutinin__InfluenzaB__ABN50657
augaaggccaucauugugcugcucauggucguuaccagcaacgcugacagaauaugcacaggcaucacuuccucuaauucaccccacgugguaaaaacggcaacccagggggaggugaacgucacaggagugauuccucuuacuaccacaccaaccaagagucauuucgccaaucugaaagguacuaagacaaggggcaaauuguguccgaacugcuuaaauuguaccgaucuggacguugcgcuagggcggcccaugugcgugggaaucacgccuagcgcuaaggccuccauucuccacgaaguccgcccagugacuucuggcuguuuucccaucaugcaugaucgaaccaagauacgucaacugccuaaccuucugagagguuacgagaauaucagguugucgacacagaacguaauuaaugcagaaaaagccccagggggacccuaucggcucggcacuucaggcagcugcccuaacguuaccagucgcacaggguucuuugcuaccauggcaugggccgugccaagagacaauaagacggcuacuaacccgcugacagucgaggugcccuacaucuguaccaaaggagaagaucagauuacugugugggguuuccacuccgacaauaagacacagaugaaaaaccuguauggcgauucuaauccucaaaaguuuaccagcuccgccaacggggucacgacccauuacguuucacagaucggaggcuucccagaccagacagaggauggugggcucccccagaguggaaggauagugguagacuauauggugcaaaagccuggcaaaacuggcaccauugucuaccagcgggggaucuuacugccacagaagguguggugcgcgagcggacgcucuaaaguuauuaaggguucccuucccuugaucggcgaggcagauugucugcacgaaaaauaugggggacuaaacaagucaaaaccguacuacacaggcgagcacgccaaggcuaucgguaauugcccuauuugggugaagacuccccucaaacuggccaacgggaccaaguaucgaccuccagcaaaacuucugaaggaaagaggcuuuuucggagcuauagccggcuuuuuggaagggggaugggaggguaugaucgcgggcuggcauggguacacaagccacggagcccauggcgucgcaguggcugccgaccucaaaaguacccaggaggcuauuaauaagaucacuaagaacuuaaauucucuguccgagcuggaaguuaaaaaccuccaaaggcuuagcggugccauggaugagcugcacaaugaaauauuggagcuagacgagaagguagacgaucugcgggcagacacgauuucgucucagaucgaacucgccgugcugcuuuccaacgaggggaucauuaauucagaagaugagcaccuguuggcucucgaacguaaacugaagaaaauguuaggccccagugcggucgacaucggaaacggcuguuucgagacaaagcauaagugcaaucagaccugccuggaucgcauugcagccgggacuuuuaacgcuggagaguucagccuaccaaccuuugacucccucaauauaacagccgcaucucugaacgaugacggucuugauaaucacaccaucuugcuguauuacagcacugccgcuucaagucucgccgugacacugaugauugcaaucuucaucgucuauaugguguccagagacaacguuagcuguucuauuugccuuuga

SEQ ID NO: 154548 - RNA, 1755 nt, Artificial Sequence
  derived and/or modified CDS sequence (opt3) from hemagglutinin__InfluenzaB__ABN50679
augaaggccaucauugugcugcucauggucguuaccagcaacgcugacagaauaugcacaggcaucacuuccucuaauucaccccacgugguaaaaacggcaacccagggggaggugaacgucacaggagugauuccucuuacuaccacaccaaccaagagucauuucgccaaucugaaagguacuaagacaaggggcaaauuguguccgaacugcuuaaauuguaccgaucuggacguugcgcuagggcggcccaugugcgugggaacgacuccuagcgcuaaggccuccauccuccacgaaguccgcccagugaccucuggcuguuuucccauuaugcaugaucgaacaaagauccgucaacugccuaaccuucugagagguuacgagaauauaagguugucgacucagaacguaaucaaugcagaaaaagccccagggggacccuaucggcucggcaccucaggcagcugcccuaacgcuacaagucgcuccggguucuuugcaaccauggccugggcuguuccaagagacaauaacaagacggccacuaauccgcugacaguggagguccccuacauuuguaccaaaggagaagaucagaucacugugugggguuuccacucugacgauaagacacagaugaaaaaccuguauggcgacagcaauccucaaaaguuuaccuccucagcgaacggggugacgacccauuacgucagucagauuggaggcuucccagaucagacagaggacggugggcucccccagagcggaaggaucguuguggauuauaugguacaaaagccuggcaaaacuggcaccauaguguaccagcgcggggucuuacugccacagaagguguggugcgcaucuggacgguccaaaguuauuaaggguucacuucccuugaucggcgaggccgacugucugcacgaaaaauaugggggacuaaacaagagcaaaccguacuacacaggcgagcacgcuaaggccauugguaauugcccuaucugggugaagacuccccucaaacuggcaaacgggaccaaguaucgaccuccagcuaaacuucugaaggaaagaggcuuuuucggagccaucgcgggcuuuuuggaagggggaugggaggguaugauugccggcuggcauggguacacaagucacggagcacauggcgucgcuguggccgcugaucucaaaucuacccaggaggccauaaauaagaucacuaagaacuuaaauucccugagcgagcuggaaguuaaaaaccuccaaaggcuuucgggugcaauggacgagcugcacaaugaaauuuuggagcuagacgagaagguagaugaccugcgggccgauacgaucucuucccagauagaacucgcugugcugcuuucaaacgaggggauuaucaauagugaagacgagcaccuguuggcgcucgaacguaaacugaagaaaauguuaggccccagcgcagucgauaucggaaacggcuguuucgagacaaagcauaagugcaaucagaccugccuggaccgcauugccgcugggacuuuuaacgccggagaguucucccuaccaaccuuugauucucucaauaucacagcagccagccugaacgacgauggucuugacaaucacaccauuuugcuguauuacucaacugcugccaguucccucgcagugacacugaugauagcgaucuucauugucuauauggugagcagagauaacguuucuuguucaaucugccuuuga

SEQ ID NO: 154549 - RNA, 1755 nt, Artificial Sequence
  derived and/or modified CDS sequence (opt3) from hemagglutinin__InfluenzaB__ABN50690
augaaggccaucauugugcugcucauggucguuaccagcaacgcugacagaauaugcacaggcaucacuuccucuaauucaccccacgugguaaaaacggcaacccagggggaggugaacgucacaggagugauuccucuuacuaccacaccaaccaagagucauuucgccaaucugaaagguacuaagacaaggggcaaauuguguccgaacugcuuaaauuguaccgaucuggacguugcgcuagggcggcccaugugcgugggaacgacuccuagcgcuaaggccuccauccuccacgaaguccgcccagugaccucuggcuguuuucccauuaugcaugaucgaacaaagauccgucaacugccuaaccuucugagagguuacgagaauauaagguugucgacucagaacguaaucaaugcagaaaaagccccagggggacccuaucggcucggcaccucaggcagcugcccuaacgcuacaagucgcuccggguucuuugcaaccauggccugggcuguuccaagagacaauaacaagacggccacuaauccgcugacaguggagguccccuacguguguaccgaaggagaggaucagauuacugugugggguuuccacucugacaacaaaacacagaugaagaaucuguauggcgauagcaacccucaaaaauuuaccuccucagcgaacggggucacgacccauuacguuagucagaucggaggcuucccagaccagacagaggauggugggcucccccagagcggaaggauugugguagacuauauggugcaaaagccuggcaagacuggcaccaucgucuaccagcgcgggguguuacugccacagaaaguuuggugcgcaucuggacgguccaaggugauaaaagguucacuucccuugauuggcgaagccgauugucugcacgagaaguaugggggacuaaauaaaagcaagccguacuacacaggcgaacacgcuaaagccaucgguaacugcccuauuugggucaagacuccccucaagcuggcaaaugggaccaaauaucgaccuccagcuaaacuucugaaggagagaggcuuuuucggagccaucgcgggcuuuuuggaagggggaugggaagguaugaucgccggcuggcauggguacacaagucacggagcacauggcguggcuguagccgcugaccucaagucuacccaggaggccauuaacaaaauaacuaagaaucugaacuccuuaagcgaacuggagguuaagaaucuccaaaggcuuucgggugcaauggaugaacugcacaacgagaucuuggagcuagacgaaaaaguggacgaucugcgggccgacacgauuucuucccagaucgagcucgcuguccugcuuucaaaugaagggauaauuaacagugaggaugaacaccuguuggcgcucgagcguaagcugaaaaagauguuaggccccagcgcaguggacaucggaaauggcuguuucgagacaaaacauaagugcaaccagaccugccuggaucgcaucgccgcugggacuuuuaaugccggagaguucucccuaccaaccuuugacucucucaacauuacagcagccagccugaaugaugacggucuugauaaccacaccaucuugcuguauuacucaacugcugccaguucccucgcagucacacugaugauugcgauauucaucguguauaugguuagcagagacaacgugucuuguucaauuugccuuuga

SEQ ID NO: 154550 - RNA, 1752 nt, Artificial Sequence
  derived and/or modified CDS sequence (opt3) from hemagglutinin__InfluenzaB__ABN50701
augaaggccaucauugugcugcucauggucguuaccagcaacgcugacagaauaugcacaggcaucacuuccucuaauucaccccacgugguaaaaacggcaacccagggggaggugaacgucacaggagugauuccucuuacuaccacaccaaccaagagucauuucgccaaucugaaagguacuaagacaaggggcaaauuguguccgaacugcuuaaauuguaccgaucuggacguugcgcuagggcggcccaugugcgugggaaucacgccuagcgcuaaggccuccauucuccacgaaguccgcccagugacuucuggcuguuuucccaucaugcaugaucgaaccaagauacgucaacugccuaaccuucugagagguuacgagaauaucagguugucgacacagaacguaauuaaugcagaaaaagccccagggggacccuaucggcucggcacuucaggcagcugcccuaacguuaccagucgcacaggguucuuugcuaccauggcaugggccgugccaagagacaauaagacggcuacuaacccgcugacagucgaggugcccuacaucuguaccaaaggagaagaucagauuacugugugggguuuccacuccgacaauaaggcccagaugaaaaaccuguauggcgauucuaauccucaaaaguuuacaagcuccgcgaacggggucaccacgcauuacguuucacagaucggaggcuucccagaccagaccgaggauggugggcucccccagaguggaaggauagugguagacuauauggugcaaaagccuggcaaaacaggcacuauugucuaccagcgggggaucuuacugccacagaagguguggugcgcaagcggacgcucuaaaguuauuaaggguucccuucccuugaucggcgaggccgauugucugcacgaaaaauaugggggacuaaacaagucaaaaccguacuacaccggcgagcacgcuaaggccaucgguaauugcccuauuugggugaagacaccccucaaacuggcaaacgggacuaaguaucgaccuccagcuaaacuucugaaggaaagaggcuuuuucggagccauagcgggcuuuuuggaagggggaugggaggguaugaucgccggcuggcauggguacaccagccacggagcacauggcgucgcuguggccgcugaccucaaaaguacacaggaggccauuaauaagaucaccaagaacuuaaauucucuguccgagcuggaaguuaaaaaccuccaaaggcuuagcggugcaauggaugagcugcacaaugaaauauuggagcuagacgagaagguagacgaucugcgggccgacacuauuucgucucagaucgaacucgcugugcugcuuuccaacgaggggaucauuaauucagaagaugagcaccuguuggcgcucgaacguaaacugaagaaaauguuaggccccagugcagucgacaucggaaacggcuguuucgagacgaagcauaagugcaaucagacaugccuggaucgcauugccgcugggaccuuuaacgccggagaguucagccuaccaacuuuugacucccucaauauaaccgcagccucucugaacgaugacggucuugauaaucacacaaucuugcuguauuacagcaccgcugccucaagucucgcagugacucugaugauugcgaucuucaucgucuauaugguguccagagacaacguuagcuguucuauuugccuuuga

SEQ ID NO: 154551 - RNA, 1755 nt, Artificial Sequence; identical to SEQ ID NO: 154549
  derived and/or modified CDS sequence (opt3) from hemagglutinin__InfluenzaB__ABN50712

SEQ ID NO: 154552 - RNA, 1755 nt, Artificial Sequence
  derived and/or modified CDS sequence (opt3) from hemagglutinin__InfluenzaB__ABN50723
augaaggccaucauugugcugcucauggucguuaccagcaacgcugacagaauaugcacaggcaucacuuccucuaauucaccccacgugguaaaaacggcaacccagggggaagugaacgucacaggagugauuccucuuacuaccacaccaaccaagagucauuucgccaaucugagggguacuaaaacacggggcaaguuguguccgaccugcuuaaacuguacggaucuggacguugcgcuagggcgccccaugugcgugggaacuaccccuagcgcuaaagccuccauccuccacgaaguccgaccagugacaucuggcuguuuucccauuaugcaugaucguacuaagaucagacaacugccuaaucuucugagggguuacgagaagauacgguugucgacccagaacguaaucaaugcagaaaaagccccagggggacccuaucgccucggcacaucaggcagcugcccuaacgcuaccaguagauccggguucuuugcaacgauggccugggcuguuccaagggacaauaacaagacugccacaaauccgcugaccguggagguccccuacauuuguacuaaagaagaggaucagaucacaguguggggauuccacucugacaacaagacccagaugaaaaaucuguauggugauagcaacccucaaaaguuuacguccucagcgaauggcgugaccacacauuacgucagucagauugggggauucccagaccagacugaggauggcggucucccccagagcgggcggaucguuguggacuauaugguacaaaagccuggaaaaaccggcacaauaguguaccagcgcggcauuuuacugccacagaaggucuggugcgcaucugggcgauccaaagugaucaagggaucacuucccuugauuggugaagccgauugucugcacgagaaauauggcgggcuaaacaagagcaaaccguacuacacuggagaacacgcuaaggccaucggcaacugcccuaucuggguuaagaccccacucaaacuggcaaaugguacaaaguauagacccccugcuaaacuucugaaggagaggggguuuuucggcgccauugcgggauuuuuggagggcgggugggaaggaaugauagccgguuggcauggcuacaccagucacggggcacauggaguggcugucgccgcugaccucaaaucuacucaggaggccaucaacaagauuacgaagaaucugaacuccuuaagcgaacuggaggugaaaaaucuccaacggcuuucgggcgcaauggaugaacugcacaacgagaucuuggagcuagacgaaaagguagacgaucugcgugccgacacaauaucuucccagauugagcucgcuguucugcuuucaaaugaagguaucaucaacagugaggaugaacaccuguuggcgcucgagcgcaaacugaagaaaauguuagggcccagcgcaguggacauuggcaauggauguuucgagaccaagcauaagugcaaccagacuugccuggauagaaucgccgcuggcaccuuuaaugccggggaguucucccuaccaacauuugacucucucaacauuaccgcagccagccugaaugaugacggacuugauaaccacacuauauugcuguauuacucaacagcugccaguucccucgcagucacgcugaugaucgcgauuuucaucguguauaugaucagcagggacaaugucucuuguucaauuugccuuuga

SEQ ID NO: 154553 - RNA, 1755 nt, Artificial Sequence
  derived and/or modified CDS sequence (opt3) from hemagglutinin__InfluenzaB__ABN50734
augaaggccaucauugugcugcucauggucguuaccagcaacgcugacagaauaugcacaggcaucacuuccucuaauucaccccacgugguaaaaacggcaacccagggggaagugaacgucacaggagccauuccucuuacuaccacaccaaccaagagucauuucgcgaaucugaaagguacuaagacaaggggcaaauuguguccgaccugcuuaaacuguacggaucuggacguggcucuagggcggcccaugugcguuggaaucacuccuagcgccaaggcauccauucuccacgaagugcgcccagucaccucuggcuguuuucccaucaugcaugaucgaacaaagauacgucaacugccuaaucuucugagagguuacgagaaaaucagguugucgacucagaacgugauuaaugccgaaaaggcuccagggggacccuaucggcucggcaccucaggcagcugcccuaacgcaacaagucgcuccggguucuuuaccacgauggccugggcuguaccaagagacaauaacaaaacugccacaaauccgcugaccguugaggugccccacaucuguacuaaggaagaggaucagauuacagucuggggauuccauucugacgauaaaacccagaugaagaaccuguacggugacagcaauccucaaaaguuuacguccucaaccaacggcaucacaacucacuaugugagucagauagggggauucccagaucagaccgaggacggcggucucccccagagcgggaggauuguggucgauuacaugguucaaaaaccuggaaagacaggcacuaucguguaucagcggggcauuuuacugccacagaaaguauggugcgcgucugggcgcuccaaggugaucaaaggaucacuucccuugaucggugaagcagacugucugcacgagaaguacggcgggcuaaauaaaagcaagccguauuacaccggagaacaugccaaggcuauuggcaacugcccuauaugggucaaaacaccccucaagcuggccaacgguaccaaauaccgaccuccagcaaagcugcugaaagagagaggguuuuucggcgcuaucgccggauuuuuggagggcgggugggaaggaaugauugcggguuggcacggcuauacaagucauggggcccacggaguggcaguugcugccgaucucaagucuacgcaggaggcuaucaauaagauaacuaaaaaccuuaauuccuuaagcgaacuggaggugaagaaccuccaaaggcuuucgggcgccauggacgaacugcacaaugagauuuuggagcuagacgaaaaagucgaugaccugcgggcagauaccaucucuucccagaucgagcucgccgugcugcuuucaaacgaagguauuaucaauagugaggacgaacaucuguuggcucucgagcguaagcugaaaaagauguuagggcccagcgcgguagauauuggcaacggauguuucgagacuaagcacaaaugcaaucagaccugccuggaccgcauagcagccggcacauuuaacgcuggggaguucucccuaccaaccuuugauucucucaauaucacugccgcaagccugaacgacgauggacuugacaaucauacaauuuugcuguacuauucaacggccgcuaguucccucgccguuacccugaugaucgcaaucuucauuguguacaugauaagcagagauaacgucucuuguucaaucugccuuuga

SEQ ID NO: 154554 - RNA, 1758 nt, Artificial Sequence
  derived and/or modified CDS sequence (opt3) from hemagglutinin__InfluenzaB__ABN50745
augaaggccaucauugugcugcucauggucguuaccagcaacgcugacagaauaugcacaggcaucacuuccucuaauucaccccacgugguaaaaacggcaacccagggggaagugaacgucacaggagugauuccucuuacuaccacaccaaccaagagucauuucgccaaucugaaagguacuaagacaaggggcaaauuguguccgaagugcuuaaacuguaccgaucuggacguugcgcuagggcggcccaagugcacgggaaauaucccuagcgcuaaaguguccauucuccacgaaguccgcccagugacuucuggcuguuuucccaucaugcaugaucgaaccaagauacgucaacugccuaaccuucugagagguuacgagcacaucagguugucgacacauaauguaauuaacgccgaaaaagcaccagggggacccuauaagaucggcacuucaggcagcugcccuaauauuaccaacgggaauggauucuuugccacaauggcuugggcaguuccgaaaaacgacaauaacaagaccgccacgaauagucucacuaucgaggugccauacauauguacagaaggugaggaucagauuaccgucuggggcuuccacuccgacaacgagacucagauggcuaagcuguauggggauucuaaaccccagaaguuuacaagcuccgccaacggagugaccacgcacuacgugucacaaaucggcgguuucccuaaucagaccgaagacgggggacugccacagaguggccggauugucguugauuauauggugcagaaaagcggcaagacagggacuaucaccuaccaacgcggaauccucuuaccccagaaaguauggugcgcgucugguagauccaaggugauuaaaggcucacugccucuuauaggggaggcagacuguuugcaugaaaaguauggaggccugaacaagagcaaaccauacuacacaggugagcacgccaaggcuaucgggaauugccccauuugggucaaaacuccgcuaaagcucgccaacggcaccaaauauaggccucccgcaaagcugcuuaaggagcggggauuuuucggcgcuaucgccggguuucuggaaggagguugggagggcaugauagcgggguggcauggauacacaagucacggcgcccacgguguggcaguugcugccgauuugaaaucuacccaggaagcuauuaauaagaucacuaaaaaccucaauucccugagcgaguuagaagugaagaaccugcagcgccucucgggggccauggacgagcuucauaaugagauccuggaauuggaugagaaagucgacgaccuacgagcagauacgauuucuucccaaaucgaacuggccgugcuccugucaaacgagggcauuauaaauagugaagacgagcaccuucuggcuuuggagagaaagcucaagaaaaugcugggaccaagcgcgguagaaaucggcaacggguguuucgagacaaagcauaaaugcaaucagaccugcuuagauaggauugcagccggaacuuuuaacgcuggugaguucucccugccuaccuuugacucucuaaauaucacagccgcaagccucaacgaugacggccuggauaaccacaccauccuuuuguauuacucaacugccgcuaguucccuggccguuacacucaugauugcaauauucguggucuauauggugagccgggacaaugucucuuguucaaucugccuguga

SEQ ID NO: 154555 - RNA, 1752 nt, Artificial Sequence
  derived and/or modified CDS sequence (opt3) from hemagglutinin__InfluenzaB__ABN51184
augaaggccaucauugugcugcucauggucguuaccagcaacgcugacagaauaugcacaggcaucacuuccucuaauucaccccacgugguaaaaacggcaacccagggggaggugaacgucacaggagugauuccucuuacuaccacaccaaccaagagucauuucgccaaucugaaagguacuaagacaaggggcaaauuguguccgaacugcuuaaauuguaccgaucuggacguugcgcuagggcggcccaugugcaucggaacgauuccuagcgcuaaggccuccauccuccacgaagugcgcccagucacuucuggcuguuuucccauaaugcaugaucgaaccaagauccgucaacugccuaaccuucugagagguuacgagaauauuagguugucgacacacaacgugaucaaugcagaacgggccccagggggacccuaucgccucggcacuucaggcagcugcccuaacguaaccaguaaauccggguucuuugcuacaauggcaugggccguuccaagagacaauaagaccgcuacgaacccgcugacuguggagguccccuacauuuguacaaaaggagaagaucagaucaccgugugggguuuccauucugacaauaagauacagaugaaaaaccuguauggcgauagcaauccucagaaguuuacuuccucagccaacggggugacaacccacuacgucagucaaauuggaggcuucccaaaccagacggaggacggugggcucccccagagcggaaggaucguuguggauuauaugguacagaagccuggcaaaaccggcacaauuguguaccaacgcggggucuuacugccacagaagguguggugcgcgucuggacgguccaaaguuaucaaggguucacuucccuugaucggcgaggcagacugucugcacgaaaaauaugggggacuaaauaagagcaaaccguacuacacuggcgagcaugccaaggcuauugguaacugcccuauaugggugaagacuccccucaaacuggccaaugggacaaaguaucgaccuccagcaaaacuucugaaggaaagaggcuuuuucggagcuaucgccggcuuuuuggaagggggaugggaggguaugauugcgggcuggcacggguacaccagucauggagcccacggcgucgcaguggcugccgaucucaaaucuacccaggaggcuaucaacaagauaacaaagaaucugaacuccuuaagcgagcuggaaguuaaaaaucuccagaggcuuucgggugccauggacgagcugcacaacgaaauuuuggagcuagaugagaagguagacgaccugcgggcagauaccaucucuucccaaaucgaacucgccgugcugcuuucaaaugaggggauuaucaacagugaagacgagcaucuguuggcucucgaacguaaacugaagaaaauguuaggccccagcgcggucgauauuggaaauggcuguuucgagacuaagcacaagugcaaccagacgugccuggaccgcauagcagccgggacauuuaaugcuggagaguucucccuaccaaccuuugauucucucaacaucacugccgcaagccugaaugacgauggucuugacaaccauaccauuuugcuguauuacucaacagccgcuaguucccucgccgugacccugaugaucgcaaucuucauugucuauauggugagcagagauaacguuucuuguucaauaugccuuuga

SEQ ID NO: 154556 - RNA, 1752 nt, Artificial Sequence
  derived and/or modified CDS sequence (opt3) from hemagglutinin__InfluenzaB__ABN51195
augaaggccaucauugugcugcucauggucguuaccagcaacgcugacagaauaugcacaggcaucacuuccucuaauucaccccacgugguaaaaacggcaacccagggggaggugaacgucacaggagugauuccucuuacuaccacaccaaccaagagucauuucgccaaucugaaagguacuaagacaaggggcaaauuguguccgaacugcuuaaauuguaccgaucuggacguugcgcuagggcggcccaugugcaucggaacgauuccuagcgcuaaggccuccauccuccacgaagugcgcccagucacuucuggcuguuuucccauaaugcaugaucgaaccaagauccgucaacugccuaaccuucugagagguuacgagaauauuagguugucgacacacaacgugaucaaugcagaacgggccccagggggacccuaucgccucggcacuucaggcagcugcccuaacguaaccaguagauccggguucuuugcuacaauggcaugggccguuccaagggacaauaaaaccgcuacgaacccgcugacuguggagguccccuacauuuguacaaagggagaagaucagaucaccgugugggguuuccauuuugacaauaaaauacagaugaagaaccuguauggcgauucuaauccucagaaauucacuagcuccgccaacggggugacaacccacuacgucucacaaauuggaggcuuuccaaaccagacggaggacggugggcucccccagaguggacggaucguuguggauuauaugguacagaagccuggcaagaccggcacaauuguguaccaacgcggggucuuacugccacagaaaguguggugcgcgagcggacgaucuaagguuaucaaagguucccuucccuugaucggcgaggcagacugucugcacgaaaaguaugggggacuaaauaaaucaaagccguacuacacuggcgagcaugccaaagcuauugguaacugcccuauaugggugaagaccccacucaagcuggccaaugggacaaaauauagacccccugcaaaacuucugaaggaaaggggcuucuuuggagcuaucgccggcuucuuggaagggggaugggaggguaugauugcgggcuggcacggguacacuagccauggagcccacggcgucgcaguggcugccgaucucaagaguacccaggaggcuaucaacaaaauaacaaagaaucugaacucuuuauccgagcuggaaguaaagaaucuccagcggcuuagcggugccauggacgagcugcacaacgaaauuuuggagcuagaugagaaaguugacgaccugcgugcagauaccaucucgucucaaaucgaacucgccgugcugcuuuccaaugaggggauuaucaacucagaagacgagcaucuguuggcucucgaacgcaagcugaaaaagauguuaggccccagugcggucgauauuggaaauggcuguuuugagacuaaacacaagugcaaccagacgugccuggacagaauagcagccgggacauucaaugcuggagaguuuagccuaccaaccuucgauucccucaacaucacugccgcaucucugaaugacgauggucuugacaaccauaccauuuugcuguauuacagcacagccgcuucaagucucgccgugacccugaugaucgcaaucuucauugucuauaugguguccagggauaacguuagcuguucuauaugccuuuga

SEQ ID NO: 154557 - RNA, 1758 nt, Artificial Sequence
  derived and/or modified CDS sequence (opt3) from hemagglutinin__InfluenzaB__ABN58661
augaaggccaucauugugcugcucauggucguuaccagcaacgcugacagaauaugcacaggcaucacuuccucuaauucaccccacgugguaaaaacggcaacccagggggaagugaacgucacaggagugauuccucuuacuaccacaccaaccaagagucauuucgccaaucugaaagguacuaagacaaggggcaaauuguguccgaagugcuuaaacuguaccgaucuggacguugcgcuagggcggcccaagugcacgggaacuaucccuagcgcuaaaguguccauucuccacgaagucaagccagugaccucuggcuguuuucccaucaugcaugaucgcacaaaaauacgacaacugccuaaucuucugcgugguuacgagcacaucagauugucgacucauaacguaauuaaugccgaaaaggcaccagggggacccuauaaaaucggcaccucaggcagcugcccuaacguuacaaaugggaacggauucuuugccaccauggcuugggcagugccaaagaaugacaacaauaagacggccacuaacagucucacagucgaggugccguacauuuguaccgaaggugaggaucagaucacuguguggggcuuccacuccgacaaugagacacagauggcuaaacuguauggggauucuaagccccagaaauuuaccagcuccgccaacggagucacgacccacuacguuucacaaauaggcgguuucccuaaccaggcggaagacgggggacugccacagaguggcaggauugugguagauuauauggugcaaaagagcggcaaaacagggacuaucaccuaccagcgggguauucucuuaccccagaaggucuggugcgcaucuggacgcuccaaagugaucaagggcucacugccucuuaucggggaggccgacuguuugcaugaaaaguauggaggccugaauaaaagcaagccauacuacacaggugagcacgcuaaagccauugggaacugccccauauggguuaagacuccgcuaaaacucgcaaauggcaccaaguauagaccucccgcuaagcugcuuaaagagaggggauuuuucggcgccaucgcgggguuucuggaaggagguugggagggcaugauugccggguggcauggauacacaagucacggcgcacacgguguggcugucgccgcugauuugaagucuacccaggaagccaucaacaaaauaacuaagaaucucaacucccugagcgaguuagaagugaaaaaucugcagcggcucucgggggcaauggacgagcuucauaacgagauucuggaauuggaugagaagguagacgaccuacgcgccgauacgaucucuucccaaaucgaacuggcuguucuccugucaaaugagggcauuaucaacagugaagacgagcaccuucuggcguuggagcgaaagcucaaaaagaugcugggaccaagcgcaguggaaauuggcaauggguguuucgagacaaaacauaagugcaaccagaccugcuuagauagaauagccgcuggaacuuuuaaugccggugaguucucccugccuaccuuugacucucuaaacaucacagcagccagccucaaugaugacggccuggauaaccacaccauucuuuuguauuacucaacugcugccaguucccuggcagucacacucaugaucgcgaucuucauuguguauauggucagcagggacaacgugucuuguucaauaugccuguga

SEQ ID NO: 154558 - RNA, 1755 nt, Artificial Sequence; identical to SEQ ID NO: 154446
  derived and/or modified CDS sequence (opt3) from hemagglutinin__InfluenzaB__ABN59445

SEQ ID NO: 154559 - RNA, 1755 nt, Artificial Sequence
  derived and/or modified CDS sequence (opt3) from hemagglutinin__InfluenzaB__ABO72377
augaaggccaucauugugcugcucauggucguuaccagcaacgcugacagaauaugcacaggcaucacuuccucuaauucaccccacgugguaaaaacggcaacccagggggaggugaacgucacaggagccauuccucuuacuaccacaccaaccaagagucauuucgcgaaucugaaagguacuaagacaaggggcaaauuguguccgaccugcuuuaacuguacggauuuagacguggcucuggggcggcccaugugcguuggaaucacuccuagcgccaaggcauccauucuacacgaagugcgcccagucaccucuggcuguuuccccaucaugcaugaucgaacaaagauacgucaacucccuaaucugcuuagagguuacgagaaaaucaggcugucgacucagaacgugauugacgccgaaaaggcuccagggggacccuaucgguugggcaccucaggcagcugcccuaaugcaacaaguaaauccggguuuuucgccaccauggcuugggccguaccacgcgauaacaauaagacggcgacuaacccgcucacaguugaggugccccacaucuguaccaaagaagaggaccagauuacugucuggggauuucauucugauaauaagacacagaugaagaaccuguacggugacagcaauccucaaaaauucaccuccucagcaaacggcaucacgacccacuaugugagucagauagggggauuuccagaucagacagaggacggcggucugccccagagcgggagaauuguggucgauuacaugguucaaaagccuggaaaaacuggcaccaucguguaucagaggggcauucucuuaccacagaagguauggugcgccucugggcgguccaaagugaucaagggaucacugccccuuaucggugaagcugacuguuugcacgagaaauacggcgggcugaauaagagcaagccguauuacacaggagaacaugccaaagcaauuggcaacugcccuauaugggucaagacuccccuaaaacucgcuaacgguaccaaguaccgcccuccagccaaacugcuuaaggagcgaggguucuuuggcgcgaucgccggauuccuggagggcgggugggaaggaaugauugcagguuggcacggcuauacaagucauggggcucacggaguggccguugcugccgauuugaagucuacccaggaggcaaucaauaaaauaacuaagaaccucaauucccugagcgaauuagaggugaaaaaccugcaaagacucucgggcgccauggacgaacuucacaaugagauucuggaguuggacgaaaaggucgaugaccuaagggcugauacgaucucuucccagaucgagcuggcggugcuccugucaaacgaagguauuaucaauagugaggacgaacaucuucuggcauuggagcggaaacucaagaagaugcuggggcccagcgccguagauauuggcaacggauguuuugagacaaaacacaagugcaaucagaccugcuuagaccguauagcugccggcacuuucaacgcaggggaauuuucccugccaaccuucgauucucuaaauaucacagccgcuagccucaacgacgauggacuggacaaucauaccauucuuuuguacuauucaacugccgcaaguucccuggcgguuacacucaugaucgcuaucuucauuguguacaugauaagccgcgauaacgucucuuguucaaucugccuguga

SEQ ID NO: 154560 - RNA, 1755 nt, Artificial Sequence; identical to SEQ ID NO: 154453
  derived and/or modified CDS sequence (opt3) from hemagglutinin__InfluenzaB__ABR15973

SEQ ID NO: 154561 - RNA, 1752 nt, Artificial Sequence
  derived and/or modified CDS sequence (opt3) from hemagglutinin__InfluenzaB__ABR15995
augaaggccaucauugugcugcucauggucguuaccagcaacgcugacagaauaugcacaggcaucacuuccucuaauucaccccacgugguaaaaacggcaacccagggggaggugaacgucacaggagugauuccucuuacuaccacaccaaccaagagucauuucgccaaucugaaagguacuaagacaaggggcaaauuguguccgaacugcuuaaauuguaccgaucuggacguugcgcuagggcggcccaugugcaucggaauuacgccuagcgcuaaggccuccauccuccacgaagugcgcccagucacuucuggcuguuuucccauaaugcaugaucgaaccaagauccgucaacugccuaaccuucugagagguuacgagcacauuagguugucgacacauaaugugaucaacgcagaacgggccccagggggacccuaucgccucggcacuucaggcagcugcccuaauguaaccaguagauccggguucuuugcuacaauggcaugggccguuccaagggacaacaaaaccgcuacgaauccgcugacuguggagguccccuacauuuguacaaagggagaagaucagaucaccgugugggguuuccacucugacuauaaaacucagaugaagaaccuguacggcgauagcaauccucagaaauuuacauccucagccaacgggauaaccacgcacuaugugagucaaauuggaggcuucccaaaucagaccgaggacggugggcucccccagagcggacggaucgucguugauuacauggugcagaagccuggcaagacaggcacuauuguauaucaacgcgggguguuacugccacagaaagucuggugcgcgucuggacgauccaaggugaucaaagguucacuucccuugaucggcgaggcagacugucugcaugaaaaguacgggggacuaaacaaaagcaagccguacuauaccggcgagcacgccaaagcuauugguaacugcccuauauggguuaagacaccccucaagcuggccaaugggacuaaauacagaccuccagcaaaacuucugaaggaaaggggcuuuuucggagcuaucgccggcuuuuuggaagggggaugggaggguaugauugcgggcuggcauggguauaccagucacggagcccacggcguggcagucgcugccgaucucaagucuacacaggaggcuaucaacaaaauaaccaagaaucugaacuccuuaagcgagcuggaagugaagaaucuccagcggcuuucgggugccauggacgagcugcauaacgaaauuuuggagcuagaugagaaaguagacgaccugcgugcagauacuaucucuucccaaaucgaacucgccguucugcuuucaaaugaggggauuaucaacagugaagacgagcaccuguuggcucucgaacgcaagcugaaaaagauguuaggccccagcgcgguggauauuggaaauggcuguuucgagacgaaacauaagugcaaccagacaugccuggacagaauagcagccgggaccuuuaaugcuggagaguucucccuaccaacuuuugauucucucaacaucaccgccgcaagccugaaugacgauggucuugacaaccacacaauuuugcuguacuauucaaccgccgcuaguucccucgccgucacucugaugaucgcaaucuucauuguguacauggucagcagggauaaugugucuuguucaauaugccuuuga

SEQ ID NO: 154562 - RNA, 1758 nt, Artificial Sequence
  derived and/or modified CDS sequence (opt3) from hemagglutinin__InfluenzaB__ABR16017
augaaggccaucauugugcugcucauggucguuaccagcaacgcugacagaauaugcacaggcaucacuuccucuaauucaccccacgugguaaaaacggcaacccagggggaggugaacgucacaggagugauuccucuuacuaccacaccaaccaagagucauuucgccaaucugaaagguacugaaacaaggggcaaguuguguccgaaaugcuuaaacuguaccgaucuggacguugcgcuagggcggcccaagugcacgggaaauaucccuagcgcucgcguguccauucuccacgagguccgaccagugacuucuggcuguuuucccaucaugcaugaucguaccaagauaagacaacugccuaaccuucugagggguuacgaacacauccgguugucgacacauaauguaauuaacgccgagaaugcaccagggggacccuauaaaaucggcacuucaggcagcugcccuaacguuaccaaugggaacggauucuuugccacaauggcuugggcagugccaaagaaugacaacaauaaaaccgccacgaacagucucacuauugaagucccguacaucuguacagagggugaggaucagauaaccguguggggcuuccacuccgacaacgaaacucagauggcuaagcuguauggggauucuaaaccccagaaguuuacaagcuccgccaauggagugaccacgcacuacgucucacaaauuggcgguuucccuaaccagaccgaggacgggggacugccacagaguggccgcaucguuguggauuauaugguacaaaagagcggcaaaacagggacuauuaccuaccagagaggaauccucuuaccccagaagguguggugcgcgucugguagguccaaagucaucaagggcucacugccucuuauuggggaagcagacuguuugcaugagaaauauggaggccugaauaagagcaaaccauacuacacaggugagcacgccaaggcuauagggaacugccccaucugggugaagacuccgcuaaaacucgccaauggcaccaaguaucggccucccgcaaaacugcuuaaggaacgcggauuuuucggcgcuauugccggguuucuggagggagguugggaaggcaugaucgcgggguggcauggauacacaagucacggcgcccacgguguugcaguggcugccgauuugaaaucuacccaggaggcuauaaacaagauuacuaagaaucucaacucccugagcgaauuagaggucaaaaaucugcagcgacucucgggggccauggacgagcuucauaacgaaauccuggaguuggaugaaaagguggacgaccuaagagcagauacgaucucuucccaaauugagcuggccguacuccugucaaaugaaggcaucauuaacagugaggacgagcaccuucuggcuuuggaaaggaaacucaagaaaaugcugggaccaagcgcgguugagauaggcaauggguguuucgaaacaaagcauaagugcaaccagaccugcuuagaucggaucgcagccggaacuuuugacgcuggugaguucucccugccuaccuuugauucucuaaauauuacagccgcaagccucaacgacgauggccuggacaaccacaccauccuuuuguauuacucaacugccgcuaguucccuggccgugacacucaugaucgcaauuuucgucguguauauggucagccgugauaaugugucuuguucaauaugccuguga

SEQ ID NO: 154563 - RNA, 1758 nt, Artificial Sequence; identical to SEQ ID NO: 154562
  derived and/or modified CDS sequence (opt3) from hemagglutinin__InfluenzaB__ACA64899

SEQ ID NO: 154564 - RNA, 1758 nt, Artificial Sequence
  derived and/or modified CDS sequence (opt3) from hemagglutinin__InfluenzaB__ACA64932
augaaggccaucauugugcugcucauggucguuaccagcaacgcugacagaauaugcacaggcaucacuuccucuaauucaccccacgugguaaaaacggcaacccagggggaggugaacgucacaggagugauuccucuuacuaccacaccaaccaagagucauuucagcaaucugaaagguacugaaacaaggggcaaguuguguccgaaaugcuuaaacuguaccgaucuggacguugcccuagggcggcccaagugcacgggaaauaucccuuccgcgcgcgugucuauucuccacgagguccgaccagugacuucgggcuguuuucccaucaugcaugaucguaccaagauaagacaacugccuaaccuucugagggguuacgaacacauccgguugucaacacauaauguaauuaacgcugagaaugccccagggggacccuauaaaaucggcacuagcggcaguugcccuaacguuaccaaugggaacggauucuuugcaacaauggccugggcugugccaaagaaugacauuaacaaaaccgcaacuaauucccucacgaucgaagucccguacauauguacagagggugaggaucagauuaccguguggggcuuccacucugacaacgaaacucagauggccaagcuguauggggauagcaaaccccagaaguuuacauccucagcuaacggagugaccacgcacuacgucagucaaaucggcgguuucccuaaucagaccgaggacgggggacugccacagagcggccgcauuguuguggauuauaugguacagaagucuggcaaaacagggacuaucaccuaccaaagaggaauccucuuaccccagaagguguggugcgccuccgguaggucaaaagucauuaagggcagccugccucuuauaggggaagcggacuguuugcaugagaaauauggaggccugaacaagaguaaaccauacuacacaggugagcacgcaaaggccaucgggaauugccccauuugggugaagacuccgcuaaaacucgcuaacggcaccaaguaucggccucccgccaaacugcuuaaggaacgcggauuuuucggcgcaaucgcuggguuucuggagggagguugggaaggcaugauagccggguggcauggauacacaucucacggcgcgcacgguguugccguggcagcugauuugaaauccacccaggaggccauuaauaagaucacuaagaaccucaauagccugucggaauuagaggucaaaaaccugcagcgacucucuggggcuauggacgagcuucauaaugaaauccuggaguuggaugaaaagguggacgaccuaagagccgauacgauuuccucacaaaucgagcuggcaguacuccugaguaacgaaggcauuauaaauagcgaggacgagcaccuucuggccuuggaaaggaaacucaagaaaaugcugggaccauccgcuguugagaucggcaacggguguuucgaaacaaagcauaagugcaaucagaccugcuuagauaaaauugcggcaggaacuuuugacgccggugaguucucucugccuaccuuugauagccuaaacaucacagcugccucacucaaugacgauggccuggacaaccacaccauccuuuuguauuacaguacugcagccuccagccuggcugugacacucaugauugccauauucgucguguauauggucucucgggauaacgugucauguaguaucugccuguga

SEQ ID NO: 154565 - RNA, 1758 nt, Artificial Sequence; identical to SEQ ID NO: 154562
  derived and/or modified CDS sequence (opt3) from hemagglutinin__InfluenzaB__ACA64943
